United States Patent Application Publication US 2007/0042381 A1 - sequence listing, part 61

SEQ ID NO: 2769029 - RNA, 19 nt, Human
auacuugugguuuucaaau

SEQ ID NO: 2769030 - RNA, 12 nt, Human
auacuuuacaug

SEQ ID NO: 2769031 - RNA, 13 nt, Human
auacuuuaaauaa

SEQ ID NO: 2769032 - RNA, 17 nt, Human
auacuuuaaauaauuua

SEQ ID NO: 2769033 - RNA, 19 nt, Human
auacuuuaaauaauuuaac

SEQ ID NO: 2769034 - RNA, 20 nt, Human
auacuuuaaauaauuuaacu

SEQ ID NO: 2769035 - RNA, 23 nt, Human
auacuugcagcucccauucuaug

SEQ ID NO: 2769036 - RNA, 17 nt, Human
auagccuaggugacaga

SEQ ID NO: 2769037 - RNA, 15 nt, Human
auagccuaggugaca

SEQ ID NO: 2769038 - RNA, 19 nt, Human
auagccuauggcagaaaaa

SEQ ID NO: 2769039 - RNA, 17 nt, Human
auaguaaguucagcacu

SEQ ID NO: 2769040 - RNA, 14 nt, Human
auaguaaaagaaau

SEQ ID NO: 2769041 - RNA, 18 nt, Human
auaguaacaucaaagauu

SEQ ID NO: 2769042 - RNA, 21 nt, Human
auaguaacuucuuauggaauu

SEQ ID NO: 2769043 - RNA, 14 nt, Human
auaguaauucucag

SEQ ID NO: 2769044 - RNA, 19 nt, Human
auaguaacuucuuauggaa

SEQ ID NO: 2769045 - RNA, 16 nt, Human
auaguaaccuggguaa

SEQ ID NO: 2769046 - RNA, 13 nt, Human
auaguaacuccca

SEQ ID NO: 2769047 - RNA, 16 nt, Human
auaguaacugacauga

SEQ ID NO: 2769048 - RNA, 19 nt, Human
auaguaacugacaugauua

SEQ ID NO: 2769049 - RNA, 20 nt, Human
auaguaacugacaugauuag

SEQ ID NO: 2769050 - RNA, 23 nt, Human
auagguuuuccccucuuuuguua

SEQ ID NO: 2769051 - RNA, 13 nt, Human
auaguaaaaauaa

SEQ ID NO: 2769052 - RNA, 14 nt, Human
auaguaaaaauaaa

SEQ ID NO: 2769053 - RNA, 15 nt, Human
auaguacuaagcauu

SEQ ID NO: 2769054 - RNA, 16 nt, Human
auaguacuaagcauuu

SEQ ID NO: 2769055 - RNA, 14 nt, Human
auaguacuggcaug

SEQ ID NO: 2769056 - RNA, 21 nt, Human
auaguagagugauauggagca

SEQ ID NO: 2769057 - RNA, 22 nt, Human
auaguagagugauauggagcaa

SEQ ID NO: 2769058 - RNA, 20 nt, Human
auaguacaugauaaaugaua

SEQ ID NO: 2769059 - RNA, 14 nt, Human
auauaaguuugaag

SEQ ID NO: 2769060 - RNA, 17 nt, Human
auauaaguuugaaggaa

SEQ ID NO: 2769061 - RNA, 19 nt, Human
auauaaguuugaaggaaac

SEQ ID NO: 2769062 - RNA, 21 nt, Human
auauaaguuugaaggaaacag

SEQ ID NO: 2769063 - RNA, 22 nt, Human
auauaauaaaauguguugaaac

SEQ ID NO: 2769064 - RNA, 16 nt, Human
auauacaauaacauaa

SEQ ID NO: 2769065 - RNA, 18 nt, Human
auauacaauaacauaauu

SEQ ID NO: 2769066 - RNA, 13 nt, Human
auauacaauaaug

SEQ ID NO: 2769067 - RNA, 14 nt, Human
auauacaauaaugg

SEQ ID NO: 2769068 - RNA, 15 nt, Human
auauacaauaaugga

SEQ ID NO: 2769069 - RNA, 16 nt, Human
auauacaauaauggaa

SEQ ID NO: 2769070 - RNA, 17 nt, Human
auauacaauaauggaaa

SEQ ID NO: 2769071 - RNA, 20 nt, Human
auauacaauaauggaaaaaa

SEQ ID NO: 2769072 - RNA, 16 nt, Human
auauaauggaagagaa

SEQ ID NO: 2769073 - RNA, 19 nt, Human
auauaauggaagagaaauc

SEQ ID NO: 2769074 - RNA, 22 nt, Human
auauaauggaagagaaaucuca

SEQ ID NO: 2769075 - RNA, 17 nt, Human
auauaauauauuugugu

SEQ ID NO: 2769076 - RNA, 20 nt, Human
auauaauauauuuguguauu

SEQ ID NO: 2769077 - RNA, 17 nt, Human
auauaauaucuaaaguu

SEQ ID NO: 2769078 - RNA, 20 nt, Human
auauaauaucuaaaguuaua

SEQ ID NO: 2769079 - RNA, 20 nt, Human
auauaauauauauauauauc

SEQ ID NO: 2769080 - RNA, 23 nt, Human
auauaauauauauauauaucagu

SEQ ID NO: 2769081 - RNA, 23 nt, Human
auauacaguaacuuuauguguaa

SEQ ID NO: 2769082 - RNA, 13 nt, Human
auauacagaggaa

SEQ ID NO: 2769083 - RNA, 14 nt, Human
auauacagaggaaa

SEQ ID NO: 2769084 - RNA, 13 nt, Human
auauacagaugaa

SEQ ID NO: 2769085 - RNA, 15 nt, Human
auauacagaugaaaa

SEQ ID NO: 2769086 - RNA, 16 nt, Human
auauacagaugaaaau

SEQ ID NO: 2769087 - RNA, 17 nt, Human
auauacagaugaaaauu

SEQ ID NO: 2769088 - RNA, 18 nt, Human
auauacagaugaaaauuu

SEQ ID NO: 2769089 - RNA, 21 nt, Human
auauacagaugaaaauuugag

SEQ ID NO: 2769090 - RNA, 22 nt, Human
auauacagaugaaaauuugaga

SEQ ID NO: 2769091 - RNA, 15 nt, Human
auauacacacacaca

SEQ ID NO: 2769092 - RNA, 16 nt, Human
auauacacauauaccu

SEQ ID NO: 2769093 - RNA, 12 nt, Human
auauacacacac

SEQ ID NO: 2769094 - RNA, 13 nt, Human
auauacacacaca

SEQ ID NO: 2769095 - RNA, 14 nt, Human
auauacaguaacuu

SEQ ID NO: 2769096 - RNA, 16 nt, Human
auauacaguaacuuua

SEQ ID NO: 2769097 - RNA, 17 nt, Human
auauacaguaacuuuau

SEQ ID NO: 2769098 - RNA, 22 nt, Human
auauacaguaacuuuaugugua

SEQ ID NO: 2769099 - RNA, 19 nt, Human
aguccucuuuucugagagg

SEQ ID NO: 2769100 - RNA, 23 nt, Human
aguccaaauguccuccagaagcc

SEQ ID NO: 2769101 - RNA, 19 nt, Human
aguccaaauguccuccaga

SEQ ID NO: 2769102 - RNA, 22 nt, Human
aguccucuuuucugagaggacu

SEQ ID NO: 2769103 - RNA, 19 nt, Human
aguccaagaggguccuuua

SEQ ID NO: 2769104 - RNA, 14 nt, Human
aguccaagaaucca

SEQ ID NO: 2769105 - RNA, 16 nt, Human
aguccaagaccagacu

SEQ ID NO: 2769106 - RNA, 15 nt, Human
agucauguaaauacu

SEQ ID NO: 2769107 - RNA, 16 nt, Human
agucauguaaauacug

SEQ ID NO: 2769108 - RNA, 18 nt, Human
agucauguaaauacuguu

SEQ ID NO: 2769109 - RNA, 21 nt, Human
agucaugcauaaauaugcagu

SEQ ID NO: 2769110 - RNA, 22 nt, Human
agucaugcauaaauaugcagug

SEQ ID NO: 2769111 - RNA, 21 nt, Human
aguccaaaaagcuccuggggc

SEQ ID NO: 2769112 - RNA, 16 nt, Human
aguccaaauguccucc

SEQ ID NO: 2769113 - RNA, 22 nt, Human
agucauguuuuaaauguacagu

SEQ ID NO: 2769114 - RNA, 13 nt, Human
agucaugugcauu

SEQ ID NO: 2769115 - RNA, 19 nt, Human
agucaugcguuuaaucaca

SEQ ID NO: 2769116 - RNA, 16 nt, Human
agucaugcauaaauau

SEQ ID NO: 2769117 - RNA, 17 nt, Human
agucaugcauaaauaug

SEQ ID NO: 2769118 - RNA, 19 nt, Human
agucaugcauaaauaugca

SEQ ID NO: 2769119 - RNA, 20 nt, Human
agucaugcauaaauaugcag

SEQ ID NO: 2769120 - RNA, 17 nt, Human
agucaugcaaaggcugg

SEQ ID NO: 2769121 - RNA, 18 nt, Human
agucaugcaaaggcuggg

SEQ ID NO: 2769122 - RNA, 19 nt, Human
agucaugcaaaggcuggga

SEQ ID NO: 2769123 - RNA, 20 nt, Human
agucaugcaaaggcugggac

SEQ ID NO: 2769124 - RNA, 13 nt, Human
agucaugcauaaa

SEQ ID NO: 2769125 - RNA, 14 nt, Human
agucaugcauaaau

SEQ ID NO: 2769126 - RNA, 11 nt, Human
aguccuuccac

SEQ ID NO: 2769127 - RNA, 14 nt, Human
aguccuugaaaaua

SEQ ID NO: 2769128 - RNA, 22 nt, Human
aguccuugaaaauauuuuuuau

SEQ ID NO: 2769129 - RNA, 16 nt, Human
aguccuugaaaauauu

SEQ ID NO: 2769130 - RNA, 17 nt, Human
aguccuugaaaauauuu

SEQ ID NO: 2769131 - RNA, 16 nt, Human
agucugaaugcugcca

SEQ ID NO: 2769132 - RNA, 17 nt, Human
agucugaaugcugccac

SEQ ID NO: 2769133 - RNA, 12 nt, Human
agucugugugaa

SEQ ID NO: 2769134 - RNA, 11 nt, Human
agucuguguga

SEQ ID NO: 2769135 - RNA, 20 nt, Human
agugaauucuugaaggaaaa

SEQ ID NO: 2769136 - RNA, 16 nt, Human
agucuguuguguguca

SEQ ID NO: 2769137 - RNA, 13 nt, Human
agucuguugugug

SEQ ID NO: 2769138 - RNA, 21 nt, Human
agucugugugaugaacuuucu

SEQ ID NO: 2769139 - RNA, 22 nt, Human
agucugugugaugaacuuucuc

SEQ ID NO: 2769140 - RNA, 15 nt, Human
agucugugugaaggu

SEQ ID NO: 2769141 - RNA, 18 nt, Human
agucugugugaugaacuu

SEQ ID NO: 2769142 - RNA, 19 nt, Human
agucugugugaugaacuuu

SEQ ID NO: 2769143 - RNA, 17 nt, Human
agugaccucagcuuuga

SEQ ID NO: 2769144 - RNA, 13 nt, Human
agugacccuuccc

SEQ ID NO: 2769145 - RNA, 21 nt, Human
agugacccuucccaaucagca

SEQ ID NO: 2769146 - RNA, 18 nt, Human
agugaccucagcuuugau

SEQ ID NO: 2769147 - RNA, 14 nt, Human
agugaccuguuuau

SEQ ID NO: 2769148 - RNA, 14 nt, Human
agugacgugcaccu

SEQ ID NO: 2769149 - RNA, 14 nt, Human
aguauuuuuaucca

SEQ ID NO: 2769150 - RNA, 19 nt, Human
aguauuuuuauacaaaccu

SEQ ID NO: 2769151 - RNA, 13 nt, Human
aguauuuuuauaa

SEQ ID NO: 2769152 - RNA, 22 nt, Human
aguauuuuuauaaauauaagcc

SEQ ID NO: 2769153 - RNA, 22 nt, Human
aguaucuauauauguguaugua

SEQ ID NO: 2769154 - RNA, 23 nt, Human
aguaucuauauauguguauguac

SEQ ID NO: 2769155 - RNA, 17 nt, Human
aguaucuauauaugugu

SEQ ID NO: 2769156 - RNA, 18 nt, Human
aguaucuauauaugugua

SEQ ID NO: 2769157 - RNA, 19 nt, Human
aguaucuauauauguguau

SEQ ID NO: 2769158 - RNA, 14 nt, Human
aguaucuaaaagug

SEQ ID NO: 2769159 - RNA, 18 nt, Human
aguaucccacauccaacu

SEQ ID NO: 2769160 - RNA, 12 nt, Human
aguaucccacau

SEQ ID NO: 2769161 - RNA, 23 nt, Human
aguauccaggcuuuguacagagu

SEQ ID NO: 2769162 - RNA, 21 nt, Human
aguauccaugcucuugaccuu

SEQ ID NO: 2769163 - RNA, 11 nt, Human
aguauccaggc

SEQ ID NO: 2769164 - RNA, 14 nt, Human
aguauccacuuugc

SEQ ID NO: 2769165 - RNA, 16 nt, Human
aguacuugaaaaagua

SEQ ID NO: 2769166 - RNA, 18 nt, Human
aguacuugaguguaaugu

SEQ ID NO: 2769167 - RNA, 20 nt, Human
aguacuugaguguaauguuu

SEQ ID NO: 2769168 - RNA, 22 nt, Human
aguacuugaguguaauguuugu

SEQ ID NO: 2769169 - RNA, 18 nt, Human
aguacuugugaaacacag

SEQ ID NO: 2769170 - RNA, 20 nt, Human
aguacuugugaaacacagcu

SEQ ID NO: 2769171 - RNA, 21 nt, Human
aguacuugugaaacacagcug

SEQ ID NO: 2769172 - RNA, 22 nt, Human
aguacuugugaaacacagcugu

SEQ ID NO: 2769173 - RNA, 23 nt, Human
aguacuugugaaacacagcuguu

SEQ ID NO: 2769174 - RNA, 24 nt, Human
aguacuugugaaacacagcuguuc

SEQ ID NO: 2769175 - RNA, 17 nt, Human
agucaaaacuacaaauc

SEQ ID NO: 2769176 - RNA, 17 nt, Human
agucaauauuuuuagau

SEQ ID NO: 2769177 - RNA, 14 nt, Human
agucaaucauuucu

SEQ ID NO: 2769178 - RNA, 15 nt, Human
agucaaucauuucuc

SEQ ID NO: 2769179 - RNA, 16 nt, Human
agucaaucauuucuca

SEQ ID NO: 2769180 - RNA, 17 nt, Human
agucaaucauuucucac

SEQ ID NO: 2769181 - RNA, 22 nt, Human
agucaaucauuucucacugugu

SEQ ID NO: 2769182 - RNA, 22 nt, Human
agucacacaguauuacuucugc

SEQ ID NO: 2769183 - RNA, 13 nt, Human
agucacaauguuc

SEQ ID NO: 2769184 - RNA, 16 nt, Human
agucacaauguucuuu

SEQ ID NO: 2769185 - RNA, 18 nt, Human
agucacaauguucuuuau

SEQ ID NO: 2769186 - RNA, 23 nt, Human
agucacaauguucuuuauauaca

SEQ ID NO: 2769187 - RNA, 18 nt, Human
aguacuguaauaauaccu

SEQ ID NO: 2769188 - RNA, 20 nt, Human
aguacuguaauaauaccuca

SEQ ID NO: 2769189 - RNA, 21 nt, Human
aguacuguaauaauaccucaa

SEQ ID NO: 2769190 - RNA, 23 nt, Human
aguacuguaauaauaccucaaug

SEQ ID NO: 2769191 - RNA, 20 nt, Human
aguacuggcugauggaguaa

SEQ ID NO: 2769192 - RNA, 22 nt, Human
aguacuucuccacccugcucuc

SEQ ID NO: 2769193 - RNA, 12 nt, Human
aguacuucuuuu

SEQ ID NO: 2769194 - RNA, 17 nt, Human
aguacuucuccacccug

SEQ ID NO: 2769195 - RNA, 15 nt, Human
aguacuguguacugu

SEQ ID NO: 2769196 - RNA, 17 nt, Human
aguacuguuuaccauuu

SEQ ID NO: 2769197 - RNA, 21 nt, Human
aguacuguuuaccauuuuuca

SEQ ID NO: 2769198 - RNA, 15 nt, Human
aguacuucagcaaga

SEQ ID NO: 2769199 - RNA, 17 nt, Human
aguacuucagcaagaga

SEQ ID NO: 2769200 - RNA, 18 nt, Human
aguacuucagcaagagag

SEQ ID NO: 2769201 - RNA, 19 nt, Human
aguacuucagcaagagaga

SEQ ID NO: 2769202 - RNA, 21 nt, Human
aguacuucagcaagagagaac

SEQ ID NO: 2769203 - RNA, 22 nt, Human
aguacuucagcaagagagaacc

SEQ ID NO: 2769204 - RNA, 14 nt, Human
aguacuaagaguau

SEQ ID NO: 2769205 - RNA, 14 nt, Human
aguacuaagcauuu

SEQ ID NO: 2769206 - RNA, 16 nt, Human
aguacuacacauuuuu

SEQ ID NO: 2769207 - RNA, 22 nt, Human
aguacuacacauuuuuaaauug

SEQ ID NO: 2769208 - RNA, 23 nt, Human
aguacuacacauuuuuaaauugu

SEQ ID NO: 2769209 - RNA, 17 nt, Human
aguacuaacacaaggac

SEQ ID NO: 2769210 - RNA, 18 nt, Human
aguacuaacacaaggaca

SEQ ID NO: 2769211 - RNA, 22 nt, Human
aguaaaugcuagguuaauucca

SEQ ID NO: 2769212 - RNA, 11 nt, Human
aguaaaugcua

SEQ ID NO: 2769213 - RNA, 23 nt, Human
aguaaaugcuagguuaauuccaa

SEQ ID NO: 2769214 - RNA, 22 nt, Human
aguaaauggcuuauccagcugg

SEQ ID NO: 2769215 - RNA, 15 nt, Human
aguaaaucuuuuaca

SEQ ID NO: 2769216 - RNA, 19 nt, Human
aguaacaaugaagauaaaa

SEQ ID NO: 2769217 - RNA, 10 nt, Human
aguaaauguu

SEQ ID NO: 2769218 - RNA, 22 nt, Human
aguaaauguuaucuuauacugu

SEQ ID NO: 2769219 - RNA, 23 nt, Human
aguaaauguuaucuuauacugua

SEQ ID NO: 2769220 - RNA, 11 nt, Human
aguaaaugucu

SEQ ID NO: 2769221 - RNA, 12 nt, Human
aguaaaugucuu

SEQ ID NO: 2769222 - RNA, 15 nt, Human
aguaaaugucuuugu

SEQ ID NO: 2769223 - RNA, 16 nt, Human
aguaaaugucuuugua

SEQ ID NO: 2769224 - RNA, 17 nt, Human
aguaaaugucuuuguaa

SEQ ID NO: 2769225 - RNA, 18 nt, Human
aguaaaugucuuuguaag

SEQ ID NO: 2769226 - RNA, 19 nt, Human
aguaaaugucuuuguaagu

SEQ ID NO: 2769227 - RNA, 17 nt, Human
aguaaaucagauguuga

SEQ ID NO: 2769228 - RNA, 18 nt, Human
aguaaaucagauguugaa

SEQ ID NO: 2769229 - RNA, 14 nt, Human
aguaagaggcugga

SEQ ID NO: 2769230 - RNA, 24 nt, Human
aguaagacauugggucuauuccag

SEQ ID NO: 2769231 - RNA, 11 nt, Human
aguaagagacu

SEQ ID NO: 2769232 - RNA, 15 nt, Human
aguaacauaauaaau

SEQ ID NO: 2769233 - RNA, 22 nt, Human
aguaacaucaaagauuagguga

SEQ ID NO: 2769234 - RNA, 23 nt, Human
aguaacaggaaaccacuuaucac

SEQ ID NO: 2769235 - RNA, 17 nt, Human
aguaagaaauuucaggu

SEQ ID NO: 2769236 - RNA, 18 nt, Human
aguaagaaauuucagguu

SEQ ID NO: 2769237 - RNA, 14 nt, Human
aguaaccauuugca

SEQ ID NO: 2769238 - RNA, 12 nt, Human
agugggccaggg

SEQ ID NO: 2769239 - RNA, 14 nt, Human
agugggccagggcu

SEQ ID NO: 2769240 - RNA, 15 nt, Human
agugggccagggcug

SEQ ID NO: 2769241 - RNA, 22 nt, Human
agugggccagggcugcccugag

SEQ ID NO: 2769242 - RNA, 20 nt, Human
agugggcagagcccccagga

SEQ ID NO: 2769243 - RNA, 20 nt, Human
agugggaucugucacaccag

SEQ ID NO: 2769244 - RNA, 12 nt, Human
agugggagguca

SEQ ID NO: 2769245 - RNA, 14 nt, Human
agugucuaaaaaca

SEQ ID NO: 2769246 - RNA, 14 nt, Human
agugucaggaggaa

SEQ ID NO: 2769247 - RNA, 13 nt, Human
agugucauuucca

SEQ ID NO: 2769248 - RNA, 12 nt, Human
agugucauguuu

SEQ ID NO: 2769249 - RNA, 18 nt, Human
agugggaacucugacaag

SEQ ID NO: 2769250 - RNA, 19 nt, Human
agugggacagggcauggcc

SEQ ID NO: 2769251 - RNA, 21 nt, Human
agugggacagggcauggccag

SEQ ID NO: 2769252 - RNA, 15 nt, Human
agugggacccauaga

SEQ ID NO: 2769253 - RNA, 18 nt, Human
agugggacccauagaucu

SEQ ID NO: 2769254 - RNA, 21 nt, Human
agugggacccauagaucuucu

SEQ ID NO: 2769255 - RNA, 22 nt, Human
agugggacccauagaucuucug

SEQ ID NO: 2769256 - RNA, 23 nt, Human
agugggacccauagaucuucuga

SEQ ID NO: 2769257 - RNA, 16 nt, Human
agugggagcugccugu

SEQ ID NO: 2769258 - RNA, 23 nt, Human
aguggccuggccaggagcucuuc

SEQ ID NO: 2769259 - RNA, 22 nt, Human
aguggccuggccaggagcucuu

SEQ ID NO: 2769260 - RNA, 18 nt, Human
aguggccuuaccccugcc

SEQ ID NO: 2769261 - RNA, 20 nt, Human
aguggccuuaccccugccuu

SEQ ID NO: 2769262 - RNA, 20 nt, Human
aguggccuggccaggagcuc

SEQ ID NO: 2769263 - RNA, 19 nt, Human
aguggccuggccaggagcu

SEQ ID NO: 2769264 - RNA, 18 nt, Human
aguggccuggccaggagc

SEQ ID NO: 2769265 - RNA, 15 nt, Human
aguggccuggccagg

SEQ ID NO: 2769266 - RNA, 14 nt, Human
aguggccuggccag

SEQ ID NO: 2769267 - RNA, 13 nt, Human
aguggccuggcca

SEQ ID NO: 2769268 - RNA, 16 nt, Human
agugucaccuuuucuu

SEQ ID NO: 2769269 - RNA, 24 nt, Human
agugauccucccaccucagccucc

SEQ ID NO: 2769270 - RNA, 23 nt, Human
agugauccucccaccucagccuc

SEQ ID NO: 2769271 - RNA, 18 nt, Human
agugauccucccaccuca

SEQ ID NO: 2769272 - RNA, 15 nt, Human
agugauccucccacc

SEQ ID NO: 2769273 - RNA, 14 nt, Human
agugauccucccac

SEQ ID NO: 2769274 - RNA, 17 nt, Human
agugauucuccugccuc

SEQ ID NO: 2769275 - RNA, 15 nt, Human
agugauucuccugcc

SEQ ID NO: 2769276 - RNA, 17 nt, Human
agugaugggcuuucucu

SEQ ID NO: 2769277 - RNA, 19 nt, Human
agugaugggcuuucucuuu

SEQ ID NO: 2769278 - RNA, 14 nt, Human
agugauucuccugc

SEQ ID NO: 2769279 - RNA, 21 nt, Human
agugauucucaugccucagcc

SEQ ID NO: 2769280 - RNA, 22 nt, Human
agugaucuacaugaggaacugu

SEQ ID NO: 2769281 - RNA, 20 nt, Human
aguucagaguccuuaaaaug

SEQ ID NO: 2769282 - RNA, 12 nt, Human
aguucagaguuu

SEQ ID NO: 2769283 - RNA, 15 nt, Human
aguucagaguuuucu

SEQ ID NO: 2769284 - RNA, 16 nt, Human
aguucagaguuuucug

SEQ ID NO: 2769285 - RNA, 17 nt, Human
aguucagaguuuucugg

SEQ ID NO: 2769286 - RNA, 18 nt, Human
aguucagguaacaggcag

SEQ ID NO: 2769287 - RNA, 18 nt, Human
aguucagcaccacccuag

SEQ ID NO: 2769288 - RNA, 14 nt, Human
aguucagcacuugu

SEQ ID NO: 2769289 - RNA, 21 nt, Human
aguucagcacuugucucauuu

SEQ ID NO: 2769290 - RNA, 17 nt, Human
aguucagcaccacccua

SEQ ID NO: 2769291 - RNA, 15 nt, Human
aguucagcaccaccc

SEQ ID NO: 2769292 - RNA, 16 nt, Human
aguucaggagucccaa

SEQ ID NO: 2769293 - RNA, 20 nt, Human
aguucaggagucccaaggaa

SEQ ID NO: 2769294 - RNA, 19 nt, Human
aguucaggagucccaagga

SEQ ID NO: 2769295 - RNA, 21 nt, Human
aguucaggagucccaaggaaa

SEQ ID NO: 2769296 - RNA, 17 nt, Human
aguugacaugagauuua

SEQ ID NO: 2769297 - RNA, 15 nt, Human
aguugacuuauagua

SEQ ID NO: 2769298 - RNA, 22 nt, Human
aguugacaaaaagcucuuacac

SEQ ID NO: 2769299 - RNA, 17 nt, Human
aguugacaccugagaaa

SEQ ID NO: 2769300 - RNA, 21 nt, Human
aguugacuuauaguacaugau

SEQ ID NO: 2769301 - RNA, 18 nt, Human
aguugacuuauaguacau

SEQ ID NO: 2769302 - RNA, 17 nt, Human
aguugacuuauaguaca

SEQ ID NO: 2769303 - RNA, 20 nt, Human
aguugagucgucaucacuuu

SEQ ID NO: 2769304 - RNA, 16 nt, Human
aguugaggaacuguac

SEQ ID NO: 2769305 - RNA, 18 nt, Human
aguugaggaacuguacag

SEQ ID NO: 2769306 - RNA, 20 nt, Human
aguuguccauauuuucacag

SEQ ID NO: 2769307 - RNA, 13 nt, Human
aguugucuaaaca

SEQ ID NO: 2769308 - RNA, 14 nt, Human
aguugucucucuuc

SEQ ID NO: 2769309 - RNA, 15 nt, Human
aguugucucucuuca

SEQ ID NO: 2769310 - RNA, 21 nt, Human
aguugucucucuucagacucu

SEQ ID NO: 2769311 - RNA, 14 nt, Human
aguugugaaaguuu

SEQ ID NO: 2769312 - RNA, 17 nt, Human
aguugugaaaguuuuga

SEQ ID NO: 2769313 - RNA, 20 nt, Human
aguugugaaaguuuugagua

SEQ ID NO: 2769314 - RNA, 15 nt, Human
aguugugcacgcaga

SEQ ID NO: 2769315 - RNA, 14 nt, Human
aguugugcagcuuu

SEQ ID NO: 2769316 - RNA, 20 nt, Human
aguugugcagcuuuugguca

SEQ ID NO: 2769317 - RNA, 21 nt, Human
aguugugcagcuuuuggucau

SEQ ID NO: 2769318 - RNA, 13 nt, Human
aguugugaucauc

SEQ ID NO: 2769319 - RNA, 21 nt, Human
aguugugccuuuuauagcuau

SEQ ID NO: 2769320 - RNA, 22 nt, Human
aguugugccuuuuauagcuauu

SEQ ID NO: 2769321 - RNA, 15 nt, Human
aguugugccuuuuau

SEQ ID NO: 2769322 - RNA, 18 nt, Human
aguugugccuuuuauagc

SEQ ID NO: 2769323 - RNA, 19 nt, Human
aguugugccuuuuauagcu

SEQ ID NO: 2769324 - RNA, 18 nt, Human
augaaaaugaguugugaa

SEQ ID NO: 2769325 - RNA, 19 nt, Human
augaaaaugaguugugaaa

SEQ ID NO: 2769326 - RNA, 20 nt, Human
augaaaaugaguugugaaag

SEQ ID NO: 2769327 - RNA, 21 nt, Human
augaaaaugaguugugaaagu

SEQ ID NO: 2769328 - RNA, 16 nt, Human
augaagugcgugaaug

SEQ ID NO: 2769329 - RNA, 18 nt, Human
augaagugcgugaaugua

SEQ ID NO: 2769330 - RNA, 20 nt, Human
augaagugcgugaauguaug

SEQ ID NO: 2769331 - RNA, 23 nt, Human
augaaguguguuuccuucagugc

SEQ ID NO: 2769332 - RNA, 19 nt, Human
augaaguguguuuccuuca

SEQ ID NO: 2769333 - RNA, 17 nt, Human
augaaguaucuaaaagu

SEQ ID NO: 2769334 - RNA, 21 nt, Human
augaaguaucuaaaaguguca

SEQ ID NO: 2769335 - RNA, 15 nt, Human
augacccaggcuggg

SEQ ID NO: 2769336 - RNA, 14 nt, Human
augacccaggcugg

SEQ ID NO: 2769337 - RNA, 12 nt, Human
augacccaggcu

SEQ ID NO: 2769338 - RNA, 21 nt, Human
augaccagaugcgucccaaga

SEQ ID NO: 2769339 - RNA, 18 nt, Human
augaccagaugcguccca

SEQ ID NO: 2769340 - RNA, 17 nt, Human
augaccauacugaggga

SEQ ID NO: 2769341 - RNA, 15 nt, Human
augaaguguuagaua

SEQ ID NO: 2769342 - RNA, 18 nt, Human
augaaguguuagauagaa

SEQ ID NO: 2769343 - RNA, 17 nt, Human
augaaguuacuuucuua

SEQ ID NO: 2769344 - RNA, 20 nt, Human
augaaguuacuuucuuaaug

SEQ ID NO: 2769345 - RNA, 15 nt, Human
augaaguuguaggua

SEQ ID NO: 2769346 - RNA, 15 nt, Human
augaaguuuaaaaca

SEQ ID NO: 2769347 - RNA, 20 nt, Human
augaaguuuaaaacaguauu

SEQ ID NO: 2769348 - RNA, 21 nt, Human
augaaguuuaaaacaguauuu

SEQ ID NO: 2769349 - RNA, 22 nt, Human
augaaguuuaaaacaguauuua

SEQ ID NO: 2769350 - RNA, 15 nt, Human
augaccacacuccag

SEQ ID NO: 2769351 - RNA, 18 nt, Human
augaccacacuccagcug

SEQ ID NO: 2769352 - RNA, 18 nt, Human
augaaaauauuuuuuaca

SEQ ID NO: 2769353 - RNA, 21 nt, Human
augacugcuccccagcccugg

SEQ ID NO: 2769354 - RNA, 13 nt, Human
augacuaauuagg

SEQ ID NO: 2769355 - RNA, 21 nt, Human
augacuaauuaggguacauuu

SEQ ID NO: 2769356 - RNA, 23 nt, Human
augacuaauuaggguacauuuau

SEQ ID NO: 2769357 - RNA, 22 nt, Human
augacugugcuacugucuuugg

SEQ ID NO: 2769358 - RNA, 13 nt, Human
augacuguagaau

SEQ ID NO: 2769359 - RNA, 17 nt, Human
augacuguagaauuugu

SEQ ID NO: 2769360 - RNA, 22 nt, Human
augacugcuccccagcccuggc

SEQ ID NO: 2769361 - RNA, 23 nt, Human
augacugcuccccagcccuggcu

SEQ ID NO: 2769362 - RNA, 13 nt, Human
augacuggcauuu

SEQ ID NO: 2769363 - RNA, 14 nt, Human
augacuggcauuuu

SEQ ID NO: 2769364 - RNA, 15 nt, Human
augacuggcauuuua

SEQ ID NO: 2769365 - RNA, 16 nt, Human
augacuggcauuuuau

SEQ ID NO: 2769366 - RNA, 20 nt, Human
augacuggcauuuuauagac

SEQ ID NO: 2769367 - RNA, 18 nt, Human
augacuggggugggaggu

SEQ ID NO: 2769368 - RNA, 16 nt, Human
augagggaugggccug

SEQ ID NO: 2769369 - RNA, 17 nt, Human
augagggaugggccugg

SEQ ID NO: 2769370 - RNA, 18 nt, Human
augagggaugggccuggc

SEQ ID NO: 2769371 - RNA, 20 nt, Human
augaggguaucaaauaaaau

SEQ ID NO: 2769372 - RNA, 16 nt, Human
aucuaguuuacagaaa

SEQ ID NO: 2769373 - RNA, 17 nt, Human
aucuaguuuacagaaaa

SEQ ID NO: 2769374 - RNA, 18 nt, Human
aucuaguuuacagaaaaa

SEQ ID NO: 2769375 - RNA, 20 nt, Human
aucuaguuuacagaaaaauc

SEQ ID NO: 2769376 - RNA, 22 nt, Human
aucuaguuuacagaaaaaucuu

SEQ ID NO: 2769377 - RNA, 13 nt, Human
aucuauaaagaag

SEQ ID NO: 2769378 - RNA, 16 nt, Human
aucuauaaagaagaac

SEQ ID NO: 2769379 - RNA, 12 nt, Human
aucuauaaagcg

SEQ ID NO: 2769380 - RNA, 21 nt, Human
aucuauaaagcgauauacaga

SEQ ID NO: 2769381 - RNA, 11 nt, Human
aucuaguguug

SEQ ID NO: 2769382 - RNA, 22 nt, Human
aucuaguaagacguaaggggaa

SEQ ID NO: 2769383 - RNA, 16 nt, Human
aucuagguaauuuuua

SEQ ID NO: 2769384 - RNA, 14 nt, Human
aucuaggcaugaag

SEQ ID NO: 2769385 - RNA, 20 nt, Human
aucuaggcaugaagagcaaa

SEQ ID NO: 2769386 - RNA, 17 nt, Human
aucuccuagggcuaugg

SEQ ID NO: 2769387 - RNA, 17 nt, Human
aucuccuauaaucuguc

SEQ ID NO: 2769388 - RNA, 18 nt, Human
aucuccuauaaucuguca

SEQ ID NO: 2769389 - RNA, 19 nt, Human
aucuccuauaaucugucaa

SEQ ID NO: 2769390 - RNA, 20 nt, Human
aucuccuauaaucugucaaa

SEQ ID NO: 2769391 - RNA, 21 nt, Human
aucuccuauaaucugucaaaa

SEQ ID NO: 2769392 - RNA, 14 nt, Human
aucuauuuuggauu

SEQ ID NO: 2769393 - RNA, 17 nt, Human
aucuccugacagaaggu

SEQ ID NO: 2769394 - RNA, 18 nt, Human
aucuccugacagaaggug

SEQ ID NO: 2769395 - RNA, 15 nt, Human
aucuccugacagaag

SEQ ID NO: 2769396 - RNA, 15 nt, Human
aucucucccuccccu

SEQ ID NO: 2769397 - RNA, 14 nt, Human
aucucucccucccc

SEQ ID NO: 2769398 - RNA, 23 nt, Human
aucucucccuccccugccauuuu

SEQ ID NO: 2769399 - RNA, 11 nt, Human
aucucucccuc

SEQ ID NO: 2769400 - RNA, 12 nt, Human
aucucucauccu

SEQ ID NO: 2769401 - RNA, 16 nt, Human
aucucucauccuccag

SEQ ID NO: 2769402 - RNA, 17 nt, Human
aucucucauccuccagu

SEQ ID NO: 2769403 - RNA, 21 nt, Human
aucucucauccuccaguaccu

SEQ ID NO: 2769404 - RNA, 17 nt, Human
aucucuauuuaauauuu

SEQ ID NO: 2769405 - RNA, 21 nt, Human
aucuccuguccaucagccagg

SEQ ID NO: 2769406 - RNA, 19 nt, Human
aucuccugucuuuucaggu

SEQ ID NO: 2769407 - RNA, 19 nt, Human
aucucuauuuaauauuuau

SEQ ID NO: 2769408 - RNA, 14 nt, Human
aucucucaaaacuu

SEQ ID NO: 2769409 - RNA, 15 nt, Human
aucucucaaaacuug

SEQ ID NO: 2769410 - RNA, 14 nt, Human
aucucucaaaucug

SEQ ID NO: 2769411 - RNA, 15 nt, Human
aucucucaaaucugu

SEQ ID NO: 2769412 - RNA, 16 nt, Human
aucucucaaaucuguu

SEQ ID NO: 2769413 - RNA, 17 nt, Human
aucucucaaaucuguua

SEQ ID NO: 2769414 - RNA, 19 nt, Human
aucucucaaaucuguuauc

SEQ ID NO: 2769415 - RNA, 18 nt, Human
aucucuauuuaauauuua

SEQ ID NO: 2769416 - RNA, 15 nt, Human
aucuauauaugugua

SEQ ID NO: 2769417 - RNA, 16 nt, Human
aucuauauauguguau

SEQ ID NO: 2769418 - RNA, 17 nt, Human
aucuauauauguguaug

SEQ ID NO: 2769419 - RNA, 15 nt, Human
aucuauauuuaacaa

SEQ ID NO: 2769420 - RNA, 18 nt, Human
aucuauauauguguaugu

SEQ ID NO: 2769421 - RNA, 19 nt, Human
aucuauauauguguaugua

SEQ ID NO: 2769422 - RNA, 21 nt, Human
aucuauaguugauauguuuua

SEQ ID NO: 2769423 - RNA, 13 nt, Human
aucuauuuauuaa

SEQ ID NO: 2769424 - RNA, 16 nt, Human
aucuauuuauuaaguu

SEQ ID NO: 2769425 - RNA, 13 nt, Human
aucuauuuaagua

SEQ ID NO: 2769426 - RNA, 15 nt, Human
aucuauuuauuaaua

SEQ ID NO: 2769427 - RNA, 19 nt, Human
aucuauuuauuaauauuua

SEQ ID NO: 2769428 - RNA, 17 nt, Human
aucuauuucacuuauuu

SEQ ID NO: 2769429 - RNA, 16 nt, Human
aucuauuugugugugu

SEQ ID NO: 2769430 - RNA, 13 nt, Human
aucuauuuucuau

SEQ ID NO: 2769431 - RNA, 14 nt, Human
aucuauuuucuaug

SEQ ID NO: 2769432 - RNA, 15 nt, Human
aucuauuuucuaugu

SEQ ID NO: 2769433 - RNA, 16 nt, Human
aucuauuuucuaugua

SEQ ID NO: 2769434 - RNA, 18 nt, Human
aucuauuuucuauguacu

SEQ ID NO: 2769435 - RNA, 20 nt, Human
aucuauuuucuauguacuag

SEQ ID NO: 2769436 - RNA, 22 nt, Human
aucuauuuucuauguacuagua

SEQ ID NO: 2769437 - RNA, 12 nt, Human
aucuauuuugau

SEQ ID NO: 2769438 - RNA, 16 nt, Human
aucuauuuugaugcag

SEQ ID NO: 2769439 - RNA, 17 nt, Human
aucuauuuugaugcagc

SEQ ID NO: 2769440 - RNA, 18 nt, Human
aucuauuuugaugcagca

SEQ ID NO: 2769441 - RNA, 20 nt, Human
aucuauuuugaugcagcauu

SEQ ID NO: 2769442 - RNA, 21 nt, Human
aucuauuuugaugcagcauuu

SEQ ID NO: 2769443 - RNA, 14 nt, Human
aucuuccauauuug

SEQ ID NO: 2769444 - RNA, 15 nt, Human
aucuuccauauuugg

SEQ ID NO: 2769445 - RNA, 16 nt, Human
aucuuccauauuugga

SEQ ID NO: 2769446 - RNA, 17 nt, Human
aucuuccauauuuggaa

SEQ ID NO: 2769447 - RNA, 18 nt, Human
aucuuccauauuuggaag

SEQ ID NO: 2769448 - RNA, 19 nt, Human
aucuuccauauuuggaaga

SEQ ID NO: 2769449 - RNA, 15 nt, Human
aucuucgggaccagg

SEQ ID NO: 2769450 - RNA, 18 nt, Human
aucuucgggaccaggauu

SEQ ID NO: 2769451 - RNA, 14 nt, Human
aucuucgucuucac

SEQ ID NO: 2769452 - RNA, 15 nt, Human
aucuucgucuucacu

SEQ ID NO: 2769453 - RNA, 16 nt, Human
aucuucgucuucacuc

SEQ ID NO: 2769454 - RNA, 22 nt, Human
aucuucgucuucacucuuaggc

SEQ ID NO: 2769455 - RNA, 21 nt, Human
aucuucuaaacccaauccaaa

SEQ ID NO: 2769456 - RNA, 20 nt, Human
aucuggagaccagggagccu

SEQ ID NO: 2769457 - RNA, 20 nt, Human
aucucugcacccuggggccu

SEQ ID NO: 2769458 - RNA, 23 nt, Human
aucucugcacccuggggccugga

SEQ ID NO: 2769459 - RNA, 21 nt, Human
aucuggagaccagggagccuu

SEQ ID NO: 2769460 - RNA, 22 nt, Human
aucuggagaccagggagccuuu

SEQ ID NO: 2769461 - RNA, 17 nt, Human
aucuggaggccuuccag

SEQ ID NO: 2769462 - RNA, 19 nt, Human
aucuggaggccuuccagcu

SEQ ID NO: 2769463 - RNA, 21 nt, Human
aucuggaggccuuccagcugc

SEQ ID NO: 2769464 - RNA, 22 nt, Human
aucuggaggccuuccagcugcu

SEQ ID NO: 2769465 - RNA, 23 nt, Human
aucuggaggccuuccagcugcug

SEQ ID NO: 2769466 - RNA, 17 nt, Human
aucuggauaggagccug

SEQ ID NO: 2769467 - RNA, 18 nt, Human
aucuggauaggagccugc

SEQ ID NO: 2769468 - RNA, 20 nt, Human
aucuggauaggagccugcug

SEQ ID NO: 2769469 - RNA, 21 nt, Human
aucuggauaggagccugcugg

SEQ ID NO: 2769470 - RNA, 22 nt, Human
aucuggauaggagccugcuggu

SEQ ID NO: 2769471 - RNA, 16 nt, Human
aucucugaagcauguu

SEQ ID NO: 2769472 - RNA, 17 nt, Human
aucucugaagcauguuu

SEQ ID NO: 2769473 - RNA, 19 nt, Human
aucucugaagcauguuuca

SEQ ID NO: 2769474 - RNA, 20 nt, Human
aucucugaagcauguuucau

SEQ ID NO: 2769475 - RNA, 11 nt, Human
aucucugaaag

SEQ ID NO: 2769476 - RNA, 13 nt, Human
aucucugaaagca

SEQ ID NO: 2769477 - RNA, 13 nt, Human
aucucugaagcau

SEQ ID NO: 2769478 - RNA, 22 nt, Human
aucuggacuccucuguccaggc

SEQ ID NO: 2769479 - RNA, 16 nt, Human
aucucugcuuuggaaa

SEQ ID NO: 2769480 - RNA, 16 nt, Human
aucuuauuuucaugua

SEQ ID NO: 2769481 - RNA, 23 nt, Human
aucuuauuuucauguauaugugu

SEQ ID NO: 2769482 - RNA, 15 nt, Human
aucuuauuuuucuaa

SEQ ID NO: 2769483 - RNA, 17 nt, Human
aucuuauuuuucuaaac

SEQ ID NO: 2769484 - RNA, 19 nt, Human
aucuuauuuuucuaaacgu

SEQ ID NO: 2769485 - RNA, 21 nt, Human
aucuuauuuuucuaaacguaa

SEQ ID NO: 2769486 - RNA, 17 nt, Human
aucuucaaaaguaaugc

SEQ ID NO: 2769487 - RNA, 19 nt, Human
aucuucaaaaguaaugccu

SEQ ID NO: 2769488 - RNA, 22 nt, Human
aucuucaaaaguaaugccucug

SEQ ID NO: 2769489 - RNA, 23 nt, Human
aucuucaaaaguaaugccucugu

SEQ ID NO: 2769490 - RNA, 24 nt, Human
aucuucaaaaguaaugccucuguc

SEQ ID NO: 2769491 - RNA, 12 nt, Human
aucuucacauag

SEQ ID NO: 2769492 - RNA, 19 nt, Human
aucuucacauaguucucca

SEQ ID NO: 2769493 - RNA, 13 nt, Human
aucuuauuuagga

SEQ ID NO: 2769494 - RNA, 14 nt, Human
aucuggguccuugc

SEQ ID NO: 2769495 - RNA, 18 nt, Human
aucuggguccuugcaccc

SEQ ID NO: 2769496 - RNA, 22 nt, Human
aucccuacccccuaagagccau

SEQ ID NO: 2769497 - RNA, 21 nt, Human
aucccuacccccuaagagcca

SEQ ID NO: 2769498 - RNA, 14 nt, Human
aucccuacccccua

SEQ ID NO: 2769499 - RNA, 22 nt, Human
auccccagggggcaugaccaga

SEQ ID NO: 2769500 - RNA, 21 nt, Human
auccccaggggucccagccac

SEQ ID NO: 2769501 - RNA, 19 nt, Human
auccccaggggucccagcc

SEQ ID NO: 2769502 - RNA, 15 nt, Human
aucccggcugcccuu

SEQ ID NO: 2769503 - RNA, 16 nt, Human
aucccuaaugcugcag

SEQ ID NO: 2769504 - RNA, 18 nt, Human
aucccuaaugugugccau

SEQ ID NO: 2769505 - RNA, 23 nt, Human
auccccaggggucccagccaccc

SEQ ID NO: 2769506 - RNA, 13 nt, Human
aucccguguucuc

SEQ ID NO: 2769507 - RNA, 16 nt, Human
aucccguguucuccuu

SEQ ID NO: 2769508 - RNA, 16 nt, Human
auccccaagccuggca

SEQ ID NO: 2769509 - RNA, 18 nt, Human
auccccaagccuggcaag

SEQ ID NO: 2769510 - RNA, 16 nt, Human
auccccaagugugaac

SEQ ID NO: 2769511 - RNA, 14 nt, Human
auccccaaguguga

SEQ ID NO: 2769512 - RNA, 19 nt, Human
aucccaugagccucagcau

SEQ ID NO: 2769513 - RNA, 15 nt, Human
aucccauguauuuau

SEQ ID NO: 2769514 - RNA, 18 nt, Human
aucccauuaaucauuucc

SEQ ID NO: 2769515 - RNA, 21 nt, Human
aucccauuaaucauuucccca

SEQ ID NO: 2769516 - RNA, 22 nt, Human
auccagaggcaaacggaggcaa

SEQ ID NO: 2769517 - RNA, 20 nt, Human
auccagaggguugugauuuu

SEQ ID NO: 2769518 - RNA, 16 nt, Human
auccacucccaggcag

SEQ ID NO: 2769519 - RNA, 19 nt, Human
auccagacccggcugcgug

SEQ ID NO: 2769520 - RNA, 21 nt, Human
auccacucuacccucccaccc

SEQ ID NO: 2769521 - RNA, 20 nt, Human
auccacucuacccucccacc

SEQ ID NO: 2769522 - RNA, 19 nt, Human
auccacucuacccucccac

SEQ ID NO: 2769523 - RNA, 18 nt, Human
auccacucuacccuccca

SEQ ID NO: 2769524 - RNA, 21 nt, Human
auccaccugucucagccuccc

SEQ ID NO: 2769525 - RNA, 21 nt, Human
auccacguauuccccuuccca

SEQ ID NO: 2769526 - RNA, 22 nt, Human
auccacguauuccccuucccac

SEQ ID NO: 2769527 - RNA, 18 nt, Human
auccaccugucucagccu

SEQ ID NO: 2769528 - RNA, 13 nt, Human
auccaccugucuc

SEQ ID NO: 2769529 - RNA, 16 nt, Human
auccacucuacccucc

SEQ ID NO: 2769530 - RNA, 13 nt, Human
auccacucgccuu

SEQ ID NO: 2769531 - RNA, 20 nt, Human
aucgcggcggagcuggcccc

SEQ ID NO: 2769532 - RNA, 22 nt, Human
aucgcggcggagcuggccccgc

SEQ ID NO: 2769533 - RNA, 23 nt, Human
aucgcgccacuacacuccagccu

SEQ ID NO: 2769534 - RNA, 17 nt, Human
auccuuuaaauccuucc

SEQ ID NO: 2769535 - RNA, 17 nt, Human
auccuuuacguguuuaa

SEQ ID NO: 2769536 - RNA, 12 nt, Human
auccuuguuuca

SEQ ID NO: 2769537 - RNA, 13 nt, Human
auccuuguuucaa

SEQ ID NO: 2769538 - RNA, 14 nt, Human
auccuuguuucaaa

SEQ ID NO: 2769539 - RNA, 16 nt, Human
auccuuguuucaaaca

SEQ ID NO: 2769540 - RNA, 23 nt, Human
auccuuguuucaaacacaaaugc

SEQ ID NO: 2769541 - RNA, 23 nt, Human
auccuuguuuugaaaaccuaaaa

SEQ ID NO: 2769542 - RNA, 19 nt, Human
aucgccagaggugcuucac

SEQ ID NO: 2769543 - RNA, 20 nt, Human
aucgccagaggugcuucacc

SEQ ID NO: 2769544 - RNA, 14 nt, Human
aucgcauugcauac

SEQ ID NO: 2769545 - RNA, 14 nt, Human
auccucagaugcuc

SEQ ID NO: 2769546 - RNA, 16 nt, Human
auccucacugcccucc

SEQ ID NO: 2769547 - RNA, 21 nt, Human
auccuuagagguccucuggag

SEQ ID NO: 2769548 - RNA, 20 nt, Human
auccuuagagguccucugga

SEQ ID NO: 2769549 - RNA, 19 nt, Human
auccuuagagguccucugg

SEQ ID NO: 2769550 - RNA, 18 nt, Human
auccuuagagguccucug

SEQ ID NO: 2769551 - RNA, 15 nt, Human
auccuuaucagagcu

SEQ ID NO: 2769552 - RNA, 16 nt, Human
auccuuaucagagcua

SEQ ID NO: 2769553 - RNA, 20 nt, Human
auccuuaucagagcuaaggg

SEQ ID NO: 2769554 - RNA, 13 nt, Human
auccuuagagguc

SEQ ID NO: 2769555 - RNA, 12 nt, Human
auccuucccaag

SEQ ID NO: 2769556 - RNA, 18 nt, Human
auccuucccaaguaagag

SEQ ID NO: 2769557 - RNA, 22 nt, Human
auccuucccaaguaagaggcug

SEQ ID NO: 2769558 - RNA, 23 nt, Human
auccuucccaaguaagaggcugg

SEQ ID NO: 2769559 - RNA, 16 nt, Human
auccuucccuuuggag

SEQ ID NO: 2769560 - RNA, 17 nt, Human
auccuucccuuuggaga

SEQ ID NO: 2769561 - RNA, 21 nt, Human
auccuucccuuuggagaugcu

SEQ ID NO: 2769562 - RNA, 20 nt, Human
auccuucaagaacucugggc

SEQ ID NO: 2769563 - RNA, 17 nt, Human
auccuucaucuuuuaaa

SEQ ID NO: 2769564 - RNA, 19 nt, Human
auccuucaucuuuuaaaga

SEQ ID NO: 2769565 - RNA, 18 nt, Human
auccuuccaaaaauuauu

SEQ ID NO: 2769566 - RNA, 19 nt, Human
auccuuccaaaaauuauua

SEQ ID NO: 2769567 - RNA, 20 nt, Human
auccuuccaaaaauuauuau

SEQ ID NO: 2769568 - RNA, 23 nt, Human
auccuuccaaaaauuauuauaag

SEQ ID NO: 2769569 - RNA, 14 nt, Human
auccuuccaaagaa

SEQ ID NO: 2769570 - RNA, 18 nt, Human
auccuuccaaagaauucu

SEQ ID NO: 2769571 - RNA, 20 nt, Human
auccuuccaaagaauucuua

SEQ ID NO: 2769572 - RNA, 22 nt, Human
auccuuccaaagaauucuuaua

SEQ ID NO: 2769573 - RNA, 16 nt, Human
auccuugacuggaccu

SEQ ID NO: 2769574 - RNA, 15 nt, Human
auccuuggucuuugu

SEQ ID NO: 2769575 - RNA, 17 nt, Human
auccuuggucuuuguau

SEQ ID NO: 2769576 - RNA, 18 nt, Human
auccuuggucuuuguauc

SEQ ID NO: 2769577 - RNA, 19 nt, Human
auccuuggucuuuguaucu

SEQ ID NO: 2769578 - RNA, 15 nt, Human
auccuuggcaccaaa

SEQ ID NO: 2769579 - RNA, 16 nt, Human
auccuuggcaccaaag

SEQ ID NO: 2769580 - RNA, 11 nt, Human
aucacacacac

SEQ ID NO: 2769581 - RNA, 11 nt, Human
aucacacacau

SEQ ID NO: 2769582 - RNA, 12 nt, Human
aucacacacaug

SEQ ID NO: 2769583 - RNA, 13 nt, Human
aucacacacaugg

SEQ ID NO: 2769584 - RNA, 14 nt, Human
aucacacacaugga

SEQ ID NO: 2769585 - RNA, 18 nt, Human
aucacacuucugugagac

SEQ ID NO: 2769586 - RNA, 16 nt, Human
aucacacuucugugag

SEQ ID NO: 2769587 - RNA, 14 nt, Human
aucacacuucugug

SEQ ID NO: 2769588 - RNA, 14 nt, Human
aucacacuauuuua

SEQ ID NO: 2769589 - RNA, 16 nt, Human
aucacacuauuuuaga

SEQ ID NO: 2769590 - RNA, 20 nt, Human
aucacaccaucgcuggcccc

SEQ ID NO: 2769591 - RNA, 21 nt, Human
aucacaccaucgcuggccccu

SEQ ID NO: 2769592 - RNA, 12 nt, Human
aucacagcagcc

SEQ ID NO: 2769593 - RNA, 14 nt, Human
aucacagcagccuc

SEQ ID NO: 2769594 - RNA, 18 nt, Human
aucacaggguugggccca

SEQ ID NO: 2769595 - RNA, 20 nt, Human
aucacaggguugggcccaga

SEQ ID NO: 2769596 - RNA, 19 nt, Human
aucacaggguugggcccag

SEQ ID NO: 2769597 - RNA, 14 nt, Human
aucacagcagcuuc

SEQ ID NO: 2769598 - RNA, 20 nt, Human
aucacagggcagagccggga

SEQ ID NO: 2769599 - RNA, 19 nt, Human
aucacaucuuuuaagacaa

SEQ ID NO: 2769600 - RNA, 23 nt, Human
aucacaggguugggcccagaucu

SEQ ID NO: 2769601 - RNA, 22 nt, Human
aucaccgacgcgucuccuguuu

SEQ ID NO: 2769602 - RNA, 20 nt, Human
aucaccgacgcgucuccugu

SEQ ID NO: 2769603 - RNA, 20 nt, Human
aucaccccaaccccccaaaa

SEQ ID NO: 2769604 - RNA, 13 nt, Human
aucaaaaugcuuu

SEQ ID NO: 2769605 - RNA, 22 nt, Human
aucaaaaugcuuuuuauuucug

SEQ ID NO: 2769606 - RNA, 12 nt, Human
aucaaaaugcuu

SEQ ID NO: 2769607 - RNA, 14 nt, Human
aucaaagccacacu

SEQ ID NO: 2769608 - RNA, 16 nt, Human
aucaaagccacacucu

SEQ ID NO: 2769609 - RNA, 13 nt, Human
aucaaagccaggg

SEQ ID NO: 2769610 - RNA, 16 nt, Human
aucaaagccagggucu

SEQ ID NO: 2769611 - RNA, 17 nt, Human
aucaaagcauagauguu

SEQ ID NO: 2769612 - RNA, 21 nt, Human
auauuucccuccccuggggac

SEQ ID NO: 2769613 - RNA, 14 nt, Human
aucaaaauaaaaag

SEQ ID NO: 2769614 - RNA, 15 nt, Human
aucaaaauaaaaagu

SEQ ID NO: 2769615 - RNA, 18 nt, Human
aucaaaauaaaaagugac

SEQ ID NO: 2769616 - RNA, 14 nt, Human
aucaugucuggcua

SEQ ID NO: 2769617 - RNA, 14 nt, Human
aucaugucagagca

SEQ ID NO: 2769618 - RNA, 19 nt, Human
aucaugucaggccugugug

SEQ ID NO: 2769619 - RNA, 18 nt, Human
aucaugucaggccugugu

SEQ ID NO: 2769620 - RNA, 14 nt, Human
aucaccuauuucca

SEQ ID NO: 2769621 - RNA, 22 nt, Human
aucaccuauuuccauucaacaa

SEQ ID NO: 2769622 - RNA, 15 nt, Human
aucaccuauuuccau

SEQ ID NO: 2769623 - RNA, 19 nt, Human
aucaugaaucuuuguuuca

SEQ ID NO: 2769624 - RNA, 11 nt, Human
aucaugaagcc

SEQ ID NO: 2769625 - RNA, 12 nt, Human
aucaugaagccu

SEQ ID NO: 2769626 - RNA, 13 nt, Human
aucaugaagccug

SEQ ID NO: 2769627 - RNA, 14 nt, Human
aucaugaagccugu

SEQ ID NO: 2769628 - RNA, 15 nt, Human
aucaugaagccugug

SEQ ID NO: 2769629 - RNA, 18 nt, Human
aucaugaaauaugcaucu

SEQ ID NO: 2769630 - RNA, 16 nt, Human
aucaugaaauuacuua

SEQ ID NO: 2769631 - RNA, 15 nt, Human
aucaugaaauaugca

SEQ ID NO: 2769632 - RNA, 16 nt, Human
aucaugaaauaugcau

SEQ ID NO: 2769633 - RNA, 18 nt, Human
aucagcuuucaaagcauu

SEQ ID NO: 2769634 - RNA, 21 nt, Human
aucagcuucuauccuugacuu

SEQ ID NO: 2769635 - RNA, 14 nt, Human
aucaugaaauaugc

SEQ ID NO: 2769636 - RNA, 13 nt, Human
auguucucugagg

SEQ ID NO: 2769637 - RNA, 14 nt, Human
auguucugggacac

SEQ ID NO: 2769638 - RNA, 17 nt, Human
auguucucugaggacac

SEQ ID NO: 2769639 - RNA, 15 nt, Human
auguucugggacaca

SEQ ID NO: 2769640 - RNA, 20 nt, Human
auguuccgaauugagcacaa

SEQ ID NO: 2769641 - RNA, 21 nt, Human
auguucugugccuguaaacau

SEQ ID NO: 2769642 - RNA, 18 nt, Human
auguucugugauacagaa

SEQ ID NO: 2769643 - RNA, 17 nt, Human
auguuugccucugccuc

SEQ ID NO: 2769644 - RNA, 15 nt, Human
auguuugccucugcc

SEQ ID NO: 2769645 - RNA, 14 nt, Human
auguuugccucugc

SEQ ID NO: 2769646 - RNA, 20 nt, Human
auguuucuggguccugaaga

SEQ ID NO: 2769647 - RNA, 21 nt, Human
auguuucuggguccugaagaa

SEQ ID NO: 2769648 - RNA, 13 nt, Human
auguuucuaucug

SEQ ID NO: 2769649 - RNA, 14 nt, Human
auguuucuuaacua

SEQ ID NO: 2769650 - RNA, 24 nt, Human
auguuuccagcagaagacaaaaag

SEQ ID NO: 2769651 - RNA, 18 nt, Human
auguguaucggaugcuuu

SEQ ID NO: 2769652 - RNA, 22 nt, Human
auguguaggcaguuuagugcau

SEQ ID NO: 2769653 - RNA, 15 nt, Human
auguguagccugugc

SEQ ID NO: 2769654 - RNA, 14 nt, Human
auguguagccugug

SEQ ID NO: 2769655 - RNA, 16 nt, Human
auguguagccugugca

SEQ ID NO: 2769656 - RNA, 17 nt, Human
auguguagccugugcau

SEQ ID NO: 2769657 - RNA, 23 nt, Human
auguguagccugugcauguaugu

SEQ ID NO: 2769658 - RNA, 22 nt, Human
auguguaguugucucucuucag

SEQ ID NO: 2769659 - RNA, 23 nt, Human
auguguaguugucucucuucaga

SEQ ID NO: 2769660 - RNA, 15 nt, Human
auguguauauauaca

SEQ ID NO: 2769661 - RNA, 16 nt, Human
auguguauauauacau

SEQ ID NO: 2769662 - RNA, 17 nt, Human
auguguauauauacaua

SEQ ID NO: 2769663 - RNA, 19 nt, Human
auguguauauauacauaca

SEQ ID NO: 2769664 - RNA, 23 nt, Human
auguguauauauacauacacuug

SEQ ID NO: 2769665 - RNA, 22 nt, Human
auguguauauauaugugaggau

SEQ ID NO: 2769666 - RNA, 19 nt, Human
auguguaaagaucuacaug

SEQ ID NO: 2769667 - RNA, 21 nt, Human
auguguaaagaucuacaugaa

SEQ ID NO: 2769668 - RNA, 22 nt, Human
auguguaaagaucuacaugaau

SEQ ID NO: 2769669 - RNA, 15 nt, Human
auguguaaaauguga

SEQ ID NO: 2769670 - RNA, 16 nt, Human
augugguuuuagauuu

SEQ ID NO: 2769671 - RNA, 17 nt, Human
augugguuuucuuaagg

SEQ ID NO: 2769672 - RNA, 23 nt, Human
augugguuugguuccucucuggu

SEQ ID NO: 2769673 - RNA, 13 nt, Human
augugaaacacuu

SEQ ID NO: 2769674 - RNA, 22 nt, Human
augugaaacacuuugccuccug

SEQ ID NO: 2769675 - RNA, 19 nt, Human
augucacaggcagguccag

SEQ ID NO: 2769676 - RNA, 21 nt, Human
auguauuuauuuaaaagauuc

SEQ ID NO: 2769677 - RNA, 12 nt, Human
augucacagggc

SEQ ID NO: 2769678 - RNA, 13 nt, Human
augucacagggcc

SEQ ID NO: 2769679 - RNA, 14 nt, Human
augucacagggcca

SEQ ID NO: 2769680 - RNA, 16 nt, Human
augucuuuugaauauu

SEQ ID NO: 2769681 - RNA, 15 nt, Human
augucuuuugaauau

SEQ ID NO: 2769682 - RNA, 16 nt, Human
augugaaaaucaaaua

SEQ ID NO: 2769683 - RNA, 18 nt, Human
augugaaaaucaaauaca

SEQ ID NO: 2769684 - RNA, 18 nt, Human
auguauuuauuuaaaaga

SEQ ID NO: 2769685 - RNA, 19 nt, Human
auguauuuauuuaaaagau

SEQ ID NO: 2769686 - RNA, 12 nt, Human
auguauuuguuc

SEQ ID NO: 2769687 - RNA, 13 nt, Human
auguauuuguuca

SEQ ID NO: 2769688 - RNA, 14 nt, Human
auguauuuguucau

SEQ ID NO: 2769689 - RNA, 18 nt, Human
auguauuuguucauguuu

SEQ ID NO: 2769690 - RNA, 13 nt, Human
auguauuuaugua

SEQ ID NO: 2769691 - RNA, 16 nt, Human
auguauuuauuuaaaa

SEQ ID NO: 2769692 - RNA, 22 nt, Human
auguauuuauuuaaaagauuca

SEQ ID NO: 2769693 - RNA, 19 nt, Human
auguauuuccuggauguuu

SEQ ID NO: 2769694 - RNA, 13 nt, Human
augucacaggcag

SEQ ID NO: 2769695 - RNA, 21 nt, Human
auguauuguaaacauguguuu

SEQ ID NO: 2769696 - RNA, 11 nt, Human
auguauuguaa

SEQ ID NO: 2769697 - RNA, 19 nt, Human
auguauuguaaacaugugu

SEQ ID NO: 2769698 - RNA, 20 nt, Human
auguauuguaaacauguguu

SEQ ID NO: 2769699 - RNA, 21 nt, Human
auguaauuuaggguacuaaau

SEQ ID NO: 2769700 - RNA, 22 nt, Human
auguaauuuaggguacuaaauu

SEQ ID NO: 2769701 - RNA, 12 nt, Human
auguaacuugaa

SEQ ID NO: 2769702 - RNA, 17 nt, Human
auguaauuguaauuuug

SEQ ID NO: 2769703 - RNA, 19 nt, Human
auguaauuguaauuuugaa

SEQ ID NO: 2769704 - RNA, 15 nt, Human
auggguuauguguau

SEQ ID NO: 2769705 - RNA, 16 nt, Human
auggguuggugcuucu

SEQ ID NO: 2769706 - RNA, 16 nt, Human
auggguuuuaugagau

SEQ ID NO: 2769707 - RNA, 22 nt, Human
auggguuuuaugagauggauca

SEQ ID NO: 2769708 - RNA, 21 nt, Human
auggguguuguauggggaggc

SEQ ID NO: 2769709 - RNA, 14 nt, Human
augguaauuguugc

SEQ ID NO: 2769710 - RNA, 19 nt, Human
augguaggaagaagcucuc

SEQ ID NO: 2769711 - RNA, 13 nt, Human
augguagaccuuu

SEQ ID NO: 2769712 - RNA, 18 nt, Human
augguaggcauuuccuau

SEQ ID NO: 2769713 - RNA, 17 nt, Human
augguaggcauuuccua

SEQ ID NO: 2769714 - RNA, 17 nt, Human
augguaccaaucaugaa

SEQ ID NO: 2769715 - RNA, 14 nt, Human
augguacaaccuuu

SEQ ID NO: 2769716 - RNA, 22 nt, Human
augguacaaccuuuauucuuuu

SEQ ID NO: 2769717 - RNA, 18 nt, Human
augguacaugucuuccau

SEQ ID NO: 2769718 - RNA, 20 nt, Human
augguaccaaucaugaaucu

SEQ ID NO: 2769719 - RNA, 15 nt, Human
augguaccagcccug

SEQ ID NO: 2769720 - RNA, 20 nt, Human
augguaccagcccuggggcu

SEQ ID NO: 2769721 - RNA, 13 nt, Human
augguacuauuua

SEQ ID NO: 2769722 - RNA, 17 nt, Human
augaucuuugcagacag

SEQ ID NO: 2769723 - RNA, 21 nt, Human
augaucuugaguauaagaaau

SEQ ID NO: 2769724 - RNA, 23 nt, Human
augaucuugaguauaagaaaugc

SEQ ID NO: 2769725 - RNA, 21 nt, Human
augaucuuugcagacaggcaa

SEQ ID NO: 2769726 - RNA, 19 nt, Human
augaucuuugcagacaggc

SEQ ID NO: 2769727 - RNA, 18 nt, Human
augaucuuugcagacagg

SEQ ID NO: 2769728 - RNA, 23 nt, Human
augaugaaaugaggucagagccu

SEQ ID NO: 2769729 - RNA, 15 nt, Human
augaugaaugagaau

SEQ ID NO: 2769730 - RNA, 12 nt, Human
augaugaaugag

SEQ ID NO: 2769731 - RNA, 20 nt, Human
augaugaucaauuauaguuu

SEQ ID NO: 2769732 - RNA, 19 nt, Human
augaugagaauuucuaaaa

SEQ ID NO: 2769733 - RNA, 20 nt, Human
augaugagccuucgugcccc

SEQ ID NO: 2769734 - RNA, 18 nt, Human
augaugaaaugaggucag

SEQ ID NO: 2769735 - RNA, 20 nt, Human
augaugaaaaccuacauauu

SEQ ID NO: 2769736 - RNA, 12 nt, Human
augaugaaaauu

SEQ ID NO: 2769737 - RNA, 21 nt, Human
augauguaaucucucugcagc

SEQ ID NO: 2769738 - RNA, 13 nt, Human
augauguaauuga

SEQ ID NO: 2769739 - RNA, 23 nt, Human
augauggggcccuaauucagcca

SEQ ID NO: 2769740 - RNA, 18 nt, Human
augaugguugcaaaagac

SEQ ID NO: 2769741 - RNA, 19 nt, Human
augauggcaauuuuguaac

SEQ ID NO: 2769742 - RNA, 19 nt, Human
augauggaugccaauauua

SEQ ID NO: 2769743 - RNA, 15 nt, Human
augauggaugccaau

SEQ ID NO: 2769744 - RNA, 16 nt, Human
augauggucacuuaaa

SEQ ID NO: 2769745 - RNA, 21 nt, Human
augccugauugccaagcucag

SEQ ID NO: 2769746 - RNA, 19 nt, Human
augccugccccaaacaaau

SEQ ID NO: 2769747 - RNA, 19 nt, Human
augccugagugccuggcca

SEQ ID NO: 2769748 - RNA, 20 nt, Human
augccugagugccuggccaa

SEQ ID NO: 2769749 - RNA, 18 nt, Human
augccuggaagcuuuguc

SEQ ID NO: 2769750 - RNA, 23 nt, Human
augccuggaagcuuuguccccug

SEQ ID NO: 2769751 - RNA, 18 nt, Human
augccuguccagccuggg

SEQ ID NO: 2769752 - RNA, 17 nt, Human
augccuguccagccugg

SEQ ID NO: 2769753 - RNA, 23 nt, Human
augcaugugguuugguuccucuc

SEQ ID NO: 2769754 - RNA, 18 nt, Human
augcauguugaccauguc

SEQ ID NO: 2769755 - RNA, 22 nt, Human
augcauguugaccaugucuaug

SEQ ID NO: 2769756 - RNA, 19 nt, Human
augcauguuuuccagcucc

SEQ ID NO: 2769757 - RNA, 21 nt, Human
augcauuauaggaucauuugu

SEQ ID NO: 2769758 - RNA, 12 nt, Human
augcauuaaacc

SEQ ID NO: 2769759 - RNA, 14 nt, Human
augcauuaaaccug

SEQ ID NO: 2769760 - RNA, 15 nt, Human
augcauuaaaccugu

SEQ ID NO: 2769761 - RNA, 17 nt, Human
augcauuaaaccugucu

SEQ ID NO: 2769762 - RNA, 20 nt, Human
augcauuaaaccugucucca

SEQ ID NO: 2769763 - RNA, 16 nt, Human
augccugagugccugg

SEQ ID NO: 2769764 - RNA, 14 nt, Human
augcauuguaguuu

SEQ ID NO: 2769765 - RNA, 21 nt, Human
augcauucuugguuggcuggc

SEQ ID NO: 2769766 - RNA, 17 nt, Human
augcauugauauuguga

SEQ ID NO: 2769767 - RNA, 18 nt, Human
augcauugauauugugaa

SEQ ID NO: 2769768 - RNA, 19 nt, Human
augcauugauauugugaac

SEQ ID NO: 2769769 - RNA, 22 nt, Human
augcauuauaggaucauuuguu

SEQ ID NO: 2769770 - RNA, 20 nt, Human
augcauguuuuccagcuccu

SEQ ID NO: 2769771 - RNA, 10 nt, Human
augcacacac

SEQ ID NO: 2769772 - RNA, 12 nt, Human
augcacacacac

SEQ ID NO: 2769773 - RNA, 21 nt, Human
augcacacacacacgcuuucu

SEQ ID NO: 2769774 - RNA, 20 nt, Human
augccuucuuauugcuuuua

SEQ ID NO: 2769775 - RNA, 15 nt, Human
augccuugaauaaua

SEQ ID NO: 2769776 - RNA, 23 nt, Human
augccuugaauaauaagcaggau

SEQ ID NO: 2769777 - RNA, 20 nt, Human
augccuuggggaggacaaaa

SEQ ID NO: 2769778 - RNA, 22 nt, Human
augccuuggggaggacaaaacu

SEQ ID NO: 2769779 - RNA, 12 nt, Human
augccuugugcu

SEQ ID NO: 2769780 - RNA, 19 nt, Human
augccuugugcuguuaaua

SEQ ID NO: 2769781 - RNA, 14 nt, Human
augccuucuuauug

SEQ ID NO: 2769782 - RNA, 22 nt, Human
augccuguggaagagugugugu

SEQ ID NO: 2769783 - RNA, 12 nt, Human
augccuguggcu

SEQ ID NO: 2769784 - RNA, 14 nt, Human
augccuguggcugc

SEQ ID NO: 2769785 - RNA, 15 nt, Human
augccuguggcugcg

SEQ ID NO: 2769786 - RNA, 13 nt, Human
augccuuaaaaug

SEQ ID NO: 2769787 - RNA, 15 nt, Human
augccuuaaaaugga

SEQ ID NO: 2769788 - RNA, 16 nt, Human
augccuuaaaauggaa

SEQ ID NO: 2769789 - RNA, 18 nt, Human
augccuuaaaauggaauu

SEQ ID NO: 2769790 - RNA, 19 nt, Human
augccuuaaaauggaauug

SEQ ID NO: 2769791 - RNA, 22 nt, Human
augccuuaaaauggaauugaaa

SEQ ID NO: 2769792 - RNA, 17 nt, Human
auggcugugccucugcc

SEQ ID NO: 2769793 - RNA, 15 nt, Human
auggcugugccucug

SEQ ID NO: 2769794 - RNA, 16 nt, Human
auggcugugccucugc

SEQ ID NO: 2769795 - RNA, 18 nt, Human
auggauauuauuagaaau

SEQ ID NO: 2769796 - RNA, 21 nt, Human
auggauauuuguacuguuuaa

SEQ ID NO: 2769797 - RNA, 14 nt, Human
auggaucccgaaga

SEQ ID NO: 2769798 - RNA, 13 nt, Human
auggauacuacau

SEQ ID NO: 2769799 - RNA, 19 nt, Human
auggauacuacaucuuuaa

SEQ ID NO: 2769800 - RNA, 16 nt, Human
auggauagagaagaaa

SEQ ID NO: 2769801 - RNA, 16 nt, Human
auggauagaguauuga

SEQ ID NO: 2769802 - RNA, 18 nt, Human
auggauaaccuauaugau

SEQ ID NO: 2769803 - RNA, 19 nt, Human
auggauaaccuauaugauu

SEQ ID NO: 2769804 - RNA, 19 nt, Human
augcuugugaaaauguguu

SEQ ID NO: 2769805 - RNA, 17 nt, Human
augcugacuucacuuau

SEQ ID NO: 2769806 - RNA, 18 nt, Human
augcuuuaccaaacagca

SEQ ID NO: 2769807 - RNA, 19 nt, Human
augcuuuaccaaacagcaa

SEQ ID NO: 2769808 - RNA, 20 nt, Human
augcuuuaccaaacagcaaa

SEQ ID NO: 2769809 - RNA, 18 nt, Human
augcuuuaggauguacag

SEQ ID NO: 2769810 - RNA, 13 nt, Human
auggaguagaggu

SEQ ID NO: 2769811 - RNA, 21 nt, Human
auggaguagagguacuagaau

SEQ ID NO: 2769812 - RNA, 22 nt, Human
auggaguagagguacuagaaug

SEQ ID NO: 2769813 - RNA, 17 nt, Human
auggagguucuaaggcc

SEQ ID NO: 2769814 - RNA, 15 nt, Human
auggagguucuaagg

SEQ ID NO: 2769815 - RNA, 16 nt, Human
auggagguucuaaggc

SEQ ID NO: 2769816 - RNA, 12 nt, Human
auggagguucua

SEQ ID NO: 2769817 - RNA, 13 nt, Human
auggagguucuaa

SEQ ID NO: 2769818 - RNA, 16 nt, Human
auggaggcccuccugu

SEQ ID NO: 2769819 - RNA, 20 nt, Human
auggaggcccuccugugcug

SEQ ID NO: 2769820 - RNA, 17 nt, Human
auggaggggaguguugg

SEQ ID NO: 2769821 - RNA, 12 nt, Human
augcugaucauc

SEQ ID NO: 2769822 - RNA, 14 nt, Human
augcugaucaucgc

SEQ ID NO: 2769823 - RNA, 19 nt, Human
augcugaucaucgccagag

SEQ ID NO: 2769824 - RNA, 22 nt, Human
augcugaucaucgccagaggug

SEQ ID NO: 2769825 - RNA, 24 nt, Human
augcugaucaucgccagaggugcu

SEQ ID NO: 2769826 - RNA, 17 nt, Human
augcugaugaaucacug

SEQ ID NO: 2769827 - RNA, 18 nt, Human
augcugaugaaucacugu

SEQ ID NO: 2769828 - RNA, 19 nt, Human
augcugaugaaucacuguu

SEQ ID NO: 2769829 - RNA, 21 nt, Human
augcugaugaaucacuguuuu

SEQ ID NO: 2769830 - RNA, 14 nt, Human
augcugauguccuc

SEQ ID NO: 2769831 - RNA, 16 nt, Human
augcugauguccucac

SEQ ID NO: 2769832 - RNA, 13 nt, Human
augcugagggugu

SEQ ID NO: 2769833 - RNA, 17 nt, Human
augcugaggguguuucu

SEQ ID NO: 2769834 - RNA, 20 nt, Human
augcugaggguguuucuucc

SEQ ID NO: 2769835 - RNA, 23 nt, Human
augcugaggguguuucuuccugc

SEQ ID NO: 2769836 - RNA, 14 nt, Human
augcugagauucuu

SEQ ID NO: 2769837 - RNA, 19 nt, Human
augcugacuguacuccucc

SEQ ID NO: 2769838 - RNA, 20 nt, Human
augcugacuguacuccuccc

SEQ ID NO: 2769839 - RNA, 21 nt, Human
augcugacuguacuccuccca

SEQ ID NO: 2769840 - RNA, 23 nt, Human
augcugaauauacagcaggugcu

SEQ ID NO: 2769841 - RNA, 12 nt, Human
augcugccucca

SEQ ID NO: 2769842 - RNA, 15 nt, Human
augcugccuccagaa

SEQ ID NO: 2769843 - RNA, 13 nt, Human
augcugccugagu

SEQ ID NO: 2769844 - RNA, 12 nt, Human
augcugccugag

SEQ ID NO: 2769845 - RNA, 22 nt, Human
augcugccuucccaugaaucug

SEQ ID NO: 2769846 - RNA, 23 nt, Human
augcugccuucccaugaaucugu

SEQ ID NO: 2769847 - RNA, 18 nt, Human
augcugccuuuucuuuaa

SEQ ID NO: 2769848 - RNA, 23 nt, Human
agccuuuucccucuuuggcuccc

SEQ ID NO: 2769849 - RNA, 13 nt, Human
agccuuuugaaag

SEQ ID NO: 2769850 - RNA, 21 nt, Human
agcgacauagcccaucccugc

SEQ ID NO: 2769851 - RNA, 19 nt, Human
agcgacauagcccaucccu

SEQ ID NO: 2769852 - RNA, 17 nt, Human
agcgaccgcccccuccu

SEQ ID NO: 2769853 - RNA, 22 nt, Human
agcgaccuuccucauccacccc

SEQ ID NO: 2769854 - RNA, 17 nt, Human
agcgacccauucagaga

SEQ ID NO: 2769855 - RNA, 14 nt, Human
agcgaccgcccccu

SEQ ID NO: 2769856 - RNA, 15 nt, Human
agcgaccgcccccuc

SEQ ID NO: 2769857 - RNA, 16 nt, Human
agcgaccgcccccucc

SEQ ID NO: 2769858 - RNA, 19 nt, Human
agccuuugguucuggccag

SEQ ID NO: 2769859 - RNA, 18 nt, Human
agccuuuucccucuuugg

SEQ ID NO: 2769860 - RNA, 15 nt, Human
agccuuuuaacugug

SEQ ID NO: 2769861 - RNA, 17 nt, Human
agccuuuuauacugauu

SEQ ID NO: 2769862 - RNA, 18 nt, Human
agccuuugguucuggcca

SEQ ID NO: 2769863 - RNA, 23 nt, Human
agccuuuggcucuggagacagcc

SEQ ID NO: 2769864 - RNA, 17 nt, Human
agccuuugggaaaugcu

SEQ ID NO: 2769865 - RNA, 16 nt, Human
agccuuuggcucugga

SEQ ID NO: 2769866 - RNA, 17 nt, Human
agccuuuggcucuggag

SEQ ID NO: 2769867 - RNA, 18 nt, Human
agccuuuggcucuggaga

SEQ ID NO: 2769868 - RNA, 21 nt, Human
agccuuuggcucuggagacag

SEQ ID NO: 2769869 - RNA, 15 nt, Human
agccuuuggaaacag

SEQ ID NO: 2769870 - RNA, 17 nt, Human
agccuuuggccuuggcu

SEQ ID NO: 2769871 - RNA, 13 nt, Human
agcgagcccuggu

SEQ ID NO: 2769872 - RNA, 16 nt, Human
agcgagagucugucuc

SEQ ID NO: 2769873 - RNA, 15 nt, Human
agcgagcauccccca

SEQ ID NO: 2769874 - RNA, 19 nt, Human
agcgagcaucccccaaagu

SEQ ID NO: 2769875 - RNA, 19 nt, Human
agcgagcccugguggcagu

SEQ ID NO: 2769876 - RNA, 16 nt, Human
agcgagggcagcugcu

SEQ ID NO: 2769877 - RNA, 15 nt, Human
agcgagggcagcugc

SEQ ID NO: 2769878 - RNA, 14 nt, Human
agcgagggcagcug

SEQ ID NO: 2769879 - RNA, 17 nt, Human
agcgagggcagcugcua

SEQ ID NO: 2769880 - RNA, 21 nt, Human
agcgaguuguggaaagccucu

SEQ ID NO: 2769881 - RNA, 15 nt, Human
agcgauauacagaug

SEQ ID NO: 2769882 - RNA, 17 nt, Human
agcgauauacagaugaa

SEQ ID NO: 2769883 - RNA, 20 nt, Human
agcgauauacagaugaaaau

SEQ ID NO: 2769884 - RNA, 14 nt, Human
agcgaguuguggaa

SEQ ID NO: 2769885 - RNA, 18 nt, Human
agcgaugaauuuggagac

SEQ ID NO: 2769886 - RNA, 19 nt, Human
agcgaugaauuuggagacu

SEQ ID NO: 2769887 - RNA, 18 nt, Human
agcgauggucucagaaac

SEQ ID NO: 2769888 - RNA, 18 nt, Human
agcguguuuacaugugua

SEQ ID NO: 2769889 - RNA, 20 nt, Human
agccugggcagccaggcugc

SEQ ID NO: 2769890 - RNA, 19 nt, Human
agccugggcagccaggcug

SEQ ID NO: 2769891 - RNA, 18 nt, Human
agccugggcagccaggcu

SEQ ID NO: 2769892 - RNA, 21 nt, Human
agccugggacaguuuaucaug

SEQ ID NO: 2769893 - RNA, 14 nt, Human
agccugggaggcac

SEQ ID NO: 2769894 - RNA, 15 nt, Human
agccugggaggcaca

SEQ ID NO: 2769895 - RNA, 16 nt, Human
agccugggaggcacag

SEQ ID NO: 2769896 - RNA, 18 nt, Human
agccugggaggcacagca

SEQ ID NO: 2769897 - RNA, 22 nt, Human
agccugggaggcacagcaaacu

SEQ ID NO: 2769898 - RNA, 23 nt, Human
agccuggcuucuggagcccuugg

SEQ ID NO: 2769899 - RNA, 21 nt, Human
agccuggcuucuggagcccuu

SEQ ID NO: 2769900 - RNA, 20 nt, Human
agccuggcuucuggagcccu

SEQ ID NO: 2769901 - RNA, 19 nt, Human
agccuggcuucuggagccc

SEQ ID NO: 2769902 - RNA, 18 nt, Human
agccuggcuucuggagcc

SEQ ID NO: 2769903 - RNA, 15 nt, Human
agccuggcuucugga

SEQ ID NO: 2769904 - RNA, 15 nt, Human
agccugggcgacaga

SEQ ID NO: 2769905 - RNA, 13 nt, Human
agccuggggccug

SEQ ID NO: 2769906 - RNA, 14 nt, Human
agccuggggccugg

SEQ ID NO: 2769907 - RNA, 15 nt, Human
agccuggggccuggc

SEQ ID NO: 2769908 - RNA, 16 nt, Human
agccuggggccuggca

SEQ ID NO: 2769909 - RNA, 17 nt, Human
agccuggggccuggcag

SEQ ID NO: 2769910 - RNA, 18 nt, Human
agccuggggccuggcagg

SEQ ID NO: 2769911 - RNA, 19 nt, Human
agccuggggccuggcaggg

SEQ ID NO: 2769912 - RNA, 11 nt, Human
agccugggccc

SEQ ID NO: 2769913 - RNA, 12 nt, Human
agccugggcccc

SEQ ID NO: 2769914 - RNA, 21 nt, Human
agccugggcagccaggcugcc

SEQ ID NO: 2769915 - RNA, 16 nt, Human
agccugggccccagcu

SEQ ID NO: 2769916 - RNA, 14 nt, Human
agccugggcgacag

SEQ ID NO: 2769917 - RNA, 22 nt, Human
agcccucccugccccucccuuc

SEQ ID NO: 2769918 - RNA, 23 nt, Human
agcccucccugccccucccuuca

SEQ ID NO: 2769919 - RNA, 15 nt, Human
agcccucccugcccc

SEQ ID NO: 2769920 - RNA, 16 nt, Human
agcccucccugccccu

SEQ ID NO: 2769921 - RNA, 17 nt, Human
agcccucccugccccuc

SEQ ID NO: 2769922 - RNA, 19 nt, Human
agcccucccugccccuccc

SEQ ID NO: 2769923 - RNA, 14 nt, Human
agccuggcuucugg

SEQ ID NO: 2769924 - RNA, 11 nt, Human
agccuggcucu

SEQ ID NO: 2769925 - RNA, 12 nt, Human
agccuggcucuu

SEQ ID NO: 2769926 - RNA, 23 nt, Human
agcuaauguaauaacugugaagu

SEQ ID NO: 2769927 - RNA, 14 nt, Human
agcuaauuugcauu

SEQ ID NO: 2769928 - RNA, 13 nt, Human
agcuaauuugcau

SEQ ID NO: 2769929 - RNA, 22 nt, Human
agcucaaagcguggacaggugu

SEQ ID NO: 2769930 - RNA, 15 nt, Human
agcuaauugggaguc

SEQ ID NO: 2769931 - RNA, 19 nt, Human
agcuaauugggaguccagg

SEQ ID NO: 2769932 - RNA, 22 nt, Human
agcuaauuugcauuaaauucac

SEQ ID NO: 2769933 - RNA, 20 nt, Human
agcuaauuugcauuaaauuc

SEQ ID NO: 2769934 - RNA, 16 nt, Human
agcucaccagccccag

SEQ ID NO: 2769935 - RNA, 14 nt, Human
agcucaauggacug

SEQ ID NO: 2769936 - RNA, 17 nt, Human
agcucaaauaaaaauaa

SEQ ID NO: 2769937 - RNA, 20 nt, Human
agcucaagcaggaaguucaa

SEQ ID NO: 2769938 - RNA, 19 nt, Human
agcucaaggaaaggccuga

SEQ ID NO: 2769939 - RNA, 19 nt, Human
agcucaagggacaaggaca

SEQ ID NO: 2769940 - RNA, 15 nt, Human
agcucaacuuucugu

SEQ ID NO: 2769941 - RNA, 19 nt, Human
agcucaacuuucuguugga

SEQ ID NO: 2769942 - RNA, 16 nt, Human
agcguuggauguagca

SEQ ID NO: 2769943 - RNA, 11 nt, Human
agcguuuuuua

SEQ ID NO: 2769944 - RNA, 17 nt, Human
agcguuuuuuaaaugua

SEQ ID NO: 2769945 - RNA, 14 nt, Human
agcguuuuuuaaau

SEQ ID NO: 2769946 - RNA, 23 nt, Human
agcguuuuuuaaauguauacuau

SEQ ID NO: 2769947 - RNA, 20 nt, Human
agcguuuuuuaaauguauac

SEQ ID NO: 2769948 - RNA, 19 nt, Human
agcguuuuuuaaauguaua

SEQ ID NO: 2769949 - RNA, 18 nt, Human
agcguuuuuuaaauguau

SEQ ID NO: 2769950 - RNA, 21 nt, Human
agcuaaucagcauucucacuc

SEQ ID NO: 2769951 - RNA, 16 nt, Human
agcuaaucagcauucu

SEQ ID NO: 2769952 - RNA, 22 nt, Human
agcuaauaauucuucaccuaag

SEQ ID NO: 2769953 - RNA, 16 nt, Human
agcuaauaauucuuca

SEQ ID NO: 2769954 - RNA, 12 nt, Human
agcuaauaauga

SEQ ID NO: 2769955 - RNA, 15 nt, Human
agcuaauaauguuaa

SEQ ID NO: 2769956 - RNA, 21 nt, Human
agcuaauaauguuaaccaagg

SEQ ID NO: 2769957 - RNA, 15 nt, Human
agcucaccagcccca

SEQ ID NO: 2769958 - RNA, 20 nt, Human
agcucaccagccccagugcc

SEQ ID NO: 2769959 - RNA, 19 nt, Human
agcucaccagccccagugc

SEQ ID NO: 2769960 - RNA, 21 nt, Human
agcucagagagggcaggcaug

SEQ ID NO: 2769961 - RNA, 16 nt, Human
agcucagagagggcag

SEQ ID NO: 2769962 - RNA, 17 nt, Human
agcucagagagggcagg

SEQ ID NO: 2769963 - RNA, 14 nt, Human
agcucagagagggc

SEQ ID NO: 2769964 - RNA, 14 nt, Human
agcucagaacccag

SEQ ID NO: 2769965 - RNA, 15 nt, Human
agcucagaacccagg

SEQ ID NO: 2769966 - RNA, 16 nt, Human
agcucagaacccaggg

SEQ ID NO: 2769967 - RNA, 17 nt, Human
agcucagaacccagggc

SEQ ID NO: 2769968 - RNA, 18 nt, Human
agcucagaacccagggcu

SEQ ID NO: 2769969 - RNA, 19 nt, Human
agcucagaacccagggcuc

SEQ ID NO: 2769970 - RNA, 15 nt, Human
agcucacgcuucaca

SEQ ID NO: 2769971 - RNA, 13 nt, Human
agcucacuacccu

SEQ ID NO: 2769972 - RNA, 14 nt, Human
agcuccuguccucc

SEQ ID NO: 2769973 - RNA, 15 nt, Human
agcuccuguccuccc

SEQ ID NO: 2769974 - RNA, 16 nt, Human
agcuccuguccuccca

SEQ ID NO: 2769975 - RNA, 17 nt, Human
agcuccuguccucccau

SEQ ID NO: 2769976 - RNA, 21 nt, Human
agcuccuguccucccaucccc

SEQ ID NO: 2769977 - RNA, 23 nt, Human
agcugaacaauaggcuguuccca

SEQ ID NO: 2769978 - RNA, 19 nt, Human
agcugaagaguugccccgu

SEQ ID NO: 2769979 - RNA, 20 nt, Human
agcugaagaguugccccguc

SEQ ID NO: 2769980 - RNA, 13 nt, Human
agcugaaguuacu

SEQ ID NO: 2769981 - RNA, 17 nt, Human
agcugaaugccuccugu

SEQ ID NO: 2769982 - RNA, 18 nt, Human
agcugaaugccuccugug

SEQ ID NO: 2769983 - RNA, 20 nt, Human
agcugaaugccuccuguggg

SEQ ID NO: 2769984 - RNA, 21 nt, Human
agcugaaugccuccugugggg

SEQ ID NO: 2769985 - RNA, 22 nt, Human
agcugaaugccuccugugggga

SEQ ID NO: 2769986 - RNA, 12 nt, Human
agcugagccagg

SEQ ID NO: 2769987 - RNA, 13 nt, Human
agcugagccaggc

SEQ ID NO: 2769988 - RNA, 14 nt, Human
agcugagccaggcu

SEQ ID NO: 2769989 - RNA, 18 nt, Human
agcugcgguccacccagg

SEQ ID NO: 2769990 - RNA, 17 nt, Human
agcugcgguccacccag

SEQ ID NO: 2769991 - RNA, 16 nt, Human
agcugcgguccaccca

SEQ ID NO: 2769992 - RNA, 13 nt, Human
agcugcgguccac

SEQ ID NO: 2769993 - RNA, 20 nt, Human
agcugcgguccacccaggag

SEQ ID NO: 2769994 - RNA, 19 nt, Human
agcugcgguccacccagga

SEQ ID NO: 2769995 - RNA, 12 nt, Human
agcugcugacag

SEQ ID NO: 2769996 - RNA, 17 nt, Human
agcuggucccacucagu

SEQ ID NO: 2769997 - RNA, 16 nt, Human
agcuggucccacucag

SEQ ID NO: 2769998 - RNA, 14 nt, Human
agcugcugacagug

SEQ ID NO: 2769999 - RNA, 13 nt, Human
agcugcugacagu

SEQ ID NO: 2770000 - RNA, 18 nt, Human
agcuggucccacucaguc

SEQ ID NO: 2770001 - RNA, 17 nt, Human
agcugcugaccaauugu

SEQ ID NO: 2770002 - RNA, 20 nt, Human
agcugcugaccaauugugcu

SEQ ID NO: 2770003 - RNA, 21 nt, Human
agcugcugaccaauugugcug

SEQ ID NO: 2770004 - RNA, 22 nt, Human
agcugcugaccaauugugcugc

SEQ ID NO: 2770005 - RNA, 23 nt, Human
agcugcugaccaauugugcugcc

SEQ ID NO: 2770006 - RNA, 22 nt, Human
agcugguuuuuagcggagacgg

SEQ ID NO: 2770007 - RNA, 22 nt, Human
agcucagccccgagcugucccc

SEQ ID NO: 2770008 - RNA, 23 nt, Human
agcucagccccgagcuguccccg

SEQ ID NO: 2770009 - RNA, 21 nt, Human
aggaagggggucuaaggucua

SEQ ID NO: 2770010 - RNA, 20 nt, Human
aggaagggguuggauugcaa

SEQ ID NO: 2770011 - RNA, 18 nt, Human
aggaacuguagaugaugu

SEQ ID NO: 2770012 - RNA, 15 nt, Human
aggaacuguccagag

SEQ ID NO: 2770013 - RNA, 16 nt, Human
aggaacuguccagaga

SEQ ID NO: 2770014 - RNA, 17 nt, Human
aggaacuguccagagag

SEQ ID NO: 2770015 - RNA, 22 nt, Human
aggaaggcugagaggagagaga

SEQ ID NO: 2770016 - RNA, 15 nt, Human
aggaaggcugagagg

SEQ ID NO: 2770017 - RNA, 17 nt, Human
aggaagggcaggaagga

SEQ ID NO: 2770018 - RNA, 12 nt, Human
aggaagggcaaa

SEQ ID NO: 2770019 - RNA, 20 nt, Human
aggaacuguccagagagcaa

SEQ ID NO: 2770020 - RNA, 18 nt, Human
aggaacuguccagagagc

SEQ ID NO: 2770021 - RNA, 19 nt, Human
aggaacuguccagagagca

SEQ ID NO: 2770022 - RNA, 18 nt, Human
aggaauaauuauuuauuu

SEQ ID NO: 2770023 - RNA, 16 nt, Human
aggaauagaagcaaau

SEQ ID NO: 2770024 - RNA, 22 nt, Human
aggaauaauuauuuauuuaaua

SEQ ID NO: 2770025 - RNA, 15 nt, Human
aggaauacaauauau

SEQ ID NO: 2770026 - RNA, 15 nt, Human
aggaauaaugggcuu

SEQ ID NO: 2770027 - RNA, 23 nt, Human
aggaauaaugggcuuagagcagu

SEQ ID NO: 2770028 - RNA, 16 nt, Human
aggaauaauuauuuau

SEQ ID NO: 2770029 - RNA, 17 nt, Human
aggaauaauuauuuauu

SEQ ID NO: 2770030 - RNA, 15 nt, Human
aggaagugcccccuc

SEQ ID NO: 2770031 - RNA, 21 nt, Human
aggaaguguugaagggaggug

SEQ ID NO: 2770032 - RNA, 14 nt, Human
aggaagugaagaau

SEQ ID NO: 2770033 - RNA, 23 nt, Human
aggaaguugacuuauaguacaug

SEQ ID NO: 2770034 - RNA, 15 nt, Human
aggaaguuuucugua

SEQ ID NO: 2770035 - RNA, 16 nt, Human
aggaaguuuucuguag

SEQ ID NO: 2770036 - RNA, 22 nt, Human
aggaaguugacuuauaguacau

SEQ ID NO: 2770037 - RNA, 18 nt, Human
aggaaguugacuuauagu

SEQ ID NO: 2770038 - RNA, 19 nt, Human
aggaauaaauugcuccuug

SEQ ID NO: 2770039 - RNA, 12 nt, Human
aggaauaagaau

SEQ ID NO: 2770040 - RNA, 20 nt, Human
aggaauaaauugcuccuuga

SEQ ID NO: 2770041 - RNA, 15 nt, Human
aggaacaaaaaaacc

SEQ ID NO: 2770042 - RNA, 16 nt, Human
aggaacaaaaaaacca

SEQ ID NO: 2770043 - RNA, 18 nt, Human
aggaacaaaaaaaccaca

SEQ ID NO: 2770044 - RNA, 22 nt, Human
aggaacaaaaaaaccacaaagg

SEQ ID NO: 2770045 - RNA, 18 nt, Human
aggaacugggccuguugc

SEQ ID NO: 2770046 - RNA, 13 nt, Human
aggaacuguacag

SEQ ID NO: 2770047 - RNA, 15 nt, Human
aggaacuguacagaa

SEQ ID NO: 2770048 - RNA, 17 nt, Human
aggaacauuuaggggca

SEQ ID NO: 2770049 - RNA, 18 nt, Human
agcuucauuuccuguguc

SEQ ID NO: 2770050 - RNA, 21 nt, Human
agcuucaccccaaucccagcu

SEQ ID NO: 2770051 - RNA, 16 nt, Human
agcuucauucuccuug

SEQ ID NO: 2770052 - RNA, 21 nt, Human
agcuucauucuccuuguuguu

SEQ ID NO: 2770053 - RNA, 20 nt, Human
agcuucaccccaaucccagc

SEQ ID NO: 2770054 - RNA, 18 nt, Human
agcuucaccccaauccca

SEQ ID NO: 2770055 - RNA, 19 nt, Human
agcuucauuuccugugucu

SEQ ID NO: 2770056 - RNA, 20 nt, Human
agcuucauuugugucaaugg

SEQ ID NO: 2770057 - RNA, 20 nt, Human
agcuuccaaggggcaaauuu

SEQ ID NO: 2770058 - RNA, 22 nt, Human
agcuuccaaggggcaaauuuuu

SEQ ID NO: 2770059 - RNA, 15 nt, Human
agcuucaccagagca

SEQ ID NO: 2770060 - RNA, 13 nt, Human
agcuucauuugug

SEQ ID NO: 2770061 - RNA, 17 nt, Human
agcuucauuugugucaa

SEQ ID NO: 2770062 - RNA, 19 nt, Human
agcuucauuugugucaaug

SEQ ID NO: 2770063 - RNA, 18 nt, Human
agcuucugaggcgcugcu

SEQ ID NO: 2770064 - RNA, 12 nt, Human
agcuuuuaaaaa

SEQ ID NO: 2770065 - RNA, 16 nt, Human
agcuuuuaaacccuau

SEQ ID NO: 2770066 - RNA, 12 nt, Human
agcuguaaaacg

SEQ ID NO: 2770067 - RNA, 14 nt, Human
agcuguaaaacgcu

SEQ ID NO: 2770068 - RNA, 18 nt, Human
agcuguaaaacgcuguca

SEQ ID NO: 2770069 - RNA, 19 nt, Human
agcuguaaaacgcugucaa

SEQ ID NO: 2770070 - RNA, 10 nt, Human
aggagagagg

SEQ ID NO: 2770071 - RNA, 13 nt, Human
aggagagaggcag

SEQ ID NO: 2770072 - RNA, 14 nt, Human
aggagagaggcaga

SEQ ID NO: 2770073 - RNA, 18 nt, Human
aggagagaggcagagagc

SEQ ID NO: 2770074 - RNA, 13 nt, Human
aggagaggaugag

SEQ ID NO: 2770075 - RNA, 15 nt, Human
aggagaggaugagag

SEQ ID NO: 2770076 - RNA, 17 nt, Human
aggagaggaugagagcc

SEQ ID NO: 2770077 - RNA, 21 nt, Human
aggagagagaaagccaggcag

SEQ ID NO: 2770078 - RNA, 22 nt, Human
aggagagagaaagccaggcagg

SEQ ID NO: 2770079 - RNA, 12 nt, Human
aggagagagaaa

SEQ ID NO: 2770080 - RNA, 14 nt, Human
aggagagagaaagc

SEQ ID NO: 2770081 - RNA, 18 nt, Human
aggagagagaaagccagg

SEQ ID NO: 2770082 - RNA, 19 nt, Human
aggagagagaaagccaggc

SEQ ID NO: 2770083 - RNA, 11 nt, Human
aggagagagaa

SEQ ID NO: 2770084 - RNA, 20 nt, Human
aggagagacucccaugaagc

SEQ ID NO: 2770085 - RNA, 21 nt, Human
aggagagacucccaugaagcc

SEQ ID NO: 2770086 - RNA, 22 nt, Human
aggagagacucccaugaagccu

SEQ ID NO: 2770087 - RNA, 23 nt, Human
aggagagacucccaugaagccuu

SEQ ID NO: 2770088 - RNA, 14 nt, Human
aggagagaaaauau

SEQ ID NO: 2770089 - RNA, 15 nt, Human
aggagagaaaauaua

SEQ ID NO: 2770090 - RNA, 16 nt, Human
aggagagaaaauauau

SEQ ID NO: 2770091 - RNA, 17 nt, Human
aggagagaaaauauaug

SEQ ID NO: 2770092 - RNA, 22 nt, Human
aggagagaaaauauauguauuu

SEQ ID NO: 2770093 - RNA, 14 nt, Human
aggaccugccugua

SEQ ID NO: 2770094 - RNA, 13 nt, Human
aggaccugccugu

SEQ ID NO: 2770095 - RNA, 13 nt, Human
aggaccuggggca

SEQ ID NO: 2770096 - RNA, 16 nt, Human
aggaccuggggcacag

SEQ ID NO: 2770097 - RNA, 17 nt, Human
aggaccuggggcacagu

SEQ ID NO: 2770098 - RNA, 22 nt, Human
aggaccuggggcacaguccagg

SEQ ID NO: 2770099 - RNA, 23 nt, Human
aggaccuggggcacaguccagga

SEQ ID NO: 2770100 - RNA, 17 nt, Human
aggaccuguauuuaagc

SEQ ID NO: 2770101 - RNA, 18 nt, Human
aggaccuguauuuaagca

SEQ ID NO: 2770102 - RNA, 20 nt, Human
aggaccuguauuuaagcaaa

SEQ ID NO: 2770103 - RNA, 21 nt, Human
aggaccuguauuuaagcaaau

SEQ ID NO: 2770104 - RNA, 13 nt, Human
aggaccaggcaau

SEQ ID NO: 2770105 - RNA, 21 nt, Human
aggaccaggacucccuccuca

SEQ ID NO: 2770106 - RNA, 18 nt, Human
aggaccaggauccagccu

SEQ ID NO: 2770107 - RNA, 19 nt, Human
aggaccaggacucccuccu

SEQ ID NO: 2770108 - RNA, 18 nt, Human
aggaccaggacucccucc

SEQ ID NO: 2770109 - RNA, 17 nt, Human
aggaccaggacucccuc

SEQ ID NO: 2770110 - RNA, 16 nt, Human
aggaccaggacucccu

SEQ ID NO: 2770111 - RNA, 13 nt, Human
aggaccaggacuc

SEQ ID NO: 2770112 - RNA, 18 nt, Human
aggacccggaggggccug

SEQ ID NO: 2770113 - RNA, 20 nt, Human
aggacccggaggggccuggc

SEQ ID NO: 2770114 - RNA, 18 nt, Human
aggacccuaacacaguau

SEQ ID NO: 2770115 - RNA, 21 nt, Human
aggacccggaggggccuggca

SEQ ID NO: 2770116 - RNA, 22 nt, Human
aggacccggaggggccuggcag

SEQ ID NO: 2770117 - RNA, 17 nt, Human
aggaccugaaauuccaa

SEQ ID NO: 2770118 - RNA, 18 nt, Human
aggaccugaaauuccaaa

SEQ ID NO: 2770119 - RNA, 20 nt, Human
aggaccugaaauuccaaagu

SEQ ID NO: 2770120 - RNA, 22 nt, Human
aggaccugacccuacucccuug

SEQ ID NO: 2770121 - RNA, 12 nt, Human
aggaccaggacu

SEQ ID NO: 2770122 - RNA, 17 nt, Human
aggaaucaaaaauugaa

SEQ ID NO: 2770123 - RNA, 16 nt, Human
aggaaucaagagcugc

SEQ ID NO: 2770124 - RNA, 17 nt, Human
aggaaucaagagcugcc

SEQ ID NO: 2770125 - RNA, 19 nt, Human
aggaaucaagagcugcccu

SEQ ID NO: 2770126 - RNA, 20 nt, Human
aggaaucaagagcugcccuc

SEQ ID NO: 2770127 - RNA, 21 nt, Human
aggaaucaagagcugcccucc

SEQ ID NO: 2770128 - RNA, 22 nt, Human
aggaaucagcaagaagauccua

SEQ ID NO: 2770129 - RNA, 21 nt, Human
aggaaucaugucaggccugug

SEQ ID NO: 2770130 - RNA, 22 nt, Human
aggaaucaugucaggccugugu

SEQ ID NO: 2770131 - RNA, 19 nt, Human
agggauuuuagucacacgu

SEQ ID NO: 2770132 - RNA, 23 nt, Human
agggcaaaauauucacugggcca

SEQ ID NO: 2770133 - RNA, 21 nt, Human
agggcaaauccagucccaaug

SEQ ID NO: 2770134 - RNA, 13 nt, Human
agggcaaaucugc

SEQ ID NO: 2770135 - RNA, 18 nt, Human
agggcaaaugacaugcac

SEQ ID NO: 2770136 - RNA, 20 nt, Human
agggcaaaugacaugcacug

SEQ ID NO: 2770137 - RNA, 21 nt, Human
agggcaaaugacaugcacuga

SEQ ID NO: 2770138 - RNA, 22 nt, Human
agggcaaaugacaugcacugac

SEQ ID NO: 2770139 - RNA, 23 nt, Human
agggcaaaugacaugcacugacc

SEQ ID NO: 2770140 - RNA, 19 nt, Human
agggaucaucaugcagcuc

SEQ ID NO: 2770141 - RNA, 23 nt, Human
agggccugcaggaccugccugua

SEQ ID NO: 2770142 - RNA, 17 nt, Human
agggccugccuggcccc

SEQ ID NO: 2770143 - RNA, 22 nt, Human
agggccugcaggaccugccugu

SEQ ID NO: 2770144 - RNA, 20 nt, Human
agggccugcaggaccugccu

SEQ ID NO: 2770145 - RNA, 22 nt, Human
agggccugagccuggccagccu

SEQ ID NO: 2770146 - RNA, 20 nt, Human
agggccugagccuggccagc

SEQ ID NO: 2770147 - RNA, 18 nt, Human
agggccugagccuggcca

SEQ ID NO: 2770148 - RNA, 19 nt, Human
agggauaguacuaagcauu

SEQ ID NO: 2770149 - RNA, 20 nt, Human
aggguccuuuaguaccugaa

SEQ ID NO: 2770150 - RNA, 14 nt, Human
agggucgaaagcuc

SEQ ID NO: 2770151 - RNA, 15 nt, Human
agggucgaaagcucu

SEQ ID NO: 2770152 - RNA, 16 nt, Human
agggucgaaagcucua

SEQ ID NO: 2770153 - RNA, 17 nt, Human
agggucggaacccaagc

SEQ ID NO: 2770154 - RNA, 18 nt, Human
agggucgaaagcucuaga

SEQ ID NO: 2770155 - RNA, 22 nt, Human
agggucgaaagcucuagaaucu

SEQ ID NO: 2770156 - RNA, 22 nt, Human
agggucggaacccaagcuuaga

SEQ ID NO: 2770157 - RNA, 16 nt, Human
aggguccuggcuccug

SEQ ID NO: 2770158 - RNA, 18 nt, Human
aggguccuuuaguaccug

SEQ ID NO: 2770159 - RNA, 14 nt, Human
aggguccuggcucc

SEQ ID NO: 2770160 - RNA, 18 nt, Human
aggguccucuacuucagg

SEQ ID NO: 2770161 - RNA, 18 nt, Human
aggguauugcuugccacu

SEQ ID NO: 2770162 - RNA, 20 nt, Human
agggucaacaucuuuuacau

SEQ ID NO: 2770163 - RNA, 14 nt, Human
agggucaaugcuau

SEQ ID NO: 2770164 - RNA, 12 nt, Human
aggggccuggca

SEQ ID NO: 2770165 - RNA, 13 nt, Human
aggggccuggcag

SEQ ID NO: 2770166 - RNA, 19 nt, Human
agggccuggaagacagaga

SEQ ID NO: 2770167 - RNA, 15 nt, Human
agggccuggggccug

SEQ ID NO: 2770168 - RNA, 16 nt, Human
agggccuggggccuga

SEQ ID NO: 2770169 - RNA, 17 nt, Human
agggccuggggccugag

SEQ ID NO: 2770170 - RNA, 18 nt, Human
agggccuggggccugaga

SEQ ID NO: 2770171 - RNA, 19 nt, Human
agggccuggggccugagag

SEQ ID NO: 2770172 - RNA, 20 nt, Human
agggccuggggccugagaga

SEQ ID NO: 2770173 - RNA, 21 nt, Human
agggccuggggccugagagaa

SEQ ID NO: 2770174 - RNA, 22 nt, Human
agggccuggggccugagagaau

SEQ ID NO: 2770175 - RNA, 12 nt, Human
agggccugguug

SEQ ID NO: 2770176 - RNA, 17 nt, Human
agggccugguugaagaa

SEQ ID NO: 2770177 - RNA, 16 nt, Human
aggggccccccugccc

SEQ ID NO: 2770178 - RNA, 17 nt, Human
aggggcccaaggcggcc

SEQ ID NO: 2770179 - RNA, 20 nt, Human
aggggcccaaggcggccccu

SEQ ID NO: 2770180 - RNA, 22 nt, Human
aggggcccaaggcggccccucc

SEQ ID NO: 2770181 - RNA, 14 nt, Human
aggggcaucugccc

SEQ ID NO: 2770182 - RNA, 15 nt, Human
aggggcaucugcccc

SEQ ID NO: 2770183 - RNA, 22 nt, Human
aggggccccccugcccuguggg

SEQ ID NO: 2770184 - RNA, 21 nt, Human
aggggccccccugcccugugg

SEQ ID NO: 2770185 - RNA, 20 nt, Human
aggggccccccugcccugug

SEQ ID NO: 2770186 - RNA, 18 nt, Human
aggggccccccugcccug

SEQ ID NO: 2770187 - RNA, 20 nt, Human
agggucucacuauguugccc

SEQ ID NO: 2770188 - RNA, 15 nt, Human
agggucuauggggag

SEQ ID NO: 2770189 - RNA, 23 nt, Human
aggguuuugccauguuggccagg

SEQ ID NO: 2770190 - RNA, 19 nt, Human
aggguuuuccacccuggaa

SEQ ID NO: 2770191 - RNA, 22 nt, Human
agguaacagaacagcuucaggu

SEQ ID NO: 2770192 - RNA, 23 nt, Human
agguaacagaacagcuucagguu

SEQ ID NO: 2770193 - RNA, 18 nt, Human
aggguuuuccacccugga

SEQ ID NO: 2770194 - RNA, 15 nt, Human
aggguuuuccacccu

SEQ ID NO: 2770195 - RNA, 22 nt, Human
aggguuuugccauguuggccag

SEQ ID NO: 2770196 - RNA, 14 nt, Human
aggguuuguggcug

SEQ ID NO: 2770197 - RNA, 14 nt, Human
agguaacaggcaga

SEQ ID NO: 2770198 - RNA, 13 nt, Human
agguaacaggcag

SEQ ID NO: 2770199 - RNA, 16 nt, Human
agguaacaggcagaua

SEQ ID NO: 2770200 - RNA, 13 nt, Human
agguacgcacaga

SEQ ID NO: 2770201 - RNA, 15 nt, Human
agguacgcacagaca

SEQ ID NO: 2770202 - RNA, 16 nt, Human
agguacgcacagacag

SEQ ID NO: 2770203 - RNA, 17 nt, Human
agguacgcacagacagg

SEQ ID NO: 2770204 - RNA, 16 nt, Human
agguccuacagggcca

SEQ ID NO: 2770205 - RNA, 19 nt, Human
agguccgguguucuaagau

SEQ ID NO: 2770206 - RNA, 18 nt, Human
agguccgguguucuaaga

SEQ ID NO: 2770207 - RNA, 14 nt, Human
agguacuauucuga

SEQ ID NO: 2770208 - RNA, 15 nt, Human
agguacuaaauaccu

SEQ ID NO: 2770209 - RNA, 14 nt, Human
agguacuagaaugc

SEQ ID NO: 2770210 - RNA, 16 nt, Human
agguacuagaaugcuu

SEQ ID NO: 2770211 - RNA, 17 nt, Human
agguacuagaaugcuua

SEQ ID NO: 2770212 - RNA, 15 nt, Human
agguacuauauuugc

SEQ ID NO: 2770213 - RNA, 19 nt, Human
aggucgggaguuggagacc

SEQ ID NO: 2770214 - RNA, 21 nt, Human
agguccugaaaguaacucaua

SEQ ID NO: 2770215 - RNA, 20 nt, Human
agguccucuggagcccuaac

SEQ ID NO: 2770216 - RNA, 15 nt, Human
agguccucuggagcc

SEQ ID NO: 2770217 - RNA, 15 nt, Human
agguccucagagaau

SEQ ID NO: 2770218 - RNA, 13 nt, Human
aggucucacgggc

SEQ ID NO: 2770219 - RNA, 17 nt, Human
aggucucccacguggga

SEQ ID NO: 2770220 - RNA, 21 nt, Human
aggucugggcuagguagaaaa

SEQ ID NO: 2770221 - RNA, 23 nt, Human
agggacugccagucccccugccc

SEQ ID NO: 2770222 - RNA, 15 nt, Human
agggacugccucugc

SEQ ID NO: 2770223 - RNA, 16 nt, Human
agggacugccucugcc

SEQ ID NO: 2770224 - RNA, 17 nt, Human
agggacugccucugcca

SEQ ID NO: 2770225 - RNA, 18 nt, Human
agggacugccucugccac

SEQ ID NO: 2770226 - RNA, 13 nt, Human
agggaccaugugu

SEQ ID NO: 2770227 - RNA, 18 nt, Human
agggaccacacccuguac

SEQ ID NO: 2770228 - RNA, 15 nt, Human
aggcuuagcuuugcu

SEQ ID NO: 2770229 - RNA, 19 nt, Human
aggcuuagcuuugcucugc

SEQ ID NO: 2770230 - RNA, 20 nt, Human
aggcuuagcuuugcucugcc

SEQ ID NO: 2770231 - RNA, 22 nt, Human
aggcuguaucccaugagccuca

SEQ ID NO: 2770232 - RNA, 21 nt, Human
aggcuguaucccaugagccuc

SEQ ID NO: 2770233 - RNA, 20 nt, Human
aggcuguaucccaugagccu

SEQ ID NO: 2770234 - RNA, 22 nt, Human
aggcuggucucaaacuccugac

SEQ ID NO: 2770235 - RNA, 23 nt, Human
aggcuggucucgaacuccugacc

SEQ ID NO: 2770236 - RNA, 11 nt, Human
aggcuggucuu

SEQ ID NO: 2770237 - RNA, 15 nt, Human
aggcuggucuugaag

SEQ ID NO: 2770238 - RNA, 19 nt, Human
aggcuggucuugaaguccu

SEQ ID NO: 2770239 - RNA, 17 nt, Human
aggcuggucuaaaacuc

SEQ ID NO: 2770240 - RNA, 19 nt, Human
aggcuacacugacacuggu

SEQ ID NO: 2770241 - RNA, 13 nt, Human
aggcuacacugac

SEQ ID NO: 2770242 - RNA, 18 nt, Human
aggcuacacugacacugg

SEQ ID NO: 2770243 - RNA, 15 nt, Human
aggcuaaggcgugga

SEQ ID NO: 2770244 - RNA, 18 nt, Human
aggcuaaggcguggagcu

SEQ ID NO: 2770245 - RNA, 19 nt, Human
aggcuaaggcguggagcug

SEQ ID NO: 2770246 - RNA, 23 nt, Human
aggcuaaggcguggagcugccug

SEQ ID NO: 2770247 - RNA, 20 nt, Human
aggcuaaggcguggagcugc

SEQ ID NO: 2770248 - RNA, 13 nt, Human
aggcuaaugucaa

SEQ ID NO: 2770249 - RNA, 14 nt, Human
aggcuaaugucaaa

SEQ ID NO: 2770250 - RNA, 21 nt, Human
aggcugaggcggguggaucac

SEQ ID NO: 2770251 - RNA, 11 nt, Human
aggcugaggcg

SEQ ID NO: 2770252 - RNA, 17 nt, Human
aggcugaggcaggagga

SEQ ID NO: 2770253 - RNA, 19 nt, Human
aggcugaggcaggagaaug

SEQ ID NO: 2770254 - RNA, 15 nt, Human
aggcugaggcaggag

SEQ ID NO: 2770255 - RNA, 14 nt, Human
aggcugaggcagga

SEQ ID NO: 2770256 - RNA, 16 nt, Human
aggcugagacugcggg

SEQ ID NO: 2770257 - RNA, 17 nt, Human
aggcugagacugcggga

SEQ ID NO: 2770258 - RNA, 11 nt, Human
aggcugagcca

SEQ ID NO: 2770259 - RNA, 16 nt, Human
aggcugacgugugagg

SEQ ID NO: 2770260 - RNA, 20 nt, Human
aggcugacgugugagggagg

SEQ ID NO: 2770261 - RNA, 16 nt, Human
aggcugagaacacugu

SEQ ID NO: 2770262 - RNA, 19 nt, Human
aggcugagaacacugugaa

SEQ ID NO: 2770263 - RNA, 13 nt, Human
aggcugagacagg

SEQ ID NO: 2770264 - RNA, 14 nt, Human
aggcgggaggaggu

SEQ ID NO: 2770265 - RNA, 20 nt, Human
aggcgggaggaggugugagg

SEQ ID NO: 2770266 - RNA, 16 nt, Human
aggcggccccucccgc

SEQ ID NO: 2770267 - RNA, 14 nt, Human
aggcggccccuccc

SEQ ID NO: 2770268 - RNA, 17 nt, Human
aggcgggggcugcccuu

SEQ ID NO: 2770269 - RNA, 20 nt, Human
aggcgguggacuugaacuuu

SEQ ID NO: 2770270 - RNA, 19 nt, Human
aggcuaaggcaggaaaauu

SEQ ID NO: 2770271 - RNA, 17 nt, Human
aggcgucccgcaccugu

SEQ ID NO: 2770272 - RNA, 19 nt, Human
aggcgucccgcaccugucu

SEQ ID NO: 2770273 - RNA, 21 nt, Human
aggcgucccgcaccugucuga

SEQ ID NO: 2770274 - RNA, 14 nt, Human
aggcggugggcacc

SEQ ID NO: 2770275 - RNA, 21 nt, Human
aggcggugggcacccacccug

SEQ ID NO: 2770276 - RNA, 20 nt, Human
aggccggcgagcccugugga

SEQ ID NO: 2770277 - RNA, 10 nt, Human
aggcccuggc

SEQ ID NO: 2770278 - RNA, 14 nt, Human
aggcccugcugccc

SEQ ID NO: 2770279 - RNA, 15 nt, Human
aggcccugcugccca

SEQ ID NO: 2770280 - RNA, 11 nt, Human
aggcccugcag

SEQ ID NO: 2770281 - RNA, 12 nt, Human
aggcccugcagu

SEQ ID NO: 2770282 - RNA, 13 nt, Human
aggcccugcagug

SEQ ID NO: 2770283 - RNA, 11 nt, Human
aggcccugcau

SEQ ID NO: 2770284 - RNA, 12 nt, Human
aggcccugcaug

SEQ ID NO: 2770285 - RNA, 12 nt, Human
aggcccugccca

SEQ ID NO: 2770286 - RNA, 12 nt, Human
aggcccugcucc

SEQ ID NO: 2770287 - RNA, 16 nt, Human
aggcccugcuccugca

SEQ ID NO: 2770288 - RNA, 17 nt, Human
aggcccugcuccugcag

SEQ ID NO: 2770289 - RNA, 18 nt, Human
aggcccugcuccugcagc

SEQ ID NO: 2770290 - RNA, 19 nt, Human
aggcccugcuccugcagca

SEQ ID NO: 2770291 - RNA, 21 nt, Human
aggcccugcuccugcagcaug

SEQ ID NO: 2770292 - RNA, 22 nt, Human
aggcccugcuccugcagcaugg

SEQ ID NO: 2770293 - RNA, 12 nt, Human
aggccauggcuc

SEQ ID NO: 2770294 - RNA, 22 nt, Human
aggcccuggugcgaauggacuu

SEQ ID NO: 2770295 - RNA, 13 nt, Human
aggcccugucugu

SEQ ID NO: 2770296 - RNA, 14 nt, Human
aggcccugucugua

SEQ ID NO: 2770297 - RNA, 16 nt, Human
aggccgcgcccuuucc

SEQ ID NO: 2770298 - RNA, 19 nt, Human
aggcccuuccucuccacug

SEQ ID NO: 2770299 - RNA, 22 nt, Human
aggcccuuccucuccacugccu

SEQ ID NO: 2770300 - RNA, 13 nt, Human
aggccggccagcc

SEQ ID NO: 2770301 - RNA, 14 nt, Human
aggccggccagccu

SEQ ID NO: 2770302 - RNA, 15 nt, Human
aggccggccagccuc

SEQ ID NO: 2770303 - RNA, 16 nt, Human
aggccggccagccuca

SEQ ID NO: 2770304 - RNA, 19 nt, Human
aggccggcgagcccugugg

SEQ ID NO: 2770305 - RNA, 14 nt, Human
aggcauguccugga

SEQ ID NO: 2770306 - RNA, 21 nt, Human
aggccaggaguuugagaccag

SEQ ID NO: 2770307 - RNA, 11 nt, Human
aggccaggagu

SEQ ID NO: 2770308 - RNA, 15 nt, Human
aggccaggccagcug

SEQ ID NO: 2770309 - RNA, 13 nt, Human
aggccaggccagc

SEQ ID NO: 2770310 - RNA, 16 nt, Human
aggccauaaaacaggu

SEQ ID NO: 2770311 - RNA, 21 nt, Human
aggccaucaucaguggagcca

SEQ ID NO: 2770312 - RNA, 14 nt, Human
aggccaggugcagu

SEQ ID NO: 2770313 - RNA, 13 nt, Human
aggccaugaaaaa

SEQ ID NO: 2770314 - RNA, 19 nt, Human
aggccaugaaaaaaaugau

SEQ ID NO: 2770315 - RNA, 15 nt, Human
aggccauggcagaau

SEQ ID NO: 2770316 - RNA, 17 nt, Human
aggccauggagagcugg

SEQ ID NO: 2770317 - RNA, 18 nt, Human
aggccauggagagcugga

SEQ ID NO: 2770318 - RNA, 21 nt, Human
aggccauggagagcuggagcc

SEQ ID NO: 2770319 - RNA, 22 nt, Human
aggccauggagagcuggagccu

SEQ ID NO: 2770320 - RNA, 16 nt, Human
aggccauggagagcug

SEQ ID NO: 2770321 - RNA, 12 nt, Human
aggcauguucuc

SEQ ID NO: 2770322 - RNA, 19 nt, Human
aggcauguucucugaggac

SEQ ID NO: 2770323 - RNA, 18 nt, Human
aggcauguucucugagga

SEQ ID NO: 2770324 - RNA, 17 nt, Human
aggcauguucucugagg

SEQ ID NO: 2770325 - RNA, 12 nt, Human
aggcauguccug

SEQ ID NO: 2770326 - RNA, 17 nt, Human
aggcauguaggacccug

SEQ ID NO: 2770327 - RNA, 19 nt, Human
aggcauguaggacccugca

SEQ ID NO: 2770328 - RNA, 12 nt, Human
aggcaugguggc

SEQ ID NO: 2770329 - RNA, 21 nt, Human
aggcaugggggguggggggag

SEQ ID NO: 2770330 - RNA, 19 nt, Human
aggcaugggugcaaggaaa

SEQ ID NO: 2770331 - RNA, 20 nt, Human
aggcaugggugcaaggaaaa

SEQ ID NO: 2770332 - RNA, 21 nt, Human
aggcaugggugcaaggaaaau

SEQ ID NO: 2770333 - RNA, 15 nt, Human
aggcauggcccuggg

SEQ ID NO: 2770334 - RNA, 14 nt, Human
aggcauggcccugg

SEQ ID NO: 2770335 - RNA, 16 nt, Human
aggcauggcccugggg

SEQ ID NO: 2770336 - RNA, 21 nt, Human
aggcauggcccugggguccca

SEQ ID NO: 2770337 - RNA, 23 nt, Human
aggcagaucugugccccaugccu

SEQ ID NO: 2770338 - RNA, 22 nt, Human
aggcagaucugugccccaugcc

SEQ ID NO: 2770339 - RNA, 13 nt, Human
aggcauggcccug

SEQ ID NO: 2770340 - RNA, 12 nt, Human
aggcauggcccu

SEQ ID NO: 2770341 - RNA, 16 nt, Human
aggcagcauguauagu

SEQ ID NO: 2770342 - RNA, 21 nt, Human
aggcagcauguauaguugcuu

SEQ ID NO: 2770343 - RNA, 13 nt, Human
aggcacuagccuu

SEQ ID NO: 2770344 - RNA, 15 nt, Human
aggcacuagccuuug

SEQ ID NO: 2770345 - RNA, 23 nt, Human
aggcacuagccuuuggcucugga

SEQ ID NO: 2770346 - RNA, 14 nt, Human
aggcacucuagauu

SEQ ID NO: 2770347 - RNA, 15 nt, Human
aggcacucuagauuc

SEQ ID NO: 2770348 - RNA, 16 nt, Human
aggcacucuguuauuu

SEQ ID NO: 2770349 - RNA, 17 nt, Human
aggcacucuagauucca

SEQ ID NO: 2770350 - RNA, 20 nt, Human
aggcacucuguuauuuagac

SEQ ID NO: 2770351 - RNA, 14 nt, Human
aggcacucuuaaau

SEQ ID NO: 2770352 - RNA, 22 nt, Human
aggcagacuucccugaauguau

SEQ ID NO: 2770353 - RNA, 19 nt, Human
aggcacucuguuauuuaga

SEQ ID NO: 2770354 - RNA, 9 nt, Human
aggcagaga

SEQ ID NO: 2770355 - RNA, 17 nt, Human
aggcacugaagugcuua

SEQ ID NO: 2770356 - RNA, 13 nt, Human
aggcagagaaagg

SEQ ID NO: 2770357 - RNA, 21 nt, Human
aggcagaucugugccccaugc

SEQ ID NO: 2770358 - RNA, 20 nt, Human
aggcagaucugugccccaug

SEQ ID NO: 2770359 - RNA, 16 nt, Human
aggcagaucugugccc

SEQ ID NO: 2770360 - RNA, 15 nt, Human
aggcagaucugugcc

SEQ ID NO: 2770361 - RNA, 14 nt, Human
aggcagagaaucau

SEQ ID NO: 2770362 - RNA, 22 nt, Human
aggcagagaaucauacuuagca

SEQ ID NO: 2770363 - RNA, 11 nt, Human
aggcagagagc

SEQ ID NO: 2770364 - RNA, 13 nt, Human
aggcagagagcgg

SEQ ID NO: 2770365 - RNA, 20 nt, Human
aggcagagagcggucucagg

SEQ ID NO: 2770366 - RNA, 21 nt, Human
aggagaggcaacauccaaaau

SEQ ID NO: 2770367 - RNA, 23 nt, Human
aggagaggaugagagcccagagg

SEQ ID NO: 2770368 - RNA, 20 nt, Human
aggagaggcaacauccaaaa

SEQ ID NO: 2770369 - RNA, 18 nt, Human
aggagaggaugagagccc

SEQ ID NO: 2770370 - RNA, 19 nt, Human
aggagaggaugagagccca

SEQ ID NO: 2770371 - RNA, 20 nt, Human
aggagaggaugagagcccag

SEQ ID NO: 2770372 - RNA, 21 nt, Human
aggagaggaugagagcccaga

SEQ ID NO: 2770373 - RNA, 12 nt, Human
aggaccugcccc

SEQ ID NO: 2770374 - RNA, 19 nt, Human
agaggaauccaugaagaau

SEQ ID NO: 2770375 - RNA, 14 nt, Human
agaggaauaagaau

SEQ ID NO: 2770376 - RNA, 17 nt, Human
agagggcucugugcuga

SEQ ID NO: 2770377 - RNA, 19 nt, Human
agagggcucugugcugaca

SEQ ID NO: 2770378 - RNA, 18 nt, Human
agaggggcuuucuggaga

SEQ ID NO: 2770379 - RNA, 16 nt, Human
agagggggacugcugc

SEQ ID NO: 2770380 - RNA, 22 nt, Human
agagggggacugcugcugccug

SEQ ID NO: 2770381 - RNA, 22 nt, Human
agaggacuuuucuuuguggcuu

SEQ ID NO: 2770382 - RNA, 21 nt, Human
agaggacuuuucuuuguggcu

SEQ ID NO: 2770383 - RNA, 14 nt, Human
agaggacuuuucuu

SEQ ID NO: 2770384 - RNA, 13 nt, Human
agaggaauuuaua

SEQ ID NO: 2770385 - RNA, 21 nt, Human
agaggaauccuggcagcccag

SEQ ID NO: 2770386 - RNA, 17 nt, Human
agaggaauccuggcagc

SEQ ID NO: 2770387 - RNA, 15 nt, Human
agaggaauccuggca

SEQ ID NO: 2770388 - RNA, 23 nt, Human
agaggacuuuucuuuguggcuuc

SEQ ID NO: 2770389 - RNA, 14 nt, Human
agaggagccuuuuu

SEQ ID NO: 2770390 - RNA, 23 nt, Human
agaggagccuuuuuaaaacacau

SEQ ID NO: 2770391 - RNA, 22 nt, Human
agaggagccuuuuuaaaacaca

SEQ ID NO: 2770392 - RNA, 23 nt, Human
agaggagggagcaucagugcccu

SEQ ID NO: 2770393 - RNA, 17 nt, Human
agaggagggaugcugcc

SEQ ID NO: 2770394 - RNA, 20 nt, Human
agaggaguacaggugaagca

SEQ ID NO: 2770395 - RNA, 16 nt, Human
agacucuguggggccu

SEQ ID NO: 2770396 - RNA, 16 nt, Human
agacugaggacaaagu

SEQ ID NO: 2770397 - RNA, 17 nt, Human
agacugaggacaaagug

SEQ ID NO: 2770398 - RNA, 19 nt, Human
agacugcugggacuggcca

SEQ ID NO: 2770399 - RNA, 22 nt, Human
agacugcugggacuggccaggu

SEQ ID NO: 2770400 - RNA, 20 nt, Human
agacugcugggacuggccag

SEQ ID NO: 2770401 - RNA, 19 nt, Human
agacugcuuccaauuuucu

SEQ ID NO: 2770402 - RNA, 13 nt, Human
agacucugucuca

SEQ ID NO: 2770403 - RNA, 18 nt, Human
agacucugucucaaaaaa

SEQ ID NO: 2770404 - RNA, 16 nt, Human
agagagaccacuuuuc

SEQ ID NO: 2770405 - RNA, 10 nt, Human
agagagagag

SEQ ID NO: 2770406 - RNA, 11 nt, Human
agagagagaga

SEQ ID NO: 2770407 - RNA, 12 nt, Human
agagagagagaa

SEQ ID NO: 2770408 - RNA, 14 nt, Human
agagagagagaaaa

SEQ ID NO: 2770409 - RNA, 14 nt, Human
agagagagagaaau

SEQ ID NO: 2770410 - RNA, 12 nt, Human
agagagagagag

SEQ ID NO: 2770411 - RNA, 15 nt, Human
agagagagagagaaa

SEQ ID NO: 2770412 - RNA, 10 nt, Human
agagagagaa

SEQ ID NO: 2770413 - RNA, 12 nt, Human
agagagagaaaa

SEQ ID NO: 2770414 - RNA, 13 nt, Human
agagagagaaaga

SEQ ID NO: 2770415 - RNA, 14 nt, Human
agagagagaaagag

SEQ ID NO: 2770416 - RNA, 21 nt, Human
agacuggaagcuaauuugcau

SEQ ID NO: 2770417 - RNA, 11 nt, Human
agacuggaagg

SEQ ID NO: 2770418 - RNA, 14 nt, Human
agacuggaaguuca

SEQ ID NO: 2770419 - RNA, 19 nt, Human
agacuggaaguucauaccu

SEQ ID NO: 2770420 - RNA, 21 nt, Human
agacuggaaguucauaccuaa

SEQ ID NO: 2770421 - RNA, 14 nt, Human
agacuggaaaaaau

SEQ ID NO: 2770422 - RNA, 16 nt, Human
agacuggaaaaaauga

SEQ ID NO: 2770423 - RNA, 17 nt, Human
agacuggaaaaaaugag

SEQ ID NO: 2770424 - RNA, 18 nt, Human
agacuggaaaaaaugagc

SEQ ID NO: 2770425 - RNA, 20 nt, Human
agacuggaagcuaauuugca

SEQ ID NO: 2770426 - RNA, 13 nt, Human
agagccagggucu

SEQ ID NO: 2770427 - RNA, 13 nt, Human
agagcccaccuug

SEQ ID NO: 2770428 - RNA, 19 nt, Human
agagccauauaaguuugaa

SEQ ID NO: 2770429 - RNA, 16 nt, Human
agagccaugcugggaa

SEQ ID NO: 2770430 - RNA, 20 nt, Human
agagccauauaaguuugaag

SEQ ID NO: 2770431 - RNA, 22 nt, Human
agagccauauaaguuugaagga

SEQ ID NO: 2770432 - RNA, 20 nt, Human
agagaggccuuuuggaaugu

SEQ ID NO: 2770433 - RNA, 14 nt, Human
agagaggccuuuug

SEQ ID NO: 2770434 - RNA, 17 nt, Human
agagagggagguaugga

SEQ ID NO: 2770435 - RNA, 15 nt, Human
agagagggcaggcau

SEQ ID NO: 2770436 - RNA, 20 nt, Human
agagagggccaugcaauuca

SEQ ID NO: 2770437 - RNA, 14 nt, Human
agagagggcaggca

SEQ ID NO: 2770438 - RNA, 17 nt, Human
agagccauuuugugaau

SEQ ID NO: 2770439 - RNA, 16 nt, Human
agagccgggaagcgau

SEQ ID NO: 2770440 - RNA, 13 nt, Human
agagccgggaagc

SEQ ID NO: 2770441 - RNA, 15 nt, Human
agagcccuucauuug

SEQ ID NO: 2770442 - RNA, 16 nt, Human
agagccauuuugugaa

SEQ ID NO: 2770443 - RNA, 18 nt, Human
agagccauguagaagcug

SEQ ID NO: 2770444 - RNA, 20 nt, Human
agagccauguagaagcugca

SEQ ID NO: 2770445 - RNA, 22 nt, Human
agagccgggcacauugagcugu

SEQ ID NO: 2770446 - RNA, 21 nt, Human
agagccucccaaggagaacaa

SEQ ID NO: 2770447 - RNA, 22 nt, Human
agagccucccaaggagaacaaa

SEQ ID NO: 2770448 - RNA, 23 nt, Human
agagccucccaaggagaacaaau

SEQ ID NO: 2770449 - RNA, 12 nt, Human
agaccagcucuu

SEQ ID NO: 2770450 - RNA, 15 nt, Human
agaccagccuggcca

SEQ ID NO: 2770451 - RNA, 19 nt, Human
agaccagccuggccaacau

SEQ ID NO: 2770452 - RNA, 22 nt, Human
agaccagccuggccaacauggc

SEQ ID NO: 2770453 - RNA, 22 nt, Human
agaccagccugggcaacaaagu

SEQ ID NO: 2770454 - RNA, 13 nt, Human
agaccagccuggc

SEQ ID NO: 2770455 - RNA, 14 nt, Human
agaccagccuggcc

SEQ ID NO: 2770456 - RNA, 12 nt, Human
agaccagccugg

SEQ ID NO: 2770457 - RNA, 13 nt, Human
agacccaccccac

SEQ ID NO: 2770458 - RNA, 16 nt, Human
agacccaccccaccug

SEQ ID NO: 2770459 - RNA, 17 nt, Human
agacccaccccaccugc

SEQ ID NO: 2770460 - RNA, 18 nt, Human
agacccaccccaccugca

SEQ ID NO: 2770461 - RNA, 19 nt, Human
agacccaccccaccugcag

SEQ ID NO: 2770462 - RNA, 20 nt, Human
agacccaccccaccugcagg

SEQ ID NO: 2770463 - RNA, 21 nt, Human
agacccaccccaccugcaggg

SEQ ID NO: 2770464 - RNA, 11 nt, Human
agacccaggac

SEQ ID NO: 2770465 - RNA, 17 nt, Human
agacgauuugucaguua

SEQ ID NO: 2770466 - RNA, 14 nt, Human
agacgcauuucggu

SEQ ID NO: 2770467 - RNA, 15 nt, Human
agacgccugagcuca

SEQ ID NO: 2770468 - RNA, 20 nt, Human
agacgccggggacagaggcc

SEQ ID NO: 2770469 - RNA, 22 nt, Human
agacgccggggacagaggccug

SEQ ID NO: 2770470 - RNA, 14 nt, Human
agacagcaggcagc

SEQ ID NO: 2770471 - RNA, 18 nt, Human
agacagcaggcagcgcca

SEQ ID NO: 2770472 - RNA, 19 nt, Human
agacagaugccccagagcu

SEQ ID NO: 2770473 - RNA, 16 nt, Human
agacagaugccccaga

SEQ ID NO: 2770474 - RNA, 15 nt, Human
agacagaugccccag

SEQ ID NO: 2770475 - RNA, 14 nt, Human
agacagaugcccca

SEQ ID NO: 2770476 - RNA, 21 nt, Human
agacagagucucacuguugcc

SEQ ID NO: 2770477 - RNA, 17 nt, Human
agacagagggucacagu

SEQ ID NO: 2770478 - RNA, 19 nt, Human
agacagagggucacagugu

SEQ ID NO: 2770479 - RNA, 18 nt, Human
agacaaauucauauucuu

SEQ ID NO: 2770480 - RNA, 20 nt, Human
agacagagucucacuguugc

SEQ ID NO: 2770481 - RNA, 19 nt, Human
agacagagucucacuguug

SEQ ID NO: 2770482 - RNA, 11 nt, Human
agacagagucu

SEQ ID NO: 2770483 - RNA, 12 nt, Human
agacaaauauuu

SEQ ID NO: 2770484 - RNA, 15 nt, Human
agacaaauauuugga

SEQ ID NO: 2770485 - RNA, 16 nt, Human
agacaaaucaaagcag

SEQ ID NO: 2770486 - RNA, 17 nt, Human
agacaaaucaacagaag

SEQ ID NO: 2770487 - RNA, 18 nt, Human
agacaaaucaacagaagc

SEQ ID NO: 2770488 - RNA, 21 nt, Human
agacaaaucaacagaagcauu

SEQ ID NO: 2770489 - RNA, 16 nt, Human
agacaaauauuuggag

SEQ ID NO: 2770490 - RNA, 18 nt, Human
agacaaacuguaaaaaau

SEQ ID NO: 2770491 - RNA, 21 nt, Human
agacaaacuguaaaaaaugug

SEQ ID NO: 2770492 - RNA, 19 nt, Human
agacaaacaccucccagga

SEQ ID NO: 2770493 - RNA, 18 nt, Human
agacaaagguuuuccucu

SEQ ID NO: 2770494 - RNA, 14 nt, Human
agacaaaauguuuu

SEQ ID NO: 2770495 - RNA, 13 nt, Human
agacaaaauuuua

SEQ ID NO: 2770496 - RNA, 20 nt, Human
agacaaaauuuuaguccaaa

SEQ ID NO: 2770497 - RNA, 22 nt, Human
agaaugacggaauaagagaccu

SEQ ID NO: 2770498 - RNA, 16 nt, Human
agaaugagcacccauu

SEQ ID NO: 2770499 - RNA, 13 nt, Human
agaagucaugaag

SEQ ID NO: 2770500 - RNA, 14 nt, Human
agaagucaaaguaa

SEQ ID NO: 2770501 - RNA, 18 nt, Human
agaaugaaagggcccaga

SEQ ID NO: 2770502 - RNA, 16 nt, Human
agaagucuuucaagaa

SEQ ID NO: 2770503 - RNA, 19 nt, Human
agaagucuuucaagaauga

SEQ ID NO: 2770504 - RNA, 21 nt, Human
agaauggcgccaccagcucug

SEQ ID NO: 2770505 - RNA, 17 nt, Human
agaaugggaauauuuua

SEQ ID NO: 2770506 - RNA, 22 nt, Human
agaauggcccaguccucuccca

SEQ ID NO: 2770507 - RNA, 16 nt, Human
agaaugauuuuuagau

SEQ ID NO: 2770508 - RNA, 14 nt, Human
agaaugauuucaug

SEQ ID NO: 2770509 - RNA, 13 nt, Human
agaaugauuucau

SEQ ID NO: 2770510 - RNA, 22 nt, Human
agaaugcugcaggacuugagaa

SEQ ID NO: 2770511 - RNA, 13 nt, Human
agaaugcuguaca

SEQ ID NO: 2770512 - RNA, 15 nt, Human
agaaugcuguacauc

SEQ ID NO: 2770513 - RNA, 14 nt, Human
agaaugcuguacau

SEQ ID NO: 2770514 - RNA, 20 nt, Human
agaaugcuguacaucuauuu

SEQ ID NO: 2770515 - RNA, 13 nt, Human
agaauggaaaaga

SEQ ID NO: 2770516 - RNA, 23 nt, Human
agaauggaaaccacaacuuuuaa

SEQ ID NO: 2770517 - RNA, 14 nt, Human
agaauggagaggaa

SEQ ID NO: 2770518 - RNA, 15 nt, Human
agaauggagaggaac

SEQ ID NO: 2770519 - RNA, 18 nt, Human
agaauggauaaaauaaug

SEQ ID NO: 2770520 - RNA, 23 nt, Human
agaauggauaaaauaaugcugca

SEQ ID NO: 2770521 - RNA, 22 nt, Human
agaagagaggagaggagagagg

SEQ ID NO: 2770522 - RNA, 15 nt, Human
agaagagaggggaag

SEQ ID NO: 2770523 - RNA, 15 nt, Human
agaagagaggagagg

SEQ ID NO: 2770524 - RNA, 16 nt, Human
agaagagaggagagga

SEQ ID NO: 2770525 - RNA, 20 nt, Human
agaagagaggagaggagaga

SEQ ID NO: 2770526 - RNA, 21 nt, Human
agaagagaggagaggagagag

SEQ ID NO: 2770527 - RNA, 15 nt, Human
agaagagagaaauag

SEQ ID NO: 2770528 - RNA, 13 nt, Human
agaagagaggaga

SEQ ID NO: 2770529 - RNA, 18 nt, Human
agaagagacucuuugcau

SEQ ID NO: 2770530 - RNA, 21 nt, Human
agaagaccacaaaaauugacu

SEQ ID NO: 2770531 - RNA, 21 nt, Human
agaagacacugaugggcaacc

SEQ ID NO: 2770532 - RNA, 23 nt, Human
agaagacaccagagcagaugcag

SEQ ID NO: 2770533 - RNA, 13 nt, Human
agaagacacugau

SEQ ID NO: 2770534 - RNA, 14 nt, Human
agaagacaccagag

SEQ ID NO: 2770535 - RNA, 15 nt, Human
agaagacaccagagc

SEQ ID NO: 2770536 - RNA, 16 nt, Human
agaagacaccagagca

SEQ ID NO: 2770537 - RNA, 17 nt, Human
agaagacaccagagcag

SEQ ID NO: 2770538 - RNA, 18 nt, Human
agaagacaccagagcaga

SEQ ID NO: 2770539 - RNA, 19 nt, Human
agaagacaccagagcagau

SEQ ID NO: 2770540 - RNA, 22 nt, Human
agaagacaccagagcagaugca

SEQ ID NO: 2770541 - RNA, 21 nt, Human
acuuuccucuuagucgagcca

SEQ ID NO: 2770542 - RNA, 19 nt, Human
acuuuccuccugaggcuuu

SEQ ID NO: 2770543 - RNA, 11 nt, Human
acuuucccuug

SEQ ID NO: 2770544 - RNA, 13 nt, Human
acuuucccuugcu

SEQ ID NO: 2770545 - RNA, 14 nt, Human
acuuucccuugcuu

SEQ ID NO: 2770546 - RNA, 17 nt, Human
acuuucccuugcuuuuc

SEQ ID NO: 2770547 - RNA, 22 nt, Human
acuuucccuugcuuuucccucu

SEQ ID NO: 2770548 - RNA, 23 nt, Human
acuuucccuugcuuuucccucuu

SEQ ID NO: 2770549 - RNA, 16 nt, Human
acuuucccagguucug

SEQ ID NO: 2770550 - RNA, 21 nt, Human
acuuucccagguucuguuuau

SEQ ID NO: 2770551 - RNA, 17 nt, Human
agaagguugacacaguu

SEQ ID NO: 2770552 - RNA, 20 nt, Human
agaagguugcucuagauuga

SEQ ID NO: 2770553 - RNA, 16 nt, Human
agaagguugcucuaga

SEQ ID NO: 2770554 - RNA, 18 nt, Human
agaagguuucagaaagaa

SEQ ID NO: 2770555 - RNA, 19 nt, Human
agaaguagauuaagagcca

SEQ ID NO: 2770556 - RNA, 13 nt, Human
agaaguagauuaa

SEQ ID NO: 2770557 - RNA, 20 nt, Human
agaaguagauuaagagccau

SEQ ID NO: 2770558 - RNA, 16 nt, Human
agaaguagccacagua

SEQ ID NO: 2770559 - RNA, 15 nt, Human
agaaggugccacuuu

SEQ ID NO: 2770560 - RNA, 22 nt, Human
agaagguggguuuucaucaaga

SEQ ID NO: 2770561 - RNA, 21 nt, Human
agaaggugccucaagaauuuc

SEQ ID NO: 2770562 - RNA, 15 nt, Human
agaagguggaccuuu

SEQ ID NO: 2770563 - RNA, 18 nt, Human
agaagguggaccuuuuaa

SEQ ID NO: 2770564 - RNA, 21 nt, Human
agaagguggaccuuuuaaagu

SEQ ID NO: 2770565 - RNA, 22 nt, Human
agaagguggaccuuuuaaagug

SEQ ID NO: 2770566 - RNA, 24 nt, Human
agaagguggaccuuuuaaaguguu

SEQ ID NO: 2770567 - RNA, 20 nt, Human
agaaggguuuuccacccugg

SEQ ID NO: 2770568 - RNA, 22 nt, Human
agaaggguuuuccacccuggaa

SEQ ID NO: 2770569 - RNA, 21 nt, Human
agaaggguuuuccacccugga

SEQ ID NO: 2770570 - RNA, 23 nt, Human
agaaggguuuuccacccuggaau

SEQ ID NO: 2770571 - RNA, 16 nt, Human
agaagaguugaggaac

SEQ ID NO: 2770572 - RNA, 22 nt, Human
agaagaguugaggaacuguaca

SEQ ID NO: 2770573 - RNA, 23 nt, Human
agaagaguugaggaacuguacag

SEQ ID NO: 2770574 - RNA, 19 nt, Human
agaagaguugugcacgcag

SEQ ID NO: 2770575 - RNA, 13 nt, Human
agaagauaauugu

SEQ ID NO: 2770576 - RNA, 14 nt, Human
agaagauaauuguu

SEQ ID NO: 2770577 - RNA, 17 nt, Human
agaagauaauuguugaa

SEQ ID NO: 2770578 - RNA, 22 nt, Human
agaagauaauuguugaaauuuu

SEQ ID NO: 2770579 - RNA, 21 nt, Human
agaaggggcgggaauauuguu

SEQ ID NO: 2770580 - RNA, 24 nt, Human
agaaggggcgggaauauuguuucu

SEQ ID NO: 2770581 - RNA, 15 nt, Human
agaagaggguguguu

SEQ ID NO: 2770582 - RNA, 17 nt, Human
agaagaggguguguuug

SEQ ID NO: 2770583 - RNA, 14 nt, Human
agaugguugccaag

SEQ ID NO: 2770584 - RNA, 17 nt, Human
agaugguuuccacauuu

SEQ ID NO: 2770585 - RNA, 17 nt, Human
agauguaaaagguauua

SEQ ID NO: 2770586 - RNA, 21 nt, Human
agauucucuggcuguaaggcu

SEQ ID NO: 2770587 - RNA, 23 nt, Human
agauucucuggcuguaaggcucu

SEQ ID NO: 2770588 - RNA, 16 nt, Human
agauucucugugucua

SEQ ID NO: 2770589 - RNA, 17 nt, Human
agauucucugugucuaa

SEQ ID NO: 2770590 - RNA, 21 nt, Human
agauucugauuugccacugau

SEQ ID NO: 2770591 - RNA, 24 nt, Human
agauucugauuugccacugauauu

SEQ ID NO: 2770592 - RNA, 14 nt, Human
agauucugauuuua

SEQ ID NO: 2770593 - RNA, 19 nt, Human
agauucucugugucuaaga

SEQ ID NO: 2770594 - RNA, 20 nt, Human
agauucucugugucuaagau

SEQ ID NO: 2770595 - RNA, 22 nt, Human
agauucucugugucuaagauuc

SEQ ID NO: 2770596 - RNA, 23 nt, Human
agauucucugugucuaagauucu

SEQ ID NO: 2770597 - RNA, 21 nt, Human
agauucuggacagucagcucu

SEQ ID NO: 2770598 - RNA, 19 nt, Human
agauucugugaucuuuuaa

SEQ ID NO: 2770599 - RNA, 21 nt, Human
agauucugugaucuuuuaaag

SEQ ID NO: 2770600 - RNA, 22 nt, Human
agauucugugaucuuuuaaagu

SEQ ID NO: 2770601 - RNA, 19 nt, Human
agaugaaguuuuacauugu

SEQ ID NO: 2770602 - RNA, 14 nt, Human
agaugaaguuuuau

SEQ ID NO: 2770603 - RNA, 11 nt, Human
agaugaauaaa

SEQ ID NO: 2770604 - RNA, 13 nt, Human
agaugauccauga

SEQ ID NO: 2770605 - RNA, 22 nt, Human
agaugaucaguggacagucugc

SEQ ID NO: 2770606 - RNA, 17 nt, Human
agaugaguuaucuaaga

SEQ ID NO: 2770607 - RNA, 20 nt, Human
agaugaguuaucuaagaaua

SEQ ID NO: 2770608 - RNA, 22 nt, Human
agaugaguuaucuaagaauaca

SEQ ID NO: 2770609 - RNA, 15 nt, Human
agauggugaaauuua

SEQ ID NO: 2770610 - RNA, 20 nt, Human
agauggugaagcauucuccc

SEQ ID NO: 2770611 - RNA, 22 nt, Human
agauggugaagcauucucccca

SEQ ID NO: 2770612 - RNA, 14 nt, Human
agaugguggcagua

SEQ ID NO: 2770613 - RNA, 12 nt, Human
agauggugggau

SEQ ID NO: 2770614 - RNA, 19 nt, Human
agauggucacgcaccuggg

SEQ ID NO: 2770615 - RNA, 21 nt, Human
agauggucacgcaccugggug

SEQ ID NO: 2770616 - RNA, 14 nt, Human
agaugaugagaauu

SEQ ID NO: 2770617 - RNA, 18 nt, Human
agaugaugagaauuucua

SEQ ID NO: 2770618 - RNA, 20 nt, Human
agaugaugagaauuucuaaa

SEQ ID NO: 2770619 - RNA, 22 nt, Human
agaugguacaaccuuuauucuu

SEQ ID NO: 2770620 - RNA, 22 nt, Human
agauggguggaucacuugaggu

SEQ ID NO: 2770621 - RNA, 22 nt, Human
agaugaaguuuguaguuguuuu

SEQ ID NO: 2770622 - RNA, 15 nt, Human
agaugaaguuuuaca

SEQ ID NO: 2770623 - RNA, 16 nt, Human
agaugaaggagaggca

SEQ ID NO: 2770624 - RNA, 19 nt, Human
agaugaacucuuagaaaug

SEQ ID NO: 2770625 - RNA, 19 nt, Human
agaugaacucugaacuuug

SEQ ID NO: 2770626 - RNA, 21 nt, Human
agaugaacucugaacuuugga

SEQ ID NO: 2770627 - RNA, 22 nt, Human
agaugaacucugaacuuuggag

SEQ ID NO: 2770628 - RNA, 18 nt, Human
agaucuguaauuuuuauu

SEQ ID NO: 2770629 - RNA, 17 nt, Human
agagugauaauacaagu

SEQ ID NO: 2770630 - RNA, 15 nt, Human
agagugauugcagcu

SEQ ID NO: 2770631 - RNA, 16 nt, Human
agagugauugcagcuu

SEQ ID NO: 2770632 - RNA, 18 nt, Human
agagugauugcagcuuua

SEQ ID NO: 2770633 - RNA, 21 nt, Human
agagugcaagccccugcucca

SEQ ID NO: 2770634 - RNA, 14 nt, Human
agagugcacagcug

SEQ ID NO: 2770635 - RNA, 15 nt, Human
agagugcacagcugu

SEQ ID NO: 2770636 - RNA, 16 nt, Human
agagugcacagcuguc

SEQ ID NO: 2770637 - RNA, 18 nt, Human
agagugcauugugagggu

SEQ ID NO: 2770638 - RNA, 11 nt, Human
agaguggccug

SEQ ID NO: 2770639 - RNA, 13 nt, Human
agcaaacagagga

SEQ ID NO: 2770640 - RNA, 13 nt, Human
agcaaaccaagag

SEQ ID NO: 2770641 - RNA, 14 nt, Human
agcaaaccaagaga

SEQ ID NO: 2770642 - RNA, 15 nt, Human
agcaaaccaagagau

SEQ ID NO: 2770643 - RNA, 17 nt, Human
agcaaaccaagagauug

SEQ ID NO: 2770644 - RNA, 19 nt, Human
agcaaaccaagagauugcu

SEQ ID NO: 2770645 - RNA, 21 nt, Human
agcaaaccaagagauugcuaa

SEQ ID NO: 2770646 - RNA, 22 nt, Human
agcaaaccaagagauugcuaau

SEQ ID NO: 2770647 - RNA, 17 nt, Human
agcaaaccauuuuuaaa

SEQ ID NO: 2770648 - RNA, 23 nt, Human
agcaaaccauuuuuaaaguagaa

SEQ ID NO: 2770649 - RNA, 21 nt, Human
agcaaaauaauuuuaaacaaa

SEQ ID NO: 2770650 - RNA, 15 nt, Human
agcaaaauaaaaacu

SEQ ID NO: 2770651 - RNA, 16 nt, Human
agcaaaauaaaaacua

SEQ ID NO: 2770652 - RNA, 17 nt, Human
agcaaaauaaaaacuau

SEQ ID NO: 2770653 - RNA, 19 nt, Human
agauugaaguaaacugcag

SEQ ID NO: 2770654 - RNA, 22 nt, Human
agauugaauauuuaucuagaga

SEQ ID NO: 2770655 - RNA, 21 nt, Human
agauugcaacaggcugggcuu

SEQ ID NO: 2770656 - RNA, 20 nt, Human
agauugcaacaggcugggcu

SEQ ID NO: 2770657 - RNA, 23 nt, Human
agauugcaacaggcugggcuuca

SEQ ID NO: 2770658 - RNA, 13 nt, Human
agcaaaacuuuua

SEQ ID NO: 2770659 - RNA, 14 nt, Human
agcaaaacuuuuaa

SEQ ID NO: 2770660 - RNA, 16 nt, Human
agcaaaacuuuuaaac

SEQ ID NO: 2770661 - RNA, 12 nt, Human
agcaaaagaaaa

SEQ ID NO: 2770662 - RNA, 13 nt, Human
agcaaaagaaaaa

SEQ ID NO: 2770663 - RNA, 14 nt, Human
agcaaaagaaaaag

SEQ ID NO: 2770664 - RNA, 13 nt, Human
agauucuucugug

SEQ ID NO: 2770665 - RNA, 16 nt, Human
agauucuucuguguuu

SEQ ID NO: 2770666 - RNA, 13 nt, Human
agauucuuuuucu

SEQ ID NO: 2770667 - RNA, 15 nt, Human
agauucuuuuucuga

SEQ ID NO: 2770668 - RNA, 19 nt, Human
agauugaaaacuuuucuca

SEQ ID NO: 2770669 - RNA, 20 nt, Human
agauugaaaacuuuucucag

SEQ ID NO: 2770670 - RNA, 14 nt, Human
agauugaaaaucuu

SEQ ID NO: 2770671 - RNA, 18 nt, Human
agauugaaaaucuugugu

SEQ ID NO: 2770672 - RNA, 21 nt, Human
agcaaagcugaugacaacuuc

SEQ ID NO: 2770673 - RNA, 23 nt, Human
agcaaagcugaugacaacuuccc

SEQ ID NO: 2770674 - RNA, 16 nt, Human
agcaaauguggcuccu

SEQ ID NO: 2770675 - RNA, 20 nt, Human
agcaaaugucuuccuggauu

SEQ ID NO: 2770676 - RNA, 17 nt, Human
agcaaaugucuuccugg

SEQ ID NO: 2770677 - RNA, 20 nt, Human
agcaaaaucaagcaagccuc

SEQ ID NO: 2770678 - RNA, 20 nt, Human
agcagccucagaacaaagug

SEQ ID NO: 2770679 - RNA, 20 nt, Human
agcagccgccuuaagcugau

SEQ ID NO: 2770680 - RNA, 21 nt, Human
agcagccgccuuaagcugauc

SEQ ID NO: 2770681 - RNA, 19 nt, Human
agcagccugagcaacucuu

SEQ ID NO: 2770682 - RNA, 15 nt, Human
agcagcuucaccaga

SEQ ID NO: 2770683 - RNA, 13 nt, Human
agcagccugagca

SEQ ID NO: 2770684 - RNA, 16 nt, Human
agcagcuucaccagag

SEQ ID NO: 2770685 - RNA, 18 nt, Human
agcagcuucaccagagca

SEQ ID NO: 2770686 - RNA, 16 nt, Human
agcagcuuuaaacaaa

SEQ ID NO: 2770687 - RNA, 17 nt, Human
agcagcuuuaaacaaau

SEQ ID NO: 2770688 - RNA, 19 nt, Human
agcagcuuuaaacucaggg

SEQ ID NO: 2770689 - RNA, 20 nt, Human
agcagcuuuaaacucaggga

SEQ ID NO: 2770690 - RNA, 15 nt, Human
agcacuuauuuaaug

SEQ ID NO: 2770691 - RNA, 19 nt, Human
agcacuucaucuggcugcc

SEQ ID NO: 2770692 - RNA, 23 nt, Human
agcacuucaucuggcugccuuug

SEQ ID NO: 2770693 - RNA, 12 nt, Human
agcacuuccaaa

SEQ ID NO: 2770694 - RNA, 16 nt, Human
agcacuuccaaaauuc

SEQ ID NO: 2770695 - RNA, 18 nt, Human
agcacuuccaaaauucuu

SEQ ID NO: 2770696 - RNA, 19 nt, Human
agcacuuccaaaauucuua

SEQ ID NO: 2770697 - RNA, 17 nt, Human
agcacggacucuuacug

SEQ ID NO: 2770698 - RNA, 13 nt, Human
agcacggacaaua

SEQ ID NO: 2770699 - RNA, 14 nt, Human
agcacggacaauaa

SEQ ID NO: 2770700 - RNA, 15 nt, Human
agcacggacaauaaa

SEQ ID NO: 2770701 - RNA, 17 nt, Human
agcacggacaauaaacc

SEQ ID NO: 2770702 - RNA, 21 nt, Human
agcacggacaauaaaccuccg

SEQ ID NO: 2770703 - RNA, 18 nt, Human
agcacgggacggaagugc

SEQ ID NO: 2770704 - RNA, 14 nt, Human
agcacuguuuuucc

SEQ ID NO: 2770705 - RNA, 16 nt, Human
agcacuguuuuuccau

SEQ ID NO: 2770706 - RNA, 21 nt, Human
agcacuguuuuuccauaguuu

SEQ ID NO: 2770707 - RNA, 23 nt, Human
agcacuguuuuuccauaguuuug

SEQ ID NO: 2770708 - RNA, 19 nt, Human
agcacaauuugcacuaaau

SEQ ID NO: 2770709 - RNA, 13 nt, Human
agcaauuaaaaau

SEQ ID NO: 2770710 - RNA, 19 nt, Human
agcaauucauaaaaacugc

SEQ ID NO: 2770711 - RNA, 15 nt, Human
agcacaaacacaagg

SEQ ID NO: 2770712 - RNA, 16 nt, Human
agcacaaacacaaggu

SEQ ID NO: 2770713 - RNA, 17 nt, Human
agcacaaacacaagguc

SEQ ID NO: 2770714 - RNA, 18 nt, Human
agcacaaacacaagguca

SEQ ID NO: 2770715 - RNA, 14 nt, Human
agcacaaacauuuu

SEQ ID NO: 2770716 - RNA, 15 nt, Human
agcacaaacauuuuu

SEQ ID NO: 2770717 - RNA, 15 nt, Human
agcacaaacuuuagg

SEQ ID NO: 2770718 - RNA, 23 nt, Human
agcacaagcagagugcacagcug

SEQ ID NO: 2770719 - RNA, 12 nt, Human
agcaaucuuuga

SEQ ID NO: 2770720 - RNA, 18 nt, Human
agcaaugacaucucaggg

SEQ ID NO: 2770721 - RNA, 19 nt, Human
agcaaugacaucucagggg

SEQ ID NO: 2770722 - RNA, 23 nt, Human
agcaauccucucaccucagccuc

SEQ ID NO: 2770723 - RNA, 21 nt, Human
agcaaugcugaugaaucacug

SEQ ID NO: 2770724 - RNA, 22 nt, Human
agcaaugcugaugaaucacugu

SEQ ID NO: 2770725 - RNA, 15 nt, Human
agcaaugcuguugga

SEQ ID NO: 2770726 - RNA, 23 nt, Human
agcaauggugucaguauccaggc

SEQ ID NO: 2770727 - RNA, 21 nt, Human
agcaaugcccguaaugcuuag

SEQ ID NO: 2770728 - RNA, 16 nt, Human
agcaauggauauuugu

SEQ ID NO: 2770729 - RNA, 20 nt, Human
agcaaugacaucucaggggc

SEQ ID NO: 2770730 - RNA, 21 nt, Human
agcaaugacaucucaggggcc

SEQ ID NO: 2770731 - RNA, 20 nt, Human
agcaaugcccguaaugcuua

SEQ ID NO: 2770732 - RNA, 17 nt, Human
agccaagcuuguuauca

SEQ ID NO: 2770733 - RNA, 21 nt, Human
agccaagcuuguuaucagcuu

SEQ ID NO: 2770734 - RNA, 16 nt, Human
agccaaagcuaggccu

SEQ ID NO: 2770735 - RNA, 12 nt, Human
agccaaagccaa

SEQ ID NO: 2770736 - RNA, 17 nt, Human
agcauccuggcacccgg

SEQ ID NO: 2770737 - RNA, 14 nt, Human
agcauccuggcacc

SEQ ID NO: 2770738 - RNA, 14 nt, Human
agccaaagaaauga

SEQ ID NO: 2770739 - RNA, 16 nt, Human
agccaaagaaaugaac

SEQ ID NO: 2770740 - RNA, 17 nt, Human
agccaaagaaaugaaca

SEQ ID NO: 2770741 - RNA, 18 nt, Human
agccaaagaaaugaacau

SEQ ID NO: 2770742 - RNA, 19 nt, Human
agccaaagaaaugaacauu

SEQ ID NO: 2770743 - RNA, 22 nt, Human
agccaaagaaaugaacauucca

SEQ ID NO: 2770744 - RNA, 15 nt, Human
agccaaacucugcca

SEQ ID NO: 2770745 - RNA, 14 nt, Human
agccaaacucugcc

SEQ ID NO: 2770746 - RNA, 16 nt, Human
agcccaauccagguac

SEQ ID NO: 2770747 - RNA, 21 nt, Human
agcccaauccagguacgcaca

SEQ ID NO: 2770748 - RNA, 22 nt, Human
agcccaauccagguacgcacag

SEQ ID NO: 2770749 - RNA, 12 nt, Human
agcccacagcac

SEQ ID NO: 2770750 - RNA, 23 nt, Human
agcccacagcacagcucccugcc

SEQ ID NO: 2770751 - RNA, 14 nt, Human
agcccaccuuggcu

SEQ ID NO: 2770752 - RNA, 16 nt, Human
agcccaccuuggcuca

SEQ ID NO: 2770753 - RNA, 20 nt, Human
agcccacggcuaagaggcug

SEQ ID NO: 2770754 - RNA, 21 nt, Human
agcccacggcuaagaggcugc

SEQ ID NO: 2770755 - RNA, 22 nt, Human
agcccacggcuaagaggcugcu

SEQ ID NO: 2770756 - RNA, 16 nt, Human
agcccacgucacgugu

SEQ ID NO: 2770757 - RNA, 23 nt, Human
agcccacgucacguguagugucc

SEQ ID NO: 2770758 - RNA, 23 nt, Human
agcccacauuggauucaucagca

SEQ ID NO: 2770759 - RNA, 14 nt, Human
agcccacucugcuc

SEQ ID NO: 2770760 - RNA, 13 nt, Human
agcccacucugcu

SEQ ID NO: 2770761 - RNA, 15 nt, Human
agcccacucugcucg

SEQ ID NO: 2770762 - RNA, 13 nt, Human
agcauccuggcac

SEQ ID NO: 2770763 - RNA, 21 nt, Human
agcaggaagcauucagagagc

SEQ ID NO: 2770764 - RNA, 22 nt, Human
agcagcuuuaaacucagggaca

SEQ ID NO: 2770765 - RNA, 19 nt, Human
agccccauucugccugccc

SEQ ID NO: 2770766 - RNA, 18 nt, Human
agccccauucugccugcc

SEQ ID NO: 2770767 - RNA, 17 nt, Human
agccccauucugccugc

SEQ ID NO: 2770768 - RNA, 20 nt, Human
agccccacccaggagggagg

SEQ ID NO: 2770769 - RNA, 12 nt, Human
agccccaucugu

SEQ ID NO: 2770770 - RNA, 13 nt, Human
agccccaucuguc

SEQ ID NO: 2770771 - RNA, 14 nt, Human
agccccaucugugc

SEQ ID NO: 2770772 - RNA, 15 nt, Human
agccccaucugugca

SEQ ID NO: 2770773 - RNA, 16 nt, Human
agccccaucugugcau

SEQ ID NO: 2770774 - RNA, 17 nt, Human
agccccaucugugcauu

SEQ ID NO: 2770775 - RNA, 23 nt, Human
agccccaucugugcauucuccug

SEQ ID NO: 2770776 - RNA, 14 nt, Human
agccccaucuucac

SEQ ID NO: 2770777 - RNA, 16 nt, Human
agccccacccaggagg

SEQ ID NO: 2770778 - RNA, 15 nt, Human
agccccacccaggag

SEQ ID NO: 2770779 - RNA, 13 nt, Human
agccccacccagg

SEQ ID NO: 2770780 - RNA, 12 nt, Human
agccccacccag

SEQ ID NO: 2770781 - RNA, 11 nt, Human
agcccucccca

SEQ ID NO: 2770782 - RNA, 15 nt, Human
agcccuccccaggaa

SEQ ID NO: 2770783 - RNA, 23 nt, Human
agcccuccaucuaaacugccccc

SEQ ID NO: 2770784 - RNA, 21 nt, Human
agcccuccaucuaaacugccc

SEQ ID NO: 2770785 - RNA, 12 nt, Human
agcccuccccau

SEQ ID NO: 2770786 - RNA, 19 nt, Human
agcccuccccauggagcca

SEQ ID NO: 2770787 - RNA, 20 nt, Human
agcccuccccauggagccag

SEQ ID NO: 2770788 - RNA, 21 nt, Human
agcccuccccauggagccagc

SEQ ID NO: 2770789 - RNA, 12 nt, Human
agcccucccugc

SEQ ID NO: 2770790 - RNA, 13 nt, Human
agcccucccugcc

SEQ ID NO: 2770791 - RNA, 12 nt, Human
agccccacacag

SEQ ID NO: 2770792 - RNA, 14 nt, Human
agccccacacagcu

SEQ ID NO: 2770793 - RNA, 21 nt, Human
aagguucucuccuccccaagg

SEQ ID NO: 2770794 - RNA, 17 nt, Human
aaguagacaaucauugu

SEQ ID NO: 2770795 - RNA, 18 nt, Human
aaguagacaaucauuguu

SEQ ID NO: 2770796 - RNA, 19 nt, Human
aaguagacaaucauuguuu

SEQ ID NO: 2770797 - RNA, 21 nt, Human
aaguagacaaucauuguuuug

SEQ ID NO: 2770798 - RNA, 18 nt, Human
aaguagacaguuuugaga

SEQ ID NO: 2770799 - RNA, 19 nt, Human
aaguagacaguuuugagaa

SEQ ID NO: 2770800 - RNA, 21 nt, Human
aaguagacaguuuugagaacg

SEQ ID NO: 2770801 - RNA, 15 nt, Human
aaguagcugggauuu

SEQ ID NO: 2770802 - RNA, 19 nt, Human
aaguagcugggauuuuaaa

SEQ ID NO: 2770803 - RNA, 14 nt, Human
aagggcaaaucugc

SEQ ID NO: 2770804 - RNA, 20 nt, Human
aaguagagguuguauacacc

SEQ ID NO: 2770805 - RNA, 22 nt, Human
aagguuauaguaacaucaaaga

SEQ ID NO: 2770806 - RNA, 22 nt, Human
aagguguucauucacuugcauu

SEQ ID NO: 2770807 - RNA, 17 nt, Human
aagguucacuaaagcag

SEQ ID NO: 2770808 - RNA, 22 nt, Human
aagguuccaaucagaucuuuau

SEQ ID NO: 2770809 - RNA, 15 nt, Human
aagguuccacagagu

SEQ ID NO: 2770810 - RNA, 21 nt, Human
aagguuccacagaguaagaca

SEQ ID NO: 2770811 - RNA, 18 nt, Human
aagguuccaacuguauau

SEQ ID NO: 2770812 - RNA, 19 nt, Human
aagguuccaacuguauaua

SEQ ID NO: 2770813 - RNA, 15 nt, Human
aagguucccuugugg

SEQ ID NO: 2770814 - RNA, 21 nt, Human
aagguuccaacuguauauauu

SEQ ID NO: 2770815 - RNA, 11 nt, Human
aagguucuaag

SEQ ID NO: 2770816 - RNA, 13 nt, Human
aagguucuaaggc

SEQ ID NO: 2770817 - RNA, 14 nt, Human
aagguucuaaggcc

SEQ ID NO: 2770818 - RNA, 12 nt, Human
aagguucuaggu

SEQ ID NO: 2770819 - RNA, 13 nt, Human
aagguucuagguu

SEQ ID NO: 2770820 - RNA, 13 nt, Human
aaggucuuugguu

SEQ ID NO: 2770821 - RNA, 19 nt, Human
aaggucuuugguucagcua

SEQ ID NO: 2770822 - RNA, 21 nt, Human
aagggcaugagcauuggauac

SEQ ID NO: 2770823 - RNA, 13 nt, Human
aagggcaugccuu

SEQ ID NO: 2770824 - RNA, 14 nt, Human
aagggcaugccuug

SEQ ID NO: 2770825 - RNA, 15 nt, Human
aagggcaugccuugu

SEQ ID NO: 2770826 - RNA, 16 nt, Human
aagggcaugccuugug

SEQ ID NO: 2770827 - RNA, 13 nt, Human
aaggucugagcca

SEQ ID NO: 2770828 - RNA, 14 nt, Human
aaggucugagccac

SEQ ID NO: 2770829 - RNA, 19 nt, Human
aaggucugagccacagcag

SEQ ID NO: 2770830 - RNA, 16 nt, Human
aagguggggacaggga

SEQ ID NO: 2770831 - RNA, 19 nt, Human
aaggugggcugagcccugg

SEQ ID NO: 2770832 - RNA, 21 nt, Human
aaggugggcugagcccuggca

SEQ ID NO: 2770833 - RNA, 20 nt, Human
aaggugggcugagcccuggc

SEQ ID NO: 2770834 - RNA, 20 nt, Human
aaggugacagaaggaccagc

SEQ ID NO: 2770835 - RNA, 20 nt, Human
aagguggugggggugcagau

SEQ ID NO: 2770836 - RNA, 16 nt, Human
aagguggugugaucuu

SEQ ID NO: 2770837 - RNA, 12 nt, Human
aagguguauuua

SEQ ID NO: 2770838 - RNA, 21 nt, Human
aagguguauuuaaacuaucuu

SEQ ID NO: 2770839 - RNA, 23 nt, Human
aagggauuuaguaacaucauuuu

SEQ ID NO: 2770840 - RNA, 15 nt, Human
aagggauuucuuagg

SEQ ID NO: 2770841 - RNA, 16 nt, Human
aagggauuucuuaggg

SEQ ID NO: 2770842 - RNA, 17 nt, Human
aagggauuuuagucaca

SEQ ID NO: 2770843 - RNA, 20 nt, Human
aagggauuuuagucacacgu

SEQ ID NO: 2770844 - RNA, 24 nt, Human
aagggauggaggucacacugguag

SEQ ID NO: 2770845 - RNA, 22 nt, Human
aagggauuuuagucacacgugg

SEQ ID NO: 2770846 - RNA, 22 nt, Human
aagggcaggaaggagagccugc

SEQ ID NO: 2770847 - RNA, 21 nt, Human
aagggcaggaaggagagccug

SEQ ID NO: 2770848 - RNA, 17 nt, Human
aagggcauaaaacagcu

SEQ ID NO: 2770849 - RNA, 15 nt, Human
aagggcagagucaca

SEQ ID NO: 2770850 - RNA, 20 nt, Human
aagggacuuggaagcuccgc

SEQ ID NO: 2770851 - RNA, 16 nt, Human
aagggaucaucaugca

SEQ ID NO: 2770852 - RNA, 15 nt, Human
aagccacuagacucu

SEQ ID NO: 2770853 - RNA, 17 nt, Human
aagccacuagacucuuc

SEQ ID NO: 2770854 - RNA, 19 nt, Human
aagccacucugucccuucc

SEQ ID NO: 2770855 - RNA, 15 nt, Human
aagcagguuagagaa

SEQ ID NO: 2770856 - RNA, 21 nt, Human
aagcagguuagagaaaauaga

SEQ ID NO: 2770857 - RNA, 14 nt, Human
aagccacugaagcu

SEQ ID NO: 2770858 - RNA, 13 nt, Human
aagccacugaagc

SEQ ID NO: 2770859 - RNA, 17 nt, Human
aagccacugaagcuggg

SEQ ID NO: 2770860 - RNA, 16 nt, Human
aagcgauucuucugcu

SEQ ID NO: 2770861 - RNA, 16 nt, Human
aagcgugagccacugc

SEQ ID NO: 2770862 - RNA, 14 nt, Human
aagcgauucuucug

SEQ ID NO: 2770863 - RNA, 15 nt, Human
aagcgauucuucugc

SEQ ID NO: 2770864 - RNA, 22 nt, Human
aaggacccggaggggccuggca

SEQ ID NO: 2770865 - RNA, 18 nt, Human
aaggacacagaugaaaca

SEQ ID NO: 2770866 - RNA, 22 nt, Human
aaggacacagaugaaacacaaa

SEQ ID NO: 2770867 - RNA, 19 nt, Human
aaggaccugaaauuccaaa

SEQ ID NO: 2770868 - RNA, 18 nt, Human
aaggaccugaaauuccaa

SEQ ID NO: 2770869 - RNA, 19 nt, Human
aaggaccguggcccugccc

SEQ ID NO: 2770870 - RNA, 21 nt, Human
aaggacccggaggggccuggc

SEQ ID NO: 2770871 - RNA, 23 nt, Human
aaggaccuccucuucccccuucc

SEQ ID NO: 2770872 - RNA, 17 nt, Human
aaggacggguuggggcc

SEQ ID NO: 2770873 - RNA, 13 nt, Human
aaggacuaggguc

SEQ ID NO: 2770874 - RNA, 12 nt, Human
aaggcaaaauug

SEQ ID NO: 2770875 - RNA, 15 nt, Human
aaggcaaaaauguaa

SEQ ID NO: 2770876 - RNA, 16 nt, Human
aaggcagcauguauag

SEQ ID NO: 2770877 - RNA, 21 nt, Human
aaggcagcauguauaguugcu

SEQ ID NO: 2770878 - RNA, 11 nt, Human
aaggcagccac

SEQ ID NO: 2770879 - RNA, 14 nt, Human
aaggcagccaccag

SEQ ID NO: 2770880 - RNA, 14 nt, Human
aaggcacugccuga

SEQ ID NO: 2770881 - RNA, 14 nt, Human
aaggcagacagcag

SEQ ID NO: 2770882 - RNA, 19 nt, Human
aaggcaaaauugcaaaucu

SEQ ID NO: 2770883 - RNA, 15 nt, Human
aaggcaaaauugcaa

SEQ ID NO: 2770884 - RNA, 14 nt, Human
aaggcaaaauugca

SEQ ID NO: 2770885 - RNA, 16 nt, Human
aaggcaaaugcccaag

SEQ ID NO: 2770886 - RNA, 17 nt, Human
aaggcaaaugcccaagg

SEQ ID NO: 2770887 - RNA, 14 nt, Human
aaggcacucuagau

SEQ ID NO: 2770888 - RNA, 15 nt, Human
aaggcacucuagauu

SEQ ID NO: 2770889 - RNA, 16 nt, Human
aaggcacucuagauuc

SEQ ID NO: 2770890 - RNA, 21 nt, Human
aaggcacucuguuauuuagac

SEQ ID NO: 2770891 - RNA, 19 nt, Human
aaggcacucuagauuccau

SEQ ID NO: 2770892 - RNA, 12 nt, Human
aaggcacugccu

SEQ ID NO: 2770893 - RNA, 13 nt, Human
aaggcacugccug

SEQ ID NO: 2770894 - RNA, 14 nt, Human
aaggaaucuuuaag

SEQ ID NO: 2770895 - RNA, 21 nt, Human
aaggaaucuuuaagcagagaa

SEQ ID NO: 2770896 - RNA, 20 nt, Human
aaggaauccacucccaggca

SEQ ID NO: 2770897 - RNA, 21 nt, Human
aaggaauccacucccaggcag

SEQ ID NO: 2770898 - RNA, 22 nt, Human
aaggaauccacucccaggcagc

SEQ ID NO: 2770899 - RNA, 23 nt, Human
aaggaauccacucccaggcagcc

SEQ ID NO: 2770900 - RNA, 16 nt, Human
aagcugcugacagugu

SEQ ID NO: 2770901 - RNA, 20 nt, Human
aagcugcccacuguuucucu

SEQ ID NO: 2770902 - RNA, 13 nt, Human
aagcugcugacca

SEQ ID NO: 2770903 - RNA, 21 nt, Human
aagcugcugaccaauugugcu

SEQ ID NO: 2770904 - RNA, 22 nt, Human
aagcugcugaccaauugugcug

SEQ ID NO: 2770905 - RNA, 18 nt, Human
aagcugcccacuguuucu

SEQ ID NO: 2770906 - RNA, 13 nt, Human
aagcugcagcuug

SEQ ID NO: 2770907 - RNA, 15 nt, Human
aagcugcccugccca

SEQ ID NO: 2770908 - RNA, 20 nt, Human
aagcugccgaaccaaaagaa

SEQ ID NO: 2770909 - RNA, 21 nt, Human
aagcugccgaaccaaaagaau

SEQ ID NO: 2770910 - RNA, 21 nt, Human
aagcugcuuuaaaaaaauaca

SEQ ID NO: 2770911 - RNA, 14 nt, Human
aagcugcugacagu

SEQ ID NO: 2770912 - RNA, 20 nt, Human
aagcgugagccacugcaccg

SEQ ID NO: 2770913 - RNA, 17 nt, Human
aagcgugagccacugca

SEQ ID NO: 2770914 - RNA, 21 nt, Human
aagcgugagccacugcaccgg

SEQ ID NO: 2770915 - RNA, 21 nt, Human
aagacagggcugauaagcuaa

SEQ ID NO: 2770916 - RNA, 22 nt, Human
aagacaggaugggggcuggccu

SEQ ID NO: 2770917 - RNA, 21 nt, Human
aagacauucuuccaaaaagau

SEQ ID NO: 2770918 - RNA, 16 nt, Human
aagacauguuguaaau

SEQ ID NO: 2770919 - RNA, 18 nt, Human
aagacauguuguaaauua

SEQ ID NO: 2770920 - RNA, 19 nt, Human
aagacauguuguaaauuag

SEQ ID NO: 2770921 - RNA, 18 nt, Human
aagacauugggucuauuc

SEQ ID NO: 2770922 - RNA, 22 nt, Human
aagacauugggucuauuccagc

SEQ ID NO: 2770923 - RNA, 23 nt, Human
aagacauugggucuauuccagcu

SEQ ID NO: 2770924 - RNA, 21 nt, Human
aagacauuaguaacauaauaa

SEQ ID NO: 2770925 - RNA, 16 nt, Human
aacuguuaugaaauaa

SEQ ID NO: 2770926 - RNA, 13 nt, Human
aacuguuuauaug

SEQ ID NO: 2770927 - RNA, 16 nt, Human
aacuguuuauaugugu

SEQ ID NO: 2770928 - RNA, 18 nt, Human
aacuguuuauauguguug

SEQ ID NO: 2770929 - RNA, 19 nt, Human
aacuguuuauauguguuga

SEQ ID NO: 2770930 - RNA, 22 nt, Human
aacuguuuauauguguugaaaa

SEQ ID NO: 2770931 - RNA, 22 nt, Human
aagacagcuucucauccugcag

SEQ ID NO: 2770932 - RNA, 18 nt, Human
aagacaggaaaguucaga

SEQ ID NO: 2770933 - RNA, 20 nt, Human
aagacaggaaaguucagagu

SEQ ID NO: 2770934 - RNA, 21 nt, Human
aagacaggaaaguucagaguu

SEQ ID NO: 2770935 - RNA, 23 nt, Human
aagacaggacagugcuucagccu

SEQ ID NO: 2770936 - RNA, 23 nt, Human
aacuuacuauucauuaaauguuu

SEQ ID NO: 2770937 - RNA, 15 nt, Human
aacuuacugauuauu

SEQ ID NO: 2770938 - RNA, 23 nt, Human
aacuuaccuaagugacauuugua

SEQ ID NO: 2770939 - RNA, 20 nt, Human
aacuuagaucaucagucacc

SEQ ID NO: 2770940 - RNA, 11 nt, Human
aagagaagaag

SEQ ID NO: 2770941 - RNA, 13 nt, Human
aagagaagaagaa

SEQ ID NO: 2770942 - RNA, 14 nt, Human
aagagaagaagaaa

SEQ ID NO: 2770943 - RNA, 16 nt, Human
aagagaagaagaaaaa

SEQ ID NO: 2770944 - RNA, 17 nt, Human
aagagaagaagaaaaaa

SEQ ID NO: 2770945 - RNA, 16 nt, Human
aagagaagacgaaaua

SEQ ID NO: 2770946 - RNA, 14 nt, Human
aagagaagcaauuu

SEQ ID NO: 2770947 - RNA, 16 nt, Human
aagagaaccgagcaaa

SEQ ID NO: 2770948 - RNA, 21 nt, Human
aagagaaccgagcaaagauca

SEQ ID NO: 2770949 - RNA, 22 nt, Human
aagagaaccgagcaaagaucaa

SEQ ID NO: 2770950 - RNA, 13 nt, Human
aagagaagcugcu

SEQ ID NO: 2770951 - RNA, 14 nt, Human
aagagaagcugcug

SEQ ID NO: 2770952 - RNA, 15 nt, Human
aagagaagcugcuga

SEQ ID NO: 2770953 - RNA, 16 nt, Human
aagagaagcugcugac

SEQ ID NO: 2770954 - RNA, 17 nt, Human
aagagaagcugcugacc

SEQ ID NO: 2770955 - RNA, 18 nt, Human
aagagaagcugcugacca

SEQ ID NO: 2770956 - RNA, 14 nt, Human
aagagacagucacc

SEQ ID NO: 2770957 - RNA, 20 nt, Human
aagagacagucaccccagga

SEQ ID NO: 2770958 - RNA, 21 nt, Human
aagagacagucaccccaggac

SEQ ID NO: 2770959 - RNA, 14 nt, Human
aagagacagaaugu

SEQ ID NO: 2770960 - RNA, 16 nt, Human
aagagacagaauguau

SEQ ID NO: 2770961 - RNA, 18 nt, Human
aagagacagaauguaucu

SEQ ID NO: 2770962 - RNA, 21 nt, Human
aagagacaaacaccucccagg

SEQ ID NO: 2770963 - RNA, 13 nt, Human
aagagacaaacug

SEQ ID NO: 2770964 - RNA, 19 nt, Human
aagagacaaacaccuccca

SEQ ID NO: 2770965 - RNA, 11 nt, Human
aagagagaacc

SEQ ID NO: 2770966 - RNA, 18 nt, Human
aagagagaaccuaacugu

SEQ ID NO: 2770967 - RNA, 20 nt, Human
aagagagaaccuaacuguau

SEQ ID NO: 2770968 - RNA, 23 nt, Human
aagagagaaccuaacuguaucuu

SEQ ID NO: 2770969 - RNA, 19 nt, Human
aagagagagaaacaaacuu

SEQ ID NO: 2770970 - RNA, 11 nt, Human
aagagagaaau

SEQ ID NO: 2770971 - RNA, 13 nt, Human
aagagagaaaucu

SEQ ID NO: 2770972 - RNA, 16 nt, Human
aagagagauauaucug

SEQ ID NO: 2770973 - RNA, 17 nt, Human
aagagagauauaucuga

SEQ ID NO: 2770974 - RNA, 20 nt, Human
aagagagauauaucugaaaa

SEQ ID NO: 2770975 - RNA, 20 nt, Human
aagagagagaaacaaacuuu

SEQ ID NO: 2770976 - RNA, 21 nt, Human
aagagagagaaacaaacuuuu

SEQ ID NO: 2770977 - RNA, 15 nt, Human
aagagagcagagaau

SEQ ID NO: 2770978 - RNA, 19 nt, Human
aagagagagagagaaaaaa

SEQ ID NO: 2770979 - RNA, 20 nt, Human
aagagagagagagaaaaaaa

SEQ ID NO: 2770980 - RNA, 19 nt, Human
aagagagagagagagagaa

SEQ ID NO: 2770981 - RNA, 22 nt, Human
aagagagcuuaaugauaauauu

SEQ ID NO: 2770982 - RNA, 17 nt, Human
aagagaggagaggagag

SEQ ID NO: 2770983 - RNA, 18 nt, Human
aagagaggagaggagaga

SEQ ID NO: 2770984 - RNA, 19 nt, Human
aagagacacucagaccaga

SEQ ID NO: 2770985 - RNA, 17 nt, Human
aagcagagugcacagcu

SEQ ID NO: 2770986 - RNA, 18 nt, Human
aagcagagugcacagcug

SEQ ID NO: 2770987 - RNA, 19 nt, Human
aagcagagugcacagcugu

SEQ ID NO: 2770988 - RNA, 20 nt, Human
aagcagagugcacagcuguc

SEQ ID NO: 2770989 - RNA, 21 nt, Human
aagcagagugcacagcugucc

SEQ ID NO: 2770990 - RNA, 17 nt, Human
aagcagggucugggcag

SEQ ID NO: 2770991 - RNA, 21 nt, Human
aagcaggggcuacaagaggga

SEQ ID NO: 2770992 - RNA, 22 nt, Human
aagcaggggcuacaagagggaa

SEQ ID NO: 2770993 - RNA, 20 nt, Human
aagcaggggcuacaagaggg

SEQ ID NO: 2770994 - RNA, 13 nt, Human
aagauuuucagaa

SEQ ID NO: 2770995 - RNA, 23 nt, Human
aagauuuucugggccuaaaggau

SEQ ID NO: 2770996 - RNA, 13 nt, Human
aagauuuuucuca

SEQ ID NO: 2770997 - RNA, 14 nt, Human
aagauuuuucucaa

SEQ ID NO: 2770998 - RNA, 19 nt, Human
aagcagaaaauaaaggaag

SEQ ID NO: 2770999 - RNA, 20 nt, Human
aagcagaaaauaaaggaagc

SEQ ID NO: 2771000 - RNA, 16 nt, Human
aagcacugugcucagg

SEQ ID NO: 2771001 - RNA, 13 nt, Human
aagcacuguuuuu

SEQ ID NO: 2771002 - RNA, 16 nt, Human
aagcacuguuuuucca

SEQ ID NO: 2771003 - RNA, 15 nt, Human
aagcacugugcucag

SEQ ID NO: 2771004 - RNA, 22 nt, Human
aagcagaaauccugcaaugaaa

SEQ ID NO: 2771005 - RNA, 15 nt, Human
aagauucagguaugu

SEQ ID NO: 2771006 - RNA, 21 nt, Human
aagauucaccuaagagauucu

SEQ ID NO: 2771007 - RNA, 21 nt, Human
aagauuauagauucuaaagau

SEQ ID NO: 2771008 - RNA, 17 nt, Human
aagauuauuuuauuaug

SEQ ID NO: 2771009 - RNA, 19 nt, Human
aagauuauuuuauuaugcg

SEQ ID NO: 2771010 - RNA, 19 nt, Human
aagauucauuuuuaaucau

SEQ ID NO: 2771011 - RNA, 20 nt, Human
aagauucauuuuuaaucaug

SEQ ID NO: 2771012 - RNA, 21 nt, Human
aagauucauuuuuaaucauga

SEQ ID NO: 2771013 - RNA, 20 nt, Human
aagauucuucuguguuuaua

SEQ ID NO: 2771014 - RNA, 16 nt, Human
aagauucuuuuucuga

SEQ ID NO: 2771015 - RNA, 16 nt, Human
aagauagauccuuuua

SEQ ID NO: 2771016 - RNA, 23 nt, Human
aagauagauuuggaauaggaaua

SEQ ID NO: 2771017 - RNA, 11 nt, Human
aagauuagaag

SEQ ID NO: 2771018 - RNA, 13 nt, Human
aagauuagaagcu

SEQ ID NO: 2771019 - RNA, 18 nt, Human
aagauuagaagcugaaaa

SEQ ID NO: 2771020 - RNA, 21 nt, Human
aagauuagcaaggucauuucu

SEQ ID NO: 2771021 - RNA, 22 nt, Human
aagauuagcaaggucauuucuu

SEQ ID NO: 2771022 - RNA, 24 nt, Human
aagauuagcaaggucauuucuuca

SEQ ID NO: 2771023 - RNA, 14 nt, Human
aagauuauagauuc

SEQ ID NO: 2771024 - RNA, 17 nt, Human
aagauucaaucccagga

SEQ ID NO: 2771025 - RNA, 15 nt, Human
aagauuauagauucu

SEQ ID NO: 2771026 - RNA, 16 nt, Human
aagauuauagauucua

SEQ ID NO: 2771027 - RNA, 17 nt, Human
aagauuauagauucuaa

SEQ ID NO: 2771028 - RNA, 20 nt, Human
aagauuauagauucuaaaga

SEQ ID NO: 2771029 - RNA, 14 nt, Human
aagugggugagaug

SEQ ID NO: 2771030 - RNA, 19 nt, Human
aagugggugagaugcugga

SEQ ID NO: 2771031 - RNA, 19 nt, Human
aaguggguuauucuggagu

SEQ ID NO: 2771032 - RNA, 19 nt, Human
aagugggaggucaggaaac

SEQ ID NO: 2771033 - RNA, 20 nt, Human
aagugggaggucaggaaacu

SEQ ID NO: 2771034 - RNA, 16 nt, Human
aagugggcuugauucu

SEQ ID NO: 2771035 - RNA, 12 nt, Human
aagugggcuuga

SEQ ID NO: 2771036 - RNA, 13 nt, Human
aaguggggcagag

SEQ ID NO: 2771037 - RNA, 17 nt, Human
aaguggggcagagccuc

SEQ ID NO: 2771038 - RNA, 22 nt, Human
aagugggcuugauucugcagua

SEQ ID NO: 2771039 - RNA, 15 nt, Human
aaguggggacagagc

SEQ ID NO: 2771040 - RNA, 15 nt, Human
aaguucuucuccaau

SEQ ID NO: 2771041 - RNA, 15 nt, Human
aaguucuguguuuaa

SEQ ID NO: 2771042 - RNA, 20 nt, Human
aaguucuguguuuaauuucu

SEQ ID NO: 2771043 - RNA, 22 nt, Human
aaguucuguguuuaauuucuuc

SEQ ID NO: 2771044 - RNA, 23 nt, Human
aaguucuguguuuaauuucuuca

SEQ ID NO: 2771045 - RNA, 13 nt, Human
aaguucugcuuuc

SEQ ID NO: 2771046 - RNA, 16 nt, Human
aaguucugcuuucucc

SEQ ID NO: 2771047 - RNA, 19 nt, Human
aaguucugcuuucucccca

SEQ ID NO: 2771048 - RNA, 14 nt, Human
aagugcugagauua

SEQ ID NO: 2771049 - RNA, 13 nt, Human
aagugcugagauu

SEQ ID NO: 2771050 - RNA, 12 nt, Human
aaguauagagag

SEQ ID NO: 2771051 - RNA, 17 nt, Human
aagugcucaucuguugu

SEQ ID NO: 2771052 - RNA, 19 nt, Human
aagugcuaagguucuaagg

SEQ ID NO: 2771053 - RNA, 20 nt, Human
aagugcuaagguucuaaggc

SEQ ID NO: 2771054 - RNA, 21 nt, Human
aagugcuaagguucuaaggcc

SEQ ID NO: 2771055 - RNA, 14 nt, Human
aagugcuacauaaa

SEQ ID NO: 2771056 - RNA, 17 nt, Human
aagugcuacauaaauug

SEQ ID NO: 2771057 - RNA, 22 nt, Human
aagugcguguguagaguuaaga

SEQ ID NO: 2771058 - RNA, 23 nt, Human
aagugcguguguagaguuaagaa

SEQ ID NO: 2771059 - RNA, 15 nt, Human
aagugcuaagguucu

SEQ ID NO: 2771060 - RNA, 16 nt, Human
aagugcuaagguucua

SEQ ID NO: 2771061 - RNA, 17 nt, Human
aagugcuaagguucuaa

SEQ ID NO: 2771062 - RNA, 18 nt, Human
aagugcuaagguucuaag

SEQ ID NO: 2771063 - RNA, 15 nt, Human
aaguagcagugugaa

SEQ ID NO: 2771064 - RNA, 23 nt, Human
aaguaguucuguuuggugugucc

SEQ ID NO: 2771065 - RNA, 15 nt, Human
aaguagugugcaguu

SEQ ID NO: 2771066 - RNA, 20 nt, Human
aaguaguuuguauaacuucu

SEQ ID NO: 2771067 - RNA, 15 nt, Human
aaguauaaaauacaa

SEQ ID NO: 2771068 - RNA, 12 nt, Human
aaguaguuugua

SEQ ID NO: 2771069 - RNA, 12 nt, Human
aaguauacaguu

SEQ ID NO: 2771070 - RNA, 21 nt, Human
aaguauacaguucaauaaacu

SEQ ID NO: 2771071 - RNA, 15 nt, Human
aaguauacuuauauu

SEQ ID NO: 2771072 - RNA, 17 nt, Human
aauaaaccucaaaaugu

SEQ ID NO: 2771073 - RNA, 13 nt, Human
aauaaacaaauaa

SEQ ID NO: 2771074 - RNA, 18 nt, Human
aaguugcacugauauuuu

SEQ ID NO: 2771075 - RNA, 20 nt, Human
aaguugcacugauauuuuac

SEQ ID NO: 2771076 - RNA, 15 nt, Human
aaguugcacggcugc

SEQ ID NO: 2771077 - RNA, 16 nt, Human
aaguugcacggcugcu

SEQ ID NO: 2771078 - RNA, 18 nt, Human
aaguugcacggcugcuga

SEQ ID NO: 2771079 - RNA, 21 nt, Human
aaguugauauagaacagugcu

SEQ ID NO: 2771080 - RNA, 18 nt, Human
aaguugauggugaugaaa

SEQ ID NO: 2771081 - RNA, 15 nt, Human
aauaaaauuucuaag

SEQ ID NO: 2771082 - RNA, 21 nt, Human
aauaaaauuucuaagagagcu

SEQ ID NO: 2771083 - RNA, 14 nt, Human
aauaauaaauauuu

SEQ ID NO: 2771084 - RNA, 18 nt, Human
aauaauaaagaugcucuu

SEQ ID NO: 2771085 - RNA, 19 nt, Human
aauaauaaagaugcucuuu

SEQ ID NO: 2771086 - RNA, 18 nt, Human
aauaaaggacuguaaucu

SEQ ID NO: 2771087 - RNA, 11 nt, Human
aauaaaggacu

SEQ ID NO: 2771088 - RNA, 16 nt, Human
aauaaaggaugugauu

SEQ ID NO: 2771089 - RNA, 22 nt, Human
aauaaaggacuguaaucuuauu

SEQ ID NO: 2771090 - RNA, 20 nt, Human
aauaaaccucaaaaugucua

SEQ ID NO: 2771091 - RNA, 15 nt, Human
aauaaagccugcuuu

SEQ ID NO: 2771092 - RNA, 21 nt, Human
aauaauguuaaccaaggaaau

SEQ ID NO: 2771093 - RNA, 16 nt, Human
aauaauguucuauugu

SEQ ID NO: 2771094 - RNA, 17 nt, Human
aauaauaugcauuguca

SEQ ID NO: 2771095 - RNA, 19 nt, Human
aauaauauggcuaugcuua

SEQ ID NO: 2771096 - RNA, 12 nt, Human
aauaauauuguu

SEQ ID NO: 2771097 - RNA, 14 nt, Human
aauaauauuguugu

SEQ ID NO: 2771098 - RNA, 20 nt, Human
aauaauauuguuguauaauu

SEQ ID NO: 2771099 - RNA, 20 nt, Human
aauaauauccaggucaacag

SEQ ID NO: 2771100 - RNA, 22 nt, Human
aauaauauccaggucaacagaa

SEQ ID NO: 2771101 - RNA, 13 nt, Human
aauaauaugauuu

SEQ ID NO: 2771102 - RNA, 11 nt, Human
aauaauaugca

SEQ ID NO: 2771103 - RNA, 12 nt, Human
aauaauaugcau

SEQ ID NO: 2771104 - RNA, 13 nt, Human
aauaauaugcauu

SEQ ID NO: 2771105 - RNA, 15 nt, Human
aauaauaugcauugu

SEQ ID NO: 2771106 - RNA, 17 nt, Human
aauaauaguaugaguaa

SEQ ID NO: 2771107 - RNA, 14 nt, Human
aauaauacacuaau

SEQ ID NO: 2771108 - RNA, 21 nt, Human
aauaauaauuagguuaacauu

SEQ ID NO: 2771109 - RNA, 12 nt, Human
aauaauaauauc

SEQ ID NO: 2771110 - RNA, 15 nt, Human
aauaauaauauccag

SEQ ID NO: 2771111 - RNA, 20 nt, Human
aauaauaauuuuuauauuua

SEQ ID NO: 2771112 - RNA, 13 nt, Human
aauaauaccucaa

SEQ ID NO: 2771113 - RNA, 20 nt, Human
aauaauaccucaauguuuga

SEQ ID NO: 2771114 - RNA, 21 nt, Human
aauaauaccucaauguuugag

SEQ ID NO: 2771115 - RNA, 20 nt, Human
aauauggaacuucuaauaua

SEQ ID NO: 2771116 - RNA, 14 nt, Human
aauauggacaagag

SEQ ID NO: 2771117 - RNA, 15 nt, Human
aauauggacaagagg

SEQ ID NO: 2771118 - RNA, 13 nt, Human
aauaugcuaauuu

SEQ ID NO: 2771119 - RNA, 14 nt, Human
aauaugcuaauuug

SEQ ID NO: 2771120 - RNA, 15 nt, Human
aauaugcuaauuugg

SEQ ID NO: 2771121 - RNA, 14 nt, Human
aauauggaacuucu

SEQ ID NO: 2771122 - RNA, 17 nt, Human
aauauggaacuucuaau

SEQ ID NO: 2771123 - RNA, 11 nt, Human
aauaugcuuac

SEQ ID NO: 2771124 - RNA, 23 nt, Human
aauaugcuuucaucuucuguugc

SEQ ID NO: 2771125 - RNA, 10 nt, Human
aauaugcuua

SEQ ID NO: 2771126 - RNA, 15 nt, Human
aauauagauuagaaa

SEQ ID NO: 2771127 - RNA, 17 nt, Human
aauauagauuagaaaaa

SEQ ID NO: 2771128 - RNA, 18 nt, Human
aauauagauuagaaaaau

SEQ ID NO: 2771129 - RNA, 13 nt, Human
aauauaacaugaa

SEQ ID NO: 2771130 - RNA, 16 nt, Human
aauauaacaugaaaug

SEQ ID NO: 2771131 - RNA, 18 nt, Human
aauauaacaugaaaugau

SEQ ID NO: 2771132 - RNA, 19 nt, Human
aauauaacaugaaaugaua

SEQ ID NO: 2771133 - RNA, 21 nt, Human
aauauagaucaguuauaagua

SEQ ID NO: 2771134 - RNA, 12 nt, Human
aauauaaacauc

SEQ ID NO: 2771135 - RNA, 21 nt, Human
aauauaaagauggcugacuuu

SEQ ID NO: 2771136 - RNA, 15 nt, Human
aauacuaccuugaaa

SEQ ID NO: 2771137 - RNA, 14 nt, Human
aauacuaccuugaa

SEQ ID NO: 2771138 - RNA, 13 nt, Human
aauacguuugaua

SEQ ID NO: 2771139 - RNA, 14 nt, Human
aauacuaaaauaug

SEQ ID NO: 2771140 - RNA, 15 nt, Human
aauacuaaaauaugu

SEQ ID NO: 2771141 - RNA, 16 nt, Human
aauacgcacuacaugu

SEQ ID NO: 2771142 - RNA, 18 nt, Human
aauacgcacuacaugugg

SEQ ID NO: 2771143 - RNA, 19 nt, Human
aauacgcaggcaucugauu

SEQ ID NO: 2771144 - RNA, 20 nt, Human
aauacgacacugaaauaugu

SEQ ID NO: 2771145 - RNA, 23 nt, Human
aauacgacacugaaauaugugaa

SEQ ID NO: 2771146 - RNA, 16 nt, Human
aauacuuacauucucu

SEQ ID NO: 2771147 - RNA, 17 nt, Human
aauacuuagcaaaaagu

SEQ ID NO: 2771148 - RNA, 23 nt, Human
aauauaaacaaagauucaugauu

SEQ ID NO: 2771149 - RNA, 22 nt, Human
aauauaaacaaagauucaugau

SEQ ID NO: 2771150 - RNA, 21 nt, Human
aauauaaacaaagauucauga

SEQ ID NO: 2771151 - RNA, 22 nt, Human
aauauaaaaggcaaauguguac

SEQ ID NO: 2771152 - RNA, 14 nt, Human
aauauaaacaaaga

SEQ ID NO: 2771153 - RNA, 23 nt, Human
aauauaaaaggcaaauguguaca

SEQ ID NO: 2771154 - RNA, 13 nt, Human
aauauaaaauagu

SEQ ID NO: 2771155 - RNA, 22 nt, Human
aauauaaaauaguuguccauau

SEQ ID NO: 2771156 - RNA, 14 nt, Human
aauauaaaaggcaa

SEQ ID NO: 2771157 - RNA, 14 nt, Human
aauaguuuuuucuu

SEQ ID NO: 2771158 - RNA, 22 nt, Human
aauauaaaacaaauaaaaaaua

SEQ ID NO: 2771159 - RNA, 14 nt, Human
aauaguuugucuau

SEQ ID NO: 2771160 - RNA, 16 nt, Human
aauaguuugucuauuu

SEQ ID NO: 2771161 - RNA, 17 nt, Human
aauaguuugucuauuuu

SEQ ID NO: 2771162 - RNA, 18 nt, Human
aauaguuugucuauuuua

SEQ ID NO: 2771163 - RNA, 19 nt, Human
aauaguuugucuauuuuaa

SEQ ID NO: 2771164 - RNA, 23 nt, Human
aauaguuugucuauuuuaaaaua

SEQ ID NO: 2771165 - RNA, 15 nt, Human
aauaguuuguuuaau

SEQ ID NO: 2771166 - RNA, 20 nt, Human
aauagaaaacugaaaaucua

SEQ ID NO: 2771167 - RNA, 12 nt, Human
aauagaaaagua

SEQ ID NO: 2771168 - RNA, 13 nt, Human
aauagaaaaguag

SEQ ID NO: 2771169 - RNA, 18 nt, Human
aauagaaaaguagacaau

SEQ ID NO: 2771170 - RNA, 14 nt, Human
aauagaaaaguuau

SEQ ID NO: 2771171 - RNA, 15 nt, Human
aauagaaaaguuauu

SEQ ID NO: 2771172 - RNA, 19 nt, Human
aauagaaaaguuauuagug

SEQ ID NO: 2771173 - RNA, 14 nt, Human
aauagaaagaaagu

SEQ ID NO: 2771174 - RNA, 22 nt, Human
aauagaaauaaaggaugugauu

SEQ ID NO: 2771175 - RNA, 16 nt, Human
aauagaaauaaguggu

SEQ ID NO: 2771176 - RNA, 20 nt, Human
aauagaaccauguugguugc

SEQ ID NO: 2771177 - RNA, 18 nt, Human
aauauggaacuucuaaua

SEQ ID NO: 2771178 - RNA, 19 nt, Human
aaucaaauaaguauuuaua

SEQ ID NO: 2771179 - RNA, 14 nt, Human
aaucauuugcuuuu

SEQ ID NO: 2771180 - RNA, 20 nt, Human
aaucauuuuacccuuggcuc

SEQ ID NO: 2771181 - RNA, 17 nt, Human
aaucauuuuaggaaagg

SEQ ID NO: 2771182 - RNA, 19 nt, Human
aaucauuuuaggaaaggau

SEQ ID NO: 2771183 - RNA, 19 nt, Human
aaucauuuugccucuuuuc

SEQ ID NO: 2771184 - RNA, 14 nt, Human
aaugaaauuguaaa

SEQ ID NO: 2771185 - RNA, 13 nt, Human
aaugaaauuuaaa

SEQ ID NO: 2771186 - RNA, 16 nt, Human
aaugaaauuuaaacau

SEQ ID NO: 2771187 - RNA, 17 nt, Human
aaugaaauuuaaacauu

SEQ ID NO: 2771188 - RNA, 16 nt, Human
aaugauacugauggug

SEQ ID NO: 2771189 - RNA, 18 nt, Human
aaugauacccugaauuug

SEQ ID NO: 2771190 - RNA, 21 nt, Human
aaugauagacaauugagguaa

SEQ ID NO: 2771191 - RNA, 14 nt, Human
aaugauagauuuga

SEQ ID NO: 2771192 - RNA, 18 nt, Human
aaugauagauuugaccuc

SEQ ID NO: 2771193 - RNA, 18 nt, Human
aaugaacacucuuuugcu

SEQ ID NO: 2771194 - RNA, 15 nt, Human
aaugaacacucuuuu

SEQ ID NO: 2771195 - RNA, 21 nt, Human
aaugaacacucuuuugcuuua

SEQ ID NO: 2771196 - RNA, 20 nt, Human
aaugauaauauuguggugcc

SEQ ID NO: 2771197 - RNA, 15 nt, Human
aaugauagcuacugu

SEQ ID NO: 2771198 - RNA, 18 nt, Human
aaugauaguaagaaaagu

SEQ ID NO: 2771199 - RNA, 16 nt, Human
aaugauaguagaguga

SEQ ID NO: 2771200 - RNA, 18 nt, Human
aaugauaguugauuuuca

SEQ ID NO: 2771201 - RNA, 19 nt, Human
aaugauaguugauuuucaa

SEQ ID NO: 2771202 - RNA, 13 nt, Human
aaugauaugcauu

SEQ ID NO: 2771203 - RNA, 23 nt, Human
aaugauguauguugaagccuuug

SEQ ID NO: 2771204 - RNA, 20 nt, Human
aaugauguauguugaagccu

SEQ ID NO: 2771205 - RNA, 16 nt, Human
aaugaucagcaucugu

SEQ ID NO: 2771206 - RNA, 17 nt, Human
aaugaucagcaucugug

SEQ ID NO: 2771207 - RNA, 13 nt, Human
aauccauaucuua

SEQ ID NO: 2771208 - RNA, 15 nt, Human
aauccacucccaggc

SEQ ID NO: 2771209 - RNA, 17 nt, Human
aauccacucccaggcag

SEQ ID NO: 2771210 - RNA, 18 nt, Human
aauccacucccaggcagc

SEQ ID NO: 2771211 - RNA, 17 nt, Human
aauccaacccaugauga

SEQ ID NO: 2771212 - RNA, 20 nt, Human
aauccaaauggcgucuggaa

SEQ ID NO: 2771213 - RNA, 13 nt, Human
aauccaaauggcg

SEQ ID NO: 2771214 - RNA, 18 nt, Human
aauccaccugccucggcc

SEQ ID NO: 2771215 - RNA, 19 nt, Human
aauccaccugccucggccu

SEQ ID NO: 2771216 - RNA, 16 nt, Human
aauccacauuucuaaa

SEQ ID NO: 2771217 - RNA, 15 nt, Human
aauccacauuucuaa

SEQ ID NO: 2771218 - RNA, 17 nt, Human
aaucucccgcugcugcu

SEQ ID NO: 2771219 - RNA, 15 nt, Human
aaucuccaguauucu

SEQ ID NO: 2771220 - RNA, 16 nt, Human
aaucucccaugugcau

SEQ ID NO: 2771221 - RNA, 18 nt, Human
aaucucggcucacugcau

SEQ ID NO: 2771222 - RNA, 19 nt, Human
aaucucccgcugcugcugc

SEQ ID NO: 2771223 - RNA, 23 nt, Human
aaucucgcucugucgcccaggcu

SEQ ID NO: 2771224 - RNA, 20 nt, Human
aaucuggacuccucugucca

SEQ ID NO: 2771225 - RNA, 17 nt, Human
aaucuggacuccucugu

SEQ ID NO: 2771226 - RNA, 18 nt, Human
aaucuggacuccucuguc

SEQ ID NO: 2771227 - RNA, 15 nt, Human
aaucuggacuccucu

SEQ ID NO: 2771228 - RNA, 16 nt, Human
aaucuggacuccucug

SEQ ID NO: 2771229 - RNA, 15 nt, Human
aaugucacaggcagg

SEQ ID NO: 2771230 - RNA, 16 nt, Human
aaugguauggaacucu

SEQ ID NO: 2771231 - RNA, 14 nt, Human
aaugcucuccuuuc

SEQ ID NO: 2771232 - RNA, 19 nt, Human
aaugcucucucaaauuguc

SEQ ID NO: 2771233 - RNA, 13 nt, Human
aaugcucuccuuu

SEQ ID NO: 2771234 - RNA, 16 nt, Human
aaugggaauauuuuau

SEQ ID NO: 2771235 - RNA, 20 nt, Human
aaugcucuggggucuuuuua

SEQ ID NO: 2771236 - RNA, 15 nt, Human
aaugcucagaccagc

SEQ ID NO: 2771237 - RNA, 17 nt, Human
aaugcuaggucucggac

SEQ ID NO: 2771238 - RNA, 23 nt, Human
aaugcuauuuuuguuuuuagaau

SEQ ID NO: 2771239 - RNA, 13 nt, Human
aaugggacacuaa

SEQ ID NO: 2771240 - RNA, 14 nt, Human
aaugcuagaagaaa

SEQ ID NO: 2771241 - RNA, 16 nt, Human
aaugggaggccucuga

SEQ ID NO: 2771242 - RNA, 16 nt, Human
aaugggaucaugaaag

SEQ ID NO: 2771243 - RNA, 23 nt, Human
aaugggauguaugaauacagcag

SEQ ID NO: 2771244 - RNA, 23 nt, Human
aaugggcacugggaugagccgcu

SEQ ID NO: 2771245 - RNA, 23 nt, Human
aaugcuaccgccccaaaguaaaa

SEQ ID NO: 2771246 - RNA, 14 nt, Human
aaugcuaauauuaa

SEQ ID NO: 2771247 - RNA, 17 nt, Human
aaugcuaauauuaaaag

SEQ ID NO: 2771248 - RNA, 19 nt, Human
aaugcuaauuuaaagagac

SEQ ID NO: 2771249 - RNA, 17 nt, Human
aaugccugagugccugg

SEQ ID NO: 2771250 - RNA, 19 nt, Human
aaugccugagugccuggcc

SEQ ID NO: 2771251 - RNA, 16 nt, Human
aaugccugagugccug

SEQ ID NO: 2771252 - RNA, 11 nt, Human
aaugccucugu

SEQ ID NO: 2771253 - RNA, 14 nt, Human
aaugcgcaggcugg

SEQ ID NO: 2771254 - RNA, 15 nt, Human
aaugcgcaggcuggc

SEQ ID NO: 2771255 - RNA, 20 nt, Human
aaugcgcaggcuggcccugc

SEQ ID NO: 2771256 - RNA, 19 nt, Human
aaugcgcaggcuggcccug

SEQ ID NO: 2771257 - RNA, 18 nt, Human
aaugcgcaggcuggcccu

SEQ ID NO: 2771258 - RNA, 17 nt, Human
aaugcgcaggcuggccc

SEQ ID NO: 2771259 - RNA, 16 nt, Human
aaugcccuuaaaucau

SEQ ID NO: 2771260 - RNA, 19 nt, Human
aaugcccguaaugcuuaga

SEQ ID NO: 2771261 - RNA, 18 nt, Human
aaugcccguaaugcuuag

SEQ ID NO: 2771262 - RNA, 13 nt, Human
aaugccuccugug

SEQ ID NO: 2771263 - RNA, 15 nt, Human
aaugccuccuguggg

SEQ ID NO: 2771264 - RNA, 17 nt, Human
aaugccuccugugggga

SEQ ID NO: 2771265 - RNA, 15 nt, Human
aaugccuaauaaaca

SEQ ID NO: 2771266 - RNA, 16 nt, Human
aaugccuaauaaacaa

SEQ ID NO: 2771267 - RNA, 24 nt, Human
aaugccuaguuuuuaguaaucugu

SEQ ID NO: 2771268 - RNA, 12 nt, Human
aacugaggaauu

SEQ ID NO: 2771269 - RNA, 16 nt, Human
aacugaggaauuuucu

SEQ ID NO: 2771270 - RNA, 15 nt, Human
aacuguguuguauua

SEQ ID NO: 2771271 - RNA, 16 nt, Human
aacuguguuguauuaa

SEQ ID NO: 2771272 - RNA, 17 nt, Human
aacuguguuguauuaac

SEQ ID NO: 2771273 - RNA, 18 nt, Human
aacuguguuguauuaaca

SEQ ID NO: 2771274 - RNA, 20 nt, Human
aacuguguuguauuaacaaa

SEQ ID NO: 2771275 - RNA, 23 nt, Human
aacuguguuguauuaacaaaagu

SEQ ID NO: 2771276 - RNA, 13 nt, Human
aacugaggaauuu

SEQ ID NO: 2771277 - RNA, 18 nt, Human
aacuguucccaccugcug

SEQ ID NO: 2771278 - RNA, 15 nt, Human
aacuguucccaccug

SEQ ID NO: 2771279 - RNA, 13 nt, Human
aacuguucccacc

SEQ ID NO: 2771280 - RNA, 21 nt, Human
aacuguuaagaaaucuguuuu

SEQ ID NO: 2771281 - RNA, 14 nt, Human
aacuguuaugaaau

SEQ ID NO: 2771282 - RNA, 14 nt, Human
aacuguuagcacug

SEQ ID NO: 2771283 - RNA, 15 nt, Human
aacuguuagcacugu

SEQ ID NO: 2771284 - RNA, 17 nt, Human
aacuguuagcacuguug

SEQ ID NO: 2771285 - RNA, 18 nt, Human
aacuguuagcacuguuga

SEQ ID NO: 2771286 - RNA, 20 nt, Human
aacuguuagcacuguugaug

SEQ ID NO: 2771287 - RNA, 22 nt, Human
aacuguuagcacuguugaugua

SEQ ID NO: 2771288 - RNA, 15 nt, Human
aacuguuaccuaaag

SEQ ID NO: 2771289 - RNA, 20 nt, Human
aacuguuaccuaaaguauuu

SEQ ID NO: 2771290 - RNA, 18 nt, Human
aacucaucauaaaauaaa

SEQ ID NO: 2771291 - RNA, 21 nt, Human
aacucaucccuaaugcugcag

SEQ ID NO: 2771292 - RNA, 22 nt, Human
aacucaucccuaaugcugcaga

SEQ ID NO: 2771293 - RNA, 17 nt, Human
aacucaucauaaaauaa

SEQ ID NO: 2771294 - RNA, 16 nt, Human
aacucaucauaaaaua

SEQ ID NO: 2771295 - RNA, 15 nt, Human
aacucaucauaaaau

SEQ ID NO: 2771296 - RNA, 14 nt, Human
aacucaucauaaaa

SEQ ID NO: 2771297 - RNA, 18 nt, Human
aacucaucacuguggcug

SEQ ID NO: 2771298 - RNA, 16 nt, Human
aacugaauuuguacuu

SEQ ID NO: 2771299 - RNA, 20 nt, Human
aacugaauguuuauuccuug

SEQ ID NO: 2771300 - RNA, 14 nt, Human
aacgcgaaaccaau

SEQ ID NO: 2771301 - RNA, 13 nt, Human
aacgcgcagaugu

SEQ ID NO: 2771302 - RNA, 14 nt, Human
aacgcgcagaugug

SEQ ID NO: 2771303 - RNA, 21 nt, Human
aacgcgcagaugugcagcaga

SEQ ID NO: 2771304 - RNA, 23 nt, Human
aacgcgcagaugugcagcagauu

SEQ ID NO: 2771305 - RNA, 15 nt, Human
aacgcuaccucucug

SEQ ID NO: 2771306 - RNA, 15 nt, Human
aacgggcugcccugc

SEQ ID NO: 2771307 - RNA, 15 nt, Human
aacgggguccuucaa

SEQ ID NO: 2771308 - RNA, 17 nt, Human
aacgggucguaaugacu

SEQ ID NO: 2771309 - RNA, 17 nt, Human
aacgggcugcccugcca

SEQ ID NO: 2771310 - RNA, 17 nt, Human
aacguaaccacggaaaa

SEQ ID NO: 2771311 - RNA, 19 nt, Human
aacguaagcacuguuuuuc

SEQ ID NO: 2771312 - RNA, 14 nt, Human
aacgguucaguuuc

SEQ ID NO: 2771313 - RNA, 15 nt, Human
aacucaaaauauuug

SEQ ID NO: 2771314 - RNA, 22 nt, Human
aacucaaacuucuggcucccuc

SEQ ID NO: 2771315 - RNA, 23 nt, Human
aacucaaacuucuggcucccucu

SEQ ID NO: 2771316 - RNA, 16 nt, Human
aacucaaaauauuugu

SEQ ID NO: 2771317 - RNA, 13 nt, Human
aacguauuuuaaa

SEQ ID NO: 2771318 - RNA, 21 nt, Human
aacucaacugggcucuguccc

SEQ ID NO: 2771319 - RNA, 13 nt, Human
aacucaagacaau

SEQ ID NO: 2771320 - RNA, 16 nt, Human
aacucaagacaaugca

SEQ ID NO: 2771321 - RNA, 18 nt, Human
aacgccuccccugcccca

SEQ ID NO: 2771322 - RNA, 23 nt, Human
aacgacaaagccaaacucugcca

SEQ ID NO: 2771323 - RNA, 14 nt, Human
aacgaaacacuuca

SEQ ID NO: 2771324 - RNA, 23 nt, Human
aaccuuuuuuaagauuuuucuca

SEQ ID NO: 2771325 - RNA, 15 nt, Human
aaccuuuuuuaagau

SEQ ID NO: 2771326 - RNA, 17 nt, Human
aaccuuuuuuaagauuu

SEQ ID NO: 2771327 - RNA, 18 nt, Human
aaccuuuuuuaagauuuu

SEQ ID NO: 2771328 - RNA, 21 nt, Human
aaccuuuuuuaagauuuuucu

SEQ ID NO: 2771329 - RNA, 22 nt, Human
aaccuuuuuuaagauuuuucuc

SEQ ID NO: 2771330 - RNA, 12 nt, Human
aaccaguugugg

SEQ ID NO: 2771331 - RNA, 19 nt, Human
aaccaguuguggugugagu

SEQ ID NO: 2771332 - RNA, 20 nt, Human
aaccaguuguggugugagua

SEQ ID NO: 2771333 - RNA, 21 nt, Human
aaccaguuguggugugaguau

SEQ ID NO: 2771334 - RNA, 17 nt, Human
aaccaguuuagauuuca

SEQ ID NO: 2771335 - RNA, 22 nt, Human
aaccaguuuagauuucaagaaa

SEQ ID NO: 2771336 - RNA, 23 nt, Human
aacccuuaccccuuagccucccu

SEQ ID NO: 2771337 - RNA, 21 nt, Human
aacccuuaccccuuagccucc

SEQ ID NO: 2771338 - RNA, 20 nt, Human
aacccuuccugagcuuuaug

SEQ ID NO: 2771339 - RNA, 19 nt, Human
aacccuucaacguuucuuc

SEQ ID NO: 2771340 - RNA, 22 nt, Human
aacccuucaacguuucuucacu

SEQ ID NO: 2771341 - RNA, 18 nt, Human
aaccauaacaacuucaua

SEQ ID NO: 2771342 - RNA, 19 nt, Human
aaccagggaagcugucccu

SEQ ID NO: 2771343 - RNA, 18 nt, Human
aaccagggaagcuguccc

SEQ ID NO: 2771344 - RNA, 23 nt, Human
aacaugcuuaugacaaugacugu

SEQ ID NO: 2771345 - RNA, 15 nt, Human
aaccgcacagcucag

SEQ ID NO: 2771346 - RNA, 14 nt, Human
aaccgcacagcuca

SEQ ID NO: 2771347 - RNA, 13 nt, Human
aaccgcacagcuc

SEQ ID NO: 2771348 - RNA, 12 nt, Human
aaccgcacagcu

SEQ ID NO: 2771349 - RNA, 14 nt, Human
aaccgaugcuuuac

SEQ ID NO: 2771350 - RNA, 17 nt, Human
aaccgaugcuuuaccaa

SEQ ID NO: 2771351 - RNA, 18 nt, Human
aaccgaugcuuuaccaaa

SEQ ID NO: 2771352 - RNA, 22 nt, Human
aaccgagcaaagaucaaaauaa

SEQ ID NO: 2771353 - RNA, 17 nt, Human
aaccgagcaaagaucaa

SEQ ID NO: 2771354 - RNA, 16 nt, Human
aaccgccucaaaaugu

SEQ ID NO: 2771355 - RNA, 16 nt, Human
aaccgcuuuggccuga

SEQ ID NO: 2771356 - RNA, 17 nt, Human
aaccgcuuuggccugag

SEQ ID NO: 2771357 - RNA, 18 nt, Human
aaccgcuuuggccugagu

SEQ ID NO: 2771358 - RNA, 12 nt, Human
aaccgcucaccu

SEQ ID NO: 2771359 - RNA, 16 nt, Human
aaccgcucaccuagag

SEQ ID NO: 2771360 - RNA, 19 nt, Human
aaccgcucaccuagagcca

SEQ ID NO: 2771361 - RNA, 16 nt, Human
aacagcuaaugggaca

SEQ ID NO: 2771362 - RNA, 20 nt, Human
aacagccuuugggaaaugcu

SEQ ID NO: 2771363 - RNA, 20 nt, Human
aacagcgaaguagcuugcuc

SEQ ID NO: 2771364 - RNA, 16 nt, Human
aacagauuuugggguu

SEQ ID NO: 2771365 - RNA, 15 nt, Human
aacagcaaaccaaga

SEQ ID NO: 2771366 - RNA, 16 nt, Human
aacagcaaaccaagag

SEQ ID NO: 2771367 - RNA, 17 nt, Human
aacagcaaaccaagaga

SEQ ID NO: 2771368 - RNA, 18 nt, Human
aacagcaaaccaagagau

SEQ ID NO: 2771369 - RNA, 19 nt, Human
aacagcaaaccaagagauu

SEQ ID NO: 2771370 - RNA, 17 nt, Human
aacaggagacaggaagg

SEQ ID NO: 2771371 - RNA, 20 nt, Human
aacaggaaucaagagcugcc

SEQ ID NO: 2771372 - RNA, 19 nt, Human
aacagcuaugggagcccca

SEQ ID NO: 2771373 - RNA, 18 nt, Human
aacagcuaugggagcccc

SEQ ID NO: 2771374 - RNA, 13 nt, Human
aacagcuacaaca

SEQ ID NO: 2771375 - RNA, 14 nt, Human
aacagcuacaacag

SEQ ID NO: 2771376 - RNA, 15 nt, Human
aacagcuacaacagc

SEQ ID NO: 2771377 - RNA, 19 nt, Human
aacagcuacaacagccuca

SEQ ID NO: 2771378 - RNA, 20 nt, Human
aacagcuacaacagccucac

SEQ ID NO: 2771379 - RNA, 21 nt, Human
aacagcuacaacagccucacu

SEQ ID NO: 2771380 - RNA, 22 nt, Human
aacagcuacaacagccucacuu

SEQ ID NO: 2771381 - RNA, 22 nt, Human
aacaggaaaggcucgaaauaca

SEQ ID NO: 2771382 - RNA, 22 nt, Human
aacagcuaugggagccccaggg

SEQ ID NO: 2771383 - RNA, 14 nt, Human
aacaggauaacccu

SEQ ID NO: 2771384 - RNA, 20 nt, Human
aacaggaucaguuaacuauu

SEQ ID NO: 2771385 - RNA, 19 nt, Human
aacauccuucaagaacucu

SEQ ID NO: 2771386 - RNA, 22 nt, Human
aacauccuaucaacaacaaggu

SEQ ID NO: 2771387 - RNA, 12 nt, Human
aacauccugcca

SEQ ID NO: 2771388 - RNA, 14 nt, Human
aacauccugccagc

SEQ ID NO: 2771389 - RNA, 19 nt, Human
aacauccuuugcagggcag

SEQ ID NO: 2771390 - RNA, 21 nt, Human
aacauccuuugcagggcagcc

SEQ ID NO: 2771391 - RNA, 22 nt, Human
aacauccuuugcagggcagccc

SEQ ID NO: 2771392 - RNA, 12 nt, Human
aacaucuagaaa

SEQ ID NO: 2771393 - RNA, 16 nt, Human
aacaucuagaaauugc

SEQ ID NO: 2771394 - RNA, 22 nt, Human
aacauccuacaagacacaguga

SEQ ID NO: 2771395 - RNA, 15 nt, Human
aacauccuacaagac

SEQ ID NO: 2771396 - RNA, 12 nt, Human
aaaucuuaaaaa

SEQ ID NO: 2771397 - RNA, 14 nt, Human
aaaucuuaaaaagu

SEQ ID NO: 2771398 - RNA, 17 nt, Human
aaaucuuaaaaaguugu

SEQ ID NO: 2771399 - RNA, 12 nt, Human
aaaucuguguau

SEQ ID NO: 2771400 - RNA, 18 nt, Human
aaaucuguguauauuauu

SEQ ID NO: 2771401 - RNA, 20 nt, Human
aaaucuguguauauuauuug

SEQ ID NO: 2771402 - RNA, 22 nt, Human
aaaucuguguauauuauuuggc

SEQ ID NO: 2771403 - RNA, 15 nt, Human
aaaucuguucuaaca

SEQ ID NO: 2771404 - RNA, 20 nt, Human
aaaucuguucugggcucuuu

SEQ ID NO: 2771405 - RNA, 12 nt, Human
aaaucuguugcc

SEQ ID NO: 2771406 - RNA, 20 nt, Human
aaaugcuagguuaauuccaa

SEQ ID NO: 2771407 - RNA, 22 nt, Human
aaaucugcuggaguuucaugua

SEQ ID NO: 2771408 - RNA, 20 nt, Human
aaaucugcuggaguuucaug

SEQ ID NO: 2771409 - RNA, 13 nt, Human
aaaucugcagagg

SEQ ID NO: 2771410 - RNA, 12 nt, Human
aaaucucuaaua

SEQ ID NO: 2771411 - RNA, 15 nt, Human
aaaucugaagauugc

SEQ ID NO: 2771412 - RNA, 13 nt, Human
aaaucucuaauau

SEQ ID NO: 2771413 - RNA, 15 nt, Human
aaaucucuaauaugg

SEQ ID NO: 2771414 - RNA, 16 nt, Human
aaauggacacugugcc

SEQ ID NO: 2771415 - RNA, 22 nt, Human
aaauggaauugaaaaacucuuu

SEQ ID NO: 2771416 - RNA, 15 nt, Human
aaauggacauggugg

SEQ ID NO: 2771417 - RNA, 13 nt, Human
aaaugcucucuca

SEQ ID NO: 2771418 - RNA, 16 nt, Human
aaaugcucucucaaau

SEQ ID NO: 2771419 - RNA, 22 nt, Human
aaaugcucucucaaauugucag

SEQ ID NO: 2771420 - RNA, 12 nt, Human
aaauguugaaua

SEQ ID NO: 2771421 - RNA, 15 nt, Human
aaauguugaauaaaa

SEQ ID NO: 2771422 - RNA, 22 nt, Human
aaauguugaaccaaaccucccu

SEQ ID NO: 2771423 - RNA, 21 nt, Human
aaauguucuaaguuucuaaga

SEQ ID NO: 2771424 - RNA, 18 nt, Human
aaauguucuaugguuaug

SEQ ID NO: 2771425 - RNA, 13 nt, Human
aaauguucuaagu

SEQ ID NO: 2771426 - RNA, 14 nt, Human
aaauguucuaaguu

SEQ ID NO: 2771427 - RNA, 17 nt, Human
aaauguucuaaguuucu

SEQ ID NO: 2771428 - RNA, 19 nt, Human
aaauguucuaaguuucuaa

SEQ ID NO: 2771429 - RNA, 18 nt, Human
aaauugagacagugcaca

SEQ ID NO: 2771430 - RNA, 21 nt, Human
aaauugagacagugcacauga

SEQ ID NO: 2771431 - RNA, 13 nt, Human
aaauuaaaaagau

SEQ ID NO: 2771432 - RNA, 17 nt, Human
aaauuaaaaagauucuu

SEQ ID NO: 2771433 - RNA, 18 nt, Human
aaauuaaaaagauucuuu

SEQ ID NO: 2771434 - RNA, 23 nt, Human
aaauuaaaaagauucuuuuucug

SEQ ID NO: 2771435 - RNA, 18 nt, Human
aaauguucaucaauuccc

SEQ ID NO: 2771436 - RNA, 14 nt, Human
aaauugauguguuu

SEQ ID NO: 2771437 - RNA, 20 nt, Human
aaauugauaaugcuuucaca

SEQ ID NO: 2771438 - RNA, 15 nt, Human
aaauuggguucauga

SEQ ID NO: 2771439 - RNA, 16 nt, Human
aaauuggguucaugau

SEQ ID NO: 2771440 - RNA, 19 nt, Human
aaauuggguucaugaugca

SEQ ID NO: 2771441 - RNA, 16 nt, Human
aaauugguucuuuauu

SEQ ID NO: 2771442 - RNA, 19 nt, Human
aacaaaauuuguuugaaau

SEQ ID NO: 2771443 - RNA, 21 nt, Human
aacaaaauuuuauuuugugcu

SEQ ID NO: 2771444 - RNA, 16 nt, Human
aacaaacaccuucuua

SEQ ID NO: 2771445 - RNA, 19 nt, Human
aacaaacaccuucuuauua

SEQ ID NO: 2771446 - RNA, 15 nt, Human
aacaaacauuguguu

SEQ ID NO: 2771447 - RNA, 20 nt, Human
aacaaacauuguguugacau

SEQ ID NO: 2771448 - RNA, 21 nt, Human
aacaaacauuguguugacauu

SEQ ID NO: 2771449 - RNA, 22 nt, Human
aacaaacauuguguugacauua

SEQ ID NO: 2771450 - RNA, 14 nt, Human
aaauuaaaauggau

SEQ ID NO: 2771451 - RNA, 16 nt, Human
aacaaaccagaauccc

SEQ ID NO: 2771452 - RNA, 10 nt, Human
aacaaaccau

SEQ ID NO: 2771453 - RNA, 11 nt, Human
aacaaaccauc

SEQ ID NO: 2771454 - RNA, 18 nt, Human
aacacccucgaagcgcgc

SEQ ID NO: 2771455 - RNA, 13 nt, Human
aacacccuuagaa

SEQ ID NO: 2771456 - RNA, 14 nt, Human
aacacccuuagaaa

SEQ ID NO: 2771457 - RNA, 15 nt, Human
aacacccuuagaaaa

SEQ ID NO: 2771458 - RNA, 20 nt, Human
aacacccuuagaaaaugugu

SEQ ID NO: 2771459 - RNA, 12 nt, Human
aacacccuuccu

SEQ ID NO: 2771460 - RNA, 14 nt, Human
aacacccuuccuuc

SEQ ID NO: 2771461 - RNA, 19 nt, Human
aacacccuuccuucuguaa

SEQ ID NO: 2771462 - RNA, 20 nt, Human
aacaccgcuucugccuuuuc

SEQ ID NO: 2771463 - RNA, 19 nt, Human
aacaccuagcuuuauucuu

SEQ ID NO: 2771464 - RNA, 21 nt, Human
aacaccucacaccucacucuu

SEQ ID NO: 2771465 - RNA, 13 nt, Human
aacaccccucagu

SEQ ID NO: 2771466 - RNA, 21 nt, Human
aacaccccucaguugugcagc

SEQ ID NO: 2771467 - RNA, 23 nt, Human
aacaccucccaggagacaguuca

SEQ ID NO: 2771468 - RNA, 13 nt, Human
aacaccucccagg

SEQ ID NO: 2771469 - RNA, 19 nt, Human
aacacuaacucaccagccc

SEQ ID NO: 2771470 - RNA, 18 nt, Human
aacacuaacucaccagcc

SEQ ID NO: 2771471 - RNA, 17 nt, Human
aacacuaacucaccagc

SEQ ID NO: 2771472 - RNA, 16 nt, Human
aacaccuccucaugua

SEQ ID NO: 2771473 - RNA, 16 nt, Human
aacacagucaaaauaa

SEQ ID NO: 2771474 - RNA, 19 nt, Human
aacacagucaaaauaauuc

SEQ ID NO: 2771475 - RNA, 22 nt, Human
aacacaggcaaaauccuugcuu

SEQ ID NO: 2771476 - RNA, 13 nt, Human
aacacaggcagcu

SEQ ID NO: 2771477 - RNA, 14 nt, Human
aacacaggcagcuu

SEQ ID NO: 2771478 - RNA, 15 nt, Human
aacacaggcagcuuu

SEQ ID NO: 2771479 - RNA, 17 nt, Human
aacacaggcagcuuucu

SEQ ID NO: 2771480 - RNA, 18 nt, Human
aacacaggcagcuuucua

SEQ ID NO: 2771481 - RNA, 22 nt, Human
aacacaggcagcuuucuagaag

SEQ ID NO: 2771482 - RNA, 14 nt, Human
aacaaaugugaagg

SEQ ID NO: 2771483 - RNA, 16 nt, Human
aacaaacucucugaac

SEQ ID NO: 2771484 - RNA, 16 nt, Human
aacaaauaaucacauu

SEQ ID NO: 2771485 - RNA, 16 nt, Human
aacaaagguugagaug

SEQ ID NO: 2771486 - RNA, 12 nt, Human
aacaaagucuuu

SEQ ID NO: 2771487 - RNA, 12 nt, Human
aacaaauaugca

SEQ ID NO: 2771488 - RNA, 13 nt, Human
aacaaauaugcaa

SEQ ID NO: 2771489 - RNA, 16 nt, Human
aacaaauaugcuaauu

SEQ ID NO: 2771490 - RNA, 18 nt, Human
aacaaauaugcuaauuug

SEQ ID NO: 2771491 - RNA, 23 nt, Human
aaaauuaaucugggccagaauuu

SEQ ID NO: 2771492 - RNA, 20 nt, Human
aaaauuaagacaagccuggc

SEQ ID NO: 2771493 - RNA, 18 nt, Human
aaaauccccaugccugug

SEQ ID NO: 2771494 - RNA, 12 nt, Human
aaaauuacuaau

SEQ ID NO: 2771495 - RNA, 15 nt, Human
aaaauuacuaauuuu

SEQ ID NO: 2771496 - RNA, 17 nt, Human
aaaauuacuaauuuuac

SEQ ID NO: 2771497 - RNA, 14 nt, Human
aaaauuagaaauug

SEQ ID NO: 2771498 - RNA, 18 nt, Human
aaaauuagccgggcgugg

SEQ ID NO: 2771499 - RNA, 20 nt, Human
aaaauuagaaauuggcugga

SEQ ID NO: 2771500 - RNA, 18 nt, Human
aaaauuagaugcauguug

SEQ ID NO: 2771501 - RNA, 19 nt, Human
aaaauuaggauuucaugau

SEQ ID NO: 2771502 - RNA, 21 nt, Human
aaaauuauacuaacuuauuua

SEQ ID NO: 2771503 - RNA, 22 nt, Human
aaaauuauacuaacuuauuuau

SEQ ID NO: 2771504 - RNA, 13 nt, Human
aaaauuauuugca

SEQ ID NO: 2771505 - RNA, 14 nt, Human
aaaauuauuugcag

SEQ ID NO: 2771506 - RNA, 17 nt, Human
aaaauuauuuuaaacaa

SEQ ID NO: 2771507 - RNA, 18 nt, Human
aaaauuauuuuaaacaaa

SEQ ID NO: 2771508 - RNA, 19 nt, Human
aaaauuauuuuaaacaaaa

SEQ ID NO: 2771509 - RNA, 13 nt, Human
aaaauuaugaauc

SEQ ID NO: 2771510 - RNA, 14 nt, Human
aaaauuaugaaucu

SEQ ID NO: 2771511 - RNA, 16 nt, Human
aaaauuaugaaucuga

SEQ ID NO: 2771512 - RNA, 19 nt, Human
aaaauuaugaaucugauuu

SEQ ID NO: 2771513 - RNA, 22 nt, Human
aaaauuaugaaucugauuuuua

SEQ ID NO: 2771514 - RNA, 13 nt, Human
aaaauuaucuaua

SEQ ID NO: 2771515 - RNA, 16 nt, Human
aaaaguuuacaagugu

SEQ ID NO: 2771516 - RNA, 22 nt, Human
aaaaguuuacaaguguauauca

SEQ ID NO: 2771517 - RNA, 13 nt, Human
aaaaguuuacaac

SEQ ID NO: 2771518 - RNA, 17 nt, Human
aaaaguuuacaacauaa

SEQ ID NO: 2771519 - RNA, 23 nt, Human
aaaaguuuacaacauaaucuagu

SEQ ID NO: 2771520 - RNA, 18 nt, Human
aaaaguuucaaugugauu

SEQ ID NO: 2771521 - RNA, 12 nt, Human
aaaaguuucaau

SEQ ID NO: 2771522 - RNA, 13 nt, Human
aaaaguuucaaug

SEQ ID NO: 2771523 - RNA, 12 nt, Human
aaaaguuuccau

SEQ ID NO: 2771524 - RNA, 21 nt, Human
aaaauaaaaacccacaaaaau

SEQ ID NO: 2771525 - RNA, 16 nt, Human
aaaauaaaaacuauuc

SEQ ID NO: 2771526 - RNA, 18 nt, Human
aaaauaaaaacuauucga

SEQ ID NO: 2771527 - RNA, 15 nt, Human
aaaauaaaaaaugug

SEQ ID NO: 2771528 - RNA, 15 nt, Human
aaaauccaaaaagaa

SEQ ID NO: 2771529 - RNA, 14 nt, Human
aaaauccaaaaaga

SEQ ID NO: 2771530 - RNA, 21 nt, Human
aaaaucacuuugucuaacuca

SEQ ID NO: 2771531 - RNA, 14 nt, Human
aaaaucacuugauu

SEQ ID NO: 2771532 - RNA, 23 nt, Human
aaaauauuuuuuauauauacagu

SEQ ID NO: 2771533 - RNA, 20 nt, Human
aaaauauuuuuuauauauac

SEQ ID NO: 2771534 - RNA, 14 nt, Human
aaaaucaaaacaag

SEQ ID NO: 2771535 - RNA, 16 nt, Human
aaaaucaaaacaagug

SEQ ID NO: 2771536 - RNA, 16 nt, Human
aaaaucaaagcugagg

SEQ ID NO: 2771537 - RNA, 11 nt, Human
aaaaucaacuu

SEQ ID NO: 2771538 - RNA, 13 nt, Human
aaaaucacaaaaa

SEQ ID NO: 2771539 - RNA, 14 nt, Human
aaaaucacaaaaau

SEQ ID NO: 2771540 - RNA, 14 nt, Human
aaaaucacaauuuu

SEQ ID NO: 2771541 - RNA, 20 nt, Human
aaaaucacaauuuuuaaugg

SEQ ID NO: 2771542 - RNA, 23 nt, Human
aaaaucacacuguaaauaugaau

SEQ ID NO: 2771543 - RNA, 22 nt, Human
aaaauaaaaagugacacagcag

SEQ ID NO: 2771544 - RNA, 17 nt, Human
aaaauaaaaagugacac

SEQ ID NO: 2771545 - RNA, 21 nt, Human
aaaauaaaaagugacacagca

SEQ ID NO: 2771546 - RNA, 20 nt, Human
aaaauucgcccgagcuguuu

SEQ ID NO: 2771547 - RNA, 22 nt, Human
aaaauucgcccgagcuguuuau

SEQ ID NO: 2771548 - RNA, 13 nt, Human
aaaauucuccuga

SEQ ID NO: 2771549 - RNA, 22 nt, Human
aaaauuccuuuguguuucuauu

SEQ ID NO: 2771550 - RNA, 22 nt, Human
aaaauugaagagagauauaucu

SEQ ID NO: 2771551 - RNA, 17 nt, Human
aaacagcaaaccaagag

SEQ ID NO: 2771552 - RNA, 18 nt, Human
aaacagcaaaccaagaga

SEQ ID NO: 2771553 - RNA, 19 nt, Human
aaacagcaaaccaagagau

SEQ ID NO: 2771554 - RNA, 20 nt, Human
aaacagcaaaccaagagauu

SEQ ID NO: 2771555 - RNA, 23 nt, Human
aaacagcaaaccaagagauugcu

SEQ ID NO: 2771556 - RNA, 24 nt, Human
aaacagcaaaccaagagauugcua

SEQ ID NO: 2771557 - RNA, 13 nt, Human
aaaauucuuggaa

SEQ ID NO: 2771558 - RNA, 20 nt, Human
aaaauucuguagguucugug

SEQ ID NO: 2771559 - RNA, 17 nt, Human
aaaauucuugaaagaau

SEQ ID NO: 2771560 - RNA, 14 nt, Human
aaacagcaguguuc

SEQ ID NO: 2771561 - RNA, 17 nt, Human
aaacagcuaaugggaca

SEQ ID NO: 2771562 - RNA, 18 nt, Human
aaacagcugcauuagaaa

SEQ ID NO: 2771563 - RNA, 20 nt, Human
aaacagcugcauuagaaaaa

SEQ ID NO: 2771564 - RNA, 16 nt, Human
aaacagcugucucuaa

SEQ ID NO: 2771565 - RNA, 16 nt, Human
aaacaggagacaggaa

SEQ ID NO: 2771566 - RNA, 17 nt, Human
aaacaggagacaggaag

SEQ ID NO: 2771567 - RNA, 18 nt, Human
aaacaggagacaggaagg

SEQ ID NO: 2771568 - RNA, 12 nt, Human
aaacaggaucag

SEQ ID NO: 2771569 - RNA, 12 nt, Human
aaacagcuuuca

SEQ ID NO: 2771570 - RNA, 14 nt, Human
aaacagcuuucaag

SEQ ID NO: 2771571 - RNA, 18 nt, Human
aaacagcuuucaagugcc

SEQ ID NO: 2771572 - RNA, 19 nt, Human
aaacagcuuucaagugccu

SEQ ID NO: 2771573 - RNA, 20 nt, Human
aaacagcuuuggggugucuu

SEQ ID NO: 2771574 - RNA, 22 nt, Human
aaagaaccaaaaguuuuccuga

SEQ ID NO: 2771575 - RNA, 20 nt, Human
aaagaggcugccccucucac

SEQ ID NO: 2771576 - RNA, 18 nt, Human
aaagaggcugccccucuc

SEQ ID NO: 2771577 - RNA, 14 nt, Human
aaagaggcugcccc

SEQ ID NO: 2771578 - RNA, 17 nt, Human
aaagaagaacuugcaug

SEQ ID NO: 2771579 - RNA, 10 nt, Human
aaagaagaag

SEQ ID NO: 2771580 - RNA, 21 nt, Human
aaagaagaagaagaagaaaag

SEQ ID NO: 2771581 - RNA, 20 nt, Human
aaagaagaauguguuucaaa

SEQ ID NO: 2771582 - RNA, 15 nt, Human
aaagaaaccacuucu

SEQ ID NO: 2771583 - RNA, 16 nt, Human
aaagaagaaagacucu

SEQ ID NO: 2771584 - RNA, 12 nt, Human
aaagaacuuacc

SEQ ID NO: 2771585 - RNA, 12 nt, Human
aaagaacuuacu

SEQ ID NO: 2771586 - RNA, 17 nt, Human
aaagaacuuacugauua

SEQ ID NO: 2771587 - RNA, 9 nt, Human
aaagaagaa

SEQ ID NO: 2771588 - RNA, 23 nt, Human
aaagaaaauaaagacaaccauau

SEQ ID NO: 2771589 - RNA, 19 nt, Human
aaacugaggaauuuucuuu

SEQ ID NO: 2771590 - RNA, 22 nt, Human
aaagaaaaugaaaaacaaccaa

SEQ ID NO: 2771591 - RNA, 18 nt, Human
aaagaaaauucuuggaau

SEQ ID NO: 2771592 - RNA, 12 nt, Human
aaagaaaauuuu

SEQ ID NO: 2771593 - RNA, 19 nt, Human
aaagaaaauuuuuguagua

SEQ ID NO: 2771594 - RNA, 13 nt, Human
aaagaaacagcuu

SEQ ID NO: 2771595 - RNA, 15 nt, Human
aaagaaacagcuuuc

SEQ ID NO: 2771596 - RNA, 14 nt, Human
aaacugaaaaucua

SEQ ID NO: 2771597 - RNA, 17 nt, Human
aaacugaaaaucuaaua

SEQ ID NO: 2771598 - RNA, 18 nt, Human
aaacugaaaaucuaauau

SEQ ID NO: 2771599 - RNA, 19 nt, Human
aaacugaaaaucuaauauu

SEQ ID NO: 2771600 - RNA, 12 nt, Human
aaacugaaaauc

SEQ ID NO: 2771601 - RNA, 13 nt, Human
aaacugaaaaucu

SEQ ID NO: 2771602 - RNA, 12 nt, Human
aaacucuugcua

SEQ ID NO: 2771603 - RNA, 13 nt, Human
aaacucuuuauuu

SEQ ID NO: 2771604 - RNA, 23 nt, Human
aaaccccauuugcuuucuuuucu

SEQ ID NO: 2771605 - RNA, 19 nt, Human
aaacccauaggcccacaca

SEQ ID NO: 2771606 - RNA, 21 nt, Human
aaacccauaggcccacacaca

SEQ ID NO: 2771607 - RNA, 22 nt, Human
aaacccauaggcccacacacag

SEQ ID NO: 2771608 - RNA, 23 nt, Human
aaacccauaggcccacacacagg

SEQ ID NO: 2771609 - RNA, 17 nt, Human
aaacucuugaccucagg

SEQ ID NO: 2771610 - RNA, 22 nt, Human
aaacucuuaucucagucaugca

SEQ ID NO: 2771611 - RNA, 16 nt, Human
aaaccuaguacugccc

SEQ ID NO: 2771612 - RNA, 17 nt, Human
aaaccuauccucacugc

SEQ ID NO: 2771613 - RNA, 18 nt, Human
aaaccuauccucacugcc

SEQ ID NO: 2771614 - RNA, 22 nt, Human
aaaccucaaaaugucuaagaua

SEQ ID NO: 2771615 - RNA, 17 nt, Human
aaaccucaaaaugucua

SEQ ID NO: 2771616 - RNA, 17 nt, Human
aaaccuagagaagauaa

SEQ ID NO: 2771617 - RNA, 19 nt, Human
aaaccuaaguccuuuaugu

SEQ ID NO: 2771618 - RNA, 20 nt, Human
aaaccuaaguccuuuaugug

SEQ ID NO: 2771619 - RNA, 18 nt, Human
aaaccuacacacugucau

SEQ ID NO: 2771620 - RNA, 15 nt, Human
aaaccuacauauucc

SEQ ID NO: 2771621 - RNA, 16 nt, Human
aaaccuacauauucca

SEQ ID NO: 2771622 - RNA, 16 nt, Human
aaaccgccuaguuuac

SEQ ID NO: 2771623 - RNA, 20 nt, Human
aaaccgccuaguuuacuguu

SEQ ID NO: 2771624 - RNA, 18 nt, Human
aaaccgcuuuggccugag

SEQ ID NO: 2771625 - RNA, 20 nt, Human
aaagauaauugcuauuuauu

SEQ ID NO: 2771626 - RNA, 17 nt, Human
aaagauaauauuacugu

SEQ ID NO: 2771627 - RNA, 23 nt, Human
aaagaggcugccccucucaccaa

SEQ ID NO: 2771628 - RNA, 22 nt, Human
aaagaggcugccccucucacca

SEQ ID NO: 2771629 - RNA, 14 nt, Human
aaagcauuuaucau

SEQ ID NO: 2771630 - RNA, 15 nt, Human
aaagccaaagcuagg

SEQ ID NO: 2771631 - RNA, 17 nt, Human
aaagccaaacucugcca

SEQ ID NO: 2771632 - RNA, 14 nt, Human
aaagcccugagauc

SEQ ID NO: 2771633 - RNA, 19 nt, Human
aaaggcuagguacacagcu

SEQ ID NO: 2771634 - RNA, 21 nt, Human
aaaggcucagucucaggagca

SEQ ID NO: 2771635 - RNA, 19 nt, Human
aaaggcucagucucaggag

SEQ ID NO: 2771636 - RNA, 20 nt, Human
aaauaaaaauauuguguugu

SEQ ID NO: 2771637 - RNA, 22 nt, Human
aaagucacuuacuauuguugcu

SEQ ID NO: 2771638 - RNA, 13 nt, Human
aaagugcuaaggu

SEQ ID NO: 2771639 - RNA, 23 nt, Human
aaauaaaaauuauuauugauuuu

SEQ ID NO: 2771640 - RNA, 13 nt, Human
aaauaaaacaaag

SEQ ID NO: 2771641 - RNA, 15 nt, Human
aaauaaaacaaaggg

SEQ ID NO: 2771642 - RNA, 20 nt, Human
aaauaaaacaaagggcacag

SEQ ID NO: 2771643 - RNA, 14 nt, Human
aaauaaaaccagcu

SEQ ID NO: 2771644 - RNA, 19 nt, Human
aaauaaaccucaaaauguc

SEQ ID NO: 2771645 - RNA, 22 nt, Human
aaauaaaccaaaggacauuaug

SEQ ID NO: 2771646 - RNA, 18 nt, Human
aaauaaacaaauaacaau

SEQ ID NO: 2771647 - RNA, 15 nt, Human
aaauaaaaccuuuca

SEQ ID NO: 2771648 - RNA, 14 nt, Human
aaauaaaaccuuuc

SEQ ID NO: 2771649 - RNA, 13 nt, Human
aaauaaaaccuuu

SEQ ID NO: 2771650 - RNA, 12 nt, Human
aaauaaaaccuu

SEQ ID NO: 2771651 - RNA, 11 nt, Human
aaauaaaaccu

SEQ ID NO: 2771652 - RNA, 14 nt, Human
aaagucacaauguu

SEQ ID NO: 2771653 - RNA, 18 nt, Human
aaagucacaauguucuuu

SEQ ID NO: 2771654 - RNA, 20 nt, Human
aaagucacaauguucuuuau

SEQ ID NO: 2771655 - RNA, 15 nt, Human
aaaggcugugcugcc

SEQ ID NO: 2771656 - RNA, 23 nt, Human
aaaggcugugcugcccugaagaa

SEQ ID NO: 2771657 - RNA, 18 nt, Human
aaaggcugugcugcccug

SEQ ID NO: 2771658 - RNA, 12 nt, Human
aaaguauuuuga

SEQ ID NO: 2771659 - RNA, 13 nt, Human
aaaguauuuugaa

SEQ ID NO: 2771660 - RNA, 14 nt, Human
aaaguauuuugaag

SEQ ID NO: 2771661 - RNA, 15 nt, Human
aaaguauuuugaagu

SEQ ID NO: 2771662 - RNA, 16 nt, Human
aaaguauuuugaaguu

SEQ ID NO: 2771663 - RNA, 17 nt, Human
aaaguauuuugaaguuu

SEQ ID NO: 2771664 - RNA, 18 nt, Human
aaaguauuuugaaguuua

SEQ ID NO: 2771665 - RNA, 21 nt, Human
aaaguauuuugaaguuuacau

SEQ ID NO: 2771666 - RNA, 22 nt, Human
aaaguauuuugaaguuuacauu

SEQ ID NO: 2771667 - RNA, 23 nt, Human
aaaguauuuugaaguuuacauuu

SEQ ID NO: 2771668 - RNA, 15 nt, Human
aaagugccacucauu

SEQ ID NO: 2771669 - RNA, 23 nt, Human
aaagugcagcuccguuuggcagu

SEQ ID NO: 2771670 - RNA, 18 nt, Human
aaagugcauauuuaucca

SEQ ID NO: 2771671 - RNA, 13 nt, Human
aaagugcacaccu

SEQ ID NO: 2771672 - RNA, 21 nt, Human
aaagugauaauuucuggaauu

SEQ ID NO: 2771673 - RNA, 15 nt, Human
aaagugaugacauau

SEQ ID NO: 2771674 - RNA, 16 nt, Human
aaagugaugacauauu

SEQ ID NO: 2771675 - RNA, 17 nt, Human
aaagugaugacauauuu

SEQ ID NO: 2771676 - RNA, 21 nt, Human
aaagugaugggcuuucucuuu

SEQ ID NO: 2771677 - RNA, 15 nt, Human
aaagugauaauuucu

SEQ ID NO: 2771678 - RNA, 15 nt, Human
aaauaaauguaucau

SEQ ID NO: 2771679 - RNA, 16 nt, Human
aaauaaauguaucaua

SEQ ID NO: 2771680 - RNA, 21 nt, Human
aaauaaauguaucauagaaau

SEQ ID NO: 2771681 - RNA, 12 nt, Human
aaauaaauuagu

SEQ ID NO: 2771682 - RNA, 17 nt, Human
aaauaaauuaguuguua

SEQ ID NO: 2771683 - RNA, 14 nt, Human
aaauaaauuuauau

SEQ ID NO: 2771684 - RNA, 17 nt, Human
acagaacuugaaugugu

SEQ ID NO: 2771685 - RNA, 20 nt, Human
acagaacuugaaugugucag

SEQ ID NO: 2771686 - RNA, 19 nt, Human
acagaacuugaauguguca

SEQ ID NO: 2771687 - RNA, 13 nt, Human
acagaagcuucag

SEQ ID NO: 2771688 - RNA, 14 nt, Human
acagaagcuucaga

SEQ ID NO: 2771689 - RNA, 18 nt, Human
acagaagcuucagaaguu

SEQ ID NO: 2771690 - RNA, 19 nt, Human
acagaagcuucagaaguuu

SEQ ID NO: 2771691 - RNA, 14 nt, Human
acagacaacagaag

SEQ ID NO: 2771692 - RNA, 16 nt, Human
acagaagucaugaagc

SEQ ID NO: 2771693 - RNA, 12 nt, Human
acagacacacac

SEQ ID NO: 2771694 - RNA, 13 nt, Human
acagacacacaca

SEQ ID NO: 2771695 - RNA, 14 nt, Human
acagacacacacac

SEQ ID NO: 2771696 - RNA, 11 nt, Human
acagacacaca

SEQ ID NO: 2771697 - RNA, 15 nt, Human
acagacacacacacg

SEQ ID NO: 2771698 - RNA, 23 nt, Human
acagaggccaugggccuccugug

SEQ ID NO: 2771699 - RNA, 21 nt, Human
acagaggccaugggccuccug

SEQ ID NO: 2771700 - RNA, 17 nt, Human
acagaggccaugggccu

SEQ ID NO: 2771701 - RNA, 23 nt, Human
acagaggcagccccauucugccu

SEQ ID NO: 2771702 - RNA, 17 nt, Human
acagaggccauggcaga

SEQ ID NO: 2771703 - RNA, 20 nt, Human
acagaggaugagcucuaccc

SEQ ID NO: 2771704 - RNA, 13 nt, Human
acagaggcagccc

SEQ ID NO: 2771705 - RNA, 16 nt, Human
acagaggaugagcucu

SEQ ID NO: 2771706 - RNA, 23 nt, Human
acagacacacacacgcacgcaca

SEQ ID NO: 2771707 - RNA, 16 nt, Human
acagacacacacacgc

SEQ ID NO: 2771708 - RNA, 17 nt, Human
acagacacacacacgca

SEQ ID NO: 2771709 - RNA, 18 nt, Human
acagacacacacacgcac

SEQ ID NO: 2771710 - RNA, 22 nt, Human
acagacacacacacgcacgcac

SEQ ID NO: 2771711 - RNA, 21 nt, Human
acagaggaauuuauaccucaa

SEQ ID NO: 2771712 - RNA, 19 nt, Human
acacuguggaacuaauaaa

SEQ ID NO: 2771713 - RNA, 20 nt, Human
acacuguggaacuaauaaau

SEQ ID NO: 2771714 - RNA, 23 nt, Human
acacuguggaacuaauaaauaca

SEQ ID NO: 2771715 - RNA, 17 nt, Human
acacuguggguguguga

SEQ ID NO: 2771716 - RNA, 19 nt, Human
acacugugggugugugacu

SEQ ID NO: 2771717 - RNA, 17 nt, Human
acagaacaucauuagaa

SEQ ID NO: 2771718 - RNA, 17 nt, Human
acagaaccccuacauga

SEQ ID NO: 2771719 - RNA, 13 nt, Human
acagaacuaaaug

SEQ ID NO: 2771720 - RNA, 14 nt, Human
acagaacuaaaugu

SEQ ID NO: 2771721 - RNA, 15 nt, Human
acagaacuaaauguu

SEQ ID NO: 2771722 - RNA, 16 nt, Human
acagaacuaaauguuc

SEQ ID NO: 2771723 - RNA, 17 nt, Human
acagaacuaaauguucu

SEQ ID NO: 2771724 - RNA, 18 nt, Human
acagaacuaaauguucua

SEQ ID NO: 2771725 - RNA, 22 nt, Human
acacugggaggccgaggcaggg

SEQ ID NO: 2771726 - RNA, 14 nt, Human
acacugggaaacag

SEQ ID NO: 2771727 - RNA, 13 nt, Human
acaauuuuuaaug

SEQ ID NO: 2771728 - RNA, 14 nt, Human
acaauuuuuaaugg

SEQ ID NO: 2771729 - RNA, 15 nt, Human
acaauuuuuaauggc

SEQ ID NO: 2771730 - RNA, 21 nt, Human
acaauuguuugggguugaaaa

SEQ ID NO: 2771731 - RNA, 16 nt, Human
acaauuguuuuaaucu

SEQ ID NO: 2771732 - RNA, 18 nt, Human
acaauuguuuuaaucuga

SEQ ID NO: 2771733 - RNA, 20 nt, Human
acaauuguuuuaaucugaaa

SEQ ID NO: 2771734 - RNA, 22 nt, Human
acaauuguuuuaaucugaaauu

SEQ ID NO: 2771735 - RNA, 23 nt, Human
acaauuguuuuaaucugaaauuc

SEQ ID NO: 2771736 - RNA, 17 nt, Human
acaauuauuuaaagcaa

SEQ ID NO: 2771737 - RNA, 16 nt, Human
acaaggauugcuacug

SEQ ID NO: 2771738 - RNA, 13 nt, Human
acaaggauugaaa

SEQ ID NO: 2771739 - RNA, 15 nt, Human
acaaggauugaaaau

SEQ ID NO: 2771740 - RNA, 16 nt, Human
acaaggauugaaaauu

SEQ ID NO: 2771741 - RNA, 17 nt, Human
acaaggauugaaaauuc

SEQ ID NO: 2771742 - RNA, 13 nt, Human
acacgaaucucac

SEQ ID NO: 2771743 - RNA, 22 nt, Human
acacgaccggggccagcaccac

SEQ ID NO: 2771744 - RNA, 19 nt, Human
acacgguuugaagccugga

SEQ ID NO: 2771745 - RNA, 22 nt, Human
acacgguuugaagccuggaaca

SEQ ID NO: 2771746 - RNA, 23 nt, Human
acacgggggcagcugauacaaau

SEQ ID NO: 2771747 - RNA, 16 nt, Human
acacgggggcagcuga

SEQ ID NO: 2771748 - RNA, 21 nt, Human
acacagcucuucuccaggcug

SEQ ID NO: 2771749 - RNA, 20 nt, Human
acacagcucuucuccaggcu

SEQ ID NO: 2771750 - RNA, 19 nt, Human
acacaaaaguuucucuuuu

SEQ ID NO: 2771751 - RNA, 19 nt, Human
acacagcucuucuccaggc

SEQ ID NO: 2771752 - RNA, 16 nt, Human
acacaaaacuccgccc

SEQ ID NO: 2771753 - RNA, 19 nt, Human
acacaaaacuccgccccca

SEQ ID NO: 2771754 - RNA, 21 nt, Human
acacaaaacuccgcccccagc

SEQ ID NO: 2771755 - RNA, 22 nt, Human
acaaccuccauucuauuuuaga

SEQ ID NO: 2771756 - RNA, 15 nt, Human
acaaccucccucuug

SEQ ID NO: 2771757 - RNA, 16 nt, Human
acaaccucccucuugu

SEQ ID NO: 2771758 - RNA, 17 nt, Human
acaaccucccucuuguu

SEQ ID NO: 2771759 - RNA, 18 nt, Human
acaaccucccucuuguuu

SEQ ID NO: 2771760 - RNA, 20 nt, Human
acaaccucccucuuguuuug

SEQ ID NO: 2771761 - RNA, 21 nt, Human
acaaccucccucuuguuuugu

SEQ ID NO: 2771762 - RNA, 22 nt, Human
acaaccucccucuuguuuuguu

SEQ ID NO: 2771763 - RNA, 23 nt, Human
acaaccucccucuuguuuuguuu

SEQ ID NO: 2771764 - RNA, 22 nt, Human
acaaacuuuaggguaaaaauug

SEQ ID NO: 2771765 - RNA, 10 nt, Human
acaaaaugga

SEQ ID NO: 2771766 - RNA, 12 nt, Human
acaaagaaauau

SEQ ID NO: 2771767 - RNA, 13 nt, Human
acaaacuuuuaua

SEQ ID NO: 2771768 - RNA, 18 nt, Human
acaaacuuuucaaggcuu

SEQ ID NO: 2771769 - RNA, 20 nt, Human
aauuuuggucauagcauuca

SEQ ID NO: 2771770 - RNA, 15 nt, Human
aauuuugcaaauaua

SEQ ID NO: 2771771 - RNA, 16 nt, Human
aauuuugcaaauauaa

SEQ ID NO: 2771772 - RNA, 18 nt, Human
aauuuugcaaauauaaac

SEQ ID NO: 2771773 - RNA, 19 nt, Human
aauuuugcaaauauaaaca

SEQ ID NO: 2771774 - RNA, 20 nt, Human
aauuuugcaaauauaaacau

SEQ ID NO: 2771775 - RNA, 21 nt, Human
aauuuugcaaauauaaacauc

SEQ ID NO: 2771776 - RNA, 12 nt, Human
aauuuugcaaug

SEQ ID NO: 2771777 - RNA, 20 nt, Human
aauuuugcuggaauuccuaa

SEQ ID NO: 2771778 - RNA, 22 nt, Human
aauuuugcuggaauuccuaacu

SEQ ID NO: 2771779 - RNA, 16 nt, Human
aauuuugcuuuuaauu

SEQ ID NO: 2771780 - RNA, 17 nt, Human
aauuuugcuuuuaauua

SEQ ID NO: 2771781 - RNA, 18 nt, Human
aauuuugcuuuuaauuaa

SEQ ID NO: 2771782 - RNA, 18 nt, Human
aauuuuggaagauuuuca

SEQ ID NO: 2771783 - RNA, 13 nt, Human
aauuuuauuuugu

SEQ ID NO: 2771784 - RNA, 20 nt, Human
aauuuuauuuugugcucauu

SEQ ID NO: 2771785 - RNA, 23 nt, Human
aauuuuauuuugugcucauuuaa

SEQ ID NO: 2771786 - RNA, 12 nt, Human
aauuuuauuccu

SEQ ID NO: 2771787 - RNA, 19 nt, Human
aaugucacaggcaggucca

SEQ ID NO: 2771788 - RNA, 16 nt, Human
aaugucacaggcaggu

SEQ ID NO: 2771789 - RNA, 13 nt, Human
aauuggguucaug

SEQ ID NO: 2771790 - RNA, 15 nt, Human
aauuggguucaugau

SEQ ID NO: 2771791 - RNA, 16 nt, Human
aauuggguucaugaug

SEQ ID NO: 2771792 - RNA, 19 nt, Human
aauuggguucaugaugcag

SEQ ID NO: 2771793 - RNA, 20 nt, Human
aauuggguucaugaugcagu

SEQ ID NO: 2771794 - RNA, 15 nt, Human
aauugguucuuuauu

SEQ ID NO: 2771795 - RNA, 16 nt, Human
aauuguauuuuaguaa

SEQ ID NO: 2771796 - RNA, 16 nt, Human
aauuuauuauugaaau

SEQ ID NO: 2771797 - RNA, 17 nt, Human
aauuuauuauugaaauu

SEQ ID NO: 2771798 - RNA, 18 nt, Human
aauuuauuauugaaauug

SEQ ID NO: 2771799 - RNA, 18 nt, Human
aauuuauugcacauuguu

SEQ ID NO: 2771800 - RNA, 19 nt, Human
aauuuauugcacauuguuc

SEQ ID NO: 2771801 - RNA, 20 nt, Human
aauuuauugcacauuguuca

SEQ ID NO: 2771802 - RNA, 20 nt, Human
aauuuauuuauacuauuuag

SEQ ID NO: 2771803 - RNA, 17 nt, Human
aauuuauuuauacuauu

SEQ ID NO: 2771804 - RNA, 22 nt, Human
aauuguguacucggaaauuaaa

SEQ ID NO: 2771805 - RNA, 18 nt, Human
aauugugggcauaaacug

SEQ ID NO: 2771806 - RNA, 20 nt, Human
aauugugggcauaaacuguu

SEQ ID NO: 2771807 - RNA, 23 nt, Human
aauugugggcauaaacuguuuca

SEQ ID NO: 2771808 - RNA, 20 nt, Human
aauugugccgagaaaagcau

SEQ ID NO: 2771809 - RNA, 12 nt, Human
aauugugcugcc

SEQ ID NO: 2771810 - RNA, 13 nt, Human
aauugugcugcca

SEQ ID NO: 2771811 - RNA, 14 nt, Human
aauugugcugccau

SEQ ID NO: 2771812 - RNA, 15 nt, Human
aauugugcugccauu

SEQ ID NO: 2771813 - RNA, 16 nt, Human
aauugugcugccauuu

SEQ ID NO: 2771814 - RNA, 19 nt, Human
aauugugcugccauuugau

SEQ ID NO: 2771815 - RNA, 12 nt, Human
aauugugcuucu

SEQ ID NO: 2771816 - RNA, 13 nt, Human
aauugugcuucuc

SEQ ID NO: 2771817 - RNA, 17 nt, Human
aauugugcuucucccca

SEQ ID NO: 2771818 - RNA, 20 nt, Human
aauugugcuucuccccagaa

SEQ ID NO: 2771819 - RNA, 21 nt, Human
aauugugcuucuccccagaau

SEQ ID NO: 2771820 - RNA, 18 nt, Human
aauugucagcaauuuaac

SEQ ID NO: 2771821 - RNA, 11 nt, Human
aauugucaugg

SEQ ID NO: 2771822 - RNA, 23 nt, Human
aauugucaugguuacaaacuaca

SEQ ID NO: 2771823 - RNA, 16 nt, Human
aauugucuucauguac

SEQ ID NO: 2771824 - RNA, 17 nt, Human
aauugucuucauguaca

SEQ ID NO: 2771825 - RNA, 17 nt, Human
aauuguccguguucaua

SEQ ID NO: 2771826 - RNA, 18 nt, Human
aauugucgaaaagagucu

SEQ ID NO: 2771827 - RNA, 23 nt, Human
aauugucgaaaagagucuuccaa

SEQ ID NO: 2771828 - RNA, 12 nt, Human
aauugucuauuu

SEQ ID NO: 2771829 - RNA, 13 nt, Human
aauugucuauuua

SEQ ID NO: 2771830 - RNA, 14 nt, Human
aauugucuauuuau

SEQ ID NO: 2771831 - RNA, 17 nt, Human
aauugucuauuuaucuu

SEQ ID NO: 2771832 - RNA, 18 nt, Human
aauugucuauuuaucuuu

SEQ ID NO: 2771833 - RNA, 21 nt, Human
aauugucuauuuaucuuuuau

SEQ ID NO: 2771834 - RNA, 20 nt, Human
aauugucuuuugucaugugg

SEQ ID NO: 2771835 - RNA, 18 nt, Human
aauugucuuuaauuucug

SEQ ID NO: 2771836 - RNA, 19 nt, Human
aauugucuuuaauuucugu

SEQ ID NO: 2771837 - RNA, 15 nt, Human
aauugugaacucauu

SEQ ID NO: 2771838 - RNA, 22 nt, Human
aauuucagguuuuguaaagaug

SEQ ID NO: 2771839 - RNA, 20 nt, Human
aauuucagguuuuguaaaga

SEQ ID NO: 2771840 - RNA, 18 nt, Human
aauuucaagguucuaacc

SEQ ID NO: 2771841 - RNA, 19 nt, Human
aauuucaggcuccccagau

SEQ ID NO: 2771842 - RNA, 16 nt, Human
aauuucacuuauaccu

SEQ ID NO: 2771843 - RNA, 12 nt, Human
aauuucaaaaug

SEQ ID NO: 2771844 - RNA, 19 nt, Human
aauuucaaaaauauaacuu

SEQ ID NO: 2771845 - RNA, 15 nt, Human
aauuucaaaagacau

SEQ ID NO: 2771846 - RNA, 17 nt, Human
aauuucaaaagacaugu

SEQ ID NO: 2771847 - RNA, 20 nt, Human
aauuucaaaagacauguugu

SEQ ID NO: 2771848 - RNA, 15 nt, Human
aauuucaaaaauaua

SEQ ID NO: 2771849 - RNA, 16 nt, Human
aauuucaaaaauauaa

SEQ ID NO: 2771850 - RNA, 17 nt, Human
aauuucaaaaauauaac

SEQ ID NO: 2771851 - RNA, 14 nt, Human
aauuucacauuaau

SEQ ID NO: 2771852 - RNA, 21 nt, Human
aauuucaccaccaaaugccaa

SEQ ID NO: 2771853 - RNA, 14 nt, Human
aauuucaagguucu

SEQ ID NO: 2771854 - RNA, 15 nt, Human
aauuucaagguucua

SEQ ID NO: 2771855 - RNA, 16 nt, Human
aauuucaagguucuaa

SEQ ID NO: 2771856 - RNA, 17 nt, Human
aauuucaagguucuaac

SEQ ID NO: 2771857 - RNA, 16 nt, Human
aauuucaaaaugcuuu

SEQ ID NO: 2771858 - RNA, 17 nt, Human
aauuucagguuguuggu

SEQ ID NO: 2771859 - RNA, 23 nt, Human
aauuucaguccuguaguuuuauu

SEQ ID NO: 2771860 - RNA, 20 nt, Human
aauuuccuguuggauuuguu

SEQ ID NO: 2771861 - RNA, 21 nt, Human
aauuuccuguuggauuuguuu

SEQ ID NO: 2771862 - RNA, 16 nt, Human
aauuuccuuuauauuu

SEQ ID NO: 2771863 - RNA, 14 nt, Human
aauuucgagauuug

SEQ ID NO: 2771864 - RNA, 21 nt, Human
aauuucgccguugaagaggaa

SEQ ID NO: 2771865 - RNA, 18 nt, Human
aauuucgccguugaagag

SEQ ID NO: 2771866 - RNA, 21 nt, Human
aauuuccuuuauauuuaguga

SEQ ID NO: 2771867 - RNA, 14 nt, Human
acagugcagggcaa

SEQ ID NO: 2771868 - RNA, 19 nt, Human
acagugcagggcaaaauau

SEQ ID NO: 2771869 - RNA, 13 nt, Human
acagugcacauga

SEQ ID NO: 2771870 - RNA, 14 nt, Human
acagugcacaugaa

SEQ ID NO: 2771871 - RNA, 15 nt, Human
acagugcacaugaac

SEQ ID NO: 2771872 - RNA, 23 nt, Human
acagugagucgaggacagggagg

SEQ ID NO: 2771873 - RNA, 24 nt, Human
acagugucccccagguuccgaaga

SEQ ID NO: 2771874 - RNA, 16 nt, Human
acagugucccccaggu

SEQ ID NO: 2771875 - RNA, 15 nt, Human
acagugucccccagg

SEQ ID NO: 2771876 - RNA, 18 nt, Human
acaguguauauugaaauu

SEQ ID NO: 2771877 - RNA, 23 nt, Human
acaggugugagucaccaagccca

SEQ ID NO: 2771878 - RNA, 22 nt, Human
acaggugggcuucccaguggcu

SEQ ID NO: 2771879 - RNA, 15 nt, Human
acagguggugucacu

SEQ ID NO: 2771880 - RNA, 17 nt, Human
acagguggugucacugu

SEQ ID NO: 2771881 - RNA, 18 nt, Human
acagguggugucacuguc

SEQ ID NO: 2771882 - RNA, 19 nt, Human
acagguggugucacugucc

SEQ ID NO: 2771883 - RNA, 20 nt, Human
acagguggugucacuguccc

SEQ ID NO: 2771884 - RNA, 22 nt, Human
acagguggugucacugucccuc

SEQ ID NO: 2771885 - RNA, 23 nt, Human
acagguggugucacugucccucc

SEQ ID NO: 2771886 - RNA, 20 nt, Human
acaggugggcuucccagugg

SEQ ID NO: 2771887 - RNA, 13 nt, Human
acaggugugcacc

SEQ ID NO: 2771888 - RNA, 16 nt, Human
acaggugugguguaau

SEQ ID NO: 2771889 - RNA, 17 nt, Human
acaggugugguguaauu

SEQ ID NO: 2771890 - RNA, 18 nt, Human
acaggugugguguaauuu

SEQ ID NO: 2771891 - RNA, 21 nt, Human
acaggugugguguaauuuaua

SEQ ID NO: 2771892 - RNA, 17 nt, Human
acagguguuggugacaa

SEQ ID NO: 2771893 - RNA, 22 nt, Human
acaggugugagucaccaagccc

SEQ ID NO: 2771894 - RNA, 19 nt, Human
acaggugugaaccaccaca

SEQ ID NO: 2771895 - RNA, 22 nt, Human
acagugagucgaggacagggag

SEQ ID NO: 2771896 - RNA, 18 nt, Human
acagugagggagauccca

SEQ ID NO: 2771897 - RNA, 14 nt, Human
acagguguuuauac

SEQ ID NO: 2771898 - RNA, 17 nt, Human
acagugagccugaauuu

SEQ ID NO: 2771899 - RNA, 21 nt, Human
acagugagccugaauuuuguu

SEQ ID NO: 2771900 - RNA, 18 nt, Human
acagugagccugaauuuu

SEQ ID NO: 2771901 - RNA, 19 nt, Human
acaggcaagcaccuccugc

SEQ ID NO: 2771902 - RNA, 18 nt, Human
acagggccaguggggccu

SEQ ID NO: 2771903 - RNA, 19 nt, Human
acagggccaguggggccug

SEQ ID NO: 2771904 - RNA, 20 nt, Human
acagggccaguggggccugu

SEQ ID NO: 2771905 - RNA, 21 nt, Human
acagggccaguggggccugug

SEQ ID NO: 2771906 - RNA, 23 nt, Human
acagggccaguggggccugugga

SEQ ID NO: 2771907 - RNA, 14 nt, Human
acaggcaaugcugg

SEQ ID NO: 2771908 - RNA, 16 nt, Human
acaggucuucaucgaa

SEQ ID NO: 2771909 - RNA, 18 nt, Human
acagguggacacacaagg

SEQ ID NO: 2771910 - RNA, 16 nt, Human
acagguggacacacaa

SEQ ID NO: 2771911 - RNA, 21 nt, Human
acagggcugauaagcuaacac

SEQ ID NO: 2771912 - RNA, 14 nt, Human
acagcucuguccug

SEQ ID NO: 2771913 - RNA, 23 nt, Human
acagcuccuucuguccuacucug

SEQ ID NO: 2771914 - RNA, 18 nt, Human
acagcuccuucuguccua

SEQ ID NO: 2771915 - RNA, 16 nt, Human
acagcuccuucugucc

SEQ ID NO: 2771916 - RNA, 15 nt, Human
acagcuccuucuguc

SEQ ID NO: 2771917 - RNA, 17 nt, Human
acagcucuguccuggga

SEQ ID NO: 2771918 - RNA, 16 nt, Human
acagcucuguccuggg

SEQ ID NO: 2771919 - RNA, 13 nt, Human
acagcucuguccu

SEQ ID NO: 2771920 - RNA, 19 nt, Human
acagcugaguuaugaugua

SEQ ID NO: 2771921 - RNA, 16 nt, Human
acagcugauacuucau

SEQ ID NO: 2771922 - RNA, 23 nt, Human
acaggcaagcaccuccugccucg

SEQ ID NO: 2771923 - RNA, 20 nt, Human
acaggcaagcaccuccugcc

SEQ ID NO: 2771924 - RNA, 16 nt, Human
acagcugcauuagaaa

SEQ ID NO: 2771925 - RNA, 20 nt, Human
acagcugcauuagaaaaaga

SEQ ID NO: 2771926 - RNA, 12 nt, Human
acagcugccugc

SEQ ID NO: 2771927 - RNA, 16 nt, Human
acagcugccugcagua

SEQ ID NO: 2771928 - RNA, 11 nt, Human
acaucaguucc

SEQ ID NO: 2771929 - RNA, 16 nt, Human
acauccgccuuuugua

SEQ ID NO: 2771930 - RNA, 18 nt, Human
acauccgccuuuuguaua

SEQ ID NO: 2771931 - RNA, 20 nt, Human
acauccgccuuuuguauaca

SEQ ID NO: 2771932 - RNA, 19 nt, Human
acaucaucaaggcacugcc

SEQ ID NO: 2771933 - RNA, 20 nt, Human
acaucaucaaggcacugccu

SEQ ID NO: 2771934 - RNA, 14 nt, Human
acaucaugaauuua

SEQ ID NO: 2771935 - RNA, 15 nt, Human
acaucaugaauuuua

SEQ ID NO: 2771936 - RNA, 17 nt, Human
acaucaugaauuuuaca

SEQ ID NO: 2771937 - RNA, 21 nt, Human
acaugauuuccuugaaugugg

SEQ ID NO: 2771938 - RNA, 18 nt, Human
acauccugccagccccac

SEQ ID NO: 2771939 - RNA, 12 nt, Human
acauccugggua

SEQ ID NO: 2771940 - RNA, 13 nt, Human
acauccuggguaa

SEQ ID NO: 2771941 - RNA, 16 nt, Human
acauccuguauaagca

SEQ ID NO: 2771942 - RNA, 17 nt, Human
acauccuguauaagcac

SEQ ID NO: 2771943 - RNA, 19 nt, Human
acauccuguauaagcacug

SEQ ID NO: 2771944 - RNA, 17 nt, Human
acauccuccguccagcc

SEQ ID NO: 2771945 - RNA, 14 nt, Human
acauccuccgucca

SEQ ID NO: 2771946 - RNA, 15 nt, Human
acauccuacaagaca

SEQ ID NO: 2771947 - RNA, 23 nt, Human
acaugauuuccuugaauguggcu

SEQ ID NO: 2771948 - RNA, 14 nt, Human
acaugcaaaaagaa

SEQ ID NO: 2771949 - RNA, 15 nt, Human
acaugcaaaaagaaa

SEQ ID NO: 2771950 - RNA, 18 nt, Human
acaugcaaaaagaaauga

SEQ ID NO: 2771951 - RNA, 21 nt, Human
acaugcaaaaagaaaugacua

SEQ ID NO: 2771952 - RNA, 23 nt, Human
acaugcaaaaagaaaugacuaau

SEQ ID NO: 2771953 - RNA, 15 nt, Human
acaugcaacccgaag

SEQ ID NO: 2771954 - RNA, 18 nt, Human
acaugccaagcacugugc

SEQ ID NO: 2771955 - RNA, 14 nt, Human
acaugccaagcacu

SEQ ID NO: 2771956 - RNA, 20 nt, Human
acaugcaaggcacuguacua

SEQ ID NO: 2771957 - RNA, 15 nt, Human
acaugcaaggcacug

SEQ ID NO: 2771958 - RNA, 17 nt, Human
acaugauuuccuugaau

SEQ ID NO: 2771959 - RNA, 19 nt, Human
acauaauuaaauuuugagu

SEQ ID NO: 2771960 - RNA, 15 nt, Human
acauaaguaauucaa

SEQ ID NO: 2771961 - RNA, 22 nt, Human
acauaagcggcguaaguuuaaa

SEQ ID NO: 2771962 - RNA, 14 nt, Human
acauaagaucacug

SEQ ID NO: 2771963 - RNA, 17 nt, Human
acauaagaucacugcca

SEQ ID NO: 2771964 - RNA, 23 nt, Human
acauaagaucacugccagagaua

SEQ ID NO: 2771965 - RNA, 19 nt, Human
acauaagggguuugccauu

SEQ ID NO: 2771966 - RNA, 20 nt, Human
acauaagggguuugccauuu

SEQ ID NO: 2771967 - RNA, 21 nt, Human
acauaagggguuugccauuug

SEQ ID NO: 2771968 - RNA, 12 nt, Human
acauaauuuuuu

SEQ ID NO: 2771969 - RNA, 18 nt, Human
acauaauuuuuuauucaa

SEQ ID NO: 2771970 - RNA, 20 nt, Human
acauaauucaggaagcagcu

SEQ ID NO: 2771971 - RNA, 22 nt, Human
acaucagcuggucaaacaaacu

SEQ ID NO: 2771972 - RNA, 15 nt, Human
acaucagccagcugc

SEQ ID NO: 2771973 - RNA, 16 nt, Human
acaucagccagcugcc

SEQ ID NO: 2771974 - RNA, 14 nt, Human
acaucaggaguuca

SEQ ID NO: 2771975 - RNA, 14 nt, Human
accaagaucuauaa

SEQ ID NO: 2771976 - RNA, 20 nt, Human
accaagaucuauaaagcgau

SEQ ID NO: 2771977 - RNA, 14 nt, Human
accaagacaaauuc

SEQ ID NO: 2771978 - RNA, 15 nt, Human
accaagagauugcua

SEQ ID NO: 2771979 - RNA, 16 nt, Human
accaagagauugcuaa

SEQ ID NO: 2771980 - RNA, 17 nt, Human
accaagagauugcuaau

SEQ ID NO: 2771981 - RNA, 18 nt, Human
accaagagauugcuaauu

SEQ ID NO: 2771982 - RNA, 21 nt, Human
accaagagauugcuaauugcu

SEQ ID NO: 2771983 - RNA, 22 nt, Human
accaagagauugcuaauugcug

SEQ ID NO: 2771984 - RNA, 13 nt, Human
acauuucuaaaau

SEQ ID NO: 2771985 - RNA, 22 nt, Human
acauuuaugauuuaauaaaaua

SEQ ID NO: 2771986 - RNA, 19 nt, Human
acauuuaugauuuaauaaa

SEQ ID NO: 2771987 - RNA, 20 nt, Human
acauuuaugauuuaauaaaa

SEQ ID NO: 2771988 - RNA, 15 nt, Human
acauuucuguaaaua

SEQ ID NO: 2771989 - RNA, 18 nt, Human
acauuucuguaaauacca

SEQ ID NO: 2771990 - RNA, 19 nt, Human
accaacuuucuguaaacuc

SEQ ID NO: 2771991 - RNA, 18 nt, Human
accaacuuucuguaaacu

SEQ ID NO: 2771992 - RNA, 14 nt, Human
accaagaaagcagg

SEQ ID NO: 2771993 - RNA, 20 nt, Human
accaccccggcccccugccc

SEQ ID NO: 2771994 - RNA, 18 nt, Human
accaccccggcccccugc

SEQ ID NO: 2771995 - RNA, 22 nt, Human
accaccccgccugcccucaugg

SEQ ID NO: 2771996 - RNA, 21 nt, Human
accacccuagucccuuccccu

SEQ ID NO: 2771997 - RNA, 20 nt, Human
accacccuagucccuucccc

SEQ ID NO: 2771998 - RNA, 12 nt, Human
accaccucugug

SEQ ID NO: 2771999 - RNA, 13 nt, Human
accaccucugugg

SEQ ID NO: 2772000 - RNA, 14 nt, Human
accaccucuguggc

SEQ ID NO: 2772001 - RNA, 15 nt, Human
accaccucuguggca

SEQ ID NO: 2772002 - RNA, 12 nt, Human
accaccugccca

SEQ ID NO: 2772003 - RNA, 17 nt, Human
accaccuuuuauuacau

SEQ ID NO: 2772004 - RNA, 21 nt, Human
accacgaaagcacacacaaaa

SEQ ID NO: 2772005 - RNA, 17 nt, Human
accagccccagugccca

SEQ ID NO: 2772006 - RNA, 16 nt, Human
accagccccagugccc

SEQ ID NO: 2772007 - RNA, 17 nt, Human
accagccccacugccag

SEQ ID NO: 2772008 - RNA, 16 nt, Human
accagccccacugcca

SEQ ID NO: 2772009 - RNA, 19 nt, Human
accagccccagugcccaca

SEQ ID NO: 2772010 - RNA, 18 nt, Human
accagccccagugcccac

SEQ ID NO: 2772011 - RNA, 20 nt, Human
accagccccagugcccacag

SEQ ID NO: 2772012 - RNA, 22 nt, Human
accagccccacugccagcagca

SEQ ID NO: 2772013 - RNA, 21 nt, Human
accagccccacugccagcagc

SEQ ID NO: 2772014 - RNA, 20 nt, Human
accagccccacugccagcag

SEQ ID NO: 2772015 - RNA, 18 nt, Human
accagccccacugccagc

SEQ ID NO: 2772016 - RNA, 23 nt, Human
accagccccacugccagcagcag

SEQ ID NO: 2772017 - RNA, 11 nt, Human
accagcccugg

SEQ ID NO: 2772018 - RNA, 12 nt, Human
accagcccuggg

SEQ ID NO: 2772019 - RNA, 15 nt, Human
accagcccuggggcu

SEQ ID NO: 2772020 - RNA, 22 nt, Human
acaugccuauaugagaagaaua

SEQ ID NO: 2772021 - RNA, 12 nt, Human
acaugugaaacc

SEQ ID NO: 2772022 - RNA, 14 nt, Human
acaugugacacaua

SEQ ID NO: 2772023 - RNA, 23 nt, Human
acaugugaaaccuuuuuuaagau

SEQ ID NO: 2772024 - RNA, 12 nt, Human
acaugugacaca

SEQ ID NO: 2772025 - RNA, 20 nt, Human
acaugugaaaccuuuuuuaa

SEQ ID NO: 2772026 - RNA, 21 nt, Human
acaugugaaaccuuuuuuaag

SEQ ID NO: 2772027 - RNA, 13 nt, Human
acaugugaaaccu

SEQ ID NO: 2772028 - RNA, 14 nt, Human
acaugugaaaccuu

SEQ ID NO: 2772029 - RNA, 15 nt, Human
acaugugaaaccuuu

SEQ ID NO: 2772030 - RNA, 17 nt, Human
acaugugaaaccuuuuu

SEQ ID NO: 2772031 - RNA, 17 nt, Human
acauuuagucucuuuau

SEQ ID NO: 2772032 - RNA, 21 nt, Human
acauuuagagaacuguggccg

SEQ ID NO: 2772033 - RNA, 13 nt, Human
acauuuagauccu

SEQ ID NO: 2772034 - RNA, 23 nt, Human
acauuuagauccugguuucauaa

SEQ ID NO: 2772035 - RNA, 12 nt, Human
acauuuauaauu

SEQ ID NO: 2772036 - RNA, 13 nt, Human
acauuuauaauug

SEQ ID NO: 2772037 - RNA, 14 nt, Human
acauuuauaauugc

SEQ ID NO: 2772038 - RNA, 18 nt, Human
acauuuaugaguaacuau

SEQ ID NO: 2772039 - RNA, 14 nt, Human
acauuuaugauuua

SEQ ID NO: 2772040 - RNA, 15 nt, Human
acauuuaugauuuaa

SEQ ID NO: 2772041 - RNA, 17 nt, Human
acauuuaugauuuaaua

SEQ ID NO: 2772042 - RNA, 16 nt, Human
acauuuacauguauua

SEQ ID NO: 2772043 - RNA, 21 nt, Human
acauuuacauguauuauuuca

SEQ ID NO: 2772044 - RNA, 14 nt, Human
acauuuaccagcaa

SEQ ID NO: 2772045 - RNA, 21 nt, Human
acauuuacuacaguuuuuaac

SEQ ID NO: 2772046 - RNA, 14 nt, Human
acauuuacauguau

SEQ ID NO: 2772047 - RNA, 12 nt, Human
acauuuacaguc

SEQ ID NO: 2772048 - RNA, 21 nt, Human
acauuuacaguccuucaaaau

SEQ ID NO: 2772049 - RNA, 16 nt, Human
acccaccccaccugca

SEQ ID NO: 2772050 - RNA, 17 nt, Human
acccaccccaccugcag

SEQ ID NO: 2772051 - RNA, 23 nt, Human
acccaccccaccugcagggcugc

SEQ ID NO: 2772052 - RNA, 15 nt, Human
acccacaugugacac

SEQ ID NO: 2772053 - RNA, 16 nt, Human
acccacaugugacaca

SEQ ID NO: 2772054 - RNA, 18 nt, Human
acccacauguaaaugaua

SEQ ID NO: 2772055 - RNA, 15 nt, Human
accaugaaacaaagc

SEQ ID NO: 2772056 - RNA, 14 nt, Human
accaugaaacaaag

SEQ ID NO: 2772057 - RNA, 14 nt, Human
accaugaagacagg

SEQ ID NO: 2772058 - RNA, 15 nt, Human
accaugaagacagga

SEQ ID NO: 2772059 - RNA, 18 nt, Human
accaugaacagaaaacau

SEQ ID NO: 2772060 - RNA, 23 nt, Human
accaugaacagaaaacauucuga

SEQ ID NO: 2772061 - RNA, 15 nt, Human
acccacccuccuuuc

SEQ ID NO: 2772062 - RNA, 14 nt, Human
acccauaggcccac

SEQ ID NO: 2772063 - RNA, 15 nt, Human
acccauaggcccaca

SEQ ID NO: 2772064 - RNA, 17 nt, Human
acccauaggcccacaca

SEQ ID NO: 2772065 - RNA, 18 nt, Human
acccauaggcccacacac

SEQ ID NO: 2772066 - RNA, 19 nt, Human
acccauaggcccacacaca

SEQ ID NO: 2772067 - RNA, 20 nt, Human
acccauaggcccacacacag

SEQ ID NO: 2772068 - RNA, 21 nt, Human
acccauaggcccacacacagg

SEQ ID NO: 2772069 - RNA, 22 nt, Human
acccauaggcccacacacaggu

SEQ ID NO: 2772070 - RNA, 14 nt, Human
acccauacaccccc

SEQ ID NO: 2772071 - RNA, 17 nt, Human
acccauagaucuucuga

SEQ ID NO: 2772072 - RNA, 18 nt, Human
acccauagaucuucugaa

SEQ ID NO: 2772073 - RNA, 21 nt, Human
acccauagaucuucugaaaug

SEQ ID NO: 2772074 - RNA, 22 nt, Human
acccauagaucuucugaaauga

SEQ ID NO: 2772075 - RNA, 16 nt, Human
acccauaauccuuucu

SEQ ID NO: 2772076 - RNA, 17 nt, Human
acccauaauccuuucug

SEQ ID NO: 2772077 - RNA, 20 nt, Human
acccaugaugagcuccucuu

SEQ ID NO: 2772078 - RNA, 18 nt, Human
acccaugaugagcuccuc

SEQ ID NO: 2772079 - RNA, 14 nt, Human
acccauauguuaaa

SEQ ID NO: 2772080 - RNA, 22 nt, Human
accauauugugcuucacaguag

SEQ ID NO: 2772081 - RNA, 13 nt, Human
accauauuuagca

SEQ ID NO: 2772082 - RNA, 15 nt, Human
accauauuuagcagu

SEQ ID NO: 2772083 - RNA, 20 nt, Human
accauauuuauccauuugua

SEQ ID NO: 2772084 - RNA, 21 nt, Human
accauauuuauccauuuguaa

SEQ ID NO: 2772085 - RNA, 17 nt, Human
accauacucauuucuaa

SEQ ID NO: 2772086 - RNA, 19 nt, Human
accauacucauuucuaaaa

SEQ ID NO: 2772087 - RNA, 17 nt, Human
accauaggucaccuuua

SEQ ID NO: 2772088 - RNA, 15 nt, Human
accauacugagggac

SEQ ID NO: 2772089 - RNA, 21 nt, Human
accauacuaauuauacccccu

SEQ ID NO: 2772090 - RNA, 16 nt, Human
accauacuaauuauac

SEQ ID NO: 2772091 - RNA, 13 nt, Human
accauacuaauua

SEQ ID NO: 2772092 - RNA, 23 nt, Human
accauccacucuacccucccacc

SEQ ID NO: 2772093 - RNA, 22 nt, Human
accauccacucuacccucccac

SEQ ID NO: 2772094 - RNA, 14 nt, Human
accaucugcuuuua

SEQ ID NO: 2772095 - RNA, 18 nt, Human
accaucugcuuuuauuaa

SEQ ID NO: 2772096 - RNA, 13 nt, Human
accaucuggccug

SEQ ID NO: 2772097 - RNA, 15 nt, Human
accaucuggccuggc

SEQ ID NO: 2772098 - RNA, 16 nt, Human
accaucuggccuggcc

SEQ ID NO: 2772099 - RNA, 17 nt, Human
accaucuggccuggccu

SEQ ID NO: 2772100 - RNA, 22 nt, Human
accaucuggccuggccuggccc

SEQ ID NO: 2772101 - RNA, 23 nt, Human
accaucuggccuggccuggcccu

SEQ ID NO: 2772102 - RNA, 14 nt, Human
accaucagggacag

SEQ ID NO: 2772103 - RNA, 15 nt, Human
accaucagggacagg

SEQ ID NO: 2772104 - RNA, 18 nt, Human
accaucacaauacagaua

SEQ ID NO: 2772105 - RNA, 15 nt, Human
acggaauaguuggcu

SEQ ID NO: 2772106 - RNA, 20 nt, Human
acggaauaagagaccuguuu

SEQ ID NO: 2772107 - RNA, 21 nt, Human
acggaagugguggcuguggaa

SEQ ID NO: 2772108 - RNA, 23 nt, Human
acgcugucccuaguaaaaauaca

SEQ ID NO: 2772109 - RNA, 20 nt, Human
acgcugucaaaaguuggacu

SEQ ID NO: 2772110 - RNA, 18 nt, Human
acgcuggagugcagugag

SEQ ID NO: 2772111 - RNA, 21 nt, Human
acgcagcaggaggccaggccg

SEQ ID NO: 2772112 - RNA, 19 nt, Human
acgcuggagugcagugagc

SEQ ID NO: 2772113 - RNA, 16 nt, Human
acgcacgcacacacac

SEQ ID NO: 2772114 - RNA, 17 nt, Human
acgcagaugauccauga

SEQ ID NO: 2772115 - RNA, 15 nt, Human
acgcagaugauccau

SEQ ID NO: 2772116 - RNA, 19 nt, Human
acgcagaugauccaugagu

SEQ ID NO: 2772117 - RNA, 14 nt, Human
acgcagcaggaggc

SEQ ID NO: 2772118 - RNA, 11 nt, Human
acgcacgcaca

SEQ ID NO: 2772119 - RNA, 13 nt, Human
acgcacgcacaca

SEQ ID NO: 2772120 - RNA, 14 nt, Human
acgcacgcacacac

SEQ ID NO: 2772121 - RNA, 15 nt, Human
acgcacgcacacaca

SEQ ID NO: 2772122 - RNA, 23 nt, Human
acgucugacaggcaaugcuggcu

SEQ ID NO: 2772123 - RNA, 13 nt, Human
acgucugucuuca

SEQ ID NO: 2772124 - RNA, 15 nt, Human
acgucugacaggcaa

SEQ ID NO: 2772125 - RNA, 14 nt, Human
acggagauguuuca

SEQ ID NO: 2772126 - RNA, 22 nt, Human
acguggagcgggguaugaagag

SEQ ID NO: 2772127 - RNA, 19 nt, Human
acgucugucuucacagcuc

SEQ ID NO: 2772128 - RNA, 15 nt, Human
acgucugucuucaca

SEQ ID NO: 2772129 - RNA, 14 nt, Human
acgucugucuucac

SEQ ID NO: 2772130 - RNA, 18 nt, Human
acguggcacuauauucug

SEQ ID NO: 2772131 - RNA, 13 nt, Human
acguggaggagca

SEQ ID NO: 2772132 - RNA, 17 nt, Human
acguggaggagcagugc

SEQ ID NO: 2772133 - RNA, 18 nt, Human
acguggaggagcagugca

SEQ ID NO: 2772134 - RNA, 22 nt, Human
acuaacucaccagccccacugc

SEQ ID NO: 2772135 - RNA, 18 nt, Human
acuaauauaaaaugagua

SEQ ID NO: 2772136 - RNA, 21 nt, Human
acuaacuccugagaaauguua

SEQ ID NO: 2772137 - RNA, 23 nt, Human
acuaacuuauuuauguuaaaaga

SEQ ID NO: 2772138 - RNA, 18 nt, Human
acuaacguugagccccug

SEQ ID NO: 2772139 - RNA, 20 nt, Human
acuaacuagacaccaaaguu

SEQ ID NO: 2772140 - RNA, 22 nt, Human
acuaacuagacaccaaaguucu

SEQ ID NO: 2772141 - RNA, 21 nt, Human
acguggcugcgugccccugcu

SEQ ID NO: 2772142 - RNA, 22 nt, Human
acguggcugcgugccccugcug

SEQ ID NO: 2772143 - RNA, 15 nt, Human
acuaaccuggguucc

SEQ ID NO: 2772144 - RNA, 12 nt, Human
accugugggugu

SEQ ID NO: 2772145 - RNA, 13 nt, Human
accugugggugua

SEQ ID NO: 2772146 - RNA, 13 nt, Human
accuguguacaua

SEQ ID NO: 2772147 - RNA, 16 nt, Human
accuguguacauaacu

SEQ ID NO: 2772148 - RNA, 14 nt, Human
accugugucugcga

SEQ ID NO: 2772149 - RNA, 20 nt, Human
accugugucugcgaaguccu

SEQ ID NO: 2772150 - RNA, 22 nt, Human
accugugucugcgaaguccuau

SEQ ID NO: 2772151 - RNA, 20 nt, Human
accugugugguacucugaaa

SEQ ID NO: 2772152 - RNA, 14 nt, Human
acuaguaguucucu

SEQ ID NO: 2772153 - RNA, 17 nt, Human
acuaguaguucucuugg

SEQ ID NO: 2772154 - RNA, 13 nt, Human
acuaguacugugu

SEQ ID NO: 2772155 - RNA, 22 nt, Human
acuaguacuguguacuguauag

SEQ ID NO: 2772156 - RNA, 23 nt, Human
acuaguacuguguacuguauaga

SEQ ID NO: 2772157 - RNA, 16 nt, Human
acuagguucaauuccc

SEQ ID NO: 2772158 - RNA, 21 nt, Human
acuagguucaauucccugaag

SEQ ID NO: 2772159 - RNA, 19 nt, Human
acuaguaaguaauuaugca

SEQ ID NO: 2772160 - RNA, 13 nt, Human
acuaguacaaauu

SEQ ID NO: 2772161 - RNA, 16 nt, Human
acuaguacaaauuaua

SEQ ID NO: 2772162 - RNA, 20 nt, Human
acuaguacaaauuauaaaaa

SEQ ID NO: 2772163 - RNA, 13 nt, Human
acuauugcccagg

SEQ ID NO: 2772164 - RNA, 15 nt, Human
acuauugcauuuaua

SEQ ID NO: 2772165 - RNA, 21 nt, Human
acuauuggaaucugauauacu

SEQ ID NO: 2772166 - RNA, 22 nt, Human
acuauuucccuugaaauuuuaa

SEQ ID NO: 2772167 - RNA, 19 nt, Human
acuauuggagggugggaga

SEQ ID NO: 2772168 - RNA, 13 nt, Human
acuauuggagggu

SEQ ID NO: 2772169 - RNA, 14 nt, Human
acuaggcucagaga

SEQ ID NO: 2772170 - RNA, 19 nt, Human
acuaaucugggaagggaag

SEQ ID NO: 2772171 - RNA, 14 nt, Human
acuaaucuuucugc

SEQ ID NO: 2772172 - RNA, 12 nt, Human
accucugccaga

SEQ ID NO: 2772173 - RNA, 15 nt, Human
accugugaagcugaa

SEQ ID NO: 2772174 - RNA, 17 nt, Human
accugugaagcugaaaa

SEQ ID NO: 2772175 - RNA, 19 nt, Human
accugccaugccaggaacc

SEQ ID NO: 2772176 - RNA, 23 nt, Human
accugccccuccucucugcccua

SEQ ID NO: 2772177 - RNA, 19 nt, Human
accugccauuugcacccuc

SEQ ID NO: 2772178 - RNA, 18 nt, Human
accugccauuugcacccu

SEQ ID NO: 2772179 - RNA, 22 nt, Human
accugccccuccucucugcccu

SEQ ID NO: 2772180 - RNA, 17 nt, Human
accugcccugcccccac

SEQ ID NO: 2772181 - RNA, 12 nt, Human
accugcccugcc

SEQ ID NO: 2772182 - RNA, 15 nt, Human
accugccauuugcac

SEQ ID NO: 2772183 - RNA, 16 nt, Human
accugccaugccagga

SEQ ID NO: 2772184 - RNA, 18 nt, Human
accucaggcuuccuuggc

SEQ ID NO: 2772185 - RNA, 20 nt, Human
accgugagcaggaaggccug

SEQ ID NO: 2772186 - RNA, 21 nt, Human
accgugagcaggaaggccugg

SEQ ID NO: 2772187 - RNA, 22 nt, Human
accgugagcaggaaggccuggg

SEQ ID NO: 2772188 - RNA, 19 nt, Human
accucaggguauugcuugc

SEQ ID NO: 2772189 - RNA, 23 nt, Human
accucaggguauugcuugccacu

SEQ ID NO: 2772190 - RNA, 22 nt, Human
accucagguaaucgaccugccu

SEQ ID NO: 2772191 - RNA, 19 nt, Human
accucaggcuuccuuggca

SEQ ID NO: 2772192 - RNA, 15 nt, Human
accucaggugaucca

SEQ ID NO: 2772193 - RNA, 23 nt, Human
accucagguaaucgaccugccuc

SEQ ID NO: 2772194 - RNA, 17 nt, Human
accucaguucccuuggc

SEQ ID NO: 2772195 - RNA, 16 nt, Human
accucaguucccuugg

SEQ ID NO: 2772196 - RNA, 21 nt, Human
accucaguucccuuggccuca

SEQ ID NO: 2772197 - RNA, 20 nt, Human
accucaguucccuuggccuc

SEQ ID NO: 2772198 - RNA, 19 nt, Human
accucaguucccuuggccu

SEQ ID NO: 2772199 - RNA, 18 nt, Human
accucaguucccuuggcc

SEQ ID NO: 2772200 - RNA, 13 nt, Human
accucauccaaac

SEQ ID NO: 2772201 - RNA, 14 nt, Human
accucauccaaaca

SEQ ID NO: 2772202 - RNA, 15 nt, Human
accucauccaaacaa

SEQ ID NO: 2772203 - RNA, 14 nt, Human
accucaucccauga

SEQ ID NO: 2772204 - RNA, 23 nt, Human
accucaguucccuuggccucaga

SEQ ID NO: 2772205 - RNA, 22 nt, Human
accucaguucccuuggccucag

SEQ ID NO: 2772206 - RNA, 14 nt, Human
accccaaucccagc

SEQ ID NO: 2772207 - RNA, 20 nt, Human
accccaaguagucugcucac

SEQ ID NO: 2772208 - RNA, 21 nt, Human
accccaagccagcccggccgc

SEQ ID NO: 2772209 - RNA, 18 nt, Human
accccaagccagcccggc

SEQ ID NO: 2772210 - RNA, 16 nt, Human
accccaacgcacagga

SEQ ID NO: 2772211 - RNA, 17 nt, Human
accccaacgcacaggaa

SEQ ID NO: 2772212 - RNA, 17 nt, Human
acccuguuaccauuuug

SEQ ID NO: 2772213 - RNA, 20 nt, Human
acccuguguauacagcccug

SEQ ID NO: 2772214 - RNA, 14 nt, Human
acccuguggcccug

SEQ ID NO: 2772215 - RNA, 15 nt, Human
acccuguggcccugg

SEQ ID NO: 2772216 - RNA, 16 nt, Human
acccuguggcccuggc

SEQ ID NO: 2772217 - RNA, 17 nt, Human
acccuguggcccuggcu

SEQ ID NO: 2772218 - RNA, 18 nt, Human
acccuguuuggauuuuua

SEQ ID NO: 2772219 - RNA, 19 nt, Human
acccuguuuggauuuuuaa

SEQ ID NO: 2772220 - RNA, 12 nt, Human
acccuuagaaaa

SEQ ID NO: 2772221 - RNA, 13 nt, Human
acccuuagaaaau

SEQ ID NO: 2772222 - RNA, 13 nt, Human
acccuuagaaucc

SEQ ID NO: 2772223 - RNA, 16 nt, Human
acccuuagaauccacg

SEQ ID NO: 2772224 - RNA, 22 nt, Human
acccuuaccccuuagccucccu

SEQ ID NO: 2772225 - RNA, 19 nt, Human
acccuuaccccuuagccuc

SEQ ID NO: 2772226 - RNA, 18 nt, Human
acccuuaccccuuagccu

SEQ ID NO: 2772227 - RNA, 14 nt, Human
acccuuaacccaag

SEQ ID NO: 2772228 - RNA, 15 nt, Human
acccuuaacccaagg

SEQ ID NO: 2772229 - RNA, 16 nt, Human
acccuuaacccaagga

SEQ ID NO: 2772230 - RNA, 17 nt, Human
acccuuaacccaaggag

SEQ ID NO: 2772231 - RNA, 18 nt, Human
acccuuaacccaaggagc

SEQ ID NO: 2772232 - RNA, 23 nt, Human
acccuuaacccaaggagcacagg

SEQ ID NO: 2772233 - RNA, 16 nt, Human
acccuuaagucacccu

SEQ ID NO: 2772234 - RNA, 20 nt, Human
accgggcacucagaagacac

SEQ ID NO: 2772235 - RNA, 22 nt, Human
accggcuggcagggcuggcccc

SEQ ID NO: 2772236 - RNA, 18 nt, Human
accggccgauggagacac

SEQ ID NO: 2772237 - RNA, 11 nt, Human
accggcgcgcu

SEQ ID NO: 2772238 - RNA, 14 nt, Human
accggcgcgcucuu

SEQ ID NO: 2772239 - RNA, 21 nt, Human
accguccucaccccuguccuc

SEQ ID NO: 2772240 - RNA, 13 nt, Human
accguccucaccc

SEQ ID NO: 2772241 - RNA, 15 nt, Human
accguccucaccccu

SEQ ID NO: 2772242 - RNA, 17 nt, Human
accguccucaccccugu

SEQ ID NO: 2772243 - RNA, 18 nt, Human
accguccucaccccuguc

SEQ ID NO: 2772244 - RNA, 23 nt, Human
accgguccagcuggccuggacag

SEQ ID NO: 2772245 - RNA, 18 nt, Human
accgguccagcuggccug

SEQ ID NO: 2772246 - RNA, 17 nt, Human
accguaauaauuauuau

SEQ ID NO: 2772247 - RNA, 12 nt, Human
accguccucacc

SEQ ID NO: 2772248 - RNA, 19 nt, Human
accgggccacagagaaagu

SEQ ID NO: 2772249 - RNA, 15 nt, Human
accgggccacagaga

SEQ ID NO: 2772250 - RNA, 17 nt, Human
accgguccagcuggccu

SEQ ID NO: 2772251 - RNA, 16 nt, Human
accgguccagcuggcc

SEQ ID NO: 2772252 - RNA, 15 nt, Human
accgguccagcuggc

SEQ ID NO: 2772253 - RNA, 14 nt, Human
accgguccagcugg

SEQ ID NO: 2772254 - RNA, 15 nt, Human
acucuguuauuuaga

SEQ ID NO: 2772255 - RNA, 14 nt, Human
acucuagauuccau

SEQ ID NO: 2772256 - RNA, 19 nt, Human
acucuagaguccaagguuu

SEQ ID NO: 2772257 - RNA, 13 nt, Human
acucuagauucca

SEQ ID NO: 2772258 - RNA, 16 nt, Human
acucuguuauuuagac

SEQ ID NO: 2772259 - RNA, 20 nt, Human
acucuuaaagcaaaaaauga

SEQ ID NO: 2772260 - RNA, 17 nt, Human
acucuuaaaugaucugc

SEQ ID NO: 2772261 - RNA, 20 nt, Human
acucuuaaaugaucugccuc

SEQ ID NO: 2772262 - RNA, 19 nt, Human
acucugugucagguggggc

SEQ ID NO: 2772263 - RNA, 21 nt, Human
acucugugucagguggggcag

SEQ ID NO: 2772264 - RNA, 19 nt, Human
acucugucucaaaaaaaca

SEQ ID NO: 2772265 - RNA, 22 nt, Human
acucuagaugaaguuuuacauu

SEQ ID NO: 2772266 - RNA, 21 nt, Human
acucuagaugaaguuuuacau

SEQ ID NO: 2772267 - RNA, 14 nt, Human
acucuagaguccaa

SEQ ID NO: 2772268 - RNA, 20 nt, Human
acucuagaguccaagguuua

SEQ ID NO: 2772269 - RNA, 20 nt, Human
acucuagauaccuaaaacau

SEQ ID NO: 2772270 - RNA, 21 nt, Human
acucuagauaccuaaaacaua

SEQ ID NO: 2772271 - RNA, 14 nt, Human
acucuacuguguaa

SEQ ID NO: 2772272 - RNA, 15 nt, Human
acucuacuguguaau

SEQ ID NO: 2772273 - RNA, 20 nt, Human
acucuacuuagcaugucccu

SEQ ID NO: 2772274 - RNA, 17 nt, Human
acucuagacaagauauu

SEQ ID NO: 2772275 - RNA, 19 nt, Human
acucuagacaagauauugu

SEQ ID NO: 2772276 - RNA, 20 nt, Human
acucuagacaagauauugua

SEQ ID NO: 2772277 - RNA, 21 nt, Human
acucuagacaagauauuguac

SEQ ID NO: 2772278 - RNA, 21 nt, Human
acucuacuuagcaugucccua

SEQ ID NO: 2772279 - RNA, 20 nt, Human
acucuaagaucuuagauucu

SEQ ID NO: 2772280 - RNA, 21 nt, Human
acucuaagaucuuagauucuc

SEQ ID NO: 2772281 - RNA, 14 nt, Human
acucuaaagaccaa

SEQ ID NO: 2772282 - RNA, 15 nt, Human
acucuaaagaccaaa

SEQ ID NO: 2772283 - RNA, 16 nt, Human
acucuaaagaccaaac

SEQ ID NO: 2772284 - RNA, 18 nt, Human
acucuaaagaccaaacuu

SEQ ID NO: 2772285 - RNA, 12 nt, Human
acucuaagaucu

SEQ ID NO: 2772286 - RNA, 13 nt, Human
acucuaagaucuu

SEQ ID NO: 2772287 - RNA, 17 nt, Human
acucuaagaucuuagau

SEQ ID NO: 2772288 - RNA, 17 nt, Human
acucuaaauucuuuauu

SEQ ID NO: 2772289 - RNA, 22 nt, Human
acucuaaauucuuuauuucugu

SEQ ID NO: 2772290 - RNA, 23 nt, Human
acucuaaauucuuuauuucuguc

SEQ ID NO: 2772291 - RNA, 15 nt, Human
acuauuuuauucuaa

SEQ ID NO: 2772292 - RNA, 18 nt, Human
acuauuugucuuucagga

SEQ ID NO: 2772293 - RNA, 16 nt, Human
acuauuugucuuucag

SEQ ID NO: 2772294 - RNA, 23 nt, Human
acuauuugcuuauuuaauaaaga

SEQ ID NO: 2772295 - RNA, 19 nt, Human
acuauuugcuuauuuaaua

SEQ ID NO: 2772296 - RNA, 14 nt, Human
acuauuucggccuu

SEQ ID NO: 2772297 - RNA, 22 nt, Human
acuauuucuacacagugggaac

SEQ ID NO: 2772298 - RNA, 22 nt, Human
acuauuucugggucuuuugcua

SEQ ID NO: 2772299 - RNA, 23 nt, Human
acuauuucugggucuuuugcuac

SEQ ID NO: 2772300 - RNA, 14 nt, Human
acuauuuucuacaa

SEQ ID NO: 2772301 - RNA, 14 nt, Human
acuauuuucuuuuu

SEQ ID NO: 2772302 - RNA, 18 nt, Human
acugauuaugucuuuuau

SEQ ID NO: 2772303 - RNA, 20 nt, Human
acugauuaugucuuuuauau

SEQ ID NO: 2772304 - RNA, 15 nt, Human
acugauuauuuucuu

SEQ ID NO: 2772305 - RNA, 18 nt, Human
acugauuauuuucuucau

SEQ ID NO: 2772306 - RNA, 20 nt, Human
acugauuguuuuagagacua

SEQ ID NO: 2772307 - RNA, 21 nt, Human
acugauuguuuuagagacuau

SEQ ID NO: 2772308 - RNA, 20 nt, Human
acugauucugggaugcuccu

SEQ ID NO: 2772309 - RNA, 15 nt, Human
acugauugagaaguu

SEQ ID NO: 2772310 - RNA, 23 nt, Human
acugacauuguuggccaaagcca

SEQ ID NO: 2772311 - RNA, 22 nt, Human
acugacauuguuggccaaagcc

SEQ ID NO: 2772312 - RNA, 13 nt, Human
acugaccagccuc

SEQ ID NO: 2772313 - RNA, 15 nt, Human
acugaccagccucca

SEQ ID NO: 2772314 - RNA, 20 nt, Human
acugaccagccuccaugcug

SEQ ID NO: 2772315 - RNA, 22 nt, Human
acugaccauccacucuacccuc

SEQ ID NO: 2772316 - RNA, 16 nt, Human
acugaccauccacucu

SEQ ID NO: 2772317 - RNA, 23 nt, Human
acugaccagccuccaugcugccu

SEQ ID NO: 2772318 - RNA, 20 nt, Human
acugaucuuuguauauuaca

SEQ ID NO: 2772319 - RNA, 15 nt, Human
acugaugcugagauu

SEQ ID NO: 2772320 - RNA, 16 nt, Human
acugaugcugagauuc

SEQ ID NO: 2772321 - RNA, 18 nt, Human
acugaugcugagauucuu

SEQ ID NO: 2772322 - RNA, 15 nt, Human
acugaugcuuagaug

SEQ ID NO: 2772323 - RNA, 15 nt, Human
acugaugcuguucuc

SEQ ID NO: 2772324 - RNA, 20 nt, Human
acugaugcuguucucuucuu

SEQ ID NO: 2772325 - RNA, 22 nt, Human
acugaugggcaacccccagccu

SEQ ID NO: 2772326 - RNA, 12 nt, Human
acugaugggcaa

SEQ ID NO: 2772327 - RNA, 15 nt, Human
acugccaucaaacug

SEQ ID NO: 2772328 - RNA, 19 nt, Human
acugccagucccccugccc

SEQ ID NO: 2772329 - RNA, 18 nt, Human
acugccagucccccugcc

SEQ ID NO: 2772330 - RNA, 20 nt, Human
acugcuuuuggucuguguga

SEQ ID NO: 2772331 - RNA, 16 nt, Human
acugcuuuuggucugu

SEQ ID NO: 2772332 - RNA, 19 nt, Human
acugcccuaacuguacauu

SEQ ID NO: 2772333 - RNA, 20 nt, Human
acuggaagcuaauuugcauu

SEQ ID NO: 2772334 - RNA, 18 nt, Human
acuggaaggggaagggac

SEQ ID NO: 2772335 - RNA, 23 nt, Human
acuggaauaagaagcaaauaaau

SEQ ID NO: 2772336 - RNA, 18 nt, Human
acuggaagguggggacag

SEQ ID NO: 2772337 - RNA, 12 nt, Human
acuggaaguuca

SEQ ID NO: 2772338 - RNA, 19 nt, Human
acuggaaguucauaccuaa

SEQ ID NO: 2772339 - RNA, 20 nt, Human
acuggaaguucauaccuaag

SEQ ID NO: 2772340 - RNA, 21 nt, Human
acuggaaguucauaccuaagu

SEQ ID NO: 2772341 - RNA, 22 nt, Human
acuggaaguucauaccuaagua

SEQ ID NO: 2772342 - RNA, 15 nt, Human
acugcuuuuggucug

SEQ ID NO: 2772343 - RNA, 14 nt, Human
acugcuuuuggucu

SEQ ID NO: 2772344 - RNA, 16 nt, Human
acugccaugcagggcc

SEQ ID NO: 2772345 - RNA, 14 nt, Human
acugcccgcacacc

SEQ ID NO: 2772346 - RNA, 16 nt, Human
acugcccgcacacccu

SEQ ID NO: 2772347 - RNA, 19 nt, Human
acugcccgcacacccucac

SEQ ID NO: 2772348 - RNA, 16 nt, Human
acuugggaggcugagg

SEQ ID NO: 2772349 - RNA, 13 nt, Human
acuuggcuuucau

SEQ ID NO: 2772350 - RNA, 13 nt, Human
acuuuauguguaa

SEQ ID NO: 2772351 - RNA, 21 nt, Human
acuuucaaaucgguccccugu

SEQ ID NO: 2772352 - RNA, 13 nt, Human
acuuucaaaauua

SEQ ID NO: 2772353 - RNA, 18 nt, Human
acuuucaaaauuaaaucu

SEQ ID NO: 2772354 - RNA, 20 nt, Human
acuuucaaaauuaaaucugu

SEQ ID NO: 2772355 - RNA, 16 nt, Human
acuuuauguguaaaua

SEQ ID NO: 2772356 - RNA, 21 nt, Human
acuuuauguguaaauacauaa

SEQ ID NO: 2772357 - RNA, 18 nt, Human
acuuuauguuugucuuuu

SEQ ID NO: 2772358 - RNA, 21 nt, Human
acuuucagguacuaaauaccu

SEQ ID NO: 2772359 - RNA, 16 nt, Human
acuuucaguaaacaua

SEQ ID NO: 2772360 - RNA, 17 nt, Human
acuuucaguaaacauaa

SEQ ID NO: 2772361 - RNA, 18 nt, Human
acuuucagguacuaaaua

SEQ ID NO: 2772362 - RNA, 22 nt, Human
acuuucaggccacauggcuaaa

SEQ ID NO: 2772363 - RNA, 20 nt, Human
acuuaaaauauuccugcauu

SEQ ID NO: 2772364 - RNA, 14 nt, Human
acuuaaaaugugca

SEQ ID NO: 2772365 - RNA, 16 nt, Human
acuuaaaaugugcagu

SEQ ID NO: 2772366 - RNA, 18 nt, Human
acuuaaaaugugcaguaa

SEQ ID NO: 2772367 - RNA, 22 nt, Human
acuuaaaauauuccugcauuug

SEQ ID NO: 2772368 - RNA, 11 nt, Human
acuuaaagauu

SEQ ID NO: 2772369 - RNA, 15 nt, Human
acuuaaagauuuauc

SEQ ID NO: 2772370 - RNA, 22 nt, Human
acuuaaagcccgccugacagaa

SEQ ID NO: 2772371 - RNA, 13 nt, Human
acuuaaagauuua

SEQ ID NO: 2772372 - RNA, 19 nt, Human
acuucaaauuuuuuaaaag

SEQ ID NO: 2772373 - RNA, 19 nt, Human
acuucaacauuuacaugua

SEQ ID NO: 2772374 - RNA, 13 nt, Human
acuucaaggccca

SEQ ID NO: 2772375 - RNA, 16 nt, Human
acuucaaggugacaga

SEQ ID NO: 2772376 - RNA, 23 nt, Human
acuucaaggugacagaaggacca

SEQ ID NO: 2772377 - RNA, 15 nt, Human
acuucaaugauagua

SEQ ID NO: 2772378 - RNA, 19 nt, Human
acuucaaugggcucuucca

SEQ ID NO: 2772379 - RNA, 22 nt, Human
acuucaaugggcucuuccaaca

SEQ ID NO: 2772380 - RNA, 19 nt, Human
acuucaauaauuguccaug

SEQ ID NO: 2772381 - RNA, 20 nt, Human
acuucugccauauucuguug

SEQ ID NO: 2772382 - RNA, 19 nt, Human
acuucugccauauucuguu

SEQ ID NO: 2772383 - RNA, 16 nt, Human
acuucuuaaaaguugu

SEQ ID NO: 2772384 - RNA, 12 nt, Human
acuucuuaaaua

SEQ ID NO: 2772385 - RNA, 14 nt, Human
acuucuuaaauauc

SEQ ID NO: 2772386 - RNA, 16 nt, Human
acuucuuaaauaucuu

SEQ ID NO: 2772387 - RNA, 17 nt, Human
acuucuuaaauaucuuu

SEQ ID NO: 2772388 - RNA, 18 nt, Human
acuucuuaaauaucuuuu

SEQ ID NO: 2772389 - RNA, 19 nt, Human
acuucuuaaauaucuuuua

SEQ ID NO: 2772390 - RNA, 20 nt, Human
acuucuuaaauaucuuuuau

SEQ ID NO: 2772391 - RNA, 22 nt, Human
acuucuuaaauaucuuuuaugu

SEQ ID NO: 2772392 - RNA, 14 nt, Human
acuucugcuggcau

SEQ ID NO: 2772393 - RNA, 13 nt, Human
acuucugccucuu

SEQ ID NO: 2772394 - RNA, 23 nt, Human
acuucugugagacccccacaccu

SEQ ID NO: 2772395 - RNA, 20 nt, Human
acuucugugagacccccaca

SEQ ID NO: 2772396 - RNA, 19 nt, Human
acuucugugagacccccac

SEQ ID NO: 2772397 - RNA, 16 nt, Human
acuucuggcucccucu

SEQ ID NO: 2772398 - RNA, 18 nt, Human
acuucuggcucccucuuc

SEQ ID NO: 2772399 - RNA, 22 nt, Human
acuucuggcucccucuucuuuc

SEQ ID NO: 2772400 - RNA, 21 nt, Human
acuggaccacugggcaaugau

SEQ ID NO: 2772401 - RNA, 13 nt, Human
acuggaauuaaaa

SEQ ID NO: 2772402 - RNA, 20 nt, Human
acuggaccacugggcaauga

SEQ ID NO: 2772403 - RNA, 16 nt, Human
acuggaccacugggca

SEQ ID NO: 2772404 - RNA, 18 nt, Human
acuggacagucacugcca

SEQ ID NO: 2772405 - RNA, 18 nt, Human
acuggacauaacauuuuc

SEQ ID NO: 2772406 - RNA, 19 nt, Human
cucuguaccccaugaccuu

SEQ ID NO: 2772407 - RNA, 21 nt, Human
cugaaggacauugcggacagc

SEQ ID NO: 2772408 - RNA, 20 nt, Human
cugaaggacauugcggacag

SEQ ID NO: 2772409 - RNA, 19 nt, Human
cugaaggacauugcggaca

SEQ ID NO: 2772410 - RNA, 22 nt, Human
cugaaaauguuuuucugccagg

SEQ ID NO: 2772411 - RNA, 12 nt, Human
cugaaaauguug

SEQ ID NO: 2772412 - RNA, 21 nt, Human
cugaaaauguuguuaugcuau

SEQ ID NO: 2772413 - RNA, 22 nt, Human
cugaaggaauaaauugcuccuu

SEQ ID NO: 2772414 - RNA, 21 nt, Human
cugaagcuucacucacuguca

SEQ ID NO: 2772415 - RNA, 14 nt, Human
cugaagcuugacuc

SEQ ID NO: 2772416 - RNA, 15 nt, Human
cugaagcuugacucc

SEQ ID NO: 2772417 - RNA, 20 nt, Human
cugaagcuugacucccaagu

SEQ ID NO: 2772418 - RNA, 21 nt, Human
cugaagcuugacucccaaguu

SEQ ID NO: 2772419 - RNA, 20 nt, Human
cugaaaaccucuccucaugu

SEQ ID NO: 2772420 - RNA, 17 nt, Human
cugaaaaccucuccuca

SEQ ID NO: 2772421 - RNA, 15 nt, Human
cugaaaaccucuccu

SEQ ID NO: 2772422 - RNA, 14 nt, Human
cugaaaaccucucc

SEQ ID NO: 2772423 - RNA, 13 nt, Human
cugaaaacuggaa

SEQ ID NO: 2772424 - RNA, 15 nt, Human
cugaaaacuggaaua

SEQ ID NO: 2772425 - RNA, 19 nt, Human
cugaaaacuggaauaagaa

SEQ ID NO: 2772426 - RNA, 21 nt, Human
cugaaaacuggaauaagaagc

SEQ ID NO: 2772427 - RNA, 22 nt, Human
cugaaaacuggaauaagaagca

SEQ ID NO: 2772428 - RNA, 23 nt, Human
cugaaaacuggaauaagaagcaa

SEQ ID NO: 2772429 - RNA, 11 nt, Human
cugaaaagaaa

SEQ ID NO: 2772430 - RNA, 13 nt, Human
cugaaaagaaaua

SEQ ID NO: 2772431 - RNA, 14 nt, Human
cugaaaagaaauaa

SEQ ID NO: 2772432 - RNA, 16 nt, Human
cugaaaagaaauaaua

SEQ ID NO: 2772433 - RNA, 17 nt, Human
cugaaaagaaauaauaa

SEQ ID NO: 2772434 - RNA, 19 nt, Human
cugaaaaccuaaguccuuu

SEQ ID NO: 2772435 - RNA, 18 nt, Human
cugaaaaccaucuggccu

SEQ ID NO: 2772436 - RNA, 19 nt, Human
cugaaaaccaucuggccug

SEQ ID NO: 2772437 - RNA, 20 nt, Human
cugaaaaccaucuggccugg

SEQ ID NO: 2772438 - RNA, 21 nt, Human
cugaaaaccaucuggccuggc

SEQ ID NO: 2772439 - RNA, 22 nt, Human
cugaaaaccaucuggccuggcc

SEQ ID NO: 2772440 - RNA, 15 nt, Human
cugaaaaauuccuuu

SEQ ID NO: 2772441 - RNA, 18 nt, Human
cucuuggagaccuuaccc

SEQ ID NO: 2772442 - RNA, 16 nt, Human
cucuugcuauugaauu

SEQ ID NO: 2772443 - RNA, 12 nt, Human
cucuugcugucu

SEQ ID NO: 2772444 - RNA, 13 nt, Human
cucuugcugucuc

SEQ ID NO: 2772445 - RNA, 14 nt, Human
cucuugcugucucu

SEQ ID NO: 2772446 - RNA, 15 nt, Human
cucuugcugucucug

SEQ ID NO: 2772447 - RNA, 17 nt, Human
cucuugcugucucugcu

SEQ ID NO: 2772448 - RNA, 18 nt, Human
cucuugcugucucugcuc

SEQ ID NO: 2772449 - RNA, 19 nt, Human
cucuugcugucucugcucg

SEQ ID NO: 2772450 - RNA, 14 nt, Human
cucuugcuuucuau

SEQ ID NO: 2772451 - RNA, 16 nt, Human
cucuugccacugccuc

SEQ ID NO: 2772452 - RNA, 17 nt, Human
cucuugccacugccucu

SEQ ID NO: 2772453 - RNA, 18 nt, Human
cucuugccacugccucuu

SEQ ID NO: 2772454 - RNA, 19 nt, Human
cucuugccacugccucuuc

SEQ ID NO: 2772455 - RNA, 20 nt, Human
cucuugccacugccucuucc

SEQ ID NO: 2772456 - RNA, 14 nt, Human
cugacccuggggcu

SEQ ID NO: 2772457 - RNA, 19 nt, Human
cugacccuggggcuggcuu

SEQ ID NO: 2772458 - RNA, 20 nt, Human
cugacccuggggcuggcuuu

SEQ ID NO: 2772459 - RNA, 14 nt, Human
cugacccuuccaga

SEQ ID NO: 2772460 - RNA, 15 nt, Human
cugacccuuccagac

SEQ ID NO: 2772461 - RNA, 16 nt, Human
cugacccuuccagaca

SEQ ID NO: 2772462 - RNA, 17 nt, Human
cugacccuuccagacau

SEQ ID NO: 2772463 - RNA, 18 nt, Human
cugacccuuccagacaua

SEQ ID NO: 2772464 - RNA, 17 nt, Human
cugaccucaagugaucu

SEQ ID NO: 2772465 - RNA, 14 nt, Human
cugaccucuugcug

SEQ ID NO: 2772466 - RNA, 15 nt, Human
cugaccucuugcugu

SEQ ID NO: 2772467 - RNA, 16 nt, Human
cugaccucuugcuguc

SEQ ID NO: 2772468 - RNA, 17 nt, Human
cugaccucuugcugucu

SEQ ID NO: 2772469 - RNA, 18 nt, Human
cugaccucuugcugucuc

SEQ ID NO: 2772470 - RNA, 13 nt, Human
cugaccuuccuuc

SEQ ID NO: 2772471 - RNA, 15 nt, Human
cugaccuuccuuccu

SEQ ID NO: 2772472 - RNA, 16 nt, Human
cugaccuuccuuccug

SEQ ID NO: 2772473 - RNA, 14 nt, Human
cugaccuucagcuc

SEQ ID NO: 2772474 - RNA, 15 nt, Human
cugaccuucagcuca

SEQ ID NO: 2772475 - RNA, 22 nt, Human
cugaccuucagcucacgcuuca

SEQ ID NO: 2772476 - RNA, 14 nt, Human
cugacagacacagg

SEQ ID NO: 2772477 - RNA, 12 nt, Human
cugacagacaca

SEQ ID NO: 2772478 - RNA, 15 nt, Human
cugacagacacaggc

SEQ ID NO: 2772479 - RNA, 21 nt, Human
cugacagaaggugccacuuua

SEQ ID NO: 2772480 - RNA, 16 nt, Human
cugacagaaggugcca

SEQ ID NO: 2772481 - RNA, 18 nt, Human
cugaaggcagcauguaua

SEQ ID NO: 2772482 - RNA, 14 nt, Human
cugaaggcuuugug

SEQ ID NO: 2772483 - RNA, 15 nt, Human
cugaaggcuuuguga

SEQ ID NO: 2772484 - RNA, 17 nt, Human
cugaagggaaucacauc

SEQ ID NO: 2772485 - RNA, 18 nt, Human
cugaagggcauucuuucc

SEQ ID NO: 2772486 - RNA, 20 nt, Human
cugaagggcauucuuuccca

SEQ ID NO: 2772487 - RNA, 14 nt, Human
cugacagaaggacu

SEQ ID NO: 2772488 - RNA, 20 nt, Human
cucucuggaagcccuggaga

SEQ ID NO: 2772489 - RNA, 20 nt, Human
cucuccucauguucugcuuu

SEQ ID NO: 2772490 - RNA, 15 nt, Human
cucugaaggacauug

SEQ ID NO: 2772491 - RNA, 20 nt, Human
cucugaagcauguuucaugu

SEQ ID NO: 2772492 - RNA, 14 nt, Human
cucugaagcauguu

SEQ ID NO: 2772493 - RNA, 17 nt, Human
cucugaagcauguuuca

SEQ ID NO: 2772494 - RNA, 15 nt, Human
cucugaagccucugg

SEQ ID NO: 2772495 - RNA, 17 nt, Human
cucugaagccucuggga

SEQ ID NO: 2772496 - RNA, 18 nt, Human
cucugaagcgugauuuua

SEQ ID NO: 2772497 - RNA, 15 nt, Human
cucugaagcaaggcg

SEQ ID NO: 2772498 - RNA, 18 nt, Human
cucugaagcaaggcggug

SEQ ID NO: 2772499 - RNA, 23 nt, Human
cucugaagcaaggcgguggacuu

SEQ ID NO: 2772500 - RNA, 11 nt, Human
cucugaagcau

SEQ ID NO: 2772501 - RNA, 13 nt, Human
cucugaacuuugg

SEQ ID NO: 2772502 - RNA, 14 nt, Human
cucugaacuuugga

SEQ ID NO: 2772503 - RNA, 16 nt, Human
cucugaacuuuggaga

SEQ ID NO: 2772504 - RNA, 21 nt, Human
cucucagccccugauccugug

SEQ ID NO: 2772505 - RNA, 13 nt, Human
cucucagcccaga

SEQ ID NO: 2772506 - RNA, 14 nt, Human
cucucagcccagaa

SEQ ID NO: 2772507 - RNA, 15 nt, Human
cucucagcccagaag

SEQ ID NO: 2772508 - RNA, 18 nt, Human
cucucagcccagaagaaa

SEQ ID NO: 2772509 - RNA, 22 nt, Human
cucucagccccugauccuguga

SEQ ID NO: 2772510 - RNA, 17 nt, Human
cucucagccuuacauuu

SEQ ID NO: 2772511 - RNA, 21 nt, Human
cucuccgaccagacaccuuga

SEQ ID NO: 2772512 - RNA, 15 nt, Human
cucuccggucucucu

SEQ ID NO: 2772513 - RNA, 21 nt, Human
cucuccguuuauuauaaacug

SEQ ID NO: 2772514 - RNA, 15 nt, Human
cucucaauaugcuua

SEQ ID NO: 2772515 - RNA, 16 nt, Human
cucucaauaugcuuac

SEQ ID NO: 2772516 - RNA, 14 nt, Human
cucucacuccccau

SEQ ID NO: 2772517 - RNA, 19 nt, Human
cucucacuccccaugccac

SEQ ID NO: 2772518 - RNA, 21 nt, Human
cucucacuaaacuuuacccaa

SEQ ID NO: 2772519 - RNA, 12 nt, Human
cucucacucccc

SEQ ID NO: 2772520 - RNA, 23 nt, Human
cucucaaaacuugguauuuuuca

SEQ ID NO: 2772521 - RNA, 23 nt, Human
cucucaaaagagaaaaacaaaac

SEQ ID NO: 2772522 - RNA, 23 nt, Human
cucucaaacuaaaagacauuugu

SEQ ID NO: 2772523 - RNA, 16 nt, Human
cucuauuuauguuugc

SEQ ID NO: 2772524 - RNA, 17 nt, Human
cucuauuuauguuugca

SEQ ID NO: 2772525 - RNA, 15 nt, Human
cucuauuucauuuuu

SEQ ID NO: 2772526 - RNA, 16 nt, Human
cucuauuuaauauuua

SEQ ID NO: 2772527 - RNA, 17 nt, Human
cucuauuuaauauuuau

SEQ ID NO: 2772528 - RNA, 13 nt, Human
cucuauuuaauau

SEQ ID NO: 2772529 - RNA, 14 nt, Human
cucuauuuaauauu

SEQ ID NO: 2772530 - RNA, 15 nt, Human
cucuauuuaauauuu

SEQ ID NO: 2772531 - RNA, 12 nt, Human
cucuauuuaaua

SEQ ID NO: 2772532 - RNA, 21 nt, Human
cucuauucucaaaguuuccua

SEQ ID NO: 2772533 - RNA, 15 nt, Human
cuccguccucgaugg

SEQ ID NO: 2772534 - RNA, 22 nt, Human
cuccguccaggagccugugccu

SEQ ID NO: 2772535 - RNA, 20 nt, Human
cuccguccaggagccugugc

SEQ ID NO: 2772536 - RNA, 19 nt, Human
cuccguccaggagccuggc

SEQ ID NO: 2772537 - RNA, 15 nt, Human
cuccguccagccgcc

SEQ ID NO: 2772538 - RNA, 22 nt, Human
cuccguccagccgccauugcca

SEQ ID NO: 2772539 - RNA, 18 nt, Human
cuccguccaggagccugg

SEQ ID NO: 2772540 - RNA, 18 nt, Human
cucggcuuuucucagcug

SEQ ID NO: 2772541 - RNA, 19 nt, Human
cucggcuuuucucagcugg

SEQ ID NO: 2772542 - RNA, 15 nt, Human
cucgggacaccugcc

SEQ ID NO: 2772543 - RNA, 20 nt, Human
cucgggacaccugcccugcc

SEQ ID NO: 2772544 - RNA, 20 nt, Human
cucgggauuaguacacacuu

SEQ ID NO: 2772545 - RNA, 19 nt, Human
cucgggaggcugaggcaca

SEQ ID NO: 2772546 - RNA, 20 nt, Human
cucgggaggcugaggcacaa

SEQ ID NO: 2772547 - RNA, 15 nt, Human
cucugucaaugaaaa

SEQ ID NO: 2772548 - RNA, 15 nt, Human
cucuguauuuuuucu

SEQ ID NO: 2772549 - RNA, 20 nt, Human
cucuguauuuuuucuugcau

SEQ ID NO: 2772550 - RNA, 23 nt, Human
cucuguauuuuuucuugcauuga

SEQ ID NO: 2772551 - RNA, 16 nt, Human
cucuuagaaaugaagg

SEQ ID NO: 2772552 - RNA, 15 nt, Human
cucuuagaacauugu

SEQ ID NO: 2772553 - RNA, 13 nt, Human
cucuguauaaaca

SEQ ID NO: 2772554 - RNA, 18 nt, Human
cucuguauaaacauuaaa

SEQ ID NO: 2772555 - RNA, 13 nt, Human
cucuguauauaua

SEQ ID NO: 2772556 - RNA, 16 nt, Human
cucugguucuucauuu

SEQ ID NO: 2772557 - RNA, 14 nt, Human
cucugguuucucau

SEQ ID NO: 2772558 - RNA, 21 nt, Human
cucuguaaaugaaaaaaccca

SEQ ID NO: 2772559 - RNA, 15 nt, Human
cucuguaacaucacu

SEQ ID NO: 2772560 - RNA, 23 nt, Human
cucuguaaaaacacugaaaaauu

SEQ ID NO: 2772561 - RNA, 19 nt, Human
cucugcugacagacacagg

SEQ ID NO: 2772562 - RNA, 18 nt, Human
cucugcugacagacacag

SEQ ID NO: 2772563 - RNA, 17 nt, Human
cucugcugacagacaca

SEQ ID NO: 2772564 - RNA, 15 nt, Human
cucugguuaucuaau

SEQ ID NO: 2772565 - RNA, 14 nt, Human
cucugguuccuccc

SEQ ID NO: 2772566 - RNA, 13 nt, Human
cucugcucagcca

SEQ ID NO: 2772567 - RNA, 16 nt, Human
cucugcucagccaagc

SEQ ID NO: 2772568 - RNA, 12 nt, Human
cucugcuccacc

SEQ ID NO: 2772569 - RNA, 14 nt, Human
cucugcuccaccac

SEQ ID NO: 2772570 - RNA, 13 nt, Human
cucugcuccacca

SEQ ID NO: 2772571 - RNA, 16 nt, Human
cucugcuccaccacau

SEQ ID NO: 2772572 - RNA, 15 nt, Human
cucugcuccaccaca

SEQ ID NO: 2772573 - RNA, 18 nt, Human
cucugcuccaccacaucc

SEQ ID NO: 2772574 - RNA, 18 nt, Human
cucugcacaugucuugua

SEQ ID NO: 2772575 - RNA, 18 nt, Human
cucugcaccguacugugg

SEQ ID NO: 2772576 - RNA, 13 nt, Human
cucugcaccccuc

SEQ ID NO: 2772577 - RNA, 15 nt, Human
cucugcaccccucug

SEQ ID NO: 2772578 - RNA, 15 nt, Human
cucugcacaugucuu

SEQ ID NO: 2772579 - RNA, 16 nt, Human
cucugcacaugucuug

SEQ ID NO: 2772580 - RNA, 16 nt, Human
cucugaagccucuggg

SEQ ID NO: 2772581 - RNA, 23 nt, Human
cucccugcagaugccacccuagc

SEQ ID NO: 2772582 - RNA, 16 nt, Human
cucccugcagaugcca

SEQ ID NO: 2772583 - RNA, 15 nt, Human
cucccugcagaugcc

SEQ ID NO: 2772584 - RNA, 21 nt, Human
cucccuccucaccucuggacu

SEQ ID NO: 2772585 - RNA, 19 nt, Human
cucccuccucaccucugga

SEQ ID NO: 2772586 - RNA, 18 nt, Human
cucccuccucaccucugg

SEQ ID NO: 2772587 - RNA, 17 nt, Human
cucccuccucaccucug

SEQ ID NO: 2772588 - RNA, 18 nt, Human
cuccagucccccuauccu

SEQ ID NO: 2772589 - RNA, 21 nt, Human
cuccagucccccuauccuugg

SEQ ID NO: 2772590 - RNA, 22 nt, Human
cuccagucccccuauccuuggc

SEQ ID NO: 2772591 - RNA, 23 nt, Human
cuccagucccccuauccuuggca

SEQ ID NO: 2772592 - RNA, 12 nt, Human
cucccaccucag

SEQ ID NO: 2772593 - RNA, 12 nt, Human
cucccacccugu

SEQ ID NO: 2772594 - RNA, 13 nt, Human
cucccacccugua

SEQ ID NO: 2772595 - RNA, 18 nt, Human
cucccacccuguaccuca

SEQ ID NO: 2772596 - RNA, 20 nt, Human
cucccacccuguaccucauc

SEQ ID NO: 2772597 - RNA, 23 nt, Human
cucccacccuguaccucauccca

SEQ ID NO: 2772598 - RNA, 13 nt, Human
cucccccugggcu

SEQ ID NO: 2772599 - RNA, 12 nt, Human
cucccccugggc

SEQ ID NO: 2772600 - RNA, 11 nt, Human
cucccccuggg

SEQ ID NO: 2772601 - RNA, 15 nt, Human
cuccccggcacccuc

SEQ ID NO: 2772602 - RNA, 17 nt, Human
cuccccggcacccucug

SEQ ID NO: 2772603 - RNA, 19 nt, Human
cuccccggcacccucuggc

SEQ ID NO: 2772604 - RNA, 20 nt, Human
cuccccggcacccucuggcc

SEQ ID NO: 2772605 - RNA, 15 nt, Human
cuccccgccuuccgc

SEQ ID NO: 2772606 - RNA, 22 nt, Human
cuccccgccuuccgccccuucc

SEQ ID NO: 2772607 - RNA, 16 nt, Human
cuccccgcuaaggaag

SEQ ID NO: 2772608 - RNA, 19 nt, Human
cuccccucacagccucuga

SEQ ID NO: 2772609 - RNA, 16 nt, Human
cuccccucagagugca

SEQ ID NO: 2772610 - RNA, 13 nt, Human
cuccccucagagu

SEQ ID NO: 2772611 - RNA, 20 nt, Human
cuccccucacagccucugac

SEQ ID NO: 2772612 - RNA, 23 nt, Human
cucccccugggcucugccccagc

SEQ ID NO: 2772613 - RNA, 16 nt, Human
cucccccuuaccccac

SEQ ID NO: 2772614 - RNA, 15 nt, Human
cuccccuccccugcu

SEQ ID NO: 2772615 - RNA, 16 nt, Human
cuccccuccccugcug

SEQ ID NO: 2772616 - RNA, 17 nt, Human
cuccccuccccugcugc

SEQ ID NO: 2772617 - RNA, 18 nt, Human
cuccccuccccugcugca

SEQ ID NO: 2772618 - RNA, 15 nt, Human
cucccuccucaccuc

SEQ ID NO: 2772619 - RNA, 14 nt, Human
cucccuccucaccu

SEQ ID NO: 2772620 - RNA, 17 nt, Human
cucccuccggcuugacc

SEQ ID NO: 2772621 - RNA, 12 nt, Human
cuccccuccagc

SEQ ID NO: 2772622 - RNA, 14 nt, Human
cuccccuccagccu

SEQ ID NO: 2772623 - RNA, 13 nt, Human
cuccccuccccug

SEQ ID NO: 2772624 - RNA, 14 nt, Human
cuccccuccccugc

SEQ ID NO: 2772625 - RNA, 19 nt, Human
cuccgcuuucuacccagcg

SEQ ID NO: 2772626 - RNA, 21 nt, Human
cuccgcugccgugccgccugc

SEQ ID NO: 2772627 - RNA, 12 nt, Human
cuccgcugcucc

SEQ ID NO: 2772628 - RNA, 13 nt, Human
cuccgcugcuccu

SEQ ID NO: 2772629 - RNA, 16 nt, Human
cuccgcugcuccuugg

SEQ ID NO: 2772630 - RNA, 18 nt, Human
cuccgcugcuccuuggcu

SEQ ID NO: 2772631 - RNA, 21 nt, Human
cuccgccuucacuccggugug

SEQ ID NO: 2772632 - RNA, 19 nt, Human
cuccgccuucacuccggug

SEQ ID NO: 2772633 - RNA, 18 nt, Human
cuccgccuucacuccggu

SEQ ID NO: 2772634 - RNA, 12 nt, Human
cuccgccuucac

SEQ ID NO: 2772635 - RNA, 14 nt, Human
cuccgccuucacau

SEQ ID NO: 2772636 - RNA, 19 nt, Human
cuccgccuucacauucccc

SEQ ID NO: 2772637 - RNA, 15 nt, Human
cuccgccucccgggu

SEQ ID NO: 2772638 - RNA, 21 nt, Human
cuccagaagccucuggcuaga

SEQ ID NO: 2772639 - RNA, 20 nt, Human
cuccagaagccucuggcuag

SEQ ID NO: 2772640 - RNA, 21 nt, Human
cuccagaaucuaaagccagug

SEQ ID NO: 2772641 - RNA, 23 nt, Human
cuccagaagauagcuucacccca

SEQ ID NO: 2772642 - RNA, 16 nt, Human
cuccagaagcacuggg

SEQ ID NO: 2772643 - RNA, 20 nt, Human
cuccagaagcacugggauca

SEQ ID NO: 2772644 - RNA, 15 nt, Human
cuccagaagccucug

SEQ ID NO: 2772645 - RNA, 14 nt, Human
cuccagaagccucu

SEQ ID NO: 2772646 - RNA, 19 nt, Human
cuccagaagccucuggcua

SEQ ID NO: 2772647 - RNA, 18 nt, Human
cuccagaagccucuggcu

SEQ ID NO: 2772648 - RNA, 17 nt, Human
cuccagaagccucuggc

SEQ ID NO: 2772649 - RNA, 16 nt, Human
cuccagaagccucugg

SEQ ID NO: 2772650 - RNA, 14 nt, Human
cuccaaccuaaccu

SEQ ID NO: 2772651 - RNA, 15 nt, Human
cuccaaccuaaccug

SEQ ID NO: 2772652 - RNA, 19 nt, Human
cuccaaccuaaccuguguc

SEQ ID NO: 2772653 - RNA, 20 nt, Human
cuccaaccuaaccugugucu

SEQ ID NO: 2772654 - RNA, 22 nt, Human
cuccaaccuaaccugugucugc

SEQ ID NO: 2772655 - RNA, 15 nt, Human
cuccagaagauagcu

SEQ ID NO: 2772656 - RNA, 14 nt, Human
cuccagaagauagc

SEQ ID NO: 2772657 - RNA, 22 nt, Human
cuccagaaaugucuaaaugcug

SEQ ID NO: 2772658 - RNA, 14 nt, Human
cuccagaacccauu

SEQ ID NO: 2772659 - RNA, 12 nt, Human
cuccagguaccu

SEQ ID NO: 2772660 - RNA, 17 nt, Human
cuccagguaccuugacc

SEQ ID NO: 2772661 - RNA, 18 nt, Human
cuccagguaccuugaccu

SEQ ID NO: 2772662 - RNA, 19 nt, Human
cuccagguaccuugaccuu

SEQ ID NO: 2772663 - RNA, 20 nt, Human
cuccagguaccuugaccuuu

SEQ ID NO: 2772664 - RNA, 15 nt, Human
cuccagggugauuuu

SEQ ID NO: 2772665 - RNA, 17 nt, Human
cuccaggucagcugccc

SEQ ID NO: 2772666 - RNA, 16 nt, Human
cuccaggucucacggg

SEQ ID NO: 2772667 - RNA, 17 nt, Human
cuccaggucucacgggc

SEQ ID NO: 2772668 - RNA, 20 nt, Human
cuccaguauucuugucaaaa

SEQ ID NO: 2772669 - RNA, 18 nt, Human
cuccaggucucacgggca

SEQ ID NO: 2772670 - RNA, 16 nt, Human
cuccaguccaaggaaa

SEQ ID NO: 2772671 - RNA, 13 nt, Human
cucagugccacua

SEQ ID NO: 2772672 - RNA, 16 nt, Human
cucagugccaacugug

SEQ ID NO: 2772673 - RNA, 19 nt, Human
cucagugccaacuguggcu

SEQ ID NO: 2772674 - RNA, 21 nt, Human
cucagugccaacuguggcugg

SEQ ID NO: 2772675 - RNA, 22 nt, Human
cucagugccaacuguggcuggu

SEQ ID NO: 2772676 - RNA, 23 nt, Human
cucagugccaacuguggcugguc

SEQ ID NO: 2772677 - RNA, 21 nt, Human
cucaguggcuucaucugucaa

SEQ ID NO: 2772678 - RNA, 18 nt, Human
cucaguggcuucaucugu

SEQ ID NO: 2772679 - RNA, 13 nt, Human
cucaucuugugaa

SEQ ID NO: 2772680 - RNA, 14 nt, Human
cucaucuugugaaa

SEQ ID NO: 2772681 - RNA, 16 nt, Human
cucaucuugugaaaug

SEQ ID NO: 2772682 - RNA, 19 nt, Human
cucaucuugaagggcccag

SEQ ID NO: 2772683 - RNA, 20 nt, Human
cucaucuugaagggcccagg

SEQ ID NO: 2772684 - RNA, 13 nt, Human
cucaugaaucugc

SEQ ID NO: 2772685 - RNA, 14 nt, Human
cucaucuuuuuacu

SEQ ID NO: 2772686 - RNA, 20 nt, Human
cucaugccucagccuccuga

SEQ ID NO: 2772687 - RNA, 18 nt, Human
cucaugccucagccuccu

SEQ ID NO: 2772688 - RNA, 20 nt, Human
cuccaacagaacuaaauguu

SEQ ID NO: 2772689 - RNA, 22 nt, Human
cuccaacagaacuaaauguucu

SEQ ID NO: 2772690 - RNA, 14 nt, Human
cuccaaauuuuucu

SEQ ID NO: 2772691 - RNA, 20 nt, Human
cuccaacacaaggcuccaag

SEQ ID NO: 2772692 - RNA, 21 nt, Human
cuccaacacaaggcuccaaga

SEQ ID NO: 2772693 - RNA, 23 nt, Human
cuccaacacaaggcuccaagacc

SEQ ID NO: 2772694 - RNA, 16 nt, Human
cuccaaaguuauccag

SEQ ID NO: 2772695 - RNA, 23 nt, Human
cuccaaaucucaaugaagccagc

SEQ ID NO: 2772696 - RNA, 15 nt, Human
cuccaaaggcccccu

SEQ ID NO: 2772697 - RNA, 14 nt, Human
cucagccuccugag

SEQ ID NO: 2772698 - RNA, 22 nt, Human
cucagccuccugaguagcugga

SEQ ID NO: 2772699 - RNA, 13 nt, Human
cucagccuccuga

SEQ ID NO: 2772700 - RNA, 12 nt, Human
cucagccuccug

SEQ ID NO: 2772701 - RNA, 16 nt, Human
cucagccuuacauuug

SEQ ID NO: 2772702 - RNA, 18 nt, Human
cucagccuuacauuugug

SEQ ID NO: 2772703 - RNA, 20 nt, Human
cucagcggcgaccgcccucc

SEQ ID NO: 2772704 - RNA, 14 nt, Human
cucagcgaaugaau

SEQ ID NO: 2772705 - RNA, 13 nt, Human
cucagccucccaa

SEQ ID NO: 2772706 - RNA, 16 nt, Human
cuaucccggcugcccu

SEQ ID NO: 2772707 - RNA, 15 nt, Human
cuaucccggcugccc

SEQ ID NO: 2772708 - RNA, 21 nt, Human
cuauccacugggcacaacugc

SEQ ID NO: 2772709 - RNA, 15 nt, Human
cuauccaugcaccaa

SEQ ID NO: 2772710 - RNA, 16 nt, Human
cuauccaugcaccaaa

SEQ ID NO: 2772711 - RNA, 17 nt, Human
cuauccaugcaccaaac

SEQ ID NO: 2772712 - RNA, 18 nt, Human
cuauccaugcaccaaacu

SEQ ID NO: 2772713 - RNA, 16 nt, Human
cucagccucccaaagu

SEQ ID NO: 2772714 - RNA, 14 nt, Human
cucagccucccaaa

SEQ ID NO: 2772715 - RNA, 21 nt, Human
cucagccucccaaagugcugg

SEQ ID NO: 2772716 - RNA, 15 nt, Human
cucagccucccaaag

SEQ ID NO: 2772717 - RNA, 17 nt, Human
cucagccucccaaagug

SEQ ID NO: 2772718 - RNA, 17 nt, Human
cuaucccggcugcccuu

SEQ ID NO: 2772719 - RNA, 13 nt, Human
cucagccucccga

SEQ ID NO: 2772720 - RNA, 22 nt, Human
cucagccucccaaagugcuggg

SEQ ID NO: 2772721 - RNA, 23 nt, Human
cucagccucccgaauagcuggga

SEQ ID NO: 2772722 - RNA, 13 nt, Human
cucagccucccag

SEQ ID NO: 2772723 - RNA, 20 nt, Human
cucagccuccggaguagcug

SEQ ID NO: 2772724 - RNA, 20 nt, Human
cucagccucccagagugcug

SEQ ID NO: 2772725 - RNA, 12 nt, Human
cucagccucccg

SEQ ID NO: 2772726 - RNA, 18 nt, Human
cucaggccaggugcagug

SEQ ID NO: 2772727 - RNA, 15 nt, Human
cucaggccaggugca

SEQ ID NO: 2772728 - RNA, 23 nt, Human
cgaccagacaccuugacagggca

SEQ ID NO: 2772729 - RNA, 12 nt, Human
cgaccaccugcc

SEQ ID NO: 2772730 - RNA, 14 nt, Human
cgaccaccugccca

SEQ ID NO: 2772731 - RNA, 22 nt, Human
cgacauagcccaucccugccug

SEQ ID NO: 2772732 - RNA, 13 nt, Human
cgacaucacuguu

SEQ ID NO: 2772733 - RNA, 17 nt, Human
cgacaucacuguucaug

SEQ ID NO: 2772734 - RNA, 22 nt, Human
cgacaggcgagagaggagccag

SEQ ID NO: 2772735 - RNA, 23 nt, Human
cgacaggcgagagaggagccaga

SEQ ID NO: 2772736 - RNA, 12 nt, Human
ccuuuugucuuc

SEQ ID NO: 2772737 - RNA, 21 nt, Human
ccuuuuggugaaagcugagaa

SEQ ID NO: 2772738 - RNA, 13 nt, Human
ccuuuuggugugu

SEQ ID NO: 2772739 - RNA, 12 nt, Human
ccuuuuguaaag

SEQ ID NO: 2772740 - RNA, 19 nt, Human
ccuuuuguugagccaggcc

SEQ ID NO: 2772741 - RNA, 12 nt, Human
ccuuuugccaau

SEQ ID NO: 2772742 - RNA, 19 nt, Human
ccuuuuguaccauggugug

SEQ ID NO: 2772743 - RNA, 17 nt, Human
ccuuuuguagaaugaac

SEQ ID NO: 2772744 - RNA, 19 nt, Human
ccuuuuguagaaugaacca

SEQ ID NO: 2772745 - RNA, 19 nt, Human
ccuuuuguauacauccugg

SEQ ID NO: 2772746 - RNA, 20 nt, Human
ccuuuuguauacauccuggg

SEQ ID NO: 2772747 - RNA, 21 nt, Human
ccuuuuguauacauccugggu

SEQ ID NO: 2772748 - RNA, 23 nt, Human
ccuuuuguauacauccuggguaa

SEQ ID NO: 2772749 - RNA, 13 nt, Human
ccuuuuucugauu

SEQ ID NO: 2772750 - RNA, 15 nt, Human
ccuuuuuaaaacaca

SEQ ID NO: 2772751 - RNA, 16 nt, Human
ccuuuuuccuagccug

SEQ ID NO: 2772752 - RNA, 19 nt, Human
ccuuuuuccuagccuguuu

SEQ ID NO: 2772753 - RNA, 14 nt, Human
ccuuuuucuccagc

SEQ ID NO: 2772754 - RNA, 16 nt, Human
ccuuuuucuccagcug

SEQ ID NO: 2772755 - RNA, 23 nt, Human
ccuugccauccuaaaagccaccc

SEQ ID NO: 2772756 - RNA, 17 nt, Human
ccuuuccccagcccagg

SEQ ID NO: 2772757 - RNA, 18 nt, Human
ccuuuccccagcccaggg

SEQ ID NO: 2772758 - RNA, 20 nt, Human
ccuuuccccgacgcccaccc

SEQ ID NO: 2772759 - RNA, 15 nt, Human
ccuuuccccuuccuu

SEQ ID NO: 2772760 - RNA, 16 nt, Human
ccuuuccccuuccuuu

SEQ ID NO: 2772761 - RNA, 13 nt, Human
ccuuuccccagcc

SEQ ID NO: 2772762 - RNA, 14 nt, Human
ccuuuccccagccc

SEQ ID NO: 2772763 - RNA, 15 nt, Human
ccuuuccccagccca

SEQ ID NO: 2772764 - RNA, 16 nt, Human
ccuuuccccagcccag

SEQ ID NO: 2772765 - RNA, 12 nt, Human
ccuuuccccagc

SEQ ID NO: 2772766 - RNA, 13 nt, Human
ccuuuccccagca

SEQ ID NO: 2772767 - RNA, 14 nt, Human
ccuuuccccagcau

SEQ ID NO: 2772768 - RNA, 16 nt, Human
ccuuuccccagcauca

SEQ ID NO: 2772769 - RNA, 17 nt, Human
ccuuuccccagcaucac

SEQ ID NO: 2772770 - RNA, 21 nt, Human
ccuuuccccagcaucacuccc

SEQ ID NO: 2772771 - RNA, 22 nt, Human
ccuuuccccagcaucacucccc

SEQ ID NO: 2772772 - RNA, 23 nt, Human
ccuuuccccagcaucacucccca

SEQ ID NO: 2772773 - RNA, 22 nt, Human
ccuuuucuggggaaagacacug

SEQ ID NO: 2772774 - RNA, 18 nt, Human
ccuuuucugucucucucu

SEQ ID NO: 2772775 - RNA, 9 nt, Human
ccuuuucuu

SEQ ID NO: 2772776 - RNA, 17 nt, Human
ccuuuucuucuauguag

SEQ ID NO: 2772777 - RNA, 15 nt, Human
ccuuuucuauuccuu

SEQ ID NO: 2772778 - RNA, 21 nt, Human
ccuuuucuauuccuucuggcc

SEQ ID NO: 2772779 - RNA, 22 nt, Human
ccuuuucuauuccuucuggccu

SEQ ID NO: 2772780 - RNA, 23 nt, Human
ccuuuugaaguaguuuguauaac

SEQ ID NO: 2772781 - RNA, 15 nt, Human
ccuuuugcagaagag

SEQ ID NO: 2772782 - RNA, 19 nt, Human
ccuuuugcagaagagggug

SEQ ID NO: 2772783 - RNA, 13 nt, Human
ccuuuucuuuugu

SEQ ID NO: 2772784 - RNA, 14 nt, Human
ccuuuucuuuuguu

SEQ ID NO: 2772785 - RNA, 15 nt, Human
ccuuuucuuuuguua

SEQ ID NO: 2772786 - RNA, 16 nt, Human
ccuuuucuuuuguuac

SEQ ID NO: 2772787 - RNA, 17 nt, Human
ccuuuucuuuuguuacu

SEQ ID NO: 2772788 - RNA, 18 nt, Human
ccuuuucuuuuguuacug

SEQ ID NO: 2772789 - RNA, 19 nt, Human
ccuuuucuuuuguuacugu

SEQ ID NO: 2772790 - RNA, 20 nt, Human
ccuuuucuuuuguuacuguu

SEQ ID NO: 2772791 - RNA, 21 nt, Human
ccuuuucuuuuguuacuguuc

SEQ ID NO: 2772792 - RNA, 22 nt, Human
ccuuuucuuuuguuacuguucu

SEQ ID NO: 2772793 - RNA, 23 nt, Human
ccuuuucuuuuguuacuguucuu

SEQ ID NO: 2772794 - RNA, 20 nt, Human
ccuuuagcgcccaguugggu

SEQ ID NO: 2772795 - RNA, 14 nt, Human
ccuuuagcgcccag

SEQ ID NO: 2772796 - RNA, 13 nt, Human
ccuuuagguucuu

SEQ ID NO: 2772797 - RNA, 16 nt, Human
ccuuuagccccuccca

SEQ ID NO: 2772798 - RNA, 14 nt, Human
ccuugcuuguuaca

SEQ ID NO: 2772799 - RNA, 22 nt, Human
ccuuggaaguugcauggcauca

SEQ ID NO: 2772800 - RNA, 15 nt, Human
ccuuggaaguuucau

SEQ ID NO: 2772801 - RNA, 22 nt, Human
ccuugccuaaauuuaaugcugc

SEQ ID NO: 2772802 - RNA, 23 nt, Human
ccuugccuaaauuuaaugcugcc

SEQ ID NO: 2772803 - RNA, 15 nt, Human
ccuugcuuuucccuc

SEQ ID NO: 2772804 - RNA, 16 nt, Human
ccuugcuuuucccucu

SEQ ID NO: 2772805 - RNA, 17 nt, Human
ccuugcuuuucccucuu

SEQ ID NO: 2772806 - RNA, 18 nt, Human
ccuugcuuuucccucuuu

SEQ ID NO: 2772807 - RNA, 19 nt, Human
ccuugcuuuucccucuuuu

SEQ ID NO: 2772808 - RNA, 20 nt, Human
ccuugcuuuucccucuuuuc

SEQ ID NO: 2772809 - RNA, 22 nt, Human
ccuugcuuuucccucuuuucuu

SEQ ID NO: 2772810 - RNA, 15 nt, Human
ccuucugacggcccu

SEQ ID NO: 2772811 - RNA, 16 nt, Human
ccuucugacggcccug

SEQ ID NO: 2772812 - RNA, 17 nt, Human
ccuucugacggcccugc

SEQ ID NO: 2772813 - RNA, 18 nt, Human
ccuucugacggcccugca

SEQ ID NO: 2772814 - RNA, 19 nt, Human
ccuucugacggcccugcaa

SEQ ID NO: 2772815 - RNA, 21 nt, Human
ccuucugacggcccugcaaug

SEQ ID NO: 2772816 - RNA, 17 nt, Human
ccuucuggccucccaca

SEQ ID NO: 2772817 - RNA, 16 nt, Human
ccuucuggaaacugug

SEQ ID NO: 2772818 - RNA, 19 nt, Human
ccuucuggaaacugugaag

SEQ ID NO: 2772819 - RNA, 17 nt, Human
ccuucugccuuugaugu

SEQ ID NO: 2772820 - RNA, 13 nt, Human
ccuucugaugucu

SEQ ID NO: 2772821 - RNA, 22 nt, Human
ccuucugaugucucuaaagcac

SEQ ID NO: 2772822 - RNA, 14 nt, Human
ccuggccucugugc

SEQ ID NO: 2772823 - RNA, 20 nt, Human
ccuucugaaaaaguauccug

SEQ ID NO: 2772824 - RNA, 18 nt, Human
ccuucuggccucccacag

SEQ ID NO: 2772825 - RNA, 20 nt, Human
ccuucuggccucccacagac

SEQ ID NO: 2772826 - RNA, 12 nt, Human
ccuucuggccuu

SEQ ID NO: 2772827 - RNA, 13 nt, Human
ccuucuggccuuu

SEQ ID NO: 2772828 - RNA, 20 nt, Human
ccuucugggcagaccuugac

SEQ ID NO: 2772829 - RNA, 18 nt, Human
ccuucugucccucacagc

SEQ ID NO: 2772830 - RNA, 19 nt, Human
ccuucugucccucacagca

SEQ ID NO: 2772831 - RNA, 16 nt, Human
cggaggggccuggcag

SEQ ID NO: 2772832 - RNA, 18 nt, Human
cggaggggccuggcagcc

SEQ ID NO: 2772833 - RNA, 13 nt, Human
cggagguugcagg

SEQ ID NO: 2772834 - RNA, 21 nt, Human
cggagggugggggccaccugc

SEQ ID NO: 2772835 - RNA, 22 nt, Human
cggagggugggggccaccugcc

SEQ ID NO: 2772836 - RNA, 23 nt, Human
cggagggugggggccaccugccu

SEQ ID NO: 2772837 - RNA, 22 nt, Human
cggagguugggugggccggcuu

SEQ ID NO: 2772838 - RNA, 19 nt, Human
cggagucagccaggagcug

SEQ ID NO: 2772839 - RNA, 14 nt, Human
cggagucccaccuu

SEQ ID NO: 2772840 - RNA, 20 nt, Human
cggcgaccgcccuccgcgaa

SEQ ID NO: 2772841 - RNA, 19 nt, Human
cggcggagcuggccccgcc

SEQ ID NO: 2772842 - RNA, 21 nt, Human
cggcggagcuggccccgccgc

SEQ ID NO: 2772843 - RNA, 13 nt, Human
cggcggagcuggc

SEQ ID NO: 2772844 - RNA, 16 nt, Human
cggcgcuucccagcac

SEQ ID NO: 2772845 - RNA, 16 nt, Human
cggcgccuggccucca

SEQ ID NO: 2772846 - RNA, 17 nt, Human
cggcgccuggccuccag

SEQ ID NO: 2772847 - RNA, 18 nt, Human
cggcgccuggccuccagg

SEQ ID NO: 2772848 - RNA, 22 nt, Human
cggcgcgcucuucgcgcccgcc

SEQ ID NO: 2772849 - RNA, 18 nt, Human
cggcgccccugccaccuc

SEQ ID NO: 2772850 - RNA, 18 nt, Human
cggcucacugcagccuca

SEQ ID NO: 2772851 - RNA, 15 nt, Human
cggcggaaagccugu

SEQ ID NO: 2772852 - RNA, 19 nt, Human
cggcucacugcagccucaa

SEQ ID NO: 2772853 - RNA, 17 nt, Human
cggcucacugcauccuc

SEQ ID NO: 2772854 - RNA, 20 nt, Human
cggcucgagcaguccugccu

SEQ ID NO: 2772855 - RNA, 12 nt, Human
cggagccccagg

SEQ ID NO: 2772856 - RNA, 15 nt, Human
cggagcaucccggag

SEQ ID NO: 2772857 - RNA, 16 nt, Human
cggagcaucccggagg

SEQ ID NO: 2772858 - RNA, 22 nt, Human
cggagcaucccggaggaaaucu

SEQ ID NO: 2772859 - RNA, 14 nt, Human
cggagccccaggcc

SEQ ID NO: 2772860 - RNA, 22 nt, Human
cggagccccaggccucuguguc

SEQ ID NO: 2772861 - RNA, 19 nt, Human
cggagauuggacggccuga

SEQ ID NO: 2772862 - RNA, 18 nt, Human
cggagauaugaagagcaa

SEQ ID NO: 2772863 - RNA, 12 nt, Human
cgccucucccac

SEQ ID NO: 2772864 - RNA, 16 nt, Human
cgccuccccugcccca

SEQ ID NO: 2772865 - RNA, 15 nt, Human
cgccucccagccugg

SEQ ID NO: 2772866 - RNA, 12 nt, Human
cgaccucggugg

SEQ ID NO: 2772867 - RNA, 16 nt, Human
cgaccagggccgagga

SEQ ID NO: 2772868 - RNA, 13 nt, Human
cgaccgcccccuc

SEQ ID NO: 2772869 - RNA, 17 nt, Human
cgaccagaggagccuuu

SEQ ID NO: 2772870 - RNA, 14 nt, Human
cgaccacuuccagg

SEQ ID NO: 2772871 - RNA, 16 nt, Human
cgaccagaggagccuu

SEQ ID NO: 2772872 - RNA, 16 nt, Human
cgaccugccucggccu

SEQ ID NO: 2772873 - RNA, 18 nt, Human
cgaccugguuuuuaaaua

SEQ ID NO: 2772874 - RNA, 16 nt, Human
cgaguagcugggacua

SEQ ID NO: 2772875 - RNA, 15 nt, Human
cgaguagcugggacu

SEQ ID NO: 2772876 - RNA, 14 nt, Human
cgaguagcugggac

SEQ ID NO: 2772877 - RNA, 13 nt, Human
cgaguagcuggga

SEQ ID NO: 2772878 - RNA, 20 nt, Human
cgaguggauuguaggugcaa

SEQ ID NO: 2772879 - RNA, 19 nt, Human
cgccgcaaaccacacugga

SEQ ID NO: 2772880 - RNA, 20 nt, Human
cgccgcaaaccacacuggac

SEQ ID NO: 2772881 - RNA, 19 nt, Human
cgaguucggcucugggugg

SEQ ID NO: 2772882 - RNA, 20 nt, Human
cgcaggcuggcccugcccug

SEQ ID NO: 2772883 - RNA, 19 nt, Human
cgcaggcuggcccugcccu

SEQ ID NO: 2772884 - RNA, 18 nt, Human
cgcaggcuggcccugccc

SEQ ID NO: 2772885 - RNA, 17 nt, Human
cgcaggcuggcccugcc

SEQ ID NO: 2772886 - RNA, 15 nt, Human
cgcaggcuggcccug

SEQ ID NO: 2772887 - RNA, 14 nt, Human
cgcaggcuggcccu

SEQ ID NO: 2772888 - RNA, 14 nt, Human
cgccuacaggagug

SEQ ID NO: 2772889 - RNA, 16 nt, Human
cgccgucuccauggca

SEQ ID NO: 2772890 - RNA, 20 nt, Human
cgccggggacagaggccugc

SEQ ID NO: 2772891 - RNA, 22 nt, Human
cgccggggacagaggccugccc

SEQ ID NO: 2772892 - RNA, 14 nt, Human
cgccgugggcugcg

SEQ ID NO: 2772893 - RNA, 18 nt, Human
cgccuaaggucacagcua

SEQ ID NO: 2772894 - RNA, 20 nt, Human
cgccuaaggucacagcuagu

SEQ ID NO: 2772895 - RNA, 15 nt, Human
cgccucccacugggg

SEQ ID NO: 2772896 - RNA, 16 nt, Human
cgccucccacuggggu

SEQ ID NO: 2772897 - RNA, 19 nt, Human
cgccucccacuggggucca

SEQ ID NO: 2772898 - RNA, 14 nt, Human
cgccucccagccug

SEQ ID NO: 2772899 - RNA, 11 nt, Human
cgccucccagc

SEQ ID NO: 2772900 - RNA, 20 nt, Human
cgccgccugguacucaagcc

SEQ ID NO: 2772901 - RNA, 16 nt, Human
cgccggggacagaggc

SEQ ID NO: 2772902 - RNA, 17 nt, Human
cgccggggacagaggcc

SEQ ID NO: 2772903 - RNA, 19 nt, Human
cgccggggacagaggccug

SEQ ID NO: 2772904 - RNA, 14 nt, Human
cgccgccugguacu

SEQ ID NO: 2772905 - RNA, 15 nt, Human
cgccgccugguacuc

SEQ ID NO: 2772906 - RNA, 21 nt, Human
cgccgcaaaccacacuggacu

SEQ ID NO: 2772907 - RNA, 22 nt, Human
cgccgcaaaccacacuggacuc

SEQ ID NO: 2772908 - RNA, 23 nt, Human
cgccgcaaaccacacuggacucc

SEQ ID NO: 2772909 - RNA, 13 nt, Human
cuacaugagaaca

SEQ ID NO: 2772910 - RNA, 18 nt, Human
cuacaugaaacagaaaca

SEQ ID NO: 2772911 - RNA, 16 nt, Human
cuacaugaaacagaaa

SEQ ID NO: 2772912 - RNA, 15 nt, Human
cuacaugaaacagaa

SEQ ID NO: 2772913 - RNA, 21 nt, Human
cuacaugaggaacuguagaug

SEQ ID NO: 2772914 - RNA, 13 nt, Human
cuaccucucuguc

SEQ ID NO: 2772915 - RNA, 14 nt, Human
cuaccucucugucc

SEQ ID NO: 2772916 - RNA, 16 nt, Human
cuaccucucugucccu

SEQ ID NO: 2772917 - RNA, 20 nt, Human
cuaccucucugucccuugcu

SEQ ID NO: 2772918 - RNA, 17 nt, Human
cuacaugagaacaaaca

SEQ ID NO: 2772919 - RNA, 14 nt, Human
cuacaugagaacaa

SEQ ID NO: 2772920 - RNA, 23 nt, Human
cuacauaaguaauucaagaaaac

SEQ ID NO: 2772921 - RNA, 14 nt, Human
cuacaugaaacaga

SEQ ID NO: 2772922 - RNA, 22 nt, Human
cuacauaaguaauucaagaaaa

SEQ ID NO: 2772923 - RNA, 12 nt, Human
cuacauaaauug

SEQ ID NO: 2772924 - RNA, 13 nt, Human
cuacauaaauugg

SEQ ID NO: 2772925 - RNA, 14 nt, Human
cuacaguuuuuccu

SEQ ID NO: 2772926 - RNA, 21 nt, Human
cuacaguuauguucagucaca

SEQ ID NO: 2772927 - RNA, 22 nt, Human
cuaagugauccucccaccucag

SEQ ID NO: 2772928 - RNA, 20 nt, Human
cuaagugauccucccaccuc

SEQ ID NO: 2772929 - RNA, 16 nt, Human
cuaagugaaauuucua

SEQ ID NO: 2772930 - RNA, 19 nt, Human
cuaagugaaauuucuagcc

SEQ ID NO: 2772931 - RNA, 16 nt, Human
cuaagugacauuugua

SEQ ID NO: 2772932 - RNA, 17 nt, Human
cuaagugacauuuguag

SEQ ID NO: 2772933 - RNA, 19 nt, Human
cuaauuggccucuuuaaga

SEQ ID NO: 2772934 - RNA, 17 nt, Human
cuaauugggaguccagg

SEQ ID NO: 2772935 - RNA, 23 nt, Human
cuaauugggaguccaggcacagg

SEQ ID NO: 2772936 - RNA, 14 nt, Human
cuaauuuaaaaaau

SEQ ID NO: 2772937 - RNA, 14 nt, Human
cuaauuuaaagaga

SEQ ID NO: 2772938 - RNA, 15 nt, Human
cuaauuuaaagagac

SEQ ID NO: 2772939 - RNA, 12 nt, Human
cuaauuuaaaaa

SEQ ID NO: 2772940 - RNA, 15 nt, Human
cuaauugcuguugaa

SEQ ID NO: 2772941 - RNA, 16 nt, Human
cuaauugcuguugaaa

SEQ ID NO: 2772942 - RNA, 18 nt, Human
cuaauugcuguugaaagc

SEQ ID NO: 2772943 - RNA, 19 nt, Human
cuaauugcuguugaaagca

SEQ ID NO: 2772944 - RNA, 21 nt, Human
cuaauugcuguugaaagcaaa

SEQ ID NO: 2772945 - RNA, 24 nt, Human
cuaauugcuguugaaagcaaaaau

SEQ ID NO: 2772946 - RNA, 23 nt, Human
cuacaaaaaauuagaaauuggcu

SEQ ID NO: 2772947 - RNA, 17 nt, Human
cuaauuuuuaagcaaaa

SEQ ID NO: 2772948 - RNA, 12 nt, Human
cuaauuuuuaag

SEQ ID NO: 2772949 - RNA, 20 nt, Human
cuaauuuuuguaauuuuagu

SEQ ID NO: 2772950 - RNA, 14 nt, Human
cuaauuuuuguaau

SEQ ID NO: 2772951 - RNA, 12 nt, Human
cuaauuuuucca

SEQ ID NO: 2772952 - RNA, 10 nt, Human
cuacaaauca

SEQ ID NO: 2772953 - RNA, 20 nt, Human
cuacaaagcacuagagaaug

SEQ ID NO: 2772954 - RNA, 12 nt, Human
cuacaaccaauu

SEQ ID NO: 2772955 - RNA, 16 nt, Human
cuacaacaagaguuua

SEQ ID NO: 2772956 - RNA, 12 nt, Human
cuacaacagccu

SEQ ID NO: 2772957 - RNA, 14 nt, Human
cuacaacagccuca

SEQ ID NO: 2772958 - RNA, 16 nt, Human
cuacaacagccucacu

SEQ ID NO: 2772959 - RNA, 19 nt, Human
cuaaagagcacuuacugua

SEQ ID NO: 2772960 - RNA, 23 nt, Human
cuaaacugcccccucugcccugc

SEQ ID NO: 2772961 - RNA, 20 nt, Human
cuaaacuuccccaucuucua

SEQ ID NO: 2772962 - RNA, 16 nt, Human
cuaaacuuccccaucu

SEQ ID NO: 2772963 - RNA, 14 nt, Human
cgugucuguauuua

SEQ ID NO: 2772964 - RNA, 22 nt, Human
cuaaacugcccccucugcccug

SEQ ID NO: 2772965 - RNA, 15 nt, Human
cgugugagugugaca

SEQ ID NO: 2772966 - RNA, 17 nt, Human
cgugugagugugacagg

SEQ ID NO: 2772967 - RNA, 20 nt, Human
cgugugagugugacagggcc

SEQ ID NO: 2772968 - RNA, 21 nt, Human
cgugugagugugacagggcca

SEQ ID NO: 2772969 - RNA, 22 nt, Human
cgugucuguauuuaugugugag

SEQ ID NO: 2772970 - RNA, 13 nt, Human
cgugucuuccacu

SEQ ID NO: 2772971 - RNA, 14 nt, Human
cgugucuuccacuu

SEQ ID NO: 2772972 - RNA, 20 nt, Human
cgugucuuccacuuugcaua

SEQ ID NO: 2772973 - RNA, 11 nt, Human
cgugggucaga

SEQ ID NO: 2772974 - RNA, 12 nt, Human
cgugggucagaa

SEQ ID NO: 2772975 - RNA, 14 nt, Human
cgugggucagaaga

SEQ ID NO: 2772976 - RNA, 14 nt, Human
cgugagccaccgcg

SEQ ID NO: 2772977 - RNA, 23 nt, Human
cguggguguguguagccaagguc

SEQ ID NO: 2772978 - RNA, 14 nt, Human
cguggguugcuaac

SEQ ID NO: 2772979 - RNA, 19 nt, Human
cguggguugcuaacugaac

SEQ ID NO: 2772980 - RNA, 21 nt, Human
cgugguccccaacagcgacau

SEQ ID NO: 2772981 - RNA, 13 nt, Human
cgugagaccugcc

SEQ ID NO: 2772982 - RNA, 20 nt, Human
cgugagcaggaaggccuggg

SEQ ID NO: 2772983 - RNA, 21 nt, Human
cgugagcaggaaggccugggu

SEQ ID NO: 2772984 - RNA, 12 nt, Human
cgugagaagcau

SEQ ID NO: 2772985 - RNA, 23 nt, Human
cgugagccaccgugccuggccac

SEQ ID NO: 2772986 - RNA, 16 nt, Human
cgugagaccugccccu

SEQ ID NO: 2772987 - RNA, 14 nt, Human
cgugagaccugccc

SEQ ID NO: 2772988 - RNA, 14 nt, Human
cgugacccucugcu

SEQ ID NO: 2772989 - RNA, 20 nt, Human
cgugacccucugcugaagac

SEQ ID NO: 2772990 - RNA, 15 nt, Human
cggcucugaagcaag

SEQ ID NO: 2772991 - RNA, 21 nt, Human
cggcucugaagcaaggcggug

SEQ ID NO: 2772992 - RNA, 13 nt, Human
cggcucugggugg

SEQ ID NO: 2772993 - RNA, 15 nt, Human
cuaacuguacauuuc

SEQ ID NO: 2772994 - RNA, 10 nt, Human
cuaacuguau

SEQ ID NO: 2772995 - RNA, 17 nt, Human
cuaaccuggguucccuu

SEQ ID NO: 2772996 - RNA, 18 nt, Human
cuaaagauucuauaguuc

SEQ ID NO: 2772997 - RNA, 21 nt, Human
cuaaagauagagucauugcug

SEQ ID NO: 2772998 - RNA, 12 nt, Human
cuaaccuguguc

SEQ ID NO: 2772999 - RNA, 13 nt, Human
cuaaccugugucu

SEQ ID NO: 2773000 - RNA, 14 nt, Human
cuaaccugugucug

SEQ ID NO: 2773001 - RNA, 15 nt, Human
cuaaccugugucugc

SEQ ID NO: 2773002 - RNA, 15 nt, Human
cuaaccuuauccugc

SEQ ID NO: 2773003 - RNA, 22 nt, Human
cuaaccuuauccugcauuguua

SEQ ID NO: 2773004 - RNA, 12 nt, Human
cuaaccuugaau

SEQ ID NO: 2773005 - RNA, 14 nt, Human
cuaaccuugaaugc

SEQ ID NO: 2773006 - RNA, 16 nt, Human
cuaaccuugaaugcug

SEQ ID NO: 2773007 - RNA, 17 nt, Human
cuaaccuugaaugcugc

SEQ ID NO: 2773008 - RNA, 18 nt, Human
cuaaccuugaaugcugcc

SEQ ID NO: 2773009 - RNA, 19 nt, Human
cuaaccuugaaugcugcca

SEQ ID NO: 2773010 - RNA, 20 nt, Human
cuaaccuugaaugcugccag

SEQ ID NO: 2773011 - RNA, 21 nt, Human
cuaaccuugaaugcugccagu

SEQ ID NO: 2773012 - RNA, 18 nt, Human
cuaaagaguuuauuuuaa

SEQ ID NO: 2773013 - RNA, 19 nt, Human
cuaaagaguuuauuuuaag

SEQ ID NO: 2773014 - RNA, 15 nt, Human
cuaaagauaauauua

SEQ ID NO: 2773015 - RNA, 17 nt, Human
cuaaagauggaguuucu

SEQ ID NO: 2773016 - RNA, 18 nt, Human
cuaaagauggaguuucua

SEQ ID NO: 2773017 - RNA, 19 nt, Human
cuaaagauggaguuucuaa

SEQ ID NO: 2773018 - RNA, 20 nt, Human
cuaaagauggaguuucuaag

SEQ ID NO: 2773019 - RNA, 21 nt, Human
cuaaagauggaguuucuaagg

SEQ ID NO: 2773020 - RNA, 23 nt, Human
cuaaagauggaguuucuaagguc

SEQ ID NO: 2773021 - RNA, 12 nt, Human
cuaaagauucua

SEQ ID NO: 2773022 - RNA, 14 nt, Human
cuaaagauucuaua

SEQ ID NO: 2773023 - RNA, 17 nt, Human
cuaaagauucuauaguu

SEQ ID NO: 2773024 - RNA, 12 nt, Human
cuaacuguaucu

SEQ ID NO: 2773025 - RNA, 13 nt, Human
cuaacuguaucuu

SEQ ID NO: 2773026 - RNA, 18 nt, Human
cuaacuuaagaaauaaau

SEQ ID NO: 2773027 - RNA, 19 nt, Human
cuaacuuauuuuauuucca

SEQ ID NO: 2773028 - RNA, 22 nt, Human
cuaacuuauuuuauuuccauca

SEQ ID NO: 2773029 - RNA, 17 nt, Human
cuaagaaacccucuguc

SEQ ID NO: 2773030 - RNA, 14 nt, Human
cuaagaaacuuuug

SEQ ID NO: 2773031 - RNA, 16 nt, Human
cuaagaaacuuuugua

SEQ ID NO: 2773032 - RNA, 17 nt, Human
cuaagaaacuuuuguaa

SEQ ID NO: 2773033 - RNA, 18 nt, Human
cuaagaaacuuuuguaaa

SEQ ID NO: 2773034 - RNA, 20 nt, Human
cuaagaaacuuuuguaaaga

SEQ ID NO: 2773035 - RNA, 19 nt, Human
cuaacuuuucaaugacauu

SEQ ID NO: 2773036 - RNA, 13 nt, Human
cuagaagaagcua

SEQ ID NO: 2773037 - RNA, 18 nt, Human
cuagaacucuccaucuua

SEQ ID NO: 2773038 - RNA, 22 nt, Human
cuagaacacaggcaaaauccuu

SEQ ID NO: 2773039 - RNA, 21 nt, Human
cuagaacacaggcaaaauccu

SEQ ID NO: 2773040 - RNA, 10 nt, Human
cuagaacuuu

SEQ ID NO: 2773041 - RNA, 11 nt, Human
cuagaacuuuu

SEQ ID NO: 2773042 - RNA, 13 nt, Human
cuagaacuuuuuu

SEQ ID NO: 2773043 - RNA, 15 nt, Human
cuagaacuuuuuuaa

SEQ ID NO: 2773044 - RNA, 16 nt, Human
cuagaacuuuuuuaaa

SEQ ID NO: 2773045 - RNA, 17 nt, Human
cuagaacuuuuuuaaau

SEQ ID NO: 2773046 - RNA, 18 nt, Human
cuagaacuuuuuuaaaua

SEQ ID NO: 2773047 - RNA, 19 nt, Human
cuagaacuuuuuuaaauaa

SEQ ID NO: 2773048 - RNA, 20 nt, Human
cuagaacuuuuuuaaauaaa

SEQ ID NO: 2773049 - RNA, 21 nt, Human
cuagaacuuuuuuaaauaaac

SEQ ID NO: 2773050 - RNA, 22 nt, Human
cuagaacuuuuuuaaauaaacu

SEQ ID NO: 2773051 - RNA, 23 nt, Human
cuagaacuuuuuuaaauaaacuu

SEQ ID NO: 2773052 - RNA, 13 nt, Human
cuagcaugccaac

SEQ ID NO: 2773053 - RNA, 15 nt, Human
cuagcaugccaacaa

SEQ ID NO: 2773054 - RNA, 21 nt, Human
cuagcaugccaacaagaaugc

SEQ ID NO: 2773055 - RNA, 16 nt, Human
cuagcaguaaaagaug

SEQ ID NO: 2773056 - RNA, 17 nt, Human
cuagcaguaaaagauga

SEQ ID NO: 2773057 - RNA, 17 nt, Human
cuagcagugaacuauuu

SEQ ID NO: 2773058 - RNA, 13 nt, Human
cuagccccugugg

SEQ ID NO: 2773059 - RNA, 19 nt, Human
cuagcccaggagagagaaa

SEQ ID NO: 2773060 - RNA, 20 nt, Human
cuagcccaggagagagaaag

SEQ ID NO: 2773061 - RNA, 22 nt, Human
cuagcccaggagagagaaagcc

SEQ ID NO: 2773062 - RNA, 23 nt, Human
cuagcccaggagagagaaagcca

SEQ ID NO: 2773063 - RNA, 14 nt, Human
cuagcccaggagag

SEQ ID NO: 2773064 - RNA, 15 nt, Human
cuagcccaggagaga

SEQ ID NO: 2773065 - RNA, 16 nt, Human
cuagcccaggagagag

SEQ ID NO: 2773066 - RNA, 17 nt, Human
cuagcccaggagagaga

SEQ ID NO: 2773067 - RNA, 18 nt, Human
cuagcccaggagagagaa

SEQ ID NO: 2773068 - RNA, 19 nt, Human
cuagaacacaggcaaaauc

SEQ ID NO: 2773069 - RNA, 14 nt, Human
cuagaacacaggca

SEQ ID NO: 2773070 - RNA, 16 nt, Human
cuagaaauugacacaa

SEQ ID NO: 2773071 - RNA, 20 nt, Human
cuagaaauugacacaagugg

SEQ ID NO: 2773072 - RNA, 18 nt, Human
cuagaaauugccuauccu

SEQ ID NO: 2773073 - RNA, 19 nt, Human
cuagaaaugugaaugagga

SEQ ID NO: 2773074 - RNA, 18 nt, Human
cuaccucgcaucauugca

SEQ ID NO: 2773075 - RNA, 20 nt, Human
cuaguugccaaaucuggcuc

SEQ ID NO: 2773076 - RNA, 18 nt, Human
cuaguuggugagaaaccu

SEQ ID NO: 2773077 - RNA, 19 nt, Human
cuaguuggugagaaaccug

SEQ ID NO: 2773078 - RNA, 18 nt, Human
cuauaaccccagcucccu

SEQ ID NO: 2773079 - RNA, 20 nt, Human
cuauaacaccugccaccacu

SEQ ID NO: 2773080 - RNA, 12 nt, Human
cuauaacagaua

SEQ ID NO: 2773081 - RNA, 22 nt, Human
cuauaaccccagcucccuagga

SEQ ID NO: 2773082 - RNA, 12 nt, Human
cuauaacuugau

SEQ ID NO: 2773083 - RNA, 15 nt, Human
cuauaacuugaugca

SEQ ID NO: 2773084 - RNA, 16 nt, Human
cuauaacuugaugcau

SEQ ID NO: 2773085 - RNA, 17 nt, Human
cuauaacuugaugcaug

SEQ ID NO: 2773086 - RNA, 22 nt, Human
cuauaacuugaugcaugugguu

SEQ ID NO: 2773087 - RNA, 21 nt, Human
cuauaacauauguacauaaau

SEQ ID NO: 2773088 - RNA, 19 nt, Human
cuagcccucucacauuuau

SEQ ID NO: 2773089 - RNA, 14 nt, Human
cuagcccucucccu

SEQ ID NO: 2773090 - RNA, 16 nt, Human
cuagcccucucccucu

SEQ ID NO: 2773091 - RNA, 21 nt, Human
cuagcccucucccucuaggcu

SEQ ID NO: 2773092 - RNA, 18 nt, Human
cuagcccucucacauuua

SEQ ID NO: 2773093 - RNA, 13 nt, Human
cuagcccucucac

SEQ ID NO: 2773094 - RNA, 14 nt, Human
cuagccccugugga

SEQ ID NO: 2773095 - RNA, 20 nt, Human
cuagccccuguggagacugg

SEQ ID NO: 2773096 - RNA, 21 nt, Human
cuagccccuguggagacuggg

SEQ ID NO: 2773097 - RNA, 11 nt, Human
cuaggcugggg

SEQ ID NO: 2773098 - RNA, 20 nt, Human
cuagccuaggucauaaagag

SEQ ID NO: 2773099 - RNA, 18 nt, Human
cuagccuauuuaccugca

SEQ ID NO: 2773100 - RNA, 21 nt, Human
cuagccuauuuaccugcaggc

SEQ ID NO: 2773101 - RNA, 22 nt, Human
cuagccuauuuaccugcaggcu

SEQ ID NO: 2773102 - RNA, 23 nt, Human
cuagccuauuuaccugcaggcug

SEQ ID NO: 2773103 - RNA, 15 nt, Human
cuagccugcacuuug

SEQ ID NO: 2773104 - RNA, 19 nt, Human
cuagccugcacuuugaugu

SEQ ID NO: 2773105 - RNA, 13 nt, Human
cuaggcuggggaa

SEQ ID NO: 2773106 - RNA, 22 nt, Human
cuaggcuggggaaguccucugg

SEQ ID NO: 2773107 - RNA, 16 nt, Human
cuagggauucaggcug

SEQ ID NO: 2773108 - RNA, 15 nt, Human
cuagggauucaggcu

SEQ ID NO: 2773109 - RNA, 18 nt, Human
cuagggauucaggcugcu

SEQ ID NO: 2773110 - RNA, 17 nt, Human
cuagggauucaggcugc

SEQ ID NO: 2773111 - RNA, 20 nt, Human
cuagggauucaggcugcuug

SEQ ID NO: 2773112 - RNA, 15 nt, Human
cuagggccacugaag

SEQ ID NO: 2773113 - RNA, 14 nt, Human
cuagggcugggaaa

SEQ ID NO: 2773114 - RNA, 15 nt, Human
cuagggcugggaaac

SEQ ID NO: 2773115 - RNA, 16 nt, Human
cuagggcugggaaaca

SEQ ID NO: 2773116 - RNA, 20 nt, Human
cuagggcugggaaacacucc

SEQ ID NO: 2773117 - RNA, 19 nt, Human
cccagccaccccgggcucu

SEQ ID NO: 2773118 - RNA, 14 nt, Human
cccagccaccccgg

SEQ ID NO: 2773119 - RNA, 22 nt, Human
cccagccaccccgggcucucug

SEQ ID NO: 2773120 - RNA, 22 nt, Human
cccagcugcaccugccagccug

SEQ ID NO: 2773121 - RNA, 21 nt, Human
cccagcugcaccugccagccu

SEQ ID NO: 2773122 - RNA, 18 nt, Human
cccagcugcaccugccag

SEQ ID NO: 2773123 - RNA, 13 nt, Human
cccagcugcaccu

SEQ ID NO: 2773124 - RNA, 12 nt, Human
cccagcugcacc

SEQ ID NO: 2773125 - RNA, 12 nt, Human
cccagccacccc

SEQ ID NO: 2773126 - RNA, 23 nt, Human
cccauauuggcauggauuucugu

SEQ ID NO: 2773127 - RNA, 15 nt, Human
cccauaggcccacac

SEQ ID NO: 2773128 - RNA, 17 nt, Human
cccauaggcccacacac

SEQ ID NO: 2773129 - RNA, 18 nt, Human
cccauaggcccacacaca

SEQ ID NO: 2773130 - RNA, 19 nt, Human
cccauaggcccacacacag

SEQ ID NO: 2773131 - RNA, 20 nt, Human
cccauaggcccacacacagg

SEQ ID NO: 2773132 - RNA, 22 nt, Human
cccauaggcccacacacaggug

SEQ ID NO: 2773133 - RNA, 15 nt, Human
cccauagaaacauga

SEQ ID NO: 2773134 - RNA, 17 nt, Human
cccauagaaacaugaca

SEQ ID NO: 2773135 - RNA, 19 nt, Human
cccauagaaacaugacacu

SEQ ID NO: 2773136 - RNA, 21 nt, Human
cccauagaaacaugacacuga

SEQ ID NO: 2773137 - RNA, 22 nt, Human
cccauagaaacaugacacugac

SEQ ID NO: 2773138 - RNA, 23 nt, Human
cccauagaaacaugacacugacc

SEQ ID NO: 2773139 - RNA, 16 nt, Human
cccauagaucuucuga

SEQ ID NO: 2773140 - RNA, 17 nt, Human
cccauagaucuucugaa

SEQ ID NO: 2773141 - RNA, 22 nt, Human
cccauagaucuucugaaaugaa

SEQ ID NO: 2773142 - RNA, 13 nt, Human
cccagggccugag

SEQ ID NO: 2773143 - RNA, 19 nt, Human
cccagggccugagccuggc

SEQ ID NO: 2773144 - RNA, 15 nt, Human
cccagggccugagcc

SEQ ID NO: 2773145 - RNA, 20 nt, Human
cccagggccagggcccugca

SEQ ID NO: 2773146 - RNA, 16 nt, Human
cccauacucagccugc

SEQ ID NO: 2773147 - RNA, 22 nt, Human
cccauacucagccugcugccca

SEQ ID NO: 2773148 - RNA, 19 nt, Human
cccagggccugcaggaccu

SEQ ID NO: 2773149 - RNA, 16 nt, Human
cccagggccugcagga

SEQ ID NO: 2773150 - RNA, 14 nt, Human
cccagggccugcag

SEQ ID NO: 2773151 - RNA, 22 nt, Human
cccagggccagggcccugcaga

SEQ ID NO: 2773152 - RNA, 17 nt, Human
cccaggcuggcgugcag

SEQ ID NO: 2773153 - RNA, 21 nt, Human
cccagggccagggcccugcag

SEQ ID NO: 2773154 - RNA, 13 nt, Human
cccaggcuggcgu

SEQ ID NO: 2773155 - RNA, 19 nt, Human
cccaggcuggagugcagug

SEQ ID NO: 2773156 - RNA, 20 nt, Human
cccaggcuggagugcaauga

SEQ ID NO: 2773157 - RNA, 17 nt, Human
cccagcuuguaggagcu

SEQ ID NO: 2773158 - RNA, 18 nt, Human
cccagcuuguaggagcug

SEQ ID NO: 2773159 - RNA, 23 nt, Human
cccagcugcaccugccagccugg

SEQ ID NO: 2773160 - RNA, 15 nt, Human
cccagcuugaaaccu

SEQ ID NO: 2773161 - RNA, 13 nt, Human
cccacugcucugg

SEQ ID NO: 2773162 - RNA, 12 nt, Human
cccacugcucug

SEQ ID NO: 2773163 - RNA, 19 nt, Human
cccacugcuuuuggucugu

SEQ ID NO: 2773164 - RNA, 23 nt, Human
cccacuguuucucuugagcuggc

SEQ ID NO: 2773165 - RNA, 22 nt, Human
cccacuguuucucuugagcugg

SEQ ID NO: 2773166 - RNA, 21 nt, Human
cccacuguuucucuugagcug

SEQ ID NO: 2773167 - RNA, 16 nt, Human
cccacugugcaggugc

SEQ ID NO: 2773168 - RNA, 12 nt, Human
cccacuucucau

SEQ ID NO: 2773169 - RNA, 18 nt, Human
cccacuucucaucacaca

SEQ ID NO: 2773170 - RNA, 19 nt, Human
cccacuucucaucacacac

SEQ ID NO: 2773171 - RNA, 20 nt, Human
cccacuucucaucacacaca

SEQ ID NO: 2773172 - RNA, 21 nt, Human
cccacuucucaucacacacau

SEQ ID NO: 2773173 - RNA, 22 nt, Human
cccacuucucaucacacacaug

SEQ ID NO: 2773174 - RNA, 23 nt, Human
cccacuucucaucacacacaugg

SEQ ID NO: 2773175 - RNA, 18 nt, Human
cccacuucucucuaagga

SEQ ID NO: 2773176 - RNA, 13 nt, Human
cccacugccagca

SEQ ID NO: 2773177 - RNA, 17 nt, Human
cccacuccccaccuuca

SEQ ID NO: 2773178 - RNA, 21 nt, Human
cccacugccagcagcagcagg

SEQ ID NO: 2773179 - RNA, 17 nt, Human
cccacugccagcagcag

SEQ ID NO: 2773180 - RNA, 16 nt, Human
cccacugccagcagca

SEQ ID NO: 2773181 - RNA, 15 nt, Human
cccacugccagcagc

SEQ ID NO: 2773182 - RNA, 14 nt, Human
cccacugccagcag

SEQ ID NO: 2773183 - RNA, 18 nt, Human
cccacuagccuaggucau

SEQ ID NO: 2773184 - RNA, 18 nt, Human
cccacuauccuucgugaa

SEQ ID NO: 2773185 - RNA, 18 nt, Human
cccacucagcuccgugaa

SEQ ID NO: 2773186 - RNA, 12 nt, Human
cccacccuggga

SEQ ID NO: 2773187 - RNA, 13 nt, Human
cccacguucuuuc

SEQ ID NO: 2773188 - RNA, 18 nt, Human
cccacuagacccacugga

SEQ ID NO: 2773189 - RNA, 12 nt, Human
cccacccugcug

SEQ ID NO: 2773190 - RNA, 14 nt, Human
cccacccugcugcc

SEQ ID NO: 2773191 - RNA, 16 nt, Human
cccacccugcugccuu

SEQ ID NO: 2773192 - RNA, 15 nt, Human
cccacccucccugga

SEQ ID NO: 2773193 - RNA, 18 nt, Human
cccacccucccuggagug

SEQ ID NO: 2773194 - RNA, 13 nt, Human
cccacccuccugg

SEQ ID NO: 2773195 - RNA, 14 nt, Human
cccacccuccuggc

SEQ ID NO: 2773196 - RNA, 16 nt, Human
cccacccucccuggag

SEQ ID NO: 2773197 - RNA, 12 nt, Human
cccacccccauc

SEQ ID NO: 2773198 - RNA, 13 nt, Human
cccacccccagcu

SEQ ID NO: 2773199 - RNA, 19 nt, Human
ccccaaacgggcugcccug

SEQ ID NO: 2773200 - RNA, 18 nt, Human
ccccaaacaccuuccagc

SEQ ID NO: 2773201 - RNA, 22 nt, Human
ccccaaacaccuuccagcuccu

SEQ ID NO: 2773202 - RNA, 11 nt, Human
ccccagcacua

SEQ ID NO: 2773203 - RNA, 22 nt, Human
ccccagcaagugagagcugggu

SEQ ID NO: 2773204 - RNA, 18 nt, Human
ccccagcaccucagccug

SEQ ID NO: 2773205 - RNA, 21 nt, Human
ccccagcaagugagagcuggg

SEQ ID NO: 2773206 - RNA, 23 nt, Human
ccccagagcuguuuauggccuca

SEQ ID NO: 2773207 - RNA, 22 nt, Human
ccccagagcuguuuauggccuc

SEQ ID NO: 2773208 - RNA, 21 nt, Human
ccccagagcuguuuauggccu

SEQ ID NO: 2773209 - RNA, 12 nt, Human
ccccagagcugu

SEQ ID NO: 2773210 - RNA, 11 nt, Human
ccccagagcug

SEQ ID NO: 2773211 - RNA, 14 nt, Human
ccccagagccacac

SEQ ID NO: 2773212 - RNA, 15 nt, Human
ccccagagccacaca

SEQ ID NO: 2773213 - RNA, 17 nt, Human
ccccagagccacacaug

SEQ ID NO: 2773214 - RNA, 18 nt, Human
ccccagagccacacaugg

SEQ ID NO: 2773215 - RNA, 22 nt, Human
cccccaaagcagcccuuccccc

SEQ ID NO: 2773216 - RNA, 20 nt, Human
ccccauuugcuuucuuuucu

SEQ ID NO: 2773217 - RNA, 14 nt, Human
ccccaucucuacua

SEQ ID NO: 2773218 - RNA, 16 nt, Human
ccccaucucucccucc

SEQ ID NO: 2773219 - RNA, 12 nt, Human
ccccaucucucc

SEQ ID NO: 2773220 - RNA, 19 nt, Human
ccccaucucucccuccccu

SEQ ID NO: 2773221 - RNA, 22 nt, Human
ccccaucucgcucccucccagg

SEQ ID NO: 2773222 - RNA, 23 nt, Human
ccccgaggccuucucugaaggac

SEQ ID NO: 2773223 - RNA, 12 nt, Human
ccccgaggcccu

SEQ ID NO: 2773224 - RNA, 15 nt, Human
ccccgaggcccugca

SEQ ID NO: 2773225 - RNA, 16 nt, Human
ccccgaggcccugcau

SEQ ID NO: 2773226 - RNA, 17 nt, Human
ccccgaggcccugcaug

SEQ ID NO: 2773227 - RNA, 13 nt, Human
ccccggcaggccc

SEQ ID NO: 2773228 - RNA, 14 nt, Human
ccccggcaggcccu

SEQ ID NO: 2773229 - RNA, 17 nt, Human
ccccggcaggcccugca

SEQ ID NO: 2773230 - RNA, 18 nt, Human
ccccggcaggcccugcag

SEQ ID NO: 2773231 - RNA, 21 nt, Human
ccccggcaggcccugcagugu

SEQ ID NO: 2773232 - RNA, 14 nt, Human
ccccggcagacgcc

SEQ ID NO: 2773233 - RNA, 15 nt, Human
ccccggaucagagca

SEQ ID NO: 2773234 - RNA, 14 nt, Human
ccccggcacccucu

SEQ ID NO: 2773235 - RNA, 17 nt, Human
ccccggcacccucuggc

SEQ ID NO: 2773236 - RNA, 20 nt, Human
ccccgcuguaagcuccuuug

SEQ ID NO: 2773237 - RNA, 22 nt, Human
ccccgcuguaagcuccuuugug

SEQ ID NO: 2773238 - RNA, 16 nt, Human
ccccggccaccucugc

SEQ ID NO: 2773239 - RNA, 17 nt, Human
ccccggccaccucugcg

SEQ ID NO: 2773240 - RNA, 12 nt, Human
ccccggccaccu

SEQ ID NO: 2773241 - RNA, 13 nt, Human
ccccggccaccuc

SEQ ID NO: 2773242 - RNA, 14 nt, Human
ccccggccaccucu

SEQ ID NO: 2773243 - RNA, 15 nt, Human
ccccggccaccucug

SEQ ID NO: 2773244 - RNA, 13 nt, Human
cccgggaggcaga

SEQ ID NO: 2773245 - RNA, 15 nt, Human
cccgggagggcggca

SEQ ID NO: 2773246 - RNA, 23 nt, Human
cccgggagggcggcacaggucgg

SEQ ID NO: 2773247 - RNA, 17 nt, Human
cccuauugguaaagaau

SEQ ID NO: 2773248 - RNA, 18 nt, Human
cccgggacgcagcaggag

SEQ ID NO: 2773249 - RNA, 12 nt, Human
cccgggagccua

SEQ ID NO: 2773250 - RNA, 13 nt, Human
cccgggagccuag

SEQ ID NO: 2773251 - RNA, 16 nt, Human
cccgggagccuaggac

SEQ ID NO: 2773252 - RNA, 18 nt, Human
cccgggagccuaggacca

SEQ ID NO: 2773253 - RNA, 19 nt, Human
cccgggagccuaggaccac

SEQ ID NO: 2773254 - RNA, 20 nt, Human
cccggcucuacgggggccgc

SEQ ID NO: 2773255 - RNA, 18 nt, Human
cccggcucuacgggggcc

SEQ ID NO: 2773256 - RNA, 22 nt, Human
cccggcucgagcaguccugccu

SEQ ID NO: 2773257 - RNA, 16 nt, Human
cccggcuccaggcucc

SEQ ID NO: 2773258 - RNA, 15 nt, Human
cccggcuccaggcuc

SEQ ID NO: 2773259 - RNA, 14 nt, Human
cccggcuccaggcu

SEQ ID NO: 2773260 - RNA, 13 nt, Human
cccggcuccaggc

SEQ ID NO: 2773261 - RNA, 12 nt, Human
cccggcuccagg

SEQ ID NO: 2773262 - RNA, 11 nt, Human
cccggcuccag

SEQ ID NO: 2773263 - RNA, 14 nt, Human
ccccucuucugagc

SEQ ID NO: 2773264 - RNA, 12 nt, Human
ccccucugucuu

SEQ ID NO: 2773265 - RNA, 18 nt, Human
ccccucugucuacaaaua

SEQ ID NO: 2773266 - RNA, 15 nt, Human
ccccuuguccuuucc

SEQ ID NO: 2773267 - RNA, 18 nt, Human
ccccuuguccuuucccuu

SEQ ID NO: 2773268 - RNA, 22 nt, Human
ccccuugcucuccccugcccug

SEQ ID NO: 2773269 - RNA, 17 nt, Human
ccccuuggcagguccug

SEQ ID NO: 2773270 - RNA, 23 nt, Human
ccccuuuccuggacacucagacc

SEQ ID NO: 2773271 - RNA, 10 nt, Human
ccccuuuccu

SEQ ID NO: 2773272 - RNA, 22 nt, Human
ccccuuuccuggacacucagac

SEQ ID NO: 2773273 - RNA, 14 nt, Human
ccccuuugggcccu

SEQ ID NO: 2773274 - RNA, 15 nt, Human
ccccuuugggcccug

SEQ ID NO: 2773275 - RNA, 16 nt, Human
ccccuuugggcccugc

SEQ ID NO: 2773276 - RNA, 17 nt, Human
ccccuuugggcccugca

SEQ ID NO: 2773277 - RNA, 18 nt, Human
ccccuuugggcccugcau

SEQ ID NO: 2773278 - RNA, 19 nt, Human
ccccuuugggcccugcaug

SEQ ID NO: 2773279 - RNA, 20 nt, Human
ccccuuugggcccugcaugu

SEQ ID NO: 2773280 - RNA, 14 nt, Human
cccgaauagcuggg

SEQ ID NO: 2773281 - RNA, 17 nt, Human
ccccuuuuucuuccuca

SEQ ID NO: 2773282 - RNA, 20 nt, Human
ccccuuuuuugucccccaac

SEQ ID NO: 2773283 - RNA, 18 nt, Human
ccccuuuuuuuccuuuuu

SEQ ID NO: 2773284 - RNA, 12 nt, Human
cccggccaccuc

SEQ ID NO: 2773285 - RNA, 13 nt, Human
cccggccaccucu

SEQ ID NO: 2773286 - RNA, 14 nt, Human
cccggccaccucug

SEQ ID NO: 2773287 - RNA, 15 nt, Human
cccggccaccucugc

SEQ ID NO: 2773288 - RNA, 20 nt, Human
cccggccaccucugcggacc

SEQ ID NO: 2773289 - RNA, 21 nt, Human
cccggccaccucugcggaccc

SEQ ID NO: 2773290 - RNA, 20 nt, Human
cccgaagaauggagaggaac

SEQ ID NO: 2773291 - RNA, 15 nt, Human
cccgaagggccccca

SEQ ID NO: 2773292 - RNA, 18 nt, Human
cccgaagggcccccacau

SEQ ID NO: 2773293 - RNA, 22 nt, Human
cccgaagguuauggucaauccc

SEQ ID NO: 2773294 - RNA, 23 nt, Human
cccgaagguuauggucaauccca

SEQ ID NO: 2773295 - RNA, 11 nt, Human
ccccucuguag

SEQ ID NO: 2773296 - RNA, 18 nt, Human
ccccucuggcuccagcug

SEQ ID NO: 2773297 - RNA, 19 nt, Human
ccccucuggcuccagcugg

SEQ ID NO: 2773298 - RNA, 15 nt, Human
ccagauccucuuggu

SEQ ID NO: 2773299 - RNA, 12 nt, Human
ccagauccuggg

SEQ ID NO: 2773300 - RNA, 14 nt, Human
ccagauccucuugg

SEQ ID NO: 2773301 - RNA, 13 nt, Human
ccagaucagucag

SEQ ID NO: 2773302 - RNA, 17 nt, Human
ccagaucauguuuuggu

SEQ ID NO: 2773303 - RNA, 20 nt, Human
ccagaucauguuuuggugaa

SEQ ID NO: 2773304 - RNA, 18 nt, Human
ccagaguuccccaugcag

SEQ ID NO: 2773305 - RNA, 19 nt, Human
ccagaguuccccaugcaga

SEQ ID NO: 2773306 - RNA, 21 nt, Human
ccagaguuccccaugcagaca

SEQ ID NO: 2773307 - RNA, 13 nt, Human
ccagaguggccug

SEQ ID NO: 2773308 - RNA, 21 nt, Human
ccagaguccuuuccaaggcuu

SEQ ID NO: 2773309 - RNA, 16 nt, Human
ccagaguccuuuccaa

SEQ ID NO: 2773310 - RNA, 17 nt, Human
ccagaguggccuggcca

SEQ ID NO: 2773311 - RNA, 16 nt, Human
ccagaguggccuggcc

SEQ ID NO: 2773312 - RNA, 15 nt, Human
ccagaguggccuggc

SEQ ID NO: 2773313 - RNA, 14 nt, Human
ccagaguggccugg

SEQ ID NO: 2773314 - RNA, 21 nt, Human
ccagaguggggaugacaugca

SEQ ID NO: 2773315 - RNA, 23 nt, Human
ccagaguggccuggccaggagcu

SEQ ID NO: 2773316 - RNA, 22 nt, Human
ccagaguggccuggccaggagc

SEQ ID NO: 2773317 - RNA, 21 nt, Human
ccagaguggccuggccaggag

SEQ ID NO: 2773318 - RNA, 19 nt, Human
ccagaguggccuggccagg

SEQ ID NO: 2773319 - RNA, 18 nt, Human
ccagaguggccuggccag

SEQ ID NO: 2773320 - RNA, 16 nt, Human
ccaccuuggcucaagu

SEQ ID NO: 2773321 - RNA, 18 nt, Human
ccaccuagaacacuaacu

SEQ ID NO: 2773322 - RNA, 16 nt, Human
ccaccuagaacacuaa

SEQ ID NO: 2773323 - RNA, 15 nt, Human
ccagaugcaccagcc

SEQ ID NO: 2773324 - RNA, 17 nt, Human
ccagaugcaccagcccu

SEQ ID NO: 2773325 - RNA, 18 nt, Human
ccagaugcaccagcccuu

SEQ ID NO: 2773326 - RNA, 15 nt, Human
ccagcagcagcaggu

SEQ ID NO: 2773327 - RNA, 14 nt, Human
ccagcagcagcagg

SEQ ID NO: 2773328 - RNA, 18 nt, Human
ccagcagcagcaggugau

SEQ ID NO: 2773329 - RNA, 23 nt, Human
ccagcaggccggaucgguacugu

SEQ ID NO: 2773330 - RNA, 15 nt, Human
ccagcuacccugugu

SEQ ID NO: 2773331 - RNA, 16 nt, Human
ccagcuacccuuuuuc

SEQ ID NO: 2773332 - RNA, 21 nt, Human
ccagcuacccuuuuucuccag

SEQ ID NO: 2773333 - RNA, 22 nt, Human
ccagcuacccuuuuucuccagc

SEQ ID NO: 2773334 - RNA, 23 nt, Human
ccagcuacucagaagccugaggc

SEQ ID NO: 2773335 - RNA, 21 nt, Human
ccagcuacucagaagccugag

SEQ ID NO: 2773336 - RNA, 20 nt, Human
ccagcuacucagaagccuga

SEQ ID NO: 2773337 - RNA, 17 nt, Human
ccagcuacucagaagcc

SEQ ID NO: 2773338 - RNA, 16 nt, Human
ccagcuacucagaagc

SEQ ID NO: 2773339 - RNA, 14 nt, Human
ccagcuacucagaa

SEQ ID NO: 2773340 - RNA, 16 nt, Human
ccagcucaccagcccc

SEQ ID NO: 2773341 - RNA, 15 nt, Human
ccagcucaccagccc

SEQ ID NO: 2773342 - RNA, 22 nt, Human
ccagcucaccagccccagugcc

SEQ ID NO: 2773343 - RNA, 17 nt, Human
ccagcucaauggacugg

SEQ ID NO: 2773344 - RNA, 22 nt, Human
ccagcucaauggacuggaaggg

SEQ ID NO: 2773345 - RNA, 13 nt, Human
ccagcucacagug

SEQ ID NO: 2773346 - RNA, 15 nt, Human
ccaggaaacucuugc

SEQ ID NO: 2773347 - RNA, 17 nt, Human
ccaggaaacucuugcua

SEQ ID NO: 2773348 - RNA, 14 nt, Human
ccaggaacugggcc

SEQ ID NO: 2773349 - RNA, 19 nt, Human
ccaggaaaggauuuuauaa

SEQ ID NO: 2773350 - RNA, 18 nt, Human
ccaguuuaaccugaugca

SEQ ID NO: 2773351 - RNA, 23 nt, Human
ccaguuuagauuucaagaaaaaa

SEQ ID NO: 2773352 - RNA, 17 nt, Human
ccaguuuaaccugaugc

SEQ ID NO: 2773353 - RNA, 10 nt, Human
ccaguugugg

SEQ ID NO: 2773354 - RNA, 20 nt, Human
ccaugacaggccugaagaua

SEQ ID NO: 2773355 - RNA, 21 nt, Human
ccaugacaggccugaagauau

SEQ ID NO: 2773356 - RNA, 24 nt, Human
ccaucccaggacaccacacccagc

SEQ ID NO: 2773357 - RNA, 22 nt, Human
ccaucccucgugguccccaaca

SEQ ID NO: 2773358 - RNA, 14 nt, Human
ccaucccaggacac

SEQ ID NO: 2773359 - RNA, 21 nt, Human
ccaucccaggacaccacaccc

SEQ ID NO: 2773360 - RNA, 22 nt, Human
ccaucccaggacaccacaccca

SEQ ID NO: 2773361 - RNA, 23 nt, Human
ccaucccaggacaccacacccag

SEQ ID NO: 2773362 - RNA, 14 nt, Human
ccaugaccauacug

SEQ ID NO: 2773363 - RNA, 18 nt, Human
ccaugacccaggcugggc

SEQ ID NO: 2773364 - RNA, 16 nt, Human
ccaugacccaggcugg

SEQ ID NO: 2773365 - RNA, 17 nt, Human
ccaugacccaggcuggg

SEQ ID NO: 2773366 - RNA, 14 nt, Human
ccaugacccaggcu

SEQ ID NO: 2773367 - RNA, 15 nt, Human
ccaugacccaggcug

SEQ ID NO: 2773368 - RNA, 23 nt, Human
ccaugagccucagcauccuggca

SEQ ID NO: 2773369 - RNA, 21 nt, Human
ccaugagccucagcauccugg

SEQ ID NO: 2773370 - RNA, 14 nt, Human
ccauguaaauacca

SEQ ID NO: 2773371 - RNA, 20 nt, Human
ccauguaaauaccagacugc

SEQ ID NO: 2773372 - RNA, 23 nt, Human
ccauguaaauaccagacugcagg

SEQ ID NO: 2773373 - RNA, 20 nt, Human
ccaugguuaagaguccaaga

SEQ ID NO: 2773374 - RNA, 19 nt, Human
ccauguccaaagaggcugc

SEQ ID NO: 2773375 - RNA, 18 nt, Human
ccauguccaaagaggcug

SEQ ID NO: 2773376 - RNA, 23 nt, Human
ccauguauggaaucccacuguau

SEQ ID NO: 2773377 - RNA, 23 nt, Human
ccauguauuuaucucuauuuaau

SEQ ID NO: 2773378 - RNA, 16 nt, Human
ccauguauuuaucucu

SEQ ID NO: 2773379 - RNA, 22 nt, Human
ccauguauuuaucucuauuuaa

SEQ ID NO: 2773380 - RNA, 17 nt, Human
ccauguccaaagaggcu

SEQ ID NO: 2773381 - RNA, 14 nt, Human
ccauguccaaagag

SEQ ID NO: 2773382 - RNA, 13 nt, Human
ccauguccaaaga

SEQ ID NO: 2773383 - RNA, 20 nt, Human
ccaguuggguggaugccugg

SEQ ID NO: 2773384 - RNA, 19 nt, Human
ccaguuggguggaugccug

SEQ ID NO: 2773385 - RNA, 17 nt, Human
ccaguuggguggaugcc

SEQ ID NO: 2773386 - RNA, 17 nt, Human
ccaguucauugcacuuu

SEQ ID NO: 2773387 - RNA, 18 nt, Human
ccaguucauugcacuuug

SEQ ID NO: 2773388 - RNA, 19 nt, Human
ccaguucaaucucccgcug

SEQ ID NO: 2773389 - RNA, 21 nt, Human
ccaguucaggagucccaagga

SEQ ID NO: 2773390 - RNA, 18 nt, Human
ccaguucaggagucccaa

SEQ ID NO: 2773391 - RNA, 14 nt, Human
ccaguucaggaguc

SEQ ID NO: 2773392 - RNA, 20 nt, Human
ccagggcuuaccuguacacu

SEQ ID NO: 2773393 - RNA, 21 nt, Human
ccagggcuuaccuguacacug

SEQ ID NO: 2773394 - RNA, 22 nt, Human
ccagggcuuaccuguacacuga

SEQ ID NO: 2773395 - RNA, 21 nt, Human
ccaggcuccuuuagcgcccag

SEQ ID NO: 2773396 - RNA, 20 nt, Human
ccaggcuccuuuagcgccca

SEQ ID NO: 2773397 - RNA, 16 nt, Human
ccaggcuggcgugcag

SEQ ID NO: 2773398 - RNA, 18 nt, Human
ccaggcagaucugugccc

SEQ ID NO: 2773399 - RNA, 18 nt, Human
ccaggcuggcgugcagug

SEQ ID NO: 2773400 - RNA, 17 nt, Human
ccaggcuggcgugcagu

SEQ ID NO: 2773401 - RNA, 19 nt, Human
ccaggcuggcgugcagugg

SEQ ID NO: 2773402 - RNA, 17 nt, Human
ccaggcagaucugugcc

SEQ ID NO: 2773403 - RNA, 13 nt, Human
ccaggcagaucug

SEQ ID NO: 2773404 - RNA, 16 nt, Human
ccaggcacgguuugga

SEQ ID NO: 2773405 - RNA, 16 nt, Human
ccaggcacugcugccc

SEQ ID NO: 2773406 - RNA, 18 nt, Human
ccaggcacugcugcccag

SEQ ID NO: 2773407 - RNA, 19 nt, Human
ccaggcacccagcuuuguc

SEQ ID NO: 2773408 - RNA, 15 nt, Human
ccaggcaccaucucc

SEQ ID NO: 2773409 - RNA, 14 nt, Human
ccaggcacagcuga

SEQ ID NO: 2773410 - RNA, 15 nt, Human
ccaggcacagcugag

SEQ ID NO: 2773411 - RNA, 16 nt, Human
ccaggcacagcugagu

SEQ ID NO: 2773412 - RNA, 23 nt, Human
ccaggcacagcugaguuaugaug

SEQ ID NO: 2773413 - RNA, 11 nt, Human
ccaggcacagg

SEQ ID NO: 2773414 - RNA, 13 nt, Human
ccaggcacaggau

SEQ ID NO: 2773415 - RNA, 13 nt, Human
ccagggucccugg

SEQ ID NO: 2773416 - RNA, 13 nt, Human
ccucugcuuccca

SEQ ID NO: 2773417 - RNA, 14 nt, Human
ccucugcuucccag

SEQ ID NO: 2773418 - RNA, 15 nt, Human
ccucugcuucccagg

SEQ ID NO: 2773419 - RNA, 15 nt, Human
ccucugcugccaugg

SEQ ID NO: 2773420 - RNA, 14 nt, Human
ccucugcugcuguc

SEQ ID NO: 2773421 - RNA, 19 nt, Human
ccucugcugcugucccucc

SEQ ID NO: 2773422 - RNA, 20 nt, Human
ccucugcugcugucccuccc

SEQ ID NO: 2773423 - RNA, 14 nt, Human
ccucucuccuuugc

SEQ ID NO: 2773424 - RNA, 12 nt, Human
ccucucucccuc

SEQ ID NO: 2773425 - RNA, 16 nt, Human
ccucucucccucuccc

SEQ ID NO: 2773426 - RNA, 20 nt, Human
ccucucucuucugcuccacc

SEQ ID NO: 2773427 - RNA, 19 nt, Human
ccucucucuucugcuccac

SEQ ID NO: 2773428 - RNA, 18 nt, Human
ccucucucuucugcucca

SEQ ID NO: 2773429 - RNA, 16 nt, Human
ccucucucuucugcuc

SEQ ID NO: 2773430 - RNA, 12 nt, Human
ccucucucuucu

SEQ ID NO: 2773431 - RNA, 12 nt, Human
ccucucugcacc

SEQ ID NO: 2773432 - RNA, 22 nt, Human
ccucucucuucugcuccacccu

SEQ ID NO: 2773433 - RNA, 21 nt, Human
ccucucucuucugcuccaccc

SEQ ID NO: 2773434 - RNA, 14 nt, Human
ccucugcugccaug

SEQ ID NO: 2773435 - RNA, 20 nt, Human
ccucugcugaagacuugccc

SEQ ID NO: 2773436 - RNA, 18 nt, Human
ccucugcugauccuccca

SEQ ID NO: 2773437 - RNA, 15 nt, Human
ccucugcugauccuc

SEQ ID NO: 2773438 - RNA, 22 nt, Human
ccucugccugaagucacacagu

SEQ ID NO: 2773439 - RNA, 12 nt, Human
ccucugccuguc

SEQ ID NO: 2773440 - RNA, 14 nt, Human
ccucugcuccccag

SEQ ID NO: 2773441 - RNA, 13 nt, Human
ccucugcucccca

SEQ ID NO: 2773442 - RNA, 12 nt, Human
ccucucugcccu

SEQ ID NO: 2773443 - RNA, 13 nt, Human
ccucuuggguuca

SEQ ID NO: 2773444 - RNA, 12 nt, Human
ccucuuguuuug

SEQ ID NO: 2773445 - RNA, 15 nt, Human
ccucuuguuuuguuu

SEQ ID NO: 2773446 - RNA, 11 nt, Human
ccucuuuaaaa

SEQ ID NO: 2773447 - RNA, 13 nt, Human
ccucuuuaaaaca

SEQ ID NO: 2773448 - RNA, 15 nt, Human
ccucuuuaaaacaaa

SEQ ID NO: 2773449 - RNA, 17 nt, Human
ccucuuuaaaacaaaac

SEQ ID NO: 2773450 - RNA, 18 nt, Human
ccucuuuaaaacaaaaca

SEQ ID NO: 2773451 - RNA, 12 nt, Human
ccucuuuaagag

SEQ ID NO: 2773452 - RNA, 16 nt, Human
ccugaccucacuguga

SEQ ID NO: 2773453 - RNA, 12 nt, Human
ccugaccucuug

SEQ ID NO: 2773454 - RNA, 13 nt, Human
ccugaccucuugc

SEQ ID NO: 2773455 - RNA, 14 nt, Human
ccugaccucuugcu

SEQ ID NO: 2773456 - RNA, 15 nt, Human
ccugaccucuugcug

SEQ ID NO: 2773457 - RNA, 16 nt, Human
ccugaccucuugcugu

SEQ ID NO: 2773458 - RNA, 17 nt, Human
ccugaccucuugcuguc

SEQ ID NO: 2773459 - RNA, 18 nt, Human
ccugaccucuugcugucu

SEQ ID NO: 2773460 - RNA, 19 nt, Human
ccugaccucuugcugucuc

SEQ ID NO: 2773461 - RNA, 20 nt, Human
ccugaccucuugcugucucu

SEQ ID NO: 2773462 - RNA, 21 nt, Human
ccugaccucuugcugucucug

SEQ ID NO: 2773463 - RNA, 23 nt, Human
ccugaccucuugcugucucugcu

SEQ ID NO: 2773464 - RNA, 24 nt, Human
ccugaccucuugcugucucugcuc

SEQ ID NO: 2773465 - RNA, 14 nt, Human
ccugacugcccagc

SEQ ID NO: 2773466 - RNA, 16 nt, Human
ccugacugcccagcau

SEQ ID NO: 2773467 - RNA, 22 nt, Human
ccugacugcccagcauuugggu

SEQ ID NO: 2773468 - RNA, 15 nt, Human
ccugacucugccccc

SEQ ID NO: 2773469 - RNA, 16 nt, Human
ccugacucugcccccu

SEQ ID NO: 2773470 - RNA, 17 nt, Human
ccugacucugcccccug

SEQ ID NO: 2773471 - RNA, 22 nt, Human
ccugacucugcccccugcuggc

SEQ ID NO: 2773472 - RNA, 13 nt, Human
ccugacugucucc

SEQ ID NO: 2773473 - RNA, 19 nt, Human
ccugacuuggggagaugga

SEQ ID NO: 2773474 - RNA, 23 nt, Human
ccugacuuggggagauggaguuc

SEQ ID NO: 2773475 - RNA, 15 nt, Human
ccugagaaagcccug

SEQ ID NO: 2773476 - RNA, 15 nt, Human
ccugagaagcugcuc

SEQ ID NO: 2773477 - RNA, 16 nt, Human
ccugagaagcugcucc

SEQ ID NO: 2773478 - RNA, 17 nt, Human
ccugagaagcugcucca

SEQ ID NO: 2773479 - RNA, 19 nt, Human
ccugagaagcugcuccagg

SEQ ID NO: 2773480 - RNA, 22 nt, Human
ccugagaagcugcuccaggccu

SEQ ID NO: 2773481 - RNA, 23 nt, Human
ccugagaagcugcuccaggccug

SEQ ID NO: 2773482 - RNA, 18 nt, Human
ccugacucucugugaccu

SEQ ID NO: 2773483 - RNA, 12 nt, Human
ccugacucugcc

SEQ ID NO: 2773484 - RNA, 13 nt, Human
ccugacucugccc

SEQ ID NO: 2773485 - RNA, 14 nt, Human
ccugacucugcccc

SEQ ID NO: 2773486 - RNA, 17 nt, Human
ccugacucucugugacc

SEQ ID NO: 2773487 - RNA, 16 nt, Human
ccugacucucugugac

SEQ ID NO: 2773488 - RNA, 15 nt, Human
ccugacucucuguga

SEQ ID NO: 2773489 - RNA, 13 nt, Human
ccugacucucugu

SEQ ID NO: 2773490 - RNA, 22 nt, Human
ccugcacuugcagacucuacag

SEQ ID NO: 2773491 - RNA, 18 nt, Human
ccugcacuuugaugucau

SEQ ID NO: 2773492 - RNA, 19 nt, Human
ccugcacuuugaugucaug

SEQ ID NO: 2773493 - RNA, 22 nt, Human
ccugcacuuugaugucaugugu

SEQ ID NO: 2773494 - RNA, 19 nt, Human
ccugcacuugcagacucua

SEQ ID NO: 2773495 - RNA, 20 nt, Human
ccugaguagcuggauuacag

SEQ ID NO: 2773496 - RNA, 15 nt, Human
ccugaguagcuggau

SEQ ID NO: 2773497 - RNA, 19 nt, Human
ccugaguagcuggauuaca

SEQ ID NO: 2773498 - RNA, 16 nt, Human
ccugcagcuaguccua

SEQ ID NO: 2773499 - RNA, 20 nt, Human
ccugagaggggaagcggccc

SEQ ID NO: 2773500 - RNA, 15 nt, Human
ccugagaggggaagc

SEQ ID NO: 2773501 - RNA, 15 nt, Human
ccugagauccccuga

SEQ ID NO: 2773502 - RNA, 17 nt, Human
ccugagauccccugagc

SEQ ID NO: 2773503 - RNA, 18 nt, Human
ccugagauccccugagcc

SEQ ID NO: 2773504 - RNA, 22 nt, Human
ccugagaagugucuaaaaacac

SEQ ID NO: 2773505 - RNA, 14 nt, Human
ccugagaaauguua

SEQ ID NO: 2773506 - RNA, 22 nt, Human
ccugagaauaagaaaguuucac

SEQ ID NO: 2773507 - RNA, 12 nt, Human
ccugagaccaca

SEQ ID NO: 2773508 - RNA, 18 nt, Human
ccugagaccacagagaga

SEQ ID NO: 2773509 - RNA, 18 nt, Human
ccugagaccauuuaacau

SEQ ID NO: 2773510 - RNA, 13 nt, Human
ccugagacccagg

SEQ ID NO: 2773511 - RNA, 14 nt, Human
ccugagacccagga

SEQ ID NO: 2773512 - RNA, 15 nt, Human
ccugagacccaggac

SEQ ID NO: 2773513 - RNA, 18 nt, Human
ccugagacccaggacucc

SEQ ID NO: 2773514 - RNA, 15 nt, Human
ccugagagaauuggc

SEQ ID NO: 2773515 - RNA, 18 nt, Human
ccugagagaauuggcuca

SEQ ID NO: 2773516 - RNA, 18 nt, Human
ccugagagacauggcuuu

SEQ ID NO: 2773517 - RNA, 17 nt, Human
ccugcaggaccugccug

SEQ ID NO: 2773518 - RNA, 16 nt, Human
ccugcaggaccugccu

SEQ ID NO: 2773519 - RNA, 15 nt, Human
ccugcaggaccugcc

SEQ ID NO: 2773520 - RNA, 15 nt, Human
ccuggccgcccccug

SEQ ID NO: 2773521 - RNA, 20 nt, Human
ccuggccgcccccugccccc

SEQ ID NO: 2773522 - RNA, 12 nt, Human
ccuggccgcccc

SEQ ID NO: 2773523 - RNA, 14 nt, Human
ccuggccgcccccu

SEQ ID NO: 2773524 - RNA, 12 nt, Human
ccuggcccugcc

SEQ ID NO: 2773525 - RNA, 13 nt, Human
ccuggcccugccc

SEQ ID NO: 2773526 - RNA, 16 nt, Human
ccuggcccugcccuga

SEQ ID NO: 2773527 - RNA, 17 nt, Human
ccuggcccugcccugag

SEQ ID NO: 2773528 - RNA, 16 nt, Human
ccugcccaggccccug

SEQ ID NO: 2773529 - RNA, 22 nt, Human
ccugcccaggccccugccaccc

SEQ ID NO: 2773530 - RNA, 15 nt, Human
ccugcccaggccccu

SEQ ID NO: 2773531 - RNA, 14 nt, Human
ccugcccaggcccc

SEQ ID NO: 2773532 - RNA, 17 nt, Human
ccugcuggcucuucugc

SEQ ID NO: 2773533 - RNA, 19 nt, Human
ccugcuggcucuucugccc

SEQ ID NO: 2773534 - RNA, 12 nt, Human
ccugcuggcucu

SEQ ID NO: 2773535 - RNA, 13 nt, Human
ccugcuggcucuu

SEQ ID NO: 2773536 - RNA, 16 nt, Human
ccugcccaugggagcu

SEQ ID NO: 2773537 - RNA, 14 nt, Human
ccugcccauuucau

SEQ ID NO: 2773538 - RNA, 23 nt, Human
ccugccccaaauaacuucagucc

SEQ ID NO: 2773539 - RNA, 21 nt, Human
ccugcccauucugcccugugg

SEQ ID NO: 2773540 - RNA, 13 nt, Human
ccugcccaggccg

SEQ ID NO: 2773541 - RNA, 15 nt, Human
ccugcccaggccggc

SEQ ID NO: 2773542 - RNA, 16 nt, Human
ccugcccaggccggcc

SEQ ID NO: 2773543 - RNA, 18 nt, Human
ccugcccaggccggccag

SEQ ID NO: 2773544 - RNA, 22 nt, Human
ccugcccaggccggccagccuc

SEQ ID NO: 2773545 - RNA, 23 nt, Human
ccugcccaggccggccagccuca

SEQ ID NO: 2773546 - RNA, 15 nt, Human
ccugcuggguaaacu

SEQ ID NO: 2773547 - RNA, 17 nt, Human
ccuggagcccuccgccu

SEQ ID NO: 2773548 - RNA, 21 nt, Human
ccuggagcccuccgccuucac

SEQ ID NO: 2773549 - RNA, 22 nt, Human
ccuggagcguuucuagcaagug

SEQ ID NO: 2773550 - RNA, 17 nt, Human
ccugcuggguaaacugu

SEQ ID NO: 2773551 - RNA, 16 nt, Human
ccuggaggauuucauc

SEQ ID NO: 2773552 - RNA, 14 nt, Human
ccuggaggcacuga

SEQ ID NO: 2773553 - RNA, 22 nt, Human
ccuggaggcacugaagugcuua

SEQ ID NO: 2773554 - RNA, 21 nt, Human
ccuggcacacaucaggaguuc

SEQ ID NO: 2773555 - RNA, 14 nt, Human
ccuggcacaggacu

SEQ ID NO: 2773556 - RNA, 15 nt, Human
ccuggcacaggacug

SEQ ID NO: 2773557 - RNA, 16 nt, Human
ccuggcacaggacuga

SEQ ID NO: 2773558 - RNA, 18 nt, Human
ccuggcacaggacugauu

SEQ ID NO: 2773559 - RNA, 24 nt, Human
ccuggcacaggacugauucuggga

SEQ ID NO: 2773560 - RNA, 18 nt, Human
ccuggauccccucugucu

SEQ ID NO: 2773561 - RNA, 21 nt, Human
ccuggauccaucaggccacuu

SEQ ID NO: 2773562 - RNA, 19 nt, Human
ccuggagugcccacccugg

SEQ ID NO: 2773563 - RNA, 19 nt, Human
ccuggaguguggcugagga

SEQ ID NO: 2773564 - RNA, 20 nt, Human
ccuggaguguggcugaggag

SEQ ID NO: 2773565 - RNA, 21 nt, Human
ccuggaguguggcugaggagg

SEQ ID NO: 2773566 - RNA, 18 nt, Human
ccuggauauuauucuugu

SEQ ID NO: 2773567 - RNA, 16 nt, Human
ccuggaguugcauuga

SEQ ID NO: 2773568 - RNA, 15 nt, Human
ccuggaguuugggau

SEQ ID NO: 2773569 - RNA, 22 nt, Human
ccuggauauuauucuuguaguu

SEQ ID NO: 2773570 - RNA, 19 nt, Human
ccuggaucacgacgcugca

SEQ ID NO: 2773571 - RNA, 21 nt, Human
ccuggaucacgacgcugcaga

SEQ ID NO: 2773572 - RNA, 22 nt, Human
ccuggaucacgacgcugcagag

SEQ ID NO: 2773573 - RNA, 23 nt, Human
ccuggaucacgacgcugcagagc

SEQ ID NO: 2773574 - RNA, 15 nt, Human
ccuggaguauaauau

SEQ ID NO: 2773575 - RNA, 18 nt, Human
ccuggaggauugcaggug

SEQ ID NO: 2773576 - RNA, 16 nt, Human
ccuggcacagggcagu

SEQ ID NO: 2773577 - RNA, 17 nt, Human
ccuggcacagggcagug

SEQ ID NO: 2773578 - RNA, 18 nt, Human
ccuggcacagggcagugg

SEQ ID NO: 2773579 - RNA, 13 nt, Human
ccucagccuccug

SEQ ID NO: 2773580 - RNA, 22 nt, Human
ccucagccucccaaguagcugg

SEQ ID NO: 2773581 - RNA, 23 nt, Human
ccucagccgacugcacagcggcc

SEQ ID NO: 2773582 - RNA, 19 nt, Human
ccucagccucccaaagugc

SEQ ID NO: 2773583 - RNA, 22 nt, Human
ccucagccucccgaauagcugg

SEQ ID NO: 2773584 - RNA, 23 nt, Human
ccucagccucccaaagugcuggg

SEQ ID NO: 2773585 - RNA, 12 nt, Human
ccucagccuccg

SEQ ID NO: 2773586 - RNA, 21 nt, Human
ccucagccucccaaagugcug

SEQ ID NO: 2773587 - RNA, 16 nt, Human
ccucauuacugggccu

SEQ ID NO: 2773588 - RNA, 21 nt, Human
ccuccaagcuccaucuccacu

SEQ ID NO: 2773589 - RNA, 22 nt, Human
ccuccaagcuccaucuccacuc

SEQ ID NO: 2773590 - RNA, 20 nt, Human
ccucauuaaccgaugcuuua

SEQ ID NO: 2773591 - RNA, 13 nt, Human
ccucauguuuaug

SEQ ID NO: 2773592 - RNA, 17 nt, Human
ccucauguuuaugaaaa

SEQ ID NO: 2773593 - RNA, 18 nt, Human
ccucauguuuaugaaaau

SEQ ID NO: 2773594 - RNA, 14 nt, Human
ccucccaggcgccc

SEQ ID NO: 2773595 - RNA, 20 nt, Human
ccucccaggcgccccuuccc

SEQ ID NO: 2773596 - RNA, 20 nt, Human
ccucccagcuuguaggagcu

SEQ ID NO: 2773597 - RNA, 17 nt, Human
ccucccaggacucugac

SEQ ID NO: 2773598 - RNA, 22 nt, Human
ccucccaggacucugaccccag

SEQ ID NO: 2773599 - RNA, 20 nt, Human
ccucccaagcuggcuggggu

SEQ ID NO: 2773600 - RNA, 14 nt, Human
ccucccaaggagaa

SEQ ID NO: 2773601 - RNA, 15 nt, Human
ccucccaaggagaac

SEQ ID NO: 2773602 - RNA, 18 nt, Human
ccucccaaggagaacaaa

SEQ ID NO: 2773603 - RNA, 21 nt, Human
ccucccaaggagaacaaauau

SEQ ID NO: 2773604 - RNA, 23 nt, Human
ccucccaaggagaacaaauauuc

SEQ ID NO: 2773605 - RNA, 12 nt, Human
ccucccagccug

SEQ ID NO: 2773606 - RNA, 12 nt, Human
ccucccagaggu

SEQ ID NO: 2773607 - RNA, 16 nt, Human
ccucccagagguccag

SEQ ID NO: 2773608 - RNA, 18 nt, Human
ccucccagagguccagcc

SEQ ID NO: 2773609 - RNA, 19 nt, Human
ccucccagagguccagccc

SEQ ID NO: 2773610 - RNA, 20 nt, Human
ccucccagagguccagccca

SEQ ID NO: 2773611 - RNA, 21 nt, Human
ccucccagagguccagcccau

SEQ ID NO: 2773612 - RNA, 22 nt, Human
ccucccagagguccagcccauc

SEQ ID NO: 2773613 - RNA, 23 nt, Human
ccucccagagguccagcccaucu

SEQ ID NO: 2773614 - RNA, 16 nt, Human
ccucaagaucauucag

SEQ ID NO: 2773615 - RNA, 22 nt, Human
ccucagccucccaaagugcugg

SEQ ID NO: 2773616 - RNA, 11 nt, Human
ccucagccucc

SEQ ID NO: 2773617 - RNA, 20 nt, Human
ccucagccuagacccuccuc

SEQ ID NO: 2773618 - RNA, 19 nt, Human
ccucagccuagacccuccu

SEQ ID NO: 2773619 - RNA, 16 nt, Human
ccucagccuagacccu

SEQ ID NO: 2773620 - RNA, 14 nt, Human
ccucagccuagacc

SEQ ID NO: 2773621 - RNA, 16 nt, Human
ccucaaccuccugggc

SEQ ID NO: 2773622 - RNA, 17 nt, Human
ccuauuugccaugggcu

SEQ ID NO: 2773623 - RNA, 14 nt, Human
ccuauuugacuuac

SEQ ID NO: 2773624 - RNA, 12 nt, Human
ccucaaccucuu

SEQ ID NO: 2773625 - RNA, 16 nt, Human
ccucaaccuccugugg

SEQ ID NO: 2773626 - RNA, 20 nt, Human
ccucaaccuccuguggaacc

SEQ ID NO: 2773627 - RNA, 17 nt, Human
ccucaaccucuucuggc

SEQ ID NO: 2773628 - RNA, 20 nt, Human
ccucaaccucuucuggcuca

SEQ ID NO: 2773629 - RNA, 18 nt, Human
ccucaacguauuguuucg

SEQ ID NO: 2773630 - RNA, 15 nt, Human
ccuauuucaguacuu

SEQ ID NO: 2773631 - RNA, 20 nt, Human
ccuauuucaguacuucagca

SEQ ID NO: 2773632 - RNA, 18 nt, Human
ccuauuuccauucaacaa

SEQ ID NO: 2773633 - RNA, 12 nt, Human
ccuauuguugau

SEQ ID NO: 2773634 - RNA, 16 nt, Human
ccuauuuaccugcagg

SEQ ID NO: 2773635 - RNA, 22 nt, Human
ccggcuaugggggcacugagga

SEQ ID NO: 2773636 - RNA, 23 nt, Human
ccggcuaugggggcacugaggac

SEQ ID NO: 2773637 - RNA, 17 nt, Human
ccggcuaugggggcacu

SEQ ID NO: 2773638 - RNA, 19 nt, Human
ccggcuaauuuuuguauuu

SEQ ID NO: 2773639 - RNA, 18 nt, Human
ccggcuaauuuuuguaau

SEQ ID NO: 2773640 - RNA, 14 nt, Human
ccgucaacguugua

SEQ ID NO: 2773641 - RNA, 17 nt, Human
ccgucaacguuguacug

SEQ ID NO: 2773642 - RNA, 21 nt, Human
ccgucucaguguugagccuuu

SEQ ID NO: 2773643 - RNA, 16 nt, Human
ccguccaggagccugg

SEQ ID NO: 2773644 - RNA, 22 nt, Human
ccguccagccgccauugccacc

SEQ ID NO: 2773645 - RNA, 20 nt, Human
ccgucacgugcgcugggcac

SEQ ID NO: 2773646 - RNA, 18 nt, Human
ccgucucugguuccuccc

SEQ ID NO: 2773647 - RNA, 13 nt, Human
ccgucuguccauc

SEQ ID NO: 2773648 - RNA, 16 nt, Human
ccguaguuauuuugca

SEQ ID NO: 2773649 - RNA, 22 nt, Human
ccuaaggcaugugugaaacaua

SEQ ID NO: 2773650 - RNA, 16 nt, Human
ccuaaggaaccuuccu

SEQ ID NO: 2773651 - RNA, 13 nt, Human
ccuaaggaaccuu

SEQ ID NO: 2773652 - RNA, 19 nt, Human
ccuaagggucgaaagcucu

SEQ ID NO: 2773653 - RNA, 21 nt, Human
ccuaagggucgaaagcucuag

SEQ ID NO: 2773654 - RNA, 16 nt, Human
ccuaagccacuugaaa

SEQ ID NO: 2773655 - RNA, 13 nt, Human
ccuaagccagccu

SEQ ID NO: 2773656 - RNA, 14 nt, Human
ccuaagccagccug

SEQ ID NO: 2773657 - RNA, 15 nt, Human
ccuaagccagccugg

SEQ ID NO: 2773658 - RNA, 16 nt, Human
ccuaagccagccuggu

SEQ ID NO: 2773659 - RNA, 17 nt, Human
ccuaagccagccugguc

SEQ ID NO: 2773660 - RNA, 19 nt, Human
ccuaagccagccuggucca

SEQ ID NO: 2773661 - RNA, 12 nt, Human
ccuaagcaucua

SEQ ID NO: 2773662 - RNA, 16 nt, Human
ccuaagcaucuaaguu

SEQ ID NO: 2773663 - RNA, 16 nt, Human
ccuaagcauugccugg

SEQ ID NO: 2773664 - RNA, 17 nt, Human
ccuaagcauugccuggc

SEQ ID NO: 2773665 - RNA, 13 nt, Human
ccuaagcaucuaa

SEQ ID NO: 2773666 - RNA, 15 nt, Human
ccuaagccuguggcu

SEQ ID NO: 2773667 - RNA, 19 nt, Human
ccuaagccuguggcugugg

SEQ ID NO: 2773668 - RNA, 18 nt, Human
ccuaaguccuuuaugugg

SEQ ID NO: 2773669 - RNA, 13 nt, Human
ccuaagucucugu

SEQ ID NO: 2773670 - RNA, 15 nt, Human
ccuaagucucuguga

SEQ ID NO: 2773671 - RNA, 14 nt, Human
ccuaagucucugug

SEQ ID NO: 2773672 - RNA, 16 nt, Human
ccuaaguccuuuaugu

SEQ ID NO: 2773673 - RNA, 18 nt, Human
ccuaaguauuaaaacauu

SEQ ID NO: 2773674 - RNA, 21 nt, Human
ccuaaguauuaaaacauugga

SEQ ID NO: 2773675 - RNA, 23 nt, Human
ccuaagggucgaaagcucuagaa

SEQ ID NO: 2773676 - RNA, 12 nt, Human
ccuaaguacugu

SEQ ID NO: 2773677 - RNA, 14 nt, Human
ccuaaguacuguaa

SEQ ID NO: 2773678 - RNA, 16 nt, Human
ccuaaguacuguaaua

SEQ ID NO: 2773679 - RNA, 18 nt, Human
ccuaaguacuguaauaau

SEQ ID NO: 2773680 - RNA, 22 nt, Human
ccuaagggucgaaagcucuaga

SEQ ID NO: 2773681 - RNA, 13 nt, Human
ccuaaguauuaaa

SEQ ID NO: 2773682 - RNA, 16 nt, Human
ccuaaguauuaaaaca

SEQ ID NO: 2773683 - RNA, 17 nt, Human
ccuaaguauuaaaacau

SEQ ID NO: 2773684 - RNA, 17 nt, Human
ccuaagugucaccccgc

SEQ ID NO: 2773685 - RNA, 22 nt, Human
ccuaaucagaaauuuuuaucag

SEQ ID NO: 2773686 - RNA, 14 nt, Human
ccuagauaugaaua

SEQ ID NO: 2773687 - RNA, 15 nt, Human
ccuagauaugaauau

SEQ ID NO: 2773688 - RNA, 16 nt, Human
ccuagauaugaauaua

SEQ ID NO: 2773689 - RNA, 21 nt, Human
ccuagauaugaauauauggca

SEQ ID NO: 2773690 - RNA, 17 nt, Human
ccuaauaucaaaugcag

SEQ ID NO: 2773691 - RNA, 16 nt, Human
ccuagcacaugcuuca

SEQ ID NO: 2773692 - RNA, 18 nt, Human
ccuagcacaugcuucaau

SEQ ID NO: 2773693 - RNA, 12 nt, Human
ccuaggagacca

SEQ ID NO: 2773694 - RNA, 14 nt, Human
ccuagauccuaagg

SEQ ID NO: 2773695 - RNA, 16 nt, Human
ccuagauccuaagggu

SEQ ID NO: 2773696 - RNA, 11 nt, Human
ccuagauuaua

SEQ ID NO: 2773697 - RNA, 15 nt, Human
ccuagauuauaucaa

SEQ ID NO: 2773698 - RNA, 14 nt, Human
ccuagcaagcuggc

SEQ ID NO: 2773699 - RNA, 15 nt, Human
ccuagcaagcuggcc

SEQ ID NO: 2773700 - RNA, 16 nt, Human
ccuagcaagcuggccu

SEQ ID NO: 2773701 - RNA, 17 nt, Human
ccuagcaagcuggccuc

SEQ ID NO: 2773702 - RNA, 18 nt, Human
ccuagcaagcuggccucu

SEQ ID NO: 2773703 - RNA, 13 nt, Human
ccuagcaauucca

SEQ ID NO: 2773704 - RNA, 16 nt, Human
ccuaggaguauauuuc

SEQ ID NO: 2773705 - RNA, 21 nt, Human
ccuaggaguauauuuccgcac

SEQ ID NO: 2773706 - RNA, 14 nt, Human
ccuaggauucuaaa

SEQ ID NO: 2773707 - RNA, 13 nt, Human
ccuaggcaggaca

SEQ ID NO: 2773708 - RNA, 18 nt, Human
ccuaggcaggacaugcug

SEQ ID NO: 2773709 - RNA, 11 nt, Human
ccuaggauucu

SEQ ID NO: 2773710 - RNA, 22 nt, Human
ccuaggcaggacaugcugaagc

SEQ ID NO: 2773711 - RNA, 23 nt, Human
ccuaggcaggacaugcugaagcc

SEQ ID NO: 2773712 - RNA, 19 nt, Human
ccuaggcaguaggccggug

SEQ ID NO: 2773713 - RNA, 22 nt, Human
ccuaggcaguaggccggugugc

SEQ ID NO: 2773714 - RNA, 12 nt, Human
cccuucucugug

SEQ ID NO: 2773715 - RNA, 13 nt, Human
cccuucucuguga

SEQ ID NO: 2773716 - RNA, 19 nt, Human
cccuucucugugacccacu

SEQ ID NO: 2773717 - RNA, 21 nt, Human
cccuucucugugacccacuuc

SEQ ID NO: 2773718 - RNA, 18 nt, Human
cccuucgcuccugugucu

SEQ ID NO: 2773719 - RNA, 16 nt, Human
cccuucgcuccugugu

SEQ ID NO: 2773720 - RNA, 15 nt, Human
ccgacccucugggaa

SEQ ID NO: 2773721 - RNA, 16 nt, Human
ccgacccucugggaac

SEQ ID NO: 2773722 - RNA, 17 nt, Human
ccgacccucugggaacc

SEQ ID NO: 2773723 - RNA, 18 nt, Human
ccgacccucugggaaccu

SEQ ID NO: 2773724 - RNA, 19 nt, Human
ccgacccucugggaaccuc

SEQ ID NO: 2773725 - RNA, 16 nt, Human
ccgccacuccugaacc

SEQ ID NO: 2773726 - RNA, 16 nt, Human
ccgccagacuguuaga

SEQ ID NO: 2773727 - RNA, 15 nt, Human
ccgccagagggcuug

SEQ ID NO: 2773728 - RNA, 21 nt, Human
ccgccaaaagcugcucaggga

SEQ ID NO: 2773729 - RNA, 20 nt, Human
ccgccaaugcacggccucgc

SEQ ID NO: 2773730 - RNA, 16 nt, Human
ccgccacacagaccac

SEQ ID NO: 2773731 - RNA, 20 nt, Human
ccgaauagcugggacuacag

SEQ ID NO: 2773732 - RNA, 17 nt, Human
cccuucugucccucaca

SEQ ID NO: 2773733 - RNA, 16 nt, Human
cccuucugucccucac

SEQ ID NO: 2773734 - RNA, 18 nt, Human
ccgaccagaggagccuuu

SEQ ID NO: 2773735 - RNA, 12 nt, Human
ccgacacuguuc

SEQ ID NO: 2773736 - RNA, 14 nt, Human
ccgacacuguucuc

SEQ ID NO: 2773737 - RNA, 17 nt, Human
ccgaccagaggagccuu

SEQ ID NO: 2773738 - RNA, 22 nt, Human
ccgacaacuauuucggccuuuu

SEQ ID NO: 2773739 - RNA, 16 nt, Human
ccgaauccccucccug

SEQ ID NO: 2773740 - RNA, 18 nt, Human
ccgaauccccucccuguc

SEQ ID NO: 2773741 - RNA, 19 nt, Human
ccgaauccccucccuguca

SEQ ID NO: 2773742 - RNA, 22 nt, Human
ccgaauucgcuguuaccgccug

SEQ ID NO: 2773743 - RNA, 15 nt, Human
ccgaauugagcacaa

SEQ ID NO: 2773744 - RNA, 16 nt, Human
ccgaauugagcacaaa

SEQ ID NO: 2773745 - RNA, 14 nt, Human
ccgcccaugcacug

SEQ ID NO: 2773746 - RNA, 13 nt, Human
ccgcccaugcacu

SEQ ID NO: 2773747 - RNA, 19 nt, Human
ccgccauugccaccaggag

SEQ ID NO: 2773748 - RNA, 16 nt, Human
ccgccauugccaccag

SEQ ID NO: 2773749 - RNA, 15 nt, Human
ccgccauugccacca

SEQ ID NO: 2773750 - RNA, 14 nt, Human
ccgccauugccacc

SEQ ID NO: 2773751 - RNA, 13 nt, Human
ccgcccccagccu

SEQ ID NO: 2773752 - RNA, 14 nt, Human
ccgcccccagccua

SEQ ID NO: 2773753 - RNA, 19 nt, Human
ccgcccaugcacuggggac

SEQ ID NO: 2773754 - RNA, 19 nt, Human
ccgccccaaaguaaaagaa

SEQ ID NO: 2773755 - RNA, 12 nt, Human
ccgcccccagcc

SEQ ID NO: 2773756 - RNA, 12 nt, Human
ccgcccccuccu

SEQ ID NO: 2773757 - RNA, 14 nt, Human
ccgcccccuccuga

SEQ ID NO: 2773758 - RNA, 11 nt, Human
ccgcccccugc

SEQ ID NO: 2773759 - RNA, 16 nt, Human
ccgcccccugcccucc

SEQ ID NO: 2773760 - RNA, 17 nt, Human
ccgcccccugcccuccc

SEQ ID NO: 2773761 - RNA, 23 nt, Human
cccuggcauuauguccacugugu

SEQ ID NO: 2773762 - RNA, 20 nt, Human
cccuggcaggaugacccugc

SEQ ID NO: 2773763 - RNA, 22 nt, Human
cccuggcaggaugacccugcga

SEQ ID NO: 2773764 - RNA, 21 nt, Human
cccuggccucugugccuucuu

SEQ ID NO: 2773765 - RNA, 12 nt, Human
cccuggcccccu

SEQ ID NO: 2773766 - RNA, 16 nt, Human
cccuggcccccugagu

SEQ ID NO: 2773767 - RNA, 15 nt, Human
cccuggcuaagaccc

SEQ ID NO: 2773768 - RNA, 15 nt, Human
cccuggcuguacugc

SEQ ID NO: 2773769 - RNA, 17 nt, Human
cccuggcuguacugcuc

SEQ ID NO: 2773770 - RNA, 21 nt, Human
cccuggcuguacugcucaggc

SEQ ID NO: 2773771 - RNA, 22 nt, Human
cccuggcuguacugcucaggcu

SEQ ID NO: 2773772 - RNA, 17 nt, Human
cccuggcucccacaggc

SEQ ID NO: 2773773 - RNA, 13 nt, Human
cccuggcuuuuca

SEQ ID NO: 2773774 - RNA, 14 nt, Human
cccugcccuguggg

SEQ ID NO: 2773775 - RNA, 12 nt, Human
cccugcccugug

SEQ ID NO: 2773776 - RNA, 13 nt, Human
cccugcccugugg

SEQ ID NO: 2773777 - RNA, 18 nt, Human
cccucacagccucugacc

SEQ ID NO: 2773778 - RNA, 13 nt, Human
cccucacauuccu

SEQ ID NO: 2773779 - RNA, 12 nt, Human
cccucaccaaca

SEQ ID NO: 2773780 - RNA, 14 nt, Human
cccucacagccucu

SEQ ID NO: 2773781 - RNA, 15 nt, Human
cccucacagccucug

SEQ ID NO: 2773782 - RNA, 16 nt, Human
cccucacagccucuga

SEQ ID NO: 2773783 - RNA, 17 nt, Human
cccucacagccucugac

SEQ ID NO: 2773784 - RNA, 14 nt, Human
cccuauuuugccau

SEQ ID NO: 2773785 - RNA, 13 nt, Human
cccucacagccuc

SEQ ID NO: 2773786 - RNA, 13 nt, Human
caacaauaacacu

SEQ ID NO: 2773787 - RNA, 12 nt, Human
caacaccacaga

SEQ ID NO: 2773788 - RNA, 13 nt, Human
caacaccacagac

SEQ ID NO: 2773789 - RNA, 14 nt, Human
caacaccacagaca

SEQ ID NO: 2773790 - RNA, 15 nt, Human
caacaccacagacac

SEQ ID NO: 2773791 - RNA, 16 nt, Human
caacaccacagacaca

SEQ ID NO: 2773792 - RNA, 17 nt, Human
caacaccacagacacac

SEQ ID NO: 2773793 - RNA, 18 nt, Human
caacaccacagacacaca

SEQ ID NO: 2773794 - RNA, 19 nt, Human
caacaccacagacacacac

SEQ ID NO: 2773795 - RNA, 20 nt, Human
caacaccacagacacacaca

SEQ ID NO: 2773796 - RNA, 22 nt, Human
caaauggaaaguaacucauuug

SEQ ID NO: 2773797 - RNA, 12 nt, Human
caacaagaaugc

SEQ ID NO: 2773798 - RNA, 13 nt, Human
caacaagaaugca

SEQ ID NO: 2773799 - RNA, 14 nt, Human
caacaagaaugcau

SEQ ID NO: 2773800 - RNA, 16 nt, Human
caacaagaaugcauug

SEQ ID NO: 2773801 - RNA, 18 nt, Human
caacaagaaugcauugau

SEQ ID NO: 2773802 - RNA, 20 nt, Human
caacaagaaugcauugauau

SEQ ID NO: 2773803 - RNA, 14 nt, Human
caacaauaaaacau

SEQ ID NO: 2773804 - RNA, 20 nt, Human
caacaagguggugugaucuu

SEQ ID NO: 2773805 - RNA, 15 nt, Human
caacaagaguuuauu

SEQ ID NO: 2773806 - RNA, 13 nt, Human
caacaagauuucc

SEQ ID NO: 2773807 - RNA, 21 nt, Human
caacaagauuuccuugugcaa

SEQ ID NO: 2773808 - RNA, 14 nt, Human
caacaagaguuuau

SEQ ID NO: 2773809 - RNA, 18 nt, Human
caaauccuuccaaaaauu

SEQ ID NO: 2773810 - RNA, 19 nt, Human
caaauccuuccaaaaauua

SEQ ID NO: 2773811 - RNA, 20 nt, Human
caaauccuuccaaaaauuau

SEQ ID NO: 2773812 - RNA, 20 nt, Human
caacacgcauggucaacccu

SEQ ID NO: 2773813 - RNA, 17 nt, Human
caaagcacaguuugaac

SEQ ID NO: 2773814 - RNA, 22 nt, Human
caaagcacaguguuaaaugaaa

SEQ ID NO: 2773815 - RNA, 16 nt, Human
caaagcacaguuugaa

SEQ ID NO: 2773816 - RNA, 11 nt, Human
caaagaugcug

SEQ ID NO: 2773817 - RNA, 15 nt, Human
caaagaugcagccgc

SEQ ID NO: 2773818 - RNA, 23 nt, Human
caaagaugcagccgccuuccuug

SEQ ID NO: 2773819 - RNA, 16 nt, Human
caaagaugcugugagu

SEQ ID NO: 2773820 - RNA, 16 nt, Human
caaagauggcucagag

SEQ ID NO: 2773821 - RNA, 17 nt, Human
caaagauggcucagagg

SEQ ID NO: 2773822 - RNA, 18 nt, Human
caaagauggcucagaggg

SEQ ID NO: 2773823 - RNA, 19 nt, Human
caaagauggcucagagggg

SEQ ID NO: 2773824 - RNA, 19 nt, Human
caaagauucaugauuuaua

SEQ ID NO: 2773825 - RNA, 16 nt, Human
caaagauucaugauuu

SEQ ID NO: 2773826 - RNA, 13 nt, Human
caaagauucauga

SEQ ID NO: 2773827 - RNA, 13 nt, Human
caaagcacagugu

SEQ ID NO: 2773828 - RNA, 14 nt, Human
caaagcacaguguu

SEQ ID NO: 2773829 - RNA, 15 nt, Human
caaagcacaguguua

SEQ ID NO: 2773830 - RNA, 19 nt, Human
caaagcacaguguuaaaug

SEQ ID NO: 2773831 - RNA, 18 nt, Human
caaaguaaaacuugcugc

SEQ ID NO: 2773832 - RNA, 16 nt, Human
caaaguaaaacuugcu

SEQ ID NO: 2773833 - RNA, 19 nt, Human
caaagguuuuccucuucua

SEQ ID NO: 2773834 - RNA, 11 nt, Human
caaagguuuuc

SEQ ID NO: 2773835 - RNA, 15 nt, Human
caaagguugagaugu

SEQ ID NO: 2773836 - RNA, 13 nt, Human
caaaggucuuuuu

SEQ ID NO: 2773837 - RNA, 18 nt, Human
caaaggucuuuuuaaacc

SEQ ID NO: 2773838 - RNA, 20 nt, Human
caaaggucuuuuuaaaccag

SEQ ID NO: 2773839 - RNA, 15 nt, Human
caaagcagggucugg

SEQ ID NO: 2773840 - RNA, 12 nt, Human
caaagguucuag

SEQ ID NO: 2773841 - RNA, 14 nt, Human
caaagguucuaggu

SEQ ID NO: 2773842 - RNA, 19 nt, Human
caaagguucuagguuucaa

SEQ ID NO: 2773843 - RNA, 21 nt, Human
caaagguucuagguuucaaag

SEQ ID NO: 2773844 - RNA, 22 nt, Human
caaagguucuagguuucaaaga

SEQ ID NO: 2773845 - RNA, 12 nt, Human
caaagucucuaa

SEQ ID NO: 2773846 - RNA, 13 nt, Human
caaagucucuaau

SEQ ID NO: 2773847 - RNA, 14 nt, Human
caaagucucuaauu

SEQ ID NO: 2773848 - RNA, 13 nt, Human
caaagucugugug

SEQ ID NO: 2773849 - RNA, 15 nt, Human
caaagucucuaauuc

SEQ ID NO: 2773850 - RNA, 14 nt, Human
caaagucuguguga

SEQ ID NO: 2773851 - RNA, 16 nt, Human
caaagucuuugggguc

SEQ ID NO: 2773852 - RNA, 23 nt, Human
caaagugaaggacauagagguau

SEQ ID NO: 2773853 - RNA, 16 nt, Human
caaagugccacucauu

SEQ ID NO: 2773854 - RNA, 22 nt, Human
caaagugccacucauuccugua

SEQ ID NO: 2773855 - RNA, 15 nt, Human
caaagugcugagauu

SEQ ID NO: 2773856 - RNA, 16 nt, Human
caaagugcugagauua

SEQ ID NO: 2773857 - RNA, 16 nt, Human
caaauccgcucucuuc

SEQ ID NO: 2773858 - RNA, 17 nt, Human
caaauccgcucucuucc

SEQ ID NO: 2773859 - RNA, 18 nt, Human
caaauccgcucucuuccu

SEQ ID NO: 2773860 - RNA, 19 nt, Human
caaauccgcucucuuccug

SEQ ID NO: 2773861 - RNA, 20 nt, Human
caaauccgcucucuuccugc

SEQ ID NO: 2773862 - RNA, 21 nt, Human
caaauccgcucucuuccugcc

SEQ ID NO: 2773863 - RNA, 22 nt, Human
caaauccgcucucuuccugccc

SEQ ID NO: 2773864 - RNA, 18 nt, Human
auuuuuuuuuuuugaaaa

SEQ ID NO: 2773865 - RNA, 21 nt, Human
auuuuuuuuuuuugaaaaaag

SEQ ID NO: 2773866 - RNA, 23 nt, Human
auuuuuuuuuuuguuucugagaa

SEQ ID NO: 2773867 - RNA, 19 nt, Human
caaaagaugcucuucugug

SEQ ID NO: 2773868 - RNA, 20 nt, Human
caaaagaugcucuucugugg

SEQ ID NO: 2773869 - RNA, 12 nt, Human
caaaagaugaaa

SEQ ID NO: 2773870 - RNA, 18 nt, Human
caaaaggcuccauauaua

SEQ ID NO: 2773871 - RNA, 19 nt, Human
caaaaggcuccauauauau

SEQ ID NO: 2773872 - RNA, 18 nt, Human
caaaagauugcugaaaaa

SEQ ID NO: 2773873 - RNA, 19 nt, Human
auuuuuuuuuuaaauuauu

SEQ ID NO: 2773874 - RNA, 16 nt, Human
auuuuuuuuuuaaauc

SEQ ID NO: 2773875 - RNA, 21 nt, Human
caaacccacgauuuucuccag

SEQ ID NO: 2773876 - RNA, 22 nt, Human
caaacccacgauuuucuccagc

SEQ ID NO: 2773877 - RNA, 23 nt, Human
caaacccacgauuuucuccagcu

SEQ ID NO: 2773878 - RNA, 24 nt, Human
caaacccacgauuuucuccagcuc

SEQ ID NO: 2773879 - RNA, 21 nt, Human
caaaccauuuuuaaaguagaa

SEQ ID NO: 2773880 - RNA, 13 nt, Human
caaacagccacac

SEQ ID NO: 2773881 - RNA, 20 nt, Human
caaacaggaucaguuaacua

SEQ ID NO: 2773882 - RNA, 11 nt, Human
caaaaggguca

SEQ ID NO: 2773883 - RNA, 13 nt, Human
caaaagggucaga

SEQ ID NO: 2773884 - RNA, 14 nt, Human
caaaagggucagag

SEQ ID NO: 2773885 - RNA, 16 nt, Human
caaaagggucagagga

SEQ ID NO: 2773886 - RNA, 23 nt, Human
caaaagggucagaggaccuguau

SEQ ID NO: 2773887 - RNA, 14 nt, Human
caaaagggaaaaga

SEQ ID NO: 2773888 - RNA, 11 nt, Human
caaacagcaaa

SEQ ID NO: 2773889 - RNA, 14 nt, Human
caaacagcaaacca

SEQ ID NO: 2773890 - RNA, 16 nt, Human
caaacagcaaaccaag

SEQ ID NO: 2773891 - RNA, 17 nt, Human
caaacagcaaaccaaga

SEQ ID NO: 2773892 - RNA, 19 nt, Human
caaacagcaaaccaagaga

SEQ ID NO: 2773893 - RNA, 20 nt, Human
caaacagcaaaccaagagau

SEQ ID NO: 2773894 - RNA, 21 nt, Human
auuugcuagcaguaaaagaug

SEQ ID NO: 2773895 - RNA, 18 nt, Human
auuugcuuuuucaccaga

SEQ ID NO: 2773896 - RNA, 13 nt, Human
auuugcuggggaa

SEQ ID NO: 2773897 - RNA, 18 nt, Human
auuugcuuauuuaauaaa

SEQ ID NO: 2773898 - RNA, 12 nt, Human
auuugcuucauu

SEQ ID NO: 2773899 - RNA, 14 nt, Human
auuugcuucauugu

SEQ ID NO: 2773900 - RNA, 20 nt, Human
auuugcuuucuuuucuccca

SEQ ID NO: 2773901 - RNA, 13 nt, Human
auuuggaaaauaa

SEQ ID NO: 2773902 - RNA, 12 nt, Human
auuuggaaaaua

SEQ ID NO: 2773903 - RNA, 12 nt, Human
auuuggaaaucc

SEQ ID NO: 2773904 - RNA, 14 nt, Human
auuuggaaauccua

SEQ ID NO: 2773905 - RNA, 21 nt, Human
auuuggaaauccuaguuuccu

SEQ ID NO: 2773906 - RNA, 18 nt, Human
auuugugcuauaguauuu

SEQ ID NO: 2773907 - RNA, 21 nt, Human
auuugugcuauaguauuugau

SEQ ID NO: 2773908 - RNA, 14 nt, Human
auuugugccagagg

SEQ ID NO: 2773909 - RNA, 21 nt, Human
auuugugccgacacuguucuc

SEQ ID NO: 2773910 - RNA, 14 nt, Human
auuugugccagaau

SEQ ID NO: 2773911 - RNA, 17 nt, Human
auuugugauauauguau

SEQ ID NO: 2773912 - RNA, 22 nt, Human
auuuguuuguuuguuuuauuca

SEQ ID NO: 2773913 - RNA, 21 nt, Human
auuuuaugaaagguuuacauu

SEQ ID NO: 2773914 - RNA, 15 nt, Human
auuuuaugagaaaug

SEQ ID NO: 2773915 - RNA, 16 nt, Human
auuuuaugagaaaugu

SEQ ID NO: 2773916 - RNA, 17 nt, Human
auuuuaugagaaaugua

SEQ ID NO: 2773917 - RNA, 18 nt, Human
auuuuaugagaaauguaa

SEQ ID NO: 2773918 - RNA, 20 nt, Human
auuuuaugagaaauguaaug

SEQ ID NO: 2773919 - RNA, 21 nt, Human
auuuuaugagaaauguaaugc

SEQ ID NO: 2773920 - RNA, 17 nt, Human
auuuuaugaucaguguu

SEQ ID NO: 2773921 - RNA, 18 nt, Human
auuuuaugaucaguguug

SEQ ID NO: 2773922 - RNA, 15 nt, Human
auuuguuuaaaagga

SEQ ID NO: 2773923 - RNA, 16 nt, Human
auuuguuuaaaaggau

SEQ ID NO: 2773924 - RNA, 12 nt, Human
auuuguuuaaaa

SEQ ID NO: 2773925 - RNA, 15 nt, Human
auuuguuggaaugaa

SEQ ID NO: 2773926 - RNA, 14 nt, Human
auuuguuuaaaagg

SEQ ID NO: 2773927 - RNA, 13 nt, Human
auuuguuuaaaag

SEQ ID NO: 2773928 - RNA, 14 nt, Human
auuuguuggaauga

SEQ ID NO: 2773929 - RNA, 13 nt, Human
auuuguuggaaug

SEQ ID NO: 2773930 - RNA, 22 nt, Human
auuuguguauuuaacagggagg

SEQ ID NO: 2773931 - RNA, 17 nt, Human
auuugugucacaaagaa

SEQ ID NO: 2773932 - RNA, 21 nt, Human
auuugugucacaaagaauuua

SEQ ID NO: 2773933 - RNA, 21 nt, Human
auuuguguaauagaaaacuga

SEQ ID NO: 2773934 - RNA, 19 nt, Human
auuuguugacaaaauuuuc

SEQ ID NO: 2773935 - RNA, 14 nt, Human
auuuguguauuuaa

SEQ ID NO: 2773936 - RNA, 13 nt, Human
auuuguguaauag

SEQ ID NO: 2773937 - RNA, 11 nt, Human
auuuguggaau

SEQ ID NO: 2773938 - RNA, 12 nt, Human
auuuguggaaua

SEQ ID NO: 2773939 - RNA, 20 nt, Human
auuuguggugauauagaauu

SEQ ID NO: 2773940 - RNA, 20 nt, Human
auuugccacugauauucaga

SEQ ID NO: 2773941 - RNA, 22 nt, Human
auuugccacugauauucagaau

SEQ ID NO: 2773942 - RNA, 16 nt, Human
auuugccaauaauaau

SEQ ID NO: 2773943 - RNA, 15 nt, Human
auuugccaugggcuu

SEQ ID NO: 2773944 - RNA, 19 nt, Human
auuugccaugggcuucacu

SEQ ID NO: 2773945 - RNA, 24 nt, Human
auuugccaugggcuucacuguaua

SEQ ID NO: 2773946 - RNA, 12 nt, Human
auuugcccuggg

SEQ ID NO: 2773947 - RNA, 16 nt, Human
auuugcccugggaaac

SEQ ID NO: 2773948 - RNA, 18 nt, Human
auuugcccugggaaaccc

SEQ ID NO: 2773949 - RNA, 15 nt, Human
auuugccaauaauaa

SEQ ID NO: 2773950 - RNA, 22 nt, Human
auuugcauugaacacaaacugu

SEQ ID NO: 2773951 - RNA, 21 nt, Human
auuugcauugaacacaaacug

SEQ ID NO: 2773952 - RNA, 16 nt, Human
auuugcauugaacaca

SEQ ID NO: 2773953 - RNA, 21 nt, Human
auuugccuguuucugcuugcu

SEQ ID NO: 2773954 - RNA, 13 nt, Human
auuugccuugcag

SEQ ID NO: 2773955 - RNA, 14 nt, Human
auuugccuugcaga

SEQ ID NO: 2773956 - RNA, 15 nt, Human
auuugccuugcagaa

SEQ ID NO: 2773957 - RNA, 17 nt, Human
auuugccuugcagaacu

SEQ ID NO: 2773958 - RNA, 18 nt, Human
auuugccuugcagaacug

SEQ ID NO: 2773959 - RNA, 19 nt, Human
auuugccuugcagaacugc

SEQ ID NO: 2773960 - RNA, 21 nt, Human
auuugccuugcagaacugcca

SEQ ID NO: 2773961 - RNA, 22 nt, Human
auuugccuugcagaacugccau

SEQ ID NO: 2773962 - RNA, 23 nt, Human
auuugccuugcagaacugccauu

SEQ ID NO: 2773963 - RNA, 15 nt, Human
auuugccuugcugga

SEQ ID NO: 2773964 - RNA, 14 nt, Human
auuugccuuuaaaa

SEQ ID NO: 2773965 - RNA, 23 nt, Human
auuugccuuuaaaaaaaaaaguu

SEQ ID NO: 2773966 - RNA, 21 nt, Human
auuugccugcagaguuuggau

SEQ ID NO: 2773967 - RNA, 23 nt, Human
auuugcggcgucagucuuuuucu

SEQ ID NO: 2773968 - RNA, 18 nt, Human
auuugcuaaucaaagcca

SEQ ID NO: 2773969 - RNA, 23 nt, Human
auuugcuaaucaaagccaggguc

SEQ ID NO: 2773970 - RNA, 15 nt, Human
auuugcuacuguaca

SEQ ID NO: 2773971 - RNA, 16 nt, Human
auuugcuacuguacau

SEQ ID NO: 2773972 - RNA, 13 nt, Human
auuugauuucuau

SEQ ID NO: 2773973 - RNA, 17 nt, Human
auuugauuucuauucaa

SEQ ID NO: 2773974 - RNA, 22 nt, Human
auuugauuuuucuaaccuugaa

SEQ ID NO: 2773975 - RNA, 18 nt, Human
auuugauuuuugucucaa

SEQ ID NO: 2773976 - RNA, 12 nt, Human
auuugcaacauu

SEQ ID NO: 2773977 - RNA, 14 nt, Human
auuugcaacauuua

SEQ ID NO: 2773978 - RNA, 15 nt, Human
auuugcaacauuuac

SEQ ID NO: 2773979 - RNA, 15 nt, Human
auuugauucaaaaua

SEQ ID NO: 2773980 - RNA, 16 nt, Human
auuugauucaaaauau

SEQ ID NO: 2773981 - RNA, 20 nt, Human
auuugauucaaaauauuuaa

SEQ ID NO: 2773982 - RNA, 16 nt, Human
auuugauugauuugaa

SEQ ID NO: 2773983 - RNA, 13 nt, Human
auuugauugauuu

SEQ ID NO: 2773984 - RNA, 20 nt, Human
auuugauguuuacaggugga

SEQ ID NO: 2773985 - RNA, 14 nt, Human
auuugauuaacaaa

SEQ ID NO: 2773986 - RNA, 16 nt, Human
auuugauuaacaaaua

SEQ ID NO: 2773987 - RNA, 17 nt, Human
auuugauuaacaaauau

SEQ ID NO: 2773988 - RNA, 18 nt, Human
auuugcauuaaauucaca

SEQ ID NO: 2773989 - RNA, 23 nt, Human
auuugcauuaaauucacaaacuu

SEQ ID NO: 2773990 - RNA, 19 nt, Human
auuugcauuaaauucacaa

SEQ ID NO: 2773991 - RNA, 15 nt, Human
auuugcaucugaaau

SEQ ID NO: 2773992 - RNA, 21 nt, Human
auuugcaucugaaauaggaaa

SEQ ID NO: 2773993 - RNA, 21 nt, Human
auuugcauggcuccagaaaug

SEQ ID NO: 2773994 - RNA, 22 nt, Human
auuugcauggcuccagaaaugu

SEQ ID NO: 2773995 - RNA, 15 nt, Human
auuagcugugauuuu

SEQ ID NO: 2773996 - RNA, 22 nt, Human
auuagcugugauuuuuguugau

SEQ ID NO: 2773997 - RNA, 17 nt, Human
auuagcuuggggccagg

SEQ ID NO: 2773998 - RNA, 18 nt, Human
auuagcuuggggccaggg

SEQ ID NO: 2773999 - RNA, 12 nt, Human
auuagcuuugug

SEQ ID NO: 2774000 - RNA, 13 nt, Human
auuagcuuugugu

SEQ ID NO: 2774001 - RNA, 14 nt, Human
auuagcuuuguguu

SEQ ID NO: 2774002 - RNA, 15 nt, Human
auuagcuuuguguuu

SEQ ID NO: 2774003 - RNA, 21 nt, Human
auuagcuuuguguuugguuua

SEQ ID NO: 2774004 - RNA, 15 nt, Human
auuagcuuuuucauc

SEQ ID NO: 2774005 - RNA, 16 nt, Human
auuagcuuuuucaucc

SEQ ID NO: 2774006 - RNA, 16 nt, Human
auuaggguacauuuau

SEQ ID NO: 2774007 - RNA, 15 nt, Human
auuagggaugccucc

SEQ ID NO: 2774008 - RNA, 18 nt, Human
auuagggcaauuggaaca

SEQ ID NO: 2774009 - RNA, 23 nt, Human
auuagggcaauuggaacaaagug

SEQ ID NO: 2774010 - RNA, 22 nt, Human
auucacaaugaaaugcucuccu

SEQ ID NO: 2774011 - RNA, 18 nt, Human
auuagguuaacauuguug

SEQ ID NO: 2774012 - RNA, 16 nt, Human
auucacaauaaaagcu

SEQ ID NO: 2774013 - RNA, 11 nt, Human
auucacacugu

SEQ ID NO: 2774014 - RNA, 22 nt, Human
auucaauguuuaugcaaggaag

SEQ ID NO: 2774015 - RNA, 21 nt, Human
auucaaaucguuuauuucaca

SEQ ID NO: 2774016 - RNA, 14 nt, Human
auucaaauggguga

SEQ ID NO: 2774017 - RNA, 20 nt, Human
auucaaaugggugauauccu

SEQ ID NO: 2774018 - RNA, 23 nt, Human
auucaauguuuaugcaaggaagg

SEQ ID NO: 2774019 - RNA, 16 nt, Human
auuaugaguuugcuua

SEQ ID NO: 2774020 - RNA, 23 nt, Human
auuaugaugaaaaccuacauauu

SEQ ID NO: 2774021 - RNA, 16 nt, Human
auuaugauggaagaca

SEQ ID NO: 2774022 - RNA, 21 nt, Human
auuaugauuuggguuggggaa

SEQ ID NO: 2774023 - RNA, 22 nt, Human
auuaugcaauuagccucauagu

SEQ ID NO: 2774024 - RNA, 16 nt, Human
auuaugcacuaaauau

SEQ ID NO: 2774025 - RNA, 18 nt, Human
auuaugcacuaaauauga

SEQ ID NO: 2774026 - RNA, 16 nt, Human
auuacaggugugaacc

SEQ ID NO: 2774027 - RNA, 22 nt, Human
auuacaggcaccugccaccaug

SEQ ID NO: 2774028 - RNA, 16 nt, Human
auuacaggcaugugcc

SEQ ID NO: 2774029 - RNA, 20 nt, Human
auuacaggcaccugccacca

SEQ ID NO: 2774030 - RNA, 15 nt, Human
auuacagcuggagaa

SEQ ID NO: 2774031 - RNA, 15 nt, Human
auuacagaggaaguu

SEQ ID NO: 2774032 - RNA, 17 nt, Human
auuacagaggaaguuau

SEQ ID NO: 2774033 - RNA, 17 nt, Human
auuagcauucuggcagu

SEQ ID NO: 2774034 - RNA, 18 nt, Human
auuagcaaggucauuucu

SEQ ID NO: 2774035 - RNA, 19 nt, Human
auuagcaaggucauuucuu

SEQ ID NO: 2774036 - RNA, 21 nt, Human
auuagcaaggucauuucuuca

SEQ ID NO: 2774037 - RNA, 17 nt, Human
auuagcaguuugcuuug

SEQ ID NO: 2774038 - RNA, 22 nt, Human
auuagcaauugacugucacugu

SEQ ID NO: 2774039 - RNA, 14 nt, Human
auuagcacagauuu

SEQ ID NO: 2774040 - RNA, 15 nt, Human
auuagcacagauuuu

SEQ ID NO: 2774041 - RNA, 16 nt, Human
auuagcacagauuuua

SEQ ID NO: 2774042 - RNA, 17 nt, Human
auuagcacagauuuuaa

SEQ ID NO: 2774043 - RNA, 18 nt, Human
auuagcacagauuuuaau

SEQ ID NO: 2774044 - RNA, 23 nt, Human
auuagcacagauuuuaauuguca

SEQ ID NO: 2774045 - RNA, 23 nt, Human
auuagauuucucauuugccaaua

SEQ ID NO: 2774046 - RNA, 16 nt, Human
auuagauuuuauuuua

SEQ ID NO: 2774047 - RNA, 18 nt, Human
auuagauuuuauuuuacu

SEQ ID NO: 2774048 - RNA, 20 nt, Human
auuagauuuuauuuuacuau

SEQ ID NO: 2774049 - RNA, 22 nt, Human
auuagauuuuauuuuacuauug

SEQ ID NO: 2774050 - RNA, 13 nt, Human
auuagccaggauc

SEQ ID NO: 2774051 - RNA, 14 nt, Human
auuagccaggauca

SEQ ID NO: 2774052 - RNA, 15 nt, Human
auuagccaggaucau

SEQ ID NO: 2774053 - RNA, 21 nt, Human
auuagccaggaucauggugua

SEQ ID NO: 2774054 - RNA, 22 nt, Human
auuagccaggaucaugguguaa

SEQ ID NO: 2774055 - RNA, 13 nt, Human
auuacaaaugguu

SEQ ID NO: 2774056 - RNA, 10 nt, Human
auuacaaaua

SEQ ID NO: 2774057 - RNA, 22 nt, Human
auuacaaauauauagcacauca

SEQ ID NO: 2774058 - RNA, 16 nt, Human
auuaauuuuuuuucau

SEQ ID NO: 2774059 - RNA, 17 nt, Human
auuaauuuuuuuucauu

SEQ ID NO: 2774060 - RNA, 14 nt, Human
auuaauucuauaag

SEQ ID NO: 2774061 - RNA, 12 nt, Human
auuaauguguug

SEQ ID NO: 2774062 - RNA, 14 nt, Human
auuaauugcugcaa

SEQ ID NO: 2774063 - RNA, 13 nt, Human
auuaauuaaacau

SEQ ID NO: 2774064 - RNA, 16 nt, Human
auuaauuaaacauugu

SEQ ID NO: 2774065 - RNA, 12 nt, Human
auuaauguuucu

SEQ ID NO: 2774066 - RNA, 16 nt, Human
auuaauguuucuaucu

SEQ ID NO: 2774067 - RNA, 18 nt, Human
auuaauguuucuaucuga

SEQ ID NO: 2774068 - RNA, 20 nt, Human
auuaauguuucuaucugauu

SEQ ID NO: 2774069 - RNA, 22 nt, Human
auuaauguuucuaucugauuuu

SEQ ID NO: 2774070 - RNA, 13 nt, Human
auuaauucuauaa

SEQ ID NO: 2774071 - RNA, 19 nt, Human
auguuuggugcauagaacu

SEQ ID NO: 2774072 - RNA, 20 nt, Human
auguuuggugcauagaacug

SEQ ID NO: 2774073 - RNA, 21 nt, Human
auguuuggugcauagaacugg

SEQ ID NO: 2774074 - RNA, 14 nt, Human
auguuuguaaaacu

SEQ ID NO: 2774075 - RNA, 20 nt, Human
auguuugucucaguuggaaa

SEQ ID NO: 2774076 - RNA, 21 nt, Human
auguuugucucaguuggaaau

SEQ ID NO: 2774077 - RNA, 13 nt, Human
auguuuguggccu

SEQ ID NO: 2774078 - RNA, 10 nt, Human
auguuugugg

SEQ ID NO: 2774079 - RNA, 23 nt, Human
auguuugggagacugcugaguca

SEQ ID NO: 2774080 - RNA, 17 nt, Human
auguuuguggccucaga

SEQ ID NO: 2774081 - RNA, 16 nt, Human
auguuuguggccucag

SEQ ID NO: 2774082 - RNA, 15 nt, Human
auguuuguggccuca

SEQ ID NO: 2774083 - RNA, 14 nt, Human
auguuuguggccuc

SEQ ID NO: 2774084 - RNA, 14 nt, Human
auuguaaauaguau

SEQ ID NO: 2774085 - RNA, 14 nt, Human
auuguaaacaaacu

SEQ ID NO: 2774086 - RNA, 17 nt, Human
auuguaaacaaacucuu

SEQ ID NO: 2774087 - RNA, 15 nt, Human
auuguaaacaugugu

SEQ ID NO: 2774088 - RNA, 16 nt, Human
auuguaaacauguguu

SEQ ID NO: 2774089 - RNA, 19 nt, Human
auuguaaaccgcuuuggcc

SEQ ID NO: 2774090 - RNA, 13 nt, Human
auuguuauuuaua

SEQ ID NO: 2774091 - RNA, 17 nt, Human
auuguuauuuucaguga

SEQ ID NO: 2774092 - RNA, 14 nt, Human
auuguucaaacaau

SEQ ID NO: 2774093 - RNA, 15 nt, Human
auuguucaaacaaua

SEQ ID NO: 2774094 - RNA, 16 nt, Human
auuguucaaacaauau

SEQ ID NO: 2774095 - RNA, 19 nt, Human
auuguucaaacaauaucau

SEQ ID NO: 2774096 - RNA, 24 nt, Human
auuguucaaacaauaucauaucau

SEQ ID NO: 2774097 - RNA, 17 nt, Human
auuguuacucuuacgaa

SEQ ID NO: 2774098 - RNA, 18 nt, Human
auuguuagcuuccuuaag

SEQ ID NO: 2774099 - RNA, 18 nt, Human
auuguucaccuuuguagc

SEQ ID NO: 2774100 - RNA, 14 nt, Human
auugcugagccucu

SEQ ID NO: 2774101 - RNA, 16 nt, Human
auugcugagccucugc

SEQ ID NO: 2774102 - RNA, 22 nt, Human
auugcugagccucugcucccca

SEQ ID NO: 2774103 - RNA, 21 nt, Human
auugcugaagggcauucuuuc

SEQ ID NO: 2774104 - RNA, 22 nt, Human
auugcugaagggcauucuuucc

SEQ ID NO: 2774105 - RNA, 12 nt, Human
auugcuccuuga

SEQ ID NO: 2774106 - RNA, 23 nt, Human
auugcucaaguucauugaugacc

SEQ ID NO: 2774107 - RNA, 16 nt, Human
auugcucccuaagacu

SEQ ID NO: 2774108 - RNA, 18 nt, Human
auugcucccuaagacugu

SEQ ID NO: 2774109 - RNA, 19 nt, Human
auugcucccuaagacugug

SEQ ID NO: 2774110 - RNA, 18 nt, Human
auugcuugagcccaggag

SEQ ID NO: 2774111 - RNA, 17 nt, Human
auugcuugagcccagga

SEQ ID NO: 2774112 - RNA, 23 nt, Human
auugcugucaaguuccuuugggu

SEQ ID NO: 2774113 - RNA, 22 nt, Human
auugcuguaggaucuaaggcug

SEQ ID NO: 2774114 - RNA, 16 nt, Human
auugcuuccuccuccc

SEQ ID NO: 2774115 - RNA, 19 nt, Human
auugcuuccuccuccccaa

SEQ ID NO: 2774116 - RNA, 23 nt, Human
auugcugagccucugcuccccag

SEQ ID NO: 2774117 - RNA, 12 nt, Human
auugcugauuuu

SEQ ID NO: 2774118 - RNA, 13 nt, Human
auugcugauuuua

SEQ ID NO: 2774119 - RNA, 15 nt, Human
auugcugauuuuaau

SEQ ID NO: 2774120 - RNA, 17 nt, Human
auugcugauuuuaaugg

SEQ ID NO: 2774121 - RNA, 23 nt, Human
auugcugcaaggacauucuugua

SEQ ID NO: 2774122 - RNA, 14 nt, Human
auugcugccacuuu

SEQ ID NO: 2774123 - RNA, 21 nt, Human
auugcugccacuuuuuaacua

SEQ ID NO: 2774124 - RNA, 18 nt, Human
auuguugacaguucugaa

SEQ ID NO: 2774125 - RNA, 17 nt, Human
auuguugacaguucuga

SEQ ID NO: 2774126 - RNA, 19 nt, Human
auuguugagcuauugcugu

SEQ ID NO: 2774127 - RNA, 16 nt, Human
auuguugagcuauugc

SEQ ID NO: 2774128 - RNA, 21 nt, Human
auuguugacaguucugaagaa

SEQ ID NO: 2774129 - RNA, 22 nt, Human
auuguugacaguucugaagaau

SEQ ID NO: 2774130 - RNA, 21 nt, Human
auuguugaugggcacuugaga

SEQ ID NO: 2774131 - RNA, 14 nt, Human
auuguugcucccug

SEQ ID NO: 2774132 - RNA, 16 nt, Human
auuguugcucccugug

SEQ ID NO: 2774133 - RNA, 16 nt, Human
auuguugcugaaacuu

SEQ ID NO: 2774134 - RNA, 14 nt, Human
auuguuguauaauu

SEQ ID NO: 2774135 - RNA, 15 nt, Human
auuguuguauaauuu

SEQ ID NO: 2774136 - RNA, 15 nt, Human
auugagucaaauggu

SEQ ID NO: 2774137 - RNA, 14 nt, Human
auugaguuuguagg

SEQ ID NO: 2774138 - RNA, 16 nt, Human
auugaguuuguaggua

SEQ ID NO: 2774139 - RNA, 20 nt, Human
auugaguuuguagguaaaau

SEQ ID NO: 2774140 - RNA, 21 nt, Human
auugaguuuguagguaaaaug

SEQ ID NO: 2774141 - RNA, 18 nt, Human
auugauaaugcuuucaca

SEQ ID NO: 2774142 - RNA, 16 nt, Human
auugauaauugcauuc

SEQ ID NO: 2774143 - RNA, 15 nt, Human
auugauacucuuucu

SEQ ID NO: 2774144 - RNA, 21 nt, Human
auugauacucuuucuaaugcu

SEQ ID NO: 2774145 - RNA, 16 nt, Human
auugagguaaguuuuu

SEQ ID NO: 2774146 - RNA, 22 nt, Human
auugcuacuguccuacccaccc

SEQ ID NO: 2774147 - RNA, 20 nt, Human
auugcuacuguccuacccac

SEQ ID NO: 2774148 - RNA, 14 nt, Human
auugcuagauaaaa

SEQ ID NO: 2774149 - RNA, 16 nt, Human
auugcuagauaaaagc

SEQ ID NO: 2774150 - RNA, 17 nt, Human
auugcuagauaaaagcu

SEQ ID NO: 2774151 - RNA, 13 nt, Human
auugcuaguauuu

SEQ ID NO: 2774152 - RNA, 14 nt, Human
auugcuaguauuug

SEQ ID NO: 2774153 - RNA, 15 nt, Human
auugcuaguauuuga

SEQ ID NO: 2774154 - RNA, 16 nt, Human
auugcuaguauuugaa

SEQ ID NO: 2774155 - RNA, 17 nt, Human
auugcuaguauuugaau

SEQ ID NO: 2774156 - RNA, 18 nt, Human
auugcuaguauuugaauu

SEQ ID NO: 2774157 - RNA, 19 nt, Human
auugcuaguauuugaauua

SEQ ID NO: 2774158 - RNA, 20 nt, Human
auugcuaguauuugaauuaa

SEQ ID NO: 2774159 - RNA, 15 nt, Human
auugcuauuguguua

SEQ ID NO: 2774160 - RNA, 22 nt, Human
auugcuaucuggaggccuucca

SEQ ID NO: 2774161 - RNA, 23 nt, Human
auugcuaucuggaggccuuccag

SEQ ID NO: 2774162 - RNA, 15 nt, Human
auugcuauguuacua

SEQ ID NO: 2774163 - RNA, 18 nt, Human
auugcuauguuacuauuu

SEQ ID NO: 2774164 - RNA, 20 nt, Human
auugcuauguuacuauuuuc

SEQ ID NO: 2774165 - RNA, 15 nt, Human
auugcuacuguccua

SEQ ID NO: 2774166 - RNA, 14 nt, Human
auugcuacuguccu

SEQ ID NO: 2774167 - RNA, 12 nt, Human
auucuuucccag

SEQ ID NO: 2774168 - RNA, 15 nt, Human
auucuuucccaguga

SEQ ID NO: 2774169 - RNA, 20 nt, Human
auucuuucccagugagucuc

SEQ ID NO: 2774170 - RNA, 18 nt, Human
auucuugaaggaaaauga

SEQ ID NO: 2774171 - RNA, 19 nt, Human
auucuucuguguuuauaaa

SEQ ID NO: 2774172 - RNA, 15 nt, Human
auucuugaaggaaaa

SEQ ID NO: 2774173 - RNA, 15 nt, Human
auucuucuguguuua

SEQ ID NO: 2774174 - RNA, 14 nt, Human
auucuucuguguuu

SEQ ID NO: 2774175 - RNA, 20 nt, Human
auucuugaaagaauuuuccu

SEQ ID NO: 2774176 - RNA, 14 nt, Human
auucuucugcuuca

SEQ ID NO: 2774177 - RNA, 13 nt, Human
auucuucuguguu

SEQ ID NO: 2774178 - RNA, 13 nt, Human
auucuucuguccu

SEQ ID NO: 2774179 - RNA, 15 nt, Human
auucuucuguccuga

SEQ ID NO: 2774180 - RNA, 12 nt, Human
auucuucugcuu

SEQ ID NO: 2774181 - RNA, 11 nt, Human
auucuucugcu

SEQ ID NO: 2774182 - RNA, 20 nt, Human
auucugaccacccuucucau

SEQ ID NO: 2774183 - RNA, 13 nt, Human
auucugaauauuu

SEQ ID NO: 2774184 - RNA, 16 nt, Human
auucucuuuuaucugu

SEQ ID NO: 2774185 - RNA, 17 nt, Human
auucucuuuuaucuguu

SEQ ID NO: 2774186 - RNA, 19 nt, Human
auucucuuuuaucuguuua

SEQ ID NO: 2774187 - RNA, 14 nt, Human
auucucuuucaaag

SEQ ID NO: 2774188 - RNA, 22 nt, Human
auucucuuguauaagauccuag

SEQ ID NO: 2774189 - RNA, 18 nt, Human
auucauaguaacuucuua

SEQ ID NO: 2774190 - RNA, 20 nt, Human
auucucuuguauaagauccu

SEQ ID NO: 2774191 - RNA, 17 nt, Human
auucauaguaacuucuu

SEQ ID NO: 2774192 - RNA, 16 nt, Human
auucauaguaacuucu

SEQ ID NO: 2774193 - RNA, 15 nt, Human
auucugaagcaacau

SEQ ID NO: 2774194 - RNA, 19 nt, Human
auucugaagcaacauuuua

SEQ ID NO: 2774195 - RNA, 12 nt, Human
cacagccucuga

SEQ ID NO: 2774196 - RNA, 13 nt, Human
cacagccucugac

SEQ ID NO: 2774197 - RNA, 14 nt, Human
cacagccucugacc

SEQ ID NO: 2774198 - RNA, 15 nt, Human
cacagccucugaccc

SEQ ID NO: 2774199 - RNA, 17 nt, Human
cacagccucugaccccu

SEQ ID NO: 2774200 - RNA, 20 nt, Human
cacagccucugaccccuccu

SEQ ID NO: 2774201 - RNA, 14 nt, Human
cacagccugggccc

SEQ ID NO: 2774202 - RNA, 12 nt, Human
cacagccugggc

SEQ ID NO: 2774203 - RNA, 22 nt, Human
cacagccucugaccccuccuca

SEQ ID NO: 2774204 - RNA, 23 nt, Human
cacagccucugaccccuccucac

SEQ ID NO: 2774205 - RNA, 19 nt, Human
cacagcgagggcagcugcu

SEQ ID NO: 2774206 - RNA, 18 nt, Human
cacagcgagggcagcugc

SEQ ID NO: 2774207 - RNA, 23 nt, Human
cacaggcccuuccucuccacugc

SEQ ID NO: 2774208 - RNA, 22 nt, Human
cacaggcccuuccucuccacug

SEQ ID NO: 2774209 - RNA, 17 nt, Human
cacagcgagggcagcug

SEQ ID NO: 2774210 - RNA, 16 nt, Human
cacagcgagggcagcu

SEQ ID NO: 2774211 - RNA, 15 nt, Human
cacagcgagggcagc

SEQ ID NO: 2774212 - RNA, 21 nt, Human
cacagccugggccccagcucg

SEQ ID NO: 2774213 - RNA, 19 nt, Human
cacagccugggccccagcu

SEQ ID NO: 2774214 - RNA, 14 nt, Human
cacagcgagggcag

SEQ ID NO: 2774215 - RNA, 17 nt, Human
cacaggggaggugauag

SEQ ID NO: 2774216 - RNA, 14 nt, Human
cacaggugugagcc

SEQ ID NO: 2774217 - RNA, 16 nt, Human
cacaggugugguguaa

SEQ ID NO: 2774218 - RNA, 19 nt, Human
cacaggugugguguaauuu

SEQ ID NO: 2774219 - RNA, 18 nt, Human
cacaggugggcuucccag

SEQ ID NO: 2774220 - RNA, 16 nt, Human
cacagguggugucacu

SEQ ID NO: 2774221 - RNA, 18 nt, Human
cacagguggugucacugu

SEQ ID NO: 2774222 - RNA, 20 nt, Human
cacagguggugucacugucc

SEQ ID NO: 2774223 - RNA, 21 nt, Human
cacagguggugucacuguccc

SEQ ID NO: 2774224 - RNA, 13 nt, Human
cacaggugucagc

SEQ ID NO: 2774225 - RNA, 14 nt, Human
cacaggugucagcc

SEQ ID NO: 2774226 - RNA, 16 nt, Human
cacaggugucagccau

SEQ ID NO: 2774227 - RNA, 17 nt, Human
cacaggugucagccauu

SEQ ID NO: 2774228 - RNA, 21 nt, Human
cacaguauuacuucugcuaca

SEQ ID NO: 2774229 - RNA, 20 nt, Human
cacaguauuacuucugcuac

SEQ ID NO: 2774230 - RNA, 13 nt, Human
cacaguaaauauc

SEQ ID NO: 2774231 - RNA, 17 nt, Human
cacaguacagcaugugc

SEQ ID NO: 2774232 - RNA, 18 nt, Human
cacaguacagcaugugcc

SEQ ID NO: 2774233 - RNA, 19 nt, Human
cacaguacagcaugugccu

SEQ ID NO: 2774234 - RNA, 20 nt, Human
cacaguacagcaugugccuu

SEQ ID NO: 2774235 - RNA, 16 nt, Human
cacaguacauaauaca

SEQ ID NO: 2774236 - RNA, 23 nt, Human
cacaguacauaauacacuugccc

SEQ ID NO: 2774237 - RNA, 15 nt, Human
cacaguagagccagc

SEQ ID NO: 2774238 - RNA, 14 nt, Human
cacaguagagccag

SEQ ID NO: 2774239 - RNA, 19 nt, Human
cacagguucaugccaccau

SEQ ID NO: 2774240 - RNA, 15 nt, Human
cacagguuggaagag

SEQ ID NO: 2774241 - RNA, 16 nt, Human
cacagguuggaagaga

SEQ ID NO: 2774242 - RNA, 18 nt, Human
cacagguuggaagagaau

SEQ ID NO: 2774243 - RNA, 20 nt, Human
cacagguuggaagagaauca

SEQ ID NO: 2774244 - RNA, 21 nt, Human
cacagguuggaagagaaucac

SEQ ID NO: 2774245 - RNA, 15 nt, Human
cacagguguuuauac

SEQ ID NO: 2774246 - RNA, 20 nt, Human
cacagguucacgugcagcuc

SEQ ID NO: 2774247 - RNA, 17 nt, Human
cacaguagagccagcuu

SEQ ID NO: 2774248 - RNA, 16 nt, Human
cacaguagagccagcu

SEQ ID NO: 2774249 - RNA, 14 nt, Human
cacagucaaaauaa

SEQ ID NO: 2774250 - RNA, 16 nt, Human
cacagucaaaauaauu

SEQ ID NO: 2774251 - RNA, 17 nt, Human
cacagucaaaauaauuc

SEQ ID NO: 2774252 - RNA, 22 nt, Human
cacagucaccuucucggcaacu

SEQ ID NO: 2774253 - RNA, 16 nt, Human
cacagucacugaugua

SEQ ID NO: 2774254 - RNA, 19 nt, Human
cacagucacugauguacaa

SEQ ID NO: 2774255 - RNA, 13 nt, Human
cacaguccaggaa

SEQ ID NO: 2774256 - RNA, 16 nt, Human
cacaguccaggaacaa

SEQ ID NO: 2774257 - RNA, 18 nt, Human
cacaguccaggaacaagc

SEQ ID NO: 2774258 - RNA, 22 nt, Human
cacaguccaggaacaagcuaau

SEQ ID NO: 2774259 - RNA, 17 nt, Human
cacagucccacugugca

SEQ ID NO: 2774260 - RNA, 13 nt, Human
cacacaucaggag

SEQ ID NO: 2774261 - RNA, 14 nt, Human
cacacauccacccc

SEQ ID NO: 2774262 - RNA, 16 nt, Human
cacacauccaccccag

SEQ ID NO: 2774263 - RNA, 12 nt, Human
cacacaucccag

SEQ ID NO: 2774264 - RNA, 13 nt, Human
cacacaucccagc

SEQ ID NO: 2774265 - RNA, 14 nt, Human
cacacaucccagcc

SEQ ID NO: 2774266 - RNA, 16 nt, Human
cacacaucccagccca

SEQ ID NO: 2774267 - RNA, 17 nt, Human
cacacaucccagcccaa

SEQ ID NO: 2774268 - RNA, 23 nt, Human
cacacagugagucgaggacaggg

SEQ ID NO: 2774269 - RNA, 21 nt, Human
cacacagugagucgaggacag

SEQ ID NO: 2774270 - RNA, 15 nt, Human
cacacauacacacac

SEQ ID NO: 2774271 - RNA, 20 nt, Human
cacacauauauauuacaagg

SEQ ID NO: 2774272 - RNA, 22 nt, Human
cacacauagauuaauggcacug

SEQ ID NO: 2774273 - RNA, 23 nt, Human
cacacauagauuaauggcacuga

SEQ ID NO: 2774274 - RNA, 23 nt, Human
cacacauauaaacaucacacaca

SEQ ID NO: 2774275 - RNA, 21 nt, Human
cacacauauaaacaucacaca

SEQ ID NO: 2774276 - RNA, 22 nt, Human
cacacaggggaggugauagcau

SEQ ID NO: 2774277 - RNA, 16 nt, Human
cacacagcucuguccu

SEQ ID NO: 2774278 - RNA, 23 nt, Human
cacacaguauuacuucugcuaca

SEQ ID NO: 2774279 - RNA, 20 nt, Human
cacacaguauuacuucugcu

SEQ ID NO: 2774280 - RNA, 18 nt, Human
cacacagugagucgagga

SEQ ID NO: 2774281 - RNA, 23 nt, Human
cacacagggucugcaaggucuuu

SEQ ID NO: 2774282 - RNA, 18 nt, Human
cacacagguggugucacu

SEQ ID NO: 2774283 - RNA, 20 nt, Human
cacacagguggugucacugu

SEQ ID NO: 2774284 - RNA, 22 nt, Human
cacacagguggugucacugucc

SEQ ID NO: 2774285 - RNA, 14 nt, Human
cacacagguguuga

SEQ ID NO: 2774286 - RNA, 13 nt, Human
cacacaugcacac

SEQ ID NO: 2774287 - RNA, 14 nt, Human
cacacaugcacaca

SEQ ID NO: 2774288 - RNA, 20 nt, Human
cacagaaacacugccuuuuu

SEQ ID NO: 2774289 - RNA, 19 nt, Human
cacagaaacacugccuuuu

SEQ ID NO: 2774290 - RNA, 18 nt, Human
cacagaaacacugccuuu

SEQ ID NO: 2774291 - RNA, 17 nt, Human
cacagaaacacugccuu

SEQ ID NO: 2774292 - RNA, 11 nt, Human
cacagaaacac

SEQ ID NO: 2774293 - RNA, 15 nt, Human
cacagaaacacugcc

SEQ ID NO: 2774294 - RNA, 16 nt, Human
cacagaaacacugccu

SEQ ID NO: 2774295 - RNA, 11 nt, Human
cacagccucug

SEQ ID NO: 2774296 - RNA, 23 nt, Human
caauuuauuaaaaugauuguaaa

SEQ ID NO: 2774297 - RNA, 14 nt, Human
caauuuauuaaaau

SEQ ID NO: 2774298 - RNA, 22 nt, Human
caauuuauuaaaaugauuguaa

SEQ ID NO: 2774299 - RNA, 13 nt, Human
caauggauauuug

SEQ ID NO: 2774300 - RNA, 13 nt, Human
caauggauuugau

SEQ ID NO: 2774301 - RNA, 17 nt, Human
caauggauuugaugcug

SEQ ID NO: 2774302 - RNA, 19 nt, Human
caauggauuugaugcuguu

SEQ ID NO: 2774303 - RNA, 22 nt, Human
caauggauuugaugcuguuuga

SEQ ID NO: 2774304 - RNA, 20 nt, Human
caauggagacugucucaaga

SEQ ID NO: 2774305 - RNA, 12 nt, Human
caauggcagccu

SEQ ID NO: 2774306 - RNA, 11 nt, Human
caauggcagcc

SEQ ID NO: 2774307 - RNA, 11 nt, Human
caauuuaaaug

SEQ ID NO: 2774308 - RNA, 14 nt, Human
caauuuaaauguua

SEQ ID NO: 2774309 - RNA, 13 nt, Human
caauuuaaauguu

SEQ ID NO: 2774310 - RNA, 20 nt, Human
cacacagcucuguccuggga

SEQ ID NO: 2774311 - RNA, 17 nt, Human
cacacagcucuguccug

SEQ ID NO: 2774312 - RNA, 15 nt, Human
caaguccaauaagac

SEQ ID NO: 2774313 - RNA, 18 nt, Human
caaguccaauaagacacu

SEQ ID NO: 2774314 - RNA, 17 nt, Human
caagucaugugcauuuc

SEQ ID NO: 2774315 - RNA, 18 nt, Human
caagucacaugcguaaac

SEQ ID NO: 2774316 - RNA, 14 nt, Human
caagucaaucauuu

SEQ ID NO: 2774317 - RNA, 15 nt, Human
caagucaaucauuuc

SEQ ID NO: 2774318 - RNA, 16 nt, Human
caagucaaucauuucu

SEQ ID NO: 2774319 - RNA, 17 nt, Human
caagucaaucauuucuc

SEQ ID NO: 2774320 - RNA, 23 nt, Human
caagucaaaauauuuuuaaaaga

SEQ ID NO: 2774321 - RNA, 18 nt, Human
caaguauagccuauggca

SEQ ID NO: 2774322 - RNA, 22 nt, Human
caaguauccaaccaacuugguu

SEQ ID NO: 2774323 - RNA, 11 nt, Human
caaguauuuug

SEQ ID NO: 2774324 - RNA, 19 nt, Human
caaguaugaauaaagacac

SEQ ID NO: 2774325 - RNA, 21 nt, Human
caaguaugaauaaagacaccu

SEQ ID NO: 2774326 - RNA, 16 nt, Human
caaguaugaauaaaga

SEQ ID NO: 2774327 - RNA, 19 nt, Human
caaggcacucuagauucca

SEQ ID NO: 2774328 - RNA, 20 nt, Human
caaguauaauuuuuuguaau

SEQ ID NO: 2774329 - RNA, 12 nt, Human
caagcucucuug

SEQ ID NO: 2774330 - RNA, 14 nt, Human
caagcucucuugcc

SEQ ID NO: 2774331 - RNA, 12 nt, Human
caaggcacugcc

SEQ ID NO: 2774332 - RNA, 13 nt, Human
caaggcacugccu

SEQ ID NO: 2774333 - RNA, 16 nt, Human
caaggcacuguacuag

SEQ ID NO: 2774334 - RNA, 15 nt, Human
caaggcacuguacua

SEQ ID NO: 2774335 - RNA, 14 nt, Human
caaggcacugccug

SEQ ID NO: 2774336 - RNA, 15 nt, Human
caaggcacugccuga

SEQ ID NO: 2774337 - RNA, 16 nt, Human
caaggcacugccugau

SEQ ID NO: 2774338 - RNA, 18 nt, Human
caaggcacugccugaugg

SEQ ID NO: 2774339 - RNA, 14 nt, Human
caagcucugcuccu

SEQ ID NO: 2774340 - RNA, 13 nt, Human
caagcucugcucc

SEQ ID NO: 2774341 - RNA, 18 nt, Human
caagcucaggaccaggca

SEQ ID NO: 2774342 - RNA, 19 nt, Human
caagcucuaucaccaagga

SEQ ID NO: 2774343 - RNA, 16 nt, Human
caagcuauuccuuucc

SEQ ID NO: 2774344 - RNA, 17 nt, Human
caagcuauuccuuuccc

SEQ ID NO: 2774345 - RNA, 18 nt, Human
caagcuauuccuuucccu

SEQ ID NO: 2774346 - RNA, 19 nt, Human
caagcuauuccuuucccuu

SEQ ID NO: 2774347 - RNA, 20 nt, Human
caagcuauuccuuucccuuc

SEQ ID NO: 2774348 - RNA, 21 nt, Human
caagcuauuccuuucccuucc

SEQ ID NO: 2774349 - RNA, 23 nt, Human
caagcuauuccuuucccuuccuc

SEQ ID NO: 2774350 - RNA, 15 nt, Human
caagcuauccuggcu

SEQ ID NO: 2774351 - RNA, 16 nt, Human
caagcuauccuggcuc

SEQ ID NO: 2774352 - RNA, 15 nt, Human
caagcuaucuaaagu

SEQ ID NO: 2774353 - RNA, 16 nt, Human
caagcuaucuaaaguu

SEQ ID NO: 2774354 - RNA, 17 nt, Human
caagcuaucuaaaguuu

SEQ ID NO: 2774355 - RNA, 21 nt, Human
caagcuaucuaaaguuuguua

SEQ ID NO: 2774356 - RNA, 21 nt, Human
caagcuaauugggaguccagg

SEQ ID NO: 2774357 - RNA, 23 nt, Human
caagcuaauugggaguccaggca

SEQ ID NO: 2774358 - RNA, 16 nt, Human
caagcucaaagcgugg

SEQ ID NO: 2774359 - RNA, 16 nt, Human
caagcucaggaccagg

SEQ ID NO: 2774360 - RNA, 18 nt, Human
caagucccugacucucug

SEQ ID NO: 2774361 - RNA, 17 nt, Human
caagucccccaagaccu

SEQ ID NO: 2774362 - RNA, 21 nt, Human
caagucccugacucucuguga

SEQ ID NO: 2774363 - RNA, 20 nt, Human
caagucccugacucucugug

SEQ ID NO: 2774364 - RNA, 14 nt, Human
caagcuaagcacug

SEQ ID NO: 2774365 - RNA, 13 nt, Human
caagcuaaccuua

SEQ ID NO: 2774366 - RNA, 22 nt, Human
caagcuaaccuuauccugcauu

SEQ ID NO: 2774367 - RNA, 16 nt, Human
caagcuaagcacugcc

SEQ ID NO: 2774368 - RNA, 22 nt, Human
caagcuaagcacugccacuggg

SEQ ID NO: 2774369 - RNA, 14 nt, Human
cacuaggcuucugg

SEQ ID NO: 2774370 - RNA, 16 nt, Human
cacuccagccugggug

SEQ ID NO: 2774371 - RNA, 15 nt, Human
cacuccagccugggu

SEQ ID NO: 2774372 - RNA, 23 nt, Human
cacuccagccugggcgacagagc

SEQ ID NO: 2774373 - RNA, 15 nt, Human
cacuccagcugggau

SEQ ID NO: 2774374 - RNA, 12 nt, Human
cacuccagcugg

SEQ ID NO: 2774375 - RNA, 11 nt, Human
cacuccagcug

SEQ ID NO: 2774376 - RNA, 17 nt, Human
cacuagguucaauuccc

SEQ ID NO: 2774377 - RNA, 17 nt, Human
cacuaguaaguaauuau

SEQ ID NO: 2774378 - RNA, 21 nt, Human
cacuaguaaguaauuaugcac

SEQ ID NO: 2774379 - RNA, 16 nt, Human
cacucauugcugagcc

SEQ ID NO: 2774380 - RNA, 19 nt, Human
cacucauugcugagccucu

SEQ ID NO: 2774381 - RNA, 21 nt, Human
cacucauugcugagccucugc

SEQ ID NO: 2774382 - RNA, 23 nt, Human
cacucauugcugagccucugcuc

SEQ ID NO: 2774383 - RNA, 22 nt, Human
cacucauuuucuauaacagaua

SEQ ID NO: 2774384 - RNA, 16 nt, Human
cacuccaaccuaaccu

SEQ ID NO: 2774385 - RNA, 21 nt, Human
cacuccaaccuaaccuguguc

SEQ ID NO: 2774386 - RNA, 22 nt, Human
cacuccaaccuaaccugugucu

SEQ ID NO: 2774387 - RNA, 23 nt, Human
cacuccaaccuaaccugugucug

SEQ ID NO: 2774388 - RNA, 21 nt, Human
cacuccaaugucugcugagga

SEQ ID NO: 2774389 - RNA, 23 nt, Human
cacugacacugguauuccugccu

SEQ ID NO: 2774390 - RNA, 13 nt, Human
cacugaauuuaua

SEQ ID NO: 2774391 - RNA, 14 nt, Human
cacugaauuuauaa

SEQ ID NO: 2774392 - RNA, 15 nt, Human
cacugaauuuauaaa

SEQ ID NO: 2774393 - RNA, 19 nt, Human
cacugaauuuauaaaguac

SEQ ID NO: 2774394 - RNA, 14 nt, Human
cacugaauuuugga

SEQ ID NO: 2774395 - RNA, 13 nt, Human
cacugacacaaag

SEQ ID NO: 2774396 - RNA, 14 nt, Human
cacugacacaaagg

SEQ ID NO: 2774397 - RNA, 15 nt, Human
cacugacacaaagga

SEQ ID NO: 2774398 - RNA, 13 nt, Human
cacugacacuggu

SEQ ID NO: 2774399 - RNA, 20 nt, Human
cacugacacugguauuccug

SEQ ID NO: 2774400 - RNA, 15 nt, Human
cacugaauuaaucau

SEQ ID NO: 2774401 - RNA, 14 nt, Human
cacucuuuuauaca

SEQ ID NO: 2774402 - RNA, 15 nt, Human
cacucuuuuauacaa

SEQ ID NO: 2774403 - RNA, 23 nt, Human
cacucuuuugcuuuauuccagaa

SEQ ID NO: 2774404 - RNA, 16 nt, Human
cacucuuuauagugca

SEQ ID NO: 2774405 - RNA, 20 nt, Human
cacucuuuauagugcacaaa

SEQ ID NO: 2774406 - RNA, 15 nt, Human
cacucuuuugcuuua

SEQ ID NO: 2774407 - RNA, 12 nt, Human
cacugcagccuc

SEQ ID NO: 2774408 - RNA, 20 nt, Human
cacugcacuccagccugggc

SEQ ID NO: 2774409 - RNA, 17 nt, Human
cacugcacuccagccug

SEQ ID NO: 2774410 - RNA, 15 nt, Human
cacugcacuccaggc

SEQ ID NO: 2774411 - RNA, 21 nt, Human
cacugcacucaaccuuaagac

SEQ ID NO: 2774412 - RNA, 19 nt, Human
cacugcacuccagccuggg

SEQ ID NO: 2774413 - RNA, 18 nt, Human
cacugcacuccagccugg

SEQ ID NO: 2774414 - RNA, 16 nt, Human
cacugcacuccagccu

SEQ ID NO: 2774415 - RNA, 19 nt, Human
cacugcacuauagccuagg

SEQ ID NO: 2774416 - RNA, 17 nt, Human
cacugcacucaaccuua

SEQ ID NO: 2774417 - RNA, 14 nt, Human
cacuggggccuaca

SEQ ID NO: 2774418 - RNA, 16 nt, Human
cacuggggccuacagc

SEQ ID NO: 2774419 - RNA, 18 nt, Human
cacugggaaacagaggcu

SEQ ID NO: 2774420 - RNA, 13 nt, Human
cacugggaaacag

SEQ ID NO: 2774421 - RNA, 16 nt, Human
cacugcauccuccgcc

SEQ ID NO: 2774422 - RNA, 14 nt, Human
cacugcauccuccg

SEQ ID NO: 2774423 - RNA, 13 nt, Human
cacugcagccuca

SEQ ID NO: 2774424 - RNA, 16 nt, Human
cacugcauaccaaccu

SEQ ID NO: 2774425 - RNA, 20 nt, Human
cacugccagcagcagcaggu

SEQ ID NO: 2774426 - RNA, 19 nt, Human
cacugccagcagcagcagg

SEQ ID NO: 2774427 - RNA, 16 nt, Human
cacugccagcagcagc

SEQ ID NO: 2774428 - RNA, 14 nt, Human
cacugccagcagca

SEQ ID NO: 2774429 - RNA, 22 nt, Human
cacugccagcagcagcagguga

SEQ ID NO: 2774430 - RNA, 21 nt, Human
cacugccagcagcagcaggug

SEQ ID NO: 2774431 - RNA, 13 nt, Human
cacugccagcagc

SEQ ID NO: 2774432 - RNA, 12 nt, Human
cacugccagcag

SEQ ID NO: 2774433 - RNA, 20 nt, Human
cacugccacacucuccauca

SEQ ID NO: 2774434 - RNA, 12 nt, Human
cacugccacugg

SEQ ID NO: 2774435 - RNA, 14 nt, Human
cacugccacuuugc

SEQ ID NO: 2774436 - RNA, 18 nt, Human
cacugccacuuugcacau

SEQ ID NO: 2774437 - RNA, 19 nt, Human
cacugccacuuugcacauu

SEQ ID NO: 2774438 - RNA, 20 nt, Human
cacugccacuuugcacauuu

SEQ ID NO: 2774439 - RNA, 22 nt, Human
cacugccacuuugcacauuuug

SEQ ID NO: 2774440 - RNA, 19 nt, Human
cacugccagagauaaacua

SEQ ID NO: 2774441 - RNA, 18 nt, Human
cacugcauccuccgccuc

SEQ ID NO: 2774442 - RNA, 18 nt, Human
cacugcaugagcuuuuau

SEQ ID NO: 2774443 - RNA, 22 nt, Human
cacugcaugagcuuuuauacua

SEQ ID NO: 2774444 - RNA, 19 nt, Human
cacugcauggcucccacag

SEQ ID NO: 2774445 - RNA, 18 nt, Human
cacugcauuauucucuuu

SEQ ID NO: 2774446 - RNA, 19 nt, Human
cacugcauuauucucuuuu

SEQ ID NO: 2774447 - RNA, 15 nt, Human
cacuuguuccagcuc

SEQ ID NO: 2774448 - RNA, 13 nt, Human
cacuuguuccagc

SEQ ID NO: 2774449 - RNA, 17 nt, Human
cacuuguuccagcucuu

SEQ ID NO: 2774450 - RNA, 16 nt, Human
cacuuguuccagcucu

SEQ ID NO: 2774451 - RNA, 20 nt, Human
cacuugucacugacacaaag

SEQ ID NO: 2774452 - RNA, 22 nt, Human
cacuugucacugacacaaagga

SEQ ID NO: 2774453 - RNA, 14 nt, Human
cacuuguaggauaa

SEQ ID NO: 2774454 - RNA, 23 nt, Human
cacuuguaggauaagugaaaugg

SEQ ID NO: 2774455 - RNA, 12 nt, Human
cacuuguauaaa

SEQ ID NO: 2774456 - RNA, 15 nt, Human
cacuuguauaaaugu

SEQ ID NO: 2774457 - RNA, 19 nt, Human
cacuuguauaaauguauau

SEQ ID NO: 2774458 - RNA, 20 nt, Human
cacuuguauaaauguauaua

SEQ ID NO: 2774459 - RNA, 21 nt, Human
cacuuguauauacgcaucuau

SEQ ID NO: 2774460 - RNA, 19 nt, Human
cacuuguauccucugguuc

SEQ ID NO: 2774461 - RNA, 13 nt, Human
cacuuguauauac

SEQ ID NO: 2774462 - RNA, 16 nt, Human
cacuuguauauacgca

SEQ ID NO: 2774463 - RNA, 17 nt, Human
cacuuguacaaaauaaa

SEQ ID NO: 2774464 - RNA, 20 nt, Human
cacuuauuccccauucuucc

SEQ ID NO: 2774465 - RNA, 24 nt, Human
cacuuagaaauugcauuuccugac

SEQ ID NO: 2774466 - RNA, 23 nt, Human
cacuuaggaacguaaucgugucc

SEQ ID NO: 2774467 - RNA, 15 nt, Human
cacuuagcuaucaga

SEQ ID NO: 2774468 - RNA, 15 nt, Human
cacuuaggcuuugua

SEQ ID NO: 2774469 - RNA, 23 nt, Human
cacuuauaagguguuuucugugu

SEQ ID NO: 2774470 - RNA, 19 nt, Human
cacuuaucauuagaaucuu

SEQ ID NO: 2774471 - RNA, 18 nt, Human
cacugguguuuaggugaa

SEQ ID NO: 2774472 - RNA, 20 nt, Human
cacuggugugaccugagggc

SEQ ID NO: 2774473 - RNA, 19 nt, Human
cacugggguccagggagca

SEQ ID NO: 2774474 - RNA, 23 nt, Human
cacugguggcccgacagccuggc

SEQ ID NO: 2774475 - RNA, 19 nt, Human
cacuggugugaccugaggg

SEQ ID NO: 2774476 - RNA, 12 nt, Human
cacugguucuca

SEQ ID NO: 2774477 - RNA, 13 nt, Human
cacuuacauauau

SEQ ID NO: 2774478 - RNA, 19 nt, Human
cacuuacauauauuuuuaa

SEQ ID NO: 2774479 - RNA, 11 nt, Human
caccccagagc

SEQ ID NO: 2774480 - RNA, 12 nt, Human
caccccagagcc

SEQ ID NO: 2774481 - RNA, 14 nt, Human
caccccagagccac

SEQ ID NO: 2774482 - RNA, 15 nt, Human
caccccagagccaca

SEQ ID NO: 2774483 - RNA, 16 nt, Human
caccccagagccacac

SEQ ID NO: 2774484 - RNA, 17 nt, Human
caccccagagccacaca

SEQ ID NO: 2774485 - RNA, 18 nt, Human
caccccagagccacacau

SEQ ID NO: 2774486 - RNA, 19 nt, Human
caccccagagccacacaug

SEQ ID NO: 2774487 - RNA, 22 nt, Human
caccccagagccacacaugggc

SEQ ID NO: 2774488 - RNA, 18 nt, Human
caccccacgccuuauccc

SEQ ID NO: 2774489 - RNA, 22 nt, Human
caccccacugcaauccugucuu

SEQ ID NO: 2774490 - RNA, 14 nt, Human
caccccaccugcag

SEQ ID NO: 2774491 - RNA, 14 nt, Human
caccccacccuucc

SEQ ID NO: 2774492 - RNA, 15 nt, Human
caccccacccucccu

SEQ ID NO: 2774493 - RNA, 19 nt, Human
caccccacccucccuggag

SEQ ID NO: 2774494 - RNA, 20 nt, Human
caccccacccucccuggagu

SEQ ID NO: 2774495 - RNA, 12 nt, Human
caccccaccugc

SEQ ID NO: 2774496 - RNA, 11 nt, Human
caccccaccug

SEQ ID NO: 2774497 - RNA, 13 nt, Human
caccccacccucc

SEQ ID NO: 2774498 - RNA, 17 nt, Human
cacccuccaccucuuca

SEQ ID NO: 2774499 - RNA, 14 nt, Human
cacccuccaccucu

SEQ ID NO: 2774500 - RNA, 20 nt, Human
cacccucccccgccacuccu

SEQ ID NO: 2774501 - RNA, 13 nt, Human
cacccucccugga

SEQ ID NO: 2774502 - RNA, 16 nt, Human
cacccuggggagaaag

SEQ ID NO: 2774503 - RNA, 15 nt, Human
cacccuggggagaaa

SEQ ID NO: 2774504 - RNA, 14 nt, Human
cacccucuuccugu

SEQ ID NO: 2774505 - RNA, 15 nt, Human
cacccucuuccugug

SEQ ID NO: 2774506 - RNA, 12 nt, Human
cacccucuggcc

SEQ ID NO: 2774507 - RNA, 13 nt, Human
cacccucuggccg

SEQ ID NO: 2774508 - RNA, 13 nt, Human
cacccucuguacc

SEQ ID NO: 2774509 - RNA, 16 nt, Human
cacccucccuggagug

SEQ ID NO: 2774510 - RNA, 11 nt, Human
cacccuccugg

SEQ ID NO: 2774511 - RNA, 12 nt, Human
cacccuccuggc

SEQ ID NO: 2774512 - RNA, 18 nt, Human
cacccuccuggccucaga

SEQ ID NO: 2774513 - RNA, 19 nt, Human
cacccuccuggccucagac

SEQ ID NO: 2774514 - RNA, 22 nt, Human
cacccuccuggccucagacugc

SEQ ID NO: 2774515 - RNA, 14 nt, Human
cacccucccuggag

SEQ ID NO: 2774516 - RNA, 15 nt, Human
cacccucccuggagu

SEQ ID NO: 2774517 - RNA, 15 nt, Human
caccucaggccaggu

SEQ ID NO: 2774518 - RNA, 23 nt, Human
caccugccucggccucccaaagu

SEQ ID NO: 2774519 - RNA, 10 nt, Human
caccugccug

SEQ ID NO: 2774520 - RNA, 11 nt, Human
caccugccugc

SEQ ID NO: 2774521 - RNA, 14 nt, Human
caccugccugcguc

SEQ ID NO: 2774522 - RNA, 15 nt, Human
caccugccugcgucu

SEQ ID NO: 2774523 - RNA, 16 nt, Human
caccugccugcgucuu

SEQ ID NO: 2774524 - RNA, 20 nt, Human
caccugccugcgucuuccgc

SEQ ID NO: 2774525 - RNA, 21 nt, Human
caccugccugcgucuuccgcc

SEQ ID NO: 2774526 - RNA, 23 nt, Human
caccugccugcgucuuccgcccc

SEQ ID NO: 2774527 - RNA, 11 nt, Human
caccugccugg

SEQ ID NO: 2774528 - RNA, 12 nt, Human
caccugccuggc

SEQ ID NO: 2774529 - RNA, 13 nt, Human
caccugccuggcc

SEQ ID NO: 2774530 - RNA, 14 nt, Human
caccugccuggccg

SEQ ID NO: 2774531 - RNA, 16 nt, Human
caccugccuggccggc

SEQ ID NO: 2774532 - RNA, 18 nt, Human
caccugccuggccggcca

SEQ ID NO: 2774533 - RNA, 19 nt, Human
caccugccuggccggccag

SEQ ID NO: 2774534 - RNA, 20 nt, Human
caccugccuggccggccagc

SEQ ID NO: 2774535 - RNA, 21 nt, Human
caccugccuggccggccagcc

SEQ ID NO: 2774536 - RNA, 22 nt, Human
caccugccuggccggccagcca

SEQ ID NO: 2774537 - RNA, 13 nt, Human
caccucagccucc

SEQ ID NO: 2774538 - RNA, 14 nt, Human
caccucagccuccc

SEQ ID NO: 2774539 - RNA, 17 nt, Human
caccucagccugcacag

SEQ ID NO: 2774540 - RNA, 14 nt, Human
caccucagccugca

SEQ ID NO: 2774541 - RNA, 12 nt, Human
caccucagccug

SEQ ID NO: 2774542 - RNA, 16 nt, Human
caccucagccucccaa

SEQ ID NO: 2774543 - RNA, 21 nt, Human
caccuaauucgaugaaggcug

SEQ ID NO: 2774544 - RNA, 22 nt, Human
caccuaauucgaugaaggcugc

SEQ ID NO: 2774545 - RNA, 23 nt, Human
caccuaauucgaugaaggcugcc

SEQ ID NO: 2774546 - RNA, 17 nt, Human
caccuacaauacaucug

SEQ ID NO: 2774547 - RNA, 13 nt, Human
caccuuggcugca

SEQ ID NO: 2774548 - RNA, 15 nt, Human
caccuuggcucaagu

SEQ ID NO: 2774549 - RNA, 14 nt, Human
caccuuggcucaag

SEQ ID NO: 2774550 - RNA, 14 nt, Human
caccuuggcugcag

SEQ ID NO: 2774551 - RNA, 23 nt, Human
caccugccuguuaggagaagcug

SEQ ID NO: 2774552 - RNA, 18 nt, Human
caccugccuguuaggaga

SEQ ID NO: 2774553 - RNA, 14 nt, Human
caccugccuccucg

SEQ ID NO: 2774554 - RNA, 20 nt, Human
caugaauucuuaugcuuaua

SEQ ID NO: 2774555 - RNA, 18 nt, Human
caugaauuuauugcacau

SEQ ID NO: 2774556 - RNA, 22 nt, Human
caugaauuuauugcacauuguu

SEQ ID NO: 2774557 - RNA, 23 nt, Human
caugaauuuauugcacauuguuc

SEQ ID NO: 2774558 - RNA, 18 nt, Human
caugaauucuuaugcuua

SEQ ID NO: 2774559 - RNA, 16 nt, Human
caugacauguuauaua

SEQ ID NO: 2774560 - RNA, 15 nt, Human
caugacauguuauau

SEQ ID NO: 2774561 - RNA, 21 nt, Human
caugacacccgugagcgccug

SEQ ID NO: 2774562 - RNA, 23 nt, Human
caugacacccgugagcgccugug

SEQ ID NO: 2774563 - RNA, 17 nt, Human
caugacauguuauauau

SEQ ID NO: 2774564 - RNA, 19 nt, Human
caugacauguuauauauuu

SEQ ID NO: 2774565 - RNA, 17 nt, Human
caugacauuuaccagca

SEQ ID NO: 2774566 - RNA, 20 nt, Human
caugacauuuaccagcaacu

SEQ ID NO: 2774567 - RNA, 18 nt, Human
caugaccauacugaggga

SEQ ID NO: 2774568 - RNA, 13 nt, Human
caugacccaggcu

SEQ ID NO: 2774569 - RNA, 15 nt, Human
caugacccaggcugg

SEQ ID NO: 2774570 - RNA, 16 nt, Human
caugacccaggcuggg

SEQ ID NO: 2774571 - RNA, 17 nt, Human
caugacccaggcugggc

SEQ ID NO: 2774572 - RNA, 21 nt, Human
caugauuagcagaagaaagga

SEQ ID NO: 2774573 - RNA, 22 nt, Human
caugauuagcagaagaaaggaa

SEQ ID NO: 2774574 - RNA, 19 nt, Human
caugacccaggcugggcaa

SEQ ID NO: 2774575 - RNA, 21 nt, Human
caugauucaugccaauuagca

SEQ ID NO: 2774576 - RNA, 16 nt, Human
caugauucaugccaau

SEQ ID NO: 2774577 - RNA, 12 nt, Human
caugcugccucc

SEQ ID NO: 2774578 - RNA, 14 nt, Human
caugcugccuccag

SEQ ID NO: 2774579 - RNA, 14 nt, Human
caugauucuauuua

SEQ ID NO: 2774580 - RNA, 17 nt, Human
caugcaauucaucccag

SEQ ID NO: 2774581 - RNA, 23 nt, Human
caucagauaagacauaucucuaa

SEQ ID NO: 2774582 - RNA, 19 nt, Human
caucagauggaaauauuuu

SEQ ID NO: 2774583 - RNA, 11 nt, Human
caucagcaaac

SEQ ID NO: 2774584 - RNA, 19 nt, Human
caucaggagaaaaagccuc

SEQ ID NO: 2774585 - RNA, 22 nt, Human
caucaggagaaaaagccuccag

SEQ ID NO: 2774586 - RNA, 14 nt, Human
caucagaaguggua

SEQ ID NO: 2774587 - RNA, 13 nt, Human
caucccagcccca

SEQ ID NO: 2774588 - RNA, 23 nt, Human
cauccuggcacccggccccugcu

SEQ ID NO: 2774589 - RNA, 11 nt, Human
cauccuggcug

SEQ ID NO: 2774590 - RNA, 12 nt, Human
cauccuggcugc

SEQ ID NO: 2774591 - RNA, 13 nt, Human
cauccuggcugcg

SEQ ID NO: 2774592 - RNA, 15 nt, Human
cauccuggcugcggc

SEQ ID NO: 2774593 - RNA, 14 nt, Human
cauccuggcuggag

SEQ ID NO: 2774594 - RNA, 17 nt, Human
cauccuggcuggagaau

SEQ ID NO: 2774595 - RNA, 12 nt, Human
cauccuggguaa

SEQ ID NO: 2774596 - RNA, 13 nt, Human
cauccuggguaau

SEQ ID NO: 2774597 - RNA, 15 nt, Human
cauccuguauaagca

SEQ ID NO: 2774598 - RNA, 19 nt, Human
cauccuguauaagcacuga

SEQ ID NO: 2774599 - RNA, 15 nt, Human
caucccauguauuua

SEQ ID NO: 2774600 - RNA, 18 nt, Human
caucccaugagacccugg

SEQ ID NO: 2774601 - RNA, 19 nt, Human
caucccaucuaagcugcag

SEQ ID NO: 2774602 - RNA, 20 nt, Human
caucccaucuaagcugcagc

SEQ ID NO: 2774603 - RNA, 21 nt, Human
caucccaucuaagcugcagcu

SEQ ID NO: 2774604 - RNA, 21 nt, Human
cauccccaggggucccagcca

SEQ ID NO: 2774605 - RNA, 18 nt, Human
cauccccaggggucccag

SEQ ID NO: 2774606 - RNA, 12 nt, Human
cauccccagggg

SEQ ID NO: 2774607 - RNA, 11 nt, Human
cauccccaggg

SEQ ID NO: 2774608 - RNA, 21 nt, Human
cauccccaaaacaaagucuuu

SEQ ID NO: 2774609 - RNA, 22 nt, Human
cauccccaaaacaaagucuuug

SEQ ID NO: 2774610 - RNA, 19 nt, Human
caucaggaaggaaaugaca

SEQ ID NO: 2774611 - RNA, 14 nt, Human
caucugucuaaaga

SEQ ID NO: 2774612 - RNA, 18 nt, Human
caucugucuaaagauaga

SEQ ID NO: 2774613 - RNA, 23 nt, Human
cauccuugacuuugaacuaauga

SEQ ID NO: 2774614 - RNA, 19 nt, Human
cauccuuggucuuuguauc

SEQ ID NO: 2774615 - RNA, 20 nt, Human
cauccuuggucuuuguaucu

SEQ ID NO: 2774616 - RNA, 21 nt, Human
cauccuuggucuuuguaucuu

SEQ ID NO: 2774617 - RNA, 15 nt, Human
cauccuuuacguguu

SEQ ID NO: 2774618 - RNA, 19 nt, Human
cauccuuuacguguuuaaa

SEQ ID NO: 2774619 - RNA, 17 nt, Human
cauccuuuucugcagag

SEQ ID NO: 2774620 - RNA, 16 nt, Human
cauccuuugcagggca

SEQ ID NO: 2774621 - RNA, 17 nt, Human
cauccuuugcagggcag

SEQ ID NO: 2774622 - RNA, 18 nt, Human
cauccuuugcagggcagc

SEQ ID NO: 2774623 - RNA, 19 nt, Human
cauccuuugcagggcagcc

SEQ ID NO: 2774624 - RNA, 19 nt, Human
cauccuuuucugcagaggg

SEQ ID NO: 2774625 - RNA, 20 nt, Human
caucgaaaauucauuucaca

SEQ ID NO: 2774626 - RNA, 21 nt, Human
caucgaaucuacuaauuccac

SEQ ID NO: 2774627 - RNA, 12 nt, Human
caucgcaaugua

SEQ ID NO: 2774628 - RNA, 22 nt, Human
caucuuacuguaccuguuccuu

SEQ ID NO: 2774629 - RNA, 19 nt, Human
caucuuacuugagccuuua

SEQ ID NO: 2774630 - RNA, 15 nt, Human
caucuuaagagaugc

SEQ ID NO: 2774631 - RNA, 16 nt, Human
cauagauuuauuuuuc

SEQ ID NO: 2774632 - RNA, 20 nt, Human
cauagauuuauuuuucaguu

SEQ ID NO: 2774633 - RNA, 21 nt, Human
cauagauuuauuuuucaguuc

SEQ ID NO: 2774634 - RNA, 22 nt, Human
cauagauuuauuuuucaguucc

SEQ ID NO: 2774635 - RNA, 23 nt, Human
cauagauuuauuuuucaguucca

SEQ ID NO: 2774636 - RNA, 15 nt, Human
cauagcaacaggaaa

SEQ ID NO: 2774637 - RNA, 16 nt, Human
cauagcaacaggaaaa

SEQ ID NO: 2774638 - RNA, 15 nt, Human
cauagccaccccaga

SEQ ID NO: 2774639 - RNA, 11 nt, Human
cauagcauuca

SEQ ID NO: 2774640 - RNA, 15 nt, Human
cauagaugcagguga

SEQ ID NO: 2774641 - RNA, 19 nt, Human
cauagcauccaaguggcau

SEQ ID NO: 2774642 - RNA, 13 nt, Human
cauagcccauccc

SEQ ID NO: 2774643 - RNA, 16 nt, Human
cauagcccaucccugc

SEQ ID NO: 2774644 - RNA, 12 nt, Human
cauagcccucac

SEQ ID NO: 2774645 - RNA, 23 nt, Human
cauagcccaucccugccugguca

SEQ ID NO: 2774646 - RNA, 17 nt, Human
cauagcccaucccugcc

SEQ ID NO: 2774647 - RNA, 18 nt, Human
cauagcccaucccugccu

SEQ ID NO: 2774648 - RNA, 19 nt, Human
cauagcccucacccugggg

SEQ ID NO: 2774649 - RNA, 15 nt, Human
cauagcccucacccu

SEQ ID NO: 2774650 - RNA, 16 nt, Human
cauagauguuuuggua

SEQ ID NO: 2774651 - RNA, 18 nt, Human
cauagauguuuugguaga

SEQ ID NO: 2774652 - RNA, 16 nt, Human
cauagauuaauggcac

SEQ ID NO: 2774653 - RNA, 17 nt, Human
cauagauuaauggcacu

SEQ ID NO: 2774654 - RNA, 18 nt, Human
cauagauuaauggcacug

SEQ ID NO: 2774655 - RNA, 19 nt, Human
cauagauuaauggcacuga

SEQ ID NO: 2774656 - RNA, 20 nt, Human
cauagauuaauggcacugau

SEQ ID NO: 2774657 - RNA, 14 nt, Human
cauagaucuucuga

SEQ ID NO: 2774658 - RNA, 15 nt, Human
cauagaucuucugaa

SEQ ID NO: 2774659 - RNA, 19 nt, Human
cauacaaguuuauaaagag

SEQ ID NO: 2774660 - RNA, 22 nt, Human
caguuuggagagucagaucuuu

SEQ ID NO: 2774661 - RNA, 18 nt, Human
cauacaaagcgugcacaa

SEQ ID NO: 2774662 - RNA, 14 nt, Human
cauaggcccacaca

SEQ ID NO: 2774663 - RNA, 15 nt, Human
cauaggcccacacac

SEQ ID NO: 2774664 - RNA, 16 nt, Human
cauaggcccacacaca

SEQ ID NO: 2774665 - RNA, 17 nt, Human
cauaggcccacacacag

SEQ ID NO: 2774666 - RNA, 18 nt, Human
cauaggcccacacacagg

SEQ ID NO: 2774667 - RNA, 21 nt, Human
cauaggcccacacacaggugg

SEQ ID NO: 2774668 - RNA, 13 nt, Human
cauaggcccagug

SEQ ID NO: 2774669 - RNA, 23 nt, Human
cauagcggacuccuccuuucucc

SEQ ID NO: 2774670 - RNA, 21 nt, Human
cauagcuacccaaaagagaaa

SEQ ID NO: 2774671 - RNA, 22 nt, Human
cauagcuacccaaaagagaaaa

SEQ ID NO: 2774672 - RNA, 23 nt, Human
cauaaucuggacuccucugucca

SEQ ID NO: 2774673 - RNA, 22 nt, Human
cauaaugaaaauauuuuuuaca

SEQ ID NO: 2774674 - RNA, 16 nt, Human
caguuugucacaugaa

SEQ ID NO: 2774675 - RNA, 15 nt, Human
caguuugugugucuu

SEQ ID NO: 2774676 - RNA, 16 nt, Human
caguuugugugucuua

SEQ ID NO: 2774677 - RNA, 19 nt, Human
cauaaucuggacuccucug

SEQ ID NO: 2774678 - RNA, 21 nt, Human
cauaaucuggacuccucuguc

SEQ ID NO: 2774679 - RNA, 22 nt, Human
cauaaucuggacuccucugucc

SEQ ID NO: 2774680 - RNA, 20 nt, Human
cauaaucuggacuccucugu

SEQ ID NO: 2774681 - RNA, 21 nt, Human
caguuugugugucuuaauuau

SEQ ID NO: 2774682 - RNA, 23 nt, Human
caguuugugugucuuaauuauua

SEQ ID NO: 2774683 - RNA, 19 nt, Human
caguuuagauuucaagaaa

SEQ ID NO: 2774684 - RNA, 16 nt, Human
caguuuaucaugaagc

SEQ ID NO: 2774685 - RNA, 17 nt, Human
caguuuaucaugaagcc

SEQ ID NO: 2774686 - RNA, 18 nt, Human
caguuuaucaugaagccu

SEQ ID NO: 2774687 - RNA, 19 nt, Human
caguuuaucaugaagccug

SEQ ID NO: 2774688 - RNA, 20 nt, Human
caguuuaucaugaagccugu

SEQ ID NO: 2774689 - RNA, 22 nt, Human
caguuuaucaugaagccugugg

SEQ ID NO: 2774690 - RNA, 20 nt, Human
caguuugaucacacuauuuu

SEQ ID NO: 2774691 - RNA, 21 nt, Human
caguuugaucacacuauuuua

SEQ ID NO: 2774692 - RNA, 14 nt, Human
caguuuguaaaugu

SEQ ID NO: 2774693 - RNA, 15 nt, Human
caguuuguaaauguu

SEQ ID NO: 2774694 - RNA, 16 nt, Human
caguuuguaaauguua

SEQ ID NO: 2774695 - RNA, 17 nt, Human
caguuuguaaauguuau

SEQ ID NO: 2774696 - RNA, 21 nt, Human
caguuuguaaauguuauuucu

SEQ ID NO: 2774697 - RNA, 22 nt, Human
caguuuguaaauguuauuucug

SEQ ID NO: 2774698 - RNA, 23 nt, Human
caguuuguaaauguuauuucugc

SEQ ID NO: 2774699 - RNA, 16 nt, Human
caguuugguauuugcg

SEQ ID NO: 2774700 - RNA, 15 nt, Human
caguuuggugucaac

SEQ ID NO: 2774701 - RNA, 12 nt, Human
caguuugcuuug

SEQ ID NO: 2774702 - RNA, 14 nt, Human
caguuugcuuugua

SEQ ID NO: 2774703 - RNA, 21 nt, Human
caguuugcuuuguaugcacuu

SEQ ID NO: 2774704 - RNA, 20 nt, Human
caguuuaaccugaugcaguc

SEQ ID NO: 2774705 - RNA, 20 nt, Human
caguuuaagagcagaacaga

SEQ ID NO: 2774706 - RNA, 18 nt, Human
caguuguuuguuuuugcu

SEQ ID NO: 2774707 - RNA, 21 nt, Human
caguuguuuguuuuugcuugu

SEQ ID NO: 2774708 - RNA, 17 nt, Human
caguauuuuggagaaau

SEQ ID NO: 2774709 - RNA, 18 nt, Human
caguauuuuggagaaauu

SEQ ID NO: 2774710 - RNA, 15 nt, Human
cauguucucugagga

SEQ ID NO: 2774711 - RNA, 18 nt, Human
cauuagcaguuugcuuug

SEQ ID NO: 2774712 - RNA, 13 nt, Human
cauguucugcccc

SEQ ID NO: 2774713 - RNA, 15 nt, Human
cauguucugccccca

SEQ ID NO: 2774714 - RNA, 16 nt, Human
cauguucugcccccag

SEQ ID NO: 2774715 - RNA, 17 nt, Human
cauguucugcccccagc

SEQ ID NO: 2774716 - RNA, 18 nt, Human
cauguucugcccccagcc

SEQ ID NO: 2774717 - RNA, 19 nt, Human
cauguucugcccccagccc

SEQ ID NO: 2774718 - RNA, 21 nt, Human
cauuaggaauuaaguuaucuu

SEQ ID NO: 2774719 - RNA, 19 nt, Human
cauggcgugucccucucgg

SEQ ID NO: 2774720 - RNA, 14 nt, Human
cauggcgugucccu

SEQ ID NO: 2774721 - RNA, 16 nt, Human
cauggcuaacuggcga

SEQ ID NO: 2774722 - RNA, 14 nt, Human
cauggcuaacuggc

SEQ ID NO: 2774723 - RNA, 20 nt, Human
cauguucacaccgcugcacu

SEQ ID NO: 2774724 - RNA, 22 nt, Human
cauguucacaccgcugcacuca

SEQ ID NO: 2774725 - RNA, 22 nt, Human
cauguucaaagccacauuauuu

SEQ ID NO: 2774726 - RNA, 12 nt, Human
cauucuccccag

SEQ ID NO: 2774727 - RNA, 15 nt, Human
cauucuccccagugu

SEQ ID NO: 2774728 - RNA, 22 nt, Human
cauucuccccaguguaugucuu

SEQ ID NO: 2774729 - RNA, 11 nt, Human
cauucuccugc

SEQ ID NO: 2774730 - RNA, 13 nt, Human
cauucuccugccu

SEQ ID NO: 2774731 - RNA, 15 nt, Human
cauucuccugccugu

SEQ ID NO: 2774732 - RNA, 22 nt, Human
cauucuccugccuguagcagug

SEQ ID NO: 2774733 - RNA, 23 nt, Human
cauucuccugccuguagcaguga

SEQ ID NO: 2774734 - RNA, 17 nt, Human
cauuagggaugccuccu

SEQ ID NO: 2774735 - RNA, 21 nt, Human
cauuauggguuaggcauuaau

SEQ ID NO: 2774736 - RNA, 13 nt, Human
cauuaugaugugu

SEQ ID NO: 2774737 - RNA, 17 nt, Human
cauuauguaaaauguuu

SEQ ID NO: 2774738 - RNA, 20 nt, Human
cauuauguaaaauguuuuag

SEQ ID NO: 2774739 - RNA, 17 nt, Human
cauuauguccacugugu

SEQ ID NO: 2774740 - RNA, 19 nt, Human
cauuauguccacuguguau

SEQ ID NO: 2774741 - RNA, 20 nt, Human
cauuauguccacuguguaua

SEQ ID NO: 2774742 - RNA, 21 nt, Human
cauuauguccacuguguauag

SEQ ID NO: 2774743 - RNA, 22 nt, Human
cauuauguccacuguguauaga

SEQ ID NO: 2774744 - RNA, 13 nt, Human
cauucucauugca

SEQ ID NO: 2774745 - RNA, 19 nt, Human
cauucucauugcagaauaa

SEQ ID NO: 2774746 - RNA, 16 nt, Human
cauucucauaauuccu

SEQ ID NO: 2774747 - RNA, 17 nt, Human
cauucucauaauuccua

SEQ ID NO: 2774748 - RNA, 18 nt, Human
cauucucauaauuccuac

SEQ ID NO: 2774749 - RNA, 19 nt, Human
cauucucauaauuccuaca

SEQ ID NO: 2774750 - RNA, 21 nt, Human
cauucucauaauuccuacagc

SEQ ID NO: 2774751 - RNA, 23 nt, Human
cauucucauaauuccuacagcac

SEQ ID NO: 2774752 - RNA, 13 nt, Human
cauucucaucugc

SEQ ID NO: 2774753 - RNA, 14 nt, Human
cauucucaucugca

SEQ ID NO: 2774754 - RNA, 15 nt, Human
cauucucaucugcac

SEQ ID NO: 2774755 - RNA, 17 nt, Human
cauucucaucugcaccc

SEQ ID NO: 2774756 - RNA, 20 nt, Human
cauucucaucugcacccuuc

SEQ ID NO: 2774757 - RNA, 21 nt, Human
cauucucaucugcacccuucu

SEQ ID NO: 2774758 - RNA, 23 nt, Human
cauucucaucugcacccuucuuu

SEQ ID NO: 2774759 - RNA, 17 nt, Human
cauucucaggcaccagu

SEQ ID NO: 2774760 - RNA, 16 nt, Human
cauucucaggcaccag

SEQ ID NO: 2774761 - RNA, 15 nt, Human
cauucucaggcacca

SEQ ID NO: 2774762 - RNA, 17 nt, Human
cauucucacuccuaccu

SEQ ID NO: 2774763 - RNA, 14 nt, Human
cauucucacuccua

SEQ ID NO: 2774764 - RNA, 17 nt, Human
cauuaugugguuuuaga

SEQ ID NO: 2774765 - RNA, 14 nt, Human
cauucucaggcacc

SEQ ID NO: 2774766 - RNA, 13 nt, Human
cauucucaggcac

SEQ ID NO: 2774767 - RNA, 16 nt, Human
cauucucacuccuacc

SEQ ID NO: 2774768 - RNA, 21 nt, Human
cauuaugugguuuuagauuuu

SEQ ID NO: 2774769 - RNA, 11 nt, Human
cauuaugugug

SEQ ID NO: 2774770 - RNA, 12 nt, Human
cauuaugugugc

SEQ ID NO: 2774771 - RNA, 13 nt, Human
cauuaugugugca

SEQ ID NO: 2774772 - RNA, 17 nt, Human
cauuaugugugcaugug

SEQ ID NO: 2774773 - RNA, 18 nt, Human
cauuaugugugcaugugu

SEQ ID NO: 2774774 - RNA, 19 nt, Human
cauuaugugugcaugugug

SEQ ID NO: 2774775 - RNA, 20 nt, Human
cauuaugugugcaugugugu

SEQ ID NO: 2774776 - RNA, 21 nt, Human
cauuaugugugcaugugugua

SEQ ID NO: 2774777 - RNA, 22 nt, Human
cauuaugugugcauguguguau

SEQ ID NO: 2774778 - RNA, 23 nt, Human
cauuaugugugcauguguguaua

SEQ ID NO: 2774779 - RNA, 14 nt, Human
cauuuguaaaugcu

SEQ ID NO: 2774780 - RNA, 22 nt, Human
ccaaaaagguugcuguuucaca

SEQ ID NO: 2774781 - RNA, 23 nt, Human
ccaaaaagguugcuguuucacaa

SEQ ID NO: 2774782 - RNA, 19 nt, Human
ccaaaaagauuuucagaaa

SEQ ID NO: 2774783 - RNA, 13 nt, Human
ccaaaaauuauua

SEQ ID NO: 2774784 - RNA, 14 nt, Human
ccaaaaauuauuau

SEQ ID NO: 2774785 - RNA, 16 nt, Human
ccaaaacaagccuggu

SEQ ID NO: 2774786 - RNA, 15 nt, Human
ccaaaacccaugugg

SEQ ID NO: 2774787 - RNA, 20 nt, Human
cauuugguuugauuuucccu

SEQ ID NO: 2774788 - RNA, 11 nt, Human
cauuuguaaaa

SEQ ID NO: 2774789 - RNA, 13 nt, Human
cauuuguaaaacu

SEQ ID NO: 2774790 - RNA, 13 nt, Human
cauuuuucuucca

SEQ ID NO: 2774791 - RNA, 14 nt, Human
cauuuuucuuccag

SEQ ID NO: 2774792 - RNA, 17 nt, Human
cauuuuucuuccaggau

SEQ ID NO: 2774793 - RNA, 21 nt, Human
cauuugguucauuaauucuau

SEQ ID NO: 2774794 - RNA, 19 nt, Human
cauuugguucuaagaaacc

SEQ ID NO: 2774795 - RNA, 20 nt, Human
cauuugguucauuaauucua

SEQ ID NO: 2774796 - RNA, 16 nt, Human
cauuugguucauuaau

SEQ ID NO: 2774797 - RNA, 20 nt, Human
cauuuccaacaccacagaca

SEQ ID NO: 2774798 - RNA, 21 nt, Human
cauuuccaacaccacagacac

SEQ ID NO: 2774799 - RNA, 22 nt, Human
cauuuccaacaccacagacaca

SEQ ID NO: 2774800 - RNA, 17 nt, Human
cauuuuugauuuaugca

SEQ ID NO: 2774801 - RNA, 18 nt, Human
cauuuuugaauacaggca

SEQ ID NO: 2774802 - RNA, 20 nt, Human
cauuuuugaauacaggcaua

SEQ ID NO: 2774803 - RNA, 23 nt, Human
cauuucauuguaugauguguugu

SEQ ID NO: 2774804 - RNA, 13 nt, Human
cauuuccaacacc

SEQ ID NO: 2774805 - RNA, 18 nt, Human
cauuuccaacaccacaga

SEQ ID NO: 2774806 - RNA, 19 nt, Human
cauuuccaacaccacagac

SEQ ID NO: 2774807 - RNA, 16 nt, Human
cauuuauucugcucac

SEQ ID NO: 2774808 - RNA, 23 nt, Human
cauugggaaggggacccccgccc

SEQ ID NO: 2774809 - RNA, 14 nt, Human
cauugcuguuaugu

SEQ ID NO: 2774810 - RNA, 17 nt, Human
cauugcuguuaugucug

SEQ ID NO: 2774811 - RNA, 20 nt, Human
cauugcuguuaugucuguuu

SEQ ID NO: 2774812 - RNA, 22 nt, Human
cauugcuguuaugucuguuuaa

SEQ ID NO: 2774813 - RNA, 17 nt, Human
cauugcuguucuacuuu

SEQ ID NO: 2774814 - RNA, 13 nt, Human
cauugcuguagga

SEQ ID NO: 2774815 - RNA, 14 nt, Human
cauugcuguaggau

SEQ ID NO: 2774816 - RNA, 22 nt, Human
cauugcuguaggaucuaaggcu

SEQ ID NO: 2774817 - RNA, 16 nt, Human
cauugcugucugcagc

SEQ ID NO: 2774818 - RNA, 19 nt, Human
cauugcugucugcagccuu

SEQ ID NO: 2774819 - RNA, 20 nt, Human
cauugcugucugcagccuug

SEQ ID NO: 2774820 - RNA, 21 nt, Human
cauugcugucugcagccuuga

SEQ ID NO: 2774821 - RNA, 12 nt, Human
cauuucauugua

SEQ ID NO: 2774822 - RNA, 13 nt, Human
cauuucauuguau

SEQ ID NO: 2774823 - RNA, 16 nt, Human
cauuucauuguaugau

SEQ ID NO: 2774824 - RNA, 18 nt, Human
cauuucauuugugccaga

SEQ ID NO: 2774825 - RNA, 18 nt, Human
cauuucauuguaugaugu

SEQ ID NO: 2774826 - RNA, 20 nt, Human
cauuucauuguaugaugugu

SEQ ID NO: 2774827 - RNA, 18 nt, Human
cauuucaaaugugcuguc

SEQ ID NO: 2774828 - RNA, 14 nt, Human
cauuucaaaaugcu

SEQ ID NO: 2774829 - RNA, 15 nt, Human
cauuucaaaaugcuu

SEQ ID NO: 2774830 - RNA, 17 nt, Human
cauuuauuuuuuacauu

SEQ ID NO: 2774831 - RNA, 19 nt, Human
cauuuauuuuuuacauuau

SEQ ID NO: 2774832 - RNA, 18 nt, Human
cauuuauuuuucucauga

SEQ ID NO: 2774833 - RNA, 13 nt, Human
cauuuauuguuua

SEQ ID NO: 2774834 - RNA, 18 nt, Human
cauuuauuguuuauguaa

SEQ ID NO: 2774835 - RNA, 15 nt, Human
cauuuauuuuaagca

SEQ ID NO: 2774836 - RNA, 21 nt, Human
cauuuauuuuaagcacucuua

SEQ ID NO: 2774837 - RNA, 13 nt, Human
cauuuauuuuaug

SEQ ID NO: 2774838 - RNA, 14 nt, Human
cauuuauuuuauga

SEQ ID NO: 2774839 - RNA, 15 nt, Human
cauuuauuuuaugag

SEQ ID NO: 2774840 - RNA, 16 nt, Human
cauuuauuuuaugaga

SEQ ID NO: 2774841 - RNA, 17 nt, Human
cauuuauuuuaugagaa

SEQ ID NO: 2774842 - RNA, 18 nt, Human
cauuuauuuuaugagaaa

SEQ ID NO: 2774843 - RNA, 19 nt, Human
cauuuauuuuaugagaaau

SEQ ID NO: 2774844 - RNA, 23 nt, Human
cauuuauuuuaugagaaauguaa

SEQ ID NO: 2774845 - RNA, 16 nt, Human
cauuucaauucucaaa

SEQ ID NO: 2774846 - RNA, 20 nt, Human
cauuucacaaaacagccuuu

SEQ ID NO: 2774847 - RNA, 16 nt, Human
cauuucacaggcuaau

SEQ ID NO: 2774848 - RNA, 12 nt, Human
cauuucacauua

SEQ ID NO: 2774849 - RNA, 13 nt, Human
cauuucacauuaa

SEQ ID NO: 2774850 - RNA, 15 nt, Human
cauuucacauuaaug

SEQ ID NO: 2774851 - RNA, 21 nt, Human
cauugcggacagccacggcca

SEQ ID NO: 2774852 - RNA, 17 nt, Human
cauugcggacagccacg

SEQ ID NO: 2774853 - RNA, 15 nt, Human
cauugcggacagcca

SEQ ID NO: 2774854 - RNA, 14 nt, Human
cauugcggacagcc

SEQ ID NO: 2774855 - RNA, 16 nt, Human
cauugcugagccucug

SEQ ID NO: 2774856 - RNA, 17 nt, Human
cauugcugagccucugc

SEQ ID NO: 2774857 - RNA, 18 nt, Human
cauugcugagccucugcu

SEQ ID NO: 2774858 - RNA, 21 nt, Human
cauugcugagccucugcuccc

SEQ ID NO: 2774859 - RNA, 14 nt, Human
cauugcugagccuc

SEQ ID NO: 2774860 - RNA, 15 nt, Human
cauugcugagccucu

SEQ ID NO: 2774861 - RNA, 15 nt, Human
cauugcuagauaaaa

SEQ ID NO: 2774862 - RNA, 17 nt, Human
cauugcuagauaaaagc

SEQ ID NO: 2774863 - RNA, 19 nt, Human
cauugcucccuaagacugu

SEQ ID NO: 2774864 - RNA, 11 nt, Human
cauugccuggc

SEQ ID NO: 2774865 - RNA, 17 nt, Human
cauugccuggccuuccu

SEQ ID NO: 2774866 - RNA, 14 nt, Human
cauugccuuugaau

SEQ ID NO: 2774867 - RNA, 17 nt, Human
cauugccuuugaauguu

SEQ ID NO: 2774868 - RNA, 22 nt, Human
cauugccuuugaauguuaauuu

SEQ ID NO: 2774869 - RNA, 23 nt, Human
cauugcguuugaccuuuuaugua

SEQ ID NO: 2774870 - RNA, 11 nt, Human
ccaaauuauuu

SEQ ID NO: 2774871 - RNA, 15 nt, Human
ccaaaugcaauuuga

SEQ ID NO: 2774872 - RNA, 16 nt, Human
ccaaaugcaauuugau

SEQ ID NO: 2774873 - RNA, 13 nt, Human
ccaaauccuuccc

SEQ ID NO: 2774874 - RNA, 22 nt, Human
ccaaaucucaaugaagccagcu

SEQ ID NO: 2774875 - RNA, 19 nt, Human
ccaaaucucucaaaucugu

SEQ ID NO: 2774876 - RNA, 18 nt, Human
ccaaaucucuuccacaag

SEQ ID NO: 2774877 - RNA, 15 nt, Human
ccaaauccgcucucu

SEQ ID NO: 2774878 - RNA, 16 nt, Human
ccaaauccgcucucuu

SEQ ID NO: 2774879 - RNA, 18 nt, Human
ccaaauccgcucucuucc

SEQ ID NO: 2774880 - RNA, 19 nt, Human
ccaaauccgcucucuuccu

SEQ ID NO: 2774881 - RNA, 20 nt, Human
ccaaauccgcucucuuccug

SEQ ID NO: 2774882 - RNA, 22 nt, Human
ccaaauccgcucucuuccugcc

SEQ ID NO: 2774883 - RNA, 22 nt, Human
ccaaagugcugggauuacaggu

SEQ ID NO: 2774884 - RNA, 13 nt, Human
ccaacuucccagu

SEQ ID NO: 2774885 - RNA, 19 nt, Human
ccaacuucucuugcuuucu

SEQ ID NO: 2774886 - RNA, 20 nt, Human
ccaacuucucuugcuuucua

SEQ ID NO: 2774887 - RNA, 21 nt, Human
ccaacuguguuguauuaacaa

SEQ ID NO: 2774888 - RNA, 23 nt, Human
ccaacuguguuguauuaacaaaa

SEQ ID NO: 2774889 - RNA, 23 nt, Human
ccaacuguucagcuguccucccu

SEQ ID NO: 2774890 - RNA, 19 nt, Human
ccaacuucuucagagcuga

SEQ ID NO: 2774891 - RNA, 10 nt, Human
ccaacuugag

SEQ ID NO: 2774892 - RNA, 18 nt, Human
ccaacuucuucagagcug

SEQ ID NO: 2774893 - RNA, 19 nt, Human
ccaacuugagggcccagag

SEQ ID NO: 2774894 - RNA, 19 nt, Human
ccaacuugguucugcuuca

SEQ ID NO: 2774895 - RNA, 21 nt, Human
ccaacuugguucugcuucaau

SEQ ID NO: 2774896 - RNA, 11 nt, Human
ccaacuuguaa

SEQ ID NO: 2774897 - RNA, 20 nt, Human
ccaacuugagggcccagagc

SEQ ID NO: 2774898 - RNA, 21 nt, Human
ccaacuugagggcccagagca

SEQ ID NO: 2774899 - RNA, 18 nt, Human
ccaacguuacucagggcu

SEQ ID NO: 2774900 - RNA, 19 nt, Human
ccaacguuacucagggcuc

SEQ ID NO: 2774901 - RNA, 13 nt, Human
ccaacguuuggaa

SEQ ID NO: 2774902 - RNA, 20 nt, Human
ccaacguuuggaagauccug

SEQ ID NO: 2774903 - RNA, 21 nt, Human
ccaacguuuggaagauccugu

SEQ ID NO: 2774904 - RNA, 22 nt, Human
ccaacguuuggaagauccugug

SEQ ID NO: 2774905 - RNA, 23 nt, Human
ccaacguuuggaagauccuguga

SEQ ID NO: 2774906 - RNA, 12 nt, Human
ccaaauuauuug

SEQ ID NO: 2774907 - RNA, 14 nt, Human
ccaaauuauuugug

SEQ ID NO: 2774908 - RNA, 17 nt, Human
ccaaauuauuuguguaa

SEQ ID NO: 2774909 - RNA, 18 nt, Human
ccaaauuauuuguguaau

SEQ ID NO: 2774910 - RNA, 22 nt, Human
ccaaagugcugggauuacaggg

SEQ ID NO: 2774911 - RNA, 22 nt, Human
ccaaagugcugggauuacaggc

SEQ ID NO: 2774912 - RNA, 19 nt, Human
ccaaagugcugggauuaca

SEQ ID NO: 2774913 - RNA, 15 nt, Human
ccaagcuuguuauca

SEQ ID NO: 2774914 - RNA, 17 nt, Human
ccaagcuuguuaucagc

SEQ ID NO: 2774915 - RNA, 20 nt, Human
ccaagcuggucccacucagu

SEQ ID NO: 2774916 - RNA, 13 nt, Human
ccaacuuucugua

SEQ ID NO: 2774917 - RNA, 14 nt, Human
ccaacuuucuguaa

SEQ ID NO: 2774918 - RNA, 17 nt, Human
ccaacuuucuguaaacu

SEQ ID NO: 2774919 - RNA, 18 nt, Human
ccaagcuguuuucuucua

SEQ ID NO: 2774920 - RNA, 17 nt, Human
ccaagcuguuuucuucu

SEQ ID NO: 2774921 - RNA, 14 nt, Human
ccaagcuguuuucu

SEQ ID NO: 2774922 - RNA, 19 nt, Human
ccaauguuagagacuuuuu

SEQ ID NO: 2774923 - RNA, 20 nt, Human
ccaauguuagagacuuuuuu

SEQ ID NO: 2774924 - RNA, 12 nt, Human
ccaauguuuucc

SEQ ID NO: 2774925 - RNA, 18 nt, Human
ccaauguuuuccacccau

SEQ ID NO: 2774926 - RNA, 21 nt, Human
ccaauuaggggguaaggcccc

SEQ ID NO: 2774927 - RNA, 17 nt, Human
ccaacuacuaucucaga

SEQ ID NO: 2774928 - RNA, 13 nt, Human
ccacccugggacc

SEQ ID NO: 2774929 - RNA, 15 nt, Human
ccacccugggagaca

SEQ ID NO: 2774930 - RNA, 17 nt, Human
ccacccugggagacaga

SEQ ID NO: 2774931 - RNA, 12 nt, Human
ccacccugggac

SEQ ID NO: 2774932 - RNA, 11 nt, Human
ccacccuggaa

SEQ ID NO: 2774933 - RNA, 13 nt, Human
ccacccugcucuc

SEQ ID NO: 2774934 - RNA, 15 nt, Human
ccacccugcugccuu

SEQ ID NO: 2774935 - RNA, 16 nt, Human
ccacccugcugccuuc

SEQ ID NO: 2774936 - RNA, 19 nt, Human
ccacccugcugccuucuga

SEQ ID NO: 2774937 - RNA, 22 nt, Human
ccaccgggcugggagcucugca

SEQ ID NO: 2774938 - RNA, 18 nt, Human
ccaccgguccagcuggcc

SEQ ID NO: 2774939 - RNA, 17 nt, Human
ccaccgguccagcuggc

SEQ ID NO: 2774940 - RNA, 15 nt, Human
ccaccgguccagcug

SEQ ID NO: 2774941 - RNA, 23 nt, Human
ccaccgggcugggagcucugcag

SEQ ID NO: 2774942 - RNA, 15 nt, Human
ccaccuuggcucaag

SEQ ID NO: 2774943 - RNA, 14 nt, Human
ccaccuuggcucaa

SEQ ID NO: 2774944 - RNA, 13 nt, Human
ccaccuuggcuca

SEQ ID NO: 2774945 - RNA, 14 nt, Human
ccaccuagaacacu

SEQ ID NO: 2774946 - RNA, 23 nt, Human
ccaccuacuuuucuuuccucaga

SEQ ID NO: 2774947 - RNA, 23 nt, Human
ccaccuaauucgaugaaggcugc

SEQ ID NO: 2774948 - RNA, 19 nt, Human
ccaccuacaauacaucuga

SEQ ID NO: 2774949 - RNA, 19 nt, Human
ccaccaggagaaccacuac

SEQ ID NO: 2774950 - RNA, 14 nt, Human
ccaccaggaucagc

SEQ ID NO: 2774951 - RNA, 18 nt, Human
ccaccaggaucccagggg

SEQ ID NO: 2774952 - RNA, 14 nt, Human
ccaccaggagaacc

SEQ ID NO: 2774953 - RNA, 13 nt, Human
ccaccaggagaac

SEQ ID NO: 2774954 - RNA, 19 nt, Human
ccaccagcaucaccugccu

SEQ ID NO: 2774955 - RNA, 18 nt, Human
ccaccagcaucaccugcc

SEQ ID NO: 2774956 - RNA, 16 nt, Human
ccaccagcucugccgu

SEQ ID NO: 2774957 - RNA, 23 nt, Human
ccaccagacugacaaauguguau

SEQ ID NO: 2774958 - RNA, 17 nt, Human
ccaccagagaccguccu

SEQ ID NO: 2774959 - RNA, 20 nt, Human
ccaccagagaccguccucac

SEQ ID NO: 2774960 - RNA, 21 nt, Human
ccaccagagaccguccucacc

SEQ ID NO: 2774961 - RNA, 22 nt, Human
ccaccagagaccguccucaccc

SEQ ID NO: 2774962 - RNA, 18 nt, Human
ccaccagauagcagaggg

SEQ ID NO: 2774963 - RNA, 21 nt, Human
ccacacuuguuccagcucuuu

SEQ ID NO: 2774964 - RNA, 20 nt, Human
ccacacuuguuccagcucuu

SEQ ID NO: 2774965 - RNA, 22 nt, Human
ccacacuucaggcucuucuccu

SEQ ID NO: 2774966 - RNA, 23 nt, Human
caggacaccacacccagccucag

SEQ ID NO: 2774967 - RNA, 16 nt, Human
caggacagugcuucag

SEQ ID NO: 2774968 - RNA, 21 nt, Human
caggacagugcuucagccuga

SEQ ID NO: 2774969 - RNA, 20 nt, Human
caggacagugcuucagccug

SEQ ID NO: 2774970 - RNA, 22 nt, Human
caggacagugcuucagccugag

SEQ ID NO: 2774971 - RNA, 18 nt, Human
caggaccaggcaauguga

SEQ ID NO: 2774972 - RNA, 23 nt, Human
caggaggauugcuugagcccagg

SEQ ID NO: 2774973 - RNA, 18 nt, Human
caggaggcaagcaagcuc

SEQ ID NO: 2774974 - RNA, 22 nt, Human
caggacaccacacccagccuca

SEQ ID NO: 2774975 - RNA, 15 nt, Human
caggacacggggcag

SEQ ID NO: 2774976 - RNA, 15 nt, Human
caggccagcugccuc

SEQ ID NO: 2774977 - RNA, 20 nt, Human
caggcaaugcuggcuguugg

SEQ ID NO: 2774978 - RNA, 19 nt, Human
caggcaaugcuggcuguug

SEQ ID NO: 2774979 - RNA, 21 nt, Human
caggcaaugcuggcuguuggc

SEQ ID NO: 2774980 - RNA, 20 nt, Human
caggaggcagagguugcagu

SEQ ID NO: 2774981 - RNA, 16 nt, Human
caggcacugcugccca

SEQ ID NO: 2774982 - RNA, 17 nt, Human
caggcacugcugcccag

SEQ ID NO: 2774983 - RNA, 23 nt, Human
caggcacugcugcccagccucca

SEQ ID NO: 2774984 - RNA, 21 nt, Human
caggcacuuaagcacaagcag

SEQ ID NO: 2774985 - RNA, 13 nt, Human
caggaaauaaagu

SEQ ID NO: 2774986 - RNA, 20 nt, Human
caggaaaagcugcugacagu

SEQ ID NO: 2774987 - RNA, 19 nt, Human
caggaaaagcugcugacag

SEQ ID NO: 2774988 - RNA, 22 nt, Human
caggaaaagguagcuuaccuga

SEQ ID NO: 2774989 - RNA, 15 nt, Human
cagcuuaucucuuuu

SEQ ID NO: 2774990 - RNA, 16 nt, Human
cagcuuaucucuuuua

SEQ ID NO: 2774991 - RNA, 18 nt, Human
cagcuuaucucuuuuaua

SEQ ID NO: 2774992 - RNA, 19 nt, Human
cagcuuaucucuuuuauau

SEQ ID NO: 2774993 - RNA, 21 nt, Human
cagcuuaucucuuuuauauuu

SEQ ID NO: 2774994 - RNA, 22 nt, Human
cagcuuaucucuuuuauauuug

SEQ ID NO: 2774995 - RNA, 23 nt, Human
cagcuuaucucuuuuauauuugu

SEQ ID NO: 2774996 - RNA, 18 nt, Human
caggaaaguguuauuuuu

SEQ ID NO: 2774997 - RNA, 14 nt, Human
caggaaaguucaga

SEQ ID NO: 2774998 - RNA, 16 nt, Human
caggaaaguucagagu

SEQ ID NO: 2774999 - RNA, 18 nt, Human
caggaaaguucagaguuu

SEQ ID NO: 2775000 - RNA, 22 nt, Human
caggaaaguucagaguuuucug

SEQ ID NO: 2775001 - RNA, 21 nt, Human
cagggaggagguggcagcccu

SEQ ID NO: 2775002 - RNA, 20 nt, Human
cagggaggagguggcagccc

SEQ ID NO: 2775003 - RNA, 19 nt, Human
cagggaggagguggcagcc

SEQ ID NO: 2775004 - RNA, 18 nt, Human
cagggaggagguggcagc

SEQ ID NO: 2775005 - RNA, 14 nt, Human
caggcugggcuuca

SEQ ID NO: 2775006 - RNA, 23 nt, Human
caggcugggccauguccaaagag

SEQ ID NO: 2775007 - RNA, 22 nt, Human
caggcugggccauguccaaaga

SEQ ID NO: 2775008 - RNA, 20 nt, Human
caggcugggccauguccaaa

SEQ ID NO: 2775009 - RNA, 18 nt, Human
caggcugggccaugucca

SEQ ID NO: 2775010 - RNA, 17 nt, Human
caggcugggccaugucc

SEQ ID NO: 2775011 - RNA, 13 nt, Human
caggcugggccau

SEQ ID NO: 2775012 - RNA, 12 nt, Human
caggcugggcca

SEQ ID NO: 2775013 - RNA, 11 nt, Human
caggcugggcc

SEQ ID NO: 2775014 - RNA, 14 nt, Human
cagggaggucaggc

SEQ ID NO: 2775015 - RNA, 17 nt, Human
cagggaggucaggcccu

SEQ ID NO: 2775016 - RNA, 18 nt, Human
cagggaggucaggcccug

SEQ ID NO: 2775017 - RNA, 19 nt, Human
cagggaggucaggcccugg

SEQ ID NO: 2775018 - RNA, 20 nt, Human
cagggaggucaggcccugga

SEQ ID NO: 2775019 - RNA, 23 nt, Human
cagggaggucaggcccuggaacu

SEQ ID NO: 2775020 - RNA, 16 nt, Human
cagggaggggaagagg

SEQ ID NO: 2775021 - RNA, 18 nt, Human
cagggagggccugggccc

SEQ ID NO: 2775022 - RNA, 17 nt, Human
cagggagggccugggcc

SEQ ID NO: 2775023 - RNA, 20 nt, Human
cagggcucagcggggacagc

SEQ ID NO: 2775024 - RNA, 15 nt, Human
cagggcucagcgggg

SEQ ID NO: 2775025 - RNA, 12 nt, Human
cagggcucagcg

SEQ ID NO: 2775026 - RNA, 12 nt, Human
caggccugggcc

SEQ ID NO: 2775027 - RNA, 17 nt, Human
caggccugggccagagu

SEQ ID NO: 2775028 - RNA, 19 nt, Human
caggcuggcgugcaguggu

SEQ ID NO: 2775029 - RNA, 18 nt, Human
caggcuggcgugcagugg

SEQ ID NO: 2775030 - RNA, 17 nt, Human
caggcuggcgugcagug

SEQ ID NO: 2775031 - RNA, 18 nt, Human
caggcugggcaaggaggc

SEQ ID NO: 2775032 - RNA, 15 nt, Human
cagggcugucaucug

SEQ ID NO: 2775033 - RNA, 13 nt, Human
cagggcugugcac

SEQ ID NO: 2775034 - RNA, 18 nt, Human
cagggcuuaccuguacac

SEQ ID NO: 2775035 - RNA, 19 nt, Human
cagggcuggccccagggca

SEQ ID NO: 2775036 - RNA, 20 nt, Human
cagggcuggccccagggcac

SEQ ID NO: 2775037 - RNA, 23 nt, Human
cagggcuggccccagggcacccu

SEQ ID NO: 2775038 - RNA, 15 nt, Human
caguauuucauugcc

SEQ ID NO: 2775039 - RNA, 19 nt, Human
caguauuucauugccugug

SEQ ID NO: 2775040 - RNA, 16 nt, Human
caguauuuccacuugu

SEQ ID NO: 2775041 - RNA, 16 nt, Human
caguauuuauuuugua

SEQ ID NO: 2775042 - RNA, 17 nt, Human
caguauuuauuuuguaa

SEQ ID NO: 2775043 - RNA, 18 nt, Human
caguauuuauuuuguaau

SEQ ID NO: 2775044 - RNA, 19 nt, Human
caguauuuauuuuguaauu

SEQ ID NO: 2775045 - RNA, 22 nt, Human
caguauuuauuuuguaauuaug

SEQ ID NO: 2775046 - RNA, 11 nt, Human
caguauuucag

SEQ ID NO: 2775047 - RNA, 14 nt, Human
caguauuuuggaga

SEQ ID NO: 2775048 - RNA, 20 nt, Human
caguaaaucuuuuacaacug

SEQ ID NO: 2775049 - RNA, 12 nt, Human
caguaaaucuuu

SEQ ID NO: 2775050 - RNA, 14 nt, Human
caguaaauaacagg

SEQ ID NO: 2775051 - RNA, 19 nt, Human
caguauuacuucugcuaca

SEQ ID NO: 2775052 - RNA, 12 nt, Human
caguauuaugua

SEQ ID NO: 2775053 - RNA, 13 nt, Human
caguauucuuguc

SEQ ID NO: 2775054 - RNA, 16 nt, Human
caguauucuugucaaa

SEQ ID NO: 2775055 - RNA, 19 nt, Human
caguauucuugucaaaaaa

SEQ ID NO: 2775056 - RNA, 21 nt, Human
caggguuggccccugcccggc

SEQ ID NO: 2775057 - RNA, 17 nt, Human
caggguuggccccugcc

SEQ ID NO: 2775058 - RNA, 14 nt, Human
caggguuggccccu

SEQ ID NO: 2775059 - RNA, 13 nt, Human
caggguugggccc

SEQ ID NO: 2775060 - RNA, 17 nt, Human
caggguggacuuagaaa

SEQ ID NO: 2775061 - RNA, 20 nt, Human
caggguugggcccagaucug

SEQ ID NO: 2775062 - RNA, 16 nt, Human
caggguugggcccaga

SEQ ID NO: 2775063 - RNA, 15 nt, Human
caggguugggcccag

SEQ ID NO: 2775064 - RNA, 14 nt, Human
caggguugggccca

SEQ ID NO: 2775065 - RNA, 14 nt, Human
caggugcugccauc

SEQ ID NO: 2775066 - RNA, 13 nt, Human
caggugcugccau

SEQ ID NO: 2775067 - RNA, 21 nt, Human
caggguugggcccagaucugg

SEQ ID NO: 2775068 - RNA, 15 nt, Human
caggguuggugugcu

SEQ ID NO: 2775069 - RNA, 18 nt, Human
caggguuggugugcugag

SEQ ID NO: 2775070 - RNA, 19 nt, Human
caggguuucaccauguugc

SEQ ID NO: 2775071 - RNA, 19 nt, Human
caggugcucaauaaaugau

SEQ ID NO: 2775072 - RNA, 14 nt, Human
caggugcuccccug

SEQ ID NO: 2775073 - RNA, 23 nt, Human
caggugcuccccugacagucccu

SEQ ID NO: 2775074 - RNA, 23 nt, Human
cagguuuuuggucugacccacug

SEQ ID NO: 2775075 - RNA, 22 nt, Human
cagguugaggggcuccuggaaa

SEQ ID NO: 2775076 - RNA, 21 nt, Human
cagguugaggggcuccuggaa

SEQ ID NO: 2775077 - RNA, 20 nt, Human
cagguugaggggcuccugga

SEQ ID NO: 2775078 - RNA, 17 nt, Human
cagguucucucucacug

SEQ ID NO: 2775079 - RNA, 15 nt, Human
cagguucugccugcu

SEQ ID NO: 2775080 - RNA, 23 nt, Human
cagggucucacucugucgcccag

SEQ ID NO: 2775081 - RNA, 22 nt, Human
cagggucucacucugucgccca

SEQ ID NO: 2775082 - RNA, 22 nt, Human
cagggucuucccuaccucaggc

SEQ ID NO: 2775083 - RNA, 21 nt, Human
cagggucuucccuaccucagg

SEQ ID NO: 2775084 - RNA, 19 nt, Human
cagggugacggugacaaag

SEQ ID NO: 2775085 - RNA, 16 nt, Human
caggguuggccccugc

SEQ ID NO: 2775086 - RNA, 15 nt, Human
caggguuggccccug

SEQ ID NO: 2775087 - RNA, 22 nt, Human
caggguggacuuagaaagcagg

SEQ ID NO: 2775088 - RNA, 18 nt, Human
caggguggagugcagugg

SEQ ID NO: 2775089 - RNA, 20 nt, Human
caggguggagugcaguggug

SEQ ID NO: 2775090 - RNA, 22 nt, Human
cagggugcccagaacuucccug

SEQ ID NO: 2775091 - RNA, 13 nt, Human
cagggugcagagg

SEQ ID NO: 2775092 - RNA, 23 nt, Human
cagccucuccaggcaccaucucc

SEQ ID NO: 2775093 - RNA, 14 nt, Human
cagccugcacagug

SEQ ID NO: 2775094 - RNA, 22 nt, Human
cagccugcacagugucccccag

SEQ ID NO: 2775095 - RNA, 20 nt, Human
cagccugcaguuaauuagca

SEQ ID NO: 2775096 - RNA, 19 nt, Human
cagccugaggcugagacug

SEQ ID NO: 2775097 - RNA, 18 nt, Human
cagccugaggcugagacu

SEQ ID NO: 2775098 - RNA, 15 nt, Human
cagccugaggcugag

SEQ ID NO: 2775099 - RNA, 12 nt, Human
cagccugaggcu

SEQ ID NO: 2775100 - RNA, 14 nt, Human
cagccgccuuccuu

SEQ ID NO: 2775101 - RNA, 15 nt, Human
cagccgccuuccuug

SEQ ID NO: 2775102 - RNA, 18 nt, Human
cagccgccuuccuugacc

SEQ ID NO: 2775103 - RNA, 22 nt, Human
cagccgccuuccuugaccuucc

SEQ ID NO: 2775104 - RNA, 23 nt, Human
cagccgccuuccuugaccuuccu

SEQ ID NO: 2775105 - RNA, 18 nt, Human
cagccgccuuaagcugau

SEQ ID NO: 2775106 - RNA, 19 nt, Human
cagccgccuuaagcugauc

SEQ ID NO: 2775107 - RNA, 23 nt, Human
cagccgccauugccaccaggaga

SEQ ID NO: 2775108 - RNA, 22 nt, Human
cagccgccauugccaccaggag

SEQ ID NO: 2775109 - RNA, 21 nt, Human
cagccgccauugccaccagga

SEQ ID NO: 2775110 - RNA, 19 nt, Human
cagccgccauugccaccag

SEQ ID NO: 2775111 - RNA, 18 nt, Human
cagccgccauugccacca

SEQ ID NO: 2775112 - RNA, 17 nt, Human
cagccgccauugccacc

SEQ ID NO: 2775113 - RNA, 18 nt, Human
cagccgccaucagcccaa

SEQ ID NO: 2775114 - RNA, 13 nt, Human
cagcccuuagcag

SEQ ID NO: 2775115 - RNA, 13 nt, Human
cagcccuguucug

SEQ ID NO: 2775116 - RNA, 16 nt, Human
cagcccugucuuccua

SEQ ID NO: 2775117 - RNA, 19 nt, Human
cagccgcagccucccucug

SEQ ID NO: 2775118 - RNA, 20 nt, Human
cagcggccccugcauccccu

SEQ ID NO: 2775119 - RNA, 23 nt, Human
cagccugaggcagccacuucggc

SEQ ID NO: 2775120 - RNA, 21 nt, Human
cagccugcccaagcccaggcc

SEQ ID NO: 2775121 - RNA, 23 nt, Human
cagccugcccaagcccaggccac

SEQ ID NO: 2775122 - RNA, 16 nt, Human
cagcgggaauggcagc

SEQ ID NO: 2775123 - RNA, 13 nt, Human
cagcgggcagguu

SEQ ID NO: 2775124 - RNA, 20 nt, Human
cagcgggcagguucugccug

SEQ ID NO: 2775125 - RNA, 23 nt, Human
cagcgggaauggcagcugccacg

SEQ ID NO: 2775126 - RNA, 22 nt, Human
cagcgggaauggcagcugccac

SEQ ID NO: 2775127 - RNA, 15 nt, Human
cagccccggcccugg

SEQ ID NO: 2775128 - RNA, 16 nt, Human
cagccccggcccuggg

SEQ ID NO: 2775129 - RNA, 17 nt, Human
cagccccggcccugggc

SEQ ID NO: 2775130 - RNA, 19 nt, Human
cagccccggcccugggcuc

SEQ ID NO: 2775131 - RNA, 12 nt, Human
cagccccuagcc

SEQ ID NO: 2775132 - RNA, 13 nt, Human
cagccccuagccc

SEQ ID NO: 2775133 - RNA, 15 nt, Human
cagccccuagcccag

SEQ ID NO: 2775134 - RNA, 12 nt, Human
cagccccuagaa

SEQ ID NO: 2775135 - RNA, 13 nt, Human
cagccccuagaaa

SEQ ID NO: 2775136 - RNA, 16 nt, Human
cagccccuagaaaccc

SEQ ID NO: 2775137 - RNA, 20 nt, Human
cagccccuagaaacccaagc

SEQ ID NO: 2775138 - RNA, 21 nt, Human
cagccccuagaaacccaagcu

SEQ ID NO: 2775139 - RNA, 24 nt, Human
cagccccuagaaacccaagcuccu

SEQ ID NO: 2775140 - RNA, 16 nt, Human
cagccccuagcccagg

SEQ ID NO: 2775141 - RNA, 17 nt, Human
cagccccuagcccagga

SEQ ID NO: 2775142 - RNA, 22 nt, Human
cagccccuagcccaggagagag

SEQ ID NO: 2775143 - RNA, 23 nt, Human
cagccccuagcccaggagagaga

SEQ ID NO: 2775144 - RNA, 24 nt, Human
cagccccuagcccaggagagagaa

SEQ ID NO: 2775145 - RNA, 12 nt, Human
cagccccuagga

SEQ ID NO: 2775146 - RNA, 13 nt, Human
cagccccuaggag

SEQ ID NO: 2775147 - RNA, 15 nt, Human
cagccccuccaucug

SEQ ID NO: 2775148 - RNA, 17 nt, Human
cagccccuccaucugua

SEQ ID NO: 2775149 - RNA, 11 nt, Human
cagccccuccc

SEQ ID NO: 2775150 - RNA, 16 nt, Human
cagccccgagcugucc

SEQ ID NO: 2775151 - RNA, 17 nt, Human
cagccccgagcuguccc

SEQ ID NO: 2775152 - RNA, 18 nt, Human
cagccccgcgccuccuuc

SEQ ID NO: 2775153 - RNA, 16 nt, Human
cagccccgcgccuccu

SEQ ID NO: 2775154 - RNA, 14 nt, Human
cagccccuccccca

SEQ ID NO: 2775155 - RNA, 21 nt, Human
cagccccucccccaucuccca

SEQ ID NO: 2775156 - RNA, 22 nt, Human
cagccccucccccaucucccac

SEQ ID NO: 2775157 - RNA, 20 nt, Human
cagccccugauccugugaag

SEQ ID NO: 2775158 - RNA, 21 nt, Human
cagccccugauccugugaagu

SEQ ID NO: 2775159 - RNA, 18 nt, Human
cagcccuggggcugggcc

SEQ ID NO: 2775160 - RNA, 19 nt, Human
cagcccuggggcugggccc

SEQ ID NO: 2775161 - RNA, 13 nt, Human
cagccccugcaca

SEQ ID NO: 2775162 - RNA, 14 nt, Human
cagccccugauccu

SEQ ID NO: 2775163 - RNA, 19 nt, Human
cagccccugauccugugaa

SEQ ID NO: 2775164 - RNA, 22 nt, Human
cagccccauucugccugcccag

SEQ ID NO: 2775165 - RNA, 20 nt, Human
cagccccauucugccugccc

SEQ ID NO: 2775166 - RNA, 19 nt, Human
cagccccauucugccugcc

SEQ ID NO: 2775167 - RNA, 24 nt, Human
cagccccauucugccugcccaggc

SEQ ID NO: 2775168 - RNA, 23 nt, Human
cagccccauucugccugcccagg

SEQ ID NO: 2775169 - RNA, 14 nt, Human
cagcccccagcccc

SEQ ID NO: 2775170 - RNA, 15 nt, Human
cagcccccagccccu

SEQ ID NO: 2775171 - RNA, 17 nt, Human
cagcccccagccccucc

SEQ ID NO: 2775172 - RNA, 13 nt, Human
cagcaguucuguu

SEQ ID NO: 2775173 - RNA, 14 nt, Human
cagcaguucuguua

SEQ ID NO: 2775174 - RNA, 19 nt, Human
cagcauagcaagacacauc

SEQ ID NO: 2775175 - RNA, 15 nt, Human
cagcacagcucccug

SEQ ID NO: 2775176 - RNA, 16 nt, Human
cagcacagcucccugc

SEQ ID NO: 2775177 - RNA, 17 nt, Human
cagcacagcucccugcc

SEQ ID NO: 2775178 - RNA, 14 nt, Human
cagcacauauuuuc

SEQ ID NO: 2775179 - RNA, 13 nt, Human
cagcaccacccua

SEQ ID NO: 2775180 - RNA, 15 nt, Human
cagcacaugcuggcc

SEQ ID NO: 2775181 - RNA, 16 nt, Human
cagcacaugcuggcca

SEQ ID NO: 2775182 - RNA, 17 nt, Human
cagcacaugcuggccag

SEQ ID NO: 2775183 - RNA, 18 nt, Human
cagcacaugcuggccagc

SEQ ID NO: 2775184 - RNA, 20 nt, Human
cagcacaugcuggccagccu

SEQ ID NO: 2775185 - RNA, 22 nt, Human
cagcacaugcuggccagccugg

SEQ ID NO: 2775186 - RNA, 11 nt, Human
cagcacugaaa

SEQ ID NO: 2775187 - RNA, 12 nt, Human
cagcacugaaaa

SEQ ID NO: 2775188 - RNA, 14 nt, Human
cagcacugaaaaua

SEQ ID NO: 2775189 - RNA, 14 nt, Human
cagauuugagcuca

SEQ ID NO: 2775190 - RNA, 13 nt, Human
cagauuugagcuc

SEQ ID NO: 2775191 - RNA, 20 nt, Human
cagauuugcuaauuuauccu

SEQ ID NO: 2775192 - RNA, 14 nt, Human
cagauuugggcugg

SEQ ID NO: 2775193 - RNA, 15 nt, Human
cagauuugggcugga

SEQ ID NO: 2775194 - RNA, 18 nt, Human
cagauuugggcuggaaca

SEQ ID NO: 2775195 - RNA, 16 nt, Human
cagauuugagcucagc

SEQ ID NO: 2775196 - RNA, 21 nt, Human
cagauugcaacaggcugggcu

SEQ ID NO: 2775197 - RNA, 12 nt, Human
cagauuggaagg

SEQ ID NO: 2775198 - RNA, 15 nt, Human
cagauuggaaggaga

SEQ ID NO: 2775199 - RNA, 21 nt, Human
cagauuggaaggagacacaga

SEQ ID NO: 2775200 - RNA, 22 nt, Human
cagauuggaaggagacacagau

SEQ ID NO: 2775201 - RNA, 23 nt, Human
cagauuggaaggagacacagaug

SEQ ID NO: 2775202 - RNA, 17 nt, Human
cagccagauccucuugg

SEQ ID NO: 2775203 - RNA, 21 nt, Human
cagauaccauacucauuucua

SEQ ID NO: 2775204 - RNA, 15 nt, Human
cagauaccucacccu

SEQ ID NO: 2775205 - RNA, 15 nt, Human
cagauacauuucccu

SEQ ID NO: 2775206 - RNA, 12 nt, Human
cagauacaucac

SEQ ID NO: 2775207 - RNA, 13 nt, Human
cagauacaucacu

SEQ ID NO: 2775208 - RNA, 14 nt, Human
cagauacaucacug

SEQ ID NO: 2775209 - RNA, 15 nt, Human
cagauacaucacugc

SEQ ID NO: 2775210 - RNA, 16 nt, Human
cagauacaucacugcu

SEQ ID NO: 2775211 - RNA, 19 nt, Human
cagauacaucacugcuuga

SEQ ID NO: 2775212 - RNA, 14 nt, Human
cagauacugcugug

SEQ ID NO: 2775213 - RNA, 23 nt, Human
cagauacaggaaaagcugcugac

SEQ ID NO: 2775214 - RNA, 18 nt, Human
cagagguuaucuguccca

SEQ ID NO: 2775215 - RNA, 19 nt, Human
cagagguuaucugucccag

SEQ ID NO: 2775216 - RNA, 21 nt, Human
cagagguuaucugucccaggu

SEQ ID NO: 2775217 - RNA, 21 nt, Human
cagagguucuuugagggacug

SEQ ID NO: 2775218 - RNA, 19 nt, Human
cagagguggccagagcugg

SEQ ID NO: 2775219 - RNA, 21 nt, Human
cagagguggccagagcuggga

SEQ ID NO: 2775220 - RNA, 14 nt, Human
cagaggugcuucac

SEQ ID NO: 2775221 - RNA, 21 nt, Human
cagaggugcuucacccugagu

SEQ ID NO: 2775222 - RNA, 14 nt, Human
cagagguggccaga

SEQ ID NO: 2775223 - RNA, 17 nt, Human
cagagguggccagagcu

SEQ ID NO: 2775224 - RNA, 23 nt, Human
cagagcuggaccaguggugccuu

SEQ ID NO: 2775225 - RNA, 13 nt, Human
cagagcugggagg

SEQ ID NO: 2775226 - RNA, 14 nt, Human
cagagcugggaggc

SEQ ID NO: 2775227 - RNA, 15 nt, Human
cagagcugggaggca

SEQ ID NO: 2775228 - RNA, 23 nt, Human
cagagcugggaggcauggcccug

SEQ ID NO: 2775229 - RNA, 13 nt, Human
cagagguccagcc

SEQ ID NO: 2775230 - RNA, 14 nt, Human
cagagguccagccc

SEQ ID NO: 2775231 - RNA, 15 nt, Human
cagagguccagccca

SEQ ID NO: 2775232 - RNA, 16 nt, Human
cagagguccagcccau

SEQ ID NO: 2775233 - RNA, 17 nt, Human
cagagguccagcccauc

SEQ ID NO: 2775234 - RNA, 20 nt, Human
cagagcugggaggcauggcc

SEQ ID NO: 2775235 - RNA, 16 nt, Human
cagagcuggaccagug

SEQ ID NO: 2775236 - RNA, 21 nt, Human
cagagcguggcugugcucuca

SEQ ID NO: 2775237 - RNA, 17 nt, Human
cagagcggaggcugugu

SEQ ID NO: 2775238 - RNA, 19 nt, Human
cagagcggaggcugugugc

SEQ ID NO: 2775239 - RNA, 20 nt, Human
cagagcuaagggugggugcu

SEQ ID NO: 2775240 - RNA, 21 nt, Human
cagagcuaagggugggugcuc

SEQ ID NO: 2775241 - RNA, 22 nt, Human
cagagcuaagggugggugcuca

SEQ ID NO: 2775242 - RNA, 15 nt, Human
cagagcgagacucca

SEQ ID NO: 2775243 - RNA, 20 nt, Human
cagagcgagagucugucuca

SEQ ID NO: 2775244 - RNA, 14 nt, Human
cagagccugcaguu

SEQ ID NO: 2775245 - RNA, 20 nt, Human
cagagaggccuuuuggaaug

SEQ ID NO: 2775246 - RNA, 13 nt, Human
cagagagagagaa

SEQ ID NO: 2775247 - RNA, 15 nt, Human
cagagagagagaaag

SEQ ID NO: 2775248 - RNA, 17 nt, Human
cagagagagagaaagag

SEQ ID NO: 2775249 - RNA, 21 nt, Human
cagagagccauuuugugaaug

SEQ ID NO: 2775250 - RNA, 23 nt, Human
cagagagccauuuugugaaugga

SEQ ID NO: 2775251 - RNA, 15 nt, Human
cagagagccauuuug

SEQ ID NO: 2775252 - RNA, 18 nt, Human
cagagagccauuuuguga

SEQ ID NO: 2775253 - RNA, 19 nt, Human
cagagagccauuuugugaa

SEQ ID NO: 2775254 - RNA, 20 nt, Human
cagagagccauuuugugaau

SEQ ID NO: 2775255 - RNA, 20 nt, Human
cagagagcaacucugagauc

SEQ ID NO: 2775256 - RNA, 22 nt, Human
cagagagaggggagaagccugg

SEQ ID NO: 2775257 - RNA, 18 nt, Human
cagagagcggucucaggc

SEQ ID NO: 2775258 - RNA, 21 nt, Human
cagagagcggucucaggcugg

SEQ ID NO: 2775259 - RNA, 20 nt, Human
cagagagcuuagccuggagc

SEQ ID NO: 2775260 - RNA, 22 nt, Human
cagagagcggucucaggcuggu

SEQ ID NO: 2775261 - RNA, 17 nt, Human
aaaaauagugucuuugu

SEQ ID NO: 2775262 - RNA, 14 nt, Human
aaaaauauaacuua

SEQ ID NO: 2775263 - RNA, 14 nt, Human
aaaaauagcaacuu

SEQ ID NO: 2775264 - RNA, 15 nt, Human
aaaaauagcaacuug

SEQ ID NO: 2775265 - RNA, 17 nt, Human
aaaaauagcaacuugug

SEQ ID NO: 2775266 - RNA, 16 nt, Human
gggaccaacugggccc

SEQ ID NO: 2775267 - RNA, 12 nt, Human
gggacaggccuc

SEQ ID NO: 2775268 - RNA, 13 nt, Human
gggacaggccuca

SEQ ID NO: 2775269 - RNA, 17 nt, Human
gggacaggccucaccuc

SEQ ID NO: 2775270 - RNA, 21 nt, Human
gggacagcuccuucuguccua

SEQ ID NO: 2775271 - RNA, 18 nt, Human
gggacagaggccugcccg

SEQ ID NO: 2775272 - RNA, 14 nt, Human
gggacagauucagu

SEQ ID NO: 2775273 - RNA, 20 nt, Human
aaaaauauggaacuucuaau

SEQ ID NO: 2775274 - RNA, 12 nt, Human
aaaaaucaucua

SEQ ID NO: 2775275 - RNA, 17 nt, Human
aaaaaucaucuauuuug

SEQ ID NO: 2775276 - RNA, 20 nt, Human
aaaaaucaucuauuuugaug

SEQ ID NO: 2775277 - RNA, 20 nt, Human
aaaaaucacuugauucauaa

SEQ ID NO: 2775278 - RNA, 17 nt, Human
aaaaaucacaaaaauuu

SEQ ID NO: 2775279 - RNA, 18 nt, Human
aaaaaucacaauuuuuaa

SEQ ID NO: 2775280 - RNA, 20 nt, Human
aaaaaucacaauuuuuaaug

SEQ ID NO: 2775281 - RNA, 15 nt, Human
aaaaauauauuuaau

SEQ ID NO: 2775282 - RNA, 13 nt, Human
aaaaauauauuua

SEQ ID NO: 2775283 - RNA, 15 nt, Human
aaaaauauauacuaa

SEQ ID NO: 2775284 - RNA, 19 nt, Human
aaaaauauauuuaaugaua

SEQ ID NO: 2775285 - RNA, 23 nt, Human
aaaaauaugaccacacuccagcu

SEQ ID NO: 2775286 - RNA, 21 nt, Human
aaaaauaugaccacacuccag

SEQ ID NO: 2775287 - RNA, 12 nt, Human
gggaagccuuua

SEQ ID NO: 2775288 - RNA, 18 nt, Human
gggaagcgcucagaacag

SEQ ID NO: 2775289 - RNA, 12 nt, Human
gggaagccagac

SEQ ID NO: 2775290 - RNA, 14 nt, Human
gggaagagggggcg

SEQ ID NO: 2775291 - RNA, 17 nt, Human
gggacagaggccugccc

SEQ ID NO: 2775292 - RNA, 15 nt, Human
gggacagaggccugc

SEQ ID NO: 2775293 - RNA, 23 nt, Human
gggaagcggagguugcagggagc

SEQ ID NO: 2775294 - RNA, 13 nt, Human
gggaagcugcagc

SEQ ID NO: 2775295 - RNA, 16 nt, Human
gggaagcugcagcuug

SEQ ID NO: 2775296 - RNA, 19 nt, Human
gggaagcugcagcuuggga

SEQ ID NO: 2775297 - RNA, 22 nt, Human
gggaagcugcagcuugggagag

SEQ ID NO: 2775298 - RNA, 14 nt, Human
gggaaggacagaaa

SEQ ID NO: 2775299 - RNA, 19 nt, Human
gggaaggacagaaaggaga

SEQ ID NO: 2775300 - RNA, 21 nt, Human
gggaaggaggguacagcuggg

SEQ ID NO: 2775301 - RNA, 16 nt, Human
gggaagcuggccugag

SEQ ID NO: 2775302 - RNA, 15 nt, Human
gggaagcuggccuga

SEQ ID NO: 2775303 - RNA, 16 nt, Human
gggacagcuccuucug

SEQ ID NO: 2775304 - RNA, 21 nt, Human
aaaacauuggauuauccugag

SEQ ID NO: 2775305 - RNA, 22 nt, Human
aaaacauugccuuugaauguua

SEQ ID NO: 2775306 - RNA, 14 nt, Human
aaaacauuggauua

SEQ ID NO: 2775307 - RNA, 19 nt, Human
aaaacauguaauauaaaga

SEQ ID NO: 2775308 - RNA, 16 nt, Human
aaaacauagcaucuca

SEQ ID NO: 2775309 - RNA, 19 nt, Human
aaaacauauucuugugcuu

SEQ ID NO: 2775310 - RNA, 14 nt, Human
aaaaaugcuuugcu

SEQ ID NO: 2775311 - RNA, 15 nt, Human
aaaaauggaacugug

SEQ ID NO: 2775312 - RNA, 12 nt, Human
aaaaauggauau

SEQ ID NO: 2775313 - RNA, 15 nt, Human
aaaaauggauauuau

SEQ ID NO: 2775314 - RNA, 23 nt, Human
aaaaauggauauuauuagaaauu

SEQ ID NO: 2775315 - RNA, 21 nt, Human
aaaacaggucuucaucgaauc

SEQ ID NO: 2775316 - RNA, 18 nt, Human
aaaacagguggagaaauu

SEQ ID NO: 2775317 - RNA, 13 nt, Human
aaaacaguauuua

SEQ ID NO: 2775318 - RNA, 16 nt, Human
aaaacaguauuuauuu

SEQ ID NO: 2775319 - RNA, 17 nt, Human
aaaacaguauuuauuuu

SEQ ID NO: 2775320 - RNA, 18 nt, Human
aaaacaguauuuauuuug

SEQ ID NO: 2775321 - RNA, 19 nt, Human
aaaacaguauuuauuuugu

SEQ ID NO: 2775322 - RNA, 20 nt, Human
aaaacaguauuuauuuugua

SEQ ID NO: 2775323 - RNA, 21 nt, Human
aaaacaguauuuauuuuguaa

SEQ ID NO: 2775324 - RNA, 23 nt, Human
aaaacaguauuuauuuuguaauu

SEQ ID NO: 2775325 - RNA, 14 nt, Human
aaaaaugccuuuga

SEQ ID NO: 2775326 - RNA, 15 nt, Human
aaaaaugccuuugag

SEQ ID NO: 2775327 - RNA, 18 nt, Human
aaaaaugccuuugagaca

SEQ ID NO: 2775328 - RNA, 13 nt, Human
aaaaaugccuuug

SEQ ID NO: 2775329 - RNA, 24 nt, Human
aaaaaugccuuugagacaguuucu

SEQ ID NO: 2775330 - RNA, 12 nt, Human
aaaaaugcuaau

SEQ ID NO: 2775331 - RNA, 13 nt, Human
aaaaaugcuaaua

SEQ ID NO: 2775332 - RNA, 17 nt, Human
aaaaaugcuaauauuaa

SEQ ID NO: 2775333 - RNA, 19 nt, Human
aaaaaugccuuugagacag

SEQ ID NO: 2775334 - RNA, 20 nt, Human
aaaaaugccuuugagacagu

SEQ ID NO: 2775335 - RNA, 21 nt, Human
aaaaaugccuuugagacaguu

SEQ ID NO: 2775336 - RNA, 22 nt, Human
aaaaaugccuuugagacaguuu

SEQ ID NO: 2775337 - RNA, 16 nt, Human
aaaacuccaccuuccc

SEQ ID NO: 2775338 - RNA, 17 nt, Human
aaaacuccaccuuccca

SEQ ID NO: 2775339 - RNA, 16 nt, Human
aaaacucccauuuacg

SEQ ID NO: 2775340 - RNA, 16 nt, Human
aaaacuccgcccccag

SEQ ID NO: 2775341 - RNA, 19 nt, Human
aaaacuccgcccccagccu

SEQ ID NO: 2775342 - RNA, 20 nt, Human
aaaacuccgcccccagccua

SEQ ID NO: 2775343 - RNA, 21 nt, Human
aaaacuggcaacauuccaaga

SEQ ID NO: 2775344 - RNA, 13 nt, Human
aaaacuggccuga

SEQ ID NO: 2775345 - RNA, 19 nt, Human
aaaacugggccuguagcuc

SEQ ID NO: 2775346 - RNA, 17 nt, Human
aaaacuguacauuuaaa

SEQ ID NO: 2775347 - RNA, 20 nt, Human
aaaacuguacauuuaaaauu

SEQ ID NO: 2775348 - RNA, 12 nt, Human
aaaacugcuuuu

SEQ ID NO: 2775349 - RNA, 23 nt, Human
aaaacugcuuuuuuuuuuccagc

SEQ ID NO: 2775350 - RNA, 17 nt, Human
aaaacuggaauaagaag

SEQ ID NO: 2775351 - RNA, 21 nt, Human
aaaacuggaauaagaagcaaa

SEQ ID NO: 2775352 - RNA, 14 nt, Human
aaaaccacaaaggc

SEQ ID NO: 2775353 - RNA, 21 nt, Human
aaaaccacaaaggccaaacug

SEQ ID NO: 2775354 - RNA, 12 nt, Human
aaaaccacacaa

SEQ ID NO: 2775355 - RNA, 15 nt, Human
aaaaccacacaaaga

SEQ ID NO: 2775356 - RNA, 20 nt, Human
aaaaccuaaguccuuuaugu

SEQ ID NO: 2775357 - RNA, 21 nt, Human
aaaaccuaaguccuuuaugug

SEQ ID NO: 2775358 - RNA, 15 nt, Human
aaaaccuacauauuc

SEQ ID NO: 2775359 - RNA, 16 nt, Human
aaaaccuacauauucc

SEQ ID NO: 2775360 - RNA, 15 nt, Human
aaaacccucaagggc

SEQ ID NO: 2775361 - RNA, 12 nt, Human
aaaacucagccu

SEQ ID NO: 2775362 - RNA, 19 nt, Human
aaaacucagccugggacag

SEQ ID NO: 2775363 - RNA, 15 nt, Human
aaaacuauuaaggau

SEQ ID NO: 2775364 - RNA, 16 nt, Human
aaaacuauucaugcua

SEQ ID NO: 2775365 - RNA, 20 nt, Human
aaaacuauucaugcuaccca

SEQ ID NO: 2775366 - RNA, 13 nt, Human
aaaaccugacaaa

SEQ ID NO: 2775367 - RNA, 15 nt, Human
aaaacuaguaguucu

SEQ ID NO: 2775368 - RNA, 12 nt, Human
aaaacuauacaa

SEQ ID NO: 2775369 - RNA, 13 nt, Human
aaaacuauacaac

SEQ ID NO: 2775370 - RNA, 20 nt, Human
aaaacuauacuugaacaaaa

SEQ ID NO: 2775371 - RNA, 21 nt, Human
aaaacuauacuugaacaaaag

SEQ ID NO: 2775372 - RNA, 15 nt, Human
gggauugcugccacu

SEQ ID NO: 2775373 - RNA, 17 nt, Human
gggauugcugccacuuu

SEQ ID NO: 2775374 - RNA, 15 nt, Human
gggauuacaggugug

SEQ ID NO: 2775375 - RNA, 12 nt, Human
gggauuacaggu

SEQ ID NO: 2775376 - RNA, 20 nt, Human
gggauuacaggcgugagcca

SEQ ID NO: 2775377 - RNA, 21 nt, Human
gggauuacaggcuccugccac

SEQ ID NO: 2775378 - RNA, 16 nt, Human
gggauuacaggcuccu

SEQ ID NO: 2775379 - RNA, 13 nt, Human
gggauuacaggcu

SEQ ID NO: 2775380 - RNA, 14 nt, Human
gggauuacaggcgu

SEQ ID NO: 2775381 - RNA, 20 nt, Human
gggcaacaaagugagacucc

SEQ ID NO: 2775382 - RNA, 21 nt, Human
gggcaaaugacaugcacugac

SEQ ID NO: 2775383 - RNA, 22 nt, Human
gggcaaaugacaugcacugacc

SEQ ID NO: 2775384 - RNA, 18 nt, Human
gggcaacccccagccugc

SEQ ID NO: 2775385 - RNA, 16 nt, Human
gggcaacccccagccu

SEQ ID NO: 2775386 - RNA, 22 nt, Human
aaaagguagcuuaccugacaca

SEQ ID NO: 2775387 - RNA, 10 nt, Human
aaaaggguca

SEQ ID NO: 2775388 - RNA, 21 nt, Human
aaaagggucaaugcuauuuuu

SEQ ID NO: 2775389 - RNA, 12 nt, Human
aaaagggucaga

SEQ ID NO: 2775390 - RNA, 13 nt, Human
aaaagggucagag

SEQ ID NO: 2775391 - RNA, 13 nt, Human
gggcaggcugggc

SEQ ID NO: 2775392 - RNA, 12 nt, Human
gggcaggcuggg

SEQ ID NO: 2775393 - RNA, 15 nt, Human
gggcaggcugggcca

SEQ ID NO: 2775394 - RNA, 14 nt, Human
gggcaggcugggcc

SEQ ID NO: 2775395 - RNA, 16 nt, Human
gggcaggcugggccau

SEQ ID NO: 2775396 - RNA, 15 nt, Human
gggcaggcaugaagu

SEQ ID NO: 2775397 - RNA, 18 nt, Human
gggcagccucccccggcu

SEQ ID NO: 2775398 - RNA, 15 nt, Human
gggcagccucccccg

SEQ ID NO: 2775399 - RNA, 22 nt, Human
gggcaacagagcaagauccugu

SEQ ID NO: 2775400 - RNA, 21 nt, Human
gggcaacauuguucaccuuug

SEQ ID NO: 2775401 - RNA, 16 nt, Human
gggcagagucacacgg

SEQ ID NO: 2775402 - RNA, 12 nt, Human
gggcagagucac

SEQ ID NO: 2775403 - RNA, 22 nt, Human
gggcagaucuuggacucaugag

SEQ ID NO: 2775404 - RNA, 20 nt, Human
gggcagaucuuggacucaug

SEQ ID NO: 2775405 - RNA, 18 nt, Human
gggcagaucuuggacuca

SEQ ID NO: 2775406 - RNA, 21 nt, Human
gggagcaggcggugggcaccc

SEQ ID NO: 2775407 - RNA, 15 nt, Human
gggagcaggcggugg

SEQ ID NO: 2775408 - RNA, 21 nt, Human
gggagcaggagauugagaagg

SEQ ID NO: 2775409 - RNA, 12 nt, Human
gggagcaggaga

SEQ ID NO: 2775410 - RNA, 13 nt, Human
gggagcaggagau

SEQ ID NO: 2775411 - RNA, 18 nt, Human
gggagcaggagauugaga

SEQ ID NO: 2775412 - RNA, 15 nt, Human
gggaggccccuucuc

SEQ ID NO: 2775413 - RNA, 20 nt, Human
gggaggcggagcuugcagug

SEQ ID NO: 2775414 - RNA, 14 nt, Human
gggagacacuggcc

SEQ ID NO: 2775415 - RNA, 19 nt, Human
gggagacacuggccccuca

SEQ ID NO: 2775416 - RNA, 19 nt, Human
gggagauggaguucuugug

SEQ ID NO: 2775417 - RNA, 18 nt, Human
gggagagugucaaccaga

SEQ ID NO: 2775418 - RNA, 20 nt, Human
gggagagugucaaccagaca

SEQ ID NO: 2775419 - RNA, 21 nt, Human
gggagagugucaaccagacag

SEQ ID NO: 2775420 - RNA, 16 nt, Human
gggagaguuccagagg

SEQ ID NO: 2775421 - RNA, 16 nt, Human
gggagcagacaggagg

SEQ ID NO: 2775422 - RNA, 16 nt, Human
gggagaaccucaggcu

SEQ ID NO: 2775423 - RNA, 16 nt, Human
aaaagcagcucucccc

SEQ ID NO: 2775424 - RNA, 17 nt, Human
aaaagcagcucuccccu

SEQ ID NO: 2775425 - RNA, 19 nt, Human
aaaagcaguaaauuugcua

SEQ ID NO: 2775426 - RNA, 21 nt, Human
aaaagcacacucauccccuca

SEQ ID NO: 2775427 - RNA, 11 nt, Human
aaaagcaccuc

SEQ ID NO: 2775428 - RNA, 19 nt, Human
gggauggacgaucucccac

SEQ ID NO: 2775429 - RNA, 16 nt, Human
gggaugguccuggggc

SEQ ID NO: 2775430 - RNA, 15 nt, Human
gggaugguccugggg

SEQ ID NO: 2775431 - RNA, 14 nt, Human
gggaugggccuggc

SEQ ID NO: 2775432 - RNA, 15 nt, Human
gggauggaggggagu

SEQ ID NO: 2775433 - RNA, 14 nt, Human
gggaugugggaggg

SEQ ID NO: 2775434 - RNA, 12 nt, Human
gggauggugccc

SEQ ID NO: 2775435 - RNA, 23 nt, Human
gggauggggggggauguggauca

SEQ ID NO: 2775436 - RNA, 19 nt, Human
gggauggugggcuucaggg

SEQ ID NO: 2775437 - RNA, 13 nt, Human
gggauggugcccu

SEQ ID NO: 2775438 - RNA, 22 nt, Human
gggauguacaaggcgaucccau

SEQ ID NO: 2775439 - RNA, 20 nt, Human
aaaaguagguuuacauucau

SEQ ID NO: 2775440 - RNA, 12 nt, Human
aaaaguauuuug

SEQ ID NO: 2775441 - RNA, 13 nt, Human
aaaaguauuuuga

SEQ ID NO: 2775442 - RNA, 14 nt, Human
aaaaguauuuugaa

SEQ ID NO: 2775443 - RNA, 15 nt, Human
aaaaguauuuugaag

SEQ ID NO: 2775444 - RNA, 16 nt, Human
aaaaguauuuugaagu

SEQ ID NO: 2775445 - RNA, 18 nt, Human
aaaaguauuuugaaguuu

SEQ ID NO: 2775446 - RNA, 12 nt, Human
aaaaucugucca

SEQ ID NO: 2775447 - RNA, 18 nt, Human
aaaaucuugugcuagaau

SEQ ID NO: 2775448 - RNA, 19 nt, Human
aaaaucuugugcuagaaua

SEQ ID NO: 2775449 - RNA, 22 nt, Human
aaaaucuugugcuagaauacuu

SEQ ID NO: 2775450 - RNA, 14 nt, Human
aaaaucuuggaagu

SEQ ID NO: 2775451 - RNA, 20 nt, Human
aaaaucuuggagacccugca

SEQ ID NO: 2775452 - RNA, 18 nt, Human
aaaaucuuauaguucuag

SEQ ID NO: 2775453 - RNA, 19 nt, Human
aaaaucuuauaguucuagg

SEQ ID NO: 2775454 - RNA, 20 nt, Human
aaaaucuuauaguucuaggc

SEQ ID NO: 2775455 - RNA, 23 nt, Human
aaaaugaaugaggucugggcuag

SEQ ID NO: 2775456 - RNA, 22 nt, Human
aaaaugagccgugccaaagucu

SEQ ID NO: 2775457 - RNA, 20 nt, Human
aaaaugaguugugaaaguuu

SEQ ID NO: 2775458 - RNA, 16 nt, Human
aaaaugaggacauguu

SEQ ID NO: 2775459 - RNA, 17 nt, Human
aaaaugcccuuaaauca

SEQ ID NO: 2775460 - RNA, 13 nt, Human
aaaaugaaagaug

SEQ ID NO: 2775461 - RNA, 14 nt, Human
aaaaugaaagauga

SEQ ID NO: 2775462 - RNA, 15 nt, Human
aaaaugaaagaugau

SEQ ID NO: 2775463 - RNA, 17 nt, Human
aaaaugaaaauaaguga

SEQ ID NO: 2775464 - RNA, 15 nt, Human
aaaaugaaauauuuu

SEQ ID NO: 2775465 - RNA, 15 nt, Human
aaaaugaaauccuuu

SEQ ID NO: 2775466 - RNA, 14 nt, Human
aaaaugaauaucua

SEQ ID NO: 2775467 - RNA, 18 nt, Human
aaaaugaauaucuauuaa

SEQ ID NO: 2775468 - RNA, 22 nt, Human
aaaaugaauaucuauuaauaua

SEQ ID NO: 2775469 - RNA, 14 nt, Human
gggccaggacugag

SEQ ID NO: 2775470 - RNA, 17 nt, Human
gggccaggacugagccc

SEQ ID NO: 2775471 - RNA, 13 nt, Human
gggccagccccuc

SEQ ID NO: 2775472 - RNA, 16 nt, Human
gggccagccccuccau

SEQ ID NO: 2775473 - RNA, 15 nt, Human
aaaaugccuuugaga

SEQ ID NO: 2775474 - RNA, 17 nt, Human
aaaaugccuuugagaca

SEQ ID NO: 2775475 - RNA, 22 nt, Human
aaaaugccuuugagacaguuuc

SEQ ID NO: 2775476 - RNA, 23 nt, Human
aaaaugccuuugagacaguuucu

SEQ ID NO: 2775477 - RNA, 16 nt, Human
aaaaugcuaauauuaa

SEQ ID NO: 2775478 - RNA, 11 nt, Human
aaaaugccuuu

SEQ ID NO: 2775479 - RNA, 12 nt, Human
aaaaugccuuug

SEQ ID NO: 2775480 - RNA, 14 nt, Human
aaaaugccuuugag

SEQ ID NO: 2775481 - RNA, 22 nt, Human
gggccaguccugccuggccagg

SEQ ID NO: 2775482 - RNA, 21 nt, Human
gggccaguccugccuggccag

SEQ ID NO: 2775483 - RNA, 20 nt, Human
gggccaguccugccuggcca

SEQ ID NO: 2775484 - RNA, 19 nt, Human
gggccaguccugccuggcc

SEQ ID NO: 2775485 - RNA, 18 nt, Human
gggccaguccugccuggc

SEQ ID NO: 2775486 - RNA, 15 nt, Human
gggccaguccugccu

SEQ ID NO: 2775487 - RNA, 18 nt, Human
gggccagggucuguguga

SEQ ID NO: 2775488 - RNA, 20 nt, Human
gggccagggcugcccugaga

SEQ ID NO: 2775489 - RNA, 21 nt, Human
gggccagggcugcccugagaa

SEQ ID NO: 2775490 - RNA, 18 nt, Human
gggccagggcccugcaga

SEQ ID NO: 2775491 - RNA, 13 nt, Human
gggccagggcugc

SEQ ID NO: 2775492 - RNA, 12 nt, Human
gggccagggcug

SEQ ID NO: 2775493 - RNA, 16 nt, Human
gggccagggcccugca

SEQ ID NO: 2775494 - RNA, 14 nt, Human
gggccagggcccug

SEQ ID NO: 2775495 - RNA, 13 nt, Human
gggccagggcccu

SEQ ID NO: 2775496 - RNA, 23 nt, Human
gggcuacaccuuagccugcccuc

SEQ ID NO: 2775497 - RNA, 15 nt, Human
gggcgggaggauguu

SEQ ID NO: 2775498 - RNA, 12 nt, Human
gggcggcugggu

SEQ ID NO: 2775499 - RNA, 11 nt, Human
aaaaguauuuu

SEQ ID NO: 2775500 - RNA, 15 nt, Human
gggcggcucugaagc

SEQ ID NO: 2775501 - RNA, 19 nt, Human
gggccucaaaggcccgcuc

SEQ ID NO: 2775502 - RNA, 13 nt, Human
gggccuccugugu

SEQ ID NO: 2775503 - RNA, 15 nt, Human
gggccuccugugugu

SEQ ID NO: 2775504 - RNA, 14 nt, Human
gggccuccagaacu

SEQ ID NO: 2775505 - RNA, 14 nt, Human
gggccugagagaau

SEQ ID NO: 2775506 - RNA, 18 nt, Human
gggccugagccuggccag

SEQ ID NO: 2775507 - RNA, 18 nt, Human
gggccugcaggaccugcc

SEQ ID NO: 2775508 - RNA, 16 nt, Human
gggccugagccuggcc

SEQ ID NO: 2775509 - RNA, 15 nt, Human
gggccugagccuggc

SEQ ID NO: 2775510 - RNA, 15 nt, Human
gggccaguggggccu

SEQ ID NO: 2775511 - RNA, 16 nt, Human
gggccaguggggccug

SEQ ID NO: 2775512 - RNA, 17 nt, Human
gggccaguggggccugu

SEQ ID NO: 2775513 - RNA, 18 nt, Human
gggccaguggggccugug

SEQ ID NO: 2775514 - RNA, 19 nt, Human
gggccaguggggccugugg

SEQ ID NO: 2775515 - RNA, 20 nt, Human
gggccaguggggccugugga

SEQ ID NO: 2775516 - RNA, 20 nt, Human
gggccgaccagaggagccuu

SEQ ID NO: 2775517 - RNA, 13 nt, Human
gggccgaccagag

SEQ ID NO: 2775518 - RNA, 18 nt, Human
gggccgaauccccucccu

SEQ ID NO: 2775519 - RNA, 12 nt, Human
gggccgaggagg

SEQ ID NO: 2775520 - RNA, 20 nt, Human
gggccgaggaggugccugga

SEQ ID NO: 2775521 - RNA, 19 nt, Human
gggcccugguccuuccagg

SEQ ID NO: 2775522 - RNA, 14 nt, Human
aaacagugagccug

SEQ ID NO: 2775523 - RNA, 21 nt, Human
gggcugggcaaggaaaaagaa

SEQ ID NO: 2775524 - RNA, 14 nt, Human
aaacaccuagcuuu

SEQ ID NO: 2775525 - RNA, 18 nt, Human
aaacaccuccucauguac

SEQ ID NO: 2775526 - RNA, 15 nt, Human
aaacaccucugcuuu

SEQ ID NO: 2775527 - RNA, 15 nt, Human
aaacaccuagcuuua

SEQ ID NO: 2775528 - RNA, 15 nt, Human
aaacaccucacaccu

SEQ ID NO: 2775529 - RNA, 21 nt, Human
aaacaccucacaccucacucu

SEQ ID NO: 2775530 - RNA, 12 nt, Human
aaacaccccuca

SEQ ID NO: 2775531 - RNA, 14 nt, Human
aaacaucacacaca

SEQ ID NO: 2775532 - RNA, 22 nt, Human
aaacaucacacacacagacaga

SEQ ID NO: 2775533 - RNA, 13 nt, Human
aaacauaugauuu

SEQ ID NO: 2775534 - RNA, 15 nt, Human
aaacauaugauuuca

SEQ ID NO: 2775535 - RNA, 17 nt, Human
aaacauaugauuucacu

SEQ ID NO: 2775536 - RNA, 14 nt, Human
aaacauaugcacau

SEQ ID NO: 2775537 - RNA, 19 nt, Human
aaacaagcaaguucugaga

SEQ ID NO: 2775538 - RNA, 19 nt, Human
aaacaagaugcuggauguc

SEQ ID NO: 2775539 - RNA, 22 nt, Human
aaacaagaguuuucuuccuugu

SEQ ID NO: 2775540 - RNA, 9 nt, Human
aaacaaaac

SEQ ID NO: 2775541 - RNA, 13 nt, Human
aaacaaaacaaaa

SEQ ID NO: 2775542 - RNA, 14 nt, Human
aaacaaaacaaaac

SEQ ID NO: 2775543 - RNA, 21 nt, Human
aaaauuuuuuuggucuuuuug

SEQ ID NO: 2775544 - RNA, 13 nt, Human
aaacaaaaacacu

SEQ ID NO: 2775545 - RNA, 12 nt, Human
aaacaaaaacau

SEQ ID NO: 2775546 - RNA, 20 nt, Human
ggggacagcuccuucugucc

SEQ ID NO: 2775547 - RNA, 14 nt, Human
ggggacagcuccuu

SEQ ID NO: 2775548 - RNA, 12 nt, Human
ggggacagcucc

SEQ ID NO: 2775549 - RNA, 12 nt, Human
aaacaugaagug

SEQ ID NO: 2775550 - RNA, 13 nt, Human
aaacaugacacug

SEQ ID NO: 2775551 - RNA, 15 nt, Human
aaacaugacacugac

SEQ ID NO: 2775552 - RNA, 17 nt, Human
aaacaugacacugaccu

SEQ ID NO: 2775553 - RNA, 18 nt, Human
aaacauccuacaagacac

SEQ ID NO: 2775554 - RNA, 20 nt, Human
aaacauccuucaagaacucu

SEQ ID NO: 2775555 - RNA, 13 nt, Human
aaacaucuagaaa

SEQ ID NO: 2775556 - RNA, 18 nt, Human
aaacauccuucaagaacu

SEQ ID NO: 2775557 - RNA, 22 nt, Human
aaacauccuacaagacacagug

SEQ ID NO: 2775558 - RNA, 15 nt, Human
aaacaugagaugugu

SEQ ID NO: 2775559 - RNA, 12 nt, Human
ggggacaggccu

SEQ ID NO: 2775560 - RNA, 13 nt, Human
ggggacaggccuc

SEQ ID NO: 2775561 - RNA, 17 nt, Human
ggggacaggccucaccu

SEQ ID NO: 2775562 - RNA, 19 nt, Human
ggggacaggccucaccucu

SEQ ID NO: 2775563 - RNA, 15 nt, Human
ggggcaugaccagau

SEQ ID NO: 2775564 - RNA, 13 nt, Human
ggggacagggaug

SEQ ID NO: 2775565 - RNA, 20 nt, Human
ggggcaucugccccuccccc

SEQ ID NO: 2775566 - RNA, 17 nt, Human
ggggcaugaccagaugc

SEQ ID NO: 2775567 - RNA, 16 nt, Human
ggggcaugcuggggca

SEQ ID NO: 2775568 - RNA, 16 nt, Human
ggggccaaaaggaaaa

SEQ ID NO: 2775569 - RNA, 14 nt, Human
ggggccaccaaagc

SEQ ID NO: 2775570 - RNA, 18 nt, Human
ggggccaccaaagcugcc

SEQ ID NO: 2775571 - RNA, 19 nt, Human
ggggccaccaaagcugccc

SEQ ID NO: 2775572 - RNA, 15 nt, Human
ggggccaccugccug

SEQ ID NO: 2775573 - RNA, 16 nt, Human
ggggccaccugccugc

SEQ ID NO: 2775574 - RNA, 19 nt, Human
ggggccacuuuugacuagg

SEQ ID NO: 2775575 - RNA, 12 nt, Human
ggggccagagga

SEQ ID NO: 2775576 - RNA, 23 nt, Human
ggggccagaggaacuguccagag

SEQ ID NO: 2775577 - RNA, 14 nt, Human
ggggccuggaccug

SEQ ID NO: 2775578 - RNA, 12 nt, Human
ggggccugagag

SEQ ID NO: 2775579 - RNA, 15 nt, Human
ggggccugagagaau

SEQ ID NO: 2775580 - RNA, 13 nt, Human
aaaauuugagacu

SEQ ID NO: 2775581 - RNA, 19 nt, Human
aaaauuugagacuauuuaa

SEQ ID NO: 2775582 - RNA, 16 nt, Human
aaaauuugaacacugg

SEQ ID NO: 2775583 - RNA, 11 nt, Human
aaaauguguuc

SEQ ID NO: 2775584 - RNA, 13 nt, Human
aaaauguguugaa

SEQ ID NO: 2775585 - RNA, 15 nt, Human
aaaauguguugaaac

SEQ ID NO: 2775586 - RNA, 16 nt, Human
aaaauguguugaaacu

SEQ ID NO: 2775587 - RNA, 12 nt, Human
aaaaugugugug

SEQ ID NO: 2775588 - RNA, 16 nt, Human
aaaauguguguauucu

SEQ ID NO: 2775589 - RNA, 23 nt, Human
aaaauguguguauucuuaaaaug

SEQ ID NO: 2775590 - RNA, 20 nt, Human
aaaauuucacauuaauauuu

SEQ ID NO: 2775591 - RNA, 13 nt, Human
aaaauuucacauu

SEQ ID NO: 2775592 - RNA, 13 nt, Human
aaaauuucuaaga

SEQ ID NO: 2775593 - RNA, 12 nt, Human
aaaaugugaagu

SEQ ID NO: 2775594 - RNA, 15 nt, Human
aaaaugugaggaaga

SEQ ID NO: 2775595 - RNA, 23 nt, Human
aaaaugugaauugcaugacuugu

SEQ ID NO: 2775596 - RNA, 15 nt, Human
aaaaugugauguucu

SEQ ID NO: 2775597 - RNA, 17 nt, Human
aaaaugugauguucuaa

SEQ ID NO: 2775598 - RNA, 19 nt, Human
aaaaugugauguucuaagg

SEQ ID NO: 2775599 - RNA, 20 nt, Human
aaaaugugauguucuaaggc

SEQ ID NO: 2775600 - RNA, 21 nt, Human
aaaaugugauguucuaaggcu

SEQ ID NO: 2775601 - RNA, 23 nt, Human
aaaaugugcaguaauagcacugc

SEQ ID NO: 2775602 - RNA, 15 nt, Human
aaaaugucuucaagg

SEQ ID NO: 2775603 - RNA, 20 nt, Human
gggcuggcuuuucuguuucc

SEQ ID NO: 2775604 - RNA, 21 nt, Human
gggcugggaaacacuccuugc

SEQ ID NO: 2775605 - RNA, 16 nt, Human
gggcugggagcucugc

SEQ ID NO: 2775606 - RNA, 18 nt, Human
gggcugggagcucugcag

SEQ ID NO: 2775607 - RNA, 12 nt, Human
gggcugcccugc

SEQ ID NO: 2775608 - RNA, 13 nt, Human
gggcugcccugag

SEQ ID NO: 2775609 - RNA, 14 nt, Human
gggcugcccugaga

SEQ ID NO: 2775610 - RNA, 16 nt, Human
gggcugcccugagaag

SEQ ID NO: 2775611 - RNA, 13 nt, Human
gggcugcccuggu

SEQ ID NO: 2775612 - RNA, 14 nt, Human
gggcugcccuggug

SEQ ID NO: 2775613 - RNA, 13 nt, Human
gggcugcccugcc

SEQ ID NO: 2775614 - RNA, 18 nt, Human
gggcuggccccagggcac

SEQ ID NO: 2775615 - RNA, 22 nt, Human
gggcuggccccagggcacccug

SEQ ID NO: 2775616 - RNA, 19 nt, Human
gggcuggccucuggcucuc

SEQ ID NO: 2775617 - RNA, 15 nt, Human
gggcugcccuggugc

SEQ ID NO: 2775618 - RNA, 13 nt, Human
gggcuacaagagg

SEQ ID NO: 2775619 - RNA, 22 nt, Human
gggcucaagcaauccucucacc

SEQ ID NO: 2775620 - RNA, 13 nt, Human
gggcuauggacac

SEQ ID NO: 2775621 - RNA, 14 nt, Human
gggcuauggacaca

SEQ ID NO: 2775622 - RNA, 15 nt, Human
gggcuauggacacag

SEQ ID NO: 2775623 - RNA, 16 nt, Human
gggcuauggacacagg

SEQ ID NO: 2775624 - RNA, 17 nt, Human
gggcuauggacacaggg

SEQ ID NO: 2775625 - RNA, 17 nt, Human
gggcuaugguguggacu

SEQ ID NO: 2775626 - RNA, 15 nt, Human
gggcugcagagugcc

SEQ ID NO: 2775627 - RNA, 13 nt, Human
aaauaaugcugca

SEQ ID NO: 2775628 - RNA, 17 nt, Human
aaauaaugcuucagaua

SEQ ID NO: 2775629 - RNA, 21 nt, Human
aaauaaugcuucagauauuau

SEQ ID NO: 2775630 - RNA, 12 nt, Human
aaauaaugcaaa

SEQ ID NO: 2775631 - RNA, 20 nt, Human
aaauaagugguuauuucuca

SEQ ID NO: 2775632 - RNA, 16 nt, Human
aaaguuuugaaaagcu

SEQ ID NO: 2775633 - RNA, 18 nt, Human
aaaguuuugaaaagcuau

SEQ ID NO: 2775634 - RNA, 13 nt, Human
aaaguuuuaucaa

SEQ ID NO: 2775635 - RNA, 15 nt, Human
aaaguuuucccuuga

SEQ ID NO: 2775636 - RNA, 15 nt, Human
aaaguuuuccugaga

SEQ ID NO: 2775637 - RNA, 12 nt, Human
aaaguuuugaaa

SEQ ID NO: 2775638 - RNA, 13 nt, Human
aaaguuuugaaaa

SEQ ID NO: 2775639 - RNA, 14 nt, Human
aaaguuuugaaaag

SEQ ID NO: 2775640 - RNA, 19 nt, Human
aaaguuuugaaaagcuauu

SEQ ID NO: 2775641 - RNA, 19 nt, Human
aaaguuuugaguagauauu

SEQ ID NO: 2775642 - RNA, 21 nt, Human
aaaguuuugaguagauauuac

SEQ ID NO: 2775643 - RNA, 22 nt, Human
aaaguuuugaguagauauuacu

SEQ ID NO: 2775644 - RNA, 23 nt, Human
aaaguuuugaguagauauuacuu

SEQ ID NO: 2775645 - RNA, 24 nt, Human
aaaguuuugaguagauauuacuuu

SEQ ID NO: 2775646 - RNA, 15 nt, Human
aaauaagauucuaac

SEQ ID NO: 2775647 - RNA, 16 nt, Human
aaauaagauucuaacg

SEQ ID NO: 2775648 - RNA, 13 nt, Human
aaauaagauucua

SEQ ID NO: 2775649 - RNA, 14 nt, Human
aaauaagauucuaa

SEQ ID NO: 2775650 - RNA, 19 nt, Human
aaaguugacaccugagaaa

SEQ ID NO: 2775651 - RNA, 18 nt, Human
aaauaagggcagagucac

SEQ ID NO: 2775652 - RNA, 12 nt, Human
aaauaaguauuu

SEQ ID NO: 2775653 - RNA, 14 nt, Human
aaauaaguauuuau

SEQ ID NO: 2775654 - RNA, 22 nt, Human
aaauaaguauuuauaauagcaa

SEQ ID NO: 2775655 - RNA, 15 nt, Human
aaauaaguauuuaua

SEQ ID NO: 2775656 - RNA, 17 nt, Human
aaauaaguauuuauaau

SEQ ID NO: 2775657 - RNA, 17 nt, Human
guaacaaugaagauaaa

SEQ ID NO: 2775658 - RNA, 14 nt, Human
guaaauuaggaggc

SEQ ID NO: 2775659 - RNA, 14 nt, Human
guaaauuauauuug

SEQ ID NO: 2775660 - RNA, 15 nt, Human
guaaauuauauuugu

SEQ ID NO: 2775661 - RNA, 19 nt, Human
guaaauuauauuugugcua

SEQ ID NO: 2775662 - RNA, 20 nt, Human
guaaauuauauuugugcuau

SEQ ID NO: 2775663 - RNA, 23 nt, Human
guaaauuauauuugugcuauagu

SEQ ID NO: 2775664 - RNA, 14 nt, Human
guaaagaaauuuac

SEQ ID NO: 2775665 - RNA, 15 nt, Human
guaaagaaauuuacu

SEQ ID NO: 2775666 - RNA, 19 nt, Human
guaaagaaauuuacuauau

SEQ ID NO: 2775667 - RNA, 22 nt, Human
guaaagaacugcacaugaagaa

SEQ ID NO: 2775668 - RNA, 17 nt, Human
guaaagaacuuuuucuu

SEQ ID NO: 2775669 - RNA, 18 nt, Human
guaaagaucuacaugaau

SEQ ID NO: 2775670 - RNA, 22 nt, Human
guaaaaugugaagugaaugaaa

SEQ ID NO: 2775671 - RNA, 20 nt, Human
guaaaaugugaagugaauga

SEQ ID NO: 2775672 - RNA, 19 nt, Human
guaaaaugugaagugaaug

SEQ ID NO: 2775673 - RNA, 12 nt, Human
guaaaaugugaa

SEQ ID NO: 2775674 - RNA, 15 nt, Human
guaaaauggaggugg

SEQ ID NO: 2775675 - RNA, 17 nt, Human
guaaaauguauuuuucu

SEQ ID NO: 2775676 - RNA, 18 nt, Human
guaaaauguauuuuucua

SEQ ID NO: 2775677 - RNA, 18 nt, Human
aaauaauguaauuguaau

SEQ ID NO: 2775678 - RNA, 14 nt, Human
guaaaauaaaauua

SEQ ID NO: 2775679 - RNA, 19 nt, Human
aaaguuuacaaguguauau

SEQ ID NO: 2775680 - RNA, 12 nt, Human
aaaguuuacaac

SEQ ID NO: 2775681 - RNA, 16 nt, Human
aaaguuuacaacauaa

SEQ ID NO: 2775682 - RNA, 18 nt, Human
aaaguugcacggcugcug

SEQ ID NO: 2775683 - RNA, 23 nt, Human
aaaguucccuacuuccugugacu

SEQ ID NO: 2775684 - RNA, 22 nt, Human
aaaguuccaagagucuaaagau

SEQ ID NO: 2775685 - RNA, 18 nt, Human
aaaguuauuuuuaaaaac

SEQ ID NO: 2775686 - RNA, 18 nt, Human
aaaguucccugaaacacg

SEQ ID NO: 2775687 - RNA, 11 nt, Human
aaaguucuaag

SEQ ID NO: 2775688 - RNA, 12 nt, Human
aaaguucuaaga

SEQ ID NO: 2775689 - RNA, 23 nt, Human
aaaguuucucuuuucaaaacauu

SEQ ID NO: 2775690 - RNA, 21 nt, Human
aaaguuucucuuuucaaaaca

SEQ ID NO: 2775691 - RNA, 12 nt, Human
aaaguuucaaug

SEQ ID NO: 2775692 - RNA, 13 nt, Human
aaaguuucaaugu

SEQ ID NO: 2775693 - RNA, 13 nt, Human
aaaguuuccauau

SEQ ID NO: 2775694 - RNA, 14 nt, Human
aaaguuuccauaug

SEQ ID NO: 2775695 - RNA, 20 nt, Human
aaaguuuccuaaucagaaau

SEQ ID NO: 2775696 - RNA, 12 nt, Human
aaaguuucucag

SEQ ID NO: 2775697 - RNA, 13 nt, Human
aaaguuucucaga

SEQ ID NO: 2775698 - RNA, 17 nt, Human
aaaguuucucagauccu

SEQ ID NO: 2775699 - RNA, 16 nt, Human
aaaguuugcuuagaaa

SEQ ID NO: 2775700 - RNA, 22 nt, Human
aaaguuugcuuguuucuugguc

SEQ ID NO: 2775701 - RNA, 15 nt, Human
aaaguuugcuuagaa

SEQ ID NO: 2775702 - RNA, 15 nt, Human
aaaguuuuacaaagg

SEQ ID NO: 2775703 - RNA, 16 nt, Human
aaaguuuuacaaaggg

SEQ ID NO: 2775704 - RNA, 15 nt, Human
aaaguguaauaauau

SEQ ID NO: 2775705 - RNA, 11 nt, Human
aaaguguuacu

SEQ ID NO: 2775706 - RNA, 13 nt, Human
aaaguguuacuuu

SEQ ID NO: 2775707 - RNA, 14 nt, Human
aaaguguuacuuuu

SEQ ID NO: 2775708 - RNA, 18 nt, Human
aaaguucacaauguggcc

SEQ ID NO: 2775709 - RNA, 15 nt, Human
aaaguucagaguuuu

SEQ ID NO: 2775710 - RNA, 16 nt, Human
aaaguucagaguuuuc

SEQ ID NO: 2775711 - RNA, 20 nt, Human
aaaguucagaguuuucuggg

SEQ ID NO: 2775712 - RNA, 21 nt, Human
aaaguucccuacuuccuguga

SEQ ID NO: 2775713 - RNA, 16 nt, Human
aaaguuccaagagucu

SEQ ID NO: 2775714 - RNA, 18 nt, Human
aaaguuccaagagucuaa

SEQ ID NO: 2775715 - RNA, 20 nt, Human
aaaguuccaagagucuaaag

SEQ ID NO: 2775716 - RNA, 21 nt, Human
aaaguuccaagagucuaaaga

SEQ ID NO: 2775717 - RNA, 23 nt, Human
gguuuggccaucucuggaugccu

SEQ ID NO: 2775718 - RNA, 14 nt, Human
aaagugguuguuag

SEQ ID NO: 2775719 - RNA, 22 nt, Human
gguuugagauugccccaggucu

SEQ ID NO: 2775720 - RNA, 13 nt, Human
gguuugagggugg

SEQ ID NO: 2775721 - RNA, 15 nt, Human
gguuugaucauuucu

SEQ ID NO: 2775722 - RNA, 15 nt, Human
gguuugaagccugga

SEQ ID NO: 2775723 - RNA, 17 nt, Human
gguuugaagccuggaac

SEQ ID NO: 2775724 - RNA, 15 nt, Human
gguuucuggucucua

SEQ ID NO: 2775725 - RNA, 15 nt, Human
gguuucuuucagauu

SEQ ID NO: 2775726 - RNA, 22 nt, Human
gguuucuuucagauuuuuugaa

SEQ ID NO: 2775727 - RNA, 15 nt, Human
gguuucuuuuuaagu

SEQ ID NO: 2775728 - RNA, 21 nt, Human
gguuugaaagugaauaaacuu

SEQ ID NO: 2775729 - RNA, 12 nt, Human
gguucuggcugc

SEQ ID NO: 2775730 - RNA, 21 nt, Human
gguucugaugaugugccuggg

SEQ ID NO: 2775731 - RNA, 13 nt, Human
gguucugccugcu

SEQ ID NO: 2775732 - RNA, 16 nt, Human
gguucugccugcuuug

SEQ ID NO: 2775733 - RNA, 19 nt, Human
gguucugcuucaaggcuuc

SEQ ID NO: 2775734 - RNA, 18 nt, Human
gguucucccccuuucucu

SEQ ID NO: 2775735 - RNA, 11 nt, Human
gguuccucucu

SEQ ID NO: 2775736 - RNA, 13 nt, Human
gguuccucucugg

SEQ ID NO: 2775737 - RNA, 14 nt, Human
gguuccucucuggu

SEQ ID NO: 2775738 - RNA, 19 nt, Human
gguuccuuccucugagccu

SEQ ID NO: 2775739 - RNA, 20 nt, Human
gguuucacccuuaacccaag

SEQ ID NO: 2775740 - RNA, 22 nt, Human
gguuucacccuuaacccaagga

SEQ ID NO: 2775741 - RNA, 15 nt, Human
gguuucucucuacag

SEQ ID NO: 2775742 - RNA, 18 nt, Human
gguuucucucuacagugc

SEQ ID NO: 2775743 - RNA, 20 nt, Human
gguuucucucuacagugcca

SEQ ID NO: 2775744 - RNA, 19 nt, Human
gguuucaccauguuggcca

SEQ ID NO: 2775745 - RNA, 19 nt, Human
gguuucaccauguugccca

SEQ ID NO: 2775746 - RNA, 18 nt, Human
gguuucaaagaugcugug

SEQ ID NO: 2775747 - RNA, 20 nt, Human
gguuucaaagaugcugugag

SEQ ID NO: 2775748 - RNA, 18 nt, Human
gguuuauaauuuucugaa

SEQ ID NO: 2775749 - RNA, 16 nt, Human
gguuucaaagaugcug

SEQ ID NO: 2775750 - RNA, 13 nt, Human
ggugugcucugau

SEQ ID NO: 2775751 - RNA, 12 nt, Human
gguucagcuugu

SEQ ID NO: 2775752 - RNA, 21 nt, Human
gguucaggguuggccccugcc

SEQ ID NO: 2775753 - RNA, 18 nt, Human
gguucaggguuggccccu

SEQ ID NO: 2775754 - RNA, 22 nt, Human
gguucaggguuggccccugccc

SEQ ID NO: 2775755 - RNA, 12 nt, Human
gguucaguuucu

SEQ ID NO: 2775756 - RNA, 14 nt, Human
gguucaguuucuuc

SEQ ID NO: 2775757 - RNA, 16 nt, Human
gguucccggucccgag

SEQ ID NO: 2775758 - RNA, 16 nt, Human
gguuccuccccuccuc

SEQ ID NO: 2775759 - RNA, 13 nt, Human
gguucccuguucu

SEQ ID NO: 2775760 - RNA, 16 nt, Human
gguucccuguucuucc

SEQ ID NO: 2775761 - RNA, 18 nt, Human
gguucccuguucuuccuc

SEQ ID NO: 2775762 - RNA, 22 nt, Human
gguucccuuuccuuccaucccu

SEQ ID NO: 2775763 - RNA, 17 nt, Human
gguucccuuuccuucca

SEQ ID NO: 2775764 - RNA, 18 nt, Human
gguuccaauccuggcucu

SEQ ID NO: 2775765 - RNA, 17 nt, Human
gguucccguuucuccac

SEQ ID NO: 2775766 - RNA, 15 nt, Human
gguuccccuguucac

SEQ ID NO: 2775767 - RNA, 24 nt, Human
gguuccagcaauucuccugccuca

SEQ ID NO: 2775768 - RNA, 13 nt, Human
gguuccacagagu

SEQ ID NO: 2775769 - RNA, 19 nt, Human
gguuccacagaguaagaca

SEQ ID NO: 2775770 - RNA, 22 nt, Human
gguuccacagaguaagacauug

SEQ ID NO: 2775771 - RNA, 13 nt, Human
gguucaugaugca

SEQ ID NO: 2775772 - RNA, 14 nt, Human
gguucaugaugcag

SEQ ID NO: 2775773 - RNA, 15 nt, Human
gguucaugaugcagu

SEQ ID NO: 2775774 - RNA, 21 nt, Human
gguucauguagagaaaagcac

SEQ ID NO: 2775775 - RNA, 16 nt, Human
gguuccaauccuggcu

SEQ ID NO: 2775776 - RNA, 23 nt, Human
gguuccagcaauucuccugccuc

SEQ ID NO: 2775777 - RNA, 15 nt, Human
ggugugaccugaggg

SEQ ID NO: 2775778 - RNA, 20 nt, Human
ggugugaaagucagaugccc

SEQ ID NO: 2775779 - RNA, 18 nt, Human
ggugugagucaccaagcc

SEQ ID NO: 2775780 - RNA, 14 nt, Human
ggugugccugcagc

SEQ ID NO: 2775781 - RNA, 13 nt, Human
ggugugccugcag

SEQ ID NO: 2775782 - RNA, 15 nt, Human
ggugugccugcagcc

SEQ ID NO: 2775783 - RNA, 15 nt, Human
gguggggcgaggcag

SEQ ID NO: 2775784 - RNA, 16 nt, Human
gguggggcgaggcagg

SEQ ID NO: 2775785 - RNA, 17 nt, Human
gguggggcagcuugagg

SEQ ID NO: 2775786 - RNA, 13 nt, Human
gguggggcagcuu

SEQ ID NO: 2775787 - RNA, 17 nt, Human
ggugggcacccacccug

SEQ ID NO: 2775788 - RNA, 18 nt, Human
ggugggcacccacccugg

SEQ ID NO: 2775789 - RNA, 17 nt, Human
aaagccuuuaguaucag

SEQ ID NO: 2775790 - RNA, 19 nt, Human
aaagccuuagggaagcugg

SEQ ID NO: 2775791 - RNA, 11 nt, Human
aaagccuugug

SEQ ID NO: 2775792 - RNA, 12 nt, Human
aaagccuugugu

SEQ ID NO: 2775793 - RNA, 14 nt, Human
aaagccuuguguau

SEQ ID NO: 2775794 - RNA, 18 nt, Human
aaagccuuguguauauuu

SEQ ID NO: 2775795 - RNA, 19 nt, Human
aaagccuuguguauauuug

SEQ ID NO: 2775796 - RNA, 22 nt, Human
aaagccuuguguauauuuguau

SEQ ID NO: 2775797 - RNA, 23 nt, Human
aaagccuuguguauauuuguaua

SEQ ID NO: 2775798 - RNA, 14 nt, Human
aaagcaugaauggu

SEQ ID NO: 2775799 - RNA, 15 nt, Human
aaagccuuagggaag

SEQ ID NO: 2775800 - RNA, 12 nt, Human
aaagcauggacu

SEQ ID NO: 2775801 - RNA, 15 nt, Human
aaagcagcucucccc

SEQ ID NO: 2775802 - RNA, 13 nt, Human
aaagcaugaaugg

SEQ ID NO: 2775803 - RNA, 21 nt, Human
aaagcauauggguuagauguu

SEQ ID NO: 2775804 - RNA, 18 nt, Human
aaagcagcucuccccuca

SEQ ID NO: 2775805 - RNA, 17 nt, Human
aaagcagggaauuucua

SEQ ID NO: 2775806 - RNA, 18 nt, Human
aaagcagggaauuucuau

SEQ ID NO: 2775807 - RNA, 18 nt, Human
aaagcauaaguauacagu

SEQ ID NO: 2775808 - RNA, 17 nt, Human
aaagcauacaugcaaaa

SEQ ID NO: 2775809 - RNA, 17 nt, Human
aaagcauagauguuuug

SEQ ID NO: 2775810 - RNA, 20 nt, Human
aaagcauagauguuuuggua

SEQ ID NO: 2775811 - RNA, 18 nt, Human
aaagcauaaaaacauuuu

SEQ ID NO: 2775812 - RNA, 18 nt, Human
aaagcaucaccucaggcc

SEQ ID NO: 2775813 - RNA, 17 nt, Human
aaagcaucaccucaggc

SEQ ID NO: 2775814 - RNA, 16 nt, Human
aaagcaucaccucagg

SEQ ID NO: 2775815 - RNA, 17 nt, Human
gguggcacaggcccccu

SEQ ID NO: 2775816 - RNA, 13 nt, Human
gguggcaagagcc

SEQ ID NO: 2775817 - RNA, 17 nt, Human
gguggcaaggcugugcu

SEQ ID NO: 2775818 - RNA, 20 nt, Human
gguggcaaggcugugcuccc

SEQ ID NO: 2775819 - RNA, 12 nt, Human
gguggcaagugc

SEQ ID NO: 2775820 - RNA, 14 nt, Human
gguggaugccuggu

SEQ ID NO: 2775821 - RNA, 12 nt, Human
ggucuuccaggg

SEQ ID NO: 2775822 - RNA, 21 nt, Human
gguggaugccugguggcagcu

SEQ ID NO: 2775823 - RNA, 22 nt, Human
ggucuucccuaccucaggcagg

SEQ ID NO: 2775824 - RNA, 20 nt, Human
ggucuucccuaccucaggca

SEQ ID NO: 2775825 - RNA, 15 nt, Human
ggucuguuuaaagug

SEQ ID NO: 2775826 - RNA, 16 nt, Human
ggucugugcauuucug

SEQ ID NO: 2775827 - RNA, 18 nt, Human
ggucuucagccucuuucu

SEQ ID NO: 2775828 - RNA, 17 nt, Human
ggucuucccuaccucag

SEQ ID NO: 2775829 - RNA, 13 nt, Human
ggugcaauuucaa

SEQ ID NO: 2775830 - RNA, 16 nt, Human
ggugccacuuuaccca

SEQ ID NO: 2775831 - RNA, 19 nt, Human
ggugccacuuuacccaccu

SEQ ID NO: 2775832 - RNA, 18 nt, Human
ggugccacaaauaaaaug

SEQ ID NO: 2775833 - RNA, 15 nt, Human
ggugccaacuggugu

SEQ ID NO: 2775834 - RNA, 13 nt, Human
ggugccagccuga

SEQ ID NO: 2775835 - RNA, 17 nt, Human
ggugccagccugaggca

SEQ ID NO: 2775836 - RNA, 14 nt, Human
aaagacuaauuuaa

SEQ ID NO: 2775837 - RNA, 20 nt, Human
aaagacuaauuuaaaaaaua

SEQ ID NO: 2775838 - RNA, 23 nt, Human
aaagacuaauuuaaaaaauaacu

SEQ ID NO: 2775839 - RNA, 21 nt, Human
aaagauucuauaguucuagac

SEQ ID NO: 2775840 - RNA, 20 nt, Human
aaagauucuauaguucuaga

SEQ ID NO: 2775841 - RNA, 12 nt, Human
aaagauuuauca

SEQ ID NO: 2775842 - RNA, 13 nt, Human
aaagauuuaucaa

SEQ ID NO: 2775843 - RNA, 17 nt, Human
aaagauuuaagcacaaa

SEQ ID NO: 2775844 - RNA, 20 nt, Human
aaagauuuaagcacaaacuu

SEQ ID NO: 2775845 - RNA, 21 nt, Human
aaagauuuaagcacaaacuuu

SEQ ID NO: 2775846 - RNA, 15 nt, Human
aaagauuguauugcu

SEQ ID NO: 2775847 - RNA, 12 nt, Human
aaagauucuuuu

SEQ ID NO: 2775848 - RNA, 17 nt, Human
aaagauucuuuuucuga

SEQ ID NO: 2775849 - RNA, 17 nt, Human
aaagauugcugaaaaag

SEQ ID NO: 2775850 - RNA, 17 nt, Human
aaagcaaaauaaaaacu

SEQ ID NO: 2775851 - RNA, 18 nt, Human
aaagcaaaauaaaaacua

SEQ ID NO: 2775852 - RNA, 13 nt, Human
aaagauuuucaga

SEQ ID NO: 2775853 - RNA, 18 nt, Human
aaagcaaaaaugcuaaua

SEQ ID NO: 2775854 - RNA, 19 nt, Human
aaagcaaaaaugcuaauau

SEQ ID NO: 2775855 - RNA, 15 nt, Human
gguccucuggagccc

SEQ ID NO: 2775856 - RNA, 17 nt, Human
gguccugaaaguaacuc

SEQ ID NO: 2775857 - RNA, 18 nt, Human
gguccugaagaauuaaga

SEQ ID NO: 2775858 - RNA, 13 nt, Human
gguccucuggagc

SEQ ID NO: 2775859 - RNA, 14 nt, Human
gguccucagagaau

SEQ ID NO: 2775860 - RNA, 21 nt, Human
gguccucagagaauuucuacc

SEQ ID NO: 2775861 - RNA, 16 nt, Human
gguccucauucaaagg

SEQ ID NO: 2775862 - RNA, 23 nt, Human
gguccuccaucccaacagccaug

SEQ ID NO: 2775863 - RNA, 13 nt, Human
aaagcaaaugucu

SEQ ID NO: 2775864 - RNA, 21 nt, Human
aaagcaacuguuaugaaauaa

SEQ ID NO: 2775865 - RNA, 16 nt, Human
gguccuggcuccugag

SEQ ID NO: 2775866 - RNA, 15 nt, Human
gguccuggcuccuga

SEQ ID NO: 2775867 - RNA, 14 nt, Human
gguccuggcuccug

SEQ ID NO: 2775868 - RNA, 12 nt, Human
gguccuggggcu

SEQ ID NO: 2775869 - RNA, 22 nt, Human
gguccuggggcucugugcaggg

SEQ ID NO: 2775870 - RNA, 15 nt, Human
gguccuggggcucug

SEQ ID NO: 2775871 - RNA, 17 nt, Human
gguccuggagcagacca

SEQ ID NO: 2775872 - RNA, 21 nt, Human
gguccuggagcagaccacccc

SEQ ID NO: 2775873 - RNA, 22 nt, Human
gguccuggccagauggcccgga

SEQ ID NO: 2775874 - RNA, 12 nt, Human
gguccuggcucc

SEQ ID NO: 2775875 - RNA, 23 nt, Human
gguccuggggcucugugcaggga

SEQ ID NO: 2775876 - RNA, 15 nt, Human
ggucuaaaaauaaac

SEQ ID NO: 2775877 - RNA, 14 nt, Human
ggucuauggggaga

SEQ ID NO: 2775878 - RNA, 16 nt, Human
ggucuacacugcaauc

SEQ ID NO: 2775879 - RNA, 21 nt, Human
ggucuacacugcaaucauaug

SEQ ID NO: 2775880 - RNA, 15 nt, Human
ggucugugugaaugu

SEQ ID NO: 2775881 - RNA, 16 nt, Human
ggucugugugaaugug

SEQ ID NO: 2775882 - RNA, 17 nt, Human
ggucugugugaaugugg

SEQ ID NO: 2775883 - RNA, 24 nt, Human
ggucugugugaaugugggcacugg

SEQ ID NO: 2775884 - RNA, 15 nt, Human
ggucggaacccaagc

SEQ ID NO: 2775885 - RNA, 13 nt, Human
aaagacaccuacu

SEQ ID NO: 2775886 - RNA, 19 nt, Human
aaagacaccuacugagugg

SEQ ID NO: 2775887 - RNA, 17 nt, Human
aaagacaccauuuaucu

SEQ ID NO: 2775888 - RNA, 13 nt, Human
aaagaauauucag

SEQ ID NO: 2775889 - RNA, 22 nt, Human
aaagaauauucagagaauauca

SEQ ID NO: 2775890 - RNA, 17 nt, Human
aaagaauauauuuauuu

SEQ ID NO: 2775891 - RNA, 18 nt, Human
aaagaauauauuuauuua

SEQ ID NO: 2775892 - RNA, 22 nt, Human
aaagaaugagaaggagucagaa

SEQ ID NO: 2775893 - RNA, 12 nt, Human
aaagaaucuacu

SEQ ID NO: 2775894 - RNA, 19 nt, Human
aaagaaucuacuauacuuu

SEQ ID NO: 2775895 - RNA, 14 nt, Human
aaagacaacacaac

SEQ ID NO: 2775896 - RNA, 14 nt, Human
aaagacaagaaaau

SEQ ID NO: 2775897 - RNA, 16 nt, Human
aaagacaaaucaaagc

SEQ ID NO: 2775898 - RNA, 19 nt, Human
aaagacaaaucaaagcaga

SEQ ID NO: 2775899 - RNA, 18 nt, Human
gguccaguggaugccaca

SEQ ID NO: 2775900 - RNA, 23 nt, Human
gguccacacccaauuccacucug

SEQ ID NO: 2775901 - RNA, 16 nt, Human
gguccaucagccccuc

SEQ ID NO: 2775902 - RNA, 12 nt, Human
aaagaauagaaa

SEQ ID NO: 2775903 - RNA, 14 nt, Human
aaagaauagaaaga

SEQ ID NO: 2775904 - RNA, 14 nt, Human
aaagaauaagaaaa

SEQ ID NO: 2775905 - RNA, 18 nt, Human
aaagaaguggggacagag

SEQ ID NO: 2775906 - RNA, 16 nt, Human
gguccacccaggagcc

SEQ ID NO: 2775907 - RNA, 15 nt, Human
gguccacccaggagc

SEQ ID NO: 2775908 - RNA, 13 nt, Human
gguccacccagga

SEQ ID NO: 2775909 - RNA, 12 nt, Human
gguccacccagg

SEQ ID NO: 2775910 - RNA, 17 nt, Human
gguccacccaggagccc

SEQ ID NO: 2775911 - RNA, 20 nt, Human
gguccacaggaagugaagaa

SEQ ID NO: 2775912 - RNA, 18 nt, Human
gguccacaggucuagacu

SEQ ID NO: 2775913 - RNA, 17 nt, Human
gguccacaucccgggac

SEQ ID NO: 2775914 - RNA, 12 nt, Human
gguccagggagc

SEQ ID NO: 2775915 - RNA, 16 nt, Human
gguccagggagcaggc

SEQ ID NO: 2775916 - RNA, 21 nt, Human
gguccagggaagcuggccgag

SEQ ID NO: 2775917 - RNA, 11 nt, Human
gguccagggaa

SEQ ID NO: 2775918 - RNA, 22 nt, Human
gguaugaucacggcucacugca

SEQ ID NO: 2775919 - RNA, 16 nt, Human
gguccacaacacacag

SEQ ID NO: 2775920 - RNA, 20 nt, Human
gguccaauucucgagcuugg

SEQ ID NO: 2775921 - RNA, 15 nt, Human
gguauggaacucucu

SEQ ID NO: 2775922 - RNA, 14 nt, Human
gguagcuuuucccu

SEQ ID NO: 2775923 - RNA, 18 nt, Human
gguagcuuaccugacaca

SEQ ID NO: 2775924 - RNA, 12 nt, Human
gguagcugccac

SEQ ID NO: 2775925 - RNA, 18 nt, Human
gguaaguuuuuugaaauu

SEQ ID NO: 2775926 - RNA, 21 nt, Human
gguaacaguucauguuugcuu

SEQ ID NO: 2775927 - RNA, 13 nt, Human
gguaacaggcaga

SEQ ID NO: 2775928 - RNA, 20 nt, Human
gguaacaggcagauacagga

SEQ ID NO: 2775929 - RNA, 14 nt, Human
gguaacaggcagau

SEQ ID NO: 2775930 - RNA, 14 nt, Human
ggguuugaauuguu

SEQ ID NO: 2775931 - RNA, 20 nt, Human
ggguuucacuguguuagcca

SEQ ID NO: 2775932 - RNA, 17 nt, Human
ggguuugccauuugaua

SEQ ID NO: 2775933 - RNA, 14 nt, Human
ggguuuuauauuuu

SEQ ID NO: 2775934 - RNA, 20 nt, Human
gguaaucaaugaauauugaa

SEQ ID NO: 2775935 - RNA, 22 nt, Human
gguaaucaaugaauauugaagu

SEQ ID NO: 2775936 - RNA, 18 nt, Human
gguaauguguuuuagagu

SEQ ID NO: 2775937 - RNA, 18 nt, Human
gguaaucgaccugccucg

SEQ ID NO: 2775938 - RNA, 17 nt, Human
gguaaucgaccugccuc

SEQ ID NO: 2775939 - RNA, 14 nt, Human
gguaaucgaccugc

SEQ ID NO: 2775940 - RNA, 20 nt, Human
gguaauccaggcacagcuga

SEQ ID NO: 2775941 - RNA, 21 nt, Human
gguacaaccuuuauucuuuuc

SEQ ID NO: 2775942 - RNA, 24 nt, Human
gguacaaccuguucugcuuuccuc

SEQ ID NO: 2775943 - RNA, 23 nt, Human
gguacaaccuguucugcuuuccu

SEQ ID NO: 2775944 - RNA, 22 nt, Human
gguaauuguugcuaaucuucuu

SEQ ID NO: 2775945 - RNA, 20 nt, Human
gguaauuuuuacccuaaugu

SEQ ID NO: 2775946 - RNA, 13 nt, Human
gguacaaaaauaa

SEQ ID NO: 2775947 - RNA, 14 nt, Human
gguacaaaaauaaa

SEQ ID NO: 2775948 - RNA, 15 nt, Human
gguacaaaaauaaau

SEQ ID NO: 2775949 - RNA, 19 nt, Human
gguacaaaaauaaauuuau

SEQ ID NO: 2775950 - RNA, 19 nt, Human
gguacauuuauaauugcau

SEQ ID NO: 2775951 - RNA, 19 nt, Human
gguacacaacuaguuuugu

SEQ ID NO: 2775952 - RNA, 15 nt, Human
gguaccaaugcugca

SEQ ID NO: 2775953 - RNA, 19 nt, Human
gggugggagagcccagcca

SEQ ID NO: 2775954 - RNA, 14 nt, Human
gggugggagagccc

SEQ ID NO: 2775955 - RNA, 15 nt, Human
ggggccuggaccugc

SEQ ID NO: 2775956 - RNA, 16 nt, Human
ggggccuggaccugcc

SEQ ID NO: 2775957 - RNA, 13 nt, Human
ggggccuggcagg

SEQ ID NO: 2775958 - RNA, 13 nt, Human
ggguggaugccug

SEQ ID NO: 2775959 - RNA, 11 nt, Human
ggggccuggca

SEQ ID NO: 2775960 - RNA, 12 nt, Human
ggggccuggcag

SEQ ID NO: 2775961 - RNA, 17 nt, Human
ggguggaugccuggugg

SEQ ID NO: 2775962 - RNA, 12 nt, Human
ggguggugaccu

SEQ ID NO: 2775963 - RNA, 17 nt, Human
gggugggguagggcuga

SEQ ID NO: 2775964 - RNA, 16 nt, Human
gggugggguagggcug

SEQ ID NO: 2775965 - RNA, 20 nt, Human
gggugucuuuuuuuggugau

SEQ ID NO: 2775966 - RNA, 14 nt, Human
gggugggugcucag

SEQ ID NO: 2775967 - RNA, 15 nt, Human
gggugggugcucaga

SEQ ID NO: 2775968 - RNA, 16 nt, Human
gggugggugcucagaa

SEQ ID NO: 2775969 - RNA, 11 nt, Human
ggccuguugcc

SEQ ID NO: 2775970 - RNA, 22 nt, Human
ggccugugugugaaaggaagcu

SEQ ID NO: 2775971 - RNA, 12 nt, Human
ggccuucucuga

SEQ ID NO: 2775972 - RNA, 23 nt, Human
ggccuggccaggagcucuucagg

SEQ ID NO: 2775973 - RNA, 22 nt, Human
ggccuggccagggccuggaaga

SEQ ID NO: 2775974 - RNA, 17 nt, Human
ggccuggccagggccug

SEQ ID NO: 2775975 - RNA, 18 nt, Human
ggccuggccagggccugg

SEQ ID NO: 2775976 - RNA, 21 nt, Human
ggccuggccagaugcaccagc

SEQ ID NO: 2775977 - RNA, 14 nt, Human
ggccuggccaggag

SEQ ID NO: 2775978 - RNA, 18 nt, Human
ggccuggccaggagcucu

SEQ ID NO: 2775979 - RNA, 17 nt, Human
ggccuggccaggagcuc

SEQ ID NO: 2775980 - RNA, 16 nt, Human
ggccuggccaggagcu

SEQ ID NO: 2775981 - RNA, 15 nt, Human
ggccuggccaggagc

SEQ ID NO: 2775982 - RNA, 16 nt, Human
ggccuggaagacagag

SEQ ID NO: 2775983 - RNA, 23 nt, Human
ggccuggaauuagcuuggggcca

SEQ ID NO: 2775984 - RNA, 13 nt, Human
ggccuggaccugc

SEQ ID NO: 2775985 - RNA, 15 nt, Human
ggccuggaccugccu

SEQ ID NO: 2775986 - RNA, 16 nt, Human
ggccuggaccugccuc

SEQ ID NO: 2775987 - RNA, 21 nt, Human
ggccuggaccugccuccugcc

SEQ ID NO: 2775988 - RNA, 22 nt, Human
ggccuggaccugccuccugccu

SEQ ID NO: 2775989 - RNA, 17 nt, Human
ggccuuuuaacauuuug

SEQ ID NO: 2775990 - RNA, 21 nt, Human
ggccuuuuaacauuuuguucu

SEQ ID NO: 2775991 - RNA, 20 nt, Human
ggcgacagagcgagacuccg

SEQ ID NO: 2775992 - RNA, 23 nt, Human
ggcgacagagcgagagucugucu

SEQ ID NO: 2775993 - RNA, 17 nt, Human
ggcguacgcuggugcug

SEQ ID NO: 2775994 - RNA, 21 nt, Human
ggcggugggcacccacccugg

SEQ ID NO: 2775995 - RNA, 22 nt, Human
ggcggugggcacccacccuggg

SEQ ID NO: 2775996 - RNA, 16 nt, Human
ggcgaccgcccuccgc

SEQ ID NO: 2775997 - RNA, 15 nt, Human
ggcgagagaggagcc

SEQ ID NO: 2775998 - RNA, 20 nt, Human
ggcggucuucaacauccugc

SEQ ID NO: 2775999 - RNA, 17 nt, Human
ggcggugcccacaccgg

SEQ ID NO: 2776000 - RNA, 23 nt, Human
ggcggugcccacaccggggacag

SEQ ID NO: 2776001 - RNA, 14 nt, Human
ggcgguggacuuga

SEQ ID NO: 2776002 - RNA, 12 nt, Human
ggccuuuccucu

SEQ ID NO: 2776003 - RNA, 13 nt, Human
ggccuuuccucuc

SEQ ID NO: 2776004 - RNA, 14 nt, Human
ggccuuuccucucu

SEQ ID NO: 2776005 - RNA, 20 nt, Human
ggccuuggcuuuucuagccu

SEQ ID NO: 2776006 - RNA, 16 nt, Human
ggccuucucugaagga

SEQ ID NO: 2776007 - RNA, 15 nt, Human
ggccuucucugaagg

SEQ ID NO: 2776008 - RNA, 18 nt, Human
ggccuguguggccacuuc

SEQ ID NO: 2776009 - RNA, 11 nt, Human
ggccuugcuga

SEQ ID NO: 2776010 - RNA, 23 nt, Human
ggccuugacaucaguuccuuugu

SEQ ID NO: 2776011 - RNA, 15 nt, Human
ggccuguugcccuuu

SEQ ID NO: 2776012 - RNA, 15 nt, Human
ggccuccagaacuca

SEQ ID NO: 2776013 - RNA, 20 nt, Human
ggccuccagaacucacuggg

SEQ ID NO: 2776014 - RNA, 10 nt, Human
ggccuccagg

SEQ ID NO: 2776015 - RNA, 13 nt, Human
ggccuccaggccc

SEQ ID NO: 2776016 - RNA, 14 nt, Human
ggccuccaggcccg

SEQ ID NO: 2776017 - RNA, 17 nt, Human
ggccuccaggcccgucu

SEQ ID NO: 2776018 - RNA, 19 nt, Human
ggccuccaggcccgucugu

SEQ ID NO: 2776019 - RNA, 22 nt, Human
ggccuccaggcccgucugucca

SEQ ID NO: 2776020 - RNA, 23 nt, Human
ggccuccaggcccgucuguccau

SEQ ID NO: 2776021 - RNA, 13 nt, Human
ggccggccagccu

SEQ ID NO: 2776022 - RNA, 12 nt, Human
ggccggccagcc

SEQ ID NO: 2776023 - RNA, 13 nt, Human
ggccggccagcca

SEQ ID NO: 2776024 - RNA, 14 nt, Human
ggccggccagccag

SEQ ID NO: 2776025 - RNA, 15 nt, Human
ggccggccagccagc

SEQ ID NO: 2776026 - RNA, 16 nt, Human
ggccggccagccagcc

SEQ ID NO: 2776027 - RNA, 19 nt, Human
ggccggccagccagccacu

SEQ ID NO: 2776028 - RNA, 20 nt, Human
ggcucagcucggggagccuu

SEQ ID NO: 2776029 - RNA, 23 nt, Human
ggcucagcggggacagcuccuuc

SEQ ID NO: 2776030 - RNA, 22 nt, Human
ggcucagcggggacagcuccuu

SEQ ID NO: 2776031 - RNA, 21 nt, Human
ggcucagcggggacagcuccu

SEQ ID NO: 2776032 - RNA, 17 nt, Human
ggcucacugcagccuca

SEQ ID NO: 2776033 - RNA, 19 nt, Human
ggcucacugcauccuccgc

SEQ ID NO: 2776034 - RNA, 16 nt, Human
ggcucacugcauccuc

SEQ ID NO: 2776035 - RNA, 16 nt, Human
ggcucacugcagccuc

SEQ ID NO: 2776036 - RNA, 16 nt, Human
ggcgugguggcgggca

SEQ ID NO: 2776037 - RNA, 22 nt, Human
ggcguguaucugguauauguaa

SEQ ID NO: 2776038 - RNA, 23 nt, Human
ggcguucuuaggcugcugggaug

SEQ ID NO: 2776039 - RNA, 14 nt, Human
ggcgugcaguggug

SEQ ID NO: 2776040 - RNA, 17 nt, Human
ggcguccaggccgcgcc

SEQ ID NO: 2776041 - RNA, 15 nt, Human
ggcgucagucuuuuu

SEQ ID NO: 2776042 - RNA, 14 nt, Human
ggcgucugugugcg

SEQ ID NO: 2776043 - RNA, 19 nt, Human
ggcgugcaguggugcgauc

SEQ ID NO: 2776044 - RNA, 16 nt, Human
ggcguggauuaaacuu

SEQ ID NO: 2776045 - RNA, 16 nt, Human
ggcguggcaaauauaa

SEQ ID NO: 2776046 - RNA, 15 nt, Human
ggcguggagcugccu

SEQ ID NO: 2776047 - RNA, 12 nt, Human
ggcguggagcug

SEQ ID NO: 2776048 - RNA, 20 nt, Human
ggcguggagagcccggcgcc

SEQ ID NO: 2776049 - RNA, 15 nt, Human
ggcguggagcaggcg

SEQ ID NO: 2776050 - RNA, 19 nt, Human
ggcccauagaaacaugaca

SEQ ID NO: 2776051 - RNA, 22 nt, Human
ggcccauagaaacaugacacug

SEQ ID NO: 2776052 - RNA, 23 nt, Human
ggcccauagaaacaugacacuga

SEQ ID NO: 2776053 - RNA, 18 nt, Human
ggcccaggggaggcggca

SEQ ID NO: 2776054 - RNA, 13 nt, Human
ggccccacugaug

SEQ ID NO: 2776055 - RNA, 13 nt, Human
ggcccuuccucuc

SEQ ID NO: 2776056 - RNA, 15 nt, Human
ggcccuuccucucca

SEQ ID NO: 2776057 - RNA, 23 nt, Human
ggccccugggucagucugguggg

SEQ ID NO: 2776058 - RNA, 23 nt, Human
ggccccuucucucccugccagag

SEQ ID NO: 2776059 - RNA, 13 nt, Human
ggccccugugagu

SEQ ID NO: 2776060 - RNA, 17 nt, Human
ggccccuuugggcccug

SEQ ID NO: 2776061 - RNA, 18 nt, Human
ggccccuuugggcccugc

SEQ ID NO: 2776062 - RNA, 19 nt, Human
ggccccuuugggcccugca

SEQ ID NO: 2776063 - RNA, 20 nt, Human
ggccccuuugggcccugcau

SEQ ID NO: 2776064 - RNA, 21 nt, Human
ggccccuuugggcccugcaug

SEQ ID NO: 2776065 - RNA, 16 nt, Human
ggcccuuccuccucca

SEQ ID NO: 2776066 - RNA, 19 nt, Human
ggcccuuccuccuccacca

SEQ ID NO: 2776067 - RNA, 21 nt, Human
ggcccuuccuccuccaccacc

SEQ ID NO: 2776068 - RNA, 17 nt, Human
ggcccuuccucuccacu

SEQ ID NO: 2776069 - RNA, 13 nt, Human
ggccgaggacuuu

SEQ ID NO: 2776070 - RNA, 18 nt, Human
ggccgaggguccuggcuc

SEQ ID NO: 2776071 - RNA, 16 nt, Human
ggccgaggguccuggc

SEQ ID NO: 2776072 - RNA, 19 nt, Human
ggccgcuccaccagcauca

SEQ ID NO: 2776073 - RNA, 16 nt, Human
ggccgcuccaccagca

SEQ ID NO: 2776074 - RNA, 12 nt, Human
ggccgcccccug

SEQ ID NO: 2776075 - RNA, 14 nt, Human
ggccgcuccaccag

SEQ ID NO: 2776076 - RNA, 14 nt, Human
ggccgauggagaca

SEQ ID NO: 2776077 - RNA, 20 nt, Human
ggccgauuugggaaccaagc

SEQ ID NO: 2776078 - RNA, 22 nt, Human
ggccgauuugggaaccaagcua

SEQ ID NO: 2776079 - RNA, 19 nt, Human
ggcagugggagcugccugu

SEQ ID NO: 2776080 - RNA, 18 nt, Human
ggcagugggagcugccug

SEQ ID NO: 2776081 - RNA, 16 nt, Human
ggcaucacagggcaga

SEQ ID NO: 2776082 - RNA, 14 nt, Human
ggcaucacagggca

SEQ ID NO: 2776083 - RNA, 13 nt, Human
ggcaucacagggc

SEQ ID NO: 2776084 - RNA, 22 nt, Human
ggcauauccaccaccucccuca

SEQ ID NO: 2776085 - RNA, 13 nt, Human
ggcauagcuacgu

SEQ ID NO: 2776086 - RNA, 18 nt, Human
ggcauccagcagucucug

SEQ ID NO: 2776087 - RNA, 21 nt, Human
ggcaucaagaggugggagggc

SEQ ID NO: 2776088 - RNA, 18 nt, Human
ggcaucugccccuccccc

SEQ ID NO: 2776089 - RNA, 16 nt, Human
ggcaucugccccuccc

SEQ ID NO: 2776090 - RNA, 19 nt, Human
ggcaucugccccuccccca

SEQ ID NO: 2776091 - RNA, 14 nt, Human
ggcaucugccccuc

SEQ ID NO: 2776092 - RNA, 19 nt, Human
ggcaucugauuugcauauu

SEQ ID NO: 2776093 - RNA, 19 nt, Human
ggcaucuuugccuugggcu

SEQ ID NO: 2776094 - RNA, 17 nt, Human
ggcaucuuugccuuggg

SEQ ID NO: 2776095 - RNA, 16 nt, Human
ggcaucuuugccuugg

SEQ ID NO: 2776096 - RNA, 15 nt, Human
ggcauuuuuauuuua

SEQ ID NO: 2776097 - RNA, 17 nt, Human
ggccaaaagcaguaaau

SEQ ID NO: 2776098 - RNA, 17 nt, Human
ggccaaaagcuagacag

SEQ ID NO: 2776099 - RNA, 17 nt, Human
ggcagugggagcugccu

SEQ ID NO: 2776100 - RNA, 13 nt, Human
ggcacuggcccag

SEQ ID NO: 2776101 - RNA, 14 nt, Human
ggcacuggcccagg

SEQ ID NO: 2776102 - RNA, 21 nt, Human
ggcacugggaugagccgcugu

SEQ ID NO: 2776103 - RNA, 19 nt, Human
ggcacugggaugagccgcu

SEQ ID NO: 2776104 - RNA, 20 nt, Human
ggcacugggaugagccgcug

SEQ ID NO: 2776105 - RNA, 14 nt, Human
ggccaggcuggucu

SEQ ID NO: 2776106 - RNA, 21 nt, Human
ggccagccccacccaggaggg

SEQ ID NO: 2776107 - RNA, 11 nt, Human
ggccagccccg

SEQ ID NO: 2776108 - RNA, 20 nt, Human
ggccagccccacccaggagg

SEQ ID NO: 2776109 - RNA, 16 nt, Human
ggccagccccacccag

SEQ ID NO: 2776110 - RNA, 15 nt, Human
ggccagccccaccca

SEQ ID NO: 2776111 - RNA, 14 nt, Human
ggccagccccaccc

SEQ ID NO: 2776112 - RNA, 13 nt, Human
ggccagccccacc

SEQ ID NO: 2776113 - RNA, 12 nt, Human
ggccaggcuggu

SEQ ID NO: 2776114 - RNA, 19 nt, Human
ggccaggcuggucuaaaac

SEQ ID NO: 2776115 - RNA, 18 nt, Human
ggccaggcuggucucaaa

SEQ ID NO: 2776116 - RNA, 16 nt, Human
ggccaggcuggucuca

SEQ ID NO: 2776117 - RNA, 14 nt, Human
ggccaaaaggaaaa

SEQ ID NO: 2776118 - RNA, 15 nt, Human
ggccaaaaggaaaaa

SEQ ID NO: 2776119 - RNA, 19 nt, Human
ggccaaaaggaaaaagcuc

SEQ ID NO: 2776120 - RNA, 13 nt, Human
ggccagccagcca

SEQ ID NO: 2776121 - RNA, 15 nt, Human
ggccagccagccacu

SEQ ID NO: 2776122 - RNA, 16 nt, Human
ggccagccagccacuc

SEQ ID NO: 2776123 - RNA, 17 nt, Human
ggccagccagccacucu

SEQ ID NO: 2776124 - RNA, 21 nt, Human
ggccagccagccacucuacca

SEQ ID NO: 2776125 - RNA, 22 nt, Human
ggccagaggaacuguccagaga

SEQ ID NO: 2776126 - RNA, 21 nt, Human
ggccagagcugggaggcaugg

SEQ ID NO: 2776127 - RNA, 21 nt, Human
ggccagaggaacuguccagag

SEQ ID NO: 2776128 - RNA, 14 nt, Human
ggccagagcuggga

SEQ ID NO: 2776129 - RNA, 16 nt, Human
ggccagagcugggagg

SEQ ID NO: 2776130 - RNA, 17 nt, Human
ggccagagcugggaggc

SEQ ID NO: 2776131 - RNA, 16 nt, Human
ggccagugugacaagg

SEQ ID NO: 2776132 - RNA, 14 nt, Human
ggccaguggggccu

SEQ ID NO: 2776133 - RNA, 15 nt, Human
ggccaguggggccug

SEQ ID NO: 2776134 - RNA, 16 nt, Human
ggccaguggggccugu

SEQ ID NO: 2776135 - RNA, 17 nt, Human
ggccaguggggccugug

SEQ ID NO: 2776136 - RNA, 18 nt, Human
ggccaguggggccugugg

SEQ ID NO: 2776137 - RNA, 19 nt, Human
ggccaguggggccugugga

SEQ ID NO: 2776138 - RNA, 14 nt, Human
ggccaucccuguga

SEQ ID NO: 2776139 - RNA, 16 nt, Human
ggcauuuuauagacac

SEQ ID NO: 2776140 - RNA, 18 nt, Human
ggccagggcccugcagag

SEQ ID NO: 2776141 - RNA, 12 nt, Human
ggccagggccug

SEQ ID NO: 2776142 - RNA, 17 nt, Human
ggccagggccuggaaga

SEQ ID NO: 2776143 - RNA, 17 nt, Human
ggccagggcccugcaga

SEQ ID NO: 2776144 - RNA, 16 nt, Human
ggccagggcccugcag

SEQ ID NO: 2776145 - RNA, 13 nt, Human
ggccagggcccug

SEQ ID NO: 2776146 - RNA, 19 nt, Human
ggccagggccuggaagaca

SEQ ID NO: 2776147 - RNA, 23 nt, Human
ggccagggccuggaagacagaga

SEQ ID NO: 2776148 - RNA, 14 nt, Human
ggccagggcugccc

SEQ ID NO: 2776149 - RNA, 19 nt, Human
ggccaugcaauucauccca

SEQ ID NO: 2776150 - RNA, 19 nt, Human
ggccaucucuggaugccug

SEQ ID NO: 2776151 - RNA, 13 nt, Human
ggaugggccuggc

SEQ ID NO: 2776152 - RNA, 21 nt, Human
ggauguacaaggacagccccu

SEQ ID NO: 2776153 - RNA, 15 nt, Human
ggauggcccuuccuc

SEQ ID NO: 2776154 - RNA, 20 nt, Human
ggauggcccuuccuccucca

SEQ ID NO: 2776155 - RNA, 23 nt, Human
ggauggcccuuccuccuccacca

SEQ ID NO: 2776156 - RNA, 20 nt, Human
ggauggccgcagggcugugc

SEQ ID NO: 2776157 - RNA, 21 nt, Human
ggauggccuggccagggccug

SEQ ID NO: 2776158 - RNA, 16 nt, Human
ggauggccuggccagg

SEQ ID NO: 2776159 - RNA, 19 nt, Human
ggaucugucacaccagcca

SEQ ID NO: 2776160 - RNA, 15 nt, Human
ggauaagccagcugc

SEQ ID NO: 2776161 - RNA, 20 nt, Human
ggauaagccacucugucccu

SEQ ID NO: 2776162 - RNA, 14 nt, Human
ggauaaccuauaug

SEQ ID NO: 2776163 - RNA, 13 nt, Human
ggauaacaaagau

SEQ ID NO: 2776164 - RNA, 14 nt, Human
ggauaacaaagaua

SEQ ID NO: 2776165 - RNA, 16 nt, Human
ggauaacaaagauauc

SEQ ID NO: 2776166 - RNA, 18 nt, Human
ggauaacaaagauaucuu

SEQ ID NO: 2776167 - RNA, 20 nt, Human
ggauaacaaagauaucuuuu

SEQ ID NO: 2776168 - RNA, 20 nt, Human
ggaguuuuuguuuggagagc

SEQ ID NO: 2776169 - RNA, 17 nt, Human
ggauaaaauaaugcugc

SEQ ID NO: 2776170 - RNA, 19 nt, Human
ggauaaaauaaugcugcaa

SEQ ID NO: 2776171 - RNA, 18 nt, Human
ggauaaaaugacuacuua

SEQ ID NO: 2776172 - RNA, 13 nt, Human
ggauaaagcagcu

SEQ ID NO: 2776173 - RNA, 21 nt, Human
ggaguuuugcucuuguagccc

SEQ ID NO: 2776174 - RNA, 20 nt, Human
ggaguuugaggcugcagcga

SEQ ID NO: 2776175 - RNA, 19 nt, Human
ggaguuugaggcugcagcg

SEQ ID NO: 2776176 - RNA, 22 nt, Human
ggaguugucaagucucugcugg

SEQ ID NO: 2776177 - RNA, 21 nt, Human
ggaguuggaagugugugaucu

SEQ ID NO: 2776178 - RNA, 13 nt, Human
ggaguuugaggcu

SEQ ID NO: 2776179 - RNA, 14 nt, Human
ggaguuucuaaggu

SEQ ID NO: 2776180 - RNA, 12 nt, Human
ggaguuucuaag

SEQ ID NO: 2776181 - RNA, 18 nt, Human
ggaguucgagaccagccu

SEQ ID NO: 2776182 - RNA, 14 nt, Human
ggagugcaguggug

SEQ ID NO: 2776183 - RNA, 19 nt, Human
ggagugcccacccugggag

SEQ ID NO: 2776184 - RNA, 16 nt, Human
ggagugcuggcucaca

SEQ ID NO: 2776185 - RNA, 18 nt, Human
ggagugcuggcucacagu

SEQ ID NO: 2776186 - RNA, 22 nt, Human
ggagugcuggcucacaguacag

SEQ ID NO: 2776187 - RNA, 12 nt, Human
ggagugcagugg

SEQ ID NO: 2776188 - RNA, 21 nt, Human
ggaguucgaggcugcagucag

SEQ ID NO: 2776189 - RNA, 20 nt, Human
ggaguucgaggcugcaguca

SEQ ID NO: 2776190 - RNA, 15 nt, Human
ggaguucgaggcugc

SEQ ID NO: 2776191 - RNA, 20 nt, Human
ggaguucgagaccagccugg

SEQ ID NO: 2776192 - RNA, 22 nt, Human
ggaguucuaacaaaacaaguug

SEQ ID NO: 2776193 - RNA, 16 nt, Human
ggaguucuaugcucuc

SEQ ID NO: 2776194 - RNA, 15 nt, Human
ggagugcagugagcc

SEQ ID NO: 2776195 - RNA, 15 nt, Human
ggauguucugggaca

SEQ ID NO: 2776196 - RNA, 14 nt, Human
ggaugucugccaau

SEQ ID NO: 2776197 - RNA, 14 nt, Human
ggaugucccugggc

SEQ ID NO: 2776198 - RNA, 18 nt, Human
ggaugucccugggccagg

SEQ ID NO: 2776199 - RNA, 19 nt, Human
ggaugucccugggccaggg

SEQ ID NO: 2776200 - RNA, 22 nt, Human
ggaugucccugggccagggucu

SEQ ID NO: 2776201 - RNA, 23 nt, Human
ggaugucccugggccagggucug

SEQ ID NO: 2776202 - RNA, 16 nt, Human
ggauguauggggaauc

SEQ ID NO: 2776203 - RNA, 15 nt, Human
ggaugucacagggcc

SEQ ID NO: 2776204 - RNA, 16 nt, Human
ggaugucacagggcca

SEQ ID NO: 2776205 - RNA, 20 nt, Human
ggauguaugaauacagcagc

SEQ ID NO: 2776206 - RNA, 21 nt, Human
ggauguaugaauacagcagca

SEQ ID NO: 2776207 - RNA, 13 nt, Human
ggauguucuggga

SEQ ID NO: 2776208 - RNA, 20 nt, Human
ggaugucugccaauuuuugc

SEQ ID NO: 2776209 - RNA, 19 nt, Human
ggauguagcuuuucaccuu

SEQ ID NO: 2776210 - RNA, 16 nt, Human
ggauguucugggacac

SEQ ID NO: 2776211 - RNA, 14 nt, Human
ggcaauuuuguaac

SEQ ID NO: 2776212 - RNA, 18 nt, Human
ggcacaaguccuggaugu

SEQ ID NO: 2776213 - RNA, 23 nt, Human
ggcacaaguccuggauguugugu

SEQ ID NO: 2776214 - RNA, 17 nt, Human
ggcacaaagggcccaga

SEQ ID NO: 2776215 - RNA, 15 nt, Human
ggcacaacugcaaua

SEQ ID NO: 2776216 - RNA, 22 nt, Human
ggcacaacugcaauaacuucug

SEQ ID NO: 2776217 - RNA, 15 nt, Human
ggcacaagaaucacu

SEQ ID NO: 2776218 - RNA, 22 nt, Human
ggcacaaucucggcucacugca

SEQ ID NO: 2776219 - RNA, 19 nt, Human
ggcaauuccaauauuucug

SEQ ID NO: 2776220 - RNA, 19 nt, Human
ggcaauucuccugccuuug

SEQ ID NO: 2776221 - RNA, 12 nt, Human
ggcaauuggaac

SEQ ID NO: 2776222 - RNA, 13 nt, Human
ggcaauuggaaca

SEQ ID NO: 2776223 - RNA, 13 nt, Human
ggcaauugucuau

SEQ ID NO: 2776224 - RNA, 18 nt, Human
ggcacagcggggccccag

SEQ ID NO: 2776225 - RNA, 13 nt, Human
ggcacaggacuga

SEQ ID NO: 2776226 - RNA, 22 nt, Human
ggcacaggacugauucugggau

SEQ ID NO: 2776227 - RNA, 20 nt, Human
ggcacagcggagucuguccu

SEQ ID NO: 2776228 - RNA, 22 nt, Human
ggcacagcggagucuguccugu

SEQ ID NO: 2776229 - RNA, 11 nt, Human
ggcacagauug

SEQ ID NO: 2776230 - RNA, 17 nt, Human
ggcacagcaucuguagu

SEQ ID NO: 2776231 - RNA, 22 nt, Human
ggcacagcaucuguagucagcc

SEQ ID NO: 2776232 - RNA, 15 nt, Human
ggcacaggcccccuu

SEQ ID NO: 2776233 - RNA, 14 nt, Human
ggcacagggagaag

SEQ ID NO: 2776234 - RNA, 14 nt, Human
ggcacaggcccccu

SEQ ID NO: 2776235 - RNA, 16 nt, Human
ggcacagggcaguggg

SEQ ID NO: 2776236 - RNA, 14 nt, Human
ggagcaugggccug

SEQ ID NO: 2776237 - RNA, 16 nt, Human
ggagcaugggccuggc

SEQ ID NO: 2776238 - RNA, 19 nt, Human
ggagcauguuuuguauaca

SEQ ID NO: 2776239 - RNA, 20 nt, Human
ggagcauguuuuguauacaa

SEQ ID NO: 2776240 - RNA, 21 nt, Human
ggagcaucucuugaggccagg

SEQ ID NO: 2776241 - RNA, 20 nt, Human
ggagcaucucuugaggccag

SEQ ID NO: 2776242 - RNA, 16 nt, Human
ggagcaucucuugagg

SEQ ID NO: 2776243 - RNA, 13 nt, Human
ggagcaucccgga

SEQ ID NO: 2776244 - RNA, 14 nt, Human
ggagcaucccggag

SEQ ID NO: 2776245 - RNA, 21 nt, Human
ggagcaucccggaggaaaucu

SEQ ID NO: 2776246 - RNA, 16 nt, Human
ggagcaucagugcccu

SEQ ID NO: 2776247 - RNA, 23 nt, Human
ggaggcgcccuuggcuucuguga

SEQ ID NO: 2776248 - RNA, 13 nt, Human
ggaggcgcccuug

SEQ ID NO: 2776249 - RNA, 17 nt, Human
ggaggccuuccagggac

SEQ ID NO: 2776250 - RNA, 17 nt, Human
ggaggccuuccagcugc

SEQ ID NO: 2776251 - RNA, 18 nt, Human
ggaggccuuccagcugcu

SEQ ID NO: 2776252 - RNA, 19 nt, Human
ggaggccuuccagcugcug

SEQ ID NO: 2776253 - RNA, 20 nt, Human
ggaggccuuccagcugcugu

SEQ ID NO: 2776254 - RNA, 21 nt, Human
ggaggccuuccagcugcuguc

SEQ ID NO: 2776255 - RNA, 16 nt, Human
ggaggcccuccugugc

SEQ ID NO: 2776256 - RNA, 23 nt, Human
ggaggcccuccugugcuggggga

SEQ ID NO: 2776257 - RNA, 16 nt, Human
ggaggguacagcuggg

SEQ ID NO: 2776258 - RNA, 18 nt, Human
ggaggguacagcugggcu

SEQ ID NO: 2776259 - RNA, 15 nt, Human
ggagggguguggcuc

SEQ ID NO: 2776260 - RNA, 15 nt, Human
ggaggucaggcccug

SEQ ID NO: 2776261 - RNA, 16 nt, Human
ggaggucaggcccugg

SEQ ID NO: 2776262 - RNA, 14 nt, Human
ggaggugaccccag

SEQ ID NO: 2776263 - RNA, 22 nt, Human
ggaggucgaccccaaagccccu

SEQ ID NO: 2776264 - RNA, 20 nt, Human
ggagguggagguugcauuga

SEQ ID NO: 2776265 - RNA, 13 nt, Human
ggaggugccugga

SEQ ID NO: 2776266 - RNA, 20 nt, Human
ggagguggaggcugcaguga

SEQ ID NO: 2776267 - RNA, 18 nt, Human
ggaggugauagcauugcu

SEQ ID NO: 2776268 - RNA, 16 nt, Human
ggagccaauggagacu

SEQ ID NO: 2776269 - RNA, 13 nt, Human
ggagccagacaga

SEQ ID NO: 2776270 - RNA, 21 nt, Human
ggagccagcucccucuauuua

SEQ ID NO: 2776271 - RNA, 16 nt, Human
ggagcccagcccuccc

SEQ ID NO: 2776272 - RNA, 19 nt, Human
ggagcccagcccuccccau

SEQ ID NO: 2776273 - RNA, 19 nt, Human
ggagcccaggcgggagcgg

SEQ ID NO: 2776274 - RNA, 22 nt, Human
ggagcccaggcgggagcggugg

SEQ ID NO: 2776275 - RNA, 22 nt, Human
ggagccccgaggccuucucuga

SEQ ID NO: 2776276 - RNA, 16 nt, Human
ggagccccgaggccuu

SEQ ID NO: 2776277 - RNA, 19 nt, Human
ggagcccauacucagccug

SEQ ID NO: 2776278 - RNA, 20 nt, Human
ggagcccauacucagccugc

SEQ ID NO: 2776279 - RNA, 21 nt, Human
ggagcccauacucagccugcu

SEQ ID NO: 2776280 - RNA, 12 nt, Human
ggagcugccugu

SEQ ID NO: 2776281 - RNA, 15 nt, Human
ggagcugccccucuc

SEQ ID NO: 2776282 - RNA, 22 nt, Human
ggagcugccccucucugggccu

SEQ ID NO: 2776283 - RNA, 21 nt, Human
ggagcugccuguucagcucca

SEQ ID NO: 2776284 - RNA, 20 nt, Human
ggagcuggccccgccgccug

SEQ ID NO: 2776285 - RNA, 18 nt, Human
ggagcuggccccgccgcc

SEQ ID NO: 2776286 - RNA, 22 nt, Human
ggaggacaggcgggaggaggug

SEQ ID NO: 2776287 - RNA, 17 nt, Human
ggaggaccacaggugug

SEQ ID NO: 2776288 - RNA, 20 nt, Human
ggaggaccacaggugugagc

SEQ ID NO: 2776289 - RNA, 14 nt, Human
ggaggacaaaacuu

SEQ ID NO: 2776290 - RNA, 14 nt, Human
ggaggccccacuga

SEQ ID NO: 2776291 - RNA, 16 nt, Human
ggaggccccacugaug

SEQ ID NO: 2776292 - RNA, 18 nt, Human
ggaggccccacugaugcu

SEQ ID NO: 2776293 - RNA, 13 nt, Human
ggaggaaggauug

SEQ ID NO: 2776294 - RNA, 21 nt, Human
ggaggaaggcuuacacccaca

SEQ ID NO: 2776295 - RNA, 11 nt, Human
ggaggaaggau

SEQ ID NO: 2776296 - RNA, 23 nt, Human
ggagcugguuagaaaugcagaau

SEQ ID NO: 2776297 - RNA, 18 nt, Human
ggagcugguuagaaaugc

SEQ ID NO: 2776298 - RNA, 18 nt, Human
ggagcugucaccaaggaa

SEQ ID NO: 2776299 - RNA, 19 nt, Human
ggagcugucaccaaggaaa

SEQ ID NO: 2776300 - RNA, 20 nt, Human
ggagcuguucucugucguga

SEQ ID NO: 2776301 - RNA, 20 nt, Human
ggagcuggggagaggaaaga

SEQ ID NO: 2776302 - RNA, 21 nt, Human
ggagcuggccgugggccuggg

SEQ ID NO: 2776303 - RNA, 14 nt, Human
gccagccagccacu

SEQ ID NO: 2776304 - RNA, 15 nt, Human
gccagccagccacuc

SEQ ID NO: 2776305 - RNA, 16 nt, Human
gccagccagccacucu

SEQ ID NO: 2776306 - RNA, 17 nt, Human
gccagccccacacagcu

SEQ ID NO: 2776307 - RNA, 18 nt, Human
gccagccccacacagcua

SEQ ID NO: 2776308 - RNA, 22 nt, Human
gccagccccacacagcuacagc

SEQ ID NO: 2776309 - RNA, 15 nt, Human
gccagccccacccag

SEQ ID NO: 2776310 - RNA, 14 nt, Human
gccagccccaccca

SEQ ID NO: 2776311 - RNA, 13 nt, Human
gccagccccaccc

SEQ ID NO: 2776312 - RNA, 19 nt, Human
gccaggcaacuucaguccu

SEQ ID NO: 2776313 - RNA, 22 nt, Human
gccaggcaacuucaguccuggg

SEQ ID NO: 2776314 - RNA, 15 nt, Human
gccaggccagaggga

SEQ ID NO: 2776315 - RNA, 22 nt, Human
gccaggccagagggagugacag

SEQ ID NO: 2776316 - RNA, 12 nt, Human
gccaggccagcu

SEQ ID NO: 2776317 - RNA, 18 nt, Human
gccaggcaggugccugga

SEQ ID NO: 2776318 - RNA, 19 nt, Human
gccaggcagguagccaggg

SEQ ID NO: 2776319 - RNA, 17 nt, Human
gccaggcagguccacag

SEQ ID NO: 2776320 - RNA, 23 nt, Human
gccaggcagaucugugccccaug

SEQ ID NO: 2776321 - RNA, 19 nt, Human
gccaggcaggcgggcgcca

SEQ ID NO: 2776322 - RNA, 21 nt, Human
gccaggcagaucugugcccca

SEQ ID NO: 2776323 - RNA, 15 nt, Human
gccaggcagaucugu

SEQ ID NO: 2776324 - RNA, 14 nt, Human
gccaggcagaucug

SEQ ID NO: 2776325 - RNA, 13 nt, Human
gccaggccagcug

SEQ ID NO: 2776326 - RNA, 17 nt, Human
gccaggcccccaccaca

SEQ ID NO: 2776327 - RNA, 19 nt, Human
gccaggcccccaccacaca

SEQ ID NO: 2776328 - RNA, 20 nt, Human
gccaggcccccaccacacau

SEQ ID NO: 2776329 - RNA, 21 nt, Human
gccaggcccccaccacacauc

SEQ ID NO: 2776330 - RNA, 22 nt, Human
gccaggcccccaccacacaucc

SEQ ID NO: 2776331 - RNA, 23 nt, Human
gccaggcccccaccacacauccc

SEQ ID NO: 2776332 - RNA, 20 nt, Human
gccagugugaucccaagugc

SEQ ID NO: 2776333 - RNA, 13 nt, Human
gccagugugcuga

SEQ ID NO: 2776334 - RNA, 17 nt, Human
gccagugugcugauggg

SEQ ID NO: 2776335 - RNA, 18 nt, Human
gccagugugcugaugggc

SEQ ID NO: 2776336 - RNA, 15 nt, Human
gccaguguugccuaa

SEQ ID NO: 2776337 - RNA, 16 nt, Human
gccaguguugccuaag

SEQ ID NO: 2776338 - RNA, 17 nt, Human
gccaguuagacuagucc

SEQ ID NO: 2776339 - RNA, 18 nt, Human
gccaguguugccuaagua

SEQ ID NO: 2776340 - RNA, 17 nt, Human
gccagugugaucccaag

SEQ ID NO: 2776341 - RNA, 13 nt, Human
gccagugugacaa

SEQ ID NO: 2776342 - RNA, 14 nt, Human
gccaguggggccug

SEQ ID NO: 2776343 - RNA, 15 nt, Human
gccaguggggccugu

SEQ ID NO: 2776344 - RNA, 16 nt, Human
gccaguggggccugug

SEQ ID NO: 2776345 - RNA, 17 nt, Human
gccaguggggccugugg

SEQ ID NO: 2776346 - RNA, 18 nt, Human
gccaguggggccugugga

SEQ ID NO: 2776347 - RNA, 19 nt, Human
gccaguggggccuguggaa

SEQ ID NO: 2776348 - RNA, 21 nt, Human
gccaguggggccuguggaaug

SEQ ID NO: 2776349 - RNA, 17 nt, Human
gccaguguaauccccca

SEQ ID NO: 2776350 - RNA, 18 nt, Human
gccaguguaaucccccag

SEQ ID NO: 2776351 - RNA, 19 nt, Human
gccaguguaaucccccagg

SEQ ID NO: 2776352 - RNA, 20 nt, Human
gccaguguaaucccccagga

SEQ ID NO: 2776353 - RNA, 16 nt, Human
gccagugcuccaggca

SEQ ID NO: 2776354 - RNA, 18 nt, Human
gccaguggaaauucaggu

SEQ ID NO: 2776355 - RNA, 14 nt, Human
gccaguuggaacca

SEQ ID NO: 2776356 - RNA, 22 nt, Human
gccauaaaacagguaauauaaa

SEQ ID NO: 2776357 - RNA, 16 nt, Human
gccauagucacauggc

SEQ ID NO: 2776358 - RNA, 16 nt, Human
gccauauaaguuugaa

SEQ ID NO: 2776359 - RNA, 17 nt, Human
gccauagucaaagagag

SEQ ID NO: 2776360 - RNA, 23 nt, Human
gccauagucaaagagaguuuuua

SEQ ID NO: 2776361 - RNA, 17 nt, Human
gccauauaaguuugaag

SEQ ID NO: 2776362 - RNA, 18 nt, Human
gccauauaaguuugaagg

SEQ ID NO: 2776363 - RNA, 19 nt, Human
gccauauaaguuugaagga

SEQ ID NO: 2776364 - RNA, 22 nt, Human
gccauauaaguuugaaggaaac

SEQ ID NO: 2776365 - RNA, 19 nt, Human
gccauauauaacagauaca

SEQ ID NO: 2776366 - RNA, 21 nt, Human
gccauauauaacagauacauu

SEQ ID NO: 2776367 - RNA, 23 nt, Human
gccauauauaacagauacauuuc

SEQ ID NO: 2776368 - RNA, 23 nt, Human
gccauauaaguuugaaggaaaca

SEQ ID NO: 2776369 - RNA, 14 nt, Human
gccauauuuacuac

SEQ ID NO: 2776370 - RNA, 17 nt, Human
gccauauuuacuaccuu

SEQ ID NO: 2776371 - RNA, 16 nt, Human
gccauacuuugucuga

SEQ ID NO: 2776372 - RNA, 20 nt, Human
gccauacuuaucucucugug

SEQ ID NO: 2776373 - RNA, 21 nt, Human
gccauacuuaucucucugugc

SEQ ID NO: 2776374 - RNA, 22 nt, Human
gccauacuuaucucucugugcu

SEQ ID NO: 2776375 - RNA, 16 nt, Human
gccauagaguuuaaca

SEQ ID NO: 2776376 - RNA, 15 nt, Human
gccauaauacaaaag

SEQ ID NO: 2776377 - RNA, 21 nt, Human
gccauaauacaaaaggcucca

SEQ ID NO: 2776378 - RNA, 18 nt, Human
gccauacuuaucucucug

SEQ ID NO: 2776379 - RNA, 14 nt, Human
gccaugugccaggu

SEQ ID NO: 2776380 - RNA, 19 nt, Human
gccaucaaaaugcuuuuua

SEQ ID NO: 2776381 - RNA, 14 nt, Human
gccaucaaacugua

SEQ ID NO: 2776382 - RNA, 18 nt, Human
gccaucaaaaugcuuuuu

SEQ ID NO: 2776383 - RNA, 16 nt, Human
gccaucaaaaugcuuu

SEQ ID NO: 2776384 - RNA, 15 nt, Human
gccaucaaaaugcuu

SEQ ID NO: 2776385 - RNA, 14 nt, Human
gccaucaaaaugcu

SEQ ID NO: 2776386 - RNA, 17 nt, Human
gccauguuaacaugaca

SEQ ID NO: 2776387 - RNA, 23 nt, Human
gccauguuaauguaaucugaugg

SEQ ID NO: 2776388 - RNA, 22 nt, Human
gcccaggaguuugaggcugcag

SEQ ID NO: 2776389 - RNA, 12 nt, Human
gcccaggcaggu

SEQ ID NO: 2776390 - RNA, 13 nt, Human
gcccaggcagguc

SEQ ID NO: 2776391 - RNA, 13 nt, Human
gcccaggccccug

SEQ ID NO: 2776392 - RNA, 15 nt, Human
gcccaggccccugcc

SEQ ID NO: 2776393 - RNA, 16 nt, Human
gcccaggcaggucuug

SEQ ID NO: 2776394 - RNA, 14 nt, Human
gcccaggcaggucu

SEQ ID NO: 2776395 - RNA, 20 nt, Human
gcccaggagggcauccauac

SEQ ID NO: 2776396 - RNA, 22 nt, Human
gcccaggagggcauccauacca

SEQ ID NO: 2776397 - RNA, 17 nt, Human
gcccaggccccugccac

SEQ ID NO: 2776398 - RNA, 22 nt, Human
gcccauguucugcccccagccc

SEQ ID NO: 2776399 - RNA, 23 nt, Human
gcccauguucugcccccagccca

SEQ ID NO: 2776400 - RNA, 20 nt, Human
gcccauucugcccuguggga

SEQ ID NO: 2776401 - RNA, 20 nt, Human
gcccauuucaauucucaaaa

SEQ ID NO: 2776402 - RNA, 11 nt, Human
gcccauuucau

SEQ ID NO: 2776403 - RNA, 18 nt, Human
gcccauuucauauucuuu

SEQ ID NO: 2776404 - RNA, 15 nt, Human
gcccauuucgugagc

SEQ ID NO: 2776405 - RNA, 19 nt, Human
gcccauuucaauucucaaa

SEQ ID NO: 2776406 - RNA, 18 nt, Human
gcccauuucaauucucaa

SEQ ID NO: 2776407 - RNA, 18 nt, Human
gccccaaucccuuuauua

SEQ ID NO: 2776408 - RNA, 19 nt, Human
gccccaaucccuuuauuac

SEQ ID NO: 2776409 - RNA, 13 nt, Human
gccccaauuuucu

SEQ ID NO: 2776410 - RNA, 16 nt, Human
gccccacacagcuaca

SEQ ID NO: 2776411 - RNA, 14 nt, Human
gccccccucccaga

SEQ ID NO: 2776412 - RNA, 15 nt, Human
gccccccucccagag

SEQ ID NO: 2776413 - RNA, 16 nt, Human
gccccccucccagagg

SEQ ID NO: 2776414 - RNA, 17 nt, Human
gccccccucccagaggc

SEQ ID NO: 2776415 - RNA, 15 nt, Human
gccccccugcccugu

SEQ ID NO: 2776416 - RNA, 14 nt, Human
gccccccugcccug

SEQ ID NO: 2776417 - RNA, 22 nt, Human
gccccugcugguucaggguugg

SEQ ID NO: 2776418 - RNA, 21 nt, Human
gccccugcugguucaggguug

SEQ ID NO: 2776419 - RNA, 15 nt, Human
gccccugcccggcug

SEQ ID NO: 2776420 - RNA, 19 nt, Human
gcccccgucacgugcgcug

SEQ ID NO: 2776421 - RNA, 22 nt, Human
gcccccuccccggcacccucug

SEQ ID NO: 2776422 - RNA, 23 nt, Human
gcccccuccccggcacccucugg

SEQ ID NO: 2776423 - RNA, 14 nt, Human
gcccccggcccccu

SEQ ID NO: 2776424 - RNA, 21 nt, Human
gcccucaucuaugaggaaagg

SEQ ID NO: 2776425 - RNA, 23 nt, Human
gcccucaucuugaagggcccagg

SEQ ID NO: 2776426 - RNA, 16 nt, Human
gcccucauggccccuc

SEQ ID NO: 2776427 - RNA, 19 nt, Human
gcccucagaacccuuggcu

SEQ ID NO: 2776428 - RNA, 15 nt, Human
gcccucacccugggg

SEQ ID NO: 2776429 - RNA, 13 nt, Human
gcccuagagccug

SEQ ID NO: 2776430 - RNA, 14 nt, Human
gcccuagagccugc

SEQ ID NO: 2776431 - RNA, 15 nt, Human
gcccuagagccugcc

SEQ ID NO: 2776432 - RNA, 16 nt, Human
gcccuagagccugccu

SEQ ID NO: 2776433 - RNA, 17 nt, Human
gcccuagagccugccug

SEQ ID NO: 2776434 - RNA, 18 nt, Human
gcccuagagccugccugg

SEQ ID NO: 2776435 - RNA, 19 nt, Human
gcccuagagccugccugga

SEQ ID NO: 2776436 - RNA, 20 nt, Human
gcccuagagccugccuggag

SEQ ID NO: 2776437 - RNA, 23 nt, Human
gcccuagagccugccuggagcgu

SEQ ID NO: 2776438 - RNA, 19 nt, Human
gcccuagcccagcgcucug

SEQ ID NO: 2776439 - RNA, 21 nt, Human
gcccuagcccagcgcucugcc

SEQ ID NO: 2776440 - RNA, 19 nt, Human
gccccuggacaagcagagg

SEQ ID NO: 2776441 - RNA, 21 nt, Human
gcccuagagccugccuggagc

SEQ ID NO: 2776442 - RNA, 16 nt, Human
gcccucacccuggggc

SEQ ID NO: 2776443 - RNA, 17 nt, Human
gcccucacccuggggcu

SEQ ID NO: 2776444 - RNA, 14 nt, Human
gcccucagaacccu

SEQ ID NO: 2776445 - RNA, 15 nt, Human
gcccuauuuuugcaa

SEQ ID NO: 2776446 - RNA, 17 nt, Human
gcccuauuuuugcaaug

SEQ ID NO: 2776447 - RNA, 23 nt, Human
gcccucagaacccuuggcuugcc

SEQ ID NO: 2776448 - RNA, 15 nt, Human
gcccucagauguccc

SEQ ID NO: 2776449 - RNA, 16 nt, Human
gcccucagaugucccu

SEQ ID NO: 2776450 - RNA, 17 nt, Human
gcccucagaugucccuu

SEQ ID NO: 2776451 - RNA, 18 nt, Human
gcccucagaugucccuug

SEQ ID NO: 2776452 - RNA, 18 nt, Human
gcccucagaacccuuggc

SEQ ID NO: 2776453 - RNA, 17 nt, Human
gcccucagaacccuugg

SEQ ID NO: 2776454 - RNA, 17 nt, Human
gcuaauuuuuguaauuu

SEQ ID NO: 2776455 - RNA, 16 nt, Human
gcuaauuuuuguaauu

SEQ ID NO: 2776456 - RNA, 15 nt, Human
gcuaauuuuuguaau

SEQ ID NO: 2776457 - RNA, 15 nt, Human
gcuaauuuaaagaga

SEQ ID NO: 2776458 - RNA, 16 nt, Human
gcuaauuuaaagagac

SEQ ID NO: 2776459 - RNA, 18 nt, Human
gcuacuggcauaguuuca

SEQ ID NO: 2776460 - RNA, 20 nt, Human
gcuacuggcauaguuucaua

SEQ ID NO: 2776461 - RNA, 12 nt, Human
gcuacaacagcc

SEQ ID NO: 2776462 - RNA, 14 nt, Human
gcuacaacagccuc

SEQ ID NO: 2776463 - RNA, 15 nt, Human
gcuacaacagccuca

SEQ ID NO: 2776464 - RNA, 17 nt, Human
gcuacaacagccucacu

SEQ ID NO: 2776465 - RNA, 18 nt, Human
gcuacaaaacgcgcagau

SEQ ID NO: 2776466 - RNA, 22 nt, Human
gcuacaaaacgcgcagaugugc

SEQ ID NO: 2776467 - RNA, 22 nt, Human
gcguugggagggggagaaaagg

SEQ ID NO: 2776468 - RNA, 22 nt, Human
gcguugguccagagcggaggcu

SEQ ID NO: 2776469 - RNA, 14 nt, Human
gcguuggucucugc

SEQ ID NO: 2776470 - RNA, 15 nt, Human
gcguuggucucugca

SEQ ID NO: 2776471 - RNA, 16 nt, Human
gcguugccugucgcuu

SEQ ID NO: 2776472 - RNA, 14 nt, Human
gcguugcuuucacu

SEQ ID NO: 2776473 - RNA, 15 nt, Human
gcguuguuacaggaa

SEQ ID NO: 2776474 - RNA, 16 nt, Human
gcguuguuacaggaag

SEQ ID NO: 2776475 - RNA, 19 nt, Human
gcguuguugcauguuugaa

SEQ ID NO: 2776476 - RNA, 23 nt, Human
gcguuguugcauguuugaaauga

SEQ ID NO: 2776477 - RNA, 14 nt, Human
gcguuuagaccaag

SEQ ID NO: 2776478 - RNA, 16 nt, Human
gcguuuagaccaagga

SEQ ID NO: 2776479 - RNA, 16 nt, Human
gcuaauuuuucauuuu

SEQ ID NO: 2776480 - RNA, 13 nt, Human
gcuaauuuucuca

SEQ ID NO: 2776481 - RNA, 14 nt, Human
gcuaauuuucucaa

SEQ ID NO: 2776482 - RNA, 17 nt, Human
gcuaauuuucucaaaag

SEQ ID NO: 2776483 - RNA, 19 nt, Human
gcuaauuuucucaaaagca

SEQ ID NO: 2776484 - RNA, 22 nt, Human
gcuaauuuucucaaaagcauuu

SEQ ID NO: 2776485 - RNA, 15 nt, Human
gcuaauuugcauuaa

SEQ ID NO: 2776486 - RNA, 13 nt, Human
gcuaauuugcauu

SEQ ID NO: 2776487 - RNA, 12 nt, Human
gcuaauuugcau

SEQ ID NO: 2776488 - RNA, 20 nt, Human
gcuaauuuauccugaaauuu

SEQ ID NO: 2776489 - RNA, 18 nt, Human
gcuaauugcuguugaaag

SEQ ID NO: 2776490 - RNA, 20 nt, Human
gcuaauugcuguugaaagca

SEQ ID NO: 2776491 - RNA, 21 nt, Human
gcuaauugcuguugaaagcaa

SEQ ID NO: 2776492 - RNA, 22 nt, Human
gcuaauugcuguugaaagcaaa

SEQ ID NO: 2776493 - RNA, 23 nt, Human
gcuaauugcuguugaaagcaaaa

SEQ ID NO: 2776494 - RNA, 19 nt, Human
gcuaauugggaguccaggc

SEQ ID NO: 2776495 - RNA, 20 nt, Human
gcuaauugggaguccaggca

SEQ ID NO: 2776496 - RNA, 19 nt, Human
gcuacuuccuccuccccac

SEQ ID NO: 2776497 - RNA, 18 nt, Human
gcuacuuccuccucccca

SEQ ID NO: 2776498 - RNA, 17 nt, Human
gcuaauuuuuacuuuuu

SEQ ID NO: 2776499 - RNA, 15 nt, Human
gcuacuugguuugug

SEQ ID NO: 2776500 - RNA, 18 nt, Human
gcuacuuugguuucuguc

SEQ ID NO: 2776501 - RNA, 22 nt, Human
gcuacuuugguuucugucugua

SEQ ID NO: 2776502 - RNA, 20 nt, Human
gcuacuguccuacccacccu

SEQ ID NO: 2776503 - RNA, 19 nt, Human
gcuacuguccuacccaccc

SEQ ID NO: 2776504 - RNA, 13 nt, Human
gcuacuuaagaga

SEQ ID NO: 2776505 - RNA, 16 nt, Human
gcuacuuaagagaaau

SEQ ID NO: 2776506 - RNA, 21 nt, Human
gcuacuuaagagaaauggcaa

SEQ ID NO: 2776507 - RNA, 21 nt, Human
gcuacugugugugugaaugaa

SEQ ID NO: 2776508 - RNA, 19 nt, Human
gcuacugugugugugaaug

SEQ ID NO: 2776509 - RNA, 18 nt, Human
gcuacugugugugugaau

SEQ ID NO: 2776510 - RNA, 15 nt, Human
gcuacugugugugug

SEQ ID NO: 2776511 - RNA, 12 nt, Human
gcuacugucuca

SEQ ID NO: 2776512 - RNA, 16 nt, Human
gcuacugucucacuga

SEQ ID NO: 2776513 - RNA, 21 nt, Human
gcuacugucucacugaaacau

SEQ ID NO: 2776514 - RNA, 16 nt, Human
gcuacugucuuuggaa

SEQ ID NO: 2776515 - RNA, 14 nt, Human
gcguggugccaucc

SEQ ID NO: 2776516 - RNA, 13 nt, Human
gcguggugccauc

SEQ ID NO: 2776517 - RNA, 13 nt, Human
gcguggauuaaac

SEQ ID NO: 2776518 - RNA, 14 nt, Human
gcguggauuaaacu

SEQ ID NO: 2776519 - RNA, 20 nt, Human
gcguggauuaaacuuaugaa

SEQ ID NO: 2776520 - RNA, 23 nt, Human
gcguggauuaaacuuaugaaugu

SEQ ID NO: 2776521 - RNA, 17 nt, Human
gcguggcaaauauaaaa

SEQ ID NO: 2776522 - RNA, 12 nt, Human
gcgugggucaga

SEQ ID NO: 2776523 - RNA, 13 nt, Human
gcgugggucagaa

SEQ ID NO: 2776524 - RNA, 14 nt, Human
gcgugggucagaag

SEQ ID NO: 2776525 - RNA, 18 nt, Human
gcgugcacacaccagagc

SEQ ID NO: 2776526 - RNA, 14 nt, Human
gcgugcacacacca

SEQ ID NO: 2776527 - RNA, 19 nt, Human
gcgugaucaaagccacacu

SEQ ID NO: 2776528 - RNA, 20 nt, Human
gcgugaucaaagccacacuc

SEQ ID NO: 2776529 - RNA, 16 nt, Human
gcggccccucccgccc

SEQ ID NO: 2776530 - RNA, 13 nt, Human
gcggccccucccg

SEQ ID NO: 2776531 - RNA, 12 nt, Human
gcggagcuggcc

SEQ ID NO: 2776532 - RNA, 16 nt, Human
gcggagcuugcaguga

SEQ ID NO: 2776533 - RNA, 16 nt, Human
gcggagguugcaggga

SEQ ID NO: 2776534 - RNA, 15 nt, Human
gcggagguugcaggg

SEQ ID NO: 2776535 - RNA, 14 nt, Human
gcggagcuggcccc

SEQ ID NO: 2776536 - RNA, 17 nt, Human
gcggagcuggccccgcc

SEQ ID NO: 2776537 - RNA, 14 nt, Human
gcggaggcugugug

SEQ ID NO: 2776538 - RNA, 16 nt, Human
gcggaggcugugugcc

SEQ ID NO: 2776539 - RNA, 18 nt, Human
gcggaggcugugugccug

SEQ ID NO: 2776540 - RNA, 18 nt, Human
gcgagacuccgucucaaa

SEQ ID NO: 2776541 - RNA, 14 nt, Human
gcgagagaggagcc

SEQ ID NO: 2776542 - RNA, 16 nt, Human
gcgagagaggagccag

SEQ ID NO: 2776543 - RNA, 13 nt, Human
gcgauucuucugc

SEQ ID NO: 2776544 - RNA, 13 nt, Human
gcgauagagucuc

SEQ ID NO: 2776545 - RNA, 13 nt, Human
gcgauauacagau

SEQ ID NO: 2776546 - RNA, 14 nt, Human
gcgauauacagaug

SEQ ID NO: 2776547 - RNA, 19 nt, Human
gcgauauacagaugaaaau

SEQ ID NO: 2776548 - RNA, 17 nt, Human
gcgauucuccugccuca

SEQ ID NO: 2776549 - RNA, 16 nt, Human
gcgauccaccugucuc

SEQ ID NO: 2776550 - RNA, 17 nt, Human
gcgaguuguggaaagcc

SEQ ID NO: 2776551 - RNA, 22 nt, Human
gcgagugaaugccagugugcug

SEQ ID NO: 2776552 - RNA, 16 nt, Human
gcgagagucugucuca

SEQ ID NO: 2776553 - RNA, 15 nt, Human
gcgagcaucccccaa

SEQ ID NO: 2776554 - RNA, 14 nt, Human
gcgagggcagcugc

SEQ ID NO: 2776555 - RNA, 13 nt, Human
gcgagggcagcug

SEQ ID NO: 2776556 - RNA, 12 nt, Human
gcgagggcagcu

SEQ ID NO: 2776557 - RNA, 16 nt, Human
gcgagggcagcugcua

SEQ ID NO: 2776558 - RNA, 15 nt, Human
gcgagggcagcugcu

SEQ ID NO: 2776559 - RNA, 17 nt, Human
gcgagggcagcugcuau

SEQ ID NO: 2776560 - RNA, 12 nt, Human
gcgaggcaggcc

SEQ ID NO: 2776561 - RNA, 13 nt, Human
gcgaggcaggccg

SEQ ID NO: 2776562 - RNA, 14 nt, Human
gcgauucuucugcu

SEQ ID NO: 2776563 - RNA, 13 nt, Human
gcgauucuccugc

SEQ ID NO: 2776564 - RNA, 20 nt, Human
gccuccuuccuugcuguccu

SEQ ID NO: 2776565 - RNA, 11 nt, Human
gccuccaucuc

SEQ ID NO: 2776566 - RNA, 12 nt, Human
gccuccacagcg

SEQ ID NO: 2776567 - RNA, 19 nt, Human
gccuccagaacucacuggg

SEQ ID NO: 2776568 - RNA, 17 nt, Human
gccuccagaacucacug

SEQ ID NO: 2776569 - RNA, 22 nt, Human
gccuccagaggggcucagguca

SEQ ID NO: 2776570 - RNA, 11 nt, Human
gccuccagccu

SEQ ID NO: 2776571 - RNA, 16 nt, Human
gccuccagccugccca

SEQ ID NO: 2776572 - RNA, 18 nt, Human
gccuccagccugcccaag

SEQ ID NO: 2776573 - RNA, 14 nt, Human
gccuccaggcccgu

SEQ ID NO: 2776574 - RNA, 20 nt, Human
gccuccaggcccgucugucc

SEQ ID NO: 2776575 - RNA, 21 nt, Human
gccuccaggcccgucugucca

SEQ ID NO: 2776576 - RNA, 17 nt, Human
gccuccaaaugccaacu

SEQ ID NO: 2776577 - RNA, 22 nt, Human
gccuccaaaugccaacuugucc

SEQ ID NO: 2776578 - RNA, 17 nt, Human
gccuccaagcuccaucu

SEQ ID NO: 2776579 - RNA, 23 nt, Human
gccugcuaauuccccagauugca

SEQ ID NO: 2776580 - RNA, 17 nt, Human
gccugcuaauuccccag

SEQ ID NO: 2776581 - RNA, 20 nt, Human
gccugcguuuuggaagcucu

SEQ ID NO: 2776582 - RNA, 18 nt, Human
gccugcguugguccagag

SEQ ID NO: 2776583 - RNA, 19 nt, Human
gccugcguugguccagagc

SEQ ID NO: 2776584 - RNA, 20 nt, Human
gccugcguugguccagagcg

SEQ ID NO: 2776585 - RNA, 13 nt, Human
gccugcgucuucc

SEQ ID NO: 2776586 - RNA, 14 nt, Human
gccugcgucuuccg

SEQ ID NO: 2776587 - RNA, 15 nt, Human
gccugcgucuuccgc

SEQ ID NO: 2776588 - RNA, 16 nt, Human
gccugcgucuuccgcc

SEQ ID NO: 2776589 - RNA, 18 nt, Human
gccugcgucuuccgcccc

SEQ ID NO: 2776590 - RNA, 23 nt, Human
gccugcgucuuccgccccugccu

SEQ ID NO: 2776591 - RNA, 15 nt, Human
gccucgaggugccuu

SEQ ID NO: 2776592 - RNA, 19 nt, Human
gccucgaggugccuucuuc

SEQ ID NO: 2776593 - RNA, 23 nt, Human
gccucgaggugccuucuucaggg

SEQ ID NO: 2776594 - RNA, 13 nt, Human
gccucggacuuag

SEQ ID NO: 2776595 - RNA, 14 nt, Human
gccugccccucucc

SEQ ID NO: 2776596 - RNA, 19 nt, Human
gccucgcucuguuacccag

SEQ ID NO: 2776597 - RNA, 20 nt, Human
gccucgcucuguuacccagg

SEQ ID NO: 2776598 - RNA, 23 nt, Human
gccucgcucuguuacccagggug

SEQ ID NO: 2776599 - RNA, 17 nt, Human
gccugccccucucccgc

SEQ ID NO: 2776600 - RNA, 14 nt, Human
gccugcccgcacag

SEQ ID NO: 2776601 - RNA, 15 nt, Human
gccugcccgcacagc

SEQ ID NO: 2776602 - RNA, 17 nt, Human
gccugcccgcacagcag

SEQ ID NO: 2776603 - RNA, 19 nt, Human
gccugcccgcacagcagcc

SEQ ID NO: 2776604 - RNA, 20 nt, Human
gccugcccgcacagcagccu

SEQ ID NO: 2776605 - RNA, 21 nt, Human
gccugcccgcacagcagccug

SEQ ID NO: 2776606 - RNA, 21 nt, Human
gccugcccguaaacacgccug

SEQ ID NO: 2776607 - RNA, 16 nt, Human
gccugcccguaaacac

SEQ ID NO: 2776608 - RNA, 20 nt, Human
gccugcccucauggccccuc

SEQ ID NO: 2776609 - RNA, 21 nt, Human
gccugcccucauggccccucu

SEQ ID NO: 2776610 - RNA, 22 nt, Human
gccugcccucauggccccucug

SEQ ID NO: 2776611 - RNA, 23 nt, Human
ggaaacgcuaccucucugucccu

SEQ ID NO: 2776612 - RNA, 13 nt, Human
ggaaaugagcagg

SEQ ID NO: 2776613 - RNA, 14 nt, Human
ggaaaugagcaggg

SEQ ID NO: 2776614 - RNA, 16 nt, Human
ggaacaaaaaaaccac

SEQ ID NO: 2776615 - RNA, 17 nt, Human
ggaacaaaaaaaccaca

SEQ ID NO: 2776616 - RNA, 21 nt, Human
ggaacaaaaaaaccacaaagg

SEQ ID NO: 2776617 - RNA, 18 nt, Human
ggaacaaggagucagaca

SEQ ID NO: 2776618 - RNA, 12 nt, Human
ggaaauuaaagu

SEQ ID NO: 2776619 - RNA, 17 nt, Human
ggaaaugucaacaagua

SEQ ID NO: 2776620 - RNA, 14 nt, Human
ggaagaagcagaga

SEQ ID NO: 2776621 - RNA, 16 nt, Human
ggaagaagcagagaga

SEQ ID NO: 2776622 - RNA, 14 nt, Human
ggaagaaaaugguu

SEQ ID NO: 2776623 - RNA, 20 nt, Human
ggaagaaaaugguuuauuuu

SEQ ID NO: 2776624 - RNA, 19 nt, Human
ggaagaaacacuuucucuu

SEQ ID NO: 2776625 - RNA, 17 nt, Human
ggaagaaaaaaaucuuc

SEQ ID NO: 2776626 - RNA, 23 nt, Human
ggaagaaaaaaaucuucuccaga

SEQ ID NO: 2776627 - RNA, 12 nt, Human
ggaacugcagca

SEQ ID NO: 2776628 - RNA, 16 nt, Human
ggaacucugacaaggg

SEQ ID NO: 2776629 - RNA, 19 nt, Human
ggaacucugacaagggcug

SEQ ID NO: 2776630 - RNA, 21 nt, Human
ggaacucugacaagggcugac

SEQ ID NO: 2776631 - RNA, 23 nt, Human
ggaaauucaggugaaaauguuca

SEQ ID NO: 2776632 - RNA, 14 nt, Human
ggaacacacuugga

SEQ ID NO: 2776633 - RNA, 17 nt, Human
ggaacaccauaggucac

SEQ ID NO: 2776634 - RNA, 17 nt, Human
ggaagacaaaauguuuu

SEQ ID NO: 2776635 - RNA, 16 nt, Human
ggaagacgccugagcu

SEQ ID NO: 2776636 - RNA, 15 nt, Human
ggaagacgccugagc

SEQ ID NO: 2776637 - RNA, 14 nt, Human
ggaagaccuggcaa

SEQ ID NO: 2776638 - RNA, 12 nt, Human
gcuuuuggccug

SEQ ID NO: 2776639 - RNA, 14 nt, Human
gcuuuuggccugga

SEQ ID NO: 2776640 - RNA, 18 nt, Human
gcuuuugucuaugggacu

SEQ ID NO: 2776641 - RNA, 15 nt, Human
gcuuuuggucugugu

SEQ ID NO: 2776642 - RNA, 14 nt, Human
gcuuuucucagcug

SEQ ID NO: 2776643 - RNA, 13 nt, Human
ggaaacagacucg

SEQ ID NO: 2776644 - RNA, 15 nt, Human
ggaaacacuccuugc

SEQ ID NO: 2776645 - RNA, 17 nt, Human
ggaaacacuccuugcau

SEQ ID NO: 2776646 - RNA, 22 nt, Human
ggaaacagacucgauucauauu

SEQ ID NO: 2776647 - RNA, 19 nt, Human
ggaaacccauaggcccaca

SEQ ID NO: 2776648 - RNA, 23 nt, Human
ggaaacccauaggcccacacaca

SEQ ID NO: 2776649 - RNA, 24 nt, Human
ggaaacccauaggcccacacacag

SEQ ID NO: 2776650 - RNA, 19 nt, Human
ggaaaccccuucucuguga

SEQ ID NO: 2776651 - RNA, 14 nt, Human
ggaaacccgagggu

SEQ ID NO: 2776652 - RNA, 16 nt, Human
gcuuuuugucuuuucu

SEQ ID NO: 2776653 - RNA, 14 nt, Human
gcuuuuugguguau

SEQ ID NO: 2776654 - RNA, 18 nt, Human
gcuuuuugguguauagaa

SEQ ID NO: 2776655 - RNA, 13 nt, Human
ggaaacaacagcu

SEQ ID NO: 2776656 - RNA, 16 nt, Human
ggaaacaacagcuuua

SEQ ID NO: 2776657 - RNA, 12 nt, Human
ggaaacaauaua

SEQ ID NO: 2776658 - RNA, 14 nt, Human
gcuuuuggucauca

SEQ ID NO: 2776659 - RNA, 20 nt, Human
gcuuuugucuaauuaaaaca

SEQ ID NO: 2776660 - RNA, 21 nt, Human
gcuuuugucuaauuaaaacac

SEQ ID NO: 2776661 - RNA, 13 nt, Human
gcuuuuuaauugu

SEQ ID NO: 2776662 - RNA, 15 nt, Human
gcuuuuuauuucugc

SEQ ID NO: 2776663 - RNA, 20 nt, Human
gcuuuuuaauuguuguuucu

SEQ ID NO: 2776664 - RNA, 21 nt, Human
gcuuuuuaauuguuguuucuu

SEQ ID NO: 2776665 - RNA, 22 nt, Human
gcuuuuuaauuguuguuucuuu

SEQ ID NO: 2776666 - RNA, 21 nt, Human
gcuuuuuauuucugcauaugu

SEQ ID NO: 2776667 - RNA, 13 nt, Human
gcuuuuucacagu

SEQ ID NO: 2776668 - RNA, 15 nt, Human
gcuuuuucacaguca

SEQ ID NO: 2776669 - RNA, 17 nt, Human
gcuuuuuauuucugcau

SEQ ID NO: 2776670 - RNA, 13 nt, Human
gcuuuuuccagag

SEQ ID NO: 2776671 - RNA, 16 nt, Human
gcuuuuuccuccugga

SEQ ID NO: 2776672 - RNA, 12 nt, Human
gcuuuuugaaau

SEQ ID NO: 2776673 - RNA, 13 nt, Human
gcuuuuugaaaug

SEQ ID NO: 2776674 - RNA, 14 nt, Human
gcuuuuugaaauga

SEQ ID NO: 2776675 - RNA, 16 nt, Human
gcuuuuugaaaugaaa

SEQ ID NO: 2776676 - RNA, 17 nt, Human
gcuuuuugaaaugaaau

SEQ ID NO: 2776677 - RNA, 18 nt, Human
gcuuuuugaaaugaaauu

SEQ ID NO: 2776678 - RNA, 14 nt, Human
gcuuugaucccuga

SEQ ID NO: 2776679 - RNA, 15 nt, Human
gcuuugaucccugac

SEQ ID NO: 2776680 - RNA, 14 nt, Human
gcuuccuguuugua

SEQ ID NO: 2776681 - RNA, 20 nt, Human
gcuuccuguccccaucuguc

SEQ ID NO: 2776682 - RNA, 22 nt, Human
gcuuccaucccaaccagugcca

SEQ ID NO: 2776683 - RNA, 23 nt, Human
gcuuccaucccaaccagugccaa

SEQ ID NO: 2776684 - RNA, 19 nt, Human
gcuuccaugauucuauuua

SEQ ID NO: 2776685 - RNA, 14 nt, Human
gcuuccaugauucu

SEQ ID NO: 2776686 - RNA, 18 nt, Human
gcuuccaugauucuauuu

SEQ ID NO: 2776687 - RNA, 15 nt, Human
gcuuccaugauucua

SEQ ID NO: 2776688 - RNA, 18 nt, Human
gcuucuuacugauaauuu

SEQ ID NO: 2776689 - RNA, 13 nt, Human
gcuucuuaauuaa

SEQ ID NO: 2776690 - RNA, 16 nt, Human
gcuucuuaauuaauuu

SEQ ID NO: 2776691 - RNA, 17 nt, Human
gcuucuuaauuaauuug

SEQ ID NO: 2776692 - RNA, 11 nt, Human
gcuugaagcug

SEQ ID NO: 2776693 - RNA, 13 nt, Human
gcuugaacccagg

SEQ ID NO: 2776694 - RNA, 17 nt, Human
gcuuguaaauagcucag

SEQ ID NO: 2776695 - RNA, 19 nt, Human
gcuuguaaauagcucaggu

SEQ ID NO: 2776696 - RNA, 18 nt, Human
gcuuguaaauagcucagg

SEQ ID NO: 2776697 - RNA, 22 nt, Human
gcuuuccccaugucucgacuca

SEQ ID NO: 2776698 - RNA, 13 nt, Human
gcuuguaaauacc

SEQ ID NO: 2776699 - RNA, 15 nt, Human
gcuuguaaauaccag

SEQ ID NO: 2776700 - RNA, 17 nt, Human
gcuuguaaauaccagga

SEQ ID NO: 2776701 - RNA, 21 nt, Human
gcuuuccccaugucucgacuc

SEQ ID NO: 2776702 - RNA, 14 nt, Human
gcuuucucuuuucu

SEQ ID NO: 2776703 - RNA, 19 nt, Human
gcuuucucuuuucucuuuu

SEQ ID NO: 2776704 - RNA, 18 nt, Human
gcuuucuccccaaugaga

SEQ ID NO: 2776705 - RNA, 21 nt, Human
gcuuucuccccaaugagacuu

SEQ ID NO: 2776706 - RNA, 12 nt, Human
gcuuucuagaag

SEQ ID NO: 2776707 - RNA, 18 nt, Human
gcuuucuaugcuguuugu

SEQ ID NO: 2776708 - RNA, 15 nt, Human
gcuuucccuuggaua

SEQ ID NO: 2776709 - RNA, 11 nt, Human
gcuuucugucu

SEQ ID NO: 2776710 - RNA, 13 nt, Human
gcuuucuggagag

SEQ ID NO: 2776711 - RNA, 15 nt, Human
gcuuuccuaaaucag

SEQ ID NO: 2776712 - RNA, 15 nt, Human
gcuuugaguccccca

SEQ ID NO: 2776713 - RNA, 21 nt, Human
gcugugcacccagaagaagau

SEQ ID NO: 2776714 - RNA, 19 nt, Human
gcuguauuagucacagaga

SEQ ID NO: 2776715 - RNA, 23 nt, Human
gcuguacaucuauuuuggauugu

SEQ ID NO: 2776716 - RNA, 20 nt, Human
gcuguacuucgucuucuaau

SEQ ID NO: 2776717 - RNA, 17 nt, Human
gcuguacugcucaggcu

SEQ ID NO: 2776718 - RNA, 23 nt, Human
gcuguacugcucaggcugcagcu

SEQ ID NO: 2776719 - RNA, 22 nt, Human
gcuguacaucuauuuuggauug

SEQ ID NO: 2776720 - RNA, 20 nt, Human
gcuguacaucuauuuuggau

SEQ ID NO: 2776721 - RNA, 16 nt, Human
gcuguacaucuauuuu

SEQ ID NO: 2776722 - RNA, 12 nt, Human
gcuguacaucua

SEQ ID NO: 2776723 - RNA, 23 nt, Human
gcugguucaggguuggccccugc

SEQ ID NO: 2776724 - RNA, 16 nt, Human
gcuggauauuuuacua

SEQ ID NO: 2776725 - RNA, 16 nt, Human
gcuggaguuucaugua

SEQ ID NO: 2776726 - RNA, 15 nt, Human
gcuggaguugucacu

SEQ ID NO: 2776727 - RNA, 20 nt, Human
gcuggagugcagugguguga

SEQ ID NO: 2776728 - RNA, 15 nt, Human
gcuggagugcagugg

SEQ ID NO: 2776729 - RNA, 19 nt, Human
gcuggagugcaguggugca

SEQ ID NO: 2776730 - RNA, 10 nt, Human
gcuucagggc

SEQ ID NO: 2776731 - RNA, 13 nt, Human
gcuucagggcagg

SEQ ID NO: 2776732 - RNA, 19 nt, Human
gcuucagggcagguggggu

SEQ ID NO: 2776733 - RNA, 12 nt, Human
gcuuauuuuaau

SEQ ID NO: 2776734 - RNA, 13 nt, Human
gcuuauuuuaaug

SEQ ID NO: 2776735 - RNA, 15 nt, Human
gcuuauuuuaaugug

SEQ ID NO: 2776736 - RNA, 17 nt, Human
gcuuauuuuaaugugau

SEQ ID NO: 2776737 - RNA, 18 nt, Human
gcuuauuuuaaugugaug

SEQ ID NO: 2776738 - RNA, 21 nt, Human
gcuuauuuuaaugugaugaug

SEQ ID NO: 2776739 - RNA, 22 nt, Human
gcuuauuuuaaugugaugaugu

SEQ ID NO: 2776740 - RNA, 14 nt, Human
gcuucaguggcagc

SEQ ID NO: 2776741 - RNA, 17 nt, Human
gcuucagguuaucgaaa

SEQ ID NO: 2776742 - RNA, 12 nt, Human
gcuucagguuau

SEQ ID NO: 2776743 - RNA, 19 nt, Human
gcuucagguuaucgaaaua

SEQ ID NO: 2776744 - RNA, 20 nt, Human
gcuucagguuaucgaaauaa

SEQ ID NO: 2776745 - RNA, 21 nt, Human
gcuucagguuaucgaaauaac

SEQ ID NO: 2776746 - RNA, 22 nt, Human
gcuucagguuaucgaaauaaca

SEQ ID NO: 2776747 - RNA, 15 nt, Human
gcuucaguggcagcu

SEQ ID NO: 2776748 - RNA, 14 nt, Human
gcuucaguggagaa

SEQ ID NO: 2776749 - RNA, 23 nt, Human
gcuucagguuaucgaaauaacaa

SEQ ID NO: 2776750 - RNA, 23 nt, Human
gcuucaguacuugugaaacacag

SEQ ID NO: 2776751 - RNA, 13 nt, Human
gcuuacaagccag

SEQ ID NO: 2776752 - RNA, 19 nt, Human
gcuuacaagccagcuggag

SEQ ID NO: 2776753 - RNA, 12 nt, Human
gcuuaauuucua

SEQ ID NO: 2776754 - RNA, 13 nt, Human
gcuuaauuucuaa

SEQ ID NO: 2776755 - RNA, 18 nt, Human
gcuuaauuucuaaagaua

SEQ ID NO: 2776756 - RNA, 14 nt, Human
gcuguuuuuguugu

SEQ ID NO: 2776757 - RNA, 15 nt, Human
gcuguuuuuguugug

SEQ ID NO: 2776758 - RNA, 18 nt, Human
gcuguuuguagugaaaua

SEQ ID NO: 2776759 - RNA, 13 nt, Human
gcuguuggcuggg

SEQ ID NO: 2776760 - RNA, 12 nt, Human
gcuguugcuuga

SEQ ID NO: 2776761 - RNA, 16 nt, Human
gcuguuggcagugagu

SEQ ID NO: 2776762 - RNA, 22 nt, Human
gcuguuggcagugagugagccu

SEQ ID NO: 2776763 - RNA, 12 nt, Human
gcugugccucug

SEQ ID NO: 2776764 - RNA, 18 nt, Human
gcugugcagcgcagcugg

SEQ ID NO: 2776765 - RNA, 14 nt, Human
gcucuggagacagc

SEQ ID NO: 2776766 - RNA, 18 nt, Human
gcucuggagacagcccca

SEQ ID NO: 2776767 - RNA, 23 nt, Human
gcucugccaacuucuucagagcu

SEQ ID NO: 2776768 - RNA, 22 nt, Human
gcucugaucauccacugugcca

SEQ ID NO: 2776769 - RNA, 21 nt, Human
gcucugaucauccacugugcc

SEQ ID NO: 2776770 - RNA, 18 nt, Human
gcucucugugucugagag

SEQ ID NO: 2776771 - RNA, 12 nt, Human
gcucucuuccug

SEQ ID NO: 2776772 - RNA, 13 nt, Human
gcucucuuccugc

SEQ ID NO: 2776773 - RNA, 14 nt, Human
gcucucuuccugcc

SEQ ID NO: 2776774 - RNA, 15 nt, Human
gcucucuuccugccc

SEQ ID NO: 2776775 - RNA, 18 nt, Human
gcucucuuccugccccuc

SEQ ID NO: 2776776 - RNA, 19 nt, Human
gcucucuuccugccccucu

SEQ ID NO: 2776777 - RNA, 20 nt, Human
gcucucuuccugccccucuu

SEQ ID NO: 2776778 - RNA, 21 nt, Human
gcucucuuccugccccucuuu

SEQ ID NO: 2776779 - RNA, 22 nt, Human
gcucucuuccugccccucuuuc

SEQ ID NO: 2776780 - RNA, 23 nt, Human
gcucucuuccugccccucuuucu

SEQ ID NO: 2776781 - RNA, 22 nt, Human
gcucucuugccgaggagccagg

SEQ ID NO: 2776782 - RNA, 23 nt, Human
gcucucuugccgaggagccaggc

SEQ ID NO: 2776783 - RNA, 20 nt, Human
gcucugaucauccacugugc

SEQ ID NO: 2776784 - RNA, 22 nt, Human
gcucugaagucacaucacagga

SEQ ID NO: 2776785 - RNA, 17 nt, Human
gcucugaaaucuccuuu

SEQ ID NO: 2776786 - RNA, 19 nt, Human
gcucugaagcaaggcggug

SEQ ID NO: 2776787 - RNA, 23 nt, Human
gcucugaagucacaucacaggac

SEQ ID NO: 2776788 - RNA, 17 nt, Human
gcucucuuuucuguacu

SEQ ID NO: 2776789 - RNA, 18 nt, Human
gcucucuuuucuguacuu

SEQ ID NO: 2776790 - RNA, 19 nt, Human
gcucucuuuucuguacuuc

SEQ ID NO: 2776791 - RNA, 11 nt, Human
gcucucuguau

SEQ ID NO: 2776792 - RNA, 18 nt, Human
gcucucuguauaaacauu

SEQ ID NO: 2776793 - RNA, 23 nt, Human
gcucucuguauaaacauuaaaug

SEQ ID NO: 2776794 - RNA, 20 nt, Human
gcugaaaaccuaaguccuuu

SEQ ID NO: 2776795 - RNA, 24 nt, Human
gcucuguggaugccagggccgacc

SEQ ID NO: 2776796 - RNA, 16 nt, Human
gcucuguggccacauu

SEQ ID NO: 2776797 - RNA, 16 nt, Human
gcucuggacucuaaag

SEQ ID NO: 2776798 - RNA, 11 nt, Human
gcucugugcug

SEQ ID NO: 2776799 - RNA, 19 nt, Human
gcugaaaaccaucuggccu

SEQ ID NO: 2776800 - RNA, 21 nt, Human
gcugaaaaccaucuggccugg

SEQ ID NO: 2776801 - RNA, 22 nt, Human
gcugaaaaccaucuggccuggc

SEQ ID NO: 2776802 - RNA, 23 nt, Human
gcugaaaaccaucuggccuggcc

SEQ ID NO: 2776803 - RNA, 12 nt, Human
gcugaaaauaua

SEQ ID NO: 2776804 - RNA, 15 nt, Human
gcugaaaauauaaaa

SEQ ID NO: 2776805 - RNA, 14 nt, Human
gcucuuuuuuacuc

SEQ ID NO: 2776806 - RNA, 17 nt, Human
gcucuuuuuuacucauu

SEQ ID NO: 2776807 - RNA, 21 nt, Human
gcucuuuuuuacucauugaaa

SEQ ID NO: 2776808 - RNA, 22 nt, Human
gcucuuuuuuacucauugaaau

SEQ ID NO: 2776809 - RNA, 23 nt, Human
gcucuuuuuuacucauugaaaug

SEQ ID NO: 2776810 - RNA, 20 nt, Human
gcucuuuuuuguuuguuucu

SEQ ID NO: 2776811 - RNA, 21 nt, Human
gcucuuuuuuguuuguuucuu

SEQ ID NO: 2776812 - RNA, 22 nt, Human
gcucuuuuuuguuuguuucuuu

SEQ ID NO: 2776813 - RNA, 19 nt, Human
gcucuggagacagccccag

SEQ ID NO: 2776814 - RNA, 20 nt, Human
gcucuggagacagccccaga

SEQ ID NO: 2776815 - RNA, 13 nt, Human
gcucuggagagaa

SEQ ID NO: 2776816 - RNA, 14 nt, Human
gcucuggagagaaa

SEQ ID NO: 2776817 - RNA, 15 nt, Human
gcucuggagagaaac

SEQ ID NO: 2776818 - RNA, 19 nt, Human
gcucuggugauaaggacau

SEQ ID NO: 2776819 - RNA, 14 nt, Human
gcucugugcaggga

SEQ ID NO: 2776820 - RNA, 23 nt, Human
gcucugucgcccaggcuggagug

SEQ ID NO: 2776821 - RNA, 14 nt, Human
gcucugucccccug

SEQ ID NO: 2776822 - RNA, 17 nt, Human
gcugacacaaaccugcc

SEQ ID NO: 2776823 - RNA, 18 nt, Human
gcugacacaaaccugccu

SEQ ID NO: 2776824 - RNA, 19 nt, Human
gcugacacaaaccugccug

SEQ ID NO: 2776825 - RNA, 20 nt, Human
gcugacacaaaccugccugg

SEQ ID NO: 2776826 - RNA, 15 nt, Human
gcugaacucaugaga

SEQ ID NO: 2776827 - RNA, 20 nt, Human
gcugaacuuguuuucuggga

SEQ ID NO: 2776828 - RNA, 13 nt, Human
gcugacagacaca

SEQ ID NO: 2776829 - RNA, 14 nt, Human
gcugagcccuggca

SEQ ID NO: 2776830 - RNA, 13 nt, Human
gcugagcccuggc

SEQ ID NO: 2776831 - RNA, 21 nt, Human
gcugacacuucaaggugacag

SEQ ID NO: 2776832 - RNA, 22 nt, Human
gcugacacuucaaggugacaga

SEQ ID NO: 2776833 - RNA, 21 nt, Human
gcugacacaaaccugccuggg

SEQ ID NO: 2776834 - RNA, 16 nt, Human
gcugagcccuggcagg

SEQ ID NO: 2776835 - RNA, 15 nt, Human
gcugagcccuggcag

SEQ ID NO: 2776836 - RNA, 12 nt, Human
gcugagccucag

SEQ ID NO: 2776837 - RNA, 16 nt, Human
gcugagccucagucuc

SEQ ID NO: 2776838 - RNA, 13 nt, Human
gcugagccucugc

SEQ ID NO: 2776839 - RNA, 19 nt, Human
gcugagccucugcucccca

SEQ ID NO: 2776840 - RNA, 20 nt, Human
gcugagccucugcuccccag

SEQ ID NO: 2776841 - RNA, 20 nt, Human
gcuccagaaaugucuaaaug

SEQ ID NO: 2776842 - RNA, 19 nt, Human
gcuccagaauuuggaaauc

SEQ ID NO: 2776843 - RNA, 21 nt, Human
gcuccagaauuuggaaauccu

SEQ ID NO: 2776844 - RNA, 22 nt, Human
gcuccagcaacacagccugggc

SEQ ID NO: 2776845 - RNA, 19 nt, Human
gcuccagagcaacgaccag

SEQ ID NO: 2776846 - RNA, 19 nt, Human
gcuccagcaacacagccug

SEQ ID NO: 2776847 - RNA, 15 nt, Human
gcuccucuccccagc

SEQ ID NO: 2776848 - RNA, 19 nt, Human
gcuccucccggugcccaag

SEQ ID NO: 2776849 - RNA, 16 nt, Human
gcuccucccggugccc

SEQ ID NO: 2776850 - RNA, 14 nt, Human
gcuccagcucacca

SEQ ID NO: 2776851 - RNA, 13 nt, Human
gcuccagcucacc

SEQ ID NO: 2776852 - RNA, 18 nt, Human
gcuccagccccuuuccaa

SEQ ID NO: 2776853 - RNA, 19 nt, Human
gcuccagccccuuuccaaa

SEQ ID NO: 2776854 - RNA, 23 nt, Human
gcuccagcaacacagccugggcc

SEQ ID NO: 2776855 - RNA, 16 nt, Human
gcucucagcucagcgc

SEQ ID NO: 2776856 - RNA, 21 nt, Human
gcucuaugagucuagauguuu

SEQ ID NO: 2776857 - RNA, 13 nt, Human
gcucuaugagucu

SEQ ID NO: 2776858 - RNA, 14 nt, Human
gcucuaugagucua

SEQ ID NO: 2776859 - RNA, 18 nt, Human
gcucuaugagucuagaug

SEQ ID NO: 2776860 - RNA, 14 nt, Human
gcucuaucucucaa

SEQ ID NO: 2776861 - RNA, 18 nt, Human
gcucuaucucucaaaacu

SEQ ID NO: 2776862 - RNA, 20 nt, Human
gcucuagaucauaaggcuuc

SEQ ID NO: 2776863 - RNA, 19 nt, Human
gcucuaggguugcuggagc

SEQ ID NO: 2776864 - RNA, 21 nt, Human
gcucuaggguugcuggagccu

SEQ ID NO: 2776865 - RNA, 22 nt, Human
gcucuaggguugcuggagccug

SEQ ID NO: 2776866 - RNA, 23 nt, Human
gcucuaggguugcuggagccuga

SEQ ID NO: 2776867 - RNA, 24 nt, Human
gcucuaggguugcuggagccugag

SEQ ID NO: 2776868 - RNA, 23 nt, Human
gcucuagauugagagaagagaca

SEQ ID NO: 2776869 - RNA, 22 nt, Human
gcucuagaucauaaggcuucaa

SEQ ID NO: 2776870 - RNA, 14 nt, Human
gcucuagaugagcu

SEQ ID NO: 2776871 - RNA, 17 nt, Human
gcucuagaugagcuggg

SEQ ID NO: 2776872 - RNA, 18 nt, Human
gcucuagaugagcugggc

SEQ ID NO: 2776873 - RNA, 19 nt, Human
gcuccucuccccagcaagu

SEQ ID NO: 2776874 - RNA, 16 nt, Human
gcuccucuccccagca

SEQ ID NO: 2776875 - RNA, 17 nt, Human
gcucuacaucuucugcc

SEQ ID NO: 2776876 - RNA, 18 nt, Human
gcucuacaucuucugccu

SEQ ID NO: 2776877 - RNA, 15 nt, Human
gcucuacccagggcc

SEQ ID NO: 2776878 - RNA, 14 nt, Human
gcucuacccagggc

SEQ ID NO: 2776879 - RNA, 19 nt, Human
gcucuacaucuucugccuu

SEQ ID NO: 2776880 - RNA, 20 nt, Human
gcucuacaucuucugccuua

SEQ ID NO: 2776881 - RNA, 13 nt, Human
gcucuacgggggc

SEQ ID NO: 2776882 - RNA, 21 nt, Human
gcucuacuggucuuguggaau

SEQ ID NO: 2776883 - RNA, 19 nt, Human
gcucuacccagggccugca

SEQ ID NO: 2776884 - RNA, 18 nt, Human
gcucuacccagggccugc

SEQ ID NO: 2776885 - RNA, 13 nt, Human
gcucuagaaucug

SEQ ID NO: 2776886 - RNA, 17 nt, Human
gcugagguuucacccuu

SEQ ID NO: 2776887 - RNA, 20 nt, Human
gcugaguagaugcgcagccc

SEQ ID NO: 2776888 - RNA, 23 nt, Human
gcugaggcucugacccagugaga

SEQ ID NO: 2776889 - RNA, 20 nt, Human
gcugaguauggagcagccug

SEQ ID NO: 2776890 - RNA, 13 nt, Human
gcugccauccagg

SEQ ID NO: 2776891 - RNA, 12 nt, Human
gcugccauccag

SEQ ID NO: 2776892 - RNA, 12 nt, Human
gcugcaggggcu

SEQ ID NO: 2776893 - RNA, 11 nt, Human
gcugcaggggc

SEQ ID NO: 2776894 - RNA, 13 nt, Human
gcugcaggggcuc

SEQ ID NO: 2776895 - RNA, 15 nt, Human
gcugcaggggcucug

SEQ ID NO: 2776896 - RNA, 16 nt, Human
gcugcaggggcucugg

SEQ ID NO: 2776897 - RNA, 17 nt, Human
gcugcaggggcucugga

SEQ ID NO: 2776898 - RNA, 17 nt, Human
gcugcaggacuugagaa

SEQ ID NO: 2776899 - RNA, 15 nt, Human
gcugcagcugggcug

SEQ ID NO: 2776900 - RNA, 10 nt, Human
gcugcagcuu

SEQ ID NO: 2776901 - RNA, 12 nt, Human
gcugcagcuucc

SEQ ID NO: 2776902 - RNA, 13 nt, Human
gcugcagcuuccu

SEQ ID NO: 2776903 - RNA, 14 nt, Human
gcugcagcuuccug

SEQ ID NO: 2776904 - RNA, 12 nt, Human
gcugcagcuugg

SEQ ID NO: 2776905 - RNA, 13 nt, Human
gcugcagcuuggg

SEQ ID NO: 2776906 - RNA, 14 nt, Human
gcugcagcuuggga

SEQ ID NO: 2776907 - RNA, 22 nt, Human
gcugcagcuugggagagccccu

SEQ ID NO: 2776908 - RNA, 23 nt, Human
gcugcagcuugggagagccccug

SEQ ID NO: 2776909 - RNA, 15 nt, Human
gcugcaggaaucaaa

SEQ ID NO: 2776910 - RNA, 16 nt, Human
gcugcaggaaucaaaa

SEQ ID NO: 2776911 - RNA, 21 nt, Human
gcugcaggaaucaaaaauuga

SEQ ID NO: 2776912 - RNA, 22 nt, Human
gcugcaggaaucaaaaauugaa

SEQ ID NO: 2776913 - RNA, 14 nt, Human
gcugcagcuggaca

SEQ ID NO: 2776914 - RNA, 15 nt, Human
gcugcagcuggacag

SEQ ID NO: 2776915 - RNA, 16 nt, Human
gcugcagcuggacaga

SEQ ID NO: 2776916 - RNA, 17 nt, Human
gcugcagcuggacagag

SEQ ID NO: 2776917 - RNA, 18 nt, Human
gcugcagcuggacagagg

SEQ ID NO: 2776918 - RNA, 13 nt, Human
gcugcaccagagc

SEQ ID NO: 2776919 - RNA, 14 nt, Human
gcugcaccagagca

SEQ ID NO: 2776920 - RNA, 17 nt, Human
gcugcaccagagcaacc

SEQ ID NO: 2776921 - RNA, 22 nt, Human
gcugcaccagagcaaccucuca

SEQ ID NO: 2776922 - RNA, 13 nt, Human
gcuggagccugag

SEQ ID NO: 2776923 - RNA, 19 nt, Human
gcuggagccugagucaggg

SEQ ID NO: 2776924 - RNA, 23 nt, Human
gcuggagccugagucagggccca

SEQ ID NO: 2776925 - RNA, 17 nt, Human
gcuggagccuggugccc

SEQ ID NO: 2776926 - RNA, 17 nt, Human
gcugccauccagguuca

SEQ ID NO: 2776927 - RNA, 12 nt, Human
gcugcugacagu

SEQ ID NO: 2776928 - RNA, 10 nt, Human
gcugcugacc

SEQ ID NO: 2776929 - RNA, 11 nt, Human
gcugcugacca

SEQ ID NO: 2776930 - RNA, 12 nt, Human
gcugcugaccaa

SEQ ID NO: 2776931 - RNA, 21 nt, Human
gcugcugaccaauugugcugc

SEQ ID NO: 2776932 - RNA, 22 nt, Human
gcugcugaccaauugugcugcc

SEQ ID NO: 2776933 - RNA, 23 nt, Human
gcugcugaccaauugugcugcca

SEQ ID NO: 2776934 - RNA, 22 nt, Human
gcugcugucccucccccuuguc

SEQ ID NO: 2776935 - RNA, 23 nt, Human
gcugcugucccucccccuugucc

SEQ ID NO: 2776936 - RNA, 15 nt, Human
gcugcugucccuccc

SEQ ID NO: 2776937 - RNA, 16 nt, Human
gcugcugucaccucuc

SEQ ID NO: 2776938 - RNA, 17 nt, Human
gcugcugucaccucucc

SEQ ID NO: 2776939 - RNA, 21 nt, Human
gcugcugucaccucucccacg

SEQ ID NO: 2776940 - RNA, 16 nt, Human
gcugcugucccucccc

SEQ ID NO: 2776941 - RNA, 18 nt, Human
gcugcugucccucccccu

SEQ ID NO: 2776942 - RNA, 22 nt, Human
gcugcugggggcaacuggccau

SEQ ID NO: 2776943 - RNA, 21 nt, Human
gcugcugggggcaacuggcca

SEQ ID NO: 2776944 - RNA, 18 nt, Human
gcugcuggggccucagac

SEQ ID NO: 2776945 - RNA, 20 nt, Human
gcugcuggggccucagacga

SEQ ID NO: 2776946 - RNA, 15 nt, Human
gcugcuggcuugcag

SEQ ID NO: 2776947 - RNA, 15 nt, Human
gcugcugggauggug

SEQ ID NO: 2776948 - RNA, 20 nt, Human
gcugcugggauggugggcuu

SEQ ID NO: 2776949 - RNA, 23 nt, Human
gcugcugggauggugggcuucag

SEQ ID NO: 2776950 - RNA, 20 nt, Human
gaguuguggaaagccucugc

SEQ ID NO: 2776951 - RNA, 16 nt, Human
gaguuguggaaagccu

SEQ ID NO: 2776952 - RNA, 20 nt, Human
gaguuugagaccagccuggc

SEQ ID NO: 2776953 - RNA, 16 nt, Human
gaguuucuaagguccg

SEQ ID NO: 2776954 - RNA, 12 nt, Human
gaguuucuguuu

SEQ ID NO: 2776955 - RNA, 13 nt, Human
gaguuucuguuug

SEQ ID NO: 2776956 - RNA, 14 nt, Human
gaguuucuguuuga

SEQ ID NO: 2776957 - RNA, 15 nt, Human
gaguuucuguuugau

SEQ ID NO: 2776958 - RNA, 13 nt, Human
gaguuugcccugg

SEQ ID NO: 2776959 - RNA, 14 nt, Human
gaguuugccuuccu

SEQ ID NO: 2776960 - RNA, 14 nt, Human
gaguuuccuuuucu

SEQ ID NO: 2776961 - RNA, 12 nt, Human
gaguuucuaagg

SEQ ID NO: 2776962 - RNA, 13 nt, Human
gaguuucuaaggu

SEQ ID NO: 2776963 - RNA, 18 nt, Human
gaguuucauucuccugcc

SEQ ID NO: 2776964 - RNA, 19 nt, Human
gaguuucauucuccugccu

SEQ ID NO: 2776965 - RNA, 20 nt, Human
gaguuucauucuccugccug

SEQ ID NO: 2776966 - RNA, 18 nt, Human
gaguuucauguacaagau

SEQ ID NO: 2776967 - RNA, 15 nt, Human
gaguuucauguacaa

SEQ ID NO: 2776968 - RNA, 14 nt, Human
gagugcgugcucag

SEQ ID NO: 2776969 - RNA, 11 nt, Human
gagugcuaagu

SEQ ID NO: 2776970 - RNA, 15 nt, Human
gagugcuaaguguag

SEQ ID NO: 2776971 - RNA, 14 nt, Human
gagugcuggcucac

SEQ ID NO: 2776972 - RNA, 18 nt, Human
gagugcuggcucacagua

SEQ ID NO: 2776973 - RNA, 21 nt, Human
gagugcuggcucacaguacag

SEQ ID NO: 2776974 - RNA, 22 nt, Human
gagugcuggcucacaguacagc

SEQ ID NO: 2776975 - RNA, 14 nt, Human
gagugccuuuugca

SEQ ID NO: 2776976 - RNA, 18 nt, Human
gagugccuuuugcagaag

SEQ ID NO: 2776977 - RNA, 14 nt, Human
gaguugucacugcu

SEQ ID NO: 2776978 - RNA, 18 nt, Human
gaguuuguguguugucuu

SEQ ID NO: 2776979 - RNA, 13 nt, Human
gaguuuggucugg

SEQ ID NO: 2776980 - RNA, 16 nt, Human
gaguuuggucuggacu

SEQ ID NO: 2776981 - RNA, 17 nt, Human
gaguuuggucuggacug

SEQ ID NO: 2776982 - RNA, 19 nt, Human
gaguuuggucuggacugac

SEQ ID NO: 2776983 - RNA, 11 nt, Human
gaguuuguagg

SEQ ID NO: 2776984 - RNA, 23 nt, Human
gaguuuguagguaaaauguauuu

SEQ ID NO: 2776985 - RNA, 18 nt, Human
gaguuugcuauuagagca

SEQ ID NO: 2776986 - RNA, 12 nt, Human
gaggucuguuua

SEQ ID NO: 2776987 - RNA, 13 nt, Human
gaggucuguuuaa

SEQ ID NO: 2776988 - RNA, 12 nt, Human
gaggucuugcua

SEQ ID NO: 2776989 - RNA, 22 nt, Human
gaggucuugcuagaaugggaag

SEQ ID NO: 2776990 - RNA, 20 nt, Human
gaggugggaggaucuuuuga

SEQ ID NO: 2776991 - RNA, 17 nt, Human
gaggugggagcaggaga

SEQ ID NO: 2776992 - RNA, 18 nt, Human
gaggugggagcaggagau

SEQ ID NO: 2776993 - RNA, 15 nt, Human
gaggugggagcagga

SEQ ID NO: 2776994 - RNA, 14 nt, Human
gaggugggagcagg

SEQ ID NO: 2776995 - RNA, 14 nt, Human
gaggugggagggcc

SEQ ID NO: 2776996 - RNA, 23 nt, Human
gaggugggagcaggagauugaga

SEQ ID NO: 2776997 - RNA, 13 nt, Human
gaggugggagggc

SEQ ID NO: 2776998 - RNA, 12 nt, Human
gagucacacuca

SEQ ID NO: 2776999 - RNA, 13 nt, Human
gaggugccugucc

SEQ ID NO: 2777000 - RNA, 15 nt, Human
gaggugccuguccca

SEQ ID NO: 2777001 - RNA, 21 nt, Human
gaggugccugucccaccccca

SEQ ID NO: 2777002 - RNA, 12 nt, Human
gaggugccuucu

SEQ ID NO: 2777003 - RNA, 15 nt, Human
gaggugccuucuuca

SEQ ID NO: 2777004 - RNA, 20 nt, Human
gaggugccuucuucagggcc

SEQ ID NO: 2777005 - RNA, 22 nt, Human
gaggugccuucuucagggccug

SEQ ID NO: 2777006 - RNA, 23 nt, Human
gaggugccuucuucagggccugg

SEQ ID NO: 2777007 - RNA, 12 nt, Human
gaggugccugga

SEQ ID NO: 2777008 - RNA, 12 nt, Human
gagugagcuggu

SEQ ID NO: 2777009 - RNA, 13 nt, Human
gagucccaccuug

SEQ ID NO: 2777010 - RNA, 13 nt, Human
gagugagccuggc

SEQ ID NO: 2777011 - RNA, 15 nt, Human
gagugagcuacagag

SEQ ID NO: 2777012 - RNA, 22 nt, Human
gagugagcuacagagccgagca

SEQ ID NO: 2777013 - RNA, 21 nt, Human
gagucccaccuuggcugcagg

SEQ ID NO: 2777014 - RNA, 24 nt, Human
gagugagcacuaaggugugcucug

SEQ ID NO: 2777015 - RNA, 12 nt, Human
gagugcagugag

SEQ ID NO: 2777016 - RNA, 11 nt, Human
gagugcaguga

SEQ ID NO: 2777017 - RNA, 20 nt, Human
gagucccaccuuggcugcag

SEQ ID NO: 2777018 - RNA, 16 nt, Human
gagucccaccuuggcu

SEQ ID NO: 2777019 - RNA, 14 nt, Human
gagucaccaagccc

SEQ ID NO: 2777020 - RNA, 13 nt, Human
gagucaccaagcc

SEQ ID NO: 2777021 - RNA, 14 nt, Human
gaguccaggcacag

SEQ ID NO: 2777022 - RNA, 15 nt, Human
gaguccaggcacagg

SEQ ID NO: 2777023 - RNA, 16 nt, Human
gaguccaggcacagga

SEQ ID NO: 2777024 - RNA, 15 nt, Human
gagucacaagccucg

SEQ ID NO: 2777025 - RNA, 19 nt, Human
gaguccaagguuuaaagag

SEQ ID NO: 2777026 - RNA, 13 nt, Human
gauaugggacuga

SEQ ID NO: 2777027 - RNA, 20 nt, Human
gauaugggacugagccuggc

SEQ ID NO: 2777028 - RNA, 22 nt, Human
gauaugggacugagccuggccc

SEQ ID NO: 2777029 - RNA, 13 nt, Human
gauauuguacaua

SEQ ID NO: 2777030 - RNA, 14 nt, Human
gauauuguacauaa

SEQ ID NO: 2777031 - RNA, 15 nt, Human
gauauuguacauaaa

SEQ ID NO: 2777032 - RNA, 16 nt, Human
gauauuguacauaaaa

SEQ ID NO: 2777033 - RNA, 17 nt, Human
gauauuguacauaaaag

SEQ ID NO: 2777034 - RNA, 18 nt, Human
gauauuguacauaaaaga

SEQ ID NO: 2777035 - RNA, 13 nt, Human
gauauucuaagac

SEQ ID NO: 2777036 - RNA, 12 nt, Human
gauauucuaaga

SEQ ID NO: 2777037 - RNA, 15 nt, Human
gauauuauucuugua

SEQ ID NO: 2777038 - RNA, 17 nt, Human
gauauucagaauuauga

SEQ ID NO: 2777039 - RNA, 12 nt, Human
gauauuacuuua

SEQ ID NO: 2777040 - RNA, 13 nt, Human
gauauuacuuuau

SEQ ID NO: 2777041 - RNA, 14 nt, Human
gauauuacuuuauc

SEQ ID NO: 2777042 - RNA, 15 nt, Human
gauauuacuuuauca

SEQ ID NO: 2777043 - RNA, 16 nt, Human
gauauuacuuuaucac

SEQ ID NO: 2777044 - RNA, 19 nt, Human
gauauuacuuuaucacuuu

SEQ ID NO: 2777045 - RNA, 22 nt, Human
gauauuacuuuaucacuuuuug

SEQ ID NO: 2777046 - RNA, 23 nt, Human
gauauuauuagaaauuagaaaaa

SEQ ID NO: 2777047 - RNA, 18 nt, Human
gauacuucauuuaaaaaa

SEQ ID NO: 2777048 - RNA, 23 nt, Human
gauacuccgcugucggcacauuc

SEQ ID NO: 2777049 - RNA, 14 nt, Human
gauacuuauauuuu

SEQ ID NO: 2777050 - RNA, 19 nt, Human
gauacuuauauuuucguau

SEQ ID NO: 2777051 - RNA, 22 nt, Human
gauacuuauauuuucguaugaa

SEQ ID NO: 2777052 - RNA, 13 nt, Human
gauauggagaauu

SEQ ID NO: 2777053 - RNA, 19 nt, Human
gauauggagaauugcugaa

SEQ ID NO: 2777054 - RNA, 14 nt, Human
gauauggcagaaga

SEQ ID NO: 2777055 - RNA, 15 nt, Human
gauauggcagaagac

SEQ ID NO: 2777056 - RNA, 17 nt, Human
gauauggcagaagacac

SEQ ID NO: 2777057 - RNA, 18 nt, Human
gauaugcaguuuuccuua

SEQ ID NO: 2777058 - RNA, 14 nt, Human
gauaugauuuaaaa

SEQ ID NO: 2777059 - RNA, 20 nt, Human
gauaugauuuaaaacaugua

SEQ ID NO: 2777060 - RNA, 22 nt, Human
gauacuaaaaguucuucuccaa

SEQ ID NO: 2777061 - RNA, 13 nt, Human
gauacuacaucuu

SEQ ID NO: 2777062 - RNA, 20 nt, Human
gauacuaaaaguucuucucc

SEQ ID NO: 2777063 - RNA, 22 nt, Human
gauacgcuacuauaaagagaag

SEQ ID NO: 2777064 - RNA, 21 nt, Human
gauaccccccucugucuugug

SEQ ID NO: 2777065 - RNA, 14 nt, Human
gauaccuaaaacau

SEQ ID NO: 2777066 - RNA, 21 nt, Human
gauaccuaaaacauaagauca

SEQ ID NO: 2777067 - RNA, 18 nt, Human
gauacccaggaccaagcc

SEQ ID NO: 2777068 - RNA, 13 nt, Human
gauaccccccucu

SEQ ID NO: 2777069 - RNA, 22 nt, Human
gauccaugaguuugcccugguu

SEQ ID NO: 2777070 - RNA, 13 nt, Human
gauccauccagcu

SEQ ID NO: 2777071 - RNA, 18 nt, Human
gauccauccagcuugcca

SEQ ID NO: 2777072 - RNA, 13 nt, Human
gaucuccugaccu

SEQ ID NO: 2777073 - RNA, 14 nt, Human
gaucucuuccuguu

SEQ ID NO: 2777074 - RNA, 23 nt, Human
gauauguuuuauuucauugguua

SEQ ID NO: 2777075 - RNA, 22 nt, Human
gauauuuuuaaagaucuguaag

SEQ ID NO: 2777076 - RNA, 19 nt, Human
gauccaggaagcaugagug

SEQ ID NO: 2777077 - RNA, 14 nt, Human
gaucuccuugcccu

SEQ ID NO: 2777078 - RNA, 16 nt, Human
gaucucggcucagugc

SEQ ID NO: 2777079 - RNA, 14 nt, Human
gaugaucuuugcag

SEQ ID NO: 2777080 - RNA, 22 nt, Human
gaugagcccucagaacccuugg

SEQ ID NO: 2777081 - RNA, 19 nt, Human
gaugagcccucagaacccu

SEQ ID NO: 2777082 - RNA, 13 nt, Human
gaugagccgcugu

SEQ ID NO: 2777083 - RNA, 23 nt, Human
gaugagccgcugugagccccugg

SEQ ID NO: 2777084 - RNA, 22 nt, Human
gaugagccuucgugcccccccu

SEQ ID NO: 2777085 - RNA, 15 nt, Human
gaugagcccucagaa

SEQ ID NO: 2777086 - RNA, 21 nt, Human
gaugagcccagcccuguucug

SEQ ID NO: 2777087 - RNA, 20 nt, Human
gaugagcccagcccuguucu

SEQ ID NO: 2777088 - RNA, 20 nt, Human
gaugagauuggcauggcuuu

SEQ ID NO: 2777089 - RNA, 16 nt, Human
gaugagcaucccagga

SEQ ID NO: 2777090 - RNA, 17 nt, Human
gaugagcaucccaggau

SEQ ID NO: 2777091 - RNA, 15 nt, Human
gaugagcauggagcu

SEQ ID NO: 2777092 - RNA, 16 nt, Human
gaugagcauggagcug

SEQ ID NO: 2777093 - RNA, 17 nt, Human
gaugagcauggagcugg

SEQ ID NO: 2777094 - RNA, 21 nt, Human
gaugaucuuugcagacaggca

SEQ ID NO: 2777095 - RNA, 20 nt, Human
gaugaucuuugcagacaggc

SEQ ID NO: 2777096 - RNA, 17 nt, Human
gaugcuggaugucugcc

SEQ ID NO: 2777097 - RNA, 20 nt, Human
gaugcuggaugucugccaau

SEQ ID NO: 2777098 - RNA, 22 nt, Human
gaugcuggaugucugccaauuu

SEQ ID NO: 2777099 - RNA, 18 nt, Human
gauuauuugggagggaaa

SEQ ID NO: 2777100 - RNA, 21 nt, Human
gauuauuugggagggaaaagg

SEQ ID NO: 2777101 - RNA, 21 nt, Human
gauuauuuaauaacauuaccu

SEQ ID NO: 2777102 - RNA, 22 nt, Human
gauuauuuaauaacauuaccuu

SEQ ID NO: 2777103 - RNA, 23 nt, Human
gauuauuuaauaacauuaccuua

SEQ ID NO: 2777104 - RNA, 12 nt, Human
gauuauuuaaua

SEQ ID NO: 2777105 - RNA, 13 nt, Human
gauuauuuaauaa

SEQ ID NO: 2777106 - RNA, 14 nt, Human
gauuauuuaauaac

SEQ ID NO: 2777107 - RNA, 15 nt, Human
gauuauuuaauaaca

SEQ ID NO: 2777108 - RNA, 16 nt, Human
gauuauuuaauaacau

SEQ ID NO: 2777109 - RNA, 17 nt, Human
gauuauuuaauaacauu

SEQ ID NO: 2777110 - RNA, 18 nt, Human
gauuauuuaauaacauua

SEQ ID NO: 2777111 - RNA, 14 nt, Human
gauuauuuucauua

SEQ ID NO: 2777112 - RNA, 11 nt, Human
gauuauuuugg

SEQ ID NO: 2777113 - RNA, 14 nt, Human
gauuauuuuggaaa

SEQ ID NO: 2777114 - RNA, 23 nt, Human
gauuauuuuggaaaguuuuugua

SEQ ID NO: 2777115 - RNA, 23 nt, Human
gauuagcaggccaaggucugagc

SEQ ID NO: 2777116 - RNA, 13 nt, Human
gauuagcuuugug

SEQ ID NO: 2777117 - RNA, 14 nt, Human
gauuagcuuugugu

SEQ ID NO: 2777118 - RNA, 15 nt, Human
gauuagcuuuguguu

SEQ ID NO: 2777119 - RNA, 16 nt, Human
gauuagcuuuguguuu

SEQ ID NO: 2777120 - RNA, 17 nt, Human
gauuagcuuuguguuug

SEQ ID NO: 2777121 - RNA, 19 nt, Human
gauuagcaaggucauuucu

SEQ ID NO: 2777122 - RNA, 20 nt, Human
gauuagcaaggucauuucuu

SEQ ID NO: 2777123 - RNA, 18 nt, Human
gauuaugucuuuuauauu

SEQ ID NO: 2777124 - RNA, 20 nt, Human
gauuaugucuuuuauauuug

SEQ ID NO: 2777125 - RNA, 21 nt, Human
gauuaugucuuuuauauuugu

SEQ ID NO: 2777126 - RNA, 16 nt, Human
gauuaguuuucuuguu

SEQ ID NO: 2777127 - RNA, 22 nt, Human
gauuaguuuucuuguugcuuug

SEQ ID NO: 2777128 - RNA, 23 nt, Human
gauuaguuuucuuguugcuuugu

SEQ ID NO: 2777129 - RNA, 19 nt, Human
gauuauaaaauuaaucaca

SEQ ID NO: 2777130 - RNA, 20 nt, Human
gauuauaaaauuaaucacaa

SEQ ID NO: 2777131 - RNA, 10 nt, Human
gauuagcuuu

SEQ ID NO: 2777132 - RNA, 12 nt, Human
gauuagcuuugu

SEQ ID NO: 2777133 - RNA, 14 nt, Human
gauuacaugcaugu

SEQ ID NO: 2777134 - RNA, 17 nt, Human
gauuagaagcugaaaac

SEQ ID NO: 2777135 - RNA, 19 nt, Human
gauuagaaaaauuccuaag

SEQ ID NO: 2777136 - RNA, 19 nt, Human
gaugcugggaguucuaaca

SEQ ID NO: 2777137 - RNA, 11 nt, Human
gaugcugggau

SEQ ID NO: 2777138 - RNA, 21 nt, Human
gaugcugggcacuucaucuga

SEQ ID NO: 2777139 - RNA, 23 nt, Human
gaugcugggcacuucaucugauc

SEQ ID NO: 2777140 - RNA, 20 nt, Human
gauuacaggugugaaccacc

SEQ ID NO: 2777141 - RNA, 20 nt, Human
gauuacaggugugagccacc

SEQ ID NO: 2777142 - RNA, 19 nt, Human
gaugugaaacacuuugccu

SEQ ID NO: 2777143 - RNA, 22 nt, Human
gauucucuggcuguaaggcucu

SEQ ID NO: 2777144 - RNA, 23 nt, Human
gauucucuggcuguaaggcucua

SEQ ID NO: 2777145 - RNA, 15 nt, Human
gauucucugugucua

SEQ ID NO: 2777146 - RNA, 23 nt, Human
gauucucugugucuaagauucua

SEQ ID NO: 2777147 - RNA, 18 nt, Human
gauucucugugucuaaga

SEQ ID NO: 2777148 - RNA, 22 nt, Human
gauucucugugucuaagauucu

SEQ ID NO: 2777149 - RNA, 12 nt, Human
gcaguuuuucag

SEQ ID NO: 2777150 - RNA, 14 nt, Human
gcaguuuuucagga

SEQ ID NO: 2777151 - RNA, 23 nt, Human
gcaguuuuucaggagcgcaagau

SEQ ID NO: 2777152 - RNA, 17 nt, Human
gcaguuugguauuugcg

SEQ ID NO: 2777153 - RNA, 20 nt, Human
gcaguuuugacaucagccag

SEQ ID NO: 2777154 - RNA, 21 nt, Human
gcaguuuugacaucagccagc

SEQ ID NO: 2777155 - RNA, 22 nt, Human
gcaguuuugacaucagccagcu

SEQ ID NO: 2777156 - RNA, 16 nt, Human
gcaguuucuguccugc

SEQ ID NO: 2777157 - RNA, 20 nt, Human
gcaguuucuguccugcuggu

SEQ ID NO: 2777158 - RNA, 18 nt, Human
gcaguccugccucagccu

SEQ ID NO: 2777159 - RNA, 17 nt, Human
gcaguccugccucagcc

SEQ ID NO: 2777160 - RNA, 23 nt, Human
gcagucccugagaccauuuaaca

SEQ ID NO: 2777161 - RNA, 21 nt, Human
gcaguccguguggauccaaug

SEQ ID NO: 2777162 - RNA, 13 nt, Human
gcaguccuggagc

SEQ ID NO: 2777163 - RNA, 15 nt, Human
gcaguccuuuguaaa

SEQ ID NO: 2777164 - RNA, 22 nt, Human
gcaguccuuuguaaacaguguu

SEQ ID NO: 2777165 - RNA, 23 nt, Human
gcaguccuuuuacuacagcuaug

SEQ ID NO: 2777166 - RNA, 12 nt, Human
gcaguccaugca

SEQ ID NO: 2777167 - RNA, 13 nt, Human
gcaguccaugcau

SEQ ID NO: 2777168 - RNA, 14 nt, Human
gcaguccaugcaug

SEQ ID NO: 2777169 - RNA, 16 nt, Human
gcaguccaugcaugac

SEQ ID NO: 2777170 - RNA, 16 nt, Human
gcaguccauuucuacc

SEQ ID NO: 2777171 - RNA, 19 nt, Human
gcauaccuuucacagcuuu

SEQ ID NO: 2777172 - RNA, 19 nt, Human
gcagcugcgguccacccag

SEQ ID NO: 2777173 - RNA, 17 nt, Human
gcagcugcgguccaccc

SEQ ID NO: 2777174 - RNA, 14 nt, Human
gcaggcuggcccug

SEQ ID NO: 2777175 - RNA, 18 nt, Human
gcaggcuggcccugcccu

SEQ ID NO: 2777176 - RNA, 17 nt, Human
gcaggcuggcccugccc

SEQ ID NO: 2777177 - RNA, 16 nt, Human
gcaggcuggcccugcc

SEQ ID NO: 2777178 - RNA, 15 nt, Human
gcaggcuggcccugc

SEQ ID NO: 2777179 - RNA, 13 nt, Human
gcaggcugggcca

SEQ ID NO: 2777180 - RNA, 12 nt, Human
gcaggcugggcc

SEQ ID NO: 2777181 - RNA, 11 nt, Human
gcaggcugggc

SEQ ID NO: 2777182 - RNA, 10 nt, Human
gcaggcuggg

SEQ ID NO: 2777183 - RNA, 15 nt, Human
gcaggcugggccaug

SEQ ID NO: 2777184 - RNA, 14 nt, Human
gcaggcugggccau

SEQ ID NO: 2777185 - RNA, 23 nt, Human
gcaggcugggccauguccaaaga

SEQ ID NO: 2777186 - RNA, 18 nt, Human
gcaggcuuaauaaaaaug

SEQ ID NO: 2777187 - RNA, 22 nt, Human
gcaggcuuaauaaaaaugacag

SEQ ID NO: 2777188 - RNA, 21 nt, Human
gcaggcuggcccugcccuggu

SEQ ID NO: 2777189 - RNA, 20 nt, Human
gcaggcuggcccugcccugg

SEQ ID NO: 2777190 - RNA, 19 nt, Human
gcaggcuggcccugcccug

SEQ ID NO: 2777191 - RNA, 13 nt, Human
gcagggaaacagc

SEQ ID NO: 2777192 - RNA, 15 nt, Human
gcagcugcgcgggcu

SEQ ID NO: 2777193 - RNA, 22 nt, Human
gcagggagccgagaucacgcca

SEQ ID NO: 2777194 - RNA, 22 nt, Human
gcagguugaggggcuccuggaa

SEQ ID NO: 2777195 - RNA, 21 nt, Human
gcagguugaggggcuccugga

SEQ ID NO: 2777196 - RNA, 20 nt, Human
gcagguugaggggcuccugg

SEQ ID NO: 2777197 - RNA, 19 nt, Human
gcagguugaggggcuccug

SEQ ID NO: 2777198 - RNA, 14 nt, Human
gcagguuggacccc

SEQ ID NO: 2777199 - RNA, 15 nt, Human
gcagguuggacccca

SEQ ID NO: 2777200 - RNA, 18 nt, Human
gcagguuggaccccagag

SEQ ID NO: 2777201 - RNA, 19 nt, Human
gcagguuggaccccagaga

SEQ ID NO: 2777202 - RNA, 16 nt, Human
gcagguugaggggcuc

SEQ ID NO: 2777203 - RNA, 14 nt, Human
gcagggagggcagu

SEQ ID NO: 2777204 - RNA, 18 nt, Human
gcagggagggcaguuuuc

SEQ ID NO: 2777205 - RNA, 13 nt, Human
gcagggagggccu

SEQ ID NO: 2777206 - RNA, 10 nt, Human
gcagggaggg

SEQ ID NO: 2777207 - RNA, 16 nt, Human
gcaguacaauaaaagu

SEQ ID NO: 2777208 - RNA, 17 nt, Human
gcaguacaauaaaagua

SEQ ID NO: 2777209 - RNA, 13 nt, Human
gcaguacauggga

SEQ ID NO: 2777210 - RNA, 15 nt, Human
gcaguaaauuugcua

SEQ ID NO: 2777211 - RNA, 19 nt, Human
gcaguagaaauaauaugca

SEQ ID NO: 2777212 - RNA, 20 nt, Human
gcaguagaaauaauaugcau

SEQ ID NO: 2777213 - RNA, 21 nt, Human
gcaguagaaauaauaugcauu

SEQ ID NO: 2777214 - RNA, 13 nt, Human
gcaguagacauuu

SEQ ID NO: 2777215 - RNA, 16 nt, Human
gcaguagacauuuuaa

SEQ ID NO: 2777216 - RNA, 19 nt, Human
gcaguagacauuuuaacaa

SEQ ID NO: 2777217 - RNA, 21 nt, Human
gcaguagacauuuuaacaaga

SEQ ID NO: 2777218 - RNA, 21 nt, Human
gcagucacuucggccagagcu

SEQ ID NO: 2777219 - RNA, 14 nt, Human
gcagucaucagaag

SEQ ID NO: 2777220 - RNA, 24 nt, Human
gcagucacguggaggagcagugca

SEQ ID NO: 2777221 - RNA, 12 nt, Human
gcaguauauuuc

SEQ ID NO: 2777222 - RNA, 21 nt, Human
gcaguagaggcuauggacagg

SEQ ID NO: 2777223 - RNA, 20 nt, Human
gcaguaggccggugugccug

SEQ ID NO: 2777224 - RNA, 13 nt, Human
gcaguaggggagg

SEQ ID NO: 2777225 - RNA, 13 nt, Human
gcagccaccagcg

SEQ ID NO: 2777226 - RNA, 15 nt, Human
gcagagcccccagga

SEQ ID NO: 2777227 - RNA, 17 nt, Human
gcagagcccccaggaag

SEQ ID NO: 2777228 - RNA, 21 nt, Human
gcagagcaccuuugcacagga

SEQ ID NO: 2777229 - RNA, 22 nt, Human
gcagagcaccuuugcacaggau

SEQ ID NO: 2777230 - RNA, 18 nt, Human
gcagcccagagacuuugu

SEQ ID NO: 2777231 - RNA, 14 nt, Human
gcagcccagagacu

SEQ ID NO: 2777232 - RNA, 22 nt, Human
gcagcccagagacuuuguagau

SEQ ID NO: 2777233 - RNA, 13 nt, Human
gcagcccagagac

SEQ ID NO: 2777234 - RNA, 17 nt, Human
gcagccccaucugugca

SEQ ID NO: 2777235 - RNA, 20 nt, Human
gcagagccucccaaggagaa

SEQ ID NO: 2777236 - RNA, 20 nt, Human
gcagcccaugcccaccugcc

SEQ ID NO: 2777237 - RNA, 22 nt, Human
gcagcccaugcccaccugccca

SEQ ID NO: 2777238 - RNA, 18 nt, Human
gcagcccauuucuccaga

SEQ ID NO: 2777239 - RNA, 19 nt, Human
gcagcccauuucuccagaa

SEQ ID NO: 2777240 - RNA, 21 nt, Human
gcagcccauuucuccagaacc

SEQ ID NO: 2777241 - RNA, 22 nt, Human
gcagcccauuucuccagaaccc

SEQ ID NO: 2777242 - RNA, 18 nt, Human
gcagcccaugcccaccug

SEQ ID NO: 2777243 - RNA, 17 nt, Human
gcagcccaugcccaccu

SEQ ID NO: 2777244 - RNA, 15 nt, Human
gcagcccaugcccac

SEQ ID NO: 2777245 - RNA, 13 nt, Human
gcagcccaugccc

SEQ ID NO: 2777246 - RNA, 17 nt, Human
gcagcccaggccggggu

SEQ ID NO: 2777247 - RNA, 13 nt, Human
gcacauauggacu

SEQ ID NO: 2777248 - RNA, 18 nt, Human
gcacauauggacucugca

SEQ ID NO: 2777249 - RNA, 12 nt, Human
gcacaguuugaa

SEQ ID NO: 2777250 - RNA, 13 nt, Human
gcacaguuugaac

SEQ ID NO: 2777251 - RNA, 14 nt, Human
gcacaguuugaaca

SEQ ID NO: 2777252 - RNA, 19 nt, Human
gcacaauuugcacuaaauc

SEQ ID NO: 2777253 - RNA, 14 nt, Human
gcacaauuugcacu

SEQ ID NO: 2777254 - RNA, 12 nt, Human
gcacaauuugca

SEQ ID NO: 2777255 - RNA, 16 nt, Human
gcacaauucuguuuua

SEQ ID NO: 2777256 - RNA, 12 nt, Human
gcacacacacaa

SEQ ID NO: 2777257 - RNA, 10 nt, Human
gcacacacac

SEQ ID NO: 2777258 - RNA, 15 nt, Human
gcacacacacacaua

SEQ ID NO: 2777259 - RNA, 21 nt, Human
gcacacacacacacaugcaca

SEQ ID NO: 2777260 - RNA, 22 nt, Human
gcacacacacacacaugcacac

SEQ ID NO: 2777261 - RNA, 14 nt, Human
gcacacacacacau

SEQ ID NO: 2777262 - RNA, 21 nt, Human
gcacacacacacacacacauc

SEQ ID NO: 2777263 - RNA, 14 nt, Human
gcacaauucuguuu

SEQ ID NO: 2777264 - RNA, 22 nt, Human
gcacaaucucggcucacugcau

SEQ ID NO: 2777265 - RNA, 21 nt, Human
gcacaaucucggcucacugca

SEQ ID NO: 2777266 - RNA, 13 nt, Human
gcacaugaagaaa

SEQ ID NO: 2777267 - RNA, 15 nt, Human
gcacaugaagaaaua

SEQ ID NO: 2777268 - RNA, 16 nt, Human
gcacaugaagaaauac

SEQ ID NO: 2777269 - RNA, 21 nt, Human
gcacaucugcauuuucacccc

SEQ ID NO: 2777270 - RNA, 13 nt, Human
gcacaucugcauu

SEQ ID NO: 2777271 - RNA, 15 nt, Human
gcacaguuugaacaa

SEQ ID NO: 2777272 - RNA, 16 nt, Human
gcacccuccgccuuca

SEQ ID NO: 2777273 - RNA, 12 nt, Human
gcacccucuggc

SEQ ID NO: 2777274 - RNA, 14 nt, Human
gcacccuggggccu

SEQ ID NO: 2777275 - RNA, 15 nt, Human
gcacccuggggccug

SEQ ID NO: 2777276 - RNA, 17 nt, Human
gcacaugcaccuaccca

SEQ ID NO: 2777277 - RNA, 22 nt, Human
gcaccgcggcgcuucccagcac

SEQ ID NO: 2777278 - RNA, 20 nt, Human
gcaccgcuuuuguucucgca

SEQ ID NO: 2777279 - RNA, 22 nt, Human
gcaccgcuuuuguucucgcaaa

SEQ ID NO: 2777280 - RNA, 12 nt, Human
gcacccuucuuu

SEQ ID NO: 2777281 - RNA, 17 nt, Human
gcacccuggggccugga

SEQ ID NO: 2777282 - RNA, 20 nt, Human
gcacccuggggccuggaccu

SEQ ID NO: 2777283 - RNA, 21 nt, Human
gcacccuggggccuggaccug

SEQ ID NO: 2777284 - RNA, 17 nt, Human
gcacccuguggcccugg

SEQ ID NO: 2777285 - RNA, 18 nt, Human
gcacccuguggcccuggc

SEQ ID NO: 2777286 - RNA, 19 nt, Human
gcacccuguggcccuggcu

SEQ ID NO: 2777287 - RNA, 15 nt, Human
gcacccuucuuuucu

SEQ ID NO: 2777288 - RNA, 18 nt, Human
gcacccuucuuuucucau

SEQ ID NO: 2777289 - RNA, 14 nt, Human
gcaccguacugugg

SEQ ID NO: 2777290 - RNA, 13 nt, Human
gcaagugagagcu

SEQ ID NO: 2777291 - RNA, 21 nt, Human
gcaagucuuuaggucuuugua

SEQ ID NO: 2777292 - RNA, 22 nt, Human
gcaagucuuuaggucuuuguaa

SEQ ID NO: 2777293 - RNA, 18 nt, Human
gcaagucugagggucugg

SEQ ID NO: 2777294 - RNA, 15 nt, Human
gcaaguccuuuugua

SEQ ID NO: 2777295 - RNA, 17 nt, Human
gcaaguccuuuuguaaa

SEQ ID NO: 2777296 - RNA, 18 nt, Human
gcaaguccuuuuguaaag

SEQ ID NO: 2777297 - RNA, 19 nt, Human
gcaaguccuuuuguaaagu

SEQ ID NO: 2777298 - RNA, 17 nt, Human
gcaagugagagagaugg

SEQ ID NO: 2777299 - RNA, 22 nt, Human
gcaagugagagagaugggagcu

SEQ ID NO: 2777300 - RNA, 12 nt, Human
gcaauaacuucu

SEQ ID NO: 2777301 - RNA, 14 nt, Human
gcaauaacuucuga

SEQ ID NO: 2777302 - RNA, 15 nt, Human
gcaauaacuucugac

SEQ ID NO: 2777303 - RNA, 17 nt, Human
gcaauaacuucugaccu

SEQ ID NO: 2777304 - RNA, 19 nt, Human
gcaccuaaaccaccagugc

SEQ ID NO: 2777305 - RNA, 21 nt, Human
gcaccuaaaccaccagugccc

SEQ ID NO: 2777306 - RNA, 23 nt, Human
gcaccuaaaccaccagugcccaa

SEQ ID NO: 2777307 - RNA, 18 nt, Human
gcagaaauagguuagagu

SEQ ID NO: 2777308 - RNA, 21 nt, Human
gcagagagccauuuugugaau

SEQ ID NO: 2777309 - RNA, 19 nt, Human
gcagagagcggucucaggc

SEQ ID NO: 2777310 - RNA, 10 nt, Human
gcagagagag

SEQ ID NO: 2777311 - RNA, 17 nt, Human
gcagagagagagaaaga

SEQ ID NO: 2777312 - RNA, 20 nt, Human
gcagagagaugcggccaaga

SEQ ID NO: 2777313 - RNA, 15 nt, Human
gcagagagccauuuu

SEQ ID NO: 2777314 - RNA, 19 nt, Human
gcagagagccauuuuguga

SEQ ID NO: 2777315 - RNA, 22 nt, Human
gcagagauuggaaugggcagcu

SEQ ID NO: 2777316 - RNA, 23 nt, Human
gcagagauuggaaugggcagcuc

SEQ ID NO: 2777317 - RNA, 20 nt, Human
gcagagcaggggcaggguga

SEQ ID NO: 2777318 - RNA, 14 nt, Human
gcagagcaggggca

SEQ ID NO: 2777319 - RNA, 14 nt, Human
gcacugacccuucc

SEQ ID NO: 2777320 - RNA, 15 nt, Human
gcacugacccuucca

SEQ ID NO: 2777321 - RNA, 16 nt, Human
gcacugacccuuccag

SEQ ID NO: 2777322 - RNA, 17 nt, Human
gcacugacccuuccaga

SEQ ID NO: 2777323 - RNA, 20 nt, Human
gcacugacccuuccagacau

SEQ ID NO: 2777324 - RNA, 21 nt, Human
gcacugacccuuccagacaua

SEQ ID NO: 2777325 - RNA, 20 nt, Human
gcacuugugauuauuuauua

SEQ ID NO: 2777326 - RNA, 21 nt, Human
gcacuugugauuauuuauuau

SEQ ID NO: 2777327 - RNA, 23 nt, Human
gcacuugugauuauuuauuauuu

SEQ ID NO: 2777328 - RNA, 15 nt, Human
gcacuuguauauacg

SEQ ID NO: 2777329 - RNA, 18 nt, Human
gcacuuuaaaugaagcua

SEQ ID NO: 2777330 - RNA, 17 nt, Human
gcacuugugauuauuua

SEQ ID NO: 2777331 - RNA, 21 nt, Human
gcacuugucucauuuuaaugu

SEQ ID NO: 2777332 - RNA, 23 nt, Human
gcacuugucucauuuuaauguaa

SEQ ID NO: 2777333 - RNA, 12 nt, Human
gcacuuguauau

SEQ ID NO: 2777334 - RNA, 18 nt, Human
gcagaaagguucugcccg

SEQ ID NO: 2777335 - RNA, 21 nt, Human
gcagaaagcugugaacaggcu

SEQ ID NO: 2777336 - RNA, 21 nt, Human
gcagaaaggaaaaccugaaga

SEQ ID NO: 2777337 - RNA, 23 nt, Human
gcagaaaggaaaaccugaagacu

SEQ ID NO: 2777338 - RNA, 21 nt, Human
gcagaaagguucugcccggga

SEQ ID NO: 2777339 - RNA, 19 nt, Human
gcagaaauccugcaaugaa

SEQ ID NO: 2777340 - RNA, 16 nt, Human
gcacuuucuaauguuu

SEQ ID NO: 2777341 - RNA, 17 nt, Human
gcacuuucuaauguuuc

SEQ ID NO: 2777342 - RNA, 19 nt, Human
gcacuuuccacuucuuccu

SEQ ID NO: 2777343 - RNA, 20 nt, Human
gcacuuuccacuucuuccuu

SEQ ID NO: 2777344 - RNA, 23 nt, Human
gcacuuuccacuucuuccuuucu

SEQ ID NO: 2777345 - RNA, 23 nt, Human
gcacuuuccgucaacguuguacu

SEQ ID NO: 2777346 - RNA, 17 nt, Human
gcacugaagugcuuagu

SEQ ID NO: 2777347 - RNA, 12 nt, Human
gcacugacauug

SEQ ID NO: 2777348 - RNA, 23 nt, Human
gacugggucucgcuuuguugccc

SEQ ID NO: 2777349 - RNA, 15 nt, Human
gacugguccugugug

SEQ ID NO: 2777350 - RNA, 11 nt, Human
gacuuuccucu

SEQ ID NO: 2777351 - RNA, 21 nt, Human
gacuuuucuuuguggcuuccu

SEQ ID NO: 2777352 - RNA, 15 nt, Human
gacuuuuguacaucu

SEQ ID NO: 2777353 - RNA, 19 nt, Human
gacuuuuguacaucuggcu

SEQ ID NO: 2777354 - RNA, 20 nt, Human
gacuuuuguacaucuggcuu

SEQ ID NO: 2777355 - RNA, 22 nt, Human
gacuuuucuuaacaaccuggcc

SEQ ID NO: 2777356 - RNA, 18 nt, Human
gagaagucuuucaagaau

SEQ ID NO: 2777357 - RNA, 20 nt, Human
gagaagucuuucaagaauga

SEQ ID NO: 2777358 - RNA, 21 nt, Human
gagaaucauacuuagcaaagu

SEQ ID NO: 2777359 - RNA, 14 nt, Human
gagacccccacacc

SEQ ID NO: 2777360 - RNA, 13 nt, Human
gagacccccacac

SEQ ID NO: 2777361 - RNA, 12 nt, Human
gagacccccaca

SEQ ID NO: 2777362 - RNA, 12 nt, Human
gagacccaggac

SEQ ID NO: 2777363 - RNA, 15 nt, Human
gagacccaagggcag

SEQ ID NO: 2777364 - RNA, 17 nt, Human
gagacccaccccaccug

SEQ ID NO: 2777365 - RNA, 19 nt, Human
gagacccaccccaccugca

SEQ ID NO: 2777366 - RNA, 20 nt, Human
gagacccaccccaccugcag

SEQ ID NO: 2777367 - RNA, 22 nt, Human
gagacguuuuuggaagaguagu

SEQ ID NO: 2777368 - RNA, 16 nt, Human
gagacuagauugccuu

SEQ ID NO: 2777369 - RNA, 15 nt, Human
gagacuacuaagagg

SEQ ID NO: 2777370 - RNA, 12 nt, Human
gagaccugcccc

SEQ ID NO: 2777371 - RNA, 11 nt, Human
gagaccugccc

SEQ ID NO: 2777372 - RNA, 13 nt, Human
gagaccuccugcc

SEQ ID NO: 2777373 - RNA, 15 nt, Human
gagaccuccugccuc

SEQ ID NO: 2777374 - RNA, 16 nt, Human
gagaccuccugccucc

SEQ ID NO: 2777375 - RNA, 15 nt, Human
gagaccugaagugug

SEQ ID NO: 2777376 - RNA, 16 nt, Human
gagaccucccuguuca

SEQ ID NO: 2777377 - RNA, 23 nt, Human
gagaccucccuguucaaggcccc

SEQ ID NO: 2777378 - RNA, 15 nt, Human
gagacccucugccac

SEQ ID NO: 2777379 - RNA, 21 nt, Human
gagacccucugccaccagaga

SEQ ID NO: 2777380 - RNA, 22 nt, Human
gagacccugcaaacagaacagg

SEQ ID NO: 2777381 - RNA, 23 nt, Human
gagacccccacaccucaguuccc

SEQ ID NO: 2777382 - RNA, 15 nt, Human
gagacccccacaccu

SEQ ID NO: 2777383 - RNA, 23 nt, Human
gagacccucgcccaacuccacca

SEQ ID NO: 2777384 - RNA, 16 nt, Human
gagaccuauguaagaa

SEQ ID NO: 2777385 - RNA, 20 nt, Human
gagaaggacccggaggggcc

SEQ ID NO: 2777386 - RNA, 15 nt, Human
gagaaggaaagcuuu

SEQ ID NO: 2777387 - RNA, 22 nt, Human
gagaaggacccggaggggccug

SEQ ID NO: 2777388 - RNA, 13 nt, Human
gagaagccuucag

SEQ ID NO: 2777389 - RNA, 14 nt, Human
gagaagccuucagc

SEQ ID NO: 2777390 - RNA, 18 nt, Human
gagaagccuucagcucca

SEQ ID NO: 2777391 - RNA, 16 nt, Human
gagaagcggauuucca

SEQ ID NO: 2777392 - RNA, 23 nt, Human
gacuagccccuguggagacuggg

SEQ ID NO: 2777393 - RNA, 19 nt, Human
gacuaugaacuucucucag

SEQ ID NO: 2777394 - RNA, 20 nt, Human
gacuaugaacuucucucaga

SEQ ID NO: 2777395 - RNA, 20 nt, Human
gacuauuuaaacuuauaaau

SEQ ID NO: 2777396 - RNA, 21 nt, Human
gacuauuuaaacuuauaaauc

SEQ ID NO: 2777397 - RNA, 23 nt, Human
gacuauuuaaacuuauaaaucau

SEQ ID NO: 2777398 - RNA, 22 nt, Human
gacuauuugcuuauuuaauaaa

SEQ ID NO: 2777399 - RNA, 13 nt, Human
gacuaucagccca

SEQ ID NO: 2777400 - RNA, 21 nt, Human
gacuaucccaacagucauguu

SEQ ID NO: 2777401 - RNA, 22 nt, Human
gacuaucccaacagucauguuu

SEQ ID NO: 2777402 - RNA, 21 nt, Human
gacuagggauucaggcugcuu

SEQ ID NO: 2777403 - RNA, 18 nt, Human
gacuaggguccuggggaa

SEQ ID NO: 2777404 - RNA, 16 nt, Human
gacuaggguccugggg

SEQ ID NO: 2777405 - RNA, 15 nt, Human
gacuaggguccuggg

SEQ ID NO: 2777406 - RNA, 21 nt, Human
gacuagccccuguggagacug

SEQ ID NO: 2777407 - RNA, 20 nt, Human
gacuagggauucaggcugcu

SEQ ID NO: 2777408 - RNA, 19 nt, Human
gacuagggauucaggcugc

SEQ ID NO: 2777409 - RNA, 18 nt, Human
gacuagggauucaggcug

SEQ ID NO: 2777410 - RNA, 17 nt, Human
gacuagggauucaggcu

SEQ ID NO: 2777411 - RNA, 20 nt, Human
gacugaaaaccucuccucau

SEQ ID NO: 2777412 - RNA, 20 nt, Human
gacugaaaauauauaagcuc

SEQ ID NO: 2777413 - RNA, 18 nt, Human
gacugaaaaccucuccuc

SEQ ID NO: 2777414 - RNA, 17 nt, Human
gacugaaaaccucuccu

SEQ ID NO: 2777415 - RNA, 16 nt, Human
gacugaaaaccucucc

SEQ ID NO: 2777416 - RNA, 19 nt, Human
gacucuuuuuagggccagg

SEQ ID NO: 2777417 - RNA, 20 nt, Human
gacucuuuuuagggccaggc

SEQ ID NO: 2777418 - RNA, 22 nt, Human
gacucuuuuuagggccaggcag

SEQ ID NO: 2777419 - RNA, 19 nt, Human
gacuauucuguaucuuuca

SEQ ID NO: 2777420 - RNA, 19 nt, Human
gacucuuguuuucaguuuc

SEQ ID NO: 2777421 - RNA, 20 nt, Human
gacucuuuagcaaaaaaaac

SEQ ID NO: 2777422 - RNA, 18 nt, Human
gacucuggugccuccaga

SEQ ID NO: 2777423 - RNA, 19 nt, Human
gacucugguuucucauucu

SEQ ID NO: 2777424 - RNA, 17 nt, Human
gacucuguaacaucacu

SEQ ID NO: 2777425 - RNA, 12 nt, Human
gacucugucuca

SEQ ID NO: 2777426 - RNA, 16 nt, Human
gacucuggcuuggccu

SEQ ID NO: 2777427 - RNA, 17 nt, Human
gacucuggcuuggccua

SEQ ID NO: 2777428 - RNA, 18 nt, Human
gacucugggcuauggaca

SEQ ID NO: 2777429 - RNA, 19 nt, Human
gacucugggcuauggacac

SEQ ID NO: 2777430 - RNA, 20 nt, Human
gacucugggcuauggacaca

SEQ ID NO: 2777431 - RNA, 21 nt, Human
gacucugggcuauggacacag

SEQ ID NO: 2777432 - RNA, 22 nt, Human
gacucugggcuauggacacagg

SEQ ID NO: 2777433 - RNA, 16 nt, Human
gacucugccuccucuu

SEQ ID NO: 2777434 - RNA, 14 nt, Human
gacucugcacauga

SEQ ID NO: 2777435 - RNA, 15 nt, Human
gacucugcacauguc

SEQ ID NO: 2777436 - RNA, 14 nt, Human
gacucucugugacc

SEQ ID NO: 2777437 - RNA, 15 nt, Human
gacucucugugaccu

SEQ ID NO: 2777438 - RNA, 22 nt, Human
gacucaaaacccaucugggcuc

SEQ ID NO: 2777439 - RNA, 23 nt, Human
gacucaaaacccaucugggcucc

SEQ ID NO: 2777440 - RNA, 19 nt, Human
gacucucugugaccugccc

SEQ ID NO: 2777441 - RNA, 19 nt, Human
gacucugaggcucuuucug

SEQ ID NO: 2777442 - RNA, 17 nt, Human
gacucugagcgggaggc

SEQ ID NO: 2777443 - RNA, 19 nt, Human
gacucugagcgggaggcag

SEQ ID NO: 2777444 - RNA, 20 nt, Human
gacucugagcgggaggcaga

SEQ ID NO: 2777445 - RNA, 21 nt, Human
gacucugagcgggaggcagag

SEQ ID NO: 2777446 - RNA, 22 nt, Human
gacucugagcgggaggcagagu

SEQ ID NO: 2777447 - RNA, 22 nt, Human
gacucugaggcucuuucugggc

SEQ ID NO: 2777448 - RNA, 12 nt, Human
gacucugcacau

SEQ ID NO: 2777449 - RNA, 15 nt, Human
gacucugaagccucu

SEQ ID NO: 2777450 - RNA, 16 nt, Human
gacucugaagccucug

SEQ ID NO: 2777451 - RNA, 17 nt, Human
gacucugaagccucugg

SEQ ID NO: 2777452 - RNA, 18 nt, Human
gacucugaagccucuggg

SEQ ID NO: 2777453 - RNA, 19 nt, Human
gacucugaagccucuggga

SEQ ID NO: 2777454 - RNA, 14 nt, Human
gagcagggcucagc

SEQ ID NO: 2777455 - RNA, 18 nt, Human
gagcagggaaggccugac

SEQ ID NO: 2777456 - RNA, 17 nt, Human
gagcagggaaggccuga

SEQ ID NO: 2777457 - RNA, 16 nt, Human
gagcagggaaggccug

SEQ ID NO: 2777458 - RNA, 14 nt, Human
gagcagggaaggcc

SEQ ID NO: 2777459 - RNA, 13 nt, Human
gagcagggaaggc

SEQ ID NO: 2777460 - RNA, 14 nt, Human
gagcauggagcugg

SEQ ID NO: 2777461 - RNA, 19 nt, Human
gagcauguaaaagcggaaa

SEQ ID NO: 2777462 - RNA, 22 nt, Human
gagcauggggauaaaggagaag

SEQ ID NO: 2777463 - RNA, 21 nt, Human
gagcauggggauaaaggagaa

SEQ ID NO: 2777464 - RNA, 15 nt, Human
gagcauggagcuggc

SEQ ID NO: 2777465 - RNA, 17 nt, Human
gagcauggagcuggccg

SEQ ID NO: 2777466 - RNA, 15 nt, Human
gagcaugggccuggc

SEQ ID NO: 2777467 - RNA, 16 nt, Human
gagcauaguccaaaaa

SEQ ID NO: 2777468 - RNA, 22 nt, Human
gagcauaguccaaaaagcuccu

SEQ ID NO: 2777469 - RNA, 22 nt, Human
gagcaguuucuguccugcuggu

SEQ ID NO: 2777470 - RNA, 21 nt, Human
gagcauacaucuuaaaucuuu

SEQ ID NO: 2777471 - RNA, 20 nt, Human
gagcaguuucuguccugcug

SEQ ID NO: 2777472 - RNA, 21 nt, Human
gagcaguuucuguccugcugg

SEQ ID NO: 2777473 - RNA, 17 nt, Human
gagcaguuucuguccug

SEQ ID NO: 2777474 - RNA, 24 nt, Human
gagccccagggucuucccuaccuc

SEQ ID NO: 2777475 - RNA, 19 nt, Human
gagccccagggugcccaga

SEQ ID NO: 2777476 - RNA, 19 nt, Human
gagccccagggucuucccu

SEQ ID NO: 2777477 - RNA, 12 nt, Human
gagccccaucug

SEQ ID NO: 2777478 - RNA, 12 nt, Human
gagccccaucuu

SEQ ID NO: 2777479 - RNA, 13 nt, Human
gagccccaucuuc

SEQ ID NO: 2777480 - RNA, 18 nt, Human
gagccccaucuucaccca

SEQ ID NO: 2777481 - RNA, 19 nt, Human
gagccccaucuucacccag

SEQ ID NO: 2777482 - RNA, 20 nt, Human
gagccccaucuucacccagg

SEQ ID NO: 2777483 - RNA, 14 nt, Human
gagccccagggucu

SEQ ID NO: 2777484 - RNA, 13 nt, Human
gagccccaggguc

SEQ ID NO: 2777485 - RNA, 12 nt, Human
gagccccagggu

SEQ ID NO: 2777486 - RNA, 18 nt, Human
gagccccaggccucugug

SEQ ID NO: 2777487 - RNA, 16 nt, Human
gagccccagcuacccu

SEQ ID NO: 2777488 - RNA, 13 nt, Human
gagccccaggccu

SEQ ID NO: 2777489 - RNA, 16 nt, Human
gagccccaggccucug

SEQ ID NO: 2777490 - RNA, 17 nt, Human
gagccccaggccucugu

SEQ ID NO: 2777491 - RNA, 17 nt, Human
gagcaugggccuggcca

SEQ ID NO: 2777492 - RNA, 18 nt, Human
gagcugggugucaagagg

SEQ ID NO: 2777493 - RNA, 19 nt, Human
gagcuggggaccugguacc

SEQ ID NO: 2777494 - RNA, 14 nt, Human
gagcugggcauggu

SEQ ID NO: 2777495 - RNA, 13 nt, Human
gagcuggggaccu

SEQ ID NO: 2777496 - RNA, 15 nt, Human
gagcuggggaccugg

SEQ ID NO: 2777497 - RNA, 12 nt, Human
gagcugggaggc

SEQ ID NO: 2777498 - RNA, 17 nt, Human
gagcugggaggcauggc

SEQ ID NO: 2777499 - RNA, 18 nt, Human
gagcugggaggcauggcc

SEQ ID NO: 2777500 - RNA, 23 nt, Human
gagccuuugguucuggccagaau

SEQ ID NO: 2777501 - RNA, 18 nt, Human
gagccuuuuaacugugca

SEQ ID NO: 2777502 - RNA, 19 nt, Human
gagccuuuuaacugugcaa

SEQ ID NO: 2777503 - RNA, 23 nt, Human
gagccuuuucccucuuuggcucc

SEQ ID NO: 2777504 - RNA, 20 nt, Human
gagccuuuuuaaaacacaug

SEQ ID NO: 2777505 - RNA, 18 nt, Human
gagccuuugguucuggcc

SEQ ID NO: 2777506 - RNA, 22 nt, Human
gagcugccuguucagcuccagc

SEQ ID NO: 2777507 - RNA, 21 nt, Human
gagcugccuguucagcuccag

SEQ ID NO: 2777508 - RNA, 20 nt, Human
gagcugccuguucagcucca

SEQ ID NO: 2777509 - RNA, 16 nt, Human
gagcggucucaggcug

SEQ ID NO: 2777510 - RNA, 14 nt, Human
gagcggucucaggc

SEQ ID NO: 2777511 - RNA, 12 nt, Human
gagcgggaggca

SEQ ID NO: 2777512 - RNA, 13 nt, Human
gagcgggaggcag

SEQ ID NO: 2777513 - RNA, 14 nt, Human
gagcgggaggcaga

SEQ ID NO: 2777514 - RNA, 15 nt, Human
gagcgggaggcagag

SEQ ID NO: 2777515 - RNA, 16 nt, Human
gagcgggaggcagagu

SEQ ID NO: 2777516 - RNA, 16 nt, Human
gagcgggguaugaaga

SEQ ID NO: 2777517 - RNA, 14 nt, Human
gagacuauggagcc

SEQ ID NO: 2777518 - RNA, 21 nt, Human
gagacuauggagccuggcaca

SEQ ID NO: 2777519 - RNA, 22 nt, Human
gagacuauggagccuggcacag

SEQ ID NO: 2777520 - RNA, 13 nt, Human
gagacuauuuaaa

SEQ ID NO: 2777521 - RNA, 22 nt, Human
gagacuauuuaaacuuauaaau

SEQ ID NO: 2777522 - RNA, 15 nt, Human
gagacucacaggaag

SEQ ID NO: 2777523 - RNA, 12 nt, Human
gagaggcagaga

SEQ ID NO: 2777524 - RNA, 22 nt, Human
gagaggcagacuucccugaaug

SEQ ID NO: 2777525 - RNA, 13 nt, Human
gagaggcagagag

SEQ ID NO: 2777526 - RNA, 14 nt, Human
gagaggcagagagc

SEQ ID NO: 2777527 - RNA, 16 nt, Human
gagaggcagagagcgg

SEQ ID NO: 2777528 - RNA, 15 nt, Human
gagauggaucacaua

SEQ ID NO: 2777529 - RNA, 17 nt, Human
gagauggagucuugcua

SEQ ID NO: 2777530 - RNA, 18 nt, Human
gagauggaguucuugugc

SEQ ID NO: 2777531 - RNA, 22 nt, Human
gagauggacaguucacacccug

SEQ ID NO: 2777532 - RNA, 18 nt, Human
gagaugcuggagaagaga

SEQ ID NO: 2777533 - RNA, 23 nt, Human
gagaugcauucuugguuggcugg

SEQ ID NO: 2777534 - RNA, 19 nt, Human
gagaugcuggagaagagag

SEQ ID NO: 2777535 - RNA, 20 nt, Human
gagaugcuggagaagagagg

SEQ ID NO: 2777536 - RNA, 21 nt, Human
gagaugcuggagaagagagga

SEQ ID NO: 2777537 - RNA, 17 nt, Human
gagaugcuguaacuuaa

SEQ ID NO: 2777538 - RNA, 23 nt, Human
gagauuguuguuugccauacuuu

SEQ ID NO: 2777539 - RNA, 21 nt, Human
gagaugucaucagagcuccuc

SEQ ID NO: 2777540 - RNA, 17 nt, Human
gagauucaguuuucauu

SEQ ID NO: 2777541 - RNA, 16 nt, Human
gagauguaugaaggcu

SEQ ID NO: 2777542 - RNA, 18 nt, Human
gagauguaugaaggcuuu

SEQ ID NO: 2777543 - RNA, 23 nt, Human
gagauguaugaaggcuuuugguc

SEQ ID NO: 2777544 - RNA, 14 nt, Human
gagauucccaagcc

SEQ ID NO: 2777545 - RNA, 16 nt, Human
gagauucccgcggguu

SEQ ID NO: 2777546 - RNA, 23 nt, Human
gagauucccgcggguuccgcagg

SEQ ID NO: 2777547 - RNA, 15 nt, Human
gagauucugugaucu

SEQ ID NO: 2777548 - RNA, 16 nt, Human
gagauugaacuccaag

SEQ ID NO: 2777549 - RNA, 16 nt, Human
gagaugggaaggcaca

SEQ ID NO: 2777550 - RNA, 14 nt, Human
gagaugggagcucc

SEQ ID NO: 2777551 - RNA, 15 nt, Human
gagaugggagcuccu

SEQ ID NO: 2777552 - RNA, 22 nt, Human
gagaugggagcuccucuccugg

SEQ ID NO: 2777553 - RNA, 23 nt, Human
gagaugggagcuccucuccugga

SEQ ID NO: 2777554 - RNA, 18 nt, Human
gagauggggauaaaauga

SEQ ID NO: 2777555 - RNA, 17 nt, Human
gagauguaaaagguauu

SEQ ID NO: 2777556 - RNA, 16 nt, Human
gagauguaaaagguau

SEQ ID NO: 2777557 - RNA, 13 nt, Human
gagauugagaagg

SEQ ID NO: 2777558 - RNA, 17 nt, Human
gagauugagaaggagag

SEQ ID NO: 2777559 - RNA, 18 nt, Human
gagauugagaaggagaga

SEQ ID NO: 2777560 - RNA, 20 nt, Human
gagauugagaaggagagaaa

SEQ ID NO: 2777561 - RNA, 22 nt, Human
gagauuuaccagggauguagau

SEQ ID NO: 2777562 - RNA, 14 nt, Human
gagauuuauauaaa

SEQ ID NO: 2777563 - RNA, 16 nt, Human
gagauuuauauaaaug

SEQ ID NO: 2777564 - RNA, 16 nt, Human
gagauuuccuccuggc

SEQ ID NO: 2777565 - RNA, 12 nt, Human
gagauuugucua

SEQ ID NO: 2777566 - RNA, 14 nt, Human
gacacugccugggc

SEQ ID NO: 2777567 - RNA, 16 nt, Human
gacacugugcccagcc

SEQ ID NO: 2777568 - RNA, 23 nt, Human
gacacugugcccagcccggaccu

SEQ ID NO: 2777569 - RNA, 22 nt, Human
gacacuguucucccuucggugg

SEQ ID NO: 2777570 - RNA, 20 nt, Human
gacacugugcccagcccgga

SEQ ID NO: 2777571 - RNA, 15 nt, Human
gacacugaugggcaa

SEQ ID NO: 2777572 - RNA, 13 nt, Human
gacacugccuggg

SEQ ID NO: 2777573 - RNA, 12 nt, Human
gacacugccugg

SEQ ID NO: 2777574 - RNA, 16 nt, Human
gacacugccacacagg

SEQ ID NO: 2777575 - RNA, 12 nt, Human
gacacuguacaa

SEQ ID NO: 2777576 - RNA, 13 nt, Human
gacacuguacaag

SEQ ID NO: 2777577 - RNA, 13 nt, Human
gacacugaugggc

SEQ ID NO: 2777578 - RNA, 23 nt, Human
gacagacaacacugggaaacaga

SEQ ID NO: 2777579 - RNA, 15 nt, Human
gacagaauguaucug

SEQ ID NO: 2777580 - RNA, 18 nt, Human
gacagaauguaucuguga

SEQ ID NO: 2777581 - RNA, 20 nt, Human
gacagaauguaucugugaag

SEQ ID NO: 2777582 - RNA, 13 nt, Human
gacagaauuuuuu

SEQ ID NO: 2777583 - RNA, 18 nt, Human
gacagaauuuuuuuuguu

SEQ ID NO: 2777584 - RNA, 21 nt, Human
gacagaauuuuuuuuguuguu

SEQ ID NO: 2777585 - RNA, 23 nt, Human
gacagaaggugccacuuuaccca

SEQ ID NO: 2777586 - RNA, 15 nt, Human
gacagaagucuccuc

SEQ ID NO: 2777587 - RNA, 16 nt, Human
gacagaagucuccuca

SEQ ID NO: 2777588 - RNA, 17 nt, Human
gacagaagucuccucaa

SEQ ID NO: 2777589 - RNA, 14 nt, Human
gacagaaggugcca

SEQ ID NO: 2777590 - RNA, 20 nt, Human
gacacuuaauacuaccuuga

SEQ ID NO: 2777591 - RNA, 19 nt, Human
gacacuucaaggugacaga

SEQ ID NO: 2777592 - RNA, 21 nt, Human
gacacuucaaggugacagaag

SEQ ID NO: 2777593 - RNA, 15 nt, Human
gacagaaggaccagc

SEQ ID NO: 2777594 - RNA, 16 nt, Human
gacagaaggaccagcc

SEQ ID NO: 2777595 - RNA, 14 nt, Human
gacaguccugggag

SEQ ID NO: 2777596 - RNA, 13 nt, Human
gacaguccuggga

SEQ ID NO: 2777597 - RNA, 14 nt, Human
gacagucaccccag

SEQ ID NO: 2777598 - RNA, 16 nt, Human
gacagucaccccagga

SEQ ID NO: 2777599 - RNA, 15 nt, Human
gacagucuugugcuu

SEQ ID NO: 2777600 - RNA, 18 nt, Human
gacauguuuuuguuuucu

SEQ ID NO: 2777601 - RNA, 18 nt, Human
gacaguccugggagaacc

SEQ ID NO: 2777602 - RNA, 15 nt, Human
gacaguccugggaga

SEQ ID NO: 2777603 - RNA, 23 nt, Human
gacaguccugggagaaccucagg

SEQ ID NO: 2777604 - RNA, 13 nt, Human
gacagucuugugc

SEQ ID NO: 2777605 - RNA, 13 nt, Human
gacagucucacuu

SEQ ID NO: 2777606 - RNA, 12 nt, Human
gacagucugcuc

SEQ ID NO: 2777607 - RNA, 23 nt, Human
gacagucugcucuagaugagcug

SEQ ID NO: 2777608 - RNA, 11 nt, Human
gacagcuccuu

SEQ ID NO: 2777609 - RNA, 13 nt, Human
gacagacacacac

SEQ ID NO: 2777610 - RNA, 15 nt, Human
gacagacacacacac

SEQ ID NO: 2777611 - RNA, 13 nt, Human
gacagccuggcac

SEQ ID NO: 2777612 - RNA, 19 nt, Human
gacagccuggcacagggca

SEQ ID NO: 2777613 - RNA, 22 nt, Human
gacaggguuuugccauguuggc

SEQ ID NO: 2777614 - RNA, 20 nt, Human
gacaggguuuugccauguug

SEQ ID NO: 2777615 - RNA, 14 nt, Human
gacagguaaauuaa

SEQ ID NO: 2777616 - RNA, 16 nt, Human
gacaggugugccgaca

SEQ ID NO: 2777617 - RNA, 16 nt, Human
gacaggucccuccccu

SEQ ID NO: 2777618 - RNA, 17 nt, Human
gacauuaugugguuuua

SEQ ID NO: 2777619 - RNA, 16 nt, Human
gacauuaagaauguug

SEQ ID NO: 2777620 - RNA, 19 nt, Human
gacauuaagaauguugguu

SEQ ID NO: 2777621 - RNA, 20 nt, Human
gacauuaguaacauaauaaa

SEQ ID NO: 2777622 - RNA, 23 nt, Human
gacauuaguaacauaauaaauua

SEQ ID NO: 2777623 - RNA, 14 nt, Human
gacauuauagacau

SEQ ID NO: 2777624 - RNA, 15 nt, Human
gacauuauagacauu

SEQ ID NO: 2777625 - RNA, 20 nt, Human
gacauuauagacauugagga

SEQ ID NO: 2777626 - RNA, 23 nt, Human
gacauuaugugguuuuagauuuu

SEQ ID NO: 2777627 - RNA, 13 nt, Human
gacauuaugugug

SEQ ID NO: 2777628 - RNA, 16 nt, Human
gacauuaugugugcau

SEQ ID NO: 2777629 - RNA, 20 nt, Human
gacauuaugugugcaugugu

SEQ ID NO: 2777630 - RNA, 21 nt, Human
gacauuaugugugcaugugug

SEQ ID NO: 2777631 - RNA, 22 nt, Human
gacauuaugugugcaugugugu

SEQ ID NO: 2777632 - RNA, 23 nt, Human
gacauuaugugugcaugugugua

SEQ ID NO: 2777633 - RNA, 16 nt, Human
gacaaacaccucccag

SEQ ID NO: 2777634 - RNA, 21 nt, Human
gacacacagcucuguccuggg

SEQ ID NO: 2777635 - RNA, 16 nt, Human
gacacacuacaccaca

SEQ ID NO: 2777636 - RNA, 19 nt, Human
gacacacuacaccacacac

SEQ ID NO: 2777637 - RNA, 20 nt, Human
gacacacuacaccacacaca

SEQ ID NO: 2777638 - RNA, 21 nt, Human
gacacacuacaccacacacaa

SEQ ID NO: 2777639 - RNA, 22 nt, Human
gacacacuaucauaguuaacau

SEQ ID NO: 2777640 - RNA, 19 nt, Human
gaaugaggucccaggcaga

SEQ ID NO: 2777641 - RNA, 18 nt, Human
gaaugaggucccaggcag

SEQ ID NO: 2777642 - RNA, 17 nt, Human
gaaugaggucccaggca

SEQ ID NO: 2777643 - RNA, 16 nt, Human
gaaugaggucccaggc

SEQ ID NO: 2777644 - RNA, 15 nt, Human
gaaugaggucccagg

SEQ ID NO: 2777645 - RNA, 14 nt, Human
gaaugaggucccag

SEQ ID NO: 2777646 - RNA, 13 nt, Human
gaauuuguuauca

SEQ ID NO: 2777647 - RNA, 22 nt, Human
gaaugaggucccaggcagagaa

SEQ ID NO: 2777648 - RNA, 15 nt, Human
gaaugaggucugggc

SEQ ID NO: 2777649 - RNA, 18 nt, Human
gaaugaggucugggcuag

SEQ ID NO: 2777650 - RNA, 21 nt, Human
gaaugaggucccaggcagaga

SEQ ID NO: 2777651 - RNA, 22 nt, Human
gaauuauccuauuucaguacuu

SEQ ID NO: 2777652 - RNA, 22 nt, Human
gaauuuuccugagacaaauuuu

SEQ ID NO: 2777653 - RNA, 23 nt, Human
gaauuuucuuuguguagcuuugc

SEQ ID NO: 2777654 - RNA, 21 nt, Human
gaauuuucuuuguguagcuuu

SEQ ID NO: 2777655 - RNA, 21 nt, Human
gaauuuuauuuuuugggaaaa

SEQ ID NO: 2777656 - RNA, 15 nt, Human
gaauuuuacauggua

SEQ ID NO: 2777657 - RNA, 14 nt, Human
gaauuuuaggaacu

SEQ ID NO: 2777658 - RNA, 19 nt, Human
gaauuuuaggaacuucaga

SEQ ID NO: 2777659 - RNA, 15 nt, Human
gaauuuuguugcugu

SEQ ID NO: 2777660 - RNA, 16 nt, Human
gacaaaaaguuuccau

SEQ ID NO: 2777661 - RNA, 19 nt, Human
gacacacagcucuguccug

SEQ ID NO: 2777662 - RNA, 18 nt, Human
gacacacagcucuguccu

SEQ ID NO: 2777663 - RNA, 17 nt, Human
gacacacagcucugucc

SEQ ID NO: 2777664 - RNA, 15 nt, Human
gacacacagcucugu

SEQ ID NO: 2777665 - RNA, 13 nt, Human
gacacacagcucu

SEQ ID NO: 2777666 - RNA, 13 nt, Human
gacaaaauguuuu

SEQ ID NO: 2777667 - RNA, 22 nt, Human
gacaaaauuuuaguccaaauaa

SEQ ID NO: 2777668 - RNA, 18 nt, Human
gacaaaauuuuauaagca

SEQ ID NO: 2777669 - RNA, 14 nt, Human
gacacacagcucug

SEQ ID NO: 2777670 - RNA, 16 nt, Human
gacaaaauauuuccca

SEQ ID NO: 2777671 - RNA, 18 nt, Human
gacaaaaaguuuccauau

SEQ ID NO: 2777672 - RNA, 17 nt, Human
gacaaaaccuaacuugc

SEQ ID NO: 2777673 - RNA, 18 nt, Human
gacaaaaccuaacuugcg

SEQ ID NO: 2777674 - RNA, 12 nt, Human
gacaaaacuucu

SEQ ID NO: 2777675 - RNA, 13 nt, Human
gacaaaacuucuu

SEQ ID NO: 2777676 - RNA, 14 nt, Human
gacaaaacuucuug

SEQ ID NO: 2777677 - RNA, 19 nt, Human
gacaaaacuucuugucaga

SEQ ID NO: 2777678 - RNA, 21 nt, Human
gacaaaacuucuugucagaca

SEQ ID NO: 2777679 - RNA, 22 nt, Human
gacaaaacuucuugucagacau

SEQ ID NO: 2777680 - RNA, 19 nt, Human
gaaugagaaguagccacag

SEQ ID NO: 2777681 - RNA, 13 nt, Human
gaaugagccucgg

SEQ ID NO: 2777682 - RNA, 11 nt, Human
gaaugagccuc

SEQ ID NO: 2777683 - RNA, 12 nt, Human
gaaugagcccag

SEQ ID NO: 2777684 - RNA, 13 nt, Human
gaaugagcccaga

SEQ ID NO: 2777685 - RNA, 14 nt, Human
gaaugagcccagag

SEQ ID NO: 2777686 - RNA, 16 nt, Human
gaaugagcccagagaa

SEQ ID NO: 2777687 - RNA, 19 nt, Human
gaaugagcccagagaacag

SEQ ID NO: 2777688 - RNA, 20 nt, Human
gaaugagcccagagaacagc

SEQ ID NO: 2777689 - RNA, 14 nt, Human
gaaugaauuaaaua

SEQ ID NO: 2777690 - RNA, 16 nt, Human
gaaugaauuaaauaaa

SEQ ID NO: 2777691 - RNA, 16 nt, Human
gaaugacaacagaagc

SEQ ID NO: 2777692 - RNA, 13 nt, Human
gaagugucauguu

SEQ ID NO: 2777693 - RNA, 14 nt, Human
gaagugucauguuu

SEQ ID NO: 2777694 - RNA, 21 nt, Human
gaagugcuuaguguacuugga

SEQ ID NO: 2777695 - RNA, 20 nt, Human
gaagugcuggcaaccacuaa

SEQ ID NO: 2777696 - RNA, 15 nt, Human
gaagugcgugaaugu

SEQ ID NO: 2777697 - RNA, 16 nt, Human
gaagugcgugaaugua

SEQ ID NO: 2777698 - RNA, 21 nt, Human
gaagugcgugaauguauguaa

SEQ ID NO: 2777699 - RNA, 19 nt, Human
gaagugcuccccucugaaa

SEQ ID NO: 2777700 - RNA, 20 nt, Human
gaagugcuccccucugaaag

SEQ ID NO: 2777701 - RNA, 17 nt, Human
gaaguggacuggccccu

SEQ ID NO: 2777702 - RNA, 18 nt, Human
gaaguggacuggccccug

SEQ ID NO: 2777703 - RNA, 20 nt, Human
gaaguggacuggccccuggg

SEQ ID NO: 2777704 - RNA, 14 nt, Human
gaaguggggagagg

SEQ ID NO: 2777705 - RNA, 18 nt, Human
gaagugguaggaaagccu

SEQ ID NO: 2777706 - RNA, 14 nt, Human
gaagugguccaucu

SEQ ID NO: 2777707 - RNA, 15 nt, Human
gaaguggggacagag

SEQ ID NO: 2777708 - RNA, 22 nt, Human
gaagugauacuauccaguuacu

SEQ ID NO: 2777709 - RNA, 18 nt, Human
gaagugcaaauuugauac

SEQ ID NO: 2777710 - RNA, 14 nt, Human
gaagugcauuucug

SEQ ID NO: 2777711 - RNA, 16 nt, Human
gaagugcauuucugaa

SEQ ID NO: 2777712 - RNA, 23 nt, Human
gaagugcauuucugaauagaaau

SEQ ID NO: 2777713 - RNA, 16 nt, Human
gaagugcccccucccc

SEQ ID NO: 2777714 - RNA, 16 nt, Human
gaagugagcacagccu

SEQ ID NO: 2777715 - RNA, 23 nt, Human
gaagggcaggaaggagagccugc

SEQ ID NO: 2777716 - RNA, 21 nt, Human
gaagggcauaaaacagcuuug

SEQ ID NO: 2777717 - RNA, 14 nt, Human
gaagugaacauuuc

SEQ ID NO: 2777718 - RNA, 20 nt, Human
gaagggauuuuagucacacg

SEQ ID NO: 2777719 - RNA, 16 nt, Human
gaagggcauucuuucc

SEQ ID NO: 2777720 - RNA, 14 nt, Human
gaagucuuuuguuc

SEQ ID NO: 2777721 - RNA, 23 nt, Human
gaagcuguaguagcccuuucugu

SEQ ID NO: 2777722 - RNA, 18 nt, Human
gaaggccucuuggagacc

SEQ ID NO: 2777723 - RNA, 20 nt, Human
gaaggccugacuucugcugg

SEQ ID NO: 2777724 - RNA, 13 nt, Human
gaaggccugacuu

SEQ ID NO: 2777725 - RNA, 18 nt, Human
gaagcugcauccagaggc

SEQ ID NO: 2777726 - RNA, 16 nt, Human
gaagcugcccugccca

SEQ ID NO: 2777727 - RNA, 13 nt, Human
gaagcugcaucca

SEQ ID NO: 2777728 - RNA, 13 nt, Human
gaagcugcuccag

SEQ ID NO: 2777729 - RNA, 14 nt, Human
gaagcugcuccagg

SEQ ID NO: 2777730 - RNA, 18 nt, Human
gaagcugcuccaggccug

SEQ ID NO: 2777731 - RNA, 20 nt, Human
gaagcugcuccaggccugca

SEQ ID NO: 2777732 - RNA, 10 nt, Human
gaagcugcug

SEQ ID NO: 2777733 - RNA, 11 nt, Human
gaagcugcuga

SEQ ID NO: 2777734 - RNA, 12 nt, Human
gaagcugcugac

SEQ ID NO: 2777735 - RNA, 13 nt, Human
gaagcugcugacc

SEQ ID NO: 2777736 - RNA, 14 nt, Human
gaagcugcugacca

SEQ ID NO: 2777737 - RNA, 22 nt, Human
gaagcugcugaccaauugugcu

SEQ ID NO: 2777738 - RNA, 23 nt, Human
gaagcuggccgaggguccuggcu

SEQ ID NO: 2777739 - RNA, 17 nt, Human
gaagcuggccgaggguc

SEQ ID NO: 2777740 - RNA, 22 nt, Human
gaagcuggccugagaggggaag

SEQ ID NO: 2777741 - RNA, 19 nt, Human
gaagcuggccugagagggg

SEQ ID NO: 2777742 - RNA, 15 nt, Human
gaagcuggccugaga

SEQ ID NO: 2777743 - RNA, 14 nt, Human
gaagcuggccugag

SEQ ID NO: 2777744 - RNA, 19 nt, Human
gaagggaauccuccuccag

SEQ ID NO: 2777745 - RNA, 20 nt, Human
gaagggaauccuccuccagg

SEQ ID NO: 2777746 - RNA, 12 nt, Human
gaaggcuuugug

SEQ ID NO: 2777747 - RNA, 17 nt, Human
gaaggcuuuuggucucc

SEQ ID NO: 2777748 - RNA, 19 nt, Human
gaaggcuuuuggucucccu

SEQ ID NO: 2777749 - RNA, 22 nt, Human
gaagggcaggaaggagagccug

SEQ ID NO: 2777750 - RNA, 13 nt, Human
gaagggagguggc

SEQ ID NO: 2777751 - RNA, 15 nt, Human
gaagggagcagcaca

SEQ ID NO: 2777752 - RNA, 16 nt, Human
gaagggagcagcacac

SEQ ID NO: 2777753 - RNA, 13 nt, Human
gaagcuccacugu

SEQ ID NO: 2777754 - RNA, 14 nt, Human
gaagcuccacuguc

SEQ ID NO: 2777755 - RNA, 15 nt, Human
gaagcuccacuguca

SEQ ID NO: 2777756 - RNA, 16 nt, Human
gaagcuccacugucac

SEQ ID NO: 2777757 - RNA, 18 nt, Human
gaagcuccacugucaccc

SEQ ID NO: 2777758 - RNA, 19 nt, Human
gaagcuccacugucacccu

SEQ ID NO: 2777759 - RNA, 23 nt, Human
gaagcuccacugucacccuccac

SEQ ID NO: 2777760 - RNA, 23 nt, Human
gaagcuacugugugugugaauga

SEQ ID NO: 2777761 - RNA, 15 nt, Human
gaagcuacuucucca

SEQ ID NO: 2777762 - RNA, 22 nt, Human
gaagcuacugugugugugaaug

SEQ ID NO: 2777763 - RNA, 20 nt, Human
gaagcuacugugugugugaa

SEQ ID NO: 2777764 - RNA, 15 nt, Human
gaagcuacugugugu

SEQ ID NO: 2777765 - RNA, 17 nt, Human
gaagcuaauuugcauua

SEQ ID NO: 2777766 - RNA, 16 nt, Human
gaagcuaauuugcauu

SEQ ID NO: 2777767 - RNA, 15 nt, Human
gaagcuaauuugcau

SEQ ID NO: 2777768 - RNA, 14 nt, Human
gaagcuaauuugca

SEQ ID NO: 2777769 - RNA, 18 nt, Human
gaaauccagggugguggu

SEQ ID NO: 2777770 - RNA, 13 nt, Human
gaaauccagggug

SEQ ID NO: 2777771 - RNA, 14 nt, Human
gaaauccaaucaga

SEQ ID NO: 2777772 - RNA, 18 nt, Human
gaaaucaucgaaaauuca

SEQ ID NO: 2777773 - RNA, 21 nt, Human
gaaaucaucggagucagccag

SEQ ID NO: 2777774 - RNA, 21 nt, Human
cuugaugaccaaaguccuuuu

SEQ ID NO: 2777775 - RNA, 13 nt, Human
cuugaugaagcaa

SEQ ID NO: 2777776 - RNA, 14 nt, Human
cuugaugaagcaag

SEQ ID NO: 2777777 - RNA, 18 nt, Human
cuugaugaccaaaguccu

SEQ ID NO: 2777778 - RNA, 13 nt, Human
cuugaugcaugug

SEQ ID NO: 2777779 - RNA, 14 nt, Human
cuugaugcacagag

SEQ ID NO: 2777780 - RNA, 15 nt, Human
cuugaugcacagaga

SEQ ID NO: 2777781 - RNA, 18 nt, Human
cuugaugcacagagaagc

SEQ ID NO: 2777782 - RNA, 19 nt, Human
cuugaugcacagagaagcu

SEQ ID NO: 2777783 - RNA, 16 nt, Human
cuugccugggucacac

SEQ ID NO: 2777784 - RNA, 10 nt, Human
cuugccuggg

SEQ ID NO: 2777785 - RNA, 15 nt, Human
cuugccuuacacaaa

SEQ ID NO: 2777786 - RNA, 12 nt, Human
cuugccugcagg

SEQ ID NO: 2777787 - RNA, 23 nt, Human
cuugaugccauaugccuugggga

SEQ ID NO: 2777788 - RNA, 20 nt, Human
cuugccuggagacguggaac

SEQ ID NO: 2777789 - RNA, 13 nt, Human
cuugccugcaggc

SEQ ID NO: 2777790 - RNA, 15 nt, Human
cuugccuuccuaagc

SEQ ID NO: 2777791 - RNA, 20 nt, Human
cuugccuuccuaagccugug

SEQ ID NO: 2777792 - RNA, 21 nt, Human
cuugccuuccuaagccugugg

SEQ ID NO: 2777793 - RNA, 22 nt, Human
cuugccuuccuaagccuguggc

SEQ ID NO: 2777794 - RNA, 23 nt, Human
cuugccuuccuaagccuguggcu

SEQ ID NO: 2777795 - RNA, 23 nt, Human
cuugccuuuagccccucccaagc

SEQ ID NO: 2777796 - RNA, 19 nt, Human
cuugcgaacuagagaugug

SEQ ID NO: 2777797 - RNA, 23 nt, Human
cuugcgaacuagagaugugcaau

SEQ ID NO: 2777798 - RNA, 14 nt, Human
cuugcgaauaacag

SEQ ID NO: 2777799 - RNA, 14 nt, Human
cuugcgaauccaag

SEQ ID NO: 2777800 - RNA, 16 nt, Human
cuugcgaauccaagcu

SEQ ID NO: 2777801 - RNA, 19 nt, Human
cuugcgaauccaagcuccc

SEQ ID NO: 2777802 - RNA, 20 nt, Human
cuugcgaauccaagcucccu

SEQ ID NO: 2777803 - RNA, 20 nt, Human
cuugcggaaucacucugucc

SEQ ID NO: 2777804 - RNA, 23 nt, Human
cuuggcacauuuaagagacaguc

SEQ ID NO: 2777805 - RNA, 12 nt, Human
cuuggcaccaaa

SEQ ID NO: 2777806 - RNA, 13 nt, Human
cuuggcaccaaag

SEQ ID NO: 2777807 - RNA, 16 nt, Human
cuuggcaccaaagaug

SEQ ID NO: 2777808 - RNA, 19 nt, Human
cuuggcaccaaagaugcag

SEQ ID NO: 2777809 - RNA, 22 nt, Human
cuuggcaccaaagaugcagccg

SEQ ID NO: 2777810 - RNA, 18 nt, Human
cuuggcagcaccugucuc

SEQ ID NO: 2777811 - RNA, 19 nt, Human
cuuggcagcccaggccggg

SEQ ID NO: 2777812 - RNA, 18 nt, Human
cuuggcaauauuccuuag

SEQ ID NO: 2777813 - RNA, 20 nt, Human
cuuggcagcaccugucuccu

SEQ ID NO: 2777814 - RNA, 19 nt, Human
cuuggcagcaccugucucc

SEQ ID NO: 2777815 - RNA, 18 nt, Human
cuuggcaucacagggcag

SEQ ID NO: 2777816 - RNA, 15 nt, Human
cuuggcauagacaug

SEQ ID NO: 2777817 - RNA, 15 nt, Human
cuuggcagcugaacu

SEQ ID NO: 2777818 - RNA, 22 nt, Human
cuugaucuguauauacaauaac

SEQ ID NO: 2777819 - RNA, 20 nt, Human
cuugaucuguauauacaaua

SEQ ID NO: 2777820 - RNA, 15 nt, Human
cuugaucuguauaua

SEQ ID NO: 2777821 - RNA, 22 nt, Human
cuugauacuaaaaguucuucuc

SEQ ID NO: 2777822 - RNA, 23 nt, Human
cuugauacuaaaaguucuucucc

SEQ ID NO: 2777823 - RNA, 16 nt, Human
cuugauaccccccucu

SEQ ID NO: 2777824 - RNA, 17 nt, Human
cuugauaccccccucug

SEQ ID NO: 2777825 - RNA, 18 nt, Human
cuugauaccccccucugu

SEQ ID NO: 2777826 - RNA, 19 nt, Human
cuugauaccccccucuguc

SEQ ID NO: 2777827 - RNA, 20 nt, Human
cuugauaccccccucugucu

SEQ ID NO: 2777828 - RNA, 21 nt, Human
cuugauaccccccucugucuu

SEQ ID NO: 2777829 - RNA, 19 nt, Human
cuugacaaaaccuaacuug

SEQ ID NO: 2777830 - RNA, 20 nt, Human
cuugacaaaaccuaacuugc

SEQ ID NO: 2777831 - RNA, 13 nt, Human
cuugacagggcac

SEQ ID NO: 2777832 - RNA, 15 nt, Human
cuugacagggcacac

SEQ ID NO: 2777833 - RNA, 14 nt, Human
cuugacagggcaca

SEQ ID NO: 2777834 - RNA, 20 nt, Human
cuugaauuucuaaaaaacag

SEQ ID NO: 2777835 - RNA, 11 nt, Human
cuugaagcugu

SEQ ID NO: 2777836 - RNA, 21 nt, Human
cuugaagccacugaagcuggg

SEQ ID NO: 2777837 - RNA, 19 nt, Human
cuugaagccacugaagcug

SEQ ID NO: 2777838 - RNA, 18 nt, Human
cuugaagccacugaagcu

SEQ ID NO: 2777839 - RNA, 17 nt, Human
cuugaagccacugaagc

SEQ ID NO: 2777840 - RNA, 16 nt, Human
cuugaagccacugaag

SEQ ID NO: 2777841 - RNA, 13 nt, Human
cuugaagccacug

SEQ ID NO: 2777842 - RNA, 15 nt, Human
cuuccugcaauuuuc

SEQ ID NO: 2777843 - RNA, 17 nt, Human
cuuccugcaauuuucua

SEQ ID NO: 2777844 - RNA, 10 nt, Human
cuuccuccug

SEQ ID NO: 2777845 - RNA, 11 nt, Human
cuuccuccuga

SEQ ID NO: 2777846 - RNA, 18 nt, Human
cuucuaggguaugggaaa

SEQ ID NO: 2777847 - RNA, 17 nt, Human
cuucuauuuuguaaacu

SEQ ID NO: 2777848 - RNA, 16 nt, Human
cuucucaaaagaacuu

SEQ ID NO: 2777849 - RNA, 13 nt, Human
cuucuauuuuauu

SEQ ID NO: 2777850 - RNA, 14 nt, Human
cuucuauuuuguaa

SEQ ID NO: 2777851 - RNA, 16 nt, Human
cuucuauuuuguaaac

SEQ ID NO: 2777852 - RNA, 15 nt, Human
cuucuauuuuguaaa

SEQ ID NO: 2777853 - RNA, 16 nt, Human
cuucuaggacgccacc

SEQ ID NO: 2777854 - RNA, 19 nt, Human
cuucuaggacgccacccag

SEQ ID NO: 2777855 - RNA, 17 nt, Human
cuucuagaaccaggcaa

SEQ ID NO: 2777856 - RNA, 9 nt, Human
cuucuagag

SEQ ID NO: 2777857 - RNA, 15 nt, Human
cuucuagaauuauaa

SEQ ID NO: 2777858 - RNA, 23 nt, Human
cuucuagaauuauaagucacaaa

SEQ ID NO: 2777859 - RNA, 13 nt, Human
cuucuagaguuca

SEQ ID NO: 2777860 - RNA, 14 nt, Human
cuucuagaguucag

SEQ ID NO: 2777861 - RNA, 12 nt, Human
cuucuaauauau

SEQ ID NO: 2777862 - RNA, 14 nt, Human
cuucuaauauauuu

SEQ ID NO: 2777863 - RNA, 15 nt, Human
cuucuaauauauuuu

SEQ ID NO: 2777864 - RNA, 18 nt, Human
cuucuaauauauuuuuau

SEQ ID NO: 2777865 - RNA, 13 nt, Human
cuucuagaaccag

SEQ ID NO: 2777866 - RNA, 11 nt, Human
cuucuaauaua

SEQ ID NO: 2777867 - RNA, 13 nt, Human
cuucuaauaaauu

SEQ ID NO: 2777868 - RNA, 15 nt, Human
cuucuaauaaauuau

SEQ ID NO: 2777869 - RNA, 17 nt, Human
cuucuaauaaauuauac

SEQ ID NO: 2777870 - RNA, 21 nt, Human
cuucuaauaaauuauacaaau

SEQ ID NO: 2777871 - RNA, 15 nt, Human
cuuccuccuccacca

SEQ ID NO: 2777872 - RNA, 16 nt, Human
cuuccuccuccccacu

SEQ ID NO: 2777873 - RNA, 17 nt, Human
cuuccuccuccccacuu

SEQ ID NO: 2777874 - RNA, 15 nt, Human
cuucuguugcugccu

SEQ ID NO: 2777875 - RNA, 21 nt, Human
cuucuguugcugccucaugcu

SEQ ID NO: 2777876 - RNA, 14 nt, Human
cuucuucagagcug

SEQ ID NO: 2777877 - RNA, 16 nt, Human
cuucuucagagcugac

SEQ ID NO: 2777878 - RNA, 21 nt, Human
cuucuucagccaccucucuuu

SEQ ID NO: 2777879 - RNA, 17 nt, Human
cuucuucagccaccucu

SEQ ID NO: 2777880 - RNA, 12 nt, Human
cuucuucagggc

SEQ ID NO: 2777881 - RNA, 14 nt, Human
cuucuucagggccu

SEQ ID NO: 2777882 - RNA, 15 nt, Human
cuucuucagggccug

SEQ ID NO: 2777883 - RNA, 16 nt, Human
cuucuucagggccugg

SEQ ID NO: 2777884 - RNA, 16 nt, Human
cuucuucauauucuaa

SEQ ID NO: 2777885 - RNA, 14 nt, Human
cuucugccaagaga

SEQ ID NO: 2777886 - RNA, 20 nt, Human
cuucuguugcugccucaugc

SEQ ID NO: 2777887 - RNA, 19 nt, Human
cuucuguugcugccucaug

SEQ ID NO: 2777888 - RNA, 18 nt, Human
cuucuguugcugccucau

SEQ ID NO: 2777889 - RNA, 17 nt, Human
cuucuguugcugccuca

SEQ ID NO: 2777890 - RNA, 14 nt, Human
cuucucaaguucua

SEQ ID NO: 2777891 - RNA, 15 nt, Human
cuucucaaguucuaa

SEQ ID NO: 2777892 - RNA, 16 nt, Human
cuucucaaguucuaag

SEQ ID NO: 2777893 - RNA, 17 nt, Human
cuucucaaguucuaaga

SEQ ID NO: 2777894 - RNA, 18 nt, Human
cuucucaaguucuaagau

SEQ ID NO: 2777895 - RNA, 23 nt, Human
cuucucaaguucuaagauucuaa

SEQ ID NO: 2777896 - RNA, 13 nt, Human
cuucucacagcac

SEQ ID NO: 2777897 - RNA, 15 nt, Human
cuucucacagcacau

SEQ ID NO: 2777898 - RNA, 21 nt, Human
cuucucaaguucuaagauucu

SEQ ID NO: 2777899 - RNA, 22 nt, Human
cuucugcaaaaauggauauuau

SEQ ID NO: 2777900 - RNA, 16 nt, Human
cuucuucauucuauca

SEQ ID NO: 2777901 - RNA, 15 nt, Human
cuucuuccuuucucu

SEQ ID NO: 2777902 - RNA, 19 nt, Human
cuucuuccuuucucuuucu

SEQ ID NO: 2777903 - RNA, 18 nt, Human
cuucuuccaucccaggac

SEQ ID NO: 2777904 - RNA, 20 nt, Human
cuucuuccaucccaggacac

SEQ ID NO: 2777905 - RNA, 20 nt, Human
cuucuuccccuucccugacu

SEQ ID NO: 2777906 - RNA, 21 nt, Human
cuucuuccccuucccugacug

SEQ ID NO: 2777907 - RNA, 19 nt, Human
cuucuuccaggugcccagc

SEQ ID NO: 2777908 - RNA, 14 nt, Human
cuucuuccauccca

SEQ ID NO: 2777909 - RNA, 15 nt, Human
cuucuuccaucccag

SEQ ID NO: 2777910 - RNA, 13 nt, Human
cuucacuguauaa

SEQ ID NO: 2777911 - RNA, 16 nt, Human
cuucacuguauaaaua

SEQ ID NO: 2777912 - RNA, 20 nt, Human
cuucacuccagccuggguga

SEQ ID NO: 2777913 - RNA, 12 nt, Human
cuucacuacuuu

SEQ ID NO: 2777914 - RNA, 18 nt, Human
cuucacuacuuuaauaaa

SEQ ID NO: 2777915 - RNA, 18 nt, Human
cuuauuguaaauuuuaga

SEQ ID NO: 2777916 - RNA, 15 nt, Human
cuucacucacuguca

SEQ ID NO: 2777917 - RNA, 20 nt, Human
cuucacucugggcacacucu

SEQ ID NO: 2777918 - RNA, 24 nt, Human
cuucacuccggugugccugcagcc

SEQ ID NO: 2777919 - RNA, 23 nt, Human
cuucacuccggugugccugcagc

SEQ ID NO: 2777920 - RNA, 22 nt, Human
cuucacuccggugugccugcag

SEQ ID NO: 2777921 - RNA, 19 nt, Human
cuucacuccggugugccug

SEQ ID NO: 2777922 - RNA, 14 nt, Human
cuucacuccggugu

SEQ ID NO: 2777923 - RNA, 17 nt, Human
cuucacuguauaaauag

SEQ ID NO: 2777924 - RNA, 23 nt, Human
cuucacuguauaaauaggagagg

SEQ ID NO: 2777925 - RNA, 14 nt, Human
cuucaguugguugu

SEQ ID NO: 2777926 - RNA, 15 nt, Human
cuucaguugguugug

SEQ ID NO: 2777927 - RNA, 20 nt, Human
cuucaguugguugugucuuu

SEQ ID NO: 2777928 - RNA, 21 nt, Human
cuucaguugguugugucuuuu

SEQ ID NO: 2777929 - RNA, 22 nt, Human
cuucaguugguugugucuuuuu

SEQ ID NO: 2777930 - RNA, 17 nt, Human
cuucaguuauuggugga

SEQ ID NO: 2777931 - RNA, 19 nt, Human
cuucaguuauugguggaau

SEQ ID NO: 2777932 - RNA, 14 nt, Human
cuucauaaaugaag

SEQ ID NO: 2777933 - RNA, 12 nt, Human
cuucaucuuuua

SEQ ID NO: 2777934 - RNA, 15 nt, Human
cuucaucuuuuaaag

SEQ ID NO: 2777935 - RNA, 20 nt, Human
cuucauauucuaaaaccauu

SEQ ID NO: 2777936 - RNA, 14 nt, Human
cuucaucuggcugc

SEQ ID NO: 2777937 - RNA, 20 nt, Human
cuucaucuggcugccuuugc

SEQ ID NO: 2777938 - RNA, 17 nt, Human
cuucaucuucccaggua

SEQ ID NO: 2777939 - RNA, 14 nt, Human
cuucaucugcccaa

SEQ ID NO: 2777940 - RNA, 15 nt, Human
cuucaucugcccaac

SEQ ID NO: 2777941 - RNA, 21 nt, Human
cuucauacuuuuuuucacagu

SEQ ID NO: 2777942 - RNA, 15 nt, Human
cuucauaauggccug

SEQ ID NO: 2777943 - RNA, 18 nt, Human
cuuccauaaugcuacugu

SEQ ID NO: 2777944 - RNA, 22 nt, Human
cuuccauaaugcuacugucuca

SEQ ID NO: 2777945 - RNA, 11 nt, Human
cuuccauaauc

SEQ ID NO: 2777946 - RNA, 21 nt, Human
cuuccauaaucuggacuccuc

SEQ ID NO: 2777947 - RNA, 15 nt, Human
cuucccaccucccug

SEQ ID NO: 2777948 - RNA, 16 nt, Human
cuucccaccucccugc

SEQ ID NO: 2777949 - RNA, 17 nt, Human
cuucccaccucccugcc

SEQ ID NO: 2777950 - RNA, 19 nt, Human
cuucccaccucccugccca

SEQ ID NO: 2777951 - RNA, 21 nt, Human
cuucccaccucccugcccagg

SEQ ID NO: 2777952 - RNA, 15 nt, Human
cuucccacucacccc

SEQ ID NO: 2777953 - RNA, 21 nt, Human
cugugcucggaggccaucucg

SEQ ID NO: 2777954 - RNA, 16 nt, Human
cugugcucucaccagc

SEQ ID NO: 2777955 - RNA, 14 nt, Human
cugugcugaaugcu

SEQ ID NO: 2777956 - RNA, 21 nt, Human
cugugcugacauggcucugga

SEQ ID NO: 2777957 - RNA, 21 nt, Human
cuuaugccauguuaauuucau

SEQ ID NO: 2777958 - RNA, 15 nt, Human
cuuauuauugaagga

SEQ ID NO: 2777959 - RNA, 12 nt, Human
cuuauucuguag

SEQ ID NO: 2777960 - RNA, 14 nt, Human
cuuauucuguagau

SEQ ID NO: 2777961 - RNA, 12 nt, Human
cuuauugcaaaa

SEQ ID NO: 2777962 - RNA, 19 nt, Human
cuuauugcugauuuuaaug

SEQ ID NO: 2777963 - RNA, 14 nt, Human
cuuauugcuuagua

SEQ ID NO: 2777964 - RNA, 16 nt, Human
cuuauugcuuaguaaa

SEQ ID NO: 2777965 - RNA, 15 nt, Human
gaaacuuuuguaaag

SEQ ID NO: 2777966 - RNA, 16 nt, Human
gaaacuuuuguaaaga

SEQ ID NO: 2777967 - RNA, 21 nt, Human
gaaacuuuuguaaagaaauuu

SEQ ID NO: 2777968 - RNA, 23 nt, Human
gaaacuuuuguaaagaaauuuac

SEQ ID NO: 2777969 - RNA, 12 nt, Human
gaaacuuuuauc

SEQ ID NO: 2777970 - RNA, 14 nt, Human
gaaacuuuuaacug

SEQ ID NO: 2777971 - RNA, 19 nt, Human
gaaacuuuuaacugagaaa

SEQ ID NO: 2777972 - RNA, 15 nt, Human
gaaacuuuauacauu

SEQ ID NO: 2777973 - RNA, 16 nt, Human
gaaacuuuauacauua

SEQ ID NO: 2777974 - RNA, 17 nt, Human
gaaacuuuauacauuag

SEQ ID NO: 2777975 - RNA, 18 nt, Human
gaaacuuuauacauuagu

SEQ ID NO: 2777976 - RNA, 19 nt, Human
gaaacuuuauacauuagua

SEQ ID NO: 2777977 - RNA, 20 nt, Human
gaaacuuuauacauuaguaa

SEQ ID NO: 2777978 - RNA, 14 nt, Human
gaaagggguugggg

SEQ ID NO: 2777979 - RNA, 16 nt, Human
gaaagggguuggggug

SEQ ID NO: 2777980 - RNA, 21 nt, Human
gaaagggguuggggugacagu

SEQ ID NO: 2777981 - RNA, 18 nt, Human
gaaagguacuauauuugc

SEQ ID NO: 2777982 - RNA, 21 nt, Human
gaaagguacuauauuugcuag

SEQ ID NO: 2777983 - RNA, 22 nt, Human
gaaagggacuuggaagcuccgc

SEQ ID NO: 2777984 - RNA, 22 nt, Human
gaaagggagcuaucaggaacag

SEQ ID NO: 2777985 - RNA, 14 nt, Human
gaaaggcuuuuaaa

SEQ ID NO: 2777986 - RNA, 16 nt, Human
gaaagggaacagaaag

SEQ ID NO: 2777987 - RNA, 16 nt, Human
gaaagggacaaugaua

SEQ ID NO: 2777988 - RNA, 19 nt, Human
gaaagggacuuggaagcuc

SEQ ID NO: 2777989 - RNA, 18 nt, Human
gaaagguuacccuguaac

SEQ ID NO: 2777990 - RNA, 20 nt, Human
gaaaucaguaauauuuauau

SEQ ID NO: 2777991 - RNA, 18 nt, Human
gaaaucaguaauauuuau

SEQ ID NO: 2777992 - RNA, 13 nt, Human
cuuuugccauuga

SEQ ID NO: 2777993 - RNA, 13 nt, Human
cuuuuggagucag

SEQ ID NO: 2777994 - RNA, 21 nt, Human
cuuuugugaagaacuauuuua

SEQ ID NO: 2777995 - RNA, 18 nt, Human
cuuuugucuaugggacuc

SEQ ID NO: 2777996 - RNA, 12 nt, Human
cuuuuguacauc

SEQ ID NO: 2777997 - RNA, 13 nt, Human
cuuuuguacaucu

SEQ ID NO: 2777998 - RNA, 14 nt, Human
cuuuuguacaucug

SEQ ID NO: 2777999 - RNA, 17 nt, Human
cuuuuguacaucuggcu

SEQ ID NO: 2778000 - RNA, 20 nt, Human
cuuuuguaagacaaagguuu

SEQ ID NO: 2778001 - RNA, 14 nt, Human
cuuuuguaauaaac

SEQ ID NO: 2778002 - RNA, 12 nt, Human
cuuuuguaauaa

SEQ ID NO: 2778003 - RNA, 13 nt, Human
cuuuuguaagaca

SEQ ID NO: 2778004 - RNA, 10 nt, Human
cuuuuguaag

SEQ ID NO: 2778005 - RNA, 14 nt, Human
cuuuuggcuuccau

SEQ ID NO: 2778006 - RNA, 13 nt, Human
cuuuuguaaaugu

SEQ ID NO: 2778007 - RNA, 14 nt, Human
cuuuuguaaauuaa

SEQ ID NO: 2778008 - RNA, 15 nt, Human
cuuuuguaaauuaaa

SEQ ID NO: 2778009 - RNA, 12 nt, Human
cuuuuguaaaga

SEQ ID NO: 2778010 - RNA, 15 nt, Human
cuuuuguaaagaaau

SEQ ID NO: 2778011 - RNA, 21 nt, Human
cuuuuguaaagaaauuuacua

SEQ ID NO: 2778012 - RNA, 22 nt, Human
cuuuuguaaagaaauuuacuau

SEQ ID NO: 2778013 - RNA, 23 nt, Human
cuuuuguaaagaaauuuacuaua

SEQ ID NO: 2778014 - RNA, 12 nt, Human
cuuuuguaaagu

SEQ ID NO: 2778015 - RNA, 19 nt, Human
cuuuuguaaagugaagaau

SEQ ID NO: 2778016 - RNA, 15 nt, Human
cuuuuggcuuccaug

SEQ ID NO: 2778017 - RNA, 15 nt, Human
cuuuugggggaaacu

SEQ ID NO: 2778018 - RNA, 11 nt, Human
cuuuuuuuccc

SEQ ID NO: 2778019 - RNA, 13 nt, Human
cuuuuuuuccuuu

SEQ ID NO: 2778020 - RNA, 19 nt, Human
cuuuuuuuccaucuuuaca

SEQ ID NO: 2778021 - RNA, 12 nt, Human
cuuuuuuucaau

SEQ ID NO: 2778022 - RNA, 13 nt, Human
cuuuuuuucaaug

SEQ ID NO: 2778023 - RNA, 14 nt, Human
cuuuuuuucaaugu

SEQ ID NO: 2778024 - RNA, 15 nt, Human
cuuuuuuucaaugug

SEQ ID NO: 2778025 - RNA, 20 nt, Human
cuuuuuuuuuuuugagacag

SEQ ID NO: 2778026 - RNA, 16 nt, Human
cuuuuuuguuuuuuca

SEQ ID NO: 2778027 - RNA, 21 nt, Human
cuuuuuuguuuuuucaaaaua

SEQ ID NO: 2778028 - RNA, 22 nt, Human
cuuuuuuguuuuuucaaaauag

SEQ ID NO: 2778029 - RNA, 10 nt, Human
cuuuuuuguc

SEQ ID NO: 2778030 - RNA, 11 nt, Human
cuuuuuugucc

SEQ ID NO: 2778031 - RNA, 19 nt, Human
cuuuuuugucccccaacuu

SEQ ID NO: 2778032 - RNA, 22 nt, Human
cuuuuuugucccccaacuugag

SEQ ID NO: 2778033 - RNA, 15 nt, Human
cuuuuuuguuuguuu

SEQ ID NO: 2778034 - RNA, 17 nt, Human
cuuuuuuguuuguuucu

SEQ ID NO: 2778035 - RNA, 18 nt, Human
cuuuuuuguuuguuucuu

SEQ ID NO: 2778036 - RNA, 22 nt, Human
cuuuuuuguuuguuucuuugug

SEQ ID NO: 2778037 - RNA, 13 nt, Human
gaaaaaaaucauc

SEQ ID NO: 2778038 - RNA, 15 nt, Human
gaaaaaaaucaucua

SEQ ID NO: 2778039 - RNA, 17 nt, Human
gaaaaaaauaaauaaaa

SEQ ID NO: 2778040 - RNA, 18 nt, Human
gaaaaaaauaauuuuaaa

SEQ ID NO: 2778041 - RNA, 22 nt, Human
gaaaaaaauaauuuuaaaaaug

SEQ ID NO: 2778042 - RNA, 10 nt, Human
gaaaaaaaga

SEQ ID NO: 2778043 - RNA, 12 nt, Human
gaaaaaaagacu

SEQ ID NO: 2778044 - RNA, 14 nt, Human
gaaaaaaagcaugu

SEQ ID NO: 2778045 - RNA, 13 nt, Human
gaaaaaaaucuuc

SEQ ID NO: 2778046 - RNA, 22 nt, Human
gaaaaaaaucuucuccagauuu

SEQ ID NO: 2778047 - RNA, 20 nt, Human
gaaaaacacauggggaaaaa

SEQ ID NO: 2778048 - RNA, 23 nt, Human
gaaaaacacauggggaaaaaaau

SEQ ID NO: 2778049 - RNA, 23 nt, Human
gaaaaacaccgcuucugccuuuu

SEQ ID NO: 2778050 - RNA, 19 nt, Human
gaaaaacaaauucaucaaa

SEQ ID NO: 2778051 - RNA, 20 nt, Human
gaaaaacaacaacacaauaa

SEQ ID NO: 2778052 - RNA, 15 nt, Human
gaaaaaccauuugaa

SEQ ID NO: 2778053 - RNA, 20 nt, Human
gaaaaaccacucccaguccc

SEQ ID NO: 2778054 - RNA, 11 nt, Human
gaaaaacaggu

SEQ ID NO: 2778055 - RNA, 16 nt, Human
gaaaaaaaccacacaa

SEQ ID NO: 2778056 - RNA, 18 nt, Human
gaaaaaaaccacacaaag

SEQ ID NO: 2778057 - RNA, 21 nt, Human
gaaaaaaaccacacaaagaca

SEQ ID NO: 2778058 - RNA, 17 nt, Human
gaaaaaaacgaaaacag

SEQ ID NO: 2778059 - RNA, 14 nt, Human
gaaaaaaacuucau

SEQ ID NO: 2778060 - RNA, 18 nt, Human
cuuuuuuuuuuuguuuga

SEQ ID NO: 2778061 - RNA, 23 nt, Human
cuuuuuuuuuuuguuugaugcag

SEQ ID NO: 2778062 - RNA, 22 nt, Human
cuuuuuuuuuuuuuaaagacag

SEQ ID NO: 2778063 - RNA, 21 nt, Human
cuuuuuuuuuuuugagacaga

SEQ ID NO: 2778064 - RNA, 21 nt, Human
gaaaaaaaaagucagacugcu

SEQ ID NO: 2778065 - RNA, 13 nt, Human
gaaaaaaaaaugc

SEQ ID NO: 2778066 - RNA, 14 nt, Human
gaaaaaaaaaugcc

SEQ ID NO: 2778067 - RNA, 15 nt, Human
gaaaaaaaaaugcca

SEQ ID NO: 2778068 - RNA, 20 nt, Human
gaaaaaaaaaugccauaaua

SEQ ID NO: 2778069 - RNA, 21 nt, Human
gaaaaaaaaaugccauaauac

SEQ ID NO: 2778070 - RNA, 22 nt, Human
gaaaaaaaaaugccauaauaca

SEQ ID NO: 2778071 - RNA, 16 nt, Human
gaaaauucauuucaca

SEQ ID NO: 2778072 - RNA, 22 nt, Human
gaaaauucauuucacauuaaug

SEQ ID NO: 2778073 - RNA, 22 nt, Human
gaaaauucaaaaaguguuuauu

SEQ ID NO: 2778074 - RNA, 20 nt, Human
gaaaaugguuuauuuuguau

SEQ ID NO: 2778075 - RNA, 23 nt, Human
gaaaaugguuuauuuuguauugu

SEQ ID NO: 2778076 - RNA, 12 nt, Human
gaaaauguacug

SEQ ID NO: 2778077 - RNA, 19 nt, Human
gaaaauguacugagauuuu

SEQ ID NO: 2778078 - RNA, 19 nt, Human
gaaaaacucuuuauuuucc

SEQ ID NO: 2778079 - RNA, 17 nt, Human
gaaaaacuggcaacauu

SEQ ID NO: 2778080 - RNA, 12 nt, Human
gaaaagaaaaaa

SEQ ID NO: 2778081 - RNA, 11 nt, Human
gaaaagaaaaa

SEQ ID NO: 2778082 - RNA, 16 nt, Human
gaaaacuuuucucaga

SEQ ID NO: 2778083 - RNA, 17 nt, Human
gaaaacuuuucucagau

SEQ ID NO: 2778084 - RNA, 15 nt, Human
gaaaacuuuucucag

SEQ ID NO: 2778085 - RNA, 23 nt, Human
gaaaaugcuguauuagucacaga

SEQ ID NO: 2778086 - RNA, 19 nt, Human
gaaaaugcuagaagaaaac

SEQ ID NO: 2778087 - RNA, 20 nt, Human
gaaaaugcuagaagaaaaca

SEQ ID NO: 2778088 - RNA, 18 nt, Human
gaaaagaaaaaaaaaaga

SEQ ID NO: 2778089 - RNA, 22 nt, Human
gaaaagaaaaaaaaaagaagaa

SEQ ID NO: 2778090 - RNA, 23 nt, Human
gaaaagaaaaaaaaaagaagaag

SEQ ID NO: 2778091 - RNA, 20 nt, Human
cuuuguaguguuuggugcuc

SEQ ID NO: 2778092 - RNA, 13 nt, Human
cuuuguauauuac

SEQ ID NO: 2778093 - RNA, 21 nt, Human
cuuuguagauccuuagagguc

SEQ ID NO: 2778094 - RNA, 15 nt, Human
cuuuguagcacucag

SEQ ID NO: 2778095 - RNA, 18 nt, Human
cuuuguagcacucaggcu

SEQ ID NO: 2778096 - RNA, 21 nt, Human
cuuuguagcacucaggcucuc

SEQ ID NO: 2778097 - RNA, 13 nt, Human
cuuuguagauccu

SEQ ID NO: 2778098 - RNA, 14 nt, Human
cuuuguauacuuua

SEQ ID NO: 2778099 - RNA, 16 nt, Human
cuuuguauacuuuaaa

SEQ ID NO: 2778100 - RNA, 17 nt, Human
cuuuguauacuuuaaau

SEQ ID NO: 2778101 - RNA, 19 nt, Human
cuuuguauacuuuaaauaa

SEQ ID NO: 2778102 - RNA, 20 nt, Human
cuuuguauacuuuaaauaau

SEQ ID NO: 2778103 - RNA, 23 nt, Human
cuuuguaagaguguagaagcauu

SEQ ID NO: 2778104 - RNA, 14 nt, Human
cuuuguauauuaca

SEQ ID NO: 2778105 - RNA, 21 nt, Human
cuuuuaugcagauagaaucaa

SEQ ID NO: 2778106 - RNA, 13 nt, Human
cuuuuauguagca

SEQ ID NO: 2778107 - RNA, 14 nt, Human
cuuuuauguagcac

SEQ ID NO: 2778108 - RNA, 23 nt, Human
cuuuuauguaguaauugacaugu

SEQ ID NO: 2778109 - RNA, 22 nt, Human
cuuuuauguaguaauugacaug

SEQ ID NO: 2778110 - RNA, 18 nt, Human
cuuuuauguaguaauuga

SEQ ID NO: 2778111 - RNA, 15 nt, Human
cuuuuauguaguaau

SEQ ID NO: 2778112 - RNA, 22 nt, Human
cuuuuaucuguuuaaagcauau

SEQ ID NO: 2778113 - RNA, 16 nt, Human
cuuuuaugagcagaag

SEQ ID NO: 2778114 - RNA, 23 nt, Human
cuuuuaucuauucugagaaaaca

SEQ ID NO: 2778115 - RNA, 24 nt, Human
cuuuuaucuauucugagaaaacaa

SEQ ID NO: 2778116 - RNA, 13 nt, Human
cuuuuaucaaaca

SEQ ID NO: 2778117 - RNA, 17 nt, Human
cuuuuauccacuuaccu

SEQ ID NO: 2778118 - RNA, 19 nt, Human
cuuuuaucacgauauuauu

SEQ ID NO: 2778119 - RNA, 19 nt, Human
cuuuuauaggugagaaaaa

SEQ ID NO: 2778120 - RNA, 20 nt, Human
cuuuuauaggugagaaaaaa

SEQ ID NO: 2778121 - RNA, 21 nt, Human
cuuuuauaggugagaaaaaaa

SEQ ID NO: 2778122 - RNA, 22 nt, Human
cuuuuauaggugagaaaaaaac

SEQ ID NO: 2778123 - RNA, 12 nt, Human
cuuuuauagugg

SEQ ID NO: 2778124 - RNA, 15 nt, Human
cuuuuauaguggaaa

SEQ ID NO: 2778125 - RNA, 20 nt, Human
cuuuuauaguggaaaaacac

SEQ ID NO: 2778126 - RNA, 21 nt, Human
cuuuuauaguggaaaaacaca

SEQ ID NO: 2778127 - RNA, 14 nt, Human
cuuuuauaucugua

SEQ ID NO: 2778128 - RNA, 15 nt, Human
cuuuuauaucuguau

SEQ ID NO: 2778129 - RNA, 23 nt, Human
cuuuuauaucuguauguauuagu

SEQ ID NO: 2778130 - RNA, 13 nt, Human
cuuuuauauuugu

SEQ ID NO: 2778131 - RNA, 14 nt, Human
cuuuuauauuugua

SEQ ID NO: 2778132 - RNA, 15 nt, Human
cuuuuauauuuguau

SEQ ID NO: 2778133 - RNA, 16 nt, Human
cuuuuauauuuguauc

SEQ ID NO: 2778134 - RNA, 17 nt, Human
cuuuuauauuuguaucg

SEQ ID NO: 2778135 - RNA, 20 nt, Human
cuuuuauacucuuucuguau

SEQ ID NO: 2778136 - RNA, 19 nt, Human
cuuuuauacucuuucugua

SEQ ID NO: 2778137 - RNA, 17 nt, Human
cuuuuauacucuuucug

SEQ ID NO: 2778138 - RNA, 12 nt, Human
cuuuuauacucu

SEQ ID NO: 2778139 - RNA, 16 nt, Human
cuuuuauagaugguca

SEQ ID NO: 2778140 - RNA, 12 nt, Human
cuuuuauagcua

SEQ ID NO: 2778141 - RNA, 14 nt, Human
cuuuuauagcuauu

SEQ ID NO: 2778142 - RNA, 17 nt, Human
cuuuuauagcuauuacu

SEQ ID NO: 2778143 - RNA, 18 nt, Human
cuuuuauagcuauuacug

SEQ ID NO: 2778144 - RNA, 19 nt, Human
cuuuuauagcuauuacugu

SEQ ID NO: 2778145 - RNA, 23 nt, Human
cuuucuagaaguuucccuuccuc

SEQ ID NO: 2778146 - RNA, 21 nt, Human
cuuugauaauguuaaauuugu

SEQ ID NO: 2778147 - RNA, 16 nt, Human
cuuugauaauguuaaa

SEQ ID NO: 2778148 - RNA, 22 nt, Human
cuuugauauuuucaacgcagcc

SEQ ID NO: 2778149 - RNA, 22 nt, Human
cuuugauaauguuaaauuugua

SEQ ID NO: 2778150 - RNA, 22 nt, Human
cuuugauacagucaacaagccu

SEQ ID NO: 2778151 - RNA, 17 nt, Human
cuuuccuuuccccagcc

SEQ ID NO: 2778152 - RNA, 19 nt, Human
cuuuccuuguuccccauca

SEQ ID NO: 2778153 - RNA, 16 nt, Human
cuuuccuuuccccagc

SEQ ID NO: 2778154 - RNA, 17 nt, Human
cuuucuacccagcgagc

SEQ ID NO: 2778155 - RNA, 17 nt, Human
cuuuccuuguggcagag

SEQ ID NO: 2778156 - RNA, 18 nt, Human
cuuuccuuguggcagagg

SEQ ID NO: 2778157 - RNA, 19 nt, Human
cuuuccuuguggcagagga

SEQ ID NO: 2778158 - RNA, 14 nt, Human
cuuugggcugcccu

SEQ ID NO: 2778159 - RNA, 18 nt, Human
cuuugaugucauauggaa

SEQ ID NO: 2778160 - RNA, 16 nt, Human
cuuugaugucaugugu

SEQ ID NO: 2778161 - RNA, 18 nt, Human
cuuugaugucauguguuc

SEQ ID NO: 2778162 - RNA, 15 nt, Human
cuuugggcugcccug

SEQ ID NO: 2778163 - RNA, 19 nt, Human
cuuugggcugcccuggugc

SEQ ID NO: 2778164 - RNA, 20 nt, Human
cuuugggcugcccuggugcu

SEQ ID NO: 2778165 - RNA, 21 nt, Human
cuuugggcugcccuggugcug

SEQ ID NO: 2778166 - RNA, 15 nt, Human
cuuuguaagaacuaa

SEQ ID NO: 2778167 - RNA, 18 nt, Human
cuuuguaagaacuaaaga

SEQ ID NO: 2778168 - RNA, 15 nt, Human
cuuuguaaauuguca

SEQ ID NO: 2778169 - RNA, 21 nt, Human
cuuuguaagaguguagaagca

SEQ ID NO: 2778170 - RNA, 22 nt, Human
cuuuguaagaguguagaagcau

SEQ ID NO: 2778171 - RNA, 21 nt, Human
cuuuguaagucaguguugaga

SEQ ID NO: 2778172 - RNA, 22 nt, Human
cuuuguaagucaguguugagau

SEQ ID NO: 2778173 - RNA, 17 nt, Human
cuuuguaagaguguaga

SEQ ID NO: 2778174 - RNA, 18 nt, Human
cuuuguaagaguguagaa

SEQ ID NO: 2778175 - RNA, 19 nt, Human
cuuuguaagaguguagaag

SEQ ID NO: 2778176 - RNA, 20 nt, Human
cuuuguaagaguguagaagc

SEQ ID NO: 2778177 - RNA, 16 nt, Human
cuuuguacagcccaga

SEQ ID NO: 2778178 - RNA, 17 nt, Human
cuuuguacagcccagag

SEQ ID NO: 2778179 - RNA, 13 nt, Human
cuuucaauucugu

SEQ ID NO: 2778180 - RNA, 17 nt, Human
cuuucacaaaauuuuau

SEQ ID NO: 2778181 - RNA, 14 nt, Human
cuuucacaaccuuc

SEQ ID NO: 2778182 - RNA, 20 nt, Human
cuuucacaaaauuuuauucc

SEQ ID NO: 2778183 - RNA, 20 nt, Human
cuuucacaacauuugcagau

SEQ ID NO: 2778184 - RNA, 20 nt, Human
cuuucagggaauuucaggaa

SEQ ID NO: 2778185 - RNA, 16 nt, Human
cuuucagggccauggu

SEQ ID NO: 2778186 - RNA, 19 nt, Human
cuuuccugauggcaggaug

SEQ ID NO: 2778187 - RNA, 22 nt, Human
cuuuccugaugguacaggaaag

SEQ ID NO: 2778188 - RNA, 13 nt, Human
cuuuccuuccuaa

SEQ ID NO: 2778189 - RNA, 14 nt, Human
cuuuccuuccuaau

SEQ ID NO: 2778190 - RNA, 15 nt, Human
cuuuccuuccauccc

SEQ ID NO: 2778191 - RNA, 13 nt, Human
cuuuccuggaugu

SEQ ID NO: 2778192 - RNA, 16 nt, Human
cuuuccuggaugucug

SEQ ID NO: 2778193 - RNA, 23 nt, Human
cuuuccuggaugucugaacuuug

SEQ ID NO: 2778194 - RNA, 20 nt, Human
cuuuccuggacacucagacc

SEQ ID NO: 2778195 - RNA, 23 nt, Human
cuuuccuggacacucagaccuga

SEQ ID NO: 2778196 - RNA, 17 nt, Human
cugugcucaggacucag

SEQ ID NO: 2778197 - RNA, 19 nt, Human
cugugagacccccacaccu

SEQ ID NO: 2778198 - RNA, 18 nt, Human
cugugagacccccacacc

SEQ ID NO: 2778199 - RNA, 17 nt, Human
cugugagacccccacac

SEQ ID NO: 2778200 - RNA, 16 nt, Human
cugugagacccccaca

SEQ ID NO: 2778201 - RNA, 23 nt, Human
cugugagacccccacaccucagu

SEQ ID NO: 2778202 - RNA, 20 nt, Human
cugugagacccccacaccuc

SEQ ID NO: 2778203 - RNA, 14 nt, Human
cugugcucuggaca

SEQ ID NO: 2778204 - RNA, 14 nt, Human
cugugcucccuggu

SEQ ID NO: 2778205 - RNA, 19 nt, Human
cugugcucaggacucagaa

SEQ ID NO: 2778206 - RNA, 18 nt, Human
cugugcucaggacucaga

SEQ ID NO: 2778207 - RNA, 23 nt, Human
cugugcucaggacucagaagccu

SEQ ID NO: 2778208 - RNA, 22 nt, Human
cugugcucccugguucugauga

SEQ ID NO: 2778209 - RNA, 14 nt, Human
cugugaagaucuca

SEQ ID NO: 2778210 - RNA, 21 nt, Human
cugugaagaucucacucugcc

SEQ ID NO: 2778211 - RNA, 20 nt, Human
cugugaagaucucacucugc

SEQ ID NO: 2778212 - RNA, 15 nt, Human
cugugagacccccac

SEQ ID NO: 2778213 - RNA, 14 nt, Human
cugugaaguaagga

SEQ ID NO: 2778214 - RNA, 13 nt, Human
cugucgcccaguc

SEQ ID NO: 2778215 - RNA, 16 nt, Human
cugucgcccaggcugg

SEQ ID NO: 2778216 - RNA, 22 nt, Human
cugucgaguucggcucugggug

SEQ ID NO: 2778217 - RNA, 23 nt, Human
cugucgaguucggcucugggugg

SEQ ID NO: 2778218 - RNA, 13 nt, Human
cuguccugcuggu

SEQ ID NO: 2778219 - RNA, 16 nt, Human
cugucauuugagcagg

SEQ ID NO: 2778220 - RNA, 18 nt, Human
cugucauuugagcagggc

SEQ ID NO: 2778221 - RNA, 17 nt, Human
cugucauuugagcaggg

SEQ ID NO: 2778222 - RNA, 12 nt, Human
cuguccugccua

SEQ ID NO: 2778223 - RNA, 20 nt, Human
cuguccugccaugcaagaac

SEQ ID NO: 2778224 - RNA, 12 nt, Human
cuguccugaucu

SEQ ID NO: 2778225 - RNA, 16 nt, Human
cuguccugaucuguga

SEQ ID NO: 2778226 - RNA, 17 nt, Human
cuguccugaucugugau

SEQ ID NO: 2778227 - RNA, 17 nt, Human
cugucagcgcagguuua

SEQ ID NO: 2778228 - RNA, 19 nt, Human
cuguaggaucuaaggcugu

SEQ ID NO: 2778229 - RNA, 22 nt, Human
cugucacucauugcugagccuc

SEQ ID NO: 2778230 - RNA, 23 nt, Human
cugucacucauugcugagccucu

SEQ ID NO: 2778231 - RNA, 16 nt, Human
cugucacccuccaccu

SEQ ID NO: 2778232 - RNA, 12 nt, Human
cugucagaaugc

SEQ ID NO: 2778233 - RNA, 17 nt, Human
cugucagaaugcuauug

SEQ ID NO: 2778234 - RNA, 16 nt, Human
cugucagaugagaaca

SEQ ID NO: 2778235 - RNA, 17 nt, Human
cugucagaugagaacaa

SEQ ID NO: 2778236 - RNA, 18 nt, Human
cugucagaugagaacaaa

SEQ ID NO: 2778237 - RNA, 19 nt, Human
cugucagaugagaacaaag

SEQ ID NO: 2778238 - RNA, 20 nt, Human
cugucagaugagaacaaagc

SEQ ID NO: 2778239 - RNA, 21 nt, Human
cugucagaugagaacaaagcu

SEQ ID NO: 2778240 - RNA, 22 nt, Human
cugucagaugagaacaaagcug

SEQ ID NO: 2778241 - RNA, 23 nt, Human
cugucagaugagaacaaagcugu

SEQ ID NO: 2778242 - RNA, 19 nt, Human
cuguacuuuucccauuugu

SEQ ID NO: 2778243 - RNA, 22 nt, Human
cuguaggagcuacccuuuuccu

SEQ ID NO: 2778244 - RNA, 14 nt, Human
cugucacucauugc

SEQ ID NO: 2778245 - RNA, 21 nt, Human
cugucacucauugcugagccu

SEQ ID NO: 2778246 - RNA, 14 nt, Human
cugucacggaggga

SEQ ID NO: 2778247 - RNA, 16 nt, Human
cugucacucaggcugg

SEQ ID NO: 2778248 - RNA, 17 nt, Human
cugucacucaggcugga

SEQ ID NO: 2778249 - RNA, 18 nt, Human
cugucacucaggcuggag

SEQ ID NO: 2778250 - RNA, 19 nt, Human
cugucacucaggcuggagu

SEQ ID NO: 2778251 - RNA, 14 nt, Human
cugucacccuccac

SEQ ID NO: 2778252 - RNA, 18 nt, Human
cugucacccuccaccucu

SEQ ID NO: 2778253 - RNA, 16 nt, Human
cugucaccucucccac

SEQ ID NO: 2778254 - RNA, 17 nt, Human
cugucaccucucccacg

SEQ ID NO: 2778255 - RNA, 13 nt, Human
cugucacauugca

SEQ ID NO: 2778256 - RNA, 14 nt, Human
cugucacauugcau

SEQ ID NO: 2778257 - RNA, 15 nt, Human
cugucacauugcauu

SEQ ID NO: 2778258 - RNA, 18 nt, Human
cugucacauugcauucua

SEQ ID NO: 2778259 - RNA, 19 nt, Human
cugucacauugcauucuau

SEQ ID NO: 2778260 - RNA, 15 nt, Human
cugucaccaaggaaa

SEQ ID NO: 2778261 - RNA, 16 nt, Human
cugucaccaaggaaac

SEQ ID NO: 2778262 - RNA, 14 nt, Human
cuguacuuggucca

SEQ ID NO: 2778263 - RNA, 17 nt, Human
cuguacuugguccaacu

SEQ ID NO: 2778264 - RNA, 20 nt, Human
cuguacuugguccaacugca

SEQ ID NO: 2778265 - RNA, 21 nt, Human
cuguacuugguccaacugcaa

SEQ ID NO: 2778266 - RNA, 23 nt, Human
cuguacuugguccaacugcaacu

SEQ ID NO: 2778267 - RNA, 22 nt, Human
cuguaaaccccuuuaguggcuu

SEQ ID NO: 2778268 - RNA, 20 nt, Human
cuguaaaccucucgagggca

SEQ ID NO: 2778269 - RNA, 12 nt, Human
cuguaaaacgcu

SEQ ID NO: 2778270 - RNA, 13 nt, Human
cuguaaaacgcug

SEQ ID NO: 2778271 - RNA, 16 nt, Human
cuguaaaacgcuguca

SEQ ID NO: 2778272 - RNA, 19 nt, Human
cuguaaaagagccuaguuu

SEQ ID NO: 2778273 - RNA, 18 nt, Human
cuguaaaagauuaaacug

SEQ ID NO: 2778274 - RNA, 23 nt, Human
cuguaaaauauacuuaaauggaa

SEQ ID NO: 2778275 - RNA, 22 nt, Human
cugguuuccugcccugggaggc

SEQ ID NO: 2778276 - RNA, 16 nt, Human
cugguuuccugcccug

SEQ ID NO: 2778277 - RNA, 15 nt, Human
cugguuucucauucu

SEQ ID NO: 2778278 - RNA, 16 nt, Human
cugguuucucauucuu

SEQ ID NO: 2778279 - RNA, 18 nt, Human
cugguuucucauucuugu

SEQ ID NO: 2778280 - RNA, 21 nt, Human
cugguuuccugcccugggagg

SEQ ID NO: 2778281 - RNA, 18 nt, Human
cugguuuccugcccuggg

SEQ ID NO: 2778282 - RNA, 13 nt, Human
cugggcagaccuu

SEQ ID NO: 2778283 - RNA, 20 nt, Human
cuggggaaagacacugccug

SEQ ID NO: 2778284 - RNA, 22 nt, Human
cuggggaaagacacugccuggg

SEQ ID NO: 2778285 - RNA, 21 nt, Human
cuggggaaagacacugccugg

SEQ ID NO: 2778286 - RNA, 23 nt, Human
cuggggaaagacacugccugggc

SEQ ID NO: 2778287 - RNA, 15 nt, Human
cuggggaaccugacc

SEQ ID NO: 2778288 - RNA, 17 nt, Human
cuggggaaccugacccc

SEQ ID NO: 2778289 - RNA, 16 nt, Human
cuggggaaccugaccc

SEQ ID NO: 2778290 - RNA, 16 nt, Human
cuggggcaagucccug

SEQ ID NO: 2778291 - RNA, 21 nt, Human
cuggggcaagucccugacucu

SEQ ID NO: 2778292 - RNA, 12 nt, Human
cuggggcacagu

SEQ ID NO: 2778293 - RNA, 16 nt, Human
cuggggcacaguccag

SEQ ID NO: 2778294 - RNA, 17 nt, Human
cuggggcacaguccagg

SEQ ID NO: 2778295 - RNA, 19 nt, Human
cuggggcacaguccaggaa

SEQ ID NO: 2778296 - RNA, 21 nt, Human
cuggggcacaguccaggaaca

SEQ ID NO: 2778297 - RNA, 14 nt, Human
cuggggcaaguccc

SEQ ID NO: 2778298 - RNA, 17 nt, Human
cuggggaugugggaggg

SEQ ID NO: 2778299 - RNA, 22 nt, Human
cuggggaugugggagggagcag

SEQ ID NO: 2778300 - RNA, 15 nt, Human
cuggggaugugggag

SEQ ID NO: 2778301 - RNA, 16 nt, Human
cuggggaugugggagg

SEQ ID NO: 2778302 - RNA, 14 nt, Human
cuggggaacauuuc

SEQ ID NO: 2778303 - RNA, 23 nt, Human
cuggguuccuuccucugagccuu

SEQ ID NO: 2778304 - RNA, 14 nt, Human
cuggguucacugca

SEQ ID NO: 2778305 - RNA, 14 nt, Human
cuggguucccuuuc

SEQ ID NO: 2778306 - RNA, 22 nt, Human
cuggguuccagcaauucuccug

SEQ ID NO: 2778307 - RNA, 20 nt, Human
cuggguucccuuuccuucca

SEQ ID NO: 2778308 - RNA, 16 nt, Human
cuggguucccuuuccu

SEQ ID NO: 2778309 - RNA, 21 nt, Human
cuggguucccuuuccuuccau

SEQ ID NO: 2778310 - RNA, 22 nt, Human
cuggguuccuuccucugagccu

SEQ ID NO: 2778311 - RNA, 18 nt, Human
cuggguuccuuccucuga

SEQ ID NO: 2778312 - RNA, 15 nt, Human
cuggggccucagacg

SEQ ID NO: 2778313 - RNA, 14 nt, Human
cuggguggcacugc

SEQ ID NO: 2778314 - RNA, 15 nt, Human
cuggguggcacugcc

SEQ ID NO: 2778315 - RNA, 16 nt, Human
cuggguggcacugcca

SEQ ID NO: 2778316 - RNA, 20 nt, Human
cuggguggcacugccaugca

SEQ ID NO: 2778317 - RNA, 11 nt, Human
cuggggccucc

SEQ ID NO: 2778318 - RNA, 12 nt, Human
cuggggccucca

SEQ ID NO: 2778319 - RNA, 15 nt, Human
cuggggccuccagaa

SEQ ID NO: 2778320 - RNA, 17 nt, Human
cuggggccuccagaacu

SEQ ID NO: 2778321 - RNA, 13 nt, Human
cuggguggccucg

SEQ ID NO: 2778322 - RNA, 19 nt, Human
cuggggccuagacucugua

SEQ ID NO: 2778323 - RNA, 21 nt, Human
cuggguggcacugccaugcag

SEQ ID NO: 2778324 - RNA, 16 nt, Human
cuggugauaaggacau

SEQ ID NO: 2778325 - RNA, 14 nt, Human
cuggugaggagcac

SEQ ID NO: 2778326 - RNA, 16 nt, Human
cuggugcacuuuguaa

SEQ ID NO: 2778327 - RNA, 13 nt, Human
cugggacacaguu

SEQ ID NO: 2778328 - RNA, 12 nt, Human
cugggacacagu

SEQ ID NO: 2778329 - RNA, 15 nt, Human
cuggcucccacaggc

SEQ ID NO: 2778330 - RNA, 20 nt, Human
cuggcuccagcuggccggga

SEQ ID NO: 2778331 - RNA, 18 nt, Human
cuggcuccagcuggccgg

SEQ ID NO: 2778332 - RNA, 14 nt, Human
cuggcuccagcugg

SEQ ID NO: 2778333 - RNA, 13 nt, Human
cuggcuccagcug

SEQ ID NO: 2778334 - RNA, 13 nt, Human
cuggcucaucucu

SEQ ID NO: 2778335 - RNA, 20 nt, Human
cuggagacuccuaggcagga

SEQ ID NO: 2778336 - RNA, 18 nt, Human
cuggagacuccuaggcag

SEQ ID NO: 2778337 - RNA, 19 nt, Human
cuggagacuccuaggcagg

SEQ ID NO: 2778338 - RNA, 17 nt, Human
cuggagaccagggagcc

SEQ ID NO: 2778339 - RNA, 18 nt, Human
cuggagaccagggagccu

SEQ ID NO: 2778340 - RNA, 19 nt, Human
cuggagaccagggagccuu

SEQ ID NO: 2778341 - RNA, 20 nt, Human
cuggagacguggaaccucug

SEQ ID NO: 2778342 - RNA, 21 nt, Human
cuggagacguggaaccucugu

SEQ ID NO: 2778343 - RNA, 22 nt, Human
cuggagacguggaaccucuguc

SEQ ID NO: 2778344 - RNA, 17 nt, Human
cuggagacccaccccac

SEQ ID NO: 2778345 - RNA, 19 nt, Human
cuggagacccaccccaccu

SEQ ID NO: 2778346 - RNA, 20 nt, Human
cuggagacccaccccaccug

SEQ ID NO: 2778347 - RNA, 21 nt, Human
cuggagacccaccccaccugc

SEQ ID NO: 2778348 - RNA, 23 nt, Human
cuggagacccaccccaccugcag

SEQ ID NO: 2778349 - RNA, 22 nt, Human
cuggagacagccccagagcagg

SEQ ID NO: 2778350 - RNA, 23 nt, Human
cuggagacagccccagagcaggg

SEQ ID NO: 2778351 - RNA, 21 nt, Human
cuggagacagccccagagcag

SEQ ID NO: 2778352 - RNA, 20 nt, Human
cuggacugucauagaaauua

SEQ ID NO: 2778353 - RNA, 19 nt, Human
cuggacugucauagaaauu

SEQ ID NO: 2778354 - RNA, 20 nt, Human
cuggcaggaugacccugcga

SEQ ID NO: 2778355 - RNA, 18 nt, Human
cuggcaggaugacccugc

SEQ ID NO: 2778356 - RNA, 23 nt, Human
cuggccccgccgccugguacuca

SEQ ID NO: 2778357 - RNA, 18 nt, Human
cuggccccggaucagagc

SEQ ID NO: 2778358 - RNA, 19 nt, Human
cuggccccggaucagagca

SEQ ID NO: 2778359 - RNA, 20 nt, Human
cuggccccggaucagagcag

SEQ ID NO: 2778360 - RNA, 21 nt, Human
cuggccccggaucagagcagg

SEQ ID NO: 2778361 - RNA, 23 nt, Human
cuggccccggaucagagcaggac

SEQ ID NO: 2778362 - RNA, 24 nt, Human
cuggccccggaucagagcaggacc

SEQ ID NO: 2778363 - RNA, 18 nt, Human
cuggccccucaaccuccu

SEQ ID NO: 2778364 - RNA, 15 nt, Human
cuggcagggggcaug

SEQ ID NO: 2778365 - RNA, 17 nt, Human
cuggcagggaggucagg

SEQ ID NO: 2778366 - RNA, 21 nt, Human
cuggcagggaggucaggcccu

SEQ ID NO: 2778367 - RNA, 22 nt, Human
cuggcagggaggucaggcccug

SEQ ID NO: 2778368 - RNA, 23 nt, Human
cuggcagggaggucaggcccugg

SEQ ID NO: 2778369 - RNA, 13 nt, Human
cuggcagggcugg

SEQ ID NO: 2778370 - RNA, 23 nt, Human
cuggcagggcuggccccagggca

SEQ ID NO: 2778371 - RNA, 12 nt, Human
cuggccccgccg

SEQ ID NO: 2778372 - RNA, 14 nt, Human
cuggccccgccgcc

SEQ ID NO: 2778373 - RNA, 16 nt, Human
cuggccccgccgccug

SEQ ID NO: 2778374 - RNA, 22 nt, Human
cuggccccgccgccugguacuc

SEQ ID NO: 2778375 - RNA, 16 nt, Human
cugggaccacgugaga

SEQ ID NO: 2778376 - RNA, 13 nt, Human
cugcuuuuugaaa

SEQ ID NO: 2778377 - RNA, 14 nt, Human
cugcuuuuugaaau

SEQ ID NO: 2778378 - RNA, 15 nt, Human
cugcuuuuugaaaug

SEQ ID NO: 2778379 - RNA, 16 nt, Human
cugcuuuuugaaauga

SEQ ID NO: 2778380 - RNA, 18 nt, Human
cugcuuuuugaaaugaaa

SEQ ID NO: 2778381 - RNA, 17 nt, Human
cugcuuuuuuuuuucca

SEQ ID NO: 2778382 - RNA, 18 nt, Human
cugcuuuuuuuuuuccag

SEQ ID NO: 2778383 - RNA, 19 nt, Human
cugcuuuuuuuuuuccagc

SEQ ID NO: 2778384 - RNA, 21 nt, Human
cugcuuuuuuuuuuccagcaa

SEQ ID NO: 2778385 - RNA, 22 nt, Human
cugcuuuuuuuuuuccagcaag

SEQ ID NO: 2778386 - RNA, 23 nt, Human
cugcuuuuuuuuuuccagcaagu

SEQ ID NO: 2778387 - RNA, 21 nt, Human
cuggaacagauucacacuguc

SEQ ID NO: 2778388 - RNA, 14 nt, Human
cuggaacagauuca

SEQ ID NO: 2778389 - RNA, 20 nt, Human
cuggaacaucaucaaggcac

SEQ ID NO: 2778390 - RNA, 17 nt, Human
cuggaacauccuuugca

SEQ ID NO: 2778391 - RNA, 18 nt, Human
cuggaacauccuuugcag

SEQ ID NO: 2778392 - RNA, 22 nt, Human
cuggaacauccuuugcagggca

SEQ ID NO: 2778393 - RNA, 23 nt, Human
cuggaacauccuuugcagggcag

SEQ ID NO: 2778394 - RNA, 24 nt, Human
cuggaacauccuuugcagggcagc

SEQ ID NO: 2778395 - RNA, 15 nt, Human
cuggaaccugcaaaa

SEQ ID NO: 2778396 - RNA, 16 nt, Human
cuggaaccugcaaaaa

SEQ ID NO: 2778397 - RNA, 18 nt, Human
cuggaaccugcaaaaaau

SEQ ID NO: 2778398 - RNA, 21 nt, Human
cuggaaccugcaaaaaauacu

SEQ ID NO: 2778399 - RNA, 15 nt, Human
cuggaaccuugcugu

SEQ ID NO: 2778400 - RNA, 16 nt, Human
cuggaaccuugcuguc

SEQ ID NO: 2778401 - RNA, 17 nt, Human
cuggaaccuugcugucc

SEQ ID NO: 2778402 - RNA, 18 nt, Human
cuggaaccuugcuguccu

SEQ ID NO: 2778403 - RNA, 19 nt, Human
cuggaaccuugcuguccug

SEQ ID NO: 2778404 - RNA, 20 nt, Human
cuggaaccuugcuguccuga

SEQ ID NO: 2778405 - RNA, 16 nt, Human
cuggaacggugaaggu

SEQ ID NO: 2778406 - RNA, 22 nt, Human
cuggaacggugaaggugacagc

SEQ ID NO: 2778407 - RNA, 13 nt, Human
cuggacugggagg

SEQ ID NO: 2778408 - RNA, 14 nt, Human
cuggacugggaggu

SEQ ID NO: 2778409 - RNA, 16 nt, Human
cuggacugggagguag

SEQ ID NO: 2778410 - RNA, 17 nt, Human
cuggacugggagguaga

SEQ ID NO: 2778411 - RNA, 18 nt, Human
cuggacugucauagaaau

SEQ ID NO: 2778412 - RNA, 21 nt, Human
cuggacuggcuagaguccuca

SEQ ID NO: 2778413 - RNA, 15 nt, Human
cuggacuggcuagag

SEQ ID NO: 2778414 - RNA, 19 nt, Human
cuggaacuccuaaaccuuu

SEQ ID NO: 2778415 - RNA, 19 nt, Human
cuggaacucuaucugggcc

SEQ ID NO: 2778416 - RNA, 20 nt, Human
cuggaacucuaucugggccu

SEQ ID NO: 2778417 - RNA, 22 nt, Human
cuggaacucuaucugggccugg

SEQ ID NO: 2778418 - RNA, 23 nt, Human
cuggaacucuaucugggccuggg

SEQ ID NO: 2778419 - RNA, 16 nt, Human
cugcuucagccucccg

SEQ ID NO: 2778420 - RNA, 14 nt, Human
cugcuucagccucc

SEQ ID NO: 2778421 - RNA, 13 nt, Human
cugcuucagccuc

SEQ ID NO: 2778422 - RNA, 23 nt, Human
cugcuucagauguggagccaggc

SEQ ID NO: 2778423 - RNA, 20 nt, Human
cugcugacagacacaggccc

SEQ ID NO: 2778424 - RNA, 19 nt, Human
cugcugacagacacaggcc

SEQ ID NO: 2778425 - RNA, 18 nt, Human
cugcugacagacacaggc

SEQ ID NO: 2778426 - RNA, 15 nt, Human
cugcugacagacaca

SEQ ID NO: 2778427 - RNA, 23 nt, Human
cugcugacagacacaggcccggc

SEQ ID NO: 2778428 - RNA, 21 nt, Human
cugcugacagacacaggcccg

SEQ ID NO: 2778429 - RNA, 18 nt, Human
cugcucagcaaccuuuca

SEQ ID NO: 2778430 - RNA, 18 nt, Human
cugccucgaacuggcugc

SEQ ID NO: 2778431 - RNA, 17 nt, Human
cugccucgaacuggcug

SEQ ID NO: 2778432 - RNA, 15 nt, Human
cugccucgaacuggc

SEQ ID NO: 2778433 - RNA, 15 nt, Human
cugccuguucagcuc

SEQ ID NO: 2778434 - RNA, 14 nt, Human
cugccuguucagcu

SEQ ID NO: 2778435 - RNA, 22 nt, Human
cugccuguuaggagaagcugca

SEQ ID NO: 2778436 - RNA, 14 nt, Human
cugccugugcugug

SEQ ID NO: 2778437 - RNA, 12 nt, Human
cugccugugcug

SEQ ID NO: 2778438 - RNA, 12 nt, Human
cugccugggcug

SEQ ID NO: 2778439 - RNA, 23 nt, Human
cugccugggcugaccccgguggc

SEQ ID NO: 2778440 - RNA, 11 nt, Human
cugccugggcu

SEQ ID NO: 2778441 - RNA, 22 nt, Human
cugccuggguuccaauccuggc

SEQ ID NO: 2778442 - RNA, 21 nt, Human
cugcuaccguugacuuccagg

SEQ ID NO: 2778443 - RNA, 16 nt, Human
cugcuacacauacagg

SEQ ID NO: 2778444 - RNA, 17 nt, Human
cugcuacccagaaauca

SEQ ID NO: 2778445 - RNA, 15 nt, Human
cugcuacccuagaug

SEQ ID NO: 2778446 - RNA, 11 nt, Human
cugcucagcca

SEQ ID NO: 2778447 - RNA, 15 nt, Human
cugcucagccaagcu

SEQ ID NO: 2778448 - RNA, 16 nt, Human
cugcucagccaagcuu

SEQ ID NO: 2778449 - RNA, 12 nt, Human
cugcucacuuua

SEQ ID NO: 2778450 - RNA, 18 nt, Human
cugcucacuuuaaaccug

SEQ ID NO: 2778451 - RNA, 13 nt, Human
cugcucagacaga

SEQ ID NO: 2778452 - RNA, 16 nt, Human
cugcuaauuccccaga

SEQ ID NO: 2778453 - RNA, 20 nt, Human
cugagacucacaggaaggag

SEQ ID NO: 2778454 - RNA, 14 nt, Human
cugaccuuggagag

SEQ ID NO: 2778455 - RNA, 19 nt, Human
cugaccuuggagagacaca

SEQ ID NO: 2778456 - RNA, 20 nt, Human
cugaccuuggagagacacag

SEQ ID NO: 2778457 - RNA, 21 nt, Human
cugaccuuggagagacacagc

SEQ ID NO: 2778458 - RNA, 15 nt, Human
cugccaaggccagag

SEQ ID NO: 2778459 - RNA, 22 nt, Human
cugccaacuucuucagagcuga

SEQ ID NO: 2778460 - RNA, 12 nt, Human
cugccaagagag

SEQ ID NO: 2778461 - RNA, 22 nt, Human
cugccaaggccagaguggccug

SEQ ID NO: 2778462 - RNA, 21 nt, Human
cugccaaggccagaguggccu

SEQ ID NO: 2778463 - RNA, 18 nt, Human
cugccaaggccagagugg

SEQ ID NO: 2778464 - RNA, 15 nt, Human
cugcauuuuucugca

SEQ ID NO: 2778465 - RNA, 16 nt, Human
cugcauuuuucugcag

SEQ ID NO: 2778466 - RNA, 17 nt, Human
cugcauuuuucugcaga

SEQ ID NO: 2778467 - RNA, 21 nt, Human
cugccaaagggaaauaucauu

SEQ ID NO: 2778468 - RNA, 21 nt, Human
cugccaacuucuucagagcug

SEQ ID NO: 2778469 - RNA, 14 nt, Human
cugcauuucugagu

SEQ ID NO: 2778470 - RNA, 18 nt, Human
cugcauuuucaccccacc

SEQ ID NO: 2778471 - RNA, 17 nt, Human
cugcauuuucaccccac

SEQ ID NO: 2778472 - RNA, 14 nt, Human
cugcauuugugaaa

SEQ ID NO: 2778473 - RNA, 15 nt, Human
cugcauuugugaaau

SEQ ID NO: 2778474 - RNA, 17 nt, Human
cugcauuugugaaauga

SEQ ID NO: 2778475 - RNA, 22 nt, Human
cugcauuugugaaaugauggug

SEQ ID NO: 2778476 - RNA, 12 nt, Human
cugcauuagaaa

SEQ ID NO: 2778477 - RNA, 13 nt, Human
cugcauuagaaaa

SEQ ID NO: 2778478 - RNA, 14 nt, Human
cugcauuagaaaaa

SEQ ID NO: 2778479 - RNA, 15 nt, Human
cugcauuagaaaaag

SEQ ID NO: 2778480 - RNA, 21 nt, Human
cugcauguggcuuuuuuaaaa

SEQ ID NO: 2778481 - RNA, 22 nt, Human
cugcauguggcuuuuuuaaaaa

SEQ ID NO: 2778482 - RNA, 15 nt, Human
cugcauuauucucuu

SEQ ID NO: 2778483 - RNA, 17 nt, Human
cugcauuauucucuuuu

SEQ ID NO: 2778484 - RNA, 18 nt, Human
cugcauuauucucuuuua

SEQ ID NO: 2778485 - RNA, 13 nt, Human
cugcauuucugag

SEQ ID NO: 2778486 - RNA, 13 nt, Human
cugcauuugugaa

SEQ ID NO: 2778487 - RNA, 20 nt, Human
cugcauucaggaucaaaccc

SEQ ID NO: 2778488 - RNA, 21 nt, Human
cugcauucugccucucuagga

SEQ ID NO: 2778489 - RNA, 17 nt, Human
cugcauugcuagauaaa

SEQ ID NO: 2778490 - RNA, 18 nt, Human
cugcauugcuagauaaaa

SEQ ID NO: 2778491 - RNA, 19 nt, Human
cugcauugcuagauaaaag

SEQ ID NO: 2778492 - RNA, 21 nt, Human
cugcauugcuagauaaaagcu

SEQ ID NO: 2778493 - RNA, 17 nt, Human
cugcauugcccagucuu

SEQ ID NO: 2778494 - RNA, 18 nt, Human
cugcccccucugcccugc

SEQ ID NO: 2778495 - RNA, 17 nt, Human
cugcccccucugcccug

SEQ ID NO: 2778496 - RNA, 16 nt, Human
cugcccccucugcccu

SEQ ID NO: 2778497 - RNA, 17 nt, Human
cugcccuggugcugcca

SEQ ID NO: 2778498 - RNA, 16 nt, Human
cugcccuggugcugcc

SEQ ID NO: 2778499 - RNA, 18 nt, Human
cugcccuggugcugccac

SEQ ID NO: 2778500 - RNA, 19 nt, Human
cugcccuggugcugccaca

SEQ ID NO: 2778501 - RNA, 22 nt, Human
cugccccucccccaacccccac

SEQ ID NO: 2778502 - RNA, 14 nt, Human
cugccccuccccca

SEQ ID NO: 2778503 - RNA, 13 nt, Human
cugccccuccccc

SEQ ID NO: 2778504 - RNA, 21 nt, Human
cugcccugguuuccugcccug

SEQ ID NO: 2778505 - RNA, 13 nt, Human
cugcccuguaccc

SEQ ID NO: 2778506 - RNA, 21 nt, Human
cugcccuguaccccagcacuu

SEQ ID NO: 2778507 - RNA, 20 nt, Human
cugcccuggugcugccacac

SEQ ID NO: 2778508 - RNA, 21 nt, Human
cugcccuggugcugccacacu

SEQ ID NO: 2778509 - RNA, 23 nt, Human
cugcccugguuuccugcccuggg

SEQ ID NO: 2778510 - RNA, 22 nt, Human
cugcccugguuuccugcccugg

SEQ ID NO: 2778511 - RNA, 23 nt, Human
cugccauauucuguuggccagug

SEQ ID NO: 2778512 - RNA, 22 nt, Human
cugccauauucuguuggccagu

SEQ ID NO: 2778513 - RNA, 21 nt, Human
cugccauauucuguuggccag

SEQ ID NO: 2778514 - RNA, 20 nt, Human
cugccauauucuguuggcca

SEQ ID NO: 2778515 - RNA, 15 nt, Human
cugccaggcccccac

SEQ ID NO: 2778516 - RNA, 19 nt, Human
cugccaggcccccaccaca

SEQ ID NO: 2778517 - RNA, 20 nt, Human
cugccaggcccccaccacac

SEQ ID NO: 2778518 - RNA, 21 nt, Human
cugccaggcccccaccacaca

SEQ ID NO: 2778519 - RNA, 22 nt, Human
cugccaggcccccaccacacau

SEQ ID NO: 2778520 - RNA, 23 nt, Human
cugccaggcccccaccacacauc

SEQ ID NO: 2778521 - RNA, 14 nt, Human
cugccaggccccca

SEQ ID NO: 2778522 - RNA, 23 nt, Human
cugccaaggccagaguggccugg

SEQ ID NO: 2778523 - RNA, 17 nt, Human
cugccaauaacauucuu

SEQ ID NO: 2778524 - RNA, 12 nt, Human
cugccauccagg

SEQ ID NO: 2778525 - RNA, 16 nt, Human
cugccccagcucuggc

SEQ ID NO: 2778526 - RNA, 19 nt, Human
cugccccagcucuggcuuc

SEQ ID NO: 2778527 - RNA, 18 nt, Human
cugccccagcucuggcuu

SEQ ID NO: 2778528 - RNA, 15 nt, Human
cugccccagcucugg

SEQ ID NO: 2778529 - RNA, 15 nt, Human
cugcccccucugccc

SEQ ID NO: 2778530 - RNA, 14 nt, Human
cugcccccucugcc

SEQ ID NO: 2778531 - RNA, 19 nt, Human
cugccccagggcucccggc

SEQ ID NO: 2778532 - RNA, 15 nt, Human
cugcauguuaccauc

SEQ ID NO: 2778533 - RNA, 23 nt, Human
cugccccagucguuagaauauag

SEQ ID NO: 2778534 - RNA, 20 nt, Human
aacuagagaugacugagucc

SEQ ID NO: 2778535 - RNA, 16 nt, Human
aacuagagaugugcaa

SEQ ID NO: 2778536 - RNA, 21 nt, Human
aacuagagaugugcaauugau

SEQ ID NO: 2778537 - RNA, 23 nt, Human
aacuagacucccaagcuggacua

SEQ ID NO: 2778538 - RNA, 20 nt, Human
aacuagacucccaagcugga

SEQ ID NO: 2778539 - RNA, 15 nt, Human
aacuacauuuaugag

SEQ ID NO: 2778540 - RNA, 14 nt, Human
aacuagaugaccuc

SEQ ID NO: 2778541 - RNA, 23 nt, Human
aacuaugagcuugcucauuaauu

SEQ ID NO: 2778542 - RNA, 11 nt, Human
aacuaucuugg

SEQ ID NO: 2778543 - RNA, 18 nt, Human
aacuaucuuggugaauuu

SEQ ID NO: 2778544 - RNA, 13 nt, Human
aacuaucuugugu

SEQ ID NO: 2778545 - RNA, 15 nt, Human
aacuaugaaaccuuu

SEQ ID NO: 2778546 - RNA, 16 nt, Human
aacuaugauuuggaaa

SEQ ID NO: 2778547 - RNA, 21 nt, Human
aacuaugauuuggaaaauaaa

SEQ ID NO: 2778548 - RNA, 17 nt, Human
aaccuucuggccuccca

SEQ ID NO: 2778549 - RNA, 16 nt, Human
aaccugugaguaaaua

SEQ ID NO: 2778550 - RNA, 18 nt, Human
aaccugugaguaaauauu

SEQ ID NO: 2778551 - RNA, 13 nt, Human
aaccuugaaugcu

SEQ ID NO: 2778552 - RNA, 14 nt, Human
aaccuugaaugcug

SEQ ID NO: 2778553 - RNA, 15 nt, Human
aaccuugaaugcugc

SEQ ID NO: 2778554 - RNA, 16 nt, Human
aaccuugaaugcugcc

SEQ ID NO: 2778555 - RNA, 17 nt, Human
aaccuugaaugcugcca

SEQ ID NO: 2778556 - RNA, 18 nt, Human
aaccuugaaugcugccag

SEQ ID NO: 2778557 - RNA, 19 nt, Human
aaccuugaaugcugccagu

SEQ ID NO: 2778558 - RNA, 20 nt, Human
aaccuugaaugcugccagug

SEQ ID NO: 2778559 - RNA, 19 nt, Human
aacuacgcuugcucauuuu

SEQ ID NO: 2778560 - RNA, 18 nt, Human
aacuacuaucucagagau

SEQ ID NO: 2778561 - RNA, 15 nt, Human
aacuacuauucaaaa

SEQ ID NO: 2778562 - RNA, 13 nt, Human
aacuacucuuuga

SEQ ID NO: 2778563 - RNA, 14 nt, Human
aacuacucuuugau

SEQ ID NO: 2778564 - RNA, 15 nt, Human
aacuacucuuugauu

SEQ ID NO: 2778565 - RNA, 16 nt, Human
aacuacucuuugauuu

SEQ ID NO: 2778566 - RNA, 11 nt, Human
aaccuugcugu

SEQ ID NO: 2778567 - RNA, 13 nt, Human
aaccuugcugucc

SEQ ID NO: 2778568 - RNA, 16 nt, Human
aaccuugcuguccuga

SEQ ID NO: 2778569 - RNA, 22 nt, Human
aacuacaugagaacaaacagau

SEQ ID NO: 2778570 - RNA, 16 nt, Human
aacuacccaaaacaag

SEQ ID NO: 2778571 - RNA, 21 nt, Human
aacuacccaaaacaagccugg

SEQ ID NO: 2778572 - RNA, 17 nt, Human
aacuacccuuaauuacu

SEQ ID NO: 2778573 - RNA, 18 nt, Human
aacuacccuuaauuacuu

SEQ ID NO: 2778574 - RNA, 21 nt, Human
aacuacccuuaauuacuuaaa

SEQ ID NO: 2778575 - RNA, 20 nt, Human
aacuaccucgcaucauugca

SEQ ID NO: 2778576 - RNA, 23 nt, Human
aacuaccucgcaucauugcagau

SEQ ID NO: 2778577 - RNA, 12 nt, Human
aacuccuggccu

SEQ ID NO: 2778578 - RNA, 19 nt, Human
aacuaucuggccauauuua

SEQ ID NO: 2778579 - RNA, 19 nt, Human
aacucuaucugggccuggg

SEQ ID NO: 2778580 - RNA, 21 nt, Human
aacucuaucugggccugggcu

SEQ ID NO: 2778581 - RNA, 19 nt, Human
aacucauuuguuaaaauua

SEQ ID NO: 2778582 - RNA, 17 nt, Human
aacucauuuuugccaua

SEQ ID NO: 2778583 - RNA, 19 nt, Human
aacucauuuuugccauaca

SEQ ID NO: 2778584 - RNA, 11 nt, Human
aacuccuuggc

SEQ ID NO: 2778585 - RNA, 12 nt, Human
aacuccuuggcc

SEQ ID NO: 2778586 - RNA, 13 nt, Human
aacuccuuggccu

SEQ ID NO: 2778587 - RNA, 23 nt, Human
gugaaccaccacacccagcccac

SEQ ID NO: 2778588 - RNA, 22 nt, Human
gugaaccaccacacccagccca

SEQ ID NO: 2778589 - RNA, 17 nt, Human
gugaacuagggaagcuc

SEQ ID NO: 2778590 - RNA, 19 nt, Human
gugaacuauuucuacacag

SEQ ID NO: 2778591 - RNA, 20 nt, Human
gugaacuauuucuacacagu

SEQ ID NO: 2778592 - RNA, 21 nt, Human
gugaacguccacaugaaaccu

SEQ ID NO: 2778593 - RNA, 15 nt, Human
gugaaccucaccccg

SEQ ID NO: 2778594 - RNA, 22 nt, Human
gugaaccucaccccgaggcccu

SEQ ID NO: 2778595 - RNA, 23 nt, Human
gugaaccucaccccgaggcccug

SEQ ID NO: 2778596 - RNA, 15 nt, Human
aacucuccagugccu

SEQ ID NO: 2778597 - RNA, 15 nt, Human
gucuuugguucagcu

SEQ ID NO: 2778598 - RNA, 22 nt, Human
gucuuuggggucuacacugcaa

SEQ ID NO: 2778599 - RNA, 15 nt, Human
gucuuugguucuaag

SEQ ID NO: 2778600 - RNA, 17 nt, Human
gucuuugguucuaagga

SEQ ID NO: 2778601 - RNA, 11 nt, Human
gucuuuguaag

SEQ ID NO: 2778602 - RNA, 18 nt, Human
gucuuuaggucuuuguaa

SEQ ID NO: 2778603 - RNA, 21 nt, Human
gucuuuaggucuuuguaagaa

SEQ ID NO: 2778604 - RNA, 22 nt, Human
gucuuuaggucuuuguaagaac

SEQ ID NO: 2778605 - RNA, 15 nt, Human
gucuuucaagaauga

SEQ ID NO: 2778606 - RNA, 15 nt, Human
gucuuucacagcucc

SEQ ID NO: 2778607 - RNA, 16 nt, Human
gucuuucacagcuccu

SEQ ID NO: 2778608 - RNA, 23 nt, Human
gucuuuaauuucugucagaaugc

SEQ ID NO: 2778609 - RNA, 18 nt, Human
gucuuuacuccucacacu

SEQ ID NO: 2778610 - RNA, 23 nt, Human
gucuucuaaacuuccccaucuuc

SEQ ID NO: 2778611 - RNA, 14 nt, Human
gucuucuaaacuuc

SEQ ID NO: 2778612 - RNA, 13 nt, Human
gucuucuaauuuc

SEQ ID NO: 2778613 - RNA, 15 nt, Human
gucuucuaauuucaa

SEQ ID NO: 2778614 - RNA, 23 nt, Human
gucuucuaauuucaaaaauauaa

SEQ ID NO: 2778615 - RNA, 19 nt, Human
gucuuuugaauauucccaa

SEQ ID NO: 2778616 - RNA, 22 nt, Human
gucuuuguaagaguguagaagc

SEQ ID NO: 2778617 - RNA, 20 nt, Human
gucuuuguaagaguguagaa

SEQ ID NO: 2778618 - RNA, 21 nt, Human
gucuuuguaagaguguagaag

SEQ ID NO: 2778619 - RNA, 15 nt, Human
gucuuuguaagucag

SEQ ID NO: 2778620 - RNA, 21 nt, Human
gucuuuguaagucaguguuga

SEQ ID NO: 2778621 - RNA, 23 nt, Human
gucuuuguaagucaguguugaga

SEQ ID NO: 2778622 - RNA, 12 nt, Human
gucuuuguaaga

SEQ ID NO: 2778623 - RNA, 13 nt, Human
gucuuuguaagag

SEQ ID NO: 2778624 - RNA, 14 nt, Human
gucuuuguaagagu

SEQ ID NO: 2778625 - RNA, 15 nt, Human
gucuuuguaagagug

SEQ ID NO: 2778626 - RNA, 15 nt, Human
gucuuuuguucgcau

SEQ ID NO: 2778627 - RNA, 17 nt, Human
gucuuuuucuguuguaa

SEQ ID NO: 2778628 - RNA, 19 nt, Human
gucuuuuucuguuguaacu

SEQ ID NO: 2778629 - RNA, 20 nt, Human
gucuuuuucuguuguaacuu

SEQ ID NO: 2778630 - RNA, 22 nt, Human
gucuuuuucuguuguaacuuau

SEQ ID NO: 2778631 - RNA, 11 nt, Human
gucuuuuugua

SEQ ID NO: 2778632 - RNA, 14 nt, Human
gucuuuuuguaagu

SEQ ID NO: 2778633 - RNA, 16 nt, Human
gucuuuuuaugcauuu

SEQ ID NO: 2778634 - RNA, 23 nt, Human
aaccuggucacaggacucugccu

SEQ ID NO: 2778635 - RNA, 22 nt, Human
aaccuguauaacccuguuacaa

SEQ ID NO: 2778636 - RNA, 13 nt, Human
aaccuguaucuuu

SEQ ID NO: 2778637 - RNA, 16 nt, Human
aaccuguaucuuucua

SEQ ID NO: 2778638 - RNA, 15 nt, Human
aaccugucuccacug

SEQ ID NO: 2778639 - RNA, 18 nt, Human
aaccugucuccacugugc

SEQ ID NO: 2778640 - RNA, 22 nt, Human
aaccugucuccacugugccuuu

SEQ ID NO: 2778641 - RNA, 24 nt, Human
aaccugucuccacugugccuuugc

SEQ ID NO: 2778642 - RNA, 23 nt, Human
aaccuguccuaaggaaccuuccu

SEQ ID NO: 2778643 - RNA, 15 nt, Human
aaccuguccuaagga

SEQ ID NO: 2778644 - RNA, 16 nt, Human
gucugguuuuaacaau

SEQ ID NO: 2778645 - RNA, 18 nt, Human
gucugguuuuaacaauuu

SEQ ID NO: 2778646 - RNA, 21 nt, Human
gucugguuuuaacaauuuccu

SEQ ID NO: 2778647 - RNA, 14 nt, Human
gucuguacacgugu

SEQ ID NO: 2778648 - RNA, 19 nt, Human
gucuguacacguguccugu

SEQ ID NO: 2778649 - RNA, 20 nt, Human
gucuguacacguguccugua

SEQ ID NO: 2778650 - RNA, 21 nt, Human
gucuguacacguguccuguag

SEQ ID NO: 2778651 - RNA, 15 nt, Human
gucuguacuaaaaau

SEQ ID NO: 2778652 - RNA, 19 nt, Human
gucuguauuuaugugugag

SEQ ID NO: 2778653 - RNA, 23 nt, Human
gucuguauuuaugugugaggagc

SEQ ID NO: 2778654 - RNA, 12 nt, Human
gucuguauuuca

SEQ ID NO: 2778655 - RNA, 14 nt, Human
gucuguauuucaug

SEQ ID NO: 2778656 - RNA, 17 nt, Human
gucuguauuucaugugg

SEQ ID NO: 2778657 - RNA, 18 nt, Human
gucuguauuucauguggc

SEQ ID NO: 2778658 - RNA, 20 nt, Human
gucuguauuucauguggcug

SEQ ID NO: 2778659 - RNA, 21 nt, Human
gucuguauuucauguggcugu

SEQ ID NO: 2778660 - RNA, 16 nt, Human
gucugucgugaugggg

SEQ ID NO: 2778661 - RNA, 13 nt, Human
gucuguccaucug

SEQ ID NO: 2778662 - RNA, 14 nt, Human
gucuguccaucugc

SEQ ID NO: 2778663 - RNA, 22 nt, Human
gucuguccaucugcccgccugc

SEQ ID NO: 2778664 - RNA, 21 nt, Human
aaccugaaaaaaaguuuacaa

SEQ ID NO: 2778665 - RNA, 19 nt, Human
aaccugacaaaaaaaaagu

SEQ ID NO: 2778666 - RNA, 11 nt, Human
aaccugacccc

SEQ ID NO: 2778667 - RNA, 11 nt, Human
aaccugaaaaa

SEQ ID NO: 2778668 - RNA, 20 nt, Human
aaccccuuaagcccuggccc

SEQ ID NO: 2778669 - RNA, 12 nt, Human
aaccccuguccc

SEQ ID NO: 2778670 - RNA, 23 nt, Human
aaccccugucccaugcaggcccu

SEQ ID NO: 2778671 - RNA, 15 nt, Human
aaccccuucucugug

SEQ ID NO: 2778672 - RNA, 16 nt, Human
aaccccuucucuguga

SEQ ID NO: 2778673 - RNA, 18 nt, Human
aaccccuucucugugacc

SEQ ID NO: 2778674 - RNA, 20 nt, Human
aaccccuucucugugaccca

SEQ ID NO: 2778675 - RNA, 21 nt, Human
aaccucauugacaagaacuga

SEQ ID NO: 2778676 - RNA, 16 nt, Human
aaccucauugacaaga

SEQ ID NO: 2778677 - RNA, 22 nt, Human
aaccuccauucuauuuuagaau

SEQ ID NO: 2778678 - RNA, 15 nt, Human
aaccucccaacccag

SEQ ID NO: 2778679 - RNA, 11 nt, Human
aaccucccaga

SEQ ID NO: 2778680 - RNA, 12 nt, Human
aaccucccagag

SEQ ID NO: 2778681 - RNA, 13 nt, Human
aaccucccagagg

SEQ ID NO: 2778682 - RNA, 17 nt, Human
aaccucccagaggucca

SEQ ID NO: 2778683 - RNA, 18 nt, Human
aaccucccagagguccag

SEQ ID NO: 2778684 - RNA, 20 nt, Human
aaccucccagagguccagcc

SEQ ID NO: 2778685 - RNA, 21 nt, Human
aaccucccagagguccagccc

SEQ ID NO: 2778686 - RNA, 23 nt, Human
aaccucccagagguccagcccau

SEQ ID NO: 2778687 - RNA, 24 nt, Human
aaccucccagagguccagcccauc

SEQ ID NO: 2778688 - RNA, 18 nt, Human
aaccucaggcuuccuugg

SEQ ID NO: 2778689 - RNA, 17 nt, Human
aacccagcaguucuguu

SEQ ID NO: 2778690 - RNA, 20 nt, Human
aacccacuugucacugacac

SEQ ID NO: 2778691 - RNA, 21 nt, Human
aacccacuugucacugacaca

SEQ ID NO: 2778692 - RNA, 22 nt, Human
aaccccgucgaggggcucucag

SEQ ID NO: 2778693 - RNA, 21 nt, Human
aaccccuacaugaaacagaaa

SEQ ID NO: 2778694 - RNA, 19 nt, Human
aacccccaccccacacuug

SEQ ID NO: 2778695 - RNA, 17 nt, Human
aaccccauguccucagc

SEQ ID NO: 2778696 - RNA, 18 nt, Human
aaccccauguccucagca

SEQ ID NO: 2778697 - RNA, 18 nt, Human
aacccccaccccacacuu

SEQ ID NO: 2778698 - RNA, 17 nt, Human
aacccccaccccacacu

SEQ ID NO: 2778699 - RNA, 15 nt, Human
aacccccaccccaca

SEQ ID NO: 2778700 - RNA, 13 nt, Human
aacccccacccca

SEQ ID NO: 2778701 - RNA, 12 nt, Human
aacccccacccc

SEQ ID NO: 2778702 - RNA, 11 nt, Human
aacccccaccc

SEQ ID NO: 2778703 - RNA, 10 nt, Human
aacccccacc

SEQ ID NO: 2778704 - RNA, 23 nt, Human
aaccauuugaaguguaccugugu

SEQ ID NO: 2778705 - RNA, 14 nt, Human
aaccauuuuauaaa

SEQ ID NO: 2778706 - RNA, 17 nt, Human
aaccauuuuauaaagug

SEQ ID NO: 2778707 - RNA, 20 nt, Human
aaccauuuuauaaagugcuu

SEQ ID NO: 2778708 - RNA, 22 nt, Human
aaccauuuuauaaagugcuugu

SEQ ID NO: 2778709 - RNA, 15 nt, Human
aacccaagcuuagaa

SEQ ID NO: 2778710 - RNA, 16 nt, Human
aacccaagcuuagaac

SEQ ID NO: 2778711 - RNA, 13 nt, Human
aacccaagcuccu

SEQ ID NO: 2778712 - RNA, 14 nt, Human
aacccaagcuccuc

SEQ ID NO: 2778713 - RNA, 15 nt, Human
aacccaagcuccucc

SEQ ID NO: 2778714 - RNA, 16 nt, Human
aacccaagcuccuccu

SEQ ID NO: 2778715 - RNA, 14 nt, Human
aacccaauccaaau

SEQ ID NO: 2778716 - RNA, 13 nt, Human
aacccaauaguug

SEQ ID NO: 2778717 - RNA, 18 nt, Human
aacccaaggacugaggga

SEQ ID NO: 2778718 - RNA, 13 nt, Human
aacccaaggagca

SEQ ID NO: 2778719 - RNA, 16 nt, Human
aacccaaggagcacag

SEQ ID NO: 2778720 - RNA, 17 nt, Human
aacccaaggagcacagg

SEQ ID NO: 2778721 - RNA, 20 nt, Human
aacccaaggagcacaggucc

SEQ ID NO: 2778722 - RNA, 21 nt, Human
aacccaaggagcacagguccc

SEQ ID NO: 2778723 - RNA, 22 nt, Human
aacccaaggagcacagguccca

SEQ ID NO: 2778724 - RNA, 17 nt, Human
aaccauuccauuuccaa

SEQ ID NO: 2778725 - RNA, 23 nt, Human
aaccauuccauuuccaagcacuu

SEQ ID NO: 2778726 - RNA, 14 nt, Human
aaccauauuuagca

SEQ ID NO: 2778727 - RNA, 13 nt, Human
aaccauaugauac

SEQ ID NO: 2778728 - RNA, 14 nt, Human
aaccauaugauacu

SEQ ID NO: 2778729 - RNA, 12 nt, Human
aaccauaugccc

SEQ ID NO: 2778730 - RNA, 21 nt, Human
aaccaccacacccagcccacu

SEQ ID NO: 2778731 - RNA, 20 nt, Human
aaccaagucaugugcauuuc

SEQ ID NO: 2778732 - RNA, 21 nt, Human
aaccaagucggaacagcagau

SEQ ID NO: 2778733 - RNA, 16 nt, Human
aacaguuagcuggagc

SEQ ID NO: 2778734 - RNA, 16 nt, Human
aacaguucauguuugc

SEQ ID NO: 2778735 - RNA, 14 nt, Human
aacaguuccuucag

SEQ ID NO: 2778736 - RNA, 23 nt, Human
aacaguucauguuugcuucauaa

SEQ ID NO: 2778737 - RNA, 19 nt, Human
aacaguuaauaccauuuuu

SEQ ID NO: 2778738 - RNA, 13 nt, Human
gucucccugggag

SEQ ID NO: 2778739 - RNA, 14 nt, Human
gucucccuucuguu

SEQ ID NO: 2778740 - RNA, 16 nt, Human
gucuccuuaacacuga

SEQ ID NO: 2778741 - RNA, 18 nt, Human
gucuccuuucaccccagg

SEQ ID NO: 2778742 - RNA, 22 nt, Human
gucuccuuaacacugagcuguc

SEQ ID NO: 2778743 - RNA, 16 nt, Human
gucuccuuuaagagcu

SEQ ID NO: 2778744 - RNA, 19 nt, Human
aaccaccacacccagccca

SEQ ID NO: 2778745 - RNA, 16 nt, Human
aaccaagucaugugca

SEQ ID NO: 2778746 - RNA, 21 nt, Human
aaccaaggaaauauauuuuac

SEQ ID NO: 2778747 - RNA, 16 nt, Human
aaccaagccguggcuu

SEQ ID NO: 2778748 - RNA, 19 nt, Human
gucucgaacuccugaccuu

SEQ ID NO: 2778749 - RNA, 20 nt, Human
aaccaagcuauuccuuuccc

SEQ ID NO: 2778750 - RNA, 18 nt, Human
aaccaagccguggcuucc

SEQ ID NO: 2778751 - RNA, 18 nt, Human
gucucgaacuccugaccu

SEQ ID NO: 2778752 - RNA, 13 nt, Human
gucucgaacuccu

SEQ ID NO: 2778753 - RNA, 20 nt, Human
gucuccuuucaccccagggc

SEQ ID NO: 2778754 - RNA, 21 nt, Human
gucuccuuucucagccacaaa

SEQ ID NO: 2778755 - RNA, 14 nt, Human
aacuguacauuuaa

SEQ ID NO: 2778756 - RNA, 18 nt, Human
aacuguacauuuaaaauu

SEQ ID NO: 2778757 - RNA, 13 nt, Human
aacuguacauuuc

SEQ ID NO: 2778758 - RNA, 23 nt, Human
aacuguacauuucacaggcuaau

SEQ ID NO: 2778759 - RNA, 18 nt, Human
aacuguacuuuuaaggca

SEQ ID NO: 2778760 - RNA, 23 nt, Human
aacuggguaaaugcaaaguucug

SEQ ID NO: 2778761 - RNA, 18 nt, Human
aacuggugcacuuuguaa

SEQ ID NO: 2778762 - RNA, 20 nt, Human
aacuggugcacuuuguaaau

SEQ ID NO: 2778763 - RNA, 21 nt, Human
aacuggugcacuuuguaaauu

SEQ ID NO: 2778764 - RNA, 17 nt, Human
aacuguaacguuuucuu

SEQ ID NO: 2778765 - RNA, 13 nt, Human
aacuguaaauaaa

SEQ ID NO: 2778766 - RNA, 20 nt, Human
aacuguaaaaaaugugugua

SEQ ID NO: 2778767 - RNA, 18 nt, Human
aacuucccagugaauucu

SEQ ID NO: 2778768 - RNA, 12 nt, Human
aacuucauucuc

SEQ ID NO: 2778769 - RNA, 19 nt, Human
aacuuccagguguuacugu

SEQ ID NO: 2778770 - RNA, 11 nt, Human
aacuucccuga

SEQ ID NO: 2778771 - RNA, 22 nt, Human
aacuuccagguguuacuguaau

SEQ ID NO: 2778772 - RNA, 18 nt, Human
aacuuccccaucuucuaa

SEQ ID NO: 2778773 - RNA, 17 nt, Human
aacuuccccaucuucua

SEQ ID NO: 2778774 - RNA, 14 nt, Human
aacuucauguaacu

SEQ ID NO: 2778775 - RNA, 20 nt, Human
aacuucauauaugaggacuu

SEQ ID NO: 2778776 - RNA, 21 nt, Human
aacuucaggauaauaaagugu

SEQ ID NO: 2778777 - RNA, 13 nt, Human
aacuucaguccug

SEQ ID NO: 2778778 - RNA, 15 nt, Human
aacuucaguccuggg

SEQ ID NO: 2778779 - RNA, 20 nt, Human
aacuguagauaaagugguuu

SEQ ID NO: 2778780 - RNA, 14 nt, Human
aacuguauauauuc

SEQ ID NO: 2778781 - RNA, 20 nt, Human
aacuguagaugauguauuuu

SEQ ID NO: 2778782 - RNA, 11 nt, Human
aacuguaucuu

SEQ ID NO: 2778783 - RNA, 13 nt, Human
aacuguaucuuga

SEQ ID NO: 2778784 - RNA, 17 nt, Human
aacuucagcuguacuuc

SEQ ID NO: 2778785 - RNA, 19 nt, Human
gugaugcuugauauuuucu

SEQ ID NO: 2778786 - RNA, 13 nt, Human
gugaugcggcaga

SEQ ID NO: 2778787 - RNA, 16 nt, Human
gugaugggcuuucucu

SEQ ID NO: 2778788 - RNA, 14 nt, Human
gugauggggcaagg

SEQ ID NO: 2778789 - RNA, 12 nt, Human
gugaugcggcag

SEQ ID NO: 2778790 - RNA, 21 nt, Human
aacuucuucuccaucccucua

SEQ ID NO: 2778791 - RNA, 19 nt, Human
aacuucuucagagcugaca

SEQ ID NO: 2778792 - RNA, 11 nt, Human
aacuucuucag

SEQ ID NO: 2778793 - RNA, 14 nt, Human
aacuucucucagac

SEQ ID NO: 2778794 - RNA, 19 nt, Human
aacuucucuugcuuucuau

SEQ ID NO: 2778795 - RNA, 15 nt, Human
aacuucuuauggaau

SEQ ID NO: 2778796 - RNA, 13 nt, Human
aacuucuuaaaua

SEQ ID NO: 2778797 - RNA, 15 nt, Human
aacuucuuaaauauc

SEQ ID NO: 2778798 - RNA, 17 nt, Human
aacuucuuaaauaucuu

SEQ ID NO: 2778799 - RNA, 18 nt, Human
aacuucuuaaauaucuuu

SEQ ID NO: 2778800 - RNA, 20 nt, Human
aacuucuuaaauaucuuuua

SEQ ID NO: 2778801 - RNA, 24 nt, Human
aacuucuuauggaauugauuugca

SEQ ID NO: 2778802 - RNA, 19 nt, Human
aacuucuuauggaauugau

SEQ ID NO: 2778803 - RNA, 17 nt, Human
aacuucuuauggaauug

SEQ ID NO: 2778804 - RNA, 16 nt, Human
aacuucuuauggaauu

SEQ ID NO: 2778805 - RNA, 12 nt, Human
gugaugagcuga

SEQ ID NO: 2778806 - RNA, 13 nt, Human
gugaugacauauu

SEQ ID NO: 2778807 - RNA, 15 nt, Human
gugaugaacuuucuc

SEQ ID NO: 2778808 - RNA, 15 nt, Human
gugaugauguaauug

SEQ ID NO: 2778809 - RNA, 23 nt, Human
gugccacuuuacccaccuagaac

SEQ ID NO: 2778810 - RNA, 23 nt, Human
gugccuccagaggggcucagguc

SEQ ID NO: 2778811 - RNA, 22 nt, Human
gugccucggcuuuucucagcug

SEQ ID NO: 2778812 - RNA, 15 nt, Human
gugccugucccaccc

SEQ ID NO: 2778813 - RNA, 20 nt, Human
gugccugucccacccccacc

SEQ ID NO: 2778814 - RNA, 23 nt, Human
gugcauguaugucuuggacacug

SEQ ID NO: 2778815 - RNA, 14 nt, Human
gugcauguccuuug

SEQ ID NO: 2778816 - RNA, 14 nt, Human
gugcauguguguau

SEQ ID NO: 2778817 - RNA, 18 nt, Human
gugcauuagcacagauuu

SEQ ID NO: 2778818 - RNA, 21 nt, Human
gugcauuagcacagauuuuaa

SEQ ID NO: 2778819 - RNA, 22 nt, Human
gugcauuagcacagauuuuaau

SEQ ID NO: 2778820 - RNA, 23 nt, Human
gugcauuagcacagauuuuaauu

SEQ ID NO: 2778821 - RNA, 12 nt, Human
gugcauucuccu

SEQ ID NO: 2778822 - RNA, 18 nt, Human
gugccacaacgccuggcu

SEQ ID NO: 2778823 - RNA, 19 nt, Human
gugccacagaguguagcca

SEQ ID NO: 2778824 - RNA, 19 nt, Human
gugccacugcacuccaggc

SEQ ID NO: 2778825 - RNA, 15 nt, Human
gugcaagccccugcu

SEQ ID NO: 2778826 - RNA, 19 nt, Human
gugcaagcgacgacagaug

SEQ ID NO: 2778827 - RNA, 22 nt, Human
gugcaacccaaggacugaggga

SEQ ID NO: 2778828 - RNA, 14 nt, Human
gugaugguuccccu

SEQ ID NO: 2778829 - RNA, 16 nt, Human
gugaugguuccccugu

SEQ ID NO: 2778830 - RNA, 16 nt, Human
gugcaacgccgugggc

SEQ ID NO: 2778831 - RNA, 13 nt, Human
gugcaacugacac

SEQ ID NO: 2778832 - RNA, 13 nt, Human
gugcaaccucugc

SEQ ID NO: 2778833 - RNA, 17 nt, Human
gugcaaccucugcuucc

SEQ ID NO: 2778834 - RNA, 21 nt, Human
gugcaaccucugcuucccagg

SEQ ID NO: 2778835 - RNA, 23 nt, Human
gugcaacccuuaccccuuagccu

SEQ ID NO: 2778836 - RNA, 13 nt, Human
gugcaacccaagg

SEQ ID NO: 2778837 - RNA, 14 nt, Human
gugcaacccuuacc

SEQ ID NO: 2778838 - RNA, 21 nt, Human
gugcacacaccagagcccacc

SEQ ID NO: 2778839 - RNA, 11 nt, Human
gugcacacaga

SEQ ID NO: 2778840 - RNA, 21 nt, Human
gugcacacagaaauauauaua

SEQ ID NO: 2778841 - RNA, 22 nt, Human
gugcacacagaaauauauauac

SEQ ID NO: 2778842 - RNA, 23 nt, Human
gugcacacagaaauauauauaca

SEQ ID NO: 2778843 - RNA, 15 nt, Human
gugcacaaauauuua

SEQ ID NO: 2778844 - RNA, 13 nt, Human
gugcacaaaauga

SEQ ID NO: 2778845 - RNA, 18 nt, Human
gugcaauuucaagguucu

SEQ ID NO: 2778846 - RNA, 19 nt, Human
gugcaauuucaagguucua

SEQ ID NO: 2778847 - RNA, 20 nt, Human
gugcaauuucaagguucuaa

SEQ ID NO: 2778848 - RNA, 16 nt, Human
gugcauguaugucuug

SEQ ID NO: 2778849 - RNA, 16 nt, Human
gugcauggaggcccuc

SEQ ID NO: 2778850 - RNA, 21 nt, Human
gugcauggaggcccuccugug

SEQ ID NO: 2778851 - RNA, 11 nt, Human
gugcacagcug

SEQ ID NO: 2778852 - RNA, 12 nt, Human
gugcacagcugu

SEQ ID NO: 2778853 - RNA, 13 nt, Human
gugcacagcuguc

SEQ ID NO: 2778854 - RNA, 14 nt, Human
gugcacagcugucc

SEQ ID NO: 2778855 - RNA, 21 nt, Human
aacuggguacuuguggacaca

SEQ ID NO: 2778856 - RNA, 16 nt, Human
aacuggguacuugugg

SEQ ID NO: 2778857 - RNA, 11 nt, Human
aacuggcugca

SEQ ID NO: 2778858 - RNA, 19 nt, Human
aacuggcaauugucuauuu

SEQ ID NO: 2778859 - RNA, 20 nt, Human
aacuggccccggaucagagc

SEQ ID NO: 2778860 - RNA, 21 nt, Human
aacuggccccggaucagagca

SEQ ID NO: 2778861 - RNA, 14 nt, Human
aacuggagucugga

SEQ ID NO: 2778862 - RNA, 16 nt, Human
aacuggagucuggagu

SEQ ID NO: 2778863 - RNA, 20 nt, Human
aacuggagucuggagugggc

SEQ ID NO: 2778864 - RNA, 10 nt, Human
aacugcagca

SEQ ID NO: 2778865 - RNA, 20 nt, Human
aacugcagcaaucuuugaaa

SEQ ID NO: 2778866 - RNA, 22 nt, Human
aacugcagcaaucuuugaaaga

SEQ ID NO: 2778867 - RNA, 14 nt, Human
aacugcaaagaaag

SEQ ID NO: 2778868 - RNA, 17 nt, Human
aacugcaauaacuucug

SEQ ID NO: 2778869 - RNA, 18 nt, Human
aacugcaauaacuucuga

SEQ ID NO: 2778870 - RNA, 19 nt, Human
aacugcaauaacuucugac

SEQ ID NO: 2778871 - RNA, 21 nt, Human
aacugcaauaacuucugaccu

SEQ ID NO: 2778872 - RNA, 17 nt, Human
aacugcacaugaagaaa

SEQ ID NO: 2778873 - RNA, 19 nt, Human
aacugcacaugaagaaaua

SEQ ID NO: 2778874 - RNA, 21 nt, Human
aacugcacaugaagaaauacu

SEQ ID NO: 2778875 - RNA, 20 nt, Human
aacugccucgaaacacagaa

SEQ ID NO: 2778876 - RNA, 20 nt, Human
aacugcuggacgucuuucuu

SEQ ID NO: 2778877 - RNA, 23 nt, Human
aacugcuggacgucuuucuuuuu

SEQ ID NO: 2778878 - RNA, 14 nt, Human
aacuggaauaagaa

SEQ ID NO: 2778879 - RNA, 15 nt, Human
aacuggaauaagaag

SEQ ID NO: 2778880 - RNA, 21 nt, Human
aacuggaauaagaagcaaaua

SEQ ID NO: 2778881 - RNA, 14 nt, Human
aacuggaauuaaaa

SEQ ID NO: 2778882 - RNA, 20 nt, Human
aacuggaauuaaaaggauag

SEQ ID NO: 2778883 - RNA, 19 nt, Human
aacuggaacggugaaggug

SEQ ID NO: 2778884 - RNA, 20 nt, Human
aacugcuuuuuuuuuuccag

SEQ ID NO: 2778885 - RNA, 22 nt, Human
aacugcuuuuuuuuuuccagca

SEQ ID NO: 2778886 - RNA, 13 nt, Human
aacugaaagugaa

SEQ ID NO: 2778887 - RNA, 19 nt, Human
aacugaaaaucuaauauua

SEQ ID NO: 2778888 - RNA, 21 nt, Human
aacugaaaacucccauuuacg

SEQ ID NO: 2778889 - RNA, 13 nt, Human
aacugaaaagaga

SEQ ID NO: 2778890 - RNA, 14 nt, Human
aacugaaaagagag

SEQ ID NO: 2778891 - RNA, 15 nt, Human
aacugaaaagagagc

SEQ ID NO: 2778892 - RNA, 19 nt, Human
aacugaaaagagagcagag

SEQ ID NO: 2778893 - RNA, 20 nt, Human
aacugaaaagagagcagaga

SEQ ID NO: 2778894 - RNA, 21 nt, Human
aacugaaaagagagcagagaa

SEQ ID NO: 2778895 - RNA, 22 nt, Human
aacugaaaagagagcagagaau

SEQ ID NO: 2778896 - RNA, 15 nt, Human
aacucuuaucucagu

SEQ ID NO: 2778897 - RNA, 14 nt, Human
aacucuuaucucag

SEQ ID NO: 2778898 - RNA, 13 nt, Human
aacucuuaucuca

SEQ ID NO: 2778899 - RNA, 17 nt, Human
aacucuuagaaaugaag

SEQ ID NO: 2778900 - RNA, 13 nt, Human
aacucuuaaaaau

SEQ ID NO: 2778901 - RNA, 22 nt, Human
gugagucgaggacagggaggug

SEQ ID NO: 2778902 - RNA, 15 nt, Human
gugagucgaggacag

SEQ ID NO: 2778903 - RNA, 13 nt, Human
gugagugagccug

SEQ ID NO: 2778904 - RNA, 17 nt, Human
gugagucuuugguucua

SEQ ID NO: 2778905 - RNA, 19 nt, Human
gugagucuuugguucuaag

SEQ ID NO: 2778906 - RNA, 20 nt, Human
aacucugacaacagacuucu

SEQ ID NO: 2778907 - RNA, 14 nt, Human
gugagugagccugg

SEQ ID NO: 2778908 - RNA, 15 nt, Human
gugagugagccuggc

SEQ ID NO: 2778909 - RNA, 18 nt, Human
gugagugagccuggcucu

SEQ ID NO: 2778910 - RNA, 12 nt, Human
gugagugccuuu

SEQ ID NO: 2778911 - RNA, 13 nt, Human
gugagugccuuuu

SEQ ID NO: 2778912 - RNA, 17 nt, Human
gugagugccuuuugcag

SEQ ID NO: 2778913 - RNA, 23 nt, Human
aacucugacaacagacuucugaa

SEQ ID NO: 2778914 - RNA, 22 nt, Human
aacucugacaacagacuucuga

SEQ ID NO: 2778915 - RNA, 12 nt, Human
aacucugagccc

SEQ ID NO: 2778916 - RNA, 13 nt, Human
aacucugagccca

SEQ ID NO: 2778917 - RNA, 14 nt, Human
aacucugagcccau

SEQ ID NO: 2778918 - RNA, 15 nt, Human
aacucugacaagggc

SEQ ID NO: 2778919 - RNA, 17 nt, Human
aacucugacaagggcug

SEQ ID NO: 2778920 - RNA, 19 nt, Human
aacucugacaagggcugac

SEQ ID NO: 2778921 - RNA, 21 nt, Human
aacucugacaagggcugaccu

SEQ ID NO: 2778922 - RNA, 22 nt, Human
aacucugacaagggcugaccug

SEQ ID NO: 2778923 - RNA, 12 nt, Human
gugaacuuguag

SEQ ID NO: 2778924 - RNA, 13 nt, Human
gugaacuuguagc

SEQ ID NO: 2778925 - RNA, 15 nt, Human
gugaacuuguagcug

SEQ ID NO: 2778926 - RNA, 18 nt, Human
gugaacuuguagcuguaa

SEQ ID NO: 2778927 - RNA, 20 nt, Human
gugaacuuguagcuguaaaa

SEQ ID NO: 2778928 - RNA, 21 nt, Human
gugaacuuguagcuguaaaac

SEQ ID NO: 2778929 - RNA, 22 nt, Human
gugagaugagggaugggccugg

SEQ ID NO: 2778930 - RNA, 18 nt, Human
gugaaccacuucauucug

SEQ ID NO: 2778931 - RNA, 13 nt, Human
gugaacugaaauu

SEQ ID NO: 2778932 - RNA, 12 nt, Human
gugagauuuuuu

SEQ ID NO: 2778933 - RNA, 13 nt, Human
gugagauuuuuua

SEQ ID NO: 2778934 - RNA, 14 nt, Human
gugagauuuuuuau

SEQ ID NO: 2778935 - RNA, 15 nt, Human
gugagauuuuuuauu

SEQ ID NO: 2778936 - RNA, 18 nt, Human
gugagauuuuuuauugcu

SEQ ID NO: 2778937 - RNA, 19 nt, Human
gugagauuuuuuauugcua

SEQ ID NO: 2778938 - RNA, 21 nt, Human
gugagauuuuuuauugcuagu

SEQ ID NO: 2778939 - RNA, 15 nt, Human
gugagaugcuggaga

SEQ ID NO: 2778940 - RNA, 17 nt, Human
gugagaugcuggagaag

SEQ ID NO: 2778941 - RNA, 18 nt, Human
gugagaugcuggagaaga

SEQ ID NO: 2778942 - RNA, 19 nt, Human
gugagaugcuggagaagag

SEQ ID NO: 2778943 - RNA, 20 nt, Human
gugagaugcuggagaagaga

SEQ ID NO: 2778944 - RNA, 21 nt, Human
gugagggguauaucugggcug

SEQ ID NO: 2778945 - RNA, 15 nt, Human
gugagggucccaugu

SEQ ID NO: 2778946 - RNA, 16 nt, Human
gugagggucccaugug

SEQ ID NO: 2778947 - RNA, 22 nt, Human
gugagaugcuggagaagagagg

SEQ ID NO: 2778948 - RNA, 13 nt, Human
gugaggccccugg

SEQ ID NO: 2778949 - RNA, 11 nt, Human
gugaggccugu

SEQ ID NO: 2778950 - RNA, 14 nt, Human
gugaggccugucug

SEQ ID NO: 2778951 - RNA, 15 nt, Human
gugaggccugucugu

SEQ ID NO: 2778952 - RNA, 21 nt, Human
gugagcaagaagucaaaguaa

SEQ ID NO: 2778953 - RNA, 22 nt, Human
aaauuuugcuuuuaauuaaaua

SEQ ID NO: 2778954 - RNA, 12 nt, Human
aaauuuugcaaa

SEQ ID NO: 2778955 - RNA, 13 nt, Human
aaauuuugcaaau

SEQ ID NO: 2778956 - RNA, 14 nt, Human
aaauuuugcaaaua

SEQ ID NO: 2778957 - RNA, 15 nt, Human
aaauuuugcaaauau

SEQ ID NO: 2778958 - RNA, 16 nt, Human
aaauuuugcaaauaua

SEQ ID NO: 2778959 - RNA, 20 nt, Human
aaauuuugcaaauauaaaca

SEQ ID NO: 2778960 - RNA, 20 nt, Human
aaauuuucuagacuuucugu

SEQ ID NO: 2778961 - RNA, 17 nt, Human
aaauuuucuugauuuga

SEQ ID NO: 2778962 - RNA, 16 nt, Human
aaauuuuauuuugugc

SEQ ID NO: 2778963 - RNA, 14 nt, Human
aaauuuucuagacu

SEQ ID NO: 2778964 - RNA, 18 nt, Human
aaauuuucuagacuuucu

SEQ ID NO: 2778965 - RNA, 19 nt, Human
aaauuuucuagacuuucug

SEQ ID NO: 2778966 - RNA, 15 nt, Human
aaauuuuaguccaaa

SEQ ID NO: 2778967 - RNA, 13 nt, Human
aaauuuuauuccu

SEQ ID NO: 2778968 - RNA, 12 nt, Human
aaauuuuauucc

SEQ ID NO: 2778969 - RNA, 14 nt, Human
aaauuuuaauuuau

SEQ ID NO: 2778970 - RNA, 21 nt, Human
aaauuuuauaaaauuaagcaa

SEQ ID NO: 2778971 - RNA, 22 nt, Human
aaauuuuauaagcaaauuucaa

SEQ ID NO: 2778972 - RNA, 22 nt, Human
aacaagaugcuggaugucugcc

SEQ ID NO: 2778973 - RNA, 12 nt, Human
aacaagauuucc

SEQ ID NO: 2778974 - RNA, 20 nt, Human
aacaagauuuccuugugcaa

SEQ ID NO: 2778975 - RNA, 19 nt, Human
aacaagagcacuacauuca

SEQ ID NO: 2778976 - RNA, 19 nt, Human
aacaagaccccgucucaaa

SEQ ID NO: 2778977 - RNA, 20 nt, Human
aaauuuuuguaguagcguuu

SEQ ID NO: 2778978 - RNA, 16 nt, Human
aaauuuuuuaaaagag

SEQ ID NO: 2778979 - RNA, 18 nt, Human
aaauuuuuuaaaagagac

SEQ ID NO: 2778980 - RNA, 14 nt, Human
aaauuuuuuugguc

SEQ ID NO: 2778981 - RNA, 23 nt, Human
aaauuuuuuuggucuuuuuguaa

SEQ ID NO: 2778982 - RNA, 18 nt, Human
aacaagccaagaaagaug

SEQ ID NO: 2778983 - RNA, 14 nt, Human
aacaagcccaaagc

SEQ ID NO: 2778984 - RNA, 19 nt, Human
aacaagcaagcucccaagg

SEQ ID NO: 2778985 - RNA, 21 nt, Human
aacaagugaaauaacaaaaug

SEQ ID NO: 2778986 - RNA, 23 nt, Human
aacaagugaaauaacaaaaugga

SEQ ID NO: 2778987 - RNA, 17 nt, Human
aacaaguuuuaauguau

SEQ ID NO: 2778988 - RNA, 20 nt, Human
aacaaguuuuaauguauagu

SEQ ID NO: 2778989 - RNA, 13 nt, Human
aacaauguuaagg

SEQ ID NO: 2778990 - RNA, 18 nt, Human
aacaauguuaaggaaacu

SEQ ID NO: 2778991 - RNA, 21 nt, Human
aacaauguuaaggaaacucuu

SEQ ID NO: 2778992 - RNA, 22 nt, Human
aacaauguuaaggaaacucuua

SEQ ID NO: 2778993 - RNA, 17 nt, Human
aacaaguuuuucuguca

SEQ ID NO: 2778994 - RNA, 15 nt, Human
aacaauaaaacauua

SEQ ID NO: 2778995 - RNA, 16 nt, Human
aacaauaaaacauuau

SEQ ID NO: 2778996 - RNA, 17 nt, Human
aacaauaaaacauuaug

SEQ ID NO: 2778997 - RNA, 17 nt, Human
aaauuuuuguaguagcg

SEQ ID NO: 2778998 - RNA, 14 nt, Human
aacaauaaagagau

SEQ ID NO: 2778999 - RNA, 12 nt, Human
aacaauguuaag

SEQ ID NO: 2779000 - RNA, 11 nt, Human
aacaauguuaa

SEQ ID NO: 2779001 - RNA, 14 nt, Human
gucacagccuccuc

SEQ ID NO: 2779002 - RNA, 16 nt, Human
gucacagccuccucug

SEQ ID NO: 2779003 - RNA, 15 nt, Human
gucagaaugcuauug

SEQ ID NO: 2779004 - RNA, 21 nt, Human
gucacagccuccucugucugc

SEQ ID NO: 2779005 - RNA, 23 nt, Human
gucacagccuccucugucugccc

SEQ ID NO: 2779006 - RNA, 21 nt, Human
gucacacaguauuacuucugc

SEQ ID NO: 2779007 - RNA, 22 nt, Human
gucacacaguauuacuucugcu

SEQ ID NO: 2779008 - RNA, 13 nt, Human
gucacaccagcca

SEQ ID NO: 2779009 - RNA, 13 nt, Human
gucaggccugugu

SEQ ID NO: 2779010 - RNA, 15 nt, Human
gucaggccugugugu

SEQ ID NO: 2779011 - RNA, 23 nt, Human
gucaggccugugugugaaaggaa

SEQ ID NO: 2779012 - RNA, 21 nt, Human
gucaggcccuuauuuucaaga

SEQ ID NO: 2779013 - RNA, 11 nt, Human
gucaggcccug

SEQ ID NO: 2779014 - RNA, 12 nt, Human
gucaggcccugg

SEQ ID NO: 2779015 - RNA, 13 nt, Human
gucaggcccugga

SEQ ID NO: 2779016 - RNA, 15 nt, Human
gucaggcccuggaac

SEQ ID NO: 2779017 - RNA, 13 nt, Human
gucaggcccuggu

SEQ ID NO: 2779018 - RNA, 22 nt, Human
gucaggcccuuauuuucaagaa

SEQ ID NO: 2779019 - RNA, 18 nt, Human
gucagacagaacuugaau

SEQ ID NO: 2779020 - RNA, 12 nt, Human
gucagacauaaa

SEQ ID NO: 2779021 - RNA, 13 nt, Human
gucagacauaaag

SEQ ID NO: 2779022 - RNA, 14 nt, Human
gucagacauaaagc

SEQ ID NO: 2779023 - RNA, 15 nt, Human
gucagacauaaagcc

SEQ ID NO: 2779024 - RNA, 16 nt, Human
gucagacauaaagcca

SEQ ID NO: 2779025 - RNA, 17 nt, Human
gucagacauaaagccau

SEQ ID NO: 2779026 - RNA, 20 nt, Human
gucagacauaaagccauguu

SEQ ID NO: 2779027 - RNA, 18 nt, Human
gucagacauccauguuug

SEQ ID NO: 2779028 - RNA, 20 nt, Human
gucagacauccauguuugua

SEQ ID NO: 2779029 - RNA, 23 nt, Human
gucaggaguucgagaccagccug

SEQ ID NO: 2779030 - RNA, 14 nt, Human
gucaggcagccagu

SEQ ID NO: 2779031 - RNA, 20 nt, Human
gucaggcagccagugagaug

SEQ ID NO: 2779032 - RNA, 13 nt, Human
gucaguuucuaca

SEQ ID NO: 2779033 - RNA, 18 nt, Human
aaauuuguggguuuuuuu

SEQ ID NO: 2779034 - RNA, 23 nt, Human
aaauuugucuugccuuauuaaag

SEQ ID NO: 2779035 - RNA, 14 nt, Human
aaauuuguuugaaa

SEQ ID NO: 2779036 - RNA, 18 nt, Human
aaauuuguuugaaaucuu

SEQ ID NO: 2779037 - RNA, 20 nt, Human
aaauuuggggacagauucag

SEQ ID NO: 2779038 - RNA, 21 nt, Human
aaauuuggggacagauucagu

SEQ ID NO: 2779039 - RNA, 14 nt, Human
aaauuugauuucua

SEQ ID NO: 2779040 - RNA, 13 nt, Human
aaauuugcuagca

SEQ ID NO: 2779041 - RNA, 14 nt, Human
aaauuugcuagcag

SEQ ID NO: 2779042 - RNA, 17 nt, Human
aaauuugauugauuuga

SEQ ID NO: 2779043 - RNA, 22 nt, Human
aaauuugauuuacauauauuau

SEQ ID NO: 2779044 - RNA, 15 nt, Human
aaauuugauugauuu

SEQ ID NO: 2779045 - RNA, 22 nt, Human
aaauuuguaaguuucaggugac

SEQ ID NO: 2779046 - RNA, 12 nt, Human
aaauuuguaagu

SEQ ID NO: 2779047 - RNA, 13 nt, Human
aaauuuguaaguu

SEQ ID NO: 2779048 - RNA, 14 nt, Human
aaauuuguaaguuu

SEQ ID NO: 2779049 - RNA, 15 nt, Human
aaauuuguaaguuuc

SEQ ID NO: 2779050 - RNA, 16 nt, Human
aaauuuguaaguuuca

SEQ ID NO: 2779051 - RNA, 17 nt, Human
aaauuuguaaguuucag

SEQ ID NO: 2779052 - RNA, 19 nt, Human
aaauuuguaaguuucaggu

SEQ ID NO: 2779053 - RNA, 20 nt, Human
aaauuuguaaguuucaggug

SEQ ID NO: 2779054 - RNA, 14 nt, Human
gucaguguugagau

SEQ ID NO: 2779055 - RNA, 14 nt, Human
aaauuugauugauu

SEQ ID NO: 2779056 - RNA, 16 nt, Human
aaauuugauacuuaua

SEQ ID NO: 2779057 - RNA, 18 nt, Human
aaauuugauacuuauauu

SEQ ID NO: 2779058 - RNA, 16 nt, Human
gucaguauccaggcuu

SEQ ID NO: 2779059 - RNA, 14 nt, Human
gucaguauccaggc

SEQ ID NO: 2779060 - RNA, 11 nt, Human
gucaggcuggu

SEQ ID NO: 2779061 - RNA, 19 nt, Human
aacacagaaaccuuuuuaa

SEQ ID NO: 2779062 - RNA, 18 nt, Human
aacacacuguuguuuagu

SEQ ID NO: 2779063 - RNA, 12 nt, Human
aacacacugaaa

SEQ ID NO: 2779064 - RNA, 20 nt, Human
aacacacgcgcgcacacaca

SEQ ID NO: 2779065 - RNA, 13 nt, Human
aacacaaaugcag

SEQ ID NO: 2779066 - RNA, 20 nt, Human
aacacaaaugcagggauugc

SEQ ID NO: 2779067 - RNA, 12 nt, Human
aacacaccuggu

SEQ ID NO: 2779068 - RNA, 19 nt, Human
aacacacgcgcgcacacac

SEQ ID NO: 2779069 - RNA, 22 nt, Human
aacacagagaagcggauuucca

SEQ ID NO: 2779070 - RNA, 23 nt, Human
aacacagagaagcggauuuccag

SEQ ID NO: 2779071 - RNA, 22 nt, Human
aacacagaggaauuuauaccuc

SEQ ID NO: 2779072 - RNA, 15 nt, Human
guccaacugcaacuc

SEQ ID NO: 2779073 - RNA, 14 nt, Human
guccaacuaaaaac

SEQ ID NO: 2779074 - RNA, 22 nt, Human
guccaagaauccacauuucuaa

SEQ ID NO: 2779075 - RNA, 20 nt, Human
guccaaaaagcuccuggggc

SEQ ID NO: 2779076 - RNA, 16 nt, Human
gucccaccuuggcugc

SEQ ID NO: 2779077 - RNA, 15 nt, Human
gucccaccuuggcug

SEQ ID NO: 2779078 - RNA, 14 nt, Human
gucccaccuuggcu

SEQ ID NO: 2779079 - RNA, 16 nt, Human
gucccaccccucccuc

SEQ ID NO: 2779080 - RNA, 17 nt, Human
gucccaccccucccucu

SEQ ID NO: 2779081 - RNA, 23 nt, Human
gucccacccccacccccagcuca

SEQ ID NO: 2779082 - RNA, 12 nt, Human
guccccaucugu

SEQ ID NO: 2779083 - RNA, 14 nt, Human
guccccaucugucg

SEQ ID NO: 2779084 - RNA, 23 nt, Human
guccccagggcugucaucugaau

SEQ ID NO: 2779085 - RNA, 15 nt, Human
gucccccaacuugag

SEQ ID NO: 2779086 - RNA, 16 nt, Human
gucccccaacuugaga

SEQ ID NO: 2779087 - RNA, 19 nt, Human
guccccauggcacccugcu

SEQ ID NO: 2779088 - RNA, 16 nt, Human
gucccccaacucugag

SEQ ID NO: 2779089 - RNA, 19 nt, Human
gucccccaacucugagccc

SEQ ID NO: 2779090 - RNA, 20 nt, Human
gucccccaacucugagccca

SEQ ID NO: 2779091 - RNA, 21 nt, Human
gucccacccccacccccagcu

SEQ ID NO: 2779092 - RNA, 22 nt, Human
gucccacccccacccccagcuc

SEQ ID NO: 2779093 - RNA, 15 nt, Human
gucccaccuccagcc

SEQ ID NO: 2779094 - RNA, 16 nt, Human
gucccaccuccagccc

SEQ ID NO: 2779095 - RNA, 17 nt, Human
gucccaccuccagcccg

SEQ ID NO: 2779096 - RNA, 22 nt, Human
gucccaccuccagcccgggagc

SEQ ID NO: 2779097 - RNA, 14 nt, Human
gucccacccccacc

SEQ ID NO: 2779098 - RNA, 15 nt, Human
gucccacccccaccc

SEQ ID NO: 2779099 - RNA, 19 nt, Human
gucccacccccacccccag

SEQ ID NO: 2779100 - RNA, 17 nt, Human
guccagugaccugcugg

SEQ ID NO: 2779101 - RNA, 20 nt, Human
guccagugcaaccacacacc

SEQ ID NO: 2779102 - RNA, 23 nt, Human
guccaagaauccacauuucuaaa

SEQ ID NO: 2779103 - RNA, 21 nt, Human
guccaagaccagacucgccaa

SEQ ID NO: 2779104 - RNA, 16 nt, Human
guccaagauuccggau

SEQ ID NO: 2779105 - RNA, 20 nt, Human
guccaagauuccggauccua

SEQ ID NO: 2779106 - RNA, 18 nt, Human
aacagguaauauaaaaag

SEQ ID NO: 2779107 - RNA, 20 nt, Human
aacagugcagggcaaaauau

SEQ ID NO: 2779108 - RNA, 11 nt, Human
aacagggaggg

SEQ ID NO: 2779109 - RNA, 15 nt, Human
aacagguaauauaaa

SEQ ID NO: 2779110 - RNA, 13 nt, Human
aacagauaaucag

SEQ ID NO: 2779111 - RNA, 17 nt, Human
aacagacaagugacugu

SEQ ID NO: 2779112 - RNA, 21 nt, Human
aacagacaauaugugagugcc

SEQ ID NO: 2779113 - RNA, 11 nt, Human
aacagacaagu

SEQ ID NO: 2779114 - RNA, 22 nt, Human
aacagauaccauacucauuucu

SEQ ID NO: 2779115 - RNA, 20 nt, Human
aacagauaguuguguuuuua

SEQ ID NO: 2779116 - RNA, 14 nt, Human
aacagaucuuuuac

SEQ ID NO: 2779117 - RNA, 15 nt, Human
aacagaacuuuuccu

SEQ ID NO: 2779118 - RNA, 15 nt, Human
aacagaagcauuugu

SEQ ID NO: 2779119 - RNA, 16 nt, Human
aacagaagcauuugua

SEQ ID NO: 2779120 - RNA, 17 nt, Human
aacagaagcauuuguau

SEQ ID NO: 2779121 - RNA, 21 nt, Human
aacagaagcauuuguauuuug

SEQ ID NO: 2779122 - RNA, 13 nt, Human
aacagaaggauga

SEQ ID NO: 2779123 - RNA, 18 nt, Human
aacagacaacagaaguca

SEQ ID NO: 2779124 - RNA, 16 nt, Human
aacagacaacagaagu

SEQ ID NO: 2779125 - RNA, 13 nt, Human
aacagaauuuuaa

SEQ ID NO: 2779126 - RNA, 12 nt, Human
aacagaaugaaa

SEQ ID NO: 2779127 - RNA, 14 nt, Human
aacagaaugaaaaa

SEQ ID NO: 2779128 - RNA, 15 nt, Human
aacagaaugaaaaau

SEQ ID NO: 2779129 - RNA, 16 nt, Human
aacagaaugaaaaaug

SEQ ID NO: 2779130 - RNA, 17 nt, Human
aacagaaugaaaaauga

SEQ ID NO: 2779131 - RNA, 18 nt, Human
aacagaaugaaaaaugaa

SEQ ID NO: 2779132 - RNA, 19 nt, Human
aacagaaugaaaaaugaaa

SEQ ID NO: 2779133 - RNA, 21 nt, Human
aacagaaugaaaaaugaaaga

SEQ ID NO: 2779134 - RNA, 14 nt, Human
aacagaauguuuua

SEQ ID NO: 2779135 - RNA, 13 nt, Human
aacagaacuaaau

SEQ ID NO: 2779136 - RNA, 14 nt, Human
aacagaacuaaaug

SEQ ID NO: 2779137 - RNA, 15 nt, Human
aacagaacuaaaugu

SEQ ID NO: 2779138 - RNA, 16 nt, Human
aacagaacuaaauguu

SEQ ID NO: 2779139 - RNA, 17 nt, Human
aacagaacuaaauguuc

SEQ ID NO: 2779140 - RNA, 18 nt, Human
aacagaacuaaauguucu

SEQ ID NO: 2779141 - RNA, 21 nt, Human
aacagaacuaaauguucuaug

SEQ ID NO: 2779142 - RNA, 12 nt, Human
guccuacucugu

SEQ ID NO: 2779143 - RNA, 20 nt, Human
guccuacuaucacugaacaa

SEQ ID NO: 2779144 - RNA, 15 nt, Human
guccuacccacccuc

SEQ ID NO: 2779145 - RNA, 16 nt, Human
guccuacccacccucc

SEQ ID NO: 2779146 - RNA, 12 nt, Human
gucccccugcag

SEQ ID NO: 2779147 - RNA, 13 nt, Human
gucccccugcagc

SEQ ID NO: 2779148 - RNA, 14 nt, Human
gucccccugcagcu

SEQ ID NO: 2779149 - RNA, 15 nt, Human
gucccccugcagcua

SEQ ID NO: 2779150 - RNA, 17 nt, Human
gucccuuucagagacag

SEQ ID NO: 2779151 - RNA, 11 nt, Human
gucccuugcug

SEQ ID NO: 2779152 - RNA, 16 nt, Human
gucccuugcuguaugc

SEQ ID NO: 2779153 - RNA, 16 nt, Human
gucccuugaugcacag

SEQ ID NO: 2779154 - RNA, 17 nt, Human
gucccuugaugcacaga

SEQ ID NO: 2779155 - RNA, 18 nt, Human
gucccuugaugcacagag

SEQ ID NO: 2779156 - RNA, 19 nt, Human
gucccuugaugcacagaga

SEQ ID NO: 2779157 - RNA, 22 nt, Human
gucccuugaugcacagagaagc

SEQ ID NO: 2779158 - RNA, 23 nt, Human
gucccuugaugcacagagaagcu

SEQ ID NO: 2779159 - RNA, 13 nt, Human
gucccuugcagcu

SEQ ID NO: 2779160 - RNA, 13 nt, Human
guauguaucuauu

SEQ ID NO: 2779161 - RNA, 13 nt, Human
guauguauuagug

SEQ ID NO: 2779162 - RNA, 14 nt, Human
guauguaaacagga

SEQ ID NO: 2779163 - RNA, 22 nt, Human
guauguaaugugugguggccuc

SEQ ID NO: 2779164 - RNA, 23 nt, Human
guauguaaugugugguggccuca

SEQ ID NO: 2779165 - RNA, 14 nt, Human
guaugucauuuccu

SEQ ID NO: 2779166 - RNA, 17 nt, Human
guaugucauuuccuuca

SEQ ID NO: 2779167 - RNA, 12 nt, Human
aaauguauuuuu

SEQ ID NO: 2779168 - RNA, 14 nt, Human
aaauguauuuuucu

SEQ ID NO: 2779169 - RNA, 15 nt, Human
aaauguauuuuucua

SEQ ID NO: 2779170 - RNA, 10 nt, Human
aaauguauuu

SEQ ID NO: 2779171 - RNA, 22 nt, Human
aaauguccuccagaagccucug

SEQ ID NO: 2779172 - RNA, 22 nt, Human
aaaugucagauacaauguauuu

SEQ ID NO: 2779173 - RNA, 15 nt, Human
aaaugucagauacaa

SEQ ID NO: 2779174 - RNA, 20 nt, Human
aaaugucagauacaauguau

SEQ ID NO: 2779175 - RNA, 13 nt, Human
aaaugucuuugua

SEQ ID NO: 2779176 - RNA, 14 nt, Human
aaaugucuuuguaa

SEQ ID NO: 2779177 - RNA, 15 nt, Human
aaaugucuuuguaag

SEQ ID NO: 2779178 - RNA, 16 nt, Human
aaaugucuuuguaagu

SEQ ID NO: 2779179 - RNA, 17 nt, Human
aaaugucuuuguaaguc

SEQ ID NO: 2779180 - RNA, 21 nt, Human
aaaugucuuuguaagucagug

SEQ ID NO: 2779181 - RNA, 17 nt, Human
aaaugucuuuuagaaga

SEQ ID NO: 2779182 - RNA, 18 nt, Human
aaaugucuuuuagaagau

SEQ ID NO: 2779183 - RNA, 14 nt, Human
aaaugugaggaaga

SEQ ID NO: 2779184 - RNA, 15 nt, Human
aaaugugaagaugca

SEQ ID NO: 2779185 - RNA, 17 nt, Human
aaaugugaagaugcauu

SEQ ID NO: 2779186 - RNA, 22 nt, Human
aaaugugaagaugcauuguagu

SEQ ID NO: 2779187 - RNA, 18 nt, Human
aaauguguguauucuuaa

SEQ ID NO: 2779188 - RNA, 12 nt, Human
aaauguguacau

SEQ ID NO: 2779189 - RNA, 20 nt, Human
aaauguguccuaucuaucuu

SEQ ID NO: 2779190 - RNA, 21 nt, Human
aaauguguccuaucuaucuuc

SEQ ID NO: 2779191 - RNA, 12 nt, Human
aaaugugugugu

SEQ ID NO: 2779192 - RNA, 20 nt, Human
aaauguguaucggaugcuuu

SEQ ID NO: 2779193 - RNA, 23 nt, Human
aaauguguacaauguacacacug

SEQ ID NO: 2779194 - RNA, 22 nt, Human
aaaugugguuuuccugaaauca

SEQ ID NO: 2779195 - RNA, 22 nt, Human
aaaugugauguucuaaggcucu

SEQ ID NO: 2779196 - RNA, 19 nt, Human
aaaugugauguucuaaggc

SEQ ID NO: 2779197 - RNA, 20 nt, Human
aaaugugauguucuaaggcu

SEQ ID NO: 2779198 - RNA, 15 nt, Human
aaaugugauguucua

SEQ ID NO: 2779199 - RNA, 18 nt, Human
aaaugugauguucuaagg

SEQ ID NO: 2779200 - RNA, 19 nt, Human
aaauguguuggacaaaugu

SEQ ID NO: 2779201 - RNA, 20 nt, Human
aaauguguuggacaaaugug

SEQ ID NO: 2779202 - RNA, 21 nt, Human
aaauguguuggacaaauguga

SEQ ID NO: 2779203 - RNA, 12 nt, Human
aaauuaagacau

SEQ ID NO: 2779204 - RNA, 17 nt, Human
aaauuaagauguucaga

SEQ ID NO: 2779205 - RNA, 15 nt, Human
aaauuaagaaggcaa

SEQ ID NO: 2779206 - RNA, 14 nt, Human
aaauuaagaaggca

SEQ ID NO: 2779207 - RNA, 23 nt, Human
aaauuaggguugguuccuuucca

SEQ ID NO: 2779208 - RNA, 15 nt, Human
aaauuauaaagauaa

SEQ ID NO: 2779209 - RNA, 19 nt, Human
aaauuauuaguuuacauca

SEQ ID NO: 2779210 - RNA, 23 nt, Human
aaauuauuaguuuacaucauuuu

SEQ ID NO: 2779211 - RNA, 16 nt, Human
aaauuauuauaagcau

SEQ ID NO: 2779212 - RNA, 19 nt, Human
aaauuauuauaagcauuga

SEQ ID NO: 2779213 - RNA, 22 nt, Human
aaauuauuauaagcauugaaau

SEQ ID NO: 2779214 - RNA, 15 nt, Human
aaauuauuuaauaaa

SEQ ID NO: 2779215 - RNA, 14 nt, Human
aaauuauguuuuua

SEQ ID NO: 2779216 - RNA, 16 nt, Human
aaauuauguuuuuauu

SEQ ID NO: 2779217 - RNA, 19 nt, Human
aaauuauguuuuuauuaag

SEQ ID NO: 2779218 - RNA, 13 nt, Human
gucaaaguaaaac

SEQ ID NO: 2779219 - RNA, 16 nt, Human
gucaaagaaaugcuga

SEQ ID NO: 2779220 - RNA, 13 nt, Human
gucaacagaauga

SEQ ID NO: 2779221 - RNA, 14 nt, Human
gucaacagaaugaa

SEQ ID NO: 2779222 - RNA, 15 nt, Human
gucaacagaaugaaa

SEQ ID NO: 2779223 - RNA, 16 nt, Human
gucaacagaaugaaaa

SEQ ID NO: 2779224 - RNA, 17 nt, Human
gucaacagaaugaaaaa

SEQ ID NO: 2779225 - RNA, 20 nt, Human
gucaacagaaugaaaaauga

SEQ ID NO: 2779226 - RNA, 21 nt, Human
gucaacaaguaugaauaaaga

SEQ ID NO: 2779227 - RNA, 12 nt, Human
gucaaagaaaug

SEQ ID NO: 2779228 - RNA, 15 nt, Human
gucaaacgugaaaau

SEQ ID NO: 2779229 - RNA, 17 nt, Human
gucaaacgugaaaaugc

SEQ ID NO: 2779230 - RNA, 14 nt, Human
gucaaacgugaaaa

SEQ ID NO: 2779231 - RNA, 15 nt, Human
gucaaacaugaagug

SEQ ID NO: 2779232 - RNA, 16 nt, Human
gucaaacaugaagugu

SEQ ID NO: 2779233 - RNA, 21 nt, Human
gucaaaacacuguggaacuaa

SEQ ID NO: 2779234 - RNA, 15 nt, Human
gucaaaagcuggauu

SEQ ID NO: 2779235 - RNA, 20 nt, Human
gucaaacaaacucucugaac

SEQ ID NO: 2779236 - RNA, 18 nt, Human
gucaaaauauuuuuaaaa

SEQ ID NO: 2779237 - RNA, 17 nt, Human
gucaaaauuguuuaaaa

SEQ ID NO: 2779238 - RNA, 15 nt, Human
gucaaaaguuggacu

SEQ ID NO: 2779239 - RNA, 16 nt, Human
gucaaaaguuggacua

SEQ ID NO: 2779240 - RNA, 19 nt, Human
gucaaaaguuggacuaaau

SEQ ID NO: 2779241 - RNA, 21 nt, Human
gucaaaaguuggacuaaaugc

SEQ ID NO: 2779242 - RNA, 20 nt, Human
aaauuuauuuaaugugaguu

SEQ ID NO: 2779243 - RNA, 13 nt, Human
aaauuucaaaaga

SEQ ID NO: 2779244 - RNA, 16 nt, Human
aaauuucaaaagacau

SEQ ID NO: 2779245 - RNA, 19 nt, Human
aaauuucaaaagacauguu

SEQ ID NO: 2779246 - RNA, 21 nt, Human
aaauuucaaaagacauguugu

SEQ ID NO: 2779247 - RNA, 18 nt, Human
guauuuuuauacaaaccu

SEQ ID NO: 2779248 - RNA, 14 nt, Human
guauuuuuauauaa

SEQ ID NO: 2779249 - RNA, 13 nt, Human
guauuuuuaucca

SEQ ID NO: 2779250 - RNA, 19 nt, Human
guauuuuucaauaauaaaa

SEQ ID NO: 2779251 - RNA, 17 nt, Human
guauuuuucagagauuu

SEQ ID NO: 2779252 - RNA, 17 nt, Human
guauuuuucuguuagcu

SEQ ID NO: 2779253 - RNA, 14 nt, Human
guauuuuuauaaau

SEQ ID NO: 2779254 - RNA, 12 nt, Human
aaauuguacaua

SEQ ID NO: 2779255 - RNA, 22 nt, Human
aaauuguacauauuuguggaau

SEQ ID NO: 2779256 - RNA, 15 nt, Human
aaauuguaccuuuuu

SEQ ID NO: 2779257 - RNA, 15 nt, Human
aaauuguacauauuu

SEQ ID NO: 2779258 - RNA, 17 nt, Human
aaauugugcuucucccc

SEQ ID NO: 2779259 - RNA, 21 nt, Human
aaauugugcuucuccccagaa

SEQ ID NO: 2779260 - RNA, 22 nt, Human
aaauugugcuucuccccagaau

SEQ ID NO: 2779261 - RNA, 18 nt, Human
aaauugucuuuugucaug

SEQ ID NO: 2779262 - RNA, 21 nt, Human
aaauugucuuuugucaugugg

SEQ ID NO: 2779263 - RNA, 19 nt, Human
aaauugugaacucauugcu

SEQ ID NO: 2779264 - RNA, 14 nt, Human
aaauugucuucaug

SEQ ID NO: 2779265 - RNA, 23 nt, Human
aaauuuaucaaagcauagauguu

SEQ ID NO: 2779266 - RNA, 11 nt, Human
aaauucugugg

SEQ ID NO: 2779267 - RNA, 10 nt, Human
aaauucuguu

SEQ ID NO: 2779268 - RNA, 17 nt, Human
aaauucuguuaaaaucu

SEQ ID NO: 2779269 - RNA, 19 nt, Human
aaauucuguuaaaaucuau

SEQ ID NO: 2779270 - RNA, 20 nt, Human
aaauucuguuaaaaucuauu

SEQ ID NO: 2779271 - RNA, 9 nt, Human
aaauucugu

SEQ ID NO: 2779272 - RNA, 16 nt, Human
aaauucugaauauuuu

SEQ ID NO: 2779273 - RNA, 14 nt, Human
aaauuauuugcagg

SEQ ID NO: 2779274 - RNA, 13 nt, Human
aaauuauuugugu

SEQ ID NO: 2779275 - RNA, 16 nt, Human
aaauuauuuguguaau

SEQ ID NO: 2779276 - RNA, 21 nt, Human
aaauuauuuguguaauagaaa

SEQ ID NO: 2779277 - RNA, 20 nt, Human
aaauucugagacauguguca

SEQ ID NO: 2779278 - RNA, 20 nt, Human
aaauggguuggugcuucuaa

SEQ ID NO: 2779279 - RNA, 18 nt, Human
guaacaguucauguuugc

SEQ ID NO: 2779280 - RNA, 20 nt, Human
guaacaguucauguuugcuu

SEQ ID NO: 2779281 - RNA, 22 nt, Human
aaauggguuggugcuucuaacc

SEQ ID NO: 2779282 - RNA, 17 nt, Human
aaauggucgcccaggag

SEQ ID NO: 2779283 - RNA, 16 nt, Human
aaauggucgcccagga

SEQ ID NO: 2779284 - RNA, 19 nt, Human
aaaugguaggcauuuccua

SEQ ID NO: 2779285 - RNA, 18 nt, Human
aaauggucgcccaggaga

SEQ ID NO: 2779286 - RNA, 23 nt, Human
aaauggugaaaauaaaauaaagc

SEQ ID NO: 2779287 - RNA, 19 nt, Human
aaauggugcucaccaugcu

SEQ ID NO: 2779288 - RNA, 17 nt, Human
aaaugguggcuucagcu

SEQ ID NO: 2779289 - RNA, 18 nt, Human
aaaugguggcuucagcuc

SEQ ID NO: 2779290 - RNA, 19 nt, Human
aaaugguggcuucagcucc

SEQ ID NO: 2779291 - RNA, 20 nt, Human
aaaugguggcuucagcucca

SEQ ID NO: 2779292 - RNA, 22 nt, Human
aaaugguggcuucagcuccagc

SEQ ID NO: 2779293 - RNA, 17 nt, Human
guaacaguucauguuug

SEQ ID NO: 2779294 - RNA, 14 nt, Human
guaacagaacagcu

SEQ ID NO: 2779295 - RNA, 22 nt, Human
guaacagguauuuuguuucuuu

SEQ ID NO: 2779296 - RNA, 12 nt, Human
guaacaggcaga

SEQ ID NO: 2779297 - RNA, 22 nt, Human
guaacacagcugagagacuuuu

SEQ ID NO: 2779298 - RNA, 14 nt, Human
guaguuaggaaaua

SEQ ID NO: 2779299 - RNA, 13 nt, Human
guaguuaggaaau

SEQ ID NO: 2779300 - RNA, 11 nt, Human
guaguuaggaa

SEQ ID NO: 2779301 - RNA, 21 nt, Human
guaguuaaaaaaaaaaaaagg

SEQ ID NO: 2779302 - RNA, 23 nt, Human
guaguuaaaaaaaaaaaaaggaa

SEQ ID NO: 2779303 - RNA, 13 nt, Human
guaguuaauuuau

SEQ ID NO: 2779304 - RNA, 15 nt, Human
guaguuaauuuaucu

SEQ ID NO: 2779305 - RNA, 18 nt, Human
guaguugcaauagaacag

SEQ ID NO: 2779306 - RNA, 22 nt, Human
guaguuaggaaauaaaaccuuu

SEQ ID NO: 2779307 - RNA, 20 nt, Human
guaguuaggaaauaaaaccu

SEQ ID NO: 2779308 - RNA, 16 nt, Human
guaguuaggaaauaaa

SEQ ID NO: 2779309 - RNA, 15 nt, Human
guaguuaggaaauaa

SEQ ID NO: 2779310 - RNA, 20 nt, Human
guaguuuuauuuuauguuua

SEQ ID NO: 2779311 - RNA, 22 nt, Human
guaguuuuuacagcuguguuau

SEQ ID NO: 2779312 - RNA, 12 nt, Human
guaguugucuuu

SEQ ID NO: 2779313 - RNA, 16 nt, Human
guaguugucuuuccug

SEQ ID NO: 2779314 - RNA, 23 nt, Human
guaguuuuuuuuuuuuuuaugug

SEQ ID NO: 2779315 - RNA, 14 nt, Human
aaauguaagaucgu

SEQ ID NO: 2779316 - RNA, 22 nt, Human
aaauguaagaucguucucugcc

SEQ ID NO: 2779317 - RNA, 18 nt, Human
aaauguaacuuuuguaag

SEQ ID NO: 2779318 - RNA, 20 nt, Human
aaauguaagauuauagauuc

SEQ ID NO: 2779319 - RNA, 21 nt, Human
aaauguaagauuauagauucu

SEQ ID NO: 2779320 - RNA, 22 nt, Human
aaauguaagauuauagauucua

SEQ ID NO: 2779321 - RNA, 13 nt, Human
aaauguaaacugc

SEQ ID NO: 2779322 - RNA, 14 nt, Human
aaauguaaacugcc

SEQ ID NO: 2779323 - RNA, 15 nt, Human
aaauguaaacugcca

SEQ ID NO: 2779324 - RNA, 16 nt, Human
aaauguaaacugccau

SEQ ID NO: 2779325 - RNA, 19 nt, Human
aaauguaaaaauaauaauu

SEQ ID NO: 2779326 - RNA, 15 nt, Human
aaauguaaacauuuu

SEQ ID NO: 2779327 - RNA, 17 nt, Human
aaaugguuuauuuugua

SEQ ID NO: 2779328 - RNA, 23 nt, Human
aaaugguuuauuuuguauugugg

SEQ ID NO: 2779329 - RNA, 17 nt, Human
aaauguaacuuuuguaa

SEQ ID NO: 2779330 - RNA, 15 nt, Human
aaauguaaauauucu

SEQ ID NO: 2779331 - RNA, 17 nt, Human
aaauguaaauauucuau

SEQ ID NO: 2779332 - RNA, 14 nt, Human
guauauuuguauau

SEQ ID NO: 2779333 - RNA, 16 nt, Human
guauauuuccgcacuu

SEQ ID NO: 2779334 - RNA, 12 nt, Human
guauauuugaaa

SEQ ID NO: 2779335 - RNA, 22 nt, Human
guauauuuaaacucaagacaau

SEQ ID NO: 2779336 - RNA, 18 nt, Human
guaucaggugcugccauc

SEQ ID NO: 2779337 - RNA, 16 nt, Human
guaucaggugcugcca

SEQ ID NO: 2779338 - RNA, 19 nt, Human
guauauuuuuuuaauuuaa

SEQ ID NO: 2779339 - RNA, 15 nt, Human
guaucaaauaaaauu

SEQ ID NO: 2779340 - RNA, 15 nt, Human
guaucaaacccacga

SEQ ID NO: 2779341 - RNA, 17 nt, Human
guauaagugcacacaga

SEQ ID NO: 2779342 - RNA, 15 nt, Human
guauaaguggugugu

SEQ ID NO: 2779343 - RNA, 12 nt, Human
guauauuggaag

SEQ ID NO: 2779344 - RNA, 13 nt, Human
guauauuguguuu

SEQ ID NO: 2779345 - RNA, 20 nt, Human
guauauuguguuuguguauu

SEQ ID NO: 2779346 - RNA, 19 nt, Human
guauauuguguuuguguau

SEQ ID NO: 2779347 - RNA, 23 nt, Human
guauaaugguugacuggguuucu

SEQ ID NO: 2779348 - RNA, 21 nt, Human
guauaaugguugacuggguuu

SEQ ID NO: 2779349 - RNA, 19 nt, Human
guauaaugguugacugggu

SEQ ID NO: 2779350 - RNA, 14 nt, Human
guauccaugcucuu

SEQ ID NO: 2779351 - RNA, 19 nt, Human
guauccaaccaacuugguu

SEQ ID NO: 2779352 - RNA, 19 nt, Human
guauccacuuugcacagcu

SEQ ID NO: 2779353 - RNA, 14 nt, Human
guauccacuuugca

SEQ ID NO: 2779354 - RNA, 19 nt, Human
guaucccaugagccucagc

SEQ ID NO: 2779355 - RNA, 22 nt, Human
guaucaggugcugccauccagg

SEQ ID NO: 2779356 - RNA, 15 nt, Human
guaucaguguuuuaa

SEQ ID NO: 2779357 - RNA, 17 nt, Human
guaucaguguuuuaaau

SEQ ID NO: 2779358 - RNA, 19 nt, Human
guaucaguguuuuaaauuc

SEQ ID NO: 2779359 - RNA, 20 nt, Human
guaucaguguuuuaaauucu

SEQ ID NO: 2779360 - RNA, 22 nt, Human
guaucaguguuuuaaauucuga

SEQ ID NO: 2779361 - RNA, 23 nt, Human
guaucaguguuuuaaauucugag

SEQ ID NO: 2779362 - RNA, 15 nt, Human
guaucauagaaaugu

SEQ ID NO: 2779363 - RNA, 12 nt, Human
guaucauagaaa

SEQ ID NO: 2779364 - RNA, 15 nt, Human
guaucaggucuccca

SEQ ID NO: 2779365 - RNA, 14 nt, Human
guaucaucuggaua

SEQ ID NO: 2779366 - RNA, 24 nt, Human
guaucaucuggauaggagccugcu

SEQ ID NO: 2779367 - RNA, 14 nt, Human
guaugguggcuggg

SEQ ID NO: 2779368 - RNA, 16 nt, Human
guaugguggcuggguu

SEQ ID NO: 2779369 - RNA, 15 nt, Human
guaugguggcugggu

SEQ ID NO: 2779370 - RNA, 15 nt, Human
guaugcgugugugug

SEQ ID NO: 2779371 - RNA, 13 nt, Human
guaugcugaucau

SEQ ID NO: 2779372 - RNA, 19 nt, Human
guaugcugaucaucgccag

SEQ ID NO: 2779373 - RNA, 21 nt, Human
guaugcugaucaucgccagag

SEQ ID NO: 2779374 - RNA, 22 nt, Human
aagggucgaaagcucuagaauc

SEQ ID NO: 2779375 - RNA, 18 nt, Human
aagggucgaaagcucuag

SEQ ID NO: 2779376 - RNA, 19 nt, Human
aagggucgaaagcucuaga

SEQ ID NO: 2779377 - RNA, 21 nt, Human
aagggucgaaagcucuagaau

SEQ ID NO: 2779378 - RNA, 17 nt, Human
aagguagaaccucaccu

SEQ ID NO: 2779379 - RNA, 23 nt, Human
aaggcucugagcaaauguggcuc

SEQ ID NO: 2779380 - RNA, 17 nt, Human
aaggcucuucuccccag

SEQ ID NO: 2779381 - RNA, 19 nt, Human
aaggcucuucuccccagag

SEQ ID NO: 2779382 - RNA, 22 nt, Human
aaggcucugagagucuagauuc

SEQ ID NO: 2779383 - RNA, 12 nt, Human
aaggcucugaga

SEQ ID NO: 2779384 - RNA, 13 nt, Human
aaggcucugagag

SEQ ID NO: 2779385 - RNA, 14 nt, Human
aaggcucugagagu

SEQ ID NO: 2779386 - RNA, 16 nt, Human
aaggcucugagagucu

SEQ ID NO: 2779387 - RNA, 17 nt, Human
aaggcucugagagucua

SEQ ID NO: 2779388 - RNA, 20 nt, Human
aaggcucugagagucuagau

SEQ ID NO: 2779389 - RNA, 21 nt, Human
aaggcucugagagucuagauu

SEQ ID NO: 2779390 - RNA, 21 nt, Human
aaggcucuaugagucuagaug

SEQ ID NO: 2779391 - RNA, 16 nt, Human
aaggcucuaugagucu

SEQ ID NO: 2779392 - RNA, 20 nt, Human
aaggcucuaugagucuagau

SEQ ID NO: 2779393 - RNA, 11 nt, Human
aaggcucuaga

SEQ ID NO: 2779394 - RNA, 12 nt, Human
aaggcucuagau

SEQ ID NO: 2779395 - RNA, 13 nt, Human
aaggcucuagauc

SEQ ID NO: 2779396 - RNA, 13 nt, Human
aaggggcccuggu

SEQ ID NO: 2779397 - RNA, 23 nt, Human
aaggggccauuuggcauaccuuu

SEQ ID NO: 2779398 - RNA, 21 nt, Human
aaggggcccugguccuuccag

SEQ ID NO: 2779399 - RNA, 14 nt, Human
aaggggcccugguc

SEQ ID NO: 2779400 - RNA, 23 nt, Human
aaggggccucaccgagugggggc

SEQ ID NO: 2779401 - RNA, 20 nt, Human
aaggggcggugcccacaccg

SEQ ID NO: 2779402 - RNA, 18 nt, Human
guuucucuugagcuggcc

SEQ ID NO: 2779403 - RNA, 17 nt, Human
guuucucuugagcuggc

SEQ ID NO: 2779404 - RNA, 12 nt, Human
guuucugaaaag

SEQ ID NO: 2779405 - RNA, 13 nt, Human
guuucugaaaaga

SEQ ID NO: 2779406 - RNA, 14 nt, Human
guuucugaaaagaa

SEQ ID NO: 2779407 - RNA, 22 nt, Human
guuucugaaaagaaauaauaau

SEQ ID NO: 2779408 - RNA, 20 nt, Human
guuucucuugagcuggccuc

SEQ ID NO: 2779409 - RNA, 22 nt, Human
guuucugaggcuuuaugauaau

SEQ ID NO: 2779410 - RNA, 13 nt, Human
guuucugagaaaa

SEQ ID NO: 2779411 - RNA, 14 nt, Human
guuucugagaaaag

SEQ ID NO: 2779412 - RNA, 17 nt, Human
guuucugagaaaagaac

SEQ ID NO: 2779413 - RNA, 19 nt, Human
guuucuauguguagggcgg

SEQ ID NO: 2779414 - RNA, 20 nt, Human
guuucuaugaguggaaaaag

SEQ ID NO: 2779415 - RNA, 14 nt, Human
guuucucagauccu

SEQ ID NO: 2779416 - RNA, 14 nt, Human
guuucucaaaucuu

SEQ ID NO: 2779417 - RNA, 21 nt, Human
aaguaaguaccacucaggcca

SEQ ID NO: 2779418 - RNA, 20 nt, Human
aaguaaguaccacucaggcc

SEQ ID NO: 2779419 - RNA, 18 nt, Human
aaguaaguaccacucagg

SEQ ID NO: 2779420 - RNA, 15 nt, Human
aaguaagagacucag

SEQ ID NO: 2779421 - RNA, 15 nt, Human
aaguaagaggcugga

SEQ ID NO: 2779422 - RNA, 13 nt, Human
aaguaagcaaaga

SEQ ID NO: 2779423 - RNA, 19 nt, Human
aaggucaccagcaccaaca

SEQ ID NO: 2779424 - RNA, 17 nt, Human
aagguauuugggaaacu

SEQ ID NO: 2779425 - RNA, 19 nt, Human
aagguauuugggaaacuug

SEQ ID NO: 2779426 - RNA, 21 nt, Human
aagguauuugggaaacuuguc

SEQ ID NO: 2779427 - RNA, 22 nt, Human
aagguauuugggaaacuuguca

SEQ ID NO: 2779428 - RNA, 15 nt, Human
aagguauuuugaaua

SEQ ID NO: 2779429 - RNA, 19 nt, Human
aagguauuuugaauaccau

SEQ ID NO: 2779430 - RNA, 23 nt, Human
aaggucauggccacacugugaca

SEQ ID NO: 2779431 - RNA, 14 nt, Human
aaggucauuucuuc

SEQ ID NO: 2779432 - RNA, 17 nt, Human
aaggucauuucuucagu

SEQ ID NO: 2779433 - RNA, 17 nt, Human
guugggcccagaucugg

SEQ ID NO: 2779434 - RNA, 16 nt, Human
guugggcccagaucug

SEQ ID NO: 2779435 - RNA, 15 nt, Human
guugggcccagaucu

SEQ ID NO: 2779436 - RNA, 21 nt, Human
guuuaauauuaccuaaugaaa

SEQ ID NO: 2779437 - RNA, 17 nt, Human
guuuaauauuuaaacag

SEQ ID NO: 2779438 - RNA, 14 nt, Human
guuuaaucuguuau

SEQ ID NO: 2779439 - RNA, 12 nt, Human
guuuaauauuua

SEQ ID NO: 2779440 - RNA, 15 nt, Human
guuuaauauuuaaac

SEQ ID NO: 2779441 - RNA, 13 nt, Human
guugggcuggugu

SEQ ID NO: 2779442 - RNA, 13 nt, Human
guugggcccagau

SEQ ID NO: 2779443 - RNA, 22 nt, Human
guugggcagggugacccugaag

SEQ ID NO: 2779444 - RNA, 12 nt, Human
guugggcaugug

SEQ ID NO: 2779445 - RNA, 16 nt, Human
guuuauuucacuugau

SEQ ID NO: 2779446 - RNA, 12 nt, Human
guuuauuucauu

SEQ ID NO: 2779447 - RNA, 13 nt, Human
guuuauuucacac

SEQ ID NO: 2779448 - RNA, 12 nt, Human
guuuauuuccaa

SEQ ID NO: 2779449 - RNA, 21 nt, Human
guuuauuuccaaauaaaauga

SEQ ID NO: 2779450 - RNA, 19 nt, Human
guuuauuucuguuucucau

SEQ ID NO: 2779451 - RNA, 13 nt, Human
guuuacaugugua

SEQ ID NO: 2779452 - RNA, 21 nt, Human
guuuacauguguagccuaugu

SEQ ID NO: 2779453 - RNA, 22 nt, Human
guuuacauguguagccuauguu

SEQ ID NO: 2779454 - RNA, 11 nt, Human
guuuacauuua

SEQ ID NO: 2779455 - RNA, 22 nt, Human
guuuauugaguuuguagguaaa

SEQ ID NO: 2779456 - RNA, 13 nt, Human
guuuacagaaaaa

SEQ ID NO: 2779457 - RNA, 14 nt, Human
guuuacagaaaaau

SEQ ID NO: 2779458 - RNA, 18 nt, Human
guuuacagaaaaaucuug

SEQ ID NO: 2779459 - RNA, 19 nt, Human
guuuacagcucugacuuua

SEQ ID NO: 2779460 - RNA, 14 nt, Human
guuuacaggcccug

SEQ ID NO: 2779461 - RNA, 18 nt, Human
guuuacaggcccugcucc

SEQ ID NO: 2779462 - RNA, 19 nt, Human
guuuacaggcccugcuccu

SEQ ID NO: 2779463 - RNA, 17 nt, Human
guuuacagguggacaca

SEQ ID NO: 2779464 - RNA, 13 nt, Human
guuuauuuuaaga

SEQ ID NO: 2779465 - RNA, 15 nt, Human
aaggcuccauauaua

SEQ ID NO: 2779466 - RNA, 16 nt, Human
aaggcuccauauauau

SEQ ID NO: 2779467 - RNA, 18 nt, Human
aaggcuccugaucauucu

SEQ ID NO: 2779468 - RNA, 18 nt, Human
guugccuaagcauugccu

SEQ ID NO: 2779469 - RNA, 21 nt, Human
guugccuaagcauugccuggc

SEQ ID NO: 2779470 - RNA, 17 nt, Human
guugccuaaguauuaaa

SEQ ID NO: 2779471 - RNA, 14 nt, Human
guugccugucgcuu

SEQ ID NO: 2779472 - RNA, 15 nt, Human
guugccugucgcuuu

SEQ ID NO: 2779473 - RNA, 16 nt, Human
guugccuaauaaacau

SEQ ID NO: 2779474 - RNA, 18 nt, Human
guugccuaaguauuaaaa

SEQ ID NO: 2779475 - RNA, 21 nt, Human
guugccuaaguauuaaaacau

SEQ ID NO: 2779476 - RNA, 22 nt, Human
guugccuaaguauuaaaacauu

SEQ ID NO: 2779477 - RNA, 18 nt, Human
guugccuuaaagaaaguc

SEQ ID NO: 2779478 - RNA, 20 nt, Human
guugccuuuuucauuuucca

SEQ ID NO: 2779479 - RNA, 24 nt, Human
guugccuuuuucauuuuccaauac

SEQ ID NO: 2779480 - RNA, 13 nt, Human
guugcccaggcug

SEQ ID NO: 2779481 - RNA, 12 nt, Human
guugcccaggcu

SEQ ID NO: 2779482 - RNA, 23 nt, Human
guugcccaggcaggucuugaacu

SEQ ID NO: 2779483 - RNA, 18 nt, Human
aaggccuaggauucuaaa

SEQ ID NO: 2779484 - RNA, 15 nt, Human
aaggccuaggauucu

SEQ ID NO: 2779485 - RNA, 16 nt, Human
aaggccuaggauucua

SEQ ID NO: 2779486 - RNA, 14 nt, Human
guugcuuucacucu

SEQ ID NO: 2779487 - RNA, 15 nt, Human
guugcuuucacucuc

SEQ ID NO: 2779488 - RNA, 16 nt, Human
guugcuucuugugaag

SEQ ID NO: 2779489 - RNA, 17 nt, Human
guugcuucuugugaagg

SEQ ID NO: 2779490 - RNA, 20 nt, Human
guugcuucuugugaaggcca

SEQ ID NO: 2779491 - RNA, 23 nt, Human
guugcguggacucugcacauguc

SEQ ID NO: 2779492 - RNA, 18 nt, Human
guugcgugacacucuccu

SEQ ID NO: 2779493 - RNA, 23 nt, Human
guugcgugacacucuccuugcag

SEQ ID NO: 2779494 - RNA, 13 nt, Human
guugcuaaacacu

SEQ ID NO: 2779495 - RNA, 14 nt, Human
guugcuaaacacug

SEQ ID NO: 2779496 - RNA, 15 nt, Human
guugcuaaacacugc

SEQ ID NO: 2779497 - RNA, 19 nt, Human
guugcuaaacacugcgcuu

SEQ ID NO: 2779498 - RNA, 11 nt, Human
guugcuuuguu

SEQ ID NO: 2779499 - RNA, 14 nt, Human
guugcuuuguugca

SEQ ID NO: 2779500 - RNA, 16 nt, Human
guugcuuuguugcacu

SEQ ID NO: 2779501 - RNA, 21 nt, Human
guugcuuuugaaggaauacaa

SEQ ID NO: 2779502 - RNA, 20 nt, Human
guuggaagcuuguuuuccag

SEQ ID NO: 2779503 - RNA, 13 nt, Human
guugggagcugau

SEQ ID NO: 2779504 - RNA, 18 nt, Human
guuggaaauauucaugcu

SEQ ID NO: 2779505 - RNA, 14 nt, Human
guuggaagagaauc

SEQ ID NO: 2779506 - RNA, 16 nt, Human
guuggaagagaaucac

SEQ ID NO: 2779507 - RNA, 15 nt, Human
guuggaagaggaaca

SEQ ID NO: 2779508 - RNA, 22 nt, Human
guuggaaugaauuaaauaaacc

SEQ ID NO: 2779509 - RNA, 18 nt, Human
guugggauacugcagggc

SEQ ID NO: 2779510 - RNA, 18 nt, Human
guugggaucgcauugcau

SEQ ID NO: 2779511 - RNA, 21 nt, Human
guugggauacugcagggccag

SEQ ID NO: 2779512 - RNA, 17 nt, Human
aaggccaaacugcugga

SEQ ID NO: 2779513 - RNA, 15 nt, Human
aaggcauuguuugag

SEQ ID NO: 2779514 - RNA, 24 nt, Human
aaggccauaaaacagguaauauaa

SEQ ID NO: 2779515 - RNA, 18 nt, Human
aaggccauaaaacaggua

SEQ ID NO: 2779516 - RNA, 18 nt, Human
aaggccaguggaaauuca

SEQ ID NO: 2779517 - RNA, 21 nt, Human
aaggccaguggaaauucaggu

SEQ ID NO: 2779518 - RNA, 17 nt, Human
aaggaauagaagcaaau

SEQ ID NO: 2779519 - RNA, 23 nt, Human
aaggccagaguggccuggccagg

SEQ ID NO: 2779520 - RNA, 17 nt, Human
aaggccauaaaacaggu

SEQ ID NO: 2779521 - RNA, 14 nt, Human
aaggccauaaaaca

SEQ ID NO: 2779522 - RNA, 21 nt, Human
aaggcccacgagcuuguucuu

SEQ ID NO: 2779523 - RNA, 21 nt, Human
aaggccauggagagcuggagc

SEQ ID NO: 2779524 - RNA, 18 nt, Human
aaggccauggagagcugg

SEQ ID NO: 2779525 - RNA, 22 nt, Human
aaggccauggagagcuggagcc

SEQ ID NO: 2779526 - RNA, 15 nt, Human
aaggcccacaggagg

SEQ ID NO: 2779527 - RNA, 14 nt, Human
aaggcccagccccu

SEQ ID NO: 2779528 - RNA, 15 nt, Human
aaggcccagccccua

SEQ ID NO: 2779529 - RNA, 16 nt, Human
aaggcccagccccuag

SEQ ID NO: 2779530 - RNA, 18 nt, Human
aaggcccagccccuagaa

SEQ ID NO: 2779531 - RNA, 15 nt, Human
aaggcccugcugccc

SEQ ID NO: 2779532 - RNA, 16 nt, Human
aaggaguuggaaguga

SEQ ID NO: 2779533 - RNA, 20 nt, Human
aaggagucagacauuuuaag

SEQ ID NO: 2779534 - RNA, 20 nt, Human
aaggcaucagucccuaugua

SEQ ID NO: 2779535 - RNA, 19 nt, Human
aaggauagaucaaagucaa

SEQ ID NO: 2779536 - RNA, 16 nt, Human
aaggcauguuccucug

SEQ ID NO: 2779537 - RNA, 15 nt, Human
aaggcaugugugaaa

SEQ ID NO: 2779538 - RNA, 18 nt, Human
aaggcaugugugaaacau

SEQ ID NO: 2779539 - RNA, 19 nt, Human
aaggcaugugugaaacaua

SEQ ID NO: 2779540 - RNA, 20 nt, Human
aaggcauaucaugcuuugaa

SEQ ID NO: 2779541 - RNA, 14 nt, Human
aaggauacauaaug

SEQ ID NO: 2779542 - RNA, 12 nt, Human
aaggagggugag

SEQ ID NO: 2779543 - RNA, 17 nt, Human
aaggagucaaaacuaca

SEQ ID NO: 2779544 - RNA, 20 nt, Human
aaggaggggauagagagaga

SEQ ID NO: 2779545 - RNA, 17 nt, Human
aaggaggggaaaaaaau

SEQ ID NO: 2779546 - RNA, 18 nt, Human
aaggaggggaaaaaaaug

SEQ ID NO: 2779547 - RNA, 19 nt, Human
aaggaggggaaaaaaaugu

SEQ ID NO: 2779548 - RNA, 20 nt, Human
aaggaggggaaaaaaauguu

SEQ ID NO: 2779549 - RNA, 21 nt, Human
aaggaggggaaaaaaauguug

SEQ ID NO: 2779550 - RNA, 22 nt, Human
aaggaggggaaaaaaauguugu

SEQ ID NO: 2779551 - RNA, 18 nt, Human
aaggaggguacagcuggg

SEQ ID NO: 2779552 - RNA, 19 nt, Human
aaggaggguacagcugggc

SEQ ID NO: 2779553 - RNA, 15 nt, Human
aaggaggggaagcug

SEQ ID NO: 2779554 - RNA, 18 nt, Human
aaggaggggaagcugcag

SEQ ID NO: 2779555 - RNA, 14 nt, Human
aaggaggcuggcag

SEQ ID NO: 2779556 - RNA, 17 nt, Human
aaggagggaaggauuua

SEQ ID NO: 2779557 - RNA, 14 nt, Human
aaggagaggaggca

SEQ ID NO: 2779558 - RNA, 20 nt, Human
aaggagcccuuaucugugcu

SEQ ID NO: 2779559 - RNA, 15 nt, Human
aaggagaguggccau

SEQ ID NO: 2779560 - RNA, 20 nt, Human
aaggagaggcaacauccaaa

SEQ ID NO: 2779561 - RNA, 13 nt, Human
aaggagaggaggc

SEQ ID NO: 2779562 - RNA, 20 nt, Human
aaggaauacaauauauagcu

SEQ ID NO: 2779563 - RNA, 14 nt, Human
aaggaagugaagag

SEQ ID NO: 2779564 - RNA, 16 nt, Human
aaggaagugcccccuc

SEQ ID NO: 2779565 - RNA, 14 nt, Human
aaggaacugcagca

SEQ ID NO: 2779566 - RNA, 17 nt, Human
aaggaacuugaaaaaua

SEQ ID NO: 2779567 - RNA, 18 nt, Human
aaggaacuugaaaaauac

SEQ ID NO: 2779568 - RNA, 16 nt, Human
aaggaagcuccacugu

SEQ ID NO: 2779569 - RNA, 21 nt, Human
aaggaauaaauugcuccuuga

SEQ ID NO: 2779570 - RNA, 16 nt, Human
aaggaagccaaauuua

SEQ ID NO: 2779571 - RNA, 18 nt, Human
aaggaagccaaauuuauc

SEQ ID NO: 2779572 - RNA, 19 nt, Human
aaggaagccaaauuuauca

SEQ ID NO: 2779573 - RNA, 21 nt, Human
aaggaagagccaauguuuucc

SEQ ID NO: 2779574 - RNA, 18 nt, Human
aaggaagauauacaugaa

SEQ ID NO: 2779575 - RNA, 19 nt, Human
aagcuccacugucacccuc

SEQ ID NO: 2779576 - RNA, 21 nt, Human
aagcuccacugucacccucca

SEQ ID NO: 2779577 - RNA, 15 nt, Human
aagcuccacugucac

SEQ ID NO: 2779578 - RNA, 16 nt, Human
aagcuccacugucacc

SEQ ID NO: 2779579 - RNA, 14 nt, Human
aagcuccaucucca

SEQ ID NO: 2779580 - RNA, 23 nt, Human
aaggaacaaaaaaaccacaaagg

SEQ ID NO: 2779581 - RNA, 20 nt, Human
aaggaaauacccuucuuuua

SEQ ID NO: 2779582 - RNA, 23 nt, Human
aaggaaauacccuucuuuuauga

SEQ ID NO: 2779583 - RNA, 15 nt, Human
aaggaaauauauuuu

SEQ ID NO: 2779584 - RNA, 22 nt, Human
aaggaaaucucaccccauccca

SEQ ID NO: 2779585 - RNA, 16 nt, Human
aaggaaaucucacccc

SEQ ID NO: 2779586 - RNA, 13 nt, Human
aaggaaaggcaaa

SEQ ID NO: 2779587 - RNA, 14 nt, Human
aaggaaaggccuga

SEQ ID NO: 2779588 - RNA, 23 nt, Human
aaggaaccuuccuuccugcuuga

SEQ ID NO: 2779589 - RNA, 21 nt, Human
aaggaaccuuccuuccugcuu

SEQ ID NO: 2779590 - RNA, 13 nt, Human
aaggaaccuuccu

SEQ ID NO: 2779591 - RNA, 12 nt, Human
aaggaaccuucc

SEQ ID NO: 2779592 - RNA, 17 nt, Human
aaggaacagcaauggug

SEQ ID NO: 2779593 - RNA, 19 nt, Human
aagucauuccuucuuuuua

SEQ ID NO: 2779594 - RNA, 17 nt, Human
aagucauguaaauacug

SEQ ID NO: 2779595 - RNA, 19 nt, Human
aagucauguaaauacuguu

SEQ ID NO: 2779596 - RNA, 20 nt, Human
aagucaugcaaaggcuggga

SEQ ID NO: 2779597 - RNA, 19 nt, Human
aagucaugcaaaggcuggg

SEQ ID NO: 2779598 - RNA, 14 nt, Human
aagucaugugcauu

SEQ ID NO: 2779599 - RNA, 15 nt, Human
aagucaugugcauuu

SEQ ID NO: 2779600 - RNA, 21 nt, Human
aagucaugcguuuaaucacau

SEQ ID NO: 2779601 - RNA, 23 nt, Human
aaguauuuauauauuuauaacuc

SEQ ID NO: 2779602 - RNA, 22 nt, Human
aaguauuuauauauuuauaacu

SEQ ID NO: 2779603 - RNA, 21 nt, Human
aaguauuuauauauuuauaac

SEQ ID NO: 2779604 - RNA, 20 nt, Human
aaguauuuauauauuuauaa

SEQ ID NO: 2779605 - RNA, 13 nt, Human
aaguauuugggaa

SEQ ID NO: 2779606 - RNA, 20 nt, Human
aagucauggcagguacagua

SEQ ID NO: 2779607 - RNA, 14 nt, Human
aagucuuuuguucg

SEQ ID NO: 2779608 - RNA, 18 nt, Human
aagucuuuaggucuuugu

SEQ ID NO: 2779609 - RNA, 23 nt, Human
aagucuuuaggucuuuguaagaa

SEQ ID NO: 2779610 - RNA, 16 nt, Human
aagucuuucaagaaug

SEQ ID NO: 2779611 - RNA, 17 nt, Human
aagucuuucaagaauga

SEQ ID NO: 2779612 - RNA, 9 nt, Human
aagucuugu

SEQ ID NO: 2779613 - RNA, 10 nt, Human
aagucuugua

SEQ ID NO: 2779614 - RNA, 11 nt, Human
aagucuuguau

SEQ ID NO: 2779615 - RNA, 16 nt, Human
aagucuuguauaacua

SEQ ID NO: 2779616 - RNA, 16 nt, Human
aagucuuaucaagcag

SEQ ID NO: 2779617 - RNA, 17 nt, Human
aagucuuaucaagcagc

SEQ ID NO: 2779618 - RNA, 22 nt, Human
aagugagacaguccagccugga

SEQ ID NO: 2779619 - RNA, 17 nt, Human
guuuuuccuuauuugcu

SEQ ID NO: 2779620 - RNA, 16 nt, Human
guuuuucuggguggcc

SEQ ID NO: 2779621 - RNA, 14 nt, Human
guuuuuccuuuaaa

SEQ ID NO: 2779622 - RNA, 15 nt, Human
guuuuuccuuuaaaa

SEQ ID NO: 2779623 - RNA, 20 nt, Human
aagugagacaguccagccug

SEQ ID NO: 2779624 - RNA, 12 nt, Human
guuuuucauuca

SEQ ID NO: 2779625 - RNA, 14 nt, Human
aagugagagcuggg

SEQ ID NO: 2779626 - RNA, 15 nt, Human
aagugagagcugggu

SEQ ID NO: 2779627 - RNA, 15 nt, Human
aagugagacagucca

SEQ ID NO: 2779628 - RNA, 13 nt, Human
aagugaaauuucu

SEQ ID NO: 2779629 - RNA, 18 nt, Human
aagugaaauuucuagccu

SEQ ID NO: 2779630 - RNA, 23 nt, Human
aagugaagaauccuuuuguagaa

SEQ ID NO: 2779631 - RNA, 16 nt, Human
aagugaagacuggaag

SEQ ID NO: 2779632 - RNA, 13 nt, Human
aagugaagacugg

SEQ ID NO: 2779633 - RNA, 18 nt, Human
aagucuuuuguucgcaug

SEQ ID NO: 2779634 - RNA, 13 nt, Human
aagugaaaaucuu

SEQ ID NO: 2779635 - RNA, 14 nt, Human
aagugaaaaucuua

SEQ ID NO: 2779636 - RNA, 18 nt, Human
aagugaaauaacaaaaug

SEQ ID NO: 2779637 - RNA, 19 nt, Human
aagugaaauaacaaaaugg

SEQ ID NO: 2779638 - RNA, 16 nt, Human
aagugaaaucaaaggu

SEQ ID NO: 2779639 - RNA, 17 nt, Human
aagugaaauggauacua

SEQ ID NO: 2779640 - RNA, 12 nt, Human
aaguauuuauaa

SEQ ID NO: 2779641 - RNA, 13 nt, Human
aaguauuuauaau

SEQ ID NO: 2779642 - RNA, 12 nt, Human
aaguauuuauau

SEQ ID NO: 2779643 - RNA, 14 nt, Human
aaguauuuauauau

SEQ ID NO: 2779644 - RNA, 13 nt, Human
aaguauuuauaua

SEQ ID NO: 2779645 - RNA, 18 nt, Human
aaguauuuauauauuuau

SEQ ID NO: 2779646 - RNA, 17 nt, Human
aaguauuuauauauuua

SEQ ID NO: 2779647 - RNA, 16 nt, Human
aaguauuuauauauuu

SEQ ID NO: 2779648 - RNA, 15 nt, Human
aaguauuuauauauu

SEQ ID NO: 2779649 - RNA, 10 nt, Human
aaguauuuag

SEQ ID NO: 2779650 - RNA, 16 nt, Human
aaguauuuagguuuuu

SEQ ID NO: 2779651 - RNA, 11 nt, Human
aaguauuuagg

SEQ ID NO: 2779652 - RNA, 16 nt, Human
aaguaccaaaguuuua

SEQ ID NO: 2779653 - RNA, 17 nt, Human
aaguaccacucaggcca

SEQ ID NO: 2779654 - RNA, 13 nt, Human
aaguacauauuua

SEQ ID NO: 2779655 - RNA, 21 nt, Human
aaguacauauuuauuuucuuu

SEQ ID NO: 2779656 - RNA, 17 nt, Human
aaguacaugaauacaaa

SEQ ID NO: 2779657 - RNA, 16 nt, Human
aaguaauccuagggaa

SEQ ID NO: 2779658 - RNA, 21 nt, Human
aaguaauccaccugccucggc

SEQ ID NO: 2779659 - RNA, 16 nt, Human
guuuugcuguuuccuu

SEQ ID NO: 2779660 - RNA, 18 nt, Human
guuuugcucuuguagccc

SEQ ID NO: 2779661 - RNA, 13 nt, Human
guuuugcacuuuu

SEQ ID NO: 2779662 - RNA, 16 nt, Human
guuuuggaagcucuga

SEQ ID NO: 2779663 - RNA, 16 nt, Human
guuuuggacuccaucu

SEQ ID NO: 2779664 - RNA, 18 nt, Human
guuuuggaucuugaaugu

SEQ ID NO: 2779665 - RNA, 19 nt, Human
guuuuggaucuugaaugug

SEQ ID NO: 2779666 - RNA, 22 nt, Human
guuuugccauguuggccaggcu

SEQ ID NO: 2779667 - RNA, 21 nt, Human
guuuugccauguuggccaggc

SEQ ID NO: 2779668 - RNA, 20 nt, Human
guuuugccauguuggccagg

SEQ ID NO: 2779669 - RNA, 16 nt, Human
guuuugccauguuggc

SEQ ID NO: 2779670 - RNA, 21 nt, Human
guuucugcccacauuggaccc

SEQ ID NO: 2779671 - RNA, 22 nt, Human
guuucugcaugaauaucauaca

SEQ ID NO: 2779672 - RNA, 13 nt, Human
uaaaagaauuuuu

SEQ ID NO: 2779673 - RNA, 19 nt, Human
uaaaagaauuuuuuugucu

SEQ ID NO: 2779674 - RNA, 20 nt, Human
uaaaagaauuuuuuugucuu

SEQ ID NO: 2779675 - RNA, 11 nt, Human
uaaaagacaaa

SEQ ID NO: 2779676 - RNA, 12 nt, Human
uaaaagacaaau

SEQ ID NO: 2779677 - RNA, 13 nt, Human
uaaaacuugcugc

SEQ ID NO: 2779678 - RNA, 15 nt, Human
uaaaaccugucaaug

SEQ ID NO: 2779679 - RNA, 19 nt, Human
uaaaaccccaucucuacua

SEQ ID NO: 2779680 - RNA, 21 nt, Human
uaaaaccccagccaacucauu

SEQ ID NO: 2779681 - RNA, 13 nt, Human
uaaaaccuuucaa

SEQ ID NO: 2779682 - RNA, 11 nt, Human
uaaaaccuuuc

SEQ ID NO: 2779683 - RNA, 10 nt, Human
uaaaaccuuu

SEQ ID NO: 2779684 - RNA, 16 nt, Human
uaaaaccugucaauga

SEQ ID NO: 2779685 - RNA, 21 nt, Human
uaaaaccuuucaaauuucaca

SEQ ID NO: 2779686 - RNA, 20 nt, Human
uaaaaccuuucaaauuucac

SEQ ID NO: 2779687 - RNA, 16 nt, Human
uaaaaccuuucaaauu

SEQ ID NO: 2779688 - RNA, 14 nt, Human
uaaaaccuuucaaa

SEQ ID NO: 2779689 - RNA, 20 nt, Human
uaaaacgcugucaaaaguug

SEQ ID NO: 2779690 - RNA, 15 nt, Human
uaaaacuucuuaaau

SEQ ID NO: 2779691 - RNA, 18 nt, Human
uaaaacuucuuaaauauc

SEQ ID NO: 2779692 - RNA, 19 nt, Human
uaaaacuucuuaaauaucu

SEQ ID NO: 2779693 - RNA, 20 nt, Human
uaaaacuucuuaaauaucuu

SEQ ID NO: 2779694 - RNA, 21 nt, Human
uaaaacuucuuaaauaucuuu

SEQ ID NO: 2779695 - RNA, 22 nt, Human
uaaaacuucuuaaauaucuuuu

SEQ ID NO: 2779696 - RNA, 14 nt, Human
guuuuucuuguaaa

SEQ ID NO: 2779697 - RNA, 12 nt, Human
uaaaaaguggaa

SEQ ID NO: 2779698 - RNA, 17 nt, Human
uaaaaaguggaauuucu

SEQ ID NO: 2779699 - RNA, 18 nt, Human
uaaaaaguggaauuucuu

SEQ ID NO: 2779700 - RNA, 14 nt, Human
uaaaaaucacacug

SEQ ID NO: 2779701 - RNA, 15 nt, Human
uaaaaaucacacugu

SEQ ID NO: 2779702 - RNA, 16 nt, Human
uaaaaaucacacugua

SEQ ID NO: 2779703 - RNA, 17 nt, Human
uaaaaauaaauagaaaa

SEQ ID NO: 2779704 - RNA, 21 nt, Human
uaaaaauaaauagaaaaguag

SEQ ID NO: 2779705 - RNA, 14 nt, Human
uaaaaauaaauccc

SEQ ID NO: 2779706 - RNA, 19 nt, Human
uaaaaauaaaucccaugga

SEQ ID NO: 2779707 - RNA, 12 nt, Human
uaaaaaguuaau

SEQ ID NO: 2779708 - RNA, 14 nt, Human
uaaaaaguuguuca

SEQ ID NO: 2779709 - RNA, 15 nt, Human
uaaaaaguuguucaa

SEQ ID NO: 2779710 - RNA, 20 nt, Human
uaaaagacaaaucaaagcag

SEQ ID NO: 2779711 - RNA, 22 nt, Human
uaaaagacaaaucaaagcagau

SEQ ID NO: 2779712 - RNA, 19 nt, Human
uaaaagagacaaacuguaa

SEQ ID NO: 2779713 - RNA, 22 nt, Human
uaaaagugggcuugauucugca

SEQ ID NO: 2779714 - RNA, 14 nt, Human
uaaaauaaacaguu

SEQ ID NO: 2779715 - RNA, 15 nt, Human
uaaaauaaacaguug

SEQ ID NO: 2779716 - RNA, 19 nt, Human
uaaaaguuucaaugugauu

SEQ ID NO: 2779717 - RNA, 15 nt, Human
uaaaauaauucuaaa

SEQ ID NO: 2779718 - RNA, 14 nt, Human
uaaaaguugugauu

SEQ ID NO: 2779719 - RNA, 15 nt, Human
uaaaaguugugauuc

SEQ ID NO: 2779720 - RNA, 21 nt, Human
uaaaaguugugauuccagaua

SEQ ID NO: 2779721 - RNA, 13 nt, Human
uaaaaguuucaau

SEQ ID NO: 2779722 - RNA, 15 nt, Human
uaaaaguuucaaugu

SEQ ID NO: 2779723 - RNA, 18 nt, Human
uaaaaguuucaaugugau

SEQ ID NO: 2779724 - RNA, 23 nt, Human
uaaaagugggcuugauucugcag

SEQ ID NO: 2779725 - RNA, 22 nt, Human
uaaaagugucaccuuuucuugc

SEQ ID NO: 2779726 - RNA, 16 nt, Human
uaaaauaauucuaaag

SEQ ID NO: 2779727 - RNA, 17 nt, Human
uaaaauaauucuaaagg

SEQ ID NO: 2779728 - RNA, 23 nt, Human
uaaaauagaguguaguuuacaga

SEQ ID NO: 2779729 - RNA, 21 nt, Human
uaaaauagaguguaguuuaca

SEQ ID NO: 2779730 - RNA, 17 nt, Human
uaaaauagaguguaguu

SEQ ID NO: 2779731 - RNA, 16 nt, Human
uaaaauagaguguagu

SEQ ID NO: 2779732 - RNA, 17 nt, Human
uaaaauagaaauaagug

SEQ ID NO: 2779733 - RNA, 18 nt, Human
uaaaauaauuucucuaca

SEQ ID NO: 2779734 - RNA, 18 nt, Human
aagugauucuccugccuc

SEQ ID NO: 2779735 - RNA, 17 nt, Human
aagugauucuccugccu

SEQ ID NO: 2779736 - RNA, 16 nt, Human
aagugauucuccugcc

SEQ ID NO: 2779737 - RNA, 15 nt, Human
aagugauucuccugc

SEQ ID NO: 2779738 - RNA, 19 nt, Human
aagugauucuccugccuca

SEQ ID NO: 2779739 - RNA, 21 nt, Human
aagugauucucaugccucagc

SEQ ID NO: 2779740 - RNA, 15 nt, Human
aagugccgcaaauug

SEQ ID NO: 2779741 - RNA, 16 nt, Human
aagugccgcaaauugu

SEQ ID NO: 2779742 - RNA, 19 nt, Human
aagugccgcaaauuguacc

SEQ ID NO: 2779743 - RNA, 19 nt, Human
aagugauucucaugccuca

SEQ ID NO: 2779744 - RNA, 15 nt, Human
aagugauaauuucug

SEQ ID NO: 2779745 - RNA, 20 nt, Human
aagugauucucaugccucag

SEQ ID NO: 2779746 - RNA, 17 nt, Human
aagugagugugcugcug

SEQ ID NO: 2779747 - RNA, 19 nt, Human
aagugagugugcugcugua

SEQ ID NO: 2779748 - RNA, 18 nt, Human
aagugaguguuucuauga

SEQ ID NO: 2779749 - RNA, 21 nt, Human
uaaaagacuucccuaacacuu

SEQ ID NO: 2779750 - RNA, 12 nt, Human
uaaaauauuuau

SEQ ID NO: 2779751 - RNA, 15 nt, Human
uaaaauauuuaucug

SEQ ID NO: 2779752 - RNA, 13 nt, Human
uaaaauauuccug

SEQ ID NO: 2779753 - RNA, 22 nt, Human
uaaaauauuccugcauuuguga

SEQ ID NO: 2779754 - RNA, 13 nt, Human
guguauuucaguu

SEQ ID NO: 2779755 - RNA, 14 nt, Human
guguauuucaguuc

SEQ ID NO: 2779756 - RNA, 19 nt, Human
guguauuucuuauacgcuu

SEQ ID NO: 2779757 - RNA, 16 nt, Human
aagaugguacaaccuu

SEQ ID NO: 2779758 - RNA, 17 nt, Human
guguauuuacgcuuuga

SEQ ID NO: 2779759 - RNA, 21 nt, Human
guguauuuacgcuuugauuca

SEQ ID NO: 2779760 - RNA, 17 nt, Human
guguauuuauugaagaa

SEQ ID NO: 2779761 - RNA, 20 nt, Human
guguauuuauugaagaaaca

SEQ ID NO: 2779762 - RNA, 21 nt, Human
gugucaacaccccugugugga

SEQ ID NO: 2779763 - RNA, 14 nt, Human
gugucaaccagaca

SEQ ID NO: 2779764 - RNA, 15 nt, Human
gugucaaccagacag

SEQ ID NO: 2779765 - RNA, 16 nt, Human
gugucaaccagacaga

SEQ ID NO: 2779766 - RNA, 19 nt, Human
gugucaaccagacagaggg

SEQ ID NO: 2779767 - RNA, 20 nt, Human
gugucaagagggucugagga

SEQ ID NO: 2779768 - RNA, 14 nt, Human
gugucacugucccu

SEQ ID NO: 2779769 - RNA, 17 nt, Human
gugucacugucccuccu

SEQ ID NO: 2779770 - RNA, 18 nt, Human
gugucacugucccuccug

SEQ ID NO: 2779771 - RNA, 20 nt, Human
gugucacugucccuccuggu

SEQ ID NO: 2779772 - RNA, 15 nt, Human
gugucacuugugcuu

SEQ ID NO: 2779773 - RNA, 12 nt, Human
gugucagccauu

SEQ ID NO: 2779774 - RNA, 23 nt, Human
gugucagcgccuggccuacccag

SEQ ID NO: 2779775 - RNA, 17 nt, Human
aagauguaccuggugga

SEQ ID NO: 2779776 - RNA, 15 nt, Human
gugucaacuucaaca

SEQ ID NO: 2779777 - RNA, 17 nt, Human
guguggguaccuguauu

SEQ ID NO: 2779778 - RNA, 18 nt, Human
gugugggguucugcuggg

SEQ ID NO: 2779779 - RNA, 16 nt, Human
guguggguaccuguau

SEQ ID NO: 2779780 - RNA, 20 nt, Human
gugugugaaaaugugugugu

SEQ ID NO: 2779781 - RNA, 23 nt, Human
gugucauaaacagaugaauaaac

SEQ ID NO: 2779782 - RNA, 14 nt, Human
guguguauucuuaa

SEQ ID NO: 2779783 - RNA, 22 nt, Human
guguguauucuuaaaaugcaau

SEQ ID NO: 2779784 - RNA, 14 nt, Human
guguguauguguau

SEQ ID NO: 2779785 - RNA, 15 nt, Human
guguguauguguauu

SEQ ID NO: 2779786 - RNA, 20 nt, Human
gugucagguggggcagcuug

SEQ ID NO: 2779787 - RNA, 16 nt, Human
gugucaguauccaggc

SEQ ID NO: 2779788 - RNA, 20 nt, Human
gugucaguggggcucucuga

SEQ ID NO: 2779789 - RNA, 13 nt, Human
guguccaaagcag

SEQ ID NO: 2779790 - RNA, 21 nt, Human
gugucaugauucacccccaaa

SEQ ID NO: 2779791 - RNA, 16 nt, Human
gugucauuucauucca

SEQ ID NO: 2779792 - RNA, 17 nt, Human
gugucauuucauuccau

SEQ ID NO: 2779793 - RNA, 22 nt, Human
gugugacaaggauugcuacugu

SEQ ID NO: 2779794 - RNA, 13 nt, Human
gugugaaugaaca

SEQ ID NO: 2779795 - RNA, 14 nt, Human
gugugaaugaacac

SEQ ID NO: 2779796 - RNA, 13 nt, Human
gugugacagggcc

SEQ ID NO: 2779797 - RNA, 14 nt, Human
gugugacagggcca

SEQ ID NO: 2779798 - RNA, 18 nt, Human
gugugacagggccagugg

SEQ ID NO: 2779799 - RNA, 23 nt, Human
gugugacagggccaguggggccu

SEQ ID NO: 2779800 - RNA, 14 nt, Human
gugugacauuccag

SEQ ID NO: 2779801 - RNA, 15 nt, Human
gugugacauuccagg

SEQ ID NO: 2779802 - RNA, 15 nt, Human
gugugaaugaacacu

SEQ ID NO: 2779803 - RNA, 11 nt, Human
gugugaaugug

SEQ ID NO: 2779804 - RNA, 15 nt, Human
gugugaaugugggca

SEQ ID NO: 2779805 - RNA, 19 nt, Human
gugugaaugugggcacugg

SEQ ID NO: 2779806 - RNA, 21 nt, Human
gugugaaugugggcacuggcc

SEQ ID NO: 2779807 - RNA, 23 nt, Human
gugugaaugugggcacuggccca

SEQ ID NO: 2779808 - RNA, 14 nt, Human
gugugaccaacugu

SEQ ID NO: 2779809 - RNA, 15 nt, Human
gugugaccaacugug

SEQ ID NO: 2779810 - RNA, 16 nt, Human
gugugaccaacugugu

SEQ ID NO: 2779811 - RNA, 23 nt, Human
aagaucugcagggggugugucug

SEQ ID NO: 2779812 - RNA, 21 nt, Human
aagaucucacucugccccccc

SEQ ID NO: 2779813 - RNA, 13 nt, Human
aagaucuacauga

SEQ ID NO: 2779814 - RNA, 14 nt, Human
aagaucuacaugaa

SEQ ID NO: 2779815 - RNA, 16 nt, Human
aagaucuauaaagcga

SEQ ID NO: 2779816 - RNA, 11 nt, Human
aagauccugug

SEQ ID NO: 2779817 - RNA, 14 nt, Human
aagauccugugagg

SEQ ID NO: 2779818 - RNA, 16 nt, Human
aagaucguucucugcc

SEQ ID NO: 2779819 - RNA, 17 nt, Human
aagaucguucucugccu

SEQ ID NO: 2779820 - RNA, 23 nt, Human
aagaugaaggagaggcaacaucc

SEQ ID NO: 2779821 - RNA, 14 nt, Human
aagaugaaguuuua

SEQ ID NO: 2779822 - RNA, 19 nt, Human
aagaugaauacauuuuguu

SEQ ID NO: 2779823 - RNA, 14 nt, Human
aagaugaacucuga

SEQ ID NO: 2779824 - RNA, 18 nt, Human
aagauggcugugccucug

SEQ ID NO: 2779825 - RNA, 15 nt, Human
aagauggaaaggauu

SEQ ID NO: 2779826 - RNA, 20 nt, Human
aagauggcugugccucugcc

SEQ ID NO: 2779827 - RNA, 21 nt, Human
aagauggcugugccucugccu

SEQ ID NO: 2779828 - RNA, 21 nt, Human
aagaugggaacgcagaugauc

SEQ ID NO: 2779829 - RNA, 18 nt, Human
aagaugggcagcuaguuc

SEQ ID NO: 2779830 - RNA, 14 nt, Human
aagauggaguuucu

SEQ ID NO: 2779831 - RNA, 23 nt, Human
aagauggcugugccucugccugu

SEQ ID NO: 2779832 - RNA, 23 nt, Human
aagaggcugccccucucaccaaa

SEQ ID NO: 2779833 - RNA, 22 nt, Human
aagaggcugccccucucaccaa

SEQ ID NO: 2779834 - RNA, 16 nt, Human
aagagggcacacacug

SEQ ID NO: 2779835 - RNA, 17 nt, Human
aagagggcacacacugu

SEQ ID NO: 2779836 - RNA, 21 nt, Human
aagaggcugccccucucacca

SEQ ID NO: 2779837 - RNA, 17 nt, Human
aagaggcugccccucuc

SEQ ID NO: 2779838 - RNA, 15 nt, Human
aagaguagaauugca

SEQ ID NO: 2779839 - RNA, 22 nt, Human
gugggguccugccggagaggaa

SEQ ID NO: 2779840 - RNA, 16 nt, Human
aagaggcugagacagg

SEQ ID NO: 2779841 - RNA, 17 nt, Human
aagaggcguugcuuuca

SEQ ID NO: 2779842 - RNA, 20 nt, Human
aagaggcguugcuuucacuc

SEQ ID NO: 2779843 - RNA, 22 nt, Human
aagaggcguugcuuucacucuc

SEQ ID NO: 2779844 - RNA, 16 nt, Human
aagacuaauuuaaaaa

SEQ ID NO: 2779845 - RNA, 19 nt, Human
aagacuaauuuaaaaaaua

SEQ ID NO: 2779846 - RNA, 23 nt, Human
aagacguguuuguguuugugugu

SEQ ID NO: 2779847 - RNA, 15 nt, Human
aagacguguuugugu

SEQ ID NO: 2779848 - RNA, 16 nt, Human
aagacguguuuguguu

SEQ ID NO: 2779849 - RNA, 14 nt, Human
aagacgccugagcu

SEQ ID NO: 2779850 - RNA, 15 nt, Human
aagacgccugagcuc

SEQ ID NO: 2779851 - RNA, 19 nt, Human
aagacgguuaaauacugug

SEQ ID NO: 2779852 - RNA, 17 nt, Human
aagacuuggcaacagaa

SEQ ID NO: 2779853 - RNA, 20 nt, Human
aagacuuggcaacagaagca

SEQ ID NO: 2779854 - RNA, 19 nt, Human
aagacuuguaauauuuuua

SEQ ID NO: 2779855 - RNA, 18 nt, Human
aagacuuggcaacagaag

SEQ ID NO: 2779856 - RNA, 19 nt, Human
aagacuuggcaacagaagc

SEQ ID NO: 2779857 - RNA, 16 nt, Human
aagacuuggcaacaga

SEQ ID NO: 2779858 - RNA, 18 nt, Human
aagacuucccuaacacuu

SEQ ID NO: 2779859 - RNA, 21 nt, Human
aagacuucauugucccucuuc

SEQ ID NO: 2779860 - RNA, 18 nt, Human
aagacuuccaaagaaugu

SEQ ID NO: 2779861 - RNA, 18 nt, Human
aagagcaugaaauuuuua

SEQ ID NO: 2779862 - RNA, 11 nt, Human
aagagccacag

SEQ ID NO: 2779863 - RNA, 16 nt, Human
aagagcagccuguggc

SEQ ID NO: 2779864 - RNA, 14 nt, Human
aagagcagccugug

SEQ ID NO: 2779865 - RNA, 12 nt, Human
aagacuuguuuu

SEQ ID NO: 2779866 - RNA, 13 nt, Human
aagagcagccugu

SEQ ID NO: 2779867 - RNA, 18 nt, Human
aagagcagccuguggcau

SEQ ID NO: 2779868 - RNA, 17 nt, Human
aagagcagccuguggca

SEQ ID NO: 2779869 - RNA, 19 nt, Human
aagagcagccuguggcauc

SEQ ID NO: 2779870 - RNA, 22 nt, Human
aacuugagggcccagagcagga

SEQ ID NO: 2779871 - RNA, 19 nt, Human
aacuugagguggccuccuu

SEQ ID NO: 2779872 - RNA, 23 nt, Human
aacuugagguggccuccuugcuu

SEQ ID NO: 2779873 - RNA, 20 nt, Human
aacuugagggcccagagcag

SEQ ID NO: 2779874 - RNA, 15 nt, Human
aacuugcauggagca

SEQ ID NO: 2779875 - RNA, 21 nt, Human
aacuugcauccaacuccagga

SEQ ID NO: 2779876 - RNA, 11 nt, Human
aacuugaugca

SEQ ID NO: 2779877 - RNA, 12 nt, Human
aacuugaugcau

SEQ ID NO: 2779878 - RNA, 14 nt, Human
aacuugaugcaugu

SEQ ID NO: 2779879 - RNA, 15 nt, Human
aacuugaugcaugug

SEQ ID NO: 2779880 - RNA, 23 nt, Human
aagaccuugcuuaugauugcaga

SEQ ID NO: 2779881 - RNA, 21 nt, Human
aagaccuuuggagcaaagcug

SEQ ID NO: 2779882 - RNA, 19 nt, Human
aagagccauauaaguuuga

SEQ ID NO: 2779883 - RNA, 20 nt, Human
aagagccauauaaguuugaa

SEQ ID NO: 2779884 - RNA, 9 nt, Human
aagagccau

SEQ ID NO: 2779885 - RNA, 19 nt, Human
aagaggacucgcuuguaaa

SEQ ID NO: 2779886 - RNA, 20 nt, Human
aagaggacucgcuuguaaau

SEQ ID NO: 2779887 - RNA, 22 nt, Human
aagaggacucgcuuguaaauac

SEQ ID NO: 2779888 - RNA, 23 nt, Human
aagaggacucgcuuguaaauacc

SEQ ID NO: 2779889 - RNA, 13 nt, Human
aagaggagcacuu

SEQ ID NO: 2779890 - RNA, 18 nt, Human
aagaggagcacuuccaaa

SEQ ID NO: 2779891 - RNA, 21 nt, Human
aagaggagcacuuccaaaauu

SEQ ID NO: 2779892 - RNA, 19 nt, Human
aagaggaucuccuguccau

SEQ ID NO: 2779893 - RNA, 17 nt, Human
guggccgcccaaggccc

SEQ ID NO: 2779894 - RNA, 9 nt, Human
guggccuca

SEQ ID NO: 2779895 - RNA, 21 nt, Human
guggcccugucccucccaccu

SEQ ID NO: 2779896 - RNA, 22 nt, Human
guggcccugucccucccaccuc

SEQ ID NO: 2779897 - RNA, 23 nt, Human
guggcccugucccucccaccucu

SEQ ID NO: 2779898 - RNA, 14 nt, Human
guggcccuguccug

SEQ ID NO: 2779899 - RNA, 19 nt, Human
guggcccuguccugccaug

SEQ ID NO: 2779900 - RNA, 11 nt, Human
guggcccuugc

SEQ ID NO: 2779901 - RNA, 23 nt, Human
guggccucuccuuguggccuggg

SEQ ID NO: 2779902 - RNA, 17 nt, Human
guggccuccuugcuugu

SEQ ID NO: 2779903 - RNA, 21 nt, Human
guggccuccuugcuuguuaca

SEQ ID NO: 2779904 - RNA, 22 nt, Human
guggccucgggacaccugcccu

SEQ ID NO: 2779905 - RNA, 21 nt, Human
guggccucuccuuguggccug

SEQ ID NO: 2779906 - RNA, 22 nt, Human
guggccucuccuuguggccugg

SEQ ID NO: 2779907 - RNA, 22 nt, Human
guggccuguagaauagccugug

SEQ ID NO: 2779908 - RNA, 12 nt, Human
guggccugggcc

SEQ ID NO: 2779909 - RNA, 15 nt, Human
guggccugggccucc

SEQ ID NO: 2779910 - RNA, 14 nt, Human
guggccugggcaag

SEQ ID NO: 2779911 - RNA, 12 nt, Human
guggccugggca

SEQ ID NO: 2779912 - RNA, 21 nt, Human
guggccuggccaggagcucuu

SEQ ID NO: 2779913 - RNA, 20 nt, Human
guggccuggccaggagcucu

SEQ ID NO: 2779914 - RNA, 18 nt, Human
guggccuggccaggagcu

SEQ ID NO: 2779915 - RNA, 16 nt, Human
guggccuggccaggag

SEQ ID NO: 2779916 - RNA, 13 nt, Human
guggccuggccag

SEQ ID NO: 2779917 - RNA, 12 nt, Human
guggccuggcca

SEQ ID NO: 2779918 - RNA, 14 nt, Human
gugggagcugccug

SEQ ID NO: 2779919 - RNA, 12 nt, Human
guggccugugug

SEQ ID NO: 2779920 - RNA, 13 nt, Human
guggccugugugg

SEQ ID NO: 2779921 - RNA, 15 nt, Human
guggccuguguggcc

SEQ ID NO: 2779922 - RNA, 19 nt, Human
guggccuuggccggcugug

SEQ ID NO: 2779923 - RNA, 21 nt, Human
guggccuuggccggcugugcu

SEQ ID NO: 2779924 - RNA, 15 nt, Human
gugggggaaaaauaa

SEQ ID NO: 2779925 - RNA, 17 nt, Human
gugggggaagaccuggc

SEQ ID NO: 2779926 - RNA, 12 nt, Human
guggggcuuggc

SEQ ID NO: 2779927 - RNA, 13 nt, Human
guggggcuuggcg

SEQ ID NO: 2779928 - RNA, 15 nt, Human
guggggcuuggcgug

SEQ ID NO: 2779929 - RNA, 17 nt, Human
guggggcuuggcgugga

SEQ ID NO: 2779930 - RNA, 13 nt, Human
guggggccugugg

SEQ ID NO: 2779931 - RNA, 19 nt, Human
guggggccuguggaaugag

SEQ ID NO: 2779932 - RNA, 13 nt, Human
guggggccuuggu

SEQ ID NO: 2779933 - RNA, 14 nt, Human
guggggcgaggcag

SEQ ID NO: 2779934 - RNA, 18 nt, Human
gugggagcugccuguuca

SEQ ID NO: 2779935 - RNA, 15 nt, Human
gugggagcugccugu

SEQ ID NO: 2779936 - RNA, 17 nt, Human
gugggaagggcuacacc

SEQ ID NO: 2779937 - RNA, 22 nt, Human
guuauucauucugugaucauuu

SEQ ID NO: 2779938 - RNA, 23 nt, Human
guuauucauucugugaucauuua

SEQ ID NO: 2779939 - RNA, 17 nt, Human
guuauuccuugaucauu

SEQ ID NO: 2779940 - RNA, 18 nt, Human
guuauuccuugaucauuu

SEQ ID NO: 2779941 - RNA, 13 nt, Human
guuauucuggagu

SEQ ID NO: 2779942 - RNA, 17 nt, Human
guuauuuuucaaggaag

SEQ ID NO: 2779943 - RNA, 18 nt, Human
guuauuuuucaaggaagg

SEQ ID NO: 2779944 - RNA, 16 nt, Human
guucaaacaauaucau

SEQ ID NO: 2779945 - RNA, 14 nt, Human
guucaaaaagucua

SEQ ID NO: 2779946 - RNA, 18 nt, Human
guucaagcgauucuucug

SEQ ID NO: 2779947 - RNA, 15 nt, Human
guucaacuuccagaa

SEQ ID NO: 2779948 - RNA, 15 nt, Human
guucaacccacagcu

SEQ ID NO: 2779949 - RNA, 16 nt, Human
guucaacccacagcua

SEQ ID NO: 2779950 - RNA, 12 nt, Human
guucaacuauuu

SEQ ID NO: 2779951 - RNA, 14 nt, Human
guucaacuauuuua

SEQ ID NO: 2779952 - RNA, 20 nt, Human
guuaggagugggugacaaga

SEQ ID NO: 2779953 - RNA, 18 nt, Human
guuaggcauuaauguuuc

SEQ ID NO: 2779954 - RNA, 14 nt, Human
guuaggaaauaaaa

SEQ ID NO: 2779955 - RNA, 11 nt, Human
guuagcuggag

SEQ ID NO: 2779956 - RNA, 19 nt, Human
guuagcuuuuuaaaacauu

SEQ ID NO: 2779957 - RNA, 18 nt, Human
guuacuuucuuaauguga

SEQ ID NO: 2779958 - RNA, 15 nt, Human
guuaggaguucgaga

SEQ ID NO: 2779959 - RNA, 17 nt, Human
guuaggaugcucaguug

SEQ ID NO: 2779960 - RNA, 23 nt, Human
guuaggaaauaaaaccuuucaaa

SEQ ID NO: 2779961 - RNA, 15 nt, Human
guuaggaaugagaag

SEQ ID NO: 2779962 - RNA, 22 nt, Human
guuaggaaauaaaaccuuucaa

SEQ ID NO: 2779963 - RNA, 21 nt, Human
guuaggaaauaaaaccuuuca

SEQ ID NO: 2779964 - RNA, 19 nt, Human
guuaggaaauaaaaccuuu

SEQ ID NO: 2779965 - RNA, 18 nt, Human
guuaggaaauaaaaccuu

SEQ ID NO: 2779966 - RNA, 17 nt, Human
guuaggaaauaaaaccu

SEQ ID NO: 2779967 - RNA, 16 nt, Human
guuaggaaauaaaacc

SEQ ID NO: 2779968 - RNA, 10 nt, Human
guuaagagaa

SEQ ID NO: 2779969 - RNA, 12 nt, Human
guuaagagaaac

SEQ ID NO: 2779970 - RNA, 14 nt, Human
guuaagagaaacuu

SEQ ID NO: 2779971 - RNA, 15 nt, Human
guuaagagaaacuuu

SEQ ID NO: 2779972 - RNA, 17 nt, Human
guuaagagaaacuuuau

SEQ ID NO: 2779973 - RNA, 19 nt, Human
guuaagagaaacuuuauac

SEQ ID NO: 2779974 - RNA, 22 nt, Human
guuaagagaaacuuuauacauu

SEQ ID NO: 2779975 - RNA, 18 nt, Human
guuaagcauuaccacuca

SEQ ID NO: 2779976 - RNA, 16 nt, Human
guuaagcauuaccacu

SEQ ID NO: 2779977 - RNA, 21 nt, Human
guuacuuuauguuugucuuuu

SEQ ID NO: 2779978 - RNA, 19 nt, Human
guuagaaaugcagaauccu

SEQ ID NO: 2779979 - RNA, 22 nt, Human
guuagaauauaggucucuucuc

SEQ ID NO: 2779980 - RNA, 14 nt, Human
guuagaaucuauuu

SEQ ID NO: 2779981 - RNA, 17 nt, Human
guuagaaucuauuuucu

SEQ ID NO: 2779982 - RNA, 18 nt, Human
guuagaaucuauuuucua

SEQ ID NO: 2779983 - RNA, 19 nt, Human
guuagaaucuauuuucuau

SEQ ID NO: 2779984 - RNA, 22 nt, Human
guuagaaucuauuuucuaugua

SEQ ID NO: 2779985 - RNA, 19 nt, Human
guuagaaugagaucugaau

SEQ ID NO: 2779986 - RNA, 17 nt, Human
aagcucaggaccaggca

SEQ ID NO: 2779987 - RNA, 12 nt, Human
aagcucauauuu

SEQ ID NO: 2779988 - RNA, 20 nt, Human
aagcucauauuuuguauaua

SEQ ID NO: 2779989 - RNA, 21 nt, Human
aagcucauauuuuguauauau

SEQ ID NO: 2779990 - RNA, 22 nt, Human
aagcucauauuuuguauauauc

SEQ ID NO: 2779991 - RNA, 23 nt, Human
aagcucauauuuuguauauaucu

SEQ ID NO: 2779992 - RNA, 15 nt, Human
aagcucauuucaugc

SEQ ID NO: 2779993 - RNA, 18 nt, Human
aagcucauuucaugcucu

SEQ ID NO: 2779994 - RNA, 19 nt, Human
aagcucauuucaugcucug

SEQ ID NO: 2779995 - RNA, 17 nt, Human
aagcucagcuacugauu

SEQ ID NO: 2779996 - RNA, 19 nt, Human
aagcucaaguguucacaac

SEQ ID NO: 2779997 - RNA, 16 nt, Human
aagcucacaccaaauu

SEQ ID NO: 2779998 - RNA, 18 nt, Human
aagcucaaauaaaaauaa

SEQ ID NO: 2779999 - RNA, 12 nt, Human
aagcuaggccug

SEQ ID NO: 2780000 - RNA, 13 nt, Human
aagcuauuccuuu

SEQ ID NO: 2780001 - RNA, 14 nt, Human
aagcuauuccuuuc

SEQ ID NO: 2780002 - RNA, 19 nt, Human
aagcuauuccuuucccuuc

SEQ ID NO: 2780003 - RNA, 20 nt, Human
aagcuauuccuuucccuucc

SEQ ID NO: 2780004 - RNA, 21 nt, Human
aagcuauuccuuucccuuccu

SEQ ID NO: 2780005 - RNA, 22 nt, Human
aagcuauuccuuucccuuccuc

SEQ ID NO: 2780006 - RNA, 23 nt, Human
aagcuauuccuuucccuuccucu

SEQ ID NO: 2780007 - RNA, 14 nt, Human
aagcuaggaaugaa

SEQ ID NO: 2780008 - RNA, 22 nt, Human
aagccugcaauuucauaugcug

SEQ ID NO: 2780009 - RNA, 17 nt, Human
aagccugcaauuucaua

SEQ ID NO: 2780010 - RNA, 15 nt, Human
aagccugaggcuggg

SEQ ID NO: 2780011 - RNA, 13 nt, Human
guucagcuccagc

SEQ ID NO: 2780012 - RNA, 23 nt, Human
aagccuaaaagugggcuugauuc

SEQ ID NO: 2780013 - RNA, 22 nt, Human
guucagcuaagcuaggaaugaa

SEQ ID NO: 2780014 - RNA, 23 nt, Human
guucaaagccacauuauuucuag

SEQ ID NO: 2780015 - RNA, 20 nt, Human
guucaagcgauucuccugcc

SEQ ID NO: 2780016 - RNA, 19 nt, Human
guucagcuaagcuaggaau

SEQ ID NO: 2780017 - RNA, 14 nt, Human
aagccuaccugcuc

SEQ ID NO: 2780018 - RNA, 16 nt, Human
aagccuaaaugccuua

SEQ ID NO: 2780019 - RNA, 23 nt, Human
aagccuaaaugccuuagaaaugu

SEQ ID NO: 2780020 - RNA, 20 nt, Human
aagccuagaagagcuucuga

SEQ ID NO: 2780021 - RNA, 16 nt, Human
aagccuaccugcucuc

SEQ ID NO: 2780022 - RNA, 19 nt, Human
aagccuaccugcucuccaa

SEQ ID NO: 2780023 - RNA, 22 nt, Human
aagccucaaagagagaaaguuu

SEQ ID NO: 2780024 - RNA, 23 nt, Human
aagccucaagguuuuagguucua

SEQ ID NO: 2780025 - RNA, 22 nt, Human
aagccucaacuagucauuuuuu

SEQ ID NO: 2780026 - RNA, 21 nt, Human
aagccucaagguuuuagguuc

SEQ ID NO: 2780027 - RNA, 16 nt, Human
aagcauuuacuuugug

SEQ ID NO: 2780028 - RNA, 13 nt, Human
aagcauugaaauu

SEQ ID NO: 2780029 - RNA, 14 nt, Human
aagcauugaaauua

SEQ ID NO: 2780030 - RNA, 17 nt, Human
aagcauugaaauuauag

SEQ ID NO: 2780031 - RNA, 13 nt, Human
aagcauugccugg

SEQ ID NO: 2780032 - RNA, 14 nt, Human
aagcauugccuggc

SEQ ID NO: 2780033 - RNA, 21 nt, Human
aagcauugccuggccuuccug

SEQ ID NO: 2780034 - RNA, 21 nt, Human
aagcauugcuguuaugucugu

SEQ ID NO: 2780035 - RNA, 20 nt, Human
aagcauugcuuuuauuuuga

SEQ ID NO: 2780036 - RNA, 22 nt, Human
aagcauugcuuuuauuuugaaa

SEQ ID NO: 2780037 - RNA, 17 nt, Human
aagccaaaaaccuuagc

SEQ ID NO: 2780038 - RNA, 21 nt, Human
aagccaaaaaccuuagcuccc

SEQ ID NO: 2780039 - RNA, 22 nt, Human
aagccaaaaaccuuagcucccu

SEQ ID NO: 2780040 - RNA, 15 nt, Human
aagcauuuaucauuc

SEQ ID NO: 2780041 - RNA, 19 nt, Human
aagcauuuaucauucuugu

SEQ ID NO: 2780042 - RNA, 13 nt, Human
aagcaucuaaguu

SEQ ID NO: 2780043 - RNA, 18 nt, Human
aagcaucuaaguuauaag

SEQ ID NO: 2780044 - RNA, 18 nt, Human
aagcauuaccacucaggc

SEQ ID NO: 2780045 - RNA, 19 nt, Human
aagcauuaccacucaggca

SEQ ID NO: 2780046 - RNA, 15 nt, Human
aagcauucagagagc

SEQ ID NO: 2780047 - RNA, 17 nt, Human
aagcauucagagagcag

SEQ ID NO: 2780048 - RNA, 22 nt, Human
aagcauuccuucuuugauaaug

SEQ ID NO: 2780049 - RNA, 23 nt, Human
aagcauuccuucuuugauaaugu

SEQ ID NO: 2780050 - RNA, 14 nt, Human
aagcauucucccca

SEQ ID NO: 2780051 - RNA, 18 nt, Human
aagcauucuccccagugu

SEQ ID NO: 2780052 - RNA, 23 nt, Human
aagcauucuccccaguguauguc

SEQ ID NO: 2780053 - RNA, 13 nt, Human
aagcauuccuucu

SEQ ID NO: 2780054 - RNA, 14 nt, Human
aagcauuccuucuu

SEQ ID NO: 2780055 - RNA, 16 nt, Human
aagcauuccuucuuug

SEQ ID NO: 2780056 - RNA, 17 nt, Human
aagcauuccuucuuuga

SEQ ID NO: 2780057 - RNA, 18 nt, Human
aagcauuccuucuuugau

SEQ ID NO: 2780058 - RNA, 20 nt, Human
aagcauuccuucuuugauaa

SEQ ID NO: 2780059 - RNA, 21 nt, Human
aagcauuccuucuuugauaau

SEQ ID NO: 2780060 - RNA, 11 nt, Human
gugugugcccu

SEQ ID NO: 2780061 - RNA, 22 nt, Human
aagcaguugaaaugaggcauga

SEQ ID NO: 2780062 - RNA, 15 nt, Human
aagcaguugugucag

SEQ ID NO: 2780063 - RNA, 15 nt, Human
aagcauaaaaacauu

SEQ ID NO: 2780064 - RNA, 17 nt, Human
aagcauaaaaacauuuu

SEQ ID NO: 2780065 - RNA, 22 nt, Human
aagcauaaaaacauuuuaaaaa

SEQ ID NO: 2780066 - RNA, 14 nt, Human
aagcauagauguuu

SEQ ID NO: 2780067 - RNA, 15 nt, Human
aagcauagauguuuu

SEQ ID NO: 2780068 - RNA, 16 nt, Human
aagcauagauguuuug

SEQ ID NO: 2780069 - RNA, 17 nt, Human
aagcauagauguuuugg

SEQ ID NO: 2780070 - RNA, 22 nt, Human
aagcauacaugcaaaaagaaau

SEQ ID NO: 2780071 - RNA, 23 nt, Human
aagcauacaugcaaaaagaaaug

SEQ ID NO: 2780072 - RNA, 21 nt, Human
gugugugcgccuacaggagug

SEQ ID NO: 2780073 - RNA, 17 nt, Human
gugugugaccccuccug

SEQ ID NO: 2780074 - RNA, 22 nt, Human
gugugugaccccuccuggggcc

SEQ ID NO: 2780075 - RNA, 14 nt, Human
gugugugaaaggaa

SEQ ID NO: 2780076 - RNA, 17 nt, Human
gugugugaaugaacacu

SEQ ID NO: 2780077 - RNA, 17 nt, Human
guguguggcagagagag

SEQ ID NO: 2780078 - RNA, 22 nt, Human
aagcagguugaggggcuccugg

SEQ ID NO: 2780079 - RNA, 17 nt, Human
aagcaguaaauuugcua

SEQ ID NO: 2780080 - RNA, 14 nt, Human
aagcaguagacaag

SEQ ID NO: 2780081 - RNA, 21 nt, Human
aagcaguagaaauaauaugca

SEQ ID NO: 2780082 - RNA, 22 nt, Human
aagcaguagaaauaauaugcau

SEQ ID NO: 2780083 - RNA, 16 nt, Human
aagcagguuuuucucc

SEQ ID NO: 2780084 - RNA, 20 nt, Human
aagcaguagaaauaauaugc

SEQ ID NO: 2780085 - RNA, 23 nt, Human
aagcccuuccaugucgccucugc

SEQ ID NO: 2780086 - RNA, 15 nt, Human
aagcccuuccauguc

SEQ ID NO: 2780087 - RNA, 20 nt, Human
aagcccuuccaugucgccuc

SEQ ID NO: 2780088 - RNA, 18 nt, Human
aagcccuguugugccaca

SEQ ID NO: 2780089 - RNA, 22 nt, Human
aagcccuguugugccacagagu

SEQ ID NO: 2780090 - RNA, 12 nt, Human
aagcccuggccc

SEQ ID NO: 2780091 - RNA, 14 nt, Human
aagccgggaacaga

SEQ ID NO: 2780092 - RNA, 15 nt, Human
aagccgaccuuagau

SEQ ID NO: 2780093 - RNA, 19 nt, Human
guuaagaagcuguuguaca

SEQ ID NO: 2780094 - RNA, 20 nt, Human
guuaagaagcuguuguacau

SEQ ID NO: 2780095 - RNA, 13 nt, Human
guuaagaagcugu

SEQ ID NO: 2780096 - RNA, 15 nt, Human
guuaagaagcuguug

SEQ ID NO: 2780097 - RNA, 17 nt, Human
guuaagaagcuguugua

SEQ ID NO: 2780098 - RNA, 22 nt, Human
guuaagacaugauuuccuugaa

SEQ ID NO: 2780099 - RNA, 19 nt, Human
guuaagacaugauuuccuu

SEQ ID NO: 2780100 - RNA, 17 nt, Human
guuaagacaugauuucc

SEQ ID NO: 2780101 - RNA, 21 nt, Human
guuaagaagcuguuguacauu

SEQ ID NO: 2780102 - RNA, 23 nt, Human
aagcccugauuguguauauucau

SEQ ID NO: 2780103 - RNA, 13 nt, Human
aagcccuggagac

SEQ ID NO: 2780104 - RNA, 13 nt, Human
aagcccucccagg

SEQ ID NO: 2780105 - RNA, 20 nt, Human
aagcccucccagguguuaac

SEQ ID NO: 2780106 - RNA, 19 nt, Human
aagcccgccugacagaaac

SEQ ID NO: 2780107 - RNA, 16 nt, Human
aagcccuacagagcug

SEQ ID NO: 2780108 - RNA, 17 nt, Human
aagcccuacagagcugu

SEQ ID NO: 2780109 - RNA, 19 nt, Human
aagcccuacagagcugugg

SEQ ID NO: 2780110 - RNA, 16 nt, Human
aagcccccccuuccac

SEQ ID NO: 2780111 - RNA, 21 nt, Human
aagccccuugcucuccccugc

SEQ ID NO: 2780112 - RNA, 23 nt, Human
aagcccccccuuauaguuugggc

SEQ ID NO: 2780113 - RNA, 14 nt, Human
aagccaagaaagau

SEQ ID NO: 2780114 - RNA, 21 nt, Human
aagcccaggugccagccugag

SEQ ID NO: 2780115 - RNA, 22 nt, Human
aagcccaugaguccuugaaaau

SEQ ID NO: 2780116 - RNA, 19 nt, Human
aagcccaugaguccuugaa

SEQ ID NO: 2780117 - RNA, 20 nt, Human
aagcccaugaguccuugaaa

SEQ ID NO: 2780118 - RNA, 16 nt, Human
aagccaacacccuguc

SEQ ID NO: 2780119 - RNA, 16 nt, Human
aagccaacgacaaagc

SEQ ID NO: 2780120 - RNA, 22 nt, Human
aagccaaagcuaggccuggcca

SEQ ID NO: 2780121 - RNA, 22 nt, Human
aagccaaaguggcauguuuugu

SEQ ID NO: 2780122 - RNA, 13 nt, Human
aagccaaauuuau

SEQ ID NO: 2780123 - RNA, 14 nt, Human
aagccaaauuuauc

SEQ ID NO: 2780124 - RNA, 16 nt, Human
aagccaaauuuaucaa

SEQ ID NO: 2780125 - RNA, 15 nt, Human
aagccaaagaaauga

SEQ ID NO: 2780126 - RNA, 14 nt, Human
aagccaaacucugc

SEQ ID NO: 2780127 - RNA, 12 nt, Human
aagccaaagaaa

SEQ ID NO: 2780128 - RNA, 20 nt, Human
aagccaaacucugccagcca

SEQ ID NO: 2780129 - RNA, 16 nt, Human
aagccaaacucugcca

SEQ ID NO: 2780130 - RNA, 15 nt, Human
aagccaaacucugcc

SEQ ID NO: 2780131 - RNA, 14 nt, Human
uaaaugaauauuuu

SEQ ID NO: 2780132 - RNA, 15 nt, Human
uaaaugaauauuuug

SEQ ID NO: 2780133 - RNA, 16 nt, Human
uaaaugaauauuuuga

SEQ ID NO: 2780134 - RNA, 21 nt, Human
uaaaugaauauuuugauaaua

SEQ ID NO: 2780135 - RNA, 16 nt, Human
uaaaugaagcagcuuu

SEQ ID NO: 2780136 - RNA, 17 nt, Human
uaaaugaagcagcuuua

SEQ ID NO: 2780137 - RNA, 13 nt, Human
uaaaugugguaaa

SEQ ID NO: 2780138 - RNA, 22 nt, Human
uaaaugaagcagcuuuaaacaa

SEQ ID NO: 2780139 - RNA, 23 nt, Human
uaaaugaagcagcuuuaaacaaa

SEQ ID NO: 2780140 - RNA, 14 nt, Human
uaaauguguacaau

SEQ ID NO: 2780141 - RNA, 11 nt, Human
uaaauguguug

SEQ ID NO: 2780142 - RNA, 19 nt, Human
uaaauguguuggacaaaug

SEQ ID NO: 2780143 - RNA, 20 nt, Human
uaaauguguuggacaaaugu

SEQ ID NO: 2780144 - RNA, 22 nt, Human
uaaauguguuggacaaauguga

SEQ ID NO: 2780145 - RNA, 18 nt, Human
uaaauguuaguuucuugg

SEQ ID NO: 2780146 - RNA, 19 nt, Human
uaaauguuaguuucuuggu

SEQ ID NO: 2780147 - RNA, 21 nt, Human
uaaauguuaguuucuugguaa

SEQ ID NO: 2780148 - RNA, 22 nt, Human
uaaauguuaguuucuugguaaa

SEQ ID NO: 2780149 - RNA, 19 nt, Human
uaaauguuaugacuaugua

SEQ ID NO: 2780150 - RNA, 21 nt, Human
uaaauguuaugacuauguaaa

SEQ ID NO: 2780151 - RNA, 23 nt, Human
aaguguauaucagaaaagggaag

SEQ ID NO: 2780152 - RNA, 19 nt, Human
aagugcguguguagaguua

SEQ ID NO: 2780153 - RNA, 21 nt, Human
aagugcguguguagaguuaag

SEQ ID NO: 2780154 - RNA, 17 nt, Human
aagugccuuucugcagu

SEQ ID NO: 2780155 - RNA, 18 nt, Human
aagugccuuucugcaguu

SEQ ID NO: 2780156 - RNA, 23 nt, Human
aagugccuuucugcaguuuuuca

SEQ ID NO: 2780157 - RNA, 15 nt, Human
aagugcgugaaugua

SEQ ID NO: 2780158 - RNA, 16 nt, Human
aagugcgugccgugug

SEQ ID NO: 2780159 - RNA, 20 nt, Human
aagugcgugccgugugagug

SEQ ID NO: 2780160 - RNA, 15 nt, Human
aagugcguguguaga

SEQ ID NO: 2780161 - RNA, 16 nt, Human
aagugcguguguagag

SEQ ID NO: 2780162 - RNA, 17 nt, Human
aagugcguguguagagu

SEQ ID NO: 2780163 - RNA, 18 nt, Human
aagugcguguguagaguu

SEQ ID NO: 2780164 - RNA, 18 nt, Human
uaaaugaaaaucgugaca

SEQ ID NO: 2780165 - RNA, 16 nt, Human
uaaaugaaauuguaaa

SEQ ID NO: 2780166 - RNA, 14 nt, Human
uaaaugaaauugua

SEQ ID NO: 2780167 - RNA, 15 nt, Human
uaaaugaaauuguaa

SEQ ID NO: 2780168 - RNA, 15 nt, Human
uaaauuauacaaauu

SEQ ID NO: 2780169 - RNA, 22 nt, Human
uaaauuauacaaauuaaaaaga

SEQ ID NO: 2780170 - RNA, 17 nt, Human
uaaauuauauuugugcu

SEQ ID NO: 2780171 - RNA, 21 nt, Human
uaaauuauauuugugcuauag

SEQ ID NO: 2780172 - RNA, 20 nt, Human
uaaauguuaugacuauguaa

SEQ ID NO: 2780173 - RNA, 16 nt, Human
uaaauuaugguauuaa

SEQ ID NO: 2780174 - RNA, 17 nt, Human
uaaauuauguaaugcaa

SEQ ID NO: 2780175 - RNA, 18 nt, Human
uaaauuauguaaugcaaa

SEQ ID NO: 2780176 - RNA, 19 nt, Human
uaaauuauguaaugcaaaa

SEQ ID NO: 2780177 - RNA, 11 nt, Human
uaacaaaaugg

SEQ ID NO: 2780178 - RNA, 12 nt, Human
uaacaaaaugga

SEQ ID NO: 2780179 - RNA, 13 nt, Human
uaacaaaauggac

SEQ ID NO: 2780180 - RNA, 15 nt, Human
uaacaaaauggacau

SEQ ID NO: 2780181 - RNA, 19 nt, Human
uaaauuauuaguuuacauc

SEQ ID NO: 2780182 - RNA, 12 nt, Human
uaacaaagauau

SEQ ID NO: 2780183 - RNA, 14 nt, Human
uaacaaagauaucu

SEQ ID NO: 2780184 - RNA, 22 nt, Human
uaacaaagauaucuuuucuuua

SEQ ID NO: 2780185 - RNA, 22 nt, Human
uaacaaacaucacucugcugcu

SEQ ID NO: 2780186 - RNA, 21 nt, Human
uaacaaacaucacucugcugc

SEQ ID NO: 2780187 - RNA, 17 nt, Human
uaacaaugaagauaaaa

SEQ ID NO: 2780188 - RNA, 20 nt, Human
uaacaaugcagcaaggcccu

SEQ ID NO: 2780189 - RNA, 21 nt, Human
uaacaaugcagcaaggcccug

SEQ ID NO: 2780190 - RNA, 14 nt, Human
aauacacuugcccu

SEQ ID NO: 2780191 - RNA, 16 nt, Human
aauacacuugcccugc

SEQ ID NO: 2780192 - RNA, 17 nt, Human
aauacacuugcccugcu

SEQ ID NO: 2780193 - RNA, 22 nt, Human
aauacacuugugauuauaaaau

SEQ ID NO: 2780194 - RNA, 20 nt, Human
aauacacuaauuccuuucua

SEQ ID NO: 2780195 - RNA, 19 nt, Human
aauacagaaauuagccggg

SEQ ID NO: 2780196 - RNA, 21 nt, Human
uaacaaugacacuagaaaacu

SEQ ID NO: 2780197 - RNA, 13 nt, Human
aauacaugcaucu

SEQ ID NO: 2780198 - RNA, 13 nt, Human
aauacagcuuucu

SEQ ID NO: 2780199 - RNA, 14 nt, Human
aauacagcuuucug

SEQ ID NO: 2780200 - RNA, 16 nt, Human
aauacagcuuucugac

SEQ ID NO: 2780201 - RNA, 19 nt, Human
aauacagcuuucugaccuu

SEQ ID NO: 2780202 - RNA, 14 nt, Human
aauacagcagcaag

SEQ ID NO: 2780203 - RNA, 15 nt, Human
aauacagcagcaaga

SEQ ID NO: 2780204 - RNA, 16 nt, Human
aauacagcagcaagaa

SEQ ID NO: 2780205 - RNA, 17 nt, Human
aauacagcagcaagaaa

SEQ ID NO: 2780206 - RNA, 18 nt, Human
aauacagcagcaagaaaa

SEQ ID NO: 2780207 - RNA, 21 nt, Human
aauacagcagcaagaaaaaaa

SEQ ID NO: 2780208 - RNA, 12 nt, Human
aauacagauaac

SEQ ID NO: 2780209 - RNA, 17 nt, Human
aauacagauaacauuag

SEQ ID NO: 2780210 - RNA, 16 nt, Human
aauaccaaguauuuau

SEQ ID NO: 2780211 - RNA, 16 nt, Human
aauacauuuaaaacuu

SEQ ID NO: 2780212 - RNA, 17 nt, Human
aauacauuuaaaacuua

SEQ ID NO: 2780213 - RNA, 22 nt, Human
aauagagcaaaauugauguguu

SEQ ID NO: 2780214 - RNA, 20 nt, Human
aauagagcaaaauugaugug

SEQ ID NO: 2780215 - RNA, 23 nt, Human
aauagaguguaguuuacagaaaa

SEQ ID NO: 2780216 - RNA, 18 nt, Human
aauagaguauaugcacuu

SEQ ID NO: 2780217 - RNA, 15 nt, Human
aauagaguauaugca

SEQ ID NO: 2780218 - RNA, 19 nt, Human
aauagagcuguucaacauc

SEQ ID NO: 2780219 - RNA, 16 nt, Human
aauagaguauaugcac

SEQ ID NO: 2780220 - RNA, 17 nt, Human
aauagaguauaugcacu

SEQ ID NO: 2780221 - RNA, 13 nt, Human
aauagcaacuuuu

SEQ ID NO: 2780222 - RNA, 19 nt, Human
aauagcaacuuuuguguaa

SEQ ID NO: 2780223 - RNA, 16 nt, Human
aauagcaauagcaugg

SEQ ID NO: 2780224 - RNA, 15 nt, Human
aauagcaacuuuugu

SEQ ID NO: 2780225 - RNA, 17 nt, Human
aauagcaacuuuugugu

SEQ ID NO: 2780226 - RNA, 12 nt, Human
aauagcaucugu

SEQ ID NO: 2780227 - RNA, 16 nt, Human
aauagcaucuguacaa

SEQ ID NO: 2780228 - RNA, 19 nt, Human
aauagcaucuguacaaagg

SEQ ID NO: 2780229 - RNA, 20 nt, Human
aauagcaucuguacaaaggg

SEQ ID NO: 2780230 - RNA, 18 nt, Human
aauagacccacaagaggc

SEQ ID NO: 2780231 - RNA, 20 nt, Human
aauaccauuuuuuaaggaaa

SEQ ID NO: 2780232 - RNA, 22 nt, Human
aauaccauuuuuuaaggaaaca

SEQ ID NO: 2780233 - RNA, 23 nt, Human
aauaccauuuuuuaaggaaacaa

SEQ ID NO: 2780234 - RNA, 14 nt, Human
aauacccuucuuuu

SEQ ID NO: 2780235 - RNA, 15 nt, Human
aauaccucaauguuu

SEQ ID NO: 2780236 - RNA, 17 nt, Human
aauaccucaauguuuga

SEQ ID NO: 2780237 - RNA, 16 nt, Human
aauaccucaggaaaga

SEQ ID NO: 2780238 - RNA, 15 nt, Human
aauaccucaugcuuc

SEQ ID NO: 2780239 - RNA, 14 nt, Human
aauaccucauguuu

SEQ ID NO: 2780240 - RNA, 15 nt, Human
aauaccucauguuua

SEQ ID NO: 2780241 - RNA, 19 nt, Human
aauaccucauguuuaugaa

SEQ ID NO: 2780242 - RNA, 21 nt, Human
aauaccucauguuuaugaaaa

SEQ ID NO: 2780243 - RNA, 22 nt, Human
aauaccucauguuuaugaaaau

SEQ ID NO: 2780244 - RNA, 23 nt, Human
aauaccucauguuuaugaaaaua

SEQ ID NO: 2780245 - RNA, 13 nt, Human
aauaccaggauuu

SEQ ID NO: 2780246 - RNA, 16 nt, Human
aauaccagacugcagg

SEQ ID NO: 2780247 - RNA, 15 nt, Human
aauaccauuaaaacu

SEQ ID NO: 2780248 - RNA, 18 nt, Human
aauaccauuaaaacugcu

SEQ ID NO: 2780249 - RNA, 20 nt, Human
aauaccauuaaaacugcuuu

SEQ ID NO: 2780250 - RNA, 21 nt, Human
aauaccauuaaaacugcuuuu

SEQ ID NO: 2780251 - RNA, 16 nt, Human
aauaccauugacacau

SEQ ID NO: 2780252 - RNA, 14 nt, Human
aauaccucugugug

SEQ ID NO: 2780253 - RNA, 13 nt, Human
aauaccucugugu

SEQ ID NO: 2780254 - RNA, 15 nt, Human
aauaccucugugugc

SEQ ID NO: 2780255 - RNA, 16 nt, Human
aauaccucugugugcu

SEQ ID NO: 2780256 - RNA, 16 nt, Human
aauagcuaauaauguu

SEQ ID NO: 2780257 - RNA, 18 nt, Human
aauagcuaauaauguuaa

SEQ ID NO: 2780258 - RNA, 14 nt, Human
aauagccuguggcc

SEQ ID NO: 2780259 - RNA, 22 nt, Human
aauagcgcuguuuuuguugugu

SEQ ID NO: 2780260 - RNA, 14 nt, Human
aauagucuguguga

SEQ ID NO: 2780261 - RNA, 13 nt, Human
aauagucugugug

SEQ ID NO: 2780262 - RNA, 16 nt, Human
aauagucauuccaaau

SEQ ID NO: 2780263 - RNA, 18 nt, Human
aauagucauuccaaauau

SEQ ID NO: 2780264 - RNA, 15 nt, Human
aauagucugugugaa

SEQ ID NO: 2780265 - RNA, 19 nt, Human
aauagugcagaaucucaua

SEQ ID NO: 2780266 - RNA, 21 nt, Human
aauaguucagguaacaggcag

SEQ ID NO: 2780267 - RNA, 21 nt, Human
aauaguuaagacaugauuucc

SEQ ID NO: 2780268 - RNA, 23 nt, Human
aauaguuaagacaugauuuccuu

SEQ ID NO: 2780269 - RNA, 22 nt, Human
aauaguuaagacaugauuuccu

SEQ ID NO: 2780270 - RNA, 14 nt, Human
aauauauuuaauga

SEQ ID NO: 2780271 - RNA, 12 nt, Human
aauaguucaagg

SEQ ID NO: 2780272 - RNA, 23 nt, Human
aauauauuccugagauuuccucc

SEQ ID NO: 2780273 - RNA, 13 nt, Human
aauauauuguuaa

SEQ ID NO: 2780274 - RNA, 17 nt, Human
uaacgcccuauuuuugc

SEQ ID NO: 2780275 - RNA, 20 nt, Human
uaacgcccuauuuuugcaau

SEQ ID NO: 2780276 - RNA, 23 nt, Human
uaacgcaauaaacgcauuaucag

SEQ ID NO: 2780277 - RNA, 21 nt, Human
uaacaguccuaacugguauag

SEQ ID NO: 2780278 - RNA, 15 nt, Human
uaacaguaacgcagg

SEQ ID NO: 2780279 - RNA, 23 nt, Human
uaacaguccccguggccaucccu

SEQ ID NO: 2780280 - RNA, 14 nt, Human
uaacagguauuuug

SEQ ID NO: 2780281 - RNA, 19 nt, Human
uaacagguauuuuguuucu

SEQ ID NO: 2780282 - RNA, 20 nt, Human
uaacagguauuuuguuucuu

SEQ ID NO: 2780283 - RNA, 23 nt, Human
uaacagguauuuuguuucuuuua

SEQ ID NO: 2780284 - RNA, 22 nt, Human
uaacaggucuagaaaaccagcu

SEQ ID NO: 2780285 - RNA, 19 nt, Human
aauauauuuauuuaaagca

SEQ ID NO: 2780286 - RNA, 20 nt, Human
aauauauuuauuuaaagcau

SEQ ID NO: 2780287 - RNA, 14 nt, Human
aauauauuuuuaga

SEQ ID NO: 2780288 - RNA, 16 nt, Human
aauauauuuuaccaua

SEQ ID NO: 2780289 - RNA, 14 nt, Human
aauaucaaaugcag

SEQ ID NO: 2780290 - RNA, 20 nt, Human
aauaucaaaugcaguauauu

SEQ ID NO: 2780291 - RNA, 21 nt, Human
aauaucaaaugcaguauauuu

SEQ ID NO: 2780292 - RNA, 22 nt, Human
aauaucaaaugcaguauauuuc

SEQ ID NO: 2780293 - RNA, 19 nt, Human
aauauauuuuuauauuuag

SEQ ID NO: 2780294 - RNA, 20 nt, Human
aauauauuuuuauauuuagu

SEQ ID NO: 2780295 - RNA, 18 nt, Human
aauauauuuuuagacuca

SEQ ID NO: 2780296 - RNA, 15 nt, Human
aauauauuuuuauau

SEQ ID NO: 2780297 - RNA, 15 nt, Human
aauauauuuuuagac

SEQ ID NO: 2780298 - RNA, 14 nt, Human
uaacuuccuguacu

SEQ ID NO: 2780299 - RNA, 22 nt, Human
uaacguguaucuuuaagaaaaa

SEQ ID NO: 2780300 - RNA, 17 nt, Human
uaacuucuuauggaauu

SEQ ID NO: 2780301 - RNA, 18 nt, Human
uaacuucuuaaaaguugu

SEQ ID NO: 2780302 - RNA, 15 nt, Human
uaacuuggcuuucau

SEQ ID NO: 2780303 - RNA, 19 nt, Human
uaacuucuuauggaauuga

SEQ ID NO: 2780304 - RNA, 18 nt, Human
uaacuucuuauggaauug

SEQ ID NO: 2780305 - RNA, 13 nt, Human
uaagaagcuguug

SEQ ID NO: 2780306 - RNA, 15 nt, Human
uaagaagcuguugua

SEQ ID NO: 2780307 - RNA, 18 nt, Human
uaagaagcuguuguacau

SEQ ID NO: 2780308 - RNA, 19 nt, Human
uaagaagcuguuguacauu

SEQ ID NO: 2780309 - RNA, 17 nt, Human
uaagaaggcaaaaaugu

SEQ ID NO: 2780310 - RNA, 13 nt, Human
uaagaaggcaaaa

SEQ ID NO: 2780311 - RNA, 22 nt, Human
uaagaagcuguuguacauuuau

SEQ ID NO: 2780312 - RNA, 14 nt, Human
uaagaagcuucuaa

SEQ ID NO: 2780313 - RNA, 16 nt, Human
uaagaagcuucuaaua

SEQ ID NO: 2780314 - RNA, 19 nt, Human
uaagaagcuucuaauaaau

SEQ ID NO: 2780315 - RNA, 20 nt, Human
uaagaagcuucuaauaaauu

SEQ ID NO: 2780316 - RNA, 22 nt, Human
uaagaagcuucuaauaaauuau

SEQ ID NO: 2780317 - RNA, 21 nt, Human
uaagaagcuguuguacauuua

SEQ ID NO: 2780318 - RNA, 18 nt, Human
uaagaaggcaaaaaugua

SEQ ID NO: 2780319 - RNA, 14 nt, Human
uaagaauucaaacu

SEQ ID NO: 2780320 - RNA, 18 nt, Human
uaagaauucaaacugggg

SEQ ID NO: 2780321 - RNA, 20 nt, Human
uaagacgguuaaauacugug

SEQ ID NO: 2780322 - RNA, 13 nt, Human
uaagaauugacca

SEQ ID NO: 2780323 - RNA, 19 nt, Human
uaagaauugaccaucugcu

SEQ ID NO: 2780324 - RNA, 22 nt, Human
uaagaauugaccaucugcuuuu

SEQ ID NO: 2780325 - RNA, 22 nt, Human
uaagaauucaaacuggggccuc

SEQ ID NO: 2780326 - RNA, 15 nt, Human
uaacguaaauacaca

SEQ ID NO: 2780327 - RNA, 23 nt, Human
uaacggucuguucuguuucaagg

SEQ ID NO: 2780328 - RNA, 22 nt, Human
uaacggucuguucuguuucaag

SEQ ID NO: 2780329 - RNA, 16 nt, Human
uaacguugagccccug

SEQ ID NO: 2780330 - RNA, 20 nt, Human
uaacguuuuuccuuuaaaaa

SEQ ID NO: 2780331 - RNA, 18 nt, Human
uaacguuuuuccuuuaaa

SEQ ID NO: 2780332 - RNA, 19 nt, Human
uaacguuuuuccuuuaaaa

SEQ ID NO: 2780333 - RNA, 15 nt, Human
uaacguuuuuccuuu

SEQ ID NO: 2780334 - RNA, 14 nt, Human
uaacuuauauugaa

SEQ ID NO: 2780335 - RNA, 16 nt, Human
uaacuuauauugaaga

SEQ ID NO: 2780336 - RNA, 15 nt, Human
uaacuuauguagaua

SEQ ID NO: 2780337 - RNA, 17 nt, Human
uaacuuauguagauauu

SEQ ID NO: 2780338 - RNA, 19 nt, Human
uaacuuauguagauauuug

SEQ ID NO: 2780339 - RNA, 21 nt, Human
uaacuuauguagauauuuggc

SEQ ID NO: 2780340 - RNA, 22 nt, Human
uaacuuauguagauauuuggcu

SEQ ID NO: 2780341 - RNA, 14 nt, Human
uaacuuauugcuga

SEQ ID NO: 2780342 - RNA, 19 nt, Human
uaacuuauugcugauuuua

SEQ ID NO: 2780343 - RNA, 22 nt, Human
uaacuuauugcugauuuuaaug

SEQ ID NO: 2780344 - RNA, 23 nt, Human
uaacuuauugcugauuuuaaugg

SEQ ID NO: 2780345 - RNA, 15 nt, Human
uaacuuauuuagaga

SEQ ID NO: 2780346 - RNA, 16 nt, Human
uaacuuauuuagagau

SEQ ID NO: 2780347 - RNA, 21 nt, Human
uaacuuauuuauguuaaaaga

SEQ ID NO: 2780348 - RNA, 23 nt, Human
uaacuuauuuauguuaaaagauu

SEQ ID NO: 2780349 - RNA, 15 nt, Human
uaacuaggcucagag

SEQ ID NO: 2780350 - RNA, 17 nt, Human
uaacuaguccuuuacua

SEQ ID NO: 2780351 - RNA, 13 nt, Human
uaacuaguggcuc

SEQ ID NO: 2780352 - RNA, 16 nt, Human
uaacuaggcucagaga

SEQ ID NO: 2780353 - RNA, 17 nt, Human
uaacuaguguugcuugg

SEQ ID NO: 2780354 - RNA, 17 nt, Human
uaacuauaaauauguac

SEQ ID NO: 2780355 - RNA, 18 nt, Human
uaacuauauuugcuuuuu

SEQ ID NO: 2780356 - RNA, 19 nt, Human
uaacuaggcucagagaugu

SEQ ID NO: 2780357 - RNA, 17 nt, Human
uaacuauauuugcuuuu

SEQ ID NO: 2780358 - RNA, 13 nt, Human
aaucccuguuuaa

SEQ ID NO: 2780359 - RNA, 19 nt, Human
aaucccucaccuucugagu

SEQ ID NO: 2780360 - RNA, 23 nt, Human
aaucccuagacuuuaggcuuuca

SEQ ID NO: 2780361 - RNA, 23 nt, Human
aaucccuagggcuggcagaaagg

SEQ ID NO: 2780362 - RNA, 23 nt, Human
aauccccaguucgccuggagccc

SEQ ID NO: 2780363 - RNA, 22 nt, Human
aauccccaugccuguggcugcg

SEQ ID NO: 2780364 - RNA, 13 nt, Human
aaucccccaggag

SEQ ID NO: 2780365 - RNA, 14 nt, Human
aaucccccaggaga

SEQ ID NO: 2780366 - RNA, 18 nt, Human
aaucccccuugccacccc

SEQ ID NO: 2780367 - RNA, 15 nt, Human
aaucccccuugccac

SEQ ID NO: 2780368 - RNA, 21 nt, Human
aauccccucccugucaaagcu

SEQ ID NO: 2780369 - RNA, 15 nt, Human
aauccccuuaugacu

SEQ ID NO: 2780370 - RNA, 17 nt, Human
aauccccuuaugacuug

SEQ ID NO: 2780371 - RNA, 23 nt, Human
aaucccagccggccaauggaaac

SEQ ID NO: 2780372 - RNA, 12 nt, Human
aaucccaggaug

SEQ ID NO: 2780373 - RNA, 15 nt, Human
aaucccagcacuuug

SEQ ID NO: 2780374 - RNA, 18 nt, Human
aaucccacccacauguga

SEQ ID NO: 2780375 - RNA, 14 nt, Human
aaucccacuguaug

SEQ ID NO: 2780376 - RNA, 17 nt, Human
aaucccacccacaugug

SEQ ID NO: 2780377 - RNA, 22 nt, Human
aaucagugugucuaaauuugaa

SEQ ID NO: 2780378 - RNA, 18 nt, Human
aaucagugugucuaaauu

SEQ ID NO: 2780379 - RNA, 17 nt, Human
aaucagugugucuaaau

SEQ ID NO: 2780380 - RNA, 14 nt, Human
aaucagugugucua

SEQ ID NO: 2780381 - RNA, 15 nt, Human
aaucaguuaguuuuu

SEQ ID NO: 2780382 - RNA, 21 nt, Human
aaucccaaauuugauugauuu

SEQ ID NO: 2780383 - RNA, 11 nt, Human
aaucuauuuaa

SEQ ID NO: 2780384 - RNA, 13 nt, Human
aaucuauucugug

SEQ ID NO: 2780385 - RNA, 16 nt, Human
aaucuauucuguguug

SEQ ID NO: 2780386 - RNA, 21 nt, Human
aaucuauucuguguugcauua

SEQ ID NO: 2780387 - RNA, 16 nt, Human
aaucuauuuauuaaua

SEQ ID NO: 2780388 - RNA, 12 nt, Human
aaucuauuuaag

SEQ ID NO: 2780389 - RNA, 20 nt, Human
aaucuauuuaauuaggaaaa

SEQ ID NO: 2780390 - RNA, 17 nt, Human
aaucuauuuauuaauau

SEQ ID NO: 2780391 - RNA, 18 nt, Human
aaucuauuuauuaauauu

SEQ ID NO: 2780392 - RNA, 20 nt, Human
aaucuauuuauuaauauuua

SEQ ID NO: 2780393 - RNA, 21 nt, Human
aaucuauuuauuaauauuuaa

SEQ ID NO: 2780394 - RNA, 13 nt, Human
aaucuauuuucua

SEQ ID NO: 2780395 - RNA, 17 nt, Human
aaucuauuuucuaugua

SEQ ID NO: 2780396 - RNA, 19 nt, Human
aaucuauuuucuauguacu

SEQ ID NO: 2780397 - RNA, 20 nt, Human
aaucuauuuucuauguacua

SEQ ID NO: 2780398 - RNA, 21 nt, Human
aaucuauuuucuauguacuag

SEQ ID NO: 2780399 - RNA, 17 nt, Human
aaucuauuucacuuauu

SEQ ID NO: 2780400 - RNA, 23 nt, Human
aaucuauuucacuuauuuuggcu

SEQ ID NO: 2780401 - RNA, 18 nt, Human
aaucugggccagaauuuc

SEQ ID NO: 2780402 - RNA, 14 nt, Human
aaucccuguuuaau

SEQ ID NO: 2780403 - RNA, 9 nt, Human
aauccuccu

SEQ ID NO: 2780404 - RNA, 11 nt, Human
aauccuccucc

SEQ ID NO: 2780405 - RNA, 13 nt, Human
aauccuccuccag

SEQ ID NO: 2780406 - RNA, 20 nt, Human
aauccucucaccucagccuc

SEQ ID NO: 2780407 - RNA, 13 nt, Human
aauccuggcagcc

SEQ ID NO: 2780408 - RNA, 12 nt, Human
aauccuggcagc

SEQ ID NO: 2780409 - RNA, 14 nt, Human
aauccugcaaugaa

SEQ ID NO: 2780410 - RNA, 17 nt, Human
aauccugcaaugaaagg

SEQ ID NO: 2780411 - RNA, 16 nt, Human
aauccugccauuuaaa

SEQ ID NO: 2780412 - RNA, 14 nt, Human
aaucuaaaucuauu

SEQ ID NO: 2780413 - RNA, 15 nt, Human
aaucuaaaucuauuu

SEQ ID NO: 2780414 - RNA, 14 nt, Human
aaucuaaagccagu

SEQ ID NO: 2780415 - RNA, 21 nt, Human
aaucuauccaaaucugaagau

SEQ ID NO: 2780416 - RNA, 19 nt, Human
aaucuaaaucuauuuauua

SEQ ID NO: 2780417 - RNA, 16 nt, Human
aaucuaaaucuauuua

SEQ ID NO: 2780418 - RNA, 17 nt, Human
aaucuaaaucuauuuau

SEQ ID NO: 2780419 - RNA, 12 nt, Human
uaaguaauuaug

SEQ ID NO: 2780420 - RNA, 15 nt, Human
uaaguaauguggaag

SEQ ID NO: 2780421 - RNA, 22 nt, Human
uaaguaauguggaagaaaaugg

SEQ ID NO: 2780422 - RNA, 19 nt, Human
uaagguuucguuucuguau

SEQ ID NO: 2780423 - RNA, 20 nt, Human
uaagguuucguuucuguaua

SEQ ID NO: 2780424 - RNA, 22 nt, Human
uaagguuucguuucuguauaca

SEQ ID NO: 2780425 - RNA, 16 nt, Human
uaaguaauucaagaaa

SEQ ID NO: 2780426 - RNA, 18 nt, Human
uaaguacacaauaagcaa

SEQ ID NO: 2780427 - RNA, 17 nt, Human
uaaguaccacucaggcc

SEQ ID NO: 2780428 - RNA, 15 nt, Human
uaagguucuaaggcc

SEQ ID NO: 2780429 - RNA, 17 nt, Human
uaaggauacuuuacaug

SEQ ID NO: 2780430 - RNA, 20 nt, Human
uaaggaggggaaaaaaaugu

SEQ ID NO: 2780431 - RNA, 22 nt, Human
uaaggaggggaaaaaaauguug

SEQ ID NO: 2780432 - RNA, 21 nt, Human
uaaguuucuaagauucuaaag

SEQ ID NO: 2780433 - RNA, 23 nt, Human
uaaguuucuaagauucuaaaggu

SEQ ID NO: 2780434 - RNA, 21 nt, Human
uaauaaaaaauggaaagaauc

SEQ ID NO: 2780435 - RNA, 15 nt, Human
uaauaaaaaauuaug

SEQ ID NO: 2780436 - RNA, 14 nt, Human
uaauaaaaaaugga

SEQ ID NO: 2780437 - RNA, 15 nt, Human
uaauaaaaaauggaa

SEQ ID NO: 2780438 - RNA, 19 nt, Human
uaauaaaaaauggaaagaa

SEQ ID NO: 2780439 - RNA, 20 nt, Human
uaauaaaaaauggaaagaau

SEQ ID NO: 2780440 - RNA, 19 nt, Human
uaauaaaaagcuuuuuccu

SEQ ID NO: 2780441 - RNA, 23 nt, Human
uaauaaaaagcuuuuuccuccug

SEQ ID NO: 2780442 - RNA, 14 nt, Human
uaaggagaauggcc

SEQ ID NO: 2780443 - RNA, 14 nt, Human
uaaguuauaagacu

SEQ ID NO: 2780444 - RNA, 20 nt, Human
uaaguuucaaacuuacuauu

SEQ ID NO: 2780445 - RNA, 23 nt, Human
uaaguuucaaacuuacuauuuug

SEQ ID NO: 2780446 - RNA, 16 nt, Human
uaaguuucaggugaca

SEQ ID NO: 2780447 - RNA, 17 nt, Human
uaaguuucaggugacau

SEQ ID NO: 2780448 - RNA, 18 nt, Human
uaaguuucaggugacaug

SEQ ID NO: 2780449 - RNA, 19 nt, Human
uaaguuucaggugacaugu

SEQ ID NO: 2780450 - RNA, 20 nt, Human
uaaguuucaggugacaugug

SEQ ID NO: 2780451 - RNA, 22 nt, Human
uaaguuucaggugacaugugaa

SEQ ID NO: 2780452 - RNA, 12 nt, Human
uaaguuucuaag

SEQ ID NO: 2780453 - RNA, 13 nt, Human
uaaguuucuaaga

SEQ ID NO: 2780454 - RNA, 14 nt, Human
uaaguuucuaagau

SEQ ID NO: 2780455 - RNA, 15 nt, Human
uaaguuucuaagauu

SEQ ID NO: 2780456 - RNA, 16 nt, Human
uaaguuucuaagauuc

SEQ ID NO: 2780457 - RNA, 17 nt, Human
uaaguuucuaagauucu

SEQ ID NO: 2780458 - RNA, 18 nt, Human
uaaguuucuaagauucua

SEQ ID NO: 2780459 - RNA, 19 nt, Human
uaaguuucuaagauucuaa

SEQ ID NO: 2780460 - RNA, 20 nt, Human
uaaguuucuaagauucuaaa

SEQ ID NO: 2780461 - RNA, 12 nt, Human
uaaguauuuagg

SEQ ID NO: 2780462 - RNA, 14 nt, Human
uaaguauuuauaau

SEQ ID NO: 2780463 - RNA, 20 nt, Human
uaaguauuuagguuuuuguu

SEQ ID NO: 2780464 - RNA, 14 nt, Human
uaaguauuuauaua

SEQ ID NO: 2780465 - RNA, 13 nt, Human
uaaguauuuauau

SEQ ID NO: 2780466 - RNA, 19 nt, Human
uaaguauuuauauauuuau

SEQ ID NO: 2780467 - RNA, 18 nt, Human
uaaguauuuauauauuua

SEQ ID NO: 2780468 - RNA, 17 nt, Human
uaaguauuuauauauuu

SEQ ID NO: 2780469 - RNA, 15 nt, Human
uaaguauuuauauau

SEQ ID NO: 2780470 - RNA, 23 nt, Human
uaaguauuuauauauuuauaacu

SEQ ID NO: 2780471 - RNA, 16 nt, Human
uaaguuaauaagcaaa

SEQ ID NO: 2780472 - RNA, 15 nt, Human
uaagauuauagauuc

SEQ ID NO: 2780473 - RNA, 16 nt, Human
uaagauuauagauucu

SEQ ID NO: 2780474 - RNA, 17 nt, Human
uaagauuauagauucua

SEQ ID NO: 2780475 - RNA, 18 nt, Human
uaagauuauagauucuaa

SEQ ID NO: 2780476 - RNA, 18 nt, Human
aaucagugggcaggauaa

SEQ ID NO: 2780477 - RNA, 19 nt, Human
aaucagugggcaggauaaa

SEQ ID NO: 2780478 - RNA, 24 nt, Human
aaucagugggcaggauaaacugaa

SEQ ID NO: 2780479 - RNA, 22 nt, Human
uaagcagauggaaugcuguguu

SEQ ID NO: 2780480 - RNA, 19 nt, Human
uaagauuauagauucuaaa

SEQ ID NO: 2780481 - RNA, 20 nt, Human
uaagauuauagauucuaaag

SEQ ID NO: 2780482 - RNA, 21 nt, Human
uaagauuauagauucuaaaga

SEQ ID NO: 2780483 - RNA, 22 nt, Human
uaagauuauagauucuaaagau

SEQ ID NO: 2780484 - RNA, 15 nt, Human
uaagcaaaagaaaaa

SEQ ID NO: 2780485 - RNA, 23 nt, Human
uaagauuauagauucuaaagauu

SEQ ID NO: 2780486 - RNA, 16 nt, Human
uaagcagcuaaauuuu

SEQ ID NO: 2780487 - RNA, 17 nt, Human
uaagcagcuaaauuuuc

SEQ ID NO: 2780488 - RNA, 22 nt, Human
uaagcagcuaaauuuucugaaa

SEQ ID NO: 2780489 - RNA, 21 nt, Human
uaagcaggagagaaauuucuc

SEQ ID NO: 2780490 - RNA, 11 nt, Human
uaaggaaacaa

SEQ ID NO: 2780491 - RNA, 10 nt, Human
uaaggaaacu

SEQ ID NO: 2780492 - RNA, 15 nt, Human
uaaggaaacucuuau

SEQ ID NO: 2780493 - RNA, 17 nt, Human
uaaggaaacucuuaucu

SEQ ID NO: 2780494 - RNA, 19 nt, Human
uaaggaaacucuuaucuca

SEQ ID NO: 2780495 - RNA, 20 nt, Human
uaaggaaacucuuaucucag

SEQ ID NO: 2780496 - RNA, 14 nt, Human
uaaggaagaaacag

SEQ ID NO: 2780497 - RNA, 19 nt, Human
uaaggaaccuuccuuccug

SEQ ID NO: 2780498 - RNA, 15 nt, Human
uaaggaaccuuccuu

SEQ ID NO: 2780499 - RNA, 21 nt, Human
uaaggaccguggcccugcccu

SEQ ID NO: 2780500 - RNA, 23 nt, Human
uaaggaccguggcccugcccucu

SEQ ID NO: 2780501 - RNA, 19 nt, Human
uaaggacaugaugcuuuua

SEQ ID NO: 2780502 - RNA, 15 nt, Human
uaaggaccugaaauu

SEQ ID NO: 2780503 - RNA, 21 nt, Human
uaaggaccugaaauuccaaag

SEQ ID NO: 2780504 - RNA, 22 nt, Human
uaaggaccugaaauuccaaagu

SEQ ID NO: 2780505 - RNA, 12 nt, Human
uaagcagucccu

SEQ ID NO: 2780506 - RNA, 15 nt, Human
uaaggaagauaucua

SEQ ID NO: 2780507 - RNA, 16 nt, Human
aaucagccucuuaaag

SEQ ID NO: 2780508 - RNA, 12 nt, Human
aaucagccucuu

SEQ ID NO: 2780509 - RNA, 13 nt, Human
aaucagccagaca

SEQ ID NO: 2780510 - RNA, 18 nt, Human
aaucacucuguccuugga

SEQ ID NO: 2780511 - RNA, 12 nt, Human
aaucagcauucu

SEQ ID NO: 2780512 - RNA, 19 nt, Human
aaucagcauucucacuccu

SEQ ID NO: 2780513 - RNA, 18 nt, Human
aaucagcauucucacucc

SEQ ID NO: 2780514 - RNA, 23 nt, Human
aaucagcuauuuacugccaaagg

SEQ ID NO: 2780515 - RNA, 21 nt, Human
aaucaguaauauuuauauauu

SEQ ID NO: 2780516 - RNA, 19 nt, Human
aaucagucagugcaaaugu

SEQ ID NO: 2780517 - RNA, 21 nt, Human
aaucagucagugcaaauguca

SEQ ID NO: 2780518 - RNA, 13 nt, Human
aauauuuauuuau

SEQ ID NO: 2780519 - RNA, 15 nt, Human
aauauuuucuggguu

SEQ ID NO: 2780520 - RNA, 11 nt, Human
aauauuuauuu

SEQ ID NO: 2780521 - RNA, 14 nt, Human
aauauuuugauaau

SEQ ID NO: 2780522 - RNA, 15 nt, Human
aauauuuugauaaua

SEQ ID NO: 2780523 - RNA, 16 nt, Human
aauauuuugauaauaa

SEQ ID NO: 2780524 - RNA, 20 nt, Human
aauauuuugauaauaaauug

SEQ ID NO: 2780525 - RNA, 18 nt, Human
aauauuuugauaauaaua

SEQ ID NO: 2780526 - RNA, 12 nt, Human
aauauuuauuaa

SEQ ID NO: 2780527 - RNA, 23 nt, Human
aauauuuaugucuauuuaagccu

SEQ ID NO: 2780528 - RNA, 11 nt, Human
aauauuuauua

SEQ ID NO: 2780529 - RNA, 21 nt, Human
aauauuuaugucuauuuaagc

SEQ ID NO: 2780530 - RNA, 17 nt, Human
aauauuuauuaaauaaa

SEQ ID NO: 2780531 - RNA, 18 nt, Human
aauauuuauuaaauaaaa

SEQ ID NO: 2780532 - RNA, 21 nt, Human
aauauuuauuaaauaaaauca

SEQ ID NO: 2780533 - RNA, 22 nt, Human
aauauuuauuaaauaaaaucaa

SEQ ID NO: 2780534 - RNA, 19 nt, Human
aauauuuaugucuauuuaa

SEQ ID NO: 2780535 - RNA, 12 nt, Human
aauauuuaugga

SEQ ID NO: 2780536 - RNA, 13 nt, Human
aauauuuauggau

SEQ ID NO: 2780537 - RNA, 19 nt, Human
aauauuuauggaugcaaca

SEQ ID NO: 2780538 - RNA, 15 nt, Human
aauauuuauagguca

SEQ ID NO: 2780539 - RNA, 17 nt, Human
aauauuuauauauuuau

SEQ ID NO: 2780540 - RNA, 14 nt, Human
aauauuuauauauu

SEQ ID NO: 2780541 - RNA, 17 nt, Human
uaagacuuacucuaaga

SEQ ID NO: 2780542 - RNA, 18 nt, Human
uaagacuuacucuaagau

SEQ ID NO: 2780543 - RNA, 15 nt, Human
uaagacguguuugug

SEQ ID NO: 2780544 - RNA, 14 nt, Human
uaagacgacaagga

SEQ ID NO: 2780545 - RNA, 15 nt, Human
uaagacucaaauguu

SEQ ID NO: 2780546 - RNA, 18 nt, Human
uaagacucaaauguucua

SEQ ID NO: 2780547 - RNA, 19 nt, Human
uaagacucaaauguucuaa

SEQ ID NO: 2780548 - RNA, 16 nt, Human
uaagacucucacacuc

SEQ ID NO: 2780549 - RNA, 18 nt, Human
uaagacucauucccuaga

SEQ ID NO: 2780550 - RNA, 21 nt, Human
uaagacucaaauguucuaagu

SEQ ID NO: 2780551 - RNA, 22 nt, Human
uaagacucaaauguucuaaguu

SEQ ID NO: 2780552 - RNA, 21 nt, Human
uacaaugaacacuuauaagug

SEQ ID NO: 2780553 - RNA, 15 nt, Human
uacaaugaacacuua

SEQ ID NO: 2780554 - RNA, 22 nt, Human
uaauuuuuuuuuuccuuuuaaa

SEQ ID NO: 2780555 - RNA, 18 nt, Human
uaauuuuuuugagacaga

SEQ ID NO: 2780556 - RNA, 16 nt, Human
uaauuuuuuuuaguau

SEQ ID NO: 2780557 - RNA, 18 nt, Human
uaauuuuuuuuucauaga

SEQ ID NO: 2780558 - RNA, 21 nt, Human
uaauuuuuuucaccuagauuu

SEQ ID NO: 2780559 - RNA, 22 nt, Human
uaauuuuucagcucucuguaua

SEQ ID NO: 2780560 - RNA, 15 nt, Human
uaauuuuuguauuuu

SEQ ID NO: 2780561 - RNA, 14 nt, Human
uaauuuuuguaauu

SEQ ID NO: 2780562 - RNA, 18 nt, Human
uacaauucuacauuguca

SEQ ID NO: 2780563 - RNA, 22 nt, Human
uacaauuaaaaaaaaagaucug

SEQ ID NO: 2780564 - RNA, 21 nt, Human
uacaauuaauaguuugucuau

SEQ ID NO: 2780565 - RNA, 22 nt, Human
uacaauuaauaguuugucuauu

SEQ ID NO: 2780566 - RNA, 13 nt, Human
uacaauguguuuu

SEQ ID NO: 2780567 - RNA, 17 nt, Human
uacaauguguuuuucuc

SEQ ID NO: 2780568 - RNA, 19 nt, Human
uacaauguguuuuucucca

SEQ ID NO: 2780569 - RNA, 20 nt, Human
uacaauguguuuuucuccag

SEQ ID NO: 2780570 - RNA, 21 nt, Human
uacaauguguuuuucuccagu

SEQ ID NO: 2780571 - RNA, 18 nt, Human
uacaauuaaaaaaaaaga

SEQ ID NO: 2780572 - RNA, 13 nt, Human
aauggaagacaca

SEQ ID NO: 2780573 - RNA, 22 nt, Human
aaugcuggcuguuggcuggggg

SEQ ID NO: 2780574 - RNA, 18 nt, Human
aaugcauguuaggaaaau

SEQ ID NO: 2780575 - RNA, 13 nt, Human
aaugcauuaaacc

SEQ ID NO: 2780576 - RNA, 15 nt, Human
aaugcauuaaaccug

SEQ ID NO: 2780577 - RNA, 18 nt, Human
aaugcauuaaaccugucu

SEQ ID NO: 2780578 - RNA, 21 nt, Human
aaugcuggcuguuggcugggg

SEQ ID NO: 2780579 - RNA, 21 nt, Human
aaugcaugaacaaguuuuaau

SEQ ID NO: 2780580 - RNA, 13 nt, Human
aaugcaugaguaa

SEQ ID NO: 2780581 - RNA, 18 nt, Human
aaugcaugaguaaaaaaa

SEQ ID NO: 2780582 - RNA, 15 nt, Human
aaugcaucagguccu

SEQ ID NO: 2780583 - RNA, 21 nt, Human
aaugcauccagcaguacaaua

SEQ ID NO: 2780584 - RNA, 12 nt, Human
aauguaaauauu

SEQ ID NO: 2780585 - RNA, 12 nt, Human
aauguaaauaaa

SEQ ID NO: 2780586 - RNA, 18 nt, Human
aauguaaauauucuauau

SEQ ID NO: 2780587 - RNA, 17 nt, Human
aauguaaaauguugaau

SEQ ID NO: 2780588 - RNA, 13 nt, Human
aauguaaacauuu

SEQ ID NO: 2780589 - RNA, 14 nt, Human
aauguaaacauuuu

SEQ ID NO: 2780590 - RNA, 14 nt, Human
aauguaaacugcca

SEQ ID NO: 2780591 - RNA, 15 nt, Human
aauguaaacugccau

SEQ ID NO: 2780592 - RNA, 16 nt, Human
aauguaaacugccaua

SEQ ID NO: 2780593 - RNA, 16 nt, Human
aaugguuuguccugau

SEQ ID NO: 2780594 - RNA, 15 nt, Human
aauguaaagauuugc

SEQ ID NO: 2780595 - RNA, 23 nt, Human
aauguaaaggagucaaaacuaca

SEQ ID NO: 2780596 - RNA, 21 nt, Human
aauguaaaggagucaaaacua

SEQ ID NO: 2780597 - RNA, 20 nt, Human
aauguaaaggagucaaaacu

SEQ ID NO: 2780598 - RNA, 19 nt, Human
aauggagucaguuugcagu

SEQ ID NO: 2780599 - RNA, 14 nt, Human
aauggaagacacau

SEQ ID NO: 2780600 - RNA, 16 nt, Human
aauggauuggauuauu

SEQ ID NO: 2780601 - RNA, 18 nt, Human
aauggauuggauuauuua

SEQ ID NO: 2780602 - RNA, 20 nt, Human
aauggauuggauuauuuaau

SEQ ID NO: 2780603 - RNA, 17 nt, Human
aauggaugccuugaaua

SEQ ID NO: 2780604 - RNA, 22 nt, Human
aauggaugccuugaauaauaag

SEQ ID NO: 2780605 - RNA, 14 nt, Human
aauggauucuauuu

SEQ ID NO: 2780606 - RNA, 19 nt, Human
aauggauacuacaucuuua

SEQ ID NO: 2780607 - RNA, 14 nt, Human
aauggauagcucau

SEQ ID NO: 2780608 - RNA, 14 nt, Human
aauggauauuauua

SEQ ID NO: 2780609 - RNA, 17 nt, Human
aauggauauuauuagaa

SEQ ID NO: 2780610 - RNA, 19 nt, Human
aauggauauuauuagaaau

SEQ ID NO: 2780611 - RNA, 22 nt, Human
aauggauauuuguacuguuuaa

SEQ ID NO: 2780612 - RNA, 15 nt, Human
uacaccuaaaggugu

SEQ ID NO: 2780613 - RNA, 23 nt, Human
uacaccuaaagguguauuuaaac

SEQ ID NO: 2780614 - RNA, 13 nt, Human
aauguaauuguaa

SEQ ID NO: 2780615 - RNA, 15 nt, Human
aauguaauuguaauu

SEQ ID NO: 2780616 - RNA, 23 nt, Human
aauguaauuguaauuuugaaaug

SEQ ID NO: 2780617 - RNA, 13 nt, Human
aauguaaugcgau

SEQ ID NO: 2780618 - RNA, 16 nt, Human
uacaccgacuagccag

SEQ ID NO: 2780619 - RNA, 17 nt, Human
uacaccgacuagccagg

SEQ ID NO: 2780620 - RNA, 22 nt, Human
uacacccccucuucugagcaca

SEQ ID NO: 2780621 - RNA, 20 nt, Human
uacacccccucuucugagca

SEQ ID NO: 2780622 - RNA, 14 nt, Human
uacacccaaagagg

SEQ ID NO: 2780623 - RNA, 14 nt, Human
uacacccagacccc

SEQ ID NO: 2780624 - RNA, 15 nt, Human
uacacccagacccca

SEQ ID NO: 2780625 - RNA, 19 nt, Human
uacacccagaccccaggcu

SEQ ID NO: 2780626 - RNA, 20 nt, Human
uacacccagaccccaggcug

SEQ ID NO: 2780627 - RNA, 15 nt, Human
uacaccgggccugga

SEQ ID NO: 2780628 - RNA, 17 nt, Human
uacaccgggccuggaga

SEQ ID NO: 2780629 - RNA, 14 nt, Human
uaauuauuauuugu

SEQ ID NO: 2780630 - RNA, 17 nt, Human
uaauuauuauuuguguu

SEQ ID NO: 2780631 - RNA, 13 nt, Human
uaauuuaaagaga

SEQ ID NO: 2780632 - RNA, 14 nt, Human
uaauuuaaagagac

SEQ ID NO: 2780633 - RNA, 11 nt, Human
uaauuuaaaca

SEQ ID NO: 2780634 - RNA, 17 nt, Human
uaauuuaaacaccuccu

SEQ ID NO: 2780635 - RNA, 19 nt, Human
uaauuuaaacaccuccuca

SEQ ID NO: 2780636 - RNA, 21 nt, Human
uaauuccuauauccugugacu

SEQ ID NO: 2780637 - RNA, 13 nt, Human
uaauuccuacagc

SEQ ID NO: 2780638 - RNA, 16 nt, Human
uaauuccuacagcacu

SEQ ID NO: 2780639 - RNA, 21 nt, Human
uaauuccuacagcacuacugg

SEQ ID NO: 2780640 - RNA, 13 nt, Human
uaauuuauaaaau

SEQ ID NO: 2780641 - RNA, 21 nt, Human
uaauuuaagagcuaaccaguu

SEQ ID NO: 2780642 - RNA, 15 nt, Human
uaauuuaguuauuga

SEQ ID NO: 2780643 - RNA, 16 nt, Human
uaauuuaguuauugau

SEQ ID NO: 2780644 - RNA, 16 nt, Human
uaauuuagauuguaaa

SEQ ID NO: 2780645 - RNA, 18 nt, Human
uaauuuaggguacuaaau

SEQ ID NO: 2780646 - RNA, 19 nt, Human
uaauuuaggguacuaaauu

SEQ ID NO: 2780647 - RNA, 21 nt, Human
uaauuuaggguacuaaauuua

SEQ ID NO: 2780648 - RNA, 23 nt, Human
uaauuuaggguacuaaauuuaaa

SEQ ID NO: 2780649 - RNA, 15 nt, Human
uaauuuaguaaaugu

SEQ ID NO: 2780650 - RNA, 16 nt, Human
uaauuuaguaaauguu

SEQ ID NO: 2780651 - RNA, 17 nt, Human
uaauuuaguaaauguua

SEQ ID NO: 2780652 - RNA, 20 nt, Human
uaauuuaguaaauguuaucu

SEQ ID NO: 2780653 - RNA, 16 nt, Human
uaauuuagugaucuua

SEQ ID NO: 2780654 - RNA, 21 nt, Human
uaauuuagugaucuuagcaua

SEQ ID NO: 2780655 - RNA, 14 nt, Human
aaugauuuuuagau

SEQ ID NO: 2780656 - RNA, 16 nt, Human
aaugcacagauauacu

SEQ ID NO: 2780657 - RNA, 17 nt, Human
aaugcacagauauacuu

SEQ ID NO: 2780658 - RNA, 18 nt, Human
aaugcacagauauacuuu

SEQ ID NO: 2780659 - RNA, 19 nt, Human
aaugcaccuagcugugcaa

SEQ ID NO: 2780660 - RNA, 16 nt, Human
aaugcacauccauucc

SEQ ID NO: 2780661 - RNA, 17 nt, Human
aaugcacauccauuccc

SEQ ID NO: 2780662 - RNA, 18 nt, Human
aaugcacauccauuccca

SEQ ID NO: 2780663 - RNA, 14 nt, Human
aaugcaaaaccuuu

SEQ ID NO: 2780664 - RNA, 20 nt, Human
aaugcaaaauuuuuuuaauc

SEQ ID NO: 2780665 - RNA, 13 nt, Human
uaauuauuauuaa

SEQ ID NO: 2780666 - RNA, 19 nt, Human
uaauuauuaacuacauuua

SEQ ID NO: 2780667 - RNA, 20 nt, Human
uaauuauuaacuacauuuau

SEQ ID NO: 2780668 - RNA, 11 nt, Human
aaugcacggcc

SEQ ID NO: 2780669 - RNA, 13 nt, Human
aaugcacggccuc

SEQ ID NO: 2780670 - RNA, 13 nt, Human
aaugagcccagag

SEQ ID NO: 2780671 - RNA, 14 nt, Human
aaugagcccagaga

SEQ ID NO: 2780672 - RNA, 19 nt, Human
aaugagcccagagaacagc

SEQ ID NO: 2780673 - RNA, 23 nt, Human
aaugagcacccauuccaaagcuu

SEQ ID NO: 2780674 - RNA, 13 nt, Human
aaugagcaccucc

SEQ ID NO: 2780675 - RNA, 14 nt, Human
aaugagcaccucca

SEQ ID NO: 2780676 - RNA, 17 nt, Human
aaugagagguuccuaag

SEQ ID NO: 2780677 - RNA, 11 nt, Human
aaucuguacau

SEQ ID NO: 2780678 - RNA, 12 nt, Human
aaucuguacauu

SEQ ID NO: 2780679 - RNA, 13 nt, Human
aaucuguacauuu

SEQ ID NO: 2780680 - RNA, 14 nt, Human
aaucuguacauuuu

SEQ ID NO: 2780681 - RNA, 19 nt, Human
aaucuguacauuuuguugu

SEQ ID NO: 2780682 - RNA, 22 nt, Human
aaucuguacauuuuguuguaaa

SEQ ID NO: 2780683 - RNA, 21 nt, Human
aaucuguaacagguauuuugu

SEQ ID NO: 2780684 - RNA, 14 nt, Human
aaucuggucuuguu

SEQ ID NO: 2780685 - RNA, 19 nt, Human
aaucuggucuuguuagaaa

SEQ ID NO: 2780686 - RNA, 20 nt, Human
aaucuggucuuguuagaaaa

SEQ ID NO: 2780687 - RNA, 20 nt, Human
aaugacucagaauauugcuu

SEQ ID NO: 2780688 - RNA, 22 nt, Human
aaugacuuauuguggauaacaa

SEQ ID NO: 2780689 - RNA, 23 nt, Human
aaugacuuauuguggauaacaaa

SEQ ID NO: 2780690 - RNA, 24 nt, Human
aaugacuuauuguggauaacaaag

SEQ ID NO: 2780691 - RNA, 12 nt, Human
aaugacuacuua

SEQ ID NO: 2780692 - RNA, 14 nt, Human
aaugacuacuuagc

SEQ ID NO: 2780693 - RNA, 16 nt, Human
aaugacuaauuagggu

SEQ ID NO: 2780694 - RNA, 23 nt, Human
aaugacuaauuaggguacauuua

SEQ ID NO: 2780695 - RNA, 12 nt, Human
aaucugucaaaa

SEQ ID NO: 2780696 - RNA, 14 nt, Human
aaucugucaaaaca

SEQ ID NO: 2780697 - RNA, 16 nt, Human
aaucugucaaaacacu

SEQ ID NO: 2780698 - RNA, 17 nt, Human
aaucugucaaaacacug

SEQ ID NO: 2780699 - RNA, 18 nt, Human
aaucugucaaaacacugu

SEQ ID NO: 2780700 - RNA, 12 nt, Human
aaugauaaaaca

SEQ ID NO: 2780701 - RNA, 13 nt, Human
aaugauaaaacac

SEQ ID NO: 2780702 - RNA, 14 nt, Human
aaugauaaaacacc

SEQ ID NO: 2780703 - RNA, 14 nt, Human
aaugauuauuuuca

SEQ ID NO: 2780704 - RNA, 15 nt, Human
aaugauuauuuucau

SEQ ID NO: 2780705 - RNA, 18 nt, Human
aaugauuauuuucauuac

SEQ ID NO: 2780706 - RNA, 19 nt, Human
aaugauuauuuucauuaca

SEQ ID NO: 2780707 - RNA, 21 nt, Human
aaugauuauuuucauuacaau

SEQ ID NO: 2780708 - RNA, 23 nt, Human
aaugauuauuuucauuacaaugg

SEQ ID NO: 2780709 - RNA, 14 nt, Human
aaugagucuguugu

SEQ ID NO: 2780710 - RNA, 16 nt, Human
aaugaggucugggcua

SEQ ID NO: 2780711 - RNA, 14 nt, Human
aaugaggucuguuu

SEQ ID NO: 2780712 - RNA, 15 nt, Human
aaugaggucuguuua

SEQ ID NO: 2780713 - RNA, 16 nt, Human
aaugaggucuguuuaa

SEQ ID NO: 2780714 - RNA, 19 nt, Human
aaugagucuguuguguguc

SEQ ID NO: 2780715 - RNA, 14 nt, Human
aaugagugugaagg

SEQ ID NO: 2780716 - RNA, 13 nt, Human
aaugagugugcau

SEQ ID NO: 2780717 - RNA, 13 nt, Human
aaugaguugugaa

SEQ ID NO: 2780718 - RNA, 14 nt, Human
aaugaguugugaaa

SEQ ID NO: 2780719 - RNA, 14 nt, Human
aaugauucauguua

SEQ ID NO: 2780720 - RNA, 15 nt, Human
aaugauucauguuau

SEQ ID NO: 2780721 - RNA, 16 nt, Human
aaugauucauguuaua

SEQ ID NO: 2780722 - RNA, 13 nt, Human
aaugauuguaaaa

SEQ ID NO: 2780723 - RNA, 14 nt, Human
aaugauuguaaaau

SEQ ID NO: 2780724 - RNA, 20 nt, Human
aaugauuguaaaauagcuug

SEQ ID NO: 2780725 - RNA, 24 nt, Human
aaugauuucagcucacugcaaccu

SEQ ID NO: 2780726 - RNA, 22 nt, Human
aaugauuucaugcuaucucugu

SEQ ID NO: 2780727 - RNA, 13 nt, Human
aaugauuucaugc

SEQ ID NO: 2780728 - RNA, 18 nt, Human
aaugaggucagagccugc

SEQ ID NO: 2780729 - RNA, 16 nt, Human
aaugaggucagagccu

SEQ ID NO: 2780730 - RNA, 16 nt, Human
aaugaggucccaggca

SEQ ID NO: 2780731 - RNA, 15 nt, Human
aaugaggucccaggc

SEQ ID NO: 2780732 - RNA, 16 nt, Human
aaugaggagagaaaau

SEQ ID NO: 2780733 - RNA, 19 nt, Human
aaugaggagagaaaauaua

SEQ ID NO: 2780734 - RNA, 22 nt, Human
aaugaggagagaaaauauaugu

SEQ ID NO: 2780735 - RNA, 15 nt, Human
aaugaggauuauuga

SEQ ID NO: 2780736 - RNA, 17 nt, Human
aaugaggauuauugaua

SEQ ID NO: 2780737 - RNA, 22 nt, Human
aauguuauuuguuauuuucagu

SEQ ID NO: 2780738 - RNA, 13 nt, Human
aauguugguuuac

SEQ ID NO: 2780739 - RNA, 15 nt, Human
aauguugguuuacuu

SEQ ID NO: 2780740 - RNA, 18 nt, Human
aauguugguuuacuuuca

SEQ ID NO: 2780741 - RNA, 21 nt, Human
aauguugguuuacuuucaaau

SEQ ID NO: 2780742 - RNA, 21 nt, Human
aauguuggacaccuuuagguu

SEQ ID NO: 2780743 - RNA, 20 nt, Human
aauguuggacaccuuuaggu

SEQ ID NO: 2780744 - RNA, 21 nt, Human
aauguucuaaguuucuaagau

SEQ ID NO: 2780745 - RNA, 22 nt, Human
aauguucuaaguuucuaagauu

SEQ ID NO: 2780746 - RNA, 23 nt, Human
aauguucuaaguuucuaagauuc

SEQ ID NO: 2780747 - RNA, 20 nt, Human
aauguucuaugguuaugaaa

SEQ ID NO: 2780748 - RNA, 21 nt, Human
aauguucuaugguuaugaaag

SEQ ID NO: 2780749 - RNA, 17 nt, Human
aauguucaucaauuccc

SEQ ID NO: 2780750 - RNA, 15 nt, Human
aauguuccuuuugcu

SEQ ID NO: 2780751 - RNA, 13 nt, Human
aauguucuaaguu

SEQ ID NO: 2780752 - RNA, 14 nt, Human
aauguucuaaguuu

SEQ ID NO: 2780753 - RNA, 16 nt, Human
aauguucuaaguuucu

SEQ ID NO: 2780754 - RNA, 17 nt, Human
aauguucuaaguuucua

SEQ ID NO: 2780755 - RNA, 19 nt, Human
aauguucuaaguuucuaag

SEQ ID NO: 2780756 - RNA, 20 nt, Human
aauguucuaaguuucuaaga

SEQ ID NO: 2780757 - RNA, 12 nt, Human
aauguuguuucc

SEQ ID NO: 2780758 - RNA, 22 nt, Human
aauguuguuuccuaauaucaaa

SEQ ID NO: 2780759 - RNA, 23 nt, Human
aauguuguuuccuaauaucaaau

SEQ ID NO: 2780760 - RNA, 18 nt, Human
aauguuguuaugcuauua

SEQ ID NO: 2780761 - RNA, 19 nt, Human
aauguucacgcaacuugaa

SEQ ID NO: 2780762 - RNA, 12 nt, Human
aauguuauuucu

SEQ ID NO: 2780763 - RNA, 15 nt, Human
aauguuauuucugca

SEQ ID NO: 2780764 - RNA, 17 nt, Human
aauguuauuucugcaaa

SEQ ID NO: 2780765 - RNA, 19 nt, Human
aauguuauuucugcaaaca

SEQ ID NO: 2780766 - RNA, 21 nt, Human
aauguuauuuguuauuuucag

SEQ ID NO: 2780767 - RNA, 23 nt, Human
aauguuauuuguuauuuucagua

SEQ ID NO: 2780768 - RNA, 18 nt, Human
aauguuauuuucuucuaa

SEQ ID NO: 2780769 - RNA, 20 nt, Human
aauguuauuuucuucuaagu

SEQ ID NO: 2780770 - RNA, 21 nt, Human
aauguuauuuucuucuaagug

SEQ ID NO: 2780771 - RNA, 22 nt, Human
aauguuaugacuauguaaacua

SEQ ID NO: 2780772 - RNA, 19 nt, Human
aauguuaugacuauguaaa

SEQ ID NO: 2780773 - RNA, 16 nt, Human
aauguuaucuucucaa

SEQ ID NO: 2780774 - RNA, 17 nt, Human
aauguuaucuucucaag

SEQ ID NO: 2780775 - RNA, 22 nt, Human
aauguuaucuucucaaguucua

SEQ ID NO: 2780776 - RNA, 23 nt, Human
aauguuaucuucucaaguucuaa

SEQ ID NO: 2780777 - RNA, 22 nt, Human
aauguuaauuuuuugguacaaa

SEQ ID NO: 2780778 - RNA, 17 nt, Human
aauguggccuaaaaaug

SEQ ID NO: 2780779 - RNA, 15 nt, Human
aauguuagagacuuu

SEQ ID NO: 2780780 - RNA, 13 nt, Human
aauguuagagcac

SEQ ID NO: 2780781 - RNA, 16 nt, Human
aauguuagagcacagu

SEQ ID NO: 2780782 - RNA, 16 nt, Human
aauguuagucauuguu

SEQ ID NO: 2780783 - RNA, 17 nt, Human
aauguuauaucauaugu

SEQ ID NO: 2780784 - RNA, 19 nt, Human
aauguuaucuuauacugua

SEQ ID NO: 2780785 - RNA, 21 nt, Human
aauguuaucuuauacuguaca

SEQ ID NO: 2780786 - RNA, 22 nt, Human
aauguuaucuuauacuguacaa

SEQ ID NO: 2780787 - RNA, 23 nt, Human
aauguuaucuuauacuguacaau

SEQ ID NO: 2780788 - RNA, 13 nt, Human
uacaggguuuuua

SEQ ID NO: 2780789 - RNA, 15 nt, Human
uacaggguuuuuacc

SEQ ID NO: 2780790 - RNA, 17 nt, Human
uacaggguuuuuaccug

SEQ ID NO: 2780791 - RNA, 23 nt, Human
uacaggguuuuuaccugucacau

SEQ ID NO: 2780792 - RNA, 22 nt, Human
aauguggcaaggaaaaacaggu

SEQ ID NO: 2780793 - RNA, 21 nt, Human
aauguggccccugaacaagaa

SEQ ID NO: 2780794 - RNA, 17 nt, Human
aauguggccgaggacuu

SEQ ID NO: 2780795 - RNA, 15 nt, Human
aauguggaagaaaau

SEQ ID NO: 2780796 - RNA, 16 nt, Human
aauguggaagaaaaug

SEQ ID NO: 2780797 - RNA, 21 nt, Human
aauguggacucaaucccuagg

SEQ ID NO: 2780798 - RNA, 19 nt, Human
aauguggagaacuaaaggu

SEQ ID NO: 2780799 - RNA, 19 nt, Human
uacaggguaacugugcuga

SEQ ID NO: 2780800 - RNA, 20 nt, Human
uacaggguaacugugcugaa

SEQ ID NO: 2780801 - RNA, 24 nt, Human
uacaggguaacugugcugaaugcu

SEQ ID NO: 2780802 - RNA, 13 nt, Human
uaccagcuuuuaa

SEQ ID NO: 2780803 - RNA, 16 nt, Human
uaccagcuuuuaacca

SEQ ID NO: 2780804 - RNA, 17 nt, Human
uaccagcuuuuaaccau

SEQ ID NO: 2780805 - RNA, 16 nt, Human
uaccaggaacuauaaa

SEQ ID NO: 2780806 - RNA, 14 nt, Human
uaccaggauuuuuu

SEQ ID NO: 2780807 - RNA, 21 nt, Human
uaccagcguauauauaagaaa

SEQ ID NO: 2780808 - RNA, 22 nt, Human
uaccagcguauauauaagaaag

SEQ ID NO: 2780809 - RNA, 17 nt, Human
uaccagcuacccugugu

SEQ ID NO: 2780810 - RNA, 21 nt, Human
uaccagcaagaauaaaaaaga

SEQ ID NO: 2780811 - RNA, 20 nt, Human
uaccagcagaaggauuuuuu

SEQ ID NO: 2780812 - RNA, 16 nt, Human
uaccagcccuggggcu

SEQ ID NO: 2780813 - RNA, 17 nt, Human
uaccagcccuggggcug

SEQ ID NO: 2780814 - RNA, 19 nt, Human
uaccagcccuggggcuggg

SEQ ID NO: 2780815 - RNA, 20 nt, Human
uaccagcccuggggcugggc

SEQ ID NO: 2780816 - RNA, 21 nt, Human
uaccagcccuggggcugggcc

SEQ ID NO: 2780817 - RNA, 22 nt, Human
uaccagcccuggggcugggccc

SEQ ID NO: 2780818 - RNA, 21 nt, Human
uaccagucuuuaaaggcccag

SEQ ID NO: 2780819 - RNA, 23 nt, Human
uaccagucuuuaaaggcccagcc

SEQ ID NO: 2780820 - RNA, 14 nt, Human
uaccagugcaggcu

SEQ ID NO: 2780821 - RNA, 18 nt, Human
uaccagugcaggcuggcc

SEQ ID NO: 2780822 - RNA, 19 nt, Human
uaccagugcaggcuggcca

SEQ ID NO: 2780823 - RNA, 20 nt, Human
uaccagugcaggcuggccag

SEQ ID NO: 2780824 - RNA, 21 nt, Human
uaccagugcaggcuggccagc

SEQ ID NO: 2780825 - RNA, 22 nt, Human
uaccagugcaggcuggccagcc

SEQ ID NO: 2780826 - RNA, 23 nt, Human
uaccagugcaggcuggccagccg

SEQ ID NO: 2780827 - RNA, 16 nt, Human
uaccagggauguagau

SEQ ID NO: 2780828 - RNA, 17 nt, Human
uaccagggauguagauu

SEQ ID NO: 2780829 - RNA, 19 nt, Human
uaccagguauuauuaucuu

SEQ ID NO: 2780830 - RNA, 15 nt, Human
uaccaguuaauuacu

SEQ ID NO: 2780831 - RNA, 14 nt, Human
uaccauuaaaacug

SEQ ID NO: 2780832 - RNA, 16 nt, Human
uaccauuaaaacugcu

SEQ ID NO: 2780833 - RNA, 17 nt, Human
uaccauuaaaacugcuu

SEQ ID NO: 2780834 - RNA, 18 nt, Human
uaccauuaaaacugcuuu

SEQ ID NO: 2780835 - RNA, 19 nt, Human
uaccauuaaaacugcuuuu

SEQ ID NO: 2780836 - RNA, 20 nt, Human
uaccauuaaaacugcuuuuu

SEQ ID NO: 2780837 - RNA, 13 nt, Human
uacccccuccuuc

SEQ ID NO: 2780838 - RNA, 16 nt, Human
uacccccuaagagcca

SEQ ID NO: 2780839 - RNA, 17 nt, Human
uaccauucacaauaaaa

SEQ ID NO: 2780840 - RNA, 21 nt, Human
uaccauucacaauaaaagcuu

SEQ ID NO: 2780841 - RNA, 13 nt, Human
uaccauucagauc

SEQ ID NO: 2780842 - RNA, 15 nt, Human
uaccauucagaucac

SEQ ID NO: 2780843 - RNA, 20 nt, Human
uaccauucagaucacugaau

SEQ ID NO: 2780844 - RNA, 22 nt, Human
uaccauucagaucacugaauuu

SEQ ID NO: 2780845 - RNA, 16 nt, Human
uacccccuccuucaga

SEQ ID NO: 2780846 - RNA, 17 nt, Human
uacccccuccuucagac

SEQ ID NO: 2780847 - RNA, 15 nt, Human
uacccccugcaaagc

SEQ ID NO: 2780848 - RNA, 23 nt, Human
uacccccugcaaagcccagcuug

SEQ ID NO: 2780849 - RNA, 19 nt, Human
uacccccugcaaagcccag

SEQ ID NO: 2780850 - RNA, 17 nt, Human
uacauuuaugauuuaau

SEQ ID NO: 2780851 - RNA, 21 nt, Human
uacauucucuaauaagaaaac

SEQ ID NO: 2780852 - RNA, 18 nt, Human
uacauuucacaggcuaau

SEQ ID NO: 2780853 - RNA, 23 nt, Human
uacauuuaugauuuaauaaaaua

SEQ ID NO: 2780854 - RNA, 18 nt, Human
uacauuuaugauuuaaua

SEQ ID NO: 2780855 - RNA, 19 nt, Human
uacauuuaugauuuaauaa

SEQ ID NO: 2780856 - RNA, 20 nt, Human
uacauuuaugauuuaauaaa

SEQ ID NO: 2780857 - RNA, 22 nt, Human
uacauuuaugauuuaauaaaau

SEQ ID NO: 2780858 - RNA, 15 nt, Human
uacauucaauguuua

SEQ ID NO: 2780859 - RNA, 15 nt, Human
uacauucauuuagcu

SEQ ID NO: 2780860 - RNA, 13 nt, Human
uacauucauuuag

SEQ ID NO: 2780861 - RNA, 14 nt, Human
uacauuauugcuua

SEQ ID NO: 2780862 - RNA, 13 nt, Human
uacauuauaaacg

SEQ ID NO: 2780863 - RNA, 12 nt, Human
uacauuaguaaa

SEQ ID NO: 2780864 - RNA, 13 nt, Human
uacauuaguaaau

SEQ ID NO: 2780865 - RNA, 14 nt, Human
uacauuaguaaaug

SEQ ID NO: 2780866 - RNA, 15 nt, Human
uacauuaguaaaugu

SEQ ID NO: 2780867 - RNA, 17 nt, Human
uacauuaguaaaugucu

SEQ ID NO: 2780868 - RNA, 18 nt, Human
uacauuaguaaaugucuu

SEQ ID NO: 2780869 - RNA, 19 nt, Human
uacauuaguaaaugucuuu

SEQ ID NO: 2780870 - RNA, 20 nt, Human
uacauuaguaaaugucuuug

SEQ ID NO: 2780871 - RNA, 21 nt, Human
uacauuaguaaaugucuuugu

SEQ ID NO: 2780872 - RNA, 22 nt, Human
uacauuaguaaaugucuuugua

SEQ ID NO: 2780873 - RNA, 23 nt, Human
uacauuaguaaaugucuuuguaa

SEQ ID NO: 2780874 - RNA, 14 nt, Human
aauuaaguuaucuu

SEQ ID NO: 2780875 - RNA, 23 nt, Human
aauuaauaaaaaauggaaagaau

SEQ ID NO: 2780876 - RNA, 15 nt, Human
aauguuuaaacauuu

SEQ ID NO: 2780877 - RNA, 16 nt, Human
uacauuuaugauuuaa

SEQ ID NO: 2780878 - RNA, 22 nt, Human
uacauuucuuagacuacauuua

SEQ ID NO: 2780879 - RNA, 17 nt, Human
aauuacauguaaaacau

SEQ ID NO: 2780880 - RNA, 12 nt, Human
uaccuuacugug

SEQ ID NO: 2780881 - RNA, 16 nt, Human
uaccugaccucuugcu

SEQ ID NO: 2780882 - RNA, 17 nt, Human
uaccugaccucuugcug

SEQ ID NO: 2780883 - RNA, 18 nt, Human
uaccugaccucuugcugu

SEQ ID NO: 2780884 - RNA, 19 nt, Human
uaccugaccucuugcuguc

SEQ ID NO: 2780885 - RNA, 20 nt, Human
uaccugaccucuugcugucu

SEQ ID NO: 2780886 - RNA, 22 nt, Human
uaccugaccucuugcugucucu

SEQ ID NO: 2780887 - RNA, 21 nt, Human
uaccugauuucuucagggcug

SEQ ID NO: 2780888 - RNA, 23 nt, Human
uaccugauggaaguaaagccuca

SEQ ID NO: 2780889 - RNA, 14 nt, Human
uaccuguguacaua

SEQ ID NO: 2780890 - RNA, 14 nt, Human
uaccuguguauaua

SEQ ID NO: 2780891 - RNA, 20 nt, Human
uaccugugcguuacuaauug

SEQ ID NO: 2780892 - RNA, 16 nt, Human
uaccugugccucggcu

SEQ ID NO: 2780893 - RNA, 12 nt, Human
uaccugugccug

SEQ ID NO: 2780894 - RNA, 18 nt, Human
uaccugcaggcugagcca

SEQ ID NO: 2780895 - RNA, 22 nt, Human
uaccugcaggcugagccacucu

SEQ ID NO: 2780896 - RNA, 21 nt, Human
uaccugugugguacucugaaa

SEQ ID NO: 2780897 - RNA, 13 nt, Human
uaccuguuccuua

SEQ ID NO: 2780898 - RNA, 13 nt, Human
uaccugacacaag

SEQ ID NO: 2780899 - RNA, 16 nt, Human
uacccuauucucucuu

SEQ ID NO: 2780900 - RNA, 18 nt, Human
uacccccuccuucagaca

SEQ ID NO: 2780901 - RNA, 13 nt, Human
uacccguuccaaa

SEQ ID NO: 2780902 - RNA, 13 nt, Human
uacccuaaugucu

SEQ ID NO: 2780903 - RNA, 14 nt, Human
uacccuaaugucuu

SEQ ID NO: 2780904 - RNA, 16 nt, Human
uacccuaaugucuuca

SEQ ID NO: 2780905 - RNA, 17 nt, Human
uacccuaaugucuucau

SEQ ID NO: 2780906 - RNA, 19 nt, Human
uacccuaaugucuucauaa

SEQ ID NO: 2780907 - RNA, 22 nt, Human
uacccuaaugucuucauaaagu

SEQ ID NO: 2780908 - RNA, 23 nt, Human
aauuacuuuuuuccaauuuuaga

SEQ ID NO: 2780909 - RNA, 20 nt, Human
aauuagaaaaaaauuacuaa

SEQ ID NO: 2780910 - RNA, 18 nt, Human
aauuagaaauuggcugga

SEQ ID NO: 2780911 - RNA, 22 nt, Human
aauuacuuaucauccacauugu

SEQ ID NO: 2780912 - RNA, 19 nt, Human
aauuacuuaucccugccca

SEQ ID NO: 2780913 - RNA, 21 nt, Human
aauuacuuaucccugcccauu

SEQ ID NO: 2780914 - RNA, 15 nt, Human
aauuaugugacauuu

SEQ ID NO: 2780915 - RNA, 20 nt, Human
aauuaugugacauuuuacau

SEQ ID NO: 2780916 - RNA, 17 nt, Human
aauuaugugacauuuua

SEQ ID NO: 2780917 - RNA, 22 nt, Human
aauuaugugacauuuuacauua

SEQ ID NO: 2780918 - RNA, 14 nt, Human
aauuauuuaauaaa

SEQ ID NO: 2780919 - RNA, 18 nt, Human
aauuauuauaagcauuga

SEQ ID NO: 2780920 - RNA, 20 nt, Human
aauuauuaguuuacaucauu

SEQ ID NO: 2780921 - RNA, 22 nt, Human
aauuauguuuuuauuaagauua

SEQ ID NO: 2780922 - RNA, 16 nt, Human
aauuauuaacuacauu

SEQ ID NO: 2780923 - RNA, 18 nt, Human
aauuauuaacuacauuua

SEQ ID NO: 2780924 - RNA, 19 nt, Human
aauuauuaacuacauuuau

SEQ ID NO: 2780925 - RNA, 20 nt, Human
aauuauuaacuacauuuaug

SEQ ID NO: 2780926 - RNA, 23 nt, Human
aauuauuaacuacauuuaugagu

SEQ ID NO: 2780927 - RNA, 20 nt, Human
aauucaagaaaacaacuuca

SEQ ID NO: 2780928 - RNA, 12 nt, Human
aauucaagaaaa

SEQ ID NO: 2780929 - RNA, 14 nt, Human
aauuauuuuaaaca

SEQ ID NO: 2780930 - RNA, 18 nt, Human
aauuauuuuaaacaaaau

SEQ ID NO: 2780931 - RNA, 19 nt, Human
aauuauuucacaaauaaua

SEQ ID NO: 2780932 - RNA, 19 nt, Human
aauuauuuauuuaauaaca

SEQ ID NO: 2780933 - RNA, 19 nt, Human
aauuauuugcaggucuuua

SEQ ID NO: 2780934 - RNA, 14 nt, Human
aauuauuuguguaa

SEQ ID NO: 2780935 - RNA, 21 nt, Human
aauuauuugacuuuaauuuau

SEQ ID NO: 2780936 - RNA, 15 nt, Human
aauuauuuguguaau

SEQ ID NO: 2780937 - RNA, 18 nt, Human
aauuauuuguguaauaga

SEQ ID NO: 2780938 - RNA, 19 nt, Human
aauuauuuguguaauagaa

SEQ ID NO: 2780939 - RNA, 21 nt, Human
aauuauuuguguaauagaaaa

SEQ ID NO: 2780940 - RNA, 15 nt, Human
aauucagcaaaccau

SEQ ID NO: 2780941 - RNA, 16 nt, Human
aauucagcaaaccauu

SEQ ID NO: 2780942 - RNA, 15 nt, Human
aauucaauuuuaaag

SEQ ID NO: 2780943 - RNA, 17 nt, Human
aauucaauuuuaaagac

SEQ ID NO: 2780944 - RNA, 18 nt, Human
aauucagccauguacaga

SEQ ID NO: 2780945 - RNA, 15 nt, Human
aauucaauacaaaca

SEQ ID NO: 2780946 - RNA, 21 nt, Human
aauucaggugaaaauguucau

SEQ ID NO: 2780947 - RNA, 13 nt, Human
aauucauauucug

SEQ ID NO: 2780948 - RNA, 13 nt, Human
aauucauauucuu

SEQ ID NO: 2780949 - RNA, 23 nt, Human
aauucaucaaauggaagacacau

SEQ ID NO: 2780950 - RNA, 16 nt, Human
aauucagugcuguacu

SEQ ID NO: 2780951 - RNA, 17 nt, Human
aauucaguguauuucag

SEQ ID NO: 2780952 - RNA, 18 nt, Human
aauucaguguauuucagu

SEQ ID NO: 2780953 - RNA, 19 nt, Human
aauucaguguauuucaguu

SEQ ID NO: 2780954 - RNA, 16 nt, Human
aauucaguauguuuua

SEQ ID NO: 2780955 - RNA, 23 nt, Human
aauucaguauguuuuacacugua

SEQ ID NO: 2780956 - RNA, 12 nt, Human
acacuaauuccu

SEQ ID NO: 2780957 - RNA, 21 nt, Human
uauaacucaucauaaaauaaa

SEQ ID NO: 2780958 - RNA, 20 nt, Human
uauaacucaucauaaaauaa

SEQ ID NO: 2780959 - RNA, 19 nt, Human
uauaacucaucauaaaaua

SEQ ID NO: 2780960 - RNA, 18 nt, Human
uauaacucaucauaaaau

SEQ ID NO: 2780961 - RNA, 17 nt, Human
uauaacucaucauaaaa

SEQ ID NO: 2780962 - RNA, 16 nt, Human
uauaacucaucauaaa

SEQ ID NO: 2780963 - RNA, 19 nt, Human
uauaacuauguugauaaaa

SEQ ID NO: 2780964 - RNA, 17 nt, Human
acacuaauuccuuucua

SEQ ID NO: 2780965 - RNA, 14 nt, Human
uauaagugaaguga

SEQ ID NO: 2780966 - RNA, 15 nt, Human
uauaagugaagugau

SEQ ID NO: 2780967 - RNA, 17 nt, Human
uauaagugcacacagaa

SEQ ID NO: 2780968 - RNA, 21 nt, Human
uauaagugcacacagaaauau

SEQ ID NO: 2780969 - RNA, 22 nt, Human
uauaagugcacacagaaauaua

SEQ ID NO: 2780970 - RNA, 23 nt, Human
uauaagugcacacagaaauauau

SEQ ID NO: 2780971 - RNA, 22 nt, Human
uauaacuuaaaaauguaaauau

SEQ ID NO: 2780972 - RNA, 18 nt, Human
uauaagucauuguauguu

SEQ ID NO: 2780973 - RNA, 20 nt, Human
uauaacuuaaaaauguaaau

SEQ ID NO: 2780974 - RNA, 19 nt, Human
uagucaccccaaguagucu

SEQ ID NO: 2780975 - RNA, 13 nt, Human
uauacagaggaaa

SEQ ID NO: 2780976 - RNA, 20 nt, Human
uauacagaggaaaucuguaa

SEQ ID NO: 2780977 - RNA, 12 nt, Human
uauacagaugaa

SEQ ID NO: 2780978 - RNA, 13 nt, Human
uauacagaugaaa

SEQ ID NO: 2780979 - RNA, 14 nt, Human
uauacagaugaaaa

SEQ ID NO: 2780980 - RNA, 15 nt, Human
uauacagaugaaaau

SEQ ID NO: 2780981 - RNA, 18 nt, Human
uauacagaugaaaauuug

SEQ ID NO: 2780982 - RNA, 19 nt, Human
uauacagaugaaaauuuga

SEQ ID NO: 2780983 - RNA, 21 nt, Human
uauacagaugaaaauuugaga

SEQ ID NO: 2780984 - RNA, 18 nt, Human
uauacaggcauaaaauag

SEQ ID NO: 2780985 - RNA, 15 nt, Human
uauacauacacuugu

SEQ ID NO: 2780986 - RNA, 19 nt, Human
uauacauacacuuguauaa

SEQ ID NO: 2780987 - RNA, 20 nt, Human
uauacauacacuuguauaaa

SEQ ID NO: 2780988 - RNA, 12 nt, Human
uauacaugugug

SEQ ID NO: 2780989 - RNA, 13 nt, Human
uauacaugugugu

SEQ ID NO: 2780990 - RNA, 14 nt, Human
uauacaugugugua

SEQ ID NO: 2780991 - RNA, 15 nt, Human
uauacauguguguau

SEQ ID NO: 2780992 - RNA, 16 nt, Human
uauacauguguguaua

SEQ ID NO: 2780993 - RNA, 17 nt, Human
uauacauguguguauau

SEQ ID NO: 2780994 - RNA, 18 nt, Human
uauacauguguguauaua

SEQ ID NO: 2780995 - RNA, 19 nt, Human
uauacauguguguauauau

SEQ ID NO: 2780996 - RNA, 20 nt, Human
uauacauguguguauauaug

SEQ ID NO: 2780997 - RNA, 22 nt, Human
uauacauguguguauauaugug

SEQ ID NO: 2780998 - RNA, 15 nt, Human
uauacauccugggua

SEQ ID NO: 2780999 - RNA, 16 nt, Human
uauacauccuggguaa

SEQ ID NO: 2781000 - RNA, 21 nt, Human
uauacauccuggguaaugaga

SEQ ID NO: 2781001 - RNA, 15 nt, Human
uauacaugaaaauuu

SEQ ID NO: 2781002 - RNA, 19 nt, Human
uauacaugaaaauuuuaaa

SEQ ID NO: 2781003 - RNA, 13 nt, Human
uauacauauguag

SEQ ID NO: 2781004 - RNA, 15 nt, Human
uauacauauguagac

SEQ ID NO: 2781005 - RNA, 16 nt, Human
uauacauauguagacu

SEQ ID NO: 2781006 - RNA, 19 nt, Human
uauacauauguagacuaua

SEQ ID NO: 2781007 - RNA, 23 nt, Human
uauacauauguagacuauauaca

SEQ ID NO: 2781008 - RNA, 16 nt, Human
uauaauuuaaugcaug

SEQ ID NO: 2781009 - RNA, 11 nt, Human
uauaauuuaau

SEQ ID NO: 2781010 - RNA, 18 nt, Human
uauaagugaagugauacu

SEQ ID NO: 2781011 - RNA, 15 nt, Human
uauaggcaccuacca

SEQ ID NO: 2781012 - RNA, 20 nt, Human
uauaggucucuucucccaga

SEQ ID NO: 2781013 - RNA, 22 nt, Human
uauaggucucuucucccagaau

SEQ ID NO: 2781014 - RNA, 17 nt, Human
uauaggugauguuugcu

SEQ ID NO: 2781015 - RNA, 20 nt, Human
uauaggugauguuugcucuu

SEQ ID NO: 2781016 - RNA, 18 nt, Human
uauauagcagcaaaaaua

SEQ ID NO: 2781017 - RNA, 21 nt, Human
uauauagcagcaaaaauauaa

SEQ ID NO: 2781018 - RNA, 22 nt, Human
uauauagcagcaaaaauauaaa

SEQ ID NO: 2781019 - RNA, 18 nt, Human
uauaggagccuuaauuuu

SEQ ID NO: 2781020 - RNA, 15 nt, Human
uauaggaucauuugu

SEQ ID NO: 2781021 - RNA, 16 nt, Human
uauagauuagaaaaau

SEQ ID NO: 2781022 - RNA, 17 nt, Human
uauagauuagaaaaauu

SEQ ID NO: 2781023 - RNA, 21 nt, Human
uauagauuagaaaaauuccua

SEQ ID NO: 2781024 - RNA, 18 nt, Human
uauagcacaucaccuggg

SEQ ID NO: 2781025 - RNA, 13 nt, Human
uauagcacuuuga

SEQ ID NO: 2781026 - RNA, 14 nt, Human
uauagcacuuugaa

SEQ ID NO: 2781027 - RNA, 15 nt, Human
uauagcacuuugaaa

SEQ ID NO: 2781028 - RNA, 20 nt, Human
uauagcacuuugaaauaccu

SEQ ID NO: 2781029 - RNA, 21 nt, Human
uauagcacuuugaaauaccuc

SEQ ID NO: 2781030 - RNA, 22 nt, Human
uauagcacuuugaaauaccuca

SEQ ID NO: 2781031 - RNA, 23 nt, Human
uauagcacuuugaaauaccucau

SEQ ID NO: 2781032 - RNA, 18 nt, Human
uauagcagcaaaaauaua

SEQ ID NO: 2781033 - RNA, 20 nt, Human
uauagcagcaaaaauauaaa

SEQ ID NO: 2781034 - RNA, 21 nt, Human
uauagcagcaaaaauauaaaa

SEQ ID NO: 2781035 - RNA, 22 nt, Human
uauagcagcaaaaauauaaaau

SEQ ID NO: 2781036 - RNA, 12 nt, Human
uauagaugucua

SEQ ID NO: 2781037 - RNA, 18 nt, Human
uauagccuaggugacaga

SEQ ID NO: 2781038 - RNA, 18 nt, Human
uauagcuggcaagaaugg

SEQ ID NO: 2781039 - RNA, 16 nt, Human
acacucaguuguucaa

SEQ ID NO: 2781040 - RNA, 15 nt, Human
uauauauuuauaacu

SEQ ID NO: 2781041 - RNA, 14 nt, Human
uauauauuuauaac

SEQ ID NO: 2781042 - RNA, 20 nt, Human
uauauccuuucuaacaaaaa

SEQ ID NO: 2781043 - RNA, 17 nt, Human
uauauccuuucuaacaa

SEQ ID NO: 2781044 - RNA, 20 nt, Human
uauauccuuuucuucuaugu

SEQ ID NO: 2781045 - RNA, 21 nt, Human
uauauccuuuucuucuaugua

SEQ ID NO: 2781046 - RNA, 14 nt, Human
uauauagcuggcaa

SEQ ID NO: 2781047 - RNA, 18 nt, Human
uauauagcuggcaagaau

SEQ ID NO: 2781048 - RNA, 19 nt, Human
uauauagcuggcaagaaug

SEQ ID NO: 2781049 - RNA, 20 nt, Human
uauauagcuggcaagaaugg

SEQ ID NO: 2781050 - RNA, 14 nt, Human
uauauagugcuaua

SEQ ID NO: 2781051 - RNA, 15 nt, Human
uauauagugcuauau

SEQ ID NO: 2781052 - RNA, 17 nt, Human
uauauagugcuauauau

SEQ ID NO: 2781053 - RNA, 17 nt, Human
uauauagguugugcaaa

SEQ ID NO: 2781054 - RNA, 22 nt, Human
uauauaguuuauugacaauaau

SEQ ID NO: 2781055 - RNA, 19 nt, Human
uauauaucugcuucagugg

SEQ ID NO: 2781056 - RNA, 21 nt, Human
uauauaucugcuucaguggag

SEQ ID NO: 2781057 - RNA, 13 nt, Human
uauauaugaaaac

SEQ ID NO: 2781058 - RNA, 15 nt, Human
uauauaugaaaacua

SEQ ID NO: 2781059 - RNA, 16 nt, Human
uauauaugaaaacuau

SEQ ID NO: 2781060 - RNA, 22 nt, Human
uauauaugaaaacuauacaaca

SEQ ID NO: 2781061 - RNA, 15 nt, Human
uauauaugccuuuuu

SEQ ID NO: 2781062 - RNA, 19 nt, Human
uauauaugccuuuuuccua

SEQ ID NO: 2781063 - RNA, 21 nt, Human
uauauaugccuuuuuccuagc

SEQ ID NO: 2781064 - RNA, 13 nt, Human
uauauauggacau

SEQ ID NO: 2781065 - RNA, 16 nt, Human
uauauauguguaugua

SEQ ID NO: 2781066 - RNA, 14 nt, Human
uauauauguguaug

SEQ ID NO: 2781067 - RNA, 18 nt, Human
uauauauguauaaauaaa

SEQ ID NO: 2781068 - RNA, 14 nt, Human
uauauaugugagga

SEQ ID NO: 2781069 - RNA, 12 nt, Human
uauauaugugua

SEQ ID NO: 2781070 - RNA, 16 nt, Human
uauauauguguauaua

SEQ ID NO: 2781071 - RNA, 19 nt, Human
uauauauguguauauauac

SEQ ID NO: 2781072 - RNA, 20 nt, Human
uauauauguguauauauaca

SEQ ID NO: 2781073 - RNA, 21 nt, Human
uauauauguguauauauacau

SEQ ID NO: 2781074 - RNA, 22 nt, Human
uauauauguguauauauacaua

SEQ ID NO: 2781075 - RNA, 23 nt, Human
uauauauguguauauauacauac

SEQ ID NO: 2781076 - RNA, 13 nt, Human
uauauauuuauaa

SEQ ID NO: 2781077 - RNA, 17 nt, Human
uauauauucuuauaaaa

SEQ ID NO: 2781078 - RNA, 20 nt, Human
uauauauucuuauaaaaaug

SEQ ID NO: 2781079 - RNA, 16 nt, Human
acagaaagguuuucuu

SEQ ID NO: 2781080 - RNA, 19 nt, Human
acagaaagucauuccuucu

SEQ ID NO: 2781081 - RNA, 22 nt, Human
acagaaagucauuccuucuuuu

SEQ ID NO: 2781082 - RNA, 13 nt, Human
acagaaauacuau

SEQ ID NO: 2781083 - RNA, 17 nt, Human
acagaaauauaauaaaa

SEQ ID NO: 2781084 - RNA, 19 nt, Human
acagaaauauaauaaaaug

SEQ ID NO: 2781085 - RNA, 14 nt, Human
acagaaauauauau

SEQ ID NO: 2781086 - RNA, 17 nt, Human
acagaaauauauauaca

SEQ ID NO: 2781087 - RNA, 18 nt, Human
acagaaauauauauacau

SEQ ID NO: 2781088 - RNA, 19 nt, Human
acagaaauauauauacaua

SEQ ID NO: 2781089 - RNA, 20 nt, Human
acagaaauauauauacauau

SEQ ID NO: 2781090 - RNA, 22 nt, Human
acagaaauauauauacauaugu

SEQ ID NO: 2781091 - RNA, 13 nt, Human
acagaaaagcaua

SEQ ID NO: 2781092 - RNA, 22 nt, Human
acagaaaacauucugauuugga

SEQ ID NO: 2781093 - RNA, 19 nt, Human
acagaaauggggaauucuc

SEQ ID NO: 2781094 - RNA, 22 nt, Human
acagaaauggggaauucucuaa

SEQ ID NO: 2781095 - RNA, 15 nt, Human
acagacagcccucca

SEQ ID NO: 2781096 - RNA, 18 nt, Human
acacuugaaccugggagg

SEQ ID NO: 2781097 - RNA, 22 nt, Human
acacuugaaccugggaggugga

SEQ ID NO: 2781098 - RNA, 23 nt, Human
acacuucugugagacccccacac

SEQ ID NO: 2781099 - RNA, 13 nt, Human
acacuugcccugc

SEQ ID NO: 2781100 - RNA, 14 nt, Human
acacuugcccugcu

SEQ ID NO: 2781101 - RNA, 15 nt, Human
acacuugcccugcuc

SEQ ID NO: 2781102 - RNA, 17 nt, Human
acacuugcccugcuccc

SEQ ID NO: 2781103 - RNA, 20 nt, Human
acacuugcccugcucccucu

SEQ ID NO: 2781104 - RNA, 21 nt, Human
acacuugcccugcucccucuc

SEQ ID NO: 2781105 - RNA, 20 nt, Human
acacuucugugagaccccca

SEQ ID NO: 2781106 - RNA, 14 nt, Human
acacuucuguccug

SEQ ID NO: 2781107 - RNA, 17 nt, Human
acacuucuguccuguga

SEQ ID NO: 2781108 - RNA, 16 nt, Human
acacuuguauaaaugu

SEQ ID NO: 2781109 - RNA, 17 nt, Human
acacuuguauaaaugua

SEQ ID NO: 2781110 - RNA, 22 nt, Human
acacuuggcccaaguggcagag

SEQ ID NO: 2781111 - RNA, 20 nt, Human
acacuuggggagauuugcca

SEQ ID NO: 2781112 - RNA, 15 nt, Human
acacuuggugcuggg

SEQ ID NO: 2781113 - RNA, 16 nt, Human
acacuuggugcuggga

SEQ ID NO: 2781114 - RNA, 17 nt, Human
acacuuggugcugggaa

SEQ ID NO: 2781115 - RNA, 18 nt, Human
acacuuggugcugggaac

SEQ ID NO: 2781116 - RNA, 19 nt, Human
acacuuggugcugggaacc

SEQ ID NO: 2781117 - RNA, 15 nt, Human
acagaaaaagacuuu

SEQ ID NO: 2781118 - RNA, 15 nt, Human
acagaaaaaucuugu

SEQ ID NO: 2781119 - RNA, 22 nt, Human
acagaaaaaucuugugcuagaa

SEQ ID NO: 2781120 - RNA, 14 nt, Human
acacuuaauacuac

SEQ ID NO: 2781121 - RNA, 14 nt, Human
acacuuauaaguga

SEQ ID NO: 2781122 - RNA, 18 nt, Human
acacuucaaggugacaga

SEQ ID NO: 2781123 - RNA, 19 nt, Human
acacuucaauaauugucca

SEQ ID NO: 2781124 - RNA, 18 nt, Human
acacuuaccccauggcug

SEQ ID NO: 2781125 - RNA, 17 nt, Human
acacuuacuguaagaca

SEQ ID NO: 2781126 - RNA, 18 nt, Human
acacuuacuguaagacau

SEQ ID NO: 2781127 - RNA, 19 nt, Human
acacuuacuguaagacauu

SEQ ID NO: 2781128 - RNA, 21 nt, Human
acacuuacuguaagacauuag

SEQ ID NO: 2781129 - RNA, 15 nt, Human
acacuucaggcucuu

SEQ ID NO: 2781130 - RNA, 19 nt, Human
acacuucaggcucuucucc

SEQ ID NO: 2781131 - RNA, 22 nt, Human
acacuucaggcucuucuccuuu

SEQ ID NO: 2781132 - RNA, 14 nt, Human
acacuuccauaauc

SEQ ID NO: 2781133 - RNA, 12 nt, Human
acacuuccagac

SEQ ID NO: 2781134 - RNA, 15 nt, Human
acagacaucucugca

SEQ ID NO: 2781135 - RNA, 15 nt, Human
acagaccugcuuuuu

SEQ ID NO: 2781136 - RNA, 16 nt, Human
acagaccugcuuuuug

SEQ ID NO: 2781137 - RNA, 17 nt, Human
acagaccugcuuuuuga

SEQ ID NO: 2781138 - RNA, 21 nt, Human
acagaccugcuuuuugaaaug

SEQ ID NO: 2781139 - RNA, 21 nt, Human
uaucaaacuucagcuguacuu

SEQ ID NO: 2781140 - RNA, 18 nt, Human
uaucaaagaauaagaaaa

SEQ ID NO: 2781141 - RNA, 12 nt, Human
uaucaaagcaua

SEQ ID NO: 2781142 - RNA, 19 nt, Human
uaucaaaugcaguauauuu

SEQ ID NO: 2781143 - RNA, 21 nt, Human
uaucaaaugcaguauauuucu

SEQ ID NO: 2781144 - RNA, 23 nt, Human
uaucaaaugcaguauauuucuuc

SEQ ID NO: 2781145 - RNA, 14 nt, Human
acagacauauuuaa

SEQ ID NO: 2781146 - RNA, 23 nt, Human
uaucacaaccaccguuacaagua

SEQ ID NO: 2781147 - RNA, 13 nt, Human
uauccccugcuac

SEQ ID NO: 2781148 - RNA, 14 nt, Human
uauccccugcuacc

SEQ ID NO: 2781149 - RNA, 14 nt, Human
uaucccgagucugg

SEQ ID NO: 2781150 - RNA, 17 nt, Human
uaucccgagucugggac

SEQ ID NO: 2781151 - RNA, 19 nt, Human
uaucccgagucugggacac

SEQ ID NO: 2781152 - RNA, 13 nt, Human
uaucuauagcuaa

SEQ ID NO: 2781153 - RNA, 13 nt, Human
uaucuauauaugu

SEQ ID NO: 2781154 - RNA, 15 nt, Human
uaucuauauaugugu

SEQ ID NO: 2781155 - RNA, 16 nt, Human
uaucuauauaugugua

SEQ ID NO: 2781156 - RNA, 17 nt, Human
uaucuauauauguguau

SEQ ID NO: 2781157 - RNA, 22 nt, Human
uaucuauauauguguauguacg

SEQ ID NO: 2781158 - RNA, 19 nt, Human
uauccccccccuguauagu

SEQ ID NO: 2781159 - RNA, 21 nt, Human
uauccccccccuguauaguua

SEQ ID NO: 2781160 - RNA, 16 nt, Human
uaucccacauccaacu

SEQ ID NO: 2781161 - RNA, 20 nt, Human
uaucccaccuccaucccaga

SEQ ID NO: 2781162 - RNA, 13 nt, Human
uauccccaaauua

SEQ ID NO: 2781163 - RNA, 16 nt, Human
uaucccaaucauuguu

SEQ ID NO: 2781164 - RNA, 14 nt, Human
uaucccagaaauua

SEQ ID NO: 2781165 - RNA, 18 nt, Human
uaucagaauugaaacacu

SEQ ID NO: 2781166 - RNA, 19 nt, Human
uaucagaauugaaacacuu

SEQ ID NO: 2781167 - RNA, 13 nt, Human
uaucagauacauc

SEQ ID NO: 2781168 - RNA, 15 nt, Human
uaucagauacaucac

SEQ ID NO: 2781169 - RNA, 16 nt, Human
uaucagauacaucacu

SEQ ID NO: 2781170 - RNA, 18 nt, Human
uaucagauacaucacugc

SEQ ID NO: 2781171 - RNA, 19 nt, Human
uaucagauacaucacugcu

SEQ ID NO: 2781172 - RNA, 20 nt, Human
uaucagcacauauuuucugu

SEQ ID NO: 2781173 - RNA, 14 nt, Human
uaucagcaaaaaag

SEQ ID NO: 2781174 - RNA, 15 nt, Human
uauccaccaccuccc

SEQ ID NO: 2781175 - RNA, 13 nt, Human
uauccaccaccuc

SEQ ID NO: 2781176 - RNA, 18 nt, Human
uauccaaccaacuugguu

SEQ ID NO: 2781177 - RNA, 12 nt, Human
acagcuguguua

SEQ ID NO: 2781178 - RNA, 22 nt, Human
acagcuguguuauucuuugcgu

SEQ ID NO: 2781179 - RNA, 16 nt, Human
acagcuguucuucugu

SEQ ID NO: 2781180 - RNA, 21 nt, Human
acagcuguucuucuguucugc

SEQ ID NO: 2781181 - RNA, 19 nt, Human
acagcuguuuaagaugggc

SEQ ID NO: 2781182 - RNA, 15 nt, Human
acagcuguuuaagau

SEQ ID NO: 2781183 - RNA, 17 nt, Human
acagcuguuuaagaugg

SEQ ID NO: 2781184 - RNA, 14 nt, Human
acagcuguuuaaga

SEQ ID NO: 2781185 - RNA, 19 nt, Human
acagcuaaugggacacuaa

SEQ ID NO: 2781186 - RNA, 17 nt, Human
acagcuaaugggacacu

SEQ ID NO: 2781187 - RNA, 16 nt, Human
acagcuaaugggacac

SEQ ID NO: 2781188 - RNA, 15 nt, Human
acagcuaaugggaca

SEQ ID NO: 2781189 - RNA, 21 nt, Human
acagcuacuugguuuguguuc

SEQ ID NO: 2781190 - RNA, 16 nt, Human
acagcuaugggagccc

SEQ ID NO: 2781191 - RNA, 21 nt, Human
acagcuaugggagccccaggg

SEQ ID NO: 2781192 - RNA, 17 nt, Human
acagcuaugggagcccc

SEQ ID NO: 2781193 - RNA, 14 nt, Human
acagcuacaacagc

SEQ ID NO: 2781194 - RNA, 16 nt, Human
acagcuacaacagccu

SEQ ID NO: 2781195 - RNA, 18 nt, Human
acagcuacaacagccuca

SEQ ID NO: 2781196 - RNA, 21 nt, Human
acagcuacaacagccucacuu

SEQ ID NO: 2781197 - RNA, 22 nt, Human
acagcuaucgaacuucacaacu

SEQ ID NO: 2781198 - RNA, 14 nt, Human
acagcuaugaagaa

SEQ ID NO: 2781199 - RNA, 21 nt, Human
acagcuucauuuccugugucu

SEQ ID NO: 2781200 - RNA, 19 nt, Human
acagcuucauuuccugugu

SEQ ID NO: 2781201 - RNA, 17 nt, Human
acagcuucauuuccugu

SEQ ID NO: 2781202 - RNA, 13 nt, Human
acagcuucagguu

SEQ ID NO: 2781203 - RNA, 15 nt, Human
acagcuucagguuau

SEQ ID NO: 2781204 - RNA, 20 nt, Human
acagcuucagguuaucgaaa

SEQ ID NO: 2781205 - RNA, 20 nt, Human
acagcuucucauccugcagg

SEQ ID NO: 2781206 - RNA, 11 nt, Human
acagcuuccug

SEQ ID NO: 2781207 - RNA, 15 nt, Human
acagcuuccuguccc

SEQ ID NO: 2781208 - RNA, 22 nt, Human
acagcuuccuguccccaucugu

SEQ ID NO: 2781209 - RNA, 22 nt, Human
acagcuucagguuaucgaaaua

SEQ ID NO: 2781210 - RNA, 21 nt, Human
acaggaaaagcugcugacagu

SEQ ID NO: 2781211 - RNA, 20 nt, Human
acaggaaaagcugcugacag

SEQ ID NO: 2781212 - RNA, 19 nt, Human
acaggaaaagcugcugaca

SEQ ID NO: 2781213 - RNA, 18 nt, Human
acaggaaaagcugcugac

SEQ ID NO: 2781214 - RNA, 21 nt, Human
acagcuucucauccugcaggc

SEQ ID NO: 2781215 - RNA, 22 nt, Human
acaggcccggcuccaggcuccu

SEQ ID NO: 2781216 - RNA, 21 nt, Human
acaggcccggcuccaggcucc

SEQ ID NO: 2781217 - RNA, 20 nt, Human
acaggcccggcuccaggcuc

SEQ ID NO: 2781218 - RNA, 18 nt, Human
acaggcccggcuccaggc

SEQ ID NO: 2781219 - RNA, 13 nt, Human
acaggcccuuccu

SEQ ID NO: 2781220 - RNA, 14 nt, Human
acaggcccugcucc

SEQ ID NO: 2781221 - RNA, 15 nt, Human
acaggcccugcuccu

SEQ ID NO: 2781222 - RNA, 17 nt, Human
acaggcccugcuccugc

SEQ ID NO: 2781223 - RNA, 19 nt, Human
acaggcccugcuccugcag

SEQ ID NO: 2781224 - RNA, 20 nt, Human
acaggcccugcuccugcagc

SEQ ID NO: 2781225 - RNA, 21 nt, Human
acaggcccugcuccugcagca

SEQ ID NO: 2781226 - RNA, 12 nt, Human
acaggcccuggc

SEQ ID NO: 2781227 - RNA, 17 nt, Human
acaggcccuggcugagg

SEQ ID NO: 2781228 - RNA, 13 nt, Human
acaggccucaccu

SEQ ID NO: 2781229 - RNA, 14 nt, Human
acaggccucaccuc

SEQ ID NO: 2781230 - RNA, 15 nt, Human
acaggccucaccucu

SEQ ID NO: 2781231 - RNA, 19 nt, Human
acaggccucaccucuaccc

SEQ ID NO: 2781232 - RNA, 20 nt, Human
acaggccucaccucuaccca

SEQ ID NO: 2781233 - RNA, 21 nt, Human
acaggccucaccucuacccaa

SEQ ID NO: 2781234 - RNA, 15 nt, Human
acaggcccuuccucu

SEQ ID NO: 2781235 - RNA, 22 nt, Human
acaggcccuuccucuccacugc

SEQ ID NO: 2781236 - RNA, 14 nt, Human
acaggccugaagau

SEQ ID NO: 2781237 - RNA, 15 nt, Human
acaggccugaagaua

SEQ ID NO: 2781238 - RNA, 20 nt, Human
acaggccugaagauauuacu

SEQ ID NO: 2781239 - RNA, 15 nt, Human
uaugucccuugcugu

SEQ ID NO: 2781240 - RNA, 17 nt, Human
uauguccacuguguaua

SEQ ID NO: 2781241 - RNA, 23 nt, Human
uauguccacuguguauagaagua

SEQ ID NO: 2781242 - RNA, 13 nt, Human
acaggcgagagag

SEQ ID NO: 2781243 - RNA, 14 nt, Human
acaggcgagagagg

SEQ ID NO: 2781244 - RNA, 19 nt, Human
acaggcgagagaggagcca

SEQ ID NO: 2781245 - RNA, 21 nt, Human
acaggcgagagaggagccaga

SEQ ID NO: 2781246 - RNA, 13 nt, Human
uaugugauuacaa

SEQ ID NO: 2781247 - RNA, 13 nt, Human
uaugucuguuuaa

SEQ ID NO: 2781248 - RNA, 14 nt, Human
uaugucuguuuaag

SEQ ID NO: 2781249 - RNA, 16 nt, Human
uaugucuguuuaagaa

SEQ ID NO: 2781250 - RNA, 18 nt, Human
uaugugaucugucuugua

SEQ ID NO: 2781251 - RNA, 19 nt, Human
uaugugaucugucuuguaa

SEQ ID NO: 2781252 - RNA, 16 nt, Human
uaugucugucauugua

SEQ ID NO: 2781253 - RNA, 12 nt, Human
uaugucuauuua

SEQ ID NO: 2781254 - RNA, 13 nt, Human
uaugucuauuuaa

SEQ ID NO: 2781255 - RNA, 12 nt, Human
uaugucugaugg

SEQ ID NO: 2781256 - RNA, 18 nt, Human
uaugucugcuccuuuccc

SEQ ID NO: 2781257 - RNA, 15 nt, Human
uaugucuauuuaagc

SEQ ID NO: 2781258 - RNA, 19 nt, Human
uaugucucgcuagugaugu

SEQ ID NO: 2781259 - RNA, 17 nt, Human
acaggcccggcuccagg

SEQ ID NO: 2781260 - RNA, 16 nt, Human
acaggcccggcuccag

SEQ ID NO: 2781261 - RNA, 21 nt, Human
acaggcccccuugaguggggu

SEQ ID NO: 2781262 - RNA, 12 nt, Human
acaggcccccuu

SEQ ID NO: 2781263 - RNA, 15 nt, Human
acaggcagcuuucua

SEQ ID NO: 2781264 - RNA, 17 nt, Human
acaggcagcuuucuaga

SEQ ID NO: 2781265 - RNA, 18 nt, Human
acaggcagcuuucuagaa

SEQ ID NO: 2781266 - RNA, 19 nt, Human
acaggcagcuuucuagaag

SEQ ID NO: 2781267 - RNA, 22 nt, Human
acaggcagcgauggucucagaa

SEQ ID NO: 2781268 - RNA, 15 nt, Human
acaggcagauacagg

SEQ ID NO: 2781269 - RNA, 14 nt, Human
acaggagacacugu

SEQ ID NO: 2781270 - RNA, 16 nt, Human
acaggacugauucugg

SEQ ID NO: 2781271 - RNA, 23 nt, Human
acaggacugauucugggaugcuc

SEQ ID NO: 2781272 - RNA, 16 nt, Human
acaggacucugccucc

SEQ ID NO: 2781273 - RNA, 15 nt, Human
acaggacucugccuc

SEQ ID NO: 2781274 - RNA, 16 nt, Human
acaggaaaguguuauu

SEQ ID NO: 2781275 - RNA, 18 nt, Human
acaggaaaguucagaguu

SEQ ID NO: 2781276 - RNA, 22 nt, Human
acaggaaaguucagaguuuucu

SEQ ID NO: 2781277 - RNA, 14 nt, Human
uaugaaagaauaua

SEQ ID NO: 2781278 - RNA, 16 nt, Human
uaugaaaacuauacaa

SEQ ID NO: 2781279 - RNA, 17 nt, Human
uaugaaaacuauacaac

SEQ ID NO: 2781280 - RNA, 22 nt, Human
uaugaaaacuauacaacaaagg

SEQ ID NO: 2781281 - RNA, 19 nt, Human
uaugaaaaugaguugugaa

SEQ ID NO: 2781282 - RNA, 20 nt, Human
uaugaaaaugaguugugaaa

SEQ ID NO: 2781283 - RNA, 16 nt, Human
uaugauaauagauucu

SEQ ID NO: 2781284 - RNA, 14 nt, Human
uaugaaguaaagaa

SEQ ID NO: 2781285 - RNA, 20 nt, Human
uaugaaguaaagaacugcac

SEQ ID NO: 2781286 - RNA, 23 nt, Human
uaugaaguaaagaacugcacaug

SEQ ID NO: 2781287 - RNA, 16 nt, Human
uaugaaguaucuaaaa

SEQ ID NO: 2781288 - RNA, 20 nt, Human
uaugaaguaucuaaaagugu

SEQ ID NO: 2781289 - RNA, 13 nt, Human
uaugaagugcgug

SEQ ID NO: 2781290 - RNA, 19 nt, Human
uaugaagugcgugaaugua

SEQ ID NO: 2781291 - RNA, 20 nt, Human
uaugaaguuacuuucuuaau

SEQ ID NO: 2781292 - RNA, 21 nt, Human
uaugaaguuacuuucuuaaug

SEQ ID NO: 2781293 - RNA, 15 nt, Human
acagcaaguagauaa

SEQ ID NO: 2781294 - RNA, 21 nt, Human
acagcaaguagauaaauauuu

SEQ ID NO: 2781295 - RNA, 16 nt, Human
acagcacagcucccug

SEQ ID NO: 2781296 - RNA, 17 nt, Human
acagcacagcucccugc

SEQ ID NO: 2781297 - RNA, 18 nt, Human
acagcacagcucccugcc

SEQ ID NO: 2781298 - RNA, 20 nt, Human
acagcacagcucccugccaa

SEQ ID NO: 2781299 - RNA, 12 nt, Human
acagcacaugcu

SEQ ID NO: 2781300 - RNA, 15 nt, Human
acagcacaugcuggc

SEQ ID NO: 2781301 - RNA, 17 nt, Human
acagcacaugcuggcca

SEQ ID NO: 2781302 - RNA, 18 nt, Human
acagcacaugcuggccag

SEQ ID NO: 2781303 - RNA, 21 nt, Human
acagcacaugcuggccagccu

SEQ ID NO: 2781304 - RNA, 22 nt, Human
acagauuugagcucagcccugg

SEQ ID NO: 2781305 - RNA, 15 nt, Human
acagauuugagcuca

SEQ ID NO: 2781306 - RNA, 20 nt, Human
acagauuuugggguuguguu

SEQ ID NO: 2781307 - RNA, 22 nt, Human
acagauuuugggguuguguugu

SEQ ID NO: 2781308 - RNA, 11 nt, Human
acagauuuuaa

SEQ ID NO: 2781309 - RNA, 14 nt, Human
acagauuuuaauug

SEQ ID NO: 2781310 - RNA, 17 nt, Human
acagauuuuaauuguca

SEQ ID NO: 2781311 - RNA, 18 nt, Human
acagauuuuaauugucau

SEQ ID NO: 2781312 - RNA, 19 nt, Human
acagauuuuaauugucaug

SEQ ID NO: 2781313 - RNA, 20 nt, Human
acagauuuuaauugucaugg

SEQ ID NO: 2781314 - RNA, 23 nt, Human
acagcccuccaucuaaacugccc

SEQ ID NO: 2781315 - RNA, 16 nt, Human
acagccccuccuccau

SEQ ID NO: 2781316 - RNA, 14 nt, Human
acagccccuccucc

SEQ ID NO: 2781317 - RNA, 17 nt, Human
acagcagccccugcaca

SEQ ID NO: 2781318 - RNA, 17 nt, Human
acagccccagagcaggg

SEQ ID NO: 2781319 - RNA, 12 nt, Human
acagcagcauuu

SEQ ID NO: 2781320 - RNA, 13 nt, Human
acagcagcauuuu

SEQ ID NO: 2781321 - RNA, 14 nt, Human
acagcagcauuuuu

SEQ ID NO: 2781322 - RNA, 19 nt, Human
acagcagcauuuuuauuuc

SEQ ID NO: 2781323 - RNA, 22 nt, Human
acagcagcauuuuuauuucaga

SEQ ID NO: 2781324 - RNA, 21 nt, Human
acagcagauaacaaugcagca

SEQ ID NO: 2781325 - RNA, 14 nt, Human
acagcagcaagaaa

SEQ ID NO: 2781326 - RNA, 15 nt, Human
acagcagcaagaaaa

SEQ ID NO: 2781327 - RNA, 16 nt, Human
acagcagcaagaaaaa

SEQ ID NO: 2781328 - RNA, 17 nt, Human
acagcagcaagaaaaaa

SEQ ID NO: 2781329 - RNA, 21 nt, Human
acagcagcaagaaaaaaaaau

SEQ ID NO: 2781330 - RNA, 22 nt, Human
acagcagcaagaaaaaaaaaug

SEQ ID NO: 2781331 - RNA, 23 nt, Human
acagcagcaagaaaaaaaaaugc

SEQ ID NO: 2781332 - RNA, 14 nt, Human
acagcacuggggag

SEQ ID NO: 2781333 - RNA, 19 nt, Human
acagcacgggggccaagga

SEQ ID NO: 2781334 - RNA, 16 nt, Human
acagcacuacugggug

SEQ ID NO: 2781335 - RNA, 17 nt, Human
acagcacuacugggugu

SEQ ID NO: 2781336 - RNA, 18 nt, Human
acagcacuacuggguguc

SEQ ID NO: 2781337 - RNA, 19 nt, Human
acagcacuacuggguguca

SEQ ID NO: 2781338 - RNA, 20 nt, Human
acagcacuacugggugucau

SEQ ID NO: 2781339 - RNA, 21 nt, Human
acagcacuacugggugucauu

SEQ ID NO: 2781340 - RNA, 22 nt, Human
acagcacuacugggugucauuu

SEQ ID NO: 2781341 - RNA, 15 nt, Human
uaugccccaaauaua

SEQ ID NO: 2781342 - RNA, 15 nt, Human
uaugcccacauuuag

SEQ ID NO: 2781343 - RNA, 18 nt, Human
uaugcccacauuuagucu

SEQ ID NO: 2781344 - RNA, 23 nt, Human
uaugcccacauuuagucucuuua

SEQ ID NO: 2781345 - RNA, 17 nt, Human
uaugccagcucaguccc

SEQ ID NO: 2781346 - RNA, 13 nt, Human
uaugccauagaaa

SEQ ID NO: 2781347 - RNA, 14 nt, Human
uaugccagcucagu

SEQ ID NO: 2781348 - RNA, 22 nt, Human
uaugccauagcaagauugcuua

SEQ ID NO: 2781349 - RNA, 20 nt, Human
uaugcauggaaaccugaaaa

SEQ ID NO: 2781350 - RNA, 17 nt, Human
uaugauaauagauucuc

SEQ ID NO: 2781351 - RNA, 13 nt, Human
uaugauaucccug

SEQ ID NO: 2781352 - RNA, 19 nt, Human
uaugcucucgcaccuuucc

SEQ ID NO: 2781353 - RNA, 13 nt, Human
uauggcauuugca

SEQ ID NO: 2781354 - RNA, 19 nt, Human
uauggcauuugcagauuuu

SEQ ID NO: 2781355 - RNA, 19 nt, Human
uauggccacauuuaauauc

SEQ ID NO: 2781356 - RNA, 23 nt, Human
uaugggacucaaugcacugacau

SEQ ID NO: 2781357 - RNA, 16 nt, Human
uaugggacucaaugca

SEQ ID NO: 2781358 - RNA, 18 nt, Human
uaugggaacacuggcaga

SEQ ID NO: 2781359 - RNA, 18 nt, Human
uaugggacugagccuggc

SEQ ID NO: 2781360 - RNA, 18 nt, Human
acagcggagucuguccug

SEQ ID NO: 2781361 - RNA, 13 nt, Human
acagcggccccug

SEQ ID NO: 2781362 - RNA, 22 nt, Human
acagcuaaucagcauucucacu

SEQ ID NO: 2781363 - RNA, 19 nt, Human
acagcggccccugcauccc

SEQ ID NO: 2781364 - RNA, 15 nt, Human
acagcggccccugca

SEQ ID NO: 2781365 - RNA, 16 nt, Human
acagcggccccugcau

SEQ ID NO: 2781366 - RNA, 17 nt, Human
acagcgagggcagcugc

SEQ ID NO: 2781367 - RNA, 16 nt, Human
acagcgagggcagcug

SEQ ID NO: 2781368 - RNA, 15 nt, Human
acagcgagggcagcu

SEQ ID NO: 2781369 - RNA, 14 nt, Human
acagcgagggcagc

SEQ ID NO: 2781370 - RNA, 23 nt, Human
acagcgagggcagcugcuauuua

SEQ ID NO: 2781371 - RNA, 19 nt, Human
acagcgagggcagcugcua

SEQ ID NO: 2781372 - RNA, 18 nt, Human
acagcgagggcagcugcu

SEQ ID NO: 2781373 - RNA, 16 nt, Human
uauggugaacccacaa

SEQ ID NO: 2781374 - RNA, 20 nt, Human
acagcgacauagcccauccc

SEQ ID NO: 2781375 - RNA, 14 nt, Human
acagcgacauagcc

SEQ ID NO: 2781376 - RNA, 19 nt, Human
uaugguccuaaaagcaaaa

SEQ ID NO: 2781377 - RNA, 20 nt, Human
uaugguauaaugguugacug

SEQ ID NO: 2781378 - RNA, 13 nt, Human
uaugguauaaugg

SEQ ID NO: 2781379 - RNA, 21 nt, Human
uauggucaaucccaaaaguca

SEQ ID NO: 2781380 - RNA, 15 nt, Human
uagaaacauugaaga

SEQ ID NO: 2781381 - RNA, 15 nt, Human
uagaaacccaagcuc

SEQ ID NO: 2781382 - RNA, 18 nt, Human
uagaaacccaagcuccuc

SEQ ID NO: 2781383 - RNA, 20 nt, Human
uagaaacccaagcuccuccu

SEQ ID NO: 2781384 - RNA, 21 nt, Human
uagaaacccaagcuccuccuc

SEQ ID NO: 2781385 - RNA, 14 nt, Human
uagaaaccuuaaua

SEQ ID NO: 2781386 - RNA, 15 nt, Human
uagaaaccuuaauau

SEQ ID NO: 2781387 - RNA, 19 nt, Human
uagaaacuaauugacuuua

SEQ ID NO: 2781388 - RNA, 19 nt, Human
uagaacuuuaagcaacaag

SEQ ID NO: 2781389 - RNA, 12 nt, Human
uagaacuuuuuu

SEQ ID NO: 2781390 - RNA, 15 nt, Human
uagaacuuuuuuaaa

SEQ ID NO: 2781391 - RNA, 16 nt, Human
uagaacuuuuuuaaau

SEQ ID NO: 2781392 - RNA, 17 nt, Human
uagaacuuuuuuaaaua

SEQ ID NO: 2781393 - RNA, 18 nt, Human
uagaacuuuuuuaaauaa

SEQ ID NO: 2781394 - RNA, 19 nt, Human
uagaacuuuuuuaaauaaa

SEQ ID NO: 2781395 - RNA, 20 nt, Human
uagaacuuuuuuaaauaaac

SEQ ID NO: 2781396 - RNA, 21 nt, Human
uagaacuuuuuuaaauaaacu

SEQ ID NO: 2781397 - RNA, 22 nt, Human
uagaacuuuuuuaaauaaacuu

SEQ ID NO: 2781398 - RNA, 23 nt, Human
uagaacuuuuuuaaauaaacuuu

SEQ ID NO: 2781399 - RNA, 18 nt, Human
uagaagaagcuaugucaa

SEQ ID NO: 2781400 - RNA, 13 nt, Human
uagaaacaugaca

SEQ ID NO: 2781401 - RNA, 14 nt, Human
uagaaacaugacac

SEQ ID NO: 2781402 - RNA, 16 nt, Human
uagaaacaugacacug

SEQ ID NO: 2781403 - RNA, 17 nt, Human
uagaaacaugacacuga

SEQ ID NO: 2781404 - RNA, 19 nt, Human
uagaaacaugacacugacc

SEQ ID NO: 2781405 - RNA, 15 nt, Human
uagaaaauucauaac

SEQ ID NO: 2781406 - RNA, 12 nt, Human
uagaaaaugugu

SEQ ID NO: 2781407 - RNA, 24 nt, Human
uagaaaauguguccuaucuaucuu

SEQ ID NO: 2781408 - RNA, 12 nt, Human
uagaaaaguuau

SEQ ID NO: 2781409 - RNA, 14 nt, Human
uagaaaaguuauua

SEQ ID NO: 2781410 - RNA, 21 nt, Human
uagaaaauagagcuuuuaaaa

SEQ ID NO: 2781411 - RNA, 23 nt, Human
uagaaaaucaagcagguuagaga

SEQ ID NO: 2781412 - RNA, 20 nt, Human
uagaaaagcugaucauaagu

SEQ ID NO: 2781413 - RNA, 21 nt, Human
uagaaaaggcuagguacacag

SEQ ID NO: 2781414 - RNA, 22 nt, Human
uagaaaacugaaaaucuaauau

SEQ ID NO: 2781415 - RNA, 15 nt, Human
uagaaaacugaaaau

SEQ ID NO: 2781416 - RNA, 16 nt, Human
uagaaaacugaaaauc

SEQ ID NO: 2781417 - RNA, 20 nt, Human
uagaaaacugaaaaucuaau

SEQ ID NO: 2781418 - RNA, 21 nt, Human
uagaaaacugaaaaucuaaua

SEQ ID NO: 2781419 - RNA, 17 nt, Human
aauuccaauuauaugag

SEQ ID NO: 2781420 - RNA, 16 nt, Human
aauuccacaccuuuua

SEQ ID NO: 2781421 - RNA, 13 nt, Human
aauuccacagcug

SEQ ID NO: 2781422 - RNA, 12 nt, Human
aauuccacagcu

SEQ ID NO: 2781423 - RNA, 14 nt, Human
aauuccacagcugc

SEQ ID NO: 2781424 - RNA, 20 nt, Human
aauuccacaccuuuuauuga

SEQ ID NO: 2781425 - RNA, 15 nt, Human
aauuccacucugaua

SEQ ID NO: 2781426 - RNA, 23 nt, Human
uacuuugauauuuucaacgcagc

SEQ ID NO: 2781427 - RNA, 18 nt, Human
uacuuugguuucugucug

SEQ ID NO: 2781428 - RNA, 19 nt, Human
uacuuugguuucugucugu

SEQ ID NO: 2781429 - RNA, 15 nt, Human
uagaaaaaaauuacu

SEQ ID NO: 2781430 - RNA, 18 nt, Human
uagaaaaaaguuuacaac

SEQ ID NO: 2781431 - RNA, 14 nt, Human
uacuuuuuuucaca

SEQ ID NO: 2781432 - RNA, 21 nt, Human
uacuuuuuuuuuuuuuuggua

SEQ ID NO: 2781433 - RNA, 18 nt, Human
uagaaaaauagcaacuug

SEQ ID NO: 2781434 - RNA, 13 nt, Human
uagaaaaaggguc

SEQ ID NO: 2781435 - RNA, 14 nt, Human
uagaaaaaggguca

SEQ ID NO: 2781436 - RNA, 21 nt, Human
uagaaaaagggucaaugcuau

SEQ ID NO: 2781437 - RNA, 13 nt, Human
uagaaaacugaaa

SEQ ID NO: 2781438 - RNA, 20 nt, Human
uagaaaaauucagcaaacca

SEQ ID NO: 2781439 - RNA, 15 nt, Human
uagaaaacaaugcaa

SEQ ID NO: 2781440 - RNA, 20 nt, Human
uagaaaacaaugcaaaaccu

SEQ ID NO: 2781441 - RNA, 20 nt, Human
uacuuuuuaaaagguauuuu

SEQ ID NO: 2781442 - RNA, 16 nt, Human
aauuccaauaugauga

SEQ ID NO: 2781443 - RNA, 16 nt, Human
uacuuuuccuuaccuu

SEQ ID NO: 2781444 - RNA, 13 nt, Human
uacuuuugagugu

SEQ ID NO: 2781445 - RNA, 14 nt, Human
uacuuuugagugug

SEQ ID NO: 2781446 - RNA, 16 nt, Human
uacuuuugagugugug

SEQ ID NO: 2781447 - RNA, 17 nt, Human
uacuuuugagugugugu

SEQ ID NO: 2781448 - RNA, 19 nt, Human
uacuuuucccauuuguaau

SEQ ID NO: 2781449 - RNA, 23 nt, Human
uacuuuuauuuuacacagaaaca

SEQ ID NO: 2781450 - RNA, 19 nt, Human
uacuuuuauuugcaacauu

SEQ ID NO: 2781451 - RNA, 21 nt, Human
uacuuuuauuugcaacauuua

SEQ ID NO: 2781452 - RNA, 16 nt, Human
uagaaaaguagacaau

SEQ ID NO: 2781453 - RNA, 13 nt, Human
uagacacagauaa

SEQ ID NO: 2781454 - RNA, 14 nt, Human
uagacacauuuaag

SEQ ID NO: 2781455 - RNA, 15 nt, Human
uagacacauuuaagg

SEQ ID NO: 2781456 - RNA, 17 nt, Human
uagacacauuuaaggau

SEQ ID NO: 2781457 - RNA, 14 nt, Human
uagacaccaaaguu

SEQ ID NO: 2781458 - RNA, 17 nt, Human
uagacaccaaaguucua

SEQ ID NO: 2781459 - RNA, 18 nt, Human
uagacaccaaaguucuaa

SEQ ID NO: 2781460 - RNA, 20 nt, Human
uagacaccaaaguucuaaua

SEQ ID NO: 2781461 - RNA, 21 nt, Human
uagacaccaaaguucuaauaa

SEQ ID NO: 2781462 - RNA, 21 nt, Human
uagacacuccccgaagucuuu

SEQ ID NO: 2781463 - RNA, 17 nt, Human
uagacacccauuuucac

SEQ ID NO: 2781464 - RNA, 18 nt, Human
uagacacccauuuucaca

SEQ ID NO: 2781465 - RNA, 14 nt, Human
uagacacccuggca

SEQ ID NO: 2781466 - RNA, 10 nt, Human
uagacagagu

SEQ ID NO: 2781467 - RNA, 22 nt, Human
uagaagggccaguccugccugg

SEQ ID NO: 2781468 - RNA, 19 nt, Human
uagaagggccaguccugcc

SEQ ID NO: 2781469 - RNA, 19 nt, Human
uagaagguucucuccuccc

SEQ ID NO: 2781470 - RNA, 19 nt, Human
uagaagguugacacaguug

SEQ ID NO: 2781471 - RNA, 14 nt, Human
uagaaguagauucu

SEQ ID NO: 2781472 - RNA, 16 nt, Human
uagaagcuguaguagc

SEQ ID NO: 2781473 - RNA, 23 nt, Human
uagaaggaaaaaaguuccuuccu

SEQ ID NO: 2781474 - RNA, 16 nt, Human
aauuugucuugccuua

SEQ ID NO: 2781475 - RNA, 22 nt, Human
aauuugggaagguuuguguuuu

SEQ ID NO: 2781476 - RNA, 17 nt, Human
aauuugggacccugcuu

SEQ ID NO: 2781477 - RNA, 18 nt, Human
aauuugggacccugcuuu

SEQ ID NO: 2781478 - RNA, 21 nt, Human
aauuugggacccugcuuuaga

SEQ ID NO: 2781479 - RNA, 15 nt, Human
aauuuuaauuuauuu

SEQ ID NO: 2781480 - RNA, 13 nt, Human
aauuuuaauuuau

SEQ ID NO: 2781481 - RNA, 12 nt, Human
aauuuuaauuua

SEQ ID NO: 2781482 - RNA, 14 nt, Human
aauuuuaauuuagu

SEQ ID NO: 2781483 - RNA, 16 nt, Human
aauuuggauugcuaau

SEQ ID NO: 2781484 - RNA, 18 nt, Human
aauuuggccugcacuaau

SEQ ID NO: 2781485 - RNA, 16 nt, Human
aauuugggcuuccugu

SEQ ID NO: 2781486 - RNA, 20 nt, Human
aauuugggcuuccuguuugu

SEQ ID NO: 2781487 - RNA, 11 nt, Human
aauuuggggac

SEQ ID NO: 2781488 - RNA, 20 nt, Human
aauuuggggacagauucagu

SEQ ID NO: 2781489 - RNA, 22 nt, Human
aauuuggggacagauucagucu

SEQ ID NO: 2781490 - RNA, 23 nt, Human
aauuuggggacagauucagucuu

SEQ ID NO: 2781491 - RNA, 24 nt, Human
aauuuggggacagauucagucuug

SEQ ID NO: 2781492 - RNA, 17 nt, Human
uagacauggagguucua

SEQ ID NO: 2781493 - RNA, 13 nt, Human
uagacauaacaaa

SEQ ID NO: 2781494 - RNA, 18 nt, Human
uagacagucucacuuugu

SEQ ID NO: 2781495 - RNA, 13 nt, Human
uagacaguuugua

SEQ ID NO: 2781496 - RNA, 15 nt, Human
uagacaguuuguaaa

SEQ ID NO: 2781497 - RNA, 18 nt, Human
uagacaguuuguaaaugu

SEQ ID NO: 2781498 - RNA, 20 nt, Human
uagacaguuuguaaauguua

SEQ ID NO: 2781499 - RNA, 21 nt, Human
uagacaguuuguaaauguuau

SEQ ID NO: 2781500 - RNA, 22 nt, Human
uagacaguuuguaaauguuauu

SEQ ID NO: 2781501 - RNA, 16 nt, Human
uagacaguuuugagaa

SEQ ID NO: 2781502 - RNA, 16 nt, Human
uagacauuuuaacaag

SEQ ID NO: 2781503 - RNA, 17 nt, Human
uagacauuuuaacaaga

SEQ ID NO: 2781504 - RNA, 18 nt, Human
uagacauuuuaacaagaa

SEQ ID NO: 2781505 - RNA, 19 nt, Human
uagacauuuuaacaagaag

SEQ ID NO: 2781506 - RNA, 21 nt, Human
uagacauuuuaacaagaagau

SEQ ID NO: 2781507 - RNA, 23 nt, Human
uagacauuuuaacaagaagauga

SEQ ID NO: 2781508 - RNA, 15 nt, Human
uagacauugaggacc

SEQ ID NO: 2781509 - RNA, 22 nt, Human
uagacauggagguucuaaggcc

SEQ ID NO: 2781510 - RNA, 23 nt, Human
uagacauggagguucuaaggccu

SEQ ID NO: 2781511 - RNA, 18 nt, Human
uagacauggagguucuaa

SEQ ID NO: 2781512 - RNA, 19 nt, Human
uagacauggagguucuaag

SEQ ID NO: 2781513 - RNA, 20 nt, Human
uagacauggagguucuaagg

SEQ ID NO: 2781514 - RNA, 21 nt, Human
uagacauggagguucuaaggc

SEQ ID NO: 2781515 - RNA, 14 nt, Human
uagaccaaaauaaa

SEQ ID NO: 2781516 - RNA, 13 nt, Human
uagaccaaaauaa

SEQ ID NO: 2781517 - RNA, 14 nt, Human
aauuuggaaauccu

SEQ ID NO: 2781518 - RNA, 18 nt, Human
aauuuuacccuuuagacu

SEQ ID NO: 2781519 - RNA, 15 nt, Human
acaaaaaacuccccu

SEQ ID NO: 2781520 - RNA, 17 nt, Human
aauuuuacccuuuagac

SEQ ID NO: 2781521 - RNA, 21 nt, Human
aauuuuacccuuuagacugua

SEQ ID NO: 2781522 - RNA, 23 nt, Human
aauuuuacuccauaaacagacug

SEQ ID NO: 2781523 - RNA, 13 nt, Human
aauuuuacacauu

SEQ ID NO: 2781524 - RNA, 14 nt, Human
acaaaaagcuuccc

SEQ ID NO: 2781525 - RNA, 15 nt, Human
acaaaaagcuucccc

SEQ ID NO: 2781526 - RNA, 19 nt, Human
acaaaaggcuccauauaua

SEQ ID NO: 2781527 - RNA, 11 nt, Human
acaaaaggguc

SEQ ID NO: 2781528 - RNA, 13 nt, Human
acaaaagggucag

SEQ ID NO: 2781529 - RNA, 14 nt, Human
acaaaagggucaga

SEQ ID NO: 2781530 - RNA, 15 nt, Human
acaaaacuacaugag

SEQ ID NO: 2781531 - RNA, 17 nt, Human
acaaaacccaugcauuu

SEQ ID NO: 2781532 - RNA, 14 nt, Human
acaaaauaaacaaa

SEQ ID NO: 2781533 - RNA, 12 nt, Human
acaaaauaaaca

SEQ ID NO: 2781534 - RNA, 23 nt, Human
acaaaacacucggcauuucaaau

SEQ ID NO: 2781535 - RNA, 16 nt, Human
acaaaaccuaacuugc

SEQ ID NO: 2781536 - RNA, 21 nt, Human
acaaaaccuaacuugcgcaga

SEQ ID NO: 2781537 - RNA, 16 nt, Human
acaaaacgcgcagaug

SEQ ID NO: 2781538 - RNA, 17 nt, Human
acaaaacgcgcagaugu

SEQ ID NO: 2781539 - RNA, 15 nt, Human
acaaaaaucagccag

SEQ ID NO: 2781540 - RNA, 17 nt, Human
acaaaaaucagccagac

SEQ ID NO: 2781541 - RNA, 18 nt, Human
acaaaaaucagccagaca

SEQ ID NO: 2781542 - RNA, 18 nt, Human
acaaaaaguuuccauaug

SEQ ID NO: 2781543 - RNA, 10 nt, Human
acaaaaauaa

SEQ ID NO: 2781544 - RNA, 12 nt, Human
acaaaaauaaau

SEQ ID NO: 2781545 - RNA, 14 nt, Human
acaaaaauaaauuu

SEQ ID NO: 2781546 - RNA, 20 nt, Human
acaaaaauaaauuuauauga

SEQ ID NO: 2781547 - RNA, 15 nt, Human
acaaaaauugacuca

SEQ ID NO: 2781548 - RNA, 13 nt, Human
acaaaaauuugaa

SEQ ID NO: 2781549 - RNA, 11 nt, Human
acaaaacaaaa

SEQ ID NO: 2781550 - RNA, 12 nt, Human
acaaaacaaaac

SEQ ID NO: 2781551 - RNA, 14 nt, Human
acaaaacaaaacaa

SEQ ID NO: 2781552 - RNA, 15 nt, Human
acaaaacaaaacaaa

SEQ ID NO: 2781553 - RNA, 16 nt, Human
acaaaacaaaacaaaa

SEQ ID NO: 2781554 - RNA, 18 nt, Human
acaaaacaaaacaaaacu

SEQ ID NO: 2781555 - RNA, 17 nt, Human
acaaaacaaaacaacau

SEQ ID NO: 2781556 - RNA, 14 nt, Human
acaaaacaaaacua

SEQ ID NO: 2781557 - RNA, 15 nt, Human
acaaaacaaaacuau

SEQ ID NO: 2781558 - RNA, 21 nt, Human
acaaagguuuuccucuucuau

SEQ ID NO: 2781559 - RNA, 14 nt, Human
acaaaguaauuccu

SEQ ID NO: 2781560 - RNA, 16 nt, Human
acaaauaauaagcaaa

SEQ ID NO: 2781561 - RNA, 12 nt, Human
acaaauaaucac

SEQ ID NO: 2781562 - RNA, 13 nt, Human
acaaauaaucaca

SEQ ID NO: 2781563 - RNA, 16 nt, Human
acaaauaacaaugugc

SEQ ID NO: 2781564 - RNA, 15 nt, Human
acaaauaauuuuagu

SEQ ID NO: 2781565 - RNA, 16 nt, Human
acaaaauauuucccau

SEQ ID NO: 2781566 - RNA, 20 nt, Human
acaaaauccagcuaugaaua

SEQ ID NO: 2781567 - RNA, 15 nt, Human
acaaaauagaagcug

SEQ ID NO: 2781568 - RNA, 18 nt, Human
acaaaauagaagcuguag

SEQ ID NO: 2781569 - RNA, 12 nt, Human
acaaaauagaag

SEQ ID NO: 2781570 - RNA, 24 nt, Human
acaaagguugagauguaaaaggua

SEQ ID NO: 2781571 - RNA, 14 nt, Human
acaaaaucuccucu

SEQ ID NO: 2781572 - RNA, 17 nt, Human
acaaaaucuguugccac

SEQ ID NO: 2781573 - RNA, 14 nt, Human
uagagccagggucu

SEQ ID NO: 2781574 - RNA, 17 nt, Human
uagagccugccuggagc

SEQ ID NO: 2781575 - RNA, 18 nt, Human
uagagccugccuggagcg

SEQ ID NO: 2781576 - RNA, 22 nt, Human
uagagccuucugaugucucuaa

SEQ ID NO: 2781577 - RNA, 12 nt, Human
uagagccugccu

SEQ ID NO: 2781578 - RNA, 13 nt, Human
uagagccugccug

SEQ ID NO: 2781579 - RNA, 16 nt, Human
uagagccugccuggag

SEQ ID NO: 2781580 - RNA, 23 nt, Human
uagagggaggagaaugagccucg

SEQ ID NO: 2781581 - RNA, 20 nt, Human
uagagggaccucucccaggg

SEQ ID NO: 2781582 - RNA, 19 nt, Human
uagagggaccucucccagg

SEQ ID NO: 2781583 - RNA, 15 nt, Human
uagagggaccucucc

SEQ ID NO: 2781584 - RNA, 14 nt, Human
uagcaaaaaguggg

SEQ ID NO: 2781585 - RNA, 18 nt, Human
uagcaaaaaguggggcag

SEQ ID NO: 2781586 - RNA, 22 nt, Human
uagcaaaacuaaauacuugcuc

SEQ ID NO: 2781587 - RNA, 15 nt, Human
uagcaaaacuuuuaa

SEQ ID NO: 2781588 - RNA, 16 nt, Human
uagcaaaacuuuuaaa

SEQ ID NO: 2781589 - RNA, 18 nt, Human
uagcaaaacuuuuaaacu

SEQ ID NO: 2781590 - RNA, 19 nt, Human
uagcaaaacuuuuaaacua

SEQ ID NO: 2781591 - RNA, 21 nt, Human
uagcaaaacuuuuaaacuaca

SEQ ID NO: 2781592 - RNA, 23 nt, Human
uagaggggggauuuccagccagg

SEQ ID NO: 2781593 - RNA, 12 nt, Human
uagauuuuuuca

SEQ ID NO: 2781594 - RNA, 18 nt, Human
uagcaaaaaaaacccaug

SEQ ID NO: 2781595 - RNA, 16 nt, Human
uagcaauuccaucacc

SEQ ID NO: 2781596 - RNA, 12 nt, Human
uagcaaacagag

SEQ ID NO: 2781597 - RNA, 15 nt, Human
uagcaaacagaggaa

SEQ ID NO: 2781598 - RNA, 14 nt, Human
uagcaaacuuugua

SEQ ID NO: 2781599 - RNA, 16 nt, Human
acaaaucaacagaagc

SEQ ID NO: 2781600 - RNA, 17 nt, Human
acaaaucaacagaagca

SEQ ID NO: 2781601 - RNA, 19 nt, Human
acaaaucaacagaagcauu

SEQ ID NO: 2781602 - RNA, 21 nt, Human
acaaaucaacagaagcauuug

SEQ ID NO: 2781603 - RNA, 23 nt, Human
acaaaucaacagaagcauuugua

SEQ ID NO: 2781604 - RNA, 14 nt, Human
uagccacucaggag

SEQ ID NO: 2781605 - RNA, 13 nt, Human
uagccacucagga

SEQ ID NO: 2781606 - RNA, 22 nt, Human
uagccacuaguaaguaauuaug

SEQ ID NO: 2781607 - RNA, 19 nt, Human
uagccaccccagaaauggu

SEQ ID NO: 2781608 - RNA, 16 nt, Human
uagccacauuuggaau

SEQ ID NO: 2781609 - RNA, 20 nt, Human
uagccacauuuggaauacuu

SEQ ID NO: 2781610 - RNA, 21 nt, Human
uagccacauuuggaauacuuu

SEQ ID NO: 2781611 - RNA, 20 nt, Human
uagcacuaccacuccugcca

SEQ ID NO: 2781612 - RNA, 14 nt, Human
uagcacuaggcacc

SEQ ID NO: 2781613 - RNA, 16 nt, Human
uagcacuaggcaccca

SEQ ID NO: 2781614 - RNA, 16 nt, Human
uagcacuaccacuccu

SEQ ID NO: 2781615 - RNA, 15 nt, Human
uagcacucaggcucu

SEQ ID NO: 2781616 - RNA, 19 nt, Human
uagcacucauuuucuauaa

SEQ ID NO: 2781617 - RNA, 11 nt, Human
uagcacuguug

SEQ ID NO: 2781618 - RNA, 16 nt, Human
uagcacuguugaugua

SEQ ID NO: 2781619 - RNA, 17 nt, Human
uagcacuguugauguau

SEQ ID NO: 2781620 - RNA, 18 nt, Human
uagcacuguugauguauc

SEQ ID NO: 2781621 - RNA, 19 nt, Human
uagcacuguugauguaucu

SEQ ID NO: 2781622 - RNA, 20 nt, Human
uagcacuguugauguaucug

SEQ ID NO: 2781623 - RNA, 23 nt, Human
uagcacuguugauguaucugagu

SEQ ID NO: 2781624 - RNA, 14 nt, Human
uagcacuuugaaau

SEQ ID NO: 2781625 - RNA, 15 nt, Human
uagcacuuugaaaua

SEQ ID NO: 2781626 - RNA, 17 nt, Human
uagcacuuugaaauacc

SEQ ID NO: 2781627 - RNA, 19 nt, Human
uagcacuuugaaauaccuc

SEQ ID NO: 2781628 - RNA, 20 nt, Human
uagcacuuugaaauaccuca

SEQ ID NO: 2781629 - RNA, 21 nt, Human
uagcacuuugaaauaccucau

SEQ ID NO: 2781630 - RNA, 18 nt, Human
uaggauuugaacacuugg

SEQ ID NO: 2781631 - RNA, 20 nt, Human
uaggcaaauguuuaaacauu

SEQ ID NO: 2781632 - RNA, 14 nt, Human
uaggauucuaaaau

SEQ ID NO: 2781633 - RNA, 12 nt, Human
uaggauucuaaa

SEQ ID NO: 2781634 - RNA, 16 nt, Human
uaggcauuaacacaaa

SEQ ID NO: 2781635 - RNA, 18 nt, Human
uaggcauuaacacaaagg

SEQ ID NO: 2781636 - RNA, 20 nt, Human
uaggcauuaacacaaaggag

SEQ ID NO: 2781637 - RNA, 19 nt, Human
uaggcauuaauguuucuau

SEQ ID NO: 2781638 - RNA, 17 nt, Human
uaggcaucucuguacuu

SEQ ID NO: 2781639 - RNA, 20 nt, Human
uaggcaugaagagcaaaaau

SEQ ID NO: 2781640 - RNA, 23 nt, Human
uaggcaugaagagcaaaaauauc

SEQ ID NO: 2781641 - RNA, 20 nt, Human
uaggcaguaggccggugugc

SEQ ID NO: 2781642 - RNA, 24 nt, Human
uaggcaguaggccggugugccuga

SEQ ID NO: 2781643 - RNA, 17 nt, Human
uaggcaggacaugcuga

SEQ ID NO: 2781644 - RNA, 22 nt, Human
uaggcaggacaugcugaagcca

SEQ ID NO: 2781645 - RNA, 16 nt, Human
uaggcaggacaugcug

SEQ ID NO: 2781646 - RNA, 21 nt, Human
uaggaaaaucacuuugucuaa

SEQ ID NO: 2781647 - RNA, 16 nt, Human
uaggaaauaaaaccuu

SEQ ID NO: 2781648 - RNA, 14 nt, Human
uaggaaauaaaacc

SEQ ID NO: 2781649 - RNA, 19 nt, Human
uaggaaagccucacugaua

SEQ ID NO: 2781650 - RNA, 21 nt, Human
uaggaaagccucacugauaua

SEQ ID NO: 2781651 - RNA, 11 nt, Human
uaggaaaggau

SEQ ID NO: 2781652 - RNA, 18 nt, Human
uaggagugugugacauuc

SEQ ID NO: 2781653 - RNA, 20 nt, Human
uaggagugugugacauucca

SEQ ID NO: 2781654 - RNA, 13 nt, Human
uaggaaacaagug

SEQ ID NO: 2781655 - RNA, 21 nt, Human
uaggagugggugacaagagcc

SEQ ID NO: 2781656 - RNA, 17 nt, Human
uaggaaauaaaaccuuu

SEQ ID NO: 2781657 - RNA, 21 nt, Human
uaggaguucgagaccagccug

SEQ ID NO: 2781658 - RNA, 17 nt, Human
uaggaguucgagaccag

SEQ ID NO: 2781659 - RNA, 23 nt, Human
uaggaguucgagaccagccuggc

SEQ ID NO: 2781660 - RNA, 22 nt, Human
uaggaaaaaaacuauuaaggau

SEQ ID NO: 2781661 - RNA, 16 nt, Human
uaggaugguaaaguua

SEQ ID NO: 2781662 - RNA, 18 nt, Human
uaggaugaaaagauucuu

SEQ ID NO: 2781663 - RNA, 18 nt, Human
uaggaugcucaguugcua

SEQ ID NO: 2781664 - RNA, 20 nt, Human
uaggaucuaaggcuguuugc

SEQ ID NO: 2781665 - RNA, 21 nt, Human
uaggaucuaaggcuguuugcu

SEQ ID NO: 2781666 - RNA, 20 nt, Human
uaggaucauuuguuggaaug

SEQ ID NO: 2781667 - RNA, 13 nt, Human
uaggauagcauuu

SEQ ID NO: 2781668 - RNA, 13 nt, Human
uagggaaagaaag

SEQ ID NO: 2781669 - RNA, 19 nt, Human
uagggaagcuggccugaga

SEQ ID NO: 2781670 - RNA, 19 nt, Human
uagggauggggcugugggg

SEQ ID NO: 2781671 - RNA, 14 nt, Human
uagggaugccuccu

SEQ ID NO: 2781672 - RNA, 15 nt, Human
uagggaugccuccuu

SEQ ID NO: 2781673 - RNA, 15 nt, Human
uagggcaauuggaac

SEQ ID NO: 2781674 - RNA, 15 nt, Human
uagggauucaggcug

SEQ ID NO: 2781675 - RNA, 16 nt, Human
uagggaugccuccuuu

SEQ ID NO: 2781676 - RNA, 16 nt, Human
uagggauucaggcugc

SEQ ID NO: 2781677 - RNA, 18 nt, Human
uagggauuuauuuucaau

SEQ ID NO: 2781678 - RNA, 23 nt, Human
uaggggcuuauaauaaaggacug

SEQ ID NO: 2781679 - RNA, 22 nt, Human
uaggggcuuauaauaaaggacu

SEQ ID NO: 2781680 - RNA, 21 nt, Human
uaggggcuuauaauaaaggac

SEQ ID NO: 2781681 - RNA, 13 nt, Human
uaggguaaaaauu

SEQ ID NO: 2781682 - RNA, 14 nt, Human
uaggguaaaaauug

SEQ ID NO: 2781683 - RNA, 14 nt, Human
uaggggucaaagaa

SEQ ID NO: 2781684 - RNA, 14 nt, Human
uaggggucacugua

SEQ ID NO: 2781685 - RNA, 11 nt, Human
uagggccaggc

SEQ ID NO: 2781686 - RNA, 14 nt, Human
uagggccaggcagg

SEQ ID NO: 2781687 - RNA, 14 nt, Human
uagggcugggaaac

SEQ ID NO: 2781688 - RNA, 16 nt, Human
uagggcugggaaacac

SEQ ID NO: 2781689 - RNA, 19 nt, Human
uagggcugggcaaggaaaa

SEQ ID NO: 2781690 - RNA, 20 nt, Human
uagggcugggcaaggaaaaa

SEQ ID NO: 2781691 - RNA, 21 nt, Human
uagggcugggcaaggaaaaag

SEQ ID NO: 2781692 - RNA, 14 nt, Human
uagggcuuaguguu

SEQ ID NO: 2781693 - RNA, 21 nt, Human
uagggccaggcaggugccugg

SEQ ID NO: 2781694 - RNA, 15 nt, Human
uagggccaggcaggu

SEQ ID NO: 2781695 - RNA, 17 nt, Human
acaaaucaguuaguuuu

SEQ ID NO: 2781696 - RNA, 21 nt, Human
acaaauccaaaggaaagaaua

SEQ ID NO: 2781697 - RNA, 14 nt, Human
acaaaucuauuuaa

SEQ ID NO: 2781698 - RNA, 20 nt, Human
acaaaucuauuuaauuagga

SEQ ID NO: 2781699 - RNA, 17 nt, Human
acaaaucuguguauauu

SEQ ID NO: 2781700 - RNA, 19 nt, Human
acaaaucuguguauauuau

SEQ ID NO: 2781701 - RNA, 20 nt, Human
acaaaucuguguauauuauu

SEQ ID NO: 2781702 - RNA, 15 nt, Human
acaauauuuauaaag

SEQ ID NO: 2781703 - RNA, 20 nt, Human
uagccuuagaagucacacag

SEQ ID NO: 2781704 - RNA, 19 nt, Human
acaaucagccacauucuag

SEQ ID NO: 2781705 - RNA, 12 nt, Human
acaaucacacuc

SEQ ID NO: 2781706 - RNA, 21 nt, Human
uagccuuagaagucacacagu

SEQ ID NO: 2781707 - RNA, 12 nt, Human
uagccuguggcc

SEQ ID NO: 2781708 - RNA, 13 nt, Human
uagccuguggccc

SEQ ID NO: 2781709 - RNA, 16 nt, Human
uagccuguggcccugu

SEQ ID NO: 2781710 - RNA, 20 nt, Human
uagccuguggcccuguccug

SEQ ID NO: 2781711 - RNA, 13 nt, Human
uagccuguggccu

SEQ ID NO: 2781712 - RNA, 15 nt, Human
uagccuguuucuucc

SEQ ID NO: 2781713 - RNA, 20 nt, Human
uagccuguuucuuccuguua

SEQ ID NO: 2781714 - RNA, 14 nt, Human
uagcgcccaguugg

SEQ ID NO: 2781715 - RNA, 17 nt, Human
uagcgcccaguugggug

SEQ ID NO: 2781716 - RNA, 13 nt, Human
uagcgcuguuuuu

SEQ ID NO: 2781717 - RNA, 19 nt, Human
uagcgugcccgugugcaug

SEQ ID NO: 2781718 - RNA, 16 nt, Human
uagcguuuuuuaaaug

SEQ ID NO: 2781719 - RNA, 18 nt, Human
uagcguuuuuuaaaugua

SEQ ID NO: 2781720 - RNA, 17 nt, Human
uagcguuuuuuaaaugu

SEQ ID NO: 2781721 - RNA, 13 nt, Human
uagcguucccaac

SEQ ID NO: 2781722 - RNA, 18 nt, Human
uagcguucccaacaacau

SEQ ID NO: 2781723 - RNA, 14 nt, Human
uagcuuuuuaauug

SEQ ID NO: 2781724 - RNA, 15 nt, Human
uagcuuuuuaauugu

SEQ ID NO: 2781725 - RNA, 16 nt, Human
uagcuuuuuaauuguu

SEQ ID NO: 2781726 - RNA, 20 nt, Human
uagcuuuuucauccccuuac

SEQ ID NO: 2781727 - RNA, 15 nt, Human
uagcuuuuuaaaaca

SEQ ID NO: 2781728 - RNA, 17 nt, Human
uagcuuuuuaaaacauu

SEQ ID NO: 2781729 - RNA, 18 nt, Human
uagcuuuuuaaaacauua

SEQ ID NO: 2781730 - RNA, 13 nt, Human
uagcuuuucccuu

SEQ ID NO: 2781731 - RNA, 18 nt, Human
uagcuuuuauuguauaaa

SEQ ID NO: 2781732 - RNA, 13 nt, Human
uagcuuuucaaac

SEQ ID NO: 2781733 - RNA, 13 nt, Human
uagcuuuucaccu

SEQ ID NO: 2781734 - RNA, 14 nt, Human
uagcuuuucaccuu

SEQ ID NO: 2781735 - RNA, 16 nt, Human
uagcuuuucaccuuua

SEQ ID NO: 2781736 - RNA, 15 nt, Human
uagcuuugcucuuug

SEQ ID NO: 2781737 - RNA, 14 nt, Human
uagcuuuuauugua

SEQ ID NO: 2781738 - RNA, 13 nt, Human
uagcuuuguguuu

SEQ ID NO: 2781739 - RNA, 14 nt, Human
uagcuuuguguuug

SEQ ID NO: 2781740 - RNA, 15 nt, Human
uagcuuuguguuugg

SEQ ID NO: 2781741 - RNA, 21 nt, Human
uagcuuuguguuugguuuaca

SEQ ID NO: 2781742 - RNA, 22 nt, Human
uagcuuuguguuugguuuacau

SEQ ID NO: 2781743 - RNA, 23 nt, Human
uagcuuuguguuugguuuacauu

SEQ ID NO: 2781744 - RNA, 14 nt, Human
uagcuuuuaggaaa

SEQ ID NO: 2781745 - RNA, 20 nt, Human
uagcuuuuaggaaaaucacu

SEQ ID NO: 2781746 - RNA, 20 nt, Human
uagcuuuauuuuuuaaguau

SEQ ID NO: 2781747 - RNA, 19 nt, Human
uagcuuuauuuuuuaagua

SEQ ID NO: 2781748 - RNA, 22 nt, Human
uagcuuuauuuuuuaaguauuu

SEQ ID NO: 2781749 - RNA, 15 nt, Human
uagcuuuauucuuca

SEQ ID NO: 2781750 - RNA, 19 nt, Human
uagcuuucccaaauaaacu

SEQ ID NO: 2781751 - RNA, 11 nt, Human
uagcuuugcuc

SEQ ID NO: 2781752 - RNA, 14 nt, Human
uagcuuugcucugc

SEQ ID NO: 2781753 - RNA, 16 nt, Human
uagcuuugcucugcca

SEQ ID NO: 2781754 - RNA, 23 nt, Human
uagcuaacauuuuaaauaaaaga

SEQ ID NO: 2781755 - RNA, 20 nt, Human
uagcuaacauuuuaaauaaa

SEQ ID NO: 2781756 - RNA, 14 nt, Human
uagcuaaguacaca

SEQ ID NO: 2781757 - RNA, 20 nt, Human
uagcuaaacggauuccaaag

SEQ ID NO: 2781758 - RNA, 19 nt, Human
uagcuaaacggauuccaaa

SEQ ID NO: 2781759 - RNA, 18 nt, Human
uagcuaaacggauuccaa

SEQ ID NO: 2781760 - RNA, 22 nt, Human
uagcguuuuuuaaauguauacu

SEQ ID NO: 2781761 - RNA, 21 nt, Human
uagcuucaccccaaucccagc

SEQ ID NO: 2781762 - RNA, 21 nt, Human
uagcuucuaccaugaacagaa

SEQ ID NO: 2781763 - RNA, 18 nt, Human
uagcuuuauauauggaca

SEQ ID NO: 2781764 - RNA, 19 nt, Human
uagcuuuauauauggacau

SEQ ID NO: 2781765 - RNA, 20 nt, Human
uagcuuuauauauggacaug

SEQ ID NO: 2781766 - RNA, 21 nt, Human
uagcuuuauauauggacaugg

SEQ ID NO: 2781767 - RNA, 18 nt, Human
uagcuuuauuuuuuaagu

SEQ ID NO: 2781768 - RNA, 13 nt, Human
uagcuuuauucuu

SEQ ID NO: 2781769 - RNA, 14 nt, Human
uagcuuuauucuuc

SEQ ID NO: 2781770 - RNA, 19 nt, Human
uagcuugggaggcuucccc

SEQ ID NO: 2781771 - RNA, 15 nt, Human
uagcuuggggccagg

SEQ ID NO: 2781772 - RNA, 17 nt, Human
uagcuuggggccaggga

SEQ ID NO: 2781773 - RNA, 13 nt, Human
uagcuuguauagu

SEQ ID NO: 2781774 - RNA, 17 nt, Human
uagcuuguauaguguaa

SEQ ID NO: 2781775 - RNA, 19 nt, Human
uagcuuguauaguguaaaa

SEQ ID NO: 2781776 - RNA, 15 nt, Human
uagcuuguucccugu

SEQ ID NO: 2781777 - RNA, 16 nt, Human
uagcuugcaccuuguc

SEQ ID NO: 2781778 - RNA, 13 nt, Human
acacaacacacac

SEQ ID NO: 2781779 - RNA, 13 nt, Human
acacaacagccaa

SEQ ID NO: 2781780 - RNA, 14 nt, Human
acacaacagccaac

SEQ ID NO: 2781781 - RNA, 18 nt, Human
acacaacagccaacagcu

SEQ ID NO: 2781782 - RNA, 19 nt, Human
acacaacagccaacagcua

SEQ ID NO: 2781783 - RNA, 14 nt, Human
acacaaaugcaggg

SEQ ID NO: 2781784 - RNA, 13 nt, Human
acacaaaugcaug

SEQ ID NO: 2781785 - RNA, 13 nt, Human
acacaaaggaagu

SEQ ID NO: 2781786 - RNA, 20 nt, Human
acacaaaggaagugcccccu

SEQ ID NO: 2781787 - RNA, 21 nt, Human
acacaaaggaagugcccccuc

SEQ ID NO: 2781788 - RNA, 13 nt, Human
acacaaaggggau

SEQ ID NO: 2781789 - RNA, 23 nt, Human
acacaaaggggaucauaaaguua

SEQ ID NO: 2781790 - RNA, 12 nt, Human
acaaugcaaaac

SEQ ID NO: 2781791 - RNA, 16 nt, Human
acaaugcaaaaccuuu

SEQ ID NO: 2781792 - RNA, 19 nt, Human
acaaugcaccuagcugugc

SEQ ID NO: 2781793 - RNA, 22 nt, Human
acaaugcaccuagcugugcaag

SEQ ID NO: 2781794 - RNA, 20 nt, Human
acaaugaugcccugcuccag

SEQ ID NO: 2781795 - RNA, 14 nt, Human
acacaauaagcaaa

SEQ ID NO: 2781796 - RNA, 15 nt, Human
acacaaguaagagac

SEQ ID NO: 2781797 - RNA, 16 nt, Human
acacaaguaagagacu

SEQ ID NO: 2781798 - RNA, 19 nt, Human
acacaaguaagagacucag

SEQ ID NO: 2781799 - RNA, 23 nt, Human
acacaaguaagagacucagccug

SEQ ID NO: 2781800 - RNA, 15 nt, Human
acacaaguccuguga

SEQ ID NO: 2781801 - RNA, 16 nt, Human
acacaaguccugugaa

SEQ ID NO: 2781802 - RNA, 13 nt, Human
acacaauaagcaa

SEQ ID NO: 2781803 - RNA, 17 nt, Human
acacaagcccacagcac

SEQ ID NO: 2781804 - RNA, 18 nt, Human
acacaagcccacagcaca

SEQ ID NO: 2781805 - RNA, 16 nt, Human
acacaaggucauggcc

SEQ ID NO: 2781806 - RNA, 20 nt, Human
acacaaggucauggccacac

SEQ ID NO: 2781807 - RNA, 21 nt, Human
acacaaggucauggccacacu

SEQ ID NO: 2781808 - RNA, 23 nt, Human
acacaaggucauggccacacugu

SEQ ID NO: 2781809 - RNA, 12 nt, Human
acacacacacau

SEQ ID NO: 2781810 - RNA, 13 nt, Human
acacacacacaua

SEQ ID NO: 2781811 - RNA, 14 nt, Human
acacacacacauac

SEQ ID NO: 2781812 - RNA, 15 nt, Human
acacacacacauaca

SEQ ID NO: 2781813 - RNA, 13 nt, Human
acacacacacaug

SEQ ID NO: 2781814 - RNA, 15 nt, Human
acacacacacacaug

SEQ ID NO: 2781815 - RNA, 12 nt, Human
uaggguggcccu

SEQ ID NO: 2781816 - RNA, 15 nt, Human
uagggugggccuuca

SEQ ID NO: 2781817 - RNA, 18 nt, Human
uaggguugcuggagccug

SEQ ID NO: 2781818 - RNA, 19 nt, Human
uaggguugguuccuuucca

SEQ ID NO: 2781819 - RNA, 15 nt, Human
uagggucggaaccca

SEQ ID NO: 2781820 - RNA, 22 nt, Human
uagggugaaccacuucauucug

SEQ ID NO: 2781821 - RNA, 13 nt, Human
uagggugcagcca

SEQ ID NO: 2781822 - RNA, 13 nt, Human
uaggguccugggg

SEQ ID NO: 2781823 - RNA, 16 nt, Human
uaggguacauuuauaa

SEQ ID NO: 2781824 - RNA, 18 nt, Human
uaggguacauuuauaauu

SEQ ID NO: 2781825 - RNA, 22 nt, Human
uaggguacauuuauaauugcau

SEQ ID NO: 2781826 - RNA, 14 nt, Human
uaggguacuaaauu

SEQ ID NO: 2781827 - RNA, 16 nt, Human
uaggguacuaaauuua

SEQ ID NO: 2781828 - RNA, 18 nt, Human
uaggguacuaaauuuaaa

SEQ ID NO: 2781829 - RNA, 19 nt, Human
uaggguacuaaauuuaaau

SEQ ID NO: 2781830 - RNA, 20 nt, Human
uaggguacuaaauuuaaauu

SEQ ID NO: 2781831 - RNA, 14 nt, Human
uagguaaaauguau

SEQ ID NO: 2781832 - RNA, 15 nt, Human
uagguaaaauguauu

SEQ ID NO: 2781833 - RNA, 16 nt, Human
uagguaaaauguauuu

SEQ ID NO: 2781834 - RNA, 21 nt, Human
uagguaaaauguauuuuucua

SEQ ID NO: 2781835 - RNA, 11 nt, Human
acacaggcagc

SEQ ID NO: 2781836 - RNA, 12 nt, Human
acacaggcagcu

SEQ ID NO: 2781837 - RNA, 15 nt, Human
acacaggcagcuuuc

SEQ ID NO: 2781838 - RNA, 16 nt, Human
acacaggcccggcucc

SEQ ID NO: 2781839 - RNA, 18 nt, Human
acacaggcccggcuccag

SEQ ID NO: 2781840 - RNA, 17 nt, Human
acacaggcccggcucca

SEQ ID NO: 2781841 - RNA, 15 nt, Human
acacacagauacaca

SEQ ID NO: 2781842 - RNA, 19 nt, Human
acacacagauacacacaca

SEQ ID NO: 2781843 - RNA, 23 nt, Human
acacacagauuugagcucagccc

SEQ ID NO: 2781844 - RNA, 15 nt, Human
acacacacacacauc

SEQ ID NO: 2781845 - RNA, 13 nt, Human
acacacacacauc

SEQ ID NO: 2781846 - RNA, 22 nt, Human
acacaggcccggcuccaggcuc

SEQ ID NO: 2781847 - RNA, 21 nt, Human
acacaggcccggcuccaggcu

SEQ ID NO: 2781848 - RNA, 20 nt, Human
acacaggcccggcuccaggc

SEQ ID NO: 2781849 - RNA, 19 nt, Human
acacaggcccggcuccagg

SEQ ID NO: 2781850 - RNA, 24 nt, Human
acacaggcccggcuccaggcuccu

SEQ ID NO: 2781851 - RNA, 23 nt, Human
acacaggcccggcuccaggcucc

SEQ ID NO: 2781852 - RNA, 12 nt, Human
acacaggcuggc

SEQ ID NO: 2781853 - RNA, 17 nt, Human
acacaggggaggugaua

SEQ ID NO: 2781854 - RNA, 21 nt, Human
acacaggggaggugauagcau

SEQ ID NO: 2781855 - RNA, 20 nt, Human
acacagggugacggugacaa

SEQ ID NO: 2781856 - RNA, 23 nt, Human
acacagggugacggugacaaaga

SEQ ID NO: 2781857 - RNA, 17 nt, Human
acacagguggugucacu

SEQ ID NO: 2781858 - RNA, 18 nt, Human
acacagguggugucacug

SEQ ID NO: 2781859 - RNA, 19 nt, Human
acacagguggugucacugu

SEQ ID NO: 2781860 - RNA, 20 nt, Human
acacagguggugucacuguc

SEQ ID NO: 2781861 - RNA, 21 nt, Human
acacagguggugucacugucc

SEQ ID NO: 2781862 - RNA, 22 nt, Human
acacagguggugucacuguccc

SEQ ID NO: 2781863 - RNA, 16 nt, Human
acacagguucacgugc

SEQ ID NO: 2781864 - RNA, 15 nt, Human
uaguaaaaauacaaa

SEQ ID NO: 2781865 - RNA, 16 nt, Human
acacacagaaaagcau

SEQ ID NO: 2781866 - RNA, 14 nt, Human
uaguaaaacacaga

SEQ ID NO: 2781867 - RNA, 15 nt, Human
uaguaaaacacagag

SEQ ID NO: 2781868 - RNA, 16 nt, Human
uaguaaaacacagagg

SEQ ID NO: 2781869 - RNA, 14 nt, Human
uaguaaucacaguu

SEQ ID NO: 2781870 - RNA, 19 nt, Human
uagguuuuuuuguauagua

SEQ ID NO: 2781871 - RNA, 15 nt, Human
uagguuuuuuuguau

SEQ ID NO: 2781872 - RNA, 21 nt, Human
uagguuuuuccuuauuugcuu

SEQ ID NO: 2781873 - RNA, 15 nt, Human
uagguuuuuguuugu

SEQ ID NO: 2781874 - RNA, 13 nt, Human
uaguaaaaauaaa

SEQ ID NO: 2781875 - RNA, 16 nt, Human
uaguaaaaauaaaauu

SEQ ID NO: 2781876 - RNA, 14 nt, Human
uaguagagacaggg

SEQ ID NO: 2781877 - RNA, 14 nt, Human
uaguaauugacaug

SEQ ID NO: 2781878 - RNA, 14 nt, Human
uaguaauucucagg

SEQ ID NO: 2781879 - RNA, 15 nt, Human
uaguaauucucaggc

SEQ ID NO: 2781880 - RNA, 15 nt, Human
uaguaaucacaguug

SEQ ID NO: 2781881 - RNA, 12 nt, Human
uaguaaucugua

SEQ ID NO: 2781882 - RNA, 15 nt, Human
uaguaaucuguacau

SEQ ID NO: 2781883 - RNA, 16 nt, Human
uaguaaucuguacauu

SEQ ID NO: 2781884 - RNA, 22 nt, Human
uaguagagacaggguuuugcca

SEQ ID NO: 2781885 - RNA, 15 nt, Human
uaguagagacagggu

SEQ ID NO: 2781886 - RNA, 23 nt, Human
uagucacauggccuaugcacaua

SEQ ID NO: 2781887 - RNA, 13 nt, Human
uaguagagacggg

SEQ ID NO: 2781888 - RNA, 13 nt, Human
acuauguugauaa

SEQ ID NO: 2781889 - RNA, 11 nt, Human
acuauuauuau

SEQ ID NO: 2781890 - RNA, 20 nt, Human
acuauuauuauagguaauca

SEQ ID NO: 2781891 - RNA, 15 nt, Human
acuauguauauacau

SEQ ID NO: 2781892 - RNA, 16 nt, Human
acuauguaaacuacuu

SEQ ID NO: 2781893 - RNA, 14 nt, Human
acuauguaaacuac

SEQ ID NO: 2781894 - RNA, 12 nt, Human
acuauguaaacu

SEQ ID NO: 2781895 - RNA, 11 nt, Human
acuauguaaac

SEQ ID NO: 2781896 - RNA, 15 nt, Human
acuaugauuuggaaa

SEQ ID NO: 2781897 - RNA, 15 nt, Human
acuaugacugcuccc

SEQ ID NO: 2781898 - RNA, 16 nt, Human
acuaugauuuggaaaa

SEQ ID NO: 2781899 - RNA, 13 nt, Human
acuagaugaccuc

SEQ ID NO: 2781900 - RNA, 14 nt, Human
acuagaugaccuca

SEQ ID NO: 2781901 - RNA, 15 nt, Human
acuagaugaccucau

SEQ ID NO: 2781902 - RNA, 17 nt, Human
acuagaugaccucauua

SEQ ID NO: 2781903 - RNA, 18 nt, Human
acuagaugaccucauuaa

SEQ ID NO: 2781904 - RNA, 15 nt, Human
uccccgucucauucc

SEQ ID NO: 2781905 - RNA, 13 nt, Human
uccccguggucuc

SEQ ID NO: 2781906 - RNA, 14 nt, Human
uccccguuccugac

SEQ ID NO: 2781907 - RNA, 15 nt, Human
uccccguuccugaca

SEQ ID NO: 2781908 - RNA, 17 nt, Human
uccccguuccugacauc

SEQ ID NO: 2781909 - RNA, 20 nt, Human
uccccguuccugacaucaca

SEQ ID NO: 2781910 - RNA, 13 nt, Human
uccccggcucgag

SEQ ID NO: 2781911 - RNA, 16 nt, Human
uccccgggcaucuuug

SEQ ID NO: 2781912 - RNA, 17 nt, Human
uccccgggcaucuuugg

SEQ ID NO: 2781913 - RNA, 21 nt, Human
uccccgggcaucuuuggggag

SEQ ID NO: 2781914 - RNA, 11 nt, Human
uccccggggcc

SEQ ID NO: 2781915 - RNA, 13 nt, Human
uccccggggccca

SEQ ID NO: 2781916 - RNA, 15 nt, Human
uccccggggcccagg

SEQ ID NO: 2781917 - RNA, 16 nt, Human
uccccggggcccaggg

SEQ ID NO: 2781918 - RNA, 17 nt, Human
uccccggggcccagggg

SEQ ID NO: 2781919 - RNA, 18 nt, Human
uccccuccuucucccuuu

SEQ ID NO: 2781920 - RNA, 14 nt, Human
uccccuccuucucc

SEQ ID NO: 2781921 - RNA, 14 nt, Human
uccccucucugcac

SEQ ID NO: 2781922 - RNA, 20 nt, Human
uccccucugcugcugucccu

SEQ ID NO: 2781923 - RNA, 17 nt, Human
uccccucuucccuucaa

SEQ ID NO: 2781924 - RNA, 18 nt, Human
uccccucuucccuucaac

SEQ ID NO: 2781925 - RNA, 15 nt, Human
uccccucugcugcug

SEQ ID NO: 2781926 - RNA, 17 nt, Human
uccccucugcugcuguc

SEQ ID NO: 2781927 - RNA, 15 nt, Human
uccccucugaaaguu

SEQ ID NO: 2781928 - RNA, 21 nt, Human
uccccucugaaaguuguacau

SEQ ID NO: 2781929 - RNA, 22 nt, Human
uccccucugaaaguuguacaug

SEQ ID NO: 2781930 - RNA, 13 nt, Human
uccccucugcugc

SEQ ID NO: 2781931 - RNA, 14 nt, Human
uccccucugcugcu

SEQ ID NO: 2781932 - RNA, 14 nt, Human
acucaaugcacuga

SEQ ID NO: 2781933 - RNA, 23 nt, Human
acucaaucuccccuugcacuaaa

SEQ ID NO: 2781934 - RNA, 16 nt, Human
acuagacacagauaau

SEQ ID NO: 2781935 - RNA, 20 nt, Human
acucacauuuauucugcuca

SEQ ID NO: 2781936 - RNA, 19 nt, Human
acucacauuuauucugcuc

SEQ ID NO: 2781937 - RNA, 14 nt, Human
uccccggcacccuc

SEQ ID NO: 2781938 - RNA, 17 nt, Human
uccccggcacccucugg

SEQ ID NO: 2781939 - RNA, 18 nt, Human
uccccggcacccucuggc

SEQ ID NO: 2781940 - RNA, 19 nt, Human
uccccggcacccucuggcc

SEQ ID NO: 2781941 - RNA, 20 nt, Human
uccccggcacccucuggccg

SEQ ID NO: 2781942 - RNA, 22 nt, Human
acuagagggaccucucccaggg

SEQ ID NO: 2781943 - RNA, 19 nt, Human
acuagagggaccucuccca

SEQ ID NO: 2781944 - RNA, 17 nt, Human
acuagacaccaaaguuc

SEQ ID NO: 2781945 - RNA, 18 nt, Human
acuagacaccaaaguucu

SEQ ID NO: 2781946 - RNA, 21 nt, Human
acuagagggaccucucccagg

SEQ ID NO: 2781947 - RNA, 20 nt, Human
acuagagggaccucucccag

SEQ ID NO: 2781948 - RNA, 23 nt, Human
acuagaagggccaguccugccug

SEQ ID NO: 2781949 - RNA, 14 nt, Human
acuagaagggccag

SEQ ID NO: 2781950 - RNA, 16 nt, Human
acuagaacucuccauc

SEQ ID NO: 2781951 - RNA, 13 nt, Human
acuagaauucugu

SEQ ID NO: 2781952 - RNA, 19 nt, Human
acuacuugauuuuauugua

SEQ ID NO: 2781953 - RNA, 13 nt, Human
acuacuuugccuu

SEQ ID NO: 2781954 - RNA, 21 nt, Human
acuacuuugccuucuuuugua

SEQ ID NO: 2781955 - RNA, 20 nt, Human
acuacuuuaauaaagaauua

SEQ ID NO: 2781956 - RNA, 17 nt, Human
acuacuuagcauccuaa

SEQ ID NO: 2781957 - RNA, 21 nt, Human
acuacuuagcauccuaagaaa

SEQ ID NO: 2781958 - RNA, 22 nt, Human
acuacuuagcauccuaagaaau

SEQ ID NO: 2781959 - RNA, 16 nt, Human
acuacuucucucugua

SEQ ID NO: 2781960 - RNA, 15 nt, Human
acuagaaaucugcca

SEQ ID NO: 2781961 - RNA, 15 nt, Human
acuagaacucuccau

SEQ ID NO: 2781962 - RNA, 13 nt, Human
acuagaacucucc

SEQ ID NO: 2781963 - RNA, 18 nt, Human
acuacggaauaguuggcu

SEQ ID NO: 2781964 - RNA, 12 nt, Human
acuaccugugua

SEQ ID NO: 2781965 - RNA, 15 nt, Human
acuaccuuaucacug

SEQ ID NO: 2781966 - RNA, 17 nt, Human
acuaccuugaaaauaag

SEQ ID NO: 2781967 - RNA, 13 nt, Human
acguacacacaca

SEQ ID NO: 2781968 - RNA, 19 nt, Human
uccccacugacagccuccc

SEQ ID NO: 2781969 - RNA, 16 nt, Human
uccccacugacagccu

SEQ ID NO: 2781970 - RNA, 23 nt, Human
uccccacggggccucgggaccuc

SEQ ID NO: 2781971 - RNA, 22 nt, Human
uccccacggggccucgggaccu

SEQ ID NO: 2781972 - RNA, 15 nt, Human
acggucagguuuaac

SEQ ID NO: 2781973 - RNA, 16 nt, Human
acggucagguuuaaca

SEQ ID NO: 2781974 - RNA, 17 nt, Human
acggucagguuuaacau

SEQ ID NO: 2781975 - RNA, 20 nt, Human
acggucagguuuaacauuug

SEQ ID NO: 2781976 - RNA, 23 nt, Human
acggucagguuuaacauuugccu

SEQ ID NO: 2781977 - RNA, 13 nt, Human
acggucaguuugg

SEQ ID NO: 2781978 - RNA, 18 nt, Human
uccccacgcccuccccuc

SEQ ID NO: 2781979 - RNA, 19 nt, Human
uccccacgcccuccccucc

SEQ ID NO: 2781980 - RNA, 22 nt, Human
ucccccaacccccaccccacac

SEQ ID NO: 2781981 - RNA, 14 nt, Human
uccccaucuggguc

SEQ ID NO: 2781982 - RNA, 15 nt, Human
uccccaucugucggc

SEQ ID NO: 2781983 - RNA, 17 nt, Human
uccccaucugucggccu

SEQ ID NO: 2781984 - RNA, 12 nt, Human
ucccccaacucu

SEQ ID NO: 2781985 - RNA, 17 nt, Human
ucccccaacucugagcc

SEQ ID NO: 2781986 - RNA, 18 nt, Human
ucccccaacucugagccc

SEQ ID NO: 2781987 - RNA, 21 nt, Human
ucccccaacucugagcccaug

SEQ ID NO: 2781988 - RNA, 19 nt, Human
ucccccacaguuugauguc

SEQ ID NO: 2781989 - RNA, 14 nt, Human
uccccacgcccucc

SEQ ID NO: 2781990 - RNA, 14 nt, Human
ucccccaacuugag

SEQ ID NO: 2781991 - RNA, 23 nt, Human
ucccccaccgguccagcuggccu

SEQ ID NO: 2781992 - RNA, 22 nt, Human
ucccccaccgguccagcuggcc

SEQ ID NO: 2781993 - RNA, 21 nt, Human
ucccccaccgguccagcuggc

SEQ ID NO: 2781994 - RNA, 20 nt, Human
ucccccaccgguccagcugg

SEQ ID NO: 2781995 - RNA, 19 nt, Human
ucccccaccgguccagcug

SEQ ID NO: 2781996 - RNA, 23 nt, Human
uccccaguucgccuggagcccuc

SEQ ID NO: 2781997 - RNA, 18 nt, Human
uccccaucaucuguggaa

SEQ ID NO: 2781998 - RNA, 17 nt, Human
uccccauaacucaaugg

SEQ ID NO: 2781999 - RNA, 16 nt, Human
uccccagucccaaugc

SEQ ID NO: 2782000 - RNA, 22 nt, Human
uccccagucucucuuaaaguug

SEQ ID NO: 2782001 - RNA, 19 nt, Human
acucauuuuuuuaauuuau

SEQ ID NO: 2782002 - RNA, 18 nt, Human
acuccaaaacccaugugg

SEQ ID NO: 2782003 - RNA, 16 nt, Human
acucauuuuuuuaauu

SEQ ID NO: 2782004 - RNA, 15 nt, Human
acucauuuuugccau

SEQ ID NO: 2782005 - RNA, 19 nt, Human
acucauuuuugccauacau

SEQ ID NO: 2782006 - RNA, 21 nt, Human
acucauuuuugccauacauca

SEQ ID NO: 2782007 - RNA, 19 nt, Human
acuccaccagauagcagag

SEQ ID NO: 2782008 - RNA, 19 nt, Human
acucaucuuacuguaccug

SEQ ID NO: 2782009 - RNA, 15 nt, Human
acucauuuucuauaa

SEQ ID NO: 2782010 - RNA, 16 nt, Human
acucauuuucuauaac

SEQ ID NO: 2782011 - RNA, 21 nt, Human
acucauuuucuauaacagaua

SEQ ID NO: 2782012 - RNA, 22 nt, Human
acucagaguucuauacuguaaa

SEQ ID NO: 2782013 - RNA, 12 nt, Human
acucagaccuga

SEQ ID NO: 2782014 - RNA, 15 nt, Human
acucagaccagagaa

SEQ ID NO: 2782015 - RNA, 17 nt, Human
acucagaauuauuuuua

SEQ ID NO: 2782016 - RNA, 18 nt, Human
acucagaauuauuuuuaa

SEQ ID NO: 2782017 - RNA, 18 nt, Human
acucagaagacacugaug

SEQ ID NO: 2782018 - RNA, 20 nt, Human
acucagaagccucuggguca

SEQ ID NO: 2782019 - RNA, 16 nt, Human
acucagaagccucugg

SEQ ID NO: 2782020 - RNA, 15 nt, Human
acucagaagccucug

SEQ ID NO: 2782021 - RNA, 12 nt, Human
acucagaagccu

SEQ ID NO: 2782022 - RNA, 18 nt, Human
acucagaagccugaggcu

SEQ ID NO: 2782023 - RNA, 17 nt, Human
acucagaagccugaggc

SEQ ID NO: 2782024 - RNA, 16 nt, Human
acucagaagccugagg

SEQ ID NO: 2782025 - RNA, 15 nt, Human
acucagaagccugag

SEQ ID NO: 2782026 - RNA, 14 nt, Human
acucagaagccuga

SEQ ID NO: 2782027 - RNA, 13 nt, Human
acucagaagccug

SEQ ID NO: 2782028 - RNA, 14 nt, Human
acucagaauauugc

SEQ ID NO: 2782029 - RNA, 17 nt, Human
acucagaagacacugau

SEQ ID NO: 2782030 - RNA, 16 nt, Human
acucagaagacacuga

SEQ ID NO: 2782031 - RNA, 15 nt, Human
acucagaagacacug

SEQ ID NO: 2782032 - RNA, 14 nt, Human
acucagaagacacu

SEQ ID NO: 2782033 - RNA, 21 nt, Human
acucagaacugucggaggaaa

SEQ ID NO: 2782034 - RNA, 22 nt, Human
acucagaacugucggaggaaag

SEQ ID NO: 2782035 - RNA, 23 nt, Human
acucagaacugucggaggaaaga

SEQ ID NO: 2782036 - RNA, 23 nt, Human
ucccucauuucaggagcagccuc

SEQ ID NO: 2782037 - RNA, 15 nt, Human
ucccucauuucagga

SEQ ID NO: 2782038 - RNA, 19 nt, Human
ucccucauuucaggagcag

SEQ ID NO: 2782039 - RNA, 13 nt, Human
ucccucccaggac

SEQ ID NO: 2782040 - RNA, 14 nt, Human
ucccucccaggacu

SEQ ID NO: 2782041 - RNA, 18 nt, Human
ucccucccaucaugcccg

SEQ ID NO: 2782042 - RNA, 15 nt, Human
ucccuccccagcucc

SEQ ID NO: 2782043 - RNA, 14 nt, Human
ucccuccccugccc

SEQ ID NO: 2782044 - RNA, 16 nt, Human
ucccuccccugccauu

SEQ ID NO: 2782045 - RNA, 13 nt, Human
ucccuccccugcc

SEQ ID NO: 2782046 - RNA, 14 nt, Human
ucccucccccuugu

SEQ ID NO: 2782047 - RNA, 12 nt, Human
ucccucccccuu

SEQ ID NO: 2782048 - RNA, 19 nt, Human
ucccuccccugcccugguc

SEQ ID NO: 2782049 - RNA, 17 nt, Human
ucccuccccugcccugg

SEQ ID NO: 2782050 - RNA, 16 nt, Human
ucccuccccugcccug

SEQ ID NO: 2782051 - RNA, 15 nt, Human
ucccuccccugcccu

SEQ ID NO: 2782052 - RNA, 16 nt, Human
ucccucuucuuucaga

SEQ ID NO: 2782053 - RNA, 20 nt, Human
ucccucuucuuucagacuug

SEQ ID NO: 2782054 - RNA, 22 nt, Human
ucccuccccuggggacagcaag

SEQ ID NO: 2782055 - RNA, 14 nt, Human
ucccuccaccuacc

SEQ ID NO: 2782056 - RNA, 23 nt, Human
ucccucauuccaccuucccaugc

SEQ ID NO: 2782057 - RNA, 23 nt, Human
uccccucuuuuguuaaauaauau

SEQ ID NO: 2782058 - RNA, 12 nt, Human
uccccugagccc

SEQ ID NO: 2782059 - RNA, 16 nt, Human
ucccugaagccagccu

SEQ ID NO: 2782060 - RNA, 17 nt, Human
ucccugaagccagccuu

SEQ ID NO: 2782061 - RNA, 18 nt, Human
ucccugaagccagccuuc

SEQ ID NO: 2782062 - RNA, 17 nt, Human
ucccugaaaauguuuuu

SEQ ID NO: 2782063 - RNA, 13 nt, Human
ucccugaaacacg

SEQ ID NO: 2782064 - RNA, 21 nt, Human
ucccugaaacacgaaacuugu

SEQ ID NO: 2782065 - RNA, 22 nt, Human
ucccugaaacacgaaacuuguu

SEQ ID NO: 2782066 - RNA, 12 nt, Human
ucccugaagcca

SEQ ID NO: 2782067 - RNA, 15 nt, Human
ucccugaagccagcc

SEQ ID NO: 2782068 - RNA, 12 nt, Human
ucccucuuguuu

SEQ ID NO: 2782069 - RNA, 13 nt, Human
ucccucuuguuuu

SEQ ID NO: 2782070 - RNA, 15 nt, Human
ucccucuuguuuugu

SEQ ID NO: 2782071 - RNA, 16 nt, Human
ucccucuuguuuuguu

SEQ ID NO: 2782072 - RNA, 17 nt, Human
ucccucuuguuuuguuu

SEQ ID NO: 2782073 - RNA, 19 nt, Human
ucccucuuguuuuguuugu

SEQ ID NO: 2782074 - RNA, 20 nt, Human
ucccucuuguuuuguuuguc

SEQ ID NO: 2782075 - RNA, 21 nt, Human
ucccucuuguuuuguuugucu

SEQ ID NO: 2782076 - RNA, 22 nt, Human
ucccucuuguuuuguuugucuc

SEQ ID NO: 2782077 - RNA, 18 nt, Human
ucccucuuuggcuccccu

SEQ ID NO: 2782078 - RNA, 23 nt, Human
ucccucuuuggcuccccuguacc

SEQ ID NO: 2782079 - RNA, 10 nt, Human
ucccucuuuu

SEQ ID NO: 2782080 - RNA, 13 nt, Human
ucccucuuuucuu

SEQ ID NO: 2782081 - RNA, 14 nt, Human
ucccucuuuucuua

SEQ ID NO: 2782082 - RNA, 16 nt, Human
ucccucuuuucuuacu

SEQ ID NO: 2782083 - RNA, 18 nt, Human
ucccucuuuucuuacucc

SEQ ID NO: 2782084 - RNA, 22 nt, Human
ucccucuuuucuuacuccuccu

SEQ ID NO: 2782085 - RNA, 19 nt, Human
acucaccccggcagacgcc

SEQ ID NO: 2782086 - RNA, 20 nt, Human
acucaccucccccaucucuu

SEQ ID NO: 2782087 - RNA, 19 nt, Human
acucaccucccccaucucu

SEQ ID NO: 2782088 - RNA, 14 nt, Human
ucccugacccgucu

SEQ ID NO: 2782089 - RNA, 21 nt, Human
ucccugaaucccccuugccac

SEQ ID NO: 2782090 - RNA, 13 nt, Human
acuccaccuuccc

SEQ ID NO: 2782091 - RNA, 18 nt, Human
acuccacgauccugccac

SEQ ID NO: 2782092 - RNA, 19 nt, Human
acuccacgauccugccacc

SEQ ID NO: 2782093 - RNA, 21 nt, Human
uccggcccuccuacccugcgc

SEQ ID NO: 2782094 - RNA, 23 nt, Human
uccggcccuccuacccugcgccc

SEQ ID NO: 2782095 - RNA, 15 nt, Human
uccguggguugcuaa

SEQ ID NO: 2782096 - RNA, 16 nt, Human
uccguggguugcuaac

SEQ ID NO: 2782097 - RNA, 20 nt, Human
uccguggguugcuaacugaa

SEQ ID NO: 2782098 - RNA, 21 nt, Human
uccguggguugcuaacugaac

SEQ ID NO: 2782099 - RNA, 18 nt, Human
uccgugucaccgccaccc

SEQ ID NO: 2782100 - RNA, 16 nt, Human
uccguguggauccaau

SEQ ID NO: 2782101 - RNA, 17 nt, Human
uccguguggauccaaug

SEQ ID NO: 2782102 - RNA, 13 nt, Human
uccuacccuuuuc

SEQ ID NO: 2782103 - RNA, 14 nt, Human
uccuacccuuuucu

SEQ ID NO: 2782104 - RNA, 13 nt, Human
uccuaccucagcc

SEQ ID NO: 2782105 - RNA, 12 nt, Human
uccuaccucagc

SEQ ID NO: 2782106 - RNA, 15 nt, Human
uccuacccugcgccc

SEQ ID NO: 2782107 - RNA, 20 nt, Human
uccuacccugcgcccagucc

SEQ ID NO: 2782108 - RNA, 17 nt, Human
uccuagccacucaggag

SEQ ID NO: 2782109 - RNA, 13 nt, Human
uccuagccacuca

SEQ ID NO: 2782110 - RNA, 14 nt, Human
uccuagccuguuuc

SEQ ID NO: 2782111 - RNA, 15 nt, Human
uccuagccuguuucu

SEQ ID NO: 2782112 - RNA, 16 nt, Human
uccuagccuguuucuu

SEQ ID NO: 2782113 - RNA, 17 nt, Human
uccuagccuguuucuuc

SEQ ID NO: 2782114 - RNA, 19 nt, Human
uccuagccuguuucuuccu

SEQ ID NO: 2782115 - RNA, 22 nt, Human
uccuacucucacacugguucuc

SEQ ID NO: 2782116 - RNA, 20 nt, Human
uccuacgucaaacaugaagu

SEQ ID NO: 2782117 - RNA, 12 nt, Human
uccuacuccuga

SEQ ID NO: 2782118 - RNA, 13 nt, Human
uccuacuccugac

SEQ ID NO: 2782119 - RNA, 14 nt, Human
uccuacuccugacu

SEQ ID NO: 2782120 - RNA, 17 nt, Human
uccuaccucagccuaga

SEQ ID NO: 2782121 - RNA, 14 nt, Human
uccuaccugcccug

SEQ ID NO: 2782122 - RNA, 15 nt, Human
uccuaccugcccugg

SEQ ID NO: 2782123 - RNA, 16 nt, Human
uccuaccugcccugga

SEQ ID NO: 2782124 - RNA, 18 nt, Human
uccuaccugcccuggaac

SEQ ID NO: 2782125 - RNA, 16 nt, Human
uccuaccucagccuag

SEQ ID NO: 2782126 - RNA, 14 nt, Human
uccuaccucagccu

SEQ ID NO: 2782127 - RNA, 19 nt, Human
acucgauucauauugaaua

SEQ ID NO: 2782128 - RNA, 18 nt, Human
acucgagucacacucaag

SEQ ID NO: 2782129 - RNA, 21 nt, Human
acuccuuuugguguguuggac

SEQ ID NO: 2782130 - RNA, 11 nt, Human
acuccuugcau

SEQ ID NO: 2782131 - RNA, 12 nt, Human
acuccuugcauc

SEQ ID NO: 2782132 - RNA, 15 nt, Human
acuccuugcaucaag

SEQ ID NO: 2782133 - RNA, 17 nt, Human
acuccuugcaucaaggg

SEQ ID NO: 2782134 - RNA, 19 nt, Human
acuccuugcaucaaggggu

SEQ ID NO: 2782135 - RNA, 20 nt, Human
acuccuugcaucaagggguc

SEQ ID NO: 2782136 - RNA, 11 nt, Human
acuccuuggcc

SEQ ID NO: 2782137 - RNA, 12 nt, Human
acuccuuggccu

SEQ ID NO: 2782138 - RNA, 14 nt, Human
acuccuuggccuag

SEQ ID NO: 2782139 - RNA, 16 nt, Human
acuccuuggccuagcc

SEQ ID NO: 2782140 - RNA, 18 nt, Human
acuccuuggccuagccca

SEQ ID NO: 2782141 - RNA, 21 nt, Human
acucuuauugcccacgcugga

SEQ ID NO: 2782142 - RNA, 18 nt, Human
acucuucaaaaacuguuu

SEQ ID NO: 2782143 - RNA, 14 nt, Human
acucugcugcuuag

SEQ ID NO: 2782144 - RNA, 15 nt, Human
acucugcugcuuaga

SEQ ID NO: 2782145 - RNA, 20 nt, Human
acucuucgaagccuugccua

SEQ ID NO: 2782146 - RNA, 16 nt, Human
acucuucuaugaccca

SEQ ID NO: 2782147 - RNA, 18 nt, Human
acucuucuaugacccagc

SEQ ID NO: 2782148 - RNA, 22 nt, Human
acucuuccuauuuuuguaguga

SEQ ID NO: 2782149 - RNA, 21 nt, Human
acucuucaguuaagccuuugg

SEQ ID NO: 2782150 - RNA, 20 nt, Human
acucuucaguuaagccuuug

SEQ ID NO: 2782151 - RNA, 12 nt, Human
acucuucacugu

SEQ ID NO: 2782152 - RNA, 13 nt, Human
acucuucacuguu

SEQ ID NO: 2782153 - RNA, 20 nt, Human
acucuucuuaacuuaaauuu

SEQ ID NO: 2782154 - RNA, 19 nt, Human
acucuucuuaacuuaaauu

SEQ ID NO: 2782155 - RNA, 16 nt, Human
acucgugugcaacaga

SEQ ID NO: 2782156 - RNA, 21 nt, Human
acucucacacugguucucaau

SEQ ID NO: 2782157 - RNA, 22 nt, Human
acucucacacugguucucaaug

SEQ ID NO: 2782158 - RNA, 21 nt, Human
acuccuggucugaaaauguug

SEQ ID NO: 2782159 - RNA, 14 nt, Human
acucguauaugucu

SEQ ID NO: 2782160 - RNA, 17 nt, Human
acucugacaacagacuu

SEQ ID NO: 2782161 - RNA, 13 nt, Human
acucugacaacag

SEQ ID NO: 2782162 - RNA, 15 nt, Human
acucucagcccagaa

SEQ ID NO: 2782163 - RNA, 16 nt, Human
acucucagcccagaag

SEQ ID NO: 2782164 - RNA, 21 nt, Human
acucucagcccagaagaaaau

SEQ ID NO: 2782165 - RNA, 22 nt, Human
acucucagcccagaagaaaauu

SEQ ID NO: 2782166 - RNA, 16 nt, Human
acucugccuccucuuc

SEQ ID NO: 2782167 - RNA, 14 nt, Human
acucugacaagggc

SEQ ID NO: 2782168 - RNA, 18 nt, Human
acucugacaagggcugac

SEQ ID NO: 2782169 - RNA, 19 nt, Human
acucugacaagggcugacc

SEQ ID NO: 2782170 - RNA, 20 nt, Human
acucugacaagggcugaccu

SEQ ID NO: 2782171 - RNA, 21 nt, Human
acucugacaagggcugaccug

SEQ ID NO: 2782172 - RNA, 19 nt, Human
acucugacgcaaaaccacu

SEQ ID NO: 2782173 - RNA, 18 nt, Human
acucugcucgccuuagca

SEQ ID NO: 2782174 - RNA, 23 nt, Human
acucugacaacagacuucugaaa

SEQ ID NO: 2782175 - RNA, 22 nt, Human
acucugacaacagacuucugaa

SEQ ID NO: 2782176 - RNA, 20 nt, Human
acucugacaacagacuucug

SEQ ID NO: 2782177 - RNA, 18 nt, Human
acucugacaacagacuuc

SEQ ID NO: 2782178 - RNA, 23 nt, Human
uccugaaccgcacagcucaggag

SEQ ID NO: 2782179 - RNA, 13 nt, Human
uccugaagaauua

SEQ ID NO: 2782180 - RNA, 14 nt, Human
uccugaagaauuaa

SEQ ID NO: 2782181 - RNA, 15 nt, Human
uccucuuuaaaacaa

SEQ ID NO: 2782182 - RNA, 17 nt, Human
uccucuuuaaaacaaaa

SEQ ID NO: 2782183 - RNA, 18 nt, Human
uccucuuuaaaacaaaac

SEQ ID NO: 2782184 - RNA, 19 nt, Human
uccucuuuaaaacaaaaca

SEQ ID NO: 2782185 - RNA, 14 nt, Human
uccucugaggcuga

SEQ ID NO: 2782186 - RNA, 19 nt, Human
uccucuugccacugccucu

SEQ ID NO: 2782187 - RNA, 13 nt, Human
acugaaacuuccc

SEQ ID NO: 2782188 - RNA, 21 nt, Human
acugaaagacaccauuuaucu

SEQ ID NO: 2782189 - RNA, 20 nt, Human
acugaaagccuuagggaagc

SEQ ID NO: 2782190 - RNA, 19 nt, Human
acugaaaccuuuaagaaaa

SEQ ID NO: 2782191 - RNA, 23 nt, Human
acugaaaaucuaauauuaaaaau

SEQ ID NO: 2782192 - RNA, 13 nt, Human
acugaaacagauu

SEQ ID NO: 2782193 - RNA, 14 nt, Human
acugaaacagauuu

SEQ ID NO: 2782194 - RNA, 18 nt, Human
acugaaacagauuucaua

SEQ ID NO: 2782195 - RNA, 20 nt, Human
acugaaaagguucuucaucc

SEQ ID NO: 2782196 - RNA, 19 nt, Human
acugaaaauaccaucaggc

SEQ ID NO: 2782197 - RNA, 15 nt, Human
acugaaaaucuaaua

SEQ ID NO: 2782198 - RNA, 16 nt, Human
acugaaaaucuaauau

SEQ ID NO: 2782199 - RNA, 17 nt, Human
acugaaaaccucuccuc

SEQ ID NO: 2782200 - RNA, 13 nt, Human
acugaaaagagag

SEQ ID NO: 2782201 - RNA, 14 nt, Human
acugaaaagagagc

SEQ ID NO: 2782202 - RNA, 15 nt, Human
acugaaaagagagca

SEQ ID NO: 2782203 - RNA, 17 nt, Human
acugaaaagagagcaga

SEQ ID NO: 2782204 - RNA, 20 nt, Human
acugaaaagagagcagagaa

SEQ ID NO: 2782205 - RNA, 23 nt, Human
acugaaaagagagcagagaauau

SEQ ID NO: 2782206 - RNA, 22 nt, Human
acucuuucuguauauacuuuuu

SEQ ID NO: 2782207 - RNA, 21 nt, Human
acucuuucuguauauacuuuu

SEQ ID NO: 2782208 - RNA, 16 nt, Human
acugaaaaccucuccu

SEQ ID NO: 2782209 - RNA, 15 nt, Human
acugaaaaccucucc

SEQ ID NO: 2782210 - RNA, 16 nt, Human
acugaaaaauuauacu

SEQ ID NO: 2782211 - RNA, 14 nt, Human
acucuuucuguaua

SEQ ID NO: 2782212 - RNA, 18 nt, Human
uccugacgaaacuggccc

SEQ ID NO: 2782213 - RNA, 20 nt, Human
uccugacgaaacuggccccg

SEQ ID NO: 2782214 - RNA, 21 nt, Human
uccugacgaaacuggccccgg

SEQ ID NO: 2782215 - RNA, 22 nt, Human
uccugacgaaacuggccccgga

SEQ ID NO: 2782216 - RNA, 16 nt, Human
uccugaccucagguga

SEQ ID NO: 2782217 - RNA, 19 nt, Human
uccugaacucuucugcaaa

SEQ ID NO: 2782218 - RNA, 13 nt, Human
uccucuccccucc

SEQ ID NO: 2782219 - RNA, 14 nt, Human
uccucuccccucca

SEQ ID NO: 2782220 - RNA, 16 nt, Human
uccucuccccuccagc

SEQ ID NO: 2782221 - RNA, 17 nt, Human
uccucuccccuccagcc

SEQ ID NO: 2782222 - RNA, 18 nt, Human
uccucuccccuccagccu

SEQ ID NO: 2782223 - RNA, 12 nt, Human
uccucuccugga

SEQ ID NO: 2782224 - RNA, 13 nt, Human
uccucuccuggag

SEQ ID NO: 2782225 - RNA, 14 nt, Human
uccucuccuggagg

SEQ ID NO: 2782226 - RNA, 17 nt, Human
uccucucccaaguccac

SEQ ID NO: 2782227 - RNA, 17 nt, Human
uccucuccacugccuuc

SEQ ID NO: 2782228 - RNA, 18 nt, Human
uccucuccacugccuucg

SEQ ID NO: 2782229 - RNA, 16 nt, Human
uccucuccacugccuu

SEQ ID NO: 2782230 - RNA, 17 nt, Human
uccucucugguggcucu

SEQ ID NO: 2782231 - RNA, 17 nt, Human
uccucugagccuuggga

SEQ ID NO: 2782232 - RNA, 13 nt, Human
uccucugagccuu

SEQ ID NO: 2782233 - RNA, 12 nt, Human
uccucugagccu

SEQ ID NO: 2782234 - RNA, 14 nt, Human
uccucucuccagau

SEQ ID NO: 2782235 - RNA, 19 nt, Human
uccucucuccagauguuuc

SEQ ID NO: 2782236 - RNA, 15 nt, Human
uccucuccuggagga

SEQ ID NO: 2782237 - RNA, 16 nt, Human
uccucuccuggaggau

SEQ ID NO: 2782238 - RNA, 15 nt, Human
uccucuccuuccuug

SEQ ID NO: 2782239 - RNA, 17 nt, Human
uccucuccuuugaaacc

SEQ ID NO: 2782240 - RNA, 23 nt, Human
uccucuccuuugaaaccugcucu

SEQ ID NO: 2782241 - RNA, 15 nt, Human
uccucucugcccuaa

SEQ ID NO: 2782242 - RNA, 14 nt, Human
uccucucugcccua

SEQ ID NO: 2782243 - RNA, 13 nt, Human
uccucucugcccu

SEQ ID NO: 2782244 - RNA, 12 nt, Human
uccucucugccc

SEQ ID NO: 2782245 - RNA, 20 nt, Human
uccucccaccucagccuccc

SEQ ID NO: 2782246 - RNA, 18 nt, Human
uccucccaccucagccuc

SEQ ID NO: 2782247 - RNA, 16 nt, Human
uccucccaccucagcc

SEQ ID NO: 2782248 - RNA, 15 nt, Human
uccucccaccucagc

SEQ ID NO: 2782249 - RNA, 14 nt, Human
uccucccaccucag

SEQ ID NO: 2782250 - RNA, 13 nt, Human
uccucccaccuca

SEQ ID NO: 2782251 - RNA, 21 nt, Human
uccucccaccucagccucccg

SEQ ID NO: 2782252 - RNA, 22 nt, Human
uccuccccauuagagucagccu

SEQ ID NO: 2782253 - RNA, 21 nt, Human
uccuccccacuuguccgcugg

SEQ ID NO: 2782254 - RNA, 19 nt, Human
uccuccccaaggagacaca

SEQ ID NO: 2782255 - RNA, 14 nt, Human
uccuccccacccuc

SEQ ID NO: 2782256 - RNA, 18 nt, Human
uccuccccacccuccugg

SEQ ID NO: 2782257 - RNA, 19 nt, Human
uccuccccacccuccuggc

SEQ ID NO: 2782258 - RNA, 12 nt, Human
uccucccuguua

SEQ ID NO: 2782259 - RNA, 13 nt, Human
uccucccuguuau

SEQ ID NO: 2782260 - RNA, 16 nt, Human
uccuccccucacagcc

SEQ ID NO: 2782261 - RNA, 14 nt, Human
uccuccccucacag

SEQ ID NO: 2782262 - RNA, 17 nt, Human
uccuccccucacagccu

SEQ ID NO: 2782263 - RNA, 18 nt, Human
uccuccccucacagccuc

SEQ ID NO: 2782264 - RNA, 19 nt, Human
uccuccccucacagccucu

SEQ ID NO: 2782265 - RNA, 21 nt, Human
uccuccccucacagccucuga

SEQ ID NO: 2782266 - RNA, 23 nt, Human
uccuccccucacagccucugacc

SEQ ID NO: 2782267 - RNA, 16 nt, Human
accugaaauuccaaag

SEQ ID NO: 2782268 - RNA, 20 nt, Human
ucauaaggcuucaaaauguu

SEQ ID NO: 2782269 - RNA, 13 nt, Human
accugaagacuga

SEQ ID NO: 2782270 - RNA, 16 nt, Human
accugaagacugagga

SEQ ID NO: 2782271 - RNA, 19 nt, Human
accugaagacugaggacaa

SEQ ID NO: 2782272 - RNA, 18 nt, Human
accugaagacucauucuu

SEQ ID NO: 2782273 - RNA, 19 nt, Human
accugaaauuccaaagucu

SEQ ID NO: 2782274 - RNA, 20 nt, Human
accugaaauuccaaagucuc

SEQ ID NO: 2782275 - RNA, 22 nt, Human
accugaaauuccaaagucucua

SEQ ID NO: 2782276 - RNA, 12 nt, Human
accugacacaag

SEQ ID NO: 2782277 - RNA, 15 nt, Human
accugacacaagagg

SEQ ID NO: 2782278 - RNA, 16 nt, Human
accugacacaagagga

SEQ ID NO: 2782279 - RNA, 18 nt, Human
accugagcaggaccucug

SEQ ID NO: 2782280 - RNA, 17 nt, Human
accugaccccugacccc

SEQ ID NO: 2782281 - RNA, 13 nt, Human
accugccuccucg

SEQ ID NO: 2782282 - RNA, 18 nt, Human
accugccuccucguuccu

SEQ ID NO: 2782283 - RNA, 20 nt, Human
accugccuccucguuccuuu

SEQ ID NO: 2782284 - RNA, 13 nt, Human
accugccuccugc

SEQ ID NO: 2782285 - RNA, 17 nt, Human
accugccucggccuccc

SEQ ID NO: 2782286 - RNA, 15 nt, Human
accugcaaucccagc

SEQ ID NO: 2782287 - RNA, 17 nt, Human
accugcaaucccagcua

SEQ ID NO: 2782288 - RNA, 18 nt, Human
accugcaaucccagcuac

SEQ ID NO: 2782289 - RNA, 23 nt, Human
accugagggcagaaagguucugc

SEQ ID NO: 2782290 - RNA, 19 nt, Human
accugaucacuagccuguc

SEQ ID NO: 2782291 - RNA, 22 nt, Human
accugaucacuagccugucauc

SEQ ID NO: 2782292 - RNA, 15 nt, Human
accugaggccugaag

SEQ ID NO: 2782293 - RNA, 21 nt, Human
accugauggcacuuagcuauc

SEQ ID NO: 2782294 - RNA, 22 nt, Human
accugauggaaguaaagccuca

SEQ ID NO: 2782295 - RNA, 14 nt, Human
accugauuguaaac

SEQ ID NO: 2782296 - RNA, 16 nt, Human
accugauuguaaacuu

SEQ ID NO: 2782297 - RNA, 13 nt, Human
accugcaaaaaau

SEQ ID NO: 2782298 - RNA, 15 nt, Human
accugcaaaaaauac

SEQ ID NO: 2782299 - RNA, 17 nt, Human
accugcuggguaaacug

SEQ ID NO: 2782300 - RNA, 12 nt, Human
accugcucuccu

SEQ ID NO: 2782301 - RNA, 14 nt, Human
accugccuguagcc

SEQ ID NO: 2782302 - RNA, 11 nt, Human
accugccugua

SEQ ID NO: 2782303 - RNA, 18 nt, Human
accugccuccugccugcc

SEQ ID NO: 2782304 - RNA, 13 nt, Human
accugccuggguu

SEQ ID NO: 2782305 - RNA, 23 nt, Human
accugccucggccucccaaagug

SEQ ID NO: 2782306 - RNA, 11 nt, Human
accugccucuc

SEQ ID NO: 2782307 - RNA, 15 nt, Human
accugccucucacac

SEQ ID NO: 2782308 - RNA, 19 nt, Human
accugccucucacacacau

SEQ ID NO: 2782309 - RNA, 22 nt, Human
accugccucucacacacauaga

SEQ ID NO: 2782310 - RNA, 23 nt, Human
accugccucucacacacauagau

SEQ ID NO: 2782311 - RNA, 21 nt, Human
accugccucggccucccaaag

SEQ ID NO: 2782312 - RNA, 14 nt, Human
accugccuccugcc

SEQ ID NO: 2782313 - RNA, 17 nt, Human
accugccuccugccugc

SEQ ID NO: 2782314 - RNA, 10 nt, Human
accugccugc

SEQ ID NO: 2782315 - RNA, 11 nt, Human
accugccugcg

SEQ ID NO: 2782316 - RNA, 13 nt, Human
accugccugcguc

SEQ ID NO: 2782317 - RNA, 17 nt, Human
accugccugcgucuucc

SEQ ID NO: 2782318 - RNA, 18 nt, Human
accugccugcgucuuccg

SEQ ID NO: 2782319 - RNA, 20 nt, Human
accugccugcgucuuccgcc

SEQ ID NO: 2782320 - RNA, 22 nt, Human
accugccugcgucuuccgcccc

SEQ ID NO: 2782321 - RNA, 10 nt, Human
accugccugg

SEQ ID NO: 2782322 - RNA, 13 nt, Human
accugccuggccg

SEQ ID NO: 2782323 - RNA, 14 nt, Human
accugccuggccgg

SEQ ID NO: 2782324 - RNA, 15 nt, Human
accugccuggccggc

SEQ ID NO: 2782325 - RNA, 17 nt, Human
accugccuggccggcca

SEQ ID NO: 2782326 - RNA, 18 nt, Human
accugccuggccggccag

SEQ ID NO: 2782327 - RNA, 20 nt, Human
accugccuggccggccagcc

SEQ ID NO: 2782328 - RNA, 21 nt, Human
accugccuggccggccagcca

SEQ ID NO: 2782329 - RNA, 15 nt, Human
accugcuaucagcag

SEQ ID NO: 2782330 - RNA, 15 nt, Human
accugcuccgcugcu

SEQ ID NO: 2782331 - RNA, 16 nt, Human
accugcuccgcugcuc

SEQ ID NO: 2782332 - RNA, 17 nt, Human
accugcuccgcugcucc

SEQ ID NO: 2782333 - RNA, 18 nt, Human
accugcuccgcugcuccu

SEQ ID NO: 2782334 - RNA, 22 nt, Human
accugcuccgcugcuccuuggc

SEQ ID NO: 2782335 - RNA, 19 nt, Human
uccaaaaagauuuucagaa

SEQ ID NO: 2782336 - RNA, 23 nt, Human
ucauuuugggacaauuguuuuaa

SEQ ID NO: 2782337 - RNA, 17 nt, Human
ucauuuuugccauacau

SEQ ID NO: 2782338 - RNA, 14 nt, Human
ucauuuuugaauac

SEQ ID NO: 2782339 - RNA, 19 nt, Human
ucauuuuuaguagagacag

SEQ ID NO: 2782340 - RNA, 18 nt, Human
ucauuuuuaaucaugaaa

SEQ ID NO: 2782341 - RNA, 19 nt, Human
ucauuuuuaaucaugaaau

SEQ ID NO: 2782342 - RNA, 12 nt, Human
ucauuuuuaauc

SEQ ID NO: 2782343 - RNA, 16 nt, Human
ucauuuuuaaucauga

SEQ ID NO: 2782344 - RNA, 19 nt, Human
ucauuuuccccccacucuc

SEQ ID NO: 2782345 - RNA, 14 nt, Human
ucauuugucacaca

SEQ ID NO: 2782346 - RNA, 18 nt, Human
ucauuugguucauuaauu

SEQ ID NO: 2782347 - RNA, 13 nt, Human
ucauuugcuuuuu

SEQ ID NO: 2782348 - RNA, 22 nt, Human
ucauuuggaggaaaaaaagcau

SEQ ID NO: 2782349 - RNA, 23 nt, Human
ucauuuggaggaaaaaaagcaug

SEQ ID NO: 2782350 - RNA, 16 nt, Human
ucauuugucacacacu

SEQ ID NO: 2782351 - RNA, 20 nt, Human
ucauuugguucauuaauucu

SEQ ID NO: 2782352 - RNA, 14 nt, Human
ucauuuucuauaac

SEQ ID NO: 2782353 - RNA, 15 nt, Human
ucauuuucuauaaca

SEQ ID NO: 2782354 - RNA, 16 nt, Human
ucauuuucuauaacag

SEQ ID NO: 2782355 - RNA, 20 nt, Human
ucauuuucuauaacagauau

SEQ ID NO: 2782356 - RNA, 12 nt, Human
ucauuuugaggg

SEQ ID NO: 2782357 - RNA, 16 nt, Human
accuugacagggcaca

SEQ ID NO: 2782358 - RNA, 17 nt, Human
accuugacuugauuagu

SEQ ID NO: 2782359 - RNA, 17 nt, Human
accuugaccuuuguaca

SEQ ID NO: 2782360 - RNA, 18 nt, Human
accuugaccuuuguacag

SEQ ID NO: 2782361 - RNA, 19 nt, Human
accuugaccuuuguacagc

SEQ ID NO: 2782362 - RNA, 16 nt, Human
accuugacuguugaug

SEQ ID NO: 2782363 - RNA, 19 nt, Human
accuugacuguugauguac

SEQ ID NO: 2782364 - RNA, 23 nt, Human
accuugauuggggaauuaaaagu

SEQ ID NO: 2782365 - RNA, 23 nt, Human
accuucguuuacuaugccugugu

SEQ ID NO: 2782366 - RNA, 15 nt, Human
accuucuagaauuau

SEQ ID NO: 2782367 - RNA, 16 nt, Human
accuucuagaauuaua

SEQ ID NO: 2782368 - RNA, 17 nt, Human
accuucuagaauuauaa

SEQ ID NO: 2782369 - RNA, 22 nt, Human
accuucguuuacuaugccugug

SEQ ID NO: 2782370 - RNA, 18 nt, Human
accuucuggccucccaca

SEQ ID NO: 2782371 - RNA, 15 nt, Human
accuucugaguacag

SEQ ID NO: 2782372 - RNA, 22 nt, Human
accuucuggccucccacagacu

SEQ ID NO: 2782373 - RNA, 19 nt, Human
accuucuggcuuccuucuc

SEQ ID NO: 2782374 - RNA, 12 nt, Human
accuucugccuu

SEQ ID NO: 2782375 - RNA, 19 nt, Human
accuucugccuuugauguu

SEQ ID NO: 2782376 - RNA, 17 nt, Human
accuucaauuccugggc

SEQ ID NO: 2782377 - RNA, 16 nt, Human
accugggguugucagc

SEQ ID NO: 2782378 - RNA, 21 nt, Human
accugggguugucagcucuca

SEQ ID NO: 2782379 - RNA, 20 nt, Human
accuggggcugcuggccuga

SEQ ID NO: 2782380 - RNA, 15 nt, Human
accuggggcugcugg

SEQ ID NO: 2782381 - RNA, 18 nt, Human
accuggggcugcuggccu

SEQ ID NO: 2782382 - RNA, 14 nt, Human
accuggggcugcug

SEQ ID NO: 2782383 - RNA, 14 nt, Human
accuggggcacagu

SEQ ID NO: 2782384 - RNA, 18 nt, Human
accuggggcacaguccag

SEQ ID NO: 2782385 - RNA, 19 nt, Human
accuggggcacaguccagg

SEQ ID NO: 2782386 - RNA, 20 nt, Human
accuggggcacaguccagga

SEQ ID NO: 2782387 - RNA, 21 nt, Human
accuggggcacaguccaggaa

SEQ ID NO: 2782388 - RNA, 22 nt, Human
accuggggcacaguccaggaac

SEQ ID NO: 2782389 - RNA, 20 nt, Human
accuucauucugagaccaaa

SEQ ID NO: 2782390 - RNA, 14 nt, Human
accuucauuucaug

SEQ ID NO: 2782391 - RNA, 15 nt, Human
accuucauuucaugu

SEQ ID NO: 2782392 - RNA, 22 nt, Human
accuucauuucauguauaguuu

SEQ ID NO: 2782393 - RNA, 13 nt, Human
accuucauuuuga

SEQ ID NO: 2782394 - RNA, 15 nt, Human
accuucauuuugagg

SEQ ID NO: 2782395 - RNA, 17 nt, Human
accuucauuuugagggg

SEQ ID NO: 2782396 - RNA, 19 nt, Human
accuggguaaaugcagcgu

SEQ ID NO: 2782397 - RNA, 18 nt, Human
accuucaauuccugggcc

SEQ ID NO: 2782398 - RNA, 12 nt, Human
accuucagcuca

SEQ ID NO: 2782399 - RNA, 16 nt, Human
accuucagcucacgcu

SEQ ID NO: 2782400 - RNA, 17 nt, Human
accuucagcucacgcuu

SEQ ID NO: 2782401 - RNA, 21 nt, Human
accuucguuuacuaugccugu

SEQ ID NO: 2782402 - RNA, 17 nt, Human
accuucgccaccugggu

SEQ ID NO: 2782403 - RNA, 15 nt, Human
accuucgccaccugg

SEQ ID NO: 2782404 - RNA, 17 nt, Human
accuucccaugcccugg

SEQ ID NO: 2782405 - RNA, 14 nt, Human
accuucccuugcca

SEQ ID NO: 2782406 - RNA, 12 nt, Human
accuuccuuccu

SEQ ID NO: 2782407 - RNA, 16 nt, Human
accuuccuuccugcuu

SEQ ID NO: 2782408 - RNA, 14 nt, Human
accuuccuuccugu

SEQ ID NO: 2782409 - RNA, 15 nt, Human
accuuccuuccuguu

SEQ ID NO: 2782410 - RNA, 15 nt, Human
accuuccucuggggc

SEQ ID NO: 2782411 - RNA, 16 nt, Human
accuuccucuggggcu

SEQ ID NO: 2782412 - RNA, 22 nt, Human
accuggccgcguuuagaccaag

SEQ ID NO: 2782413 - RNA, 18 nt, Human
accugggauucaggaaug

SEQ ID NO: 2782414 - RNA, 15 nt, Human
accugggcauaucca

SEQ ID NO: 2782415 - RNA, 15 nt, Human
accuggcuuguuuau

SEQ ID NO: 2782416 - RNA, 20 nt, Human
accuggcuuguuuauuuugu

SEQ ID NO: 2782417 - RNA, 22 nt, Human
accuggcuuguuuauuuugugg

SEQ ID NO: 2782418 - RNA, 17 nt, Human
uccacccaggagccccg

SEQ ID NO: 2782419 - RNA, 13 nt, Human
uccacccaccuca

SEQ ID NO: 2782420 - RNA, 12 nt, Human
uccacccaccuc

SEQ ID NO: 2782421 - RNA, 20 nt, Human
uccacccaggagccccgagg

SEQ ID NO: 2782422 - RNA, 15 nt, Human
uccacccaacccuau

SEQ ID NO: 2782423 - RNA, 16 nt, Human
uccacauuguuuuaaa

SEQ ID NO: 2782424 - RNA, 17 nt, Human
uccacauuguuuuaaaa

SEQ ID NO: 2782425 - RNA, 23 nt, Human
uccacccaacccuaucuccugac

SEQ ID NO: 2782426 - RNA, 19 nt, Human
uccacccaacccuaucucc

SEQ ID NO: 2782427 - RNA, 20 nt, Human
uccacccauaauccuuucug

SEQ ID NO: 2782428 - RNA, 22 nt, Human
uccacccauaauccuuucugcc

SEQ ID NO: 2782429 - RNA, 22 nt, Human
uccaccccaucccuccccaguu

SEQ ID NO: 2782430 - RNA, 12 nt, Human
uccaccccaucc

SEQ ID NO: 2782431 - RNA, 20 nt, Human
uccaccccaucccuccccag

SEQ ID NO: 2782432 - RNA, 20 nt, Human
uccaaaaagauuuucagaaa

SEQ ID NO: 2782433 - RNA, 19 nt, Human
uccaaaugcagcuuuaaaa

SEQ ID NO: 2782434 - RNA, 20 nt, Human
uccaaauggcgucuggaagu

SEQ ID NO: 2782435 - RNA, 18 nt, Human
uccaaauggcgucuggaa

SEQ ID NO: 2782436 - RNA, 22 nt, Human
uccaaauguccuccagaagccu

SEQ ID NO: 2782437 - RNA, 20 nt, Human
uccaaauguccuccagaagc

SEQ ID NO: 2782438 - RNA, 19 nt, Human
uccaaauguccuccagaag

SEQ ID NO: 2782439 - RNA, 17 nt, Human
uccaaauguccuccaga

SEQ ID NO: 2782440 - RNA, 14 nt, Human
uccaaauugugcuu

SEQ ID NO: 2782441 - RNA, 15 nt, Human
uccaaauugugcuuc

SEQ ID NO: 2782442 - RNA, 22 nt, Human
uccaaauugugcuucuccccag

SEQ ID NO: 2782443 - RNA, 23 nt, Human
uccaaauugugcuucuccccaga

SEQ ID NO: 2782444 - RNA, 23 nt, Human
uccaaggaaaccacagcugcugg

SEQ ID NO: 2782445 - RNA, 19 nt, Human
uccaaggaacuaauuucuu

SEQ ID NO: 2782446 - RNA, 15 nt, Human
uccaacacaaggcuc

SEQ ID NO: 2782447 - RNA, 23 nt, Human
uccaacacaaggcuccaagaccu

SEQ ID NO: 2782448 - RNA, 21 nt, Human
uccaaggaaaccacagcugcu

SEQ ID NO: 2782449 - RNA, 14 nt, Human
uccaaggggcaaau

SEQ ID NO: 2782450 - RNA, 12 nt, Human
uccacaugcucu

SEQ ID NO: 2782451 - RNA, 13 nt, Human
uccacaugcucug

SEQ ID NO: 2782452 - RNA, 14 nt, Human
uccacaugcucuga

SEQ ID NO: 2782453 - RNA, 14 nt, Human
uccacauuguuuua

SEQ ID NO: 2782454 - RNA, 15 nt, Human
uccacauuguuuuaa

SEQ ID NO: 2782455 - RNA, 14 nt, Human
uccacaucccggga

SEQ ID NO: 2782456 - RNA, 23 nt, Human
uccaauuauuugacuuuaauuua

SEQ ID NO: 2782457 - RNA, 18 nt, Human
uccaauguggcaaggaaa

SEQ ID NO: 2782458 - RNA, 20 nt, Human
uccaauguuagagacuuuuu

SEQ ID NO: 2782459 - RNA, 20 nt, Human
uccaaugccacauacuugca

SEQ ID NO: 2782460 - RNA, 22 nt, Human
uccaaugccacauacuugcagc

SEQ ID NO: 2782461 - RNA, 19 nt, Human
uccaaugucugcugaggag

SEQ ID NO: 2782462 - RNA, 16 nt, Human
acgcugauacauaacu

SEQ ID NO: 2782463 - RNA, 14 nt, Human
acgcugcagagcac

SEQ ID NO: 2782464 - RNA, 14 nt, Human
acgcugccugcccg

SEQ ID NO: 2782465 - RNA, 15 nt, Human
acgcugccugcccac

SEQ ID NO: 2782466 - RNA, 13 nt, Human
acgcugccugccc

SEQ ID NO: 2782467 - RNA, 12 nt, Human
acgcugccugcc

SEQ ID NO: 2782468 - RNA, 19 nt, Human
acggagucccaccuuggcu

SEQ ID NO: 2782469 - RNA, 18 nt, Human
acggaggcauccuacccu

SEQ ID NO: 2782470 - RNA, 23 nt, Human
acggaggcaaagcuggcucaccu

SEQ ID NO: 2782471 - RNA, 18 nt, Human
acggagccccaggccucu

SEQ ID NO: 2782472 - RNA, 21 nt, Human
acggagccccaggccucugug

SEQ ID NO: 2782473 - RNA, 15 nt, Human
acggagcccagcccu

SEQ ID NO: 2782474 - RNA, 20 nt, Human
acggagcccagcccucccca

SEQ ID NO: 2782475 - RNA, 21 nt, Human
acggagucccaccuuggcugc

SEQ ID NO: 2782476 - RNA, 12 nt, Human
acggauuccaaa

SEQ ID NO: 2782477 - RNA, 16 nt, Human
acggccaggccagagg

SEQ ID NO: 2782478 - RNA, 18 nt, Human
acggcacggucuucccuc

SEQ ID NO: 2782479 - RNA, 19 nt, Human
acggcacggucuucccucu

SEQ ID NO: 2782480 - RNA, 22 nt, Human
acggcacggucuucccucuucc

SEQ ID NO: 2782481 - RNA, 13 nt, Human
acggccaggccag

SEQ ID NO: 2782482 - RNA, 15 nt, Human
acggccaucucuuug

SEQ ID NO: 2782483 - RNA, 20 nt, Human
acggccaucucuuuguacag

SEQ ID NO: 2782484 - RNA, 22 nt, Human
acggccaucucuuuguacagga

SEQ ID NO: 2782485 - RNA, 23 nt, Human
acgcgugcacacaccagagccca

SEQ ID NO: 2782486 - RNA, 20 nt, Human
acgcgugcacacaccagagc

SEQ ID NO: 2782487 - RNA, 21 nt, Human
acgccggggacagaggccugc

SEQ ID NO: 2782488 - RNA, 22 nt, Human
acgccggggacagaggccugcc

SEQ ID NO: 2782489 - RNA, 20 nt, Human
acgccgcccuaaaagcacac

SEQ ID NO: 2782490 - RNA, 23 nt, Human
acgcccuccccuccccugcugca

SEQ ID NO: 2782491 - RNA, 20 nt, Human
acgccggggacagaggccug

SEQ ID NO: 2782492 - RNA, 18 nt, Human
acgcccuccccuccccug

SEQ ID NO: 2782493 - RNA, 19 nt, Human
acgcccuccccuccccugc

SEQ ID NO: 2782494 - RNA, 21 nt, Human
acgcccuccccuccccugcug

SEQ ID NO: 2782495 - RNA, 22 nt, Human
acgcccuccccuccccugcugc

SEQ ID NO: 2782496 - RNA, 14 nt, Human
acgcccucucccca

SEQ ID NO: 2782497 - RNA, 15 nt, Human
acgcccucuccccac

SEQ ID NO: 2782498 - RNA, 18 nt, Human
acgcccucuccccacccc

SEQ ID NO: 2782499 - RNA, 21 nt, Human
acgcccucuccccaccccuac

SEQ ID NO: 2782500 - RNA, 23 nt, Human
acgcccucuccccaccccuaccc

SEQ ID NO: 2782501 - RNA, 13 nt, Human
acgcccuauuuuu

SEQ ID NO: 2782502 - RNA, 12 nt, Human
acgcccuccccu

SEQ ID NO: 2782503 - RNA, 13 nt, Human
acgcccuccccuc

SEQ ID NO: 2782504 - RNA, 14 nt, Human
acgcccuccccucc

SEQ ID NO: 2782505 - RNA, 15 nt, Human
acgcccuccccuccc

SEQ ID NO: 2782506 - RNA, 16 nt, Human
acgagucaccuuccag

SEQ ID NO: 2782507 - RNA, 13 nt, Human
acgagugcuaagu

SEQ ID NO: 2782508 - RNA, 14 nt, Human
acgauaaggaagaa

SEQ ID NO: 2782509 - RNA, 17 nt, Human
acgauaaggaagaaaca

SEQ ID NO: 2782510 - RNA, 23 nt, Human
acgauaaggaagaaacagaagag

SEQ ID NO: 2782511 - RNA, 23 nt, Human
acgauacgcuacuauaaagagaa

SEQ ID NO: 2782512 - RNA, 19 nt, Human
acgacaaggaaaggcaaau

SEQ ID NO: 2782513 - RNA, 22 nt, Human
acgacaaagccaaacucugcca

SEQ ID NO: 2782514 - RNA, 16 nt, Human
acgaccagggccgagg

SEQ ID NO: 2782515 - RNA, 16 nt, Human
acgaccggggccagca

SEQ ID NO: 2782516 - RNA, 21 nt, Human
acgaccggggccagcaccacu

SEQ ID NO: 2782517 - RNA, 21 nt, Human
acgaccuaggcaguaggccgg

SEQ ID NO: 2782518 - RNA, 13 nt, Human
acgacgcccucuc

SEQ ID NO: 2782519 - RNA, 14 nt, Human
acgacgcccucucc

SEQ ID NO: 2782520 - RNA, 16 nt, Human
acgacgcccucucccc

SEQ ID NO: 2782521 - RNA, 14 nt, Human
acgacgcugcagag

SEQ ID NO: 2782522 - RNA, 20 nt, Human
acgcccacccaaccccaagc

SEQ ID NO: 2782523 - RNA, 17 nt, Human
acgaagaagagccacag

SEQ ID NO: 2782524 - RNA, 18 nt, Human
acgaagaagagccacagu

SEQ ID NO: 2782525 - RNA, 15 nt, Human
acgaagaagagccac

SEQ ID NO: 2782526 - RNA, 14 nt, Human
acgacaaggaaagg

SEQ ID NO: 2782527 - RNA, 20 nt, Human
uccagggaauccaagccucc

SEQ ID NO: 2782528 - RNA, 19 nt, Human
uccagggaauccaagccuc

SEQ ID NO: 2782529 - RNA, 18 nt, Human
uccagggaagcuggccga

SEQ ID NO: 2782530 - RNA, 21 nt, Human
uccagggacgaagaagagcca

SEQ ID NO: 2782531 - RNA, 15 nt, Human
uccagggagccuaga

SEQ ID NO: 2782532 - RNA, 21 nt, Human
uccagggagccuagaagcugg

SEQ ID NO: 2782533 - RNA, 16 nt, Human
accuucucuauaucau

SEQ ID NO: 2782534 - RNA, 18 nt, Human
uccagggaauccaagccu

SEQ ID NO: 2782535 - RNA, 14 nt, Human
uccagggaauccaa

SEQ ID NO: 2782536 - RNA, 23 nt, Human
uccagggaagcuggccgaggguc

SEQ ID NO: 2782537 - RNA, 17 nt, Human
uccacgauccugccacc

SEQ ID NO: 2782538 - RNA, 18 nt, Human
uccacgauccugccaccc

SEQ ID NO: 2782539 - RNA, 17 nt, Human
uccacgcgcuucgacuu

SEQ ID NO: 2782540 - RNA, 21 nt, Human
uccacgcgcuucgacuuuucu

SEQ ID NO: 2782541 - RNA, 22 nt, Human
uccaucccuacccccuaagagc

SEQ ID NO: 2782542 - RNA, 23 nt, Human
uccaucccucuaaugagacugac

SEQ ID NO: 2782543 - RNA, 15 nt, Human
uccaucccucuaaug

SEQ ID NO: 2782544 - RNA, 12 nt, Human
uccaucccucua

SEQ ID NO: 2782545 - RNA, 18 nt, Human
uccaucccuacccccuaa

SEQ ID NO: 2782546 - RNA, 15 nt, Human
acggcucacugcagc

SEQ ID NO: 2782547 - RNA, 19 nt, Human
acggcguuguaccuguagg

SEQ ID NO: 2782548 - RNA, 15 nt, Human
acggcuaagaggcug

SEQ ID NO: 2782549 - RNA, 16 nt, Human
acggcuaagaggcugc

SEQ ID NO: 2782550 - RNA, 17 nt, Human
acggcuaagaggcugcu

SEQ ID NO: 2782551 - RNA, 18 nt, Human
acggcuaagaggcugcug

SEQ ID NO: 2782552 - RNA, 20 nt, Human
uccagugacaaaccauccag

SEQ ID NO: 2782553 - RNA, 14 nt, Human
acggcucacugcag

SEQ ID NO: 2782554 - RNA, 22 nt, Human
acggccugaugcucccuccccu

SEQ ID NO: 2782555 - RNA, 20 nt, Human
acggccugaugcucccuccc

SEQ ID NO: 2782556 - RNA, 21 nt, Human
acggccccgaagggcccccac

SEQ ID NO: 2782557 - RNA, 22 nt, Human
acggccccgaagggcccccaca

SEQ ID NO: 2782558 - RNA, 22 nt, Human
acggcccucaucuaugaggaaa

SEQ ID NO: 2782559 - RNA, 11 nt, Human
acggcccugca

SEQ ID NO: 2782560 - RNA, 12 nt, Human
acggcccugcaa

SEQ ID NO: 2782561 - RNA, 13 nt, Human
acggcccugcaau

SEQ ID NO: 2782562 - RNA, 18 nt, Human
acggcccugcagccagcu

SEQ ID NO: 2782563 - RNA, 19 nt, Human
acggccugaugcucccucc

SEQ ID NO: 2782564 - RNA, 18 nt, Human
acggccugaugcucccuc

SEQ ID NO: 2782565 - RNA, 15 nt, Human
acggccugaugcucc

SEQ ID NO: 2782566 - RNA, 15 nt, Human
uccaugacaggccug

SEQ ID NO: 2782567 - RNA, 20 nt, Human
uccaugacaggccugaagau

SEQ ID NO: 2782568 - RNA, 18 nt, Human
uccaucugcccgccugcc

SEQ ID NO: 2782569 - RNA, 20 nt, Human
uccaucugcccgccugccca

SEQ ID NO: 2782570 - RNA, 21 nt, Human
uccaucugcccgccugcccac

SEQ ID NO: 2782571 - RNA, 22 nt, Human
uccaucugcccgccugcccacc

SEQ ID NO: 2782572 - RNA, 14 nt, Human
uccaucuguacuug

SEQ ID NO: 2782573 - RNA, 17 nt, Human
uccaucuguacuugguc

SEQ ID NO: 2782574 - RNA, 19 nt, Human
uccaucuguacuuggucca

SEQ ID NO: 2782575 - RNA, 13 nt, Human
uccaucuuuacaa

SEQ ID NO: 2782576 - RNA, 18 nt, Human
uccaucuuuccugauggc

SEQ ID NO: 2782577 - RNA, 22 nt, Human
uccauugguccaagauuccgga

SEQ ID NO: 2782578 - RNA, 18 nt, Human
uccaugaguuugcccugg

SEQ ID NO: 2782579 - RNA, 18 nt, Human
uccauugccuagcucuuu

SEQ ID NO: 2782580 - RNA, 15 nt, Human
uccauugguccaaga

SEQ ID NO: 2782581 - RNA, 16 nt, Human
uccauugguccaagau

SEQ ID NO: 2782582 - RNA, 18 nt, Human
uccauugguccaagauuc

SEQ ID NO: 2782583 - RNA, 19 nt, Human
uccauugguccaagauucc

SEQ ID NO: 2782584 - RNA, 13 nt, Human
uccauuuguaaaa

SEQ ID NO: 2782585 - RNA, 13 nt, Human
uccauuuguaauu

SEQ ID NO: 2782586 - RNA, 21 nt, Human
uccauuuguaauuaaauuaug

SEQ ID NO: 2782587 - RNA, 18 nt, Human
uccauuuuccuacaggca

SEQ ID NO: 2782588 - RNA, 19 nt, Human
uccauuuuccuacaggcag

SEQ ID NO: 2782589 - RNA, 23 nt, Human
uccauuuuccuacaggcagucuc

SEQ ID NO: 2782590 - RNA, 22 nt, Human
uccauuuucuuauugcgcugcu

SEQ ID NO: 2782591 - RNA, 22 nt, Human
uccauuuuggcgcuauuacaaa

SEQ ID NO: 2782592 - RNA, 16 nt, Human
ucccaaagugcuggga

SEQ ID NO: 2782593 - RNA, 20 nt, Human
ucccaaagugcugggauuac

SEQ ID NO: 2782594 - RNA, 15 nt, Human
ucccaaagugcuggg

SEQ ID NO: 2782595 - RNA, 13 nt, Human
uccauuuugugaa

SEQ ID NO: 2782596 - RNA, 14 nt, Human
uccauuuugugaag

SEQ ID NO: 2782597 - RNA, 15 nt, Human
uccauuuugugaagc

SEQ ID NO: 2782598 - RNA, 16 nt, Human
uccauuuugugaagcc

SEQ ID NO: 2782599 - RNA, 17 nt, Human
uccauuuugugaagccc

SEQ ID NO: 2782600 - RNA, 19 nt, Human
uccauuuugugaagcccug

SEQ ID NO: 2782601 - RNA, 20 nt, Human
uccauuuugugaagcccugu

SEQ ID NO: 2782602 - RNA, 16 nt, Human
ucccaauugagaaaaa

SEQ ID NO: 2782603 - RNA, 14 nt, Human
ucccaaucagcacu

SEQ ID NO: 2782604 - RNA, 15 nt, Human
ucccaaucagcacug

SEQ ID NO: 2782605 - RNA, 16 nt, Human
ucccaaucagcacuga

SEQ ID NO: 2782606 - RNA, 17 nt, Human
ucccaaucagcacugaa

SEQ ID NO: 2782607 - RNA, 18 nt, Human
ucccaaucagcacugaaa

SEQ ID NO: 2782608 - RNA, 19 nt, Human
ucccaaucagcacugaaaa

SEQ ID NO: 2782609 - RNA, 14 nt, Human
ucccaaugcacauc

SEQ ID NO: 2782610 - RNA, 20 nt, Human
ucccaaugcacauccauucc

SEQ ID NO: 2782611 - RNA, 22 nt, Human
ucccaaugcacauccauuccca

SEQ ID NO: 2782612 - RNA, 13 nt, Human
ucccaaugguguu

SEQ ID NO: 2782613 - RNA, 14 nt, Human
ucccaaugguguuu

SEQ ID NO: 2782614 - RNA, 16 nt, Human
ucccaaugguguuuuu

SEQ ID NO: 2782615 - RNA, 21 nt, Human
ucccaaugguguuuuucuugu

SEQ ID NO: 2782616 - RNA, 22 nt, Human
ucccaaugguguuuuucuugua

SEQ ID NO: 2782617 - RNA, 19 nt, Human
ucccacauccaacuccagc

SEQ ID NO: 2782618 - RNA, 21 nt, Human
ucccacaggcccuuccucucc

SEQ ID NO: 2782619 - RNA, 22 nt, Human
ucccacaggcccuuccucucca

SEQ ID NO: 2782620 - RNA, 15 nt, Human
ucccacaggcccuuc

SEQ ID NO: 2782621 - RNA, 17 nt, Human
ucccacaggcccuuccu

SEQ ID NO: 2782622 - RNA, 16 nt, Human
ucccacccacauguga

SEQ ID NO: 2782623 - RNA, 15 nt, Human
ucccacccacaugug

SEQ ID NO: 2782624 - RNA, 18 nt, Human
ucccacccacaugugaca

SEQ ID NO: 2782625 - RNA, 22 nt, Human
ucccacccacaugugacacaua

SEQ ID NO: 2782626 - RNA, 22 nt, Human
ucccacauccaacuccagcaac

SEQ ID NO: 2782627 - RNA, 20 nt, Human
ucccacauccaacuccagca

SEQ ID NO: 2782628 - RNA, 23 nt, Human
ucccacauccaacuccagcaacu

SEQ ID NO: 2782629 - RNA, 19 nt, Human
ucccaccaacccucagagc

SEQ ID NO: 2782630 - RNA, 20 nt, Human
ucccacccccaucucucccu

SEQ ID NO: 2782631 - RNA, 19 nt, Human
ucccacccccuucucugcu

SEQ ID NO: 2782632 - RNA, 17 nt, Human
ucccacccccuucucug

SEQ ID NO: 2782633 - RNA, 20 nt, Human
ucccacccccacccccagcu

SEQ ID NO: 2782634 - RNA, 22 nt, Human
ucccacccccacccccagcuca

SEQ ID NO: 2782635 - RNA, 23 nt, Human
ucccacccccacccccagcucaa

SEQ ID NO: 2782636 - RNA, 22 nt, Human
ucccacccccuucucugcucca

SEQ ID NO: 2782637 - RNA, 13 nt, Human
ucccaccccuccc

SEQ ID NO: 2782638 - RNA, 19 nt, Human
ucccaccccucccucuguc

SEQ ID NO: 2782639 - RNA, 21 nt, Human
ucccacccccuucucugcucc

SEQ ID NO: 2782640 - RNA, 20 nt, Human
ucccacccccuucucugcuc

SEQ ID NO: 2782641 - RNA, 11 nt, Human
ucccacccugu

SEQ ID NO: 2782642 - RNA, 12 nt, Human
ucccacccugua

SEQ ID NO: 2782643 - RNA, 20 nt, Human
ucccacccuguaccucaucc

SEQ ID NO: 2782644 - RNA, 13 nt, Human
ucccacccuguuc

SEQ ID NO: 2782645 - RNA, 15 nt, Human
acggguuggggccgg

SEQ ID NO: 2782646 - RNA, 14 nt, Human
acgggguccuucaa

SEQ ID NO: 2782647 - RNA, 18 nt, Human
acggggagcggcggaaag

SEQ ID NO: 2782648 - RNA, 14 nt, Human
acggggacugggga

SEQ ID NO: 2782649 - RNA, 21 nt, Human
ucaaucaaauaaguauuuaua

SEQ ID NO: 2782650 - RNA, 13 nt, Human
ucaaucaacacua

SEQ ID NO: 2782651 - RNA, 15 nt, Human
ucaaucaacacuacc

SEQ ID NO: 2782652 - RNA, 17 nt, Human
ucaaucaagccauguau

SEQ ID NO: 2782653 - RNA, 16 nt, Human
ucaauauuuuuagaua

SEQ ID NO: 2782654 - RNA, 20 nt, Human
ucaagugauucucaugccuc

SEQ ID NO: 2782655 - RNA, 13 nt, Human
ucaaucccaaaag

SEQ ID NO: 2782656 - RNA, 16 nt, Human
ucaaucccaaaaguca

SEQ ID NO: 2782657 - RNA, 19 nt, Human
ucaaucccaaaagucacca

SEQ ID NO: 2782658 - RNA, 13 nt, Human
ucaaucccagccu

SEQ ID NO: 2782659 - RNA, 12 nt, Human
ucaaucauuucu

SEQ ID NO: 2782660 - RNA, 13 nt, Human
ucaaucauuucuc

SEQ ID NO: 2782661 - RNA, 14 nt, Human
ucaaucauuucuca

SEQ ID NO: 2782662 - RNA, 15 nt, Human
ucaaucauuucucac

SEQ ID NO: 2782663 - RNA, 19 nt, Human
ucaaucauuucucacugug

SEQ ID NO: 2782664 - RNA, 18 nt, Human
ucaauccagaugguggga

SEQ ID NO: 2782665 - RNA, 19 nt, Human
ucaaucaucugugugaaaa

SEQ ID NO: 2782666 - RNA, 16 nt, Human
ucaaucaucuguguga

SEQ ID NO: 2782667 - RNA, 20 nt, Human
ucaaucaucugugugaaaau

SEQ ID NO: 2782668 - RNA, 15 nt, Human
ucaaucaucugugug

SEQ ID NO: 2782669 - RNA, 12 nt, Human
ucaaucacuguc

SEQ ID NO: 2782670 - RNA, 22 nt, Human
ucaaucacuguccuccacacaa

SEQ ID NO: 2782671 - RNA, 17 nt, Human
ucaagugauucuccugc

SEQ ID NO: 2782672 - RNA, 16 nt, Human
ucaagugauucuccug

SEQ ID NO: 2782673 - RNA, 22 nt, Human
ucaagugauucucaugccucag

SEQ ID NO: 2782674 - RNA, 21 nt, Human
ucaagugauucucaugccuca

SEQ ID NO: 2782675 - RNA, 19 nt, Human
ucaaguaauccaccugccu

SEQ ID NO: 2782676 - RNA, 23 nt, Human
ucaagguuuuagguucuaaaguu

SEQ ID NO: 2782677 - RNA, 21 nt, Human
ucaagguuuuagguucuaaag

SEQ ID NO: 2782678 - RNA, 22 nt, Human
ucaagguuuuagguucuaaagu

SEQ ID NO: 2782679 - RNA, 17 nt, Human
ucaagagggucugagga

SEQ ID NO: 2782680 - RNA, 20 nt, Human
ucaagagggcacugguggcc

SEQ ID NO: 2782681 - RNA, 21 nt, Human
ucaagagggcacugguggccc

SEQ ID NO: 2782682 - RNA, 15 nt, Human
acauuauugcuuauu

SEQ ID NO: 2782683 - RNA, 19 nt, Human
ucaagaggugggagggccc

SEQ ID NO: 2782684 - RNA, 17 nt, Human
acauuaugcuccagaaa

SEQ ID NO: 2782685 - RNA, 19 nt, Human
acauuaugugguuuuagau

SEQ ID NO: 2782686 - RNA, 21 nt, Human
acauuaugugguuuuagauuu

SEQ ID NO: 2782687 - RNA, 22 nt, Human
acauuaugugguuuuagauuuu

SEQ ID NO: 2782688 - RNA, 13 nt, Human
acauuaugugugc

SEQ ID NO: 2782689 - RNA, 14 nt, Human
acauuaugugugca

SEQ ID NO: 2782690 - RNA, 15 nt, Human
acauuaugugugcau

SEQ ID NO: 2782691 - RNA, 17 nt, Human
acauuaugugugcaugu

SEQ ID NO: 2782692 - RNA, 19 nt, Human
acauuaugugugcaugugu

SEQ ID NO: 2782693 - RNA, 20 nt, Human
acauuaugugugcaugugug

SEQ ID NO: 2782694 - RNA, 21 nt, Human
acauuaugugugcaugugugu

SEQ ID NO: 2782695 - RNA, 22 nt, Human
acauuaugugugcaugugugua

SEQ ID NO: 2782696 - RNA, 23 nt, Human
acauuaugugugcauguguguau

SEQ ID NO: 2782697 - RNA, 19 nt, Human
acauuaucucacuugugcc

SEQ ID NO: 2782698 - RNA, 17 nt, Human
ucaagagcugcccuccu

SEQ ID NO: 2782699 - RNA, 12 nt, Human
ucaagaggcuga

SEQ ID NO: 2782700 - RNA, 18 nt, Human
ucaagaggcugagacagg

SEQ ID NO: 2782701 - RNA, 18 nt, Human
acauuauuuauaugggga

SEQ ID NO: 2782702 - RNA, 16 nt, Human
acauuauuuauucagc

SEQ ID NO: 2782703 - RNA, 12 nt, Human
acauuauuucua

SEQ ID NO: 2782704 - RNA, 13 nt, Human
acauuauuucuag

SEQ ID NO: 2782705 - RNA, 16 nt, Human
acauuauuucuagucc

SEQ ID NO: 2782706 - RNA, 14 nt, Human
acauuauuuauaug

SEQ ID NO: 2782707 - RNA, 13 nt, Human
ucaaggcacucua

SEQ ID NO: 2782708 - RNA, 14 nt, Human
ucaaggcacucuag

SEQ ID NO: 2782709 - RNA, 15 nt, Human
ucaaggcacucuaga

SEQ ID NO: 2782710 - RNA, 16 nt, Human
ucaaggcacucuagau

SEQ ID NO: 2782711 - RNA, 12 nt, Human
ucaagcagccaa

SEQ ID NO: 2782712 - RNA, 18 nt, Human
ucaagcagcgaccgcccc

SEQ ID NO: 2782713 - RNA, 21 nt, Human
ucaagcagcgaccgcccccuc

SEQ ID NO: 2782714 - RNA, 12 nt, Human
ucaagcacugau

SEQ ID NO: 2782715 - RNA, 13 nt, Human
ucaagcacugaua

SEQ ID NO: 2782716 - RNA, 20 nt, Human
ucaagcaauccucucaccuc

SEQ ID NO: 2782717 - RNA, 20 nt, Human
ucaagguggccaaauuauuu

SEQ ID NO: 2782718 - RNA, 11 nt, Human
ucaagguucua

SEQ ID NO: 2782719 - RNA, 14 nt, Human
ucaagguucuaacc

SEQ ID NO: 2782720 - RNA, 13 nt, Human
ucaagguuuuagg

SEQ ID NO: 2782721 - RNA, 18 nt, Human
ucaagguuuuagguucua

SEQ ID NO: 2782722 - RNA, 20 nt, Human
ucaagguuuuagguucuaaa

SEQ ID NO: 2782723 - RNA, 17 nt, Human
ucaaggcaucaugcaga

SEQ ID NO: 2782724 - RNA, 13 nt, Human
ucaaggcacugcc

SEQ ID NO: 2782725 - RNA, 14 nt, Human
ucaaggcacugccu

SEQ ID NO: 2782726 - RNA, 15 nt, Human
ucaaggcacugccug

SEQ ID NO: 2782727 - RNA, 16 nt, Human
ucaaggcacugccuga

SEQ ID NO: 2782728 - RNA, 17 nt, Human
ucaaggcacucuagauu

SEQ ID NO: 2782729 - RNA, 18 nt, Human
ucaaggcacucuagauuc

SEQ ID NO: 2782730 - RNA, 20 nt, Human
ucaaggcacucuagauucca

SEQ ID NO: 2782731 - RNA, 21 nt, Human
ucaaggcacucuagauuccau

SEQ ID NO: 2782732 - RNA, 16 nt, Human
acauugggucuauucc

SEQ ID NO: 2782733 - RNA, 18 nt, Human
acauugggucuauuccag

SEQ ID NO: 2782734 - RNA, 20 nt, Human
acauugggucuauuccagcu

SEQ ID NO: 2782735 - RNA, 21 nt, Human
acauugggucuauuccagcuc

SEQ ID NO: 2782736 - RNA, 22 nt, Human
acauugggucuauuccagcuca

SEQ ID NO: 2782737 - RNA, 23 nt, Human
acauugggucuauuccagcucau

SEQ ID NO: 2782738 - RNA, 21 nt, Human
acauuguaaauaguauuugag

SEQ ID NO: 2782739 - RNA, 19 nt, Human
acauuguaaauaguauuug

SEQ ID NO: 2782740 - RNA, 17 nt, Human
acauuguaaauaguauu

SEQ ID NO: 2782741 - RNA, 17 nt, Human
acauuguuugcugcuau

SEQ ID NO: 2782742 - RNA, 18 nt, Human
acauuguuugcugcuauu

SEQ ID NO: 2782743 - RNA, 13 nt, Human
acauuguuuuaaa

SEQ ID NO: 2782744 - RNA, 15 nt, Human
acauuguuuuaaaaa

SEQ ID NO: 2782745 - RNA, 16 nt, Human
acauuguuuuaaaaag

SEQ ID NO: 2782746 - RNA, 17 nt, Human
acauuguuuuaaaaaga

SEQ ID NO: 2782747 - RNA, 18 nt, Human
acauuguuuuaaaaagaa

SEQ ID NO: 2782748 - RNA, 15 nt, Human
acauugggaagggga

SEQ ID NO: 2782749 - RNA, 19 nt, Human
acauugggaaggggacccc

SEQ ID NO: 2782750 - RNA, 23 nt, Human
acauugggaaggggacccccgcc

SEQ ID NO: 2782751 - RNA, 16 nt, Human
acauuggauuauccug

SEQ ID NO: 2782752 - RNA, 22 nt, Human
acauuggagaugccauccucuu

SEQ ID NO: 2782753 - RNA, 18 nt, Human
acauuggauuauccugag

SEQ ID NO: 2782754 - RNA, 22 nt, Human
acauugcggacagccacggcca

SEQ ID NO: 2782755 - RNA, 21 nt, Human
acauugcggacagccacggcc

SEQ ID NO: 2782756 - RNA, 23 nt, Human
acauugcguuugaccuuuuaugu

SEQ ID NO: 2782757 - RNA, 15 nt, Human
acauugcguuugacc

SEQ ID NO: 2782758 - RNA, 20 nt, Human
acauugcuugugccacaccc

SEQ ID NO: 2782759 - RNA, 19 nt, Human
acauuuuuccguuugcuuu

SEQ ID NO: 2782760 - RNA, 21 nt, Human
acauuuuuccguuugcuuuug

SEQ ID NO: 2782761 - RNA, 12 nt, Human
acauuuuuauuu

SEQ ID NO: 2782762 - RNA, 13 nt, Human
acauuuuuauuua

SEQ ID NO: 2782763 - RNA, 15 nt, Human
acauuuuuauuuaug

SEQ ID NO: 2782764 - RNA, 16 nt, Human
acauuuuuauuuauga

SEQ ID NO: 2782765 - RNA, 17 nt, Human
acauuuuuauuuaugaa

SEQ ID NO: 2782766 - RNA, 18 nt, Human
acauuuuuauuuaugaag

SEQ ID NO: 2782767 - RNA, 23 nt, Human
acauuuuuauuuaugaaguuuaa

SEQ ID NO: 2782768 - RNA, 14 nt, Human
acauuuuuucauca

SEQ ID NO: 2782769 - RNA, 18 nt, Human
acauuuuuuuuuuaaauc

SEQ ID NO: 2782770 - RNA, 14 nt, Human
acauuuuacauuaa

SEQ ID NO: 2782771 - RNA, 12 nt, Human
acauuuuaacaa

SEQ ID NO: 2782772 - RNA, 13 nt, Human
acauuuuaacaag

SEQ ID NO: 2782773 - RNA, 14 nt, Human
acauuuuaacaaga

SEQ ID NO: 2782774 - RNA, 15 nt, Human
acauuuuaacaagaa

SEQ ID NO: 2782775 - RNA, 17 nt, Human
acauuuuaacaagaaga

SEQ ID NO: 2782776 - RNA, 18 nt, Human
acauuuuaacaagaagau

SEQ ID NO: 2782777 - RNA, 21 nt, Human
acauuuuaacaagaagaugaa

SEQ ID NO: 2782778 - RNA, 16 nt, Human
acauuuaauaucuuca

SEQ ID NO: 2782779 - RNA, 12 nt, Human
acauuuaauuua

SEQ ID NO: 2782780 - RNA, 15 nt, Human
acauuuaauuuagug

SEQ ID NO: 2782781 - RNA, 19 nt, Human
acauuuaauuuagugaucu

SEQ ID NO: 2782782 - RNA, 20 nt, Human
acauuuaagagacagucacc

SEQ ID NO: 2782783 - RNA, 21 nt, Human
acauuuaaggaugggguuaug

SEQ ID NO: 2782784 - RNA, 13 nt, Human
acauuuaaagcau

SEQ ID NO: 2782785 - RNA, 14 nt, Human
acauuuaaagcauu

SEQ ID NO: 2782786 - RNA, 19 nt, Human
acauuuaaagcauugcugu

SEQ ID NO: 2782787 - RNA, 20 nt, Human
acauuuaaagcauugcuguu

SEQ ID NO: 2782788 - RNA, 10 nt, Human
acauuuaaaa

SEQ ID NO: 2782789 - RNA, 23 nt, Human
acauuuaaauuuuacccuuuaga

SEQ ID NO: 2782790 - RNA, 14 nt, Human
acauuuaaaacuua

SEQ ID NO: 2782791 - RNA, 12 nt, Human
acauuuaaaauu

SEQ ID NO: 2782792 - RNA, 17 nt, Human
acauuuaaaauugcuau

SEQ ID NO: 2782793 - RNA, 18 nt, Human
acauuuuacuuuuuccug

SEQ ID NO: 2782794 - RNA, 18 nt, Human
acauuuuacauuaaauuu

SEQ ID NO: 2782795 - RNA, 15 nt, Human
acauuuuacauuaaa

SEQ ID NO: 2782796 - RNA, 18 nt, Human
acauuuuagcucuauuga

SEQ ID NO: 2782797 - RNA, 12 nt, Human
acauuuuguucu

SEQ ID NO: 2782798 - RNA, 14 nt, Human
acauuuuguucuua

SEQ ID NO: 2782799 - RNA, 18 nt, Human
acauuuuguucuuacaca

SEQ ID NO: 2782800 - RNA, 19 nt, Human
acauuuuguucuuacacau

SEQ ID NO: 2782801 - RNA, 20 nt, Human
acauuuuguucuuacacaua

SEQ ID NO: 2782802 - RNA, 13 nt, Human
acauuuuguugua

SEQ ID NO: 2782803 - RNA, 14 nt, Human
acauuuuguuguaa

SEQ ID NO: 2782804 - RNA, 15 nt, Human
acauuuuguuguaaa

SEQ ID NO: 2782805 - RNA, 16 nt, Human
acauuuuguuguaaaa

SEQ ID NO: 2782806 - RNA, 17 nt, Human
acauuuuguuguaaaaa

SEQ ID NO: 2782807 - RNA, 19 nt, Human
acauuuuguuguaaaaaga

SEQ ID NO: 2782808 - RNA, 20 nt, Human
acauuuuguuguaaaaagaa

SEQ ID NO: 2782809 - RNA, 21 nt, Human
acauuuuguuguaaaaagaaa

SEQ ID NO: 2782810 - RNA, 23 nt, Human
acauuuuguuguaaaaagaaaaa

SEQ ID NO: 2782811 - RNA, 14 nt, Human
acauuuuuaaauug

SEQ ID NO: 2782812 - RNA, 20 nt, Human
acauuuuuaaauuguuagcu

SEQ ID NO: 2782813 - RNA, 13 nt, Human
accacacccagcc

SEQ ID NO: 2782814 - RNA, 12 nt, Human
accacacccagc

SEQ ID NO: 2782815 - RNA, 21 nt, Human
ucacagaacccuuggagccaa

SEQ ID NO: 2782816 - RNA, 22 nt, Human
ucacagaugaguuaucuaagaa

SEQ ID NO: 2782817 - RNA, 15 nt, Human
ucacagcagcuucua

SEQ ID NO: 2782818 - RNA, 16 nt, Human
ucacagcuccucccac

SEQ ID NO: 2782819 - RNA, 11 nt, Human
ucacagcuccu

SEQ ID NO: 2782820 - RNA, 14 nt, Human
ucacagcuccuccc

SEQ ID NO: 2782821 - RNA, 13 nt, Human
ucacaucacagga

SEQ ID NO: 2782822 - RNA, 13 nt, Human
ucacaucagauaa

SEQ ID NO: 2782823 - RNA, 16 nt, Human
ucacaucagauaagac

SEQ ID NO: 2782824 - RNA, 17 nt, Human
ucacaucagauaagaca

SEQ ID NO: 2782825 - RNA, 18 nt, Human
ucacaucagauaagacau

SEQ ID NO: 2782826 - RNA, 23 nt, Human
ucacauauuuuauuaagaacuca

SEQ ID NO: 2782827 - RNA, 16 nt, Human
ucaccagccccagugc

SEQ ID NO: 2782828 - RNA, 17 nt, Human
ucaccagccccagugcc

SEQ ID NO: 2782829 - RNA, 17 nt, Human
ucacauuccccugggga

SEQ ID NO: 2782830 - RNA, 18 nt, Human
ucacauuccccuggggac

SEQ ID NO: 2782831 - RNA, 21 nt, Human
ucacauuccccuggggaccca

SEQ ID NO: 2782832 - RNA, 13 nt, Human
ucacauuagaauu

SEQ ID NO: 2782833 - RNA, 15 nt, Human
ucacauuagaauuag

SEQ ID NO: 2782834 - RNA, 21 nt, Human
ucacauggugcuacgccugca

SEQ ID NO: 2782835 - RNA, 16 nt, Human
ucacauggugccccua

SEQ ID NO: 2782836 - RNA, 18 nt, Human
ucacauggugccccuagc

SEQ ID NO: 2782837 - RNA, 16 nt, Human
ucacauggccuaugca

SEQ ID NO: 2782838 - RNA, 21 nt, Human
ucacauggccuaugcacauau

SEQ ID NO: 2782839 - RNA, 20 nt, Human
ucacauuaauauuugcugac

SEQ ID NO: 2782840 - RNA, 16 nt, Human
ucacauuaauggucua

SEQ ID NO: 2782841 - RNA, 19 nt, Human
ucacauuaauggucuaaaa

SEQ ID NO: 2782842 - RNA, 22 nt, Human
ucacauuaauggucuaaaaaua

SEQ ID NO: 2782843 - RNA, 21 nt, Human
ucacauuaaaaaaugaaauau

SEQ ID NO: 2782844 - RNA, 22 nt, Human
ucacauuaaaaaaugaaauauu

SEQ ID NO: 2782845 - RNA, 19 nt, Human
ucacauuaauauuugcuga

SEQ ID NO: 2782846 - RNA, 20 nt, Human
accacaaagcacaguuugaa

SEQ ID NO: 2782847 - RNA, 10 nt, Human
accacaaagg

SEQ ID NO: 2782848 - RNA, 14 nt, Human
accacaaaggccaa

SEQ ID NO: 2782849 - RNA, 18 nt, Human
accacaaaggccaaacug

SEQ ID NO: 2782850 - RNA, 20 nt, Human
accacaaaggccaaacugcu

SEQ ID NO: 2782851 - RNA, 21 nt, Human
accacaaaggccaaacugcug

SEQ ID NO: 2782852 - RNA, 21 nt, Human
accaaugccaaaaaaagacag

SEQ ID NO: 2782853 - RNA, 16 nt, Human
accaaugccaagauaa

SEQ ID NO: 2782854 - RNA, 22 nt, Human
accaaugccaagauaauucacu

SEQ ID NO: 2782855 - RNA, 18 nt, Human
accaaugcuuuuaucaaa

SEQ ID NO: 2782856 - RNA, 19 nt, Human
accaaugcuuuuaucaaac

SEQ ID NO: 2782857 - RNA, 22 nt, Human
accaacacccaaagcauggacu

SEQ ID NO: 2782858 - RNA, 15 nt, Human
accaacccucagagc

SEQ ID NO: 2782859 - RNA, 23 nt, Human
accacacccagcccacuucugcc

SEQ ID NO: 2782860 - RNA, 21 nt, Human
accacacccagcccacuucug

SEQ ID NO: 2782861 - RNA, 20 nt, Human
accacacccagcccacuucu

SEQ ID NO: 2782862 - RNA, 16 nt, Human
accacacccagcccac

SEQ ID NO: 2782863 - RNA, 15 nt, Human
accacacccagccca

SEQ ID NO: 2782864 - RNA, 13 nt, Human
accacacauccca

SEQ ID NO: 2782865 - RNA, 14 nt, Human
accacacaucccag

SEQ ID NO: 2782866 - RNA, 15 nt, Human
accacacaucccagc

SEQ ID NO: 2782867 - RNA, 17 nt, Human
accacacaucccagccc

SEQ ID NO: 2782868 - RNA, 18 nt, Human
accacacaucccagccca

SEQ ID NO: 2782869 - RNA, 19 nt, Human
accacacaucccagcccaa

SEQ ID NO: 2782870 - RNA, 15 nt, Human
accacacaucuauga

SEQ ID NO: 2782871 - RNA, 12 nt, Human
accacaagggcu

SEQ ID NO: 2782872 - RNA, 13 nt, Human
accacacacaaca

SEQ ID NO: 2782873 - RNA, 14 nt, Human
accacacacaacag

SEQ ID NO: 2782874 - RNA, 15 nt, Human
accacacacaacagc

SEQ ID NO: 2782875 - RNA, 18 nt, Human
accacacacaacagccaa

SEQ ID NO: 2782876 - RNA, 18 nt, Human
accacacaccucaccaga

SEQ ID NO: 2782877 - RNA, 11 nt, Human
accacacaaag

SEQ ID NO: 2782878 - RNA, 14 nt, Human
accacacaaagaca

SEQ ID NO: 2782879 - RNA, 13 nt, Human
accacaacugaca

SEQ ID NO: 2782880 - RNA, 15 nt, Human
accacaacugacaca

SEQ ID NO: 2782881 - RNA, 16 nt, Human
accacaacugacacag

SEQ ID NO: 2782882 - RNA, 19 nt, Human
accacaacugacacaggaa

SEQ ID NO: 2782883 - RNA, 20 nt, Human
accaaaucucucaaaucugu

SEQ ID NO: 2782884 - RNA, 17 nt, Human
accaaauuuuucuauca

SEQ ID NO: 2782885 - RNA, 22 nt, Human
accaacaggcuguucugcacug

SEQ ID NO: 2782886 - RNA, 23 nt, Human
accaacaggcuguucugcacuga

SEQ ID NO: 2782887 - RNA, 16 nt, Human
accaacaguuccuuca

SEQ ID NO: 2782888 - RNA, 15 nt, Human
acauuggaaagcaca

SEQ ID NO: 2782889 - RNA, 19 nt, Human
accaaaaacugaaagugaa

SEQ ID NO: 2782890 - RNA, 12 nt, Human
accaaaguucua

SEQ ID NO: 2782891 - RNA, 18 nt, Human
accaaauaaaaauauugu

SEQ ID NO: 2782892 - RNA, 16 nt, Human
accaaauaaaaauauu

SEQ ID NO: 2782893 - RNA, 14 nt, Human
accaaaguucuaau

SEQ ID NO: 2782894 - RNA, 15 nt, Human
accaaaguucuaaua

SEQ ID NO: 2782895 - RNA, 20 nt, Human
accaaaguucuaauaauuuc

SEQ ID NO: 2782896 - RNA, 21 nt, Human
accaaaguucuaauaauuucu

SEQ ID NO: 2782897 - RNA, 23 nt, Human
accaaaguucuaauaauuucuaa

SEQ ID NO: 2782898 - RNA, 12 nt, Human
accaaaguuuua

SEQ ID NO: 2782899 - RNA, 17 nt, Human
uauuuguuauuuucagu

SEQ ID NO: 2782900 - RNA, 13 nt, Human
uauuuguuuucau

SEQ ID NO: 2782901 - RNA, 14 nt, Human
uauuuguuuucaug

SEQ ID NO: 2782902 - RNA, 17 nt, Human
uauuuguuuuucauuca

SEQ ID NO: 2782903 - RNA, 19 nt, Human
uauuuuaaaaaaugaaaau

SEQ ID NO: 2782904 - RNA, 18 nt, Human
uauuuguuauuuucagua

SEQ ID NO: 2782905 - RNA, 14 nt, Human
uauuuguucauguu

SEQ ID NO: 2782906 - RNA, 15 nt, Human
uauuuguucauguuu

SEQ ID NO: 2782907 - RNA, 16 nt, Human
uauuuguucauguuug

SEQ ID NO: 2782908 - RNA, 22 nt, Human
uauuuguucauguuuggugcau

SEQ ID NO: 2782909 - RNA, 16 nt, Human
uauuuguucuucaaga

SEQ ID NO: 2782910 - RNA, 15 nt, Human
uauuuguaggagaaa

SEQ ID NO: 2782911 - RNA, 12 nt, Human
uauuuuaaaagc

SEQ ID NO: 2782912 - RNA, 14 nt, Human
uauuuuaaaagcca

SEQ ID NO: 2782913 - RNA, 23 nt, Human
uauuuuaaaagccacauagagug

SEQ ID NO: 2782914 - RNA, 12 nt, Human
uauuuuaaacaa

SEQ ID NO: 2782915 - RNA, 14 nt, Human
uauuuuaaacaaaa

SEQ ID NO: 2782916 - RNA, 19 nt, Human
uauuuuaaacaaaauagaa

SEQ ID NO: 2782917 - RNA, 23 nt, Human
uauuuguaaggcuuguuccaaug

SEQ ID NO: 2782918 - RNA, 12 nt, Human
uauuuguacaua

SEQ ID NO: 2782919 - RNA, 23 nt, Human
uauuuguacuguuuaauguucug

SEQ ID NO: 2782920 - RNA, 24 nt, Human
uauuuguacuguuuaauguucugu

SEQ ID NO: 2782921 - RNA, 16 nt, Human
uauuuguuauggcaga

SEQ ID NO: 2782922 - RNA, 14 nt, Human
uauuuguuauuuuc

SEQ ID NO: 2782923 - RNA, 12 nt, Human
uauuuguguuuu

SEQ ID NO: 2782924 - RNA, 19 nt, Human
uauuuguguuuuaauuuaa

SEQ ID NO: 2782925 - RNA, 21 nt, Human
uauuuguguuuuaauuuaaac

SEQ ID NO: 2782926 - RNA, 22 nt, Human
uauuuguaucucugaagcaugu

SEQ ID NO: 2782927 - RNA, 23 nt, Human
uauuuguaucucugaagcauguu

SEQ ID NO: 2782928 - RNA, 12 nt, Human
uauuuguaucuc

SEQ ID NO: 2782929 - RNA, 15 nt, Human
uauuuguaucucuga

SEQ ID NO: 2782930 - RNA, 15 nt, Human
uauuugucuuucagg

SEQ ID NO: 2782931 - RNA, 17 nt, Human
acaucuugcucugcuga

SEQ ID NO: 2782932 - RNA, 22 nt, Human
acaucuugcucugcugacagac

SEQ ID NO: 2782933 - RNA, 14 nt, Human
acaucuugcucugc

SEQ ID NO: 2782934 - RNA, 13 nt, Human
acaucuuggcaca

SEQ ID NO: 2782935 - RNA, 24 nt, Human
acaucuuggcacauuuaagagaca

SEQ ID NO: 2782936 - RNA, 17 nt, Human
acaucuuuaucuguucu

SEQ ID NO: 2782937 - RNA, 14 nt, Human
acaucuuuccuguc

SEQ ID NO: 2782938 - RNA, 18 nt, Human
acaucuuucucuuuucua

SEQ ID NO: 2782939 - RNA, 16 nt, Human
acaucuuuuaagacaa

SEQ ID NO: 2782940 - RNA, 18 nt, Human
acaucuuuuaagacaaau

SEQ ID NO: 2782941 - RNA, 15 nt, Human
acaucuuuuuucaca

SEQ ID NO: 2782942 - RNA, 19 nt, Human
acaucuuuuuucacaaauu

SEQ ID NO: 2782943 - RNA, 16 nt, Human
acaucuuuuuaaagcu

SEQ ID NO: 2782944 - RNA, 18 nt, Human
acaucuuuuuaaagcuua

SEQ ID NO: 2782945 - RNA, 19 nt, Human
acaucuuuuuaaagcuuau

SEQ ID NO: 2782946 - RNA, 22 nt, Human
acaucuuuuuaaagcuuaucca

SEQ ID NO: 2782947 - RNA, 16 nt, Human
acaucuugcucugcug

SEQ ID NO: 2782948 - RNA, 15 nt, Human
acaucuugcucugcu

SEQ ID NO: 2782949 - RNA, 17 nt, Human
uauguguaaaaugugaa

SEQ ID NO: 2782950 - RNA, 14 nt, Human
uauguguaaaaugu

SEQ ID NO: 2782951 - RNA, 19 nt, Human
uaugugguuuuagauuuuc

SEQ ID NO: 2782952 - RNA, 16 nt, Human
uaugugguuuuagauu

SEQ ID NO: 2782953 - RNA, 18 nt, Human
uaugugguuuuagauuuu

SEQ ID NO: 2782954 - RNA, 19 nt, Human
uauguggguugccugguga

SEQ ID NO: 2782955 - RNA, 19 nt, Human
uauuuuaagcacucuuaaa

SEQ ID NO: 2782956 - RNA, 22 nt, Human
uauuuuaaaggggucugaaauu

SEQ ID NO: 2782957 - RNA, 19 nt, Human
uauuuuaauuuaugaguuu

SEQ ID NO: 2782958 - RNA, 13 nt, Human
uauuuuaauguga

SEQ ID NO: 2782959 - RNA, 14 nt, Human
uauuuuaaugugau

SEQ ID NO: 2782960 - RNA, 21 nt, Human
uauuuuaaugugaugauguaa

SEQ ID NO: 2782961 - RNA, 19 nt, Human
uauuuuacacagaaacacu

SEQ ID NO: 2782962 - RNA, 18 nt, Human
uauuuuacacagaaacac

SEQ ID NO: 2782963 - RNA, 17 nt, Human
uauuuuacacagaaaca

SEQ ID NO: 2782964 - RNA, 15 nt, Human
uauuuuacacagaaa

SEQ ID NO: 2782965 - RNA, 14 nt, Human
uauuuuacacagaa

SEQ ID NO: 2782966 - RNA, 23 nt, Human
uauuuuggauuguauauuguguu

SEQ ID NO: 2782967 - RNA, 20 nt, Human
uauuuuggauuguauauugu

SEQ ID NO: 2782968 - RNA, 16 nt, Human
uauuuuggagaaauua

SEQ ID NO: 2782969 - RNA, 18 nt, Human
uauuuuggaaagaagaaa

SEQ ID NO: 2782970 - RNA, 14 nt, Human
uauuuuggaaaguu

SEQ ID NO: 2782971 - RNA, 15 nt, Human
uauuuuggaaaguuu

SEQ ID NO: 2782972 - RNA, 24 nt, Human
uauuuuacacagaaacacugccuu

SEQ ID NO: 2782973 - RNA, 23 nt, Human
uauuuuacacagaaacacugccu

SEQ ID NO: 2782974 - RNA, 13 nt, Human
uauuuuaccauac

SEQ ID NO: 2782975 - RNA, 12 nt, Human
uauuuuacuauu

SEQ ID NO: 2782976 - RNA, 17 nt, Human
uauuuuacuauuggaau

SEQ ID NO: 2782977 - RNA, 14 nt, Human
uauuuugauaauaa

SEQ ID NO: 2782978 - RNA, 15 nt, Human
uauuuugauaauaaa

SEQ ID NO: 2782979 - RNA, 18 nt, Human
uauuuugauaauaaauug

SEQ ID NO: 2782980 - RNA, 20 nt, Human
uauuuugauaauaaauugaa

SEQ ID NO: 2782981 - RNA, 15 nt, Human
uauuuugauaauaau

SEQ ID NO: 2782982 - RNA, 18 nt, Human
uauuuugauaauaauauu

SEQ ID NO: 2782983 - RNA, 19 nt, Human
uauuuugauaauaauauug

SEQ ID NO: 2782984 - RNA, 13 nt, Human
uauuuugaugcag

SEQ ID NO: 2782985 - RNA, 15 nt, Human
uauuuugaugcagca

SEQ ID NO: 2782986 - RNA, 17 nt, Human
uauuuugaugcagcauu

SEQ ID NO: 2782987 - RNA, 19 nt, Human
uauuuugaugcagcauuug

SEQ ID NO: 2782988 - RNA, 23 nt, Human
uauuuugaugcagcauuugauaa

SEQ ID NO: 2782989 - RNA, 13 nt, Human
uauuuugccauuu

SEQ ID NO: 2782990 - RNA, 16 nt, Human
uauuuugccauuuagc

SEQ ID NO: 2782991 - RNA, 14 nt, Human
uauuuugcacaguu

SEQ ID NO: 2782992 - RNA, 13 nt, Human
uauuuugugugac

SEQ ID NO: 2782993 - RNA, 15 nt, Human
uauuuugugugacca

SEQ ID NO: 2782994 - RNA, 17 nt, Human
uauuuugugugaccaac

SEQ ID NO: 2782995 - RNA, 21 nt, Human
uauuuugugugaccaacugug

SEQ ID NO: 2782996 - RNA, 22 nt, Human
uauuuugugugaccaacugugu

SEQ ID NO: 2782997 - RNA, 23 nt, Human
uauuuugugugaccaacuguguu

SEQ ID NO: 2782998 - RNA, 17 nt, Human
uauuuugugcucauuua

SEQ ID NO: 2782999 - RNA, 17 nt, Human
uauuuuguggaggcagu

SEQ ID NO: 2783000 - RNA, 21 nt, Human
uauuuuguggaggcaguguca

SEQ ID NO: 2783001 - RNA, 23 nt, Human
uauuuuguggaggcagugucauu

SEQ ID NO: 2783002 - RNA, 19 nt, Human
uauuuuguauuauugcugu

SEQ ID NO: 2783003 - RNA, 20 nt, Human
uauuuuguauuauugcuguu

SEQ ID NO: 2783004 - RNA, 16 nt, Human
uauuuuguauuguggu

SEQ ID NO: 2783005 - RNA, 17 nt, Human
uauuuuguauuguggua

SEQ ID NO: 2783006 - RNA, 21 nt, Human
uauuuuguaaacucaaaauau

SEQ ID NO: 2783007 - RNA, 15 nt, Human
uauuuuguauauauc

SEQ ID NO: 2783008 - RNA, 20 nt, Human
uauuuuguaaacucaaaaua

SEQ ID NO: 2783009 - RNA, 13 nt, Human
uauuuuguaaacu

SEQ ID NO: 2783010 - RNA, 11 nt, Human
uauuuuucaua

SEQ ID NO: 2783011 - RNA, 13 nt, Human
uauuuuucauauu

SEQ ID NO: 2783012 - RNA, 14 nt, Human
uauuuuucauauug

SEQ ID NO: 2783013 - RNA, 13 nt, Human
uauuuuucagaga

SEQ ID NO: 2783014 - RNA, 21 nt, Human
uauuuuucagagauuuauaua

SEQ ID NO: 2783015 - RNA, 14 nt, Human
uauuuuucaguucc

SEQ ID NO: 2783016 - RNA, 17 nt, Human
uauuuuucaguuccaag

SEQ ID NO: 2783017 - RNA, 14 nt, Human
uauuuuucaaggaa

SEQ ID NO: 2783018 - RNA, 15 nt, Human
uauuuuucaaggaag

SEQ ID NO: 2783019 - RNA, 23 nt, Human
uauuuuuaaaaaaugaaauccuu

SEQ ID NO: 2783020 - RNA, 15 nt, Human
uauuuuuaaaaagaa

SEQ ID NO: 2783021 - RNA, 19 nt, Human
uauuuuuaaaaagaaaucu

SEQ ID NO: 2783022 - RNA, 13 nt, Human
uauuuuuaaaaga

SEQ ID NO: 2783023 - RNA, 17 nt, Human
uauuuuuaaaagaucuu

SEQ ID NO: 2783024 - RNA, 13 nt, Human
uauuuuuaaagau

SEQ ID NO: 2783025 - RNA, 15 nt, Human
uauuuuuaaagauag

SEQ ID NO: 2783026 - RNA, 17 nt, Human
uauuuuuguagagccag

SEQ ID NO: 2783027 - RNA, 17 nt, Human
uauuuuguuucuuuuaa

SEQ ID NO: 2783028 - RNA, 12 nt, Human
uauuuuuguaaa

SEQ ID NO: 2783029 - RNA, 13 nt, Human
uauuuuuguaaac

SEQ ID NO: 2783030 - RNA, 13 nt, Human
uauuuuucuaaac

SEQ ID NO: 2783031 - RNA, 13 nt, Human
uauuuuugcccug

SEQ ID NO: 2783032 - RNA, 15 nt, Human
uauuuuucauauugu

SEQ ID NO: 2783033 - RNA, 19 nt, Human
uauuuuucauauugugcca

SEQ ID NO: 2783034 - RNA, 13 nt, Human
ucaaaaguuccaa

SEQ ID NO: 2783035 - RNA, 14 nt, Human
ucaaaaguuccaag

SEQ ID NO: 2783036 - RNA, 21 nt, Human
ucaaaaguuccaagagucuaa

SEQ ID NO: 2783037 - RNA, 15 nt, Human
ucaaaaguuccaaga

SEQ ID NO: 2783038 - RNA, 17 nt, Human
ucaaaaguuccaagagu

SEQ ID NO: 2783039 - RNA, 11 nt, Human
ucaaaaggaac

SEQ ID NO: 2783040 - RNA, 21 nt, Human
ucaaaaggaaccaggagguuu

SEQ ID NO: 2783041 - RNA, 17 nt, Human
ucaaaaguaaugccucu

SEQ ID NO: 2783042 - RNA, 16 nt, Human
ucaaacagaauuuuaa

SEQ ID NO: 2783043 - RNA, 12 nt, Human
ucaaagaugcug

SEQ ID NO: 2783044 - RNA, 23 nt, Human
ucaaagcaaaugucuuccuggau

SEQ ID NO: 2783045 - RNA, 15 nt, Human
ucaaagcaaaugucu

SEQ ID NO: 2783046 - RNA, 19 nt, Human
ucaaagaugcugugagucu

SEQ ID NO: 2783047 - RNA, 17 nt, Human
ucaaaguucugcuuucu

SEQ ID NO: 2783048 - RNA, 19 nt, Human
ucaaaguaaaacuugcugc

SEQ ID NO: 2783049 - RNA, 13 nt, Human
ucaaaguauuugu

SEQ ID NO: 2783050 - RNA, 13 nt, Human
ucaaagucaaaaa

SEQ ID NO: 2783051 - RNA, 14 nt, Human
ucaaaguaaaacuu

SEQ ID NO: 2783052 - RNA, 21 nt, Human
ucaaagguucuagguuucaaa

SEQ ID NO: 2783053 - RNA, 23 nt, Human
ucaaagguucuagguuucaaaga

SEQ ID NO: 2783054 - RNA, 12 nt, Human
ucaaagguucua

SEQ ID NO: 2783055 - RNA, 16 nt, Human
ucaaagguucuagguu

SEQ ID NO: 2783056 - RNA, 20 nt, Human
ucaaagguucuagguuucaa

SEQ ID NO: 2783057 - RNA, 15 nt, Human
acaugaaacagaaac

SEQ ID NO: 2783058 - RNA, 18 nt, Human
acaugaaaccuacacacu

SEQ ID NO: 2783059 - RNA, 20 nt, Human
acaugaaaccuacacacugu

SEQ ID NO: 2783060 - RNA, 23 nt, Human
acaugaaaccuacacacugucau

SEQ ID NO: 2783061 - RNA, 13 nt, Human
acaugaaacagaa

SEQ ID NO: 2783062 - RNA, 14 nt, Human
acaugaaaauuuua

SEQ ID NO: 2783063 - RNA, 15 nt, Human
acaugaaaauuuuaa

SEQ ID NO: 2783064 - RNA, 16 nt, Human
acaugaaaauuuuaaa

SEQ ID NO: 2783065 - RNA, 18 nt, Human
acaugaaaauuuuaaaaa

SEQ ID NO: 2783066 - RNA, 23 nt, Human
acaugaaaauuuuaaaaauacau

SEQ ID NO: 2783067 - RNA, 21 nt, Human
acaugaaaguagcagugugaa

SEQ ID NO: 2783068 - RNA, 12 nt, Human
acaugaaaugau

SEQ ID NO: 2783069 - RNA, 13 nt, Human
acaugaaaugaua

SEQ ID NO: 2783070 - RNA, 17 nt, Human
acaugaaauuuuuguaa

SEQ ID NO: 2783071 - RNA, 18 nt, Human
acaugaaauuuuuguaaa

SEQ ID NO: 2783072 - RNA, 19 nt, Human
acaugaaauuuuuguaaau

SEQ ID NO: 2783073 - RNA, 19 nt, Human
acaugaacacccuuagaaa

SEQ ID NO: 2783074 - RNA, 15 nt, Human
acaugagaacaaaca

SEQ ID NO: 2783075 - RNA, 13 nt, Human
acaugacacugac

SEQ ID NO: 2783076 - RNA, 14 nt, Human
acaugacacugacc

SEQ ID NO: 2783077 - RNA, 15 nt, Human
acaugacacugaccu

SEQ ID NO: 2783078 - RNA, 16 nt, Human
acaugacacugaccuu

SEQ ID NO: 2783079 - RNA, 18 nt, Human
acaugacauuuaccagca

SEQ ID NO: 2783080 - RNA, 15 nt, Human
acaugacacccguga

SEQ ID NO: 2783081 - RNA, 11 nt, Human
acaugacacug

SEQ ID NO: 2783082 - RNA, 12 nt, Human
acaugacacuga

SEQ ID NO: 2783083 - RNA, 13 nt, Human
acaugaagaaaua

SEQ ID NO: 2783084 - RNA, 22 nt, Human
acaugucuuguacauguguagc

SEQ ID NO: 2783085 - RNA, 16 nt, Human
acaugucuuguacaug

SEQ ID NO: 2783086 - RNA, 19 nt, Human
acaugucuuguacaugugu

SEQ ID NO: 2783087 - RNA, 13 nt, Human
acaugucuuguac

SEQ ID NO: 2783088 - RNA, 14 nt, Human
acaugucuuguaca

SEQ ID NO: 2783089 - RNA, 13 nt, Human
acaugucuuccau

SEQ ID NO: 2783090 - RNA, 20 nt, Human
acaugucuuccauguaucuu

SEQ ID NO: 2783091 - RNA, 19 nt, Human
acauuacucugccucugua

SEQ ID NO: 2783092 - RNA, 16 nt, Human
acauuaccuuacugug

SEQ ID NO: 2783093 - RNA, 19 nt, Human
acauuaccuuacuguggag

SEQ ID NO: 2783094 - RNA, 20 nt, Human
acauuagaauaaaagguagu

SEQ ID NO: 2783095 - RNA, 15 nt, Human
acauuauagauuuuc

SEQ ID NO: 2783096 - RNA, 15 nt, Human
acauuaccuuacugu

SEQ ID NO: 2783097 - RNA, 18 nt, Human
acauuagaacacugcauu

SEQ ID NO: 2783098 - RNA, 11 nt, Human
acauuagaacu

SEQ ID NO: 2783099 - RNA, 12 nt, Human
acauuagaacuu

SEQ ID NO: 2783100 - RNA, 13 nt, Human
acauuagaacuuc

SEQ ID NO: 2783101 - RNA, 14 nt, Human
acauuagaacuucu

SEQ ID NO: 2783102 - RNA, 22 nt, Human
acauuagaacuucuccguccuc

SEQ ID NO: 2783103 - RNA, 21 nt, Human
acauuaaucaaucaucugugu

SEQ ID NO: 2783104 - RNA, 17 nt, Human
acauuaauggucuaaaa

SEQ ID NO: 2783105 - RNA, 20 nt, Human
acauuaauggucuaaaaaua

SEQ ID NO: 2783106 - RNA, 19 nt, Human
acauggugcuacgccugca

SEQ ID NO: 2783107 - RNA, 23 nt, Human
acauggugcuacgccugcaugua

SEQ ID NO: 2783108 - RNA, 21 nt, Human
acaugguggcaugcaccugca

SEQ ID NO: 2783109 - RNA, 23 nt, Human
acauggugucuggauucccagga

SEQ ID NO: 2783110 - RNA, 17 nt, Human
acaugguuugacucccg

SEQ ID NO: 2783111 - RNA, 15 nt, Human
acauguauuauuuca

SEQ ID NO: 2783112 - RNA, 13 nt, Human
acauguauuuaug

SEQ ID NO: 2783113 - RNA, 14 nt, Human
acauguauuuaugu

SEQ ID NO: 2783114 - RNA, 15 nt, Human
acauguauuuaugua

SEQ ID NO: 2783115 - RNA, 18 nt, Human
acauguauuuauguaaug

SEQ ID NO: 2783116 - RNA, 15 nt, Human
acauggacucagaga

SEQ ID NO: 2783117 - RNA, 14 nt, Human
acaugaggaacugu

SEQ ID NO: 2783118 - RNA, 20 nt, Human
acaugagauguguggacugu

SEQ ID NO: 2783119 - RNA, 18 nt, Human
acaugagauguguggacu

SEQ ID NO: 2783120 - RNA, 23 nt, Human
acaugagauguguggacuguggc

SEQ ID NO: 2783121 - RNA, 14 nt, Human
acaugagauuuaua

SEQ ID NO: 2783122 - RNA, 21 nt, Human
acaugaggaacuguagaugau

SEQ ID NO: 2783123 - RNA, 18 nt, Human
acaugaggaacuguagau

SEQ ID NO: 2783124 - RNA, 17 nt, Human
acaugaggaacuguaga

SEQ ID NO: 2783125 - RNA, 22 nt, Human
acaugaggaacuguagaugaug

SEQ ID NO: 2783126 - RNA, 21 nt, Human
acaugaggacaugauggagcg

SEQ ID NO: 2783127 - RNA, 14 nt, Human
acauggagguucua

SEQ ID NO: 2783128 - RNA, 15 nt, Human
acauggagguucuaa

SEQ ID NO: 2783129 - RNA, 16 nt, Human
acauggagguucuaag

SEQ ID NO: 2783130 - RNA, 17 nt, Human
acauggagguucuaagg

SEQ ID NO: 2783131 - RNA, 18 nt, Human
acauggagguucuaaggc

SEQ ID NO: 2783132 - RNA, 19 nt, Human
acauggagguucuaaggcc

SEQ ID NO: 2783133 - RNA, 15 nt, Human
acauggacagaauuu

SEQ ID NO: 2783134 - RNA, 20 nt, Human
acauggccuaugcacauaug

SEQ ID NO: 2783135 - RNA, 17 nt, Human
acauggccuaugcacau

SEQ ID NO: 2783136 - RNA, 18 nt, Human
acauggccuaugcacaua

SEQ ID NO: 2783137 - RNA, 19 nt, Human
acauggcucuggacucuaa

SEQ ID NO: 2783138 - RNA, 20 nt, Human
acauggcucuggacucuaaa

SEQ ID NO: 2783139 - RNA, 22 nt, Human
acauggcucuggacucuaaaga

SEQ ID NO: 2783140 - RNA, 23 nt, Human
acauggcucuggacucuaaagac

SEQ ID NO: 2783141 - RNA, 15 nt, Human
acauggccaguguga

SEQ ID NO: 2783142 - RNA, 14 nt, Human
acauggccagugug

SEQ ID NO: 2783143 - RNA, 21 nt, Human
ucagaugcccagagggcccag

SEQ ID NO: 2783144 - RNA, 22 nt, Human
ucagaugcccagagggcccagg

SEQ ID NO: 2783145 - RNA, 12 nt, Human
ucagaugcucaa

SEQ ID NO: 2783146 - RNA, 13 nt, Human
ucagaugcucaaa

SEQ ID NO: 2783147 - RNA, 21 nt, Human
ucagaugcugugcaaauguua

SEQ ID NO: 2783148 - RNA, 14 nt, Human
ucagaugcuccaag

SEQ ID NO: 2783149 - RNA, 15 nt, Human
ucagaugcuccaaga

SEQ ID NO: 2783150 - RNA, 16 nt, Human
ucagaugcuccaagau

SEQ ID NO: 2783151 - RNA, 18 nt, Human
ucagaugcuccaagauuc

SEQ ID NO: 2783152 - RNA, 19 nt, Human
ucagaugcuccaagauucu

SEQ ID NO: 2783153 - RNA, 20 nt, Human
ucagaugcuccaagauucua

SEQ ID NO: 2783154 - RNA, 22 nt, Human
ucagaugcuccaagauucuaga

SEQ ID NO: 2783155 - RNA, 18 nt, Human
ucagagccccuacagcau

SEQ ID NO: 2783156 - RNA, 20 nt, Human
ucagagccccuacagcauug

SEQ ID NO: 2783157 - RNA, 21 nt, Human
ucagagaucguguauugagau

SEQ ID NO: 2783158 - RNA, 17 nt, Human
ucagagaugugcaccca

SEQ ID NO: 2783159 - RNA, 17 nt, Human
ucagagauuuauauaaa

SEQ ID NO: 2783160 - RNA, 18 nt, Human
ucagagauuuauauaaau

SEQ ID NO: 2783161 - RNA, 19 nt, Human
ucagagauuuauauaaaug

SEQ ID NO: 2783162 - RNA, 21 nt, Human
ucagagccaccccuaaagaga

SEQ ID NO: 2783163 - RNA, 13 nt, Human
ucagagcaggacc

SEQ ID NO: 2783164 - RNA, 14 nt, Human
ucagagcaggaccu

SEQ ID NO: 2783165 - RNA, 18 nt, Human
ucagagcaggaccucccu

SEQ ID NO: 2783166 - RNA, 21 nt, Human
ucagagcaggaccucccuucc

SEQ ID NO: 2783167 - RNA, 12 nt, Human
ucagagagcagc

SEQ ID NO: 2783168 - RNA, 22 nt, Human
ucagagagcgagcgcuacccac

SEQ ID NO: 2783169 - RNA, 15 nt, Human
ucagagacagcugau

SEQ ID NO: 2783170 - RNA, 22 nt, Human
ucagagacaaaauauuucccau

SEQ ID NO: 2783171 - RNA, 21 nt, Human
ucagagacaaaauauuuccca

SEQ ID NO: 2783172 - RNA, 17 nt, Human
ucagagaccugaagugu

SEQ ID NO: 2783173 - RNA, 16 nt, Human
ucagagaccaggcccu

SEQ ID NO: 2783174 - RNA, 18 nt, Human
ucagagaccaggcccugg

SEQ ID NO: 2783175 - RNA, 21 nt, Human
ucagagaccaggcccuggcua

SEQ ID NO: 2783176 - RNA, 14 nt, Human
ucagagacaaaaua

SEQ ID NO: 2783177 - RNA, 23 nt, Human
ucagagaauuucuaccauuucag

SEQ ID NO: 2783178 - RNA, 13 nt, Human
ucagagaauuucu

SEQ ID NO: 2783179 - RNA, 15 nt, Human
acccagcccacuucu

SEQ ID NO: 2783180 - RNA, 14 nt, Human
acccagcaguucug

SEQ ID NO: 2783181 - RNA, 15 nt, Human
acccagcaguucugu

SEQ ID NO: 2783182 - RNA, 17 nt, Human
acccagcaguucuguua

SEQ ID NO: 2783183 - RNA, 22 nt, Human
acccacugguuccuucuuccug

SEQ ID NO: 2783184 - RNA, 13 nt, Human
ucagaauuaugau

SEQ ID NO: 2783185 - RNA, 14 nt, Human
ucagaauuaugaug

SEQ ID NO: 2783186 - RNA, 16 nt, Human
ucagaauuauuuuuaa

SEQ ID NO: 2783187 - RNA, 20 nt, Human
ucagaauuauuuuuaaaaag

SEQ ID NO: 2783188 - RNA, 23 nt, Human
ucagaauagccacauuuggaaua

SEQ ID NO: 2783189 - RNA, 22 nt, Human
ucagaauagccacauuuggaau

SEQ ID NO: 2783190 - RNA, 17 nt, Human
ucagaaucacuucugag

SEQ ID NO: 2783191 - RNA, 19 nt, Human
ucagaaucacuucugagaa

SEQ ID NO: 2783192 - RNA, 21 nt, Human
ucagaauagccacauuuggaa

SEQ ID NO: 2783193 - RNA, 17 nt, Human
ucagaaguuuggcaaua

SEQ ID NO: 2783194 - RNA, 15 nt, Human
ucagaauaaggcagg

SEQ ID NO: 2783195 - RNA, 20 nt, Human
ucagaauaaggcaggcauug

SEQ ID NO: 2783196 - RNA, 21 nt, Human
ucagaauaaggcaggcauuga

SEQ ID NO: 2783197 - RNA, 19 nt, Human
ucagauggaaauauuuuga

SEQ ID NO: 2783198 - RNA, 19 nt, Human
ucagauucccagagcaaaa

SEQ ID NO: 2783199 - RNA, 22 nt, Human
ucagauucccagagcaaaauaa

SEQ ID NO: 2783200 - RNA, 21 nt, Human
ucagauucccagagcaaaaua

SEQ ID NO: 2783201 - RNA, 14 nt, Human
ucagccccugaucc

SEQ ID NO: 2783202 - RNA, 22 nt, Human
ucagccccugauccugugaagu

SEQ ID NO: 2783203 - RNA, 22 nt, Human
acccagccucaguccuccccuc

SEQ ID NO: 2783204 - RNA, 23 nt, Human
acccagccucaguccuccccuca

SEQ ID NO: 2783205 - RNA, 13 nt, Human
acccagcgagccc

SEQ ID NO: 2783206 - RNA, 17 nt, Human
acccagcgagcccuggu

SEQ ID NO: 2783207 - RNA, 16 nt, Human
acccagcgagcccugg

SEQ ID NO: 2783208 - RNA, 15 nt, Human
acccaggagccccga

SEQ ID NO: 2783209 - RNA, 15 nt, Human
acccagggccugcag

SEQ ID NO: 2783210 - RNA, 13 nt, Human
acccaggagcccc

SEQ ID NO: 2783211 - RNA, 15 nt, Human
acccaggacuccucc

SEQ ID NO: 2783212 - RNA, 14 nt, Human
acccaggaccaagc

SEQ ID NO: 2783213 - RNA, 13 nt, Human
accccagguuucu

SEQ ID NO: 2783214 - RNA, 24 nt, Human
accccagggccugagccuggccag

SEQ ID NO: 2783215 - RNA, 17 nt, Human
accccagggccugagcc

SEQ ID NO: 2783216 - RNA, 16 nt, Human
accccaguggccacuc

SEQ ID NO: 2783217 - RNA, 15 nt, Human
accccagggccugag

SEQ ID NO: 2783218 - RNA, 14 nt, Human
accccagggccuga

SEQ ID NO: 2783219 - RNA, 13 nt, Human
accccagggccug

SEQ ID NO: 2783220 - RNA, 11 nt, Human
accccagggcc

SEQ ID NO: 2783221 - RNA, 18 nt, Human
acccccacccccagcuca

SEQ ID NO: 2783222 - RNA, 19 nt, Human
acccccacccccagcucaa

SEQ ID NO: 2783223 - RNA, 16 nt, Human
acccccaccccacacu

SEQ ID NO: 2783224 - RNA, 15 nt, Human
acccccaccccacac

SEQ ID NO: 2783225 - RNA, 17 nt, Human
accccaguggccacuca

SEQ ID NO: 2783226 - RNA, 19 nt, Human
accccaguggccacucagc

SEQ ID NO: 2783227 - RNA, 23 nt, Human
accccaguggccacucagcuucc

SEQ ID NO: 2783228 - RNA, 17 nt, Human
acccccaccccacacuu

SEQ ID NO: 2783229 - RNA, 14 nt, Human
acccccacccccag

SEQ ID NO: 2783230 - RNA, 15 nt, Human
acccccacccccagc

SEQ ID NO: 2783231 - RNA, 14 nt, Human
acccagguccccuc

SEQ ID NO: 2783232 - RNA, 21 nt, Human
acccaggugauguuaguguuu

SEQ ID NO: 2783233 - RNA, 15 nt, Human
acccaggguggagug

SEQ ID NO: 2783234 - RNA, 19 nt, Human
acccaggguggagugcagu

SEQ ID NO: 2783235 - RNA, 20 nt, Human
acccaggguggagugcagug

SEQ ID NO: 2783236 - RNA, 21 nt, Human
acccaggguggagugcagugg

SEQ ID NO: 2783237 - RNA, 17 nt, Human
acccagggccugcagga

SEQ ID NO: 2783238 - RNA, 15 nt, Human
acccagggcucugcc

SEQ ID NO: 2783239 - RNA, 16 nt, Human
acccagggcucugccc

SEQ ID NO: 2783240 - RNA, 17 nt, Human
acccagggcucugcccc

SEQ ID NO: 2783241 - RNA, 18 nt, Human
acccagggcucugcccca

SEQ ID NO: 2783242 - RNA, 19 nt, Human
acccagggcucugccccag

SEQ ID NO: 2783243 - RNA, 20 nt, Human
acccagggcucugccccagu

SEQ ID NO: 2783244 - RNA, 21 nt, Human
acccagggcucugccccaguc

SEQ ID NO: 2783245 - RNA, 23 nt, Human
accccagcucccuaggagaccaa

SEQ ID NO: 2783246 - RNA, 17 nt, Human
accccagcucccuagga

SEQ ID NO: 2783247 - RNA, 14 nt, Human
accccagcucccua

SEQ ID NO: 2783248 - RNA, 14 nt, Human
acccaaagcaugga

SEQ ID NO: 2783249 - RNA, 16 nt, Human
acccaaagcauggacu

SEQ ID NO: 2783250 - RNA, 17 nt, Human
acccaaagcauggacua

SEQ ID NO: 2783251 - RNA, 18 nt, Human
acccaaagagguauuuau

SEQ ID NO: 2783252 - RNA, 20 nt, Human
acccacugcuuuuggucugu

SEQ ID NO: 2783253 - RNA, 17 nt, Human
acccacuggacucaccu

SEQ ID NO: 2783254 - RNA, 14 nt, Human
acccacuggacuca

SEQ ID NO: 2783255 - RNA, 21 nt, Human
acccacuggacucaccucccc

SEQ ID NO: 2783256 - RNA, 17 nt, Human
acccacuucucaucaca

SEQ ID NO: 2783257 - RNA, 18 nt, Human
acccacuucucaucacac

SEQ ID NO: 2783258 - RNA, 19 nt, Human
acccacuucucaucacaca

SEQ ID NO: 2783259 - RNA, 20 nt, Human
acccacuucucaucacacac

SEQ ID NO: 2783260 - RNA, 21 nt, Human
acccacuucucaucacacaca

SEQ ID NO: 2783261 - RNA, 22 nt, Human
acccacuucucaucacacacau

SEQ ID NO: 2783262 - RNA, 23 nt, Human
acccacuucucaucacacacaug

SEQ ID NO: 2783263 - RNA, 22 nt, Human
acccagaugggggaaagcacag

SEQ ID NO: 2783264 - RNA, 18 nt, Human
accauguuggccaggcug

SEQ ID NO: 2783265 - RNA, 23 nt, Human
accauguugguugcacuuuguag

SEQ ID NO: 2783266 - RNA, 21 nt, Human
accauuuugggguacccacug

SEQ ID NO: 2783267 - RNA, 16 nt, Human
accauguauuuuguaa

SEQ ID NO: 2783268 - RNA, 22 nt, Human
accaugucuaugauucguguaa

SEQ ID NO: 2783269 - RNA, 15 nt, Human
accaugugucacuug

SEQ ID NO: 2783270 - RNA, 16 nt, Human
accaugugucacuugu

SEQ ID NO: 2783271 - RNA, 19 nt, Human
accaugugucacuugugcu

SEQ ID NO: 2783272 - RNA, 21 nt, Human
accaugugucacuugugcuuu

SEQ ID NO: 2783273 - RNA, 15 nt, Human
accauggccagccaa

SEQ ID NO: 2783274 - RNA, 16 nt, Human
accauggagacaagaa

SEQ ID NO: 2783275 - RNA, 16 nt, Human
accauggacuuuauaa

SEQ ID NO: 2783276 - RNA, 15 nt, Human
accauggacuuuaua

SEQ ID NO: 2783277 - RNA, 14 nt, Human
accauggacuuuau

SEQ ID NO: 2783278 - RNA, 18 nt, Human
ucacuuaaaaugugcagu

SEQ ID NO: 2783279 - RNA, 22 nt, Human
ucacuugaacccgggaggcaga

SEQ ID NO: 2783280 - RNA, 17 nt, Human
ucacuucugagaacuca

SEQ ID NO: 2783281 - RNA, 20 nt, Human
accaugcccggcuaauuuuu

SEQ ID NO: 2783282 - RNA, 16 nt, Human
accaugcaaaugcuau

SEQ ID NO: 2783283 - RNA, 13 nt, Human
accaggugccuuu

SEQ ID NO: 2783284 - RNA, 17 nt, Human
accaggugccuuucaaa

SEQ ID NO: 2783285 - RNA, 22 nt, Human
accaggugccuuucaaauuuag

SEQ ID NO: 2783286 - RNA, 23 nt, Human
accaggugccuuucaaauuuaga

SEQ ID NO: 2783287 - RNA, 11 nt, Human
ucacucuuuau

SEQ ID NO: 2783288 - RNA, 14 nt, Human
ucacucuuuauagu

SEQ ID NO: 2783289 - RNA, 19 nt, Human
ucacucuuuauagugcaca

SEQ ID NO: 2783290 - RNA, 21 nt, Human
ucacucuuuauagugcacaaa

SEQ ID NO: 2783291 - RNA, 21 nt, Human
ucacugaaaccuuuaagaaaa

SEQ ID NO: 2783292 - RNA, 21 nt, Human
ucacaugaucuguuuuucacc

SEQ ID NO: 2783293 - RNA, 12 nt, Human
ucacugaagacg

SEQ ID NO: 2783294 - RNA, 14 nt, Human
ucacugaagacgcc

SEQ ID NO: 2783295 - RNA, 11 nt, Human
ucacugaagcc

SEQ ID NO: 2783296 - RNA, 14 nt, Human
ucacugaagccugc

SEQ ID NO: 2783297 - RNA, 15 nt, Human
ucacucauugcugag

SEQ ID NO: 2783298 - RNA, 17 nt, Human
ucacucauugcugagcc

SEQ ID NO: 2783299 - RNA, 18 nt, Human
ucacucauugcugagccu

SEQ ID NO: 2783300 - RNA, 19 nt, Human
ucacucauugcugagccuc

SEQ ID NO: 2783301 - RNA, 20 nt, Human
ucacucauugcugagccucu

SEQ ID NO: 2783302 - RNA, 22 nt, Human
ucacucauugcugagccucugc

SEQ ID NO: 2783303 - RNA, 21 nt, Human
ucacuauguugcccaggcagg

SEQ ID NO: 2783304 - RNA, 20 nt, Human
ucacuauguugcccaggcag

SEQ ID NO: 2783305 - RNA, 22 nt, Human
ucaccagccccagugcccacag

SEQ ID NO: 2783306 - RNA, 16 nt, Human
ucacucacugucaaug

SEQ ID NO: 2783307 - RNA, 14 nt, Human
ucacucaagcacug

SEQ ID NO: 2783308 - RNA, 15 nt, Human
ucacucaagcacuga

SEQ ID NO: 2783309 - RNA, 17 nt, Human
ucacucaagcacugaua

SEQ ID NO: 2783310 - RNA, 13 nt, Human
ucacucauugcug

SEQ ID NO: 2783311 - RNA, 17 nt, Human
ucacucauacaucuggc

SEQ ID NO: 2783312 - RNA, 13 nt, Human
ucacucaggcugg

SEQ ID NO: 2783313 - RNA, 14 nt, Human
ucacucaggcugga

SEQ ID NO: 2783314 - RNA, 21 nt, Human
ucacucaggcuggaguacagu

SEQ ID NO: 2783315 - RNA, 15 nt, Human
ucacuguugcccagg

SEQ ID NO: 2783316 - RNA, 14 nt, Human
ucacuguuuuuaga

SEQ ID NO: 2783317 - RNA, 17 nt, Human
ucacuguuuuuagacac

SEQ ID NO: 2783318 - RNA, 21 nt, Human
ucacuguuuuuagacaccuuc

SEQ ID NO: 2783319 - RNA, 22 nt, Human
ucacuguuuuuagacaccuuca

SEQ ID NO: 2783320 - RNA, 19 nt, Human
ucacuguugaaaauuauuu

SEQ ID NO: 2783321 - RNA, 20 nt, Human
ucacuguugaaaauuauuuu

SEQ ID NO: 2783322 - RNA, 20 nt, Human
ucacuuaacauuccuaaaau

SEQ ID NO: 2783323 - RNA, 22 nt, Human
ucacuuaacauuccuaaaaugc

SEQ ID NO: 2783324 - RNA, 13 nt, Human
ucacuuacuauug

SEQ ID NO: 2783325 - RNA, 18 nt, Human
ucacuuacuauuguugcu

SEQ ID NO: 2783326 - RNA, 13 nt, Human
ucacuuauaccug

SEQ ID NO: 2783327 - RNA, 13 nt, Human
ucacuuagccaug

SEQ ID NO: 2783328 - RNA, 22 nt, Human
ucacuucucuuaaacuugugaa

SEQ ID NO: 2783329 - RNA, 20 nt, Human
ucacuucuaggguaugggaa

SEQ ID NO: 2783330 - RNA, 23 nt, Human
ucacuucgcgugcccucgcugcu

SEQ ID NO: 2783331 - RNA, 18 nt, Human
ucacuucggccagagcug

SEQ ID NO: 2783332 - RNA, 19 nt, Human
ucacuucggccagagcuga

SEQ ID NO: 2783333 - RNA, 23 nt, Human
ucacuucgggcuguguaaacaca

SEQ ID NO: 2783334 - RNA, 17 nt, Human
ucacuuccuacaagagc

SEQ ID NO: 2783335 - RNA, 22 nt, Human
ucacuucgcgugcccucgcugc

SEQ ID NO: 2783336 - RNA, 14 nt, Human
ucacuguugcccag

SEQ ID NO: 2783337 - RNA, 22 nt, Human
ucacuguucuauucaucucaag

SEQ ID NO: 2783338 - RNA, 15 nt, Human
ucacuguugaaaauu

SEQ ID NO: 2783339 - RNA, 18 nt, Human
ucacuguugaaaauuauu

SEQ ID NO: 2783340 - RNA, 17 nt, Human
ucacugcaacuucugcc

SEQ ID NO: 2783341 - RNA, 18 nt, Human
ucacugcaacuucugccu

SEQ ID NO: 2783342 - RNA, 23 nt, Human
ucacugaacaaacuaaaggugca

SEQ ID NO: 2783343 - RNA, 16 nt, Human
ucacugcaaccuucac

SEQ ID NO: 2783344 - RNA, 18 nt, Human
ucacugcaaccuccgccu

SEQ ID NO: 2783345 - RNA, 21 nt, Human
ucacugcaaccuucgccaccu

SEQ ID NO: 2783346 - RNA, 19 nt, Human
ucacugcaaccucugccuc

SEQ ID NO: 2783347 - RNA, 14 nt, Human
ucacugauguacaa

SEQ ID NO: 2783348 - RNA, 17 nt, Human
ucacugauguacaauua

SEQ ID NO: 2783349 - RNA, 21 nt, Human
ucacugauguacaauuaaaaa

SEQ ID NO: 2783350 - RNA, 16 nt, Human
ucacugaggccugaga

SEQ ID NO: 2783351 - RNA, 22 nt, Human
ucacugaggccugagacccagg

SEQ ID NO: 2783352 - RNA, 23 nt, Human
ucacugaggccugagacccagga

SEQ ID NO: 2783353 - RNA, 20 nt, Human
ucacugauauuuuuuauaca

SEQ ID NO: 2783354 - RNA, 13 nt, Human
ucaguaggcuaau

SEQ ID NO: 2783355 - RNA, 18 nt, Human
ucaguaggcuaaugucaa

SEQ ID NO: 2783356 - RNA, 17 nt, Human
ucaguauguuuuacacu

SEQ ID NO: 2783357 - RNA, 18 nt, Human
ucaguauguuuuacacug

SEQ ID NO: 2783358 - RNA, 19 nt, Human
ucaguauguuuuacacugu

SEQ ID NO: 2783359 - RNA, 20 nt, Human
ucaguauguuuuacacugua

SEQ ID NO: 2783360 - RNA, 17 nt, Human
ucaguauuauguaguug

SEQ ID NO: 2783361 - RNA, 16 nt, Human
ucaguauuaauacuaa

SEQ ID NO: 2783362 - RNA, 21 nt, Human
ucaguauuaauacuaaaauau

SEQ ID NO: 2783363 - RNA, 23 nt, Human
ucaguauuaauacuaaaauaugu

SEQ ID NO: 2783364 - RNA, 13 nt, Human
ucaguggcagcug

SEQ ID NO: 2783365 - RNA, 15 nt, Human
ucagugcuguggccu

SEQ ID NO: 2783366 - RNA, 14 nt, Human
ucagugcuguggcc

SEQ ID NO: 2783367 - RNA, 12 nt, Human
ucagugcugugg

SEQ ID NO: 2783368 - RNA, 16 nt, Human
ucaguggcagcugcuu

SEQ ID NO: 2783369 - RNA, 19 nt, Human
ucagugcuguggccugggc

SEQ ID NO: 2783370 - RNA, 17 nt, Human
ucagugcuguggccugg

SEQ ID NO: 2783371 - RNA, 15 nt, Human
ucaguggcagcugcu

SEQ ID NO: 2783372 - RNA, 14 nt, Human
ucaguggcagcugc

SEQ ID NO: 2783373 - RNA, 22 nt, Human
ucagugcuguggccugggcaag

SEQ ID NO: 2783374 - RNA, 19 nt, Human
ucaguuguuuguuuuugcu

SEQ ID NO: 2783375 - RNA, 16 nt, Human
ucaguuuauguuguac

SEQ ID NO: 2783376 - RNA, 21 nt, Human
ucaguuuauguuguacaaugu

SEQ ID NO: 2783377 - RNA, 14 nt, Human
ucaguuuguauaga

SEQ ID NO: 2783378 - RNA, 15 nt, Human
ucaguuugugugucu

SEQ ID NO: 2783379 - RNA, 16 nt, Human
ucaguuugugugucuu

SEQ ID NO: 2783380 - RNA, 17 nt, Human
ucaguuugugugucuua

SEQ ID NO: 2783381 - RNA, 21 nt, Human
ucauaaaauaaaguauauaua

SEQ ID NO: 2783382 - RNA, 23 nt, Human
ucauaaaaucaaaacaagugaaa

SEQ ID NO: 2783383 - RNA, 16 nt, Human
ucauaaaauaaaguau

SEQ ID NO: 2783384 - RNA, 12 nt, Human
ucaguuucuaca

SEQ ID NO: 2783385 - RNA, 22 nt, Human
ucaguuucuucugcgccucagg

SEQ ID NO: 2783386 - RNA, 12 nt, Human
ucaguuugauca

SEQ ID NO: 2783387 - RNA, 16 nt, Human
ucaguuugaucacacu

SEQ ID NO: 2783388 - RNA, 19 nt, Human
ucaguuucaauucagugcu

SEQ ID NO: 2783389 - RNA, 20 nt, Human
ucaguuuccaauuauuugac

SEQ ID NO: 2783390 - RNA, 24 nt, Human
ucauaaagaggcguugcuuucacu

SEQ ID NO: 2783391 - RNA, 18 nt, Human
ucaguuuguccuguagag

SEQ ID NO: 2783392 - RNA, 19 nt, Human
ucauaaacagaugaauaaa

SEQ ID NO: 2783393 - RNA, 19 nt, Human
ucauaaaguuagaaucuau

SEQ ID NO: 2783394 - RNA, 20 nt, Human
ucauaaaguuagaaucuauu

SEQ ID NO: 2783395 - RNA, 23 nt, Human
ucauaaaguuagaaucuauuuuc

SEQ ID NO: 2783396 - RNA, 15 nt, Human
ucauaaaguacuuga

SEQ ID NO: 2783397 - RNA, 12 nt, Human
ucauaaaugaag

SEQ ID NO: 2783398 - RNA, 11 nt, Human
ucauaacuuau

SEQ ID NO: 2783399 - RNA, 15 nt, Human
ucauaacuuauugcu

SEQ ID NO: 2783400 - RNA, 18 nt, Human
ucauaacuuauugcugau

SEQ ID NO: 2783401 - RNA, 20 nt, Human
ucauaacuuauugcugauuu

SEQ ID NO: 2783402 - RNA, 21 nt, Human
ucauaacuuauugcugauuuu

SEQ ID NO: 2783403 - RNA, 17 nt, Human
ucauaacuuccuguacu

SEQ ID NO: 2783404 - RNA, 14 nt, Human
ucauaaggcuucaa

SEQ ID NO: 2783405 - RNA, 15 nt, Human
ucauaaggcuucaaa

SEQ ID NO: 2783406 - RNA, 18 nt, Human
ucaggugucccugcacuu

SEQ ID NO: 2783407 - RNA, 17 nt, Human
ucaggugucccugcacu

SEQ ID NO: 2783408 - RNA, 15 nt, Human
ucaggugucccugca

SEQ ID NO: 2783409 - RNA, 17 nt, Human
acccuuggccugucuca

SEQ ID NO: 2783410 - RNA, 13 nt, Human
acccuuggccugu

SEQ ID NO: 2783411 - RNA, 17 nt, Human
acccuuggcucaauccu

SEQ ID NO: 2783412 - RNA, 17 nt, Human
acccuuggcuugcccac

SEQ ID NO: 2783413 - RNA, 12 nt, Human
acccuuggccug

SEQ ID NO: 2783414 - RNA, 11 nt, Human
acccuuggccu

SEQ ID NO: 2783415 - RNA, 20 nt, Human
acccuggaccaguggucuca

SEQ ID NO: 2783416 - RNA, 17 nt, Human
acccuggaccagugguc

SEQ ID NO: 2783417 - RNA, 19 nt, Human
acccugcuuuagagcuagg

SEQ ID NO: 2783418 - RNA, 14 nt, Human
acccugcugccuuc

SEQ ID NO: 2783419 - RNA, 14 nt, Human
acccuggaaaugga

SEQ ID NO: 2783420 - RNA, 23 nt, Human
acccuggaaauggacugguuuga

SEQ ID NO: 2783421 - RNA, 19 nt, Human
ucaguaauaaacuguguuu

SEQ ID NO: 2783422 - RNA, 14 nt, Human
ucaguaauauuuau

SEQ ID NO: 2783423 - RNA, 13 nt, Human
ucaguaauguuau

SEQ ID NO: 2783424 - RNA, 21 nt, Human
ucaguaagacgacaaggaaag

SEQ ID NO: 2783425 - RNA, 22 nt, Human
ucaguaagacgacaaggaaagg

SEQ ID NO: 2783426 - RNA, 17 nt, Human
ucaguaagaaaaagaag

SEQ ID NO: 2783427 - RNA, 19 nt, Human
ucaguaagaaaaagaagaa

SEQ ID NO: 2783428 - RNA, 13 nt, Human
ucaguaagacgac

SEQ ID NO: 2783429 - RNA, 16 nt, Human
ucaguacuucagcaag

SEQ ID NO: 2783430 - RNA, 17 nt, Human
ucaguacuucagcaaga

SEQ ID NO: 2783431 - RNA, 19 nt, Human
ucaguacuucagcaagaga

SEQ ID NO: 2783432 - RNA, 21 nt, Human
ucaguacuucagcaagagaga

SEQ ID NO: 2783433 - RNA, 20 nt, Human
ucaguacuugugaaacacag

SEQ ID NO: 2783434 - RNA, 22 nt, Human
ucaguacuugugaaacacagcu

SEQ ID NO: 2783435 - RNA, 23 nt, Human
ucaguacuugugaaacacagcug

SEQ ID NO: 2783436 - RNA, 24 nt, Human
ucaguacuugugaaacacagcugu

SEQ ID NO: 2783437 - RNA, 16 nt, Human
ucaguacccucucagc

SEQ ID NO: 2783438 - RNA, 17 nt, Human
ucaguacccucucagcu

SEQ ID NO: 2783439 - RNA, 19 nt, Human
ucaguacccucucagcucc

SEQ ID NO: 2783440 - RNA, 18 nt, Human
ucaguaauuugaggacaa

SEQ ID NO: 2783441 - RNA, 17 nt, Human
ucaguaauuugaggaca

SEQ ID NO: 2783442 - RNA, 15 nt, Human
ucaguaauuugagga

SEQ ID NO: 2783443 - RNA, 14 nt, Human
ucaguaauuugagg

SEQ ID NO: 2783444 - RNA, 22 nt, Human
ucaggugucccugcacuugcag

SEQ ID NO: 2783445 - RNA, 22 nt, Human
ucagguguuuuuuaugaagugc

SEQ ID NO: 2783446 - RNA, 18 nt, Human
ucagguuaucgaaauaac

SEQ ID NO: 2783447 - RNA, 18 nt, Human
ucagguucaguauuaugu

SEQ ID NO: 2783448 - RNA, 23 nt, Human
ucagguuaucgaaauaacaaugu

SEQ ID NO: 2783449 - RNA, 19 nt, Human
ucagguuaucgaaauaaca

SEQ ID NO: 2783450 - RNA, 20 nt, Human
ucagguuaucgaaauaacaa

SEQ ID NO: 2783451 - RNA, 21 nt, Human
ucagguuaucgaaauaacaau

SEQ ID NO: 2783452 - RNA, 22 nt, Human
ucaguaaauaacaggcauuugu

SEQ ID NO: 2783453 - RNA, 13 nt, Human
ucagguuuuguaa

SEQ ID NO: 2783454 - RNA, 14 nt, Human
ucagguuuuguaaa

SEQ ID NO: 2783455 - RNA, 19 nt, Human
ucagguuugucaucagaug

SEQ ID NO: 2783456 - RNA, 14 nt, Human
ucagguuguuggug

SEQ ID NO: 2783457 - RNA, 15 nt, Human
ucagguuuaacauuu

SEQ ID NO: 2783458 - RNA, 17 nt, Human
ucagguuuaacauuugc

SEQ ID NO: 2783459 - RNA, 19 nt, Human
ucagguuuaacauuugccu

SEQ ID NO: 2783460 - RNA, 23 nt, Human
ucagguuuaacauuugccuugca

SEQ ID NO: 2783461 - RNA, 22 nt, Human
ucagguugucugaagucacugc

SEQ ID NO: 2783462 - RNA, 14 nt, Human
acccugaugaaaac

SEQ ID NO: 2783463 - RNA, 14 nt, Human
acccugaggucagg

SEQ ID NO: 2783464 - RNA, 20 nt, Human
acccugaggucagggagugc

SEQ ID NO: 2783465 - RNA, 22 nt, Human
acccugaggucagggagugcug

SEQ ID NO: 2783466 - RNA, 23 nt, Human
acccugaggucagggagugcugg

SEQ ID NO: 2783467 - RNA, 16 nt, Human
acccugaguucaucca

SEQ ID NO: 2783468 - RNA, 15 nt, Human
acccugcaaggccca

SEQ ID NO: 2783469 - RNA, 16 nt, Human
acccugcaaggcccac

SEQ ID NO: 2783470 - RNA, 17 nt, Human
acccugcaaggcccaca

SEQ ID NO: 2783471 - RNA, 18 nt, Human
acccugcaaggcccacag

SEQ ID NO: 2783472 - RNA, 23 nt, Human
acccugcaaggcccacaggaggc

SEQ ID NO: 2783473 - RNA, 17 nt, Human
acccugauuucuugcuu

SEQ ID NO: 2783474 - RNA, 19 nt, Human
acccugcaaacagaacagg

SEQ ID NO: 2783475 - RNA, 23 nt, Human
acccugcaaacagaacaggguca

SEQ ID NO: 2783476 - RNA, 17 nt, Human
acccugaguuuuguuuu

SEQ ID NO: 2783477 - RNA, 22 nt, Human
acccugcgcccaguccuuccac

SEQ ID NO: 2783478 - RNA, 22 nt, Human
acccugcgaaggggcccugguc

SEQ ID NO: 2783479 - RNA, 20 nt, Human
acccugcgaaggggcccugg

SEQ ID NO: 2783480 - RNA, 19 nt, Human
acccugcgaaggggcccug

SEQ ID NO: 2783481 - RNA, 18 nt, Human
acccugcgaaggggcccu

SEQ ID NO: 2783482 - RNA, 20 nt, Human
acccucgaagcgcgccacuc

SEQ ID NO: 2783483 - RNA, 16 nt, Human
acccucgaagcgcgcc

SEQ ID NO: 2783484 - RNA, 21 nt, Human
acccucgaagcgcgccacucg

SEQ ID NO: 2783485 - RNA, 21 nt, Human
acccugaauuuggccugcacu

SEQ ID NO: 2783486 - RNA, 21 nt, Human
acccuccuuucaccacaugug

SEQ ID NO: 2783487 - RNA, 23 nt, Human
acccucccccaggaggucgaccc

SEQ ID NO: 2783488 - RNA, 23 nt, Human
acccuccccgcaccccccaagcu

SEQ ID NO: 2783489 - RNA, 13 nt, Human
ucaggccacuuga

SEQ ID NO: 2783490 - RNA, 12 nt, Human
acccccagccug

SEQ ID NO: 2783491 - RNA, 13 nt, Human
acccccagccugc

SEQ ID NO: 2783492 - RNA, 21 nt, Human
ucaggcaggaagggcaggaag

SEQ ID NO: 2783493 - RNA, 23 nt, Human
ucaggcaggcaccuagcaauucc

SEQ ID NO: 2783494 - RNA, 13 nt, Human
ucaggcaggaagg

SEQ ID NO: 2783495 - RNA, 13 nt, Human
ucaggcagcucaa

SEQ ID NO: 2783496 - RNA, 12 nt, Human
ucaggcagccag

SEQ ID NO: 2783497 - RNA, 13 nt, Human
ucaggcagccagu

SEQ ID NO: 2783498 - RNA, 20 nt, Human
ucaggcagccagugagauga

SEQ ID NO: 2783499 - RNA, 14 nt, Human
ucaggggugacaca

SEQ ID NO: 2783500 - RNA, 15 nt, Human
ucaggggugacacag

SEQ ID NO: 2783501 - RNA, 16 nt, Human
ucaggggugacacaga

SEQ ID NO: 2783502 - RNA, 17 nt, Human
ucaggggugacacagac

SEQ ID NO: 2783503 - RNA, 18 nt, Human
ucaggggugacacagacu

SEQ ID NO: 2783504 - RNA, 19 nt, Human
ucaggggugacacagacuc

SEQ ID NO: 2783505 - RNA, 20 nt, Human
ucaggggugacacagacuca

SEQ ID NO: 2783506 - RNA, 17 nt, Human
ucaggguuggccccugc

SEQ ID NO: 2783507 - RNA, 19 nt, Human
ucaggguuggccccugccc

SEQ ID NO: 2783508 - RNA, 18 nt, Human
ucaggguuggccccugcc

SEQ ID NO: 2783509 - RNA, 18 nt, Human
ucagguaaucgaccugcc

SEQ ID NO: 2783510 - RNA, 20 nt, Human
ucagguaaucgaccugccuc

SEQ ID NO: 2783511 - RNA, 19 nt, Human
ucagguaaucgaccugccu

SEQ ID NO: 2783512 - RNA, 16 nt, Human
ucagguaguacuaaga

SEQ ID NO: 2783513 - RNA, 16 nt, Human
ucagguauguugccuu

SEQ ID NO: 2783514 - RNA, 15 nt, Human
ucagguauguugccu

SEQ ID NO: 2783515 - RNA, 21 nt, Human
ucagguaaucgaccugccucg

SEQ ID NO: 2783516 - RNA, 21 nt, Human
ucuacaugaggaacuguagau

SEQ ID NO: 2783517 - RNA, 14 nt, Human
ucuacauuauugcu

SEQ ID NO: 2783518 - RNA, 15 nt, Human
ucuacauuauugcuu

SEQ ID NO: 2783519 - RNA, 16 nt, Human
ucuacauauucuuuaa

SEQ ID NO: 2783520 - RNA, 15 nt, Human
ucuacaucuucugcc

SEQ ID NO: 2783521 - RNA, 15 nt, Human
ucuacauauucuuua

SEQ ID NO: 2783522 - RNA, 23 nt, Human
ucuacauacuuucauccugacuc

SEQ ID NO: 2783523 - RNA, 16 nt, Human
ucuacaucuucugccu

SEQ ID NO: 2783524 - RNA, 17 nt, Human
ucuacaucuucugccuu

SEQ ID NO: 2783525 - RNA, 19 nt, Human
ucuacaucuuuuuucacaa

SEQ ID NO: 2783526 - RNA, 22 nt, Human
ucuacaucuuuuuucacaaauu

SEQ ID NO: 2783527 - RNA, 11 nt, Human
ucuacaugaau

SEQ ID NO: 2783528 - RNA, 13 nt, Human
ucuacaugaaugc

SEQ ID NO: 2783529 - RNA, 15 nt, Human
ucuacccguuccaaa

SEQ ID NO: 2783530 - RNA, 16 nt, Human
ucuacccguuccaaaa

SEQ ID NO: 2783531 - RNA, 20 nt, Human
ucuacaugaggaacuguaga

SEQ ID NO: 2783532 - RNA, 14 nt, Human
ucuacauuucuuag

SEQ ID NO: 2783533 - RNA, 16 nt, Human
ucuacccucccacccc

SEQ ID NO: 2783534 - RNA, 15 nt, Human
ucuacccucccaccc

SEQ ID NO: 2783535 - RNA, 18 nt, Human
ucuacccucccacccccu

SEQ ID NO: 2783536 - RNA, 15 nt, Human
ucuaccucaggcagc

SEQ ID NO: 2783537 - RNA, 19 nt, Human
ucuaagucaauccaagagu

SEQ ID NO: 2783538 - RNA, 16 nt, Human
ucuaaguauuugaaac

SEQ ID NO: 2783539 - RNA, 22 nt, Human
ucuaaguuauaagacucucaca

SEQ ID NO: 2783540 - RNA, 12 nt, Human
ucuaaguuucua

SEQ ID NO: 2783541 - RNA, 14 nt, Human
ucuaaguuauaaga

SEQ ID NO: 2783542 - RNA, 16 nt, Human
ucuaaguuauaagacu

SEQ ID NO: 2783543 - RNA, 17 nt, Human
ucuaaguuauaagacuc

SEQ ID NO: 2783544 - RNA, 20 nt, Human
ucuaaguuauaagacucuca

SEQ ID NO: 2783545 - RNA, 13 nt, Human
ucuaagauucuga

SEQ ID NO: 2783546 - RNA, 13 nt, Human
ucuaagauucuag

SEQ ID NO: 2783547 - RNA, 14 nt, Human
ucuaagauucuaga

SEQ ID NO: 2783548 - RNA, 15 nt, Human
ucuaagauucuagau

SEQ ID NO: 2783549 - RNA, 16 nt, Human
ucuaagauucuagauc

SEQ ID NO: 2783550 - RNA, 19 nt, Human
ucuaagauucuagaucaga

SEQ ID NO: 2783551 - RNA, 12 nt, Human
ucuaagauucug

SEQ ID NO: 2783552 - RNA, 19 nt, Human
ucuaagauucugauuuuag

SEQ ID NO: 2783553 - RNA, 16 nt, Human
ucuaagcaauuucuug

SEQ ID NO: 2783554 - RNA, 12 nt, Human
ucuaagauucua

SEQ ID NO: 2783555 - RNA, 13 nt, Human
ucuaagauucuaa

SEQ ID NO: 2783556 - RNA, 14 nt, Human
ucuaagauucuaaa

SEQ ID NO: 2783557 - RNA, 15 nt, Human
ucuaagauucuaaag

SEQ ID NO: 2783558 - RNA, 16 nt, Human
ucuaagauucuaaagg

SEQ ID NO: 2783559 - RNA, 17 nt, Human
ucuaagauucuaaaggu

SEQ ID NO: 2783560 - RNA, 18 nt, Human
ucuaagauucuaaagguc

SEQ ID NO: 2783561 - RNA, 19 nt, Human
ucuaagauucuaaaggucc

SEQ ID NO: 2783562 - RNA, 14 nt, Human
ucuaagauucuaau

SEQ ID NO: 2783563 - RNA, 15 nt, Human
ucuaagauucuaaug

SEQ ID NO: 2783564 - RNA, 16 nt, Human
ucuaagauucuaauga

SEQ ID NO: 2783565 - RNA, 17 nt, Human
ucuaagauucuaaugau

SEQ ID NO: 2783566 - RNA, 19 nt, Human
ucuaagauucuaaugauga

SEQ ID NO: 2783567 - RNA, 20 nt, Human
ucuaagauucuaaugaugau

SEQ ID NO: 2783568 - RNA, 21 nt, Human
ucuaaagaguuuauuuuaaga

SEQ ID NO: 2783569 - RNA, 18 nt, Human
ucuaaagauaauauuacu

SEQ ID NO: 2783570 - RNA, 24 nt, Human
ucuaaagauagagucauugcugua

SEQ ID NO: 2783571 - RNA, 20 nt, Human
ucuaaagaguuuauuuuaag

SEQ ID NO: 2783572 - RNA, 13 nt, Human
ucuaaagaccaaa

SEQ ID NO: 2783573 - RNA, 18 nt, Human
ucuaaagaccaaacuuca

SEQ ID NO: 2783574 - RNA, 20 nt, Human
ucuaaagaccaaacuucacu

SEQ ID NO: 2783575 - RNA, 22 nt, Human
ucuaaagaccaaacuucacucu

SEQ ID NO: 2783576 - RNA, 12 nt, Human
ucuaaagagcac

SEQ ID NO: 2783577 - RNA, 15 nt, Human
ucuaaagagcacuua

SEQ ID NO: 2783578 - RNA, 17 nt, Human
ucuaaacuuccccaucu

SEQ ID NO: 2783579 - RNA, 17 nt, Human
ucuaaacauuaaucaau

SEQ ID NO: 2783580 - RNA, 23 nt, Human
ucuaaacugcccccucugcccug

SEQ ID NO: 2783581 - RNA, 22 nt, Human
ucuaaacugcccccucugcccu

SEQ ID NO: 2783582 - RNA, 16 nt, Human
ucuaaacugcccccuc

SEQ ID NO: 2783583 - RNA, 13 nt, Human
ucuaaacugcccc

SEQ ID NO: 2783584 - RNA, 21 nt, Human
ucuaagauaguaacaaugaag

SEQ ID NO: 2783585 - RNA, 12 nt, Human
ucuaagaucuua

SEQ ID NO: 2783586 - RNA, 15 nt, Human
ucuaagaucuuagau

SEQ ID NO: 2783587 - RNA, 17 nt, Human
ucuaagaucuuagauuc

SEQ ID NO: 2783588 - RNA, 19 nt, Human
ucuaagaucuuagauucuc

SEQ ID NO: 2783589 - RNA, 23 nt, Human
ucuaagacuuacucuaagaucuu

SEQ ID NO: 2783590 - RNA, 21 nt, Human
ucuaagacucaaauguucuaa

SEQ ID NO: 2783591 - RNA, 22 nt, Human
ucuaagacucaaauguucuaag

SEQ ID NO: 2783592 - RNA, 19 nt, Human
ucuaagacuuacucuaaga

SEQ ID NO: 2783593 - RNA, 20 nt, Human
ucuaagacuuacucuaagau

SEQ ID NO: 2783594 - RNA, 24 nt, Human
ucuaagaugugauauucuaagacu

SEQ ID NO: 2783595 - RNA, 21 nt, Human
ucuaagaucuuagauucucug

SEQ ID NO: 2783596 - RNA, 12 nt, Human
ucuaagauguga

SEQ ID NO: 2783597 - RNA, 13 nt, Human
ucuaagaugugau

SEQ ID NO: 2783598 - RNA, 18 nt, Human
ucuaagaugugauauucu

SEQ ID NO: 2783599 - RNA, 19 nt, Human
ucuaagaugugauauucua

SEQ ID NO: 2783600 - RNA, 20 nt, Human
ucuaagaugugauauucuaa

SEQ ID NO: 2783601 - RNA, 21 nt, Human
ucuaagaugugauauucuaag

SEQ ID NO: 2783602 - RNA, 22 nt, Human
ucuaagaugugauauucuaaga

SEQ ID NO: 2783603 - RNA, 16 nt, Human
ucuaagacucaaaugu

SEQ ID NO: 2783604 - RNA, 18 nt, Human
ucuaagacucaaauguuc

SEQ ID NO: 2783605 - RNA, 19 nt, Human
ucuaagacucaaauguucu

SEQ ID NO: 2783606 - RNA, 16 nt, Human
ucuaagaauacagcuu

SEQ ID NO: 2783607 - RNA, 17 nt, Human
ucuaagaauacagcuuu

SEQ ID NO: 2783608 - RNA, 13 nt, Human
ucuaacuuuagaa

SEQ ID NO: 2783609 - RNA, 12 nt, Human
ucuaagaaaccc

SEQ ID NO: 2783610 - RNA, 23 nt, Human
acuguggccguuaucuggaagua

SEQ ID NO: 2783611 - RNA, 22 nt, Human
acugugugugugaaugaacacu

SEQ ID NO: 2783612 - RNA, 18 nt, Human
acugugugugugaaugaa

SEQ ID NO: 2783613 - RNA, 16 nt, Human
acugugugugugaaug

SEQ ID NO: 2783614 - RNA, 15 nt, Human
acugugugugugaau

SEQ ID NO: 2783615 - RNA, 22 nt, Human
acuguggcacuugccuggguca

SEQ ID NO: 2783616 - RNA, 20 nt, Human
acuguggccguuaucuggaa

SEQ ID NO: 2783617 - RNA, 19 nt, Human
acuguggcacuugccuggg

SEQ ID NO: 2783618 - RNA, 23 nt, Human
acuguggaggaaggauuguaaaa

SEQ ID NO: 2783619 - RNA, 21 nt, Human
acuguggauacccuuacccuu

SEQ ID NO: 2783620 - RNA, 20 nt, Human
acuguggcacuugccugggu

SEQ ID NO: 2783621 - RNA, 17 nt, Human
acuguggccguuaucug

SEQ ID NO: 2783622 - RNA, 22 nt, Human
acuguggaggaaggauuguaaa

SEQ ID NO: 2783623 - RNA, 18 nt, Human
acuguggaggaaggauug

SEQ ID NO: 2783624 - RNA, 17 nt, Human
acuguuaauaguucagg

SEQ ID NO: 2783625 - RNA, 19 nt, Human
acuguguuuuauaaaauag

SEQ ID NO: 2783626 - RNA, 18 nt, Human
acuguguuuuauaaaaua

SEQ ID NO: 2783627 - RNA, 17 nt, Human
acuguguuuuauaaaau

SEQ ID NO: 2783628 - RNA, 19 nt, Human
acuguuaagaaaucuguuu

SEQ ID NO: 2783629 - RNA, 14 nt, Human
acuguuaagaagca

SEQ ID NO: 2783630 - RNA, 18 nt, Human
acuguuaaccauuuaagu

SEQ ID NO: 2783631 - RNA, 14 nt, Human
acuguguuguauua

SEQ ID NO: 2783632 - RNA, 15 nt, Human
acuguguuguauuaa

SEQ ID NO: 2783633 - RNA, 17 nt, Human
acuguguuguauuaaca

SEQ ID NO: 2783634 - RNA, 20 nt, Human
acuguguuguauuaacaaaa

SEQ ID NO: 2783635 - RNA, 21 nt, Human
acuguguuguauuaacaaaag

SEQ ID NO: 2783636 - RNA, 14 nt, Human
acuguguucauuag

SEQ ID NO: 2783637 - RNA, 21 nt, Human
acuguuaauaguucagguaac

SEQ ID NO: 2783638 - RNA, 14 nt, Human
acuguggcugucug

SEQ ID NO: 2783639 - RNA, 19 nt, Human
ucgggacaccugcccugcc

SEQ ID NO: 2783640 - RNA, 20 nt, Human
ucgggacaccugcccugccc

SEQ ID NO: 2783641 - RNA, 11 nt, Human
ucgggaccagg

SEQ ID NO: 2783642 - RNA, 10 nt, Human
ucgggaccag

SEQ ID NO: 2783643 - RNA, 16 nt, Human
ucgggacaccugcccu

SEQ ID NO: 2783644 - RNA, 18 nt, Human
ucgucacuaauacacagu

SEQ ID NO: 2783645 - RNA, 12 nt, Human
ucguuccuuucu

SEQ ID NO: 2783646 - RNA, 22 nt, Human
ucguugguuauacaaguucuug

SEQ ID NO: 2783647 - RNA, 14 nt, Human
ucguucuuuuuaag

SEQ ID NO: 2783648 - RNA, 18 nt, Human
ucguucuuuuuaaguuaa

SEQ ID NO: 2783649 - RNA, 13 nt, Human
ucguucucugccu

SEQ ID NO: 2783650 - RNA, 20 nt, Human
ucuaaacaaugcugauuugg

SEQ ID NO: 2783651 - RNA, 22 nt, Human
ucuaaaaugugauguucuaagg

SEQ ID NO: 2783652 - RNA, 19 nt, Human
ucuaaacccaauccaaaug

SEQ ID NO: 2783653 - RNA, 19 nt, Human
ucuaaacguaagcacuguu

SEQ ID NO: 2783654 - RNA, 20 nt, Human
ucuaaacguaagcacuguuu

SEQ ID NO: 2783655 - RNA, 21 nt, Human
ucuaaacguaagcacuguuuu

SEQ ID NO: 2783656 - RNA, 16 nt, Human
ucuaaacccaauccaa

SEQ ID NO: 2783657 - RNA, 13 nt, Human
ucuaaacauuaau

SEQ ID NO: 2783658 - RNA, 14 nt, Human
ucuaaacauuaauc

SEQ ID NO: 2783659 - RNA, 15 nt, Human
ucguuuacuaugccu

SEQ ID NO: 2783660 - RNA, 18 nt, Human
ucuaaaaugugauguucu

SEQ ID NO: 2783661 - RNA, 19 nt, Human
ucuaaaaugugauguucua

SEQ ID NO: 2783662 - RNA, 20 nt, Human
ucuaaaaugugauguucuaa

SEQ ID NO: 2783663 - RNA, 21 nt, Human
ucuaaaaugugauguucuaag

SEQ ID NO: 2783664 - RNA, 12 nt, Human
ucguagcuuucc

SEQ ID NO: 2783665 - RNA, 22 nt, Human
ucguagcuuucccaaauaaacu

SEQ ID NO: 2783666 - RNA, 20 nt, Human
ucguaucccgagucugggac

SEQ ID NO: 2783667 - RNA, 12 nt, Human
ucguaugaaaau

SEQ ID NO: 2783668 - RNA, 13 nt, Human
ucguaugaaaaug

SEQ ID NO: 2783669 - RNA, 15 nt, Human
ucguaugaaaaugag

SEQ ID NO: 2783670 - RNA, 13 nt, Human
ucggggagccuua

SEQ ID NO: 2783671 - RNA, 16 nt, Human
ucggggcaugcugggg

SEQ ID NO: 2783672 - RNA, 18 nt, Human
ucggggcaugcuggggca

SEQ ID NO: 2783673 - RNA, 17 nt, Human
ucggggcaugcuggggc

SEQ ID NO: 2783674 - RNA, 20 nt, Human
ucguaaccagccagauccuc

SEQ ID NO: 2783675 - RNA, 13 nt, Human
ucguaaugacuua

SEQ ID NO: 2783676 - RNA, 19 nt, Human
ucggggagaggcugaggac

SEQ ID NO: 2783677 - RNA, 19 nt, Human
ucgggaggcugaggcacaa

SEQ ID NO: 2783678 - RNA, 14 nt, Human
acugucacucauug

SEQ ID NO: 2783679 - RNA, 15 nt, Human
acugucacccuccac

SEQ ID NO: 2783680 - RNA, 17 nt, Human
acugucacccuccaccu

SEQ ID NO: 2783681 - RNA, 14 nt, Human
acugucacccucca

SEQ ID NO: 2783682 - RNA, 13 nt, Human
acugucauagaaa

SEQ ID NO: 2783683 - RNA, 15 nt, Human
acugucaugcuucau

SEQ ID NO: 2783684 - RNA, 24 nt, Human
acugucaugcuucaucauucccuc

SEQ ID NO: 2783685 - RNA, 13 nt, Human
acuguccagagag

SEQ ID NO: 2783686 - RNA, 14 nt, Human
acuguccagagagc

SEQ ID NO: 2783687 - RNA, 15 nt, Human
acuguccagagagca

SEQ ID NO: 2783688 - RNA, 18 nt, Human
acuguccuccaagccagc

SEQ ID NO: 2783689 - RNA, 17 nt, Human
acuguccucuccccucc

SEQ ID NO: 2783690 - RNA, 18 nt, Human
acuguccucuccccucca

SEQ ID NO: 2783691 - RNA, 19 nt, Human
acuguccucuccccuccag

SEQ ID NO: 2783692 - RNA, 20 nt, Human
acuguccucuccccuccagc

SEQ ID NO: 2783693 - RNA, 16 nt, Human
acuguccuccaagcca

SEQ ID NO: 2783694 - RNA, 18 nt, Human
acuguauauuuuaagaag

SEQ ID NO: 2783695 - RNA, 14 nt, Human
acuguaucugugua

SEQ ID NO: 2783696 - RNA, 13 nt, Human
acuguaucugugu

SEQ ID NO: 2783697 - RNA, 15 nt, Human
acuguaucuguguag

SEQ ID NO: 2783698 - RNA, 13 nt, Human
acuguaugcugga

SEQ ID NO: 2783699 - RNA, 14 nt, Human
acuguaugugauga

SEQ ID NO: 2783700 - RNA, 16 nt, Human
acuguaugugaugaau

SEQ ID NO: 2783701 - RNA, 15 nt, Human
acuguaugauuuaua

SEQ ID NO: 2783702 - RNA, 12 nt, Human
acuguaugcuca

SEQ ID NO: 2783703 - RNA, 13 nt, Human
acuguauuuguau

SEQ ID NO: 2783704 - RNA, 14 nt, Human
acuguauuuguauc

SEQ ID NO: 2783705 - RNA, 20 nt, Human
acuguacuccucccaggcgc

SEQ ID NO: 2783706 - RNA, 15 nt, Human
acuguacuccuccca

SEQ ID NO: 2783707 - RNA, 17 nt, Human
acuguacugacuugagg

SEQ ID NO: 2783708 - RNA, 18 nt, Human
acuggguacuuguggaca

SEQ ID NO: 2783709 - RNA, 17 nt, Human
acuggguacuuguggac

SEQ ID NO: 2783710 - RNA, 21 nt, Human
acuggguaaaugcaaaguucu

SEQ ID NO: 2783711 - RNA, 11 nt, Human
acuguacaaua

SEQ ID NO: 2783712 - RNA, 17 nt, Human
acuguacaauaaaaaca

SEQ ID NO: 2783713 - RNA, 18 nt, Human
acuguacaauaaaaacau

SEQ ID NO: 2783714 - RNA, 14 nt, Human
acugaaaucuguca

SEQ ID NO: 2783715 - RNA, 17 nt, Human
acugaaaucugucaaga

SEQ ID NO: 2783716 - RNA, 12 nt, Human
acugaagagaca

SEQ ID NO: 2783717 - RNA, 16 nt, Human
acugaagauguugaga

SEQ ID NO: 2783718 - RNA, 13 nt, Human
acugaaagguuac

SEQ ID NO: 2783719 - RNA, 13 nt, Human
acugaaagugguu

SEQ ID NO: 2783720 - RNA, 14 nt, Human
acugaaagugguuu

SEQ ID NO: 2783721 - RNA, 17 nt, Human
acugaaagugguuugaa

SEQ ID NO: 2783722 - RNA, 22 nt, Human
ucgcccgagcuguuuauguuuu

SEQ ID NO: 2783723 - RNA, 14 nt, Human
ucgcuccugugucu

SEQ ID NO: 2783724 - RNA, 17 nt, Human
ucgccguugaagaggaa

SEQ ID NO: 2783725 - RNA, 13 nt, Human
ucgccuggagccc

SEQ ID NO: 2783726 - RNA, 14 nt, Human
ucgccuggagcccu

SEQ ID NO: 2783727 - RNA, 15 nt, Human
ucgccgucugugaau

SEQ ID NO: 2783728 - RNA, 14 nt, Human
ucgcccucccaggc

SEQ ID NO: 2783729 - RNA, 19 nt, Human
ucgcccuuacuucuugccc

SEQ ID NO: 2783730 - RNA, 20 nt, Human
ucgcccuuacuucuugcccu

SEQ ID NO: 2783731 - RNA, 22 nt, Human
ucgcccuuacuucuugcccugg

SEQ ID NO: 2783732 - RNA, 23 nt, Human
ucgcccuuacuucuugcccuggg

SEQ ID NO: 2783733 - RNA, 17 nt, Human
ucgcccucccaggcucu

SEQ ID NO: 2783734 - RNA, 14 nt, Human
ucgcccuccuuucu

SEQ ID NO: 2783735 - RNA, 16 nt, Human
ucgcccuccuuucugu

SEQ ID NO: 2783736 - RNA, 18 nt, Human
ucgcccuccuuucugugc

SEQ ID NO: 2783737 - RNA, 13 nt, Human
ucgcccucccagg

SEQ ID NO: 2783738 - RNA, 13 nt, Human
acuggggggcuug

SEQ ID NO: 2783739 - RNA, 17 nt, Human
acuggggccuccagaac

SEQ ID NO: 2783740 - RNA, 17 nt, Human
acuggggugggaggucu

SEQ ID NO: 2783741 - RNA, 21 nt, Human
acuggggugggaggucuugcu

SEQ ID NO: 2783742 - RNA, 22 nt, Human
acuggggugggaggucuugcua

SEQ ID NO: 2783743 - RNA, 15 nt, Human
acuggguacuugugg

SEQ ID NO: 2783744 - RNA, 21 nt, Human
acuggggccuacagcuuugau

SEQ ID NO: 2783745 - RNA, 12 nt, Human
acuggggccucc

SEQ ID NO: 2783746 - RNA, 13 nt, Human
acuggggccucca

SEQ ID NO: 2783747 - RNA, 16 nt, Human
acuggggccuccagaa

SEQ ID NO: 2783748 - RNA, 16 nt, Human
ucgcugucacaggcgg

SEQ ID NO: 2783749 - RNA, 22 nt, Human
ucgcuggccccuuugggcccug

SEQ ID NO: 2783750 - RNA, 23 nt, Human
ucgcuggccccuuugggcccugc

SEQ ID NO: 2783751 - RNA, 17 nt, Human
acugggccuguagcuca

SEQ ID NO: 2783752 - RNA, 21 nt, Human
acugggccuguugcccuuucu

SEQ ID NO: 2783753 - RNA, 20 nt, Human
acugggccuuagugggccag

SEQ ID NO: 2783754 - RNA, 21 nt, Human
acugggccuuagugggccagg

SEQ ID NO: 2783755 - RNA, 16 nt, Human
ucgcugacuucaugga

SEQ ID NO: 2783756 - RNA, 17 nt, Human
ucgcugacuucauggaa

SEQ ID NO: 2783757 - RNA, 18 nt, Human
ucgcugacuucauggaau

SEQ ID NO: 2783758 - RNA, 21 nt, Human
ucgcucuguugcccaggcugg

SEQ ID NO: 2783759 - RNA, 19 nt, Human
ucgcucuguuacccagggu

SEQ ID NO: 2783760 - RNA, 22 nt, Human
acuugaacccgggaggcagagg

SEQ ID NO: 2783761 - RNA, 14 nt, Human
acuugaaauguuag

SEQ ID NO: 2783762 - RNA, 23 nt, Human
acuugaaauguuagucauuguua

SEQ ID NO: 2783763 - RNA, 16 nt, Human
acuugaaauuauaucu

SEQ ID NO: 2783764 - RNA, 17 nt, Human
acuugaaauuauaucug

SEQ ID NO: 2783765 - RNA, 23 nt, Human
acuugaaauuauaucuguggucu

SEQ ID NO: 2783766 - RNA, 21 nt, Human
acuucucuuguuagguaauuu

SEQ ID NO: 2783767 - RNA, 21 nt, Human
acuugagaacuuuccauuuug

SEQ ID NO: 2783768 - RNA, 15 nt, Human
acuugagguggccuc

SEQ ID NO: 2783769 - RNA, 21 nt, Human
acuugagguggccuccuugcu

SEQ ID NO: 2783770 - RNA, 22 nt, Human
acuugagguggccuccuugcuu

SEQ ID NO: 2783771 - RNA, 16 nt, Human
acuugaguguaauguu

SEQ ID NO: 2783772 - RNA, 22 nt, Human
acuugaguguaauguuuguuac

SEQ ID NO: 2783773 - RNA, 15 nt, Human
acuugagggcccaga

SEQ ID NO: 2783774 - RNA, 16 nt, Human
acuugagggcccagag

SEQ ID NO: 2783775 - RNA, 17 nt, Human
acuugagggcccagagc

SEQ ID NO: 2783776 - RNA, 18 nt, Human
acuugagggcccagagca

SEQ ID NO: 2783777 - RNA, 19 nt, Human
acuugagggcccagagcag

SEQ ID NO: 2783778 - RNA, 20 nt, Human
acuugagggcccagagcagg

SEQ ID NO: 2783779 - RNA, 21 nt, Human
acuugagggcccagagcagga

SEQ ID NO: 2783780 - RNA, 18 nt, Human
acuugacuccauuucauc

SEQ ID NO: 2783781 - RNA, 21 nt, Human
acuugacuccauuucaucauu

SEQ ID NO: 2783782 - RNA, 19 nt, Human
acuugacccccuugagggu

SEQ ID NO: 2783783 - RNA, 20 nt, Human
acuugaaccuaugaagcaau

SEQ ID NO: 2783784 - RNA, 16 nt, Human
acuugaacuuuccugg

SEQ ID NO: 2783785 - RNA, 18 nt, Human
acuugaacuucaccugca

SEQ ID NO: 2783786 - RNA, 15 nt, Human
acuugaaugugucag

SEQ ID NO: 2783787 - RNA, 14 nt, Human
acuuguaugaaaga

SEQ ID NO: 2783788 - RNA, 15 nt, Human
acuugucucauuuua

SEQ ID NO: 2783789 - RNA, 16 nt, Human
acuugucucauuuuaa

SEQ ID NO: 2783790 - RNA, 17 nt, Human
acuugucucauuuuaau

SEQ ID NO: 2783791 - RNA, 19 nt, Human
acuugucucauuuuaaugu

SEQ ID NO: 2783792 - RNA, 20 nt, Human
acuugucucauuuuaaugua

SEQ ID NO: 2783793 - RNA, 23 nt, Human
acuuguccuuuuguaccauggug

SEQ ID NO: 2783794 - RNA, 14 nt, Human
acuuggaagcuccg

SEQ ID NO: 2783795 - RNA, 23 nt, Human
acuugccgcgucgcccucccagg

SEQ ID NO: 2783796 - RNA, 18 nt, Human
acuugccuccgugucacc

SEQ ID NO: 2783797 - RNA, 22 nt, Human
acuugccgcgucgcccucccag

SEQ ID NO: 2783798 - RNA, 19 nt, Human
acuugcauccaacuccagg

SEQ ID NO: 2783799 - RNA, 19 nt, Human
acuugauagcaaacacugg

SEQ ID NO: 2783800 - RNA, 20 nt, Human
acuugauagcaaacacuggg

SEQ ID NO: 2783801 - RNA, 11 nt, Human
acuugcauuuc

SEQ ID NO: 2783802 - RNA, 12 nt, Human
acuugcaugaag

SEQ ID NO: 2783803 - RNA, 14 nt, Human
acuugcaugaagag

SEQ ID NO: 2783804 - RNA, 21 nt, Human
acuugcaugaagagaagcaau

SEQ ID NO: 2783805 - RNA, 15 nt, Human
acuugcauggagcag

SEQ ID NO: 2783806 - RNA, 12 nt, Human
acuugcaugucc

SEQ ID NO: 2783807 - RNA, 19 nt, Human
acuugcaugucccaucacg

SEQ ID NO: 2783808 - RNA, 12 nt, Human
acuugcccugcu

SEQ ID NO: 2783809 - RNA, 13 nt, Human
acuugcccugcuc

SEQ ID NO: 2783810 - RNA, 15 nt, Human
acuugcccugcuccc

SEQ ID NO: 2783811 - RNA, 16 nt, Human
acuugcccugcucccu

SEQ ID NO: 2783812 - RNA, 18 nt, Human
acuugcccugcucccucu

SEQ ID NO: 2783813 - RNA, 14 nt, Human
acuugccagaaguu

SEQ ID NO: 2783814 - RNA, 20 nt, Human
acuugccagaaguuguggau

SEQ ID NO: 2783815 - RNA, 21 nt, Human
acuugccaugugacucuggcu

SEQ ID NO: 2783816 - RNA, 22 nt, Human
acuugccaugugacucuggcuu

SEQ ID NO: 2783817 - RNA, 13 nt, Human
ucuauuuuugucu

SEQ ID NO: 2783818 - RNA, 14 nt, Human
ucucaaaaauacaa

SEQ ID NO: 2783819 - RNA, 15 nt, Human
ucucaaaaauacaaa

SEQ ID NO: 2783820 - RNA, 16 nt, Human
ucucaaaaauacaaaa

SEQ ID NO: 2783821 - RNA, 23 nt, Human
ucucaaaaauacaaaauaaaaac

SEQ ID NO: 2783822 - RNA, 13 nt, Human
ucucacuccccau

SEQ ID NO: 2783823 - RNA, 15 nt, Human
ucucacuccccaugc

SEQ ID NO: 2783824 - RNA, 12 nt, Human
ucucacucccca

SEQ ID NO: 2783825 - RNA, 13 nt, Human
ucucacuccuacc

SEQ ID NO: 2783826 - RNA, 23 nt, Human
ucucacauggugcuacgccugca

SEQ ID NO: 2783827 - RNA, 22 nt, Human
ucucacauggugcuacgccugc

SEQ ID NO: 2783828 - RNA, 15 nt, Human
ucucaccagcugcug

SEQ ID NO: 2783829 - RNA, 17 nt, Human
ucucaccagcugcugcu

SEQ ID NO: 2783830 - RNA, 14 nt, Human
ucuauauaugugua

SEQ ID NO: 2783831 - RNA, 15 nt, Human
ucuauauauguguau

SEQ ID NO: 2783832 - RNA, 14 nt, Human
ucuauaguucuaga

SEQ ID NO: 2783833 - RNA, 12 nt, Human
ucuauaguucua

SEQ ID NO: 2783834 - RNA, 15 nt, Human
ucuauaguucuagac

SEQ ID NO: 2783835 - RNA, 21 nt, Human
ucuauaguugauauguuuuau

SEQ ID NO: 2783836 - RNA, 16 nt, Human
ucuauaguugucagua

SEQ ID NO: 2783837 - RNA, 16 nt, Human
ucuauauauguguaug

SEQ ID NO: 2783838 - RNA, 19 nt, Human
ucuauauauguguauguac

SEQ ID NO: 2783839 - RNA, 12 nt, Human
ucuauaugaauu

SEQ ID NO: 2783840 - RNA, 14 nt, Human
ucuauaugaauuua

SEQ ID NO: 2783841 - RNA, 15 nt, Human
acuucggccagagcu

SEQ ID NO: 2783842 - RNA, 18 nt, Human
acuucuccacccugcucu

SEQ ID NO: 2783843 - RNA, 19 nt, Human
acuucucuuaaacuuguga

SEQ ID NO: 2783844 - RNA, 20 nt, Human
acuucucuuaaacuugugaa

SEQ ID NO: 2783845 - RNA, 21 nt, Human
acuucucuuaaacuugugaau

SEQ ID NO: 2783846 - RNA, 14 nt, Human
acuucucuugcuuu

SEQ ID NO: 2783847 - RNA, 16 nt, Human
acuucucuugcuuucu

SEQ ID NO: 2783848 - RNA, 17 nt, Human
acuucucuugcuuucua

SEQ ID NO: 2783849 - RNA, 21 nt, Human
acuucucugccuuugacauuu

SEQ ID NO: 2783850 - RNA, 23 nt, Human
acuucucugccuuugacauuuaa

SEQ ID NO: 2783851 - RNA, 16 nt, Human
acuucucucuaaggag

SEQ ID NO: 2783852 - RNA, 22 nt, Human
acuucucucuaaggagaauggc

SEQ ID NO: 2783853 - RNA, 16 nt, Human
acuucuccaggucuca

SEQ ID NO: 2783854 - RNA, 14 nt, Human
acuucccuuucugc

SEQ ID NO: 2783855 - RNA, 16 nt, Human
ucucacuccuaccugg

SEQ ID NO: 2783856 - RNA, 17 nt, Human
ucucacuccuaccuggu

SEQ ID NO: 2783857 - RNA, 22 nt, Human
acuucccuuucugcuuguguua

SEQ ID NO: 2783858 - RNA, 18 nt, Human
acuuccuccuccccacuu

SEQ ID NO: 2783859 - RNA, 17 nt, Human
acuuccucgccucuccc

SEQ ID NO: 2783860 - RNA, 18 nt, Human
acuuccucgccucuccca

SEQ ID NO: 2783861 - RNA, 15 nt, Human
acuuccuccucccca

SEQ ID NO: 2783862 - RNA, 17 nt, Human
acuuccuccuccccacu

SEQ ID NO: 2783863 - RNA, 18 nt, Human
ucuauugugggacuuauu

SEQ ID NO: 2783864 - RNA, 12 nt, Human
acuuccuguacu

SEQ ID NO: 2783865 - RNA, 15 nt, Human
ucuaguuugcauucc

SEQ ID NO: 2783866 - RNA, 18 nt, Human
ucuaguuugcauuccuga

SEQ ID NO: 2783867 - RNA, 21 nt, Human
ucuauaaucccagcacuuugg

SEQ ID NO: 2783868 - RNA, 22 nt, Human
ucuauaaggccauaaaacaggu

SEQ ID NO: 2783869 - RNA, 19 nt, Human
ucuauaaucccagcacuuu

SEQ ID NO: 2783870 - RNA, 20 nt, Human
ucuauaaucccagcacuuug

SEQ ID NO: 2783871 - RNA, 15 nt, Human
ucuauacaucucucc

SEQ ID NO: 2783872 - RNA, 16 nt, Human
ucuauacaucucuccc

SEQ ID NO: 2783873 - RNA, 11 nt, Human
ucuauacaaau

SEQ ID NO: 2783874 - RNA, 16 nt, Human
ucuauacaaauauaaa

SEQ ID NO: 2783875 - RNA, 21 nt, Human
ucuauacaaauauaaaucuua

SEQ ID NO: 2783876 - RNA, 22 nt, Human
ucuauacaaauauaaaucuuaa

SEQ ID NO: 2783877 - RNA, 18 nt, Human
ucuauaguagacacacua

SEQ ID NO: 2783878 - RNA, 13 nt, Human
ucuaguuugcauu

SEQ ID NO: 2783879 - RNA, 21 nt, Human
ucuaguggucuuuguaagagu

SEQ ID NO: 2783880 - RNA, 22 nt, Human
ucuaguggucuuuguaagagug

SEQ ID NO: 2783881 - RNA, 23 nt, Human
ucuaguggucuuuguaagagugu

SEQ ID NO: 2783882 - RNA, 19 nt, Human
ucuagcaugccaacaagaa

SEQ ID NO: 2783883 - RNA, 20 nt, Human
ucuagcaugccaacaagaau

SEQ ID NO: 2783884 - RNA, 22 nt, Human
ucuagcaugccaacaagaaugc

SEQ ID NO: 2783885 - RNA, 20 nt, Human
ucuagccuauuuaccugcag

SEQ ID NO: 2783886 - RNA, 11 nt, Human
ucuagccugca

SEQ ID NO: 2783887 - RNA, 14 nt, Human
ucuagccugcacuu

SEQ ID NO: 2783888 - RNA, 16 nt, Human
ucuagccugcacuuug

SEQ ID NO: 2783889 - RNA, 20 nt, Human
ucuagccugcacuuugaugu

SEQ ID NO: 2783890 - RNA, 22 nt, Human
ucuagccugcacuuugauguca

SEQ ID NO: 2783891 - RNA, 22 nt, Human
ucuagcacaauuugcacuaaau

SEQ ID NO: 2783892 - RNA, 17 nt, Human
ucuagcacucauuuucu

SEQ ID NO: 2783893 - RNA, 18 nt, Human
ucuagcacucauuuucua

SEQ ID NO: 2783894 - RNA, 21 nt, Human
ucuagauucucuggcuguaag

SEQ ID NO: 2783895 - RNA, 22 nt, Human
ucuagcaaccgccucaaaaugu

SEQ ID NO: 2783896 - RNA, 13 nt, Human
ucuagauucaaag

SEQ ID NO: 2783897 - RNA, 17 nt, Human
ucuagauucaaagguuc

SEQ ID NO: 2783898 - RNA, 18 nt, Human
ucuagauucaaagguucu

SEQ ID NO: 2783899 - RNA, 19 nt, Human
ucuagauucaaagguucua

SEQ ID NO: 2783900 - RNA, 20 nt, Human
ucuagauucaaagguucuag

SEQ ID NO: 2783901 - RNA, 22 nt, Human
ucuagauucaaagguucuaggu

SEQ ID NO: 2783902 - RNA, 23 nt, Human
ucuagauucaaagguucuagguu

SEQ ID NO: 2783903 - RNA, 15 nt, Human
ucuagauugagagaa

SEQ ID NO: 2783904 - RNA, 11 nt, Human
ucuagauucuc

SEQ ID NO: 2783905 - RNA, 14 nt, Human
ucuagauucucugg

SEQ ID NO: 2783906 - RNA, 19 nt, Human
ucuagauuccauuggucca

SEQ ID NO: 2783907 - RNA, 21 nt, Human
ucuagauuccauugguccaag

SEQ ID NO: 2783908 - RNA, 22 nt, Human
ucuagauuccauugguccaaga

SEQ ID NO: 2783909 - RNA, 23 nt, Human
ucuagauuccauugguccaagau

SEQ ID NO: 2783910 - RNA, 17 nt, Human
acuucccagugaauucu

SEQ ID NO: 2783911 - RNA, 24 nt, Human
acuucccaguucaggagucccaag

SEQ ID NO: 2783912 - RNA, 23 nt, Human
acuucccaguucaggagucccaa

SEQ ID NO: 2783913 - RNA, 22 nt, Human
acuucccaguucaggaguccca

SEQ ID NO: 2783914 - RNA, 16 nt, Human
ucuagaucagaugcuc

SEQ ID NO: 2783915 - RNA, 18 nt, Human
ucuagaucagaugcucca

SEQ ID NO: 2783916 - RNA, 20 nt, Human
ucuagaucagaugcuccaag

SEQ ID NO: 2783917 - RNA, 21 nt, Human
ucuagaucagaugcuccaaga

SEQ ID NO: 2783918 - RNA, 22 nt, Human
ucuagaucagaugcuccaagau

SEQ ID NO: 2783919 - RNA, 21 nt, Human
ucuagaugaaguuuuacauug

SEQ ID NO: 2783920 - RNA, 20 nt, Human
ucuagaugaaguuuuacauu

SEQ ID NO: 2783921 - RNA, 19 nt, Human
ucuagaugaaguuuuacau

SEQ ID NO: 2783922 - RNA, 14 nt, Human
ucuagaucauaagg

SEQ ID NO: 2783923 - RNA, 22 nt, Human
ucuagauguuuauucuucuaga

SEQ ID NO: 2783924 - RNA, 23 nt, Human
ucuagauguuuauucuucuagag

SEQ ID NO: 2783925 - RNA, 21 nt, Human
ucuagauguuuauucuucuag

SEQ ID NO: 2783926 - RNA, 22 nt, Human
ucuagaugauuaaauaagauuc

SEQ ID NO: 2783927 - RNA, 23 nt, Human
ucuagaugaaguuuuacauuguu

SEQ ID NO: 2783928 - RNA, 16 nt, Human
ucuagaugagcugggc

SEQ ID NO: 2783929 - RNA, 22 nt, Human
ucuagaugaaguuuuacauugu

SEQ ID NO: 2783930 - RNA, 21 nt, Human
acuuccagguguuacuguaau

SEQ ID NO: 2783931 - RNA, 20 nt, Human
acuuccagguguuacuguaa

SEQ ID NO: 2783932 - RNA, 21 nt, Human
acuuccaggggaaccugccau

SEQ ID NO: 2783933 - RNA, 20 nt, Human
acuuccaggggaaccugcca

SEQ ID NO: 2783934 - RNA, 18 nt, Human
acuuccaggggaaccugc

SEQ ID NO: 2783935 - RNA, 16 nt, Human
acuuccaggggaaccu

SEQ ID NO: 2783936 - RNA, 17 nt, Human
acuuccauaaucuggac

SEQ ID NO: 2783937 - RNA, 21 nt, Human
acuuccaccucgggcacauuu

SEQ ID NO: 2783938 - RNA, 15 nt, Human
acuuccaaagaaugu

SEQ ID NO: 2783939 - RNA, 23 nt, Human
acuuccaaagaauguuagagcac

SEQ ID NO: 2783940 - RNA, 17 nt, Human
acuucauucugcagggu

SEQ ID NO: 2783941 - RNA, 19 nt, Human
acuucaugacaagcauuuu

SEQ ID NO: 2783942 - RNA, 15 nt, Human
acuucauggaaugga

SEQ ID NO: 2783943 - RNA, 20 nt, Human
acuucauggaauggacaucc

SEQ ID NO: 2783944 - RNA, 21 nt, Human
acuucauugagaguuuugucu

SEQ ID NO: 2783945 - RNA, 15 nt, Human
acuucauugucccuc

SEQ ID NO: 2783946 - RNA, 20 nt, Human
acuucauuuaaaaaaaucac

SEQ ID NO: 2783947 - RNA, 14 nt, Human
acuuccaaaauucu

SEQ ID NO: 2783948 - RNA, 15 nt, Human
acuuccaaaauucuu

SEQ ID NO: 2783949 - RNA, 16 nt, Human
acuuccaaaauucuua

SEQ ID NO: 2783950 - RNA, 19 nt, Human
acuuccaaaauucuuauuu

SEQ ID NO: 2783951 - RNA, 20 nt, Human
acuucaggcucuucuccuuu

SEQ ID NO: 2783952 - RNA, 17 nt, Human
acuucaggcucuucucc

SEQ ID NO: 2783953 - RNA, 18 nt, Human
acuucaggcucuucuccu

SEQ ID NO: 2783954 - RNA, 16 nt, Human
acuucaucuggcugcc

SEQ ID NO: 2783955 - RNA, 21 nt, Human
acuucaucuggcugccuuugc

SEQ ID NO: 2783956 - RNA, 13 nt, Human
acuuacucuaaga

SEQ ID NO: 2783957 - RNA, 14 nt, Human
acuuacucuaagau

SEQ ID NO: 2783958 - RNA, 19 nt, Human
ucuaccucaggcagcucaa

SEQ ID NO: 2783959 - RNA, 18 nt, Human
acuuauccuaaaacaaau

SEQ ID NO: 2783960 - RNA, 19 nt, Human
acuuauccuaaaacaaaua

SEQ ID NO: 2783961 - RNA, 20 nt, Human
acuuaucauccacauuguuu

SEQ ID NO: 2783962 - RNA, 22 nt, Human
acuuaucauccacauuguuuua

SEQ ID NO: 2783963 - RNA, 16 nt, Human
acuuaucccugcccau

SEQ ID NO: 2783964 - RNA, 17 nt, Human
acuuaucccugcccauu

SEQ ID NO: 2783965 - RNA, 16 nt, Human
acuucaggcucuucuc

SEQ ID NO: 2783966 - RNA, 16 nt, Human
acuuaucucucugugc

SEQ ID NO: 2783967 - RNA, 17 nt, Human
acuuaucucucugugcu

SEQ ID NO: 2783968 - RNA, 22 nt, Human
acuuaucucucugugcugugga

SEQ ID NO: 2783969 - RNA, 19 nt, Human
acuuaucauccacauuguu

SEQ ID NO: 2783970 - RNA, 20 nt, Human
acuuaucagcuacuuaagag

SEQ ID NO: 2783971 - RNA, 15 nt, Human
acuuauauuucccua

SEQ ID NO: 2783972 - RNA, 15 nt, Human
acuuauauuuucgua

SEQ ID NO: 2783973 - RNA, 19 nt, Human
acuuauauuuucguaugaa

SEQ ID NO: 2783974 - RNA, 21 nt, Human
acuuauauuuucguaugaaaa

SEQ ID NO: 2783975 - RNA, 22 nt, Human
acuuauauuuucguaugaaaau

SEQ ID NO: 2783976 - RNA, 23 nt, Human
acuuauauuuucguaugaaaaug

SEQ ID NO: 2783977 - RNA, 16 nt, Human
acuuacucuaagaucu

SEQ ID NO: 2783978 - RNA, 16 nt, Human
acuuacuguaagacau

SEQ ID NO: 2783979 - RNA, 17 nt, Human
acuuacuguaagacauu

SEQ ID NO: 2783980 - RNA, 15 nt, Human
acuuagaguuucugu

SEQ ID NO: 2783981 - RNA, 17 nt, Human
acuuagaguuucuguuu

SEQ ID NO: 2783982 - RNA, 18 nt, Human
acuuagaguuucuguuug

SEQ ID NO: 2783983 - RNA, 20 nt, Human
acuuagaguuucuguuugau

SEQ ID NO: 2783984 - RNA, 21 nt, Human
acuuagaguuucuguuugauu

SEQ ID NO: 2783985 - RNA, 22 nt, Human
acuuagaguuucuguuugauuc

SEQ ID NO: 2783986 - RNA, 14 nt, Human
acuuagcauccuaa

SEQ ID NO: 2783987 - RNA, 18 nt, Human
acuuagcauccuaagaaa

SEQ ID NO: 2783988 - RNA, 19 nt, Human
acuuagcauccuaagaaau

SEQ ID NO: 2783989 - RNA, 21 nt, Human
acuuagcauccuaagaaauau

SEQ ID NO: 2783990 - RNA, 13 nt, Human
acuuagcaaaaag

SEQ ID NO: 2783991 - RNA, 17 nt, Human
acuuagcaaaaaguggg

SEQ ID NO: 2783992 - RNA, 18 nt, Human
acuuauauugaagacaau

SEQ ID NO: 2783993 - RNA, 20 nt, Human
acuuauauugaagacaauuu

SEQ ID NO: 2783994 - RNA, 12 nt, Human
agaaagcagggg

SEQ ID NO: 2783995 - RNA, 14 nt, Human
agaaagcaggggcu

SEQ ID NO: 2783996 - RNA, 21 nt, Human
agaaagcagauaccucacccu

SEQ ID NO: 2783997 - RNA, 19 nt, Human
agaaauacaauucuacauu

SEQ ID NO: 2783998 - RNA, 20 nt, Human
agaaagcaggggcuacaaga

SEQ ID NO: 2783999 - RNA, 12 nt, Human
agaaagauguau

SEQ ID NO: 2784000 - RNA, 14 nt, Human
agaaagauguauau

SEQ ID NO: 2784001 - RNA, 20 nt, Human
agaaagauguauauaggugu

SEQ ID NO: 2784002 - RNA, 18 nt, Human
agaaagacaucuuucucu

SEQ ID NO: 2784003 - RNA, 22 nt, Human
agaaaucuggucuuguuagaaa

SEQ ID NO: 2784004 - RNA, 13 nt, Human
agaaaucuguuuu

SEQ ID NO: 2784005 - RNA, 16 nt, Human
agaaauggggaauucu

SEQ ID NO: 2784006 - RNA, 21 nt, Human
agaaauggggaauucucuaau

SEQ ID NO: 2784007 - RNA, 12 nt, Human
agaaaugcuuug

SEQ ID NO: 2784008 - RNA, 22 nt, Human
ucugaaggacauugcggacagc

SEQ ID NO: 2784009 - RNA, 21 nt, Human
agaaauacuauaacauaugua

SEQ ID NO: 2784010 - RNA, 20 nt, Human
agaaauagccugcgcuguuu

SEQ ID NO: 2784011 - RNA, 20 nt, Human
agaaaucucccaugugcaua

SEQ ID NO: 2784012 - RNA, 13 nt, Human
agaaaucugaaaa

SEQ ID NO: 2784013 - RNA, 23 nt, Human
agaaaucuaguauuucaugcugg

SEQ ID NO: 2784014 - RNA, 14 nt, Human
agaaagcaacuuau

SEQ ID NO: 2784015 - RNA, 23 nt, Human
agaaauaguuugagaaaugcaua

SEQ ID NO: 2784016 - RNA, 14 nt, Human
agaaacaauaaaga

SEQ ID NO: 2784017 - RNA, 15 nt, Human
agaaacaauaaagag

SEQ ID NO: 2784018 - RNA, 16 nt, Human
agaaacaauaaagaga

SEQ ID NO: 2784019 - RNA, 17 nt, Human
agaaacaauaaagagau

SEQ ID NO: 2784020 - RNA, 12 nt, Human
agaaaaggaaaa

SEQ ID NO: 2784021 - RNA, 13 nt, Human
agaaaaggaaaag

SEQ ID NO: 2784022 - RNA, 15 nt, Human
agaaaaggaaaagaa

SEQ ID NO: 2784023 - RNA, 17 nt, Human
agaaaaggaaaagaaaa

SEQ ID NO: 2784024 - RNA, 18 nt, Human
agaaaaggaaaagaaaaa

SEQ ID NO: 2784025 - RNA, 16 nt, Human
agaaaagagaagaaga

SEQ ID NO: 2784026 - RNA, 17 nt, Human
agaaaagagaagaagaa

SEQ ID NO: 2784027 - RNA, 20 nt, Human
agaaaagagaagaagaaaaa

SEQ ID NO: 2784028 - RNA, 22 nt, Human
agaaaacaagcaaguucugaga

SEQ ID NO: 2784029 - RNA, 21 nt, Human
agaaaacaagcaaguucugag

SEQ ID NO: 2784030 - RNA, 12 nt, Human
agaaaagcacac

SEQ ID NO: 2784031 - RNA, 22 nt, Human
agaaacuguucccaccugcugg

SEQ ID NO: 2784032 - RNA, 21 nt, Human
agaaacuguucccaccugcug

SEQ ID NO: 2784033 - RNA, 15 nt, Human
agaaacuguucccac

SEQ ID NO: 2784034 - RNA, 12 nt, Human
agaaacaugaca

SEQ ID NO: 2784035 - RNA, 13 nt, Human
agaaacaugacac

SEQ ID NO: 2784036 - RNA, 14 nt, Human
agaaacaugacacu

SEQ ID NO: 2784037 - RNA, 15 nt, Human
agaaacaugacacug

SEQ ID NO: 2784038 - RNA, 17 nt, Human
agaaacaugacacugac

SEQ ID NO: 2784039 - RNA, 18 nt, Human
agaaacaugacacugacc

SEQ ID NO: 2784040 - RNA, 14 nt, Human
agaaacauugaaga

SEQ ID NO: 2784041 - RNA, 15 nt, Human
agaaacauugaagau

SEQ ID NO: 2784042 - RNA, 14 nt, Human
ucucucccuccccu

SEQ ID NO: 2784043 - RNA, 22 nt, Human
ucucuuguauaagauccuagau

SEQ ID NO: 2784044 - RNA, 16 nt, Human
agaaaacaagcaaguu

SEQ ID NO: 2784045 - RNA, 13 nt, Human
agaaaacaaaauu

SEQ ID NO: 2784046 - RNA, 22 nt, Human
agaaaacaagaugagauuggca

SEQ ID NO: 2784047 - RNA, 13 nt, Human
agaaaaaugcuuu

SEQ ID NO: 2784048 - RNA, 20 nt, Human
agaaaaauucagcaaaccau

SEQ ID NO: 2784049 - RNA, 13 nt, Human
ucucuugguguua

SEQ ID NO: 2784050 - RNA, 20 nt, Human
ucucuugguguuaaaacacu

SEQ ID NO: 2784051 - RNA, 22 nt, Human
ucucuugguguuaaaacacuuc

SEQ ID NO: 2784052 - RNA, 21 nt, Human
ucucggcaacuaagcaguccc

SEQ ID NO: 2784053 - RNA, 17 nt, Human
acuuuguggaccaauua

SEQ ID NO: 2784054 - RNA, 18 nt, Human
acuuuguggaccaauuau

SEQ ID NO: 2784055 - RNA, 20 nt, Human
acuuuguggaccaauuauug

SEQ ID NO: 2784056 - RNA, 21 nt, Human
acuuuguggaccaauuauuga

SEQ ID NO: 2784057 - RNA, 22 nt, Human
acuuuguggaccaauuauugau

SEQ ID NO: 2784058 - RNA, 16 nt, Human
acuuuguguucaccuu

SEQ ID NO: 2784059 - RNA, 22 nt, Human
acuuuguaugucauuuccuuca

SEQ ID NO: 2784060 - RNA, 20 nt, Human
acuuugucgcccaggcugga

SEQ ID NO: 2784061 - RNA, 14 nt, Human
acuuugucugaaaa

SEQ ID NO: 2784062 - RNA, 15 nt, Human
acuuugucugaaaaa

SEQ ID NO: 2784063 - RNA, 17 nt, Human
acuuugucugaaaaauu

SEQ ID NO: 2784064 - RNA, 18 nt, Human
acuuuguguucaccuugu

SEQ ID NO: 2784065 - RNA, 14 nt, Human
agaaaaaaaucuuc

SEQ ID NO: 2784066 - RNA, 16 nt, Human
agaaaaaaaucuucuc

SEQ ID NO: 2784067 - RNA, 17 nt, Human
agaaaaaaaucuucucc

SEQ ID NO: 2784068 - RNA, 21 nt, Human
agaaaaaaaucuucuccagau

SEQ ID NO: 2784069 - RNA, 17 nt, Human
agaaaaaaagauuuauu

SEQ ID NO: 2784070 - RNA, 12 nt, Human
agaaaaaaacga

SEQ ID NO: 2784071 - RNA, 18 nt, Human
agaaaaaaacgaaaacag

SEQ ID NO: 2784072 - RNA, 18 nt, Human
agaaaaaaaccacacaaa

SEQ ID NO: 2784073 - RNA, 13 nt, Human
agaaaaaaaaaug

SEQ ID NO: 2784074 - RNA, 15 nt, Human
agaaaaaaaaaugcc

SEQ ID NO: 2784075 - RNA, 16 nt, Human
agaaaaaaaaaugcca

SEQ ID NO: 2784076 - RNA, 21 nt, Human
agaaaaaaaaaugccauaaua

SEQ ID NO: 2784077 - RNA, 22 nt, Human
agaaaaaaaaaugccauaauac

SEQ ID NO: 2784078 - RNA, 23 nt, Human
agaaaaaaaaaugccauaauaca

SEQ ID NO: 2784079 - RNA, 18 nt, Human
agaaaaaaaauagacuuu

SEQ ID NO: 2784080 - RNA, 12 nt, Human
agaaaaaaacaa

SEQ ID NO: 2784081 - RNA, 19 nt, Human
agaaaaaaauuacuaauuu

SEQ ID NO: 2784082 - RNA, 13 nt, Human
ucuccuucuuagc

SEQ ID NO: 2784083 - RNA, 11 nt, Human
ucuccuuccuu

SEQ ID NO: 2784084 - RNA, 14 nt, Human
ucuccuuccuuacc

SEQ ID NO: 2784085 - RNA, 18 nt, Human
ucuccuuccuuacccaaa

SEQ ID NO: 2784086 - RNA, 18 nt, Human
ucuccuucguaucccgag

SEQ ID NO: 2784087 - RNA, 19 nt, Human
ucuccuucguaucccgagu

SEQ ID NO: 2784088 - RNA, 23 nt, Human
ucuccuucguaucccgagucugg

SEQ ID NO: 2784089 - RNA, 14 nt, Human
ucuccuguuuuucu

SEQ ID NO: 2784090 - RNA, 17 nt, Human
ucuccuguuuuucuggg

SEQ ID NO: 2784091 - RNA, 19 nt, Human
ucuccuguuuuucugggug

SEQ ID NO: 2784092 - RNA, 19 nt, Human
ucuccuguuuauucccauc

SEQ ID NO: 2784093 - RNA, 20 nt, Human
ucuccuguuuauucccaucu

SEQ ID NO: 2784094 - RNA, 17 nt, Human
ucuccuguuucccuucc

SEQ ID NO: 2784095 - RNA, 18 nt, Human
ucuccuguuucccuuccc

SEQ ID NO: 2784096 - RNA, 17 nt, Human
ucucucagccuuacauu

SEQ ID NO: 2784097 - RNA, 14 nt, Human
ucucggcucagugc

SEQ ID NO: 2784098 - RNA, 16 nt, Human
ucucggcucagugcaa

SEQ ID NO: 2784099 - RNA, 15 nt, Human
ucucggcucacugca

SEQ ID NO: 2784100 - RNA, 23 nt, Human
ucuccuugcuccuggccuugcug

SEQ ID NO: 2784101 - RNA, 19 nt, Human
ucuccuugcccuagaugag

SEQ ID NO: 2784102 - RNA, 13 nt, Human
ucuccuugcaguu

SEQ ID NO: 2784103 - RNA, 14 nt, Human
ucuccuugcaguuc

SEQ ID NO: 2784104 - RNA, 17 nt, Human
ucuccuugcaguucuug

SEQ ID NO: 2784105 - RNA, 13 nt, Human
ucuccuugcccua

SEQ ID NO: 2784106 - RNA, 14 nt, Human
ucuccuucuuagcu

SEQ ID NO: 2784107 - RNA, 17 nt, Human
ucucgaacuccugaccu

SEQ ID NO: 2784108 - RNA, 19 nt, Human
ucuccuuuuccucucuccc

SEQ ID NO: 2784109 - RNA, 12 nt, Human
ucuccuuuucuu

SEQ ID NO: 2784110 - RNA, 14 nt, Human
ucuccuuuucuuuu

SEQ ID NO: 2784111 - RNA, 17 nt, Human
ucuccuuuucuuuuguu

SEQ ID NO: 2784112 - RNA, 18 nt, Human
ucuccuuuucuuuuguua

SEQ ID NO: 2784113 - RNA, 19 nt, Human
ucuccuuuucuuuuguuac

SEQ ID NO: 2784114 - RNA, 20 nt, Human
ucuccuuuucuuuuguuacu

SEQ ID NO: 2784115 - RNA, 21 nt, Human
ucuccuuuucuuuuguuacug

SEQ ID NO: 2784116 - RNA, 22 nt, Human
ucuccuuuucuuuuguuacugu

SEQ ID NO: 2784117 - RNA, 23 nt, Human
ucuccuuuucuuuuguuacuguu

SEQ ID NO: 2784118 - RNA, 20 nt, Human
ucucgaacuccuaaccucaa

SEQ ID NO: 2784119 - RNA, 14 nt, Human
ucuccuuguggccu

SEQ ID NO: 2784120 - RNA, 12 nt, Human
ucucgagcuugg

SEQ ID NO: 2784121 - RNA, 13 nt, Human
ucucgagcuuggg

SEQ ID NO: 2784122 - RNA, 16 nt, Human
ucucgcaucuucccaa

SEQ ID NO: 2784123 - RNA, 20 nt, Human
ucucgcuauugucaccaggg

SEQ ID NO: 2784124 - RNA, 17 nt, Human
ucucgcucuguugccca

SEQ ID NO: 2784125 - RNA, 16 nt, Human
ucucgcucccucccag

SEQ ID NO: 2784126 - RNA, 15 nt, Human
ucucgcucccuccca

SEQ ID NO: 2784127 - RNA, 17 nt, Human
ucucggaaggcuggcug

SEQ ID NO: 2784128 - RNA, 19 nt, Human
ucucggacuaagccuaccu

SEQ ID NO: 2784129 - RNA, 20 nt, Human
ucucggagcaucccggagga

SEQ ID NO: 2784130 - RNA, 18 nt, Human
ucucgcucccucccagga

SEQ ID NO: 2784131 - RNA, 14 nt, Human
acuuuaaaaaauau

SEQ ID NO: 2784132 - RNA, 21 nt, Human
acuuuaaaaaauauuuauuaa

SEQ ID NO: 2784133 - RNA, 17 nt, Human
acuuuagaaagcugaca

SEQ ID NO: 2784134 - RNA, 18 nt, Human
acuuuagaaagcugacau

SEQ ID NO: 2784135 - RNA, 21 nt, Human
acuuuagaagcacaguaaaua

SEQ ID NO: 2784136 - RNA, 19 nt, Human
acuuuagaagugcauuucu

SEQ ID NO: 2784137 - RNA, 20 nt, Human
acuuuagaagugcauuucug

SEQ ID NO: 2784138 - RNA, 21 nt, Human
acuuuagaagugcauuucuga

SEQ ID NO: 2784139 - RNA, 14 nt, Human
acuuuaggcuuuca

SEQ ID NO: 2784140 - RNA, 17 nt, Human
acuuuaggcuuucagcu

SEQ ID NO: 2784141 - RNA, 18 nt, Human
acuuuaggcuuucagcuu

SEQ ID NO: 2784142 - RNA, 19 nt, Human
acuuuaggcuuucagcuua

SEQ ID NO: 2784143 - RNA, 21 nt, Human
acuuuaggcuuucagcuuaca

SEQ ID NO: 2784144 - RNA, 17 nt, Human
acuuucuuucuguaggu

SEQ ID NO: 2784145 - RNA, 18 nt, Human
acuuucuuuaaauuaugu

SEQ ID NO: 2784146 - RNA, 23 nt, Human
acuuucuuuaaauuauguuuuua

SEQ ID NO: 2784147 - RNA, 14 nt, Human
acuuucuucugaau

SEQ ID NO: 2784148 - RNA, 18 nt, Human
acuuucuucugaauauuu

SEQ ID NO: 2784149 - RNA, 20 nt, Human
acuuucuucugaauauuuua

SEQ ID NO: 2784150 - RNA, 21 nt, Human
acuugugcuuucaguuagccu

SEQ ID NO: 2784151 - RNA, 15 nt, Human
acuugugcuuugcuc

SEQ ID NO: 2784152 - RNA, 16 nt, Human
acuuguuuucugggaa

SEQ ID NO: 2784153 - RNA, 16 nt, Human
acuuuaaaaggagcca

SEQ ID NO: 2784154 - RNA, 14 nt, Human
acuuguggacacag

SEQ ID NO: 2784155 - RNA, 17 nt, Human
acuugugauuauuuauu

SEQ ID NO: 2784156 - RNA, 20 nt, Human
acuugugauuauuuauuauu

SEQ ID NO: 2784157 - RNA, 13 nt, Human
acuugugccaaca

SEQ ID NO: 2784158 - RNA, 18 nt, Human
acuugugccaacacucaa

SEQ ID NO: 2784159 - RNA, 16 nt, Human
acuugugauuauuuau

SEQ ID NO: 2784160 - RNA, 12 nt, Human
acuugugaaugc

SEQ ID NO: 2784161 - RNA, 13 nt, Human
acuugugaaugcu

SEQ ID NO: 2784162 - RNA, 17 nt, Human
acuugugaaugcuucuc

SEQ ID NO: 2784163 - RNA, 18 nt, Human
acuugugaaugcuucuca

SEQ ID NO: 2784164 - RNA, 15 nt, Human
acuuugcuuucauga

SEQ ID NO: 2784165 - RNA, 14 nt, Human
acuuuguauacuuu

SEQ ID NO: 2784166 - RNA, 16 nt, Human
acuuuguauacuuuaa

SEQ ID NO: 2784167 - RNA, 17 nt, Human
acuuuguauacuuuaaa

SEQ ID NO: 2784168 - RNA, 18 nt, Human
acuuuguauacuuuaaau

SEQ ID NO: 2784169 - RNA, 21 nt, Human
acuuuguauacuuuaaauaau

SEQ ID NO: 2784170 - RNA, 19 nt, Human
acuuuguaugucauuuccu

SEQ ID NO: 2784171 - RNA, 14 nt, Human
acuuugaugucaug

SEQ ID NO: 2784172 - RNA, 15 nt, Human
acuuugaugucaugu

SEQ ID NO: 2784173 - RNA, 19 nt, Human
acuuugaugucauguguuc

SEQ ID NO: 2784174 - RNA, 21 nt, Human
acuuugaugucauguguuccc

SEQ ID NO: 2784175 - RNA, 22 nt, Human
acuuugaugucauguguucccu

SEQ ID NO: 2784176 - RNA, 14 nt, Human
acuuugcacauuuu

SEQ ID NO: 2784177 - RNA, 15 nt, Human
acuuugcacauuuug

SEQ ID NO: 2784178 - RNA, 20 nt, Human
acuuugcacauuuugauuuu

SEQ ID NO: 2784179 - RNA, 19 nt, Human
acuuugcacgacgcccucu

SEQ ID NO: 2784180 - RNA, 20 nt, Human
acuuugcacgacgcccucuc

SEQ ID NO: 2784181 - RNA, 21 nt, Human
acuuugaagacccgcuacaaa

SEQ ID NO: 2784182 - RNA, 16 nt, Human
acuuugaggugucuca

SEQ ID NO: 2784183 - RNA, 14 nt, Human
acuuugaaauaccu

SEQ ID NO: 2784184 - RNA, 15 nt, Human
acuuugaaauaccuc

SEQ ID NO: 2784185 - RNA, 16 nt, Human
acuuugaaauaccuca

SEQ ID NO: 2784186 - RNA, 17 nt, Human
acuuugaaauaccucau

SEQ ID NO: 2784187 - RNA, 20 nt, Human
acuuugaaauaccucauguu

SEQ ID NO: 2784188 - RNA, 21 nt, Human
acuuugaaauaccucauguuu

SEQ ID NO: 2784189 - RNA, 22 nt, Human
acuuugaaauaccucauguuua

SEQ ID NO: 2784190 - RNA, 23 nt, Human
acuuugaaauaccucauguuuau

SEQ ID NO: 2784191 - RNA, 17 nt, Human
acuuugcucuuucuuga

SEQ ID NO: 2784192 - RNA, 15 nt, Human
acuuugcugauuucc

SEQ ID NO: 2784193 - RNA, 20 nt, Human
acuuugcugauuuccccucu

SEQ ID NO: 2784194 - RNA, 15 nt, Human
acuuugcucuuucuu

SEQ ID NO: 2784195 - RNA, 15 nt, Human
acuuugccuccugug

SEQ ID NO: 2784196 - RNA, 16 nt, Human
acuuugccuccugugu

SEQ ID NO: 2784197 - RNA, 23 nt, Human
acuuugccuccuguguacugugu

SEQ ID NO: 2784198 - RNA, 10 nt, Human
agaacuuuuu

SEQ ID NO: 2784199 - RNA, 20 nt, Human
agaacuuuuucuuuucccuc

SEQ ID NO: 2784200 - RNA, 13 nt, Human
agaacuuuuuuaa

SEQ ID NO: 2784201 - RNA, 14 nt, Human
agaacuuuuuuaaa

SEQ ID NO: 2784202 - RNA, 15 nt, Human
agaacuuuuuuaaau

SEQ ID NO: 2784203 - RNA, 16 nt, Human
agaacuuuuuuaaaua

SEQ ID NO: 2784204 - RNA, 17 nt, Human
agaacuuuuuuaaauaa

SEQ ID NO: 2784205 - RNA, 18 nt, Human
agaacuuuuuuaaauaaa

SEQ ID NO: 2784206 - RNA, 19 nt, Human
agaacuuuuuuaaauaaac

SEQ ID NO: 2784207 - RNA, 20 nt, Human
agaacuuuuuuaaauaaacu

SEQ ID NO: 2784208 - RNA, 21 nt, Human
agaacuuuuuuaaauaaacuu

SEQ ID NO: 2784209 - RNA, 22 nt, Human
agaacuuuuuuaaauaaacuuu

SEQ ID NO: 2784210 - RNA, 18 nt, Human
agaacuugaaugugucag

SEQ ID NO: 2784211 - RNA, 20 nt, Human
agaacuucuccguccucgau

SEQ ID NO: 2784212 - RNA, 13 nt, Human
agaagcagagaga

SEQ ID NO: 2784213 - RNA, 18 nt, Human
agaagcaggcuacacuga

SEQ ID NO: 2784214 - RNA, 13 nt, Human
agaagcauuccuu

SEQ ID NO: 2784215 - RNA, 12 nt, Human
ucugcccugugg

SEQ ID NO: 2784216 - RNA, 20 nt, Human
ucugcccugugggaccccag

SEQ ID NO: 2784217 - RNA, 21 nt, Human
ucugcccugugggaccccagg

SEQ ID NO: 2784218 - RNA, 22 nt, Human
ucugcccugugggaccccaggc

SEQ ID NO: 2784219 - RNA, 16 nt, Human
ucugcccccugcuggc

SEQ ID NO: 2784220 - RNA, 22 nt, Human
ucugcccugcgggucacaggag

SEQ ID NO: 2784221 - RNA, 14 nt, Human
ucugcccccugcug

SEQ ID NO: 2784222 - RNA, 20 nt, Human
ucugccccccccccccaucu

SEQ ID NO: 2784223 - RNA, 17 nt, Human
ucugccccagcucuggc

SEQ ID NO: 2784224 - RNA, 16 nt, Human
ucugccccagcucugg

SEQ ID NO: 2784225 - RNA, 20 nt, Human
ucugccccagcucuggcuuc

SEQ ID NO: 2784226 - RNA, 13 nt, Human
ucugcccccagcc

SEQ ID NO: 2784227 - RNA, 14 nt, Human
ucugcccccagccc

SEQ ID NO: 2784228 - RNA, 15 nt, Human
ucugcccccagccca

SEQ ID NO: 2784229 - RNA, 16 nt, Human
ucugcccccagcccaa

SEQ ID NO: 2784230 - RNA, 18 nt, Human
ucugcccccagcccaaag

SEQ ID NO: 2784231 - RNA, 19 nt, Human
ucugcccccagcccaaagg

SEQ ID NO: 2784232 - RNA, 11 nt, Human
ucugccccagu

SEQ ID NO: 2784233 - RNA, 14 nt, Human
ucugccccagcucu

SEQ ID NO: 2784234 - RNA, 21 nt, Human
agaaccuggaaaaauuccaga

SEQ ID NO: 2784235 - RNA, 23 nt, Human
agaaccuggaaaaauuccagaag

SEQ ID NO: 2784236 - RNA, 18 nt, Human
agaaauuacacccaaaga

SEQ ID NO: 2784237 - RNA, 13 nt, Human
ucugaaugcugcc

SEQ ID NO: 2784238 - RNA, 20 nt, Human
ucugaaugcugccacaacca

SEQ ID NO: 2784239 - RNA, 14 nt, Human
agaaauuagccggg

SEQ ID NO: 2784240 - RNA, 12 nt, Human
agaaauuagaaa

SEQ ID NO: 2784241 - RNA, 21 nt, Human
agaaauuagaaaaaaauuacu

SEQ ID NO: 2784242 - RNA, 17 nt, Human
agaaauuagaaaccuua

SEQ ID NO: 2784243 - RNA, 15 nt, Human
agaaauuagccgggc

SEQ ID NO: 2784244 - RNA, 22 nt, Human
ucugaaucgagugagacaaaau

SEQ ID NO: 2784245 - RNA, 16 nt, Human
ucugaauagaaauggg

SEQ ID NO: 2784246 - RNA, 19 nt, Human
ucugaaggggcaaauucuu

SEQ ID NO: 2784247 - RNA, 14 nt, Human
agaacucacugggg

SEQ ID NO: 2784248 - RNA, 15 nt, Human
agaacugcacaugaa

SEQ ID NO: 2784249 - RNA, 17 nt, Human
agaacugcacaugaaga

SEQ ID NO: 2784250 - RNA, 19 nt, Human
agaacugcacaugaagaaa

SEQ ID NO: 2784251 - RNA, 20 nt, Human
agaacugcacaugaagaaau

SEQ ID NO: 2784252 - RNA, 21 nt, Human
agaacugcacaugaagaaaua

SEQ ID NO: 2784253 - RNA, 18 nt, Human
agaacgaggauuuuaauu

SEQ ID NO: 2784254 - RNA, 23 nt, Human
agaacgcagcccuagagccugcc

SEQ ID NO: 2784255 - RNA, 13 nt, Human
agaacgcagcccu

SEQ ID NO: 2784256 - RNA, 22 nt, Human
agaacgcagcccuagagccugc

SEQ ID NO: 2784257 - RNA, 17 nt, Human
agaacuauuuuauucua

SEQ ID NO: 2784258 - RNA, 20 nt, Human
agaacucaaacuucuggcuc

SEQ ID NO: 2784259 - RNA, 16 nt, Human
agaacuauaugugaau

SEQ ID NO: 2784260 - RNA, 19 nt, Human
agaacuauaugugaauccu

SEQ ID NO: 2784261 - RNA, 21 nt, Human
agaacuauaugugaauccucu

SEQ ID NO: 2784262 - RNA, 15 nt, Human
agaacuagcauauag

SEQ ID NO: 2784263 - RNA, 14 nt, Human
agaagugcauuucu

SEQ ID NO: 2784264 - RNA, 15 nt, Human
agaagugcauuucug

SEQ ID NO: 2784265 - RNA, 16 nt, Human
agaagugcauuucuga

SEQ ID NO: 2784266 - RNA, 19 nt, Human
agaagugcauuucugaaua

SEQ ID NO: 2784267 - RNA, 24 nt, Human
agaagugcauuucugaauagaaau

SEQ ID NO: 2784268 - RNA, 21 nt, Human
agaagugagaauaggcagccc

SEQ ID NO: 2784269 - RNA, 18 nt, Human
agaagugagaauaggcag

SEQ ID NO: 2784270 - RNA, 15 nt, Human
agaagugcuccccuc

SEQ ID NO: 2784271 - RNA, 17 nt, Human
agaagugaguguuucua

SEQ ID NO: 2784272 - RNA, 19 nt, Human
agaaguuguggauuucagu

SEQ ID NO: 2784273 - RNA, 20 nt, Human
agaaguuguggauuucaguu

SEQ ID NO: 2784274 - RNA, 21 nt, Human
agaaguuguggauuucaguuu

SEQ ID NO: 2784275 - RNA, 14 nt, Human
agaaguuguuuguc

SEQ ID NO: 2784276 - RNA, 20 nt, Human
agaaguugaggauuguugaa

SEQ ID NO: 2784277 - RNA, 18 nt, Human
agaaguugauauagaaca

SEQ ID NO: 2784278 - RNA, 19 nt, Human
agaaguugauauagaacag

SEQ ID NO: 2784279 - RNA, 14 nt, Human
agaaggagagaaag

SEQ ID NO: 2784280 - RNA, 18 nt, Human
agaaggagagaaaguggg

SEQ ID NO: 2784281 - RNA, 19 nt, Human
agaaggagagaaagugggu

SEQ ID NO: 2784282 - RNA, 21 nt, Human
agaaggaugaaugagguccca

SEQ ID NO: 2784283 - RNA, 14 nt, Human
agaaggaugaauga

SEQ ID NO: 2784284 - RNA, 20 nt, Human
agaaggagucagaaacuguu

SEQ ID NO: 2784285 - RNA, 11 nt, Human
agaaggcaaaa

SEQ ID NO: 2784286 - RNA, 13 nt, Human
agaaggagagaaa

SEQ ID NO: 2784287 - RNA, 23 nt, Human
agaagcucccugaaguaagcaaa

SEQ ID NO: 2784288 - RNA, 13 nt, Human
agaauaaucuuug

SEQ ID NO: 2784289 - RNA, 13 nt, Human
agaaguuugucca

SEQ ID NO: 2784290 - RNA, 15 nt, Human
agaaguuuguccauu

SEQ ID NO: 2784291 - RNA, 19 nt, Human
agaaguuuguccauuugua

SEQ ID NO: 2784292 - RNA, 21 nt, Human
agaaguuuguccauuuguaaa

SEQ ID NO: 2784293 - RNA, 22 nt, Human
agaaguuuguccauuuguaaaa

SEQ ID NO: 2784294 - RNA, 14 nt, Human
agaauacagcuuuc

SEQ ID NO: 2784295 - RNA, 15 nt, Human
agaauacagcuuucu

SEQ ID NO: 2784296 - RNA, 16 nt, Human
agaauacagcuuucug

SEQ ID NO: 2784297 - RNA, 17 nt, Human
agaauacagcuuucuga

SEQ ID NO: 2784298 - RNA, 16 nt, Human
agaauaaucuuugggu

SEQ ID NO: 2784299 - RNA, 14 nt, Human
agaauaauguucua

SEQ ID NO: 2784300 - RNA, 16 nt, Human
agaauaauguucuauu

SEQ ID NO: 2784301 - RNA, 19 nt, Human
agaauaauguucuauugug

SEQ ID NO: 2784302 - RNA, 21 nt, Human
agaauaauucaauuuuaaaga

SEQ ID NO: 2784303 - RNA, 19 nt, Human
agaauagccacauuuggaa

SEQ ID NO: 2784304 - RNA, 20 nt, Human
agaauagccacauuuggaau

SEQ ID NO: 2784305 - RNA, 21 nt, Human
agaauagccacauuuggaaua

SEQ ID NO: 2784306 - RNA, 20 nt, Human
agaauagccuagauaugaau

SEQ ID NO: 2784307 - RNA, 11 nt, Human
agaauauauau

SEQ ID NO: 2784308 - RNA, 12 nt, Human
agaauauauaua

SEQ ID NO: 2784309 - RNA, 15 nt, Human
agaauauauauauau

SEQ ID NO: 2784310 - RNA, 12 nt, Human
agaauauauuua

SEQ ID NO: 2784311 - RNA, 13 nt, Human
agaauauauuuau

SEQ ID NO: 2784312 - RNA, 14 nt, Human
agaauauauuuauu

SEQ ID NO: 2784313 - RNA, 14 nt, Human
agaaucaaucagua

SEQ ID NO: 2784314 - RNA, 13 nt, Human
agaauauaacaug

SEQ ID NO: 2784315 - RNA, 14 nt, Human
agaauauaacauga

SEQ ID NO: 2784316 - RNA, 15 nt, Human
agaauauaacaugaa

SEQ ID NO: 2784317 - RNA, 16 nt, Human
agaauauaacaugaaa

SEQ ID NO: 2784318 - RNA, 21 nt, Human
agaauauaacaugaaaugaua

SEQ ID NO: 2784319 - RNA, 22 nt, Human
agaauauaacaugaaaugauag

SEQ ID NO: 2784320 - RNA, 18 nt, Human
agaauaggcauuaacaca

SEQ ID NO: 2784321 - RNA, 19 nt, Human
agaauaggcauuaacacaa

SEQ ID NO: 2784322 - RNA, 14 nt, Human
agaauauaggucuc

SEQ ID NO: 2784323 - RNA, 19 nt, Human
agaauauaggucucuucuc

SEQ ID NO: 2784324 - RNA, 14 nt, Human
agaagccugaggcu

SEQ ID NO: 2784325 - RNA, 12 nt, Human
agaagccugagg

SEQ ID NO: 2784326 - RNA, 17 nt, Human
agaagccugaggcuggg

SEQ ID NO: 2784327 - RNA, 14 nt, Human
agaagccucuggcu

SEQ ID NO: 2784328 - RNA, 13 nt, Human
agaagccucuggc

SEQ ID NO: 2784329 - RNA, 12 nt, Human
agaagccucugg

SEQ ID NO: 2784330 - RNA, 20 nt, Human
agaagccucguuuugaugcc

SEQ ID NO: 2784331 - RNA, 23 nt, Human
agaagccucuggcuagaggccag

SEQ ID NO: 2784332 - RNA, 16 nt, Human
agaagccucuggcuag

SEQ ID NO: 2784333 - RNA, 23 nt, Human
agaagccucugggucaguggucc

SEQ ID NO: 2784334 - RNA, 22 nt, Human
agaagccucugggucagugguc

SEQ ID NO: 2784335 - RNA, 12 nt, Human
ucuggccuggcc

SEQ ID NO: 2784336 - RNA, 13 nt, Human
agaagcccugaug

SEQ ID NO: 2784337 - RNA, 13 nt, Human
ucuggccuggccu

SEQ ID NO: 2784338 - RNA, 14 nt, Human
ucuggccuggccug

SEQ ID NO: 2784339 - RNA, 16 nt, Human
ucuggccuggccuggc

SEQ ID NO: 2784340 - RNA, 17 nt, Human
ucuggccuggccuggcc

SEQ ID NO: 2784341 - RNA, 18 nt, Human
ucuggccuggccuggccc

SEQ ID NO: 2784342 - RNA, 19 nt, Human
ucuggccuggccuggcccu

SEQ ID NO: 2784343 - RNA, 20 nt, Human
ucuggccuggccuggcccug

SEQ ID NO: 2784344 - RNA, 21 nt, Human
ucuggccuggccuggcccugc

SEQ ID NO: 2784345 - RNA, 22 nt, Human
ucuggccuggccuggcccugcc

SEQ ID NO: 2784346 - RNA, 23 nt, Human
ucuggccuggccuggcccugccc

SEQ ID NO: 2784347 - RNA, 22 nt, Human
agaagccgggaacagacaacag

SEQ ID NO: 2784348 - RNA, 18 nt, Human
agaagccgggaacagaca

SEQ ID NO: 2784349 - RNA, 16 nt, Human
agaagccgggaacaga

SEQ ID NO: 2784350 - RNA, 14 nt, Human
agaagccgggaaca

SEQ ID NO: 2784351 - RNA, 14 nt, Human
ucuggccucccaca

SEQ ID NO: 2784352 - RNA, 13 nt, Human
ucuggccucccac

SEQ ID NO: 2784353 - RNA, 17 nt, Human
ucuggccuaaaaucuug

SEQ ID NO: 2784354 - RNA, 22 nt, Human
ucuggccuaaaaucuuggaagu

SEQ ID NO: 2784355 - RNA, 13 nt, Human
ucugcuuuuauua

SEQ ID NO: 2784356 - RNA, 16 nt, Human
ucugcccuucacccca

SEQ ID NO: 2784357 - RNA, 12 nt, Human
ucugccugucuc

SEQ ID NO: 2784358 - RNA, 14 nt, Human
ucugccugucuccc

SEQ ID NO: 2784359 - RNA, 13 nt, Human
ucugccuuagagg

SEQ ID NO: 2784360 - RNA, 16 nt, Human
ucugccuuagaggagc

SEQ ID NO: 2784361 - RNA, 15 nt, Human
ucugccuuagucuca

SEQ ID NO: 2784362 - RNA, 19 nt, Human
ucugccuuagucucaguuu

SEQ ID NO: 2784363 - RNA, 16 nt, Human
ucugccuguugcguga

SEQ ID NO: 2784364 - RNA, 13 nt, Human
ucuggauucccag

SEQ ID NO: 2784365 - RNA, 14 nt, Human
ucuggauucccagg

SEQ ID NO: 2784366 - RNA, 17 nt, Human
ucuggauucccaggaug

SEQ ID NO: 2784367 - RNA, 21 nt, Human
ucuggauucccaggaugagca

SEQ ID NO: 2784368 - RNA, 22 nt, Human
ucuggauucccaggaugagcau

SEQ ID NO: 2784369 - RNA, 13 nt, Human
ucuggaagaaaaa

SEQ ID NO: 2784370 - RNA, 14 nt, Human
ucuggaagaaaaaa

SEQ ID NO: 2784371 - RNA, 18 nt, Human
ucuggaagcccuggagac

SEQ ID NO: 2784372 - RNA, 13 nt, Human
ucuggaagggcca

SEQ ID NO: 2784373 - RNA, 13 nt, Human
ucuggaaguccaa

SEQ ID NO: 2784374 - RNA, 18 nt, Human
ugaauacuuacauucucu

SEQ ID NO: 2784375 - RNA, 17 nt, Human
ugaauaccauuaaaacu

SEQ ID NO: 2784376 - RNA, 21 nt, Human
ugaauaccauuaaaacugcuu

SEQ ID NO: 2784377 - RNA, 22 nt, Human
ugaauaccauuaaaacugcuuu

SEQ ID NO: 2784378 - RNA, 23 nt, Human
ugaauaccauuaaaacugcuuuu

SEQ ID NO: 2784379 - RNA, 14 nt, Human
ugaagucacacagu

SEQ ID NO: 2784380 - RNA, 14 nt, Human
ugaagucacugcac

SEQ ID NO: 2784381 - RNA, 12 nt, Human
ugaauaaagugu

SEQ ID NO: 2784382 - RNA, 14 nt, Human
ugaagucaccuugu

SEQ ID NO: 2784383 - RNA, 20 nt, Human
ugaauaaagccugcuuuuua

SEQ ID NO: 2784384 - RNA, 18 nt, Human
ugaagucacaucacagga

SEQ ID NO: 2784385 - RNA, 18 nt, Human
ugaauaaagccugcuuuu

SEQ ID NO: 2784386 - RNA, 15 nt, Human
ugaagucacugcaca

SEQ ID NO: 2784387 - RNA, 16 nt, Human
ugaagucacugcacag

SEQ ID NO: 2784388 - RNA, 16 nt, Human
ugaauaaagacaccua

SEQ ID NO: 2784389 - RNA, 17 nt, Human
ugaauauugaaguuuca

SEQ ID NO: 2784390 - RNA, 14 nt, Human
ugaauaugccugua

SEQ ID NO: 2784391 - RNA, 16 nt, Human
ugaauaugccuguaau

SEQ ID NO: 2784392 - RNA, 21 nt, Human
ugaauaugccuguaauucagu

SEQ ID NO: 2784393 - RNA, 23 nt, Human
ugaauaugccuguaauucagugu

SEQ ID NO: 2784394 - RNA, 12 nt, Human
ugaauauggaca

SEQ ID NO: 2784395 - RNA, 19 nt, Human
ugaauauggacaagaggua

SEQ ID NO: 2784396 - RNA, 22 nt, Human
ugaauauggacaagagguacag

SEQ ID NO: 2784397 - RNA, 21 nt, Human
ugaauauggacucaguuuucu

SEQ ID NO: 2784398 - RNA, 15 nt, Human
ugaauauuacuccua

SEQ ID NO: 2784399 - RNA, 19 nt, Human
ugaauauuacuccuauuuu

SEQ ID NO: 2784400 - RNA, 22 nt, Human
ugaauauuacuccuauuuuugu

SEQ ID NO: 2784401 - RNA, 18 nt, Human
ugaauaucuauuaauaua

SEQ ID NO: 2784402 - RNA, 21 nt, Human
ugaauaucuauuaauauaugu

SEQ ID NO: 2784403 - RNA, 14 nt, Human
ugaauaucuuucga

SEQ ID NO: 2784404 - RNA, 21 nt, Human
ugaauagcaauagcauggaua

SEQ ID NO: 2784405 - RNA, 16 nt, Human
ugaauacuuuuuacaa

SEQ ID NO: 2784406 - RNA, 12 nt, Human
ugaauagaaaug

SEQ ID NO: 2784407 - RNA, 15 nt, Human
ugaauagaaauggga

SEQ ID NO: 2784408 - RNA, 13 nt, Human
ugaaugggaucau

SEQ ID NO: 2784409 - RNA, 18 nt, Human
ugaaugggaucaugaaag

SEQ ID NO: 2784410 - RNA, 20 nt, Human
ugaaugggaucaugaaagua

SEQ ID NO: 2784411 - RNA, 19 nt, Human
ugaauguagcagccccggg

SEQ ID NO: 2784412 - RNA, 11 nt, Human
ugaauguauuu

SEQ ID NO: 2784413 - RNA, 16 nt, Human
ugaauguauugaacuu

SEQ ID NO: 2784414 - RNA, 20 nt, Human
ugaauguauguaaugugugg

SEQ ID NO: 2784415 - RNA, 22 nt, Human
ugaauguauguaauguguggug

SEQ ID NO: 2784416 - RNA, 14 nt, Human
agaguaugaacacc

SEQ ID NO: 2784417 - RNA, 13 nt, Human
agaguauggagcu

SEQ ID NO: 2784418 - RNA, 14 nt, Human
agaguauggagcuc

SEQ ID NO: 2784419 - RNA, 21 nt, Human
agaguauggagcucagagagg

SEQ ID NO: 2784420 - RNA, 22 nt, Human
agaguaugugccaggaaacucu

SEQ ID NO: 2784421 - RNA, 16 nt, Human
agaguauugagauacu

SEQ ID NO: 2784422 - RNA, 20 nt, Human
agagguuaucugucccaggu

SEQ ID NO: 2784423 - RNA, 14 nt, Human
agaguaguuauaua

SEQ ID NO: 2784424 - RNA, 23 nt, Human
agaguaguuauauaauuguugaa

SEQ ID NO: 2784425 - RNA, 13 nt, Human
agaguauaugcac

SEQ ID NO: 2784426 - RNA, 17 nt, Human
agagguuaucuguccca

SEQ ID NO: 2784427 - RNA, 15 nt, Human
ugaagccaaagccaa

SEQ ID NO: 2784428 - RNA, 23 nt, Human
agaguauuggucuccucucagcc

SEQ ID NO: 2784429 - RNA, 16 nt, Human
ugaagccacugaagcu

SEQ ID NO: 2784430 - RNA, 13 nt, Human
ugaagccuuuuga

SEQ ID NO: 2784431 - RNA, 15 nt, Human
ugaagccuuuugaaa

SEQ ID NO: 2784432 - RNA, 16 nt, Human
ugaagccuuuugaaag

SEQ ID NO: 2784433 - RNA, 21 nt, Human
ugaagcgaaacacagagaagc

SEQ ID NO: 2784434 - RNA, 17 nt, Human
ugaagcgugauuuuaaa

SEQ ID NO: 2784435 - RNA, 12 nt, Human
ugaagccuuugu

SEQ ID NO: 2784436 - RNA, 22 nt, Human
ugaaggggccaaggagggugag

SEQ ID NO: 2784437 - RNA, 23 nt, Human
ugaaggggcaaauucuuuugaau

SEQ ID NO: 2784438 - RNA, 13 nt, Human
ugaagggcccagg

SEQ ID NO: 2784439 - RNA, 14 nt, Human
ugaagggcccagga

SEQ ID NO: 2784440 - RNA, 14 nt, Human
ugaagcuacugugu

SEQ ID NO: 2784441 - RNA, 22 nt, Human
ugaagcuacugugugugugaau

SEQ ID NO: 2784442 - RNA, 14 nt, Human
ugaaaguacauuug

SEQ ID NO: 2784443 - RNA, 15 nt, Human
ugaaagguuuacauu

SEQ ID NO: 2784444 - RNA, 23 nt, Human
ugaaaguacauuuggagacacaa

SEQ ID NO: 2784445 - RNA, 21 nt, Human
agagcugaagaguugccccgu

SEQ ID NO: 2784446 - RNA, 20 nt, Human
ugaaaguagcagugugaagu

SEQ ID NO: 2784447 - RNA, 16 nt, Human
ugaaaguccagaaacu

SEQ ID NO: 2784448 - RNA, 18 nt, Human
ugaaagucagaugcccag

SEQ ID NO: 2784449 - RNA, 15 nt, Human
ugaaagucagaugcc

SEQ ID NO: 2784450 - RNA, 18 nt, Human
ugaaaguccagaaacugu

SEQ ID NO: 2784451 - RNA, 24 nt, Human
agagggaggagaaugagccucggc

SEQ ID NO: 2784452 - RNA, 19 nt, Human
agagggagaagggauggag

SEQ ID NO: 2784453 - RNA, 14 nt, Human
ugaauuuuguugcu

SEQ ID NO: 2784454 - RNA, 23 nt, Human
ugaauuuuaaaucuaaaucuauu

SEQ ID NO: 2784455 - RNA, 14 nt, Human
ugaauuuuaagggu

SEQ ID NO: 2784456 - RNA, 17 nt, Human
ugaauuuuaaggguuuc

SEQ ID NO: 2784457 - RNA, 13 nt, Human
ugaauuuguacuu

SEQ ID NO: 2784458 - RNA, 21 nt, Human
ugaauuuggccugcacuaauu

SEQ ID NO: 2784459 - RNA, 12 nt, Human
ugacaaacugug

SEQ ID NO: 2784460 - RNA, 22 nt, Human
ugacaaacuguguacauagcgg

SEQ ID NO: 2784461 - RNA, 10 nt, Human
ugacaaaauu

SEQ ID NO: 2784462 - RNA, 17 nt, Human
ugaauuuuaaaucuaaa

SEQ ID NO: 2784463 - RNA, 16 nt, Human
ugaauuuuguugcugu

SEQ ID NO: 2784464 - RNA, 15 nt, Human
ugaauuugcccuggg

SEQ ID NO: 2784465 - RNA, 17 nt, Human
ugaauuugcccugggaa

SEQ ID NO: 2784466 - RNA, 18 nt, Human
ugaauuugcccugggaaa

SEQ ID NO: 2784467 - RNA, 17 nt, Human
agaucaaaauaaaaagu

SEQ ID NO: 2784468 - RNA, 14 nt, Human
agaucaaaauaaaa

SEQ ID NO: 2784469 - RNA, 16 nt, Human
agaucaaaauaaaaag

SEQ ID NO: 2784470 - RNA, 23 nt, Human
agaucaaauuucacgucgucuuc

SEQ ID NO: 2784471 - RNA, 14 nt, Human
agaucaaauuucac

SEQ ID NO: 2784472 - RNA, 20 nt, Human
ugaauuuggccugcacuaau

SEQ ID NO: 2784473 - RNA, 20 nt, Human
ugaauuuggagacucugugg

SEQ ID NO: 2784474 - RNA, 17 nt, Human
ugaauuuggagacucug

SEQ ID NO: 2784475 - RNA, 15 nt, Human
ugaauuuggagacuc

SEQ ID NO: 2784476 - RNA, 14 nt, Human
ugaauuuggagacu

SEQ ID NO: 2784477 - RNA, 14 nt, Human
ugacaccaaagcca

SEQ ID NO: 2784478 - RNA, 16 nt, Human
ugacaccaaagccacc

SEQ ID NO: 2784479 - RNA, 20 nt, Human
ugacaccaaagccaccucug

SEQ ID NO: 2784480 - RNA, 21 nt, Human
ugacacauaugcaccuugugu

SEQ ID NO: 2784481 - RNA, 22 nt, Human
ugacacauaugcaccuuguguc

SEQ ID NO: 2784482 - RNA, 19 nt, Human
ugacacauccgccuuuugu

SEQ ID NO: 2784483 - RNA, 22 nt, Human
ugacacauccgccuuuuguaua

SEQ ID NO: 2784484 - RNA, 21 nt, Human
ugacacccgugagcgccugug

SEQ ID NO: 2784485 - RNA, 22 nt, Human
ugacacccgugagcgccugugc

SEQ ID NO: 2784486 - RNA, 15 nt, Human
ugacacucuccuugc

SEQ ID NO: 2784487 - RNA, 17 nt, Human
ugacacucuccuugcag

SEQ ID NO: 2784488 - RNA, 18 nt, Human
ugacacucuccuugcagu

SEQ ID NO: 2784489 - RNA, 19 nt, Human
ugacacucuccuugcaguu

SEQ ID NO: 2784490 - RNA, 20 nt, Human
ugacacucuccuugcaguuc

SEQ ID NO: 2784491 - RNA, 16 nt, Human
ugacacucccacccag

SEQ ID NO: 2784492 - RNA, 18 nt, Human
ugacacucccacccaguc

SEQ ID NO: 2784493 - RNA, 20 nt, Human
ugacacucccacccagucuc

SEQ ID NO: 2784494 - RNA, 15 nt, Human
ugacacuagaaaacu

SEQ ID NO: 2784495 - RNA, 18 nt, Human
ugacacuauaguuuaaaa

SEQ ID NO: 2784496 - RNA, 20 nt, Human
ugacacuauaguuuaaaaca

SEQ ID NO: 2784497 - RNA, 18 nt, Human
ugacacacagcucugucc

SEQ ID NO: 2784498 - RNA, 16 nt, Human
ugacacacagcucugu

SEQ ID NO: 2784499 - RNA, 14 nt, Human
ugacaaagauggcu

SEQ ID NO: 2784500 - RNA, 16 nt, Human
ugacaaagauggcuca

SEQ ID NO: 2784501 - RNA, 18 nt, Human
ugacaaagauggcucaga

SEQ ID NO: 2784502 - RNA, 19 nt, Human
ugacaaagauggcucagag

SEQ ID NO: 2784503 - RNA, 23 nt, Human
ugacaaagauggcucagaggggg

SEQ ID NO: 2784504 - RNA, 19 nt, Human
ugacacacagcucuguccu

SEQ ID NO: 2784505 - RNA, 23 nt, Human
ugacacagaaaauguugagaauc

SEQ ID NO: 2784506 - RNA, 11 nt, Human
ugacacagacu

SEQ ID NO: 2784507 - RNA, 12 nt, Human
ugacacagacuc

SEQ ID NO: 2784508 - RNA, 13 nt, Human
ugacacagacuca

SEQ ID NO: 2784509 - RNA, 17 nt, Human
ugacacagacucauccu

SEQ ID NO: 2784510 - RNA, 19 nt, Human
ugacacagacucauccuga

SEQ ID NO: 2784511 - RNA, 22 nt, Human
ugacacagacucauccugaaca

SEQ ID NO: 2784512 - RNA, 22 nt, Human
ugacacagucuuggcucacugc

SEQ ID NO: 2784513 - RNA, 23 nt, Human
ugacacagucuuggcucacugca

SEQ ID NO: 2784514 - RNA, 16 nt, Human
ugacacagcagcuuca

SEQ ID NO: 2784515 - RNA, 16 nt, Human
ugacacaggaugaagg

SEQ ID NO: 2784516 - RNA, 22 nt, Human
ugacacagcagcuucaccagag

SEQ ID NO: 2784517 - RNA, 16 nt, Human
ugacacaggaaaccaa

SEQ ID NO: 2784518 - RNA, 15 nt, Human
agauaauauuacugu

SEQ ID NO: 2784519 - RNA, 16 nt, Human
agauaauauuacuguu

SEQ ID NO: 2784520 - RNA, 20 nt, Human
agauacaggaaaagcugcug

SEQ ID NO: 2784521 - RNA, 13 nt, Human
agauacuggugga

SEQ ID NO: 2784522 - RNA, 14 nt, Human
agauacugguggaa

SEQ ID NO: 2784523 - RNA, 11 nt, Human
agauauuuggc

SEQ ID NO: 2784524 - RNA, 12 nt, Human
agauauuuggcu

SEQ ID NO: 2784525 - RNA, 16 nt, Human
agauauuuggcuuaaa

SEQ ID NO: 2784526 - RNA, 19 nt, Human
agauauuuggcuuaaauau

SEQ ID NO: 2784527 - RNA, 20 nt, Human
agauauuuggcuuaaauaua

SEQ ID NO: 2784528 - RNA, 21 nt, Human
agauauuuggcuuaaauauag

SEQ ID NO: 2784529 - RNA, 21 nt, Human
agauauuuucacaaugucagu

SEQ ID NO: 2784530 - RNA, 12 nt, Human
agaucaaaauaa

SEQ ID NO: 2784531 - RNA, 14 nt, Human
agagucacaagccu

SEQ ID NO: 2784532 - RNA, 20 nt, Human
agagucacacgggggcagcu

SEQ ID NO: 2784533 - RNA, 21 nt, Human
agagucacacgggggcagcug

SEQ ID NO: 2784534 - RNA, 12 nt, Human
agauaagacaua

SEQ ID NO: 2784535 - RNA, 19 nt, Human
agauaacuuugacuuucuu

SEQ ID NO: 2784536 - RNA, 22 nt, Human
agaguuuguguguugucuugaa

SEQ ID NO: 2784537 - RNA, 18 nt, Human
agaguuuguguguugucu

SEQ ID NO: 2784538 - RNA, 19 nt, Human
agaguuuguguguugucuu

SEQ ID NO: 2784539 - RNA, 13 nt, Human
agaguuugugugu

SEQ ID NO: 2784540 - RNA, 16 nt, Human
agaguuuguguguugu

SEQ ID NO: 2784541 - RNA, 21 nt, Human
agaguuugccuuccuuucucc

SEQ ID NO: 2784542 - RNA, 16 nt, Human
agaguuugguuugguc

SEQ ID NO: 2784543 - RNA, 14 nt, Human
agaguuucuguuug

SEQ ID NO: 2784544 - RNA, 15 nt, Human
agaguuucuguuuga

SEQ ID NO: 2784545 - RNA, 18 nt, Human
agaguuucuguuugauuc

SEQ ID NO: 2784546 - RNA, 22 nt, Human
agaguuucuguuugauucuuuu

SEQ ID NO: 2784547 - RNA, 21 nt, Human
agauaaccagcuguaacacag

SEQ ID NO: 2784548 - RNA, 22 nt, Human
agauaacgcuuaaaggaaguca

SEQ ID NO: 2784549 - RNA, 22 nt, Human
agauaacacacuuuuuauuaga

SEQ ID NO: 2784550 - RNA, 15 nt, Human
agauaacauuugugu

SEQ ID NO: 2784551 - RNA, 22 nt, Human
agcaaaaaaguccaauuuuaau

SEQ ID NO: 2784552 - RNA, 19 nt, Human
agcaaaaaaaacccaugug

SEQ ID NO: 2784553 - RNA, 23 nt, Human
agcaaaaaaaacccaugugguga

SEQ ID NO: 2784554 - RNA, 20 nt, Human
agcaacguagcuucuaccau

SEQ ID NO: 2784555 - RNA, 14 nt, Human
agcaacucuugauu

SEQ ID NO: 2784556 - RNA, 13 nt, Human
agcaaaaaaugaa

SEQ ID NO: 2784557 - RNA, 20 nt, Human
agcaaaaaaugaaugucuaa

SEQ ID NO: 2784558 - RNA, 13 nt, Human
agauuuuuuauug

SEQ ID NO: 2784559 - RNA, 16 nt, Human
agauuuuuuauugcua

SEQ ID NO: 2784560 - RNA, 18 nt, Human
agauuuuuuauugcuagu

SEQ ID NO: 2784561 - RNA, 22 nt, Human
agauuuuuuauugcuaguauuu

SEQ ID NO: 2784562 - RNA, 23 nt, Human
agauuuuuuauugcuaguauuug

SEQ ID NO: 2784563 - RNA, 16 nt, Human
agauuuuuucagacuu

SEQ ID NO: 2784564 - RNA, 21 nt, Human
agauuuuuucagacuugucaa

SEQ ID NO: 2784565 - RNA, 22 nt, Human
agauuuuuucagacuugucaag

SEQ ID NO: 2784566 - RNA, 13 nt, Human
agauuuuugcaau

SEQ ID NO: 2784567 - RNA, 22 nt, Human
agauuuuucucaaaguuuugaa

SEQ ID NO: 2784568 - RNA, 13 nt, Human
agauuuuucucaa

SEQ ID NO: 2784569 - RNA, 14 nt, Human
agauuuuugcaaua

SEQ ID NO: 2784570 - RNA, 22 nt, Human
agauuucuuaaauaaugcuuca

SEQ ID NO: 2784571 - RNA, 13 nt, Human
agauuuuuuuuaa

SEQ ID NO: 2784572 - RNA, 15 nt, Human
agcaacuuuugugua

SEQ ID NO: 2784573 - RNA, 20 nt, Human
agcaacuuuuguguaaugaa

SEQ ID NO: 2784574 - RNA, 16 nt, Human
agcaagaaaaaaaaau

SEQ ID NO: 2784575 - RNA, 18 nt, Human
agcaagaaaaaaaaaugc

SEQ ID NO: 2784576 - RNA, 19 nt, Human
agcaagaaaaaaaaaugcc

SEQ ID NO: 2784577 - RNA, 20 nt, Human
agcaagaaaaaaaaaugcca

SEQ ID NO: 2784578 - RNA, 21 nt, Human
agcaagaagauccuaaaacaa

SEQ ID NO: 2784579 - RNA, 21 nt, Human
agcaagaauaaaaaagaaauc

SEQ ID NO: 2784580 - RNA, 18 nt, Human
agcaacuucuucuccauc

SEQ ID NO: 2784581 - RNA, 16 nt, Human
agcaacuucuucucca

SEQ ID NO: 2784582 - RNA, 15 nt, Human
agcaacuucuucucc

SEQ ID NO: 2784583 - RNA, 21 nt, Human
agcaacuguuaugaaauaaag

SEQ ID NO: 2784584 - RNA, 21 nt, Human
agcaacuucuucuccaucccu

SEQ ID NO: 2784585 - RNA, 12 nt, Human
agcaacuugaac

SEQ ID NO: 2784586 - RNA, 22 nt, Human
agcaacuugaacuucaccugca

SEQ ID NO: 2784587 - RNA, 13 nt, Human
agcaacuguuaug

SEQ ID NO: 2784588 - RNA, 17 nt, Human
agcaacuguuaugaaau

SEQ ID NO: 2784589 - RNA, 18 nt, Human
agcaacuguuaugaaaua

SEQ ID NO: 2784590 - RNA, 20 nt, Human
agcaacuguuaugaaauaaa

SEQ ID NO: 2784591 - RNA, 20 nt, Human
agcaacucuugauuauccau

SEQ ID NO: 2784592 - RNA, 16 nt, Human
agcaacucuugauuau

SEQ ID NO: 2784593 - RNA, 12 nt, Human
agcaacugggac

SEQ ID NO: 2784594 - RNA, 21 nt, Human
agcaagauccugucuuuaagg

SEQ ID NO: 2784595 - RNA, 14 nt, Human
agcaagagagaacc

SEQ ID NO: 2784596 - RNA, 23 nt, Human
agcaagagagaaccuaacuguau

SEQ ID NO: 2784597 - RNA, 15 nt, Human
ugagaagaggagccc

SEQ ID NO: 2784598 - RNA, 12 nt, Human
ugagaagaauag

SEQ ID NO: 2784599 - RNA, 16 nt, Human
agcaagagauauuuug

SEQ ID NO: 2784600 - RNA, 18 nt, Human
ugagaacuuaaguggcua

SEQ ID NO: 2784601 - RNA, 13 nt, Human
ugagaacuccuga

SEQ ID NO: 2784602 - RNA, 15 nt, Human
ugagaacuccugacu

SEQ ID NO: 2784603 - RNA, 20 nt, Human
ugagaaggcagccaccagcg

SEQ ID NO: 2784604 - RNA, 16 nt, Human
ugagaaguagccacag

SEQ ID NO: 2784605 - RNA, 17 nt, Human
ugagaaguagccacagu

SEQ ID NO: 2784606 - RNA, 12 nt, Human
ugagaaguauac

SEQ ID NO: 2784607 - RNA, 16 nt, Human
ugagaaggcagccacc

SEQ ID NO: 2784608 - RNA, 17 nt, Human
ugagaaggcagccacca

SEQ ID NO: 2784609 - RNA, 16 nt, Human
agauuccggauccuaa

SEQ ID NO: 2784610 - RNA, 18 nt, Human
agauuccggauccuaagc

SEQ ID NO: 2784611 - RNA, 20 nt, Human
agauuccggauccuaagcau

SEQ ID NO: 2784612 - RNA, 23 nt, Human
agauuccggauccuaagcaucua

SEQ ID NO: 2784613 - RNA, 24 nt, Human
agauuccggauccuaagcaucuaa

SEQ ID NO: 2784614 - RNA, 15 nt, Human
agauuccucuguauu

SEQ ID NO: 2784615 - RNA, 13 nt, Human
agauucuaaagau

SEQ ID NO: 2784616 - RNA, 16 nt, Human
agauucgcuuuccaug

SEQ ID NO: 2784617 - RNA, 11 nt, Human
agauucuaaag

SEQ ID NO: 2784618 - RNA, 12 nt, Human
agauucuaaaga

SEQ ID NO: 2784619 - RNA, 16 nt, Human
agauugcuuaaaauag

SEQ ID NO: 2784620 - RNA, 12 nt, Human
agauugcuucuc

SEQ ID NO: 2784621 - RNA, 15 nt, Human
agauugcuuaaaaua

SEQ ID NO: 2784622 - RNA, 14 nt, Human
agauuggaaggaga

SEQ ID NO: 2784623 - RNA, 15 nt, Human
agauuggaaggagac

SEQ ID NO: 2784624 - RNA, 16 nt, Human
agauuggaaggagaca

SEQ ID NO: 2784625 - RNA, 20 nt, Human
agauuggaaggagacacaga

SEQ ID NO: 2784626 - RNA, 21 nt, Human
agauuggaaggagacacagau

SEQ ID NO: 2784627 - RNA, 22 nt, Human
agauuggaaggagacacagaug

SEQ ID NO: 2784628 - RNA, 23 nt, Human
agauuggaaggagacacagaugu

SEQ ID NO: 2784629 - RNA, 20 nt, Human
agauuggaguggggaagugu

SEQ ID NO: 2784630 - RNA, 18 nt, Human
agauucaugauuuauaaa

SEQ ID NO: 2784631 - RNA, 18 nt, Human
agauuccagagaguggcu

SEQ ID NO: 2784632 - RNA, 17 nt, Human
agauucauuuuuaauca

SEQ ID NO: 2784633 - RNA, 20 nt, Human
agauucauuuuuaaucauga

SEQ ID NO: 2784634 - RNA, 15 nt, Human
agauuucuaaauaaa

SEQ ID NO: 2784635 - RNA, 16 nt, Human
agauuucuaaauaaaa

SEQ ID NO: 2784636 - RNA, 20 nt, Human
agauuucucauuugccaaua

SEQ ID NO: 2784637 - RNA, 13 nt, Human
agauuuccuccug

SEQ ID NO: 2784638 - RNA, 15 nt, Human
agauuggcauggcuu

SEQ ID NO: 2784639 - RNA, 23 nt, Human
agauuggcauggcuuuauuuguu

SEQ ID NO: 2784640 - RNA, 19 nt, Human
agauuuucugguucuaaca

SEQ ID NO: 2784641 - RNA, 17 nt, Human
agauuuucugguucuaa

SEQ ID NO: 2784642 - RNA, 18 nt, Human
agauuuucugguucuaac

SEQ ID NO: 2784643 - RNA, 22 nt, Human
agauuuucugggccuaaaggau

SEQ ID NO: 2784644 - RNA, 12 nt, Human
agauuuucuggu

SEQ ID NO: 2784645 - RNA, 16 nt, Human
agauuuucugguucua

SEQ ID NO: 2784646 - RNA, 21 nt, Human
agauuuuucggaggccccacu

SEQ ID NO: 2784647 - RNA, 21 nt, Human
agauuuuuauauuaguugcuu

SEQ ID NO: 2784648 - RNA, 22 nt, Human
agauuuuuauauuaguugcuuu

SEQ ID NO: 2784649 - RNA, 19 nt, Human
agauuuugagguaaagaua

SEQ ID NO: 2784650 - RNA, 14 nt, Human
agauuuugauaacu

SEQ ID NO: 2784651 - RNA, 16 nt, Human
agauuuugauaacugu

SEQ ID NO: 2784652 - RNA, 17 nt, Human
agauuuugauaacuguu

SEQ ID NO: 2784653 - RNA, 18 nt, Human
agauuuugauaacuguuu

SEQ ID NO: 2784654 - RNA, 22 nt, Human
agauuuugggguuguguuguca

SEQ ID NO: 2784655 - RNA, 15 nt, Human
ugacacuucaaggug

SEQ ID NO: 2784656 - RNA, 18 nt, Human
ugacacuucaaggugaca

SEQ ID NO: 2784657 - RNA, 18 nt, Human
agaugcagagagccauuu

SEQ ID NO: 2784658 - RNA, 16 nt, Human
agaugccaucuguguc

SEQ ID NO: 2784659 - RNA, 15 nt, Human
agaugccauucauag

SEQ ID NO: 2784660 - RNA, 16 nt, Human
agaugccauucauaga

SEQ ID NO: 2784661 - RNA, 18 nt, Human
agaugccauucauagaga

SEQ ID NO: 2784662 - RNA, 19 nt, Human
agaugcagagagccauuuu

SEQ ID NO: 2784663 - RNA, 20 nt, Human
agaugcagagagccauuuug

SEQ ID NO: 2784664 - RNA, 12 nt, Human
agaugccccaga

SEQ ID NO: 2784665 - RNA, 22 nt, Human
agaugcccagagggcccaggca

SEQ ID NO: 2784666 - RNA, 21 nt, Human
agaugcccagagggcccaggc

SEQ ID NO: 2784667 - RNA, 19 nt, Human
agaugcuccagcaacacag

SEQ ID NO: 2784668 - RNA, 19 nt, Human
ugacacgccuaaggucaca

SEQ ID NO: 2784669 - RNA, 17 nt, Human
agaugccccagagcugu

SEQ ID NO: 2784670 - RNA, 15 nt, Human
agaugcucuucugug

SEQ ID NO: 2784671 - RNA, 23 nt, Human
agaugcugacuguacuccuccca

SEQ ID NO: 2784672 - RNA, 13 nt, Human
agaugcucuuuua

SEQ ID NO: 2784673 - RNA, 20 nt, Human
agaugcugacuguacuccuc

SEQ ID NO: 2784674 - RNA, 15 nt, Human
agauggaaugcugug

SEQ ID NO: 2784675 - RNA, 13 nt, Human
agauggaaugcug

SEQ ID NO: 2784676 - RNA, 18 nt, Human
agauggaaugcuguguua

SEQ ID NO: 2784677 - RNA, 23 nt, Human
agauggacaguucacacccugca

SEQ ID NO: 2784678 - RNA, 14 nt, Human
agauguugccaugu

SEQ ID NO: 2784679 - RNA, 23 nt, Human
agauguugauuuuuacuguguuu

SEQ ID NO: 2784680 - RNA, 22 nt, Human
agauguugauuuuuacuguguu

SEQ ID NO: 2784681 - RNA, 16 nt, Human
agauguugauuuuuac

SEQ ID NO: 2784682 - RNA, 21 nt, Human
agauguugaagaauacaguua

SEQ ID NO: 2784683 - RNA, 15 nt, Human
agauguugaauucuu

SEQ ID NO: 2784684 - RNA, 23 nt, Human
agauguugaauucuuuugccaag

SEQ ID NO: 2784685 - RNA, 22 nt, Human
agauguugagaaaccugggcuc

SEQ ID NO: 2784686 - RNA, 21 nt, Human
agauguuuccagacuuccuug

SEQ ID NO: 2784687 - RNA, 23 nt, Human
agauguuuccagacuuccuugag

SEQ ID NO: 2784688 - RNA, 14 nt, Human
agauguuuccagac

SEQ ID NO: 2784689 - RNA, 14 nt, Human
agauguuucacgaa

SEQ ID NO: 2784690 - RNA, 18 nt, Human
agauguugccauguguuu

SEQ ID NO: 2784691 - RNA, 17 nt, Human
agauguugccauguguu

SEQ ID NO: 2784692 - RNA, 14 nt, Human
agauguuucacacc

SEQ ID NO: 2784693 - RNA, 23 nt, Human
agauguuucacaccggaagguuu

SEQ ID NO: 2784694 - RNA, 22 nt, Human
agauguuuauucuucuagaguu

SEQ ID NO: 2784695 - RNA, 18 nt, Human
agauguuuauucuucuag

SEQ ID NO: 2784696 - RNA, 19 nt, Human
agauguuuauucuucuaga

SEQ ID NO: 2784697 - RNA, 20 nt, Human
agauguuuauucuucuagag

SEQ ID NO: 2784698 - RNA, 21 nt, Human
agauguuuauucuucuagagu

SEQ ID NO: 2784699 - RNA, 12 nt, Human
agauuaaauaua

SEQ ID NO: 2784700 - RNA, 13 nt, Human
agauuaaauauag

SEQ ID NO: 2784701 - RNA, 16 nt, Human
agauuaaauauagauu

SEQ ID NO: 2784702 - RNA, 17 nt, Human
agauuaaauauagauua

SEQ ID NO: 2784703 - RNA, 22 nt, Human
agauguuuuuaaaaguuucaau

SEQ ID NO: 2784704 - RNA, 18 nt, Human
agauguuuuuaaaaguuu

SEQ ID NO: 2784705 - RNA, 20 nt, Human
agauguuuuuaaaaguuuca

SEQ ID NO: 2784706 - RNA, 14 nt, Human
agauuaaacagaug

SEQ ID NO: 2784707 - RNA, 17 nt, Human
agauuaaacagaugaug

SEQ ID NO: 2784708 - RNA, 22 nt, Human
agauguuuuaccguaauaauua

SEQ ID NO: 2784709 - RNA, 19 nt, Human
agauguuuugguagauuaa

SEQ ID NO: 2784710 - RNA, 21 nt, Human
agauguuuugguagauuaaau

SEQ ID NO: 2784711 - RNA, 22 nt, Human
agauguuuugguagauuaaaua

SEQ ID NO: 2784712 - RNA, 23 nt, Human
agauguuuuggucaaguaguuug

SEQ ID NO: 2784713 - RNA, 13 nt, Human
agauguuuuuaaa

SEQ ID NO: 2784714 - RNA, 16 nt, Human
agauguuuuuaaaagu

SEQ ID NO: 2784715 - RNA, 21 nt, Human
ugaccccaaacaccuuccagc

SEQ ID NO: 2784716 - RNA, 18 nt, Human
ugacucgagucacacuca

SEQ ID NO: 2784717 - RNA, 22 nt, Human
ugacucccuuaaaauagaaaua

SEQ ID NO: 2784718 - RNA, 17 nt, Human
ugacuccuaccugcccu

SEQ ID NO: 2784719 - RNA, 18 nt, Human
ugacuccuaccugcccug

SEQ ID NO: 2784720 - RNA, 19 nt, Human
ugacuccuaccugcccugg

SEQ ID NO: 2784721 - RNA, 20 nt, Human
ugacuccuaccugcccugga

SEQ ID NO: 2784722 - RNA, 22 nt, Human
ugacuccuaccugcccuggaac

SEQ ID NO: 2784723 - RNA, 11 nt, Human
ugaccuuccuc

SEQ ID NO: 2784724 - RNA, 16 nt, Human
ugacucaaaucuccag

SEQ ID NO: 2784725 - RNA, 23 nt, Human
ugacuagggauucaggcugcuug

SEQ ID NO: 2784726 - RNA, 13 nt, Human
ugacuaguacaaa

SEQ ID NO: 2784727 - RNA, 15 nt, Human
ugacuaguacaaauu

SEQ ID NO: 2784728 - RNA, 16 nt, Human
ugacuaguacaaauua

SEQ ID NO: 2784729 - RNA, 17 nt, Human
ugacuaguacaaauuau

SEQ ID NO: 2784730 - RNA, 20 nt, Human
ugacuaguacaaauuauaaa

SEQ ID NO: 2784731 - RNA, 23 nt, Human
ugacuaguacaaauuauaaaaag

SEQ ID NO: 2784732 - RNA, 21 nt, Human
ugacuagggauucaggcugcu

SEQ ID NO: 2784733 - RNA, 20 nt, Human
ugacuagggauucaggcugc

SEQ ID NO: 2784734 - RNA, 14 nt, Human
ugaccuucucuaua

SEQ ID NO: 2784735 - RNA, 19 nt, Human
ugacuagacguucauuugu

SEQ ID NO: 2784736 - RNA, 21 nt, Human
ugacuagaagggccaguccug

SEQ ID NO: 2784737 - RNA, 14 nt, Human
ugacuacauuuuuu

SEQ ID NO: 2784738 - RNA, 19 nt, Human
ugacuacuuagcauccuaa

SEQ ID NO: 2784739 - RNA, 22 nt, Human
ugacuacuuagcauccuaagaa

SEQ ID NO: 2784740 - RNA, 15 nt, Human
ugacuacuuugccuu

SEQ ID NO: 2784741 - RNA, 19 nt, Human
ugacuagggauucaggcug

SEQ ID NO: 2784742 - RNA, 18 nt, Human
ugacuagggauucaggcu

SEQ ID NO: 2784743 - RNA, 17 nt, Human
ugacuagggauucaggc

SEQ ID NO: 2784744 - RNA, 23 nt, Human
ugacuagaugauggaugccaaua

SEQ ID NO: 2784745 - RNA, 16 nt, Human
ugacccuacucccuug

SEQ ID NO: 2784746 - RNA, 17 nt, Human
ugacccuacucccuugc

SEQ ID NO: 2784747 - RNA, 21 nt, Human
ugaccccuccucacuggccau

SEQ ID NO: 2784748 - RNA, 15 nt, Human
ugaccccuucccugu

SEQ ID NO: 2784749 - RNA, 22 nt, Human
ugaccccuccucacuggccauc

SEQ ID NO: 2784750 - RNA, 12 nt, Human
ugaccccuccug

SEQ ID NO: 2784751 - RNA, 13 nt, Human
ugaccccuccugg

SEQ ID NO: 2784752 - RNA, 14 nt, Human
ugaccccuccuggg

SEQ ID NO: 2784753 - RNA, 15 nt, Human
ugaccccuccugggg

SEQ ID NO: 2784754 - RNA, 16 nt, Human
ugaccccuccuggggc

SEQ ID NO: 2784755 - RNA, 17 nt, Human
ugaccccuccuggggcc

SEQ ID NO: 2784756 - RNA, 19 nt, Human
ugaccccuccuggggccag

SEQ ID NO: 2784757 - RNA, 20 nt, Human
ugaccccuccuggggccagg

SEQ ID NO: 2784758 - RNA, 22 nt, Human
ugaccccuccuggggccaggcc

SEQ ID NO: 2784759 - RNA, 23 nt, Human
ugaccccuccuggggccaggccg

SEQ ID NO: 2784760 - RNA, 23 nt, Human
ugaccccucauagcccucacccu

SEQ ID NO: 2784761 - RNA, 13 nt, Human
ugaccccuccuca

SEQ ID NO: 2784762 - RNA, 11 nt, Human
ugaccccuccu

SEQ ID NO: 2784763 - RNA, 15 nt, Human
ugaccccuccucacu

SEQ ID NO: 2784764 - RNA, 20 nt, Human
ugaccccuccucacuggcca

SEQ ID NO: 2784765 - RNA, 22 nt, Human
ugaccccaaacaccuuccagcu

SEQ ID NO: 2784766 - RNA, 22 nt, Human
ugaccccagcauucucaggcac

SEQ ID NO: 2784767 - RNA, 18 nt, Human
ugacccuagcucuuuccu

SEQ ID NO: 2784768 - RNA, 12 nt, Human
ugaccugagggc

SEQ ID NO: 2784769 - RNA, 20 nt, Human
ugaccugcaggccaagagca

SEQ ID NO: 2784770 - RNA, 11 nt, Human
ugaccugcagg

SEQ ID NO: 2784771 - RNA, 15 nt, Human
ugaccuguuucucug

SEQ ID NO: 2784772 - RNA, 16 nt, Human
ugaccuguuucucugc

SEQ ID NO: 2784773 - RNA, 19 nt, Human
ugaccuuauccuuccucuc

SEQ ID NO: 2784774 - RNA, 22 nt, Human
ugaccuuaugagaaacugcaug

SEQ ID NO: 2784775 - RNA, 12 nt, Human
ugaccuucagcu

SEQ ID NO: 2784776 - RNA, 19 nt, Human
ugaccuucagcucacgcuu

SEQ ID NO: 2784777 - RNA, 13 nt, Human
ugaccuucauuuc

SEQ ID NO: 2784778 - RNA, 20 nt, Human
ugaccuucauuucauguaua

SEQ ID NO: 2784779 - RNA, 14 nt, Human
ugaccuuccucugg

SEQ ID NO: 2784780 - RNA, 15 nt, Human
ugaccuuccucuggg

SEQ ID NO: 2784781 - RNA, 16 nt, Human
ugaccuuccucugggg

SEQ ID NO: 2784782 - RNA, 17 nt, Human
ugaccuuccucuggggc

SEQ ID NO: 2784783 - RNA, 18 nt, Human
ugaccuuccucuggggcu

SEQ ID NO: 2784784 - RNA, 19 nt, Human
ugaccuuccucuggggcuc

SEQ ID NO: 2784785 - RNA, 21 nt, Human
ugaccuuccucuggggcucua

SEQ ID NO: 2784786 - RNA, 23 nt, Human
ugaccuuccucuggggcucuagg

SEQ ID NO: 2784787 - RNA, 24 nt, Human
ugaccuuccucuggggcucuaggg

SEQ ID NO: 2784788 - RNA, 14 nt, Human
ugaccuuccuuccu

SEQ ID NO: 2784789 - RNA, 16 nt, Human
ugaccuuccuuccugu

SEQ ID NO: 2784790 - RNA, 15 nt, Human
agacuauggagccug

SEQ ID NO: 2784791 - RNA, 16 nt, Human
agacuauggagccugg

SEQ ID NO: 2784792 - RNA, 20 nt, Human
agacuauggagccuggcaca

SEQ ID NO: 2784793 - RNA, 21 nt, Human
agacuauggagccuggcacag

SEQ ID NO: 2784794 - RNA, 23 nt, Human
agaccuuggaucagaugaacucu

SEQ ID NO: 2784795 - RNA, 11 nt, Human
agaccuuaccc

SEQ ID NO: 2784796 - RNA, 13 nt, Human
agaccuuccauaa

SEQ ID NO: 2784797 - RNA, 22 nt, Human
agaccuuccauaaugcuacugu

SEQ ID NO: 2784798 - RNA, 23 nt, Human
agaccuuccauaaugcuacuguc

SEQ ID NO: 2784799 - RNA, 18 nt, Human
agaccuucuaggacgcca

SEQ ID NO: 2784800 - RNA, 22 nt, Human
agaccuggcaaggacacagaug

SEQ ID NO: 2784801 - RNA, 23 nt, Human
agacucaggccaagaaacgucuu

SEQ ID NO: 2784802 - RNA, 13 nt, Human
agacucagccugc

SEQ ID NO: 2784803 - RNA, 14 nt, Human
agacucagccugca

SEQ ID NO: 2784804 - RNA, 17 nt, Human
agacucagccugcaguu

SEQ ID NO: 2784805 - RNA, 23 nt, Human
agacucagccugcaguuaauuag

SEQ ID NO: 2784806 - RNA, 20 nt, Human
agacucaggccaagaaacgu

SEQ ID NO: 2784807 - RNA, 19 nt, Human
agacucaggccaagaaacg

SEQ ID NO: 2784808 - RNA, 13 nt, Human
ucuugauuugagu

SEQ ID NO: 2784809 - RNA, 23 nt, Human
ucuugauuauccauauugaguca

SEQ ID NO: 2784810 - RNA, 14 nt, Human
ucuugauuauccau

SEQ ID NO: 2784811 - RNA, 22 nt, Human
ucuugaggugguaguaaaacac

SEQ ID NO: 2784812 - RNA, 23 nt, Human
ucuugaggugguaguaaaacaca

SEQ ID NO: 2784813 - RNA, 19 nt, Human
ucuugaguauaagaaaugc

SEQ ID NO: 2784814 - RNA, 20 nt, Human
ucuugaguauaagaaaugca

SEQ ID NO: 2784815 - RNA, 21 nt, Human
ucuugaguauaagaaaugcau

SEQ ID NO: 2784816 - RNA, 14 nt, Human
ucuugagcuggccu

SEQ ID NO: 2784817 - RNA, 13 nt, Human
ucuugagcuggcc

SEQ ID NO: 2784818 - RNA, 12 nt, Human
ucuugagcuggc

SEQ ID NO: 2784819 - RNA, 21 nt, Human
ucuugagcuggccucucuagc

SEQ ID NO: 2784820 - RNA, 17 nt, Human
ucuugagcuggccucuc

SEQ ID NO: 2784821 - RNA, 15 nt, Human
ucuugaggccaggag

SEQ ID NO: 2784822 - RNA, 23 nt, Human
ucuugagcuggccucucuagcac

SEQ ID NO: 2784823 - RNA, 16 nt, Human
ucuugaggccaggagu

SEQ ID NO: 2784824 - RNA, 14 nt, Human
ucuugguaagaagc

SEQ ID NO: 2784825 - RNA, 16 nt, Human
ucuugggucuaugccu

SEQ ID NO: 2784826 - RNA, 20 nt, Human
ucuugguaaaguccuuuucu

SEQ ID NO: 2784827 - RNA, 14 nt, Human
ucuugggaacugaa

SEQ ID NO: 2784828 - RNA, 13 nt, Human
ucuugggaacuga

SEQ ID NO: 2784829 - RNA, 22 nt, Human
ucuugcaauggcagccuuggca

SEQ ID NO: 2784830 - RNA, 19 nt, Human
ucuuggcagcaccugucuc

SEQ ID NO: 2784831 - RNA, 18 nt, Human
ucuuggcagcaccugucu

SEQ ID NO: 2784832 - RNA, 18 nt, Human
ucuugcaauggcagccuu

SEQ ID NO: 2784833 - RNA, 19 nt, Human
ucuugcaauggcagccuug

SEQ ID NO: 2784834 - RNA, 17 nt, Human
ucuuggcuuggugagga

SEQ ID NO: 2784835 - RNA, 19 nt, Human
ucuuggcuuacugcagccu

SEQ ID NO: 2784836 - RNA, 14 nt, Human
ucuugguauucuua

SEQ ID NO: 2784837 - RNA, 11 nt, Human
ucuuuaaaugu

SEQ ID NO: 2784838 - RNA, 12 nt, Human
ucuuuaaauguu

SEQ ID NO: 2784839 - RNA, 16 nt, Human
ucuuuaaauguuuuau

SEQ ID NO: 2784840 - RNA, 19 nt, Human
ucuuuaaauguuuuauaag

SEQ ID NO: 2784841 - RNA, 15 nt, Human
ucuuuaacucauaaa

SEQ ID NO: 2784842 - RNA, 12 nt, Human
ucuuuaaauaga

SEQ ID NO: 2784843 - RNA, 14 nt, Human
ucuuuaaauagaua

SEQ ID NO: 2784844 - RNA, 16 nt, Human
ucuuuaaaucauuuua

SEQ ID NO: 2784845 - RNA, 23 nt, Human
ucuuuaaaucauuuuaggaaagg

SEQ ID NO: 2784846 - RNA, 14 nt, Human
ucuuuaaucacuua

SEQ ID NO: 2784847 - RNA, 18 nt, Human
ucuuuaaucacuuaacau

SEQ ID NO: 2784848 - RNA, 23 nt, Human
ucuuuaaucacuuaacauuccua

SEQ ID NO: 2784849 - RNA, 18 nt, Human
ucuuuaagggcaugccuu

SEQ ID NO: 2784850 - RNA, 19 nt, Human
ucuuuaagggcaugccuug

SEQ ID NO: 2784851 - RNA, 20 nt, Human
ucuuuaagggcaugccuugu

SEQ ID NO: 2784852 - RNA, 22 nt, Human
ucuuuaagggcaugccuugugc

SEQ ID NO: 2784853 - RNA, 19 nt, Human
ucuuuaaguauugauucug

SEQ ID NO: 2784854 - RNA, 22 nt, Human
ucuuuauauacaauaauggaaa

SEQ ID NO: 2784855 - RNA, 23 nt, Human
ucuuuauauacaauaauggaaaa

SEQ ID NO: 2784856 - RNA, 23 nt, Human
ucuuuaaucauuuugccucuuuu

SEQ ID NO: 2784857 - RNA, 11 nt, Human
ucuuuccuguc

SEQ ID NO: 2784858 - RNA, 21 nt, Human
ucuuucuaacuccagugaagu

SEQ ID NO: 2784859 - RNA, 14 nt, Human
ucuuucgucacccu

SEQ ID NO: 2784860 - RNA, 15 nt, Human
ucuuucgucacccuu

SEQ ID NO: 2784861 - RNA, 18 nt, Human
ucuuucuaaugugugaau

SEQ ID NO: 2784862 - RNA, 18 nt, Human
ucuuucucucuucccuca

SEQ ID NO: 2784863 - RNA, 13 nt, Human
ucuuuauuccuag

SEQ ID NO: 2784864 - RNA, 14 nt, Human
ucuuuauuccuagu

SEQ ID NO: 2784865 - RNA, 15 nt, Human
ucuuuauuccuaguu

SEQ ID NO: 2784866 - RNA, 14 nt, Human
agaaucacuugaac

SEQ ID NO: 2784867 - RNA, 22 nt, Human
agaaucacuucugagaacucau

SEQ ID NO: 2784868 - RNA, 17 nt, Human
agaaucacuugaacccg

SEQ ID NO: 2784869 - RNA, 20 nt, Human
ucuucaacaugucacacugg

SEQ ID NO: 2784870 - RNA, 16 nt, Human
agaaucagaguagaaa

SEQ ID NO: 2784871 - RNA, 17 nt, Human
agaaucagaguagaaau

SEQ ID NO: 2784872 - RNA, 18 nt, Human
agaaucagaguagaaaua

SEQ ID NO: 2784873 - RNA, 15 nt, Human
ucuucaacucccugc

SEQ ID NO: 2784874 - RNA, 16 nt, Human
ucuucaacugaccagc

SEQ ID NO: 2784875 - RNA, 19 nt, Human
ucuucaacugaccagccuc

SEQ ID NO: 2784876 - RNA, 15 nt, Human
ucuuccaucccagga

SEQ ID NO: 2784877 - RNA, 11 nt, Human
ucuucaagaga

SEQ ID NO: 2784878 - RNA, 22 nt, Human
ucuucaagagacccuucaaacu

SEQ ID NO: 2784879 - RNA, 15 nt, Human
ucuucaaggcuucag

SEQ ID NO: 2784880 - RNA, 16 nt, Human
ucuucaaggcuucagu

SEQ ID NO: 2784881 - RNA, 17 nt, Human
ucuucaaggcuucaguc

SEQ ID NO: 2784882 - RNA, 16 nt, Human
ucuuccauguaucuuu

SEQ ID NO: 2784883 - RNA, 19 nt, Human
ucuuccauguaucuuuuga

SEQ ID NO: 2784884 - RNA, 16 nt, Human
ucuuccaucccaggac

SEQ ID NO: 2784885 - RNA, 14 nt, Human
ucuuccaugauuuu

SEQ ID NO: 2784886 - RNA, 12 nt, Human
ucuucucugucu

SEQ ID NO: 2784887 - RNA, 11 nt, Human
ucuuccugacg

SEQ ID NO: 2784888 - RNA, 23 nt, Human
ucuuccugacgaaacuggccccg

SEQ ID NO: 2784889 - RNA, 11 nt, Human
ucuuccugccc

SEQ ID NO: 2784890 - RNA, 13 nt, Human
ucuuccugccccu

SEQ ID NO: 2784891 - RNA, 14 nt, Human
ucuuccugccccuc

SEQ ID NO: 2784892 - RNA, 15 nt, Human
ucuuccugccccucu

SEQ ID NO: 2784893 - RNA, 16 nt, Human
ucuuccugccccucuu

SEQ ID NO: 2784894 - RNA, 17 nt, Human
ucuuccugccccucuuu

SEQ ID NO: 2784895 - RNA, 18 nt, Human
ucuuccugccccucuuuc

SEQ ID NO: 2784896 - RNA, 19 nt, Human
ucuuccugccccucuuucu

SEQ ID NO: 2784897 - RNA, 21 nt, Human
ucuuccugccccucuuucucu

SEQ ID NO: 2784898 - RNA, 11 nt, Human
ucuuccucugc

SEQ ID NO: 2784899 - RNA, 12 nt, Human
ucuuccucugcu

SEQ ID NO: 2784900 - RNA, 14 nt, Human
ucuuccucugcuga

SEQ ID NO: 2784901 - RNA, 13 nt, Human
ucuuccuccagcu

SEQ ID NO: 2784902 - RNA, 14 nt, Human
ucuuccuccagcug

SEQ ID NO: 2784903 - RNA, 15 nt, Human
ucuuccuccagcugc

SEQ ID NO: 2784904 - RNA, 17 nt, Human
ucuuccuccagcugcac

SEQ ID NO: 2784905 - RNA, 19 nt, Human
ucuuccuccagcugcacca

SEQ ID NO: 2784906 - RNA, 19 nt, Human
ucuuccccacuccccaccu

SEQ ID NO: 2784907 - RNA, 14 nt, Human
ucuuccccacuccc

SEQ ID NO: 2784908 - RNA, 20 nt, Human
ucuuccccagaaaggagacu

SEQ ID NO: 2784909 - RNA, 20 nt, Human
agacaucaugaauuuuacau

SEQ ID NO: 2784910 - RNA, 17 nt, Human
agacauccauguuugua

SEQ ID NO: 2784911 - RNA, 18 nt, Human
agacauaggccaugaaaa

SEQ ID NO: 2784912 - RNA, 17 nt, Human
agacauaacguuuuucc

SEQ ID NO: 2784913 - RNA, 16 nt, Human
agacauagcauccaag

SEQ ID NO: 2784914 - RNA, 22 nt, Human
agacauagcauccaaguggcau

SEQ ID NO: 2784915 - RNA, 19 nt, Human
agacauaggccaugaaaaa

SEQ ID NO: 2784916 - RNA, 13 nt, Human
agacauaucucua

SEQ ID NO: 2784917 - RNA, 14 nt, Human
agacauauuuaacu

SEQ ID NO: 2784918 - RNA, 15 nt, Human
agacauauuuaacug

SEQ ID NO: 2784919 - RNA, 16 nt, Human
agacauauuuaacugg

SEQ ID NO: 2784920 - RNA, 14 nt, Human
agacauaacguuuu

SEQ ID NO: 2784921 - RNA, 20 nt, Human
agacauaacguuuuuccuuu

SEQ ID NO: 2784922 - RNA, 16 nt, Human
agacauacgaaacaca

SEQ ID NO: 2784923 - RNA, 18 nt, Human
agacauacgaaacacaaa

SEQ ID NO: 2784924 - RNA, 19 nt, Human
agacauucuuccaaaaaga

SEQ ID NO: 2784925 - RNA, 18 nt, Human
agacauugggucuauucc

SEQ ID NO: 2784926 - RNA, 19 nt, Human
agacauugggucuauucca

SEQ ID NO: 2784927 - RNA, 22 nt, Human
agacauugggucuauuccagcu

SEQ ID NO: 2784928 - RNA, 23 nt, Human
agacauugggucuauuccagcuc

SEQ ID NO: 2784929 - RNA, 18 nt, Human
agacauguuuuccgugaa

SEQ ID NO: 2784930 - RNA, 16 nt, Human
agacaucucugcaccc

SEQ ID NO: 2784931 - RNA, 18 nt, Human
agacauccauguuuguaa

SEQ ID NO: 2784932 - RNA, 21 nt, Human
agacauccauguuuguaaaac

SEQ ID NO: 2784933 - RNA, 22 nt, Human
agacauccauguuuguaaaacu

SEQ ID NO: 2784934 - RNA, 14 nt, Human
agacaucucugcac

SEQ ID NO: 2784935 - RNA, 21 nt, Human
agaccccggcuuccuuuccca

SEQ ID NO: 2784936 - RNA, 21 nt, Human
ucuucuguguuuauaaaauau

SEQ ID NO: 2784937 - RNA, 13 nt, Human
ucuucuguggacc

SEQ ID NO: 2784938 - RNA, 13 nt, Human
ucuucuuaacuua

SEQ ID NO: 2784939 - RNA, 15 nt, Human
agacaguuucuuagc

SEQ ID NO: 2784940 - RNA, 18 nt, Human
ucuucuuaagacuuuugg

SEQ ID NO: 2784941 - RNA, 21 nt, Human
agacaguuucuuagcuuuuua

SEQ ID NO: 2784942 - RNA, 18 nt, Human
agacaguuucuuagcuuu

SEQ ID NO: 2784943 - RNA, 20 nt, Human
agacaguuucuuagcuuuuu

SEQ ID NO: 2784944 - RNA, 22 nt, Human
agacaguuucuuagcuuuuuaa

SEQ ID NO: 2784945 - RNA, 11 nt, Human
agacaguuugu

SEQ ID NO: 2784946 - RNA, 13 nt, Human
agacaguuuguaa

SEQ ID NO: 2784947 - RNA, 14 nt, Human
agacaguuuguaaa

SEQ ID NO: 2784948 - RNA, 15 nt, Human
agacaguuuguaaau

SEQ ID NO: 2784949 - RNA, 16 nt, Human
agacaguuuguaaaug

SEQ ID NO: 2784950 - RNA, 17 nt, Human
agacaguuuguaaaugu

SEQ ID NO: 2784951 - RNA, 18 nt, Human
agacaguuuguaaauguu

SEQ ID NO: 2784952 - RNA, 19 nt, Human
agacaguuuguaaauguua

SEQ ID NO: 2784953 - RNA, 21 nt, Human
agacaguuuguaaauguuauu

SEQ ID NO: 2784954 - RNA, 16 nt, Human
agacaguuuugagaac

SEQ ID NO: 2784955 - RNA, 20 nt, Human
agacaguuuugagaacguaa

SEQ ID NO: 2784956 - RNA, 21 nt, Human
agacaguuuugagaacguaaa

SEQ ID NO: 2784957 - RNA, 11 nt, Human
agacauaaagc

SEQ ID NO: 2784958 - RNA, 12 nt, Human
agacauaaagcc

SEQ ID NO: 2784959 - RNA, 13 nt, Human
agacauaaagcca

SEQ ID NO: 2784960 - RNA, 15 nt, Human
ucuucuguacgucug

SEQ ID NO: 2784961 - RNA, 22 nt, Human
ucuucuggggcaggcugggcca

SEQ ID NO: 2784962 - RNA, 23 nt, Human
ucuucugugauucgguggagacu

SEQ ID NO: 2784963 - RNA, 19 nt, Human
ucuucuguauacuguggag

SEQ ID NO: 2784964 - RNA, 17 nt, Human
ucuucuguauauaaaug

SEQ ID NO: 2784965 - RNA, 20 nt, Human
ucuucuguauauaaauggga

SEQ ID NO: 2784966 - RNA, 22 nt, Human
ucuucuguauauaaaugggaac

SEQ ID NO: 2784967 - RNA, 24 nt, Human
ucuucuguauauaaaugggaacau

SEQ ID NO: 2784968 - RNA, 18 nt, Human
ucuucuggguuccuuccu

SEQ ID NO: 2784969 - RNA, 13 nt, Human
ucuucugaaauga

SEQ ID NO: 2784970 - RNA, 22 nt, Human
ucuucugaaaugaaacaaauaa

SEQ ID NO: 2784971 - RNA, 20 nt, Human
ucuucugcuccacccuuggc

SEQ ID NO: 2784972 - RNA, 19 nt, Human
ucuucugcuccacccuugg

SEQ ID NO: 2784973 - RNA, 17 nt, Human
ucuucugcuccacccuu

SEQ ID NO: 2784974 - RNA, 16 nt, Human
ucuucugcuccacccu

SEQ ID NO: 2784975 - RNA, 15 nt, Human
ucuucugcuccaccc

SEQ ID NO: 2784976 - RNA, 14 nt, Human
ucuucugcuccacc

SEQ ID NO: 2784977 - RNA, 13 nt, Human
ucuucugcuccac

SEQ ID NO: 2784978 - RNA, 19 nt, Human
ucuucugcuucagccuccc

SEQ ID NO: 2784979 - RNA, 12 nt, Human
ucuucugcuuca

SEQ ID NO: 2784980 - RNA, 21 nt, Human
ucuucuggggcaggcugggcc

SEQ ID NO: 2784981 - RNA, 20 nt, Human
ucuucuggggcaggcugggc

SEQ ID NO: 2784982 - RNA, 18 nt, Human
ucuucuggggcaggcugg

SEQ ID NO: 2784983 - RNA, 23 nt, Human
ucuucugcuccacccuuggccug

SEQ ID NO: 2784984 - RNA, 22 nt, Human
ucuucugcuccacccuuggccu

SEQ ID NO: 2784985 - RNA, 15 nt, Human
ugaaaagcuucuuaa

SEQ ID NO: 2784986 - RNA, 16 nt, Human
ugaaaagcuucuuaau

SEQ ID NO: 2784987 - RNA, 17 nt, Human
ugaaaagcuucuuaauu

SEQ ID NO: 2784988 - RNA, 19 nt, Human
ugaaaagcuucuuaauuaa

SEQ ID NO: 2784989 - RNA, 23 nt, Human
ugaaaagcuucuuaauuaauuug

SEQ ID NO: 2784990 - RNA, 13 nt, Human
ugaaaaaugaaag

SEQ ID NO: 2784991 - RNA, 14 nt, Human
ugaaaaaugaaaga

SEQ ID NO: 2784992 - RNA, 16 nt, Human
ugaaaaaugaaagaug

SEQ ID NO: 2784993 - RNA, 17 nt, Human
ugaaaaaugaaagauga

SEQ ID NO: 2784994 - RNA, 18 nt, Human
ugaaaaaugaaagaugau

SEQ ID NO: 2784995 - RNA, 18 nt, Human
ugaaaaaucggcuuacca

SEQ ID NO: 2784996 - RNA, 15 nt, Human
ugaaaaagaugccaa

SEQ ID NO: 2784997 - RNA, 16 nt, Human
ugaaaaaguaaagugu

SEQ ID NO: 2784998 - RNA, 19 nt, Human
ugaaaaauuccuuuguguu

SEQ ID NO: 2784999 - RNA, 21 nt, Human
ugaaaaaucacuugauucaua

SEQ ID NO: 2785000 - RNA, 22 nt, Human
ugaaaaaguauccugcuucuga

SEQ ID NO: 2785001 - RNA, 19 nt, Human
ugaaaaaguuaaugcuuaa

SEQ ID NO: 2785002 - RNA, 16 nt, Human
ugaaaaucgugacaac

SEQ ID NO: 2785003 - RNA, 20 nt, Human
ugaaaauaugauguuucaca

SEQ ID NO: 2785004 - RNA, 18 nt, Human
ugaaaauaucugcucaaa

SEQ ID NO: 2785005 - RNA, 23 nt, Human
ugaaaauaucugcucaaaacuuu

SEQ ID NO: 2785006 - RNA, 12 nt, Human
ugaaaagucguu

SEQ ID NO: 2785007 - RNA, 17 nt, Human
ugaaaagucguuuucca

SEQ ID NO: 2785008 - RNA, 22 nt, Human
ugaaaagucguuuuccaaacug

SEQ ID NO: 2785009 - RNA, 19 nt, Human
ugaaaagggggugggaugg

SEQ ID NO: 2785010 - RNA, 21 nt, Human
ugaaaagguucuucaucccuu

SEQ ID NO: 2785011 - RNA, 18 nt, Human
ugaaacuggcacugaauu

SEQ ID NO: 2785012 - RNA, 17 nt, Human
ugaaaauauaugauggc

SEQ ID NO: 2785013 - RNA, 16 nt, Human
ugaaacucacaaauga

SEQ ID NO: 2785014 - RNA, 17 nt, Human
ugaaacucacaaaugau

SEQ ID NO: 2785015 - RNA, 13 nt, Human
ugaaacuccaccu

SEQ ID NO: 2785016 - RNA, 21 nt, Human
ugaaacuccaccuugcgggga

SEQ ID NO: 2785017 - RNA, 14 nt, Human
ugaaaaugucaaag

SEQ ID NO: 2785018 - RNA, 19 nt, Human
ugaaaaucgugacaacacu

SEQ ID NO: 2785019 - RNA, 14 nt, Human
ugaaaaucuaauau

SEQ ID NO: 2785020 - RNA, 15 nt, Human
ugaaaaucuaauauu

SEQ ID NO: 2785021 - RNA, 17 nt, Human
ugaaaaucuaauauuaa

SEQ ID NO: 2785022 - RNA, 21 nt, Human
ugaaaaucuaauauuaaaaau

SEQ ID NO: 2785023 - RNA, 12 nt, Human
ugaaaauguacu

SEQ ID NO: 2785024 - RNA, 13 nt, Human
ugaaaauguacug

SEQ ID NO: 2785025 - RNA, 16 nt, Human
ugaaaauguacugaga

SEQ ID NO: 2785026 - RNA, 10 nt, Human
ucuuucugua

SEQ ID NO: 2785027 - RNA, 20 nt, Human
ucuuucuuacaaggaaggug

SEQ ID NO: 2785028 - RNA, 13 nt, Human
ucuuucugucccu

SEQ ID NO: 2785029 - RNA, 14 nt, Human
ucuuucugucccuu

SEQ ID NO: 2785030 - RNA, 18 nt, Human
ucuuucugagcacacuuu

SEQ ID NO: 2785031 - RNA, 19 nt, Human
ucuuucugagcacacuuua

SEQ ID NO: 2785032 - RNA, 21 nt, Human
ucuuucugagcacacuuuagu

SEQ ID NO: 2785033 - RNA, 12 nt, Human
ucuuucucuuuc

SEQ ID NO: 2785034 - RNA, 11 nt, Human
ucuuuaacuuu

SEQ ID NO: 2785035 - RNA, 14 nt, Human
ucuuucuaaugcug

SEQ ID NO: 2785036 - RNA, 17 nt, Human
ucuuucucuuucuuccu

SEQ ID NO: 2785037 - RNA, 12 nt, Human
ucuuucucuuuu

SEQ ID NO: 2785038 - RNA, 15 nt, Human
agagacauggcuuuc

SEQ ID NO: 2785039 - RNA, 12 nt, Human
agagacagucac

SEQ ID NO: 2785040 - RNA, 22 nt, Human
agagacaguuauuuauagucau

SEQ ID NO: 2785041 - RNA, 17 nt, Human
ucuuugguguacagacu

SEQ ID NO: 2785042 - RNA, 12 nt, Human
ucuuugguucua

SEQ ID NO: 2785043 - RNA, 14 nt, Human
ucuuugguucuaag

SEQ ID NO: 2785044 - RNA, 15 nt, Human
ucuuugguucuaagg

SEQ ID NO: 2785045 - RNA, 16 nt, Human
ucuuugguucuaagga

SEQ ID NO: 2785046 - RNA, 21 nt, Human
ucuuugguucuaaggaccuga

SEQ ID NO: 2785047 - RNA, 18 nt, Human
ucuuuguguagcuuugcu

SEQ ID NO: 2785048 - RNA, 13 nt, Human
ucuuuguggggcu

SEQ ID NO: 2785049 - RNA, 18 nt, Human
ucuuuguggggcuuggcg

SEQ ID NO: 2785050 - RNA, 22 nt, Human
ucuuuguggggcuuggcgugga

SEQ ID NO: 2785051 - RNA, 15 nt, Human
ucuuuguguagcuuu

SEQ ID NO: 2785052 - RNA, 13 nt, Human
ucuuuguguagcu

SEQ ID NO: 2785053 - RNA, 13 nt, Human
ucuuuguaagagu

SEQ ID NO: 2785054 - RNA, 14 nt, Human
ucuuuguaagagug

SEQ ID NO: 2785055 - RNA, 12 nt, Human
ucuuuguaagaa

SEQ ID NO: 2785056 - RNA, 20 nt, Human
ucuuuguaagaacuaaagaa

SEQ ID NO: 2785057 - RNA, 21 nt, Human
ucuuuguaagaacuaaagaag

SEQ ID NO: 2785058 - RNA, 22 nt, Human
ucuuuguaagaacuaaagaaga

SEQ ID NO: 2785059 - RNA, 18 nt, Human
ucuuuguaagaguguaga

SEQ ID NO: 2785060 - RNA, 22 nt, Human
ugaaaaagaccuuuggagcaaa

SEQ ID NO: 2785061 - RNA, 23 nt, Human
ugaaaaacuggcaacauuccaag

SEQ ID NO: 2785062 - RNA, 17 nt, Human
ugaaaaacaacaacaca

SEQ ID NO: 2785063 - RNA, 13 nt, Human
ugaaaaacaacca

SEQ ID NO: 2785064 - RNA, 11 nt, Human
ugaaaaaagcu

SEQ ID NO: 2785065 - RNA, 12 nt, Human
ugaaaaaagcuc

SEQ ID NO: 2785066 - RNA, 13 nt, Human
ugaaaaaagcuca

SEQ ID NO: 2785067 - RNA, 14 nt, Human
ugaaaaaagcucau

SEQ ID NO: 2785068 - RNA, 20 nt, Human
ugaaaaaagcucauuucaug

SEQ ID NO: 2785069 - RNA, 16 nt, Human
ugaaaaaaaguuuaca

SEQ ID NO: 2785070 - RNA, 17 nt, Human
ugaaaaaaaguuuacaa

SEQ ID NO: 2785071 - RNA, 18 nt, Human
ugaaaaaaauaauuuuaa

SEQ ID NO: 2785072 - RNA, 15 nt, Human
ugaaaaaaacuucau

SEQ ID NO: 2785073 - RNA, 16 nt, Human
ugaaaaaaacuucauu

SEQ ID NO: 2785074 - RNA, 21 nt, Human
ucuuuguuaucaaacuucagc

SEQ ID NO: 2785075 - RNA, 15 nt, Human
ucuuuguuauaccau

SEQ ID NO: 2785076 - RNA, 18 nt, Human
ucuuuuaaaaauucaaau

SEQ ID NO: 2785077 - RNA, 19 nt, Human
ucuuuuaaaaauucaaaug

SEQ ID NO: 2785078 - RNA, 19 nt, Human
ucuuucugaaggcuuugug

SEQ ID NO: 2785079 - RNA, 12 nt, Human
ucuuuuaaugcu

SEQ ID NO: 2785080 - RNA, 19 nt, Human
ucuuuuaaugcuucauuca

SEQ ID NO: 2785081 - RNA, 18 nt, Human
ucuuuuaaaguguuacuu

SEQ ID NO: 2785082 - RNA, 21 nt, Human
ucuuuuaaaguguuacuuuuu

SEQ ID NO: 2785083 - RNA, 23 nt, Human
ucuuuuaaaguguuacuuuuugu

SEQ ID NO: 2785084 - RNA, 14 nt, Human
ucuuuuacauucug

SEQ ID NO: 2785085 - RNA, 12 nt, Human
ucuuuuacaacu

SEQ ID NO: 2785086 - RNA, 22 nt, Human
agagcaguuucuguccugcugg

SEQ ID NO: 2785087 - RNA, 23 nt, Human
agagcaguuucuguccugcuggu

SEQ ID NO: 2785088 - RNA, 13 nt, Human
agagccagcuugg

SEQ ID NO: 2785089 - RNA, 11 nt, Human
agagccagcuu

SEQ ID NO: 2785090 - RNA, 12 nt, Human
agagccagcuug

SEQ ID NO: 2785091 - RNA, 12 nt, Human
agagcaugaaau

SEQ ID NO: 2785092 - RNA, 14 nt, Human
agagcaugaaauuu

SEQ ID NO: 2785093 - RNA, 14 nt, Human
agagcaacucugag

SEQ ID NO: 2785094 - RNA, 20 nt, Human
agagcaccuuugcacaggau

SEQ ID NO: 2785095 - RNA, 21 nt, Human
agagcacuagguucaauuccc

SEQ ID NO: 2785096 - RNA, 17 nt, Human
agagcagccuguggcau

SEQ ID NO: 2785097 - RNA, 16 nt, Human
agagcagccuguggca

SEQ ID NO: 2785098 - RNA, 12 nt, Human
agagcagccugu

SEQ ID NO: 2785099 - RNA, 19 nt, Human
agagcagccuguggcaucu

SEQ ID NO: 2785100 - RNA, 18 nt, Human
agagcagcuuuaaacuca

SEQ ID NO: 2785101 - RNA, 23 nt, Human
agagcaggaagcauucagagagc

SEQ ID NO: 2785102 - RNA, 13 nt, Human
agagcaggaccuc

SEQ ID NO: 2785103 - RNA, 20 nt, Human
agagcagcuuuaaacucagg

SEQ ID NO: 2785104 - RNA, 21 nt, Human
agagcagcuuuaaacucaggg

SEQ ID NO: 2785105 - RNA, 18 nt, Human
agagcaggaagcauucag

SEQ ID NO: 2785106 - RNA, 20 nt, Human
agagcaggaagcauucagag

SEQ ID NO: 2785107 - RNA, 23 nt, Human
agagcugacacaaaccugccugg

SEQ ID NO: 2785108 - RNA, 23 nt, Human
agagcugacacaggaugaaggca

SEQ ID NO: 2785109 - RNA, 18 nt, Human
agagcugacacaaaccug

SEQ ID NO: 2785110 - RNA, 20 nt, Human
agagcugacacaaaccugcc

SEQ ID NO: 2785111 - RNA, 22 nt, Human
agagcugacacaaaccugccug

SEQ ID NO: 2785112 - RNA, 17 nt, Human
agagcaaccucucacuc

SEQ ID NO: 2785113 - RNA, 21 nt, Human
agagcucuggugauaaggaca

SEQ ID NO: 2785114 - RNA, 22 nt, Human
agagcucuggugauaaggacau

SEQ ID NO: 2785115 - RNA, 23 nt, Human
agagcuccucuguccugcuucug

SEQ ID NO: 2785116 - RNA, 20 nt, Human
agagcuccccuacggaccag

SEQ ID NO: 2785117 - RNA, 21 nt, Human
agagcuccccuacggaccagg

SEQ ID NO: 2785118 - RNA, 17 nt, Human
agagcucaagggacaag

SEQ ID NO: 2785119 - RNA, 21 nt, Human
agagcucaagggacaaggaca

SEQ ID NO: 2785120 - RNA, 17 nt, Human
agagcuaagggugggug

SEQ ID NO: 2785121 - RNA, 18 nt, Human
agagcuaagggugggugc

SEQ ID NO: 2785122 - RNA, 22 nt, Human
agagcuaagggugggugcucag

SEQ ID NO: 2785123 - RNA, 23 nt, Human
agagcuaagggugggugcucaga

SEQ ID NO: 2785124 - RNA, 16 nt, Human
agagacuccagcuggg

SEQ ID NO: 2785125 - RNA, 15 nt, Human
agagaccuccugccu

SEQ ID NO: 2785126 - RNA, 15 nt, Human
agagaccugaagugu

SEQ ID NO: 2785127 - RNA, 16 nt, Human
agagaccugaagugug

SEQ ID NO: 2785128 - RNA, 22 nt, Human
agagaccuguuuuaaaaaggaa

SEQ ID NO: 2785129 - RNA, 16 nt, Human
agagacggugucuugu

SEQ ID NO: 2785130 - RNA, 21 nt, Human
agagacggugucuuguucugu

SEQ ID NO: 2785131 - RNA, 18 nt, Human
agagacuauggagccugg

SEQ ID NO: 2785132 - RNA, 22 nt, Human
agagacuauggagccuggcaca

SEQ ID NO: 2785133 - RNA, 13 nt, Human
agagacucagccu

SEQ ID NO: 2785134 - RNA, 14 nt, Human
agagacucagccug

SEQ ID NO: 2785135 - RNA, 15 nt, Human
agagacucagccugc

SEQ ID NO: 2785136 - RNA, 16 nt, Human
agagacucagccugca

SEQ ID NO: 2785137 - RNA, 18 nt, Human
agagacucagccugcagu

SEQ ID NO: 2785138 - RNA, 14 nt, Human
ugaaagaauauauu

SEQ ID NO: 2785139 - RNA, 18 nt, Human
ugaaagaauauauuuauu

SEQ ID NO: 2785140 - RNA, 22 nt, Human
ugaaagaauauauuuauuuaaa

SEQ ID NO: 2785141 - RNA, 13 nt, Human
ugaaagacaccau

SEQ ID NO: 2785142 - RNA, 22 nt, Human
ugaaagaagaauguguuucaaa

SEQ ID NO: 2785143 - RNA, 14 nt, Human
agagagaaaauaaa

SEQ ID NO: 2785144 - RNA, 16 nt, Human
agagacucccaugaag

SEQ ID NO: 2785145 - RNA, 17 nt, Human
agagacucccaugaagc

SEQ ID NO: 2785146 - RNA, 18 nt, Human
agagacucccaugaagcc

SEQ ID NO: 2785147 - RNA, 19 nt, Human
agagacucccaugaagccu

SEQ ID NO: 2785148 - RNA, 20 nt, Human
agagacucccaugaagccuu

SEQ ID NO: 2785149 - RNA, 21 nt, Human
agagacucccaugaagccuuu

SEQ ID NO: 2785150 - RNA, 22 nt, Human
agagacucccaugaagccuuuu

SEQ ID NO: 2785151 - RNA, 14 nt, Human
agagagaaagagag

SEQ ID NO: 2785152 - RNA, 14 nt, Human
agagagaaagccag

SEQ ID NO: 2785153 - RNA, 22 nt, Human
agagaucaaccccuucgcuccu

SEQ ID NO: 2785154 - RNA, 18 nt, Human
agagagaaccuaacugua

SEQ ID NO: 2785155 - RNA, 19 nt, Human
agagagaaccuaacuguau

SEQ ID NO: 2785156 - RNA, 21 nt, Human
agagagaaccuaacuguaucu

SEQ ID NO: 2785157 - RNA, 22 nt, Human
agagagaaccuaacuguaucuu

SEQ ID NO: 2785158 - RNA, 22 nt, Human
agagagaaagccaggcagguag

SEQ ID NO: 2785159 - RNA, 15 nt, Human
agagagaaagccagg

SEQ ID NO: 2785160 - RNA, 16 nt, Human
agagagaaagccaggc

SEQ ID NO: 2785161 - RNA, 12 nt, Human
agagagaaaucu

SEQ ID NO: 2785162 - RNA, 13 nt, Human
agagagaaauucu

SEQ ID NO: 2785163 - RNA, 14 nt, Human
agagagaaauucug

SEQ ID NO: 2785164 - RNA, 19 nt, Human
agagagaaauucuguuaaa

SEQ ID NO: 2785165 - RNA, 21 nt, Human
agagagaaauucuguuaaaau

SEQ ID NO: 2785166 - RNA, 20 nt, Human
agagauauguagaaggcaca

SEQ ID NO: 2785167 - RNA, 15 nt, Human
agagauauuuugggc

SEQ ID NO: 2785168 - RNA, 18 nt, Human
agagauauuuugggcaug

SEQ ID NO: 2785169 - RNA, 20 nt, Human
agagauauuuugggcaugug

SEQ ID NO: 2785170 - RNA, 23 nt, Human
agagauauuuugggcaugugggc

SEQ ID NO: 2785171 - RNA, 20 nt, Human
agagcaaaauugauguguuu

SEQ ID NO: 2785172 - RNA, 14 nt, Human
agagcaaagugacc

SEQ ID NO: 2785173 - RNA, 21 nt, Human
agagaugugcaauugauuucu

SEQ ID NO: 2785174 - RNA, 14 nt, Human
agagaugugcaccc

SEQ ID NO: 2785175 - RNA, 15 nt, Human
agagaugugcaccca

SEQ ID NO: 2785176 - RNA, 17 nt, Human
agagaugugcacccaug

SEQ ID NO: 2785177 - RNA, 15 nt, Human
agagaugggagcucc

SEQ ID NO: 2785178 - RNA, 17 nt, Human
agagaugggagcuccuc

SEQ ID NO: 2785179 - RNA, 19 nt, Human
agagaugggagcuccucuc

SEQ ID NO: 2785180 - RNA, 20 nt, Human
agagaugggagcuccucucc

SEQ ID NO: 2785181 - RNA, 21 nt, Human
agagaugggagcuccucuccu

SEQ ID NO: 2785182 - RNA, 24 nt, Human
agagaugggagcuccucuccugga

SEQ ID NO: 2785183 - RNA, 17 nt, Human
agagaugucaucagagc

SEQ ID NO: 2785184 - RNA, 18 nt, Human
agagauggagucuugcua

SEQ ID NO: 2785185 - RNA, 13 nt, Human
agagaucauggaa

SEQ ID NO: 2785186 - RNA, 17 nt, Human
ugauauggcagaagaca

SEQ ID NO: 2785187 - RNA, 18 nt, Human
ugauauggcagaagacac

SEQ ID NO: 2785188 - RNA, 16 nt, Human
ugauauggcagaagac

SEQ ID NO: 2785189 - RNA, 18 nt, Human
ugauagacaauugaggua

SEQ ID NO: 2785190 - RNA, 17 nt, Human
ugauagacaauugaggu

SEQ ID NO: 2785191 - RNA, 19 nt, Human
ugauauggcagaagacacc

SEQ ID NO: 2785192 - RNA, 20 nt, Human
ugauauggcagaagacacca

SEQ ID NO: 2785193 - RNA, 14 nt, Human
ugauaugggacuga

SEQ ID NO: 2785194 - RNA, 21 nt, Human
ugauacuaucauacuacugaa

SEQ ID NO: 2785195 - RNA, 13 nt, Human
ugauacugauggu

SEQ ID NO: 2785196 - RNA, 18 nt, Human
ugauacuauccaguuacu

SEQ ID NO: 2785197 - RNA, 20 nt, Human
ugauacucuuucuaaugcug

SEQ ID NO: 2785198 - RNA, 14 nt, Human
ugauacuuauauuu

SEQ ID NO: 2785199 - RNA, 15 nt, Human
ugauacuuauauuuu

SEQ ID NO: 2785200 - RNA, 16 nt, Human
ugauacuuauauuuuc

SEQ ID NO: 2785201 - RNA, 22 nt, Human
ugauacuuauauuuucguauga

SEQ ID NO: 2785202 - RNA, 14 nt, Human
ugauacuucacuac

SEQ ID NO: 2785203 - RNA, 13 nt, Human
ugauacuucauuu

SEQ ID NO: 2785204 - RNA, 16 nt, Human
ugauacuucauuuaaa

SEQ ID NO: 2785205 - RNA, 15 nt, Human
ugauacuuuuaagag

SEQ ID NO: 2785206 - RNA, 12 nt, Human
ugauauucuaag

SEQ ID NO: 2785207 - RNA, 15 nt, Human
ugauauucuaagacu

SEQ ID NO: 2785208 - RNA, 17 nt, Human
ugauauucuaagacuua

SEQ ID NO: 2785209 - RNA, 13 nt, Human
ugauauugugaac

SEQ ID NO: 2785210 - RNA, 17 nt, Human
ugauauugugaacauuu

SEQ ID NO: 2785211 - RNA, 21 nt, Human
ugauauugugaacauuuguga

SEQ ID NO: 2785212 - RNA, 12 nt, Human
ugauauucagaa

SEQ ID NO: 2785213 - RNA, 14 nt, Human
ugauauucagaauu

SEQ ID NO: 2785214 - RNA, 22 nt, Human
ugauauucagaauuaugaugga

SEQ ID NO: 2785215 - RNA, 16 nt, Human
ugauauguuuuauuuc

SEQ ID NO: 2785216 - RNA, 17 nt, Human
ugauauguuuuauuuca

SEQ ID NO: 2785217 - RNA, 23 nt, Human
ugauauguuuuauuucauugguu

SEQ ID NO: 2785218 - RNA, 23 nt, Human
ugauauuucccuccccuggggac

SEQ ID NO: 2785219 - RNA, 12 nt, Human
ugauauuucucu

SEQ ID NO: 2785220 - RNA, 14 nt, Human
ugauauuucucuag

SEQ ID NO: 2785221 - RNA, 15 nt, Human
ugauauuucucuagu

SEQ ID NO: 2785222 - RNA, 16 nt, Human
ugauauuucucuagua

SEQ ID NO: 2785223 - RNA, 18 nt, Human
ugauauuucucuaguagu

SEQ ID NO: 2785224 - RNA, 19 nt, Human
ugauauuucucuaguaguu

SEQ ID NO: 2785225 - RNA, 19 nt, Human
ugauauuuucaacgcagcc

SEQ ID NO: 2785226 - RNA, 21 nt, Human
ugauauuuucaacgcagcccu

SEQ ID NO: 2785227 - RNA, 22 nt, Human
ugauauuuucaacgcagcccug

SEQ ID NO: 2785228 - RNA, 23 nt, Human
ugauauuuucaacgcagcccugc

SEQ ID NO: 2785229 - RNA, 19 nt, Human
ugaucacggcucacugcag

SEQ ID NO: 2785230 - RNA, 18 nt, Human
ugaucacggcucacugca

SEQ ID NO: 2785231 - RNA, 15 nt, Human
ugaucaacucuucga

SEQ ID NO: 2785232 - RNA, 18 nt, Human
ugaucaaagccacacucu

SEQ ID NO: 2785233 - RNA, 16 nt, Human
ugaucaaaaauaaugc

SEQ ID NO: 2785234 - RNA, 17 nt, Human
ugaucaaaaauaaugca

SEQ ID NO: 2785235 - RNA, 18 nt, Human
ugaucaaaaauaaugcau

SEQ ID NO: 2785236 - RNA, 16 nt, Human
ugauauuuuguacuuu

SEQ ID NO: 2785237 - RNA, 18 nt, Human
ugauauuuuguuuuuccc

SEQ ID NO: 2785238 - RNA, 19 nt, Human
ugauauuuuaccucuuauu

SEQ ID NO: 2785239 - RNA, 21 nt, Human
ugaucacggcucacugcagcc

SEQ ID NO: 2785240 - RNA, 20 nt, Human
ugaucacggcucacugcagc

SEQ ID NO: 2785241 - RNA, 22 nt, Human
ugauauggguuuauaauuuucu

SEQ ID NO: 2785242 - RNA, 21 nt, Human
agcauauucuuuucugcaaaa

SEQ ID NO: 2785243 - RNA, 23 nt, Human
agcauggcacucccuccagcaca

SEQ ID NO: 2785244 - RNA, 18 nt, Human
agcauggcucaaagugca

SEQ ID NO: 2785245 - RNA, 17 nt, Human
agcauguauaguugcuu

SEQ ID NO: 2785246 - RNA, 18 nt, Human
agcauguauaguugcuuu

SEQ ID NO: 2785247 - RNA, 21 nt, Human
agcauugcuuuuauuuugaaa

SEQ ID NO: 2785248 - RNA, 23 nt, Human
agcauugcuuuuauuuugaaaag

SEQ ID NO: 2785249 - RNA, 17 nt, Human
agcauuggauacagcag

SEQ ID NO: 2785250 - RNA, 23 nt, Human
agcauuggauacagcaguagaca

SEQ ID NO: 2785251 - RNA, 13 nt, Human
agcauugugagua

SEQ ID NO: 2785252 - RNA, 23 nt, Human
agcauuuccaacaccacagacac

SEQ ID NO: 2785253 - RNA, 14 nt, Human
agcauuuccaacac

SEQ ID NO: 2785254 - RNA, 17 nt, Human
agcauuuccaacaccac

SEQ ID NO: 2785255 - RNA, 18 nt, Human
agcauuuccaacaccaca

SEQ ID NO: 2785256 - RNA, 19 nt, Human
agcauuuccaacaccacag

SEQ ID NO: 2785257 - RNA, 21 nt, Human
agcauuuccaacaccacagac

SEQ ID NO: 2785258 - RNA, 22 nt, Human
agcauuuccaacaccacagaca

SEQ ID NO: 2785259 - RNA, 14 nt, Human
agcauguuuuguau

SEQ ID NO: 2785260 - RNA, 15 nt, Human
agcauguuuuguaua

SEQ ID NO: 2785261 - RNA, 16 nt, Human
agcauguuuuguauac

SEQ ID NO: 2785262 - RNA, 17 nt, Human
agcauguuuuguauaca

SEQ ID NO: 2785263 - RNA, 19 nt, Human
agcauguuuuguauacaaa

SEQ ID NO: 2785264 - RNA, 18 nt, Human
agcauguuucauguuuug

SEQ ID NO: 2785265 - RNA, 21 nt, Human
agcauguuucauguuuuguga

SEQ ID NO: 2785266 - RNA, 12 nt, Human
agcauugccugg

SEQ ID NO: 2785267 - RNA, 13 nt, Human
agcauugccuggc

SEQ ID NO: 2785268 - RNA, 17 nt, Human
agcauugccuggccuuc

SEQ ID NO: 2785269 - RNA, 21 nt, Human
agcauugccuggccuuccugu

SEQ ID NO: 2785270 - RNA, 15 nt, Human
agcauugcuguuaug

SEQ ID NO: 2785271 - RNA, 16 nt, Human
agcauugcuguuaugu

SEQ ID NO: 2785272 - RNA, 17 nt, Human
agcauugcuguuauguc

SEQ ID NO: 2785273 - RNA, 20 nt, Human
agcauugcuguuaugucugu

SEQ ID NO: 2785274 - RNA, 23 nt, Human
agcauugcuguuaugucuguuua

SEQ ID NO: 2785275 - RNA, 14 nt, Human
agcauguuucaugu

SEQ ID NO: 2785276 - RNA, 17 nt, Human
agcauguuucauguuuu

SEQ ID NO: 2785277 - RNA, 16 nt, Human
agcaugugucaugcau

SEQ ID NO: 2785278 - RNA, 15 nt, Human
agcaugugcccuccu

SEQ ID NO: 2785279 - RNA, 16 nt, Human
agcaugugcccuccug

SEQ ID NO: 2785280 - RNA, 17 nt, Human
agcaugugcccuccuga

SEQ ID NO: 2785281 - RNA, 16 nt, Human
agcaugugccuuaaug

SEQ ID NO: 2785282 - RNA, 18 nt, Human
agcaugugccuuaaugcu

SEQ ID NO: 2785283 - RNA, 15 nt, Human
ugaguaacuauuauu

SEQ ID NO: 2785284 - RNA, 21 nt, Human
agcauaauugaaaguucugaa

SEQ ID NO: 2785285 - RNA, 12 nt, Human
ugaguaaauauu

SEQ ID NO: 2785286 - RNA, 15 nt, Human
ugaguaaauauugag

SEQ ID NO: 2785287 - RNA, 20 nt, Human
ugaguaaauauugaggcuuu

SEQ ID NO: 2785288 - RNA, 23 nt, Human
ugaguaaauauugaggcuuugug

SEQ ID NO: 2785289 - RNA, 17 nt, Human
ugaguaaaucagauguu

SEQ ID NO: 2785290 - RNA, 20 nt, Human
agcauauggguuagauguug

SEQ ID NO: 2785291 - RNA, 19 nt, Human
ugaguagacacauuuaagg

SEQ ID NO: 2785292 - RNA, 14 nt, Human
ugaguagauauuac

SEQ ID NO: 2785293 - RNA, 15 nt, Human
ugaguagauauuacu

SEQ ID NO: 2785294 - RNA, 18 nt, Human
ugaguagauauuacuuua

SEQ ID NO: 2785295 - RNA, 19 nt, Human
ugaguagauauuacuuuau

SEQ ID NO: 2785296 - RNA, 20 nt, Human
ugaguagauauuacuuuauc

SEQ ID NO: 2785297 - RNA, 13 nt, Human
ugaguagcuggau

SEQ ID NO: 2785298 - RNA, 13 nt, Human
ugaguagcuggga

SEQ ID NO: 2785299 - RNA, 19 nt, Human
ugaguauaaaaacuugaaa

SEQ ID NO: 2785300 - RNA, 15 nt, Human
ugaguauacaauaua

SEQ ID NO: 2785301 - RNA, 18 nt, Human
ugaguauacaauauauaa

SEQ ID NO: 2785302 - RNA, 19 nt, Human
ugagaauugggcggcucug

SEQ ID NO: 2785303 - RNA, 13 nt, Human
ugagaauuucuaa

SEQ ID NO: 2785304 - RNA, 14 nt, Human
ugagaauuucuaaa

SEQ ID NO: 2785305 - RNA, 15 nt, Human
ugagaauuucuaaaa

SEQ ID NO: 2785306 - RNA, 22 nt, Human
ugagaauuucuaaaaagauuag

SEQ ID NO: 2785307 - RNA, 23 nt, Human
ugagacaaauuuuaacuucuugu

SEQ ID NO: 2785308 - RNA, 16 nt, Human
ugagacaaaauuuuag

SEQ ID NO: 2785309 - RNA, 14 nt, Human
ugagacaaacaugc

SEQ ID NO: 2785310 - RNA, 17 nt, Human
agcauaaguauacaguu

SEQ ID NO: 2785311 - RNA, 18 nt, Human
agcauaaguauacaguuc

SEQ ID NO: 2785312 - RNA, 12 nt, Human
ugauaaguaaau

SEQ ID NO: 2785313 - RNA, 19 nt, Human
ugauaaggacaugaugcuu

SEQ ID NO: 2785314 - RNA, 19 nt, Human
ugauaauauuguggugcca

SEQ ID NO: 2785315 - RNA, 16 nt, Human
ugauaauucuuauuuu

SEQ ID NO: 2785316 - RNA, 21 nt, Human
ugauaauguuaaauuuguaag

SEQ ID NO: 2785317 - RNA, 22 nt, Human
ugauaauguuaaauuuguaagu

SEQ ID NO: 2785318 - RNA, 15 nt, Human
ugauaauguuaaauu

SEQ ID NO: 2785319 - RNA, 16 nt, Human
ugauaauguuaaauuu

SEQ ID NO: 2785320 - RNA, 17 nt, Human
ugauaauguuaaauuug

SEQ ID NO: 2785321 - RNA, 18 nt, Human
ugauaauguuaaauuugu

SEQ ID NO: 2785322 - RNA, 13 nt, Human
ugauaauguuaaa

SEQ ID NO: 2785323 - RNA, 14 nt, Human
ugauaauguuaaau

SEQ ID NO: 2785324 - RNA, 21 nt, Human
ugauaaugauaaaacaccuca

SEQ ID NO: 2785325 - RNA, 17 nt, Human
ugaguucauacccuguu

SEQ ID NO: 2785326 - RNA, 19 nt, Human
ugauaagagggcacacacu

SEQ ID NO: 2785327 - RNA, 21 nt, Human
ugauaagagggcacacacugu

SEQ ID NO: 2785328 - RNA, 14 nt, Human
ugauaauugcauuc

SEQ ID NO: 2785329 - RNA, 16 nt, Human
ugauaauugcauucau

SEQ ID NO: 2785330 - RNA, 19 nt, Human
ugauaauugcauucaucuu

SEQ ID NO: 2785331 - RNA, 13 nt, Human
ugauaauuuaaga

SEQ ID NO: 2785332 - RNA, 18 nt, Human
ugauaauuuaagagcuaa

SEQ ID NO: 2785333 - RNA, 19 nt, Human
ugauacgcaacauaauuaa

SEQ ID NO: 2785334 - RNA, 17 nt, Human
ugauacuaaaaguucuu

SEQ ID NO: 2785335 - RNA, 17 nt, Human
ugagucaccaagcccag

SEQ ID NO: 2785336 - RNA, 16 nt, Human
ugagucaccaagccca

SEQ ID NO: 2785337 - RNA, 14 nt, Human
ugagucaccaagcc

SEQ ID NO: 2785338 - RNA, 21 nt, Human
ugaguagaugcgcagccccau

SEQ ID NO: 2785339 - RNA, 13 nt, Human
ugaguaucagaau

SEQ ID NO: 2785340 - RNA, 14 nt, Human
ugaguaucagaauu

SEQ ID NO: 2785341 - RNA, 15 nt, Human
ugaguaucagaauug

SEQ ID NO: 2785342 - RNA, 22 nt, Human
ugaguaucagaauugaaacacu

SEQ ID NO: 2785343 - RNA, 17 nt, Human
ugaguauguggaaggca

SEQ ID NO: 2785344 - RNA, 20 nt, Human
ugaguauggagcagccugga

SEQ ID NO: 2785345 - RNA, 23 nt, Human
ugaguauggagcagccuggagac

SEQ ID NO: 2785346 - RNA, 15 nt, Human
ugagugccuuuugca

SEQ ID NO: 2785347 - RNA, 17 nt, Human
ugagugccuuuugcaga

SEQ ID NO: 2785348 - RNA, 19 nt, Human
ugagugccuuuugcagaag

SEQ ID NO: 2785349 - RNA, 22 nt, Human
ugagugccuuuugcagaagagg

SEQ ID NO: 2785350 - RNA, 13 nt, Human
ugaguguaauguu

SEQ ID NO: 2785351 - RNA, 21 nt, Human
ugagugggguuaucucugugu

SEQ ID NO: 2785352 - RNA, 22 nt, Human
ugagugggguuaucucuguguu

SEQ ID NO: 2785353 - RNA, 15 nt, Human
ugaguuaucuaagaa

SEQ ID NO: 2785354 - RNA, 16 nt, Human
ugaguuaucuaagaau

SEQ ID NO: 2785355 - RNA, 15 nt, Human
ugaguuaugauguaa

SEQ ID NO: 2785356 - RNA, 16 nt, Human
ugaguuauguuaaaau

SEQ ID NO: 2785357 - RNA, 22 nt, Human
ugaguuauuccuugaucauuuu

SEQ ID NO: 2785358 - RNA, 23 nt, Human
ugaguuauuccuugaucauuuug

SEQ ID NO: 2785359 - RNA, 21 nt, Human
ugaguuauugagauuguccuc

SEQ ID NO: 2785360 - RNA, 17 nt, Human
ugaguuaggaaugagaa

SEQ ID NO: 2785361 - RNA, 18 nt, Human
ugaguuaggaaugagaag

SEQ ID NO: 2785362 - RNA, 14 nt, Human
ugaugaagaggagu

SEQ ID NO: 2785363 - RNA, 15 nt, Human
ugaugaagcaaggaa

SEQ ID NO: 2785364 - RNA, 16 nt, Human
ugaugaagcaaggaag

SEQ ID NO: 2785365 - RNA, 23 nt, Human
ugaugaagcaaggaagauauaca

SEQ ID NO: 2785366 - RNA, 24 nt, Human
ugaugaagcaaggaagauauacau

SEQ ID NO: 2785367 - RNA, 21 nt, Human
ugaugaagccgaccuuagauu

SEQ ID NO: 2785368 - RNA, 13 nt, Human
ugaugaagaggag

SEQ ID NO: 2785369 - RNA, 13 nt, Human
ugaugaaucacug

SEQ ID NO: 2785370 - RNA, 14 nt, Human
ugaugaaucacugu

SEQ ID NO: 2785371 - RNA, 21 nt, Human
agccaccuaaacgguucaguu

SEQ ID NO: 2785372 - RNA, 16 nt, Human
ugaugagcuccucuuc

SEQ ID NO: 2785373 - RNA, 15 nt, Human
ugaugagcuccucuu

SEQ ID NO: 2785374 - RNA, 15 nt, Human
agccacggccaggcc

SEQ ID NO: 2785375 - RNA, 21 nt, Human
ugauccaugaguuugcccugg

SEQ ID NO: 2785376 - RNA, 13 nt, Human
ugauccugugaag

SEQ ID NO: 2785377 - RNA, 13 nt, Human
ugauccauccagc

SEQ ID NO: 2785378 - RNA, 16 nt, Human
ugauccauccagcuug

SEQ ID NO: 2785379 - RNA, 19 nt, Human
ugauccauccagcuugcca

SEQ ID NO: 2785380 - RNA, 18 nt, Human
ugauccuuuuggagucag

SEQ ID NO: 2785381 - RNA, 14 nt, Human
ugauccugugaagu

SEQ ID NO: 2785382 - RNA, 21 nt, Human
ugaucgaugauucaggugcag

SEQ ID NO: 2785383 - RNA, 17 nt, Human
ugaucgcacaaccugca

SEQ ID NO: 2785384 - RNA, 20 nt, Human
agccacauuuggaauacuuu

SEQ ID NO: 2785385 - RNA, 15 nt, Human
agccacauuuggaau

SEQ ID NO: 2785386 - RNA, 21 nt, Human
agccacauagagugacuccaa

SEQ ID NO: 2785387 - RNA, 20 nt, Human
agcauuucuuuucuggccaa

SEQ ID NO: 2785388 - RNA, 14 nt, Human
agccacggccaggc

SEQ ID NO: 2785389 - RNA, 18 nt, Human
agccaccucucuuuuuca

SEQ ID NO: 2785390 - RNA, 16 nt, Human
agccaccucugucauu

SEQ ID NO: 2785391 - RNA, 23 nt, Human
agccaccucugucauuuguugug

SEQ ID NO: 2785392 - RNA, 18 nt, Human
agccaccgugccuggcca

SEQ ID NO: 2785393 - RNA, 14 nt, Human
agccaccucucuuu

SEQ ID NO: 2785394 - RNA, 14 nt, Human
agccacauuauuuc

SEQ ID NO: 2785395 - RNA, 23 nt, Human
agccacauuuggaauacuuuuug

SEQ ID NO: 2785396 - RNA, 22 nt, Human
agccacauuuggaauacuuuuu

SEQ ID NO: 2785397 - RNA, 21 nt, Human
agccacauuuggaauacuuuu

SEQ ID NO: 2785398 - RNA, 16 nt, Human
agccacugaagcuggg

SEQ ID NO: 2785399 - RNA, 13 nt, Human
agccacugaagcu

SEQ ID NO: 2785400 - RNA, 12 nt, Human
agccacugaagc

SEQ ID NO: 2785401 - RNA, 22 nt, Human
agccacucuaccagugcaggcu

SEQ ID NO: 2785402 - RNA, 16 nt, Human
agccacucucuucccu

SEQ ID NO: 2785403 - RNA, 19 nt, Human
agccacucucuucccuuuc

SEQ ID NO: 2785404 - RNA, 20 nt, Human
agccacucucuucccuuucc

SEQ ID NO: 2785405 - RNA, 17 nt, Human
agccacucugucccuuc

SEQ ID NO: 2785406 - RNA, 15 nt, Human
ugauguuuuuaugau

SEQ ID NO: 2785407 - RNA, 17 nt, Human
agccacuucggccaggu

SEQ ID NO: 2785408 - RNA, 22 nt, Human
agccacuucggccaggucacac

SEQ ID NO: 2785409 - RNA, 22 nt, Human
agccacugcaccgggccacaga

SEQ ID NO: 2785410 - RNA, 21 nt, Human
agccacugcaccgggccacag

SEQ ID NO: 2785411 - RNA, 13 nt, Human
agccacugcaccg

SEQ ID NO: 2785412 - RNA, 20 nt, Human
agccacugcaccgggccaca

SEQ ID NO: 2785413 - RNA, 15 nt, Human
ugauuaaaaugguga

SEQ ID NO: 2785414 - RNA, 11 nt, Human
ugauguuugug

SEQ ID NO: 2785415 - RNA, 16 nt, Human
ugauguuuguggccuc

SEQ ID NO: 2785416 - RNA, 20 nt, Human
ugauguuuguggccucagaa

SEQ ID NO: 2785417 - RNA, 19 nt, Human
ugauguuuguggccucaga

SEQ ID NO: 2785418 - RNA, 18 nt, Human
ugauguuuguggccucag

SEQ ID NO: 2785419 - RNA, 17 nt, Human
ugauguuuguggccuca

SEQ ID NO: 2785420 - RNA, 17 nt, Human
ugaugauacaaugaaca

SEQ ID NO: 2785421 - RNA, 15 nt, Human
ugaugauacaagauu

SEQ ID NO: 2785422 - RNA, 13 nt, Human
ugauguuugcucu

SEQ ID NO: 2785423 - RNA, 23 nt, Human
agccagacgccauuuaaaagucu

SEQ ID NO: 2785424 - RNA, 18 nt, Human
agccagaaucagcacaga

SEQ ID NO: 2785425 - RNA, 19 nt, Human
agccagaaucagcacagau

SEQ ID NO: 2785426 - RNA, 21 nt, Human
agccagaaucagcacagauaa

SEQ ID NO: 2785427 - RNA, 12 nt, Human
agccagacagac

SEQ ID NO: 2785428 - RNA, 13 nt, Human
agccagacagacc

SEQ ID NO: 2785429 - RNA, 15 nt, Human
agccagacagacccu

SEQ ID NO: 2785430 - RNA, 20 nt, Human
agccagcugcagcugggcug

SEQ ID NO: 2785431 - RNA, 18 nt, Human
agccagcugcaggaauca

SEQ ID NO: 2785432 - RNA, 11 nt, Human
agccagcugcc

SEQ ID NO: 2785433 - RNA, 19 nt, Human
agccagcugcagcugggcu

SEQ ID NO: 2785434 - RNA, 12 nt, Human
agccagcuuggg

SEQ ID NO: 2785435 - RNA, 14 nt, Human
agccaggagcuguc

SEQ ID NO: 2785436 - RNA, 15 nt, Human
agccaggagcuguca

SEQ ID NO: 2785437 - RNA, 17 nt, Human
agccaggagcugucacc

SEQ ID NO: 2785438 - RNA, 14 nt, Human
agccaggaucaugg

SEQ ID NO: 2785439 - RNA, 15 nt, Human
agccaggaucauggu

SEQ ID NO: 2785440 - RNA, 18 nt, Human
agccaggaucauggugua

SEQ ID NO: 2785441 - RNA, 20 nt, Human
agccaggaucaugguguaau

SEQ ID NO: 2785442 - RNA, 23 nt, Human
agccaggaucaugguguaauaag

SEQ ID NO: 2785443 - RNA, 22 nt, Human
agccaggcaacuucaguccugg

SEQ ID NO: 2785444 - RNA, 22 nt, Human
agccaggaucaugguguaauaa

SEQ ID NO: 2785445 - RNA, 20 nt, Human
agccaggaaguacuuccacc

SEQ ID NO: 2785446 - RNA, 15 nt, Human
agccaggacagucag

SEQ ID NO: 2785447 - RNA, 21 nt, Human
agccaggcagguagccagggg

SEQ ID NO: 2785448 - RNA, 12 nt, Human
agccagggucuc

SEQ ID NO: 2785449 - RNA, 23 nt, Human
agccagggggacuagccccugug

SEQ ID NO: 2785450 - RNA, 21 nt, Human
agccagggggacuagccccug

SEQ ID NO: 2785451 - RNA, 22 nt, Human
agccagggggacuagccccugu

SEQ ID NO: 2785452 - RNA, 20 nt, Human
agccagggggaugccacucc

SEQ ID NO: 2785453 - RNA, 16 nt, Human
agccagggucucuccc

SEQ ID NO: 2785454 - RNA, 18 nt, Human
agccagggucucucccuc

SEQ ID NO: 2785455 - RNA, 20 nt, Human
agccagggucucucccucag

SEQ ID NO: 2785456 - RNA, 21 nt, Human
agccagggucucucccucagg

SEQ ID NO: 2785457 - RNA, 22 nt, Human
agccagggucucucccucaggu

SEQ ID NO: 2785458 - RNA, 18 nt, Human
agccagggggacuagccc

SEQ ID NO: 2785459 - RNA, 20 nt, Human
agccaggcuagcuggagccu

SEQ ID NO: 2785460 - RNA, 21 nt, Human
agccaggcuagcuggagccug

SEQ ID NO: 2785461 - RNA, 17 nt, Human
agccagguauggcucug

SEQ ID NO: 2785462 - RNA, 19 nt, Human
agccagguauggcucugca

SEQ ID NO: 2785463 - RNA, 15 nt, Human
agccaggucccccug

SEQ ID NO: 2785464 - RNA, 16 nt, Human
agccaggucccccugc

SEQ ID NO: 2785465 - RNA, 17 nt, Human
agccaggucccccugca

SEQ ID NO: 2785466 - RNA, 18 nt, Human
agccaggucccccugcag

SEQ ID NO: 2785467 - RNA, 19 nt, Human
agccaggucccccugcagc

SEQ ID NO: 2785468 - RNA, 20 nt, Human
agccaggucccccugcagcu

SEQ ID NO: 2785469 - RNA, 20 nt, Human
agccagggcuuaccuguaca

SEQ ID NO: 2785470 - RNA, 22 nt, Human
agccauacuuaucucucugugc

SEQ ID NO: 2785471 - RNA, 16 nt, Human
agccauacuuaucucu

SEQ ID NO: 2785472 - RNA, 19 nt, Human
agccauacuuaucucucug

SEQ ID NO: 2785473 - RNA, 21 nt, Human
agccauauaaguuugaaggaa

SEQ ID NO: 2785474 - RNA, 16 nt, Human
agccaguguugccuaa

SEQ ID NO: 2785475 - RNA, 13 nt, Human
agccagugagaug

SEQ ID NO: 2785476 - RNA, 23 nt, Human
agccaugggcacaaagggcccag

SEQ ID NO: 2785477 - RNA, 22 nt, Human
agccauguagaagcugcaucuu

SEQ ID NO: 2785478 - RNA, 15 nt, Human
agccauguauaaaug

SEQ ID NO: 2785479 - RNA, 16 nt, Human
agccauguauaaaugu

SEQ ID NO: 2785480 - RNA, 17 nt, Human
agccauguauaaaugug

SEQ ID NO: 2785481 - RNA, 18 nt, Human
agccauguauaaauguga

SEQ ID NO: 2785482 - RNA, 22 nt, Human
agccaugggcacaaagggccca

SEQ ID NO: 2785483 - RNA, 13 nt, Human
agccauguacaga

SEQ ID NO: 2785484 - RNA, 14 nt, Human
agccauguacagac

SEQ ID NO: 2785485 - RNA, 20 nt, Human
agccauguacagacagagaa

SEQ ID NO: 2785486 - RNA, 23 nt, Human
agccauguacagacagagaauau

SEQ ID NO: 2785487 - RNA, 15 nt, Human
agccaucaaaaugcu

SEQ ID NO: 2785488 - RNA, 14 nt, Human
agccaucaaaaugc

SEQ ID NO: 2785489 - RNA, 13 nt, Human
agccaucaaaaug

SEQ ID NO: 2785490 - RNA, 12 nt, Human
agcccagaagaa

SEQ ID NO: 2785491 - RNA, 17 nt, Human
agccauguuaacaugac

SEQ ID NO: 2785492 - RNA, 22 nt, Human
agcccacuucugccauauucug

SEQ ID NO: 2785493 - RNA, 20 nt, Human
agcccagagacuuuguagau

SEQ ID NO: 2785494 - RNA, 12 nt, Human
agcccagagacu

SEQ ID NO: 2785495 - RNA, 12 nt, Human
agcccagacaaa

SEQ ID NO: 2785496 - RNA, 11 nt, Human
agcccagagaa

SEQ ID NO: 2785497 - RNA, 14 nt, Human
agcccagagaacag

SEQ ID NO: 2785498 - RNA, 15 nt, Human
agcccagagaacagc

SEQ ID NO: 2785499 - RNA, 13 nt, Human
agcccagcccucc

SEQ ID NO: 2785500 - RNA, 17 nt, Human
agcccagcccuguucug

SEQ ID NO: 2785501 - RNA, 14 nt, Human
agcccagcgcucug

SEQ ID NO: 2785502 - RNA, 17 nt, Human
agcccagcgcucugccu

SEQ ID NO: 2785503 - RNA, 16 nt, Human
agcccagcccuguucu

SEQ ID NO: 2785504 - RNA, 15 nt, Human
agcccagcccuguuc

SEQ ID NO: 2785505 - RNA, 23 nt, Human
agcccagccauuaccauggagac

SEQ ID NO: 2785506 - RNA, 21 nt, Human
agcccagccauuaccauggag

SEQ ID NO: 2785507 - RNA, 21 nt, Human
ugauucccaagcucugcuccu

SEQ ID NO: 2785508 - RNA, 19 nt, Human
ugauucccaagcucugcuc

SEQ ID NO: 2785509 - RNA, 17 nt, Human
ugauuccuuuuuucaaa

SEQ ID NO: 2785510 - RNA, 18 nt, Human
ugauucccaagcucugcu

SEQ ID NO: 2785511 - RNA, 16 nt, Human
ugauucccaagcucug

SEQ ID NO: 2785512 - RNA, 15 nt, Human
ugauucccaagcucu

SEQ ID NO: 2785513 - RNA, 13 nt, Human
agcccaggagaga

SEQ ID NO: 2785514 - RNA, 14 nt, Human
agcccaggagagag

SEQ ID NO: 2785515 - RNA, 15 nt, Human
agcccaggagagaga

SEQ ID NO: 2785516 - RNA, 14 nt, Human
ugauucaggugcag

SEQ ID NO: 2785517 - RNA, 18 nt, Human
ugauucaggugcagagga

SEQ ID NO: 2785518 - RNA, 21 nt, Human
ugauucaggugcagaggaagu

SEQ ID NO: 2785519 - RNA, 16 nt, Human
agcccaggagagagaa

SEQ ID NO: 2785520 - RNA, 13 nt, Human
ugauucauaaaga

SEQ ID NO: 2785521 - RNA, 21 nt, Human
agccucuuucugucccuucug

SEQ ID NO: 2785522 - RNA, 21 nt, Human
agccugaauuuuguugcuguu

SEQ ID NO: 2785523 - RNA, 20 nt, Human
agccugaauuuuguugcugu

SEQ ID NO: 2785524 - RNA, 23 nt, Human
ugcagccucaaccuccugggcua

SEQ ID NO: 2785525 - RNA, 16 nt, Human
ugcagcccugagaaag

SEQ ID NO: 2785526 - RNA, 19 nt, Human
ugcagcccugagaaagccc

SEQ ID NO: 2785527 - RNA, 21 nt, Human
ugcagcccugagaaagcccug

SEQ ID NO: 2785528 - RNA, 22 nt, Human
ugcagcccugagaaagcccugu

SEQ ID NO: 2785529 - RNA, 21 nt, Human
ugcagccccgcgccuccuucc

SEQ ID NO: 2785530 - RNA, 13 nt, Human
ugcagcccaugcc

SEQ ID NO: 2785531 - RNA, 21 nt, Human
ugcagcccaugcccaccugcc

SEQ ID NO: 2785532 - RNA, 19 nt, Human
ugcagcccaugcccaccug

SEQ ID NO: 2785533 - RNA, 18 nt, Human
ugcagcccaugcccaccu

SEQ ID NO: 2785534 - RNA, 14 nt, Human
ugcagcccaugccc

SEQ ID NO: 2785535 - RNA, 23 nt, Human
ugcagcccaugcccaccugccca

SEQ ID NO: 2785536 - RNA, 14 nt, Human
ugcagcccauuucu

SEQ ID NO: 2785537 - RNA, 15 nt, Human
ugcagcccauuucuc

SEQ ID NO: 2785538 - RNA, 18 nt, Human
ugcagcccauuucuccag

SEQ ID NO: 2785539 - RNA, 19 nt, Human
ugcagcccauuucuccaga

SEQ ID NO: 2785540 - RNA, 20 nt, Human
ugcagcccauuucuccagaa

SEQ ID NO: 2785541 - RNA, 21 nt, Human
ugcagcccauuucuccagaac

SEQ ID NO: 2785542 - RNA, 22 nt, Human
ugcagcccauuucuccagaacc

SEQ ID NO: 2785543 - RNA, 21 nt, Human
ugcagccuugaacucugggcu

SEQ ID NO: 2785544 - RNA, 12 nt, Human
ugcagcgcagcu

SEQ ID NO: 2785545 - RNA, 19 nt, Human
ugcagcgcagcuggacucu

SEQ ID NO: 2785546 - RNA, 22 nt, Human
ugcagcgcagcuggacucugca

SEQ ID NO: 2785547 - RNA, 19 nt, Human
ugcagcuaguccuagugaa

SEQ ID NO: 2785548 - RNA, 21 nt, Human
ugcagcuaguccuagugaacc

SEQ ID NO: 2785549 - RNA, 22 nt, Human
ugcagcuaguccuagugaaccu

SEQ ID NO: 2785550 - RNA, 23 nt, Human
ugcagccuuugccuccccggcuc

SEQ ID NO: 2785551 - RNA, 13 nt, Human
ugcagucuccucu

SEQ ID NO: 2785552 - RNA, 15 nt, Human
ugcagucuccucuuu

SEQ ID NO: 2785553 - RNA, 17 nt, Human
ugcagucuccucuuuaa

SEQ ID NO: 2785554 - RNA, 21 nt, Human
ugcagucuccucuuuaaaaca

SEQ ID NO: 2785555 - RNA, 23 nt, Human
ugcagucuccucuuuaaaacaaa

SEQ ID NO: 2785556 - RNA, 18 nt, Human
ugcaguacuuuaccuccu

SEQ ID NO: 2785557 - RNA, 21 nt, Human
ugcaguaaaucuuuuacaacu

SEQ ID NO: 2785558 - RNA, 18 nt, Human
ugcaguaaaucuuuuaca

SEQ ID NO: 2785559 - RNA, 17 nt, Human
ugcagcucaacuuucug

SEQ ID NO: 2785560 - RNA, 15 nt, Human
ugcaguaaaucuuuu

SEQ ID NO: 2785561 - RNA, 14 nt, Human
ugcaguaaaucuuu

SEQ ID NO: 2785562 - RNA, 13 nt, Human
ugcaguaaaucuu

SEQ ID NO: 2785563 - RNA, 12 nt, Human
agccucaucucu

SEQ ID NO: 2785564 - RNA, 23 nt, Human
agccucagcauccuggcacccgg

SEQ ID NO: 2785565 - RNA, 22 nt, Human
agccucagcauccuggcacccg

SEQ ID NO: 2785566 - RNA, 18 nt, Human
agccuccaugcugccucc

SEQ ID NO: 2785567 - RNA, 20 nt, Human
agccuccaugcugccuccag

SEQ ID NO: 2785568 - RNA, 13 nt, Human
agccucccaaagu

SEQ ID NO: 2785569 - RNA, 14 nt, Human
agccucccaaagug

SEQ ID NO: 2785570 - RNA, 16 nt, Human
agccucccaaagugcu

SEQ ID NO: 2785571 - RNA, 15 nt, Human
agccuaggaccacuc

SEQ ID NO: 2785572 - RNA, 18 nt, Human
agccuaggaccacucagc

SEQ ID NO: 2785573 - RNA, 19 nt, Human
agccuaggaccacucagcc

SEQ ID NO: 2785574 - RNA, 20 nt, Human
agccuaggaccacucagccc

SEQ ID NO: 2785575 - RNA, 21 nt, Human
agccuaggaccacucagcccc

SEQ ID NO: 2785576 - RNA, 22 nt, Human
agccuaggaccacucagccccu

SEQ ID NO: 2785577 - RNA, 16 nt, Human
agccucagcauccugg

SEQ ID NO: 2785578 - RNA, 17 nt, Human
agccuagaagagcuucu

SEQ ID NO: 2785579 - RNA, 19 nt, Human
agccuagaagagcuucuga

SEQ ID NO: 2785580 - RNA, 14 nt, Human
agccuagaagcugg

SEQ ID NO: 2785581 - RNA, 18 nt, Human
agccuagaagcugguggc

SEQ ID NO: 2785582 - RNA, 17 nt, Human
agccuaccugcucucca

SEQ ID NO: 2785583 - RNA, 18 nt, Human
agccuagacccuccuccu

SEQ ID NO: 2785584 - RNA, 15 nt, Human
agccuagacccuccu

SEQ ID NO: 2785585 - RNA, 18 nt, Human
agccuagauaugaauaua

SEQ ID NO: 2785586 - RNA, 19 nt, Human
agccuagauaugaauauau

SEQ ID NO: 2785587 - RNA, 21 nt, Human
agccucagcauccuggcaccc

SEQ ID NO: 2785588 - RNA, 20 nt, Human
agccucagcauccuggcacc

SEQ ID NO: 2785589 - RNA, 19 nt, Human
agccucagcauccuggcac

SEQ ID NO: 2785590 - RNA, 17 nt, Human
agccucagcauccuggc

SEQ ID NO: 2785591 - RNA, 22 nt, Human
agccgacaacuauuucggccuu

SEQ ID NO: 2785592 - RNA, 23 nt, Human
agccgacugcacagcggccccug

SEQ ID NO: 2785593 - RNA, 16 nt, Human
agccuaccugcucucc

SEQ ID NO: 2785594 - RNA, 22 nt, Human
agccguggcuucccgcucagcc

SEQ ID NO: 2785595 - RNA, 23 nt, Human
agccguggcuucccgcucagccc

SEQ ID NO: 2785596 - RNA, 14 nt, Human
agccguggcuuccc

SEQ ID NO: 2785597 - RNA, 21 nt, Human
agccguggcuucccgcucagc

SEQ ID NO: 2785598 - RNA, 13 nt, Human
agccguggcuucc

SEQ ID NO: 2785599 - RNA, 14 nt, Human
ugcacucaaccuua

SEQ ID NO: 2785600 - RNA, 23 nt, Human
ugcacuauagccuaggugacaga

SEQ ID NO: 2785601 - RNA, 22 nt, Human
ugcacuauagccuaggugacag

SEQ ID NO: 2785602 - RNA, 15 nt, Human
ugcacuaugaggaau

SEQ ID NO: 2785603 - RNA, 15 nt, Human
agcccaucucggagc

SEQ ID NO: 2785604 - RNA, 18 nt, Human
agcccauccuucccuuug

SEQ ID NO: 2785605 - RNA, 11 nt, Human
agcccaugccc

SEQ ID NO: 2785606 - RNA, 17 nt, Human
agcccaugaguccuuga

SEQ ID NO: 2785607 - RNA, 20 nt, Human
agcccaugcccaccugccca

SEQ ID NO: 2785608 - RNA, 16 nt, Human
agcccaugcccaccug

SEQ ID NO: 2785609 - RNA, 22 nt, Human
agcccaugcccaccugcccauc

SEQ ID NO: 2785610 - RNA, 20 nt, Human
agcccaucccugccugguca

SEQ ID NO: 2785611 - RNA, 13 nt, Human
agcccaucccugc

SEQ ID NO: 2785612 - RNA, 15 nt, Human
agcccaucccugccu

SEQ ID NO: 2785613 - RNA, 17 nt, Human
agcccaucccugccugg

SEQ ID NO: 2785614 - RNA, 18 nt, Human
agcccaucccugccuggu

SEQ ID NO: 2785615 - RNA, 15 nt, Human
agcccauacucagcc

SEQ ID NO: 2785616 - RNA, 16 nt, Human
agcccauacucagccu

SEQ ID NO: 2785617 - RNA, 17 nt, Human
agcccauacucagccug

SEQ ID NO: 2785618 - RNA, 18 nt, Human
agcccauacucagccugc

SEQ ID NO: 2785619 - RNA, 19 nt, Human
agcccauacucagccugcu

SEQ ID NO: 2785620 - RNA, 20 nt, Human
agcccauacucagccugcug

SEQ ID NO: 2785621 - RNA, 16 nt, Human
agcccauccauaguaa

SEQ ID NO: 2785622 - RNA, 19 nt, Human
agcccauccauaguaacug

SEQ ID NO: 2785623 - RNA, 22 nt, Human
agcccauccauaguaacugaca

SEQ ID NO: 2785624 - RNA, 15 nt, Human
ugauucuccugccuc

SEQ ID NO: 2785625 - RNA, 19 nt, Human
ugauucuccugccucagcc

SEQ ID NO: 2785626 - RNA, 15 nt, Human
ugauucuaaugucuu

SEQ ID NO: 2785627 - RNA, 22 nt, Human
ugauucuauuuauauguacaug

SEQ ID NO: 2785628 - RNA, 11 nt, Human
ugauucucagg

SEQ ID NO: 2785629 - RNA, 12 nt, Human
ugauucucaggg

SEQ ID NO: 2785630 - RNA, 21 nt, Human
ugauucuauuuauauguacau

SEQ ID NO: 2785631 - RNA, 17 nt, Human
ugauucuaaugucuuca

SEQ ID NO: 2785632 - RNA, 19 nt, Human
ugauucuaaugucuucauu

SEQ ID NO: 2785633 - RNA, 20 nt, Human
ugauucuccugccucagccu

SEQ ID NO: 2785634 - RNA, 15 nt, Human
ugauucucagggucu

SEQ ID NO: 2785635 - RNA, 19 nt, Human
ugauucucagggucucugc

SEQ ID NO: 2785636 - RNA, 17 nt, Human
agcccaggugccagccu

SEQ ID NO: 2785637 - RNA, 22 nt, Human
agcccaggugccagccugaggc

SEQ ID NO: 2785638 - RNA, 14 nt, Human
agccccgcagaccu

SEQ ID NO: 2785639 - RNA, 16 nt, Human
agccccgcagaccucc

SEQ ID NO: 2785640 - RNA, 12 nt, Human
agccccuagaaa

SEQ ID NO: 2785641 - RNA, 16 nt, Human
agccccuagaaaccca

SEQ ID NO: 2785642 - RNA, 18 nt, Human
agccccuagaaacccaag

SEQ ID NO: 2785643 - RNA, 23 nt, Human
agccccuagaaacccaagcuccu

SEQ ID NO: 2785644 - RNA, 21 nt, Human
agccccuagcccaggagagag

SEQ ID NO: 2785645 - RNA, 22 nt, Human
agccccuagcccaggagagaga

SEQ ID NO: 2785646 - RNA, 23 nt, Human
agccccuagcccaggagagagaa

SEQ ID NO: 2785647 - RNA, 11 nt, Human
agccccuagga

SEQ ID NO: 2785648 - RNA, 13 nt, Human
agccccuccaucu

SEQ ID NO: 2785649 - RNA, 16 nt, Human
agccccuccaucugua

SEQ ID NO: 2785650 - RNA, 10 nt, Human
agccccuccc

SEQ ID NO: 2785651 - RNA, 13 nt, Human
agccccucccaag

SEQ ID NO: 2785652 - RNA, 16 nt, Human
agccccucccaagcug

SEQ ID NO: 2785653 - RNA, 19 nt, Human
agccccucccaagcuggcu

SEQ ID NO: 2785654 - RNA, 20 nt, Human
agccccucccaagcuggcug

SEQ ID NO: 2785655 - RNA, 21 nt, Human
agccccucccaagcuggcugg

SEQ ID NO: 2785656 - RNA, 22 nt, Human
agccccucccaagcuggcuggg

SEQ ID NO: 2785657 - RNA, 18 nt, Human
agccccgcagaccucccc

SEQ ID NO: 2785658 - RNA, 12 nt, Human
agccccuagccc

SEQ ID NO: 2785659 - RNA, 14 nt, Human
agccccuagcccag

SEQ ID NO: 2785660 - RNA, 15 nt, Human
agccccuagcccagg

SEQ ID NO: 2785661 - RNA, 16 nt, Human
agccccuagcccagga

SEQ ID NO: 2785662 - RNA, 18 nt, Human
agccccuagcccaggaga

SEQ ID NO: 2785663 - RNA, 19 nt, Human
agccccuagcccaggagag

SEQ ID NO: 2785664 - RNA, 23 nt, Human
agccccauucugccugcccaggc

SEQ ID NO: 2785665 - RNA, 15 nt, Human
agcccccagccccuc

SEQ ID NO: 2785666 - RNA, 17 nt, Human
agcccccagccccuccc

SEQ ID NO: 2785667 - RNA, 18 nt, Human
agcccccagccccucccc

SEQ ID NO: 2785668 - RNA, 16 nt, Human
agccccgaggccuucu

SEQ ID NO: 2785669 - RNA, 22 nt, Human
agccccgaggccuucucugaag

SEQ ID NO: 2785670 - RNA, 17 nt, Human
agccccgaggccuucuc

SEQ ID NO: 2785671 - RNA, 14 nt, Human
ugcacacccacuca

SEQ ID NO: 2785672 - RNA, 17 nt, Human
ugcacacccacucagcu

SEQ ID NO: 2785673 - RNA, 16 nt, Human
ugcacacccacucagc

SEQ ID NO: 2785674 - RNA, 18 nt, Human
ugcacacccacucagcuc

SEQ ID NO: 2785675 - RNA, 15 nt, Human
ugcacccagaagaag

SEQ ID NO: 2785676 - RNA, 14 nt, Human
ugcacccagcccag

SEQ ID NO: 2785677 - RNA, 16 nt, Human
ugcacccagcccagau

SEQ ID NO: 2785678 - RNA, 15 nt, Human
ugcacccacugaaag

SEQ ID NO: 2785679 - RNA, 15 nt, Human
ugcacgugugugcac

SEQ ID NO: 2785680 - RNA, 14 nt, Human
ugcacgugugugca

SEQ ID NO: 2785681 - RNA, 14 nt, Human
ugcacccuccgccu

SEQ ID NO: 2785682 - RNA, 16 nt, Human
ugcacccuccgccuuc

SEQ ID NO: 2785683 - RNA, 18 nt, Human
ugcacccaugggcucuga

SEQ ID NO: 2785684 - RNA, 20 nt, Human
ugcacccaugggcucugaca

SEQ ID NO: 2785685 - RNA, 21 nt, Human
ugcacccaugggcucugacag

SEQ ID NO: 2785686 - RNA, 22 nt, Human
ugcacccaggaggggaacacug

SEQ ID NO: 2785687 - RNA, 15 nt, Human
ugcacccaugggcuc

SEQ ID NO: 2785688 - RNA, 21 nt, Human
agcccugguggcagugggagc

SEQ ID NO: 2785689 - RNA, 22 nt, Human
agcccugcuuugggcugcccug

SEQ ID NO: 2785690 - RNA, 23 nt, Human
agcccugcuuugggcugcccugg

SEQ ID NO: 2785691 - RNA, 20 nt, Human
agcccugcuuugggcugccc

SEQ ID NO: 2785692 - RNA, 12 nt, Human
agcccuggagac

SEQ ID NO: 2785693 - RNA, 20 nt, Human
agccccuugcucuccccugc

SEQ ID NO: 2785694 - RNA, 21 nt, Human
agcccugcuuugggcugcccu

SEQ ID NO: 2785695 - RNA, 22 nt, Human
ugcacacaccagagcccaccuu

SEQ ID NO: 2785696 - RNA, 12 nt, Human
ugcacaaggauu

SEQ ID NO: 2785697 - RNA, 15 nt, Human
ugcacaaggauugaa

SEQ ID NO: 2785698 - RNA, 17 nt, Human
ugcacaaggauugaaaa

SEQ ID NO: 2785699 - RNA, 16 nt, Human
ugcacacagaaauaua

SEQ ID NO: 2785700 - RNA, 17 nt, Human
ugcacacagaaauauau

SEQ ID NO: 2785701 - RNA, 18 nt, Human
ugcacacagaaauauaua

SEQ ID NO: 2785702 - RNA, 19 nt, Human
ugcacacagaaauauauau

SEQ ID NO: 2785703 - RNA, 20 nt, Human
ugcacacagaaauauauaua

SEQ ID NO: 2785704 - RNA, 22 nt, Human
ugcacacagaaauauauauaca

SEQ ID NO: 2785705 - RNA, 23 nt, Human
ugcacacagaaauauauauacau

SEQ ID NO: 2785706 - RNA, 24 nt, Human
ugcacacagcacgggggccaagga

SEQ ID NO: 2785707 - RNA, 12 nt, Human
ugcacacagcac

SEQ ID NO: 2785708 - RNA, 23 nt, Human
agcccugguggcagugggagcug

SEQ ID NO: 2785709 - RNA, 22 nt, Human
agcccugguggcagugggagcu

SEQ ID NO: 2785710 - RNA, 14 nt, Human
agcuacuugguuug

SEQ ID NO: 2785711 - RNA, 16 nt, Human
agcuacuugguuugug

SEQ ID NO: 2785712 - RNA, 17 nt, Human
agcuacuugguuugugu

SEQ ID NO: 2785713 - RNA, 21 nt, Human
agcuacuugguuuguguucuu

SEQ ID NO: 2785714 - RNA, 17 nt, Human
agcuagaaaacauuuuu

SEQ ID NO: 2785715 - RNA, 15 nt, Human
agcuagcuuuuagga

SEQ ID NO: 2785716 - RNA, 16 nt, Human
agcuagcuuuuaggaa

SEQ ID NO: 2785717 - RNA, 20 nt, Human
agcuagcuuuuaggaaaauc

SEQ ID NO: 2785718 - RNA, 13 nt, Human
agcuagaugcuuu

SEQ ID NO: 2785719 - RNA, 17 nt, Human
agcuagaugcuuuccua

SEQ ID NO: 2785720 - RNA, 18 nt, Human
ugccagaagauccccuca

SEQ ID NO: 2785721 - RNA, 21 nt, Human
ugccagaagauccccucagga

SEQ ID NO: 2785722 - RNA, 22 nt, Human
ugccagaaguuguggauuucag

SEQ ID NO: 2785723 - RNA, 17 nt, Human
ugccagaauuuuaggaa

SEQ ID NO: 2785724 - RNA, 12 nt, Human
ugccacuuuuua

SEQ ID NO: 2785725 - RNA, 22 nt, Human
ugccacacuucaggcucuucuc

SEQ ID NO: 2785726 - RNA, 23 nt, Human
ugccacacuucaggcucuucucc

SEQ ID NO: 2785727 - RNA, 23 nt, Human
ugccacuuugguacauggccagu

SEQ ID NO: 2785728 - RNA, 13 nt, Human
ugccacuuugcac

SEQ ID NO: 2785729 - RNA, 15 nt, Human
ugccacuuugcacau

SEQ ID NO: 2785730 - RNA, 19 nt, Human
ugccacuuugcacauuuug

SEQ ID NO: 2785731 - RNA, 20 nt, Human
ugccacuuugcacauuuuga

SEQ ID NO: 2785732 - RNA, 21 nt, Human
ugccacuuugcacauuuugau

SEQ ID NO: 2785733 - RNA, 12 nt, Human
ugccacuuugca

SEQ ID NO: 2785734 - RNA, 16 nt, Human
agcgggguaugaagag

SEQ ID NO: 2785735 - RNA, 20 nt, Human
ugccagaagauccccucagg

SEQ ID NO: 2785736 - RNA, 15 nt, Human
ugccagagauaaacu

SEQ ID NO: 2785737 - RNA, 17 nt, Human
ugccagagauaaacuaa

SEQ ID NO: 2785738 - RNA, 13 nt, Human
agcggucucaggc

SEQ ID NO: 2785739 - RNA, 22 nt, Human
agcggucucaggcuggugggag

SEQ ID NO: 2785740 - RNA, 14 nt, Human
agcgguugccagga

SEQ ID NO: 2785741 - RNA, 15 nt, Human
agcgguggcccuguc

SEQ ID NO: 2785742 - RNA, 23 nt, Human
agcggucucaggcuggugggagg

SEQ ID NO: 2785743 - RNA, 12 nt, Human
agcgguggcccu

SEQ ID NO: 2785744 - RNA, 21 nt, Human
agcgguggcccugucccuccc

SEQ ID NO: 2785745 - RNA, 20 nt, Human
agcggugggggaggaggguu

SEQ ID NO: 2785746 - RNA, 22 nt, Human
agcgugagccacugcaccgggc

SEQ ID NO: 2785747 - RNA, 19 nt, Human
agcgugagccacugcaccg

SEQ ID NO: 2785748 - RNA, 13 nt, Human
agcguaaaauggu

SEQ ID NO: 2785749 - RNA, 16 nt, Human
agcguaaaauggugaa

SEQ ID NO: 2785750 - RNA, 22 nt, Human
agcuacguggcacuauauucug

SEQ ID NO: 2785751 - RNA, 14 nt, Human
agcuaccucaacca

SEQ ID NO: 2785752 - RNA, 23 nt, Human
agcuaccucaaccaaugccaaaa

SEQ ID NO: 2785753 - RNA, 20 nt, Human
agcuacccuuuuucuccagc

SEQ ID NO: 2785754 - RNA, 21 nt, Human
agcuacccuuuuucuccagcu

SEQ ID NO: 2785755 - RNA, 21 nt, Human
agcucaggugucccugcacuu

SEQ ID NO: 2785756 - RNA, 20 nt, Human
agcucaggugucccugcacu

SEQ ID NO: 2785757 - RNA, 22 nt, Human
agcucaggugucccugcacuug

SEQ ID NO: 2785758 - RNA, 21 nt, Human
agcucagucccaucagagagc

SEQ ID NO: 2785759 - RNA, 13 nt, Human
agcucagucccau

SEQ ID NO: 2785760 - RNA, 18 nt, Human
agcucaggugucccugca

SEQ ID NO: 2785761 - RNA, 22 nt, Human
agcucagcuuuuugucuuuucu

SEQ ID NO: 2785762 - RNA, 20 nt, Human
agcucagcuuuuugucuuuu

SEQ ID NO: 2785763 - RNA, 15 nt, Human
agcuaggccuggcca

SEQ ID NO: 2785764 - RNA, 14 nt, Human
agcuaggccuggcc

SEQ ID NO: 2785765 - RNA, 16 nt, Human
agcuaggccuggccag

SEQ ID NO: 2785766 - RNA, 21 nt, Human
agcucagcuacugauuuuugu

SEQ ID NO: 2785767 - RNA, 12 nt, Human
agcucagcgcca

SEQ ID NO: 2785768 - RNA, 17 nt, Human
agcucagcgccagccug

SEQ ID NO: 2785769 - RNA, 20 nt, Human
agcuaggauuugaacacuug

SEQ ID NO: 2785770 - RNA, 23 nt, Human
agcuaggauuugaacacuuggug

SEQ ID NO: 2785771 - RNA, 12 nt, Human
agcuaggccugg

SEQ ID NO: 2785772 - RNA, 13 nt, Human
agcuaggaaugaa

SEQ ID NO: 2785773 - RNA, 12 nt, Human
agcuaggaauga

SEQ ID NO: 2785774 - RNA, 20 nt, Human
ugcccagcccggaccuuggc

SEQ ID NO: 2785775 - RNA, 16 nt, Human
ugcccacaggaucagu

SEQ ID NO: 2785776 - RNA, 19 nt, Human
ugcccacaggaucagucug

SEQ ID NO: 2785777 - RNA, 20 nt, Human
ugcccacaggaucagucuga

SEQ ID NO: 2785778 - RNA, 14 nt, Human
agcucauucauuuu

SEQ ID NO: 2785779 - RNA, 16 nt, Human
agcucauucauuuuau

SEQ ID NO: 2785780 - RNA, 17 nt, Human
agcucauucauuuuaua

SEQ ID NO: 2785781 - RNA, 22 nt, Human
agcucauucauuuuauauugaa

SEQ ID NO: 2785782 - RNA, 18 nt, Human
agcucauauuuuguauau

SEQ ID NO: 2785783 - RNA, 20 nt, Human
agcucauagaguccccccuc

SEQ ID NO: 2785784 - RNA, 14 nt, Human
agcucaucucuguc

SEQ ID NO: 2785785 - RNA, 14 nt, Human
agcucauauuuugu

SEQ ID NO: 2785786 - RNA, 15 nt, Human
agcucauauuuugua

SEQ ID NO: 2785787 - RNA, 22 nt, Human
ugcccaagaauagaugcugacu

SEQ ID NO: 2785788 - RNA, 23 nt, Human
ugcccaagaauagaugcugacug

SEQ ID NO: 2785789 - RNA, 21 nt, Human
ugcccaagaauagaugcugac

SEQ ID NO: 2785790 - RNA, 17 nt, Human
agcucauuucaugcucu

SEQ ID NO: 2785791 - RNA, 10 nt, Human
agccuugugu

SEQ ID NO: 2785792 - RNA, 13 nt, Human
agccuuguguaua

SEQ ID NO: 2785793 - RNA, 14 nt, Human
agccuuguguauau

SEQ ID NO: 2785794 - RNA, 19 nt, Human
agccuuguguauauuugua

SEQ ID NO: 2785795 - RNA, 20 nt, Human
agccuuguguauauuuguau

SEQ ID NO: 2785796 - RNA, 22 nt, Human
agccuuguguauauuuguauau

SEQ ID NO: 2785797 - RNA, 24 nt, Human
agccuuguguauauuuguauauua

SEQ ID NO: 2785798 - RNA, 11 nt, Human
agcgccuggcc

SEQ ID NO: 2785799 - RNA, 13 nt, Human
agcgccuggccua

SEQ ID NO: 2785800 - RNA, 15 nt, Human
agcgccugugcacac

SEQ ID NO: 2785801 - RNA, 16 nt, Human
agcgccugugcacaca

SEQ ID NO: 2785802 - RNA, 17 nt, Human
agcgccugugcacacac

SEQ ID NO: 2785803 - RNA, 18 nt, Human
agcggagacggaguccca

SEQ ID NO: 2785804 - RNA, 15 nt, Human
agcggaggcugugug

SEQ ID NO: 2785805 - RNA, 16 nt, Human
agcggaggcugugugc

SEQ ID NO: 2785806 - RNA, 19 nt, Human
agcggacaucagcugguca

SEQ ID NO: 2785807 - RNA, 20 nt, Human
agcggacuccuccuuucucc

SEQ ID NO: 2785808 - RNA, 18 nt, Human
ugccaauacuagucaccc

SEQ ID NO: 2785809 - RNA, 21 nt, Human
ugccaauacuagucaccccaa

SEQ ID NO: 2785810 - RNA, 15 nt, Human
ugccaauuagcaauu

SEQ ID NO: 2785811 - RNA, 21 nt, Human
ugccaauuauuguuacacauu

SEQ ID NO: 2785812 - RNA, 22 nt, Human
ugccaauaauaauaccucccuu

SEQ ID NO: 2785813 - RNA, 21 nt, Human
ugccaauaauaauaccucccu

SEQ ID NO: 2785814 - RNA, 13 nt, Human
ugccacacuucag

SEQ ID NO: 2785815 - RNA, 14 nt, Human
ugccacacuucagg

SEQ ID NO: 2785816 - RNA, 15 nt, Human
ugccacacuucaggc

SEQ ID NO: 2785817 - RNA, 16 nt, Human
ugccacacuucaggcu

SEQ ID NO: 2785818 - RNA, 19 nt, Human
ugccaauuuuugccuucau

SEQ ID NO: 2785819 - RNA, 17 nt, Human
ugccaauuuuugccuuc

SEQ ID NO: 2785820 - RNA, 18 nt, Human
ugccaauuuuugccuuca

SEQ ID NO: 2785821 - RNA, 21 nt, Human
ugccaauuuuugccuucauua

SEQ ID NO: 2785822 - RNA, 17 nt, Human
ugccacaaccagccagg

SEQ ID NO: 2785823 - RNA, 18 nt, Human
ugccacaacgccuggcua

SEQ ID NO: 2785824 - RNA, 19 nt, Human
ugccacaacgccuggcuaa

SEQ ID NO: 2785825 - RNA, 23 nt, Human
agcggagguugcagggagccgag

SEQ ID NO: 2785826 - RNA, 22 nt, Human
ugcauugaacacaaacuguaaa

SEQ ID NO: 2785827 - RNA, 23 nt, Human
ugcauugaacacaaacuguaaau

SEQ ID NO: 2785828 - RNA, 14 nt, Human
ugcauugacauuau

SEQ ID NO: 2785829 - RNA, 15 nt, Human
ugcauugcuagauaa

SEQ ID NO: 2785830 - RNA, 16 nt, Human
ugcauugcuagauaaa

SEQ ID NO: 2785831 - RNA, 17 nt, Human
ugcauugcuagauaaaa

SEQ ID NO: 2785832 - RNA, 18 nt, Human
ugcauugcuagauaaaag

SEQ ID NO: 2785833 - RNA, 13 nt, Human
ugcauugauauug

SEQ ID NO: 2785834 - RNA, 17 nt, Human
ugcauugauauugugaa

SEQ ID NO: 2785835 - RNA, 18 nt, Human
ugcauugauauugugaac

SEQ ID NO: 2785836 - RNA, 22 nt, Human
ugcauugauauugugaacauuu

SEQ ID NO: 2785837 - RNA, 17 nt, Human
ugcauugauucaguauu

SEQ ID NO: 2785838 - RNA, 20 nt, Human
ugcauugcccagucuuucau

SEQ ID NO: 2785839 - RNA, 20 nt, Human
ugcauugaccgcgacuaauu

SEQ ID NO: 2785840 - RNA, 22 nt, Human
ugcauugaccgcgacuaauuuc

SEQ ID NO: 2785841 - RNA, 14 nt, Human
ugcauugacuuuca

SEQ ID NO: 2785842 - RNA, 21 nt, Human
ugcauugacuuucaguaaaca

SEQ ID NO: 2785843 - RNA, 15 nt, Human
agccuguggaugauc

SEQ ID NO: 2785844 - RNA, 16 nt, Human
agccuguggaugauca

SEQ ID NO: 2785845 - RNA, 20 nt, Human
agccuguggaugaucaaucc

SEQ ID NO: 2785846 - RNA, 23 nt, Human
agccuguggaugaucaauccuuu

SEQ ID NO: 2785847 - RNA, 22 nt, Human
agccuguggcaucuuugccuug

SEQ ID NO: 2785848 - RNA, 13 nt, Human
agccuguggcccu

SEQ ID NO: 2785849 - RNA, 14 nt, Human
agccuguggcccug

SEQ ID NO: 2785850 - RNA, 15 nt, Human
agccuguggcccugu

SEQ ID NO: 2785851 - RNA, 19 nt, Human
agccuguggcccuguccug

SEQ ID NO: 2785852 - RNA, 13 nt, Human
agccuguggccuu

SEQ ID NO: 2785853 - RNA, 17 nt, Human
agccuguggccuuugca

SEQ ID NO: 2785854 - RNA, 14 nt, Human
agccuguggcaucu

SEQ ID NO: 2785855 - RNA, 11 nt, Human
agccuguggca

SEQ ID NO: 2785856 - RNA, 11 nt, Human
agccuguggcu

SEQ ID NO: 2785857 - RNA, 14 nt, Human
agccuguggcugug

SEQ ID NO: 2785858 - RNA, 15 nt, Human
agccuguggcugugg

SEQ ID NO: 2785859 - RNA, 16 nt, Human
agccuguggcugugga

SEQ ID NO: 2785860 - RNA, 18 nt, Human
agccuguggcuguggaga

SEQ ID NO: 2785861 - RNA, 22 nt, Human
agccuguggcuguggagacaau

SEQ ID NO: 2785862 - RNA, 23 nt, Human
agccuguggcuguggagacaaug

SEQ ID NO: 2785863 - RNA, 21 nt, Human
agccuguggcaucuuugccuu

SEQ ID NO: 2785864 - RNA, 20 nt, Human
agccugguaggaaagggcaa

SEQ ID NO: 2785865 - RNA, 21 nt, Human
agccugguaggaaagggcaag

SEQ ID NO: 2785866 - RNA, 11 nt, Human
agccuggugcc

SEQ ID NO: 2785867 - RNA, 22 nt, Human
agccuuagaagucacacaguau

SEQ ID NO: 2785868 - RNA, 14 nt, Human
agccuucagcucca

SEQ ID NO: 2785869 - RNA, 23 nt, Human
agccuucagucuugaauuucuaa

SEQ ID NO: 2785870 - RNA, 22 nt, Human
agccuuagggaagcuggccuga

SEQ ID NO: 2785871 - RNA, 20 nt, Human
agccuuagggaagcuggccu

SEQ ID NO: 2785872 - RNA, 15 nt, Human
agccuuagggaagcu

SEQ ID NO: 2785873 - RNA, 14 nt, Human
agccuuagggaagc

SEQ ID NO: 2785874 - RNA, 22 nt, Human
agccuguugggaucgcauugca

SEQ ID NO: 2785875 - RNA, 18 nt, Human
ugcauaccaaccugggca

SEQ ID NO: 2785876 - RNA, 14 nt, Human
ugcauaccaaccug

SEQ ID NO: 2785877 - RNA, 12 nt, Human
ugcauaccaacc

SEQ ID NO: 2785878 - RNA, 14 nt, Human
ugcauaagugaaaa

SEQ ID NO: 2785879 - RNA, 18 nt, Human
ugcauaagugaaaaucuu

SEQ ID NO: 2785880 - RNA, 22 nt, Human
ugcauaagugaaaaucuuacaa

SEQ ID NO: 2785881 - RNA, 15 nt, Human
ugcauacagaaauau

SEQ ID NO: 2785882 - RNA, 14 nt, Human
agccugggugacaa

SEQ ID NO: 2785883 - RNA, 19 nt, Human
agccugggugacaaagcga

SEQ ID NO: 2785884 - RNA, 14 nt, Human
uggagaacuagaga

SEQ ID NO: 2785885 - RNA, 15 nt, Human
uggacuuuggaagca

SEQ ID NO: 2785886 - RNA, 19 nt, Human
uggagaaauuauuuaauaa

SEQ ID NO: 2785887 - RNA, 21 nt, Human
uggagaaauuauuuaauaaaa

SEQ ID NO: 2785888 - RNA, 12 nt, Human
uggacuuucaaa

SEQ ID NO: 2785889 - RNA, 16 nt, Human
uggacuuucaaaauua

SEQ ID NO: 2785890 - RNA, 23 nt, Human
uggacuuucaaaauuaaaucugu

SEQ ID NO: 2785891 - RNA, 17 nt, Human
uggacuugagcuuggca

SEQ ID NO: 2785892 - RNA, 22 nt, Human
uggagcccaggcgggagcggug

SEQ ID NO: 2785893 - RNA, 16 nt, Human
uggagcccaggcggga

SEQ ID NO: 2785894 - RNA, 18 nt, Human
uggagcccaggcgggagc

SEQ ID NO: 2785895 - RNA, 22 nt, Human
aggcacccaccaucaugucugg

SEQ ID NO: 2785896 - RNA, 21 nt, Human
aggcacccaccaucaugucug

SEQ ID NO: 2785897 - RNA, 20 nt, Human
aggcacccaccaucaugucu

SEQ ID NO: 2785898 - RNA, 14 nt, Human
aggcaaugcuggcu

SEQ ID NO: 2785899 - RNA, 15 nt, Human
aggcacccaccauca

SEQ ID NO: 2785900 - RNA, 17 nt, Human
aggcaccgcugaugggg

SEQ ID NO: 2785901 - RNA, 17 nt, Human
aggcaccuagcaauucc

SEQ ID NO: 2785902 - RNA, 20 nt, Human
aggcaccuaccaccacgccc

SEQ ID NO: 2785903 - RNA, 18 nt, Human
aggcaaguuaagagaaac

SEQ ID NO: 2785904 - RNA, 19 nt, Human
aggcaaguuaagagaaacu

SEQ ID NO: 2785905 - RNA, 20 nt, Human
aggcaaguuaagagaaacuu

SEQ ID NO: 2785906 - RNA, 23 nt, Human
uggagcggaauuuaccugauuuc

SEQ ID NO: 2785907 - RNA, 18 nt, Human
uggagcgggguaugaaga

SEQ ID NO: 2785908 - RNA, 22 nt, Human
uggagcgcaccugcccccuggu

SEQ ID NO: 2785909 - RNA, 21 nt, Human
uggagcgcaccugcccccugg

SEQ ID NO: 2785910 - RNA, 18 nt, Human
uggagcucagagagggca

SEQ ID NO: 2785911 - RNA, 12 nt, Human
uggagcucagcc

SEQ ID NO: 2785912 - RNA, 13 nt, Human
uggagcucagccc

SEQ ID NO: 2785913 - RNA, 22 nt, Human
uggagcucagccccgagcuguc

SEQ ID NO: 2785914 - RNA, 16 nt, Human
uggagcgcaccugccc

SEQ ID NO: 2785915 - RNA, 14 nt, Human
uggagcgcaccugc

SEQ ID NO: 2785916 - RNA, 20 nt, Human
uggagccuuuuaacugugca

SEQ ID NO: 2785917 - RNA, 23 nt, Human
uggagcgagcaucccccaaaguu

SEQ ID NO: 2785918 - RNA, 15 nt, Human
uggagcccuccgccu

SEQ ID NO: 2785919 - RNA, 17 nt, Human
uggagcccuccgccuuc

SEQ ID NO: 2785920 - RNA, 19 nt, Human
uggagcccuccgccuucac

SEQ ID NO: 2785921 - RNA, 20 nt, Human
uggaccuugaacuggguacu

SEQ ID NO: 2785922 - RNA, 16 nt, Human
uggaccugccuccugc

SEQ ID NO: 2785923 - RNA, 17 nt, Human
uggaccugccuccugcc

SEQ ID NO: 2785924 - RNA, 18 nt, Human
uggaccugccuccugccu

SEQ ID NO: 2785925 - RNA, 19 nt, Human
uggaccugccuccugccug

SEQ ID NO: 2785926 - RNA, 22 nt, Human
uggaccuuacgaucaggcacag

SEQ ID NO: 2785927 - RNA, 20 nt, Human
uggaccugccuccugccugc

SEQ ID NO: 2785928 - RNA, 15 nt, Human
uggaccuuaggccuu

SEQ ID NO: 2785929 - RNA, 16 nt, Human
uggaccuuaggccuuc

SEQ ID NO: 2785930 - RNA, 17 nt, Human
uggaccuuaggccuucc

SEQ ID NO: 2785931 - RNA, 19 nt, Human
uggaccuuaggccuuccuc

SEQ ID NO: 2785932 - RNA, 21 nt, Human
uggaccuuaggccuuccucuc

SEQ ID NO: 2785933 - RNA, 15 nt, Human
uggacacagggugac

SEQ ID NO: 2785934 - RNA, 23 nt, Human
uggacacagcucuucuccaggcu

SEQ ID NO: 2785935 - RNA, 14 nt, Human
uggacacagcucuu

SEQ ID NO: 2785936 - RNA, 13 nt, Human
uggacacagcucu

SEQ ID NO: 2785937 - RNA, 22 nt, Human
uggacacagcucuucuccaggc

SEQ ID NO: 2785938 - RNA, 21 nt, Human
uggacacagcucuucuccagg

SEQ ID NO: 2785939 - RNA, 17 nt, Human
uggacacacaaggugca

SEQ ID NO: 2785940 - RNA, 13 nt, Human
uggaauucuuccu

SEQ ID NO: 2785941 - RNA, 12 nt, Human
uggaauugauuu

SEQ ID NO: 2785942 - RNA, 14 nt, Human
uggaagauucagcu

SEQ ID NO: 2785943 - RNA, 19 nt, Human
uggaauuccauuugaggau

SEQ ID NO: 2785944 - RNA, 18 nt, Human
uggaauugauuugcauug

SEQ ID NO: 2785945 - RNA, 17 nt, Human
uggaauugauuugcauu

SEQ ID NO: 2785946 - RNA, 16 nt, Human
uggaauugauuugcau

SEQ ID NO: 2785947 - RNA, 15 nt, Human
uggaauugauuugca

SEQ ID NO: 2785948 - RNA, 16 nt, Human
uggacaaucaugaaau

SEQ ID NO: 2785949 - RNA, 22 nt, Human
uggaauugauuugcauugaaca

SEQ ID NO: 2785950 - RNA, 22 nt, Human
uggacaagcagagguggccaga

SEQ ID NO: 2785951 - RNA, 20 nt, Human
uggaauugauuugcauugaa

SEQ ID NO: 2785952 - RNA, 19 nt, Human
uggaauugauuugcauuga

SEQ ID NO: 2785953 - RNA, 20 nt, Human
aggcaaaauugcaaaucuug

SEQ ID NO: 2785954 - RNA, 19 nt, Human
aggcaaaauugcaaaucuu

SEQ ID NO: 2785955 - RNA, 14 nt, Human
aggcaaagcuggcu

SEQ ID NO: 2785956 - RNA, 17 nt, Human
aggcaaaauugcaaauc

SEQ ID NO: 2785957 - RNA, 13 nt, Human
aggcaaaugugua

SEQ ID NO: 2785958 - RNA, 14 nt, Human
aggcaaaugcccaa

SEQ ID NO: 2785959 - RNA, 15 nt, Human
aggcaaaugcccaag

SEQ ID NO: 2785960 - RNA, 13 nt, Human
uggaaaggcucag

SEQ ID NO: 2785961 - RNA, 23 nt, Human
uggaaaggcucagucucaggagc

SEQ ID NO: 2785962 - RNA, 21 nt, Human
uggaaaggcucagucucagga

SEQ ID NO: 2785963 - RNA, 20 nt, Human
uggaaaggcucagucucagg

SEQ ID NO: 2785964 - RNA, 17 nt, Human
uggaaaggcucagucuc

SEQ ID NO: 2785965 - RNA, 19 nt, Human
uggaaaguaacucauuugu

SEQ ID NO: 2785966 - RNA, 17 nt, Human
ugcuuuuggucugugug

SEQ ID NO: 2785967 - RNA, 14 nt, Human
ugcuuuuggucugu

SEQ ID NO: 2785968 - RNA, 13 nt, Human
ugcuuuuggccug

SEQ ID NO: 2785969 - RNA, 12 nt, Human
ugcuuguaccuc

SEQ ID NO: 2785970 - RNA, 14 nt, Human
ugcuuguaccucug

SEQ ID NO: 2785971 - RNA, 18 nt, Human
ugcuuguaccucuggcug

SEQ ID NO: 2785972 - RNA, 22 nt, Human
ugcuuguaccucuggcugacua

SEQ ID NO: 2785973 - RNA, 21 nt, Human
ugcuuugucuggaagaaagau

SEQ ID NO: 2785974 - RNA, 19 nt, Human
ugcuugcuuucuuuuuuaa

SEQ ID NO: 2785975 - RNA, 21 nt, Human
ugcuugauaggaauucaucuu

SEQ ID NO: 2785976 - RNA, 16 nt, Human
ugcuugauauuuucua

SEQ ID NO: 2785977 - RNA, 14 nt, Human
ugcuugaugaagca

SEQ ID NO: 2785978 - RNA, 17 nt, Human
ugcuugaugaagcaagg

SEQ ID NO: 2785979 - RNA, 18 nt, Human
ugcuugaugaagcaagga

SEQ ID NO: 2785980 - RNA, 19 nt, Human
ugcuugaugaagcaaggaa

SEQ ID NO: 2785981 - RNA, 20 nt, Human
ugcuugaugaagcaaggaag

SEQ ID NO: 2785982 - RNA, 22 nt, Human
aggacagugcuucagccugagg

SEQ ID NO: 2785983 - RNA, 21 nt, Human
aggacagugcuucagccugag

SEQ ID NO: 2785984 - RNA, 20 nt, Human
aggacagugcuucagccuga

SEQ ID NO: 2785985 - RNA, 19 nt, Human
aggacagugcuucagccug

SEQ ID NO: 2785986 - RNA, 18 nt, Human
aggacagugcuucagccu

SEQ ID NO: 2785987 - RNA, 17 nt, Human
aggacagugcuucagcc

SEQ ID NO: 2785988 - RNA, 16 nt, Human
aggacagugcuucagc

SEQ ID NO: 2785989 - RNA, 15 nt, Human
aggacagugcuucag

SEQ ID NO: 2785990 - RNA, 20 nt, Human
ugcuuuugaaggaauacaau

SEQ ID NO: 2785991 - RNA, 14 nt, Human
uggaaauauuuuga

SEQ ID NO: 2785992 - RNA, 17 nt, Human
uggaaauauuuugauaa

SEQ ID NO: 2785993 - RNA, 21 nt, Human
uggaaauauuuugauaauaaa

SEQ ID NO: 2785994 - RNA, 18 nt, Human
uggaaaucaucgaaaauu

SEQ ID NO: 2785995 - RNA, 19 nt, Human
uggaaauccuaguuuccuc

SEQ ID NO: 2785996 - RNA, 22 nt, Human
uggaaauccuaguuuccucucc

SEQ ID NO: 2785997 - RNA, 17 nt, Human
uggaaauggaugcaaag

SEQ ID NO: 2785998 - RNA, 19 nt, Human
uggaaauggaugcaaagua

SEQ ID NO: 2785999 - RNA, 16 nt, Human
uggaagcacagcuuca

SEQ ID NO: 2786000 - RNA, 18 nt, Human
uggaagcaacaggaauca

SEQ ID NO: 2786001 - RNA, 17 nt, Human
uggaagauuuucagucu

SEQ ID NO: 2786002 - RNA, 14 nt, Human
uggaagcaaaguau

SEQ ID NO: 2786003 - RNA, 19 nt, Human
uggaagauaguuuucuccu

SEQ ID NO: 2786004 - RNA, 16 nt, Human
uggaagagugugugug

SEQ ID NO: 2786005 - RNA, 14 nt, Human
uggaagauccugug

SEQ ID NO: 2786006 - RNA, 15 nt, Human
uggaagauccuguga

SEQ ID NO: 2786007 - RNA, 17 nt, Human
uggaagauccugugagg

SEQ ID NO: 2786008 - RNA, 18 nt, Human
uggaagauccugugagga

SEQ ID NO: 2786009 - RNA, 15 nt, Human
uggaaggguuugugg

SEQ ID NO: 2786010 - RNA, 18 nt, Human
uggaaggguucuggcugc

SEQ ID NO: 2786011 - RNA, 19 nt, Human
uggaaggguucuggcugcc

SEQ ID NO: 2786012 - RNA, 23 nt, Human
uggaaggggacacgugacagccg

SEQ ID NO: 2786013 - RNA, 20 nt, Human
uggaaguaaccauuugcacu

SEQ ID NO: 2786014 - RNA, 13 nt, Human
uggaaggugggga

SEQ ID NO: 2786015 - RNA, 17 nt, Human
uggaaggguuuguggcu

SEQ ID NO: 2786016 - RNA, 16 nt, Human
aggagcuaaggcucua

SEQ ID NO: 2786017 - RNA, 17 nt, Human
aggagcuaaggcucuau

SEQ ID NO: 2786018 - RNA, 19 nt, Human
aggagcuaaggcucuauga

SEQ ID NO: 2786019 - RNA, 20 nt, Human
aggagcuaaggcucuaugag

SEQ ID NO: 2786020 - RNA, 18 nt, Human
uggaagcuuguuuuccag

SEQ ID NO: 2786021 - RNA, 20 nt, Human
uggaagcuuguuuuccaguc

SEQ ID NO: 2786022 - RNA, 17 nt, Human
uggaagcuuuguccccu

SEQ ID NO: 2786023 - RNA, 18 nt, Human
uggaagcuuuguccccug

SEQ ID NO: 2786024 - RNA, 19 nt, Human
uggaagcuuuguccccugc

SEQ ID NO: 2786025 - RNA, 15 nt, Human
uggaaggagacacag

SEQ ID NO: 2786026 - RNA, 16 nt, Human
uggaaggagacacaga

SEQ ID NO: 2786027 - RNA, 17 nt, Human
uggaaggagacacagau

SEQ ID NO: 2786028 - RNA, 19 nt, Human
uggaaggagacacagaugu

SEQ ID NO: 2786029 - RNA, 20 nt, Human
uggaaggagacacagauguu

SEQ ID NO: 2786030 - RNA, 21 nt, Human
uggaaggagacacagauguuc

SEQ ID NO: 2786031 - RNA, 14 nt, Human
uggaaggcagacag

SEQ ID NO: 2786032 - RNA, 23 nt, Human
uggaaggcagacagcaggcagcg

SEQ ID NO: 2786033 - RNA, 16 nt, Human
uggaagggccaagguc

SEQ ID NO: 2786034 - RNA, 15 nt, Human
aggaucccucucugg

SEQ ID NO: 2786035 - RNA, 19 nt, Human
aggaucccucucuggauug

SEQ ID NO: 2786036 - RNA, 16 nt, Human
aggaucccucucugga

SEQ ID NO: 2786037 - RNA, 17 nt, Human
aggaucccucucuggau

SEQ ID NO: 2786038 - RNA, 14 nt, Human
aggagcuucugggg

SEQ ID NO: 2786039 - RNA, 20 nt, Human
aggagcuucuggggucccca

SEQ ID NO: 2786040 - RNA, 22 nt, Human
aggagcuucugggguccccagg

SEQ ID NO: 2786041 - RNA, 20 nt, Human
aggagcugucaccaaggaaa

SEQ ID NO: 2786042 - RNA, 21 nt, Human
aggagcugucaccaaggaaac

SEQ ID NO: 2786043 - RNA, 21 nt, Human
aggagcugcuggcuugcagug

SEQ ID NO: 2786044 - RNA, 17 nt, Human
aggagcugcuggcuugc

SEQ ID NO: 2786045 - RNA, 15 nt, Human
aggagcugagguuuc

SEQ ID NO: 2786046 - RNA, 21 nt, Human
aggagcugagguuucacccuu

SEQ ID NO: 2786047 - RNA, 21 nt, Human
aggagcucuucaggccucccu

SEQ ID NO: 2786048 - RNA, 19 nt, Human
aggagcucuucaggccucc

SEQ ID NO: 2786049 - RNA, 17 nt, Human
aggagcucuucaggccu

SEQ ID NO: 2786050 - RNA, 21 nt, Human
aggagcuaaggcucuaugagu

SEQ ID NO: 2786051 - RNA, 22 nt, Human
aggagcuacccuuuuccuuugu

SEQ ID NO: 2786052 - RNA, 13 nt, Human
uggcagccuuggc

SEQ ID NO: 2786053 - RNA, 13 nt, Human
uggcaauuccaau

SEQ ID NO: 2786054 - RNA, 17 nt, Human
uggcaauuccaauauuu

SEQ ID NO: 2786055 - RNA, 19 nt, Human
uggcaauuccaauauuucu

SEQ ID NO: 2786056 - RNA, 13 nt, Human
uggcaauugucua

SEQ ID NO: 2786057 - RNA, 14 nt, Human
uggcaauugucuau

SEQ ID NO: 2786058 - RNA, 16 nt, Human
uggcaauugucuauuu

SEQ ID NO: 2786059 - RNA, 18 nt, Human
uggcaauugucuauuuau

SEQ ID NO: 2786060 - RNA, 13 nt, Human
uggcaauuuugua

SEQ ID NO: 2786061 - RNA, 15 nt, Human
uggcaauuuuguaac

SEQ ID NO: 2786062 - RNA, 14 nt, Human
uggcaauuuuguaa

SEQ ID NO: 2786063 - RNA, 18 nt, Human
uggcacagggcaguggga

SEQ ID NO: 2786064 - RNA, 16 nt, Human
uggcacagggcagugg

SEQ ID NO: 2786065 - RNA, 14 nt, Human
aggccagagggagu

SEQ ID NO: 2786066 - RNA, 17 nt, Human
uggcagccuuggcaaac

SEQ ID NO: 2786067 - RNA, 20 nt, Human
aggccagagggagugacaga

SEQ ID NO: 2786068 - RNA, 17 nt, Human
aggccagaguggccugg

SEQ ID NO: 2786069 - RNA, 16 nt, Human
aggccagaguggccug

SEQ ID NO: 2786070 - RNA, 22 nt, Human
aggccagaguggccuggccagg

SEQ ID NO: 2786071 - RNA, 21 nt, Human
aggccagaguggccuggccag

SEQ ID NO: 2786072 - RNA, 20 nt, Human
aggccagaguggccuggcca

SEQ ID NO: 2786073 - RNA, 19 nt, Human
aggccagaguggccuggcc

SEQ ID NO: 2786074 - RNA, 21 nt, Human
aggccagccccacccaggagg

SEQ ID NO: 2786075 - RNA, 18 nt, Human
aggccagccccacccagg

SEQ ID NO: 2786076 - RNA, 17 nt, Human
aggccagccccacccag

SEQ ID NO: 2786077 - RNA, 16 nt, Human
aggccagccccaccca

SEQ ID NO: 2786078 - RNA, 15 nt, Human
aggccagccccaccc

SEQ ID NO: 2786079 - RNA, 14 nt, Human
aggccagccccacc

SEQ ID NO: 2786080 - RNA, 13 nt, Human
aggccagccccac

SEQ ID NO: 2786081 - RNA, 13 nt, Human
aggccccacugau

SEQ ID NO: 2786082 - RNA, 14 nt, Human
aggccccacugaug

SEQ ID NO: 2786083 - RNA, 15 nt, Human
aggccccacugaugc

SEQ ID NO: 2786084 - RNA, 19 nt, Human
aggccccacugaugcuguu

SEQ ID NO: 2786085 - RNA, 21 nt, Human
aggccccacugaugcuguucu

SEQ ID NO: 2786086 - RNA, 17 nt, Human
aggcccagugagaugca

SEQ ID NO: 2786087 - RNA, 13 nt, Human
aggcccagugaga

SEQ ID NO: 2786088 - RNA, 13 nt, Human
aggcccagccccu

SEQ ID NO: 2786089 - RNA, 14 nt, Human
aggcccagccccua

SEQ ID NO: 2786090 - RNA, 15 nt, Human
aggcccagccccuag

SEQ ID NO: 2786091 - RNA, 16 nt, Human
aggcccagccccuaga

SEQ ID NO: 2786092 - RNA, 17 nt, Human
aggcccagccccuagaa

SEQ ID NO: 2786093 - RNA, 19 nt, Human
aggcccagccccuagaaac

SEQ ID NO: 2786094 - RNA, 17 nt, Human
aggcagccccauucugc

SEQ ID NO: 2786095 - RNA, 16 nt, Human
aggcagccccauucug

SEQ ID NO: 2786096 - RNA, 14 nt, Human
aggcagccagggcu

SEQ ID NO: 2786097 - RNA, 15 nt, Human
aggcagccagugaga

SEQ ID NO: 2786098 - RNA, 13 nt, Human
aggccaaggggag

SEQ ID NO: 2786099 - RNA, 22 nt, Human
aggccaaggggagucaccuucc

SEQ ID NO: 2786100 - RNA, 18 nt, Human
aggccaaggucugagcca

SEQ ID NO: 2786101 - RNA, 17 nt, Human
aggccaaggccuucucc

SEQ ID NO: 2786102 - RNA, 20 nt, Human
aggccaagagcagaggcagc

SEQ ID NO: 2786103 - RNA, 18 nt, Human
aggccaagagcagaggca

SEQ ID NO: 2786104 - RNA, 17 nt, Human
aggccaagagcagaggc

SEQ ID NO: 2786105 - RNA, 14 nt, Human
aggccaagagcaga

SEQ ID NO: 2786106 - RNA, 14 nt, Human
uggagggguguggc

SEQ ID NO: 2786107 - RNA, 13 nt, Human
uggaggggugugg

SEQ ID NO: 2786108 - RNA, 14 nt, Human
uggagguacacucu

SEQ ID NO: 2786109 - RNA, 20 nt, Human
uggagggugggagagcccag

SEQ ID NO: 2786110 - RNA, 23 nt, Human
uggagggguguggcuccuuccca

SEQ ID NO: 2786111 - RNA, 15 nt, Human
uggcaauauuccuua

SEQ ID NO: 2786112 - RNA, 19 nt, Human
uggcaaucucagaugcagu

SEQ ID NO: 2786113 - RNA, 23 nt, Human
uggauuggauuauuuaauaacau

SEQ ID NO: 2786114 - RNA, 17 nt, Human
uggauugggggggccaa

SEQ ID NO: 2786115 - RNA, 21 nt, Human
uggauugggggggccaaaagg

SEQ ID NO: 2786116 - RNA, 15 nt, Human
uggauuauuuaauaa

SEQ ID NO: 2786117 - RNA, 20 nt, Human
uggauuggagauagggaaag

SEQ ID NO: 2786118 - RNA, 21 nt, Human
uggauuggagauagggaaaga

SEQ ID NO: 2786119 - RNA, 15 nt, Human
uggauuggauuauuu

SEQ ID NO: 2786120 - RNA, 16 nt, Human
uggauuggauuauuua

SEQ ID NO: 2786121 - RNA, 17 nt, Human
uggauuggauuauuuaa

SEQ ID NO: 2786122 - RNA, 20 nt, Human
uggauuggauuauuuaauaa

SEQ ID NO: 2786123 - RNA, 21 nt, Human
uggauuggauuauuuaauaac

SEQ ID NO: 2786124 - RNA, 13 nt, Human
uggauuaaauuua

SEQ ID NO: 2786125 - RNA, 15 nt, Human
uggauuaaauuuaau

SEQ ID NO: 2786126 - RNA, 13 nt, Human
uggauuaggucuc

SEQ ID NO: 2786127 - RNA, 15 nt, Human
uggauuaggucucug

SEQ ID NO: 2786128 - RNA, 14 nt, Human
uggauuauccugag

SEQ ID NO: 2786129 - RNA, 13 nt, Human
uggauuauuuaau

SEQ ID NO: 2786130 - RNA, 14 nt, Human
uggauuauuuaaua

SEQ ID NO: 2786131 - RNA, 23 nt, Human
uggauuggagaaguaauccuagg

SEQ ID NO: 2786132 - RNA, 16 nt, Human
uggaguauaauauuca

SEQ ID NO: 2786133 - RNA, 13 nt, Human
uggauggaagggg

SEQ ID NO: 2786134 - RNA, 13 nt, Human
uggagguucuaag

SEQ ID NO: 2786135 - RNA, 15 nt, Human
uggagguucuaaggc

SEQ ID NO: 2786136 - RNA, 16 nt, Human
uggagguucuaaggcc

SEQ ID NO: 2786137 - RNA, 15 nt, Human
uggauggagcccagg

SEQ ID NO: 2786138 - RNA, 15 nt, Human
uggauggaaggggcu

SEQ ID NO: 2786139 - RNA, 14 nt, Human
uggauuaaacuuau

SEQ ID NO: 2786140 - RNA, 15 nt, Human
uggauuaaacuuaug

SEQ ID NO: 2786141 - RNA, 17 nt, Human
uggauuaaacuuaugaa

SEQ ID NO: 2786142 - RNA, 18 nt, Human
uggauuaaacuuaugaau

SEQ ID NO: 2786143 - RNA, 20 nt, Human
uggauuaaacuuaugaaugu

SEQ ID NO: 2786144 - RNA, 22 nt, Human
uggcauacgccuguaguccuag

SEQ ID NO: 2786145 - RNA, 14 nt, Human
uggcauagacaugg

SEQ ID NO: 2786146 - RNA, 14 nt, Human
uggcauaguuucau

SEQ ID NO: 2786147 - RNA, 16 nt, Human
uggcauaguuucauaa

SEQ ID NO: 2786148 - RNA, 23 nt, Human
uggcaucaagaggugggagggcc

SEQ ID NO: 2786149 - RNA, 22 nt, Human
uggcaucaagaggugggagggc

SEQ ID NO: 2786150 - RNA, 22 nt, Human
uggcaucuucgucuucacucuu

SEQ ID NO: 2786151 - RNA, 23 nt, Human
uggcaucuucgucuucacucuua

SEQ ID NO: 2786152 - RNA, 23 nt, Human
uggcaucuuugccuugggcugcu

SEQ ID NO: 2786153 - RNA, 21 nt, Human
uggcaucuuugccuugggcug

SEQ ID NO: 2786154 - RNA, 16 nt, Human
uggcauaccuuucaca

SEQ ID NO: 2786155 - RNA, 20 nt, Human
uggcaucuuugccuugggcu

SEQ ID NO: 2786156 - RNA, 16 nt, Human
uggcaucuuugccuug

SEQ ID NO: 2786157 - RNA, 19 nt, Human
aggccugacuucugcuggc

SEQ ID NO: 2786158 - RNA, 21 nt, Human
aggccugacuucugcuggcau

SEQ ID NO: 2786159 - RNA, 14 nt, Human
aggccugagaccca

SEQ ID NO: 2786160 - RNA, 15 nt, Human
aggccugagacccag

SEQ ID NO: 2786161 - RNA, 16 nt, Human
aggccugagacccagg

SEQ ID NO: 2786162 - RNA, 17 nt, Human
aggccugagacccagga

SEQ ID NO: 2786163 - RNA, 18 nt, Human
aggccugagacccaggac

SEQ ID NO: 2786164 - RNA, 17 nt, Human
aggccugacuucugcug

SEQ ID NO: 2786165 - RNA, 16 nt, Human
aggccugacuucugcu

SEQ ID NO: 2786166 - RNA, 23 nt, Human
uggccagugugacaaggauugcu

SEQ ID NO: 2786167 - RNA, 16 nt, Human
uggccagugugauccc

SEQ ID NO: 2786168 - RNA, 19 nt, Human
uggccagguggccacucca

SEQ ID NO: 2786169 - RNA, 16 nt, Human
uggccagguggccacu

SEQ ID NO: 2786170 - RNA, 17 nt, Human
uggccagguggccacuc

SEQ ID NO: 2786171 - RNA, 14 nt, Human
uggccaucucugga

SEQ ID NO: 2786172 - RNA, 17 nt, Human
uggccaucucuggaugc

SEQ ID NO: 2786173 - RNA, 16 nt, Human
uggccaucucuggaug

SEQ ID NO: 2786174 - RNA, 16 nt, Human
uggccaguuggaacca

SEQ ID NO: 2786175 - RNA, 14 nt, Human
uggccaucccugug

SEQ ID NO: 2786176 - RNA, 15 nt, Human
uggccaucccuguga

SEQ ID NO: 2786177 - RNA, 16 nt, Human
uggccaucccugugag

SEQ ID NO: 2786178 - RNA, 17 nt, Human
uggccaucccugugagg

SEQ ID NO: 2786179 - RNA, 23 nt, Human
uggccaaagccaaagcuaggccu

SEQ ID NO: 2786180 - RNA, 21 nt, Human
uggccaaagccaaagcuaggc

SEQ ID NO: 2786181 - RNA, 22 nt, Human
uggccacagcccauccauagua

SEQ ID NO: 2786182 - RNA, 23 nt, Human
uggccacagcccauccauaguaa

SEQ ID NO: 2786183 - RNA, 17 nt, Human
uggcauuugcagauuuu

SEQ ID NO: 2786184 - RNA, 19 nt, Human
uggcauuugcagauuuuua

SEQ ID NO: 2786185 - RNA, 14 nt, Human
uggccacaaauucu

SEQ ID NO: 2786186 - RNA, 19 nt, Human
uggccacaaauucuuugac

SEQ ID NO: 2786187 - RNA, 12 nt, Human
uggccacacugu

SEQ ID NO: 2786188 - RNA, 14 nt, Human
uggccacacuguga

SEQ ID NO: 2786189 - RNA, 16 nt, Human
uggccacacugugaca

SEQ ID NO: 2786190 - RNA, 18 nt, Human
uggccacacugugacaca

SEQ ID NO: 2786191 - RNA, 19 nt, Human
uggccacacugugacacac

SEQ ID NO: 2786192 - RNA, 18 nt, Human
uggccaaaagcaguaaau

SEQ ID NO: 2786193 - RNA, 22 nt, Human
uggccacauuuaauaucuucag

SEQ ID NO: 2786194 - RNA, 21 nt, Human
uggccacauuuucagccaaag

SEQ ID NO: 2786195 - RNA, 17 nt, Human
uggccacaguagucuug

SEQ ID NO: 2786196 - RNA, 15 nt, Human
uggccaccucucucc

SEQ ID NO: 2786197 - RNA, 22 nt, Human
uggccaccaggugccuuucaaa

SEQ ID NO: 2786198 - RNA, 11 nt, Human
uggccaggugg

SEQ ID NO: 2786199 - RNA, 15 nt, Human
uggccagguggccac

SEQ ID NO: 2786200 - RNA, 16 nt, Human
uggccuaaaaaugcaa

SEQ ID NO: 2786201 - RNA, 18 nt, Human
uggccuaaaacuggccug

SEQ ID NO: 2786202 - RNA, 21 nt, Human
uggccuaaaacuggccugacu

SEQ ID NO: 2786203 - RNA, 15 nt, Human
uggccuaaaaucuug

SEQ ID NO: 2786204 - RNA, 17 nt, Human
uggccuaaaaucuugga

SEQ ID NO: 2786205 - RNA, 14 nt, Human
uggccgugggccug

SEQ ID NO: 2786206 - RNA, 19 nt, Human
uggccgugggccuggggua

SEQ ID NO: 2786207 - RNA, 14 nt, Human
uggccguuaucugg

SEQ ID NO: 2786208 - RNA, 19 nt, Human
uggccguugauguuggcug

SEQ ID NO: 2786209 - RNA, 21 nt, Human
uggccguugauguuggcuggg

SEQ ID NO: 2786210 - RNA, 19 nt, Human
uggcccuggggucccacga

SEQ ID NO: 2786211 - RNA, 12 nt, Human
uggcccuggggu

SEQ ID NO: 2786212 - RNA, 13 nt, Human
uggcccugggguc

SEQ ID NO: 2786213 - RNA, 13 nt, Human
uggcccugucccu

SEQ ID NO: 2786214 - RNA, 15 nt, Human
uggcccugcccugag

SEQ ID NO: 2786215 - RNA, 14 nt, Human
uggcccuggcucug

SEQ ID NO: 2786216 - RNA, 17 nt, Human
uggcccuggcucugcug

SEQ ID NO: 2786217 - RNA, 19 nt, Human
uggcccuggcucugcuguc

SEQ ID NO: 2786218 - RNA, 13 nt, Human
uggcccugcccug

SEQ ID NO: 2786219 - RNA, 14 nt, Human
uggcccugcccugg

SEQ ID NO: 2786220 - RNA, 19 nt, Human
uggcccaaguggcagagcu

SEQ ID NO: 2786221 - RNA, 21 nt, Human
uggcccaaguggcagagcuug

SEQ ID NO: 2786222 - RNA, 20 nt, Human
uggccauucuuuuuuucuug

SEQ ID NO: 2786223 - RNA, 22 nt, Human
uggccauucuuuuuuucuuggc

SEQ ID NO: 2786224 - RNA, 23 nt, Human
uggccauucuuuuuuucuuggcc

SEQ ID NO: 2786225 - RNA, 15 nt, Human
uggccauuugcuuuu

SEQ ID NO: 2786226 - RNA, 14 nt, Human
uggccauuugcuuu

SEQ ID NO: 2786227 - RNA, 13 nt, Human
uggccuggccugg

SEQ ID NO: 2786228 - RNA, 14 nt, Human
uggccuggccuggc

SEQ ID NO: 2786229 - RNA, 15 nt, Human
uggccuggccuggcc

SEQ ID NO: 2786230 - RNA, 16 nt, Human
uggccuggccuggccc

SEQ ID NO: 2786231 - RNA, 17 nt, Human
uggccuggccuggcccu

SEQ ID NO: 2786232 - RNA, 18 nt, Human
uggccuggccuggcccug

SEQ ID NO: 2786233 - RNA, 19 nt, Human
uggccuggccuggcccugc

SEQ ID NO: 2786234 - RNA, 15 nt, Human
uggccugagagggga

SEQ ID NO: 2786235 - RNA, 17 nt, Human
uggccugacuuggggga

SEQ ID NO: 2786236 - RNA, 13 nt, Human
uggccuggcccug

SEQ ID NO: 2786237 - RNA, 14 nt, Human
uggccuggcccugc

SEQ ID NO: 2786238 - RNA, 15 nt, Human
uggccuggcccugcc

SEQ ID NO: 2786239 - RNA, 16 nt, Human
uggccuggcccugccc

SEQ ID NO: 2786240 - RNA, 18 nt, Human
uggccuggcccugcccug

SEQ ID NO: 2786241 - RNA, 20 nt, Human
uggccuggcccugcccugag

SEQ ID NO: 2786242 - RNA, 21 nt, Human
uggccugaagaguccucugaa

SEQ ID NO: 2786243 - RNA, 22 nt, Human
uggccguugauguuggcuggga

SEQ ID NO: 2786244 - RNA, 12 nt, Human
aggccugugugu

SEQ ID NO: 2786245 - RNA, 23 nt, Human
aggccugugugugaaaggaagcu

SEQ ID NO: 2786246 - RNA, 15 nt, Human
uggccuuaccccugc

SEQ ID NO: 2786247 - RNA, 16 nt, Human
uggccuuaccccugcc

SEQ ID NO: 2786248 - RNA, 18 nt, Human
uggccuguuucaacacag

SEQ ID NO: 2786249 - RNA, 18 nt, Human
uggccuuccauuuauaug

SEQ ID NO: 2786250 - RNA, 23 nt, Human
uggccuguuuuagaagguucucu

SEQ ID NO: 2786251 - RNA, 15 nt, Human
agcuguguuguugcu

SEQ ID NO: 2786252 - RNA, 23 nt, Human
agcuguguuguugcuucuuguga

SEQ ID NO: 2786253 - RNA, 12 nt, Human
agcuguuaaacu

SEQ ID NO: 2786254 - RNA, 14 nt, Human
agcuguuaaacugu

SEQ ID NO: 2786255 - RNA, 15 nt, Human
agcuguuaaacuguu

SEQ ID NO: 2786256 - RNA, 16 nt, Human
agcuguuaaacuguua

SEQ ID NO: 2786257 - RNA, 19 nt, Human
agcuguuaaacuguuagca

SEQ ID NO: 2786258 - RNA, 22 nt, Human
agcuguuaaacuguuagcacug

SEQ ID NO: 2786259 - RNA, 23 nt, Human
agcuguuaaacuguuagcacugu

SEQ ID NO: 2786260 - RNA, 15 nt, Human
agcuguuaccauuca

SEQ ID NO: 2786261 - RNA, 16 nt, Human
agcuguuaccauucac

SEQ ID NO: 2786262 - RNA, 17 nt, Human
agcuguuaccauucaca

SEQ ID NO: 2786263 - RNA, 19 nt, Human
agcuguuaccauucacaau

SEQ ID NO: 2786264 - RNA, 20 nt, Human
ugccuguucagcuccagcuc

SEQ ID NO: 2786265 - RNA, 18 nt, Human
ugccuguucagcuccagc

SEQ ID NO: 2786266 - RNA, 17 nt, Human
ugccuguucagcuccag

SEQ ID NO: 2786267 - RNA, 14 nt, Human
ugccuuaaaaugga

SEQ ID NO: 2786268 - RNA, 15 nt, Human
ugccuuaaaauggaa

SEQ ID NO: 2786269 - RNA, 20 nt, Human
ugccuuaaaauggaauugaa

SEQ ID NO: 2786270 - RNA, 13 nt, Human
ugccuuaaagaaa

SEQ ID NO: 2786271 - RNA, 15 nt, Human
ugccuuagucucagu

SEQ ID NO: 2786272 - RNA, 16 nt, Human
ugccuuaggccuaccu

SEQ ID NO: 2786273 - RNA, 17 nt, Human
ugccuuaggccuaccug

SEQ ID NO: 2786274 - RNA, 21 nt, Human
ugccuuaggccuaccugaugg

SEQ ID NO: 2786275 - RNA, 14 nt, Human
ugccuuagaggagc

SEQ ID NO: 2786276 - RNA, 16 nt, Human
ugccuuagaggagccc

SEQ ID NO: 2786277 - RNA, 18 nt, Human
ugccuuagaggagcccac

SEQ ID NO: 2786278 - RNA, 19 nt, Human
ugccuuagaggagcccacg

SEQ ID NO: 2786279 - RNA, 21 nt, Human
ugccuguucagcuccagcuca

SEQ ID NO: 2786280 - RNA, 21 nt, Human
agcugugcucuggacaggcau

SEQ ID NO: 2786281 - RNA, 20 nt, Human
agcugugcucuggacaggca

SEQ ID NO: 2786282 - RNA, 19 nt, Human
agcugugcucuggacaggc

SEQ ID NO: 2786283 - RNA, 11 nt, Human
agcugucugcu

SEQ ID NO: 2786284 - RNA, 15 nt, Human
agcugucucuaacuu

SEQ ID NO: 2786285 - RNA, 17 nt, Human
agcugucugcucagaca

SEQ ID NO: 2786286 - RNA, 16 nt, Human
agcugucuguggcuuc

SEQ ID NO: 2786287 - RNA, 15 nt, Human
agcugucacaacuug

SEQ ID NO: 2786288 - RNA, 14 nt, Human
agcuguccagagaa

SEQ ID NO: 2786289 - RNA, 18 nt, Human
agcugucacaacuugugu

SEQ ID NO: 2786290 - RNA, 17 nt, Human
agcugucaccaaggaaa

SEQ ID NO: 2786291 - RNA, 18 nt, Human
agcugucaccaaggaaac

SEQ ID NO: 2786292 - RNA, 21 nt, Human
agcugucacuucgcgugcccu

SEQ ID NO: 2786293 - RNA, 20 nt, Human
agcugucacuuuugcuccga

SEQ ID NO: 2786294 - RNA, 15 nt, Human
agcuguccucccucc

SEQ ID NO: 2786295 - RNA, 17 nt, Human
agcuguccucccuccac

SEQ ID NO: 2786296 - RNA, 15 nt, Human
agcugucccugcccu

SEQ ID NO: 2786297 - RNA, 16 nt, Human
agcugucccugcccuu

SEQ ID NO: 2786298 - RNA, 13 nt, Human
agcuggcuggggu

SEQ ID NO: 2786299 - RNA, 14 nt, Human
agcuggcuggggug

SEQ ID NO: 2786300 - RNA, 15 nt, Human
agcuggcuggggugg

SEQ ID NO: 2786301 - RNA, 19 nt, Human
agcuggcugggguggccug

SEQ ID NO: 2786302 - RNA, 20 nt, Human
agcuggcugggguggccugu

SEQ ID NO: 2786303 - RNA, 21 nt, Human
agcuggcugggguggccugug

SEQ ID NO: 2786304 - RNA, 23 nt, Human
agcuggcugggguggccugugug

SEQ ID NO: 2786305 - RNA, 14 nt, Human
agcuggccccgccg

SEQ ID NO: 2786306 - RNA, 15 nt, Human
agcuggccccgccgc

SEQ ID NO: 2786307 - RNA, 18 nt, Human
agcuggccccgccgccug

SEQ ID NO: 2786308 - RNA, 19 nt, Human
agcuggccccgccgccugg

SEQ ID NO: 2786309 - RNA, 20 nt, Human
agcuggccgaggguccuggc

SEQ ID NO: 2786310 - RNA, 21 nt, Human
agcuggccgaggguccuggcu

SEQ ID NO: 2786311 - RNA, 18 nt, Human
agcugccgggccugauuu

SEQ ID NO: 2786312 - RNA, 15 nt, Human
agcugccuagcaagc

SEQ ID NO: 2786313 - RNA, 19 nt, Human
agcugccuagcaagcuggc

SEQ ID NO: 2786314 - RNA, 20 nt, Human
agcugccuagcaagcuggcc

SEQ ID NO: 2786315 - RNA, 21 nt, Human
agcugccuagcaagcuggccu

SEQ ID NO: 2786316 - RNA, 22 nt, Human
agcugccuagcaagcuggccuc

SEQ ID NO: 2786317 - RNA, 13 nt, Human
agcugccucacuu

SEQ ID NO: 2786318 - RNA, 20 nt, Human
agcugccuguucagcuccag

SEQ ID NO: 2786319 - RNA, 23 nt, Human
ugccuggauccccucugucuaca

SEQ ID NO: 2786320 - RNA, 21 nt, Human
ugccuggagugcccacccugg

SEQ ID NO: 2786321 - RNA, 22 nt, Human
agcugccuguucagcuccagcu

SEQ ID NO: 2786322 - RNA, 21 nt, Human
agcugccuguucagcuccagc

SEQ ID NO: 2786323 - RNA, 19 nt, Human
agcugccuguucagcucca

SEQ ID NO: 2786324 - RNA, 21 nt, Human
agcugcuuuugucuaugggac

SEQ ID NO: 2786325 - RNA, 13 nt, Human
agcuggccccgcc

SEQ ID NO: 2786326 - RNA, 21 nt, Human
agcuggcauuacagcuggaga

SEQ ID NO: 2786327 - RNA, 15 nt, Human
agcuggcauuacagc

SEQ ID NO: 2786328 - RNA, 22 nt, Human
agcuggaucuccauucucucag

SEQ ID NO: 2786329 - RNA, 20 nt, Human
agcuggaugauggucuucag

SEQ ID NO: 2786330 - RNA, 15 nt, Human
ugccucugccucuga

SEQ ID NO: 2786331 - RNA, 13 nt, Human
ugccugcccaggc

SEQ ID NO: 2786332 - RNA, 14 nt, Human
ugccucugccucug

SEQ ID NO: 2786333 - RNA, 13 nt, Human
ugccucugccucu

SEQ ID NO: 2786334 - RNA, 14 nt, Human
ugcccaggcagguc

SEQ ID NO: 2786335 - RNA, 13 nt, Human
ugcccaggcaggu

SEQ ID NO: 2786336 - RNA, 12 nt, Human
ugcccaggcagg

SEQ ID NO: 2786337 - RNA, 16 nt, Human
ugccugcccaggcccc

SEQ ID NO: 2786338 - RNA, 24 nt, Human
ugccugcccaggccccugccaccc

SEQ ID NO: 2786339 - RNA, 12 nt, Human
ugccucugccuc

SEQ ID NO: 2786340 - RNA, 15 nt, Human
ugccugcccaggccc

SEQ ID NO: 2786341 - RNA, 14 nt, Human
ugccugcccaggcc

SEQ ID NO: 2786342 - RNA, 18 nt, Human
ugccuggagacguggaac

SEQ ID NO: 2786343 - RNA, 22 nt, Human
ugccuggagacguggaaccucu

SEQ ID NO: 2786344 - RNA, 18 nt, Human
ugccugcccgcacagcag

SEQ ID NO: 2786345 - RNA, 19 nt, Human
ugccugcccgcacagcagc

SEQ ID NO: 2786346 - RNA, 20 nt, Human
ugccugcccgcacagcagcc

SEQ ID NO: 2786347 - RNA, 22 nt, Human
ugccugcccgcacagcagccug

SEQ ID NO: 2786348 - RNA, 18 nt, Human
ugccugccccccucaucu

SEQ ID NO: 2786349 - RNA, 18 nt, Human
ugccugccccaaacaaau

SEQ ID NO: 2786350 - RNA, 20 nt, Human
ugccugccccaaacaaauau

SEQ ID NO: 2786351 - RNA, 18 nt, Human
ugcuaagguucuaaggcc

SEQ ID NO: 2786352 - RNA, 16 nt, Human
ugcuaagguucuaagg

SEQ ID NO: 2786353 - RNA, 17 nt, Human
ugcuaagguucuaaggc

SEQ ID NO: 2786354 - RNA, 12 nt, Human
ugcuaagguucu

SEQ ID NO: 2786355 - RNA, 13 nt, Human
ugcuaagguucua

SEQ ID NO: 2786356 - RNA, 14 nt, Human
ugcuaagguucuaa

SEQ ID NO: 2786357 - RNA, 15 nt, Human
ugcuaagguucuaag

SEQ ID NO: 2786358 - RNA, 15 nt, Human
agcuguuguacauuu

SEQ ID NO: 2786359 - RNA, 19 nt, Human
agcuuacaagccagcugga

SEQ ID NO: 2786360 - RNA, 21 nt, Human
agcuuacaaucgcaaaucaaa

SEQ ID NO: 2786361 - RNA, 16 nt, Human
agcuuacacaaaucua

SEQ ID NO: 2786362 - RNA, 20 nt, Human
agcuuacacaaaucuauuua

SEQ ID NO: 2786363 - RNA, 16 nt, Human
agcuuacauaguuuua

SEQ ID NO: 2786364 - RNA, 17 nt, Human
agcuuacauaguuuuaa

SEQ ID NO: 2786365 - RNA, 22 nt, Human
agcuuacauaguuuuaaacuca

SEQ ID NO: 2786366 - RNA, 22 nt, Human
agcuucuuccaggugcccagcu

SEQ ID NO: 2786367 - RNA, 20 nt, Human
agcuucuuccaggugcccag

SEQ ID NO: 2786368 - RNA, 17 nt, Human
agcuugaaaguuuucag

SEQ ID NO: 2786369 - RNA, 16 nt, Human
agcuugaaaguuuuca

SEQ ID NO: 2786370 - RNA, 22 nt, Human
agcuugaaaguuuucagaaccu

SEQ ID NO: 2786371 - RNA, 12 nt, Human
agcuucuuccag

SEQ ID NO: 2786372 - RNA, 18 nt, Human
agcuucuuaauuaauuug

SEQ ID NO: 2786373 - RNA, 19 nt, Human
agcuucuuaauuaauuuga

SEQ ID NO: 2786374 - RNA, 21 nt, Human
agcuucuuaauuaauuugauu

SEQ ID NO: 2786375 - RNA, 10 nt, Human
agcuuagaac

SEQ ID NO: 2786376 - RNA, 21 nt, Human
agcuuacucuguccauuuauc

SEQ ID NO: 2786377 - RNA, 13 nt, Human
agcuuaccugaca

SEQ ID NO: 2786378 - RNA, 15 nt, Human
agcuuaccugacaca

SEQ ID NO: 2786379 - RNA, 17 nt, Human
agcuuaccugacacaag

SEQ ID NO: 2786380 - RNA, 20 nt, Human
agcuuaccagaagcuuccau

SEQ ID NO: 2786381 - RNA, 22 nt, Human
agcuuaccagaagcuuccauag

SEQ ID NO: 2786382 - RNA, 14 nt, Human
agcuugaggguugg

SEQ ID NO: 2786383 - RNA, 13 nt, Human
agcuugacuccca

SEQ ID NO: 2786384 - RNA, 15 nt, Human
agcuugacucccaag

SEQ ID NO: 2786385 - RNA, 18 nt, Human
agcuugaggguugggcug

SEQ ID NO: 2786386 - RNA, 18 nt, Human
agcuugggaggcuucccc

SEQ ID NO: 2786387 - RNA, 22 nt, Human
agcuugggagagccccuggggc

SEQ ID NO: 2786388 - RNA, 24 nt, Human
agcuugggagagccccuggggccu

SEQ ID NO: 2786389 - RNA, 22 nt, Human
agcuuggggccaccaaagcugc

SEQ ID NO: 2786390 - RNA, 21 nt, Human
agcuuggggccaccaaagcug

SEQ ID NO: 2786391 - RNA, 20 nt, Human
agcuuggggccaccaaagcu

SEQ ID NO: 2786392 - RNA, 17 nt, Human
agcuuggggcaacauug

SEQ ID NO: 2786393 - RNA, 23 nt, Human
agcuuggggccaccaaagcugcc

SEQ ID NO: 2786394 - RNA, 14 nt, Human
agcuuggggccagg

SEQ ID NO: 2786395 - RNA, 15 nt, Human
agcuuggggccaggg

SEQ ID NO: 2786396 - RNA, 16 nt, Human
agcuuggggccaggga

SEQ ID NO: 2786397 - RNA, 18 nt, Human
ugcgguccacccaggagc

SEQ ID NO: 2786398 - RNA, 17 nt, Human
ugcgguccacccaggag

SEQ ID NO: 2786399 - RNA, 17 nt, Human
ugcgggucacaggaggg

SEQ ID NO: 2786400 - RNA, 16 nt, Human
ugcgggucacaggagg

SEQ ID NO: 2786401 - RNA, 14 nt, Human
ugcgggucacagga

SEQ ID NO: 2786402 - RNA, 17 nt, Human
ugcgggaugguccuggg

SEQ ID NO: 2786403 - RNA, 19 nt, Human
ugcgggaugguccuggggc

SEQ ID NO: 2786404 - RNA, 18 nt, Human
ugcgggaugguccugggg

SEQ ID NO: 2786405 - RNA, 22 nt, Human
ugcggacagccacggccaggcc

SEQ ID NO: 2786406 - RNA, 13 nt, Human
ugccuuuuauagc

SEQ ID NO: 2786407 - RNA, 17 nt, Human
ugccuuuuauagcuauu

SEQ ID NO: 2786408 - RNA, 22 nt, Human
ugccuuuuauagcuauuacugu

SEQ ID NO: 2786409 - RNA, 23 nt, Human
ugcggacagccacggccaggcca

SEQ ID NO: 2786410 - RNA, 13 nt, Human
ugcggagaacaaa

SEQ ID NO: 2786411 - RNA, 14 nt, Human
ugcggaccccagcu

SEQ ID NO: 2786412 - RNA, 22 nt, Human
ugcggaccccagcugugagccu

SEQ ID NO: 2786413 - RNA, 13 nt, Human
ugcggaccccagc

SEQ ID NO: 2786414 - RNA, 15 nt, Human
ugcggaucucagcuu

SEQ ID NO: 2786415 - RNA, 23 nt, Human
ugcggaccccagcugugagccuu

SEQ ID NO: 2786416 - RNA, 15 nt, Human
ugcggagaacaaaug

SEQ ID NO: 2786417 - RNA, 17 nt, Human
ugcggaucucagcuuug

SEQ ID NO: 2786418 - RNA, 17 nt, Human
ugcggcauuaaagccau

SEQ ID NO: 2786419 - RNA, 15 nt, Human
ugccuuuguuuugau

SEQ ID NO: 2786420 - RNA, 16 nt, Human
ugccuuugccuccaga

SEQ ID NO: 2786421 - RNA, 12 nt, Human
ugccuuugggag

SEQ ID NO: 2786422 - RNA, 15 nt, Human
ugccuuugggagcag

SEQ ID NO: 2786423 - RNA, 16 nt, Human
ugccuuugcaaaucag

SEQ ID NO: 2786424 - RNA, 23 nt, Human
ugccuuugagacaguuucuuagc

SEQ ID NO: 2786425 - RNA, 12 nt, Human
ugccuuugagac

SEQ ID NO: 2786426 - RNA, 13 nt, Human
ugccuuugagaca

SEQ ID NO: 2786427 - RNA, 15 nt, Human
ugccuuugagacagu

SEQ ID NO: 2786428 - RNA, 17 nt, Human
ugccuuugagacaguuu

SEQ ID NO: 2786429 - RNA, 18 nt, Human
ugccuuugagacaguuuc

SEQ ID NO: 2786430 - RNA, 19 nt, Human
ugccuuugagacaguuucu

SEQ ID NO: 2786431 - RNA, 20 nt, Human
ugccuuugagacaguuucuu

SEQ ID NO: 2786432 - RNA, 21 nt, Human
ugccuuugagacaguuucuua

SEQ ID NO: 2786433 - RNA, 16 nt, Human
ugccuuagucucaguu

SEQ ID NO: 2786434 - RNA, 20 nt, Human
ugccuuagucucaguuugug

SEQ ID NO: 2786435 - RNA, 15 nt, Human
ugccuuucugcaguu

SEQ ID NO: 2786436 - RNA, 20 nt, Human
ugccuuucugcaguuuuuca

SEQ ID NO: 2786437 - RNA, 22 nt, Human
ugccuuucugcaguuuuucagg

SEQ ID NO: 2786438 - RNA, 12 nt, Human
ugccuuugaaug

SEQ ID NO: 2786439 - RNA, 17 nt, Human
ugcugggauuacaggug

SEQ ID NO: 2786440 - RNA, 21 nt, Human
ugcugggauuacaagcgugag

SEQ ID NO: 2786441 - RNA, 21 nt, Human
ugcugggaaccucaggguauu

SEQ ID NO: 2786442 - RNA, 20 nt, Human
ugcugggauggugggcuuca

SEQ ID NO: 2786443 - RNA, 23 nt, Human
ugcugggauggugggcuucaggg

SEQ ID NO: 2786444 - RNA, 16 nt, Human
ugcuguagaugacaac

SEQ ID NO: 2786445 - RNA, 21 nt, Human
ugcuggcuguuggcugggggc

SEQ ID NO: 2786446 - RNA, 19 nt, Human
ugcuggcuguuggcugggg

SEQ ID NO: 2786447 - RNA, 19 nt, Human
ugcugggauuacaagcgug

SEQ ID NO: 2786448 - RNA, 19 nt, Human
ugcuggcucacaguacagc

SEQ ID NO: 2786449 - RNA, 13 nt, Human
ugcuggcucuucu

SEQ ID NO: 2786450 - RNA, 13 nt, Human
ugcuggcugccuu

SEQ ID NO: 2786451 - RNA, 14 nt, Human
ugcuggccuuugcu

SEQ ID NO: 2786452 - RNA, 23 nt, Human
ugcuggcgagugaaugccagugu

SEQ ID NO: 2786453 - RNA, 20 nt, Human
aggaauggacagacagagga

SEQ ID NO: 2786454 - RNA, 12 nt, Human
aggaauggacag

SEQ ID NO: 2786455 - RNA, 23 nt, Human
ugcuggaggugggagcaggagau

SEQ ID NO: 2786456 - RNA, 18 nt, Human
ugcuggaggugggagcag

SEQ ID NO: 2786457 - RNA, 22 nt, Human
ugcuggaggugggagcaggaga

SEQ ID NO: 2786458 - RNA, 17 nt, Human
ugcuggaggugggagca

SEQ ID NO: 2786459 - RNA, 16 nt, Human
ugcuggaggugggagc

SEQ ID NO: 2786460 - RNA, 20 nt, Human
ugcuggaguuucauguacaa

SEQ ID NO: 2786461 - RNA, 17 nt, Human
ugcuggauggagcccag

SEQ ID NO: 2786462 - RNA, 18 nt, Human
ugcuggauggagcccagg

SEQ ID NO: 2786463 - RNA, 19 nt, Human
ugcuggauggagcccaggc

SEQ ID NO: 2786464 - RNA, 20 nt, Human
ugcuggauggagcccaggcg

SEQ ID NO: 2786465 - RNA, 18 nt, Human
ugcuggaugucugccaau

SEQ ID NO: 2786466 - RNA, 22 nt, Human
ugcuggaugucugccaauuuuu

SEQ ID NO: 2786467 - RNA, 15 nt, Human
ugcuggccagccugg

SEQ ID NO: 2786468 - RNA, 16 nt, Human
ugcuggccagccuggg

SEQ ID NO: 2786469 - RNA, 17 nt, Human
ugcuggccagccugggg

SEQ ID NO: 2786470 - RNA, 18 nt, Human
ugcuggcaucaagaggug

SEQ ID NO: 2786471 - RNA, 22 nt, Human
aggacacgcgccccccucccag

SEQ ID NO: 2786472 - RNA, 23 nt, Human
aggacacgcgccccccucccaga

SEQ ID NO: 2786473 - RNA, 13 nt, Human
aggacagaaagga

SEQ ID NO: 2786474 - RNA, 23 nt, Human
aggacagaaaggagaguggccau

SEQ ID NO: 2786475 - RNA, 17 nt, Human
aggacagccccuccucc

SEQ ID NO: 2786476 - RNA, 15 nt, Human
aggacaccacaccca

SEQ ID NO: 2786477 - RNA, 18 nt, Human
aggacacuaaccacgcug

SEQ ID NO: 2786478 - RNA, 17 nt, Human
aggacaccacacccagc

SEQ ID NO: 2786479 - RNA, 18 nt, Human
aggacaccacacccagcc

SEQ ID NO: 2786480 - RNA, 19 nt, Human
aggacaccacacccagccu

SEQ ID NO: 2786481 - RNA, 20 nt, Human
aggacaccacacccagccuc

SEQ ID NO: 2786482 - RNA, 21 nt, Human
aggacaccacacccagccuca

SEQ ID NO: 2786483 - RNA, 22 nt, Human
aggacaccacacccagccucag

SEQ ID NO: 2786484 - RNA, 23 nt, Human
aggacaccacacccagccucagu

SEQ ID NO: 2786485 - RNA, 15 nt, Human
ugcuuccaauuuucu

SEQ ID NO: 2786486 - RNA, 15 nt, Human
ugcuucauucaauau

SEQ ID NO: 2786487 - RNA, 19 nt, Human
ugcuucauucaauauugac

SEQ ID NO: 2786488 - RNA, 18 nt, Human
ugcuucaucuucccaggu

SEQ ID NO: 2786489 - RNA, 19 nt, Human
ugcuucaucuucccaggua

SEQ ID NO: 2786490 - RNA, 13 nt, Human
ugcuucaauaguu

SEQ ID NO: 2786491 - RNA, 21 nt, Human
ugcuucaauaguucaaggaac

SEQ ID NO: 2786492 - RNA, 22 nt, Human
ugcuucaauaguucaaggaacu

SEQ ID NO: 2786493 - RNA, 15 nt, Human
ugcuucaaucccagc

SEQ ID NO: 2786494 - RNA, 16 nt, Human
ugcuucaaggcuucca

SEQ ID NO: 2786495 - RNA, 16 nt, Human
ugcuucaauaaaucuu

SEQ ID NO: 2786496 - RNA, 22 nt, Human
ugcuucaauaaaucuuuggaaa

SEQ ID NO: 2786497 - RNA, 15 nt, Human
ugcuucaauuaauaa

SEQ ID NO: 2786498 - RNA, 16 nt, Human
ugcuucaauuaauaaa

SEQ ID NO: 2786499 - RNA, 13 nt, Human
ugcugugcaaaug

SEQ ID NO: 2786500 - RNA, 13 nt, Human
ugcuguggaagca

SEQ ID NO: 2786501 - RNA, 20 nt, Human
ugcuguaugcugaucaucgc

SEQ ID NO: 2786502 - RNA, 22 nt, Human
ugcuguaugcugaucaucgcca

SEQ ID NO: 2786503 - RNA, 14 nt, Human
ugcuuagaaaagaa

SEQ ID NO: 2786504 - RNA, 18 nt, Human
ugcuguaggaucuaaggc

SEQ ID NO: 2786505 - RNA, 17 nt, Human
ugcuuagacauaacaaa

SEQ ID NO: 2786506 - RNA, 16 nt, Human
ugcuuagagacuauca

SEQ ID NO: 2786507 - RNA, 17 nt, Human
ugcuuagagacuaucaa

SEQ ID NO: 2786508 - RNA, 22 nt, Human
ugcuuagagggauuucuuugcu

SEQ ID NO: 2786509 - RNA, 23 nt, Human
ugcuuagagggauuucuuugcug

SEQ ID NO: 2786510 - RNA, 15 nt, Human
ugcuguggccugggc

SEQ ID NO: 2786511 - RNA, 14 nt, Human
ugcuguggccuggg

SEQ ID NO: 2786512 - RNA, 12 nt, Human
ugcuguggccug

SEQ ID NO: 2786513 - RNA, 16 nt, Human
ugcuguggccugggca

SEQ ID NO: 2786514 - RNA, 14 nt, Human
ugcuuacuuaugcc

SEQ ID NO: 2786515 - RNA, 13 nt, Human
ugcuucaaaaaca

SEQ ID NO: 2786516 - RNA, 21 nt, Human
ugcuucaaaaacauucuuaca

SEQ ID NO: 2786517 - RNA, 17 nt, Human
ugcuuauugcuuaguaa

SEQ ID NO: 2786518 - RNA, 21 nt, Human
ugcuuauugcuuaguaaaauu

SEQ ID NO: 2786519 - RNA, 21 nt, Human
ugcuuaguaucucaucaacaa

SEQ ID NO: 2786520 - RNA, 13 nt, Human
ugcuuaguaaaau

SEQ ID NO: 2786521 - RNA, 14 nt, Human
ugcuuaguaaaauu

SEQ ID NO: 2786522 - RNA, 16 nt, Human
ugcuuaguaaaauuua

SEQ ID NO: 2786523 - RNA, 14 nt, Human
aggaaauccagggu

SEQ ID NO: 2786524 - RNA, 22 nt, Human
aggaaauaaaaccuuucaaauu

SEQ ID NO: 2786525 - RNA, 21 nt, Human
aggaaauaaaaccuuucaaau

SEQ ID NO: 2786526 - RNA, 20 nt, Human
aggaaauaaaaccuuucaaa

SEQ ID NO: 2786527 - RNA, 19 nt, Human
aggaaauaaaaccuuucaa

SEQ ID NO: 2786528 - RNA, 17 nt, Human
aggaaauaaaaccuuuc

SEQ ID NO: 2786529 - RNA, 21 nt, Human
ugcugacuguacuccucccag

SEQ ID NO: 2786530 - RNA, 22 nt, Human
ugcugacuguacuccucccagg

SEQ ID NO: 2786531 - RNA, 19 nt, Human
aggaagccugcaguccugg

SEQ ID NO: 2786532 - RNA, 12 nt, Human
aggaaggaaaga

SEQ ID NO: 2786533 - RNA, 20 nt, Human
aggaagccugcaguccugga

SEQ ID NO: 2786534 - RNA, 16 nt, Human
aggaaauauugcuggg

SEQ ID NO: 2786535 - RNA, 19 nt, Human
ugcucaugggcugugugau

SEQ ID NO: 2786536 - RNA, 15 nt, Human
ugcucauuaauuuug

SEQ ID NO: 2786537 - RNA, 12 nt, Human
ugcucauuuaag

SEQ ID NO: 2786538 - RNA, 18 nt, Human
ugcucauuuaaguuucaa

SEQ ID NO: 2786539 - RNA, 19 nt, Human
ugcuccaagauucuagaug

SEQ ID NO: 2786540 - RNA, 14 nt, Human
ugcuccaagauucu

SEQ ID NO: 2786541 - RNA, 15 nt, Human
ugcuccaagauucua

SEQ ID NO: 2786542 - RNA, 16 nt, Human
ugcuccaagauucuag

SEQ ID NO: 2786543 - RNA, 17 nt, Human
ugcuccaagauucuaga

SEQ ID NO: 2786544 - RNA, 18 nt, Human
ugcuccaagauucuagau

SEQ ID NO: 2786545 - RNA, 17 nt, Human
ugcucccuccccugccc

SEQ ID NO: 2786546 - RNA, 15 nt, Human
ugcucccuccccugc

SEQ ID NO: 2786547 - RNA, 14 nt, Human
ugcucccuccccug

SEQ ID NO: 2786548 - RNA, 13 nt, Human
ugcucccuccccu

SEQ ID NO: 2786549 - RNA, 18 nt, Human
ugcucccuaagccagccu

SEQ ID NO: 2786550 - RNA, 19 nt, Human
ugcucccuaagccagccug

SEQ ID NO: 2786551 - RNA, 20 nt, Human
ugcucccuaagccagccugg

SEQ ID NO: 2786552 - RNA, 21 nt, Human
ugcucccuaagccagccuggu

SEQ ID NO: 2786553 - RNA, 15 nt, Human
ugcuccccucugaaa

SEQ ID NO: 2786554 - RNA, 16 nt, Human
ugcucuggacaggcau

SEQ ID NO: 2786555 - RNA, 15 nt, Human
ugcucuggacaggca

SEQ ID NO: 2786556 - RNA, 14 nt, Human
ugcugacuguacuc

SEQ ID NO: 2786557 - RNA, 16 nt, Human
ugcugacuguacuccu

SEQ ID NO: 2786558 - RNA, 19 nt, Human
ugcugacuguacuccuccc

SEQ ID NO: 2786559 - RNA, 14 nt, Human
ugcucuggacaggc

SEQ ID NO: 2786560 - RNA, 18 nt, Human
ugcuccuaguuugaccuc

SEQ ID NO: 2786561 - RNA, 20 nt, Human
ugcuccuaguuugaccucac

SEQ ID NO: 2786562 - RNA, 19 nt, Human
ugcuccucacugcccgcac

SEQ ID NO: 2786563 - RNA, 20 nt, Human
ugcuauuggaggaucaguuu

SEQ ID NO: 2786564 - RNA, 12 nt, Human
ugcuauuaaagu

SEQ ID NO: 2786565 - RNA, 13 nt, Human
ugcuauuaaagug

SEQ ID NO: 2786566 - RNA, 16 nt, Human
ugcuauguuacuauuu

SEQ ID NO: 2786567 - RNA, 18 nt, Human
ugcuauguuacuauuuuc

SEQ ID NO: 2786568 - RNA, 19 nt, Human
ugcuauguuacuauuuucu

SEQ ID NO: 2786569 - RNA, 15 nt, Human
agcuuucaaagcauu

SEQ ID NO: 2786570 - RNA, 16 nt, Human
agcuuucaaagcauuu

SEQ ID NO: 2786571 - RNA, 16 nt, Human
agcuuucaagugccuu

SEQ ID NO: 2786572 - RNA, 17 nt, Human
agcuuucaagugccuuu

SEQ ID NO: 2786573 - RNA, 16 nt, Human
ugcuaucucugugugc

SEQ ID NO: 2786574 - RNA, 20 nt, Human
ugcuaucucugugugcacaa

SEQ ID NO: 2786575 - RNA, 21 nt, Human
ugcuaucucugugugcacaaa

SEQ ID NO: 2786576 - RNA, 20 nt, Human
ugcuaucuggaggccuucca

SEQ ID NO: 2786577 - RNA, 23 nt, Human
ugcuaucuggaggccuuccagcu

SEQ ID NO: 2786578 - RNA, 17 nt, Human
agcuuuauauauggaca

SEQ ID NO: 2786579 - RNA, 18 nt, Human
agcuuuauauauggacau

SEQ ID NO: 2786580 - RNA, 18 nt, Human
agcuuuauguucauuugu

SEQ ID NO: 2786581 - RNA, 23 nt, Human
agcuuuauguucauuuguuuguu

SEQ ID NO: 2786582 - RNA, 10 nt, Human
agcuuuauga

SEQ ID NO: 2786583 - RNA, 12 nt, Human
agcuuuaugauu

SEQ ID NO: 2786584 - RNA, 14 nt, Human
agcuuuaugauuuu

SEQ ID NO: 2786585 - RNA, 15 nt, Human
agcuuuaugauuuuc

SEQ ID NO: 2786586 - RNA, 17 nt, Human
agcuuuaugauuuucau

SEQ ID NO: 2786587 - RNA, 18 nt, Human
agcuuuaugauuuucaua

SEQ ID NO: 2786588 - RNA, 23 nt, Human
agcuuuaugauuuucauaacuua

SEQ ID NO: 2786589 - RNA, 21 nt, Human
agcuuuaugguccuaaaagca

SEQ ID NO: 2786590 - RNA, 14 nt, Human
agcuuuauucuuca

SEQ ID NO: 2786591 - RNA, 22 nt, Human
agcuuuauuuuuuaaguauuua

SEQ ID NO: 2786592 - RNA, 19 nt, Human
agcuuuauuuuuuaaguau

SEQ ID NO: 2786593 - RNA, 21 nt, Human
agcuuuacaugcaauuuauua

SEQ ID NO: 2786594 - RNA, 15 nt, Human
agcuuuacaugcaau

SEQ ID NO: 2786595 - RNA, 19 nt, Human
agcuuuacaugcaauuuau

SEQ ID NO: 2786596 - RNA, 15 nt, Human
agcuuuaaaagaaaa

SEQ ID NO: 2786597 - RNA, 13 nt, Human
agcuuuaaaagaa

SEQ ID NO: 2786598 - RNA, 15 nt, Human
agcuuuaaacaaauu

SEQ ID NO: 2786599 - RNA, 19 nt, Human
agcuuuaaacucagggaca

SEQ ID NO: 2786600 - RNA, 20 nt, Human
agcuuuaaacucagggacag

SEQ ID NO: 2786601 - RNA, 21 nt, Human
agcuuuaaacucagggacaga

SEQ ID NO: 2786602 - RNA, 13 nt, Human
agcuuuacacaca

SEQ ID NO: 2786603 - RNA, 20 nt, Human
agcuuuacacacacagaugu

SEQ ID NO: 2786604 - RNA, 14 nt, Human
aguagauauuacuu

SEQ ID NO: 2786605 - RNA, 15 nt, Human
aguagauauuacuuu

SEQ ID NO: 2786606 - RNA, 16 nt, Human
aguagauauuacuuua

SEQ ID NO: 2786607 - RNA, 17 nt, Human
aguagauauuacuuuau

SEQ ID NO: 2786608 - RNA, 18 nt, Human
aguagauauuacuuuauc

SEQ ID NO: 2786609 - RNA, 21 nt, Human
aguagauauuacuuuaucacu

SEQ ID NO: 2786610 - RNA, 15 nt, Human
aguagauggugaaau

SEQ ID NO: 2786611 - RNA, 16 nt, Human
aguagauggugaaauu

SEQ ID NO: 2786612 - RNA, 17 nt, Human
aguagauggugaaauuu

SEQ ID NO: 2786613 - RNA, 20 nt, Human
aguagaugcgcagccccauc

SEQ ID NO: 2786614 - RNA, 21 nt, Human
aguagaugcgcagccccaucu

SEQ ID NO: 2786615 - RNA, 21 nt, Human
aguagauggugaaauuuauua

SEQ ID NO: 2786616 - RNA, 13 nt, Human
uguaggagacuug

SEQ ID NO: 2786617 - RNA, 13 nt, Human
uguaggagaaacu

SEQ ID NO: 2786618 - RNA, 18 nt, Human
uguaggagaaacucccau

SEQ ID NO: 2786619 - RNA, 22 nt, Human
uguaggagacuugccagagccg

SEQ ID NO: 2786620 - RNA, 18 nt, Human
uguaggagacuugccaga

SEQ ID NO: 2786621 - RNA, 20 nt, Human
uguaggagcuacccuuuucc

SEQ ID NO: 2786622 - RNA, 17 nt, Human
uguaggagcugagguuu

SEQ ID NO: 2786623 - RNA, 12 nt, Human
uguaggagcugc

SEQ ID NO: 2786624 - RNA, 15 nt, Human
uguaggagcugccuu

SEQ ID NO: 2786625 - RNA, 22 nt, Human
uguaggagcugccuuggcucag

SEQ ID NO: 2786626 - RNA, 20 nt, Human
uguaggugcaagauggaaag

SEQ ID NO: 2786627 - RNA, 16 nt, Human
uguaggugguauguga

SEQ ID NO: 2786628 - RNA, 23 nt, Human
uguagguggucuggagcuguccg

SEQ ID NO: 2786629 - RNA, 19 nt, Human
aguagaacagauaaucagu

SEQ ID NO: 2786630 - RNA, 13 nt, Human
aguagaacagaua

SEQ ID NO: 2786631 - RNA, 19 nt, Human
aguagaaauaauaugcauu

SEQ ID NO: 2786632 - RNA, 18 nt, Human
aguagaaauaauaugcau

SEQ ID NO: 2786633 - RNA, 15 nt, Human
aguagaaauaaaagu

SEQ ID NO: 2786634 - RNA, 19 nt, Human
aguagaaauaaaagugaau

SEQ ID NO: 2786635 - RNA, 12 nt, Human
aguagagacagg

SEQ ID NO: 2786636 - RNA, 18 nt, Human
aguagagguacuagaaug

SEQ ID NO: 2786637 - RNA, 15 nt, Human
aguagagccagcuug

SEQ ID NO: 2786638 - RNA, 14 nt, Human
aguagauaagcaga

SEQ ID NO: 2786639 - RNA, 12 nt, Human
aguagagccagc

SEQ ID NO: 2786640 - RNA, 13 nt, Human
aguagagccagcu

SEQ ID NO: 2786641 - RNA, 14 nt, Human
aguaaucaauaaag

SEQ ID NO: 2786642 - RNA, 15 nt, Human
aguaaucaauaaaga

SEQ ID NO: 2786643 - RNA, 18 nt, Human
aguaaucaauaaagaaaa

SEQ ID NO: 2786644 - RNA, 14 nt, Human
aguaauccaccugc

SEQ ID NO: 2786645 - RNA, 15 nt, Human
aguaauuugaggaca

SEQ ID NO: 2786646 - RNA, 13 nt, Human
aguacaaaugccu

SEQ ID NO: 2786647 - RNA, 16 nt, Human
aguacaaaugccuuaa

SEQ ID NO: 2786648 - RNA, 21 nt, Human
aguacaaaugccuuaaaaugg

SEQ ID NO: 2786649 - RNA, 22 nt, Human
aguacaaaugccuuaaaaugga

SEQ ID NO: 2786650 - RNA, 23 nt, Human
aguacaaaugccuuaaaauggaa

SEQ ID NO: 2786651 - RNA, 14 nt, Human
aguacaaauuauaa

SEQ ID NO: 2786652 - RNA, 17 nt, Human
aguacaaauuauaaaaa

SEQ ID NO: 2786653 - RNA, 14 nt, Human
aguacaauaaaagu

SEQ ID NO: 2786654 - RNA, 22 nt, Human
aguacacaauaagcaaaaacaa

SEQ ID NO: 2786655 - RNA, 21 nt, Human
aguacacaauaagcaaaaaca

SEQ ID NO: 2786656 - RNA, 18 nt, Human
aguacacaauaagcaaaa

SEQ ID NO: 2786657 - RNA, 13 nt, Human
aguacaauguguu

SEQ ID NO: 2786658 - RNA, 17 nt, Human
aguacaauguguuuuuc

SEQ ID NO: 2786659 - RNA, 18 nt, Human
aguacaauguguuuuucu

SEQ ID NO: 2786660 - RNA, 20 nt, Human
aguacaauguguuuuucucc

SEQ ID NO: 2786661 - RNA, 17 nt, Human
aguacacaauaagcaaa

SEQ ID NO: 2786662 - RNA, 16 nt, Human
aguacacaauaagcaa

SEQ ID NO: 2786663 - RNA, 23 nt, Human
agguuuuuaaacacuaaaauaua

SEQ ID NO: 2786664 - RNA, 12 nt, Human
aguaaaaauaaa

SEQ ID NO: 2786665 - RNA, 13 nt, Human
aguaaaaauacaa

SEQ ID NO: 2786666 - RNA, 12 nt, Human
aguaaaaauaca

SEQ ID NO: 2786667 - RNA, 15 nt, Human
aguaaaaauaaaauu

SEQ ID NO: 2786668 - RNA, 22 nt, Human
agguuuuccucuucuauuuugu

SEQ ID NO: 2786669 - RNA, 22 nt, Human
agguuuuccccucuuuuguuaa

SEQ ID NO: 2786670 - RNA, 15 nt, Human
agguuuuguaaagau

SEQ ID NO: 2786671 - RNA, 23 nt, Human
agguuuuggaucuugaauguggu

SEQ ID NO: 2786672 - RNA, 13 nt, Human
agguuuuguaaag

SEQ ID NO: 2786673 - RNA, 12 nt, Human
agguuuuguugu

SEQ ID NO: 2786674 - RNA, 17 nt, Human
agguuuuguuguuuuau

SEQ ID NO: 2786675 - RNA, 17 nt, Human
aguaaguaccacucagg

SEQ ID NO: 2786676 - RNA, 18 nt, Human
aguaauauuuauauauuu

SEQ ID NO: 2786677 - RNA, 14 nt, Human
aguaaguaauuaug

SEQ ID NO: 2786678 - RNA, 20 nt, Human
aguaaguaauuaugcacuaa

SEQ ID NO: 2786679 - RNA, 19 nt, Human
aguaaaaauacaaaaauua

SEQ ID NO: 2786680 - RNA, 13 nt, Human
aguaaaacacaga

SEQ ID NO: 2786681 - RNA, 14 nt, Human
aguaaaacacagag

SEQ ID NO: 2786682 - RNA, 15 nt, Human
aguaaaacacagagg

SEQ ID NO: 2786683 - RNA, 23 nt, Human
uguacuuuuauuuuacacagaaa

SEQ ID NO: 2786684 - RNA, 17 nt, Human
uguaccauauagcaaaa

SEQ ID NO: 2786685 - RNA, 18 nt, Human
uguaccauaugaucuguu

SEQ ID NO: 2786686 - RNA, 18 nt, Human
uguacuuuuuaguuguuc

SEQ ID NO: 2786687 - RNA, 16 nt, Human
uguacuuuuaaggcag

SEQ ID NO: 2786688 - RNA, 21 nt, Human
uguaccaugaaacaaagcugc

SEQ ID NO: 2786689 - RNA, 19 nt, Human
uguacauuuuguuguaaaa

SEQ ID NO: 2786690 - RNA, 21 nt, Human
uguacauuuuguuguaaaaag

SEQ ID NO: 2786691 - RNA, 22 nt, Human
uguacauuuuguuguaaaaaga

SEQ ID NO: 2786692 - RNA, 23 nt, Human
uguacauuuuguuguaaaaagaa

SEQ ID NO: 2786693 - RNA, 21 nt, Human
uguaccaggaaaggauuuuau

SEQ ID NO: 2786694 - RNA, 20 nt, Human
uguaauuuaggguacuaaau

SEQ ID NO: 2786695 - RNA, 21 nt, Human
uguaauuuaggguacuaaauu

SEQ ID NO: 2786696 - RNA, 23 nt, Human
uguaauuuaggguacuaaauuua

SEQ ID NO: 2786697 - RNA, 15 nt, Human
uguaauuuauaaaau

SEQ ID NO: 2786698 - RNA, 16 nt, Human
uguaauuuauaaaauu

SEQ ID NO: 2786699 - RNA, 16 nt, Human
uguaauuuaugugaaa

SEQ ID NO: 2786700 - RNA, 13 nt, Human
uguaaguuucagg

SEQ ID NO: 2786701 - RNA, 22 nt, Human
uguaauuacuuaucccugccca

SEQ ID NO: 2786702 - RNA, 15 nt, Human
uguaauuaugauuug

SEQ ID NO: 2786703 - RNA, 16 nt, Human
uguaauuaugauuugg

SEQ ID NO: 2786704 - RNA, 13 nt, Human
uguaagccaaaga

SEQ ID NO: 2786705 - RNA, 15 nt, Human
uguaagccaaagaaa

SEQ ID NO: 2786706 - RNA, 18 nt, Human
uguaagccaaagaaauga

SEQ ID NO: 2786707 - RNA, 20 nt, Human
uguaagccaaagaaaugaac

SEQ ID NO: 2786708 - RNA, 21 nt, Human
uguaagccaaagaaaugaaca

SEQ ID NO: 2786709 - RNA, 22 nt, Human
uguaagccaaagaaaugaacau

SEQ ID NO: 2786710 - RNA, 14 nt, Human
uguaagccugcaag

SEQ ID NO: 2786711 - RNA, 15 nt, Human
uguaagccugcaagc

SEQ ID NO: 2786712 - RNA, 23 nt, Human
uguaagauuauagauucuaaaga

SEQ ID NO: 2786713 - RNA, 17 nt, Human
uguaagugagugugcug

SEQ ID NO: 2786714 - RNA, 21 nt, Human
uguaagugagugugcugcugu

SEQ ID NO: 2786715 - RNA, 16 nt, Human
uguaagugcuacauaa

SEQ ID NO: 2786716 - RNA, 22 nt, Human
uguaagugcuacauaaauuggc

SEQ ID NO: 2786717 - RNA, 16 nt, Human
uguaagucaguguuga

SEQ ID NO: 2786718 - RNA, 17 nt, Human
uguaagucaguguugag

SEQ ID NO: 2786719 - RNA, 19 nt, Human
uguaagucaguguugagau

SEQ ID NO: 2786720 - RNA, 21 nt, Human
uguaaguaacuucacauuaaa

SEQ ID NO: 2786721 - RNA, 14 nt, Human
uguaaguucacaac

SEQ ID NO: 2786722 - RNA, 19 nt, Human
uguaagcaggagagaaauu

SEQ ID NO: 2786723 - RNA, 19 nt, Human
uguaagauuauagauucua

SEQ ID NO: 2786724 - RNA, 20 nt, Human
uguaagauuauagauucuaa

SEQ ID NO: 2786725 - RNA, 21 nt, Human
uguaagauuauagauucuaaa

SEQ ID NO: 2786726 - RNA, 22 nt, Human
uguaagauuauagauucuaaag

SEQ ID NO: 2786727 - RNA, 18 nt, Human
uguaagauuauagauucu

SEQ ID NO: 2786728 - RNA, 13 nt, Human
uguaagaugucug

SEQ ID NO: 2786729 - RNA, 14 nt, Human
uguaagaugucugu

SEQ ID NO: 2786730 - RNA, 19 nt, Human
uguaagaucguucucugcc

SEQ ID NO: 2786731 - RNA, 20 nt, Human
uguaagaucguucucugccu

SEQ ID NO: 2786732 - RNA, 15 nt, Human
uguaagaguguagaa

SEQ ID NO: 2786733 - RNA, 18 nt, Human
uguaagaguguagaagca

SEQ ID NO: 2786734 - RNA, 19 nt, Human
uguaagaguguagaagcau

SEQ ID NO: 2786735 - RNA, 20 nt, Human
uguaagaguguagaagcauu

SEQ ID NO: 2786736 - RNA, 21 nt, Human
uguaagaguguagaagcauuc

SEQ ID NO: 2786737 - RNA, 22 nt, Human
agguugguuuaaugcaauagaa

SEQ ID NO: 2786738 - RNA, 13 nt, Human
uguaacuuaugua

SEQ ID NO: 2786739 - RNA, 15 nt, Human
uguaacuuauguaga

SEQ ID NO: 2786740 - RNA, 16 nt, Human
uguaacuuauguagau

SEQ ID NO: 2786741 - RNA, 17 nt, Human
uguaacuuauguagaua

SEQ ID NO: 2786742 - RNA, 20 nt, Human
uguaacuuauguagauauuu

SEQ ID NO: 2786743 - RNA, 22 nt, Human
uguaacuuauguagauauuugg

SEQ ID NO: 2786744 - RNA, 23 nt, Human
uguaacuuauguagauauuuggc

SEQ ID NO: 2786745 - RNA, 24 nt, Human
uguaacuugaaccuaugaagcaau

SEQ ID NO: 2786746 - RNA, 22 nt, Human
uguaagaauaggcauuaacaca

SEQ ID NO: 2786747 - RNA, 20 nt, Human
uguaagacaaagguuuuccu

SEQ ID NO: 2786748 - RNA, 11 nt, Human
uguaagacauu

SEQ ID NO: 2786749 - RNA, 16 nt, Human
uguaagaauucagaag

SEQ ID NO: 2786750 - RNA, 18 nt, Human
uguaagaauucagaagac

SEQ ID NO: 2786751 - RNA, 21 nt, Human
uguaagacaaagguuuuccuc

SEQ ID NO: 2786752 - RNA, 20 nt, Human
uguaacuuuuguaagacaaa

SEQ ID NO: 2786753 - RNA, 16 nt, Human
uguaacuuuuguaaga

SEQ ID NO: 2786754 - RNA, 15 nt, Human
uguaacuuuuguaag

SEQ ID NO: 2786755 - RNA, 21 nt, Human
agguggccacuuuaagagaga

SEQ ID NO: 2786756 - RNA, 16 nt, Human
agguggugugaucuua

SEQ ID NO: 2786757 - RNA, 20 nt, Human
agguugaggggcuccuggaa

SEQ ID NO: 2786758 - RNA, 17 nt, Human
agguugaggggcuccug

SEQ ID NO: 2786759 - RNA, 15 nt, Human
aggugguuuuaaagg

SEQ ID NO: 2786760 - RNA, 12 nt, Human
agguugcaggga

SEQ ID NO: 2786761 - RNA, 18 nt, Human
agguugcagggagccgag

SEQ ID NO: 2786762 - RNA, 11 nt, Human
aggucuugcua

SEQ ID NO: 2786763 - RNA, 14 nt, Human
aggucccccugcag

SEQ ID NO: 2786764 - RNA, 15 nt, Human
aggucccccugcagc

SEQ ID NO: 2786765 - RNA, 16 nt, Human
aggucccccugcagcu

SEQ ID NO: 2786766 - RNA, 18 nt, Human
aggucuuugguucagcua

SEQ ID NO: 2786767 - RNA, 20 nt, Human
aggucuuuguaagaacuaaa

SEQ ID NO: 2786768 - RNA, 21 nt, Human
aggucuuuguaagaacuaaag

SEQ ID NO: 2786769 - RNA, 23 nt, Human
aggucuuuguaagaacuaaagaa

SEQ ID NO: 2786770 - RNA, 23 nt, Human
aggucuugaacuccuggccucaa

SEQ ID NO: 2786771 - RNA, 14 nt, Human
aggucccaggcaga

SEQ ID NO: 2786772 - RNA, 16 nt, Human
uguaaauccugccauu

SEQ ID NO: 2786773 - RNA, 15 nt, Human
aggugcaauuucaag

SEQ ID NO: 2786774 - RNA, 23 nt, Human
agguggccucuccuuguggccug

SEQ ID NO: 2786775 - RNA, 21 nt, Human
agguggccuccuugcuuguua

SEQ ID NO: 2786776 - RNA, 17 nt, Human
agguggugucacugucc

SEQ ID NO: 2786777 - RNA, 18 nt, Human
agguggugucacuguccc

SEQ ID NO: 2786778 - RNA, 21 nt, Human
agguggugucacugucccucc

SEQ ID NO: 2786779 - RNA, 23 nt, Human
agguggugucacugucccuccug

SEQ ID NO: 2786780 - RNA, 21 nt, Human
agguggugagaaauuucugug

SEQ ID NO: 2786781 - RNA, 15 nt, Human
agguggugcuuacau

SEQ ID NO: 2786782 - RNA, 21 nt, Human
aggugcaauuucaagguucua

SEQ ID NO: 2786783 - RNA, 22 nt, Human
aggugcaauuucaagguucuaa

SEQ ID NO: 2786784 - RNA, 16 nt, Human
aggugcaauuucaagg

SEQ ID NO: 2786785 - RNA, 18 nt, Human
aggugcaauuucaagguu

SEQ ID NO: 2786786 - RNA, 19 nt, Human
aggugcaauuucaagguuc

SEQ ID NO: 2786787 - RNA, 20 nt, Human
aggugcaauuucaagguucu

SEQ ID NO: 2786788 - RNA, 13 nt, Human
aggugcagaggaa

SEQ ID NO: 2786789 - RNA, 16 nt, Human
aggugcaguggcucac

SEQ ID NO: 2786790 - RNA, 11 nt, Human
aggugcagugg

SEQ ID NO: 2786791 - RNA, 17 nt, Human
agguggccacuccagac

SEQ ID NO: 2786792 - RNA, 14 nt, Human
agguggccacucca

SEQ ID NO: 2786793 - RNA, 17 nt, Human
ugucaagaguaguuaua

SEQ ID NO: 2786794 - RNA, 20 nt, Human
ugucaagaguaguuauauaa

SEQ ID NO: 2786795 - RNA, 22 nt, Human
ugucaagaguaguuauauaauu

SEQ ID NO: 2786796 - RNA, 19 nt, Human
ugucaagagggucugagga

SEQ ID NO: 2786797 - RNA, 18 nt, Human
uguauuuuucaauaauaa

SEQ ID NO: 2786798 - RNA, 14 nt, Human
uguauuuuucuaca

SEQ ID NO: 2786799 - RNA, 19 nt, Human
uguauuuuucuacauuauu

SEQ ID NO: 2786800 - RNA, 22 nt, Human
uguauuuuucuacauuauugcu

SEQ ID NO: 2786801 - RNA, 14 nt, Human
ugucaagaaagagc

SEQ ID NO: 2786802 - RNA, 18 nt, Human
uguauuuuuucuugcauu

SEQ ID NO: 2786803 - RNA, 19 nt, Human
uguauuuuuucuugcauug

SEQ ID NO: 2786804 - RNA, 20 nt, Human
uguauuuuuucuugcauuga

SEQ ID NO: 2786805 - RNA, 21 nt, Human
uguauuuuuucuugcauugac

SEQ ID NO: 2786806 - RNA, 19 nt, Human
ugucaagaagaugaucaga

SEQ ID NO: 2786807 - RNA, 16 nt, Human
uguauuuuuauauaau

SEQ ID NO: 2786808 - RNA, 23 nt, Human
uguauuuuuauauaauaucuaaa

SEQ ID NO: 2786809 - RNA, 14 nt, Human
uguauuuuguguga

SEQ ID NO: 2786810 - RNA, 15 nt, Human
uguauuuugugugac

SEQ ID NO: 2786811 - RNA, 16 nt, Human
uguauuuugugugacc

SEQ ID NO: 2786812 - RNA, 19 nt, Human
uguauuuugugugaccaac

SEQ ID NO: 2786813 - RNA, 17 nt, Human
uguauuuuuaaagcaug

SEQ ID NO: 2786814 - RNA, 21 nt, Human
uguauuauuucauuauguaaa

SEQ ID NO: 2786815 - RNA, 13 nt, Human
uguauuauuucau

SEQ ID NO: 2786816 - RNA, 20 nt, Human
uguauuauuucauuauguaa

SEQ ID NO: 2786817 - RNA, 14 nt, Human
uguauuauuuauaa

SEQ ID NO: 2786818 - RNA, 15 nt, Human
uguauuauuuauaau

SEQ ID NO: 2786819 - RNA, 12 nt, Human
uguauuauugcu

SEQ ID NO: 2786820 - RNA, 14 nt, Human
uguauuauugcugu

SEQ ID NO: 2786821 - RNA, 15 nt, Human
uguauuauugcuguu

SEQ ID NO: 2786822 - RNA, 18 nt, Human
uguauuauugcuguugcu

SEQ ID NO: 2786823 - RNA, 16 nt, Human
uguaguaauugacaug

SEQ ID NO: 2786824 - RNA, 15 nt, Human
uguaguaauugacau

SEQ ID NO: 2786825 - RNA, 14 nt, Human
uguaguaauugaca

SEQ ID NO: 2786826 - RNA, 19 nt, Human
uguaguaaagccguuguuu

SEQ ID NO: 2786827 - RNA, 20 nt, Human
uguaguaaagccguuguuua

SEQ ID NO: 2786828 - RNA, 22 nt, Human
uguaguaaagccguuguuuacu

SEQ ID NO: 2786829 - RNA, 17 nt, Human
ugucaaugauuauuuuc

SEQ ID NO: 2786830 - RNA, 18 nt, Human
aguagcugggauuuuaaa

SEQ ID NO: 2786831 - RNA, 21 nt, Human
aguagcugggauuuuaaacua

SEQ ID NO: 2786832 - RNA, 22 nt, Human
aguagcugggauuuuaaacuag

SEQ ID NO: 2786833 - RNA, 23 nt, Human
aguagcugggauuuuaaacuaga

SEQ ID NO: 2786834 - RNA, 13 nt, Human
aguagcuugcucc

SEQ ID NO: 2786835 - RNA, 14 nt, Human
aguagcuugcuccc

SEQ ID NO: 2786836 - RNA, 16 nt, Human
aguagcuugcucccug

SEQ ID NO: 2786837 - RNA, 17 nt, Human
aguagcuugcucccugu

SEQ ID NO: 2786838 - RNA, 18 nt, Human
aguagcuugcucccugug

SEQ ID NO: 2786839 - RNA, 19 nt, Human
aguagcuugcucccugugu

SEQ ID NO: 2786840 - RNA, 23 nt, Human
aguagcuugcucccuguguccac

SEQ ID NO: 2786841 - RNA, 18 nt, Human
aguagucagcuagaucau

SEQ ID NO: 2786842 - RNA, 18 nt, Human
aguaguucuguuuggugu

SEQ ID NO: 2786843 - RNA, 19 nt, Human
aguaguucucuugguguua

SEQ ID NO: 2786844 - RNA, 13 nt, Human
aguagucugcuca

SEQ ID NO: 2786845 - RNA, 14 nt, Human
aguagucugcucac

SEQ ID NO: 2786846 - RNA, 13 nt, Human
aguaguuauauaa

SEQ ID NO: 2786847 - RNA, 18 nt, Human
aguaguuauauaauuguu

SEQ ID NO: 2786848 - RNA, 12 nt, Human
aguaguuaaaaa

SEQ ID NO: 2786849 - RNA, 14 nt, Human
aguaguuaaaaaaa

SEQ ID NO: 2786850 - RNA, 23 nt, Human
aguaguuaaaaaaaaaaaaagga

SEQ ID NO: 2786851 - RNA, 16 nt, Human
aguaguccuuggcaua

SEQ ID NO: 2786852 - RNA, 17 nt, Human
ugucaauccagauggug

SEQ ID NO: 2786853 - RNA, 21 nt, Human
aguagggaggaccacaggugu

SEQ ID NO: 2786854 - RNA, 18 nt, Human
aguagggcuuaguguuuu

SEQ ID NO: 2786855 - RNA, 23 nt, Human
aguaggggaggagcacaguuugu

SEQ ID NO: 2786856 - RNA, 13 nt, Human
aguauuucagugu

SEQ ID NO: 2786857 - RNA, 14 nt, Human
aguauuucagugua

SEQ ID NO: 2786858 - RNA, 17 nt, Human
aguauuucaguguaguu

SEQ ID NO: 2786859 - RNA, 20 nt, Human
aguauuucaguguaguuaau

SEQ ID NO: 2786860 - RNA, 23 nt, Human
aguauuucaguguaguuaauuua

SEQ ID NO: 2786861 - RNA, 16 nt, Human
aguauuugagaguucu

SEQ ID NO: 2786862 - RNA, 23 nt, Human
aguauuugaaacugaauguuuau

SEQ ID NO: 2786863 - RNA, 12 nt, Human
aguauuugaauu

SEQ ID NO: 2786864 - RNA, 13 nt, Human
aguauuugaauua

SEQ ID NO: 2786865 - RNA, 15 nt, Human
aguauuugaauuaaa

SEQ ID NO: 2786866 - RNA, 16 nt, Human
aguauuugaauuaaaa

SEQ ID NO: 2786867 - RNA, 17 nt, Human
aguauuugaauuaaaac

SEQ ID NO: 2786868 - RNA, 20 nt, Human
aguauuugaauuaaaacuuc

SEQ ID NO: 2786869 - RNA, 21 nt, Human
aguauuugaauuaaaacuucu

SEQ ID NO: 2786870 - RNA, 22 nt, Human
aguauuugaauuaaaacuucuu

SEQ ID NO: 2786871 - RNA, 17 nt, Human
aguauuugggaagugaa

SEQ ID NO: 2786872 - RNA, 13 nt, Human
aguauuugauuca

SEQ ID NO: 2786873 - RNA, 17 nt, Human
aguauuugauucaaaau

SEQ ID NO: 2786874 - RNA, 19 nt, Human
aguauuugauucaaaauau

SEQ ID NO: 2786875 - RNA, 20 nt, Human
aguauuugauucaaaauauu

SEQ ID NO: 2786876 - RNA, 23 nt, Human
aguauuugauucaaaauauuuaa

SEQ ID NO: 2786877 - RNA, 14 nt, Human
agucaccaagccca

SEQ ID NO: 2786878 - RNA, 13 nt, Human
agucaccaagccc

SEQ ID NO: 2786879 - RNA, 14 nt, Human
aguaugucugaugg

SEQ ID NO: 2786880 - RNA, 14 nt, Human
aguaugugccagga

SEQ ID NO: 2786881 - RNA, 21 nt, Human
aguaugugccaggaaacucuu

SEQ ID NO: 2786882 - RNA, 21 nt, Human
aguauguaaaguauguaaaca

SEQ ID NO: 2786883 - RNA, 16 nt, Human
aguauuucaugcuggg

SEQ ID NO: 2786884 - RNA, 13 nt, Human
aguauuucauugc

SEQ ID NO: 2786885 - RNA, 15 nt, Human
aguauuucauugccu

SEQ ID NO: 2786886 - RNA, 19 nt, Human
aguauuucauugccugugu

SEQ ID NO: 2786887 - RNA, 21 nt, Human
aguauuucauugccuguguau

SEQ ID NO: 2786888 - RNA, 18 nt, Human
aguauuuccacuuguucu

SEQ ID NO: 2786889 - RNA, 22 nt, Human
aguauuuccacuuguucucagg

SEQ ID NO: 2786890 - RNA, 15 nt, Human
aguauaaaaacuuga

SEQ ID NO: 2786891 - RNA, 17 nt, Human
aguauaaaauacaacaa

SEQ ID NO: 2786892 - RNA, 21 nt, Human
aguauaaaauacaacaaagga

SEQ ID NO: 2786893 - RNA, 12 nt, Human
aguaguuuguau

SEQ ID NO: 2786894 - RNA, 17 nt, Human
aguaguuuguauaacuu

SEQ ID NO: 2786895 - RNA, 21 nt, Human
aguaguuuuuacagcuguguu

SEQ ID NO: 2786896 - RNA, 15 nt, Human
aguauguaaaguaug

SEQ ID NO: 2786897 - RNA, 16 nt, Human
aguauguaaaguaugu

SEQ ID NO: 2786898 - RNA, 17 nt, Human
aguauaaccauaugaua

SEQ ID NO: 2786899 - RNA, 19 nt, Human
aguauaaccauaugauacu

SEQ ID NO: 2786900 - RNA, 15 nt, Human
ugucaguauccaggc

SEQ ID NO: 2786901 - RNA, 16 nt, Human
ugucaguauuauucua

SEQ ID NO: 2786902 - RNA, 14 nt, Human
ugucaguauccagg

SEQ ID NO: 2786903 - RNA, 16 nt, Human
ugucagguggggcagc

SEQ ID NO: 2786904 - RNA, 22 nt, Human
ugucaggggcggggagggugac

SEQ ID NO: 2786905 - RNA, 14 nt, Human
ugucaggccugugu

SEQ ID NO: 2786906 - RNA, 17 nt, Human
ugucagcucucaucuga

SEQ ID NO: 2786907 - RNA, 20 nt, Human
ugucagcucucaucugaggc

SEQ ID NO: 2786908 - RNA, 17 nt, Human
ugucaggaacagaagga

SEQ ID NO: 2786909 - RNA, 16 nt, Human
ugucaggaacagaagg

SEQ ID NO: 2786910 - RNA, 20 nt, Human
ugucaggaacagaaggauga

SEQ ID NO: 2786911 - RNA, 18 nt, Human
ugucaggaacagaaggau

SEQ ID NO: 2786912 - RNA, 16 nt, Human
agucacugauguacaa

SEQ ID NO: 2786913 - RNA, 23 nt, Human
agucacugauguacaauuaaaaa

SEQ ID NO: 2786914 - RNA, 13 nt, Human
agucacugcacag

SEQ ID NO: 2786915 - RNA, 17 nt, Human
agucacugccacuuugc

SEQ ID NO: 2786916 - RNA, 18 nt, Human
agucacugccacuuugca

SEQ ID NO: 2786917 - RNA, 19 nt, Human
agucacugccacuuugcac

SEQ ID NO: 2786918 - RNA, 20 nt, Human
agucacugccacuuugcaca

SEQ ID NO: 2786919 - RNA, 21 nt, Human
agucacugccacuuugcacau

SEQ ID NO: 2786920 - RNA, 22 nt, Human
agucagagccccuacagcauug

SEQ ID NO: 2786921 - RNA, 23 nt, Human
agucagagccccuacagcauugu

SEQ ID NO: 2786922 - RNA, 20 nt, Human
ugucuaaacaaugcugauuu

SEQ ID NO: 2786923 - RNA, 21 nt, Human
ugucuaaacaaugcugauuug

SEQ ID NO: 2786924 - RNA, 15 nt, Human
agucagacugcuggg

SEQ ID NO: 2786925 - RNA, 16 nt, Human
agucagacagaugugg

SEQ ID NO: 2786926 - RNA, 21 nt, Human
ugucguuaaaaaguuguuugu

SEQ ID NO: 2786927 - RNA, 23 nt, Human
ugucguuaaaaaguuguuuguuu

SEQ ID NO: 2786928 - RNA, 13 nt, Human
ugucuaaaaacac

SEQ ID NO: 2786929 - RNA, 15 nt, Human
ugucuaaaaaccaga

SEQ ID NO: 2786930 - RNA, 16 nt, Human
ugucuaaacaaugcug

SEQ ID NO: 2786931 - RNA, 17 nt, Human
ugucuaaacaaugcuga

SEQ ID NO: 2786932 - RNA, 15 nt, Human
ugucgcccagucugg

SEQ ID NO: 2786933 - RNA, 14 nt, Human
ugucgcccagucug

SEQ ID NO: 2786934 - RNA, 23 nt, Human
ugucgugagugucucuugucuaa

SEQ ID NO: 2786935 - RNA, 23 nt, Human
ugucguagccaaggugggcugag

SEQ ID NO: 2786936 - RNA, 21 nt, Human
ugucguggguguguguagcca

SEQ ID NO: 2786937 - RNA, 15 nt, Human
ugucgggcaccagcc

SEQ ID NO: 2786938 - RNA, 19 nt, Human
ugucgggcaccagccagcg

SEQ ID NO: 2786939 - RNA, 12 nt, Human
ugucauuugcuu

SEQ ID NO: 2786940 - RNA, 13 nt, Human
ugucauuuguuaa

SEQ ID NO: 2786941 - RNA, 16 nt, Human
ugucauuuguuaaaau

SEQ ID NO: 2786942 - RNA, 17 nt, Human
ugucauuuguugugaug

SEQ ID NO: 2786943 - RNA, 18 nt, Human
ugucauuuguugugaugu

SEQ ID NO: 2786944 - RNA, 15 nt, Human
uguccgcuggguggu

SEQ ID NO: 2786945 - RNA, 20 nt, Human
uguccgcugggugguacccu

SEQ ID NO: 2786946 - RNA, 17 nt, Human
uguccggaaugccaccc

SEQ ID NO: 2786947 - RNA, 19 nt, Human
uguccuaaggaaccuuccu

SEQ ID NO: 2786948 - RNA, 16 nt, Human
uguccuaaggaaccuu

SEQ ID NO: 2786949 - RNA, 22 nt, Human
uguccgcugggugguacccucu

SEQ ID NO: 2786950 - RNA, 23 nt, Human
uguccgcugggugguacccucug

SEQ ID NO: 2786951 - RNA, 16 nt, Human
uguccuacccacccuc

SEQ ID NO: 2786952 - RNA, 13 nt, Human
uguccuuucccuu

SEQ ID NO: 2786953 - RNA, 14 nt, Human
uguccuuucccuuc

SEQ ID NO: 2786954 - RNA, 14 nt, Human
uguccuaauucuuc

SEQ ID NO: 2786955 - RNA, 16 nt, Human
uguccuaauucuucug

SEQ ID NO: 2786956 - RNA, 18 nt, Human
uguccuaauucuucuguc

SEQ ID NO: 2786957 - RNA, 19 nt, Human
uguccuaauucuucugucc

SEQ ID NO: 2786958 - RNA, 20 nt, Human
uguccuaauucuucuguccu

SEQ ID NO: 2786959 - RNA, 16 nt, Human
uguccuuuugucuucu

SEQ ID NO: 2786960 - RNA, 23 nt, Human
uguccuuucccuucaguacccuc

SEQ ID NO: 2786961 - RNA, 18 nt, Human
ugucaguauuucagugua

SEQ ID NO: 2786962 - RNA, 20 nt, Human
ugucgaaaagagucuuccaa

SEQ ID NO: 2786963 - RNA, 22 nt, Human
ugucgaaaagagucuuccaauu

SEQ ID NO: 2786964 - RNA, 16 nt, Human
ugucgcccaggcugga

SEQ ID NO: 2786965 - RNA, 15 nt, Human
ugucgcccaggcugg

SEQ ID NO: 2786966 - RNA, 21 nt, Human
agucccugacucucugugacc

SEQ ID NO: 2786967 - RNA, 15 nt, Human
agucccuauguauuu

SEQ ID NO: 2786968 - RNA, 19 nt, Human
agucccugacucucuguga

SEQ ID NO: 2786969 - RNA, 20 nt, Human
agucccuauguauuugcagu

SEQ ID NO: 2786970 - RNA, 20 nt, Human
aguccagaaacuguucccac

SEQ ID NO: 2786971 - RNA, 14 nt, Human
agucagggcccaga

SEQ ID NO: 2786972 - RNA, 15 nt, Human
agucagggcccagag

SEQ ID NO: 2786973 - RNA, 16 nt, Human
agucagggcccagagg

SEQ ID NO: 2786974 - RNA, 20 nt, Human
agucagggcccagaggcuga

SEQ ID NO: 2786975 - RNA, 22 nt, Human
agucaggaguccaagaccagac

SEQ ID NO: 2786976 - RNA, 13 nt, Human
aguccagccugga

SEQ ID NO: 2786977 - RNA, 13 nt, Human
aguccaggcacag

SEQ ID NO: 2786978 - RNA, 14 nt, Human
aguccaggcacagg

SEQ ID NO: 2786979 - RNA, 16 nt, Human
aguccaggcacaggau

SEQ ID NO: 2786980 - RNA, 19 nt, Human
aguccaggcacaggaugcu

SEQ ID NO: 2786981 - RNA, 15 nt, Human
aguccagccuggaga

SEQ ID NO: 2786982 - RNA, 13 nt, Human
aguccaggaacaa

SEQ ID NO: 2786983 - RNA, 23 nt, Human
aguccgaaagggacuuggaagcu

SEQ ID NO: 2786984 - RNA, 23 nt, Human
agucccuuccccucccuggcucc

SEQ ID NO: 2786985 - RNA, 15 nt, Human
aguccgcagaagccc

SEQ ID NO: 2786986 - RNA, 22 nt, Human
agucccuuccccucccuggcuc

SEQ ID NO: 2786987 - RNA, 21 nt, Human
agucccuuccccucccuggcu

SEQ ID NO: 2786988 - RNA, 20 nt, Human
agucccuuccccucccuggc

SEQ ID NO: 2786989 - RNA, 19 nt, Human
agucccuuccccucccugg

SEQ ID NO: 2786990 - RNA, 17 nt, Human
agucccuuccccucccu

SEQ ID NO: 2786991 - RNA, 15 nt, Human
agucccuuccccucc

SEQ ID NO: 2786992 - RNA, 14 nt, Human
agucccuuccccuc

SEQ ID NO: 2786993 - RNA, 13 nt, Human
agucccuuccccu

SEQ ID NO: 2786994 - RNA, 18 nt, Human
aguccguguggauccaau

SEQ ID NO: 2786995 - RNA, 19 nt, Human
aguccguguggauccaaug

SEQ ID NO: 2786996 - RNA, 18 nt, Human
aguccgcagaagcccuga

SEQ ID NO: 2786997 - RNA, 17 nt, Human
aguccggacccaccuca

SEQ ID NO: 2786998 - RNA, 22 nt, Human
aguccggacccaccucaccccg

SEQ ID NO: 2786999 - RNA, 17 nt, Human
aguccgcagaagcccug

SEQ ID NO: 2787000 - RNA, 17 nt, Human
agucucacuguugccca

SEQ ID NO: 2787001 - RNA, 16 nt, Human
agucucacuguugccc

SEQ ID NO: 2787002 - RNA, 19 nt, Human
agucucaaaaauacaaaau

SEQ ID NO: 2787003 - RNA, 20 nt, Human
agucucaaaaauacaaaaua

SEQ ID NO: 2787004 - RNA, 21 nt, Human
agucucaaaaauacaaaauaa

SEQ ID NO: 2787005 - RNA, 16 nt, Human
agucuagauucucugg

SEQ ID NO: 2787006 - RNA, 13 nt, Human
agucuagauucuc

SEQ ID NO: 2787007 - RNA, 14 nt, Human
agucuagauucucu

SEQ ID NO: 2787008 - RNA, 20 nt, Human
agucuagauucucuggcugu

SEQ ID NO: 2787009 - RNA, 16 nt, Human
agucuagcacucauuu

SEQ ID NO: 2787010 - RNA, 20 nt, Human
agucuagcacucauuuucua

SEQ ID NO: 2787011 - RNA, 13 nt, Human
agucguuuuccaa

SEQ ID NO: 2787012 - RNA, 14 nt, Human
agucguuuuccaaa

SEQ ID NO: 2787013 - RNA, 20 nt, Human
agucuaaagauggaguuucu

SEQ ID NO: 2787014 - RNA, 21 nt, Human
agucuaaagauggaguuucua

SEQ ID NO: 2787015 - RNA, 20 nt, Human
agucuacgcucuccuuucuu

SEQ ID NO: 2787016 - RNA, 22 nt, Human
agucuaaagauggaguuucuaa

SEQ ID NO: 2787017 - RNA, 23 nt, Human
agucuagauguuuauucuucuag

SEQ ID NO: 2787018 - RNA, 14 nt, Human
agucuagauucaaa

SEQ ID NO: 2787019 - RNA, 15 nt, Human
agucuagauucaaag

SEQ ID NO: 2787020 - RNA, 18 nt, Human
agucuagauucaaagguu

SEQ ID NO: 2787021 - RNA, 20 nt, Human
agucuagauucaaagguucu

SEQ ID NO: 2787022 - RNA, 21 nt, Human
agucuagauucaaagguucua

SEQ ID NO: 2787023 - RNA, 22 nt, Human
agucuagauucaaagguucuag

SEQ ID NO: 2787024 - RNA, 14 nt, Human
agucuagaaguugu

SEQ ID NO: 2787025 - RNA, 22 nt, Human
agggcagggaccacacccugua

SEQ ID NO: 2787026 - RNA, 12 nt, Human
agggcagcccca

SEQ ID NO: 2787027 - RNA, 13 nt, Human
agggcagccccac

SEQ ID NO: 2787028 - RNA, 11 nt, Human
agggcaggugg

SEQ ID NO: 2787029 - RNA, 12 nt, Human
agggcagguggg

SEQ ID NO: 2787030 - RNA, 15 nt, Human
agggcagguggggug

SEQ ID NO: 2787031 - RNA, 19 nt, Human
agggcagguggggugagaa

SEQ ID NO: 2787032 - RNA, 12 nt, Human
agggccaggacu

SEQ ID NO: 2787033 - RNA, 17 nt, Human
agggccaggacugagcc

SEQ ID NO: 2787034 - RNA, 19 nt, Human
agggccaggacugagcccc

SEQ ID NO: 2787035 - RNA, 21 nt, Human
agggccaggacugagccccgc

SEQ ID NO: 2787036 - RNA, 10 nt, Human
agggccaggc

SEQ ID NO: 2787037 - RNA, 12 nt, Human
agggccaggcag

SEQ ID NO: 2787038 - RNA, 13 nt, Human
agggccaggcagg

SEQ ID NO: 2787039 - RNA, 14 nt, Human
agggccaggcaggu

SEQ ID NO: 2787040 - RNA, 21 nt, Human
agggccaggcaggugccugga

SEQ ID NO: 2787041 - RNA, 22 nt, Human
agggccaggcaggugccuggac

SEQ ID NO: 2787042 - RNA, 18 nt, Human
agggcccagagagggugg

SEQ ID NO: 2787043 - RNA, 18 nt, Human
agggccaguccugccugg

SEQ ID NO: 2787044 - RNA, 17 nt, Human
agggccaguccugccug

SEQ ID NO: 2787045 - RNA, 23 nt, Human
agggcccagagaggguggugacc

SEQ ID NO: 2787046 - RNA, 16 nt, Human
agggccaguccugccu

SEQ ID NO: 2787047 - RNA, 13 nt, Human
agggccaguccug

SEQ ID NO: 2787048 - RNA, 22 nt, Human
agggccagggcccugcagaggg

SEQ ID NO: 2787049 - RNA, 19 nt, Human
agggccagggcccugcaga

SEQ ID NO: 2787050 - RNA, 15 nt, Human
agggccagggcccug

SEQ ID NO: 2787051 - RNA, 14 nt, Human
agggccagggcccu

SEQ ID NO: 2787052 - RNA, 12 nt, Human
agggccagggcc

SEQ ID NO: 2787053 - RNA, 20 nt, Human
agggccgaggaggugccugg

SEQ ID NO: 2787054 - RNA, 21 nt, Human
agggccgaggaggugccugga

SEQ ID NO: 2787055 - RNA, 18 nt, Human
agggcccagagcaggaag

SEQ ID NO: 2787056 - RNA, 15 nt, Human
agggcccagagcagg

SEQ ID NO: 2787057 - RNA, 17 nt, Human
agggcccagagcaggaa

SEQ ID NO: 2787058 - RNA, 12 nt, Human
agggcccagagc

SEQ ID NO: 2787059 - RNA, 13 nt, Human
agggcccagagca

SEQ ID NO: 2787060 - RNA, 14 nt, Human
agggcccagagcag

SEQ ID NO: 2787061 - RNA, 23 nt, Human
ugggcccaagacagaugccccag

SEQ ID NO: 2787062 - RNA, 22 nt, Human
ugggcccaagacagaugcccca

SEQ ID NO: 2787063 - RNA, 14 nt, Human
ugggcccagaucug

SEQ ID NO: 2787064 - RNA, 13 nt, Human
ugggcccagaucu

SEQ ID NO: 2787065 - RNA, 19 nt, Human
agggagugacagaggcagc

SEQ ID NO: 2787066 - RNA, 18 nt, Human
agggagugacagaggcag

SEQ ID NO: 2787067 - RNA, 17 nt, Human
agggagugacagaggca

SEQ ID NO: 2787068 - RNA, 17 nt, Human
agggaggugaccccagg

SEQ ID NO: 2787069 - RNA, 16 nt, Human
agggaggucaggcccu

SEQ ID NO: 2787070 - RNA, 17 nt, Human
agggaggucaggcccug

SEQ ID NO: 2787071 - RNA, 18 nt, Human
agggaggucaggcccugg

SEQ ID NO: 2787072 - RNA, 22 nt, Human
agggaggucaggcccuggaacu

SEQ ID NO: 2787073 - RNA, 16 nt, Human
ugggcaacccccagcc

SEQ ID NO: 2787074 - RNA, 17 nt, Human
ugggauuucuaugcagu

SEQ ID NO: 2787075 - RNA, 14 nt, Human
ugggauuuaauuuc

SEQ ID NO: 2787076 - RNA, 16 nt, Human
ugggauuuaauuucca

SEQ ID NO: 2787077 - RNA, 17 nt, Human
ugggauuuaauuuccag

SEQ ID NO: 2787078 - RNA, 10 nt, Human
ugggauugcu

SEQ ID NO: 2787079 - RNA, 23 nt, Human
ugggauugacagaagcuucugcc

SEQ ID NO: 2787080 - RNA, 16 nt, Human
ugggaggucaggaaac

SEQ ID NO: 2787081 - RNA, 17 nt, Human
ugggaggucaggaaacu

SEQ ID NO: 2787082 - RNA, 14 nt, Human
ugggaggucuugcu

SEQ ID NO: 2787083 - RNA, 17 nt, Human
ugggauucaggaaugug

SEQ ID NO: 2787084 - RNA, 19 nt, Human
ugggagguggagguugcau

SEQ ID NO: 2787085 - RNA, 16 nt, Human
aggccuuccucucucc

SEQ ID NO: 2787086 - RNA, 18 nt, Human
aggccuuccucucuccag

SEQ ID NO: 2787087 - RNA, 19 nt, Human
aggccuuccucucuccaga

SEQ ID NO: 2787088 - RNA, 13 nt, Human
aggccuucuccuc

SEQ ID NO: 2787089 - RNA, 22 nt, Human
aggccuucuccuccccacccgc

SEQ ID NO: 2787090 - RNA, 15 nt, Human
aggccuuccagcugc

SEQ ID NO: 2787091 - RNA, 16 nt, Human
aggccuuccagcugcu

SEQ ID NO: 2787092 - RNA, 17 nt, Human
aggccuuccagcugcug

SEQ ID NO: 2787093 - RNA, 18 nt, Human
aggccuuccagcugcugu

SEQ ID NO: 2787094 - RNA, 20 nt, Human
aggccuuccagcugcugucu

SEQ ID NO: 2787095 - RNA, 15 nt, Human
aggccuuccucucuc

SEQ ID NO: 2787096 - RNA, 19 nt, Human
aggccuuaucuccaagacc

SEQ ID NO: 2787097 - RNA, 18 nt, Human
aggccuuaugaggguccu

SEQ ID NO: 2787098 - RNA, 17 nt, Human
aggccuuaucuccaaga

SEQ ID NO: 2787099 - RNA, 20 nt, Human
ugggcaacccccagccugcu

SEQ ID NO: 2787100 - RNA, 17 nt, Human
ugggcaacccccagccu

SEQ ID NO: 2787101 - RNA, 22 nt, Human
ugggcacacgccucccacuggg

SEQ ID NO: 2787102 - RNA, 20 nt, Human
ugggcacccacccugggacc

SEQ ID NO: 2787103 - RNA, 16 nt, Human
ugggcaccccacugca

SEQ ID NO: 2787104 - RNA, 14 nt, Human
ugggcacccacccu

SEQ ID NO: 2787105 - RNA, 16 nt, Human
ugggcacccacccugg

SEQ ID NO: 2787106 - RNA, 17 nt, Human
ugggccagaauuucaaa

SEQ ID NO: 2787107 - RNA, 16 nt, Human
ugggcacacucugcca

SEQ ID NO: 2787108 - RNA, 15 nt, Human
ugggccacuguggug

SEQ ID NO: 2787109 - RNA, 17 nt, Human
ugggccaccccuccuag

SEQ ID NO: 2787110 - RNA, 22 nt, Human
ugggccagccccuccaucugua

SEQ ID NO: 2787111 - RNA, 14 nt, Human
ugggccagccccuc

SEQ ID NO: 2787112 - RNA, 13 nt, Human
ugggccagccccu

SEQ ID NO: 2787113 - RNA, 18 nt, Human
ugggccagaauuucaaac

SEQ ID NO: 2787114 - RNA, 24 nt, Human
ugggccauguccaaagaggcugcc

SEQ ID NO: 2787115 - RNA, 18 nt, Human
ugggcuggaacagauuca

SEQ ID NO: 2787116 - RNA, 16 nt, Human
ugggcugcuccucaug

SEQ ID NO: 2787117 - RNA, 15 nt, Human
ugggcugcuccucau

SEQ ID NO: 2787118 - RNA, 11 nt, Human
uggggacccac

SEQ ID NO: 2787119 - RNA, 13 nt, Human
uggggacccaggc

SEQ ID NO: 2787120 - RNA, 14 nt, Human
uggggacccaggcu

SEQ ID NO: 2787121 - RNA, 21 nt, Human
uggggacccaggcuccgcccu

SEQ ID NO: 2787122 - RNA, 22 nt, Human
uggggacccaggcuccgcccuu

SEQ ID NO: 2787123 - RNA, 17 nt, Human
uggggacagagcagaac

SEQ ID NO: 2787124 - RNA, 19 nt, Human
uggggacagauucagucuu

SEQ ID NO: 2787125 - RNA, 21 nt, Human
uggggacagauucagucuugc

SEQ ID NO: 2787126 - RNA, 21 nt, Human
ugggcugaccccgguggcggc

SEQ ID NO: 2787127 - RNA, 13 nt, Human
ugggcucuuccaa

SEQ ID NO: 2787128 - RNA, 12 nt, Human
ugggcugagccc

SEQ ID NO: 2787129 - RNA, 16 nt, Human
ugggcugagcccuggc

SEQ ID NO: 2787130 - RNA, 15 nt, Human
ugggcugagcccugg

SEQ ID NO: 2787131 - RNA, 18 nt, Human
ugggcugagcccuggcag

SEQ ID NO: 2787132 - RNA, 17 nt, Human
ugggcugagcccuggca

SEQ ID NO: 2787133 - RNA, 17 nt, Human
ugggcugcccuggugcu

SEQ ID NO: 2787134 - RNA, 19 nt, Human
ugggcugcccuggugcugc

SEQ ID NO: 2787135 - RNA, 20 nt, Human
ugggcugcccuggugcugcc

SEQ ID NO: 2787136 - RNA, 17 nt, Human
ugggcugcuacccagaa

SEQ ID NO: 2787137 - RNA, 16 nt, Human
ugggcugcccuggugc

SEQ ID NO: 2787138 - RNA, 21 nt, Human
ugggcugcccuggugcugcca

SEQ ID NO: 2787139 - RNA, 15 nt, Human
agggccugagccugg

SEQ ID NO: 2787140 - RNA, 15 nt, Human
agggcuuacuauuuc

SEQ ID NO: 2787141 - RNA, 20 nt, Human
agggccucaaaggcccgcuc

SEQ ID NO: 2787142 - RNA, 16 nt, Human
uggggaggugucacau

SEQ ID NO: 2787143 - RNA, 16 nt, Human
uggggagguguucacu

SEQ ID NO: 2787144 - RNA, 23 nt, Human
uggggagguguucacugaagacg

SEQ ID NO: 2787145 - RNA, 19 nt, Human
uggggaguaggacauacca

SEQ ID NO: 2787146 - RNA, 12 nt, Human
uggggagaaagu

SEQ ID NO: 2787147 - RNA, 15 nt, Human
uggggaggggcugug

SEQ ID NO: 2787148 - RNA, 21 nt, Human
uggggacgcuccgcugccgug

SEQ ID NO: 2787149 - RNA, 18 nt, Human
uggggaccugguacccuc

SEQ ID NO: 2787150 - RNA, 18 nt, Human
uggggcggugagagggga

SEQ ID NO: 2787151 - RNA, 14 nt, Human
uggggcgaggcagg

SEQ ID NO: 2787152 - RNA, 15 nt, Human
uggggcucugugcag

SEQ ID NO: 2787153 - RNA, 22 nt, Human
uggggcucucugaguccuggcc

SEQ ID NO: 2787154 - RNA, 23 nt, Human
uggggcucuaggguugcuggagc

SEQ ID NO: 2787155 - RNA, 23 nt, Human
uggggcuaggaaauccagggugg

SEQ ID NO: 2787156 - RNA, 14 nt, Human
agggcuugugaaca

SEQ ID NO: 2787157 - RNA, 18 nt, Human
uggggccuacagcuuuga

SEQ ID NO: 2787158 - RNA, 16 nt, Human
uggggccuagacucug

SEQ ID NO: 2787159 - RNA, 12 nt, Human
uggggccuuggu

SEQ ID NO: 2787160 - RNA, 13 nt, Human
uggggccugugga

SEQ ID NO: 2787161 - RNA, 14 nt, Human
uggggccuguggaa

SEQ ID NO: 2787162 - RNA, 16 nt, Human
uggggccuguggaaug

SEQ ID NO: 2787163 - RNA, 21 nt, Human
uggggccuguggaaugagugu

SEQ ID NO: 2787164 - RNA, 22 nt, Human
uggggccuguggaaugagugug

SEQ ID NO: 2787165 - RNA, 20 nt, Human
ugggguacccacugcucugg

SEQ ID NO: 2787166 - RNA, 21 nt, Human
ugggguaccaagagacuccuu

SEQ ID NO: 2787167 - RNA, 16 nt, Human
ugggguacccacugcu

SEQ ID NO: 2787168 - RNA, 15 nt, Human
ugggguacccacugc

SEQ ID NO: 2787169 - RNA, 16 nt, Human
ugggguagggcugacu

SEQ ID NO: 2787170 - RNA, 13 nt, Human
ugggguagggcug

SEQ ID NO: 2787171 - RNA, 14 nt, Human
ugggguacccacug

SEQ ID NO: 2787172 - RNA, 17 nt, Human
ugggggaagaccuggca

SEQ ID NO: 2787173 - RNA, 12 nt, Human
uggggcuuggcg

SEQ ID NO: 2787174 - RNA, 16 nt, Human
uggggcuuggcgugga

SEQ ID NO: 2787175 - RNA, 18 nt, Human
uggggcuuggcguggagc

SEQ ID NO: 2787176 - RNA, 22 nt, Human
uggggcuuucguccacagcuuc

SEQ ID NO: 2787177 - RNA, 23 nt, Human
uggggcuuucguccacagcuucc

SEQ ID NO: 2787178 - RNA, 15 nt, Human
ugggggaaagcacag

SEQ ID NO: 2787179 - RNA, 17 nt, Human
uggggcucugugcaggg

SEQ ID NO: 2787180 - RNA, 13 nt, Human
uggggcugggccc

SEQ ID NO: 2787181 - RNA, 17 nt, Human
ugguaauguguuuuaga

SEQ ID NO: 2787182 - RNA, 12 nt, Human
uggguggggcug

SEQ ID NO: 2787183 - RNA, 15 nt, Human
ugguaagagacagaa

SEQ ID NO: 2787184 - RNA, 20 nt, Human
ugguaagagacagaauguau

SEQ ID NO: 2787185 - RNA, 22 nt, Human
ugguaagagacagaauguaucu

SEQ ID NO: 2787186 - RNA, 15 nt, Human
uggguggcacugcca

SEQ ID NO: 2787187 - RNA, 15 nt, Human
uggguggccucggga

SEQ ID NO: 2787188 - RNA, 17 nt, Human
ugguacucauuaaaaaa

SEQ ID NO: 2787189 - RNA, 18 nt, Human
ugguacggagauguuuca

SEQ ID NO: 2787190 - RNA, 15 nt, Human
ugguacgugacccuc

SEQ ID NO: 2787191 - RNA, 20 nt, Human
ugguacgugacccucugcug

SEQ ID NO: 2787192 - RNA, 17 nt, Human
ugguacucccucucagg

SEQ ID NO: 2787193 - RNA, 20 nt, Human
ugguagcuuuucccuucuuu

SEQ ID NO: 2787194 - RNA, 22 nt, Human
ugguacucccucucaggaucca

SEQ ID NO: 2787195 - RNA, 16 nt, Human
ugguacucugaaacac

SEQ ID NO: 2787196 - RNA, 24 nt, Human
ugguacuuagaguuucuguuugau

SEQ ID NO: 2787197 - RNA, 20 nt, Human
uggucacaggacucugccuc

SEQ ID NO: 2787198 - RNA, 22 nt, Human
uggucacaggacucugccuccu

SEQ ID NO: 2787199 - RNA, 23 nt, Human
uggucacaggacucugccuccuc

SEQ ID NO: 2787200 - RNA, 21 nt, Human
ugguagcuuuucccuucuuuu

SEQ ID NO: 2787201 - RNA, 17 nt, Human
ugguagcuuuucccuuc

SEQ ID NO: 2787202 - RNA, 18 nt, Human
ugggugcugauccuugca

SEQ ID NO: 2787203 - RNA, 13 nt, Human
ugggugcucagaa

SEQ ID NO: 2787204 - RNA, 14 nt, Human
ugggugcucagaau

SEQ ID NO: 2787205 - RNA, 15 nt, Human
ugggugcucagaaua

SEQ ID NO: 2787206 - RNA, 22 nt, Human
ugggugcucagaauaaggcagg

SEQ ID NO: 2787207 - RNA, 14 nt, Human
ugggucugugcauu

SEQ ID NO: 2787208 - RNA, 22 nt, Human
ugggucucgcuuuguugcccag

SEQ ID NO: 2787209 - RNA, 20 nt, Human
ugggucucgcuuuguugccc

SEQ ID NO: 2787210 - RNA, 14 nt, Human
ugggucuauuccag

SEQ ID NO: 2787211 - RNA, 15 nt, Human
ugggucuauuccagc

SEQ ID NO: 2787212 - RNA, 16 nt, Human
ugggucuauuccagcu

SEQ ID NO: 2787213 - RNA, 17 nt, Human
ugggucuauuccagcuc

SEQ ID NO: 2787214 - RNA, 18 nt, Human
ugggucuauuccagcuca

SEQ ID NO: 2787215 - RNA, 19 nt, Human
ugggucuauuccagcucau

SEQ ID NO: 2787216 - RNA, 20 nt, Human
ugggucuauuccagcucauu

SEQ ID NO: 2787217 - RNA, 21 nt, Human
agggucucacucugucgccca

SEQ ID NO: 2787218 - RNA, 22 nt, Human
agggucucacucugucgcccag

SEQ ID NO: 2787219 - RNA, 13 nt, Human
agggucucugcug

SEQ ID NO: 2787220 - RNA, 12 nt, Human
agggucucuccc

SEQ ID NO: 2787221 - RNA, 16 nt, Human
agggucucucccucag

SEQ ID NO: 2787222 - RNA, 17 nt, Human
agggucucucccucagg

SEQ ID NO: 2787223 - RNA, 14 nt, Human
agggucucugcugc

SEQ ID NO: 2787224 - RNA, 15 nt, Human
agggucucugcugcc

SEQ ID NO: 2787225 - RNA, 18 nt, Human
aggguggcccuugcaguu

SEQ ID NO: 2787226 - RNA, 14 nt, Human
aggguggcccuugc

SEQ ID NO: 2787227 - RNA, 11 nt, Human
aggguggcccu

SEQ ID NO: 2787228 - RNA, 19 nt, Human
agggugggagagcccagcc

SEQ ID NO: 2787229 - RNA, 18 nt, Human
agggugggagagcccagc

SEQ ID NO: 2787230 - RNA, 17 nt, Human
agggugggagagcccag

SEQ ID NO: 2787231 - RNA, 16 nt, Human
agggugggagagccca

SEQ ID NO: 2787232 - RNA, 16 nt, Human
agggucucugcugccg

SEQ ID NO: 2787233 - RNA, 15 nt, Human
aggggccuggcagcc

SEQ ID NO: 2787234 - RNA, 23 nt, Human
aggggcgccgcaaaccacacugg

SEQ ID NO: 2787235 - RNA, 14 nt, Human
aggggcgcccaccu

SEQ ID NO: 2787236 - RNA, 18 nt, Human
aggggccuggcagccgug

SEQ ID NO: 2787237 - RNA, 23 nt, Human
aggggccuggcagccgugccuuc

SEQ ID NO: 2787238 - RNA, 17 nt, Human
aggggacucagcccuga

SEQ ID NO: 2787239 - RNA, 14 nt, Human
aggggacucagccc

SEQ ID NO: 2787240 - RNA, 22 nt, Human
aggggacucagcccugagguga

SEQ ID NO: 2787241 - RNA, 23 nt, Human
aggggacucugggcuauggacac

SEQ ID NO: 2787242 - RNA, 15 nt, Human
agggggaggggaagu

SEQ ID NO: 2787243 - RNA, 16 nt, Human
agggggaggggaaguc

SEQ ID NO: 2787244 - RNA, 15 nt, Human
agggggaaggcaggg

SEQ ID NO: 2787245 - RNA, 22 nt, Human
agggggaaggugggguccugga

SEQ ID NO: 2787246 - RNA, 20 nt, Human
agggggacugcugcugccug

SEQ ID NO: 2787247 - RNA, 21 nt, Human
agggggacugcugcugccugg

SEQ ID NO: 2787248 - RNA, 22 nt, Human
agggggacugcugcugccuggc

SEQ ID NO: 2787249 - RNA, 12 nt, Human
agggggagaaaa

SEQ ID NO: 2787250 - RNA, 20 nt, Human
agggggagaaaaggaaaaga

SEQ ID NO: 2787251 - RNA, 21 nt, Human
agggggagaaaaggaaaagaa

SEQ ID NO: 2787252 - RNA, 18 nt, Human
aggggcuacaagagggaa

SEQ ID NO: 2787253 - RNA, 20 nt, Human
aggggcgugggaguggccug

SEQ ID NO: 2787254 - RNA, 18 nt, Human
aggggcggugcccacacc

SEQ ID NO: 2787255 - RNA, 15 nt, Human
aggggcuacaagagg

SEQ ID NO: 2787256 - RNA, 17 nt, Human
aggggcuacaagaggga

SEQ ID NO: 2787257 - RNA, 17 nt, Human
aggggcgggaauauugu

SEQ ID NO: 2787258 - RNA, 21 nt, Human
aggggcgggaauauuguuucu

SEQ ID NO: 2787259 - RNA, 16 nt, Human
aggggcgcccaccucc

SEQ ID NO: 2787260 - RNA, 23 nt, Human
agggggugauuagagggaggaga

SEQ ID NO: 2787261 - RNA, 21 nt, Human
agggguggguuccucuucccc

SEQ ID NO: 2787262 - RNA, 20 nt, Human
agggguggguuccucuuccc

SEQ ID NO: 2787263 - RNA, 16 nt, Human
agggggaugccacucc

SEQ ID NO: 2787264 - RNA, 23 nt, Human
agggggaugccacuccucccucc

SEQ ID NO: 2787265 - RNA, 23 nt, Human
agggucucacuauguugcccagg

SEQ ID NO: 2787266 - RNA, 22 nt, Human
agggucucacuauguugcccag

SEQ ID NO: 2787267 - RNA, 21 nt, Human
agggucucacuauguugccca

SEQ ID NO: 2787268 - RNA, 15 nt, Human
agggguguggcuccu

SEQ ID NO: 2787269 - RNA, 20 nt, Human
agguacuuuuugugaagacg

SEQ ID NO: 2787270 - RNA, 13 nt, Human
agguagaaaaagg

SEQ ID NO: 2787271 - RNA, 14 nt, Human
agguagaaaaaggg

SEQ ID NO: 2787272 - RNA, 16 nt, Human
agguagaaaaaggguc

SEQ ID NO: 2787273 - RNA, 17 nt, Human
agguagaaaaaggguca

SEQ ID NO: 2787274 - RNA, 18 nt, Human
agguagaaaaagggucaa

SEQ ID NO: 2787275 - RNA, 17 nt, Human
aggguuggccccugccc

SEQ ID NO: 2787276 - RNA, 15 nt, Human
aggguugggcccaga

SEQ ID NO: 2787277 - RNA, 22 nt, Human
agguacugucaugggcuaggca

SEQ ID NO: 2787278 - RNA, 23 nt, Human
aggguuggccccugcccggcugc

SEQ ID NO: 2787279 - RNA, 18 nt, Human
aggguuggccccugcccg

SEQ ID NO: 2787280 - RNA, 20 nt, Human
agguauaaguggugugugua

SEQ ID NO: 2787281 - RNA, 19 nt, Human
agguauaaguggugugugu

SEQ ID NO: 2787282 - RNA, 12 nt, Human
agguagaaacuu

SEQ ID NO: 2787283 - RNA, 18 nt, Human
aggguuggccugaguuag

SEQ ID NO: 2787284 - RNA, 15 nt, Human
agguagaaccucacc

SEQ ID NO: 2787285 - RNA, 14 nt, Human
aggucauuucuuca

SEQ ID NO: 2787286 - RNA, 14 nt, Human
aggucccaccucca

SEQ ID NO: 2787287 - RNA, 15 nt, Human
aggucccaccuccag

SEQ ID NO: 2787288 - RNA, 16 nt, Human
aggucccaccuccagc

SEQ ID NO: 2787289 - RNA, 17 nt, Human
aggucccaccuccagcc

SEQ ID NO: 2787290 - RNA, 18 nt, Human
aggucccaccuccagccc

SEQ ID NO: 2787291 - RNA, 19 nt, Human
aggucccaccuccagcccg

SEQ ID NO: 2787292 - RNA, 11 nt, Human
aggucccaggc

SEQ ID NO: 2787293 - RNA, 13 nt, Human
aggucccaggcag

SEQ ID NO: 2787294 - RNA, 12 nt, Human
aggucccaggca

SEQ ID NO: 2787295 - RNA, 12 nt, Human
aggucagagccu

SEQ ID NO: 2787296 - RNA, 19 nt, Human
aggucagacuaagaaauau

SEQ ID NO: 2787297 - RNA, 15 nt, Human
aggucauggccacac

SEQ ID NO: 2787298 - RNA, 16 nt, Human
aggucauggccacacu

SEQ ID NO: 2787299 - RNA, 18 nt, Human
aggucauggccacacugu

SEQ ID NO: 2787300 - RNA, 19 nt, Human
aggucauggccacacugug

SEQ ID NO: 2787301 - RNA, 21 nt, Human
aggucauggccacacugugac

SEQ ID NO: 2787302 - RNA, 19 nt, Human
aggucaccuuuauucuggc

SEQ ID NO: 2787303 - RNA, 12 nt, Human
aggucaccagca

SEQ ID NO: 2787304 - RNA, 18 nt, Human
aggucaccuuuauucugg

SEQ ID NO: 2787305 - RNA, 22 nt, Human
aggucacacgaccggggccagc

SEQ ID NO: 2787306 - RNA, 23 nt, Human
aggucacacgaccggggccagca

SEQ ID NO: 2787307 - RNA, 15 nt, Human
aggucacauaaaacu

SEQ ID NO: 2787308 - RNA, 20 nt, Human
agguauguugccuuuauggu

SEQ ID NO: 2787309 - RNA, 14 nt, Human
agguauguugccuu

SEQ ID NO: 2787310 - RNA, 22 nt, Human
agguauggaaggguuuguggcu

SEQ ID NO: 2787311 - RNA, 13 nt, Human
agguauggcucug

SEQ ID NO: 2787312 - RNA, 23 nt, Human
agguauggcucugcaccccucug

SEQ ID NO: 2787313 - RNA, 20 nt, Human
agguauggaaggguuugugg

SEQ ID NO: 2787314 - RNA, 15 nt, Human
agguauuauuaucuu

SEQ ID NO: 2787315 - RNA, 16 nt, Human
agguauuauuaucuuu

SEQ ID NO: 2787316 - RNA, 18 nt, Human
agguauuauuaucuuuaa

SEQ ID NO: 2787317 - RNA, 20 nt, Human
aggguguguuugaaaucauc

SEQ ID NO: 2787318 - RNA, 21 nt, Human
aggguguugggauacugcagg

SEQ ID NO: 2787319 - RNA, 20 nt, Human
aggguuacagagaccuaugu

SEQ ID NO: 2787320 - RNA, 21 nt, Human
aggguggugaccucugccuga

SEQ ID NO: 2787321 - RNA, 14 nt, Human
uggucuuuguaaga

SEQ ID NO: 2787322 - RNA, 15 nt, Human
uggucuuuguaagag

SEQ ID NO: 2787323 - RNA, 21 nt, Human
uggucuuuguaagaguguaga

SEQ ID NO: 2787324 - RNA, 22 nt, Human
uggucuuuguaagaguguagaa

SEQ ID NO: 2787325 - RNA, 15 nt, Human
agggugguggagcca

SEQ ID NO: 2787326 - RNA, 17 nt, Human
agggugguggagccagu

SEQ ID NO: 2787327 - RNA, 17 nt, Human
uggucugacccacugcu

SEQ ID NO: 2787328 - RNA, 16 nt, Human
uggucugacccacugc

SEQ ID NO: 2787329 - RNA, 12 nt, Human
uggucucaggau

SEQ ID NO: 2787330 - RNA, 13 nt, Human
uggucucaggaua

SEQ ID NO: 2787331 - RNA, 23 nt, Human
uggucucaggauauccuuaucag

SEQ ID NO: 2787332 - RNA, 14 nt, Human
uggucuauguuccg

SEQ ID NO: 2787333 - RNA, 20 nt, Human
uggucuuucuuacaaggaag

SEQ ID NO: 2787334 - RNA, 13 nt, Human
uggucuuuguaag

SEQ ID NO: 2787335 - RNA, 14 nt, Human
uggucuuuccucug

SEQ ID NO: 2787336 - RNA, 20 nt, Human
uggucuuggcagcaccuguc

SEQ ID NO: 2787337 - RNA, 16 nt, Human
uggucuuguggaauug

SEQ ID NO: 2787338 - RNA, 14 nt, Human
uggucuucagccuc

SEQ ID NO: 2787339 - RNA, 15 nt, Human
uggucuucagccucu

SEQ ID NO: 2787340 - RNA, 20 nt, Human
uggucuuggaauuccauuug

SEQ ID NO: 2787341 - RNA, 17 nt, Human
uggucuuggcagcaccu

SEQ ID NO: 2787342 - RNA, 15 nt, Human
uggucuugaaguccu

SEQ ID NO: 2787343 - RNA, 19 nt, Human
uggucuugaaguccuggcu

SEQ ID NO: 2787344 - RNA, 20 nt, Human
uggucuugaaguccuggcuu

SEQ ID NO: 2787345 - RNA, 16 nt, Human
uggucucaaacucuug

SEQ ID NO: 2787346 - RNA, 19 nt, Human
uggucuaucuuugagcgcc

SEQ ID NO: 2787347 - RNA, 23 nt, Human
uggucucaaacucuugaccucag

SEQ ID NO: 2787348 - RNA, 17 nt, Human
uggucucaaacucuuga

SEQ ID NO: 2787349 - RNA, 18 nt, Human
uggucucaaacuccugac

SEQ ID NO: 2787350 - RNA, 12 nt, Human
uggucucagaaa

SEQ ID NO: 2787351 - RNA, 15 nt, Human
uggucaggcccuggu

SEQ ID NO: 2787352 - RNA, 13 nt, Human
uggucaggcuggu

SEQ ID NO: 2787353 - RNA, 13 nt, Human
uggucacagggca

SEQ ID NO: 2787354 - RNA, 17 nt, Human
uggucacagggcaugcc

SEQ ID NO: 2787355 - RNA, 17 nt, Human
agugccgcaaauuguac

SEQ ID NO: 2787356 - RNA, 22 nt, Human
agugccuggauccccucugucu

SEQ ID NO: 2787357 - RNA, 23 nt, Human
agugccuggauccccucugucua

SEQ ID NO: 2787358 - RNA, 19 nt, Human
agugcugggauuacaggug

SEQ ID NO: 2787359 - RNA, 17 nt, Human
agugcugggauuacagg

SEQ ID NO: 2787360 - RNA, 20 nt, Human
agugcugggauuacaggcgu

SEQ ID NO: 2787361 - RNA, 14 nt, Human
agugcuucagccug

SEQ ID NO: 2787362 - RNA, 19 nt, Human
agugcugggauuacaggcu

SEQ ID NO: 2787363 - RNA, 20 nt, Human
agugcugggauuacaagcgu

SEQ ID NO: 2787364 - RNA, 13 nt, Human
agugcuggcucac

SEQ ID NO: 2787365 - RNA, 14 nt, Human
agugcuggcucaca

SEQ ID NO: 2787366 - RNA, 15 nt, Human
agugcuggcucacag

SEQ ID NO: 2787367 - RNA, 16 nt, Human
agugcuggcucacagu

SEQ ID NO: 2787368 - RNA, 17 nt, Human
agugcuggcucacagua

SEQ ID NO: 2787369 - RNA, 18 nt, Human
agugcuggcucacaguac

SEQ ID NO: 2787370 - RNA, 19 nt, Human
agugcuggcucacaguaca

SEQ ID NO: 2787371 - RNA, 20 nt, Human
agugcuggcucacaguacag

SEQ ID NO: 2787372 - RNA, 21 nt, Human
agugcuggcucacaguacagc

SEQ ID NO: 2787373 - RNA, 21 nt, Human
agugcugggauggaggggagu

SEQ ID NO: 2787374 - RNA, 22 nt, Human
agugcugggauggaggggagug

SEQ ID NO: 2787375 - RNA, 15 nt, Human
uguggugaugaugug

SEQ ID NO: 2787376 - RNA, 19 nt, Human
uguggugaugauguguaua

SEQ ID NO: 2787377 - RNA, 14 nt, Human
ugugguggccucag

SEQ ID NO: 2787378 - RNA, 15 nt, Human
ugugguggccucagc

SEQ ID NO: 2787379 - RNA, 19 nt, Human
ugugguugacuuaugggcc

SEQ ID NO: 2787380 - RNA, 11 nt, Human
uguggucucag

SEQ ID NO: 2787381 - RNA, 13 nt, Human
uguggucucagga

SEQ ID NO: 2787382 - RNA, 14 nt, Human
uguggucucaggau

SEQ ID NO: 2787383 - RNA, 15 nt, Human
uguggucucaggaua

SEQ ID NO: 2787384 - RNA, 18 nt, Human
agugcuucagccugaggc

SEQ ID NO: 2787385 - RNA, 17 nt, Human
agugcuucagccugagg

SEQ ID NO: 2787386 - RNA, 16 nt, Human
agugcuucagccugag

SEQ ID NO: 2787387 - RNA, 15 nt, Human
agugcuucagccuga

SEQ ID NO: 2787388 - RNA, 20 nt, Human
agugcuucagccugaggcug

SEQ ID NO: 2787389 - RNA, 19 nt, Human
agugcuucagccugaggcu

SEQ ID NO: 2787390 - RNA, 15 nt, Human
agugcuugccacaga

SEQ ID NO: 2787391 - RNA, 16 nt, Human
agugcuugccacagag

SEQ ID NO: 2787392 - RNA, 17 nt, Human
agugcuugccacagagc

SEQ ID NO: 2787393 - RNA, 19 nt, Human
agugcuugccacagagcgg

SEQ ID NO: 2787394 - RNA, 14 nt, Human
uguguuaugaagca

SEQ ID NO: 2787395 - RNA, 14 nt, Human
uguguugcauuauu

SEQ ID NO: 2787396 - RNA, 24 nt, Human
uguguugcauuauucauuuaguga

SEQ ID NO: 2787397 - RNA, 16 nt, Human
uguguuccaaguuucc

SEQ ID NO: 2787398 - RNA, 17 nt, Human
uguguuccaaguuucca

SEQ ID NO: 2787399 - RNA, 18 nt, Human
uguguuccaaguuuccaa

SEQ ID NO: 2787400 - RNA, 19 nt, Human
uguguuccaaguuuccaaa

SEQ ID NO: 2787401 - RNA, 19 nt, Human
uguguguuccaaguuucca

SEQ ID NO: 2787402 - RNA, 14 nt, Human
ugugugugugugug

SEQ ID NO: 2787403 - RNA, 13 nt, Human
ugugugugugugu

SEQ ID NO: 2787404 - RNA, 14 nt, Human
ugugugugugugua

SEQ ID NO: 2787405 - RNA, 12 nt, Human
ugugugugugug

SEQ ID NO: 2787406 - RNA, 16 nt, Human
uguguguguguaugug

SEQ ID NO: 2787407 - RNA, 13 nt, Human
uguguguguguau

SEQ ID NO: 2787408 - RNA, 15 nt, Human
ugugucuaagauucu

SEQ ID NO: 2787409 - RNA, 16 nt, Human
ugugucuaagauucua

SEQ ID NO: 2787410 - RNA, 17 nt, Human
ugugucuaagauucuag

SEQ ID NO: 2787411 - RNA, 18 nt, Human
ugugucuaagauucuaga

SEQ ID NO: 2787412 - RNA, 19 nt, Human
ugugucuaagauucuagau

SEQ ID NO: 2787413 - RNA, 19 nt, Human
ugugucagguggggcagcu

SEQ ID NO: 2787414 - RNA, 17 nt, Human
ugugucagguggggcag

SEQ ID NO: 2787415 - RNA, 20 nt, Human
ugugucuaagauucuagauc

SEQ ID NO: 2787416 - RNA, 13 nt, Human
ugugugugugcau

SEQ ID NO: 2787417 - RNA, 14 nt, Human
ugugugugugcaug

SEQ ID NO: 2787418 - RNA, 11 nt, Human
ugugugugugc

SEQ ID NO: 2787419 - RNA, 11 nt, Human
ugugugugugu

SEQ ID NO: 2787420 - RNA, 12 nt, Human
ugugugugugua

SEQ ID NO: 2787421 - RNA, 19 nt, Human
uguuaaugauagcuacugu

SEQ ID NO: 2787422 - RNA, 19 nt, Human
uguuaaucucuguuaugua

SEQ ID NO: 2787423 - RNA, 21 nt, Human
uguuaaucucuguuauguacu

SEQ ID NO: 2787424 - RNA, 23 nt, Human
uguuaaucucuguuauguacugu

SEQ ID NO: 2787425 - RNA, 13 nt, Human
agugcuuguguaa

SEQ ID NO: 2787426 - RNA, 14 nt, Human
agugcuuguguaau

SEQ ID NO: 2787427 - RNA, 19 nt, Human
agugcuuguguaauuuaug

SEQ ID NO: 2787428 - RNA, 22 nt, Human
agugcuuguguaauuuauguga

SEQ ID NO: 2787429 - RNA, 13 nt, Human
agugcuuuaaugg

SEQ ID NO: 2787430 - RNA, 12 nt, Human
uguuaauguauu

SEQ ID NO: 2787431 - RNA, 18 nt, Human
uguuaauguauuuguuca

SEQ ID NO: 2787432 - RNA, 19 nt, Human
uguuaauguauuuguucau

SEQ ID NO: 2787433 - RNA, 22 nt, Human
uguuaauguauuuguucauguu

SEQ ID NO: 2787434 - RNA, 13 nt, Human
agugcuuucuugu

SEQ ID NO: 2787435 - RNA, 15 nt, Human
uguuaacauuccaag

SEQ ID NO: 2787436 - RNA, 16 nt, Human
uguuaaccaaggaaau

SEQ ID NO: 2787437 - RNA, 15 nt, Human
uguuaaccauuuaag

SEQ ID NO: 2787438 - RNA, 21 nt, Human
uguuaacauuccaagacucua

SEQ ID NO: 2787439 - RNA, 16 nt, Human
uguuaacauuccaaga

SEQ ID NO: 2787440 - RNA, 20 nt, Human
uguuaacauuccaagacucu

SEQ ID NO: 2787441 - RNA, 17 nt, Human
uguuaacucuugucuau

SEQ ID NO: 2787442 - RNA, 13 nt, Human
uguguugugaaug

SEQ ID NO: 2787443 - RNA, 18 nt, Human
uguguugucuugaaagau

SEQ ID NO: 2787444 - RNA, 16 nt, Human
uguuaaauuuuucuga

SEQ ID NO: 2787445 - RNA, 14 nt, Human
uguguugucuugaa

SEQ ID NO: 2787446 - RNA, 21 nt, Human
uguguuggacaaaugugaaga

SEQ ID NO: 2787447 - RNA, 15 nt, Human
uguguuggacagaga

SEQ ID NO: 2787448 - RNA, 19 nt, Human
uguguuggacagagaaggg

SEQ ID NO: 2787449 - RNA, 12 nt, Human
uguguuguauua

SEQ ID NO: 2787450 - RNA, 19 nt, Human
uguguuguauuaacaaaag

SEQ ID NO: 2787451 - RNA, 18 nt, Human
uguguugccaugugugcu

SEQ ID NO: 2787452 - RNA, 15 nt, Human
uguguugcuauccug

SEQ ID NO: 2787453 - RNA, 17 nt, Human
agugauugggacagagg

SEQ ID NO: 2787454 - RNA, 14 nt, Human
agugaguguuucua

SEQ ID NO: 2787455 - RNA, 16 nt, Human
agugaguguuucuaug

SEQ ID NO: 2787456 - RNA, 13 nt, Human
agugauugcagcu

SEQ ID NO: 2787457 - RNA, 14 nt, Human
agugauugcagcuu

SEQ ID NO: 2787458 - RNA, 20 nt, Human
agugauugcagcuuuauguu

SEQ ID NO: 2787459 - RNA, 16 nt, Human
agugcaaugacacagu

SEQ ID NO: 2787460 - RNA, 18 nt, Human
agugcaaugacacagucu

SEQ ID NO: 2787461 - RNA, 22 nt, Human
agugcaaugguauaaauuucaa

SEQ ID NO: 2787462 - RNA, 13 nt, Human
agugcacaaaaug

SEQ ID NO: 2787463 - RNA, 14 nt, Human
agugcacaaaauga

SEQ ID NO: 2787464 - RNA, 15 nt, Human
agugcacaaaaugaa

SEQ ID NO: 2787465 - RNA, 17 nt, Human
agugcacaaaaugaaug

SEQ ID NO: 2787466 - RNA, 16 nt, Human
agugcacacagaaaua

SEQ ID NO: 2787467 - RNA, 17 nt, Human
agugcacacagaaauau

SEQ ID NO: 2787468 - RNA, 19 nt, Human
agugcacacagaaauauau

SEQ ID NO: 2787469 - RNA, 20 nt, Human
agugcacacagaaauauaua

SEQ ID NO: 2787470 - RNA, 11 nt, Human
agugcacaccu

SEQ ID NO: 2787471 - RNA, 12 nt, Human
agugcacagcug

SEQ ID NO: 2787472 - RNA, 13 nt, Human
agugcacagcugu

SEQ ID NO: 2787473 - RNA, 14 nt, Human
agugcacagcuguc

SEQ ID NO: 2787474 - RNA, 15 nt, Human
agugcacagcugucc

SEQ ID NO: 2787475 - RNA, 12 nt, Human
agugcacaugaa

SEQ ID NO: 2787476 - RNA, 13 nt, Human
agugcacaugaac

SEQ ID NO: 2787477 - RNA, 24 nt, Human
agugauucuccugccucagccucc

SEQ ID NO: 2787478 - RNA, 22 nt, Human
agugauucuccugccucagccu

SEQ ID NO: 2787479 - RNA, 14 nt, Human
agugagugagccug

SEQ ID NO: 2787480 - RNA, 16 nt, Human
agugagugagccuggc

SEQ ID NO: 2787481 - RNA, 15 nt, Human
agugagugugcugcu

SEQ ID NO: 2787482 - RNA, 17 nt, Human
agugagugugcugcugu

SEQ ID NO: 2787483 - RNA, 19 nt, Human
agugagugugcugcuguaa

SEQ ID NO: 2787484 - RNA, 14 nt, Human
agugagucugucag

SEQ ID NO: 2787485 - RNA, 15 nt, Human
agugagucugucagc

SEQ ID NO: 2787486 - RNA, 13 nt, Human
agugagugagccu

SEQ ID NO: 2787487 - RNA, 16 nt, Human
agugagucgaggacag

SEQ ID NO: 2787488 - RNA, 14 nt, Human
uguggcccuguccu

SEQ ID NO: 2787489 - RNA, 16 nt, Human
uguggcccuguccugc

SEQ ID NO: 2787490 - RNA, 15 nt, Human
uguggccgaggacuu

SEQ ID NO: 2787491 - RNA, 16 nt, Human
uguggccgaggacuuu

SEQ ID NO: 2787492 - RNA, 18 nt, Human
uguggcccuggcucugcu

SEQ ID NO: 2787493 - RNA, 17 nt, Human
uguggccccugaacaag

SEQ ID NO: 2787494 - RNA, 22 nt, Human
uguggccccugaacaagaauug

SEQ ID NO: 2787495 - RNA, 12 nt, Human
uguggcccuggc

SEQ ID NO: 2787496 - RNA, 20 nt, Human
uguggcccucucccuuaccc

SEQ ID NO: 2787497 - RNA, 19 nt, Human
agugccacucauuccugua

SEQ ID NO: 2787498 - RNA, 12 nt, Human
agugccaaggac

SEQ ID NO: 2787499 - RNA, 13 nt, Human
agugccaaggacc

SEQ ID NO: 2787500 - RNA, 22 nt, Human
agugccaaggaccuccucuucc

SEQ ID NO: 2787501 - RNA, 16 nt, Human
agugccaacuccucac

SEQ ID NO: 2787502 - RNA, 13 nt, Human
agugccaacugug

SEQ ID NO: 2787503 - RNA, 16 nt, Human
agugccaacuguggcu

SEQ ID NO: 2787504 - RNA, 18 nt, Human
agugcacggggcacagcg

SEQ ID NO: 2787505 - RNA, 14 nt, Human
agugccaaaugcuc

SEQ ID NO: 2787506 - RNA, 14 nt, Human
agugcccacaggau

SEQ ID NO: 2787507 - RNA, 16 nt, Human
agugcccacccuggga

SEQ ID NO: 2787508 - RNA, 18 nt, Human
agugcccacccugggaga

SEQ ID NO: 2787509 - RNA, 20 nt, Human
agugcccacccugggagaca

SEQ ID NO: 2787510 - RNA, 22 nt, Human
agugcccacccugggagacaga

SEQ ID NO: 2787511 - RNA, 23 nt, Human
agugcccacccugggagacagac

SEQ ID NO: 2787512 - RNA, 14 nt, Human
agugcaggcuggcc

SEQ ID NO: 2787513 - RNA, 15 nt, Human
agugcaggcuggcca

SEQ ID NO: 2787514 - RNA, 16 nt, Human
agugcaggcuggccag

SEQ ID NO: 2787515 - RNA, 17 nt, Human
agugcaggcuggccagc

SEQ ID NO: 2787516 - RNA, 18 nt, Human
agugcaggcuggccagcc

SEQ ID NO: 2787517 - RNA, 19 nt, Human
agugcaggcuggccagccg

SEQ ID NO: 2787518 - RNA, 21 nt, Human
agugcaggcuggccagccgcu

SEQ ID NO: 2787519 - RNA, 16 nt, Human
agugcagggcaaaaua

SEQ ID NO: 2787520 - RNA, 12 nt, Human
agugcaggcugg

SEQ ID NO: 2787521 - RNA, 15 nt, Human
agugcaucucagccc

SEQ ID NO: 2787522 - RNA, 14 nt, Human
agugcaucucagcc

SEQ ID NO: 2787523 - RNA, 18 nt, Human
agugcaucuuugccucuc

SEQ ID NO: 2787524 - RNA, 16 nt, Human
agugcaucucagccca

SEQ ID NO: 2787525 - RNA, 17 nt, Human
agugcaucucagcccac

SEQ ID NO: 2787526 - RNA, 17 nt, Human
uguggcaaggaaaaaca

SEQ ID NO: 2787527 - RNA, 19 nt, Human
uguggcacuugccuggguc

SEQ ID NO: 2787528 - RNA, 14 nt, Human
uguggcagagagag

SEQ ID NO: 2787529 - RNA, 15 nt, Human
uguggcagagagaga

SEQ ID NO: 2787530 - RNA, 22 nt, Human
uguggcagagagagagaaagag

SEQ ID NO: 2787531 - RNA, 23 nt, Human
uguggcagagagagagaaagaga

SEQ ID NO: 2787532 - RNA, 18 nt, Human
uguggcacuugccugggu

SEQ ID NO: 2787533 - RNA, 16 nt, Human
uguggcacuugccugg

SEQ ID NO: 2787534 - RNA, 15 nt, Human
uguggcacuugccug

SEQ ID NO: 2787535 - RNA, 20 nt, Human
ugucgggcuuugugugaagg

SEQ ID NO: 2787536 - RNA, 11 nt, Human
uguggagccag

SEQ ID NO: 2787537 - RNA, 12 nt, Human
uguggagccagg

SEQ ID NO: 2787538 - RNA, 13 nt, Human
uguggagccaggc

SEQ ID NO: 2787539 - RNA, 14 nt, Human
uguggagccaggcg

SEQ ID NO: 2787540 - RNA, 15 nt, Human
uguggagccaggcgu

SEQ ID NO: 2787541 - RNA, 13 nt, Human
uguggagacuggg

SEQ ID NO: 2787542 - RNA, 15 nt, Human
uguggagcucagccc

SEQ ID NO: 2787543 - RNA, 16 nt, Human
uguggagcucagcccc

SEQ ID NO: 2787544 - RNA, 12 nt, Human
uguggaggaagg

SEQ ID NO: 2787545 - RNA, 14 nt, Human
uguggaggaaggau

SEQ ID NO: 2787546 - RNA, 15 nt, Human
uguggaggaaggauu

SEQ ID NO: 2787547 - RNA, 16 nt, Human
uguggaggaaggauug

SEQ ID NO: 2787548 - RNA, 17 nt, Human
uguggaggaaggauugu

SEQ ID NO: 2787549 - RNA, 14 nt, Human
uguggauuucaguu

SEQ ID NO: 2787550 - RNA, 15 nt, Human
uguggauuucaguuu

SEQ ID NO: 2787551 - RNA, 18 nt, Human
ugugcucuggacaggcau

SEQ ID NO: 2787552 - RNA, 16 nt, Human
ugugcucuggacaggc

SEQ ID NO: 2787553 - RNA, 19 nt, Human
ugugcucuggacaggcaug

SEQ ID NO: 2787554 - RNA, 12 nt, Human
ugugcugcccug

SEQ ID NO: 2787555 - RNA, 16 nt, Human
ugugcugcccugaaga

SEQ ID NO: 2787556 - RNA, 18 nt, Human
ugugcugcccugaagaau

SEQ ID NO: 2787557 - RNA, 17 nt, Human
ugugcugcccugaagaa

SEQ ID NO: 2787558 - RNA, 18 nt, Human
uguggagacaaugucugc

SEQ ID NO: 2787559 - RNA, 24 nt, Human
uguggagacaaugucugcagcccu

SEQ ID NO: 2787560 - RNA, 19 nt, Human
agucucacuguugcccagg

SEQ ID NO: 2787561 - RNA, 18 nt, Human
agucucacuguugcccag

SEQ ID NO: 2787562 - RNA, 20 nt, Human
agucucacuguugcccaggc

SEQ ID NO: 2787563 - RNA, 15 nt, Human
ugugcucuggacagg

SEQ ID NO: 2787564 - RNA, 23 nt, Human
ugugcucugaucauccacugugc

SEQ ID NO: 2787565 - RNA, 12 nt, Human
ugugcucugauc

SEQ ID NO: 2787566 - RNA, 22 nt, Human
ugugcucugaucauccacugug

SEQ ID NO: 2787567 - RNA, 16 nt, Human
ugugccuccucacccc

SEQ ID NO: 2787568 - RNA, 15 nt, Human
ugugccuccucaccc

SEQ ID NO: 2787569 - RNA, 14 nt, Human
ugugccuccucacc

SEQ ID NO: 2787570 - RNA, 12 nt, Human
ugugccucugcc

SEQ ID NO: 2787571 - RNA, 21 nt, Human
ugugccucggcuuuucucagc

SEQ ID NO: 2787572 - RNA, 12 nt, Human
ugugccucggcu

SEQ ID NO: 2787573 - RNA, 17 nt, Human
aguguuacuuuuuguaa

SEQ ID NO: 2787574 - RNA, 21 nt, Human
aguuacucuucaguuaagccu

SEQ ID NO: 2787575 - RNA, 12 nt, Human
aguguugaaggg

SEQ ID NO: 2787576 - RNA, 19 nt, Human
aguguugaagggagguggc

SEQ ID NO: 2787577 - RNA, 17 nt, Human
aguguugagccuuuucc

SEQ ID NO: 2787578 - RNA, 13 nt, Human
aguguugccuaag

SEQ ID NO: 2787579 - RNA, 14 nt, Human
aguguugccuaagu

SEQ ID NO: 2787580 - RNA, 16 nt, Human
aguguugccuaaguau

SEQ ID NO: 2787581 - RNA, 17 nt, Human
aguguugccuaaguauu

SEQ ID NO: 2787582 - RNA, 23 nt, Human
aguguugccuaaguauuaaaaca

SEQ ID NO: 2787583 - RNA, 13 nt, Human
aguuacugugcau

SEQ ID NO: 2787584 - RNA, 14 nt, Human
aguuacugugcauu

SEQ ID NO: 2787585 - RNA, 21 nt, Human
aguuacugccgguuugaaaau

SEQ ID NO: 2787586 - RNA, 18 nt, Human
aguuacugauucacugca

SEQ ID NO: 2787587 - RNA, 15 nt, Human
aguuagaaucuauuu

SEQ ID NO: 2787588 - RNA, 17 nt, Human
aguuagaaucuauuuuc

SEQ ID NO: 2787589 - RNA, 18 nt, Human
aguuagaaucuauuuucu

SEQ ID NO: 2787590 - RNA, 13 nt, Human
aguuauaguuuca

SEQ ID NO: 2787591 - RNA, 16 nt, Human
aguuacuuucuuaaug

SEQ ID NO: 2787592 - RNA, 14 nt, Human
aguuacuuuauguu

SEQ ID NO: 2787593 - RNA, 20 nt, Human
aguuacuuuauguuugucuu

SEQ ID NO: 2787594 - RNA, 11 nt, Human
uguucuuuaua

SEQ ID NO: 2787595 - RNA, 13 nt, Human
uguucuuuauaua

SEQ ID NO: 2787596 - RNA, 14 nt, Human
uguucuuuauauac

SEQ ID NO: 2787597 - RNA, 15 nt, Human
uguucuuuauauaca

SEQ ID NO: 2787598 - RNA, 20 nt, Human
uguucuuuauauacaauaau

SEQ ID NO: 2787599 - RNA, 12 nt, Human
uguucuugcugc

SEQ ID NO: 2787600 - RNA, 13 nt, Human
uguucuugcugcu

SEQ ID NO: 2787601 - RNA, 14 nt, Human
uguucuugcugcua

SEQ ID NO: 2787602 - RNA, 15 nt, Human
uguucuugcugcuag

SEQ ID NO: 2787603 - RNA, 16 nt, Human
uguucuugcugcuaga

SEQ ID NO: 2787604 - RNA, 17 nt, Human
uguucuugcugcuagaa

SEQ ID NO: 2787605 - RNA, 13 nt, Human
uguugcccaggcu

SEQ ID NO: 2787606 - RNA, 15 nt, Human
uguugcccaggcugg

SEQ ID NO: 2787607 - RNA, 14 nt, Human
uguugcccaggcug

SEQ ID NO: 2787608 - RNA, 21 nt, Human
uguugcccaggcuggagugca

SEQ ID NO: 2787609 - RNA, 20 nt, Human
aguguuauuuuucaaggaag

SEQ ID NO: 2787610 - RNA, 21 nt, Human
aguguuauuuuucaaggaagg

SEQ ID NO: 2787611 - RNA, 15 nt, Human
aguguucacaaccug

SEQ ID NO: 2787612 - RNA, 23 nt, Human
aguguucacaaccuggaagugcu

SEQ ID NO: 2787613 - RNA, 17 nt, Human
aguguugaaaauguuca

SEQ ID NO: 2787614 - RNA, 13 nt, Human
aguguuauguauu

SEQ ID NO: 2787615 - RNA, 14 nt, Human
aguguuauguauuu

SEQ ID NO: 2787616 - RNA, 15 nt, Human
aguguuauguauuuc

SEQ ID NO: 2787617 - RNA, 20 nt, Human
aguguguuuccuucagugca

SEQ ID NO: 2787618 - RNA, 19 nt, Human
aguguguuuccuucagugc

SEQ ID NO: 2787619 - RNA, 12 nt, Human
uguuauugugaa

SEQ ID NO: 2787620 - RNA, 13 nt, Human
uguuauugugaau

SEQ ID NO: 2787621 - RNA, 15 nt, Human
uguuauugugaauga

SEQ ID NO: 2787622 - RNA, 16 nt, Human
uguuauugugaaugau

SEQ ID NO: 2787623 - RNA, 19 nt, Human
uguuauugugaaugauuca

SEQ ID NO: 2787624 - RNA, 16 nt, Human
uguuauuguuuuguua

SEQ ID NO: 2787625 - RNA, 22 nt, Human
uguuauuguuuuguuaauuaca

SEQ ID NO: 2787626 - RNA, 19 nt, Human
uguuauuuaacccauuugu

SEQ ID NO: 2787627 - RNA, 17 nt, Human
uguuauuuagacucauc

SEQ ID NO: 2787628 - RNA, 13 nt, Human
uguuauuucugca

SEQ ID NO: 2787629 - RNA, 14 nt, Human
uguuauuucugcaa

SEQ ID NO: 2787630 - RNA, 15 nt, Human
uguuauuucugcaaa

SEQ ID NO: 2787631 - RNA, 17 nt, Human
uguucuacccguuccaa

SEQ ID NO: 2787632 - RNA, 18 nt, Human
uguucuacccguuccaaa

SEQ ID NO: 2787633 - RNA, 19 nt, Human
uguucuacccguuccaaaa

SEQ ID NO: 2787634 - RNA, 23 nt, Human
uguucuaaguuucuaagauucua

SEQ ID NO: 2787635 - RNA, 17 nt, Human
uguucuaaguuucuaag

SEQ ID NO: 2787636 - RNA, 18 nt, Human
uguucuaaguuucuaaga

SEQ ID NO: 2787637 - RNA, 19 nt, Human
uguucuaaguuucuaagau

SEQ ID NO: 2787638 - RNA, 22 nt, Human
uguucuaaguuucuaagauucu

SEQ ID NO: 2787639 - RNA, 18 nt, Human
uguucccucucccuguug

SEQ ID NO: 2787640 - RNA, 14 nt, Human
uguucuaaggcucu

SEQ ID NO: 2787641 - RNA, 15 nt, Human
uguucuaaggcucug

SEQ ID NO: 2787642 - RNA, 16 nt, Human
uguucuaaggcucuga

SEQ ID NO: 2787643 - RNA, 18 nt, Human
uguucuaaggcucugaga

SEQ ID NO: 2787644 - RNA, 23 nt, Human
uguucuaaggcucugagagucua

SEQ ID NO: 2787645 - RNA, 11 nt, Human
uguucuaaggg

SEQ ID NO: 2787646 - RNA, 19 nt, Human
uguucuaaggcucugagag

SEQ ID NO: 2787647 - RNA, 12 nt, Human
uguucuaaguuu

SEQ ID NO: 2787648 - RNA, 14 nt, Human
uguucuaaguuucu

SEQ ID NO: 2787649 - RNA, 16 nt, Human
uguucuaaguuucuaa

SEQ ID NO: 2787650 - RNA, 18 nt, Human
uguuaucccaaucauugu

SEQ ID NO: 2787651 - RNA, 20 nt, Human
uguucuuaugcaaaauggaa

SEQ ID NO: 2787652 - RNA, 13 nt, Human
uguucuucagaga

SEQ ID NO: 2787653 - RNA, 13 nt, Human
uguucuuccucca

SEQ ID NO: 2787654 - RNA, 22 nt, Human
uguuauuauuacuuauuuuuga

SEQ ID NO: 2787655 - RNA, 16 nt, Human
uguuaucuucucaagu

SEQ ID NO: 2787656 - RNA, 20 nt, Human
uguuaucuucucaaguucua

SEQ ID NO: 2787657 - RNA, 19 nt, Human
uguuaucuuauacuguaca

SEQ ID NO: 2787658 - RNA, 21 nt, Human
uguuaucuuauacuguacaau

SEQ ID NO: 2787659 - RNA, 22 nt, Human
uguuaucuuauacuguacaaua

SEQ ID NO: 2787660 - RNA, 15 nt, Human
uguuaucuucucaag

SEQ ID NO: 2787661 - RNA, 16 nt, Human
uguuauauuaagcaga

SEQ ID NO: 2787662 - RNA, 18 nt, Human
uguuauauuuaaugcauu

SEQ ID NO: 2787663 - RNA, 19 nt, Human
uguuauauuuaaugcauua

SEQ ID NO: 2787664 - RNA, 20 nt, Human
uguuauauuuaaugcauuaa

SEQ ID NO: 2787665 - RNA, 23 nt, Human
uguuauauuuaaugcauuaaacc

SEQ ID NO: 2787666 - RNA, 21 nt, Human
uguuaucagucaauauuuuua

SEQ ID NO: 2787667 - RNA, 14 nt, Human
uguuaucagcuuuc

SEQ ID NO: 2787668 - RNA, 13 nt, Human
uguuaucaaacuu

SEQ ID NO: 2787669 - RNA, 15 nt, Human
agugugggggguccu

SEQ ID NO: 2787670 - RNA, 14 nt, Human
aguggaaauucagg

SEQ ID NO: 2787671 - RNA, 22 nt, Human
aguggaaauucaggugaaaaug

SEQ ID NO: 2787672 - RNA, 16 nt, Human
agugcuuuucuguuua

SEQ ID NO: 2787673 - RNA, 16 nt, Human
aguggaaacauuuaua

SEQ ID NO: 2787674 - RNA, 22 nt, Human
aguggaaccguugccaaccgag

SEQ ID NO: 2787675 - RNA, 22 nt, Human
aguggaaagacagcuucucauc

SEQ ID NO: 2787676 - RNA, 12 nt, Human
aguggaaaaaca

SEQ ID NO: 2787677 - RNA, 13 nt, Human
aguggaaaaacac

SEQ ID NO: 2787678 - RNA, 14 nt, Human
aguggaaaaacaca

SEQ ID NO: 2787679 - RNA, 11 nt, Human
aguggaaaaag

SEQ ID NO: 2787680 - RNA, 16 nt, Human
aguggagaauuauaua

SEQ ID NO: 2787681 - RNA, 14 nt, Human
aguggagguuuguc

SEQ ID NO: 2787682 - RNA, 18 nt, Human
aguuccucuagugcccuc

SEQ ID NO: 2787683 - RNA, 15 nt, Human
aguucuacauaagua

SEQ ID NO: 2787684 - RNA, 20 nt, Human
aguucuaccucaggcagcuc

SEQ ID NO: 2787685 - RNA, 21 nt, Human
aguucuaauaauuucuaaugu

SEQ ID NO: 2787686 - RNA, 16 nt, Human
aguucgccuggagccc

SEQ ID NO: 2787687 - RNA, 17 nt, Human
aguucgccuggagcccu

SEQ ID NO: 2787688 - RNA, 18 nt, Human
aguucgccuggagcccuc

SEQ ID NO: 2787689 - RNA, 19 nt, Human
aguucgccuggagcccucc

SEQ ID NO: 2787690 - RNA, 17 nt, Human
aguucggcucugggugg

SEQ ID NO: 2787691 - RNA, 20 nt, Human
aguucuaauaauuucuaaug

SEQ ID NO: 2787692 - RNA, 22 nt, Human
aguucuaccucaggcagcucaa

SEQ ID NO: 2787693 - RNA, 23 nt, Human
aguucuaccucaggcagcucaag

SEQ ID NO: 2787694 - RNA, 22 nt, Human
aguucuacuauggcugaguucu

SEQ ID NO: 2787695 - RNA, 22 nt, Human
aguucuagacauggagguucua

SEQ ID NO: 2787696 - RNA, 23 nt, Human
aguucuagacauggagguucuaa

SEQ ID NO: 2787697 - RNA, 10 nt, Human
aguucuagac

SEQ ID NO: 2787698 - RNA, 21 nt, Human
aguucuagacauggagguucu

SEQ ID NO: 2787699 - RNA, 14 nt, Human
aguucuaggcacug

SEQ ID NO: 2787700 - RNA, 22 nt, Human
aguucuaggcacuguaguucua

SEQ ID NO: 2787701 - RNA, 10 nt, Human
aguucuaggc

SEQ ID NO: 2787702 - RNA, 15 nt, Human
aguucucaaugugaa

SEQ ID NO: 2787703 - RNA, 17 nt, Human
aguucuaguuugcauuc

SEQ ID NO: 2787704 - RNA, 18 nt, Human
aguucuauacuguaaagc

SEQ ID NO: 2787705 - RNA, 20 nt, Human
aguucuauacuguaaagcgc

SEQ ID NO: 2787706 - RNA, 15 nt, Human
aguucuaguuugcau

SEQ ID NO: 2787707 - RNA, 16 nt, Human
aguucuaguuugcauu

SEQ ID NO: 2787708 - RNA, 14 nt, Human
aguucacacccugc

SEQ ID NO: 2787709 - RNA, 15 nt, Human
aguucacacccugca

SEQ ID NO: 2787710 - RNA, 16 nt, Human
aguucacacccugcaa

SEQ ID NO: 2787711 - RNA, 17 nt, Human
aguucacacccugcaag

SEQ ID NO: 2787712 - RNA, 18 nt, Human
aguucacacccugcaagg

SEQ ID NO: 2787713 - RNA, 22 nt, Human
aguucacacccugcaaggccca

SEQ ID NO: 2787714 - RNA, 23 nt, Human
aguucacacccugcaaggcccac

SEQ ID NO: 2787715 - RNA, 18 nt, Human
aguucacauuagaauuag

SEQ ID NO: 2787716 - RNA, 17 nt, Human
aguucccaaaagauugc

SEQ ID NO: 2787717 - RNA, 14 nt, Human
aguuccccaugcag

SEQ ID NO: 2787718 - RNA, 16 nt, Human
aguuccccaugcagac

SEQ ID NO: 2787719 - RNA, 17 nt, Human
aguuccccaugcagaca

SEQ ID NO: 2787720 - RNA, 16 nt, Human
aguucaauucucauuu

SEQ ID NO: 2787721 - RNA, 18 nt, Human
aguucaauaaaugucugu

SEQ ID NO: 2787722 - RNA, 23 nt, Human
aguucaauaaacuuaacuuuaac

SEQ ID NO: 2787723 - RNA, 22 nt, Human
aguucaaggaacuugaaaaaua

SEQ ID NO: 2787724 - RNA, 23 nt, Human
aguucaaggaacuugaaaaauac

SEQ ID NO: 2787725 - RNA, 19 nt, Human
aguucaauaaaugucuguu

SEQ ID NO: 2787726 - RNA, 21 nt, Human
aguucaauaaaugucuguuga

SEQ ID NO: 2787727 - RNA, 15 nt, Human
aguucaaucucccgc

SEQ ID NO: 2787728 - RNA, 22 nt, Human
aguucaaucucccgcugcugcu

SEQ ID NO: 2787729 - RNA, 21 nt, Human
aguuauccagaggguugugau

SEQ ID NO: 2787730 - RNA, 15 nt, Human
aguuauaguuucaga

SEQ ID NO: 2787731 - RNA, 16 nt, Human
aguuauaguuucagau

SEQ ID NO: 2787732 - RNA, 20 nt, Human
aguuauauaauucacucaag

SEQ ID NO: 2787733 - RNA, 18 nt, Human
aguuauaguuucagauau

SEQ ID NO: 2787734 - RNA, 19 nt, Human
aguuauauuucagauguaa

SEQ ID NO: 2787735 - RNA, 22 nt, Human
aguuauauuucagauguaaugu

SEQ ID NO: 2787736 - RNA, 23 nt, Human
aguuauauuucagauguaauguu

SEQ ID NO: 2787737 - RNA, 12 nt, Human
uguuuaugaaaa

SEQ ID NO: 2787738 - RNA, 13 nt, Human
uguuuaugaaaau

SEQ ID NO: 2787739 - RNA, 14 nt, Human
uguuuaugaaaaua

SEQ ID NO: 2787740 - RNA, 18 nt, Human
uguuuaugaaaauaaaua

SEQ ID NO: 2787741 - RNA, 21 nt, Human
uguuuaugaaaauaaauagcu

SEQ ID NO: 2787742 - RNA, 16 nt, Human
uguuuagauagggcug

SEQ ID NO: 2787743 - RNA, 18 nt, Human
uguuuaggggaucuggaa

SEQ ID NO: 2787744 - RNA, 14 nt, Human
uguuuauuagauga

SEQ ID NO: 2787745 - RNA, 24 nt, Human
uguuuauggccucagcugccucac

SEQ ID NO: 2787746 - RNA, 17 nt, Human
uguuuauggccacauuu

SEQ ID NO: 2787747 - RNA, 21 nt, Human
uguuuaugcaaggaaggaaag

SEQ ID NO: 2787748 - RNA, 23 nt, Human
uguuuauggccucagcugccuca

SEQ ID NO: 2787749 - RNA, 15 nt, Human
uguuuauggccucag

SEQ ID NO: 2787750 - RNA, 14 nt, Human
uguuuauggccuca

SEQ ID NO: 2787751 - RNA, 13 nt, Human
uguuuauggccuc

SEQ ID NO: 2787752 - RNA, 14 nt, Human
uguuuauuucuguu

SEQ ID NO: 2787753 - RNA, 17 nt, Human
uguuuauuucuguuucu

SEQ ID NO: 2787754 - RNA, 13 nt, Human
uguuuauuccuug

SEQ ID NO: 2787755 - RNA, 16 nt, Human
uguuuauucuucuaga

SEQ ID NO: 2787756 - RNA, 17 nt, Human
uguuuauucuucuagag

SEQ ID NO: 2787757 - RNA, 14 nt, Human
uguuuauugaguuu

SEQ ID NO: 2787758 - RNA, 14 nt, Human
uguuguuaugcuau

SEQ ID NO: 2787759 - RNA, 16 nt, Human
uguuguguacagacuu

SEQ ID NO: 2787760 - RNA, 13 nt, Human
uguugugaugucu

SEQ ID NO: 2787761 - RNA, 14 nt, Human
uguugugaugucuu

SEQ ID NO: 2787762 - RNA, 12 nt, Human
uguugugccaca

SEQ ID NO: 2787763 - RNA, 21 nt, Human
uguuguggguucuauguuuac

SEQ ID NO: 2787764 - RNA, 22 nt, Human
uguuguggguucuauguuuacu

SEQ ID NO: 2787765 - RNA, 12 nt, Human
uguugugugugc

SEQ ID NO: 2787766 - RNA, 13 nt, Human
uguugugugugca

SEQ ID NO: 2787767 - RNA, 15 nt, Human
uguugugugugcagg

SEQ ID NO: 2787768 - RNA, 12 nt, Human
uguuguuagaga

SEQ ID NO: 2787769 - RNA, 14 nt, Human
uguuguguuucugu

SEQ ID NO: 2787770 - RNA, 14 nt, Human
uguuguuaaaauua

SEQ ID NO: 2787771 - RNA, 20 nt, Human
uguugugauguauucuagcu

SEQ ID NO: 2787772 - RNA, 14 nt, Human
uguugugauguauu

SEQ ID NO: 2787773 - RNA, 13 nt, Human
uguugugaauguu

SEQ ID NO: 2787774 - RNA, 12 nt, Human
uguugugaaugu

SEQ ID NO: 2787775 - RNA, 16 nt, Human
uguugucuugaaagau

SEQ ID NO: 2787776 - RNA, 12 nt, Human
uguugucuugaa

SEQ ID NO: 2787777 - RNA, 21 nt, Human
uguugguuuugggggugugag

SEQ ID NO: 2787778 - RNA, 13 nt, Human
uguuguaaaaaga

SEQ ID NO: 2787779 - RNA, 15 nt, Human
uguugguugcacuuu

SEQ ID NO: 2787780 - RNA, 19 nt, Human
uguugguugcacuuuguag

SEQ ID NO: 2787781 - RNA, 16 nt, Human
uguugguuguuuuuuc

SEQ ID NO: 2787782 - RNA, 19 nt, Human
uguugguuguuuuuuccuu

SEQ ID NO: 2787783 - RNA, 20 nt, Human
uguugguuguuuuuuccuuu

SEQ ID NO: 2787784 - RNA, 14 nt, Human
uguugguuuaauau

SEQ ID NO: 2787785 - RNA, 13 nt, Human
uguugguuuacuu

SEQ ID NO: 2787786 - RNA, 14 nt, Human
uguugguuuacuuu

SEQ ID NO: 2787787 - RNA, 17 nt, Human
uguugguuuacuuucaa

SEQ ID NO: 2787788 - RNA, 19 nt, Human
uguugguuuacuuucaaau

SEQ ID NO: 2787789 - RNA, 20 nt, Human
uguugguuuacuuucaaauc

SEQ ID NO: 2787790 - RNA, 20 nt, Human
uguuggucaggcuggucuca

SEQ ID NO: 2787791 - RNA, 15 nt, Human
aguuuucuuccauga

SEQ ID NO: 2787792 - RNA, 14 nt, Human
aguuuucuucugug

SEQ ID NO: 2787793 - RNA, 12 nt, Human
aguuuucuuguu

SEQ ID NO: 2787794 - RNA, 13 nt, Human
aguuuucuuguug

SEQ ID NO: 2787795 - RNA, 15 nt, Human
aguuuucuuguugcu

SEQ ID NO: 2787796 - RNA, 18 nt, Human
aguuuucuuguugcuuug

SEQ ID NO: 2787797 - RNA, 19 nt, Human
aguuuucuuguugcuuugu

SEQ ID NO: 2787798 - RNA, 21 nt, Human
aguuuucuuguugcuuuguug

SEQ ID NO: 2787799 - RNA, 13 nt, Human
aguuuugaauguu

SEQ ID NO: 2787800 - RNA, 18 nt, Human
aguuuugaauguuaagaa

SEQ ID NO: 2787801 - RNA, 21 nt, Human
aguuuugaauguuaagaauug

SEQ ID NO: 2787802 - RNA, 12 nt, Human
aguuuugaaaag

SEQ ID NO: 2787803 - RNA, 14 nt, Human
aguuuugaaaagcu

SEQ ID NO: 2787804 - RNA, 15 nt, Human
aguuuugaaaagcua

SEQ ID NO: 2787805 - RNA, 16 nt, Human
aguuuugaaaagcuau

SEQ ID NO: 2787806 - RNA, 17 nt, Human
aguuuugaaaagcuauu

SEQ ID NO: 2787807 - RNA, 16 nt, Human
aguuuccuaaucagaa

SEQ ID NO: 2787808 - RNA, 16 nt, Human
aguuucccuuccucca

SEQ ID NO: 2787809 - RNA, 20 nt, Human
aguuucccuuccuccauccu

SEQ ID NO: 2787810 - RNA, 17 nt, Human
aguuucauucuccugcc

SEQ ID NO: 2787811 - RNA, 20 nt, Human
aguuucauucuccugccugu

SEQ ID NO: 2787812 - RNA, 18 nt, Human
aguuuccaauuauuugac

SEQ ID NO: 2787813 - RNA, 17 nt, Human
aguuuccagucucaaaa

SEQ ID NO: 2787814 - RNA, 17 nt, Human
aguuuccauagcaacag

SEQ ID NO: 2787815 - RNA, 20 nt, Human
aguuuccauagcaacaggaa

SEQ ID NO: 2787816 - RNA, 18 nt, Human
aguuuuuaguaaucugua

SEQ ID NO: 2787817 - RNA, 21 nt, Human
aguuuuuaguaaucuguacau

SEQ ID NO: 2787818 - RNA, 23 nt, Human
aguuuuuaacucuacuguguaau

SEQ ID NO: 2787819 - RNA, 18 nt, Human
aguuuuuacagcuguguu

SEQ ID NO: 2787820 - RNA, 14 nt, Human
aguuuugucuugaa

SEQ ID NO: 2787821 - RNA, 12 nt, Human
aguuuugucuug

SEQ ID NO: 2787822 - RNA, 13 nt, Human
aguuuugucuuga

SEQ ID NO: 2787823 - RNA, 17 nt, Human
aguuuuggccaccacau

SEQ ID NO: 2787824 - RNA, 19 nt, Human
aguuuugaugacuggcauu

SEQ ID NO: 2787825 - RNA, 20 nt, Human
aguuuugaugacuggcauuu

SEQ ID NO: 2787826 - RNA, 21 nt, Human
aguuuugaugacuggcauuuu

SEQ ID NO: 2787827 - RNA, 23 nt, Human
aguuuugaugacuggcauuuuau

SEQ ID NO: 2787828 - RNA, 18 nt, Human
aguuuugacaucagccag

SEQ ID NO: 2787829 - RNA, 22 nt, Human
aguuuugacaucagccagcugc

SEQ ID NO: 2787830 - RNA, 23 nt, Human
aguuuugacaucagccagcugcc

SEQ ID NO: 2787831 - RNA, 12 nt, Human
aguuuugagaac

SEQ ID NO: 2787832 - RNA, 18 nt, Human
aguuuugagaacguaaag

SEQ ID NO: 2787833 - RNA, 18 nt, Human
aguuuugaguagauauua

SEQ ID NO: 2787834 - RNA, 20 nt, Human
aguuuugaguagauauuacu

SEQ ID NO: 2787835 - RNA, 21 nt, Human
aguuuugaguagauauuacuu

SEQ ID NO: 2787836 - RNA, 22 nt, Human
aguuuugaguagauauuacuuu

SEQ ID NO: 2787837 - RNA, 18 nt, Human
aguuuugauaugaguaua

SEQ ID NO: 2787838 - RNA, 18 nt, Human
auaaaauaauucuaaagg

SEQ ID NO: 2787839 - RNA, 16 nt, Human
auaaaauaauucuaaa

SEQ ID NO: 2787840 - RNA, 17 nt, Human
auaaaauaauucuaaag

SEQ ID NO: 2787841 - RNA, 15 nt, Human
auaaaauauaaacaa

SEQ ID NO: 2787842 - RNA, 18 nt, Human
auaaaauaguuguccaua

SEQ ID NO: 2787843 - RNA, 19 nt, Human
auaaaauaguuguccauau

SEQ ID NO: 2787844 - RNA, 16 nt, Human
auaaaaucaaaacaag

SEQ ID NO: 2787845 - RNA, 21 nt, Human
auaaaaucaaaacaagugaaa

SEQ ID NO: 2787846 - RNA, 16 nt, Human
auaaaaucaaguuuua

SEQ ID NO: 2787847 - RNA, 16 nt, Human
auaaaaucaauuuuua

SEQ ID NO: 2787848 - RNA, 20 nt, Human
auaaaaucaauuuuuaggaa

SEQ ID NO: 2787849 - RNA, 14 nt, Human
uuaagaaaaguauu

SEQ ID NO: 2787850 - RNA, 15 nt, Human
uuaagaaaaguauuu

SEQ ID NO: 2787851 - RNA, 16 nt, Human
uuaagaaaaguauuuu

SEQ ID NO: 2787852 - RNA, 17 nt, Human
uuaagaaaaguauuuug

SEQ ID NO: 2787853 - RNA, 18 nt, Human
uuaagaaaaguauuuuga

SEQ ID NO: 2787854 - RNA, 21 nt, Human
uuaagaaaaguauuuugaagu

SEQ ID NO: 2787855 - RNA, 23 nt, Human
uuaagaaaaguauuuugaaguuu

SEQ ID NO: 2787856 - RNA, 15 nt, Human
auaaaauaauucuaa

SEQ ID NO: 2787857 - RNA, 13 nt, Human
auaaaauaaugca

SEQ ID NO: 2787858 - RNA, 18 nt, Human
aguuuuuauuccuuguga

SEQ ID NO: 2787859 - RNA, 15 nt, Human
auaaaagauucaccu

SEQ ID NO: 2787860 - RNA, 22 nt, Human
uuaauucuucagcguaaaaugg

SEQ ID NO: 2787861 - RNA, 12 nt, Human
uuaauugcugca

SEQ ID NO: 2787862 - RNA, 13 nt, Human
uuaauugcugcaa

SEQ ID NO: 2787863 - RNA, 21 nt, Human
uuaaucaucuauaaagaagaa

SEQ ID NO: 2787864 - RNA, 13 nt, Human
uuaaucaugaaau

SEQ ID NO: 2787865 - RNA, 16 nt, Human
uuaauauuuaacauua

SEQ ID NO: 2787866 - RNA, 17 nt, Human
uuaauauuuaacauuau

SEQ ID NO: 2787867 - RNA, 12 nt, Human
uuaauauuugcu

SEQ ID NO: 2787868 - RNA, 20 nt, Human
uuaauauuugcugacagcug

SEQ ID NO: 2787869 - RNA, 19 nt, Human
uuaauauuugcugacagcu

SEQ ID NO: 2787870 - RNA, 12 nt, Human
uuaauauuuaac

SEQ ID NO: 2787871 - RNA, 22 nt, Human
uuaauauuuaaacagcaguguu

SEQ ID NO: 2787872 - RNA, 18 nt, Human
uuaauauuuaaacagcag

SEQ ID NO: 2787873 - RNA, 21 nt, Human
uuaauauuuaaacagcagugu

SEQ ID NO: 2787874 - RNA, 22 nt, Human
uuaauauuuauaggucacuuug

SEQ ID NO: 2787875 - RNA, 20 nt, Human
uuaaucuagacaauauacaa

SEQ ID NO: 2787876 - RNA, 21 nt, Human
uuaaucugggccagaauuuca

SEQ ID NO: 2787877 - RNA, 14 nt, Human
uuaaucucuguuau

SEQ ID NO: 2787878 - RNA, 15 nt, Human
uuaaucucuguuaug

SEQ ID NO: 2787879 - RNA, 19 nt, Human
uuaaucucuguuauguacu

SEQ ID NO: 2787880 - RNA, 20 nt, Human
uuaaucucuguuauguacug

SEQ ID NO: 2787881 - RNA, 21 nt, Human
uuaaucucuguuauguacugu

SEQ ID NO: 2787882 - RNA, 22 nt, Human
uuaaucucuguuauguacugua

SEQ ID NO: 2787883 - RNA, 23 nt, Human
uuaaucucuguuauguacuguac

SEQ ID NO: 2787884 - RNA, 15 nt, Human
uuaaucugaaauucu

SEQ ID NO: 2787885 - RNA, 16 nt, Human
uuaaucugaaauucua

SEQ ID NO: 2787886 - RNA, 17 nt, Human
uuaaucugaaauucuaa

SEQ ID NO: 2787887 - RNA, 18 nt, Human
uuaaucugaaauucuaaa

SEQ ID NO: 2787888 - RNA, 19 nt, Human
uuaaucugaaauucuaaag

SEQ ID NO: 2787889 - RNA, 23 nt, Human
uuaaucugaaauucuaaagagca

SEQ ID NO: 2787890 - RNA, 12 nt, Human
uuaauauuuaaa

SEQ ID NO: 2787891 - RNA, 15 nt, Human
uuaauauuuaaacag

SEQ ID NO: 2787892 - RNA, 16 nt, Human
uuaauauuuaaacagc

SEQ ID NO: 2787893 - RNA, 17 nt, Human
uuaauauuuaaacagca

SEQ ID NO: 2787894 - RNA, 19 nt, Human
uuaaguauuuauauauuua

SEQ ID NO: 2787895 - RNA, 17 nt, Human
uuaaguauuuauauauu

SEQ ID NO: 2787896 - RNA, 14 nt, Human
uuaaguauguguaa

SEQ ID NO: 2787897 - RNA, 23 nt, Human
uuaaguauugauucugcuugaga

SEQ ID NO: 2787898 - RNA, 14 nt, Human
uuaaguaucuuuuu

SEQ ID NO: 2787899 - RNA, 19 nt, Human
uuaaguaucuuuuuucaaa

SEQ ID NO: 2787900 - RNA, 16 nt, Human
uuaaguauuuauauau

SEQ ID NO: 2787901 - RNA, 11 nt, Human
uuaaguauuua

SEQ ID NO: 2787902 - RNA, 22 nt, Human
uuaagaaaucuguuuuuguuua

SEQ ID NO: 2787903 - RNA, 14 nt, Human
uuaagaaauguagu

SEQ ID NO: 2787904 - RNA, 15 nt, Human
uuaagaaauguaguu

SEQ ID NO: 2787905 - RNA, 21 nt, Human
uuaagaaauguaguugaugua

SEQ ID NO: 2787906 - RNA, 16 nt, Human
uuaagggcaugccuug

SEQ ID NO: 2787907 - RNA, 19 nt, Human
uuaagggcaugccuugugc

SEQ ID NO: 2787908 - RNA, 22 nt, Human
uuaagggccaccuacaauacau

SEQ ID NO: 2787909 - RNA, 20 nt, Human
uuaaggugaggccugucugu

SEQ ID NO: 2787910 - RNA, 21 nt, Human
uuaaggugaggccugucugug

SEQ ID NO: 2787911 - RNA, 12 nt, Human
uguuuauuuuuc

SEQ ID NO: 2787912 - RNA, 14 nt, Human
uguuuauuuuucau

SEQ ID NO: 2787913 - RNA, 15 nt, Human
uguuuauuuuucaua

SEQ ID NO: 2787914 - RNA, 19 nt, Human
uguuuauuuuucauauugu

SEQ ID NO: 2787915 - RNA, 16 nt, Human
uguuuauuuuucauau

SEQ ID NO: 2787916 - RNA, 18 nt, Human
uguuuauuuuucauauug

SEQ ID NO: 2787917 - RNA, 17 nt, Human
uguuucaaacacaaaug

SEQ ID NO: 2787918 - RNA, 18 nt, Human
uguuucaaacacaaaugc

SEQ ID NO: 2787919 - RNA, 19 nt, Human
uguuucaaacacaaaugca

SEQ ID NO: 2787920 - RNA, 17 nt, Human
aguugccccgucucugu

SEQ ID NO: 2787921 - RNA, 18 nt, Human
aguugccccgucucuguu

SEQ ID NO: 2787922 - RNA, 19 nt, Human
aguugccccgucucuguuc

SEQ ID NO: 2787923 - RNA, 20 nt, Human
aguugccccgucucuguucc

SEQ ID NO: 2787924 - RNA, 19 nt, Human
aguugggcuuccucauagu

SEQ ID NO: 2787925 - RNA, 13 nt, Human
aguugggcuuccu

SEQ ID NO: 2787926 - RNA, 14 nt, Human
aguuggaaauauuc

SEQ ID NO: 2787927 - RNA, 15 nt, Human
aguuggaauuuacca

SEQ ID NO: 2787928 - RNA, 13 nt, Human
aguuggacuaaau

SEQ ID NO: 2787929 - RNA, 14 nt, Human
aguuggacuaaaug

SEQ ID NO: 2787930 - RNA, 20 nt, Human
aguuggacuaaaugccuagu

SEQ ID NO: 2787931 - RNA, 15 nt, Human
aguuuaaaacacauu

SEQ ID NO: 2787932 - RNA, 13 nt, Human
aguuuaaaacagu

SEQ ID NO: 2787933 - RNA, 16 nt, Human
aguuuaaaacaguauu

SEQ ID NO: 2787934 - RNA, 17 nt, Human
aguuuaaaacaguauuu

SEQ ID NO: 2787935 - RNA, 18 nt, Human
aguuuaaaacaguauuua

SEQ ID NO: 2787936 - RNA, 20 nt, Human
aguuuaaaacaguauuuauu

SEQ ID NO: 2787937 - RNA, 12 nt, Human
aguuuaaagcaa

SEQ ID NO: 2787938 - RNA, 17 nt, Human
aguugguacacaacuag

SEQ ID NO: 2787939 - RNA, 12 nt, Human
uuaaaaaaagaa

SEQ ID NO: 2787940 - RNA, 13 nt, Human
uuaaaaaaagaaa

SEQ ID NO: 2787941 - RNA, 14 nt, Human
uuaaaaaaagaaaa

SEQ ID NO: 2787942 - RNA, 19 nt, Human
uuaaaaaaaggcauuguuu

SEQ ID NO: 2787943 - RNA, 21 nt, Human
uuaaaaaaaggcauuguuuga

SEQ ID NO: 2787944 - RNA, 23 nt, Human
uuaaaaauauggaacuucuaaua

SEQ ID NO: 2787945 - RNA, 12 nt, Human
uuaaaaaaauca

SEQ ID NO: 2787946 - RNA, 16 nt, Human
uuaaaaaaauggcagu

SEQ ID NO: 2787947 - RNA, 17 nt, Human
uuaaaaaaaucacaaaa

SEQ ID NO: 2787948 - RNA, 23 nt, Human
uuaaaaaaaucacaaaaauuuga

SEQ ID NO: 2787949 - RNA, 13 nt, Human
aguuuacagaaaa

SEQ ID NO: 2787950 - RNA, 18 nt, Human
aguuuacagaaaaaucuu

SEQ ID NO: 2787951 - RNA, 19 nt, Human
aguuuacagaaaaaucuug

SEQ ID NO: 2787952 - RNA, 23 nt, Human
aguuuacagcucugacuuuacac

SEQ ID NO: 2787953 - RNA, 19 nt, Human
aguuuacaaguguauauca

SEQ ID NO: 2787954 - RNA, 21 nt, Human
aguuuacaaguguauaucaga

SEQ ID NO: 2787955 - RNA, 23 nt, Human
aguuuacaaguguauaucagaaa

SEQ ID NO: 2787956 - RNA, 22 nt, Human
aguuuacaucauuuuuguaucu

SEQ ID NO: 2787957 - RNA, 15 nt, Human
aguuuacaaguguau

SEQ ID NO: 2787958 - RNA, 16 nt, Human
aguuuacaaguguaua

SEQ ID NO: 2787959 - RNA, 17 nt, Human
aguuuacaaguguauau

SEQ ID NO: 2787960 - RNA, 20 nt, Human
uuaaacaaaauagaagcugu

SEQ ID NO: 2787961 - RNA, 20 nt, Human
uuaaacaaacauuguguuga

SEQ ID NO: 2787962 - RNA, 12 nt, Human
uuaaacaaacca

SEQ ID NO: 2787963 - RNA, 16 nt, Human
uuaaacaaaccagaau

SEQ ID NO: 2787964 - RNA, 14 nt, Human
uuaaacacauuguc

SEQ ID NO: 2787965 - RNA, 14 nt, Human
uuaaacaccccuca

SEQ ID NO: 2787966 - RNA, 13 nt, Human
uuaaacaccuccu

SEQ ID NO: 2787967 - RNA, 16 nt, Human
uuaaacaccuccucau

SEQ ID NO: 2787968 - RNA, 14 nt, Human
uuaaacaaagguug

SEQ ID NO: 2787969 - RNA, 14 nt, Human
uuaaacacaaagug

SEQ ID NO: 2787970 - RNA, 12 nt, Human
uuaaacacacag

SEQ ID NO: 2787971 - RNA, 22 nt, Human
uuaaacacacagauacacacac

SEQ ID NO: 2787972 - RNA, 23 nt, Human
uuaaacacacagauacacacaca

SEQ ID NO: 2787973 - RNA, 12 nt, Human
uuaaacagcagu

SEQ ID NO: 2787974 - RNA, 11 nt, Human
uuaaacagaug

SEQ ID NO: 2787975 - RNA, 12 nt, Human
uuaaacagauga

SEQ ID NO: 2787976 - RNA, 22 nt, Human
uuaaacagaugaugagaauuuc

SEQ ID NO: 2787977 - RNA, 14 nt, Human
uuaaacagcagugu

SEQ ID NO: 2787978 - RNA, 19 nt, Human
uuaaacagccuauuccuga

SEQ ID NO: 2787979 - RNA, 23 nt, Human
uuaaacagugagccugaauuuug

SEQ ID NO: 2787980 - RNA, 18 nt, Human
uuaaacagugagccugaa

SEQ ID NO: 2787981 - RNA, 16 nt, Human
uuaaacaguauuucau

SEQ ID NO: 2787982 - RNA, 19 nt, Human
uuaaacaguauuucauugc

SEQ ID NO: 2787983 - RNA, 14 nt, Human
uuaaaguguuucag

SEQ ID NO: 2787984 - RNA, 17 nt, Human
uuaaaguguuucagcua

SEQ ID NO: 2787985 - RNA, 22 nt, Human
uuaaaguguuucagcuaaggga

SEQ ID NO: 2787986 - RNA, 19 nt, Human
uuaaagugcuaagguucua

SEQ ID NO: 2787987 - RNA, 21 nt, Human
uuaaagugcuaagguucuaag

SEQ ID NO: 2787988 - RNA, 22 nt, Human
uuaaagugcuaagguucuaagg

SEQ ID NO: 2787989 - RNA, 17 nt, Human
uuaaaguggcaaucuca

SEQ ID NO: 2787990 - RNA, 17 nt, Human
uuaaaguguaauaauau

SEQ ID NO: 2787991 - RNA, 12 nt, Human
uuaaagucugaa

SEQ ID NO: 2787992 - RNA, 13 nt, Human
uuaaagugaauug

SEQ ID NO: 2787993 - RNA, 10 nt, Human
uuaaacauua

SEQ ID NO: 2787994 - RNA, 13 nt, Human
uuaaacauuaaaa

SEQ ID NO: 2787995 - RNA, 18 nt, Human
uuaaacauuaaaaaugga

SEQ ID NO: 2787996 - RNA, 21 nt, Human
uuaaacauuaaaaauggaacu

SEQ ID NO: 2787997 - RNA, 16 nt, Human
uuaacacaaguccugu

SEQ ID NO: 2787998 - RNA, 13 nt, Human
uuaacacugagcu

SEQ ID NO: 2787999 - RNA, 16 nt, Human
aguuucauaauugugu

SEQ ID NO: 2788000 - RNA, 21 nt, Human
aguuucauguacaagaugaag

SEQ ID NO: 2788001 - RNA, 18 nt, Human
aguuucauguacaagaug

SEQ ID NO: 2788002 - RNA, 15 nt, Human
aguuucauguacaag

SEQ ID NO: 2788003 - RNA, 13 nt, Human
uuaaauaauuuaa

SEQ ID NO: 2788004 - RNA, 14 nt, Human
uuaaauaauuuaac

SEQ ID NO: 2788005 - RNA, 15 nt, Human
uuaaauaauuuaacu

SEQ ID NO: 2788006 - RNA, 16 nt, Human
uuaaauaauuuaacua

SEQ ID NO: 2788007 - RNA, 21 nt, Human
uuaaauaauuuaacuacccuu

SEQ ID NO: 2788008 - RNA, 18 nt, Human
uuaaauagaguuugcuau

SEQ ID NO: 2788009 - RNA, 13 nt, Human
uuaaauagauaca

SEQ ID NO: 2788010 - RNA, 17 nt, Human
uuaaauagauacaaaug

SEQ ID NO: 2788011 - RNA, 19 nt, Human
uuaaauagaguauaugcac

SEQ ID NO: 2788012 - RNA, 19 nt, Human
uuaaauacgcacuacaugu

SEQ ID NO: 2788013 - RNA, 21 nt, Human
auaauagcaacuuuuguguaa

SEQ ID NO: 2788014 - RNA, 13 nt, Human
auaauagauucuc

SEQ ID NO: 2788015 - RNA, 15 nt, Human
auaaucccagcacuu

SEQ ID NO: 2788016 - RNA, 16 nt, Human
auaaucccagcacuuu

SEQ ID NO: 2788017 - RNA, 17 nt, Human
auaaucccagcacuuug

SEQ ID NO: 2788018 - RNA, 12 nt, Human
auaaucuagaac

SEQ ID NO: 2788019 - RNA, 15 nt, Human
auaaucuagaacaca

SEQ ID NO: 2788020 - RNA, 14 nt, Human
auaaucuaguuuac

SEQ ID NO: 2788021 - RNA, 23 nt, Human
auaaucuaguuuacagaaaaauc

SEQ ID NO: 2788022 - RNA, 18 nt, Human
auaaucuggacuccucug

SEQ ID NO: 2788023 - RNA, 19 nt, Human
auaaucuggacuccucugu

SEQ ID NO: 2788024 - RNA, 20 nt, Human
auaaucuggacuccucuguc

SEQ ID NO: 2788025 - RNA, 13 nt, Human
auaauucuuauuu

SEQ ID NO: 2788026 - RNA, 14 nt, Human
auaauucuuauuuu

SEQ ID NO: 2788027 - RNA, 16 nt, Human
auaauucuuauuuugu

SEQ ID NO: 2788028 - RNA, 19 nt, Human
auaauucuuauuuugugga

SEQ ID NO: 2788029 - RNA, 12 nt, Human
auaauucuguaa

SEQ ID NO: 2788030 - RNA, 13 nt, Human
auaauucuguaaa

SEQ ID NO: 2788031 - RNA, 14 nt, Human
auaauucuguaaau

SEQ ID NO: 2788032 - RNA, 15 nt, Human
auaaugagcuauuaa

SEQ ID NO: 2788033 - RNA, 19 nt, Human
auaaugagcuauuaaaacu

SEQ ID NO: 2788034 - RNA, 21 nt, Human
auaaugagcuauuaaaacuca

SEQ ID NO: 2788035 - RNA, 15 nt, Human
auaaugauaaaacac

SEQ ID NO: 2788036 - RNA, 16 nt, Human
auaaugauaaaacacc

SEQ ID NO: 2788037 - RNA, 17 nt, Human
auaaugauaaaacaccu

SEQ ID NO: 2788038 - RNA, 14 nt, Human
auaaugcaaagaau

SEQ ID NO: 2788039 - RNA, 19 nt, Human
auaaugcaaagaaucccua

SEQ ID NO: 2788040 - RNA, 18 nt, Human
auaaugcauccagcagua

SEQ ID NO: 2788041 - RNA, 13 nt, Human
auaauaaauuaaa

SEQ ID NO: 2788042 - RNA, 14 nt, Human
auaauaauuuuuau

SEQ ID NO: 2788043 - RNA, 22 nt, Human
auaauaauuuuuauauuuaauu

SEQ ID NO: 2788044 - RNA, 12 nt, Human
auaauacaaaag

SEQ ID NO: 2788045 - RNA, 13 nt, Human
auaauacaaaagg

SEQ ID NO: 2788046 - RNA, 12 nt, Human
auaauagauucu

SEQ ID NO: 2788047 - RNA, 17 nt, Human
auaauacucuguuguac

SEQ ID NO: 2788048 - RNA, 16 nt, Human
auaauaccucaauguu

SEQ ID NO: 2788049 - RNA, 18 nt, Human
auaauaccucaauguuug

SEQ ID NO: 2788050 - RNA, 19 nt, Human
auaauaccucaauguuuga

SEQ ID NO: 2788051 - RNA, 14 nt, Human
auaauaaaguguuu

SEQ ID NO: 2788052 - RNA, 18 nt, Human
auaauaaaggacuguaau

SEQ ID NO: 2788053 - RNA, 13 nt, Human
auaauaaaggacu

SEQ ID NO: 2788054 - RNA, 11 nt, Human
auaauaaagga

SEQ ID NO: 2788055 - RNA, 20 nt, Human
auaagagaccuguuuuaaaa

SEQ ID NO: 2788056 - RNA, 14 nt, Human
auaagagaaagaaa

SEQ ID NO: 2788057 - RNA, 18 nt, Human
auaagagaaagaaaauga

SEQ ID NO: 2788058 - RNA, 13 nt, Human
auaauaaacauaa

SEQ ID NO: 2788059 - RNA, 21 nt, Human
auaauaaacauaaugaaaaua

SEQ ID NO: 2788060 - RNA, 12 nt, Human
auaauaaaauag

SEQ ID NO: 2788061 - RNA, 13 nt, Human
auaauaaaauagu

SEQ ID NO: 2788062 - RNA, 14 nt, Human
auaagacauaacgu

SEQ ID NO: 2788063 - RNA, 17 nt, Human
auaagacuuagauugug

SEQ ID NO: 2788064 - RNA, 23 nt, Human
auaagacauaacguuuuuccuuu

SEQ ID NO: 2788065 - RNA, 22 nt, Human
auaagacauaucucuaauucca

SEQ ID NO: 2788066 - RNA, 17 nt, Human
auaagacauaacguuuu

SEQ ID NO: 2788067 - RNA, 22 nt, Human
auaagaccaccaccucagagua

SEQ ID NO: 2788068 - RNA, 18 nt, Human
auaagaaugguugccuua

SEQ ID NO: 2788069 - RNA, 18 nt, Human
auaagaauggagcaguac

SEQ ID NO: 2788070 - RNA, 23 nt, Human
auaauuuaacuacccuuaauuac

SEQ ID NO: 2788071 - RNA, 12 nt, Human
auaauuuaagag

SEQ ID NO: 2788072 - RNA, 15 nt, Human
auaauuuaaugcaug

SEQ ID NO: 2788073 - RNA, 12 nt, Human
auaauuguugaa

SEQ ID NO: 2788074 - RNA, 15 nt, Human
auaauuguugaaauu

SEQ ID NO: 2788075 - RNA, 18 nt, Human
auaauuguugaaauuuug

SEQ ID NO: 2788076 - RNA, 19 nt, Human
auaauuguugaaauuuugc

SEQ ID NO: 2788077 - RNA, 20 nt, Human
auaauuguugaaauuuugca

SEQ ID NO: 2788078 - RNA, 21 nt, Human
auaauuguugaaauuuugcaa

SEQ ID NO: 2788079 - RNA, 22 nt, Human
auaauuguugaaauuuugcaaa

SEQ ID NO: 2788080 - RNA, 14 nt, Human
uuagcaaacuuugu

SEQ ID NO: 2788081 - RNA, 13 nt, Human
uuagcacagauuu

SEQ ID NO: 2788082 - RNA, 19 nt, Human
uuagcacagauuuuaauug

SEQ ID NO: 2788083 - RNA, 20 nt, Human
uuagcacagauuuuaauugu

SEQ ID NO: 2788084 - RNA, 21 nt, Human
uuagcacagauuuuaauuguc

SEQ ID NO: 2788085 - RNA, 22 nt, Human
uuagcacagauuuuaauuguca

SEQ ID NO: 2788086 - RNA, 23 nt, Human
uuagcacagauuuuaauugucau

SEQ ID NO: 2788087 - RNA, 16 nt, Human
uuagcaguuugcuuug

SEQ ID NO: 2788088 - RNA, 14 nt, Human
uuagcggagacgga

SEQ ID NO: 2788089 - RNA, 12 nt, Human
uuagccuggagc

SEQ ID NO: 2788090 - RNA, 23 nt, Human
uuagccuggagcaccuuuccuuc

SEQ ID NO: 2788091 - RNA, 12 nt, Human
uuagcaaggauu

SEQ ID NO: 2788092 - RNA, 18 nt, Human
uuagcaaggucauuucuu

SEQ ID NO: 2788093 - RNA, 21 nt, Human
uuagcaaggucauuucuucag

SEQ ID NO: 2788094 - RNA, 18 nt, Human
uuagcauagcuuauuauu

SEQ ID NO: 2788095 - RNA, 15 nt, Human
uuagcauccuaagaa

SEQ ID NO: 2788096 - RNA, 17 nt, Human
uuagcauccuaagaaau

SEQ ID NO: 2788097 - RNA, 18 nt, Human
uuagcauccuaagaaaua

SEQ ID NO: 2788098 - RNA, 19 nt, Human
uuagcauccuaagaaauau

SEQ ID NO: 2788099 - RNA, 15 nt, Human
uuagccaggaucaug

SEQ ID NO: 2788100 - RNA, 17 nt, Human
uuagccaggaucauggu

SEQ ID NO: 2788101 - RNA, 23 nt, Human
uuagccaggaucaugguguaaua

SEQ ID NO: 2788102 - RNA, 14 nt, Human
uuaguuucuuuggg

SEQ ID NO: 2788103 - RNA, 18 nt, Human
uuaguuuggauucuuaug

SEQ ID NO: 2788104 - RNA, 14 nt, Human
uuaguuuggauucu

SEQ ID NO: 2788105 - RNA, 13 nt, Human
uuaguaaaugucu

SEQ ID NO: 2788106 - RNA, 16 nt, Human
uuaguaaaugucuuug

SEQ ID NO: 2788107 - RNA, 17 nt, Human
uuaguaaaugucuuugu

SEQ ID NO: 2788108 - RNA, 18 nt, Human
uuaguaaaugucuuugua

SEQ ID NO: 2788109 - RNA, 19 nt, Human
uuaguaaaugucuuuguaa

SEQ ID NO: 2788110 - RNA, 20 nt, Human
uuaguaaaugucuuuguaag

SEQ ID NO: 2788111 - RNA, 21 nt, Human
uuaguaaaugucuuuguaagu

SEQ ID NO: 2788112 - RNA, 13 nt, Human
uuaguaaauguua

SEQ ID NO: 2788113 - RNA, 22 nt, Human
uuaguaacauaauaaauuaaaa

SEQ ID NO: 2788114 - RNA, 16 nt, Human
uuaguaacaucauuuu

SEQ ID NO: 2788115 - RNA, 16 nt, Human
uuagguuuuuccuuau

SEQ ID NO: 2788116 - RNA, 19 nt, Human
uuagguuuuuuuguauagu

SEQ ID NO: 2788117 - RNA, 18 nt, Human
uuagguggcaagcuguga

SEQ ID NO: 2788118 - RNA, 18 nt, Human
uuaggugcaauuucaagg

SEQ ID NO: 2788119 - RNA, 22 nt, Human
uuaggugcaauuucaagguucu

SEQ ID NO: 2788120 - RNA, 16 nt, Human
auaacgcuuaaaggaa

SEQ ID NO: 2788121 - RNA, 18 nt, Human
auaacgcuuaaaggaagu

SEQ ID NO: 2788122 - RNA, 13 nt, Human
auaacugugaagu

SEQ ID NO: 2788123 - RNA, 16 nt, Human
auaacuguuuauaugu

SEQ ID NO: 2788124 - RNA, 20 nt, Human
auaacuguuuauauguguug

SEQ ID NO: 2788125 - RNA, 21 nt, Human
auaacuguuuauauguguuga

SEQ ID NO: 2788126 - RNA, 17 nt, Human
auaacguuuuuccuuua

SEQ ID NO: 2788127 - RNA, 18 nt, Human
auaacguuuuuccuuuaa

SEQ ID NO: 2788128 - RNA, 15 nt, Human
auaacguuuuuccuu

SEQ ID NO: 2788129 - RNA, 13 nt, Human
auaacguuuuucc

SEQ ID NO: 2788130 - RNA, 16 nt, Human
auaacgugauacauuu

SEQ ID NO: 2788131 - RNA, 21 nt, Human
auaaauuauuaguuuacauca

SEQ ID NO: 2788132 - RNA, 15 nt, Human
auaaauccaguucua

SEQ ID NO: 2788133 - RNA, 18 nt, Human
auaaauccaguucuacua

SEQ ID NO: 2788134 - RNA, 21 nt, Human
auaaaucagugggauuuggua

SEQ ID NO: 2788135 - RNA, 14 nt, Human
auaaaucauauuga

SEQ ID NO: 2788136 - RNA, 15 nt, Human
auaaaucauauugau

SEQ ID NO: 2788137 - RNA, 18 nt, Human
auaaaucauauugaugaa

SEQ ID NO: 2788138 - RNA, 20 nt, Human
auaaaucauauugaugaaaa

SEQ ID NO: 2788139 - RNA, 21 nt, Human
auaaaucauauugaugaaaag

SEQ ID NO: 2788140 - RNA, 20 nt, Human
auaaccccagcucccuagga

SEQ ID NO: 2788141 - RNA, 15 nt, Human
auaacccacuuguca

SEQ ID NO: 2788142 - RNA, 13 nt, Human
auaaccuauauga

SEQ ID NO: 2788143 - RNA, 18 nt, Human
auaaccuauaugauuuau

SEQ ID NO: 2788144 - RNA, 15 nt, Human
auaacccuaacacac

SEQ ID NO: 2788145 - RNA, 13 nt, Human
auaacccuguuac

SEQ ID NO: 2788146 - RNA, 13 nt, Human
auaacccuucaac

SEQ ID NO: 2788147 - RNA, 15 nt, Human
auaaauuccacugga

SEQ ID NO: 2788148 - RNA, 23 nt, Human
auaaauucccaacuucucuugcu

SEQ ID NO: 2788149 - RNA, 13 nt, Human
auaaaguacuuga

SEQ ID NO: 2788150 - RNA, 12 nt, Human
uuaauugucaug

SEQ ID NO: 2788151 - RNA, 14 nt, Human
uuaauugucauggu

SEQ ID NO: 2788152 - RNA, 16 nt, Human
auaaaggcuaacuaug

SEQ ID NO: 2788153 - RNA, 14 nt, Human
auaaagggaacaaa

SEQ ID NO: 2788154 - RNA, 17 nt, Human
auaaagggggagggaaa

SEQ ID NO: 2788155 - RNA, 15 nt, Human
auaaagguaaaacaa

SEQ ID NO: 2788156 - RNA, 15 nt, Human
auaaauauaagccuu

SEQ ID NO: 2788157 - RNA, 16 nt, Human
auaaauauaagccuuu

SEQ ID NO: 2788158 - RNA, 16 nt, Human
auaaauaggagaggau

SEQ ID NO: 2788159 - RNA, 14 nt, Human
auaaauauauauaa

SEQ ID NO: 2788160 - RNA, 18 nt, Human
auaaauauuuuugccaua

SEQ ID NO: 2788161 - RNA, 20 nt, Human
auaaauauuugacuugcaug

SEQ ID NO: 2788162 - RNA, 16 nt, Human
auaaauauauauaaag

SEQ ID NO: 2788163 - RNA, 17 nt, Human
auaaauauauauaaaga

SEQ ID NO: 2788164 - RNA, 19 nt, Human
auaaauauauauaaagaau

SEQ ID NO: 2788165 - RNA, 15 nt, Human
uuaccuccaacagaa

SEQ ID NO: 2788166 - RNA, 18 nt, Human
uuaccuccaacagaacua

SEQ ID NO: 2788167 - RNA, 19 nt, Human
uuaccuccaacagaacuaa

SEQ ID NO: 2788168 - RNA, 22 nt, Human
uuaccuccaacagaacuaaaug

SEQ ID NO: 2788169 - RNA, 23 nt, Human
uuaccuccaacagaacuaaaugu

SEQ ID NO: 2788170 - RNA, 19 nt, Human
uuaccuaccacaugccaag

SEQ ID NO: 2788171 - RNA, 16 nt, Human
uuaccccuuagccucc

SEQ ID NO: 2788172 - RNA, 17 nt, Human
uuacccgguuucuuuuu

SEQ ID NO: 2788173 - RNA, 12 nt, Human
uuacccuaaugu

SEQ ID NO: 2788174 - RNA, 18 nt, Human
uuacccuaaugucuucau

SEQ ID NO: 2788175 - RNA, 14 nt, Human
uuaccccuuagccu

SEQ ID NO: 2788176 - RNA, 17 nt, Human
uuaccccuggcuguuug

SEQ ID NO: 2788177 - RNA, 13 nt, Human
uuacccaugaaaa

SEQ ID NO: 2788178 - RNA, 22 nt, Human
uuaccccacaacgugcaacuga

SEQ ID NO: 2788179 - RNA, 21 nt, Human
uuaccccauggcugcacaguu

SEQ ID NO: 2788180 - RNA, 17 nt, Human
uuacccccauucgcgcu

SEQ ID NO: 2788181 - RNA, 20 nt, Human
uuacccaggguggagugcag

SEQ ID NO: 2788182 - RNA, 20 nt, Human
uuacaggcaugagccacugc

SEQ ID NO: 2788183 - RNA, 11 nt, Human
uuacaggcccu

SEQ ID NO: 2788184 - RNA, 17 nt, Human
uuacaggcccugcuccu

SEQ ID NO: 2788185 - RNA, 22 nt, Human
uuacaggcccugcuccugcagc

SEQ ID NO: 2788186 - RNA, 24 nt, Human
uuacaggcgugagccaccgugccu

SEQ ID NO: 2788187 - RNA, 18 nt, Human
uuacaggcuccugccacc

SEQ ID NO: 2788188 - RNA, 16 nt, Human
uuacaggcuccugcca

SEQ ID NO: 2788189 - RNA, 21 nt, Human
auaacuuaaaaauguaaauau

SEQ ID NO: 2788190 - RNA, 19 nt, Human
auaacuuaaaaauguaaau

SEQ ID NO: 2788191 - RNA, 20 nt, Human
auaacuuaaaaauguaaaua

SEQ ID NO: 2788192 - RNA, 20 nt, Human
uuagacagagucucacuguu

SEQ ID NO: 2788193 - RNA, 13 nt, Human
uuagacagagucu

SEQ ID NO: 2788194 - RNA, 16 nt, Human
uuagaacaauuuucuu

SEQ ID NO: 2788195 - RNA, 18 nt, Human
uuagaacaauuuucuugu

SEQ ID NO: 2788196 - RNA, 14 nt, Human
uuagaaauuagaaa

SEQ ID NO: 2788197 - RNA, 16 nt, Human
uuagaaaugcagaauc

SEQ ID NO: 2788198 - RNA, 17 nt, Human
uuagaaauguaaacugc

SEQ ID NO: 2788199 - RNA, 20 nt, Human
uuagaaauguaaacugccau

SEQ ID NO: 2788200 - RNA, 21 nt, Human
uuagaaauguaaacugccaua

SEQ ID NO: 2788201 - RNA, 17 nt, Human
uuagaaauugcauuucc

SEQ ID NO: 2788202 - RNA, 22 nt, Human
uuagaaagcugacauugccaaa

SEQ ID NO: 2788203 - RNA, 21 nt, Human
uuagaaaguagccacguaugg

SEQ ID NO: 2788204 - RNA, 17 nt, Human
uuagaaagcaacuuauc

SEQ ID NO: 2788205 - RNA, 21 nt, Human
uuacucuaugccccaaauaua

SEQ ID NO: 2788206 - RNA, 18 nt, Human
uuaccuugacuguugaug

SEQ ID NO: 2788207 - RNA, 19 nt, Human
uuaccuugacuguugaugu

SEQ ID NO: 2788208 - RNA, 23 nt, Human
uuacucuucaguuaagccuuugg

SEQ ID NO: 2788209 - RNA, 15 nt, Human
uuaccuuguuauuua

SEQ ID NO: 2788210 - RNA, 18 nt, Human
uuagaaaccuuaauaugu

SEQ ID NO: 2788211 - RNA, 14 nt, Human
uuagaaaccuuaau

SEQ ID NO: 2788212 - RNA, 18 nt, Human
uuugcaauaaaaaugaua

SEQ ID NO: 2788213 - RNA, 19 nt, Human
uuugcaauggcuauauggc

SEQ ID NO: 2788214 - RNA, 22 nt, Human
uuugccauguuggccaggcugg

SEQ ID NO: 2788215 - RNA, 16 nt, Human
uuugcacagcucuccg

SEQ ID NO: 2788216 - RNA, 12 nt, Human
uuugcacagcuc

SEQ ID NO: 2788217 - RNA, 11 nt, Human
uuugccauuug

SEQ ID NO: 2788218 - RNA, 12 nt, Human
uuugccauuuga

SEQ ID NO: 2788219 - RNA, 14 nt, Human
uuugccauuugaua

SEQ ID NO: 2788220 - RNA, 16 nt, Human
uuugccauuugauacc

SEQ ID NO: 2788221 - RNA, 13 nt, Human
uuugcacauuuug

SEQ ID NO: 2788222 - RNA, 18 nt, Human
uuugcacauuuugauuuu

SEQ ID NO: 2788223 - RNA, 19 nt, Human
uuugcuagacucuagacaa

SEQ ID NO: 2788224 - RNA, 21 nt, Human
uuugcuagacucuagacaaga

SEQ ID NO: 2788225 - RNA, 15 nt, Human
uuugcuagcaguaaa

SEQ ID NO: 2788226 - RNA, 20 nt, Human
uuugcuagcaguaaaagaug

SEQ ID NO: 2788227 - RNA, 24 nt, Human
uuugcuagcaguaaaagaugaagu

SEQ ID NO: 2788228 - RNA, 14 nt, Human
uuugcuacuaaguu

SEQ ID NO: 2788229 - RNA, 24 nt, Human
uuugcuacuguacauaaacaauga

SEQ ID NO: 2788230 - RNA, 13 nt, Human
uuugcuaauuaaa

SEQ ID NO: 2788231 - RNA, 14 nt, Human
uuugcuaauuaaaa

SEQ ID NO: 2788232 - RNA, 19 nt, Human
uuugcuaauuaaaaaguua

SEQ ID NO: 2788233 - RNA, 19 nt, Human
uuugcccugguuucacugg

SEQ ID NO: 2788234 - RNA, 12 nt, Human
uuugcuuagaaa

SEQ ID NO: 2788235 - RNA, 16 nt, Human
uuugcuuagaaaagaa

SEQ ID NO: 2788236 - RNA, 14 nt, Human
uuugcugugaacaa

SEQ ID NO: 2788237 - RNA, 15 nt, Human
uuugcugugaacaau

SEQ ID NO: 2788238 - RNA, 13 nt, Human
uuugcuucauaaa

SEQ ID NO: 2788239 - RNA, 15 nt, Human
uuugcuucaaaaaca

SEQ ID NO: 2788240 - RNA, 19 nt, Human
uuuggcccaaucucugcca

SEQ ID NO: 2788241 - RNA, 13 nt, Human
uuuggccaucucu

SEQ ID NO: 2788242 - RNA, 23 nt, Human
uuuggccaucucuggaugccuga

SEQ ID NO: 2788243 - RNA, 19 nt, Human
uuuggggagguguucacug

SEQ ID NO: 2788244 - RNA, 23 nt, Human
uuuggggaaggguuugaauuguu

SEQ ID NO: 2788245 - RNA, 22 nt, Human
uuuggggacagauucagucuug

SEQ ID NO: 2788246 - RNA, 23 nt, Human
uuuggggacagauucagucuugc

SEQ ID NO: 2788247 - RNA, 16 nt, Human
uuugggaaacuuguca

SEQ ID NO: 2788248 - RNA, 17 nt, Human
uuugggaaccaagcuau

SEQ ID NO: 2788249 - RNA, 22 nt, Human
uuugggaagugaagacuggaag

SEQ ID NO: 2788250 - RNA, 20 nt, Human
uuugggaagugaagacugga

SEQ ID NO: 2788251 - RNA, 17 nt, Human
uuuggccugcacuaauu

SEQ ID NO: 2788252 - RNA, 17 nt, Human
uuuggcgcuauuacaaa

SEQ ID NO: 2788253 - RNA, 19 nt, Human
uuuggcgcuauuacaaaua

SEQ ID NO: 2788254 - RNA, 15 nt, Human
uuugggacccugcuu

SEQ ID NO: 2788255 - RNA, 20 nt, Human
uuugggacccugcuuuagag

SEQ ID NO: 2788256 - RNA, 23 nt, Human
uuugggacccugcuuuagagcua

SEQ ID NO: 2788257 - RNA, 14 nt, Human
auguccccucccag

SEQ ID NO: 2788258 - RNA, 22 nt, Human
augucccaucacguguacuggc

SEQ ID NO: 2788259 - RNA, 24 nt, Human
augucccuaccgagucucuucucc

SEQ ID NO: 2788260 - RNA, 19 nt, Human
augucccuagaaaacaaug

SEQ ID NO: 2788261 - RNA, 14 nt, Human
augucccugggcca

SEQ ID NO: 2788262 - RNA, 15 nt, Human
augucccugggccag

SEQ ID NO: 2788263 - RNA, 16 nt, Human
augucccugggccagg

SEQ ID NO: 2788264 - RNA, 17 nt, Human
augucccugggccaggg

SEQ ID NO: 2788265 - RNA, 18 nt, Human
augucccugggccagggu

SEQ ID NO: 2788266 - RNA, 20 nt, Human
augucccugggccagggucu

SEQ ID NO: 2788267 - RNA, 21 nt, Human
augucccugggccagggucug

SEQ ID NO: 2788268 - RNA, 19 nt, Human
auguccauuuauaucauuu

SEQ ID NO: 2788269 - RNA, 20 nt, Human
augucccaacuuguaaaaau

SEQ ID NO: 2788270 - RNA, 19 nt, Human
augucuaaaugcugaaaaa

SEQ ID NO: 2788271 - RNA, 18 nt, Human
augucccuugaugcacag

SEQ ID NO: 2788272 - RNA, 19 nt, Human
augucccuugaugcacaga

SEQ ID NO: 2788273 - RNA, 21 nt, Human
augucccuugaugcacagaga

SEQ ID NO: 2788274 - RNA, 23 nt, Human
augucccuugaugcacagagaag

SEQ ID NO: 2788275 - RNA, 23 nt, Human
augucucuuuaaugucacaggca

SEQ ID NO: 2788276 - RNA, 12 nt, Human
augucuauuuaa

SEQ ID NO: 2788277 - RNA, 13 nt, Human
augucuauuuaag

SEQ ID NO: 2788278 - RNA, 14 nt, Human
augucuauuuaagc

SEQ ID NO: 2788279 - RNA, 22 nt, Human
augucuauaaucccagcacuuu

SEQ ID NO: 2788280 - RNA, 20 nt, Human
augucuaucaacuuuaauca

SEQ ID NO: 2788281 - RNA, 21 nt, Human
augucuaugauucguguaauu

SEQ ID NO: 2788282 - RNA, 19 nt, Human
augucaggucagccaacug

SEQ ID NO: 2788283 - RNA, 22 nt, Human
auguagugugggaggcuccugu

SEQ ID NO: 2788284 - RNA, 15 nt, Human
auguaguugauguau

SEQ ID NO: 2788285 - RNA, 17 nt, Human
auguaguugauguaucc

SEQ ID NO: 2788286 - RNA, 18 nt, Human
auguaguugauguaucca

SEQ ID NO: 2788287 - RNA, 22 nt, Human
auguaguugauguauccaacaa

SEQ ID NO: 2788288 - RNA, 21 nt, Human
auguauaaagcaacuguuaug

SEQ ID NO: 2788289 - RNA, 22 nt, Human
auguauaaagcaacuguuauga

SEQ ID NO: 2788290 - RNA, 14 nt, Human
auguauaaauguga

SEQ ID NO: 2788291 - RNA, 16 nt, Human
auguauaaaugugaua

SEQ ID NO: 2788292 - RNA, 16 nt, Human
auguaucauagaaaug

SEQ ID NO: 2788293 - RNA, 21 nt, Human
auguaucccuucucacagcac

SEQ ID NO: 2788294 - RNA, 19 nt, Human
auguaucgggaagauuucu

SEQ ID NO: 2788295 - RNA, 12 nt, Human
auguaucaucug

SEQ ID NO: 2788296 - RNA, 17 nt, Human
auguaucauagaaaugu

SEQ ID NO: 2788297 - RNA, 16 nt, Human
auguaucuauuuauua

SEQ ID NO: 2788298 - RNA, 22 nt, Human
auguauggaaucccacuguaug

SEQ ID NO: 2788299 - RNA, 14 nt, Human
uuugggggaaacuu

SEQ ID NO: 2788300 - RNA, 23 nt, Human
augucaggggcggggagggugac

SEQ ID NO: 2788301 - RNA, 12 nt, Human
augucaggccug

SEQ ID NO: 2788302 - RNA, 16 nt, Human
augucaggccugugug

SEQ ID NO: 2788303 - RNA, 20 nt, Human
augucaggaacagaaggaug

SEQ ID NO: 2788304 - RNA, 19 nt, Human
augucaggaacagaaggau

SEQ ID NO: 2788305 - RNA, 17 nt, Human
augucaggaacagaagg

SEQ ID NO: 2788306 - RNA, 15 nt, Human
augucaggaacagaa

SEQ ID NO: 2788307 - RNA, 13 nt, Human
uuuuaaaagaaau

SEQ ID NO: 2788308 - RNA, 14 nt, Human
uuuuaacauuuugu

SEQ ID NO: 2788309 - RNA, 19 nt, Human
uuuuaacauuuuguucuua

SEQ ID NO: 2788310 - RNA, 20 nt, Human
uuuuaaaacacauguuuuua

SEQ ID NO: 2788311 - RNA, 22 nt, Human
uuuuaaaacacuuccauaaucu

SEQ ID NO: 2788312 - RNA, 11 nt, Human
uuuuaaaacac

SEQ ID NO: 2788313 - RNA, 13 nt, Human
uuuuaaaacacau

SEQ ID NO: 2788314 - RNA, 16 nt, Human
uuuuaaaacacuucca

SEQ ID NO: 2788315 - RNA, 12 nt, Human
uuuuaaaaaugg

SEQ ID NO: 2788316 - RNA, 13 nt, Human
uuuuaaaaauggu

SEQ ID NO: 2788317 - RNA, 23 nt, Human
uuuuaaaaauguccugccuuuua

SEQ ID NO: 2788318 - RNA, 17 nt, Human
uuuuaaaaauagacacu

SEQ ID NO: 2788319 - RNA, 21 nt, Human
uuuguuuggauguaauuuagg

SEQ ID NO: 2788320 - RNA, 12 nt, Human
uuuguuugucuc

SEQ ID NO: 2788321 - RNA, 12 nt, Human
uuuguuugucug

SEQ ID NO: 2788322 - RNA, 10 nt, Human
uuuguuucuu

SEQ ID NO: 2788323 - RNA, 13 nt, Human
uuuguuugaugca

SEQ ID NO: 2788324 - RNA, 13 nt, Human
uuuuaaaaaauga

SEQ ID NO: 2788325 - RNA, 14 nt, Human
uuuuaaaaaaugaa

SEQ ID NO: 2788326 - RNA, 22 nt, Human
uuuuaaaaaaugaaaauaagug

SEQ ID NO: 2788327 - RNA, 19 nt, Human
uuuuaaaaacauagaaaaa

SEQ ID NO: 2788328 - RNA, 22 nt, Human
uuuuaaaaagaaacaagaugcu

SEQ ID NO: 2788329 - RNA, 23 nt, Human
uuuuaaaaaagcaacagaaaccu

SEQ ID NO: 2788330 - RNA, 16 nt, Human
uuuuaaaaacaacuua

SEQ ID NO: 2788331 - RNA, 21 nt, Human
uuuuaaaaaggaacugcagca

SEQ ID NO: 2788332 - RNA, 14 nt, Human
uuuuaaaaauacau

SEQ ID NO: 2788333 - RNA, 16 nt, Human
uuuuaaaaauacauau

SEQ ID NO: 2788334 - RNA, 21 nt, Human
uuuuaaaaauacauaucgcug

SEQ ID NO: 2788335 - RNA, 11 nt, Human
uuuuaagaaau

SEQ ID NO: 2788336 - RNA, 13 nt, Human
uuuuaagaaaugu

SEQ ID NO: 2788337 - RNA, 14 nt, Human
uuuuaagaaaugua

SEQ ID NO: 2788338 - RNA, 16 nt, Human
uuuuaagaaauguagu

SEQ ID NO: 2788339 - RNA, 15 nt, Human
uuuuaagaggcaggg

SEQ ID NO: 2788340 - RNA, 16 nt, Human
uuuuaagaggcagggu

SEQ ID NO: 2788341 - RNA, 19 nt, Human
uuuuaagacguguuugugu

SEQ ID NO: 2788342 - RNA, 18 nt, Human
uuuuaaccucuuuaagua

SEQ ID NO: 2788343 - RNA, 18 nt, Human
uuuuaaccauggcagggu

SEQ ID NO: 2788344 - RNA, 13 nt, Human
uuuuaacuucuuu

SEQ ID NO: 2788345 - RNA, 15 nt, Human
uuuuaacuucuuucu

SEQ ID NO: 2788346 - RNA, 19 nt, Human
uuuuaacuccccuguuuca

SEQ ID NO: 2788347 - RNA, 14 nt, Human
uuuuaacugugcaa

SEQ ID NO: 2788348 - RNA, 18 nt, Human
uuuuaaguauuuauauau

SEQ ID NO: 2788349 - RNA, 17 nt, Human
uuuuaaguauuuauaua

SEQ ID NO: 2788350 - RNA, 15 nt, Human
uuuuaaguauuuagg

SEQ ID NO: 2788351 - RNA, 14 nt, Human
uuuuaaguaaugug

SEQ ID NO: 2788352 - RNA, 15 nt, Human
uuuuaaguaaugugg

SEQ ID NO: 2788353 - RNA, 17 nt, Human
uuuuaaguaauguggaa

SEQ ID NO: 2788354 - RNA, 23 nt, Human
uuuuaaggguuuguggaaaauga

SEQ ID NO: 2788355 - RNA, 12 nt, Human
uuuuaagauuuu

SEQ ID NO: 2788356 - RNA, 17 nt, Human
uuuuaagauuuuucuca

SEQ ID NO: 2788357 - RNA, 18 nt, Human
uuuuaagauuuuucucaa

SEQ ID NO: 2788358 - RNA, 19 nt, Human
uuuuaagauuuuucucaaa

SEQ ID NO: 2788359 - RNA, 15 nt, Human
uuuuaagcaaaauau

SEQ ID NO: 2788360 - RNA, 21 nt, Human
uuuuaagcacucuuaaagcaa

SEQ ID NO: 2788361 - RNA, 18 nt, Human
uuuuaagcauugugagua

SEQ ID NO: 2788362 - RNA, 21 nt, Human
uuuuaagauuuuucucaaagu

SEQ ID NO: 2788363 - RNA, 20 nt, Human
uuuuaaggguuuguggaaaa

SEQ ID NO: 2788364 - RNA, 12 nt, Human
uuuuaaggaaac

SEQ ID NO: 2788365 - RNA, 13 nt, Human
uuugucucuccuu

SEQ ID NO: 2788366 - RNA, 16 nt, Human
uuugucucuccuuuuc

SEQ ID NO: 2788367 - RNA, 17 nt, Human
uuugucucuccuuuucu

SEQ ID NO: 2788368 - RNA, 22 nt, Human
uuugucucuccuuuucuuuugu

SEQ ID NO: 2788369 - RNA, 18 nt, Human
uuugucuauuuuaaaaua

SEQ ID NO: 2788370 - RNA, 22 nt, Human
uuugucucagaagugaaaaucu

SEQ ID NO: 2788371 - RNA, 18 nt, Human
uuugucucaguuggaaau

SEQ ID NO: 2788372 - RNA, 13 nt, Human
uuugucugucgug

SEQ ID NO: 2788373 - RNA, 14 nt, Human
uuugucugaaaaau

SEQ ID NO: 2788374 - RNA, 20 nt, Human
uuugugacuauauagagaug

SEQ ID NO: 2788375 - RNA, 22 nt, Human
uuugugacuauauagagauguu

SEQ ID NO: 2788376 - RNA, 16 nt, Human
uuugugagcaggcugu

SEQ ID NO: 2788377 - RNA, 21 nt, Human
uuuguaggaaggucucauucu

SEQ ID NO: 2788378 - RNA, 22 nt, Human
uuuguaggaaggucucauucuu

SEQ ID NO: 2788379 - RNA, 23 nt, Human
uuuguaggaaggucucauucuuc

SEQ ID NO: 2788380 - RNA, 21 nt, Human
uuuguaggagaaacucccaug

SEQ ID NO: 2788381 - RNA, 21 nt, Human
uuugucgggcaccagccagcg

SEQ ID NO: 2788382 - RNA, 19 nt, Human
uuuguaggggucaaagaaa

SEQ ID NO: 2788383 - RNA, 20 nt, Human
uuuguaggggucaaagaaau

SEQ ID NO: 2788384 - RNA, 21 nt, Human
uuuguaggggucaaagaaaug

SEQ ID NO: 2788385 - RNA, 23 nt, Human
uuuguaggggucaaagaaaugcu

SEQ ID NO: 2788386 - RNA, 19 nt, Human
uuuguccugaugcuuuugu

SEQ ID NO: 2788387 - RNA, 23 nt, Human
uuugugacuauauagagauguuu

SEQ ID NO: 2788388 - RNA, 13 nt, Human
uuugugauaauuu

SEQ ID NO: 2788389 - RNA, 14 nt, Human
uuugugauaauuua

SEQ ID NO: 2788390 - RNA, 13 nt, Human
uuuguagagccag

SEQ ID NO: 2788391 - RNA, 13 nt, Human
uuuguacuguuua

SEQ ID NO: 2788392 - RNA, 14 nt, Human
uuuguacuguuuaa

SEQ ID NO: 2788393 - RNA, 18 nt, Human
uuuguacuguuuaauguu

SEQ ID NO: 2788394 - RNA, 15 nt, Human
uuuguacugaaaaau

SEQ ID NO: 2788395 - RNA, 14 nt, Human
uuuguacugaaaaa

SEQ ID NO: 2788396 - RNA, 17 nt, Human
uuuguaccaugguguga

SEQ ID NO: 2788397 - RNA, 19 nt, Human
uuuguacauaguuauuuau

SEQ ID NO: 2788398 - RNA, 11 nt, Human
uuuguaaauuc

SEQ ID NO: 2788399 - RNA, 13 nt, Human
uuuguaaauuguc

SEQ ID NO: 2788400 - RNA, 14 nt, Human
uuuguaccauggug

SEQ ID NO: 2788401 - RNA, 19 nt, Human
uuuguacauauguaaaaua

SEQ ID NO: 2788402 - RNA, 12 nt, Human
uuuguacaucug

SEQ ID NO: 2788403 - RNA, 19 nt, Human
uuuguacaucuggcuuauu

SEQ ID NO: 2788404 - RNA, 19 nt, Human
augucugcuccuuuccccu

SEQ ID NO: 2788405 - RNA, 23 nt, Human
augucugccaauuuuugccuuca

SEQ ID NO: 2788406 - RNA, 11 nt, Human
augucugcagc

SEQ ID NO: 2788407 - RNA, 13 nt, Human
augucugcagccc

SEQ ID NO: 2788408 - RNA, 14 nt, Human
augucugcagcccu

SEQ ID NO: 2788409 - RNA, 15 nt, Human
augucugcagcccug

SEQ ID NO: 2788410 - RNA, 19 nt, Human
augucugcagcccugagaa

SEQ ID NO: 2788411 - RNA, 15 nt, Human
augucuauuuaagcc

SEQ ID NO: 2788412 - RNA, 23 nt, Human
augucuauuuaagccucauauuu

SEQ ID NO: 2788413 - RNA, 13 nt, Human
augucugaacuuu

SEQ ID NO: 2788414 - RNA, 14 nt, Human
augucugaacuuug

SEQ ID NO: 2788415 - RNA, 17 nt, Human
augucugaacuuuggga

SEQ ID NO: 2788416 - RNA, 18 nt, Human
augucugaacuuugggaa

SEQ ID NO: 2788417 - RNA, 13 nt, Human
augucugccaauu

SEQ ID NO: 2788418 - RNA, 14 nt, Human
augucugccaauuu

SEQ ID NO: 2788419 - RNA, 16 nt, Human
augucugccaauuuuu

SEQ ID NO: 2788420 - RNA, 21 nt, Human
augucugccaauuuuugccuu

SEQ ID NO: 2788421 - RNA, 12 nt, Human
augucuguaaau

SEQ ID NO: 2788422 - RNA, 13 nt, Human
augucugucauug

SEQ ID NO: 2788423 - RNA, 16 nt, Human
augucuguugaugacu

SEQ ID NO: 2788424 - RNA, 14 nt, Human
augucuguuuaaga

SEQ ID NO: 2788425 - RNA, 16 nt, Human
augucuguuuaagaaa

SEQ ID NO: 2788426 - RNA, 17 nt, Human
augucuguuuaagaaaa

SEQ ID NO: 2788427 - RNA, 19 nt, Human
augucuguuuaagaaaagu

SEQ ID NO: 2788428 - RNA, 13 nt, Human
augucuguuugcu

SEQ ID NO: 2788429 - RNA, 14 nt, Human
augucuguuugcug

SEQ ID NO: 2788430 - RNA, 15 nt, Human
augucuguuugcuga

SEQ ID NO: 2788431 - RNA, 24 nt, Human
augucuguuugcugauggucuggu

SEQ ID NO: 2788432 - RNA, 17 nt, Human
auguuuauuuacuaauu

SEQ ID NO: 2788433 - RNA, 19 nt, Human
auguuuauucuucuagagu

SEQ ID NO: 2788434 - RNA, 21 nt, Human
auguuuauucuucuagaguuc

SEQ ID NO: 2788435 - RNA, 22 nt, Human
auguuuacagguggacacacaa

SEQ ID NO: 2788436 - RNA, 21 nt, Human
auguuuagauagggcugggca

SEQ ID NO: 2788437 - RNA, 16 nt, Human
auguuuauucuucuag

SEQ ID NO: 2788438 - RNA, 14 nt, Human
auguuuauuccuug

SEQ ID NO: 2788439 - RNA, 17 nt, Human
auguuuauucuucuaga

SEQ ID NO: 2788440 - RNA, 18 nt, Human
auguuuauucuucuagag

SEQ ID NO: 2788441 - RNA, 15 nt, Human
auguugugauguauu

SEQ ID NO: 2788442 - RNA, 22 nt, Human
auguuguccaauuguugacagu

SEQ ID NO: 2788443 - RNA, 22 nt, Human
auguuguaaauuaggaggcuca

SEQ ID NO: 2788444 - RNA, 14 nt, Human
auguuguaaugcug

SEQ ID NO: 2788445 - RNA, 15 nt, Human
auguuguaaugcugc

SEQ ID NO: 2788446 - RNA, 16 nt, Human
auguuguaaugcugca

SEQ ID NO: 2788447 - RNA, 18 nt, Human
auguuguaaugcugcacu

SEQ ID NO: 2788448 - RNA, 11 nt, Human
auguuguacaa

SEQ ID NO: 2788449 - RNA, 15 nt, Human
auguuguacaaugua

SEQ ID NO: 2788450 - RNA, 19 nt, Human
uuuucuauuccuucuggcc

SEQ ID NO: 2788451 - RNA, 20 nt, Human
uuuucuauuccuucuggccu

SEQ ID NO: 2788452 - RNA, 17 nt, Human
uuuucuauuuaugccuu

SEQ ID NO: 2788453 - RNA, 12 nt, Human
uuuucuauguac

SEQ ID NO: 2788454 - RNA, 14 nt, Human
uuuucuauguacua

SEQ ID NO: 2788455 - RNA, 18 nt, Human
uuuucuauguacuaguac

SEQ ID NO: 2788456 - RNA, 21 nt, Human
uuuucuauguacuaguacugu

SEQ ID NO: 2788457 - RNA, 17 nt, Human
uuuucucacuccuuuug

SEQ ID NO: 2788458 - RNA, 18 nt, Human
auguugguuuacuuucaa

SEQ ID NO: 2788459 - RNA, 19 nt, Human
auguugguuuacuuucaaa

SEQ ID NO: 2788460 - RNA, 12 nt, Human
uuuucucagcug

SEQ ID NO: 2788461 - RNA, 19 nt, Human
uuuucucaaaguuuugaaa

SEQ ID NO: 2788462 - RNA, 20 nt, Human
uuuucucaaaguuuugaaaa

SEQ ID NO: 2788463 - RNA, 15 nt, Human
uuuucucaaaguuuu

SEQ ID NO: 2788464 - RNA, 15 nt, Human
uuuucucaaaagcau

SEQ ID NO: 2788465 - RNA, 22 nt, Human
uuuucucaaaagcauuuaucau

SEQ ID NO: 2788466 - RNA, 23 nt, Human
uuuucucaaaguuuugaaaagcu

SEQ ID NO: 2788467 - RNA, 21 nt, Human
auuaaaaauauggaacuucua

SEQ ID NO: 2788468 - RNA, 16 nt, Human
auuaaaaggauaguau

SEQ ID NO: 2788469 - RNA, 12 nt, Human
auuaaaagucac

SEQ ID NO: 2788470 - RNA, 13 nt, Human
auuaaaagucaca

SEQ ID NO: 2788471 - RNA, 22 nt, Human
auuaaaagucacaauguucuuu

SEQ ID NO: 2788472 - RNA, 23 nt, Human
auuaaaagucacaauguucuuua

SEQ ID NO: 2788473 - RNA, 14 nt, Human
auuaaaaauaugga

SEQ ID NO: 2788474 - RNA, 13 nt, Human
auuaaaaaguuaa

SEQ ID NO: 2788475 - RNA, 15 nt, Human
auuaaaaaguuaauc

SEQ ID NO: 2788476 - RNA, 17 nt, Human
auuaaaaaguuaaucuu

SEQ ID NO: 2788477 - RNA, 16 nt, Human
auuaaaaacuaguagu

SEQ ID NO: 2788478 - RNA, 17 nt, Human
auuaaaaacuaguaguu

SEQ ID NO: 2788479 - RNA, 19 nt, Human
auuaaaaacuaguaguucu

SEQ ID NO: 2788480 - RNA, 22 nt, Human
auuaaaaacuaguaguucucuu

SEQ ID NO: 2788481 - RNA, 21 nt, Human
auuaaaaagaugguugccaag

SEQ ID NO: 2788482 - RNA, 16 nt, Human
auuaaaaagauucuuu

SEQ ID NO: 2788483 - RNA, 17 nt, Human
auuaaaaagauucuuuu

SEQ ID NO: 2788484 - RNA, 19 nt, Human
auuaaaaagauucuuuuuc

SEQ ID NO: 2788485 - RNA, 22 nt, Human
auuaaaaagauucuuuuucuga

SEQ ID NO: 2788486 - RNA, 18 nt, Human
auguuuuccagcuccuca

SEQ ID NO: 2788487 - RNA, 19 nt, Human
auguuuuccagcuccucau

SEQ ID NO: 2788488 - RNA, 16 nt, Human
auguuuucuuugcaaa

SEQ ID NO: 2788489 - RNA, 17 nt, Human
auguuuucuuugcaaag

SEQ ID NO: 2788490 - RNA, 18 nt, Human
auguuuucuuugcaaagu

SEQ ID NO: 2788491 - RNA, 21 nt, Human
auguuuucuuugcaaaguauu

SEQ ID NO: 2788492 - RNA, 19 nt, Human
auuaaaggcauaaaugacu

SEQ ID NO: 2788493 - RNA, 16 nt, Human
auuaaagccuuuagua

SEQ ID NO: 2788494 - RNA, 14 nt, Human
auuaaagucugaau

SEQ ID NO: 2788495 - RNA, 16 nt, Human
auuaaagucugaauca

SEQ ID NO: 2788496 - RNA, 15 nt, Human
auuaaccgaugcuuu

SEQ ID NO: 2788497 - RNA, 16 nt, Human
auuaaccgaugcuuua

SEQ ID NO: 2788498 - RNA, 17 nt, Human
auuaaccgaugcuuuac

SEQ ID NO: 2788499 - RNA, 21 nt, Human
auuaaccgaugcuuuaccaaa

SEQ ID NO: 2788500 - RNA, 22 nt, Human
auuaacugaguagcucuccuga

SEQ ID NO: 2788501 - RNA, 14 nt, Human
auuaacuacauuua

SEQ ID NO: 2788502 - RNA, 17 nt, Human
auuaacuacauuuauga

SEQ ID NO: 2788503 - RNA, 21 nt, Human
auuaacuacauuuaugaguaa

SEQ ID NO: 2788504 - RNA, 12 nt, Human
auuaacuuauuu

SEQ ID NO: 2788505 - RNA, 14 nt, Human
auuaacuuauuuag

SEQ ID NO: 2788506 - RNA, 15 nt, Human
auuaacuuauuuaga

SEQ ID NO: 2788507 - RNA, 17 nt, Human
auuaacuuauuuagaga

SEQ ID NO: 2788508 - RNA, 18 nt, Human
auuaacuuauuuagagau

SEQ ID NO: 2788509 - RNA, 22 nt, Human
auuaagaaggcaaaaauguaaa

SEQ ID NO: 2788510 - RNA, 20 nt, Human
auuaagaauauguuuccuug

SEQ ID NO: 2788511 - RNA, 21 nt, Human
auuaagaauauguuuccuugu

SEQ ID NO: 2788512 - RNA, 19 nt, Human
auuaagaaggcaaaaaugu

SEQ ID NO: 2788513 - RNA, 15 nt, Human
auuaagaaggcaaaa

SEQ ID NO: 2788514 - RNA, 19 nt, Human
auguugaauacuuuuuaca

SEQ ID NO: 2788515 - RNA, 15 nt, Human
auguugaauacuuuu

SEQ ID NO: 2788516 - RNA, 14 nt, Human
auguugaauacuuu

SEQ ID NO: 2788517 - RNA, 11 nt, Human
auguucauuua

SEQ ID NO: 2788518 - RNA, 18 nt, Human
auguucauuuguuuguuu

SEQ ID NO: 2788519 - RNA, 15 nt, Human
auguugaagccuuug

SEQ ID NO: 2788520 - RNA, 16 nt, Human
auguugaagccuuugu

SEQ ID NO: 2788521 - RNA, 13 nt, Human
auguuauauauuu

SEQ ID NO: 2788522 - RNA, 17 nt, Human
auguuauauauuuuuug

SEQ ID NO: 2788523 - RNA, 16 nt, Human
auguuauaucauaugu

SEQ ID NO: 2788524 - RNA, 18 nt, Human
auguuauaucauauguau

SEQ ID NO: 2788525 - RNA, 19 nt, Human
auguuauaucauauguaua

SEQ ID NO: 2788526 - RNA, 13 nt, Human
auguuauauuuaa

SEQ ID NO: 2788527 - RNA, 22 nt, Human
auguuauauuuaaugcauuaaa

SEQ ID NO: 2788528 - RNA, 15 nt, Human
auguuaucuucucaa

SEQ ID NO: 2788529 - RNA, 16 nt, Human
auguuaucuucucaag

SEQ ID NO: 2788530 - RNA, 21 nt, Human
auguuaucuuauacuguacaa

SEQ ID NO: 2788531 - RNA, 16 nt, Human
auguucaucaauuccc

SEQ ID NO: 2788532 - RNA, 15 nt, Human
auguuaguuucuugg

SEQ ID NO: 2788533 - RNA, 15 nt, Human
auguuagucauuguu

SEQ ID NO: 2788534 - RNA, 16 nt, Human
auguuagucauuguua

SEQ ID NO: 2788535 - RNA, 22 nt, Human
auguuagucauuguuauuuaua

SEQ ID NO: 2788536 - RNA, 18 nt, Human
auguuaguguuuuaagaa

SEQ ID NO: 2788537 - RNA, 22 nt, Human
auguuaguguuuuaagaaaugu

SEQ ID NO: 2788538 - RNA, 19 nt, Human
uuuuaaguauuuauauauu

SEQ ID NO: 2788539 - RNA, 21 nt, Human
uuuuaagugaaagugaggaaa

SEQ ID NO: 2788540 - RNA, 15 nt, Human
uuuuaagugguuuga

SEQ ID NO: 2788541 - RNA, 15 nt, Human
uuuuaaguuaauaga

SEQ ID NO: 2788542 - RNA, 18 nt, Human
uuuuaaguuaauagauuu

SEQ ID NO: 2788543 - RNA, 23 nt, Human
uuuuaaguuaauagauuuuuuca

SEQ ID NO: 2788544 - RNA, 21 nt, Human
auguugauuuuuacuguguuu

SEQ ID NO: 2788545 - RNA, 17 nt, Human
uuuuagaugguuucuug

SEQ ID NO: 2788546 - RNA, 20 nt, Human
uuuuagaugagauuguuuua

SEQ ID NO: 2788547 - RNA, 22 nt, Human
uuuuagauuuucugguucuaac

SEQ ID NO: 2788548 - RNA, 19 nt, Human
uuuuagaugagauuguuuu

SEQ ID NO: 2788549 - RNA, 21 nt, Human
uuuuagcaauuuauacaauau

SEQ ID NO: 2788550 - RNA, 14 nt, Human
auguuggccaggcu

SEQ ID NO: 2788551 - RNA, 13 nt, Human
auguuggccaggc

SEQ ID NO: 2788552 - RNA, 16 nt, Human
auguuggccaggcugg

SEQ ID NO: 2788553 - RNA, 16 nt, Human
auguuggccaggcugc

SEQ ID NO: 2788554 - RNA, 22 nt, Human
auguugcacacccacucagcuc

SEQ ID NO: 2788555 - RNA, 21 nt, Human
auguugcacacccacucagcu

SEQ ID NO: 2788556 - RNA, 23 nt, Human
auguugauuuuuacuguguuuua

SEQ ID NO: 2788557 - RNA, 20 nt, Human
auguugauuuuuacuguguu

SEQ ID NO: 2788558 - RNA, 17 nt, Human
auguugauuuuuacugu

SEQ ID NO: 2788559 - RNA, 16 nt, Human
auguugauuuuuacug

SEQ ID NO: 2788560 - RNA, 20 nt, Human
auguugauccauccagcuug

SEQ ID NO: 2788561 - RNA, 23 nt, Human
auguugauccauccagcuugcca

SEQ ID NO: 2788562 - RNA, 24 nt, Human
auguugauccauccagcuugccag

SEQ ID NO: 2788563 - RNA, 16 nt, Human
auguugaccaugucua

SEQ ID NO: 2788564 - RNA, 19 nt, Human
auguugaccaugucuauga

SEQ ID NO: 2788565 - RNA, 22 nt, Human
auguugagaaucccaaauuuga

SEQ ID NO: 2788566 - RNA, 16 nt, Human
auguugagaaucccaa

SEQ ID NO: 2788567 - RNA, 14 nt, Human
auguugaauucuuu

SEQ ID NO: 2788568 - RNA, 19 nt, Human
auguugacauaccuuuuau

SEQ ID NO: 2788569 - RNA, 19 nt, Human
uuuuauguaguaauugaca

SEQ ID NO: 2788570 - RNA, 13 nt, Human
uuuuaugcucuuu

SEQ ID NO: 2788571 - RNA, 19 nt, Human
uuuuaugcucuuuuuuacu

SEQ ID NO: 2788572 - RNA, 22 nt, Human
uuuuaugcucuuuuuuacucau

SEQ ID NO: 2788573 - RNA, 24 nt, Human
uuuuaugcucuuuuuuacucauug

SEQ ID NO: 2788574 - RNA, 19 nt, Human
uuuuauggagaccucuccu

SEQ ID NO: 2788575 - RNA, 14 nt, Human
uuuuauaagcaaau

SEQ ID NO: 2788576 - RNA, 20 nt, Human
uuuuauaaauauaagccuuu

SEQ ID NO: 2788577 - RNA, 20 nt, Human
uuuuauaacuaguccuuuac

SEQ ID NO: 2788578 - RNA, 12 nt, Human
uuuuauaaagug

SEQ ID NO: 2788579 - RNA, 13 nt, Human
uuuuauaaagugc

SEQ ID NO: 2788580 - RNA, 19 nt, Human
uuuuauaaagugcuugugu

SEQ ID NO: 2788581 - RNA, 18 nt, Human
uuuuauaaauaaacuguu

SEQ ID NO: 2788582 - RNA, 17 nt, Human
uuuuauaaaauuuugcu

SEQ ID NO: 2788583 - RNA, 16 nt, Human
uuuuauaaaaauaaau

SEQ ID NO: 2788584 - RNA, 12 nt, Human
uuuuauuauugu

SEQ ID NO: 2788585 - RNA, 13 nt, Human
uuuuauuauugug

SEQ ID NO: 2788586 - RNA, 14 nt, Human
uuuuauuauugugg

SEQ ID NO: 2788587 - RNA, 15 nt, Human
uuuuauuauuguggu

SEQ ID NO: 2788588 - RNA, 22 nt, Human
uuuuauuauugugguaggccuu

SEQ ID NO: 2788589 - RNA, 15 nt, Human
uuuuauuauuucuau

SEQ ID NO: 2788590 - RNA, 17 nt, Human
uuuuauuauuucuauua

SEQ ID NO: 2788591 - RNA, 14 nt, Human
uuuuauucaaguua

SEQ ID NO: 2788592 - RNA, 18 nt, Human
uuuucauggugaaaaugu

SEQ ID NO: 2788593 - RNA, 19 nt, Human
uuuuauaaguucacaaaau

SEQ ID NO: 2788594 - RNA, 15 nt, Human
uuuuccagucucuug

SEQ ID NO: 2788595 - RNA, 18 nt, Human
uuuuccagucucuuguac

SEQ ID NO: 2788596 - RNA, 20 nt, Human
uuuuccagggcaaucaaugu

SEQ ID NO: 2788597 - RNA, 16 nt, Human
uuuucauuacaaugga

SEQ ID NO: 2788598 - RNA, 19 nt, Human
uuuucauuacaauggaaac

SEQ ID NO: 2788599 - RNA, 21 nt, Human
uuuucauggugaaaauguacu

SEQ ID NO: 2788600 - RNA, 14 nt, Human
uuuucauucucauu

SEQ ID NO: 2788601 - RNA, 15 nt, Human
auuaucaauaucuaa

SEQ ID NO: 2788602 - RNA, 17 nt, Human
auuaucaauaucuaaua

SEQ ID NO: 2788603 - RNA, 19 nt, Human
auuaucaauaucuaauaua

SEQ ID NO: 2788604 - RNA, 12 nt, Human
auuaucccugaa

SEQ ID NO: 2788605 - RNA, 16 nt, Human
auuauccuagauuaua

SEQ ID NO: 2788606 - RNA, 21 nt, Human
auuauccuagauuauaucaaa

SEQ ID NO: 2788607 - RNA, 17 nt, Human
auuauccuauuucagua

SEQ ID NO: 2788608 - RNA, 21 nt, Human
auuauccugaacucuucugca

SEQ ID NO: 2788609 - RNA, 17 nt, Human
auuauccauauugaguc

SEQ ID NO: 2788610 - RNA, 14 nt, Human
auuauccauauuga

SEQ ID NO: 2788611 - RNA, 20 nt, Human
auuauguuuuuuaaaauauu

SEQ ID NO: 2788612 - RNA, 16 nt, Human
auuauguuuuuauuaa

SEQ ID NO: 2788613 - RNA, 18 nt, Human
auuauguuuuuauuaaga

SEQ ID NO: 2788614 - RNA, 23 nt, Human
auuauguuuuuauuaagauuauu

SEQ ID NO: 2788615 - RNA, 16 nt, Human
auuauguuuuuuaaaa

SEQ ID NO: 2788616 - RNA, 14 nt, Human
auuauuaacuacau

SEQ ID NO: 2788617 - RNA, 15 nt, Human
auuauuaacuacauu

SEQ ID NO: 2788618 - RNA, 18 nt, Human
auuauuaacuacauuuau

SEQ ID NO: 2788619 - RNA, 19 nt, Human
auuauuaacuacauuuaug

SEQ ID NO: 2788620 - RNA, 20 nt, Human
auuauuaacuacauuuauga

SEQ ID NO: 2788621 - RNA, 22 nt, Human
auuaucuauagcuaaguacaca

SEQ ID NO: 2788622 - RNA, 19 nt, Human
auuaucuauagcuaaguac

SEQ ID NO: 2788623 - RNA, 20 nt, Human
auuauguuguuagagaaaaa

SEQ ID NO: 2788624 - RNA, 22 nt, Human
auuaucuugggauaguucccaa

SEQ ID NO: 2788625 - RNA, 17 nt, Human
auuaucucacuugugcc

SEQ ID NO: 2788626 - RNA, 19 nt, Human
auuaucuauuugugugugu

SEQ ID NO: 2788627 - RNA, 13 nt, Human
auuauuuuaaaca

SEQ ID NO: 2788628 - RNA, 14 nt, Human
auuauuuuaaacaa

SEQ ID NO: 2788629 - RNA, 22 nt, Human
auuauuuauauggggaauauau

SEQ ID NO: 2788630 - RNA, 17 nt, Human
auuauuuguguaauaga

SEQ ID NO: 2788631 - RNA, 18 nt, Human
auuauuuguguaauagaa

SEQ ID NO: 2788632 - RNA, 12 nt, Human
auuauuuguguu

SEQ ID NO: 2788633 - RNA, 20 nt, Human
auuauuuguguaauagaaaa

SEQ ID NO: 2788634 - RNA, 23 nt, Human
auuauuuguguaauagaaaacug

SEQ ID NO: 2788635 - RNA, 15 nt, Human
auuauuuguguuuua

SEQ ID NO: 2788636 - RNA, 22 nt, Human
auuauuuguguuuuaauuuaaa

SEQ ID NO: 2788637 - RNA, 13 nt, Human
auuauucauuuag

SEQ ID NO: 2788638 - RNA, 15 nt, Human
auuauucauuuagug

SEQ ID NO: 2788639 - RNA, 12 nt, Human
auuauucauuua

SEQ ID NO: 2788640 - RNA, 12 nt, Human
auuauugaaauu

SEQ ID NO: 2788641 - RNA, 21 nt, Human
auuauugaaggaagccaaauu

SEQ ID NO: 2788642 - RNA, 12 nt, Human
auuauucucuuu

SEQ ID NO: 2788643 - RNA, 14 nt, Human
auuauucucuuuua

SEQ ID NO: 2788644 - RNA, 18 nt, Human
auuauucucuuuuaucug

SEQ ID NO: 2788645 - RNA, 21 nt, Human
auuauucucuuuuaucuguuu

SEQ ID NO: 2788646 - RNA, 12 nt, Human
auuauucuugua

SEQ ID NO: 2788647 - RNA, 13 nt, Human
auuauucuuguag

SEQ ID NO: 2788648 - RNA, 13 nt, Human
auuauuuauaugg

SEQ ID NO: 2788649 - RNA, 12 nt, Human
auuauuuauaau

SEQ ID NO: 2788650 - RNA, 21 nt, Human
auuauuuaauaacauuaccuu

SEQ ID NO: 2788651 - RNA, 22 nt, Human
auuauuuaauaacauuaccuua

SEQ ID NO: 2788652 - RNA, 21 nt, Human
auuauuuaauaaaaaaacaau

SEQ ID NO: 2788653 - RNA, 15 nt, Human
auuauugauaguacu

SEQ ID NO: 2788654 - RNA, 17 nt, Human
auuauugauaguacucu

SEQ ID NO: 2788655 - RNA, 13 nt, Human
auuauugauauau

SEQ ID NO: 2788656 - RNA, 15 nt, Human
auuauugauauauau

SEQ ID NO: 2788657 - RNA, 13 nt, Human
auuauuuaauaac

SEQ ID NO: 2788658 - RNA, 14 nt, Human
auuauuuaauaaca

SEQ ID NO: 2788659 - RNA, 15 nt, Human
auuauuuaauaacau

SEQ ID NO: 2788660 - RNA, 18 nt, Human
auuauuuaauaacauuac

SEQ ID NO: 2788661 - RNA, 19 nt, Human
auuauagguaaucaaugaa

SEQ ID NO: 2788662 - RNA, 21 nt, Human
auuauagguaaucaaugaaua

SEQ ID NO: 2788663 - RNA, 17 nt, Human
auuauaggaucauuugu

SEQ ID NO: 2788664 - RNA, 17 nt, Human
auuauaggagccuuaau

SEQ ID NO: 2788665 - RNA, 19 nt, Human
auuauaggagccuuaauuu

SEQ ID NO: 2788666 - RNA, 19 nt, Human
auuauagauucuaaagauu

SEQ ID NO: 2788667 - RNA, 13 nt, Human
auuauaaugaauu

SEQ ID NO: 2788668 - RNA, 21 nt, Human
auuagaauuagugccagaauu

SEQ ID NO: 2788669 - RNA, 13 nt, Human
auuauagauucua

SEQ ID NO: 2788670 - RNA, 14 nt, Human
auuauagauucuaa

SEQ ID NO: 2788671 - RNA, 15 nt, Human
auuauagauucuaaa

SEQ ID NO: 2788672 - RNA, 16 nt, Human
auuauagauucuaaag

SEQ ID NO: 2788673 - RNA, 17 nt, Human
auuauagauucuaaaga

SEQ ID NO: 2788674 - RNA, 18 nt, Human
auuauagauucuaaagau

SEQ ID NO: 2788675 - RNA, 13 nt, Human
auuagaauuauuu

SEQ ID NO: 2788676 - RNA, 13 nt, Human
auuagagcaggcg

SEQ ID NO: 2788677 - RNA, 14 nt, Human
auuagagcauugaa

SEQ ID NO: 2788678 - RNA, 15 nt, Human
auuauaagucacaaa

SEQ ID NO: 2788679 - RNA, 12 nt, Human
auuauaagcauu

SEQ ID NO: 2788680 - RNA, 17 nt, Human
auuauaagcauugaaau

SEQ ID NO: 2788681 - RNA, 18 nt, Human
auuauaagcauugaaauu

SEQ ID NO: 2788682 - RNA, 17 nt, Human
auuacuggcguggauua

SEQ ID NO: 2788683 - RNA, 18 nt, Human
auuacuggcguggauuaa

SEQ ID NO: 2788684 - RNA, 21 nt, Human
auuacuggcguggauuaaacu

SEQ ID NO: 2788685 - RNA, 22 nt, Human
auuacuggcguggauuaaacuu

SEQ ID NO: 2788686 - RNA, 23 nt, Human
auuacuggcguggauuaaacuua

SEQ ID NO: 2788687 - RNA, 12 nt, Human
auuacugggccu

SEQ ID NO: 2788688 - RNA, 13 nt, Human
auuacugggccuu

SEQ ID NO: 2788689 - RNA, 14 nt, Human
auuacugggccuua

SEQ ID NO: 2788690 - RNA, 15 nt, Human
auuacugggccuuag

SEQ ID NO: 2788691 - RNA, 11 nt, Human
auuacuuuauc

SEQ ID NO: 2788692 - RNA, 14 nt, Human
auuacuuuaucacu

SEQ ID NO: 2788693 - RNA, 15 nt, Human
auuacuuuaucacuu

SEQ ID NO: 2788694 - RNA, 16 nt, Human
auuacuuuaucacuuu

SEQ ID NO: 2788695 - RNA, 23 nt, Human
auuacuuuaucacuuuuugaacu

SEQ ID NO: 2788696 - RNA, 14 nt, Human
auuacuuuuuucca

SEQ ID NO: 2788697 - RNA, 15 nt, Human
auuacuuuuuuccaa

SEQ ID NO: 2788698 - RNA, 16 nt, Human
auuagaaaaaaauuac

SEQ ID NO: 2788699 - RNA, 22 nt, Human
auuagaaaaaaauuacuaauuu

SEQ ID NO: 2788700 - RNA, 21 nt, Human
auuagaaaaauagcaacuugu

SEQ ID NO: 2788701 - RNA, 17 nt, Human
auuagaaaaauuccuaa

SEQ ID NO: 2788702 - RNA, 10 nt, Human
auuagaacuu

SEQ ID NO: 2788703 - RNA, 11 nt, Human
auuagaacuuc

SEQ ID NO: 2788704 - RNA, 15 nt, Human
auuagaaauuagaaa

SEQ ID NO: 2788705 - RNA, 17 nt, Human
auuagaaauuggcugga

SEQ ID NO: 2788706 - RNA, 20 nt, Human
auuaauauauguauuauuua

SEQ ID NO: 2788707 - RNA, 23 nt, Human
auuaauagcuuuuauuguauaaa

SEQ ID NO: 2788708 - RNA, 16 nt, Human
auuaauauauguauua

SEQ ID NO: 2788709 - RNA, 18 nt, Human
auuaauagcuuuuauugu

SEQ ID NO: 2788710 - RNA, 19 nt, Human
auuaauagcuuuuauugua

SEQ ID NO: 2788711 - RNA, 13 nt, Human
auuaauagcuuuu

SEQ ID NO: 2788712 - RNA, 15 nt, Human
auuaaucuuggauag

SEQ ID NO: 2788713 - RNA, 21 nt, Human
auuaaucuuggauagcuaaua

SEQ ID NO: 2788714 - RNA, 21 nt, Human
auuaauauauguauuauuuau

SEQ ID NO: 2788715 - RNA, 18 nt, Human
auuaauauuaauuuucua

SEQ ID NO: 2788716 - RNA, 22 nt, Human
auuaauauauguauuauuuaua

SEQ ID NO: 2788717 - RNA, 15 nt, Human
auuaaguaaucaaua

SEQ ID NO: 2788718 - RNA, 18 nt, Human
auuaaguaaucaauaaag

SEQ ID NO: 2788719 - RNA, 18 nt, Human
uuuuuuaaaaaaagaaaa

SEQ ID NO: 2788720 - RNA, 17 nt, Human
uuuuuguuuuacaaugu

SEQ ID NO: 2788721 - RNA, 15 nt, Human
uuuuuguuuguuucu

SEQ ID NO: 2788722 - RNA, 20 nt, Human
uuuuuguuucugagaaaaga

SEQ ID NO: 2788723 - RNA, 13 nt, Human
uuuuuguuugaug

SEQ ID NO: 2788724 - RNA, 21 nt, Human
auuaacaugcuuaugacaaug

SEQ ID NO: 2788725 - RNA, 13 nt, Human
auuaagaauguug

SEQ ID NO: 2788726 - RNA, 21 nt, Human
auuaagaauguugguuuacuu

SEQ ID NO: 2788727 - RNA, 23 nt, Human
auuaagaauguugguuuacuuuc

SEQ ID NO: 2788728 - RNA, 17 nt, Human
auuaagaggcagaaaau

SEQ ID NO: 2788729 - RNA, 14 nt, Human
auuaagauacaaau

SEQ ID NO: 2788730 - RNA, 15 nt, Human
auuaagauacaaauu

SEQ ID NO: 2788731 - RNA, 16 nt, Human
auuaagauacaaauua

SEQ ID NO: 2788732 - RNA, 17 nt, Human
auuaagauacaaauuaa

SEQ ID NO: 2788733 - RNA, 14 nt, Human
auuaccuaaugaaa

SEQ ID NO: 2788734 - RNA, 15 nt, Human
auuaccuaaugaaag

SEQ ID NO: 2788735 - RNA, 18 nt, Human
auuaccagcaagaauaaa

SEQ ID NO: 2788736 - RNA, 15 nt, Human
auuacucuuaaggaa

SEQ ID NO: 2788737 - RNA, 12 nt, Human
auuaccuucucc

SEQ ID NO: 2788738 - RNA, 21 nt, Human
auuaccuuuuaccagcuuuua

SEQ ID NO: 2788739 - RNA, 13 nt, Human
auuaccuuacugu

SEQ ID NO: 2788740 - RNA, 14 nt, Human
auucagccuguuug

SEQ ID NO: 2788741 - RNA, 14 nt, Human
auuauuuuauuaug

SEQ ID NO: 2788742 - RNA, 15 nt, Human
auuauuuuaaacaaa

SEQ ID NO: 2788743 - RNA, 21 nt, Human
auuauuuuaaacaaaauagaa

SEQ ID NO: 2788744 - RNA, 14 nt, Human
auuauuuucauuac

SEQ ID NO: 2788745 - RNA, 17 nt, Human
auuauuuucauuacaau

SEQ ID NO: 2788746 - RNA, 19 nt, Human
auuauuuucauuacaaugg

SEQ ID NO: 2788747 - RNA, 21 nt, Human
auuauuuucauuacaauggaa

SEQ ID NO: 2788748 - RNA, 21 nt, Human
auucaaaaguuccaagagucu

SEQ ID NO: 2788749 - RNA, 14 nt, Human
auuauuuucuguca

SEQ ID NO: 2788750 - RNA, 15 nt, Human
auuauuuucugucag

SEQ ID NO: 2788751 - RNA, 16 nt, Human
auuauuuucugucaga

SEQ ID NO: 2788752 - RNA, 22 nt, Human
auuauuuucugucagaugagaa

SEQ ID NO: 2788753 - RNA, 14 nt, Human
auuauuuucuucau

SEQ ID NO: 2788754 - RNA, 17 nt, Human
auucaaaaguuccaaga

SEQ ID NO: 2788755 - RNA, 16 nt, Human
auucaaaaugauguau

SEQ ID NO: 2788756 - RNA, 12 nt, Human
auucaaaauauu

SEQ ID NO: 2788757 - RNA, 14 nt, Human
auucaaaauauuua

SEQ ID NO: 2788758 - RNA, 15 nt, Human
auucaaaauauuuaa

SEQ ID NO: 2788759 - RNA, 16 nt, Human
auucaaaauauuuaaa

SEQ ID NO: 2788760 - RNA, 22 nt, Human
auucaaaauauuuaaaaauguc

SEQ ID NO: 2788761 - RNA, 21 nt, Human
auucaggaauguguggccugc

SEQ ID NO: 2788762 - RNA, 17 nt, Human
auucagcugagguucau

SEQ ID NO: 2788763 - RNA, 21 nt, Human
auucagcugagguucauuaca

SEQ ID NO: 2788764 - RNA, 15 nt, Human
auucauaaaaacugc

SEQ ID NO: 2788765 - RNA, 16 nt, Human
auucauaaaaacugcu

SEQ ID NO: 2788766 - RNA, 14 nt, Human
auucaguuuucauu

SEQ ID NO: 2788767 - RNA, 13 nt, Human
auuccacagcugc

SEQ ID NO: 2788768 - RNA, 15 nt, Human
auucaguuuucauuu

SEQ ID NO: 2788769 - RNA, 13 nt, Human
auucaguuuucau

SEQ ID NO: 2788770 - RNA, 12 nt, Human
auuccacuggac

SEQ ID NO: 2788771 - RNA, 19 nt, Human
auuccagaagaagagaagc

SEQ ID NO: 2788772 - RNA, 21 nt, Human
auuccagaagaagagaagcug

SEQ ID NO: 2788773 - RNA, 22 nt, Human
auuccagaagaagagaagcugc

SEQ ID NO: 2788774 - RNA, 23 nt, Human
auuccagaagaagagaagcugcu

SEQ ID NO: 2788775 - RNA, 16 nt, Human
auuccauucuggauuu

SEQ ID NO: 2788776 - RNA, 19 nt, Human
auuccauugccuagcucuu

SEQ ID NO: 2788777 - RNA, 20 nt, Human
auuccauugccuagcucuuu

SEQ ID NO: 2788778 - RNA, 16 nt, Human
auuccauugguccaag

SEQ ID NO: 2788779 - RNA, 17 nt, Human
auuccauugguccaaga

SEQ ID NO: 2788780 - RNA, 23 nt, Human
auuccauugguccaagauuccgg

SEQ ID NO: 2788781 - RNA, 23 nt, Human
auuccauguuuggaagacccuug

SEQ ID NO: 2788782 - RNA, 12 nt, Human
auuccaugcuaa

SEQ ID NO: 2788783 - RNA, 17 nt, Human
auuccaugcuaagcaag

SEQ ID NO: 2788784 - RNA, 22 nt, Human
auuccaugcuaagcaagcuaac

SEQ ID NO: 2788785 - RNA, 18 nt, Human
auuccguugucuguggau

SEQ ID NO: 2788786 - RNA, 19 nt, Human
auuccguugucuguggaug

SEQ ID NO: 2788787 - RNA, 13 nt, Human
auuccggauccua

SEQ ID NO: 2788788 - RNA, 15 nt, Human
auuccggauccuaag

SEQ ID NO: 2788789 - RNA, 16 nt, Human
auuccggauccuaagc

SEQ ID NO: 2788790 - RNA, 19 nt, Human
auuccggauccuaagcauc

SEQ ID NO: 2788791 - RNA, 21 nt, Human
auuccauuugaggauuuagaa

SEQ ID NO: 2788792 - RNA, 17 nt, Human
auucccaacuagacauu

SEQ ID NO: 2788793 - RNA, 21 nt, Human
auucccaacuagacauuacca

SEQ ID NO: 2788794 - RNA, 22 nt, Human
auucccaacugaguguuauuug

SEQ ID NO: 2788795 - RNA, 20 nt, Human
auuccccagauugcaacagg

SEQ ID NO: 2788796 - RNA, 18 nt, Human
auuuaccagggauguaga

SEQ ID NO: 2788797 - RNA, 19 nt, Human
auuuaccagggauguagau

SEQ ID NO: 2788798 - RNA, 23 nt, Human
auuuaauuuuuuugagacagagu

SEQ ID NO: 2788799 - RNA, 19 nt, Human
auuuaauuuuuuugagaca

SEQ ID NO: 2788800 - RNA, 13 nt, Human
auuuaacuggcuu

SEQ ID NO: 2788801 - RNA, 18 nt, Human
auuuaacuggugcacuuu

SEQ ID NO: 2788802 - RNA, 21 nt, Human
auuuaacuggugcacuuugua

SEQ ID NO: 2788803 - RNA, 22 nt, Human
auuuaacuggugcacuuuguaa

SEQ ID NO: 2788804 - RNA, 23 nt, Human
auuuaacuggugcacuuuguaaa

SEQ ID NO: 2788805 - RNA, 13 nt, Human
auuuaacugaaga

SEQ ID NO: 2788806 - RNA, 18 nt, Human
auuuaacuacccuuaauu

SEQ ID NO: 2788807 - RNA, 19 nt, Human
auuuaacuacccuuaauua

SEQ ID NO: 2788808 - RNA, 21 nt, Human
auuuaacuacccuuaauuacu

SEQ ID NO: 2788809 - RNA, 22 nt, Human
auuuaacuacccuuaauuacuu

SEQ ID NO: 2788810 - RNA, 23 nt, Human
auuuaacuacccuuaauuacuua

SEQ ID NO: 2788811 - RNA, 15 nt, Human
auuuaacauuauuua

SEQ ID NO: 2788812 - RNA, 16 nt, Human
auuuaacauuauuuau

SEQ ID NO: 2788813 - RNA, 13 nt, Human
auuuaacaugcaa

SEQ ID NO: 2788814 - RNA, 22 nt, Human
auuuaacaugcaacccgaaggu

SEQ ID NO: 2788815 - RNA, 17 nt, Human
auuuaacauuauuuaua

SEQ ID NO: 2788816 - RNA, 20 nt, Human
auuuaacauuauuuauaugg

SEQ ID NO: 2788817 - RNA, 19 nt, Human
auuuaacccauuugucucu

SEQ ID NO: 2788818 - RNA, 17 nt, Human
auuuaacagggagggga

SEQ ID NO: 2788819 - RNA, 15 nt, Human
auuuaaagccuccuc

SEQ ID NO: 2788820 - RNA, 12 nt, Human
auuuaaagcauu

SEQ ID NO: 2788821 - RNA, 18 nt, Human
auuuaaagcauugcuguu

SEQ ID NO: 2788822 - RNA, 21 nt, Human
auuuaaagcauugcuguuaug

SEQ ID NO: 2788823 - RNA, 16 nt, Human
auuuaaagcauugcuu

SEQ ID NO: 2788824 - RNA, 14 nt, Human
auuuaaacagcagu

SEQ ID NO: 2788825 - RNA, 15 nt, Human
auuuaaacagcagug

SEQ ID NO: 2788826 - RNA, 16 nt, Human
auuuaaacagcagugu

SEQ ID NO: 2788827 - RNA, 20 nt, Human
auuuaaacagcaguguuccc

SEQ ID NO: 2788828 - RNA, 13 nt, Human
auuuaaaacaugu

SEQ ID NO: 2788829 - RNA, 14 nt, Human
auuuaaaacaugua

SEQ ID NO: 2788830 - RNA, 15 nt, Human
auuuaaaacauguaa

SEQ ID NO: 2788831 - RNA, 19 nt, Human
auuuaaacaauaaaugugc

SEQ ID NO: 2788832 - RNA, 13 nt, Human
auuuaaacacaca

SEQ ID NO: 2788833 - RNA, 14 nt, Human
auuuaaacacacag

SEQ ID NO: 2788834 - RNA, 15 nt, Human
auuuaaacacacaga

SEQ ID NO: 2788835 - RNA, 18 nt, Human
auugucuuuugucaugug

SEQ ID NO: 2788836 - RNA, 20 nt, Human
auugucuuuugucauguggc

SEQ ID NO: 2788837 - RNA, 18 nt, Human
auugucucguuugugauu

SEQ ID NO: 2788838 - RNA, 19 nt, Human
auugucucguuugugauuc

SEQ ID NO: 2788839 - RNA, 19 nt, Human
auugugccaauauguauug

SEQ ID NO: 2788840 - RNA, 16 nt, Human
auugugaacauuugug

SEQ ID NO: 2788841 - RNA, 18 nt, Human
auugugaacauuugugau

SEQ ID NO: 2788842 - RNA, 20 nt, Human
auugugcuucacaguagagc

SEQ ID NO: 2788843 - RNA, 15 nt, Human
auugugcuucacagu

SEQ ID NO: 2788844 - RNA, 11 nt, Human
auugugcugcc

SEQ ID NO: 2788845 - RNA, 12 nt, Human
auugugcugcca

SEQ ID NO: 2788846 - RNA, 13 nt, Human
auugugcugccau

SEQ ID NO: 2788847 - RNA, 15 nt, Human
auugugcugccauuu

SEQ ID NO: 2788848 - RNA, 24 nt, Human
auugugcuucacaguagagccagc

SEQ ID NO: 2788849 - RNA, 12 nt, Human
auugugcuucuc

SEQ ID NO: 2788850 - RNA, 14 nt, Human
auugugcuucuccc

SEQ ID NO: 2788851 - RNA, 17 nt, Human
auugugcuucuccccag

SEQ ID NO: 2788852 - RNA, 18 nt, Human
auugugcuucuccccaga

SEQ ID NO: 2788853 - RNA, 19 nt, Human
auugugcuucuccccagaa

SEQ ID NO: 2788854 - RNA, 20 nt, Human
auugugcuucuccccagaau

SEQ ID NO: 2788855 - RNA, 18 nt, Human
auuguggauaacaaagau

SEQ ID NO: 2788856 - RNA, 21 nt, Human
auuguggauaacaaagauauc

SEQ ID NO: 2788857 - RNA, 14 nt, Human
auugucuucaugua

SEQ ID NO: 2788858 - RNA, 17 nt, Human
auuguuuccucuuccaa

SEQ ID NO: 2788859 - RNA, 20 nt, Human
auuguuuccucuuccaaagu

SEQ ID NO: 2788860 - RNA, 15 nt, Human
auuguuucuauacaa

SEQ ID NO: 2788861 - RNA, 16 nt, Human
auuguuucuauacaaa

SEQ ID NO: 2788862 - RNA, 19 nt, Human
auuguuucuauacaaauau

SEQ ID NO: 2788863 - RNA, 17 nt, Human
auuguuucucaaaucuu

SEQ ID NO: 2788864 - RNA, 15 nt, Human
auuguuucugugggc

SEQ ID NO: 2788865 - RNA, 21 nt, Human
auuguuucuuuaucaccuggc

SEQ ID NO: 2788866 - RNA, 12 nt, Human
auuguuugcugc

SEQ ID NO: 2788867 - RNA, 15 nt, Human
auuguuugcugcuau

SEQ ID NO: 2788868 - RNA, 18 nt, Human
auuguuuggcuuccuccu

SEQ ID NO: 2788869 - RNA, 20 nt, Human
auuguuuggcuuccuccuga

SEQ ID NO: 2788870 - RNA, 21 nt, Human
auugcuaaucaccaaaggcuc

SEQ ID NO: 2788871 - RNA, 14 nt, Human
auugcuaauugcug

SEQ ID NO: 2788872 - RNA, 15 nt, Human
auugcuaauugcugu

SEQ ID NO: 2788873 - RNA, 16 nt, Human
auugcuaauugcuguu

SEQ ID NO: 2788874 - RNA, 19 nt, Human
auugcuaauugcuguugaa

SEQ ID NO: 2788875 - RNA, 20 nt, Human
auugcuaauugcuguugaaa

SEQ ID NO: 2788876 - RNA, 23 nt, Human
auugcuaauugcuguugaaagca

SEQ ID NO: 2788877 - RNA, 21 nt, Human
auugcuacuacuuaccuacca

SEQ ID NO: 2788878 - RNA, 13 nt, Human
auugcgcugcuac

SEQ ID NO: 2788879 - RNA, 20 nt, Human
auugcguuugaccuuuuaug

SEQ ID NO: 2788880 - RNA, 13 nt, Human
auugcguuggucu

SEQ ID NO: 2788881 - RNA, 17 nt, Human
auugcguuggucucugc

SEQ ID NO: 2788882 - RNA, 20 nt, Human
auugcguuggucucugcauu

SEQ ID NO: 2788883 - RNA, 21 nt, Human
auugcguuugaccuuuuaugu

SEQ ID NO: 2788884 - RNA, 16 nt, Human
auuggcuuuucaugcg

SEQ ID NO: 2788885 - RNA, 13 nt, Human
auuguauaaacua

SEQ ID NO: 2788886 - RNA, 17 nt, Human
auuguauaaacuaucag

SEQ ID NO: 2788887 - RNA, 21 nt, Human
auuguauaaacuaucaguuug

SEQ ID NO: 2788888 - RNA, 22 nt, Human
auuguauaaacuaucaguuugu

SEQ ID NO: 2788889 - RNA, 14 nt, Human
auuggcuuguagaa

SEQ ID NO: 2788890 - RNA, 15 nt, Human
auuggcuuguagaau

SEQ ID NO: 2788891 - RNA, 16 nt, Human
auuggcuuguagaauu

SEQ ID NO: 2788892 - RNA, 17 nt, Human
auuggcuuguagaauug

SEQ ID NO: 2788893 - RNA, 18 nt, Human
auuggcuuguagaauugu

SEQ ID NO: 2788894 - RNA, 19 nt, Human
auuggcuuguagaauuguu

SEQ ID NO: 2788895 - RNA, 22 nt, Human
auuggcuuguagaauuguuaua

SEQ ID NO: 2788896 - RNA, 22 nt, Human
auuggcugaacucaugagaagu

SEQ ID NO: 2788897 - RNA, 17 nt, Human
auuguauauuguguuug

SEQ ID NO: 2788898 - RNA, 13 nt, Human
auuguaugaugug

SEQ ID NO: 2788899 - RNA, 12 nt, Human
auuguaugaugu

SEQ ID NO: 2788900 - RNA, 21 nt, Human
auuguaugauguguugugaua

SEQ ID NO: 2788901 - RNA, 14 nt, Human
auuguaugaugugu

SEQ ID NO: 2788902 - RNA, 15 nt, Human
auuguaugauguguu

SEQ ID NO: 2788903 - RNA, 13 nt, Human
auugacagaagcu

SEQ ID NO: 2788904 - RNA, 18 nt, Human
auucuaaugucuucauuu

SEQ ID NO: 2788905 - RNA, 22 nt, Human
auucuagaucagaugcuccaag

SEQ ID NO: 2788906 - RNA, 23 nt, Human
auucuagaucagaugcuccaaga

SEQ ID NO: 2788907 - RNA, 23 nt, Human
auugaccgcgacuaauuucaaaa

SEQ ID NO: 2788908 - RNA, 20 nt, Human
auugaccgcgacuaauuuca

SEQ ID NO: 2788909 - RNA, 17 nt, Human
auugaccgcgacuaauu

SEQ ID NO: 2788910 - RNA, 15 nt, Human
auugcaacaggcugg

SEQ ID NO: 2788911 - RNA, 19 nt, Human
auugcaaaucuugaaauua

SEQ ID NO: 2788912 - RNA, 17 nt, Human
auugcaaaucuugaaau

SEQ ID NO: 2788913 - RNA, 16 nt, Human
auugcaaaucuugaaa

SEQ ID NO: 2788914 - RNA, 12 nt, Human
auugcaaaucuu

SEQ ID NO: 2788915 - RNA, 23 nt, Human
auugcaaagguuccaacuguaua

SEQ ID NO: 2788916 - RNA, 19 nt, Human
auugcaaaauagcauuugu

SEQ ID NO: 2788917 - RNA, 21 nt, Human
auugcaacaggcugggcuuca

SEQ ID NO: 2788918 - RNA, 13 nt, Human
auugcacaauauu

SEQ ID NO: 2788919 - RNA, 11 nt, Human
auugcacaaua

SEQ ID NO: 2788920 - RNA, 17 nt, Human
auugcaauaucugaagc

SEQ ID NO: 2788921 - RNA, 14 nt, Human
auugcaauaucuga

SEQ ID NO: 2788922 - RNA, 16 nt, Human
auugcaauaucugaag

SEQ ID NO: 2788923 - RNA, 16 nt, Human
auugcagguggaacuc

SEQ ID NO: 2788924 - RNA, 17 nt, Human
auugcagguggaacuca

SEQ ID NO: 2788925 - RNA, 19 nt, Human
auugcagucauagaagaga

SEQ ID NO: 2788926 - RNA, 14 nt, Human
auugcagcuuuaug

SEQ ID NO: 2788927 - RNA, 16 nt, Human
auugcagcuuuauguu

SEQ ID NO: 2788928 - RNA, 17 nt, Human
auugcagcuuuauguuc

SEQ ID NO: 2788929 - RNA, 20 nt, Human
auugcagcuuuauguucauu

SEQ ID NO: 2788930 - RNA, 20 nt, Human
auugcagauaacuuugacuu

SEQ ID NO: 2788931 - RNA, 22 nt, Human
auugcacaauauugaacuuuuu

SEQ ID NO: 2788932 - RNA, 16 nt, Human
auugcacagaaguccu

SEQ ID NO: 2788933 - RNA, 19 nt, Human
auugcggacagccacggcc

SEQ ID NO: 2788934 - RNA, 18 nt, Human
auugcggacagccacggc

SEQ ID NO: 2788935 - RNA, 16 nt, Human
auugcggacagccacg

SEQ ID NO: 2788936 - RNA, 21 nt, Human
auugcccacgcuggagugcag

SEQ ID NO: 2788937 - RNA, 17 nt, Human
auugcccacgcuggagu

SEQ ID NO: 2788938 - RNA, 14 nt, Human
auugcccaggcugg

SEQ ID NO: 2788939 - RNA, 15 nt, Human
auugcccaggcuggu

SEQ ID NO: 2788940 - RNA, 16 nt, Human
auugcccaggcugguc

SEQ ID NO: 2788941 - RNA, 20 nt, Human
auugcccaggcuggucuuga

SEQ ID NO: 2788942 - RNA, 15 nt, Human
auugcccagucuuuc

SEQ ID NO: 2788943 - RNA, 16 nt, Human
auugcccagucuuuca

SEQ ID NO: 2788944 - RNA, 21 nt, Human
auugccaccaggagaaccacu

SEQ ID NO: 2788945 - RNA, 22 nt, Human
auugccaagcucaggaccaggc

SEQ ID NO: 2788946 - RNA, 15 nt, Human
auugccaccaggaga

SEQ ID NO: 2788947 - RNA, 14 nt, Human
auugccaccaggag

SEQ ID NO: 2788948 - RNA, 16 nt, Human
auugcauuuccugaca

SEQ ID NO: 2788949 - RNA, 17 nt, Human
auugcauuuccugacag

SEQ ID NO: 2788950 - RNA, 15 nt, Human
auugccaaaaaggau

SEQ ID NO: 2788951 - RNA, 16 nt, Human
auugccaaaaaggaua

SEQ ID NO: 2788952 - RNA, 22 nt, Human
auuuguaucucugaagcauguu

SEQ ID NO: 2788953 - RNA, 23 nt, Human
auuuguaucucugaagcauguuu

SEQ ID NO: 2788954 - RNA, 12 nt, Human
auuuuaauuuau

SEQ ID NO: 2788955 - RNA, 22 nt, Human
auuuguaggaaggucucauucu

SEQ ID NO: 2788956 - RNA, 23 nt, Human
auuuguaggaaggucucauucuu

SEQ ID NO: 2788957 - RNA, 14 nt, Human
auuuguaggagaaa

SEQ ID NO: 2788958 - RNA, 19 nt, Human
auuuguaguggaaacauuu

SEQ ID NO: 2788959 - RNA, 22 nt, Human
auuuguaguggaaacauuuaua

SEQ ID NO: 2788960 - RNA, 22 nt, Human
auuuguauauuacacauuugua

SEQ ID NO: 2788961 - RNA, 19 nt, Human
auuuguaucucugaagcau

SEQ ID NO: 2788962 - RNA, 20 nt, Human
auuuguaucucugaagcaug

SEQ ID NO: 2788963 - RNA, 21 nt, Human
auuuguaucucugaagcaugu

SEQ ID NO: 2788964 - RNA, 22 nt, Human
auuuuacaaaagaggagcacuu

SEQ ID NO: 2788965 - RNA, 18 nt, Human
auuuuaauuuaugaguuu

SEQ ID NO: 2788966 - RNA, 22 nt, Human
auuuuacacagaaacacugccu

SEQ ID NO: 2788967 - RNA, 20 nt, Human
auuuuacacagaaacacugc

SEQ ID NO: 2788968 - RNA, 19 nt, Human
auuuuacacagaaacacug

SEQ ID NO: 2788969 - RNA, 18 nt, Human
auuuuacacagaaacacu

SEQ ID NO: 2788970 - RNA, 23 nt, Human
auuuuacacagaaacacugccuu

SEQ ID NO: 2788971 - RNA, 13 nt, Human
auuuuacacauua

SEQ ID NO: 2788972 - RNA, 19 nt, Human
auuuuacacauuagauuuu

SEQ ID NO: 2788973 - RNA, 17 nt, Human
auuuuacacagaaacac

SEQ ID NO: 2788974 - RNA, 15 nt, Human
auuuuacacagaaac

SEQ ID NO: 2788975 - RNA, 14 nt, Human
auuuuacacagaaa

SEQ ID NO: 2788976 - RNA, 22 nt, Human
auuuuacuccauaaacagacug

SEQ ID NO: 2788977 - RNA, 21 nt, Human
auuuuacuuuaaaaggagcca

SEQ ID NO: 2788978 - RNA, 15 nt, Human
auuuuauguuuagau

SEQ ID NO: 2788979 - RNA, 12 nt, Human
auuuuauuaugc

SEQ ID NO: 2788980 - RNA, 13 nt, Human
auuuuauuuccau

SEQ ID NO: 2788981 - RNA, 16 nt, Human
auuuuauuuccaucau

SEQ ID NO: 2788982 - RNA, 17 nt, Human
auuuuauuuguuuuuca

SEQ ID NO: 2788983 - RNA, 12 nt, Human
auuuuauuacug

SEQ ID NO: 2788984 - RNA, 14 nt, Human
auuuuauuacuggc

SEQ ID NO: 2788985 - RNA, 21 nt, Human
auuuuauuacuggcguggauu

SEQ ID NO: 2788986 - RNA, 16 nt, Human
auuuauuaguuaauau

SEQ ID NO: 2788987 - RNA, 23 nt, Human
auuuauuaugcuuuauuggaaaa

SEQ ID NO: 2788988 - RNA, 13 nt, Human
auuuauguuugca

SEQ ID NO: 2788989 - RNA, 14 nt, Human
auuuaguaaauguu

SEQ ID NO: 2788990 - RNA, 15 nt, Human
auuuaguaaauguua

SEQ ID NO: 2788991 - RNA, 19 nt, Human
auuuauuaaaaugauugua

SEQ ID NO: 2788992 - RNA, 22 nt, Human
auuuauguuugcacuugugauu

SEQ ID NO: 2788993 - RNA, 23 nt, Human
auuuagguuuuuguuuguuuccu

SEQ ID NO: 2788994 - RNA, 21 nt, Human
auuuauuaaaaugauuguaaa

SEQ ID NO: 2788995 - RNA, 23 nt, Human
auuuauuaaaaugauuguaaaau

SEQ ID NO: 2788996 - RNA, 13 nt, Human
auuuauuaaauaa

SEQ ID NO: 2788997 - RNA, 14 nt, Human
auuuauuaaauaaa

SEQ ID NO: 2788998 - RNA, 16 nt, Human
auuuauuaaauaaaau

SEQ ID NO: 2788999 - RNA, 17 nt, Human
auuuauuaaauaaaauc

SEQ ID NO: 2789000 - RNA, 18 nt, Human
auuuauuaaauaaaauca

SEQ ID NO: 2789001 - RNA, 19 nt, Human
auuuacgcuuugauucaua

SEQ ID NO: 2789002 - RNA, 17 nt, Human
auuuacgcuuugauuca

SEQ ID NO: 2789003 - RNA, 15 nt, Human
auuuacgcuuugauu

SEQ ID NO: 2789004 - RNA, 13 nt, Human
auuuaccugcagg

SEQ ID NO: 2789005 - RNA, 21 nt, Human
auuuaccugcaggcugagcca

SEQ ID NO: 2789006 - RNA, 22 nt, Human
auuuagcuaaacggauuccaaa

SEQ ID NO: 2789007 - RNA, 21 nt, Human
auuuagcuaaacggauuccaa

SEQ ID NO: 2789008 - RNA, 17 nt, Human
auuuaggguacuaaauu

SEQ ID NO: 2789009 - RNA, 19 nt, Human
auuuaggguacuaaauuua

SEQ ID NO: 2789010 - RNA, 20 nt, Human
auuuaggguacuaaauuuaa

SEQ ID NO: 2789011 - RNA, 22 nt, Human
auuuaggguacuaaauuuaaau

SEQ ID NO: 2789012 - RNA, 23 nt, Human
auuuagcuaaacggauuccaaag

SEQ ID NO: 2789013 - RNA, 23 nt, Human
auuuaggaaguugacuuauagua

SEQ ID NO: 2789014 - RNA, 16 nt, Human
auuuaggaaguugacu

SEQ ID NO: 2789015 - RNA, 21 nt, Human
auuuaggagugugugacauuc

SEQ ID NO: 2789016 - RNA, 14 nt, Human
auuuccugugucuu

SEQ ID NO: 2789017 - RNA, 12 nt, Human
auuuauuauuga

SEQ ID NO: 2789018 - RNA, 12 nt, Human
auuuccuguguc

SEQ ID NO: 2789019 - RNA, 16 nt, Human
auuuccugugucaauc

SEQ ID NO: 2789020 - RNA, 16 nt, Human
auuuccuguuggauuu

SEQ ID NO: 2789021 - RNA, 21 nt, Human
auuuccuguuggauuuguuua

SEQ ID NO: 2789022 - RNA, 22 nt, Human
auuuccuguuggauuuguuuaa

SEQ ID NO: 2789023 - RNA, 23 nt, Human
auuuccuguuggauuuguuuaaa

SEQ ID NO: 2789024 - RNA, 15 nt, Human
auuucuaaauaaaag

SEQ ID NO: 2789025 - RNA, 14 nt, Human
auuuggucucuauu

SEQ ID NO: 2789026 - RNA, 12 nt, Human
auuugguacuuu

SEQ ID NO: 2789027 - RNA, 23 nt, Human
auuugguacuuuugagugugugu

SEQ ID NO: 2789028 - RNA, 23 nt, Human
auuuggggaaaccuagagaagau

SEQ ID NO: 2789029 - RNA, 14 nt, Human
auuuggggacagau

SEQ ID NO: 2789030 - RNA, 19 nt, Human
auuuggggacagauucagu

SEQ ID NO: 2789031 - RNA, 22 nt, Human
auuuggggacagauucagucuu

SEQ ID NO: 2789032 - RNA, 20 nt, Human
auuuggagacacaacuauuu

SEQ ID NO: 2789033 - RNA, 13 nt, Human
auuuggaauacuu

SEQ ID NO: 2789034 - RNA, 21 nt, Human
auuuggaagaaaaaaaucuuc

SEQ ID NO: 2789035 - RNA, 15 nt, Human
auuuggaauacuuuu

SEQ ID NO: 2789036 - RNA, 11 nt, Human
auuuggaauag

SEQ ID NO: 2789037 - RNA, 14 nt, Human
auuuggaauacuuu

SEQ ID NO: 2789038 - RNA, 23 nt, Human
auuuguacugaaaaaugguaauu

SEQ ID NO: 2789039 - RNA, 21 nt, Human
auuuguacuguuuaauguucu

SEQ ID NO: 2789040 - RNA, 22 nt, Human
auuuguacuguuuaauguucug

SEQ ID NO: 2789041 - RNA, 12 nt, Human
auuugauaauga

SEQ ID NO: 2789042 - RNA, 16 nt, Human
auuugauaaugauaaa

SEQ ID NO: 2789043 - RNA, 19 nt, Human
auuugauaaugauaaaaca

SEQ ID NO: 2789044 - RNA, 20 nt, Human
auuugauaaugauaaaacac

SEQ ID NO: 2789045 - RNA, 13 nt, Human
auuugauacauaa

SEQ ID NO: 2789046 - RNA, 14 nt, Human
auuugauacauaau

SEQ ID NO: 2789047 - RNA, 15 nt, Human
auuugauacauaaua

SEQ ID NO: 2789048 - RNA, 19 nt, Human
auuugauacauaauaaaaa

SEQ ID NO: 2789049 - RNA, 16 nt, Human
auuugauaccccuggg

SEQ ID NO: 2789050 - RNA, 12 nt, Human
auuugauacuua

SEQ ID NO: 2789051 - RNA, 13 nt, Human
auuugauacuuau

SEQ ID NO: 2789052 - RNA, 14 nt, Human
auuugauacuuaua

SEQ ID NO: 2789053 - RNA, 15 nt, Human
auuugauacuuauau

SEQ ID NO: 2789054 - RNA, 19 nt, Human
auuugauacuuauauuuuc

SEQ ID NO: 2789055 - RNA, 22 nt, Human
auuugauacuuauauuuucgua

SEQ ID NO: 2789056 - RNA, 17 nt, Human
auuugagcagggcucag

SEQ ID NO: 2789057 - RNA, 22 nt, Human
auuugaggacaaccauuccaga

SEQ ID NO: 2789058 - RNA, 20 nt, Human
auuugaggauuuagaagugu

SEQ ID NO: 2789059 - RNA, 22 nt, Human
auuugaggauuuagaaguguca

SEQ ID NO: 2789060 - RNA, 23 nt, Human
auuugaggauuuagaagugucau

SEQ ID NO: 2789061 - RNA, 14 nt, Human
auuugaggcucaga

SEQ ID NO: 2789062 - RNA, 17 nt, Human
auuugaggggaaaacac

SEQ ID NO: 2789063 - RNA, 22 nt, Human
auuugaggggaaaacaccauaa

SEQ ID NO: 2789064 - RNA, 16 nt, Human
auuugagcagggcuca

SEQ ID NO: 2789065 - RNA, 21 nt, Human
auuucuuuguuaucaaacuuc

SEQ ID NO: 2789066 - RNA, 14 nt, Human
auuucuuugcugua

SEQ ID NO: 2789067 - RNA, 17 nt, Human
auuucuuugcuguaaga

SEQ ID NO: 2789068 - RNA, 21 nt, Human
auuucuuugcuguaagauguc

SEQ ID NO: 2789069 - RNA, 22 nt, Human
auuucuuugcuguaagaugucu

SEQ ID NO: 2789070 - RNA, 22 nt, Human
auuucuuuguuaucaaacuuca

SEQ ID NO: 2789071 - RNA, 23 nt, Human
auuucuuuguuaucaaacuucag

SEQ ID NO: 2789072 - RNA, 16 nt, Human
auuucuuuucuuccug

SEQ ID NO: 2789073 - RNA, 18 nt, Human
auuucuuuucuuccuggc

SEQ ID NO: 2789074 - RNA, 19 nt, Human
auuucuuuucuuuuuacau

SEQ ID NO: 2789075 - RNA, 20 nt, Human
auuucuuuucuuuuuacaua

SEQ ID NO: 2789076 - RNA, 18 nt, Human
auuucuaauguuggacac

SEQ ID NO: 2789077 - RNA, 15 nt, Human
auauauaaaaauaua

SEQ ID NO: 2789078 - RNA, 12 nt, Human
auauaagaaaga

SEQ ID NO: 2789079 - RNA, 14 nt, Human
auauaagaaagaca

SEQ ID NO: 2789080 - RNA, 15 nt, Human
auauauaaagaauau

SEQ ID NO: 2789081 - RNA, 16 nt, Human
auauauaaagaauaua

SEQ ID NO: 2789082 - RNA, 17 nt, Human
auauauaaagaauauau

SEQ ID NO: 2789083 - RNA, 19 nt, Human
auauauaaagaauauauau

SEQ ID NO: 2789084 - RNA, 13 nt, Human
auauauaaaguau

SEQ ID NO: 2789085 - RNA, 15 nt, Human
auauauaaaguauag

SEQ ID NO: 2789086 - RNA, 18 nt, Human
auauauaaaguauagaga

SEQ ID NO: 2789087 - RNA, 13 nt, Human
auauauaagaaag

SEQ ID NO: 2789088 - RNA, 14 nt, Human
auauauaagaaaga

SEQ ID NO: 2789089 - RNA, 17 nt, Human
auauauaagaaagacau

SEQ ID NO: 2789090 - RNA, 18 nt, Human
auauauaagaaagacauc

SEQ ID NO: 2789091 - RNA, 22 nt, Human
auauauaagaaagacaucuuuc

SEQ ID NO: 2789092 - RNA, 13 nt, Human
auauauaauauau

SEQ ID NO: 2789093 - RNA, 17 nt, Human
auauaaaacaaauaaaa

SEQ ID NO: 2789094 - RNA, 17 nt, Human
auauauaacagauacau

SEQ ID NO: 2789095 - RNA, 18 nt, Human
auauauaacagauacauu

SEQ ID NO: 2789096 - RNA, 13 nt, Human
auauaacaugaaa

SEQ ID NO: 2789097 - RNA, 15 nt, Human
auauaacaugaaaug

SEQ ID NO: 2789098 - RNA, 16 nt, Human
auauaacaugaaauga

SEQ ID NO: 2789099 - RNA, 18 nt, Human
auauaacaugaaaugaua

SEQ ID NO: 2789100 - RNA, 20 nt, Human
auauaacaugaaaugauaga

SEQ ID NO: 2789101 - RNA, 15 nt, Human
auauaacagauacau

SEQ ID NO: 2789102 - RNA, 16 nt, Human
auauaacagauacauu

SEQ ID NO: 2789103 - RNA, 23 nt, Human
auauaaccacaaagcacaguuug

SEQ ID NO: 2789104 - RNA, 23 nt, Human
auauaacccuaacacacacagaa

SEQ ID NO: 2789105 - RNA, 21 nt, Human
auauaacuuaaaaauguaaau

SEQ ID NO: 2789106 - RNA, 18 nt, Human
auauaacuauugcccagg

SEQ ID NO: 2789107 - RNA, 13 nt, Human
auauaaaguauag

SEQ ID NO: 2789108 - RNA, 14 nt, Human
auauaaaguauaga

SEQ ID NO: 2789109 - RNA, 20 nt, Human
auauaaagggggagggaaau

SEQ ID NO: 2789110 - RNA, 21 nt, Human
auauaaagggggagggaaaua

SEQ ID NO: 2789111 - RNA, 20 nt, Human
auauaaaaggcaaaugugua

SEQ ID NO: 2789112 - RNA, 18 nt, Human
auauaaaagaucuugcag

SEQ ID NO: 2789113 - RNA, 19 nt, Human
auauaaaagaucuugcaga

SEQ ID NO: 2789114 - RNA, 14 nt, Human
auauaaagauguua

SEQ ID NO: 2789115 - RNA, 21 nt, Human
auauauccuuuucuucuaugu

SEQ ID NO: 2789116 - RNA, 23 nt, Human
auauauccuuuucuucuauguag

SEQ ID NO: 2789117 - RNA, 16 nt, Human
auauaucccagaaauu

SEQ ID NO: 2789118 - RNA, 12 nt, Human
auauaucugaaa

SEQ ID NO: 2789119 - RNA, 18 nt, Human
auauaucugaaaacugga

SEQ ID NO: 2789120 - RNA, 13 nt, Human
auauaugaaaacu

SEQ ID NO: 2789121 - RNA, 18 nt, Human
auauaucugcuucagugg

SEQ ID NO: 2789122 - RNA, 15 nt, Human
auauaucugcuucag

SEQ ID NO: 2789123 - RNA, 17 nt, Human
auauaucugcuucagug

SEQ ID NO: 2789124 - RNA, 12 nt, Human
auauaugaauaa

SEQ ID NO: 2789125 - RNA, 15 nt, Human
auauaugaaaacuau

SEQ ID NO: 2789126 - RNA, 16 nt, Human
auauaugaaaacuaua

SEQ ID NO: 2789127 - RNA, 17 nt, Human
auauaugaaaacuauac

SEQ ID NO: 2789128 - RNA, 20 nt, Human
auauaugaaaacuauacaac

SEQ ID NO: 2789129 - RNA, 12 nt, Human
uucacuucaaaa

SEQ ID NO: 2789130 - RNA, 15 nt, Human
uucacuuacagcacc

SEQ ID NO: 2789131 - RNA, 21 nt, Human
uucacuguugaaaauuauuuu

SEQ ID NO: 2789132 - RNA, 16 nt, Human
uucacuguuagcuuuu

SEQ ID NO: 2789133 - RNA, 22 nt, Human
uucacuguuagcuuuuuaaaac

SEQ ID NO: 2789134 - RNA, 22 nt, Human
uucacuguccuccaagccagcg

SEQ ID NO: 2789135 - RNA, 13 nt, Human
auauaugaggacu

SEQ ID NO: 2789136 - RNA, 15 nt, Human
auauaugcacuaugu

SEQ ID NO: 2789137 - RNA, 19 nt, Human
auauaugcacuauguauau

SEQ ID NO: 2789138 - RNA, 22 nt, Human
uucacuguauaaauaggagagg

SEQ ID NO: 2789139 - RNA, 23 nt, Human
uucacuguauaaauaggagagga

SEQ ID NO: 2789140 - RNA, 10 nt, Human
auauauauuu

SEQ ID NO: 2789141 - RNA, 13 nt, Human
auauaucauauug

SEQ ID NO: 2789142 - RNA, 20 nt, Human
auauaucauauugguauuca

SEQ ID NO: 2789143 - RNA, 14 nt, Human
auauaucaguuuga

SEQ ID NO: 2789144 - RNA, 15 nt, Human
auauaucaguuugau

SEQ ID NO: 2789145 - RNA, 17 nt, Human
auauauauuauaaauau

SEQ ID NO: 2789146 - RNA, 19 nt, Human
auauauauuauaaauauau

SEQ ID NO: 2789147 - RNA, 14 nt, Human
auauauaugaauaa

SEQ ID NO: 2789148 - RNA, 15 nt, Human
auauauaugaauaaa

SEQ ID NO: 2789149 - RNA, 19 nt, Human
auauauaugccuuuuuccu

SEQ ID NO: 2789150 - RNA, 20 nt, Human
auauauaugccuuuuuccua

SEQ ID NO: 2789151 - RNA, 14 nt, Human
auauauauauauac

SEQ ID NO: 2789152 - RNA, 15 nt, Human
auauauauauauaca

SEQ ID NO: 2789153 - RNA, 14 nt, Human
auauauauauauau

SEQ ID NO: 2789154 - RNA, 16 nt, Human
auauauauauauauaa

SEQ ID NO: 2789155 - RNA, 14 nt, Human
auauauaucaguuu

SEQ ID NO: 2789156 - RNA, 15 nt, Human
auauauaucaguuug

SEQ ID NO: 2789157 - RNA, 13 nt, Human
auauauauauauc

SEQ ID NO: 2789158 - RNA, 14 nt, Human
auauauauauauca

SEQ ID NO: 2789159 - RNA, 15 nt, Human
auauauauauaugca

SEQ ID NO: 2789160 - RNA, 14 nt, Human
auauauauaucagu

SEQ ID NO: 2789161 - RNA, 16 nt, Human
auauauauaucaguuu

SEQ ID NO: 2789162 - RNA, 13 nt, Human
auauauauauaaa

SEQ ID NO: 2789163 - RNA, 14 nt, Human
auauauauauaaag

SEQ ID NO: 2789164 - RNA, 14 nt, Human
auauauauauauaa

SEQ ID NO: 2789165 - RNA, 15 nt, Human
auauauauauauaaa

SEQ ID NO: 2789166 - RNA, 14 nt, Human
auauauauaaauau

SEQ ID NO: 2789167 - RNA, 15 nt, Human
auauauauauaaagu

SEQ ID NO: 2789168 - RNA, 15 nt, Human
auauauauaauauau

SEQ ID NO: 2789169 - RNA, 13 nt, Human
auauauauacaca

SEQ ID NO: 2789170 - RNA, 15 nt, Human
auauauauacacaca

SEQ ID NO: 2789171 - RNA, 13 nt, Human
auauauauacaua

SEQ ID NO: 2789172 - RNA, 14 nt, Human
auauauauacauau

SEQ ID NO: 2789173 - RNA, 16 nt, Human
auauauauacauaugu

SEQ ID NO: 2789174 - RNA, 10 nt, Human
auauauauau

SEQ ID NO: 2789175 - RNA, 11 nt, Human
auauauauaua

SEQ ID NO: 2789176 - RNA, 13 nt, Human
auauauauaaaua

SEQ ID NO: 2789177 - RNA, 23 nt, Human
auauauaagcucagauuauuuaa

SEQ ID NO: 2789178 - RNA, 16 nt, Human
auaguuggucaucuag

SEQ ID NO: 2789179 - RNA, 22 nt, Human
auaguugucaguauuauucuac

SEQ ID NO: 2789180 - RNA, 19 nt, Human
auaguuguccauauuuuca

SEQ ID NO: 2789181 - RNA, 13 nt, Human
auaguuuaaaaca

SEQ ID NO: 2789182 - RNA, 22 nt, Human
auaguuggcuaggaccccucca

SEQ ID NO: 2789183 - RNA, 12 nt, Human
auaguugcuuuu

SEQ ID NO: 2789184 - RNA, 15 nt, Human
auaguugcuuuugaa

SEQ ID NO: 2789185 - RNA, 20 nt, Human
auaguugcuuuugaaggaau

SEQ ID NO: 2789186 - RNA, 21 nt, Human
auaguugcuuuugaaggaaua

SEQ ID NO: 2789187 - RNA, 13 nt, Human
auaguuuugauga

SEQ ID NO: 2789188 - RNA, 20 nt, Human
auaguuuugaugacuggcau

SEQ ID NO: 2789189 - RNA, 22 nt, Human
auaguuuugaugacuggcauuu

SEQ ID NO: 2789190 - RNA, 13 nt, Human
auaguuuauugac

SEQ ID NO: 2789191 - RNA, 17 nt, Human
auaguuuaccugaauaa

SEQ ID NO: 2789192 - RNA, 13 nt, Human
auauaaaaacaaa

SEQ ID NO: 2789193 - RNA, 14 nt, Human
auauaaaaacaaaa

SEQ ID NO: 2789194 - RNA, 21 nt, Human
auaguuuuuaccuuuuaugua

SEQ ID NO: 2789195 - RNA, 14 nt, Human
auauaaaaauauau

SEQ ID NO: 2789196 - RNA, 17 nt, Human
auauaaaaauauauaua

SEQ ID NO: 2789197 - RNA, 19 nt, Human
auauaaaaauauauauagu

SEQ ID NO: 2789198 - RNA, 15 nt, Human
auaguuagaaccugg

SEQ ID NO: 2789199 - RNA, 22 nt, Human
auaguuaacauaguaaguucag

SEQ ID NO: 2789200 - RNA, 23 nt, Human
auaguuaggauagcauuuuugau

SEQ ID NO: 2789201 - RNA, 15 nt, Human
auaguucaaggaacu

SEQ ID NO: 2789202 - RNA, 14 nt, Human
auaguucacccccu

SEQ ID NO: 2789203 - RNA, 21 nt, Human
auaguucuccaguuguaugga

SEQ ID NO: 2789204 - RNA, 12 nt, Human
auaguucuaggc

SEQ ID NO: 2789205 - RNA, 16 nt, Human
auaguuccuaagaagc

SEQ ID NO: 2789206 - RNA, 18 nt, Human
auaguuccuaagaagcuu

SEQ ID NO: 2789207 - RNA, 21 nt, Human
auaguuccuaagaagcuucua

SEQ ID NO: 2789208 - RNA, 23 nt, Human
auaguuccuaagaagcuucuaau

SEQ ID NO: 2789209 - RNA, 12 nt, Human
auaguucuagac

SEQ ID NO: 2789210 - RNA, 13 nt, Human
auaguucuagaca

SEQ ID NO: 2789211 - RNA, 14 nt, Human
auaguucuagacau

SEQ ID NO: 2789212 - RNA, 23 nt, Human
auaguucuagacauggagguucu

SEQ ID NO: 2789213 - RNA, 13 nt, Human
auagucuuucagu

SEQ ID NO: 2789214 - RNA, 14 nt, Human
auagucuaguguag

SEQ ID NO: 2789215 - RNA, 15 nt, Human
auagucuaguguagu

SEQ ID NO: 2789216 - RNA, 17 nt, Human
auagucuaguguaguau

SEQ ID NO: 2789217 - RNA, 23 nt, Human
uucacauuccccuggggacccac

SEQ ID NO: 2789218 - RNA, 15 nt, Human
auagugcaacuauga

SEQ ID NO: 2789219 - RNA, 20 nt, Human
auagugcaacuaugaaugua

SEQ ID NO: 2789220 - RNA, 21 nt, Human
auagugaggcaucgcaaugua

SEQ ID NO: 2789221 - RNA, 15 nt, Human
auagugcacaaaaug

SEQ ID NO: 2789222 - RNA, 17 nt, Human
auagugcacaaaaugaa

SEQ ID NO: 2789223 - RNA, 22 nt, Human
auagugcauuguuucugugggc

SEQ ID NO: 2789224 - RNA, 13 nt, Human
auagucuguguga

SEQ ID NO: 2789225 - RNA, 18 nt, Human
auagugacuaugaacuuc

SEQ ID NO: 2789226 - RNA, 17 nt, Human
auaguggcuuaaaacaa

SEQ ID NO: 2789227 - RNA, 20 nt, Human
auagugcugggauggagggg

SEQ ID NO: 2789228 - RNA, 22 nt, Human
auagugcugggauggaggggag

SEQ ID NO: 2789229 - RNA, 14 nt, Human
auagugcuauauau

SEQ ID NO: 2789230 - RNA, 15 nt, Human
auagugcuauauaua

SEQ ID NO: 2789231 - RNA, 16 nt, Human
auagugcuauauauau

SEQ ID NO: 2789232 - RNA, 19 nt, Human
auagugcuauauauauaaa

SEQ ID NO: 2789233 - RNA, 20 nt, Human
auagugcuauauauauaaau

SEQ ID NO: 2789234 - RNA, 22 nt, Human
auagugcuauauauauaaauau

SEQ ID NO: 2789235 - RNA, 16 nt, Human
auaguggggagacuuc

SEQ ID NO: 2789236 - RNA, 20 nt, Human
auagugggcaccccacugca

SEQ ID NO: 2789237 - RNA, 15 nt, Human
auaguggaaaaacac

SEQ ID NO: 2789238 - RNA, 18 nt, Human
auaguggaaaaacacaug

SEQ ID NO: 2789239 - RNA, 12 nt, Human
auagugucuuug

SEQ ID NO: 2789240 - RNA, 16 nt, Human
auaguguccuaugcaa

SEQ ID NO: 2789241 - RNA, 18 nt, Human
auaguguccuaugcaaua

SEQ ID NO: 2789242 - RNA, 20 nt, Human
auaguguccuaugcaauaaa

SEQ ID NO: 2789243 - RNA, 13 nt, Human
auaguguaaaaua

SEQ ID NO: 2789244 - RNA, 14 nt, Human
auaguguaaaauaa

SEQ ID NO: 2789245 - RNA, 17 nt, Human
uucaagugauucucaug

SEQ ID NO: 2789246 - RNA, 15 nt, Human
uucaagguucuaacc

SEQ ID NO: 2789247 - RNA, 21 nt, Human
uucaaguacuguaacuguguc

SEQ ID NO: 2789248 - RNA, 16 nt, Human
uucaaguagcugggau

SEQ ID NO: 2789249 - RNA, 20 nt, Human
uucaaguagcugggauuuua

SEQ ID NO: 2789250 - RNA, 16 nt, Human
uucacaaugucaguau

SEQ ID NO: 2789251 - RNA, 13 nt, Human
uucacaauguggc

SEQ ID NO: 2789252 - RNA, 20 nt, Human
uucacaaugaaaugcucucc

SEQ ID NO: 2789253 - RNA, 13 nt, Human
uucacaauaaaag

SEQ ID NO: 2789254 - RNA, 15 nt, Human
uucacaauaaaagcu

SEQ ID NO: 2789255 - RNA, 13 nt, Human
uucacacugucug

SEQ ID NO: 2789256 - RNA, 18 nt, Human
uucacacgcuguucuaau

SEQ ID NO: 2789257 - RNA, 11 nt, Human
uucacacccug

SEQ ID NO: 2789258 - RNA, 12 nt, Human
uucacacccugc

SEQ ID NO: 2789259 - RNA, 13 nt, Human
uucacacccugca

SEQ ID NO: 2789260 - RNA, 14 nt, Human
uucacacccugcaa

SEQ ID NO: 2789261 - RNA, 15 nt, Human
uucacacccugcaag

SEQ ID NO: 2789262 - RNA, 12 nt, Human
uucacagcuccu

SEQ ID NO: 2789263 - RNA, 23 nt, Human
uucacaguuggcuggaugaaauu

SEQ ID NO: 2789264 - RNA, 21 nt, Human
auaggaccaggauccagccuc

SEQ ID NO: 2789265 - RNA, 16 nt, Human
auaggaccuugggcca

SEQ ID NO: 2789266 - RNA, 17 nt, Human
auaggaccuugggccaa

SEQ ID NO: 2789267 - RNA, 17 nt, Human
auagcuuuuauuguaua

SEQ ID NO: 2789268 - RNA, 18 nt, Human
auagcuuuuauuguauaa

SEQ ID NO: 2789269 - RNA, 21 nt, Human
auaggaaaguauuuuuuuaag

SEQ ID NO: 2789270 - RNA, 14 nt, Human
auaggagaggauga

SEQ ID NO: 2789271 - RNA, 19 nt, Human
auaggagaggaugagagcc

SEQ ID NO: 2789272 - RNA, 20 nt, Human
auaggagaggaugagagccc

SEQ ID NO: 2789273 - RNA, 21 nt, Human
auaggagaggaugagagccca

SEQ ID NO: 2789274 - RNA, 15 nt, Human
auaggagccugcugg

SEQ ID NO: 2789275 - RNA, 23 nt, Human
auaggagaggaugagagcccaga

SEQ ID NO: 2789276 - RNA, 24 nt, Human
auaggagaggaugagagcccagag

SEQ ID NO: 2789277 - RNA, 12 nt, Human
auaggagccugc

SEQ ID NO: 2789278 - RNA, 13 nt, Human
auaggagccugcu

SEQ ID NO: 2789279 - RNA, 14 nt, Human
auagcuuuuauugu

SEQ ID NO: 2789280 - RNA, 15 nt, Human
auagcuuuuauugua

SEQ ID NO: 2789281 - RNA, 22 nt, Human
uucacauuaauauuugcugaca

SEQ ID NO: 2789282 - RNA, 20 nt, Human
uucacauuaauggucuaaaa

SEQ ID NO: 2789283 - RNA, 17 nt, Human
uucacauuaaaaaauga

SEQ ID NO: 2789284 - RNA, 18 nt, Human
uucacauuaaaaaaugaa

SEQ ID NO: 2789285 - RNA, 23 nt, Human
uucacauuaaaaaaugaaauauu

SEQ ID NO: 2789286 - RNA, 15 nt, Human
uucaaacacaaaugc

SEQ ID NO: 2789287 - RNA, 17 nt, Human
uucaaacacaaaugcag

SEQ ID NO: 2789288 - RNA, 14 nt, Human
uucaaacacaaaug

SEQ ID NO: 2789289 - RNA, 13 nt, Human
uucaaacaagaau

SEQ ID NO: 2789290 - RNA, 14 nt, Human
uucaaacaagaaug

SEQ ID NO: 2789291 - RNA, 15 nt, Human
uucaaacaagaaugu

SEQ ID NO: 2789292 - RNA, 11 nt, Human
uucaagaauga

SEQ ID NO: 2789293 - RNA, 16 nt, Human
uucaaaaguaaugccu

SEQ ID NO: 2789294 - RNA, 21 nt, Human
uucaaaaguaaugccucuguc

SEQ ID NO: 2789295 - RNA, 22 nt, Human
uucaaaaguaaugccucugucu

SEQ ID NO: 2789296 - RNA, 14 nt, Human
uucaaaagacaugu

SEQ ID NO: 2789297 - RNA, 19 nt, Human
uucaaaagacauguuguaa

SEQ ID NO: 2789298 - RNA, 12 nt, Human
uucaaaaguucc

SEQ ID NO: 2789299 - RNA, 14 nt, Human
uucaaaaguuccaa

SEQ ID NO: 2789300 - RNA, 15 nt, Human
uucaaaaguuccaag

SEQ ID NO: 2789301 - RNA, 16 nt, Human
uucaaaaguuccaaga

SEQ ID NO: 2789302 - RNA, 20 nt, Human
uucaaggaacuugaaaaaua

SEQ ID NO: 2789303 - RNA, 11 nt, Human
uucaaggaagg

SEQ ID NO: 2789304 - RNA, 17 nt, Human
uucaagguggccaaauu

SEQ ID NO: 2789305 - RNA, 14 nt, Human
uucaaggugacaga

SEQ ID NO: 2789306 - RNA, 22 nt, Human
uucaagguggccaaauuauuug

SEQ ID NO: 2789307 - RNA, 14 nt, Human
uucaagguucuaac

SEQ ID NO: 2789308 - RNA, 18 nt, Human
uucaagguggccaaauua

SEQ ID NO: 2789309 - RNA, 20 nt, Human
uucaagguggccaaauuauu

SEQ ID NO: 2789310 - RNA, 21 nt, Human
uucaagcgauucuucugcuuc

SEQ ID NO: 2789311 - RNA, 17 nt, Human
uucaagcacuuacagcu

SEQ ID NO: 2789312 - RNA, 16 nt, Human
uucaagaaccuggaaa

SEQ ID NO: 2789313 - RNA, 20 nt, Human
uucaagccugugcaaugcau

SEQ ID NO: 2789314 - RNA, 16 nt, Human
uucaagcagcaucuuc

SEQ ID NO: 2789315 - RNA, 14 nt, Human
uuauuuuuaaagau

SEQ ID NO: 2789316 - RNA, 17 nt, Human
uuauuuuuagacagagu

SEQ ID NO: 2789317 - RNA, 18 nt, Human
uuauuuuuagacagaguc

SEQ ID NO: 2789318 - RNA, 14 nt, Human
uuauuuuucaagga

SEQ ID NO: 2789319 - RNA, 18 nt, Human
uuaguuuuuguaauuuau

SEQ ID NO: 2789320 - RNA, 17 nt, Human
uuaguuuuuguaauuua

SEQ ID NO: 2789321 - RNA, 13 nt, Human
uuaguuuucuugu

SEQ ID NO: 2789322 - RNA, 14 nt, Human
uuaguuuucuuguu

SEQ ID NO: 2789323 - RNA, 16 nt, Human
uuauuuuuaaaaagaa

SEQ ID NO: 2789324 - RNA, 14 nt, Human
uuauuuuucauauu

SEQ ID NO: 2789325 - RNA, 16 nt, Human
uuauuuuucauauugu

SEQ ID NO: 2789326 - RNA, 19 nt, Human
uuauuuuucauauugugcc

SEQ ID NO: 2789327 - RNA, 13 nt, Human
uuauuuuucuaaa

SEQ ID NO: 2789328 - RNA, 23 nt, Human
uuauuuuugacaguguugaaaau

SEQ ID NO: 2789329 - RNA, 14 nt, Human
uuauuuuucuaaac

SEQ ID NO: 2789330 - RNA, 13 nt, Human
uuauuuuuuauug

SEQ ID NO: 2789331 - RNA, 14 nt, Human
uuauuuuuuacauu

SEQ ID NO: 2789332 - RNA, 18 nt, Human
uuauuuuuuacauuauua

SEQ ID NO: 2789333 - RNA, 18 nt, Human
uuauuuuuuaaguauuua

SEQ ID NO: 2789334 - RNA, 21 nt, Human
uucccaaccccuuaagcccug

SEQ ID NO: 2789335 - RNA, 20 nt, Human
uucccaacuucucuugcuuu

SEQ ID NO: 2789336 - RNA, 14 nt, Human
uucccaagaaaugc

SEQ ID NO: 2789337 - RNA, 16 nt, Human
uucccaagcucugcuc

SEQ ID NO: 2789338 - RNA, 15 nt, Human
uucccaagcucugcu

SEQ ID NO: 2789339 - RNA, 14 nt, Human
uucccaagcucugc

SEQ ID NO: 2789340 - RNA, 13 nt, Human
uucccaagcucug

SEQ ID NO: 2789341 - RNA, 17 nt, Human
uucccaccgcccucccu

SEQ ID NO: 2789342 - RNA, 22 nt, Human
uucccaccgcccucccucccca

SEQ ID NO: 2789343 - RNA, 14 nt, Human
uucccaccucccug

SEQ ID NO: 2789344 - RNA, 16 nt, Human
uucccaccucccugcc

SEQ ID NO: 2789345 - RNA, 21 nt, Human
uucccaccucccugcccaggc

SEQ ID NO: 2789346 - RNA, 18 nt, Human
uucccaagcucugcuccu

SEQ ID NO: 2789347 - RNA, 23 nt, Human
uucccaagccuucgggcgucugu

SEQ ID NO: 2789348 - RNA, 20 nt, Human
uucccaauagcaacguagcu

SEQ ID NO: 2789349 - RNA, 20 nt, Human
uucccaaguaagaggcugga

SEQ ID NO: 2789350 - RNA, 23 nt, Human
uucccaauagcaacguagcuucu

SEQ ID NO: 2789351 - RNA, 15 nt, Human
uucccaaucagcacu

SEQ ID NO: 2789352 - RNA, 16 nt, Human
uucccaaucagcacug

SEQ ID NO: 2789353 - RNA, 17 nt, Human
uucccaaucagcacuga

SEQ ID NO: 2789354 - RNA, 18 nt, Human
uucccaaucagcacugaa

SEQ ID NO: 2789355 - RNA, 19 nt, Human
uucccaaucagcacugaaa

SEQ ID NO: 2789356 - RNA, 20 nt, Human
uucccaaucagcacugaaaa

SEQ ID NO: 2789357 - RNA, 12 nt, Human
uucccaauggug

SEQ ID NO: 2789358 - RNA, 19 nt, Human
uucccaaugguguuuuucu

SEQ ID NO: 2789359 - RNA, 21 nt, Human
uucccaaugguguuuuucuug

SEQ ID NO: 2789360 - RNA, 22 nt, Human
uucccaaugguguuuuucuugu

SEQ ID NO: 2789361 - RNA, 13 nt, Human
uuccauagcaaca

SEQ ID NO: 2789362 - RNA, 15 nt, Human
uuccauagcaacagg

SEQ ID NO: 2789363 - RNA, 17 nt, Human
uuccauagcaacaggaa

SEQ ID NO: 2789364 - RNA, 13 nt, Human
uuccaguguucua

SEQ ID NO: 2789365 - RNA, 19 nt, Human
uuccauaaucuggacuccu

SEQ ID NO: 2789366 - RNA, 22 nt, Human
uuccauaaucuggacuccucug

SEQ ID NO: 2789367 - RNA, 23 nt, Human
uuccauaaucuggacuccucugu

SEQ ID NO: 2789368 - RNA, 21 nt, Human
auaugugaauccucuucuuua

SEQ ID NO: 2789369 - RNA, 21 nt, Human
auaugugagauuuuuuauugc

SEQ ID NO: 2789370 - RNA, 22 nt, Human
auaugugagauuuuuuauugcu

SEQ ID NO: 2789371 - RNA, 20 nt, Human
auaugugagugccuuuugca

SEQ ID NO: 2789372 - RNA, 13 nt, Human
auaugugaucugu

SEQ ID NO: 2789373 - RNA, 15 nt, Human
auaugugaucugucu

SEQ ID NO: 2789374 - RNA, 16 nt, Human
auaugugaucugucuu

SEQ ID NO: 2789375 - RNA, 20 nt, Human
auaugugaucugucuuguaa

SEQ ID NO: 2789376 - RNA, 21 nt, Human
auaugugaucugucuuguaau

SEQ ID NO: 2789377 - RNA, 15 nt, Human
uucauucacuucucu

SEQ ID NO: 2789378 - RNA, 17 nt, Human
uucauucacuucucuua

SEQ ID NO: 2789379 - RNA, 13 nt, Human
uucauucuccugc

SEQ ID NO: 2789380 - RNA, 15 nt, Human
uucauucugcagggu

SEQ ID NO: 2789381 - RNA, 12 nt, Human
uucauucugcau

SEQ ID NO: 2789382 - RNA, 14 nt, Human
uucauucugcauug

SEQ ID NO: 2789383 - RNA, 15 nt, Human
uucauucuccugccu

SEQ ID NO: 2789384 - RNA, 12 nt, Human
uucauucuccuu

SEQ ID NO: 2789385 - RNA, 15 nt, Human
uucauucuccuuguu

SEQ ID NO: 2789386 - RNA, 17 nt, Human
uucauucuccuuguugu

SEQ ID NO: 2789387 - RNA, 21 nt, Human
uucauucucgugagucauuua

SEQ ID NO: 2789388 - RNA, 12 nt, Human
uucauucucaua

SEQ ID NO: 2789389 - RNA, 18 nt, Human
uucauucucauaauuccu

SEQ ID NO: 2789390 - RNA, 23 nt, Human
uucauucucauaauuccuacagc

SEQ ID NO: 2789391 - RNA, 21 nt, Human
uucauucucauugcagaauaa

SEQ ID NO: 2789392 - RNA, 12 nt, Human
uucauucauccc

SEQ ID NO: 2789393 - RNA, 18 nt, Human
uucauucauggaccacug

SEQ ID NO: 2789394 - RNA, 23 nt, Human
uucauucauggaccacuguuucu

SEQ ID NO: 2789395 - RNA, 14 nt, Human
uucauucauucacu

SEQ ID NO: 2789396 - RNA, 15 nt, Human
uucauuccauugccu

SEQ ID NO: 2789397 - RNA, 21 nt, Human
uucauuccauugccuagcucu

SEQ ID NO: 2789398 - RNA, 12 nt, Human
uuccaagagucu

SEQ ID NO: 2789399 - RNA, 13 nt, Human
uuccaagagucua

SEQ ID NO: 2789400 - RNA, 14 nt, Human
uuccaagagucuaa

SEQ ID NO: 2789401 - RNA, 22 nt, Human
uuccaagacucuagaguccaag

SEQ ID NO: 2789402 - RNA, 21 nt, Human
uucauuuagcuaaacggauuc

SEQ ID NO: 2789403 - RNA, 14 nt, Human
uucauuguaugaug

SEQ ID NO: 2789404 - RNA, 16 nt, Human
uucauuguaugaugug

SEQ ID NO: 2789405 - RNA, 15 nt, Human
uucauugucccucuu

SEQ ID NO: 2789406 - RNA, 12 nt, Human
uucauugucucu

SEQ ID NO: 2789407 - RNA, 21 nt, Human
uucauuguuuuuaacuuugcu

SEQ ID NO: 2789408 - RNA, 22 nt, Human
uuccacaccuuuuauugacaca

SEQ ID NO: 2789409 - RNA, 15 nt, Human
uuccacaccuuuuau

SEQ ID NO: 2789410 - RNA, 19 nt, Human
uuccacaccuagcaucuca

SEQ ID NO: 2789411 - RNA, 22 nt, Human
uuccacaagugccgcaaauugu

SEQ ID NO: 2789412 - RNA, 23 nt, Human
uuccaauccuggcucuguggcuu

SEQ ID NO: 2789413 - RNA, 15 nt, Human
uuccaauccuggcuc

SEQ ID NO: 2789414 - RNA, 16 nt, Human
uuccaauaugaugacu

SEQ ID NO: 2789415 - RNA, 13 nt, Human
uuccaauauuucu

SEQ ID NO: 2789416 - RNA, 15 nt, Human
uuccaauauuucugc

SEQ ID NO: 2789417 - RNA, 24 nt, Human
uuccaauauuucugcuuucuuuga

SEQ ID NO: 2789418 - RNA, 15 nt, Human
uuccaagagucuaaa

SEQ ID NO: 2789419 - RNA, 17 nt, Human
uuccaagagucuaaaga

SEQ ID NO: 2789420 - RNA, 13 nt, Human
uuccaaggcuucu

SEQ ID NO: 2789421 - RNA, 18 nt, Human
uuccaaggggcaaauuuu

SEQ ID NO: 2789422 - RNA, 13 nt, Human
uuccaaguaauau

SEQ ID NO: 2789423 - RNA, 19 nt, Human
uuccaaguaauauaaugga

SEQ ID NO: 2789424 - RNA, 13 nt, Human
uuccacccuggaa

SEQ ID NO: 2789425 - RNA, 11 nt, Human
uuccacccugg

SEQ ID NO: 2789426 - RNA, 19 nt, Human
uuccagcucauucauuuua

SEQ ID NO: 2789427 - RNA, 21 nt, Human
uuccaggcuaguccggaccca

SEQ ID NO: 2789428 - RNA, 13 nt, Human
uuccaggaccccu

SEQ ID NO: 2789429 - RNA, 14 nt, Human
uuccaggauggugu

SEQ ID NO: 2789430 - RNA, 13 nt, Human
uuccagcuccuca

SEQ ID NO: 2789431 - RNA, 11 nt, Human
uuccagcuccu

SEQ ID NO: 2789432 - RNA, 14 nt, Human
uuccagcuccugua

SEQ ID NO: 2789433 - RNA, 19 nt, Human
uuccagcucuaauaaaaca

SEQ ID NO: 2789434 - RNA, 11 nt, Human
uuccagcugcu

SEQ ID NO: 2789435 - RNA, 12 nt, Human
uuccagcugcug

SEQ ID NO: 2789436 - RNA, 13 nt, Human
uuccagcugcugu

SEQ ID NO: 2789437 - RNA, 15 nt, Human
uuccagcugcugucu

SEQ ID NO: 2789438 - RNA, 20 nt, Human
uuccagcugcugucuucugg

SEQ ID NO: 2789439 - RNA, 22 nt, Human
uuccagcugcugucuucuggac

SEQ ID NO: 2789440 - RNA, 22 nt, Human
auauauuuguguauuuaacagg

SEQ ID NO: 2789441 - RNA, 17 nt, Human
auauauuuguguauuua

SEQ ID NO: 2789442 - RNA, 21 nt, Human
auauauuuguguauuuaacag

SEQ ID NO: 2789443 - RNA, 14 nt, Human
auaucuauuaauau

SEQ ID NO: 2789444 - RNA, 15 nt, Human
auaucuauuaauaua

SEQ ID NO: 2789445 - RNA, 18 nt, Human
auaucuauuaauauaugu

SEQ ID NO: 2789446 - RNA, 22 nt, Human
auaucuauuaauauauguauua

SEQ ID NO: 2789447 - RNA, 13 nt, Human
auaucuauuaaua

SEQ ID NO: 2789448 - RNA, 12 nt, Human
auaucuauuaau

SEQ ID NO: 2789449 - RNA, 11 nt, Human
auaucugaaaa

SEQ ID NO: 2789450 - RNA, 16 nt, Human
auaucugaaaacugga

SEQ ID NO: 2789451 - RNA, 17 nt, Human
auaucugaaaacuggaa

SEQ ID NO: 2789452 - RNA, 23 nt, Human
auaucugaaaacuggaauaagaa

SEQ ID NO: 2789453 - RNA, 16 nt, Human
auaucuuugugauaau

SEQ ID NO: 2789454 - RNA, 21 nt, Human
auaucuuugugauaauuuaag

SEQ ID NO: 2789455 - RNA, 22 nt, Human
auaucuuugugauaauuuaaga

SEQ ID NO: 2789456 - RNA, 23 nt, Human
auaucuuugugauaauuuaagag

SEQ ID NO: 2789457 - RNA, 12 nt, Human
auaucuuuuaug

SEQ ID NO: 2789458 - RNA, 17 nt, Human
auaucuuuuauguuuga

SEQ ID NO: 2789459 - RNA, 18 nt, Human
auaucuuuuauguuugaa

SEQ ID NO: 2789460 - RNA, 19 nt, Human
auaucuuuuauguuugaau

SEQ ID NO: 2789461 - RNA, 20 nt, Human
auaucuuuuauguuugaaua

SEQ ID NO: 2789462 - RNA, 21 nt, Human
auaucuuuuauguuugaauau

SEQ ID NO: 2789463 - RNA, 22 nt, Human
auaucuuuuauguuugaauaug

SEQ ID NO: 2789464 - RNA, 15 nt, Human
auaucuuuucuuuag

SEQ ID NO: 2789465 - RNA, 21 nt, Human
auaucuuuucuuuagagaacu

SEQ ID NO: 2789466 - RNA, 22 nt, Human
auaucuuuucuuuagagaacug

SEQ ID NO: 2789467 - RNA, 23 nt, Human
auaucuuuucuuuagagaacuga

SEQ ID NO: 2789468 - RNA, 13 nt, Human
auaugaaaacuau

SEQ ID NO: 2789469 - RNA, 15 nt, Human
auaugaaaacuauac

SEQ ID NO: 2789470 - RNA, 17 nt, Human
auaugaaaacuauacaa

SEQ ID NO: 2789471 - RNA, 22 nt, Human
auaucuauaguagacacacuau

SEQ ID NO: 2789472 - RNA, 20 nt, Human
auauggguuuauaauuuucu

SEQ ID NO: 2789473 - RNA, 22 nt, Human
auauggguuuauaauuuucuga

SEQ ID NO: 2789474 - RNA, 13 nt, Human
auaugaucuguuu

SEQ ID NO: 2789475 - RNA, 14 nt, Human
auaugaucuguuuu

SEQ ID NO: 2789476 - RNA, 15 nt, Human
auaugaguacaaaug

SEQ ID NO: 2789477 - RNA, 13 nt, Human
auaugaguauaca

SEQ ID NO: 2789478 - RNA, 14 nt, Human
auaugaguauacaa

SEQ ID NO: 2789479 - RNA, 15 nt, Human
auaugaguauacaau

SEQ ID NO: 2789480 - RNA, 16 nt, Human
auaugaguauacaaua

SEQ ID NO: 2789481 - RNA, 17 nt, Human
auaugaguauacaauau

SEQ ID NO: 2789482 - RNA, 18 nt, Human
auaugaguauacaauaua

SEQ ID NO: 2789483 - RNA, 20 nt, Human
auaugaguauacaauauaua

SEQ ID NO: 2789484 - RNA, 21 nt, Human
auaugaguauacaauauauaa

SEQ ID NO: 2789485 - RNA, 22 nt, Human
auaugaguauacaauauauaaa

SEQ ID NO: 2789486 - RNA, 16 nt, Human
auauguaacaagccac

SEQ ID NO: 2789487 - RNA, 16 nt, Human
auauguaaaauaaaau

SEQ ID NO: 2789488 - RNA, 15 nt, Human
auauguaaaauaaaa

SEQ ID NO: 2789489 - RNA, 14 nt, Human
auauguaaaauaaa

SEQ ID NO: 2789490 - RNA, 13 nt, Human
auauguaaaauaa

SEQ ID NO: 2789491 - RNA, 22 nt, Human
auauggucuaccaguuugcuga

SEQ ID NO: 2789492 - RNA, 12 nt, Human
auauguaaaaua

SEQ ID NO: 2789493 - RNA, 17 nt, Human
auauguaacaagccacc

SEQ ID NO: 2789494 - RNA, 17 nt, Human
auauguacaauuguggg

SEQ ID NO: 2789495 - RNA, 14 nt, Human
auauguacauaaau

SEQ ID NO: 2789496 - RNA, 15 nt, Human
auauguacauaaauu

SEQ ID NO: 2789497 - RNA, 20 nt, Human
auauguaaaauaaaauuaug

SEQ ID NO: 2789498 - RNA, 20 nt, Human
auauguaaacauaaguguac

SEQ ID NO: 2789499 - RNA, 11 nt, Human
auaugugaauc

SEQ ID NO: 2789500 - RNA, 14 nt, Human
auauguacaugaga

SEQ ID NO: 2789501 - RNA, 10 nt, Human
auauauguau

SEQ ID NO: 2789502 - RNA, 14 nt, Human
uucauccccuuacc

SEQ ID NO: 2789503 - RNA, 15 nt, Human
uucauccccuuaccc

SEQ ID NO: 2789504 - RNA, 19 nt, Human
auauauguauuauuuauaa

SEQ ID NO: 2789505 - RNA, 12 nt, Human
auauauguauuu

SEQ ID NO: 2789506 - RNA, 13 nt, Human
auauauguauuuu

SEQ ID NO: 2789507 - RNA, 20 nt, Human
auauauguauuauuuauaau

SEQ ID NO: 2789508 - RNA, 18 nt, Human
auauaugugaggauguau

SEQ ID NO: 2789509 - RNA, 12 nt, Human
auauauguguau

SEQ ID NO: 2789510 - RNA, 18 nt, Human
auauauguguauauauac

SEQ ID NO: 2789511 - RNA, 19 nt, Human
auauauguguauauauaca

SEQ ID NO: 2789512 - RNA, 20 nt, Human
auauauguguauauauacau

SEQ ID NO: 2789513 - RNA, 21 nt, Human
auauauguguauauauacaua

SEQ ID NO: 2789514 - RNA, 23 nt, Human
auauauguguauauauacauaca

SEQ ID NO: 2789515 - RNA, 13 nt, Human
uucaucccagccc

SEQ ID NO: 2789516 - RNA, 14 nt, Human
uucaucccagcccc

SEQ ID NO: 2789517 - RNA, 16 nt, Human
uucaucccagccccaa

SEQ ID NO: 2789518 - RNA, 21 nt, Human
uucauccaggcccaacuguga

SEQ ID NO: 2789519 - RNA, 22 nt, Human
uucauccaggcccaacugugag

SEQ ID NO: 2789520 - RNA, 12 nt, Human
uucauauugugc

SEQ ID NO: 2789521 - RNA, 14 nt, Human
uucauauugugcca

SEQ ID NO: 2789522 - RNA, 16 nt, Human
uucauauugugccaau

SEQ ID NO: 2789523 - RNA, 22 nt, Human
uucauauugugccaauauguau

SEQ ID NO: 2789524 - RNA, 13 nt, Human
auauauuuaauga

SEQ ID NO: 2789525 - RNA, 15 nt, Human
auauauuuaaugaua

SEQ ID NO: 2789526 - RNA, 14 nt, Human
auauauuucuuugu

SEQ ID NO: 2789527 - RNA, 13 nt, Human
auauauuuaagca

SEQ ID NO: 2789528 - RNA, 20 nt, Human
auauauuuaagcaacaucuu

SEQ ID NO: 2789529 - RNA, 13 nt, Human
auauauuugugua

SEQ ID NO: 2789530 - RNA, 15 nt, Human
auauauucccaauag

SEQ ID NO: 2789531 - RNA, 14 nt, Human
auauauuguuaauc

SEQ ID NO: 2789532 - RNA, 19 nt, Human
auauauuguuaaucucugu

SEQ ID NO: 2789533 - RNA, 14 nt, Human
auauauucuuauaa

SEQ ID NO: 2789534 - RNA, 17 nt, Human
auauauucuuauaaaaa

SEQ ID NO: 2789535 - RNA, 21 nt, Human
auauauucugaagcaacauuu

SEQ ID NO: 2789536 - RNA, 13 nt, Human
auauauguguaug

SEQ ID NO: 2789537 - RNA, 15 nt, Human
auauauguguaugua

SEQ ID NO: 2789538 - RNA, 18 nt, Human
uucauacacuaaccaaau

SEQ ID NO: 2789539 - RNA, 20 nt, Human
uucauacacuaaccaaaucu

SEQ ID NO: 2789540 - RNA, 13 nt, Human
uucauaugcugua

SEQ ID NO: 2789541 - RNA, 20 nt, Human
uucauaauggccugagacuu

SEQ ID NO: 2789542 - RNA, 14 nt, Human
uucauauugaauau

SEQ ID NO: 2789543 - RNA, 14 nt, Human
uucauauuggaaaa

SEQ ID NO: 2789544 - RNA, 22 nt, Human
uucauauucuucauauccuucu

SEQ ID NO: 2789545 - RNA, 16 nt, Human
uucauauucuuucaau

SEQ ID NO: 2789546 - RNA, 13 nt, Human
uucauauucuuuu

SEQ ID NO: 2789547 - RNA, 14 nt, Human
uucauauucuuuua

SEQ ID NO: 2789548 - RNA, 19 nt, Human
auauuuuuauagacaaaua

SEQ ID NO: 2789549 - RNA, 16 nt, Human
auauuuuuauauuuag

SEQ ID NO: 2789550 - RNA, 17 nt, Human
aucaaaugcaguauauu

SEQ ID NO: 2789551 - RNA, 19 nt, Human
aucaaaugcaguauauuuc

SEQ ID NO: 2789552 - RNA, 21 nt, Human
aucaaauggaagacacauuga

SEQ ID NO: 2789553 - RNA, 17 nt, Human
aucaaauggaagacaca

SEQ ID NO: 2789554 - RNA, 14 nt, Human
auauuuuuauagac

SEQ ID NO: 2789555 - RNA, 13 nt, Human
auauuuuuauaga

SEQ ID NO: 2789556 - RNA, 16 nt, Human
auauuuuuagacucau

SEQ ID NO: 2789557 - RNA, 13 nt, Human
auauuuuuagaua

SEQ ID NO: 2789558 - RNA, 17 nt, Human
auauuuuuauaauaaac

SEQ ID NO: 2789559 - RNA, 20 nt, Human
auauuuuuauaauaaacaua

SEQ ID NO: 2789560 - RNA, 17 nt, Human
auauuuuuaaaaaauga

SEQ ID NO: 2789561 - RNA, 19 nt, Human
auauuuuuaaaaaaugaaa

SEQ ID NO: 2789562 - RNA, 14 nt, Human
auauuuuuaaaaga

SEQ ID NO: 2789563 - RNA, 16 nt, Human
auauuuuguauuauug

SEQ ID NO: 2789564 - RNA, 18 nt, Human
auauuuuguauuauugcu

SEQ ID NO: 2789565 - RNA, 22 nt, Human
auauuuuguauuauugcuguug

SEQ ID NO: 2789566 - RNA, 20 nt, Human
auauuuuuaaaauauuuauu

SEQ ID NO: 2789567 - RNA, 13 nt, Human
auauuuuuaaaga

SEQ ID NO: 2789568 - RNA, 14 nt, Human
auauuuuuaaagau

SEQ ID NO: 2789569 - RNA, 15 nt, Human
auauuuuuaaagauc

SEQ ID NO: 2789570 - RNA, 22 nt, Human
aucaaccccuucgcuccugugu

SEQ ID NO: 2789571 - RNA, 16 nt, Human
aucaaguauuugggaa

SEQ ID NO: 2789572 - RNA, 20 nt, Human
aucaaccccuucgcuccugu

SEQ ID NO: 2789573 - RNA, 19 nt, Human
aucaaccccuucgcuccug

SEQ ID NO: 2789574 - RNA, 20 nt, Human
aucaaguauuugggaaguga

SEQ ID NO: 2789575 - RNA, 21 nt, Human
aucaaguauuugggaagugaa

SEQ ID NO: 2789576 - RNA, 13 nt, Human
aucaaguauuuug

SEQ ID NO: 2789577 - RNA, 15 nt, Human
aucaagucaaucauu

SEQ ID NO: 2789578 - RNA, 17 nt, Human
aucaagucaaucauuuc

SEQ ID NO: 2789579 - RNA, 18 nt, Human
aucaagucaaucauuucu

SEQ ID NO: 2789580 - RNA, 19 nt, Human
aucaagucaaucauuucuc

SEQ ID NO: 2789581 - RNA, 22 nt, Human
aucaaguuggcuucuaaucaaa

SEQ ID NO: 2789582 - RNA, 23 nt, Human
aucaaguuggcuucuaaucaaag

SEQ ID NO: 2789583 - RNA, 11 nt, Human
aucaaguuuua

SEQ ID NO: 2789584 - RNA, 13 nt, Human
aucaaguuuuaag

SEQ ID NO: 2789585 - RNA, 17 nt, Human
aucaaguuuuaagugaa

SEQ ID NO: 2789586 - RNA, 16 nt, Human
auauuuucguaugaaa

SEQ ID NO: 2789587 - RNA, 17 nt, Human
auauuuucguaugaaaa

SEQ ID NO: 2789588 - RNA, 19 nt, Human
auauuuucguaugaaaaug

SEQ ID NO: 2789589 - RNA, 20 nt, Human
uuccuuauuugcuucauugu

SEQ ID NO: 2789590 - RNA, 21 nt, Human
uuccuuauuuuaagcauugug

SEQ ID NO: 2789591 - RNA, 20 nt, Human
uuccuucaaagcaaaugucu

SEQ ID NO: 2789592 - RNA, 16 nt, Human
uuccuguauguugucc

SEQ ID NO: 2789593 - RNA, 18 nt, Human
uuccuguccccaucuguc

SEQ ID NO: 2789594 - RNA, 13 nt, Human
uuccucuccacug

SEQ ID NO: 2789595 - RNA, 14 nt, Human
uuccucuccacugc

SEQ ID NO: 2789596 - RNA, 15 nt, Human
uuccucuccacugcc

SEQ ID NO: 2789597 - RNA, 19 nt, Human
uuccucucacuaaacuuua

SEQ ID NO: 2789598 - RNA, 12 nt, Human
uuccucuccacu

SEQ ID NO: 2789599 - RNA, 17 nt, Human
uuccucucacuaaacuu

SEQ ID NO: 2789600 - RNA, 18 nt, Human
uuccucucacuaaacuuu

SEQ ID NO: 2789601 - RNA, 13 nt, Human
uucccuacuuccu

SEQ ID NO: 2789602 - RNA, 17 nt, Human
uucccaaggccuuaagc

SEQ ID NO: 2789603 - RNA, 17 nt, Human
uuccccuuccuuuuaag

SEQ ID NO: 2789604 - RNA, 14 nt, Human
uucccuacuuccug

SEQ ID NO: 2789605 - RNA, 16 nt, Human
uucccuacuuccugug

SEQ ID NO: 2789606 - RNA, 21 nt, Human
uucccuuuuaaacacauuuug

SEQ ID NO: 2789607 - RNA, 17 nt, Human
uucccuacuuccuguga

SEQ ID NO: 2789608 - RNA, 17 nt, Human
uuccccuguucacucua

SEQ ID NO: 2789609 - RNA, 14 nt, Human
uuccccuguucacu

SEQ ID NO: 2789610 - RNA, 16 nt, Human
uuccccuggggaccca

SEQ ID NO: 2789611 - RNA, 21 nt, Human
uuccccuggggacccacgugg

SEQ ID NO: 2789612 - RNA, 22 nt, Human
uuccccuuccuaauuccacagc

SEQ ID NO: 2789613 - RNA, 23 nt, Human
uuccuacguaggaugaaaagauu

SEQ ID NO: 2789614 - RNA, 23 nt, Human
uuccuacccacaccucugccaga

SEQ ID NO: 2789615 - RNA, 23 nt, Human
uuccuacccacuuaggcuuugua

SEQ ID NO: 2789616 - RNA, 20 nt, Human
uuccuacccacaccucugcc

SEQ ID NO: 2789617 - RNA, 21 nt, Human
uuccuacccacaccucugcca

SEQ ID NO: 2789618 - RNA, 14 nt, Human
uuccuacagcacua

SEQ ID NO: 2789619 - RNA, 15 nt, Human
uuccuacagcacuac

SEQ ID NO: 2789620 - RNA, 17 nt, Human
uuccuacagcacuacug

SEQ ID NO: 2789621 - RNA, 20 nt, Human
uuccuacagcacuacugggu

SEQ ID NO: 2789622 - RNA, 21 nt, Human
uuccuacagcacuacugggug

SEQ ID NO: 2789623 - RNA, 22 nt, Human
uuccuacagcacuacugggugu

SEQ ID NO: 2789624 - RNA, 23 nt, Human
uuccuacagcacuacuggguguc

SEQ ID NO: 2789625 - RNA, 13 nt, Human
uuccuacaggcag

SEQ ID NO: 2789626 - RNA, 17 nt, Human
uuccuacaggcagucuc

SEQ ID NO: 2789627 - RNA, 18 nt, Human
uuccuacaggcagucucu

SEQ ID NO: 2789628 - RNA, 20 nt, Human
uuccuacaggcagucucucu

SEQ ID NO: 2789629 - RNA, 19 nt, Human
auauuuuaaugcaguugcu

SEQ ID NO: 2789630 - RNA, 23 nt, Human
uucccagagcaaaauaauuuuaa

SEQ ID NO: 2789631 - RNA, 19 nt, Human
uucccagagucaucugauu

SEQ ID NO: 2789632 - RNA, 17 nt, Human
uucccacuuucccaccc

SEQ ID NO: 2789633 - RNA, 18 nt, Human
uucccacuuucccacccc

SEQ ID NO: 2789634 - RNA, 20 nt, Human
uucccacuuucccaccccac

SEQ ID NO: 2789635 - RNA, 18 nt, Human
uucccagagcaaaauaau

SEQ ID NO: 2789636 - RNA, 15 nt, Human
uucccacucaccccg

SEQ ID NO: 2789637 - RNA, 17 nt, Human
uuccccucccuggcucc

SEQ ID NO: 2789638 - RNA, 16 nt, Human
uuccccucccuggcuc

SEQ ID NO: 2789639 - RNA, 13 nt, Human
uuccccucccugg

SEQ ID NO: 2789640 - RNA, 15 nt, Human
uuccccuaucauuua

SEQ ID NO: 2789641 - RNA, 18 nt, Human
uuccccuccuucucccuu

SEQ ID NO: 2789642 - RNA, 12 nt, Human
uuccccucugcu

SEQ ID NO: 2789643 - RNA, 17 nt, Human
uuccccuccuucucccu

SEQ ID NO: 2789644 - RNA, 14 nt, Human
uuccccucugcugc

SEQ ID NO: 2789645 - RNA, 15 nt, Human
uuccccucugcugcu

SEQ ID NO: 2789646 - RNA, 18 nt, Human
uuccccucugcugcuguc

SEQ ID NO: 2789647 - RNA, 19 nt, Human
uuccccucuucccuucaac

SEQ ID NO: 2789648 - RNA, 17 nt, Human
uucccccuuccaaauaa

SEQ ID NO: 2789649 - RNA, 21 nt, Human
uucccccuuccaaauaauaaa

SEQ ID NO: 2789650 - RNA, 15 nt, Human
uucccccucccaggg

SEQ ID NO: 2789651 - RNA, 19 nt, Human
uucccccuccaaucccacc

SEQ ID NO: 2789652 - RNA, 17 nt, Human
auauuuuaccucuuauu

SEQ ID NO: 2789653 - RNA, 23 nt, Human
auauuuuaccucuuauugcaaaa

SEQ ID NO: 2789654 - RNA, 14 nt, Human
uucuaagauucuga

SEQ ID NO: 2789655 - RNA, 21 nt, Human
uucuaaggaccugaaauucca

SEQ ID NO: 2789656 - RNA, 22 nt, Human
uucuaaggaccugaaauuccaa

SEQ ID NO: 2789657 - RNA, 19 nt, Human
uucuaagauucuaaugaug

SEQ ID NO: 2789658 - RNA, 13 nt, Human
uucuaagauucug

SEQ ID NO: 2789659 - RNA, 15 nt, Human
uucuaacuccaguga

SEQ ID NO: 2789660 - RNA, 12 nt, Human
uucuaagaugug

SEQ ID NO: 2789661 - RNA, 19 nt, Human
uucuaagaugugauauucu

SEQ ID NO: 2789662 - RNA, 20 nt, Human
uucuaagaugugauauucua

SEQ ID NO: 2789663 - RNA, 21 nt, Human
uucuaagaugugauauucuaa

SEQ ID NO: 2789664 - RNA, 22 nt, Human
uucuaagaugugauauucuaag

SEQ ID NO: 2789665 - RNA, 23 nt, Human
uucuaagaugugauauucuaaga

SEQ ID NO: 2789666 - RNA, 12 nt, Human
uucuaagauucu

SEQ ID NO: 2789667 - RNA, 13 nt, Human
uucuaagauucua

SEQ ID NO: 2789668 - RNA, 14 nt, Human
uucuaagauucuaa

SEQ ID NO: 2789669 - RNA, 15 nt, Human
uucuaagauucuaaa

SEQ ID NO: 2789670 - RNA, 16 nt, Human
uucuaagauucuaaag

SEQ ID NO: 2789671 - RNA, 17 nt, Human
uucuaagauucuaaagg

SEQ ID NO: 2789672 - RNA, 15 nt, Human
uucuaagauucuaau

SEQ ID NO: 2789673 - RNA, 16 nt, Human
uucuaagauucuaaug

SEQ ID NO: 2789674 - RNA, 17 nt, Human
uucuaagauucuaauga

SEQ ID NO: 2789675 - RNA, 13 nt, Human
uucgcuccugugu

SEQ ID NO: 2789676 - RNA, 14 nt, Human
uucgccuggagccc

SEQ ID NO: 2789677 - RNA, 15 nt, Human
uucgccuggagcccu

SEQ ID NO: 2789678 - RNA, 21 nt, Human
uucgccuuaauacuuuuuuau

SEQ ID NO: 2789679 - RNA, 19 nt, Human
uucgcgugcccucgcugcu

SEQ ID NO: 2789680 - RNA, 15 nt, Human
uucgcgcucugcuca

SEQ ID NO: 2789681 - RNA, 12 nt, Human
uucuaaaguucu

SEQ ID NO: 2789682 - RNA, 13 nt, Human
uucuaaaguucua

SEQ ID NO: 2789683 - RNA, 13 nt, Human
uucuaaauagcaa

SEQ ID NO: 2789684 - RNA, 20 nt, Human
uucuaaaguucuaagauucu

SEQ ID NO: 2789685 - RNA, 21 nt, Human
uucuaaauaaaaguuuuacaa

SEQ ID NO: 2789686 - RNA, 14 nt, Human
uucuaaaguucuaa

SEQ ID NO: 2789687 - RNA, 16 nt, Human
uucuaaaguucuaaga

SEQ ID NO: 2789688 - RNA, 17 nt, Human
uucuaaaguucuaagau

SEQ ID NO: 2789689 - RNA, 18 nt, Human
uucuaaaguucuaagauu

SEQ ID NO: 2789690 - RNA, 20 nt, Human
uucuaacaaaaaaauauauu

SEQ ID NO: 2789691 - RNA, 19 nt, Human
uucuaacaaaaaaauauau

SEQ ID NO: 2789692 - RNA, 18 nt, Human
uucuaaccuugaaugcug

SEQ ID NO: 2789693 - RNA, 20 nt, Human
uucuaaccuugaaugcugcc

SEQ ID NO: 2789694 - RNA, 21 nt, Human
uucuaaccuugaaugcugcca

SEQ ID NO: 2789695 - RNA, 22 nt, Human
uucuaaccuugaaugcugccag

SEQ ID NO: 2789696 - RNA, 23 nt, Human
uucuaaccuugaaugcugccagu

SEQ ID NO: 2789697 - RNA, 24 nt, Human
uucuaaccuugaaugcugccagug

SEQ ID NO: 2789698 - RNA, 20 nt, Human
aucaaguuguaacuuauauu

SEQ ID NO: 2789699 - RNA, 22 nt, Human
aucaaguuguaacuuauauuga

SEQ ID NO: 2789700 - RNA, 23 nt, Human
aucaaguuguaacuuauauugaa

SEQ ID NO: 2789701 - RNA, 13 nt, Human
aucaauaagaagg

SEQ ID NO: 2789702 - RNA, 22 nt, Human
uucgaaaccugggauucaggaa

SEQ ID NO: 2789703 - RNA, 22 nt, Human
uucgaagccuugccuaaauuua

SEQ ID NO: 2789704 - RNA, 14 nt, Human
uucgagaccagccu

SEQ ID NO: 2789705 - RNA, 19 nt, Human
uucgagaccagccuggcca

SEQ ID NO: 2789706 - RNA, 17 nt, Human
uucgagaccagccuggc

SEQ ID NO: 2789707 - RNA, 16 nt, Human
uucgagaccagccugg

SEQ ID NO: 2789708 - RNA, 15 nt, Human
uucgagaccagccug

SEQ ID NO: 2789709 - RNA, 15 nt, Human
uucgacauauuuccu

SEQ ID NO: 2789710 - RNA, 23 nt, Human
uucgcaccuaccaucagggacag

SEQ ID NO: 2789711 - RNA, 23 nt, Human
uucgauacccaggaccaagccac

SEQ ID NO: 2789712 - RNA, 18 nt, Human
uucgaugguacgugaccc

SEQ ID NO: 2789713 - RNA, 20 nt, Human
uucgaugguacgugacccuc

SEQ ID NO: 2789714 - RNA, 23 nt, Human
uucgaugguacgugacccucugc

SEQ ID NO: 2789715 - RNA, 16 nt, Human
uucgaugaaggcugcc

SEQ ID NO: 2789716 - RNA, 20 nt, Human
uucgauacaccgggccugga

SEQ ID NO: 2789717 - RNA, 17 nt, Human
uucgaggacuacaacca

SEQ ID NO: 2789718 - RNA, 20 nt, Human
uucgauaaacaacaaggugg

SEQ ID NO: 2789719 - RNA, 20 nt, Human
uucgcccgagcuguuuaugu

SEQ ID NO: 2789720 - RNA, 23 nt, Human
uucgcauggucacacacugaugc

SEQ ID NO: 2789721 - RNA, 21 nt, Human
uucgcauggucacacacugau

SEQ ID NO: 2789722 - RNA, 20 nt, Human
uucgcauggucacacacuga

SEQ ID NO: 2789723 - RNA, 19 nt, Human
uucgcauggucacacacug

SEQ ID NO: 2789724 - RNA, 18 nt, Human
uucgcauggucacacacu

SEQ ID NO: 2789725 - RNA, 17 nt, Human
uucgcauggucacacac

SEQ ID NO: 2789726 - RNA, 16 nt, Human
uucgcauggucacaca

SEQ ID NO: 2789727 - RNA, 14 nt, Human
uucgcauggucaca

SEQ ID NO: 2789728 - RNA, 17 nt, Human
uucgcagcugaagugga

SEQ ID NO: 2789729 - RNA, 17 nt, Human
uucuaaggccuaggauu

SEQ ID NO: 2789730 - RNA, 23 nt, Human
uucuaaggaccugaaauuccaaa

SEQ ID NO: 2789731 - RNA, 15 nt, Human
uucuaaggccuagga

SEQ ID NO: 2789732 - RNA, 21 nt, Human
uucuagaauuuaucacacuuc

SEQ ID NO: 2789733 - RNA, 15 nt, Human
uucuagaauuuauca

SEQ ID NO: 2789734 - RNA, 18 nt, Human
uucuagaaguuucccuuc

SEQ ID NO: 2789735 - RNA, 20 nt, Human
uucuagaaguuucccuuccu

SEQ ID NO: 2789736 - RNA, 21 nt, Human
uucuagaaguuucccuuccuc

SEQ ID NO: 2789737 - RNA, 22 nt, Human
uucuagaauuauaagucacaaa

SEQ ID NO: 2789738 - RNA, 20 nt, Human
uucuagacauggagguucua

SEQ ID NO: 2789739 - RNA, 22 nt, Human
uucuagacauggagguucuaag

SEQ ID NO: 2789740 - RNA, 23 nt, Human
uucuagacauggagguucuaagg

SEQ ID NO: 2789741 - RNA, 15 nt, Human
uucuagacuuucugu

SEQ ID NO: 2789742 - RNA, 20 nt, Human
uucuaguggucuuuguaaga

SEQ ID NO: 2789743 - RNA, 21 nt, Human
uucuaguggucuuuguaagag

SEQ ID NO: 2789744 - RNA, 15 nt, Human
uucuaguggucuuug

SEQ ID NO: 2789745 - RNA, 17 nt, Human
uucuaguggucuuugua

SEQ ID NO: 2789746 - RNA, 18 nt, Human
uucuaguggucuuuguaa

SEQ ID NO: 2789747 - RNA, 19 nt, Human
uucuaguggucuuuguaag

SEQ ID NO: 2789748 - RNA, 19 nt, Human
uucuaguacacuuuuauga

SEQ ID NO: 2789749 - RNA, 16 nt, Human
uucuagaucagaugcu

SEQ ID NO: 2789750 - RNA, 22 nt, Human
uucuagaucagaugcuccaaga

SEQ ID NO: 2789751 - RNA, 21 nt, Human
uucuagguuucaaagaugcug

SEQ ID NO: 2789752 - RNA, 14 nt, Human
uucuagaguucaga

SEQ ID NO: 2789753 - RNA, 19 nt, Human
uucuagaguucagaguccu

SEQ ID NO: 2789754 - RNA, 22 nt, Human
uucuaguggucuuuguaagagu

SEQ ID NO: 2789755 - RNA, 19 nt, Human
uucucagauccuuguuuca

SEQ ID NO: 2789756 - RNA, 21 nt, Human
uucucagauggauugauaauu

SEQ ID NO: 2789757 - RNA, 15 nt, Human
uucucagauccuugu

SEQ ID NO: 2789758 - RNA, 13 nt, Human
uucucagcuccca

SEQ ID NO: 2789759 - RNA, 13 nt, Human
aucagaaaaggga

SEQ ID NO: 2789760 - RNA, 15 nt, Human
aucagaaaagggaag

SEQ ID NO: 2789761 - RNA, 15 nt, Human
aucacuuuuugaacu

SEQ ID NO: 2789762 - RNA, 16 nt, Human
aucacuuuuugaacua

SEQ ID NO: 2789763 - RNA, 17 nt, Human
aucacuuuuugaacuaa

SEQ ID NO: 2789764 - RNA, 18 nt, Human
aucacuuuuugaacuaag

SEQ ID NO: 2789765 - RNA, 21 nt, Human
aucacuuuuugaacuaagaaa

SEQ ID NO: 2789766 - RNA, 22 nt, Human
aucacuuuuugaacuaagaaac

SEQ ID NO: 2789767 - RNA, 17 nt, Human
aucagaaaaauggagca

SEQ ID NO: 2789768 - RNA, 18 nt, Human
aucagaaaaauggagcaa

SEQ ID NO: 2789769 - RNA, 16 nt, Human
aucacuuugucuaacu

SEQ ID NO: 2789770 - RNA, 21 nt, Human
aucacuuugucuaacucagaa

SEQ ID NO: 2789771 - RNA, 13 nt, Human
aucacuuuucagu

SEQ ID NO: 2789772 - RNA, 14 nt, Human
aucacuuuucagug

SEQ ID NO: 2789773 - RNA, 15 nt, Human
aucacuuuucaguga

SEQ ID NO: 2789774 - RNA, 13 nt, Human
aucaggagaaaaa

SEQ ID NO: 2789775 - RNA, 22 nt, Human
aucaggagaaaaagccuccagu

SEQ ID NO: 2789776 - RNA, 18 nt, Human
aucagaauugaaacacuu

SEQ ID NO: 2789777 - RNA, 22 nt, Human
aucagaccuuggaucagaugaa

SEQ ID NO: 2789778 - RNA, 13 nt, Human
auccauaaaaaaa

SEQ ID NO: 2789779 - RNA, 23 nt, Human
auccauuugcguuccaugaugcu

SEQ ID NO: 2789780 - RNA, 22 nt, Human
aucccacauccaacuccagcaa

SEQ ID NO: 2789781 - RNA, 13 nt, Human
aucccacauccaa

SEQ ID NO: 2789782 - RNA, 14 nt, Human
aucccacccacaug

SEQ ID NO: 2789783 - RNA, 15 nt, Human
aucccaccaacccuc

SEQ ID NO: 2789784 - RNA, 15 nt, Human
aucccaagugccagu

SEQ ID NO: 2789785 - RNA, 16 nt, Human
aucccaaucauuguug

SEQ ID NO: 2789786 - RNA, 17 nt, Human
aucccaaucauuguugc

SEQ ID NO: 2789787 - RNA, 12 nt, Human
aucccacacagg

SEQ ID NO: 2789788 - RNA, 14 nt, Human
aucccacacccugg

SEQ ID NO: 2789789 - RNA, 16 nt, Human
auccaaucucaaggaa

SEQ ID NO: 2789790 - RNA, 16 nt, Human
auccaaucagagacca

SEQ ID NO: 2789791 - RNA, 17 nt, Human
auccaaucagagaccag

SEQ ID NO: 2789792 - RNA, 22 nt, Human
auccaaucagagaccaggcccu

SEQ ID NO: 2789793 - RNA, 16 nt, Human
auccaaaaguggaagu

SEQ ID NO: 2789794 - RNA, 14 nt, Human
auccaaaaugugua

SEQ ID NO: 2789795 - RNA, 17 nt, Human
auccaaaauguguauuu

SEQ ID NO: 2789796 - RNA, 19 nt, Human
auccaaaauguguauuucu

SEQ ID NO: 2789797 - RNA, 23 nt, Human
auccaaaauguguauuucuuaua

SEQ ID NO: 2789798 - RNA, 13 nt, Human
auccaaacaauuu

SEQ ID NO: 2789799 - RNA, 18 nt, Human
auccaaacaauuuaaaaa

SEQ ID NO: 2789800 - RNA, 20 nt, Human
auccaaacauguauuuaugu

SEQ ID NO: 2789801 - RNA, 21 nt, Human
auccaaacauguauuuaugua

SEQ ID NO: 2789802 - RNA, 19 nt, Human
uucuguaaacucaaaacuu

SEQ ID NO: 2789803 - RNA, 20 nt, Human
uucuguaaacucaaaacuua

SEQ ID NO: 2789804 - RNA, 17 nt, Human
uucugguuuaaacuugu

SEQ ID NO: 2789805 - RNA, 22 nt, Human
uucugguuuaaacuuguuugcu

SEQ ID NO: 2789806 - RNA, 22 nt, Human
uucugguugaugccugugaacu

SEQ ID NO: 2789807 - RNA, 14 nt, Human
uucugguucuaaca

SEQ ID NO: 2789808 - RNA, 12 nt, Human
uucugguucuaa

SEQ ID NO: 2789809 - RNA, 14 nt, Human
uucuguagucauuu

SEQ ID NO: 2789810 - RNA, 15 nt, Human
uucuguagucauuua

SEQ ID NO: 2789811 - RNA, 20 nt, Human
uucuguagucauuuacuaaa

SEQ ID NO: 2789812 - RNA, 22 nt, Human
uucuguagucauuuacuaaaca

SEQ ID NO: 2789813 - RNA, 13 nt, Human
uucuguagauucu

SEQ ID NO: 2789814 - RNA, 16 nt, Human
uucuguagguuaaaaa

SEQ ID NO: 2789815 - RNA, 23 nt, Human
uucuguaaacucaaaacuuaaca

SEQ ID NO: 2789816 - RNA, 16 nt, Human
uucuguagguucugug

SEQ ID NO: 2789817 - RNA, 20 nt, Human
uucuguagagccuucugaug

SEQ ID NO: 2789818 - RNA, 14 nt, Human
aucauuuuuguauc

SEQ ID NO: 2789819 - RNA, 23 nt, Human
uucugcccugugggaccccaggc

SEQ ID NO: 2789820 - RNA, 22 nt, Human
uucugccgaccccuaguucccu

SEQ ID NO: 2789821 - RNA, 10 nt, Human
uucuggcuca

SEQ ID NO: 2789822 - RNA, 16 nt, Human
uucuggcucucccauu

SEQ ID NO: 2789823 - RNA, 14 nt, Human
uucuggcucccucu

SEQ ID NO: 2789824 - RNA, 22 nt, Human
uucuggcucucccauuuccuga

SEQ ID NO: 2789825 - RNA, 17 nt, Human
uucugguguguuaacau

SEQ ID NO: 2789826 - RNA, 16 nt, Human
uucucuaauaagaaaa

SEQ ID NO: 2789827 - RNA, 15 nt, Human
uucucuaaucgaaag

SEQ ID NO: 2789828 - RNA, 13 nt, Human
uucucuuucaaag

SEQ ID NO: 2789829 - RNA, 23 nt, Human
uucucuuguauaagauccuagau

SEQ ID NO: 2789830 - RNA, 16 nt, Human
uucucuuuucaaaaca

SEQ ID NO: 2789831 - RNA, 14 nt, Human
uucucuuucucucu

SEQ ID NO: 2789832 - RNA, 17 nt, Human
uucucuuucucucuucc

SEQ ID NO: 2789833 - RNA, 14 nt, Human
uucucuuucuuccu

SEQ ID NO: 2789834 - RNA, 11 nt, Human
uucucuuucuc

SEQ ID NO: 2789835 - RNA, 13 nt, Human
uucucuuucucuc

SEQ ID NO: 2789836 - RNA, 22 nt, Human
uucucuuuguggggcuuggcgu

SEQ ID NO: 2789837 - RNA, 19 nt, Human
uucugacaaaaaguuucca

SEQ ID NO: 2789838 - RNA, 15 nt, Human
uucucuuuucuaaaa

SEQ ID NO: 2789839 - RNA, 22 nt, Human
uucugacaaaaaguuuccauau

SEQ ID NO: 2789840 - RNA, 14 nt, Human
uucugacaaacugu

SEQ ID NO: 2789841 - RNA, 15 nt, Human
uucugacaaacugug

SEQ ID NO: 2789842 - RNA, 20 nt, Human
uucugacaaacuguguacau

SEQ ID NO: 2789843 - RNA, 18 nt, Human
uucugacaguuuuucugu

SEQ ID NO: 2789844 - RNA, 21 nt, Human
uucugacaguuuuucuguuuu

SEQ ID NO: 2789845 - RNA, 22 nt, Human
uucugcaagcacaucugcauuu

SEQ ID NO: 2789846 - RNA, 15 nt, Human
uucugcacacagcac

SEQ ID NO: 2789847 - RNA, 12 nt, Human
uucugcagaaga

SEQ ID NO: 2789848 - RNA, 15 nt, Human
uucugcagaagagga

SEQ ID NO: 2789849 - RNA, 20 nt, Human
uucugcagacacgccuuccc

SEQ ID NO: 2789850 - RNA, 12 nt, Human
uucugcacugaa

SEQ ID NO: 2789851 - RNA, 13 nt, Human
uucugcacugaaa

SEQ ID NO: 2789852 - RNA, 14 nt, Human
uucugcacugaaaa

SEQ ID NO: 2789853 - RNA, 15 nt, Human
uucugcacugaaaag

SEQ ID NO: 2789854 - RNA, 19 nt, Human
aucauugcuuccuccuccc

SEQ ID NO: 2789855 - RNA, 14 nt, Human
aucauugcugucug

SEQ ID NO: 2789856 - RNA, 16 nt, Human
aucauugcugucugca

SEQ ID NO: 2789857 - RNA, 21 nt, Human
aucauugcugucugcagccuu

SEQ ID NO: 2789858 - RNA, 22 nt, Human
aucauugcugucugcagccuug

SEQ ID NO: 2789859 - RNA, 14 nt, Human
aucaggcacagguc

SEQ ID NO: 2789860 - RNA, 15 nt, Human
aucaggcacagguca

SEQ ID NO: 2789861 - RNA, 17 nt, Human
aucaggcacaggucagg

SEQ ID NO: 2789862 - RNA, 18 nt, Human
aucauuguuuugaauauu

SEQ ID NO: 2789863 - RNA, 23 nt, Human
aucauugcuuugaagcaguugug

SEQ ID NO: 2789864 - RNA, 19 nt, Human
aucauuggaacaacugaua

SEQ ID NO: 2789865 - RNA, 20 nt, Human
aucauuggaacaacugauac

SEQ ID NO: 2789866 - RNA, 15 nt, Human
aucauuucucacugu

SEQ ID NO: 2789867 - RNA, 13 nt, Human
uucuccucccagg

SEQ ID NO: 2789868 - RNA, 22 nt, Human
aucauuuauuuuuuacauuauu

SEQ ID NO: 2789869 - RNA, 19 nt, Human
aucauuuauuuuuuacauu

SEQ ID NO: 2789870 - RNA, 15 nt, Human
aucauuuauuggaug

SEQ ID NO: 2789871 - RNA, 17 nt, Human
aucauuuauuuuaagca

SEQ ID NO: 2789872 - RNA, 21 nt, Human
aucauuuauuuuaagcacucu

SEQ ID NO: 2789873 - RNA, 18 nt, Human
aucauugcuuugaagcag

SEQ ID NO: 2789874 - RNA, 11 nt, Human
uucuccucccc

SEQ ID NO: 2789875 - RNA, 21 nt, Human
uucucuaacuucaaggcccau

SEQ ID NO: 2789876 - RNA, 14 nt, Human
uucuccugccucag

SEQ ID NO: 2789877 - RNA, 13 nt, Human
uucuccugccuca

SEQ ID NO: 2789878 - RNA, 12 nt, Human
uucuccugccuc

SEQ ID NO: 2789879 - RNA, 14 nt, Human
uugaacacaaacug

SEQ ID NO: 2789880 - RNA, 18 nt, Human
uugaacacaaacuguaaa

SEQ ID NO: 2789881 - RNA, 15 nt, Human
uugaacacaaacugu

SEQ ID NO: 2789882 - RNA, 19 nt, Human
uugaaaucaaugcaagagu

SEQ ID NO: 2789883 - RNA, 12 nt, Human
uugaaauuuuaa

SEQ ID NO: 2789884 - RNA, 15 nt, Human
uugaaauuuugcaaa

SEQ ID NO: 2789885 - RNA, 17 nt, Human
uugaaauuuugcaaaua

SEQ ID NO: 2789886 - RNA, 18 nt, Human
uugaaauuuugcaaauau

SEQ ID NO: 2789887 - RNA, 19 nt, Human
uugaaauuuugcaaauaua

SEQ ID NO: 2789888 - RNA, 20 nt, Human
uugaaauuuugcaaauauaa

SEQ ID NO: 2789889 - RNA, 22 nt, Human
uugaaauuuugcaaauauaaac

SEQ ID NO: 2789890 - RNA, 13 nt, Human
uugaaaugaaauu

SEQ ID NO: 2789891 - RNA, 14 nt, Human
uugaaaugaaauuu

SEQ ID NO: 2789892 - RNA, 19 nt, Human
uugaaaugaaauuuaaaca

SEQ ID NO: 2789893 - RNA, 20 nt, Human
uugaaaugaaauuuaaacau

SEQ ID NO: 2789894 - RNA, 21 nt, Human
uugaaaugaaauuuaaacauu

SEQ ID NO: 2789895 - RNA, 18 nt, Human
uugaaaugaggucuguuu

SEQ ID NO: 2789896 - RNA, 19 nt, Human
uugaaaugaggucuguuua

SEQ ID NO: 2789897 - RNA, 20 nt, Human
uugaaaugaggucuguuuaa

SEQ ID NO: 2789898 - RNA, 21 nt, Human
uugaaaugaggucuguuuaaa

SEQ ID NO: 2789899 - RNA, 13 nt, Human
uugaaaucuuuua

SEQ ID NO: 2789900 - RNA, 17 nt, Human
uugaaaguuuucagaac

SEQ ID NO: 2789901 - RNA, 13 nt, Human
uugaaauaccuca

SEQ ID NO: 2789902 - RNA, 14 nt, Human
uugaaauaccucau

SEQ ID NO: 2789903 - RNA, 17 nt, Human
uugaaauaccucauguu

SEQ ID NO: 2789904 - RNA, 18 nt, Human
uugaaauaccucauguuu

SEQ ID NO: 2789905 - RNA, 20 nt, Human
uugaaauaccucauguuuau

SEQ ID NO: 2789906 - RNA, 22 nt, Human
uugaaauaccucauguuuauga

SEQ ID NO: 2789907 - RNA, 12 nt, Human
uucuuuuucuga

SEQ ID NO: 2789908 - RNA, 16 nt, Human
uugaaaguuuacagga

SEQ ID NO: 2789909 - RNA, 16 nt, Human
uucuuuuuauuuucuu

SEQ ID NO: 2789910 - RNA, 16 nt, Human
uucuuuuuaaaauggu

SEQ ID NO: 2789911 - RNA, 20 nt, Human
uucuuuuuaaaauggugcuu

SEQ ID NO: 2789912 - RNA, 12 nt, Human
uucuuuuguuac

SEQ ID NO: 2789913 - RNA, 13 nt, Human
uucuuuuguuacu

SEQ ID NO: 2789914 - RNA, 14 nt, Human
uucuuuuguuacug

SEQ ID NO: 2789915 - RNA, 15 nt, Human
uucuuuuguuacugu

SEQ ID NO: 2789916 - RNA, 16 nt, Human
uucuuuuguuacuguu

SEQ ID NO: 2789917 - RNA, 17 nt, Human
uucuuuuguuacuguuc

SEQ ID NO: 2789918 - RNA, 18 nt, Human
uucuuuuguuacuguucu

SEQ ID NO: 2789919 - RNA, 19 nt, Human
uucuuuuguuacuguucuu

SEQ ID NO: 2789920 - RNA, 21 nt, Human
uucuuuuguuacuguucuugc

SEQ ID NO: 2789921 - RNA, 23 nt, Human
uucuuuuguuacuguucuugcug

SEQ ID NO: 2789922 - RNA, 15 nt, Human
uucuuuuuauugaau

SEQ ID NO: 2789923 - RNA, 15 nt, Human
uucuuuuuauuuucu

SEQ ID NO: 2789924 - RNA, 21 nt, Human
uucuuuuuaaguaauguggaa

SEQ ID NO: 2789925 - RNA, 13 nt, Human
uucuuuuuacaua

SEQ ID NO: 2789926 - RNA, 14 nt, Human
uucuuuuuacauaa

SEQ ID NO: 2789927 - RNA, 16 nt, Human
uucuuuuuacauaacu

SEQ ID NO: 2789928 - RNA, 18 nt, Human
uucuuuuuacauaacugc

SEQ ID NO: 2789929 - RNA, 23 nt, Human
uucuuuuuacauaacugccuuga

SEQ ID NO: 2789930 - RNA, 12 nt, Human
uucuuuuaucac

SEQ ID NO: 2789931 - RNA, 15 nt, Human
uucuuuuauuuguua

SEQ ID NO: 2789932 - RNA, 12 nt, Human
auccuaaugaau

SEQ ID NO: 2789933 - RNA, 13 nt, Human
auccuaaugaaug

SEQ ID NO: 2789934 - RNA, 22 nt, Human
auccuaagggucgaaagcucua

SEQ ID NO: 2789935 - RNA, 23 nt, Human
auccuaagggucgaaagcucuag

SEQ ID NO: 2789936 - RNA, 19 nt, Human
auccuaaugaaugcauaaa

SEQ ID NO: 2789937 - RNA, 11 nt, Human
uugaacacugg

SEQ ID NO: 2789938 - RNA, 20 nt, Human
uugaacacuggcuaaagaua

SEQ ID NO: 2789939 - RNA, 15 nt, Human
uugaaccaaaccucc

SEQ ID NO: 2789940 - RNA, 17 nt, Human
uugaacaaaaucuguug

SEQ ID NO: 2789941 - RNA, 21 nt, Human
uugaacacaaacuguaaauaa

SEQ ID NO: 2789942 - RNA, 20 nt, Human
uugaacacaaacuguaaaua

SEQ ID NO: 2789943 - RNA, 18 nt, Human
auccuaagggucgaaagc

SEQ ID NO: 2789944 - RNA, 19 nt, Human
auccuaagggucgaaagcu

SEQ ID NO: 2789945 - RNA, 21 nt, Human
auccuaagggucgaaagcucu

SEQ ID NO: 2789946 - RNA, 17 nt, Human
uugaacccaggaguuca

SEQ ID NO: 2789947 - RNA, 15 nt, Human
uugaaccauccacuu

SEQ ID NO: 2789948 - RNA, 16 nt, Human
uugaaccauccacuua

SEQ ID NO: 2789949 - RNA, 21 nt, Human
uugaaccauccacuuacauau

SEQ ID NO: 2789950 - RNA, 19 nt, Human
uucuuggcaaaagccuugu

SEQ ID NO: 2789951 - RNA, 20 nt, Human
uucuuggcaaaagccuugug

SEQ ID NO: 2789952 - RNA, 22 nt, Human
uucuuggcaaaagccuugugua

SEQ ID NO: 2789953 - RNA, 23 nt, Human
uucuuggcaaaagccuuguguau

SEQ ID NO: 2789954 - RNA, 23 nt, Human
uucuugcugcuagaacuuuuuua

SEQ ID NO: 2789955 - RNA, 14 nt, Human
uucuugguaaaguc

SEQ ID NO: 2789956 - RNA, 21 nt, Human
uucuugguaaaguccuuuucu

SEQ ID NO: 2789957 - RNA, 20 nt, Human
uucuugcuuaccuugacugu

SEQ ID NO: 2789958 - RNA, 12 nt, Human
uucuugcuugua

SEQ ID NO: 2789959 - RNA, 13 nt, Human
uucuugcuuguac

SEQ ID NO: 2789960 - RNA, 22 nt, Human
uucuugcuuguaccucuggcug

SEQ ID NO: 2789961 - RNA, 23 nt, Human
uucuugcuuguaccucuggcuga

SEQ ID NO: 2789962 - RNA, 17 nt, Human
uucuuccuuuacuuucc

SEQ ID NO: 2789963 - RNA, 18 nt, Human
uucuuccuuuacuuuccc

SEQ ID NO: 2789964 - RNA, 13 nt, Human
uucuuccuuucuc

SEQ ID NO: 2789965 - RNA, 20 nt, Human
uucuugacaaaaccuaacuu

SEQ ID NO: 2789966 - RNA, 21 nt, Human
uucuugacaaaaccuaacuug

SEQ ID NO: 2789967 - RNA, 13 nt, Human
uucuuucuuccuc

SEQ ID NO: 2789968 - RNA, 15 nt, Human
uucuuucuuccucug

SEQ ID NO: 2789969 - RNA, 19 nt, Human
uucuuuuaacuucuuucua

SEQ ID NO: 2789970 - RNA, 20 nt, Human
uucuuuuaacuucuuucuau

SEQ ID NO: 2789971 - RNA, 21 nt, Human
uucuuuuaacuucuuucuauu

SEQ ID NO: 2789972 - RNA, 19 nt, Human
uucuuuguguagcuuugcu

SEQ ID NO: 2789973 - RNA, 11 nt, Human
uucuuuguguu

SEQ ID NO: 2789974 - RNA, 12 nt, Human
uucuuuguguag

SEQ ID NO: 2789975 - RNA, 12 nt, Human
uucuuuguauca

SEQ ID NO: 2789976 - RNA, 10 nt, Human
uucuuugugu

SEQ ID NO: 2789977 - RNA, 12 nt, Human
uucuuugaagaa

SEQ ID NO: 2789978 - RNA, 13 nt, Human
uucuuucuuuaaa

SEQ ID NO: 2789979 - RNA, 12 nt, Human
uucuuacaagga

SEQ ID NO: 2789980 - RNA, 12 nt, Human
uucuuacacaua

SEQ ID NO: 2789981 - RNA, 16 nt, Human
uucuuacacauacagu

SEQ ID NO: 2789982 - RNA, 22 nt, Human
uucuuacacgacuaaguugaau

SEQ ID NO: 2789983 - RNA, 18 nt, Human
uucuuacacugccuguau

SEQ ID NO: 2789984 - RNA, 21 nt, Human
uucuuacacugccuguauacu

SEQ ID NO: 2789985 - RNA, 13 nt, Human
uucuuacauaauu

SEQ ID NO: 2789986 - RNA, 11 nt, Human
uucuuccucug

SEQ ID NO: 2789987 - RNA, 12 nt, Human
uucuuccucugc

SEQ ID NO: 2789988 - RNA, 13 nt, Human
uucuuccucugcu

SEQ ID NO: 2789989 - RNA, 18 nt, Human
uucuuccuguuaauguau

SEQ ID NO: 2789990 - RNA, 9 nt, Human
uucuuccuu

SEQ ID NO: 2789991 - RNA, 13 nt, Human
uucuuaauuaauu

SEQ ID NO: 2789992 - RNA, 14 nt, Human
uucuuaauuaauuu

SEQ ID NO: 2789993 - RNA, 16 nt, Human
uucuuaauuaauuuga

SEQ ID NO: 2789994 - RNA, 22 nt, Human
uucuuaauuaauuugauuaaca

SEQ ID NO: 2789995 - RNA, 16 nt, Human
uucuguugcugccuca

SEQ ID NO: 2789996 - RNA, 15 nt, Human
uucuguugcugccuc

SEQ ID NO: 2789997 - RNA, 18 nt, Human
aucccaccuccaucccag

SEQ ID NO: 2789998 - RNA, 15 nt, Human
aucccacccacaugu

SEQ ID NO: 2789999 - RNA, 18 nt, Human
aucccacccacaugugac

SEQ ID NO: 2790000 - RNA, 20 nt, Human
aucccacccacaugugacac

SEQ ID NO: 2790001 - RNA, 23 nt, Human
aucccacccacaugugacacaua

SEQ ID NO: 2790002 - RNA, 16 nt, Human
uucuuaaaaugcaaua

SEQ ID NO: 2790003 - RNA, 18 nt, Human
uucuuaaaaugcaauauu

SEQ ID NO: 2790004 - RNA, 21 nt, Human
uucuuaaaaugcaauauuugu

SEQ ID NO: 2790005 - RNA, 22 nt, Human
uucuuaaaaugcaauauuugua

SEQ ID NO: 2790006 - RNA, 23 nt, Human
uucuuaaaaugcaauauuuguaa

SEQ ID NO: 2790007 - RNA, 17 nt, Human
uucuguugcugccucau

SEQ ID NO: 2790008 - RNA, 22 nt, Human
uucuguuggauuccaugcuaag

SEQ ID NO: 2790009 - RNA, 23 nt, Human
uucuguuuuguuuggcaaggaaa

SEQ ID NO: 2790010 - RNA, 15 nt, Human
uugugguuuuaugga

SEQ ID NO: 2790011 - RNA, 16 nt, Human
uugugguuuuauggag

SEQ ID NO: 2790012 - RNA, 17 nt, Human
uugugguuuucaaauug

SEQ ID NO: 2790013 - RNA, 21 nt, Human
uuguggugugaguaucagaau

SEQ ID NO: 2790014 - RNA, 22 nt, Human
uuguggugugaguaucagaauu

SEQ ID NO: 2790015 - RNA, 22 nt, Human
uugugguaggccuuuuaacauu

SEQ ID NO: 2790016 - RNA, 17 nt, Human
uugugugaccaacugug

SEQ ID NO: 2790017 - RNA, 18 nt, Human
uugugugaccaacugugu

SEQ ID NO: 2790018 - RNA, 19 nt, Human
uugugugaccaacuguguu

SEQ ID NO: 2790019 - RNA, 21 nt, Human
uugugugaccaacuguguugu

SEQ ID NO: 2790020 - RNA, 23 nt, Human
uugugugaccaacuguguuguau

SEQ ID NO: 2790021 - RNA, 11 nt, Human
uugugugaccc

SEQ ID NO: 2790022 - RNA, 13 nt, Human
uuguguguugucu

SEQ ID NO: 2790023 - RNA, 18 nt, Human
uuguguguuuauuucacu

SEQ ID NO: 2790024 - RNA, 15 nt, Human
uuguguguuccaagu

SEQ ID NO: 2790025 - RNA, 22 nt, Human
uuguguguuccaaguuuccaaa

SEQ ID NO: 2790026 - RNA, 14 nt, Human
uuguucucugucca

SEQ ID NO: 2790027 - RNA, 14 nt, Human
augagacuugccuu

SEQ ID NO: 2790028 - RNA, 16 nt, Human
augagacuugccuucc

SEQ ID NO: 2790029 - RNA, 18 nt, Human
augagacucuagggucca

SEQ ID NO: 2790030 - RNA, 17 nt, Human
augagacucuagggucc

SEQ ID NO: 2790031 - RNA, 21 nt, Human
uugugacuauauagagauguu

SEQ ID NO: 2790032 - RNA, 22 nt, Human
uugugacuauauagagauguuu

SEQ ID NO: 2790033 - RNA, 19 nt, Human
uugugacuauauagagaug

SEQ ID NO: 2790034 - RNA, 15 nt, Human
uugugacuauauaga

SEQ ID NO: 2790035 - RNA, 20 nt, Human
uugugaguaaaucagauguu

SEQ ID NO: 2790036 - RNA, 12 nt, Human
uuguggccucag

SEQ ID NO: 2790037 - RNA, 11 nt, Human
uuguggccuca

SEQ ID NO: 2790038 - RNA, 13 nt, Human
uugugauaauuua

SEQ ID NO: 2790039 - RNA, 14 nt, Human
uugugauaauuuaa

SEQ ID NO: 2790040 - RNA, 11 nt, Human
uuguggcagag

SEQ ID NO: 2790041 - RNA, 21 nt, Human
uuguggccugggccuccucac

SEQ ID NO: 2790042 - RNA, 13 nt, Human
uuguggccucaga

SEQ ID NO: 2790043 - RNA, 14 nt, Human
uuguggcugggggc

SEQ ID NO: 2790044 - RNA, 16 nt, Human
uugugggaauuuaaga

SEQ ID NO: 2790045 - RNA, 20 nt, Human
uugugggacuuauuacaauu

SEQ ID NO: 2790046 - RNA, 16 nt, Human
uugugggcauaaacug

SEQ ID NO: 2790047 - RNA, 18 nt, Human
uugugggcauaaacuguu

SEQ ID NO: 2790048 - RNA, 20 nt, Human
uuguggguucuauguuuacu

SEQ ID NO: 2790049 - RNA, 15 nt, Human
uuguggggacccagg

SEQ ID NO: 2790050 - RNA, 20 nt, Human
uuguggggacccaggcuccg

SEQ ID NO: 2790051 - RNA, 19 nt, Human
augauuaaauaagauucua

SEQ ID NO: 2790052 - RNA, 20 nt, Human
augauuaaauaagauucuaa

SEQ ID NO: 2790053 - RNA, 19 nt, Human
uuguugugacuuugacgcu

SEQ ID NO: 2790054 - RNA, 16 nt, Human
uuguugugaugucuuu

SEQ ID NO: 2790055 - RNA, 17 nt, Human
uuguuguauaauuucga

SEQ ID NO: 2790056 - RNA, 20 nt, Human
uuguuguauaauuucgagau

SEQ ID NO: 2790057 - RNA, 21 nt, Human
uuguuguaaagcaauaaaauu

SEQ ID NO: 2790058 - RNA, 13 nt, Human
uuguuguaaaaag

SEQ ID NO: 2790059 - RNA, 15 nt, Human
uuguuguaaaaagaa

SEQ ID NO: 2790060 - RNA, 16 nt, Human
uuguuguaaaaagaaa

SEQ ID NO: 2790061 - RNA, 17 nt, Human
uuguuguaaaaagaaaa

SEQ ID NO: 2790062 - RNA, 17 nt, Human
augauuucagcucacug

SEQ ID NO: 2790063 - RNA, 18 nt, Human
augauuucacuagaaaag

SEQ ID NO: 2790064 - RNA, 20 nt, Human
augauuucacuagaaaagcu

SEQ ID NO: 2790065 - RNA, 21 nt, Human
augauuucacuagaaaagcug

SEQ ID NO: 2790066 - RNA, 14 nt, Human
augauucagaaauu

SEQ ID NO: 2790067 - RNA, 15 nt, Human
augauucauguuaua

SEQ ID NO: 2790068 - RNA, 17 nt, Human
augauucagaaauugga

SEQ ID NO: 2790069 - RNA, 14 nt, Human
augauucaggugca

SEQ ID NO: 2790070 - RNA, 22 nt, Human
augauucaggugcagaggaagu

SEQ ID NO: 2790071 - RNA, 23 nt, Human
augauuagcagaagaaaggaaca

SEQ ID NO: 2790072 - RNA, 24 nt, Human
augauuaaauaagauucuaacggu

SEQ ID NO: 2790073 - RNA, 15 nt, Human
augauuauuuucauu

SEQ ID NO: 2790074 - RNA, 18 nt, Human
augauuauuuucauuaca

SEQ ID NO: 2790075 - RNA, 16 nt, Human
augcaaauagcaaaac

SEQ ID NO: 2790076 - RNA, 14 nt, Human
augcaaaggcuggg

SEQ ID NO: 2790077 - RNA, 14 nt, Human
augcaaaguucugu

SEQ ID NO: 2790078 - RNA, 17 nt, Human
augcaaaguucuguguu

SEQ ID NO: 2790079 - RNA, 21 nt, Human
augcaaaguucuguguuuaau

SEQ ID NO: 2790080 - RNA, 15 nt, Human
augcaaaggcuggga

SEQ ID NO: 2790081 - RNA, 14 nt, Human
augcaaaguacaau

SEQ ID NO: 2790082 - RNA, 15 nt, Human
augcaaaguacaaug

SEQ ID NO: 2790083 - RNA, 16 nt, Human
augcaaaguacaaugu

SEQ ID NO: 2790084 - RNA, 17 nt, Human
augcaaaguacaaugug

SEQ ID NO: 2790085 - RNA, 18 nt, Human
augcaaaguacaaugugu

SEQ ID NO: 2790086 - RNA, 19 nt, Human
augcaaaguacaauguguu

SEQ ID NO: 2790087 - RNA, 11 nt, Human
augauuuuuag

SEQ ID NO: 2790088 - RNA, 15 nt, Human
augauuuucauaacu

SEQ ID NO: 2790089 - RNA, 20 nt, Human
augauuuucauaacuuauug

SEQ ID NO: 2790090 - RNA, 22 nt, Human
augauuuucauaacuuauugcu

SEQ ID NO: 2790091 - RNA, 13 nt, Human
augcaaaggcugg

SEQ ID NO: 2790092 - RNA, 21 nt, Human
augauuuccuugaauguggcu

SEQ ID NO: 2790093 - RNA, 12 nt, Human
augauuugcaau

SEQ ID NO: 2790094 - RNA, 19 nt, Human
augauuucagcucacugca

SEQ ID NO: 2790095 - RNA, 20 nt, Human
augauuuccuugaauguggc

SEQ ID NO: 2790096 - RNA, 21 nt, Human
augauuucaugcuaucucugu

SEQ ID NO: 2790097 - RNA, 20 nt, Human
augauuucaugcuaucucug

SEQ ID NO: 2790098 - RNA, 13 nt, Human
augcaccagcccu

SEQ ID NO: 2790099 - RNA, 11 nt, Human
augcaccaaac

SEQ ID NO: 2790100 - RNA, 21 nt, Human
augcacauauggacucugcac

SEQ ID NO: 2790101 - RNA, 17 nt, Human
augcacauccauuccca

SEQ ID NO: 2790102 - RNA, 21 nt, Human
augcacauccauucccaagaa

SEQ ID NO: 2790103 - RNA, 19 nt, Human
augcacauauggacucugc

SEQ ID NO: 2790104 - RNA, 17 nt, Human
augauuuguaguggaaa

SEQ ID NO: 2790105 - RNA, 14 nt, Human
augcaccagcccuu

SEQ ID NO: 2790106 - RNA, 13 nt, Human
uuuaaauguauac

SEQ ID NO: 2790107 - RNA, 15 nt, Human
uuguuuuacugucuu

SEQ ID NO: 2790108 - RNA, 19 nt, Human
uuguuuuaucaugacaugu

SEQ ID NO: 2790109 - RNA, 15 nt, Human
uuuaaauguauacua

SEQ ID NO: 2790110 - RNA, 14 nt, Human
uuuaaauguauacu

SEQ ID NO: 2790111 - RNA, 12 nt, Human
uuuaaauucuga

SEQ ID NO: 2790112 - RNA, 14 nt, Human
uuuaaauucugaga

SEQ ID NO: 2790113 - RNA, 17 nt, Human
uuuaaauucugagacau

SEQ ID NO: 2790114 - RNA, 14 nt, Human
uuuaaauguguaca

SEQ ID NO: 2790115 - RNA, 17 nt, Human
uuuaaauguguacaaug

SEQ ID NO: 2790116 - RNA, 18 nt, Human
uuuaaauguguacaaugu

SEQ ID NO: 2790117 - RNA, 19 nt, Human
uuuaaauguguacaaugua

SEQ ID NO: 2790118 - RNA, 23 nt, Human
uuuaaauguguacaauguacaca

SEQ ID NO: 2790119 - RNA, 22 nt, Human
uuuaaauuauguuuuuauuaag

SEQ ID NO: 2790120 - RNA, 14 nt, Human
uuuaagagugaagu

SEQ ID NO: 2790121 - RNA, 14 nt, Human
uuuaagaggcaggg

SEQ ID NO: 2790122 - RNA, 12 nt, Human
uuuaagauuuuu

SEQ ID NO: 2790123 - RNA, 14 nt, Human
uuuaagauuuuucu

SEQ ID NO: 2790124 - RNA, 16 nt, Human
uuuaagauuuuucuca

SEQ ID NO: 2790125 - RNA, 18 nt, Human
uuuaagauuuuucucaaa

SEQ ID NO: 2790126 - RNA, 12 nt, Human
uuuaagcaaaua

SEQ ID NO: 2790127 - RNA, 16 nt, Human
uuuaagcaaauacuua

SEQ ID NO: 2790128 - RNA, 15 nt, Human
uuuaagcaacaucuu

SEQ ID NO: 2790129 - RNA, 17 nt, Human
uuuaagcaacaucuuuu

SEQ ID NO: 2790130 - RNA, 17 nt, Human
uuuaagauuuuucucaa

SEQ ID NO: 2790131 - RNA, 15 nt, Human
uuuaagcacucuuaa

SEQ ID NO: 2790132 - RNA, 20 nt, Human
uuuaagcacucuuaaagcaa

SEQ ID NO: 2790133 - RNA, 19 nt, Human
uuuaagccucauauuuaaa

SEQ ID NO: 2790134 - RNA, 21 nt, Human
uuuaagugcguguguagaguu

SEQ ID NO: 2790135 - RNA, 18 nt, Human
uuuaaugcauuaaaccug

SEQ ID NO: 2790136 - RNA, 19 nt, Human
uuuaaugcauuaaaccugu

SEQ ID NO: 2790137 - RNA, 20 nt, Human
uuuaaugcauuaaaccuguc

SEQ ID NO: 2790138 - RNA, 21 nt, Human
uuuaaugcauuaaaccugucu

SEQ ID NO: 2790139 - RNA, 14 nt, Human
uuuaauguaaagau

SEQ ID NO: 2790140 - RNA, 15 nt, Human
uuuaauguaaagauu

SEQ ID NO: 2790141 - RNA, 16 nt, Human
uuuaauguaaagauuu

SEQ ID NO: 2790142 - RNA, 16 nt, Human
uuuaauuccaauauga

SEQ ID NO: 2790143 - RNA, 12 nt, Human
uuuaaugcugcc

SEQ ID NO: 2790144 - RNA, 13 nt, Human
uuuaaugcugccu

SEQ ID NO: 2790145 - RNA, 14 nt, Human
uuuaaugcugccuu

SEQ ID NO: 2790146 - RNA, 17 nt, Human
uuuaaugcuucauucaa

SEQ ID NO: 2790147 - RNA, 19 nt, Human
uuuaaugcuucauucaaua

SEQ ID NO: 2790148 - RNA, 19 nt, Human
uuuaauggacacuuuucac

SEQ ID NO: 2790149 - RNA, 21 nt, Human
uuuaauggacacuuuucaccu

SEQ ID NO: 2790150 - RNA, 22 nt, Human
uuuaauggacuuauuucuucaa

SEQ ID NO: 2790151 - RNA, 17 nt, Human
uuuaauggauuguuaau

SEQ ID NO: 2790152 - RNA, 20 nt, Human
uuuaauggauuguuaauuuc

SEQ ID NO: 2790153 - RNA, 21 nt, Human
uuuaauggauuguuaauuuca

SEQ ID NO: 2790154 - RNA, 23 nt, Human
uuuaauggauuguuaauuucagu

SEQ ID NO: 2790155 - RNA, 17 nt, Human
uuuaauggcagcagaaa

SEQ ID NO: 2790156 - RNA, 19 nt, Human
uuuaauggcagcagaaaac

SEQ ID NO: 2790157 - RNA, 21 nt, Human
uuuaauggcagcagaaaacuu

SEQ ID NO: 2790158 - RNA, 23 nt, Human
uuuaaugccgauauacucuagau

SEQ ID NO: 2790159 - RNA, 21 nt, Human
uuuaauuccaauaugaugacu

SEQ ID NO: 2790160 - RNA, 12 nt, Human
uuuaauugucau

SEQ ID NO: 2790161 - RNA, 14 nt, Human
augccacguuccac

SEQ ID NO: 2790162 - RNA, 21 nt, Human
augccacguuccacaguugcc

SEQ ID NO: 2790163 - RNA, 14 nt, Human
augccacuccuccc

SEQ ID NO: 2790164 - RNA, 16 nt, Human
augccacuccucccuc

SEQ ID NO: 2790165 - RNA, 17 nt, Human
augccacuccucccucc

SEQ ID NO: 2790166 - RNA, 18 nt, Human
augccacuccucccuccg

SEQ ID NO: 2790167 - RNA, 15 nt, Human
augcccaccugccca

SEQ ID NO: 2790168 - RNA, 19 nt, Human
augcccaccugcccaucac

SEQ ID NO: 2790169 - RNA, 16 nt, Human
augcccaccugcccau

SEQ ID NO: 2790170 - RNA, 21 nt, Human
augcccaccugcccaucacag

SEQ ID NO: 2790171 - RNA, 17 nt, Human
augcccacguucuuucc

SEQ ID NO: 2790172 - RNA, 20 nt, Human
augcccaccugcccaucaca

SEQ ID NO: 2790173 - RNA, 23 nt, Human
augcccagagggcccaggcaggc

SEQ ID NO: 2790174 - RNA, 22 nt, Human
augcccagagggcccaggcagg

SEQ ID NO: 2790175 - RNA, 21 nt, Human
augcccagagggcccaggcag

SEQ ID NO: 2790176 - RNA, 20 nt, Human
augcccagagggcccaggca

SEQ ID NO: 2790177 - RNA, 21 nt, Human
augcccauuugccuuuaaaaa

SEQ ID NO: 2790178 - RNA, 14 nt, Human
augccccaaauaua

SEQ ID NO: 2790179 - RNA, 15 nt, Human
augccccaaauauag

SEQ ID NO: 2790180 - RNA, 15 nt, Human
augcaguuuuccuua

SEQ ID NO: 2790181 - RNA, 18 nt, Human
augcagggauugcugcca

SEQ ID NO: 2790182 - RNA, 20 nt, Human
augccaagagugcacccaug

SEQ ID NO: 2790183 - RNA, 16 nt, Human
augccaagcacugugc

SEQ ID NO: 2790184 - RNA, 17 nt, Human
augccaagcacugugcu

SEQ ID NO: 2790185 - RNA, 14 nt, Human
augccaacuugucc

SEQ ID NO: 2790186 - RNA, 22 nt, Human
augccaagaaaagggcugacau

SEQ ID NO: 2790187 - RNA, 21 nt, Human
augccaagcacugugcucagg

SEQ ID NO: 2790188 - RNA, 18 nt, Human
augccaagcacugugcuc

SEQ ID NO: 2790189 - RNA, 19 nt, Human
augccaagcacugugcuca

SEQ ID NO: 2790190 - RNA, 22 nt, Human
augccaaagcuaggguggcccu

SEQ ID NO: 2790191 - RNA, 18 nt, Human
augccaaagcuagggugg

SEQ ID NO: 2790192 - RNA, 21 nt, Human
augcauaaauaugcagugaua

SEQ ID NO: 2790193 - RNA, 14 nt, Human
augcauaaauaugc

SEQ ID NO: 2790194 - RNA, 15 nt, Human
augcauaaauaugca

SEQ ID NO: 2790195 - RNA, 16 nt, Human
augcauaaauaugcag

SEQ ID NO: 2790196 - RNA, 17 nt, Human
augcauaaauaugcagu

SEQ ID NO: 2790197 - RNA, 13 nt, Human
augccaacaagaa

SEQ ID NO: 2790198 - RNA, 15 nt, Human
augccaacaagaaug

SEQ ID NO: 2790199 - RNA, 16 nt, Human
augccaacaagaaugc

SEQ ID NO: 2790200 - RNA, 18 nt, Human
augccaacaagaaugcau

SEQ ID NO: 2790201 - RNA, 19 nt, Human
augccaacaagaaugcauu

SEQ ID NO: 2790202 - RNA, 20 nt, Human
augccaacaagaaugcauug

SEQ ID NO: 2790203 - RNA, 21 nt, Human
augccaacaagaaugcauuga

SEQ ID NO: 2790204 - RNA, 13 nt, Human
augccaaccagcu

SEQ ID NO: 2790205 - RNA, 23 nt, Human
augcagugauauggcagaagaca

SEQ ID NO: 2790206 - RNA, 18 nt, Human
augcagugauauggcaga

SEQ ID NO: 2790207 - RNA, 19 nt, Human
augcagugauauggcagaa

SEQ ID NO: 2790208 - RNA, 21 nt, Human
augcagugauauggcagaaga

SEQ ID NO: 2790209 - RNA, 22 nt, Human
augcagugauauggcagaagac

SEQ ID NO: 2790210 - RNA, 13 nt, Human
augcagucuccuc

SEQ ID NO: 2790211 - RNA, 15 nt, Human
augcagucuccucuu

SEQ ID NO: 2790212 - RNA, 16 nt, Human
augcagucuccucuuu

SEQ ID NO: 2790213 - RNA, 17 nt, Human
augcagucuccucuuua

SEQ ID NO: 2790214 - RNA, 18 nt, Human
augcagucuccucuuuaa

SEQ ID NO: 2790215 - RNA, 19 nt, Human
augcagucuccucuuuaaa

SEQ ID NO: 2790216 - RNA, 20 nt, Human
augcagucuccucuuuaaaa

SEQ ID NO: 2790217 - RNA, 21 nt, Human
augcagucuccucuuuaaaac

SEQ ID NO: 2790218 - RNA, 23 nt, Human
augcagucuccucuuuaaaacaa

SEQ ID NO: 2790219 - RNA, 16 nt, Human
augcaguaaauuaucu

SEQ ID NO: 2790220 - RNA, 17 nt, Human
uuuaauuuuuuaaauaa

SEQ ID NO: 2790221 - RNA, 19 nt, Human
augcagggauugcugccac

SEQ ID NO: 2790222 - RNA, 20 nt, Human
augcagggauugcugccacu

SEQ ID NO: 2790223 - RNA, 22 nt, Human
augcagggauugcugccacuuu

SEQ ID NO: 2790224 - RNA, 19 nt, Human
augcagggccucacacggu

SEQ ID NO: 2790225 - RNA, 16 nt, Human
augcagggggcuccug

SEQ ID NO: 2790226 - RNA, 17 nt, Human
augcagggggcuccugg

SEQ ID NO: 2790227 - RNA, 21 nt, Human
augcaggucgcuacuggcaua

SEQ ID NO: 2790228 - RNA, 18 nt, Human
auggcuacuuugguuucu

SEQ ID NO: 2790229 - RNA, 22 nt, Human
auggcuacuuugguuucugucu

SEQ ID NO: 2790230 - RNA, 20 nt, Human
auggcgccaccagcucugcc

SEQ ID NO: 2790231 - RNA, 12 nt, Human
auggccuggcca

SEQ ID NO: 2790232 - RNA, 18 nt, Human
auggccuaugcacauaug

SEQ ID NO: 2790233 - RNA, 14 nt, Human
auggccucagcugc

SEQ ID NO: 2790234 - RNA, 23 nt, Human
auggcaaguuuugauaugaguau

SEQ ID NO: 2790235 - RNA, 13 nt, Human
auggccucagcug

SEQ ID NO: 2790236 - RNA, 20 nt, Human
auggccugccuugaagccac

SEQ ID NO: 2790237 - RNA, 19 nt, Human
auggccugccuugaagcca

SEQ ID NO: 2790238 - RNA, 18 nt, Human
auggcccuuccuccucca

SEQ ID NO: 2790239 - RNA, 21 nt, Human
auggcccuuccuccuccacca

SEQ ID NO: 2790240 - RNA, 20 nt, Human
auggccgcagggcugugcac

SEQ ID NO: 2790241 - RNA, 22 nt, Human
auggccagguggccacuccaga

SEQ ID NO: 2790242 - RNA, 18 nt, Human
auggccaggauccucucc

SEQ ID NO: 2790243 - RNA, 19 nt, Human
auggccaggauccucuccu

SEQ ID NO: 2790244 - RNA, 16 nt, Human
auggccagguggccac

SEQ ID NO: 2790245 - RNA, 22 nt, Human
auggccacaguagucuugauga

SEQ ID NO: 2790246 - RNA, 14 nt, Human
auggccacauuuaa

SEQ ID NO: 2790247 - RNA, 15 nt, Human
auggccacauuuaau

SEQ ID NO: 2790248 - RNA, 12 nt, Human
auggccacacug

SEQ ID NO: 2790249 - RNA, 18 nt, Human
auggccacacugugacac

SEQ ID NO: 2790250 - RNA, 21 nt, Human
auggccacacugugacacacu

SEQ ID NO: 2790251 - RNA, 22 nt, Human
auggccacacugugacacacua

SEQ ID NO: 2790252 - RNA, 23 nt, Human
auggccacacugugacacacuac

SEQ ID NO: 2790253 - RNA, 13 nt, Human
auggcauuugcag

SEQ ID NO: 2790254 - RNA, 14 nt, Human
auggcauuugcaga

SEQ ID NO: 2790255 - RNA, 17 nt, Human
auggcauuugcagauuu

SEQ ID NO: 2790256 - RNA, 19 nt, Human
auggcagaguuuguguguu

SEQ ID NO: 2790257 - RNA, 20 nt, Human
auggcagaguuuguguguug

SEQ ID NO: 2790258 - RNA, 22 nt, Human
auggcagaguuuguguguuguc

SEQ ID NO: 2790259 - RNA, 23 nt, Human
auggcagaguuuguguguugucu

SEQ ID NO: 2790260 - RNA, 14 nt, Human
auggauuuguuaca

SEQ ID NO: 2790261 - RNA, 17 nt, Human
auggauuuguuacagcc

SEQ ID NO: 2790262 - RNA, 21 nt, Human
auggacuaaccccaacgcaca

SEQ ID NO: 2790263 - RNA, 20 nt, Human
auggauuucugucuucucua

SEQ ID NO: 2790264 - RNA, 17 nt, Human
auggauuugaugcuguu

SEQ ID NO: 2790265 - RNA, 19 nt, Human
auggauuugaugcuguuug

SEQ ID NO: 2790266 - RNA, 14 nt, Human
auggcaaaaauggc

SEQ ID NO: 2790267 - RNA, 21 nt, Human
auggcagaaaaaaugucugua

SEQ ID NO: 2790268 - RNA, 16 nt, Human
auggcagaagacacca

SEQ ID NO: 2790269 - RNA, 13 nt, Human
auggcagaagaca

SEQ ID NO: 2790270 - RNA, 22 nt, Human
auggcagaagacaccagagcag

SEQ ID NO: 2790271 - RNA, 24 nt, Human
auggcagaagacaccagagcagau

SEQ ID NO: 2790272 - RNA, 17 nt, Human
auggcagaagacaccag

SEQ ID NO: 2790273 - RNA, 19 nt, Human
auggcagaagacaccagag

SEQ ID NO: 2790274 - RNA, 20 nt, Human
auggcagaagacaccagagc

SEQ ID NO: 2790275 - RNA, 21 nt, Human
auggcagaagacaccagagca

SEQ ID NO: 2790276 - RNA, 23 nt, Human
auggcaagaaagcugguaaacua

SEQ ID NO: 2790277 - RNA, 19 nt, Human
auggcaaggacugcaggga

SEQ ID NO: 2790278 - RNA, 22 nt, Human
auggcacaaucucggcucacug

SEQ ID NO: 2790279 - RNA, 16 nt, Human
auggcaauuuuguaac

SEQ ID NO: 2790280 - RNA, 15 nt, Human
auggcaauuuuguaa

SEQ ID NO: 2790281 - RNA, 23 nt, Human
uuucauguugcacacccacucag

SEQ ID NO: 2790282 - RNA, 18 nt, Human
uuucauguuuugugacua

SEQ ID NO: 2790283 - RNA, 16 nt, Human
uuucauguuuugugac

SEQ ID NO: 2790284 - RNA, 17 nt, Human
uuucauguuuugugacu

SEQ ID NO: 2790285 - RNA, 16 nt, Human
uuucaugcuaucucug

SEQ ID NO: 2790286 - RNA, 19 nt, Human
uuucaugcuaucucugugu

SEQ ID NO: 2790287 - RNA, 17 nt, Human
uuucaugcucugcaaaa

SEQ ID NO: 2790288 - RNA, 19 nt, Human
uuucaugcucugcaaaagg

SEQ ID NO: 2790289 - RNA, 20 nt, Human
auggacggugcuccaggcag

SEQ ID NO: 2790290 - RNA, 21 nt, Human
auggacggugcuccaggcagg

SEQ ID NO: 2790291 - RNA, 22 nt, Human
auggacggugcuccaggcaggc

SEQ ID NO: 2790292 - RNA, 13 nt, Human
auggacagaauuu

SEQ ID NO: 2790293 - RNA, 18 nt, Human
auggacagggcaugccac

SEQ ID NO: 2790294 - RNA, 18 nt, Human
auggacaguucacacccu

SEQ ID NO: 2790295 - RNA, 19 nt, Human
auggacaguucacacccug

SEQ ID NO: 2790296 - RNA, 21 nt, Human
auggacaguucacacccugca

SEQ ID NO: 2790297 - RNA, 22 nt, Human
auggacaguucacacccugcaa

SEQ ID NO: 2790298 - RNA, 23 nt, Human
auggacaguucacacccugcaag

SEQ ID NO: 2790299 - RNA, 13 nt, Human
auggacauccugu

SEQ ID NO: 2790300 - RNA, 15 nt, Human
auggacauccuguau

SEQ ID NO: 2790301 - RNA, 20 nt, Human
auggacauccuguauaagca

SEQ ID NO: 2790302 - RNA, 22 nt, Human
auggacauccuguauaagcacu

SEQ ID NO: 2790303 - RNA, 23 nt, Human
auggacauccuguauaagcacug

SEQ ID NO: 2790304 - RNA, 22 nt, Human
uuucccauuugugccagaggaa

SEQ ID NO: 2790305 - RNA, 21 nt, Human
uuucccauuugugccagagga

SEQ ID NO: 2790306 - RNA, 19 nt, Human
uuuccccagcaucacuccc

SEQ ID NO: 2790307 - RNA, 17 nt, Human
uuuccccccacucuccc

SEQ ID NO: 2790308 - RNA, 13 nt, Human
uuuccccccacuc

SEQ ID NO: 2790309 - RNA, 12 nt, Human
uuuccccccacu

SEQ ID NO: 2790310 - RNA, 15 nt, Human
uuuccccauaacuca

SEQ ID NO: 2790311 - RNA, 17 nt, Human
uuucauguggcuguaga

SEQ ID NO: 2790312 - RNA, 11 nt, Human
uuuccccagcc

SEQ ID NO: 2790313 - RNA, 13 nt, Human
uuuccccagccca

SEQ ID NO: 2790314 - RNA, 20 nt, Human
uuucacugcuggcugccuua

SEQ ID NO: 2790315 - RNA, 22 nt, Human
uuucacugcuggcugccuuaga

SEQ ID NO: 2790316 - RNA, 14 nt, Human
uuucacugcuggcu

SEQ ID NO: 2790317 - RNA, 19 nt, Human
auggaagacaaaauguuuu

SEQ ID NO: 2790318 - RNA, 21 nt, Human
auggaaucccacuguaugauu

SEQ ID NO: 2790319 - RNA, 17 nt, Human
uuucacugcuggcugcc

SEQ ID NO: 2790320 - RNA, 18 nt, Human
uuucacugcuggcugccu

SEQ ID NO: 2790321 - RNA, 16 nt, Human
auggaagacacauuga

SEQ ID NO: 2790322 - RNA, 16 nt, Human
auggaauaacucugug

SEQ ID NO: 2790323 - RNA, 16 nt, Human
auggaaugcuguguua

SEQ ID NO: 2790324 - RNA, 23 nt, Human
uuucagaaccucuuccccagaaa

SEQ ID NO: 2790325 - RNA, 20 nt, Human
uuucagaaccucuuccccag

SEQ ID NO: 2790326 - RNA, 19 nt, Human
uuucagaaccucuucccca

SEQ ID NO: 2790327 - RNA, 18 nt, Human
uuucagaaccucuucccc

SEQ ID NO: 2790328 - RNA, 13 nt, Human
uuucauauucuuu

SEQ ID NO: 2790329 - RNA, 16 nt, Human
uuucauauucuuucaa

SEQ ID NO: 2790330 - RNA, 18 nt, Human
uuucauauucuuucaauu

SEQ ID NO: 2790331 - RNA, 12 nt, Human
uuucauauugug

SEQ ID NO: 2790332 - RNA, 14 nt, Human
uuucauauugugcc

SEQ ID NO: 2790333 - RNA, 15 nt, Human
uuucauauugugcca

SEQ ID NO: 2790334 - RNA, 14 nt, Human
uuucaucaugagga

SEQ ID NO: 2790335 - RNA, 16 nt, Human
augcuguacaucuauu

SEQ ID NO: 2790336 - RNA, 12 nt, Human
augcuguacauc

SEQ ID NO: 2790337 - RNA, 20 nt, Human
augcuucaaaguccacauua

SEQ ID NO: 2790338 - RNA, 22 nt, Human
auggaacucagcugucuguggc

SEQ ID NO: 2790339 - RNA, 23 nt, Human
auggaacucagcugucuguggcu

SEQ ID NO: 2790340 - RNA, 20 nt, Human
augcuguaacuuaaaauagg

SEQ ID NO: 2790341 - RNA, 18 nt, Human
auggaacuucuaauauau

SEQ ID NO: 2790342 - RNA, 19 nt, Human
auggaacuucuaauauauu

SEQ ID NO: 2790343 - RNA, 13 nt, Human
auggaagacacau

SEQ ID NO: 2790344 - RNA, 14 nt, Human
auggaagacacauu

SEQ ID NO: 2790345 - RNA, 19 nt, Human
augcuucauaugaggagga

SEQ ID NO: 2790346 - RNA, 19 nt, Human
augcuucaucauucccucu

SEQ ID NO: 2790347 - RNA, 20 nt, Human
augcuucaucauucccucuc

SEQ ID NO: 2790348 - RNA, 22 nt, Human
augcuucaucauucccucucau

SEQ ID NO: 2790349 - RNA, 23 nt, Human
augcuacugucucacugaaacau

SEQ ID NO: 2790350 - RNA, 12 nt, Human
uuuauuaccagu

SEQ ID NO: 2790351 - RNA, 14 nt, Human
uuuauuaccagugg

SEQ ID NO: 2790352 - RNA, 12 nt, Human
uuuauuaccccc

SEQ ID NO: 2790353 - RNA, 17 nt, Human
uuuauuacccccuccuu

SEQ ID NO: 2790354 - RNA, 23 nt, Human
uuuauuacccccuccuucagaca

SEQ ID NO: 2790355 - RNA, 19 nt, Human
augcuggaugucugccaau

SEQ ID NO: 2790356 - RNA, 17 nt, Human
augcuggaugucugcca

SEQ ID NO: 2790357 - RNA, 23 nt, Human
augcucugagaagaggagcccuc

SEQ ID NO: 2790358 - RNA, 17 nt, Human
augcucugcaaaaggag

SEQ ID NO: 2790359 - RNA, 14 nt, Human
augcucuccuuucc

SEQ ID NO: 2790360 - RNA, 17 nt, Human
augcucucucaaauugu

SEQ ID NO: 2790361 - RNA, 18 nt, Human
augcucucucaaauuguc

SEQ ID NO: 2790362 - RNA, 19 nt, Human
augcucucucaaauuguca

SEQ ID NO: 2790363 - RNA, 23 nt, Human
augcuggcauuugcaccuaccuc

SEQ ID NO: 2790364 - RNA, 14 nt, Human
augcuggccagccu

SEQ ID NO: 2790365 - RNA, 15 nt, Human
augcuggccagccug

SEQ ID NO: 2790366 - RNA, 17 nt, Human
augcuggccagccuggg

SEQ ID NO: 2790367 - RNA, 22 nt, Human
augcuggccagccuggggccug

SEQ ID NO: 2790368 - RNA, 23 nt, Human
augcuggccagccuggggccugg

SEQ ID NO: 2790369 - RNA, 22 nt, Human
augcuggaugucugccaauuuu

SEQ ID NO: 2790370 - RNA, 17 nt, Human
augcuggccuuugcucu

SEQ ID NO: 2790371 - RNA, 15 nt, Human
uuuauagugcacaaa

SEQ ID NO: 2790372 - RNA, 18 nt, Human
uuuauagugcacaaaaug

SEQ ID NO: 2790373 - RNA, 19 nt, Human
uuuauagugcacaaaauga

SEQ ID NO: 2790374 - RNA, 13 nt, Human
uuuauaguggaaa

SEQ ID NO: 2790375 - RNA, 16 nt, Human
uuuauaggugagaaaa

SEQ ID NO: 2790376 - RNA, 18 nt, Human
uuuauaggugagaaaaaa

SEQ ID NO: 2790377 - RNA, 17 nt, Human
uuuauaguuuguacaug

SEQ ID NO: 2790378 - RNA, 19 nt, Human
uuuauaguuuguacaugca

SEQ ID NO: 2790379 - RNA, 14 nt, Human
uuuauauaauaucu

SEQ ID NO: 2790380 - RNA, 17 nt, Human
uuuauauaauaucuaaa

SEQ ID NO: 2790381 - RNA, 22 nt, Human
uuuauauaauaucuaaaguuau

SEQ ID NO: 2790382 - RNA, 14 nt, Human
uuuauauaaaugua

SEQ ID NO: 2790383 - RNA, 16 nt, Human
uuuauauacaauaaug

SEQ ID NO: 2790384 - RNA, 20 nt, Human
uuuauauacaauaauggaaa

SEQ ID NO: 2790385 - RNA, 16 nt, Human
uuuaugugaucaauuu

SEQ ID NO: 2790386 - RNA, 18 nt, Human
uuuaugggcauugacaaa

SEQ ID NO: 2790387 - RNA, 18 nt, Human
uuuaugguccuaaaagca

SEQ ID NO: 2790388 - RNA, 21 nt, Human
uuuaugguccuaaaagcaaaa

SEQ ID NO: 2790389 - RNA, 23 nt, Human
uuuaugguccuaaaagcaaaaua

SEQ ID NO: 2790390 - RNA, 21 nt, Human
uuuauuaaaaugauuguaaaa

SEQ ID NO: 2790391 - RNA, 22 nt, Human
uuuauuaaaaugauuguaaaau

SEQ ID NO: 2790392 - RNA, 23 nt, Human
uuuauuaaaaugauuguaaaaua

SEQ ID NO: 2790393 - RNA, 14 nt, Human
uuuauuaaaaugau

SEQ ID NO: 2790394 - RNA, 23 nt, Human
uuuauguuugcacuugugauuau

SEQ ID NO: 2790395 - RNA, 14 nt, Human
uuuauguuugucuu

SEQ ID NO: 2790396 - RNA, 22 nt, Human
uuuauguuugucuuuuaaugcu

SEQ ID NO: 2790397 - RNA, 14 nt, Human
uuuauguuuagaua

SEQ ID NO: 2790398 - RNA, 12 nt, Human
uuuauguuugaa

SEQ ID NO: 2790399 - RNA, 13 nt, Human
uuuauguuugaau

SEQ ID NO: 2790400 - RNA, 14 nt, Human
uuuauguuugaaua

SEQ ID NO: 2790401 - RNA, 22 nt, Human
uuuaugugugaggagcugcugg

SEQ ID NO: 2790402 - RNA, 18 nt, Human
uuuaugugugaggagcug

SEQ ID NO: 2790403 - RNA, 17 nt, Human
uuuauguucauuuguuu

SEQ ID NO: 2790404 - RNA, 17 nt, Human
uuuauguguaguugucu

SEQ ID NO: 2790405 - RNA, 15 nt, Human
uuuauguuaaaagau

SEQ ID NO: 2790406 - RNA, 17 nt, Human
uuuauguuaaaagauuu

SEQ ID NO: 2790407 - RNA, 22 nt, Human
uuuagcaauuuaauauuuugca

SEQ ID NO: 2790408 - RNA, 23 nt, Human
uuuagcaauuuaauauuuugcac

SEQ ID NO: 2790409 - RNA, 19 nt, Human
uuuagauugaaaacuuuuc

SEQ ID NO: 2790410 - RNA, 19 nt, Human
uuuagauuuucugguucua

SEQ ID NO: 2790411 - RNA, 12 nt, Human
uuuagauuucaa

SEQ ID NO: 2790412 - RNA, 16 nt, Human
uuuagauuucaagaaa

SEQ ID NO: 2790413 - RNA, 20 nt, Human
uuuagauuucaagaaaaaau

SEQ ID NO: 2790414 - RNA, 22 nt, Human
uuuagauugaaaacuuuucuca

SEQ ID NO: 2790415 - RNA, 15 nt, Human
augccccagagcugu

SEQ ID NO: 2790416 - RNA, 19 nt, Human
augccccggccaccucugc

SEQ ID NO: 2790417 - RNA, 20 nt, Human
augccccggccaccucugcg

SEQ ID NO: 2790418 - RNA, 15 nt, Human
augccccggccaccu

SEQ ID NO: 2790419 - RNA, 16 nt, Human
augccccggccaccuc

SEQ ID NO: 2790420 - RNA, 17 nt, Human
augccccggccaccucu

SEQ ID NO: 2790421 - RNA, 18 nt, Human
augccccggccaccucug

SEQ ID NO: 2790422 - RNA, 17 nt, Human
uuuagaugaggaaauga

SEQ ID NO: 2790423 - RNA, 15 nt, Human
uuuaggaacuucaga

SEQ ID NO: 2790424 - RNA, 16 nt, Human
uuuaggaacuucagag

SEQ ID NO: 2790425 - RNA, 17 nt, Human
uuuaggaacuucagaga

SEQ ID NO: 2790426 - RNA, 13 nt, Human
uuuaggaaaauca

SEQ ID NO: 2790427 - RNA, 22 nt, Human
uuuaggaaaaucacuuugucua

SEQ ID NO: 2790428 - RNA, 15 nt, Human
uuuaguagagacagg

SEQ ID NO: 2790429 - RNA, 13 nt, Human
uuuaggaaguguu

SEQ ID NO: 2790430 - RNA, 22 nt, Human
uuuaggaaguugacuuauagua

SEQ ID NO: 2790431 - RNA, 18 nt, Human
uuuaggaauccuuuggug

SEQ ID NO: 2790432 - RNA, 21 nt, Human
uuuaggacacauuuagaugca

SEQ ID NO: 2790433 - RNA, 17 nt, Human
uuuauagcuauuacugu

SEQ ID NO: 2790434 - RNA, 20 nt, Human
uuuauagcuauuacugucug

SEQ ID NO: 2790435 - RNA, 13 nt, Human
uuuaguauucauu

SEQ ID NO: 2790436 - RNA, 15 nt, Human
uuuaguauucauucu

SEQ ID NO: 2790437 - RNA, 21 nt, Human
uuuaguauucauucugcauug

SEQ ID NO: 2790438 - RNA, 21 nt, Human
uuuaguauugaauacuuacau

SEQ ID NO: 2790439 - RNA, 20 nt, Human
uuuaguaugacgcugauaca

SEQ ID NO: 2790440 - RNA, 21 nt, Human
uuuaguaugacgcugauacau

SEQ ID NO: 2790441 - RNA, 13 nt, Human
uuuagucucuuua

SEQ ID NO: 2790442 - RNA, 14 nt, Human
uuuagucucuuuau

SEQ ID NO: 2790443 - RNA, 22 nt, Human
uuuaguaucaguguuuuaaauu

SEQ ID NO: 2790444 - RNA, 13 nt, Human
uugcccugggaaa

SEQ ID NO: 2790445 - RNA, 16 nt, Human
uugcccuggggaucaa

SEQ ID NO: 2790446 - RNA, 22 nt, Human
uugcauuaaauucacaaacuuu

SEQ ID NO: 2790447 - RNA, 16 nt, Human
uugcauuauucauuua

SEQ ID NO: 2790448 - RNA, 17 nt, Human
uugcauuauucauuuag

SEQ ID NO: 2790449 - RNA, 17 nt, Human
uugcauuccuuugucuu

SEQ ID NO: 2790450 - RNA, 12 nt, Human
uugcauucuauu

SEQ ID NO: 2790451 - RNA, 15 nt, Human
uugcauucuauugcc

SEQ ID NO: 2790452 - RNA, 16 nt, Human
uugcauucuauugccu

SEQ ID NO: 2790453 - RNA, 17 nt, Human
uugcauucuauugccuu

SEQ ID NO: 2790454 - RNA, 18 nt, Human
uugcauucuauugccuuc

SEQ ID NO: 2790455 - RNA, 19 nt, Human
uugcauucuauugccuucu

SEQ ID NO: 2790456 - RNA, 20 nt, Human
uugcauucuauugccuucuu

SEQ ID NO: 2790457 - RNA, 22 nt, Human
uugcauucuauugccuucuuug

SEQ ID NO: 2790458 - RNA, 21 nt, Human
uugcauuaaauucacaaacuu

SEQ ID NO: 2790459 - RNA, 20 nt, Human
uugcauuaaauucacaaacu

SEQ ID NO: 2790460 - RNA, 13 nt, Human
uugcauuaaauuc

SEQ ID NO: 2790461 - RNA, 21 nt, Human
uugccgcgucgcccucccagg

SEQ ID NO: 2790462 - RNA, 18 nt, Human
uugccgcgucgcccuccc

SEQ ID NO: 2790463 - RNA, 17 nt, Human
uugccgaggagccaggc

SEQ ID NO: 2790464 - RNA, 18 nt, Human
uugcccuuucuguaccau

SEQ ID NO: 2790465 - RNA, 23 nt, Human
uugcccugguuucacuggcccaa

SEQ ID NO: 2790466 - RNA, 22 nt, Human
uugccgcgucgcccucccaggc

SEQ ID NO: 2790467 - RNA, 20 nt, Human
uugcccuuucuguaccauuu

SEQ ID NO: 2790468 - RNA, 18 nt, Human
uugccuaaauuuaaugcu

SEQ ID NO: 2790469 - RNA, 22 nt, Human
uugccuaaauuuaaugcugccu

SEQ ID NO: 2790470 - RNA, 19 nt, Human
uugccuaagcauugccugg

SEQ ID NO: 2790471 - RNA, 20 nt, Human
uugccuaagcauugccuggc

SEQ ID NO: 2790472 - RNA, 14 nt, Human
uugccuaaguauua

SEQ ID NO: 2790473 - RNA, 19 nt, Human
uugccuaauaaacauccuu

SEQ ID NO: 2790474 - RNA, 16 nt, Human
uugccuaaguauuaaa

SEQ ID NO: 2790475 - RNA, 20 nt, Human
uugccuaaguauuaaaacau

SEQ ID NO: 2790476 - RNA, 16 nt, Human
aucugagcugagccag

SEQ ID NO: 2790477 - RNA, 17 nt, Human
aucugagcugagccagg

SEQ ID NO: 2790478 - RNA, 18 nt, Human
aucugagcugagccaggc

SEQ ID NO: 2790479 - RNA, 19 nt, Human
aucugagcugagccaggcu

SEQ ID NO: 2790480 - RNA, 15 nt, Human
aucugagccagugcu

SEQ ID NO: 2790481 - RNA, 23 nt, Human
uugccuaaguauuaaaacauugg

SEQ ID NO: 2790482 - RNA, 15 nt, Human
uugccuauccugcug

SEQ ID NO: 2790483 - RNA, 16 nt, Human
uugccuauccugcugu

SEQ ID NO: 2790484 - RNA, 20 nt, Human
uugccuauccugcuguucua

SEQ ID NO: 2790485 - RNA, 23 nt, Human
aucugaggcauccagcagucucu

SEQ ID NO: 2790486 - RNA, 20 nt, Human
aucugagguccugugaucuu

SEQ ID NO: 2790487 - RNA, 20 nt, Human
aucugcagggggugugucug

SEQ ID NO: 2790488 - RNA, 21 nt, Human
aucugcaauucaaaaguucca

SEQ ID NO: 2790489 - RNA, 12 nt, Human
aucugcacccuu

SEQ ID NO: 2790490 - RNA, 16 nt, Human
aucugcacccuucuuu

SEQ ID NO: 2790491 - RNA, 17 nt, Human
aucugcacccuucuuuu

SEQ ID NO: 2790492 - RNA, 19 nt, Human
aucugcacccuucuuuucu

SEQ ID NO: 2790493 - RNA, 20 nt, Human
aucugcacccuucuuuucuc

SEQ ID NO: 2790494 - RNA, 22 nt, Human
aucugcacccuucuuuucucau

SEQ ID NO: 2790495 - RNA, 13 nt, Human
aucugauuugcau

SEQ ID NO: 2790496 - RNA, 19 nt, Human
aucugauuugcauauucau

SEQ ID NO: 2790497 - RNA, 21 nt, Human
aucugauuugcauauucauuc

SEQ ID NO: 2790498 - RNA, 14 nt, Human
aucugauggcuucu

SEQ ID NO: 2790499 - RNA, 17 nt, Human
aucugauggcuucucca

SEQ ID NO: 2790500 - RNA, 18 nt, Human
aucugauggcuucuccag

SEQ ID NO: 2790501 - RNA, 18 nt, Human
aucugaugcaagcaagaa

SEQ ID NO: 2790502 - RNA, 17 nt, Human
aucugaucugagugaga

SEQ ID NO: 2790503 - RNA, 13 nt, Human
aucugaguugcca

SEQ ID NO: 2790504 - RNA, 14 nt, Human
aucugaguugccaa

SEQ ID NO: 2790505 - RNA, 16 nt, Human
aucugaguugccaaga

SEQ ID NO: 2790506 - RNA, 18 nt, Human
aucugaguugccaagaca

SEQ ID NO: 2790507 - RNA, 20 nt, Human
aucugaguugccaagacaaa

SEQ ID NO: 2790508 - RNA, 23 nt, Human
aucugaguugccaagacaaauca

SEQ ID NO: 2790509 - RNA, 23 nt, Human
aucugcauuuucaccccacccuu

SEQ ID NO: 2790510 - RNA, 22 nt, Human
aucugcauuuucaccccacccu

SEQ ID NO: 2790511 - RNA, 19 nt, Human
aucugcauuuucaccccac

SEQ ID NO: 2790512 - RNA, 16 nt, Human
aucugcauugcccagu

SEQ ID NO: 2790513 - RNA, 17 nt, Human
aucugcauugcccaguc

SEQ ID NO: 2790514 - RNA, 20 nt, Human
aucugcauugcccagucuuu

SEQ ID NO: 2790515 - RNA, 21 nt, Human
aucugcauugcccagucuuuc

SEQ ID NO: 2790516 - RNA, 22 nt, Human
aucugcauugcccagucuuuca

SEQ ID NO: 2790517 - RNA, 17 nt, Human
aucuggguucacugcaa

SEQ ID NO: 2790518 - RNA, 19 nt, Human
aucuggguucacugcaacc

SEQ ID NO: 2790519 - RNA, 23 nt, Human
aucuguacuugguccaacugcaa

SEQ ID NO: 2790520 - RNA, 23 nt, Human
aucuguacaaaggggaaagaaca

SEQ ID NO: 2790521 - RNA, 17 nt, Human
aucuggucccuugcagc

SEQ ID NO: 2790522 - RNA, 18 nt, Human
aucuggucuuguuagaaa

SEQ ID NO: 2790523 - RNA, 19 nt, Human
aucuggucuuguuagaaaa

SEQ ID NO: 2790524 - RNA, 11 nt, Human
aucuguaacag

SEQ ID NO: 2790525 - RNA, 20 nt, Human
aucuguaacagguauuuugu

SEQ ID NO: 2790526 - RNA, 23 nt, Human
aucuguaacagguauuuuguuuc

SEQ ID NO: 2790527 - RNA, 11 nt, Human
aucuguacauu

SEQ ID NO: 2790528 - RNA, 15 nt, Human
aucuguacauuuugu

SEQ ID NO: 2790529 - RNA, 16 nt, Human
aucuguacauuuuguu

SEQ ID NO: 2790530 - RNA, 20 nt, Human
aucuguacauuuuguuguaa

SEQ ID NO: 2790531 - RNA, 21 nt, Human
aucuguacauuuuguuguaaa

SEQ ID NO: 2790532 - RNA, 22 nt, Human
aucuguacauuuuguuguaaaa

SEQ ID NO: 2790533 - RNA, 23 nt, Human
aucuguacauuuuguuguaaaaa

SEQ ID NO: 2790534 - RNA, 19 nt, Human
aucuugcucugcugacaga

SEQ ID NO: 2790535 - RNA, 17 nt, Human
aucuugcucugcugaca

SEQ ID NO: 2790536 - RNA, 15 nt, Human
aucuuagauucucug

SEQ ID NO: 2790537 - RNA, 18 nt, Human
aucuuagauucucugugu

SEQ ID NO: 2790538 - RNA, 20 nt, Human
aucuuagauucucugugucu

SEQ ID NO: 2790539 - RNA, 22 nt, Human
aucuuagauucucugugucuaa

SEQ ID NO: 2790540 - RNA, 16 nt, Human
aucuugaggugguagu

SEQ ID NO: 2790541 - RNA, 22 nt, Human
aucuugaggugguaguaaaaca

SEQ ID NO: 2790542 - RNA, 19 nt, Human
aucuugaguauaagaaaug

SEQ ID NO: 2790543 - RNA, 22 nt, Human
aucuugaguauaagaaaugcau

SEQ ID NO: 2790544 - RNA, 23 nt, Human
aucuuagauucucugugucuaag

SEQ ID NO: 2790545 - RNA, 19 nt, Human
aucuuagcauagcuuauua

SEQ ID NO: 2790546 - RNA, 14 nt, Human
aucuguucuaacau

SEQ ID NO: 2790547 - RNA, 16 nt, Human
aucuguucuaacaugu

SEQ ID NO: 2790548 - RNA, 20 nt, Human
aucuguucugggcucuuucc

SEQ ID NO: 2790549 - RNA, 21 nt, Human
aucugugaaaugcuggcauuu

SEQ ID NO: 2790550 - RNA, 19 nt, Human
aucuguaaguaacuucaca

SEQ ID NO: 2790551 - RNA, 13 nt, Human
aucugugugaaaa

SEQ ID NO: 2790552 - RNA, 15 nt, Human
aucugugugaaaaug

SEQ ID NO: 2790553 - RNA, 17 nt, Human
aucugugugaaaauggg

SEQ ID NO: 2790554 - RNA, 13 nt, Human
aucuuagauucuc

SEQ ID NO: 2790555 - RNA, 21 nt, Human
aucugugaaguaguucuguuu

SEQ ID NO: 2790556 - RNA, 18 nt, Human
aucuuagauguuucacac

SEQ ID NO: 2790557 - RNA, 13 nt, Human
aucuuacagcugg

SEQ ID NO: 2790558 - RNA, 21 nt, Human
aucuuacaacaggcuuaugaa

SEQ ID NO: 2790559 - RNA, 22 nt, Human
aucuuacaacaggcuuaugaau

SEQ ID NO: 2790560 - RNA, 15 nt, Human
aucuguuguuuuguu

SEQ ID NO: 2790561 - RNA, 14 nt, Human
aucuguuuaaagca

SEQ ID NO: 2790562 - RNA, 17 nt, Human
aucuguuuaaagcauau

SEQ ID NO: 2790563 - RNA, 21 nt, Human
aucuguuuaaagcauauagag

SEQ ID NO: 2790564 - RNA, 22 nt, Human
aucuguuuaaagcauauagaga

SEQ ID NO: 2790565 - RNA, 24 nt, Human
aucuguuuaaagcauauagagaug

SEQ ID NO: 2790566 - RNA, 18 nt, Human
aucucaaugaagccagcu

SEQ ID NO: 2790567 - RNA, 20 nt, Human
uugaacacuuggugcuggga

SEQ ID NO: 2790568 - RNA, 13 nt, Human
aucucaauccugc

SEQ ID NO: 2790569 - RNA, 18 nt, Human
auccuauccacugggcac

SEQ ID NO: 2790570 - RNA, 19 nt, Human
auccuaucaacaacaaggu

SEQ ID NO: 2790571 - RNA, 15 nt, Human
auccuaguuuccucu

SEQ ID NO: 2790572 - RNA, 17 nt, Human
auccuaguuuccucucc

SEQ ID NO: 2790573 - RNA, 18 nt, Human
auccuaguuuccucuccu

SEQ ID NO: 2790574 - RNA, 13 nt, Human
auccuauauagaa

SEQ ID NO: 2790575 - RNA, 15 nt, Human
auccuauauagaaug

SEQ ID NO: 2790576 - RNA, 18 nt, Human
auccuauauagaaugcug

SEQ ID NO: 2790577 - RNA, 20 nt, Human
auccuauauagaaugcugca

SEQ ID NO: 2790578 - RNA, 23 nt, Human
aucucagcuuugagaagccuuca

SEQ ID NO: 2790579 - RNA, 22 nt, Human
aucucagucaugcauaaauaug

SEQ ID NO: 2790580 - RNA, 13 nt, Human
aucucagcuuuga

SEQ ID NO: 2790581 - RNA, 22 nt, Human
aucucagcuuugagaagccuuc

SEQ ID NO: 2790582 - RNA, 18 nt, Human
aucucaggagauuucaug

SEQ ID NO: 2790583 - RNA, 19 nt, Human
aucucagaucacugcaacc

SEQ ID NO: 2790584 - RNA, 18 nt, Human
aucucacuugugccaaca

SEQ ID NO: 2790585 - RNA, 22 nt, Human
aucucacuugugccaacacuca

SEQ ID NO: 2790586 - RNA, 13 nt, Human
aucucacuugugc

SEQ ID NO: 2790587 - RNA, 16 nt, Human
aucucacucugccccc

SEQ ID NO: 2790588 - RNA, 14 nt, Human
aucucacucugccc

SEQ ID NO: 2790589 - RNA, 12 nt, Human
aucucacucugc

SEQ ID NO: 2790590 - RNA, 11 nt, Human
aucucagccca

SEQ ID NO: 2790591 - RNA, 20 nt, Human
aucucagaucaguguaccau

SEQ ID NO: 2790592 - RNA, 17 nt, Human
aucucauagguugccaa

SEQ ID NO: 2790593 - RNA, 15 nt, Human
aucucauaccucuga

SEQ ID NO: 2790594 - RNA, 18 nt, Human
aucucauaccucugacca

SEQ ID NO: 2790595 - RNA, 23 nt, Human
aucucauagguugccaauaauac

SEQ ID NO: 2790596 - RNA, 16 nt, Human
aucucaucaacaaaga

SEQ ID NO: 2790597 - RNA, 19 nt, Human
aucucauagguugccaaua

SEQ ID NO: 2790598 - RNA, 15 nt, Human
aucuccacuccagau

SEQ ID NO: 2790599 - RNA, 15 nt, Human
aucuccaguauucuu

SEQ ID NO: 2790600 - RNA, 15 nt, Human
aucuccaucugucaa

SEQ ID NO: 2790601 - RNA, 18 nt, Human
aucuccaguauucuuguc

SEQ ID NO: 2790602 - RNA, 20 nt, Human
aucucccaagcuaucuaaag

SEQ ID NO: 2790603 - RNA, 23 nt, Human
uugauggugaugaaauguaaaua

SEQ ID NO: 2790604 - RNA, 13 nt, Human
aucucauuugguu

SEQ ID NO: 2790605 - RNA, 20 nt, Human
uugauguacugauugagaag

SEQ ID NO: 2790606 - RNA, 22 nt, Human
uugauguacugauugagaaguu

SEQ ID NO: 2790607 - RNA, 22 nt, Human
uugauguauccaacaagccaga

SEQ ID NO: 2790608 - RNA, 12 nt, Human
uugauguaucug

SEQ ID NO: 2790609 - RNA, 13 nt, Human
uugauguaucuga

SEQ ID NO: 2790610 - RNA, 15 nt, Human
uugauguaucugagu

SEQ ID NO: 2790611 - RNA, 20 nt, Human
uugauguaucugaguugcca

SEQ ID NO: 2790612 - RNA, 11 nt, Human
uugauguguuu

SEQ ID NO: 2790613 - RNA, 14 nt, Human
uugaugugacaaua

SEQ ID NO: 2790614 - RNA, 15 nt, Human
uugaugugacaauaa

SEQ ID NO: 2790615 - RNA, 19 nt, Human
uugaugugacaauaauauu

SEQ ID NO: 2790616 - RNA, 15 nt, Human
uugaugccaggacac

SEQ ID NO: 2790617 - RNA, 11 nt, Human
aucucuuccug

SEQ ID NO: 2790618 - RNA, 12 nt, Human
aucucuuccugu

SEQ ID NO: 2790619 - RNA, 19 nt, Human
aucucuuauuuuacaauaa

SEQ ID NO: 2790620 - RNA, 16 nt, Human
aucucuuauuuuacaa

SEQ ID NO: 2790621 - RNA, 19 nt, Human
aucucuucuggguuccuuc

SEQ ID NO: 2790622 - RNA, 19 nt, Human
uugcacaauauugaacuuu

SEQ ID NO: 2790623 - RNA, 20 nt, Human
uugcacaauauugaacuuuu

SEQ ID NO: 2790624 - RNA, 21 nt, Human
uugcacaauauugaacuuuuu

SEQ ID NO: 2790625 - RNA, 18 nt, Human
uugcacacacucagugca

SEQ ID NO: 2790626 - RNA, 18 nt, Human
uugcacaggaugcuggcc

SEQ ID NO: 2790627 - RNA, 16 nt, Human
uugcacaguuagcaaa

SEQ ID NO: 2790628 - RNA, 15 nt, Human
uugcacaucuuggcu

SEQ ID NO: 2790629 - RNA, 15 nt, Human
uugcacagaaguccu

SEQ ID NO: 2790630 - RNA, 17 nt, Human
uugcacagaaguccugu

SEQ ID NO: 2790631 - RNA, 18 nt, Human
uugcacagaaguccugua

SEQ ID NO: 2790632 - RNA, 21 nt, Human
uugcacagaaguccuguaugu

SEQ ID NO: 2790633 - RNA, 23 nt, Human
uugcacagaaguccuguaugucu

SEQ ID NO: 2790634 - RNA, 21 nt, Human
uugcacacccacucagcuccg

SEQ ID NO: 2790635 - RNA, 19 nt, Human
uugcacacccacucagcuc

SEQ ID NO: 2790636 - RNA, 15 nt, Human
uugcaucaguauuaa

SEQ ID NO: 2790637 - RNA, 21 nt, Human
uugcaucaguauuaauacuaa

SEQ ID NO: 2790638 - RNA, 23 nt, Human
uugcaucaguauuaauacuaaaa

SEQ ID NO: 2790639 - RNA, 15 nt, Human
uugcauccuuccuau

SEQ ID NO: 2790640 - RNA, 18 nt, Human
uugcauccuuccuauaac

SEQ ID NO: 2790641 - RNA, 21 nt, Human
uugcauccuuccuauaacuug

SEQ ID NO: 2790642 - RNA, 19 nt, Human
uugcaucguccccuccccc

SEQ ID NO: 2790643 - RNA, 18 nt, Human
uugcaucuagguaauuuu

SEQ ID NO: 2790644 - RNA, 20 nt, Human
uugcaucuagguaauuuuua

SEQ ID NO: 2790645 - RNA, 17 nt, Human
uugcaucucaaaauuau

SEQ ID NO: 2790646 - RNA, 18 nt, Human
uugcaucucaaaauuauu

SEQ ID NO: 2790647 - RNA, 12 nt, Human
uugcacauuguu

SEQ ID NO: 2790648 - RNA, 13 nt, Human
uugcacauuguuc

SEQ ID NO: 2790649 - RNA, 14 nt, Human
uugcacauuguuca

SEQ ID NO: 2790650 - RNA, 23 nt, Human
uugcacauuguuguuuuuuuaau

SEQ ID NO: 2790651 - RNA, 14 nt, Human
uugcacauuuugau

SEQ ID NO: 2790652 - RNA, 16 nt, Human
uugcacauuuugauuu

SEQ ID NO: 2790653 - RNA, 13 nt, Human
uugcauguuugaa

SEQ ID NO: 2790654 - RNA, 20 nt, Human
uugcaugugaaaaucaaaua

SEQ ID NO: 2790655 - RNA, 14 nt, Human
uugcaugugaaaau

SEQ ID NO: 2790656 - RNA, 14 nt, Human
uugcaucugaaaua

SEQ ID NO: 2790657 - RNA, 18 nt, Human
uugcauccaacuccagga

SEQ ID NO: 2790658 - RNA, 17 nt, Human
uugcaucugaaauagga

SEQ ID NO: 2790659 - RNA, 16 nt, Human
uugcaugaagagaagc

SEQ ID NO: 2790660 - RNA, 18 nt, Human
uugcaugaagagaagcaa

SEQ ID NO: 2790661 - RNA, 21 nt, Human
uugcaugaagagaagcaauuu

SEQ ID NO: 2790662 - RNA, 15 nt, Human
aucuuuuuaaagcuu

SEQ ID NO: 2790663 - RNA, 22 nt, Human
aucuuugccuugggcugcuccu

SEQ ID NO: 2790664 - RNA, 20 nt, Human
augaaagcagggaauuucua

SEQ ID NO: 2790665 - RNA, 21 nt, Human
augaaagcagggaauuucuau

SEQ ID NO: 2790666 - RNA, 16 nt, Human
augaaaggcuuuuaaa

SEQ ID NO: 2790667 - RNA, 18 nt, Human
aucuuugcagacaggcaa

SEQ ID NO: 2790668 - RNA, 15 nt, Human
aucuuuagugcuuuc

SEQ ID NO: 2790669 - RNA, 23 nt, Human
uuggcucuggagacagccccaga

SEQ ID NO: 2790670 - RNA, 13 nt, Human
aucuuugccuugg

SEQ ID NO: 2790671 - RNA, 13 nt, Human
aucuuugccucuc

SEQ ID NO: 2790672 - RNA, 20 nt, Human
aucuuugccuugggcugcuc

SEQ ID NO: 2790673 - RNA, 14 nt, Human
aucuuugccuuggg

SEQ ID NO: 2790674 - RNA, 21 nt, Human
aucuuuacaaaacuacaugag

SEQ ID NO: 2790675 - RNA, 17 nt, Human
aucuuuacaaaacuaca

SEQ ID NO: 2790676 - RNA, 16 nt, Human
uuggaguguuauguau

SEQ ID NO: 2790677 - RNA, 18 nt, Human
uuggaguguuauguauuu

SEQ ID NO: 2790678 - RNA, 15 nt, Human
uuggauguaauuuag

SEQ ID NO: 2790679 - RNA, 15 nt, Human
uuggauuauccugag

SEQ ID NO: 2790680 - RNA, 22 nt, Human
uuggauacagcaguagacauuu

SEQ ID NO: 2790681 - RNA, 16 nt, Human
uuggauaaacaacauu

SEQ ID NO: 2790682 - RNA, 16 nt, Human
uuggaucuugaaugug

SEQ ID NO: 2790683 - RNA, 17 nt, Human
uuggaucuugaaugugg

SEQ ID NO: 2790684 - RNA, 17 nt, Human
uuggauuauuuaauaac

SEQ ID NO: 2790685 - RNA, 14 nt, Human
uuggauuauuuaau

SEQ ID NO: 2790686 - RNA, 15 nt, Human
uuggauuauuuaaua

SEQ ID NO: 2790687 - RNA, 20 nt, Human
uuggcucuggagacagcccc

SEQ ID NO: 2790688 - RNA, 22 nt, Human
uuggcucuggagacagccccag

SEQ ID NO: 2790689 - RNA, 14 nt, Human
uuggcucuggagac

SEQ ID NO: 2790690 - RNA, 17 nt, Human
uuggcucuggagacagc

SEQ ID NO: 2790691 - RNA, 19 nt, Human
uuggcucuggagacagccc

SEQ ID NO: 2790692 - RNA, 13 nt, Human
uuggcguggagca

SEQ ID NO: 2790693 - RNA, 14 nt, Human
uuggcguggagcag

SEQ ID NO: 2790694 - RNA, 20 nt, Human
uuggcuaacuauauuugcuu

SEQ ID NO: 2790695 - RNA, 13 nt, Human
uuggcucuggaga

SEQ ID NO: 2790696 - RNA, 17 nt, Human
augaaccuucuggccuc

SEQ ID NO: 2790697 - RNA, 24 nt, Human
augaaccuucuggccucccacaga

SEQ ID NO: 2790698 - RNA, 21 nt, Human
augaaccuucuggccucccac

SEQ ID NO: 2790699 - RNA, 20 nt, Human
augaacucuuagaaaugaag

SEQ ID NO: 2790700 - RNA, 12 nt, Human
augaacucugaa

SEQ ID NO: 2790701 - RNA, 15 nt, Human
augaaugagucuguu

SEQ ID NO: 2790702 - RNA, 20 nt, Human
augaaugaggucccaggcag

SEQ ID NO: 2790703 - RNA, 15 nt, Human
augaaugaggucugg

SEQ ID NO: 2790704 - RNA, 19 nt, Human
augaaugaggucugggcua

SEQ ID NO: 2790705 - RNA, 19 nt, Human
augaaugaggucccaggca

SEQ ID NO: 2790706 - RNA, 16 nt, Human
augaaugagaaucuac

SEQ ID NO: 2790707 - RNA, 11 nt, Human
uugggcccugc

SEQ ID NO: 2790708 - RNA, 12 nt, Human
uugggcccugca

SEQ ID NO: 2790709 - RNA, 13 nt, Human
uugggcccugcau

SEQ ID NO: 2790710 - RNA, 18 nt, Human
uugggccccagaggcugg

SEQ ID NO: 2790711 - RNA, 16 nt, Human
augaauuaaauaaacc

SEQ ID NO: 2790712 - RNA, 14 nt, Human
augaauuaaauaaa

SEQ ID NO: 2790713 - RNA, 15 nt, Human
uuggggcaaaaaucc

SEQ ID NO: 2790714 - RNA, 22 nt, Human
uuggggcaacauuguucaccuu

SEQ ID NO: 2790715 - RNA, 16 nt, Human
uuggggcaagucaugu

SEQ ID NO: 2790716 - RNA, 21 nt, Human
uuggggccaccaaagcugccc

SEQ ID NO: 2790717 - RNA, 23 nt, Human
uuggggccaccaaagcugcccac

SEQ ID NO: 2790718 - RNA, 13 nt, Human
uuggggcccugcc

SEQ ID NO: 2790719 - RNA, 19 nt, Human
uugggggacguuucucauu

SEQ ID NO: 2790720 - RNA, 21 nt, Human
uugggggggccaaaaggaaaa

SEQ ID NO: 2790721 - RNA, 21 nt, Human
uugggggggcucccguggccu

SEQ ID NO: 2790722 - RNA, 17 nt, Human
uuggggggacucugagc

SEQ ID NO: 2790723 - RNA, 16 nt, Human
uuggggguaaaaaaua

SEQ ID NO: 2790724 - RNA, 22 nt, Human
uugggggucaggcagccaguga

SEQ ID NO: 2790725 - RNA, 14 nt, Human
uugguucccuugug

SEQ ID NO: 2790726 - RNA, 14 nt, Human
uugguuccucucug

SEQ ID NO: 2790727 - RNA, 15 nt, Human
uugguuccucucugg

SEQ ID NO: 2790728 - RNA, 13 nt, Human
uugguucuaagga

SEQ ID NO: 2790729 - RNA, 14 nt, Human
uugguucuaaggac

SEQ ID NO: 2790730 - RNA, 18 nt, Human
uugguucuaaggaccuga

SEQ ID NO: 2790731 - RNA, 23 nt, Human
uuguaguagcguuuuuuaaaugu

SEQ ID NO: 2790732 - RNA, 22 nt, Human
uuguaguagcguuuuuuaaaug

SEQ ID NO: 2790733 - RNA, 19 nt, Human
uuguaggggucaaagaaau

SEQ ID NO: 2790734 - RNA, 13 nt, Human
uuguagguaaaau

SEQ ID NO: 2790735 - RNA, 15 nt, Human
uuguagguaaaaugu

SEQ ID NO: 2790736 - RNA, 19 nt, Human
uuguaggugcaagauggaa

SEQ ID NO: 2790737 - RNA, 21 nt, Human
uuguaguagcguuuuuuaaau

SEQ ID NO: 2790738 - RNA, 15 nt, Human
uuguaggagacuugc

SEQ ID NO: 2790739 - RNA, 20 nt, Human
uuguaggagcugagguuuca

SEQ ID NO: 2790740 - RNA, 17 nt, Human
uuguaggauaagugaaa

SEQ ID NO: 2790741 - RNA, 23 nt, Human
uuguacaaaauaaacaaauaaca

SEQ ID NO: 2790742 - RNA, 17 nt, Human
uuguaggggucaaagaa

SEQ ID NO: 2790743 - RNA, 20 nt, Human
uuguaggggucaaagaaaug

SEQ ID NO: 2790744 - RNA, 16 nt, Human
uuguaggguuacagag

SEQ ID NO: 2790745 - RNA, 14 nt, Human
uuguacaaaauaaa

SEQ ID NO: 2790746 - RNA, 13 nt, Human
uugguuuacauuu

SEQ ID NO: 2790747 - RNA, 14 nt, Human
uugguuuacauuua

SEQ ID NO: 2790748 - RNA, 20 nt, Human
uugguuuacauuuaaagcau

SEQ ID NO: 2790749 - RNA, 21 nt, Human
uugguuuacauuuaaagcauu

SEQ ID NO: 2790750 - RNA, 13 nt, Human
uugguuuacuuuc

SEQ ID NO: 2790751 - RNA, 15 nt, Human
uugguuuacuuucaa

SEQ ID NO: 2790752 - RNA, 16 nt, Human
uugguuuacuuucaaa

SEQ ID NO: 2790753 - RNA, 15 nt, Human
uugguugugucuuuu

SEQ ID NO: 2790754 - RNA, 18 nt, Human
uugguuguuuuuuccuuu

SEQ ID NO: 2790755 - RNA, 12 nt, Human
uugguuuaaaaa

SEQ ID NO: 2790756 - RNA, 15 nt, Human
uugguuggcuggccu

SEQ ID NO: 2790757 - RNA, 19 nt, Human
uugguucugcuucaauaaa

SEQ ID NO: 2790758 - RNA, 19 nt, Human
uuguauauuguguuugugu

SEQ ID NO: 2790759 - RNA, 21 nt, Human
augaauuuggagacucugugg

SEQ ID NO: 2790760 - RNA, 20 nt, Human
augaauuuggagacucugug

SEQ ID NO: 2790761 - RNA, 15 nt, Human
augaauuuggagacu

SEQ ID NO: 2790762 - RNA, 21 nt, Human
augaauuuauugcacauuguu

SEQ ID NO: 2790763 - RNA, 22 nt, Human
augaauuuauugcacauuguuc

SEQ ID NO: 2790764 - RNA, 11 nt, Human
augaauuuaaa

SEQ ID NO: 2790765 - RNA, 21 nt, Human
augaauugcguuggucucugc

SEQ ID NO: 2790766 - RNA, 13 nt, Human
augaauuuaaaua

SEQ ID NO: 2790767 - RNA, 14 nt, Human
augaauuuaaauau

SEQ ID NO: 2790768 - RNA, 16 nt, Human
augaauuuaaauauaa

SEQ ID NO: 2790769 - RNA, 23 nt, Human
augaauuuaaauauaauucugua

SEQ ID NO: 2790770 - RNA, 15 nt, Human
augaauuuuaagggu

SEQ ID NO: 2790771 - RNA, 16 nt, Human
augaauuuuaaggguu

SEQ ID NO: 2790772 - RNA, 13 nt, Human
augaauuuuacau

SEQ ID NO: 2790773 - RNA, 20 nt, Human
uuguauacaccauauacugu

SEQ ID NO: 2790774 - RNA, 15 nt, Human
uuguauacauccugg

SEQ ID NO: 2790775 - RNA, 18 nt, Human
uuguauacauccugggua

SEQ ID NO: 2790776 - RNA, 19 nt, Human
uuguauacauccuggguaa

SEQ ID NO: 2790777 - RNA, 15 nt, Human
uuguauacuuuaaau

SEQ ID NO: 2790778 - RNA, 19 nt, Human
uuguauacuuuaaauaauu

SEQ ID NO: 2790779 - RNA, 20 nt, Human
uuguauacuuuaaauaauuu

SEQ ID NO: 2790780 - RNA, 21 nt, Human
uuguauacuuuaaauaauuua

SEQ ID NO: 2790781 - RNA, 22 nt, Human
uuguauacuuuaaauaauuuaa

SEQ ID NO: 2790782 - RNA, 12 nt, Human
uuguauaauuuc

SEQ ID NO: 2790783 - RNA, 14 nt, Human
uuguauaauuucga

SEQ ID NO: 2790784 - RNA, 22 nt, Human
uuguauaauuucgagauuugua

SEQ ID NO: 2790785 - RNA, 13 nt, Human
uuguauacaaaua

SEQ ID NO: 2790786 - RNA, 14 nt, Human
uuguauacaaauau

SEQ ID NO: 2790787 - RNA, 16 nt, Human
uuguauacaaauauau

SEQ ID NO: 2790788 - RNA, 22 nt, Human
uuguauacaaauauauuguuaa

SEQ ID NO: 2790789 - RNA, 15 nt, Human
uuguauaguaaagug

SEQ ID NO: 2790790 - RNA, 14 nt, Human
uuguauaguaaagu

SEQ ID NO: 2790791 - RNA, 14 nt, Human
uuguauaguguaaa

SEQ ID NO: 2790792 - RNA, 15 nt, Human
uuguauaguguaaaa

SEQ ID NO: 2790793 - RNA, 16 nt, Human
uuguauaguguaaaau

SEQ ID NO: 2790794 - RNA, 15 nt, Human
uuguauauuguguuu

SEQ ID NO: 2790795 - RNA, 13 nt, Human
uuguauauugugu

SEQ ID NO: 2790796 - RNA, 15 nt, Human
augagacucuagggu

SEQ ID NO: 2790797 - RNA, 21 nt, Human
augagacccauuccuauuucu

SEQ ID NO: 2790798 - RNA, 22 nt, Human
augagacauaggccaugaaaaa

SEQ ID NO: 2790799 - RNA, 15 nt, Human
augagacaaacaugc

SEQ ID NO: 2790800 - RNA, 14 nt, Human
augagaauuucuaa

SEQ ID NO: 2790801 - RNA, 22 nt, Human
augagaauuucuaaaaagauua

SEQ ID NO: 2790802 - RNA, 13 nt, Human
augagaagaauag

SEQ ID NO: 2790803 - RNA, 16 nt, Human
augagaaggaacuucc

SEQ ID NO: 2790804 - RNA, 15 nt, Human
augagaaggcagcca

SEQ ID NO: 2790805 - RNA, 22 nt, Human
augagaaguugauauagaacag

SEQ ID NO: 2790806 - RNA, 23 nt, Human
augagaaucuacccccagaucca

SEQ ID NO: 2790807 - RNA, 11 nt, Human
augagaaucua

SEQ ID NO: 2790808 - RNA, 22 nt, Human
augagaaagguugaagcaccaa

SEQ ID NO: 2790809 - RNA, 21 nt, Human
augagaaagguugaagcacca

SEQ ID NO: 2790810 - RNA, 14 nt, Human
augagaacucugag

SEQ ID NO: 2790811 - RNA, 11 nt, Human
augagaaaugu

SEQ ID NO: 2790812 - RNA, 12 nt, Human
augagaaaugua

SEQ ID NO: 2790813 - RNA, 15 nt, Human
augagaaauguaaug

SEQ ID NO: 2790814 - RNA, 16 nt, Human
augagaaauguaaugc

SEQ ID NO: 2790815 - RNA, 13 nt, Human
augagaacaaaca

SEQ ID NO: 2790816 - RNA, 13 nt, Human
augagaacaaagc

SEQ ID NO: 2790817 - RNA, 14 nt, Human
augagaacaaagcu

SEQ ID NO: 2790818 - RNA, 15 nt, Human
augagaacaaagcug

SEQ ID NO: 2790819 - RNA, 16 nt, Human
augagaacaaagcugu

SEQ ID NO: 2790820 - RNA, 17 nt, Human
augagaacaaagcuguu

SEQ ID NO: 2790821 - RNA, 18 nt, Human
augagaacaaagcuguua

SEQ ID NO: 2790822 - RNA, 20 nt, Human
augagaacaaagcuguuaaa

SEQ ID NO: 2790823 - RNA, 22 nt, Human
augagaacaaagcuguuaaacu

SEQ ID NO: 2790824 - RNA, 23 nt, Human
augagaacaaagcuguuaaacug

SEQ ID NO: 2790825 - RNA, 21 nt, Human
augacauuuuuuuuaacuacu

SEQ ID NO: 2790826 - RNA, 15 nt, Human
augaccaaaguccuu

SEQ ID NO: 2790827 - RNA, 17 nt, Human
augacauucaugccugg

SEQ ID NO: 2790828 - RNA, 12 nt, Human
uugguuuaauau

SEQ ID NO: 2790829 - RNA, 15 nt, Human
augacaaugacugug

SEQ ID NO: 2790830 - RNA, 18 nt, Human
augacauucaugccuggc

SEQ ID NO: 2790831 - RNA, 22 nt, Human
augacuuauuguggauaacaaa

SEQ ID NO: 2790832 - RNA, 22 nt, Human
augacacccgugagcgccugug

SEQ ID NO: 2790833 - RNA, 23 nt, Human
augacuuuauauggaugauucag

SEQ ID NO: 2790834 - RNA, 16 nt, Human
augacuugcuacuuuu

SEQ ID NO: 2790835 - RNA, 20 nt, Human
augacuuguagcauauucuu

SEQ ID NO: 2790836 - RNA, 11 nt, Human
augagaaacug

SEQ ID NO: 2790837 - RNA, 14 nt, Human
augagaaacugcau

SEQ ID NO: 2790838 - RNA, 13 nt, Human
caauuuuugccuu

SEQ ID NO: 2790839 - RNA, 14 nt, Human
caauuuuugccuuc

SEQ ID NO: 2790840 - RNA, 15 nt, Human
caauuuuugccuuca

SEQ ID NO: 2790841 - RNA, 16 nt, Human
caauuuuugccuucau

SEQ ID NO: 2790842 - RNA, 17 nt, Human
caauuuuuuguucuuca

SEQ ID NO: 2790843 - RNA, 18 nt, Human
caauuuuuuguucuucag

SEQ ID NO: 2790844 - RNA, 16 nt, Human
caauuuuugucucaga

SEQ ID NO: 2790845 - RNA, 18 nt, Human
caauuuuugucucagaag

SEQ ID NO: 2790846 - RNA, 19 nt, Human
caauuuuugucucagaagu

SEQ ID NO: 2790847 - RNA, 18 nt, Human
cacaaagcccuuccaugu

SEQ ID NO: 2790848 - RNA, 15 nt, Human
cacaaaaucugucca

SEQ ID NO: 2790849 - RNA, 13 nt, Human
cacaaacacaagg

SEQ ID NO: 2790850 - RNA, 16 nt, Human
cacaaacacaagguca

SEQ ID NO: 2790851 - RNA, 21 nt, Human
cacaaacacauuguuauuuuc

SEQ ID NO: 2790852 - RNA, 23 nt, Human
cacaaacacauuguuauuuucag

SEQ ID NO: 2790853 - RNA, 23 nt, Human
caauuaaaaaaaaagaucuguuu

SEQ ID NO: 2790854 - RNA, 22 nt, Human
caauuaaaaauugucuucaugu

SEQ ID NO: 2790855 - RNA, 16 nt, Human
caauuaggauuuugau

SEQ ID NO: 2790856 - RNA, 13 nt, Human
caauuccacucug

SEQ ID NO: 2790857 - RNA, 16 nt, Human
caauuccacucugaua

SEQ ID NO: 2790858 - RNA, 21 nt, Human
caauuccacucugauagaauu

SEQ ID NO: 2790859 - RNA, 22 nt, Human
caauuccacucugauagaauua

SEQ ID NO: 2790860 - RNA, 14 nt, Human
caauuccaucaccc

SEQ ID NO: 2790861 - RNA, 21 nt, Human
caauuagcaauugacugucac

SEQ ID NO: 2790862 - RNA, 19 nt, Human
caauuagccucauaguuau

SEQ ID NO: 2790863 - RNA, 13 nt, Human
caauuccugggcc

SEQ ID NO: 2790864 - RNA, 12 nt, Human
caauuccugggc

SEQ ID NO: 2790865 - RNA, 15 nt, Human
caauuccucauccuc

SEQ ID NO: 2790866 - RNA, 18 nt, Human
caauuccucauccucaga

SEQ ID NO: 2790867 - RNA, 22 nt, Human
caauuccucauccucagaugcu

SEQ ID NO: 2790868 - RNA, 23 nt, Human
caauuccucauccucagaugcuc

SEQ ID NO: 2790869 - RNA, 11 nt, Human
caauuccccuc

SEQ ID NO: 2790870 - RNA, 12 nt, Human
caauuccccucu

SEQ ID NO: 2790871 - RNA, 13 nt, Human
caauuccccucug

SEQ ID NO: 2790872 - RNA, 22 nt, Human
caauuccgucuucuuaaucuga

SEQ ID NO: 2790873 - RNA, 14 nt, Human
caauuccccucugc

SEQ ID NO: 2790874 - RNA, 17 nt, Human
caauuccccucugcugc

SEQ ID NO: 2790875 - RNA, 16 nt, Human
caauaguuugcauaga

SEQ ID NO: 2790876 - RNA, 15 nt, Human
caauaucuaauauau

SEQ ID NO: 2790877 - RNA, 16 nt, Human
caauaucuaauauaua

SEQ ID NO: 2790878 - RNA, 17 nt, Human
caauaucuaauauauau

SEQ ID NO: 2790879 - RNA, 13 nt, Human
caauaucugaagc

SEQ ID NO: 2790880 - RNA, 23 nt, Human
caauaucugaagcccucccaggu

SEQ ID NO: 2790881 - RNA, 23 nt, Human
caauguggcaaggaaaaacaggu

SEQ ID NO: 2790882 - RNA, 13 nt, Human
caaugugcucucg

SEQ ID NO: 2790883 - RNA, 14 nt, Human
caauguucuuuaua

SEQ ID NO: 2790884 - RNA, 15 nt, Human
caauguucuuuauau

SEQ ID NO: 2790885 - RNA, 16 nt, Human
caauguucuuuauaua

SEQ ID NO: 2790886 - RNA, 18 nt, Human
caauguucuuuauauaca

SEQ ID NO: 2790887 - RNA, 22 nt, Human
caauguucuuuauauacaauaa

SEQ ID NO: 2790888 - RNA, 14 nt, Human
caauguguuuuucu

SEQ ID NO: 2790889 - RNA, 16 nt, Human
caauguguuuuucucc

SEQ ID NO: 2790890 - RNA, 17 nt, Human
caauguguuuuucucca

SEQ ID NO: 2790891 - RNA, 21 nt, Human
caauguggccuaaaaaugcaa

SEQ ID NO: 2790892 - RNA, 19 nt, Human
caauguguggcugaagacu

SEQ ID NO: 2790893 - RNA, 20 nt, Human
caauguguggcugaagacuu

SEQ ID NO: 2790894 - RNA, 18 nt, Human
caauguuucuuuuaucac

SEQ ID NO: 2790895 - RNA, 16 nt, Human
caauguuucuuuuauc

SEQ ID NO: 2790896 - RNA, 20 nt, Human
caauguuuaugcaaggaagg

SEQ ID NO: 2790897 - RNA, 23 nt, Human
caauguuuaugcaaggaaggaaa

SEQ ID NO: 2790898 - RNA, 13 nt, Human
caauguuucuuuu

SEQ ID NO: 2790899 - RNA, 15 nt, Human
cacaaagggcccaga

SEQ ID NO: 2790900 - RNA, 16 nt, Human
cacaaagggcccagau

SEQ ID NO: 2790901 - RNA, 22 nt, Human
cacaaaggggaucauaaaguua

SEQ ID NO: 2790902 - RNA, 13 nt, Human
cacaaagggccca

SEQ ID NO: 2790903 - RNA, 17 nt, Human
cacaaaggccaaacugc

SEQ ID NO: 2790904 - RNA, 18 nt, Human
cacaaaggccaaacugcu

SEQ ID NO: 2790905 - RNA, 19 nt, Human
cacaaaggccaaacugcug

SEQ ID NO: 2790906 - RNA, 21 nt, Human
cacaaaggccaaacugcugga

SEQ ID NO: 2790907 - RNA, 13 nt, Human
cacaauuuuuaau

SEQ ID NO: 2790908 - RNA, 14 nt, Human
cacaauuuuuaaug

SEQ ID NO: 2790909 - RNA, 15 nt, Human
cacaauuuuuaaugg

SEQ ID NO: 2790910 - RNA, 16 nt, Human
cacaauuuuuaauggc

SEQ ID NO: 2790911 - RNA, 22 nt, Human
cacaauuuuuaauggcagcaga

SEQ ID NO: 2790912 - RNA, 13 nt, Human
cacaauuugcacu

SEQ ID NO: 2790913 - RNA, 17 nt, Human
cacaaugguuuuuaaau

SEQ ID NO: 2790914 - RNA, 22 nt, Human
cacaaugguuuuuaaauuuugu

SEQ ID NO: 2790915 - RNA, 16 nt, Human
cacaaugucaguauuu

SEQ ID NO: 2790916 - RNA, 18 nt, Human
cacaaugucaguauuuca

SEQ ID NO: 2790917 - RNA, 21 nt, Human
cacacaaaaagugucucugcc

SEQ ID NO: 2790918 - RNA, 18 nt, Human
cacacaaaccuucugccu

SEQ ID NO: 2790919 - RNA, 15 nt, Human
cacacacacacacaa

SEQ ID NO: 2790920 - RNA, 15 nt, Human
cacacacacacacac

SEQ ID NO: 2790921 - RNA, 16 nt, Human
cacacacacacacaca

SEQ ID NO: 2790922 - RNA, 13 nt, Human
cacacacacacac

SEQ ID NO: 2790923 - RNA, 14 nt, Human
cacacacacacaca

SEQ ID NO: 2790924 - RNA, 19 nt, Human
cacaauacagauaacauua

SEQ ID NO: 2790925 - RNA, 13 nt, Human
cacaauaagcaaa

SEQ ID NO: 2790926 - RNA, 19 nt, Human
cacaauaacacuaaaauuu

SEQ ID NO: 2790927 - RNA, 21 nt, Human
cacaauaacacuaaaauuuua

SEQ ID NO: 2790928 - RNA, 15 nt, Human
cacaauguucuuuau

SEQ ID NO: 2790929 - RNA, 16 nt, Human
cacaauguucuuuaua

SEQ ID NO: 2790930 - RNA, 18 nt, Human
cacaauguucuuuauaua

SEQ ID NO: 2790931 - RNA, 22 nt, Human
cacaauguucuuuauauacaau

SEQ ID NO: 2790932 - RNA, 22 nt, Human
cacaaugaaaugcucuccuuuc

SEQ ID NO: 2790933 - RNA, 15 nt, Human
cacaauauugaacuu

SEQ ID NO: 2790934 - RNA, 17 nt, Human
cacacacgcgugcacac

SEQ ID NO: 2790935 - RNA, 20 nt, Human
cacacacggaggcauccuac

SEQ ID NO: 2790936 - RNA, 19 nt, Human
cacacacgcacgcacacac

SEQ ID NO: 2790937 - RNA, 17 nt, Human
cacacacgcacgcacac

SEQ ID NO: 2790938 - RNA, 18 nt, Human
cacacacgcacgcacaca

SEQ ID NO: 2790939 - RNA, 23 nt, Human
cacacacgcacgcacacacacaa

SEQ ID NO: 2790940 - RNA, 20 nt, Human
cacacacgcgcgcgcacaca

SEQ ID NO: 2790941 - RNA, 21 nt, Human
cacacacgcgcgcgcacacac

SEQ ID NO: 2790942 - RNA, 14 nt, Human
cacacacgcacgca

SEQ ID NO: 2790943 - RNA, 15 nt, Human
cacacacgcacgcac

SEQ ID NO: 2790944 - RNA, 16 nt, Human
cacacacgcacgcaca

SEQ ID NO: 2790945 - RNA, 14 nt, Human
cacacacgcacaua

SEQ ID NO: 2790946 - RNA, 13 nt, Human
cacacacacucua

SEQ ID NO: 2790947 - RNA, 14 nt, Human
cacacacacgcacg

SEQ ID NO: 2790948 - RNA, 12 nt, Human
cacacacacaua

SEQ ID NO: 2790949 - RNA, 13 nt, Human
cacacacacauac

SEQ ID NO: 2790950 - RNA, 14 nt, Human
cacacacacauaca

SEQ ID NO: 2790951 - RNA, 12 nt, Human
cacacacacaug

SEQ ID NO: 2790952 - RNA, 13 nt, Human
cacacacacgcac

SEQ ID NO: 2790953 - RNA, 15 nt, Human
cacacacacauacac

SEQ ID NO: 2790954 - RNA, 12 nt, Human
cacacacacauc

SEQ ID NO: 2790955 - RNA, 14 nt, Human
cacacacacaugcu

SEQ ID NO: 2790956 - RNA, 14 nt, Human
cacacacacacaua

SEQ ID NO: 2790957 - RNA, 14 nt, Human
cacacacacacaug

SEQ ID NO: 2790958 - RNA, 14 nt, Human
cacacacacacauc

SEQ ID NO: 2790959 - RNA, 14 nt, Human
cacacacacacgca

SEQ ID NO: 2790960 - RNA, 22 nt, Human
cacagaugugggcuuugauuuc

SEQ ID NO: 2790961 - RNA, 15 nt, Human
cacagcccagcuugg

SEQ ID NO: 2790962 - RNA, 21 nt, Human
cacagccgauucaccugagca

SEQ ID NO: 2790963 - RNA, 20 nt, Human
cacagccgauucaccugagc

SEQ ID NO: 2790964 - RNA, 21 nt, Human
cacagcucuucuccaggcugu

SEQ ID NO: 2790965 - RNA, 18 nt, Human
cacagcugagagacuuuu

SEQ ID NO: 2790966 - RNA, 19 nt, Human
cacagcugagagacuuuua

SEQ ID NO: 2790967 - RNA, 22 nt, Human
cacagcagcuucaccagagcau

SEQ ID NO: 2790968 - RNA, 14 nt, Human
cacagauuguuucu

SEQ ID NO: 2790969 - RNA, 15 nt, Human
cacagauuguuucua

SEQ ID NO: 2790970 - RNA, 20 nt, Human
cacagauuguuucuauacaa

SEQ ID NO: 2790971 - RNA, 21 nt, Human
cacagauuguuucuauacaaa

SEQ ID NO: 2790972 - RNA, 22 nt, Human
cacagauuguuucuauacaaau

SEQ ID NO: 2790973 - RNA, 21 nt, Human
cacagcagcuucaccagagca

SEQ ID NO: 2790974 - RNA, 22 nt, Human
cacagauuugagcucagcccug

SEQ ID NO: 2790975 - RNA, 18 nt, Human
cacagauuugagcucagc

SEQ ID NO: 2790976 - RNA, 17 nt, Human
cacagauuugagcucag

SEQ ID NO: 2790977 - RNA, 16 nt, Human
cacagauuugagcuca

SEQ ID NO: 2790978 - RNA, 13 nt, Human
cacagcagguccu

SEQ ID NO: 2790979 - RNA, 12 nt, Human
cacagagaaagu

SEQ ID NO: 2790980 - RNA, 22 nt, Human
cacacucuccaucacccucuuc

SEQ ID NO: 2790981 - RNA, 12 nt, Human
cacacucugacg

SEQ ID NO: 2790982 - RNA, 19 nt, Human
cacacucugccagcaaaga

SEQ ID NO: 2790983 - RNA, 14 nt, Human
cacacuccagcugg

SEQ ID NO: 2790984 - RNA, 19 nt, Human
cacacacgcuuucuuaugc

SEQ ID NO: 2790985 - RNA, 20 nt, Human
cacagagaaaguacuucucc

SEQ ID NO: 2790986 - RNA, 19 nt, Human
cacagagaaaguacuucuc

SEQ ID NO: 2790987 - RNA, 21 nt, Human
cacagagaaaguacuucucca

SEQ ID NO: 2790988 - RNA, 14 nt, Human
cacagagcggggac

SEQ ID NO: 2790989 - RNA, 15 nt, Human
cacagaguaagacau

SEQ ID NO: 2790990 - RNA, 16 nt, Human
cacagaguaagacauu

SEQ ID NO: 2790991 - RNA, 17 nt, Human
cacagaguaagacauug

SEQ ID NO: 2790992 - RNA, 19 nt, Human
cacagauguucccccaucu

SEQ ID NO: 2790993 - RNA, 23 nt, Human
cacagauguucgguuuuuuuccu

SEQ ID NO: 2790994 - RNA, 14 nt, Human
cacagauaaaaagu

SEQ ID NO: 2790995 - RNA, 15 nt, Human
cacagauaaaaagug

SEQ ID NO: 2790996 - RNA, 17 nt, Human
cacagauauacuuugug

SEQ ID NO: 2790997 - RNA, 19 nt, Human
cacagauauacuuugugga

SEQ ID NO: 2790998 - RNA, 20 nt, Human
cacagauauacuuuguggac

SEQ ID NO: 2790999 - RNA, 23 nt, Human
cacagauauacuuuguggaccaa

SEQ ID NO: 2791000 - RNA, 16 nt, Human
cacagauacacacaca

SEQ ID NO: 2791001 - RNA, 11 nt, Human
cacagaucaug

SEQ ID NO: 2791002 - RNA, 17 nt, Human
cacagaugaaacacaaa

SEQ ID NO: 2791003 - RNA, 20 nt, Human
cacagaugaguuaucuaaga

SEQ ID NO: 2791004 - RNA, 12 nt, Human
cacagauuuuaa

SEQ ID NO: 2791005 - RNA, 16 nt, Human
caauaaaugucuguug

SEQ ID NO: 2791006 - RNA, 14 nt, Human
caauaaaugucugu

SEQ ID NO: 2791007 - RNA, 15 nt, Human
caauaaaugucuguu

SEQ ID NO: 2791008 - RNA, 15 nt, Human
caaggcuucagucuc

SEQ ID NO: 2791009 - RNA, 23 nt, Human
caagggucauuauggguuaggca

SEQ ID NO: 2791010 - RNA, 14 nt, Human
caagggaaggacag

SEQ ID NO: 2791011 - RNA, 19 nt, Human
caaggguagggugggccuu

SEQ ID NO: 2791012 - RNA, 17 nt, Human
caaggcuuauauucaac

SEQ ID NO: 2791013 - RNA, 18 nt, Human
caaggcuuauauucaacc

SEQ ID NO: 2791014 - RNA, 15 nt, Human
caaggagcacaagcc

SEQ ID NO: 2791015 - RNA, 16 nt, Human
caaggagcacaagcca

SEQ ID NO: 2791016 - RNA, 16 nt, Human
caaggagcacaggucc

SEQ ID NO: 2791017 - RNA, 17 nt, Human
caaggagcacagguccc

SEQ ID NO: 2791018 - RNA, 18 nt, Human
caaggagcacagguccca

SEQ ID NO: 2791019 - RNA, 22 nt, Human
caaggagcacaggucccaccuc

SEQ ID NO: 2791020 - RNA, 20 nt, Human
caauaguguccuaugcaaua

SEQ ID NO: 2791021 - RNA, 21 nt, Human
caauaguguccuaugcaauaa

SEQ ID NO: 2791022 - RNA, 22 nt, Human
caauaguguccuaugcaauaaa

SEQ ID NO: 2791023 - RNA, 22 nt, Human
caauaguucaaggaacuugaaa

SEQ ID NO: 2791024 - RNA, 19 nt, Human
caauagcaacguagcuucu

SEQ ID NO: 2791025 - RNA, 20 nt, Human
caauagcauggauagaguau

SEQ ID NO: 2791026 - RNA, 19 nt, Human
caauaauaaauauuuuugc

SEQ ID NO: 2791027 - RNA, 11 nt, Human
caauaauaaaa

SEQ ID NO: 2791028 - RNA, 24 nt, Human
caauaauaaaaaauauucuuguca

SEQ ID NO: 2791029 - RNA, 21 nt, Human
caauacguuugauaauaguuu

SEQ ID NO: 2791030 - RNA, 17 nt, Human
caauacuagucacccca

SEQ ID NO: 2791031 - RNA, 19 nt, Human
caauagauauuuaccuuuu

SEQ ID NO: 2791032 - RNA, 13 nt, Human
caauaacacuguc

SEQ ID NO: 2791033 - RNA, 15 nt, Human
caauaacacacagcu

SEQ ID NO: 2791034 - RNA, 14 nt, Human
caauaacacuaaaa

SEQ ID NO: 2791035 - RNA, 17 nt, Human
caauaacacuaaaauuu

SEQ ID NO: 2791036 - RNA, 13 nt, Human
caauaacuucuga

SEQ ID NO: 2791037 - RNA, 16 nt, Human
caauaacuucugaccu

SEQ ID NO: 2791038 - RNA, 12 nt, Human
caauaagcaaaa

SEQ ID NO: 2791039 - RNA, 23 nt, Human
caagcuggucccacucaguccau

SEQ ID NO: 2791040 - RNA, 22 nt, Human
caagcuggucccacucagucca

SEQ ID NO: 2791041 - RNA, 17 nt, Human
caagcuguccagagaaa

SEQ ID NO: 2791042 - RNA, 18 nt, Human
caagcuguccagagaaaa

SEQ ID NO: 2791043 - RNA, 20 nt, Human
caaggagacacaacaacucc

SEQ ID NO: 2791044 - RNA, 13 nt, Human
caaggagaacaaa

SEQ ID NO: 2791045 - RNA, 14 nt, Human
caaggagaacaaau

SEQ ID NO: 2791046 - RNA, 15 nt, Human
caaggagaacaaaua

SEQ ID NO: 2791047 - RNA, 18 nt, Human
caaggagaacaaauauuc

SEQ ID NO: 2791048 - RNA, 13 nt, Human
caaggagaggagg

SEQ ID NO: 2791049 - RNA, 14 nt, Human
caaggagaggaggc

SEQ ID NO: 2791050 - RNA, 15 nt, Human
caaggagaggaggca

SEQ ID NO: 2791051 - RNA, 18 nt, Human
caaggagaggaggcaacu

SEQ ID NO: 2791052 - RNA, 21 nt, Human
caagcuggucccacucagucc

SEQ ID NO: 2791053 - RNA, 17 nt, Human
caagcgauucuucugcu

SEQ ID NO: 2791054 - RNA, 15 nt, Human
caagcgauucuucug

SEQ ID NO: 2791055 - RNA, 18 nt, Human
caagcgauucuucugcuu

SEQ ID NO: 2791056 - RNA, 16 nt, Human
caagcgauucuccugc

SEQ ID NO: 2791057 - RNA, 17 nt, Human
caagcgauucuccugcc

SEQ ID NO: 2791058 - RNA, 18 nt, Human
caagcgauucuccugccu

SEQ ID NO: 2791059 - RNA, 20 nt, Human
caagcgauucuccugccuca

SEQ ID NO: 2791060 - RNA, 14 nt, Human
caagccugucugag

SEQ ID NO: 2791061 - RNA, 15 nt, Human
caagccugugcaaaa

SEQ ID NO: 2791062 - RNA, 16 nt, Human
caagccugugcaaaaa

SEQ ID NO: 2791063 - RNA, 19 nt, Human
caagccugugcaaaaaaau

SEQ ID NO: 2791064 - RNA, 21 nt, Human
caagccugugcaaaaaaauua

SEQ ID NO: 2791065 - RNA, 19 nt, Human
caagaguaguuauauaauu

SEQ ID NO: 2791066 - RNA, 22 nt, Human
caagaguaguuauauaauuguu

SEQ ID NO: 2791067 - RNA, 18 nt, Human
caagagugauugcagcuu

SEQ ID NO: 2791068 - RNA, 14 nt, Human
caagagucuaaaga

SEQ ID NO: 2791069 - RNA, 15 nt, Human
caagagucuaaagau

SEQ ID NO: 2791070 - RNA, 22 nt, Human
caagaguuuauuuccaaauaaa

SEQ ID NO: 2791071 - RNA, 18 nt, Human
caagaguuuucuuccuug

SEQ ID NO: 2791072 - RNA, 17 nt, Human
caagauagauuuggaau

SEQ ID NO: 2791073 - RNA, 18 nt, Human
caagauagauuuggaaua

SEQ ID NO: 2791074 - RNA, 15 nt, Human
caagauaggaccuug

SEQ ID NO: 2791075 - RNA, 18 nt, Human
caagauaggaccuugggc

SEQ ID NO: 2791076 - RNA, 13 nt, Human
caaauauuuggag

SEQ ID NO: 2791077 - RNA, 20 nt, Human
caaauauuuauuuucuuucu

SEQ ID NO: 2791078 - RNA, 17 nt, Human
caaaucaauaagaaggu

SEQ ID NO: 2791079 - RNA, 13 nt, Human
caaaucaaagcag

SEQ ID NO: 2791080 - RNA, 14 nt, Human
caaaucaaagcaga

SEQ ID NO: 2791081 - RNA, 15 nt, Human
caaaucaaagcagau

SEQ ID NO: 2791082 - RNA, 13 nt, Human
caaaucaacagaa

SEQ ID NO: 2791083 - RNA, 14 nt, Human
caaaucaacagaag

SEQ ID NO: 2791084 - RNA, 15 nt, Human
caaaucaacagaagc

SEQ ID NO: 2791085 - RNA, 17 nt, Human
caaaucaacagaagcau

SEQ ID NO: 2791086 - RNA, 19 nt, Human
caaaucaacagaagcauuu

SEQ ID NO: 2791087 - RNA, 21 nt, Human
caaaucaacagaagcauuugu

SEQ ID NO: 2791088 - RNA, 11 nt, Human
caaauauauug

SEQ ID NO: 2791089 - RNA, 13 nt, Human
caaauauauuguu

SEQ ID NO: 2791090 - RNA, 14 nt, Human
caaauauauuguua

SEQ ID NO: 2791091 - RNA, 15 nt, Human
caaauauauuguuaa

SEQ ID NO: 2791092 - RNA, 15 nt, Human
caaauaucuuguguu

SEQ ID NO: 2791093 - RNA, 17 nt, Human
caaauaucuuguguugu

SEQ ID NO: 2791094 - RNA, 21 nt, Human
caaauaucuuguguuguccuu

SEQ ID NO: 2791095 - RNA, 22 nt, Human
caaauaucuuguguuguccuuu

SEQ ID NO: 2791096 - RNA, 21 nt, Human
caaauaugaguacaaaugccu

SEQ ID NO: 2791097 - RNA, 22 nt, Human
caaauaugaguacaaaugccuu

SEQ ID NO: 2791098 - RNA, 23 nt, Human
caaauaugaguacaaaugccuua

SEQ ID NO: 2791099 - RNA, 18 nt, Human
caaauaaacucuaaacau

SEQ ID NO: 2791100 - RNA, 17 nt, Human
caaauaaacucuaaaca

SEQ ID NO: 2791101 - RNA, 13 nt, Human
caaaguuauccag

SEQ ID NO: 2791102 - RNA, 21 nt, Human
caaauggcgucuggaagucca

SEQ ID NO: 2791103 - RNA, 19 nt, Human
caaauggcgucuggaaguc

SEQ ID NO: 2791104 - RNA, 22 nt, Human
caaauggcgucuggaaguccaa

SEQ ID NO: 2791105 - RNA, 19 nt, Human
caaauggaagacacauuga

SEQ ID NO: 2791106 - RNA, 15 nt, Human
caaauggaagacaca

SEQ ID NO: 2791107 - RNA, 18 nt, Human
caaauggcgucuggaagu

SEQ ID NO: 2791108 - RNA, 19 nt, Human
caaagugcugggauuacaa

SEQ ID NO: 2791109 - RNA, 13 nt, Human
caaagugcuggga

SEQ ID NO: 2791110 - RNA, 19 nt, Human
caaagagagaaaauaaaga

SEQ ID NO: 2791111 - RNA, 14 nt, Human
caaagagaguuuuu

SEQ ID NO: 2791112 - RNA, 21 nt, Human
caaagagaguuuuuaauagaa

SEQ ID NO: 2791113 - RNA, 22 nt, Human
caaagagaguuuuuaauagaac

SEQ ID NO: 2791114 - RNA, 17 nt, Human
caaagagcacaaacauu

SEQ ID NO: 2791115 - RNA, 19 nt, Human
caaagagcacaaacauuuu

SEQ ID NO: 2791116 - RNA, 20 nt, Human
caaagagcacaaacauuuuu

SEQ ID NO: 2791117 - RNA, 16 nt, Human
caaagagagaaaauaa

SEQ ID NO: 2791118 - RNA, 15 nt, Human
caaagagaaaacuua

SEQ ID NO: 2791119 - RNA, 18 nt, Human
caaauaaaaauauugugu

SEQ ID NO: 2791120 - RNA, 16 nt, Human
caaauaaaaauauugu

SEQ ID NO: 2791121 - RNA, 10 nt, Human
caaauaaaau

SEQ ID NO: 2791122 - RNA, 15 nt, Human
caaauaaaaauauug

SEQ ID NO: 2791123 - RNA, 20 nt, Human
caaaguucccuacuuccugu

SEQ ID NO: 2791124 - RNA, 16 nt, Human
caaaguuaacagauuu

SEQ ID NO: 2791125 - RNA, 23 nt, Human
caaagugcugggauuacaagcgu

SEQ ID NO: 2791126 - RNA, 18 nt, Human
caaagugcugggauuaca

SEQ ID NO: 2791127 - RNA, 15 nt, Human
caaaguuaacagauu

SEQ ID NO: 2791128 - RNA, 20 nt, Human
caaagaggacucgcuuguaa

SEQ ID NO: 2791129 - RNA, 21 nt, Human
caaagaggacucgcuuguaaa

SEQ ID NO: 2791130 - RNA, 22 nt, Human
caaagaggacucgcuuguaaau

SEQ ID NO: 2791131 - RNA, 18 nt, Human
caacagcucgauccaaau

SEQ ID NO: 2791132 - RNA, 19 nt, Human
caacaggaaucaagagcug

SEQ ID NO: 2791133 - RNA, 21 nt, Human
caacaggaaucaagagcugcc

SEQ ID NO: 2791134 - RNA, 23 nt, Human
caacaggaaucaagagcugcccu

SEQ ID NO: 2791135 - RNA, 14 nt, Human
caacagcuacaaca

SEQ ID NO: 2791136 - RNA, 15 nt, Human
caacagcuacaacag

SEQ ID NO: 2791137 - RNA, 16 nt, Human
caacagcuacaacagc

SEQ ID NO: 2791138 - RNA, 20 nt, Human
caacagcuacaacagccuca

SEQ ID NO: 2791139 - RNA, 21 nt, Human
caacagcuacaacagccucac

SEQ ID NO: 2791140 - RNA, 23 nt, Human
caacagcgacauagcccaucccu

SEQ ID NO: 2791141 - RNA, 21 nt, Human
caacagcgacauagcccaucc

SEQ ID NO: 2791142 - RNA, 12 nt, Human
caacagccaugc

SEQ ID NO: 2791143 - RNA, 14 nt, Human
caacagccucacuu

SEQ ID NO: 2791144 - RNA, 15 nt, Human
caacagccucacuug

SEQ ID NO: 2791145 - RNA, 16 nt, Human
caacagccaacagcua

SEQ ID NO: 2791146 - RNA, 12 nt, Human
caacaggcuggg

SEQ ID NO: 2791147 - RNA, 21 nt, Human
caaccugcucuccucuugcca

SEQ ID NO: 2791148 - RNA, 23 nt, Human
caaccugcucuccucuugccacu

SEQ ID NO: 2791149 - RNA, 18 nt, Human
caaccugcucuccucuug

SEQ ID NO: 2791150 - RNA, 13 nt, Human
caacauauaaaau

SEQ ID NO: 2791151 - RNA, 14 nt, Human
caacauauaaaaua

SEQ ID NO: 2791152 - RNA, 16 nt, Human
caaccuggucacagga

SEQ ID NO: 2791153 - RNA, 16 nt, Human
caaccuucuguggcuc

SEQ ID NO: 2791154 - RNA, 17 nt, Human
caaccuucuguggcuca

SEQ ID NO: 2791155 - RNA, 19 nt, Human
caaccuucuguggcucaca

SEQ ID NO: 2791156 - RNA, 20 nt, Human
caaccuucuguggcucacag

SEQ ID NO: 2791157 - RNA, 17 nt, Human
caaauuugauugauuug

SEQ ID NO: 2791158 - RNA, 14 nt, Human
caaauuugauugau

SEQ ID NO: 2791159 - RNA, 17 nt, Human
caaauuugucuugccuu

SEQ ID NO: 2791160 - RNA, 22 nt, Human
caaauuugucuugccuuauuaa

SEQ ID NO: 2791161 - RNA, 13 nt, Human
caaauuaauuuua

SEQ ID NO: 2791162 - RNA, 13 nt, Human
caaauuauaaaaa

SEQ ID NO: 2791163 - RNA, 14 nt, Human
caaauuagggcaau

SEQ ID NO: 2791164 - RNA, 15 nt, Human
caaauuagggcaauu

SEQ ID NO: 2791165 - RNA, 21 nt, Human
caaauuagggcaauuggaaca

SEQ ID NO: 2791166 - RNA, 13 nt, Human
caacacugugggu

SEQ ID NO: 2791167 - RNA, 19 nt, Human
caacacuguggguguguga

SEQ ID NO: 2791168 - RNA, 21 nt, Human
caacacugugggugugugacu

SEQ ID NO: 2791169 - RNA, 16 nt, Human
caacagaagcuucaga

SEQ ID NO: 2791170 - RNA, 22 nt, Human
caacagaaaccuauccucacug

SEQ ID NO: 2791171 - RNA, 14 nt, Human
caacagaaagucau

SEQ ID NO: 2791172 - RNA, 15 nt, Human
caacagaacuaaaug

SEQ ID NO: 2791173 - RNA, 16 nt, Human
caacagaacuaaaugu

SEQ ID NO: 2791174 - RNA, 12 nt, Human
caacagaagcag

SEQ ID NO: 2791175 - RNA, 15 nt, Human
caacagaagcauuug

SEQ ID NO: 2791176 - RNA, 17 nt, Human
caacagaagcauuugua

SEQ ID NO: 2791177 - RNA, 18 nt, Human
caacagaagcauuuguau

SEQ ID NO: 2791178 - RNA, 19 nt, Human
caacagaagcauuuguauu

SEQ ID NO: 2791179 - RNA, 23 nt, Human
caacagaagcauuuguauuuugu

SEQ ID NO: 2791180 - RNA, 17 nt, Human
caacagaagcuucagaa

SEQ ID NO: 2791181 - RNA, 13 nt, Human
caacagaaugaaa

SEQ ID NO: 2791182 - RNA, 14 nt, Human
caacagaaugaaaa

SEQ ID NO: 2791183 - RNA, 15 nt, Human
caacagaaugaaaaa

SEQ ID NO: 2791184 - RNA, 16 nt, Human
caacagaaugaaaaau

SEQ ID NO: 2791185 - RNA, 17 nt, Human
caacagaaugaaaaaug

SEQ ID NO: 2791186 - RNA, 18 nt, Human
caacagaaugaaaaauga

SEQ ID NO: 2791187 - RNA, 19 nt, Human
caacagaaugaaaaaugaa

SEQ ID NO: 2791188 - RNA, 20 nt, Human
caacagaaugaaaaaugaaa

SEQ ID NO: 2791189 - RNA, 21 nt, Human
caacagaaugaaaaaugaaag

SEQ ID NO: 2791190 - RNA, 22 nt, Human
caacagaaugaaaaaugaaaga

SEQ ID NO: 2791191 - RNA, 23 nt, Human
caacagaagucaugaagcccaag

SEQ ID NO: 2791192 - RNA, 22 nt, Human
caacagaagucaugaagcccaa

SEQ ID NO: 2791193 - RNA, 20 nt, Human
caacagaagucaugaagccc

SEQ ID NO: 2791194 - RNA, 23 nt, Human
caacagagugagacccugucucu

SEQ ID NO: 2791195 - RNA, 19 nt, Human
caacagagugagacccugu

SEQ ID NO: 2791196 - RNA, 20 nt, Human
caagaagcaggcuacacuga

SEQ ID NO: 2791197 - RNA, 13 nt, Human
caagaagcaggcu

SEQ ID NO: 2791198 - RNA, 14 nt, Human
caagaagcaggcua

SEQ ID NO: 2791199 - RNA, 11 nt, Human
caagaagauga

SEQ ID NO: 2791200 - RNA, 12 nt, Human
caagaagaugaa

SEQ ID NO: 2791201 - RNA, 13 nt, Human
caagaagaugaau

SEQ ID NO: 2791202 - RNA, 18 nt, Human
caagaagaugaauggcgu

SEQ ID NO: 2791203 - RNA, 15 nt, Human
caacguuacucaggg

SEQ ID NO: 2791204 - RNA, 16 nt, Human
caacguuacucagggc

SEQ ID NO: 2791205 - RNA, 17 nt, Human
caacguuacucagggcu

SEQ ID NO: 2791206 - RNA, 18 nt, Human
caacguuacucagggcuc

SEQ ID NO: 2791207 - RNA, 22 nt, Human
caacguuacucagggcuccucc

SEQ ID NO: 2791208 - RNA, 23 nt, Human
caacguuguacuguaugugauga

SEQ ID NO: 2791209 - RNA, 23 nt, Human
caacguuuacaccgacuagccag

SEQ ID NO: 2791210 - RNA, 18 nt, Human
caacguuucuucacuuuu

SEQ ID NO: 2791211 - RNA, 22 nt, Human
caacguuuggaagauccuguga

SEQ ID NO: 2791212 - RNA, 12 nt, Human
caacuugggaac

SEQ ID NO: 2791213 - RNA, 16 nt, Human
caacuuguaaaugugg

SEQ ID NO: 2791214 - RNA, 17 nt, Human
caacuugguucugcuuc

SEQ ID NO: 2791215 - RNA, 18 nt, Human
caacuugguucugcuuca

SEQ ID NO: 2791216 - RNA, 19 nt, Human
caacuugguucugcuucaa

SEQ ID NO: 2791217 - RNA, 13 nt, Human
caacgacaaagcc

SEQ ID NO: 2791218 - RNA, 12 nt, Human
caacgaccaggg

SEQ ID NO: 2791219 - RNA, 19 nt, Human
caacgaccagggccgagga

SEQ ID NO: 2791220 - RNA, 16 nt, Human
caaccuuuauucuuuu

SEQ ID NO: 2791221 - RNA, 17 nt, Human
caaccuuucaccuuugu

SEQ ID NO: 2791222 - RNA, 21 nt, Human
caaccuuucaccuuuguguau

SEQ ID NO: 2791223 - RNA, 23 nt, Human
caacguggcuuuuuuuuuuuccc

SEQ ID NO: 2791224 - RNA, 14 nt, Human
caagagauugcuaa

SEQ ID NO: 2791225 - RNA, 15 nt, Human
caagagauugcuaau

SEQ ID NO: 2791226 - RNA, 16 nt, Human
caagagauugcuaauu

SEQ ID NO: 2791227 - RNA, 19 nt, Human
caagagauugcuaauugcu

SEQ ID NO: 2791228 - RNA, 20 nt, Human
caagagauugcuaauugcug

SEQ ID NO: 2791229 - RNA, 18 nt, Human
caagagauauuuugggca

SEQ ID NO: 2791230 - RNA, 13 nt, Human
caagagaggauga

SEQ ID NO: 2791231 - RNA, 20 nt, Human
caagagagggccaugcaauu

SEQ ID NO: 2791232 - RNA, 24 nt, Human
caagagagggccaugcaauucauc

SEQ ID NO: 2791233 - RNA, 12 nt, Human
caagagagaacc

SEQ ID NO: 2791234 - RNA, 19 nt, Human
caagagagaaccuaacugu

SEQ ID NO: 2791235 - RNA, 21 nt, Human
caagagagaaccuaacuguau

SEQ ID NO: 2791236 - RNA, 19 nt, Human
caagagaaggggaagcacu

SEQ ID NO: 2791237 - RNA, 19 nt, Human
caagagacccuucaaacuu

SEQ ID NO: 2791238 - RNA, 16 nt, Human
caagaggcuccugucc

SEQ ID NO: 2791239 - RNA, 11 nt, Human
caagaggcuga

SEQ ID NO: 2791240 - RNA, 17 nt, Human
caagaggcugagacagg

SEQ ID NO: 2791241 - RNA, 17 nt, Human
caagagcuuaacagugu

SEQ ID NO: 2791242 - RNA, 20 nt, Human
caagagcugcccuccuuguc

SEQ ID NO: 2791243 - RNA, 22 nt, Human
caagaggaauaagaauggagca

SEQ ID NO: 2791244 - RNA, 16 nt, Human
caagagcugcccuccu

SEQ ID NO: 2791245 - RNA, 18 nt, Human
caagagcugcccuccuug

SEQ ID NO: 2791246 - RNA, 13 nt, Human
caagagcugcccu

SEQ ID NO: 2791247 - RNA, 14 nt, Human
caagagcugcccuc

SEQ ID NO: 2791248 - RNA, 21 nt, Human
caagagccauguagaagcugc

SEQ ID NO: 2791249 - RNA, 17 nt, Human
caagagcagccuguggc

SEQ ID NO: 2791250 - RNA, 16 nt, Human
caagagcagccugugg

SEQ ID NO: 2791251 - RNA, 15 nt, Human
caagagcagccugug

SEQ ID NO: 2791252 - RNA, 14 nt, Human
caagagcagccugu

SEQ ID NO: 2791253 - RNA, 16 nt, Human
caagagcagaggcagc

SEQ ID NO: 2791254 - RNA, 15 nt, Human
caagagcagaggcag

SEQ ID NO: 2791255 - RNA, 13 nt, Human
caagagcacacuu

SEQ ID NO: 2791256 - RNA, 14 nt, Human
caagagcacacuug

SEQ ID NO: 2791257 - RNA, 20 nt, Human
caagagcagccuguggcauc

SEQ ID NO: 2791258 - RNA, 18 nt, Human
caagagcagccuguggca

SEQ ID NO: 2791259 - RNA, 21 nt, Human
caagagcagccuguggcaucu

SEQ ID NO: 2791260 - RNA, 16 nt, Human
caagagcacacuuggc

SEQ ID NO: 2791261 - RNA, 20 nt, Human
caagagccauguagaagcug

SEQ ID NO: 2791262 - RNA, 15 nt, Human
caagauauuguacau

SEQ ID NO: 2791263 - RNA, 16 nt, Human
caagauauuguacaua

SEQ ID NO: 2791264 - RNA, 17 nt, Human
caagauauuguacauaa

SEQ ID NO: 2791265 - RNA, 19 nt, Human
caagauauuguacauaaaa

SEQ ID NO: 2791266 - RNA, 21 nt, Human
caagauauuguacauaaaaga

SEQ ID NO: 2791267 - RNA, 17 nt, Human
caaacugacucaacagu

SEQ ID NO: 2791268 - RNA, 21 nt, Human
caaacucuugaccucagguga

SEQ ID NO: 2791269 - RNA, 20 nt, Human
caaacucuugaccucaggug

SEQ ID NO: 2791270 - RNA, 19 nt, Human
caaacucuugaccucaggu

SEQ ID NO: 2791271 - RNA, 17 nt, Human
caaacucuugaccucag

SEQ ID NO: 2791272 - RNA, 14 nt, Human
caaacucucugaac

SEQ ID NO: 2791273 - RNA, 16 nt, Human
caaacucugccagcca

SEQ ID NO: 2791274 - RNA, 12 nt, Human
caaaccugccug

SEQ ID NO: 2791275 - RNA, 16 nt, Human
caaaccugccuggguu

SEQ ID NO: 2791276 - RNA, 13 nt, Human
caaaccugccugg

SEQ ID NO: 2791277 - RNA, 14 nt, Human
caaaccugccuggg

SEQ ID NO: 2791278 - RNA, 15 nt, Human
caaaccugccugggu

SEQ ID NO: 2791279 - RNA, 13 nt, Human
caaacagaacagg

SEQ ID NO: 2791280 - RNA, 15 nt, Human
caaacagaacagggu

SEQ ID NO: 2791281 - RNA, 16 nt, Human
caaacagaacaggguc

SEQ ID NO: 2791282 - RNA, 17 nt, Human
caaacagaacaggguca

SEQ ID NO: 2791283 - RNA, 12 nt, Human
caaacaccuucc

SEQ ID NO: 2791284 - RNA, 15 nt, Human
caaacaccucccagg

SEQ ID NO: 2791285 - RNA, 14 nt, Human
caaacaccucccag

SEQ ID NO: 2791286 - RNA, 20 nt, Human
caaacacugcaggcaucaca

SEQ ID NO: 2791287 - RNA, 21 nt, Human
caaacaaggggcuguuacaua

SEQ ID NO: 2791288 - RNA, 14 nt, Human
caaacaccuuccag

SEQ ID NO: 2791289 - RNA, 21 nt, Human
caaacaccuuccagcuccugu

SEQ ID NO: 2791290 - RNA, 20 nt, Human
caaacaccuucuuauuauau

SEQ ID NO: 2791291 - RNA, 21 nt, Human
caaacaccuucuuauuauaua

SEQ ID NO: 2791292 - RNA, 22 nt, Human
caaacaccuucuuauuauauau

SEQ ID NO: 2791293 - RNA, 16 nt, Human
caaaauuuuuuuaauc

SEQ ID NO: 2791294 - RNA, 14 nt, Human
caaacaaauaugca

SEQ ID NO: 2791295 - RNA, 15 nt, Human
caaacaaauaugcaa

SEQ ID NO: 2791296 - RNA, 17 nt, Human
caaacaagaaugucccu

SEQ ID NO: 2791297 - RNA, 17 nt, Human
caaacaaauaugcaaaa

SEQ ID NO: 2791298 - RNA, 18 nt, Human
caaacaacagaaagucau

SEQ ID NO: 2791299 - RNA, 22 nt, Human
caaacaacagaaagucauuccu

SEQ ID NO: 2791300 - RNA, 21 nt, Human
caaaaucuguccaaaggaggc

SEQ ID NO: 2791301 - RNA, 16 nt, Human
caaaaucuguucuaac

SEQ ID NO: 2791302 - RNA, 17 nt, Human
caaaaucuguucuaaca

SEQ ID NO: 2791303 - RNA, 13 nt, Human
caaaaucugucca

SEQ ID NO: 2791304 - RNA, 16 nt, Human
caaaaugacaucuuuu

SEQ ID NO: 2791305 - RNA, 18 nt, Human
caaaaugacaucuuuuua

SEQ ID NO: 2791306 - RNA, 19 nt, Human
caaaaugacaucuuuuuaa

SEQ ID NO: 2791307 - RNA, 22 nt, Human
caaaaugacaucuuuuuaaagc

SEQ ID NO: 2791308 - RNA, 23 nt, Human
caaaaugacaucuuuuuaaagcu

SEQ ID NO: 2791309 - RNA, 21 nt, Human
caaaaugagcccuguccugcc

SEQ ID NO: 2791310 - RNA, 19 nt, Human
caaaauuugaugccaggac

SEQ ID NO: 2791311 - RNA, 14 nt, Human
caaaauuuuauucc

SEQ ID NO: 2791312 - RNA, 13 nt, Human
caaaauuuuauuc

SEQ ID NO: 2791313 - RNA, 20 nt, Human
caaaauuuuaguccaaauaa

SEQ ID NO: 2791314 - RNA, 23 nt, Human
caaaauuuuauaagcaaauuuca

SEQ ID NO: 2791315 - RNA, 13 nt, Human
caaaauuuguuug

SEQ ID NO: 2791316 - RNA, 18 nt, Human
caaaauuuuauuccuaua

SEQ ID NO: 2791317 - RNA, 14 nt, Human
caaaauuuuauuuu

SEQ ID NO: 2791318 - RNA, 16 nt, Human
caaaauuuuauuuugu

SEQ ID NO: 2791319 - RNA, 19 nt, Human
caaaauuuuauuuugugcu

SEQ ID NO: 2791320 - RNA, 17 nt, Human
caaaauuuucucauuuu

SEQ ID NO: 2791321 - RNA, 20 nt, Human
caaaauuuucucauuuucuu

SEQ ID NO: 2791322 - RNA, 22 nt, Human
caaaauuuucucauuuucuuuu

SEQ ID NO: 2791323 - RNA, 15 nt, Human
caaaauuuuucaacc

SEQ ID NO: 2791324 - RNA, 18 nt, Human
caaaauuuuucaacccca

SEQ ID NO: 2791325 - RNA, 22 nt, Human
caaaauuuuucaaccccacccu

SEQ ID NO: 2791326 - RNA, 23 nt, Human
caaaauuuuucaaccccacccug

SEQ ID NO: 2791327 - RNA, 14 nt, Human
caaaaguuccaaga

SEQ ID NO: 2791328 - RNA, 18 nt, Human
caaaaguuccaagagucu

SEQ ID NO: 2791329 - RNA, 23 nt, Human
caaaaguuccaagagucuaaaga

SEQ ID NO: 2791330 - RNA, 21 nt, Human
caaaaguucccugaaacacga

SEQ ID NO: 2791331 - RNA, 14 nt, Human
caaaaguuucucuu

SEQ ID NO: 2791332 - RNA, 18 nt, Human
caaaaguuggacuaaaug

SEQ ID NO: 2791333 - RNA, 19 nt, Human
caaaaguuggacuaaaugc

SEQ ID NO: 2791334 - RNA, 21 nt, Human
caaaaguuggacuaaaugccu

SEQ ID NO: 2791335 - RNA, 13 nt, Human
caaaacggggcag

SEQ ID NO: 2791336 - RNA, 15 nt, Human
caaaacuauacuuga

SEQ ID NO: 2791337 - RNA, 17 nt, Human
caaaacuauacuugaac

SEQ ID NO: 2791338 - RNA, 18 nt, Human
caaaacuauacuugaaca

SEQ ID NO: 2791339 - RNA, 19 nt, Human
caaaacuauacuugaacaa

SEQ ID NO: 2791340 - RNA, 21 nt, Human
caaaacuauacuugaacaaaa

SEQ ID NO: 2791341 - RNA, 23 nt, Human
caaaacuauacuugaacaaaagg

SEQ ID NO: 2791342 - RNA, 17 nt, Human
caaaacuccgcccccag

SEQ ID NO: 2791343 - RNA, 18 nt, Human
caaaacuccgcccccagc

SEQ ID NO: 2791344 - RNA, 20 nt, Human
caaaacuccgcccccagccu

SEQ ID NO: 2791345 - RNA, 21 nt, Human
caaaacuccgcccccagccua

SEQ ID NO: 2791346 - RNA, 16 nt, Human
caaaacuccugucuuu

SEQ ID NO: 2791347 - RNA, 16 nt, Human
caaaacgcgcagaugu

SEQ ID NO: 2791348 - RNA, 17 nt, Human
caaaacgcgcagaugug

SEQ ID NO: 2791349 - RNA, 18 nt, Human
caaaacgcgcagaugugc

SEQ ID NO: 2791350 - RNA, 21 nt, Human
auuuuauuuugugcucauuua

SEQ ID NO: 2791351 - RNA, 22 nt, Human
auuuuauuuugugcucauuuaa

SEQ ID NO: 2791352 - RNA, 23 nt, Human
auuuuauuuugugcucauuuaag

SEQ ID NO: 2791353 - RNA, 23 nt, Human
caaaaccuugcuaauuuucucaa

SEQ ID NO: 2791354 - RNA, 20 nt, Human
caaaauccuugcuuaugaca

SEQ ID NO: 2791355 - RNA, 22 nt, Human
caaaauccaaaaagaaaugaug

SEQ ID NO: 2791356 - RNA, 16 nt, Human
caaaauccaaaaagaa

SEQ ID NO: 2791357 - RNA, 16 nt, Human
caaaauccuugcuuau

SEQ ID NO: 2791358 - RNA, 18 nt, Human
caaaauccugacuauuau

SEQ ID NO: 2791359 - RNA, 18 nt, Human
caaaauccuuccaaagaa

SEQ ID NO: 2791360 - RNA, 19 nt, Human
caaaauccuuccaaagaau

SEQ ID NO: 2791361 - RNA, 15 nt, Human
caaaauauuucccau

SEQ ID NO: 2791362 - RNA, 16 nt, Human
caaaaucauuuuaaug

SEQ ID NO: 2791363 - RNA, 17 nt, Human
caaaaucaagcaagccu

SEQ ID NO: 2791364 - RNA, 19 nt, Human
caaaaucaagcaagccucu

SEQ ID NO: 2791365 - RNA, 17 nt, Human
caaaauauuuguacaua

SEQ ID NO: 2791366 - RNA, 12 nt, Human
caaaauauuuuc

SEQ ID NO: 2791367 - RNA, 13 nt, Human
caaaauauuuuua

SEQ ID NO: 2791368 - RNA, 16 nt, Human
caaaauauuuuuaaaa

SEQ ID NO: 2791369 - RNA, 16 nt, Human
caaaauauuuguacau

SEQ ID NO: 2791370 - RNA, 12 nt, Human
caaaauauuuaa

SEQ ID NO: 2791371 - RNA, 13 nt, Human
caaaauauuuaaa

SEQ ID NO: 2791372 - RNA, 14 nt, Human
caaaauauuuaaaa

SEQ ID NO: 2791373 - RNA, 17 nt, Human
caaaauauuuaaaaaug

SEQ ID NO: 2791374 - RNA, 18 nt, Human
caaaauauuuaaaaaugu

SEQ ID NO: 2791375 - RNA, 19 nt, Human
caaaauauuuaaaaauguc

SEQ ID NO: 2791376 - RNA, 20 nt, Human
caaaauauuuaaaaaugucu

SEQ ID NO: 2791377 - RNA, 21 nt, Human
caaaauauuuaaaaaugucuu

SEQ ID NO: 2791378 - RNA, 15 nt, Human
caaaauagcauuugu

SEQ ID NO: 2791379 - RNA, 16 nt, Human
caaaauagcauuuguu

SEQ ID NO: 2791380 - RNA, 13 nt, Human
caaaauagaagcu

SEQ ID NO: 2791381 - RNA, 14 nt, Human
caaaauaaauguug

SEQ ID NO: 2791382 - RNA, 14 nt, Human
caaaauaaaucagu

SEQ ID NO: 2791383 - RNA, 22 nt, Human
caaaauaaaucagugggauuug

SEQ ID NO: 2791384 - RNA, 12 nt, Human
caaaauaaaaac

SEQ ID NO: 2791385 - RNA, 15 nt, Human
caaaaguuuuccuga

SEQ ID NO: 2791386 - RNA, 17 nt, Human
caaaaguuuuccugaga

SEQ ID NO: 2791387 - RNA, 22 nt, Human
caaaauaauuuuaagaaaucaa

SEQ ID NO: 2791388 - RNA, 18 nt, Human
caaaauaauuuuaagaaa

SEQ ID NO: 2791389 - RNA, 11 nt, Human
caaaauaauuc

SEQ ID NO: 2791390 - RNA, 14 nt, Human
caaaauaauucuaa

SEQ ID NO: 2791391 - RNA, 12 nt, Human
caaaauagaaaa

SEQ ID NO: 2791392 - RNA, 14 nt, Human
caaaauagaaaagu

SEQ ID NO: 2791393 - RNA, 17 nt, Human
caaaauagaaaaguuau

SEQ ID NO: 2791394 - RNA, 12 nt, Human
cacaggaaaagg

SEQ ID NO: 2791395 - RNA, 23 nt, Human
cacaggaaaccaacacccaaagc

SEQ ID NO: 2791396 - RNA, 22 nt, Human
cacaguggaaagacagcuucuc

SEQ ID NO: 2791397 - RNA, 21 nt, Human
cacaggcccuuccucuccacu

SEQ ID NO: 2791398 - RNA, 17 nt, Human
cacagugcaucucagcc

SEQ ID NO: 2791399 - RNA, 18 nt, Human
cacagugcaucucagccc

SEQ ID NO: 2791400 - RNA, 19 nt, Human
cacagugcaucucagccca

SEQ ID NO: 2791401 - RNA, 17 nt, Human
cacaguucaauucucau

SEQ ID NO: 2791402 - RNA, 23 nt, Human
cacaguguuaaaugaaauuguaa

SEQ ID NO: 2791403 - RNA, 19 nt, Human
cacaguguugcccaggcug

SEQ ID NO: 2791404 - RNA, 14 nt, Human
cacaguguugccca

SEQ ID NO: 2791405 - RNA, 16 nt, Human
cacaguguguuuguga

SEQ ID NO: 2791406 - RNA, 13 nt, Human
cacaguguguuug

SEQ ID NO: 2791407 - RNA, 11 nt, Human
cacagcuuccu

SEQ ID NO: 2791408 - RNA, 12 nt, Human
cacagcuuccug

SEQ ID NO: 2791409 - RNA, 15 nt, Human
cacagcuuccugucc

SEQ ID NO: 2791410 - RNA, 21 nt, Human
cacagcuuccuguccccaucu

SEQ ID NO: 2791411 - RNA, 22 nt, Human
cacagcuuccuguccccaucug

SEQ ID NO: 2791412 - RNA, 20 nt, Human
cacagcugaaaguucuugcu

SEQ ID NO: 2791413 - RNA, 22 nt, Human
cacagcugcucaauaaaguaca

SEQ ID NO: 2791414 - RNA, 12 nt, Human
cacagcugcuca

SEQ ID NO: 2791415 - RNA, 15 nt, Human
cacaggcccuuccuc

SEQ ID NO: 2791416 - RNA, 16 nt, Human
cacaggcccuuccucu

SEQ ID NO: 2791417 - RNA, 17 nt, Human
cacaggcccuuccucuc

SEQ ID NO: 2791418 - RNA, 18 nt, Human
cacaggcccuuccucucc

SEQ ID NO: 2791419 - RNA, 19 nt, Human
cacaggcccuuccucucca

SEQ ID NO: 2791420 - RNA, 11 nt, Human
cagugucauuu

SEQ ID NO: 2791421 - RNA, 15 nt, Human
caguguauuucaguu

SEQ ID NO: 2791422 - RNA, 16 nt, Human
caguguauuucaguuc

SEQ ID NO: 2791423 - RNA, 17 nt, Human
caguguauggaaauaaa

SEQ ID NO: 2791424 - RNA, 19 nt, Human
caguguagccuugcccgga

SEQ ID NO: 2791425 - RNA, 15 nt, Human
caguguaguuaauuu

SEQ ID NO: 2791426 - RNA, 16 nt, Human
caguguaguuaauuua

SEQ ID NO: 2791427 - RNA, 17 nt, Human
caguguaguuaauuuau

SEQ ID NO: 2791428 - RNA, 21 nt, Human
caguguaguuaauuuaucuaa

SEQ ID NO: 2791429 - RNA, 21 nt, Human
caguguccccuccacugucac

SEQ ID NO: 2791430 - RNA, 16 nt, Human
caguguccccuccacu

SEQ ID NO: 2791431 - RNA, 17 nt, Human
caguguccccuccacug

SEQ ID NO: 2791432 - RNA, 19 nt, Human
caguguccccuccacuguc

SEQ ID NO: 2791433 - RNA, 20 nt, Human
caguguccccuccacuguca

SEQ ID NO: 2791434 - RNA, 15 nt, Human
caguguccccuccac

SEQ ID NO: 2791435 - RNA, 22 nt, Human
caguguccaaagcagggucugg

SEQ ID NO: 2791436 - RNA, 16 nt, Human
caguguccaaagcagg

SEQ ID NO: 2791437 - RNA, 17 nt, Human
caguguccaaagcaggg

SEQ ID NO: 2791438 - RNA, 12 nt, Human
cagugucauuug

SEQ ID NO: 2791439 - RNA, 13 nt, Human
cagugucauuugc

SEQ ID NO: 2791440 - RNA, 17 nt, Human
cagugucauuugcucug

SEQ ID NO: 2791441 - RNA, 19 nt, Human
caguguacauaguguaaug

SEQ ID NO: 2791442 - RNA, 20 nt, Human
caguguacauaguguaaugu

SEQ ID NO: 2791443 - RNA, 15 nt, Human
caguguaauccccca

SEQ ID NO: 2791444 - RNA, 19 nt, Human
caguguaaucccccaggag

SEQ ID NO: 2791445 - RNA, 14 nt, Human
cagugugacaagga

SEQ ID NO: 2791446 - RNA, 21 nt, Human
cagugugaaguacaauaauuc

SEQ ID NO: 2791447 - RNA, 23 nt, Human
cagugugaaguacaauaauucau

SEQ ID NO: 2791448 - RNA, 19 nt, Human
cagugucuguaaaagagcc

SEQ ID NO: 2791449 - RNA, 23 nt, Human
cagugugucuaaauuugaauguu

SEQ ID NO: 2791450 - RNA, 14 nt, Human
cagugugucuaaau

SEQ ID NO: 2791451 - RNA, 13 nt, Human
caguguggagugg

SEQ ID NO: 2791452 - RNA, 14 nt, Human
cagugugcugaugg

SEQ ID NO: 2791453 - RNA, 11 nt, Human
caguguggaac

SEQ ID NO: 2791454 - RNA, 19 nt, Human
cagugugaucccaagugcc

SEQ ID NO: 2791455 - RNA, 18 nt, Human
cagugugaucccaagugc

SEQ ID NO: 2791456 - RNA, 22 nt, Human
cagugugaucccaagugccagu

SEQ ID NO: 2791457 - RNA, 18 nt, Human
caguggaaauucagguga

SEQ ID NO: 2791458 - RNA, 16 nt, Human
cagugcuuuaauggca

SEQ ID NO: 2791459 - RNA, 18 nt, Human
caguggaaccguugccaa

SEQ ID NO: 2791460 - RNA, 16 nt, Human
caguggcagcugcuuu

SEQ ID NO: 2791461 - RNA, 15 nt, Human
caguggcagcugcuu

SEQ ID NO: 2791462 - RNA, 14 nt, Human
caguggcagcugcu

SEQ ID NO: 2791463 - RNA, 13 nt, Human
caguggcagcugc

SEQ ID NO: 2791464 - RNA, 12 nt, Human
caguggcagcug

SEQ ID NO: 2791465 - RNA, 15 nt, Human
caguggagguuuguc

SEQ ID NO: 2791466 - RNA, 13 nt, Human
caguggagaauua

SEQ ID NO: 2791467 - RNA, 14 nt, Human
caguggagaauuau

SEQ ID NO: 2791468 - RNA, 17 nt, Human
cagugggaacucugaca

SEQ ID NO: 2791469 - RNA, 22 nt, Human
cagugggaacucugacaagggc

SEQ ID NO: 2791470 - RNA, 11 nt, Human
cagugggaacu

SEQ ID NO: 2791471 - RNA, 19 nt, Human
caguggcuucaucugucaa

SEQ ID NO: 2791472 - RNA, 21 nt, Human
caguggcuucaucugucaagu

SEQ ID NO: 2791473 - RNA, 14 nt, Human
caguggcugcugcc

SEQ ID NO: 2791474 - RNA, 15 nt, Human
caguggcugcugccc

SEQ ID NO: 2791475 - RNA, 17 nt, Human
caguggcugcugcccag

SEQ ID NO: 2791476 - RNA, 18 nt, Human
caguggcugcugcccagg

SEQ ID NO: 2791477 - RNA, 18 nt, Human
caguggccuuaccccugc

SEQ ID NO: 2791478 - RNA, 19 nt, Human
caguggccuuaccccugcc

SEQ ID NO: 2791479 - RNA, 21 nt, Human
caguggccuuaccccugccuu

SEQ ID NO: 2791480 - RNA, 13 nt, Human
caguggcugcugc

SEQ ID NO: 2791481 - RNA, 20 nt, Human
caguggcucacgccuaugau

SEQ ID NO: 2791482 - RNA, 19 nt, Human
caguggcguuguugcaugu

SEQ ID NO: 2791483 - RNA, 16 nt, Human
caguggauugcauuuc

SEQ ID NO: 2791484 - RNA, 17 nt, Human
caguggauuguuuauac

SEQ ID NO: 2791485 - RNA, 13 nt, Human
caguggccacuca

SEQ ID NO: 2791486 - RNA, 14 nt, Human
caguggccacucag

SEQ ID NO: 2791487 - RNA, 22 nt, Human
caguuaccacacaucuaugaua

SEQ ID NO: 2791488 - RNA, 13 nt, Human
caguucccuuggc

SEQ ID NO: 2791489 - RNA, 20 nt, Human
caguucccuuggccucagaa

SEQ ID NO: 2791490 - RNA, 19 nt, Human
caguucccuuggccucaga

SEQ ID NO: 2791491 - RNA, 18 nt, Human
caguucccuuggccucag

SEQ ID NO: 2791492 - RNA, 17 nt, Human
caguucccuuggccuca

SEQ ID NO: 2791493 - RNA, 16 nt, Human
caguucccuuggccuc

SEQ ID NO: 2791494 - RNA, 15 nt, Human
caguucccuuggccu

SEQ ID NO: 2791495 - RNA, 14 nt, Human
caguucccuuggcc

SEQ ID NO: 2791496 - RNA, 22 nt, Human
caguuaauuacucagcagaaug

SEQ ID NO: 2791497 - RNA, 15 nt, Human
caguuaauuagcauu

SEQ ID NO: 2791498 - RNA, 21 nt, Human
caguuaauuagcauucuggca

SEQ ID NO: 2791499 - RNA, 20 nt, Human
caguuaagccuuuggaaaca

SEQ ID NO: 2791500 - RNA, 23 nt, Human
caguguuguugcucuaggaagac

SEQ ID NO: 2791501 - RNA, 20 nt, Human
caguuaaggaccguggcccu

SEQ ID NO: 2791502 - RNA, 21 nt, Human
caguuaaggaccguggcccug

SEQ ID NO: 2791503 - RNA, 14 nt, Human
caguuaagccuuug

SEQ ID NO: 2791504 - RNA, 17 nt, Human
caguuaagccuuuggaa

SEQ ID NO: 2791505 - RNA, 15 nt, Human
caguuaagccuuugg

SEQ ID NO: 2791506 - RNA, 20 nt, Human
caguguuuuaaacucuccua

SEQ ID NO: 2791507 - RNA, 14 nt, Human
caguguuuuaaauu

SEQ ID NO: 2791508 - RNA, 16 nt, Human
caguguuuuaaauucu

SEQ ID NO: 2791509 - RNA, 17 nt, Human
caguguuuuaaauucug

SEQ ID NO: 2791510 - RNA, 12 nt, Human
caguguugagau

SEQ ID NO: 2791511 - RNA, 14 nt, Human
caguguugccuaag

SEQ ID NO: 2791512 - RNA, 20 nt, Human
caguguuuuggacuccaucu

SEQ ID NO: 2791513 - RNA, 22 nt, Human
caguguuuuggacuccaucucu

SEQ ID NO: 2791514 - RNA, 24 nt, Human
caguuaacuauugcauuuauaugu

SEQ ID NO: 2791515 - RNA, 21 nt, Human
caguuaacuauugcauuuaua

SEQ ID NO: 2791516 - RNA, 14 nt, Human
caguuaaaauguga

SEQ ID NO: 2791517 - RNA, 18 nt, Human
caguguugagccuuuucc

SEQ ID NO: 2791518 - RNA, 13 nt, Human
caguguugccuaa

SEQ ID NO: 2791519 - RNA, 19 nt, Human
caguguuccccaucugggu

SEQ ID NO: 2791520 - RNA, 21 nt, Human
caguguuccccaucugggucc

SEQ ID NO: 2791521 - RNA, 14 nt, Human
caguguucgcuugg

SEQ ID NO: 2791522 - RNA, 15 nt, Human
caguguucgcuuggc

SEQ ID NO: 2791523 - RNA, 16 nt, Human
caguguucgcuuggcu

SEQ ID NO: 2791524 - RNA, 17 nt, Human
caguguucgcuuggcuc

SEQ ID NO: 2791525 - RNA, 23 nt, Human
caguguucgcuuggcuccaugcu

SEQ ID NO: 2791526 - RNA, 17 nt, Human
caguguucuaugaacaa

SEQ ID NO: 2791527 - RNA, 18 nt, Human
caguguucuaugaacaac

SEQ ID NO: 2791528 - RNA, 16 nt, Human
caguguuaaaugaaau

SEQ ID NO: 2791529 - RNA, 17 nt, Human
caguguuaaaugaaauu

SEQ ID NO: 2791530 - RNA, 18 nt, Human
caguguuaaaugaaauug

SEQ ID NO: 2791531 - RNA, 15 nt, Human
caguguuaaaugaaa

SEQ ID NO: 2791532 - RNA, 17 nt, Human
caguguguuugugauug

SEQ ID NO: 2791533 - RNA, 14 nt, Human
caguguuccccauc

SEQ ID NO: 2791534 - RNA, 14 nt, Human
caguucugaagaau

SEQ ID NO: 2791535 - RNA, 15 nt, Human
caguuccuuugugug

SEQ ID NO: 2791536 - RNA, 22 nt, Human
caguuccuuuguguguacucac

SEQ ID NO: 2791537 - RNA, 17 nt, Human
caguucgccuggagccc

SEQ ID NO: 2791538 - RNA, 18 nt, Human
caguucgccuggagcccu

SEQ ID NO: 2791539 - RNA, 20 nt, Human
caguucgccuggagcccucc

SEQ ID NO: 2791540 - RNA, 17 nt, Human
caguucuaguuugcauu

SEQ ID NO: 2791541 - RNA, 18 nt, Human
caguucuaguuugcauuc

SEQ ID NO: 2791542 - RNA, 19 nt, Human
caguucuaguuugcauucc

SEQ ID NO: 2791543 - RNA, 18 nt, Human
caguucugucauauguua

SEQ ID NO: 2791544 - RNA, 21 nt, Human
caguucuguuauauccccugc

SEQ ID NO: 2791545 - RNA, 12 nt, Human
caguucuuagcc

SEQ ID NO: 2791546 - RNA, 14 nt, Human
caguucuugaguug

SEQ ID NO: 2791547 - RNA, 21 nt, Human
cauacaucaguuauucauucu

SEQ ID NO: 2791548 - RNA, 17 nt, Human
cauacaugcaaaaagaa

SEQ ID NO: 2791549 - RNA, 16 nt, Human
cauacauuaauuaaua

SEQ ID NO: 2791550 - RNA, 20 nt, Human
cauaaucuaccaacgaaaga

SEQ ID NO: 2791551 - RNA, 21 nt, Human
cauaaucuaguuuacagaaaa

SEQ ID NO: 2791552 - RNA, 22 nt, Human
cauaaucuaguuuacagaaaaa

SEQ ID NO: 2791553 - RNA, 14 nt, Human
cauaauacaaaagg

SEQ ID NO: 2791554 - RNA, 20 nt, Human
cauaauacacuugcccugcu

SEQ ID NO: 2791555 - RNA, 21 nt, Human
cauaauacacuugcccugcuc

SEQ ID NO: 2791556 - RNA, 22 nt, Human
cauaccagcucgcaccccccug

SEQ ID NO: 2791557 - RNA, 23 nt, Human
cauaccagcucgcaccccccugu

SEQ ID NO: 2791558 - RNA, 19 nt, Human
cauaagcggcguaaguuua

SEQ ID NO: 2791559 - RNA, 17 nt, Human
cauaagaucacugccag

SEQ ID NO: 2791560 - RNA, 20 nt, Human
cauaacguuuuuccuuuaaa

SEQ ID NO: 2791561 - RNA, 17 nt, Human
cauaacguuuuuccuuu

SEQ ID NO: 2791562 - RNA, 18 nt, Human
cauaacguuuuuccuuua

SEQ ID NO: 2791563 - RNA, 18 nt, Human
cauaacucuguaaaaaca

SEQ ID NO: 2791564 - RNA, 22 nt, Human
cauaacucuguaaaaacacuga

SEQ ID NO: 2791565 - RNA, 15 nt, Human
cauaacguuuuuccu

SEQ ID NO: 2791566 - RNA, 16 nt, Human
cauaacguuuuuccuu

SEQ ID NO: 2791567 - RNA, 21 nt, Human
cauaacguuuuuccuuuaaaa

SEQ ID NO: 2791568 - RNA, 13 nt, Human
cauaacuaaauuu

SEQ ID NO: 2791569 - RNA, 14 nt, Human
cauaacuaaauuug

SEQ ID NO: 2791570 - RNA, 16 nt, Human
cauaacuaaauuugau

SEQ ID NO: 2791571 - RNA, 17 nt, Human
cauaacuaaauuugaua

SEQ ID NO: 2791572 - RNA, 18 nt, Human
cauaacuaaauuugauac

SEQ ID NO: 2791573 - RNA, 19 nt, Human
cauaacuaaauuugauacu

SEQ ID NO: 2791574 - RNA, 20 nt, Human
cauaacuaaauuugauacuu

SEQ ID NO: 2791575 - RNA, 21 nt, Human
cauaacuaaauuugauacuua

SEQ ID NO: 2791576 - RNA, 22 nt, Human
cauaacuaaauuugauacuuau

SEQ ID NO: 2791577 - RNA, 12 nt, Human
cauaacugccuu

SEQ ID NO: 2791578 - RNA, 14 nt, Human
cauaacugccuuga

SEQ ID NO: 2791579 - RNA, 19 nt, Human
cauaacugccuugaaccug

SEQ ID NO: 2791580 - RNA, 23 nt, Human
cauaacugccuugaaccugugag

SEQ ID NO: 2791581 - RNA, 16 nt, Human
cauaacuuauugcuga

SEQ ID NO: 2791582 - RNA, 19 nt, Human
cauaacuuauugcugauuu

SEQ ID NO: 2791583 - RNA, 21 nt, Human
cauaacuuauugcugauuuua

SEQ ID NO: 2791584 - RNA, 22 nt, Human
cauaacuuauugcugauuuuaa

SEQ ID NO: 2791585 - RNA, 23 nt, Human
cauaacuuauugcugauuuuaau

SEQ ID NO: 2791586 - RNA, 13 nt, Human
cauaacuuccugu

SEQ ID NO: 2791587 - RNA, 14 nt, Human
cauaacuuccugua

SEQ ID NO: 2791588 - RNA, 23 nt, Human
cauaacuuccuguacuugaaguc

SEQ ID NO: 2791589 - RNA, 22 nt, Human
cauaaguaauucaagaaaacaa

SEQ ID NO: 2791590 - RNA, 18 nt, Human
cauaaguaauucaagaaa

SEQ ID NO: 2791591 - RNA, 16 nt, Human
cauaaguauacaguuc

SEQ ID NO: 2791592 - RNA, 21 nt, Human
cauaauaaaaaauuaugacaa

SEQ ID NO: 2791593 - RNA, 23 nt, Human
cauaauaaaaaauuaugacaaug

SEQ ID NO: 2791594 - RNA, 14 nt, Human
cauaagugaauuua

SEQ ID NO: 2791595 - RNA, 16 nt, Human
cauaagugaauuuaua

SEQ ID NO: 2791596 - RNA, 17 nt, Human
cauaaguaauucaagaa

SEQ ID NO: 2791597 - RNA, 16 nt, Human
cauaaguaauucaaga

SEQ ID NO: 2791598 - RNA, 22 nt, Human
cauaagguuucguuucuguaua

SEQ ID NO: 2791599 - RNA, 15 nt, Human
cauaagguuucguuu

SEQ ID NO: 2791600 - RNA, 21 nt, Human
cauaagguuucguuucuguau

SEQ ID NO: 2791601 - RNA, 21 nt, Human
cauaagggguuugccauuuga

SEQ ID NO: 2791602 - RNA, 23 nt, Human
cauaagggguuugccauuugaua

SEQ ID NO: 2791603 - RNA, 15 nt, Human
cauaaggcuucaaaa

SEQ ID NO: 2791604 - RNA, 19 nt, Human
cauaaggcuucaaaauguu

SEQ ID NO: 2791605 - RNA, 21 nt, Human
cauaaggccaguaugauuuau

SEQ ID NO: 2791606 - RNA, 20 nt, Human
cauaacauuuucagaauagu

SEQ ID NO: 2791607 - RNA, 16 nt, Human
cauaaccuagccuuag

SEQ ID NO: 2791608 - RNA, 18 nt, Human
cauaacccacuugucacu

SEQ ID NO: 2791609 - RNA, 13 nt, Human
cauaacagugcag

SEQ ID NO: 2791610 - RNA, 15 nt, Human
cauaacagugcaggg

SEQ ID NO: 2791611 - RNA, 16 nt, Human
cauaacagugcagggc

SEQ ID NO: 2791612 - RNA, 15 nt, Human
cauaacaacuucaua

SEQ ID NO: 2791613 - RNA, 13 nt, Human
cauaaauaugcag

SEQ ID NO: 2791614 - RNA, 15 nt, Human
cauaaauaugcagug

SEQ ID NO: 2791615 - RNA, 20 nt, Human
cauaaauaugcagugauaug

SEQ ID NO: 2791616 - RNA, 12 nt, Human
cauaaauaugca

SEQ ID NO: 2791617 - RNA, 18 nt, Human
cauaaaguuagaaucuau

SEQ ID NO: 2791618 - RNA, 22 nt, Human
cauaaaguuagaaucuauuuuc

SEQ ID NO: 2791619 - RNA, 12 nt, Human
cauaaaguacuu

SEQ ID NO: 2791620 - RNA, 16 nt, Human
cauaaagguaaaacaa

SEQ ID NO: 2791621 - RNA, 18 nt, Human
cauaaagcauaaguauac

SEQ ID NO: 2791622 - RNA, 22 nt, Human
cauaaagccauguuuccucuuu

SEQ ID NO: 2791623 - RNA, 20 nt, Human
cauaaauuuacuuuacacaa

SEQ ID NO: 2791624 - RNA, 13 nt, Human
cauaaaugaagca

SEQ ID NO: 2791625 - RNA, 14 nt, Human
cauaaaugaagcag

SEQ ID NO: 2791626 - RNA, 14 nt, Human
cauaaaugcagccc

SEQ ID NO: 2791627 - RNA, 15 nt, Human
cauaaaugcagccca

SEQ ID NO: 2791628 - RNA, 16 nt, Human
cauaaaugcagcccau

SEQ ID NO: 2791629 - RNA, 18 nt, Human
cauaaaugcagcccauuu

SEQ ID NO: 2791630 - RNA, 21 nt, Human
cauaaaugcagcccauuucuc

SEQ ID NO: 2791631 - RNA, 18 nt, Human
cauaaauaugcagugaua

SEQ ID NO: 2791632 - RNA, 22 nt, Human
cauaaagaggcguugcuuucac

SEQ ID NO: 2791633 - RNA, 16 nt, Human
cauaaauccaguucua

SEQ ID NO: 2791634 - RNA, 15 nt, Human
cauaaacauucuuuu

SEQ ID NO: 2791635 - RNA, 19 nt, Human
cauaaaaacauuuuaaaaa

SEQ ID NO: 2791636 - RNA, 18 nt, Human
cauaaacaaugaugcccu

SEQ ID NO: 2791637 - RNA, 23 nt, Human
cauaaaaagccugcaauuucaua

SEQ ID NO: 2791638 - RNA, 21 nt, Human
cauaaaaaggacaucagcaaa

SEQ ID NO: 2791639 - RNA, 20 nt, Human
cauaaaaaggacaucagcaa

SEQ ID NO: 2791640 - RNA, 19 nt, Human
cauaaaaaggacaucagca

SEQ ID NO: 2791641 - RNA, 13 nt, Human
cauaaaaaggaca

SEQ ID NO: 2791642 - RNA, 22 nt, Human
cauaaaaaggacaucagcaaac

SEQ ID NO: 2791643 - RNA, 12 nt, Human
cauaaaacaggu

SEQ ID NO: 2791644 - RNA, 14 nt, Human
cauaaaaucaaaac

SEQ ID NO: 2791645 - RNA, 22 nt, Human
cauaaaaucaaaacaagugaaa

SEQ ID NO: 2791646 - RNA, 20 nt, Human
cauaaaauaaaguauauaua

SEQ ID NO: 2791647 - RNA, 14 nt, Human
cauaaaagaauuuu

SEQ ID NO: 2791648 - RNA, 19 nt, Human
cauaaaauaaaguauauau

SEQ ID NO: 2791649 - RNA, 20 nt, Human
caguugaaugacaacagaag

SEQ ID NO: 2791650 - RNA, 21 nt, Human
caguugaaugacaacagaagc

SEQ ID NO: 2791651 - RNA, 20 nt, Human
caguugcagcccuugugaug

SEQ ID NO: 2791652 - RNA, 20 nt, Human
caguugagucgucaucacuu

SEQ ID NO: 2791653 - RNA, 19 nt, Human
caguuuugacaucagccag

SEQ ID NO: 2791654 - RNA, 20 nt, Human
caguuuugacaucagccagc

SEQ ID NO: 2791655 - RNA, 23 nt, Human
caguuuugacaucagccagcugc

SEQ ID NO: 2791656 - RNA, 17 nt, Human
caguuuuuggaguguua

SEQ ID NO: 2791657 - RNA, 19 nt, Human
caguuuugguguguaacuu

SEQ ID NO: 2791658 - RNA, 19 nt, Human
caguuuuuaacucuacugu

SEQ ID NO: 2791659 - RNA, 22 nt, Human
caguuuuuaacucuacugugua

SEQ ID NO: 2791660 - RNA, 12 nt, Human
caguuuuucagg

SEQ ID NO: 2791661 - RNA, 15 nt, Human
caguuuuucaggagc

SEQ ID NO: 2791662 - RNA, 12 nt, Human
caguugugcagc

SEQ ID NO: 2791663 - RNA, 17 nt, Human
caguuguggugugagua

SEQ ID NO: 2791664 - RNA, 21 nt, Human
caguuguggugugaguaucag

SEQ ID NO: 2791665 - RNA, 22 nt, Human
caguuguggugugaguaucaga

SEQ ID NO: 2791666 - RNA, 17 nt, Human
caguuguguuuguugcu

SEQ ID NO: 2791667 - RNA, 22 nt, Human
caguuguguuuguugcuggcuu

SEQ ID NO: 2791668 - RNA, 23 nt, Human
caguuguguuuguugcuggcuug

SEQ ID NO: 2791669 - RNA, 14 nt, Human
caguugguuguguc

SEQ ID NO: 2791670 - RNA, 17 nt, Human
caguugguugugucuuu

SEQ ID NO: 2791671 - RNA, 18 nt, Human
caguugguugugucuuuu

SEQ ID NO: 2791672 - RNA, 21 nt, Human
caguuguaggguuacagagac

SEQ ID NO: 2791673 - RNA, 23 nt, Human
caguuguaggguuacagagaccu

SEQ ID NO: 2791674 - RNA, 19 nt, Human
caguuggguggaugccugg

SEQ ID NO: 2791675 - RNA, 18 nt, Human
caguuggguggaugccug

SEQ ID NO: 2791676 - RNA, 12 nt, Human
caguugccacca

SEQ ID NO: 2791677 - RNA, 15 nt, Human
caguugccaccaccu

SEQ ID NO: 2791678 - RNA, 16 nt, Human
caguugccaccaccuc

SEQ ID NO: 2791679 - RNA, 18 nt, Human
caguugccaccaccucug

SEQ ID NO: 2791680 - RNA, 21 nt, Human
caguugccaccaccucugugg

SEQ ID NO: 2791681 - RNA, 22 nt, Human
caguugccaccaccucuguggc

SEQ ID NO: 2791682 - RNA, 15 nt, Human
caguugcuaaacacu

SEQ ID NO: 2791683 - RNA, 16 nt, Human
caguugcuaaacacug

SEQ ID NO: 2791684 - RNA, 21 nt, Human
caguugcuaaacacugcgcuu

SEQ ID NO: 2791685 - RNA, 16 nt, Human
caguuggguggaugcc

SEQ ID NO: 2791686 - RNA, 16 nt, Human
caguuggccuucagaa

SEQ ID NO: 2791687 - RNA, 21 nt, Human
caguuggaaauaauaaaagau

SEQ ID NO: 2791688 - RNA, 21 nt, Human
cauaccuuucacagcuuuuau

SEQ ID NO: 2791689 - RNA, 17 nt, Human
cauaccuuuuauuuuuu

SEQ ID NO: 2791690 - RNA, 22 nt, Human
cauaccuuuuauuuuuuuuaau

SEQ ID NO: 2791691 - RNA, 16 nt, Human
cauacgaaacacaaac

SEQ ID NO: 2791692 - RNA, 19 nt, Human
cauacggucagguuuaaca

SEQ ID NO: 2791693 - RNA, 23 nt, Human
cauacggucagguuuaacauuug

SEQ ID NO: 2791694 - RNA, 22 nt, Human
cauaccucagaauguaaaagaa

SEQ ID NO: 2791695 - RNA, 22 nt, Human
cauacccuggccgcccccugcc

SEQ ID NO: 2791696 - RNA, 17 nt, Human
cauaccuaaguacugua

SEQ ID NO: 2791697 - RNA, 18 nt, Human
cauaccuaaguacuguaa

SEQ ID NO: 2791698 - RNA, 13 nt, Human
cauaccucugacc

SEQ ID NO: 2791699 - RNA, 17 nt, Human
cauaccucugaccaaca

SEQ ID NO: 2791700 - RNA, 23 nt, Human
cauacuacauugaguagacacau

SEQ ID NO: 2791701 - RNA, 18 nt, Human
cauacuacugaaacagau

SEQ ID NO: 2791702 - RNA, 20 nt, Human
cauacuacugaaacagauuu

SEQ ID NO: 2791703 - RNA, 22 nt, Human
cauacuacugaaacagauuuca

SEQ ID NO: 2791704 - RNA, 20 nt, Human
cauacuaauuauacccccug

SEQ ID NO: 2791705 - RNA, 12 nt, Human
cauacucagccu

SEQ ID NO: 2791706 - RNA, 14 nt, Human
cauacucagccugc

SEQ ID NO: 2791707 - RNA, 15 nt, Human
cauacucagccugcu

SEQ ID NO: 2791708 - RNA, 17 nt, Human
cauacucagccugcugc

SEQ ID NO: 2791709 - RNA, 18 nt, Human
cauacucagccugcugcc

SEQ ID NO: 2791710 - RNA, 19 nt, Human
cauacucagccugcugccc

SEQ ID NO: 2791711 - RNA, 20 nt, Human
cauacucagccugcugccca

SEQ ID NO: 2791712 - RNA, 21 nt, Human
cauacucagccugcugcccag

SEQ ID NO: 2791713 - RNA, 17 nt, Human
caucuagguaauuuuua

SEQ ID NO: 2791714 - RNA, 18 nt, Human
caucuagguaauuuuuac

SEQ ID NO: 2791715 - RNA, 18 nt, Human
caucuaguacuugaaaaa

SEQ ID NO: 2791716 - RNA, 14 nt, Human
caucuauaaagaag

SEQ ID NO: 2791717 - RNA, 14 nt, Human
caucuauaaauugu

SEQ ID NO: 2791718 - RNA, 20 nt, Human
caucuaugggagagugucaa

SEQ ID NO: 2791719 - RNA, 19 nt, Human
caucuaugucccuugcugu

SEQ ID NO: 2791720 - RNA, 11 nt, Human
caucuauuuug

SEQ ID NO: 2791721 - RNA, 13 nt, Human
caucuauuuugau

SEQ ID NO: 2791722 - RNA, 14 nt, Human
caucuauuuugaug

SEQ ID NO: 2791723 - RNA, 17 nt, Human
caucuauuuugaugcag

SEQ ID NO: 2791724 - RNA, 19 nt, Human
caucuauuuugaugcagca

SEQ ID NO: 2791725 - RNA, 21 nt, Human
caucuauuuugaugcagcauu

SEQ ID NO: 2791726 - RNA, 22 nt, Human
caucuauuuugaugcagcauuu

SEQ ID NO: 2791727 - RNA, 23 nt, Human
caucuauuuugaugcagcauuug

SEQ ID NO: 2791728 - RNA, 16 nt, Human
caucuauuuuggauug

SEQ ID NO: 2791729 - RNA, 14 nt, Human
caucucaaaauuau

SEQ ID NO: 2791730 - RNA, 14 nt, Human
caucuauuuuggau

SEQ ID NO: 2791731 - RNA, 22 nt, Human
caucucaaggaauaaugggcuu

SEQ ID NO: 2791732 - RNA, 18 nt, Human
caucucaggagauuucau

SEQ ID NO: 2791733 - RNA, 19 nt, Human
caucucacuggaugcaaag

SEQ ID NO: 2791734 - RNA, 20 nt, Human
caucucagccuaccaugaga

SEQ ID NO: 2791735 - RNA, 13 nt, Human
caucucagcccac

SEQ ID NO: 2791736 - RNA, 17 nt, Human
caucucauuccaacuuc

SEQ ID NO: 2791737 - RNA, 23 nt, Human
caucucauguaucaucuggauag

SEQ ID NO: 2791738 - RNA, 22 nt, Human
caucucauucaaaccccacccu

SEQ ID NO: 2791739 - RNA, 20 nt, Human
caucucauguaucaucugga

SEQ ID NO: 2791740 - RNA, 12 nt, Human
caucucaggggc

SEQ ID NO: 2791741 - RNA, 15 nt, Human
caucucaggggccag

SEQ ID NO: 2791742 - RNA, 16 nt, Human
caucucaggggccaga

SEQ ID NO: 2791743 - RNA, 19 nt, Human
caucucaggggccagagga

SEQ ID NO: 2791744 - RNA, 18 nt, Human
caucucaggccucccuca

SEQ ID NO: 2791745 - RNA, 14 nt, Human
cauccuccuggaac

SEQ ID NO: 2791746 - RNA, 16 nt, Human
cauccuccuggaaccu

SEQ ID NO: 2791747 - RNA, 21 nt, Human
cauccuccuggaaccuugcug

SEQ ID NO: 2791748 - RNA, 22 nt, Human
cauccuccuggaaccuugcugu

SEQ ID NO: 2791749 - RNA, 23 nt, Human
cauccuccuggaaccuugcuguc

SEQ ID NO: 2791750 - RNA, 20 nt, Human
cauccuccguccagccgcca

SEQ ID NO: 2791751 - RNA, 19 nt, Human
cauccuccguccagccgcc

SEQ ID NO: 2791752 - RNA, 21 nt, Human
caucuaauucucuguggaaug

SEQ ID NO: 2791753 - RNA, 23 nt, Human
caucuaauagcggguuacuuuca

SEQ ID NO: 2791754 - RNA, 20 nt, Human
caucuaaguuauaagacucu

SEQ ID NO: 2791755 - RNA, 14 nt, Human
caucuaagcugcag

SEQ ID NO: 2791756 - RNA, 15 nt, Human
caucuaagcugcagc

SEQ ID NO: 2791757 - RNA, 16 nt, Human
caucuaagcugcagcu

SEQ ID NO: 2791758 - RNA, 17 nt, Human
caucuaagcugcagcuu

SEQ ID NO: 2791759 - RNA, 20 nt, Human
caucuaagcugcagcuuccu

SEQ ID NO: 2791760 - RNA, 21 nt, Human
caucuaagcugcagcuuccug

SEQ ID NO: 2791761 - RNA, 23 nt, Human
caucuaagcugcagcuuccuguc

SEQ ID NO: 2791762 - RNA, 16 nt, Human
cauccucaaacacugc

SEQ ID NO: 2791763 - RNA, 17 nt, Human
cauccucaaacacugca

SEQ ID NO: 2791764 - RNA, 18 nt, Human
cauccucaaacacugcag

SEQ ID NO: 2791765 - RNA, 19 nt, Human
cauccucaaacacugcagg

SEQ ID NO: 2791766 - RNA, 17 nt, Human
cauccuauccacugggc

SEQ ID NO: 2791767 - RNA, 14 nt, Human
cauccuacccuuuu

SEQ ID NO: 2791768 - RNA, 16 nt, Human
cauccuacaagacaca

SEQ ID NO: 2791769 - RNA, 22 nt, Human
cauccucaaacacugcaggcau

SEQ ID NO: 2791770 - RNA, 19 nt, Human
cauccucaagaucauucag

SEQ ID NO: 2791771 - RNA, 15 nt, Human
cauccucagaugcuc

SEQ ID NO: 2791772 - RNA, 19 nt, Human
cauccucagaugcucaaag

SEQ ID NO: 2791773 - RNA, 19 nt, Human
cauccuccaguaccuugcu

SEQ ID NO: 2791774 - RNA, 16 nt, Human
cauccuccguccagcc

SEQ ID NO: 2791775 - RNA, 20 nt, Human
cauccuccgccucccggguu

SEQ ID NO: 2791776 - RNA, 13 nt, Human
caucuucugccuu

SEQ ID NO: 2791777 - RNA, 13 nt, Human
caucuucccgaga

SEQ ID NO: 2791778 - RNA, 14 nt, Human
caucuucgggacca

SEQ ID NO: 2791779 - RNA, 14 nt, Human
caucuucccaaccc

SEQ ID NO: 2791780 - RNA, 15 nt, Human
caucuucgggaccag

SEQ ID NO: 2791781 - RNA, 18 nt, Human
caucuucgggaccaggau

SEQ ID NO: 2791782 - RNA, 15 nt, Human
caucuucgucuucac

SEQ ID NO: 2791783 - RNA, 17 nt, Human
caucuucgucuucacuc

SEQ ID NO: 2791784 - RNA, 19 nt, Human
caucuucgucuucacucuu

SEQ ID NO: 2791785 - RNA, 21 nt, Human
caucuucgucuucacucuuag

SEQ ID NO: 2791786 - RNA, 23 nt, Human
caucuucgucuucacucuuaggc

SEQ ID NO: 2791787 - RNA, 21 nt, Human
caucuucuaaacccaauccaa

SEQ ID NO: 2791788 - RNA, 20 nt, Human
caucuugcucugcugacaga

SEQ ID NO: 2791789 - RNA, 23 nt, Human
caucuuguaauuuccagcuuucu

SEQ ID NO: 2791790 - RNA, 17 nt, Human
caucuuguauacacaua

SEQ ID NO: 2791791 - RNA, 12 nt, Human
caucuugugaaa

SEQ ID NO: 2791792 - RNA, 13 nt, Human
caucuugugaaau

SEQ ID NO: 2791793 - RNA, 16 nt, Human
caucuuggagggacca

SEQ ID NO: 2791794 - RNA, 13 nt, Human
caucuugcucugc

SEQ ID NO: 2791795 - RNA, 14 nt, Human
caucuugcucugcu

SEQ ID NO: 2791796 - RNA, 15 nt, Human
caucuuauagcacuu

SEQ ID NO: 2791797 - RNA, 18 nt, Human
caucuuauagcacuuuga

SEQ ID NO: 2791798 - RNA, 19 nt, Human
caucuuauagcacuuugaa

SEQ ID NO: 2791799 - RNA, 21 nt, Human
caucuuauagcacuuugaaau

SEQ ID NO: 2791800 - RNA, 18 nt, Human
caucuuaucaaggacucu

SEQ ID NO: 2791801 - RNA, 20 nt, Human
caucuuaugcuaacuguaga

SEQ ID NO: 2791802 - RNA, 21 nt, Human
caucuuaugcuaacuguagau

SEQ ID NO: 2791803 - RNA, 13 nt, Human
caucuucacccag

SEQ ID NO: 2791804 - RNA, 17 nt, Human
caucuucacccaggccu

SEQ ID NO: 2791805 - RNA, 18 nt, Human
caucuucacccaggccua

SEQ ID NO: 2791806 - RNA, 20 nt, Human
caucuuauuuucauguauau

SEQ ID NO: 2791807 - RNA, 14 nt, Human
caucugauaucuau

SEQ ID NO: 2791808 - RNA, 22 nt, Human
caucugauaucuauaguagaca

SEQ ID NO: 2791809 - RNA, 18 nt, Human
caucugaugccgugaucc

SEQ ID NO: 2791810 - RNA, 13 nt, Human
caucugauuugca

SEQ ID NO: 2791811 - RNA, 15 nt, Human
caucugauuugcaua

SEQ ID NO: 2791812 - RNA, 19 nt, Human
caucugauuugcauauuca

SEQ ID NO: 2791813 - RNA, 16 nt, Human
caucugaggcauccag

SEQ ID NO: 2791814 - RNA, 17 nt, Human
caucugaggcauccagc

SEQ ID NO: 2791815 - RNA, 18 nt, Human
caucugaggcauccagca

SEQ ID NO: 2791816 - RNA, 20 nt, Human
caucugagguccugugaucu

SEQ ID NO: 2791817 - RNA, 23 nt, Human
caucugagguccugugaucuuau

SEQ ID NO: 2791818 - RNA, 13 nt, Human
caucucuguccca

SEQ ID NO: 2791819 - RNA, 18 nt, Human
caucucuguacuuugcuu

SEQ ID NO: 2791820 - RNA, 20 nt, Human
caucucuugaggccaggagu

SEQ ID NO: 2791821 - RNA, 15 nt, Human
caucucuugaggcca

SEQ ID NO: 2791822 - RNA, 22 nt, Human
caucucuucuggguuccuuccu

SEQ ID NO: 2791823 - RNA, 14 nt, Human
caucucccacccug

SEQ ID NO: 2791824 - RNA, 15 nt, Human
caucucccacccugu

SEQ ID NO: 2791825 - RNA, 16 nt, Human
caucucccacccugua

SEQ ID NO: 2791826 - RNA, 21 nt, Human
caucucccacccuguaccuca

SEQ ID NO: 2791827 - RNA, 14 nt, Human
caucuccacuccag

SEQ ID NO: 2791828 - RNA, 14 nt, Human
caucccuccccagu

SEQ ID NO: 2791829 - RNA, 13 nt, Human
caucccuccccag

SEQ ID NO: 2791830 - RNA, 15 nt, Human
cauccagguucagcu

SEQ ID NO: 2791831 - RNA, 19 nt, Human
cauccagggcucugaccag

SEQ ID NO: 2791832 - RNA, 22 nt, Human
caucccuacccccuaagagcca

SEQ ID NO: 2791833 - RNA, 14 nt, Human
caucccuacccccu

SEQ ID NO: 2791834 - RNA, 12 nt, Human
cauccagcaaga

SEQ ID NO: 2791835 - RNA, 13 nt, Human
cauccagcaagaa

SEQ ID NO: 2791836 - RNA, 14 nt, Human
cauccagcuugcca

SEQ ID NO: 2791837 - RNA, 15 nt, Human
cauccagcuugccag

SEQ ID NO: 2791838 - RNA, 15 nt, Human
cauccagcagucucu

SEQ ID NO: 2791839 - RNA, 16 nt, Human
cauccagcagucucug

SEQ ID NO: 2791840 - RNA, 17 nt, Human
cauccagcagucucugc

SEQ ID NO: 2791841 - RNA, 18 nt, Human
cauccagcagucucugcc

SEQ ID NO: 2791842 - RNA, 19 nt, Human
cauccagcagucucugccu

SEQ ID NO: 2791843 - RNA, 20 nt, Human
cauccagcagucucugccuu

SEQ ID NO: 2791844 - RNA, 21 nt, Human
cauccagcagucucugccuug

SEQ ID NO: 2791845 - RNA, 15 nt, Human
cauccacucuacccu

SEQ ID NO: 2791846 - RNA, 14 nt, Human
cauccacucuaccc

SEQ ID NO: 2791847 - RNA, 17 nt, Human
cauccacauuguuuuaa

SEQ ID NO: 2791848 - RNA, 18 nt, Human
cauccacauuguuuuaaa

SEQ ID NO: 2791849 - RNA, 14 nt, Human
cauccaccccaucc

SEQ ID NO: 2791850 - RNA, 18 nt, Human
cauccaccgcugcuccac

SEQ ID NO: 2791851 - RNA, 12 nt, Human
cauccaccccau

SEQ ID NO: 2791852 - RNA, 21 nt, Human
cauccacauuguuuuaaaaag

SEQ ID NO: 2791853 - RNA, 12 nt, Human
cauccaccccag

SEQ ID NO: 2791854 - RNA, 20 nt, Human
cauccaaucuauuauuucuc

SEQ ID NO: 2791855 - RNA, 22 nt, Human
caucacaggguugggcccagau

SEQ ID NO: 2791856 - RNA, 13 nt, Human
caucauugcagau

SEQ ID NO: 2791857 - RNA, 18 nt, Human
caucauugcugucugcag

SEQ ID NO: 2791858 - RNA, 21 nt, Human
caucauugcugucugcagccu

SEQ ID NO: 2791859 - RNA, 13 nt, Human
caucauuguuucu

SEQ ID NO: 2791860 - RNA, 17 nt, Human
caucauuguuucugcau

SEQ ID NO: 2791861 - RNA, 23 nt, Human
cauccaaaauaguuaagacauga

SEQ ID NO: 2791862 - RNA, 17 nt, Human
caucauuuuuguaucua

SEQ ID NO: 2791863 - RNA, 18 nt, Human
cauccaacuccagcaacu

SEQ ID NO: 2791864 - RNA, 17 nt, Human
cauccaacuccagcaac

SEQ ID NO: 2791865 - RNA, 16 nt, Human
cauccaacuccagcaa

SEQ ID NO: 2791866 - RNA, 15 nt, Human
cauccaacuccagca

SEQ ID NO: 2791867 - RNA, 14 nt, Human
cauccaacuccagc

SEQ ID NO: 2791868 - RNA, 16 nt, Human
cauccaaccuucccaa

SEQ ID NO: 2791869 - RNA, 15 nt, Human
cauccaaguggcaua

SEQ ID NO: 2791870 - RNA, 15 nt, Human
cauccaacuccagga

SEQ ID NO: 2791871 - RNA, 14 nt, Human
cauccaacuuaugu

SEQ ID NO: 2791872 - RNA, 14 nt, Human
cauccaaccuuccc

SEQ ID NO: 2791873 - RNA, 21 nt, Human
cauccaaccccccaccugcca

SEQ ID NO: 2791874 - RNA, 19 nt, Human
cauccaaccccccaccugc

SEQ ID NO: 2791875 - RNA, 16 nt, Human
cauccaaccccccacc

SEQ ID NO: 2791876 - RNA, 15 nt, Human
cauccaaccccccac

SEQ ID NO: 2791877 - RNA, 14 nt, Human
cauccuaacuccau

SEQ ID NO: 2791878 - RNA, 21 nt, Human
cauccuaacuccaugucucug

SEQ ID NO: 2791879 - RNA, 16 nt, Human
cauccuaaaagccacc

SEQ ID NO: 2791880 - RNA, 19 nt, Human
cauccuaaaagccacccca

SEQ ID NO: 2791881 - RNA, 14 nt, Human
cauccuaagaaaua

SEQ ID NO: 2791882 - RNA, 15 nt, Human
cauccuaagaaauau

SEQ ID NO: 2791883 - RNA, 16 nt, Human
cauccuaagaaauaug

SEQ ID NO: 2791884 - RNA, 17 nt, Human
cauccuaagaaauaugu

SEQ ID NO: 2791885 - RNA, 20 nt, Human
cauccuaagaaauaugugag

SEQ ID NO: 2791886 - RNA, 22 nt, Human
cauccuaagaaauaugugagau

SEQ ID NO: 2791887 - RNA, 19 nt, Human
caucaaucaaauaaguauu

SEQ ID NO: 2791888 - RNA, 22 nt, Human
caucaauaguguccuaugcaau

SEQ ID NO: 2791889 - RNA, 23 nt, Human
caucaauaguguccuaugcaaua

SEQ ID NO: 2791890 - RNA, 15 nt, Human
caucacaauacagau

SEQ ID NO: 2791891 - RNA, 11 nt, Human
caucaauuccc

SEQ ID NO: 2791892 - RNA, 14 nt, Human
caucaauucccauu

SEQ ID NO: 2791893 - RNA, 19 nt, Human
caucacaggguugggccca

SEQ ID NO: 2791894 - RNA, 20 nt, Human
caucacagggcagagccggg

SEQ ID NO: 2791895 - RNA, 15 nt, Human
caucacagggcagag

SEQ ID NO: 2791896 - RNA, 13 nt, Human
caucacagggcag

SEQ ID NO: 2791897 - RNA, 22 nt, Human
caucacaggacacggggcagug

SEQ ID NO: 2791898 - RNA, 17 nt, Human
caucacagcuaacaauu

SEQ ID NO: 2791899 - RNA, 12 nt, Human
caucacacacac

SEQ ID NO: 2791900 - RNA, 12 nt, Human
caucacacacau

SEQ ID NO: 2791901 - RNA, 13 nt, Human
caucacacacaug

SEQ ID NO: 2791902 - RNA, 15 nt, Human
caucacacacaugga

SEQ ID NO: 2791903 - RNA, 20 nt, Human
caucacacacauggaaaccc

SEQ ID NO: 2791904 - RNA, 11 nt, Human
caucacacaca

SEQ ID NO: 2791905 - RNA, 12 nt, Human
caucacagcagc

SEQ ID NO: 2791906 - RNA, 13 nt, Human
caucacagcagcc

SEQ ID NO: 2791907 - RNA, 14 nt, Human
caucacagcagccu

SEQ ID NO: 2791908 - RNA, 16 nt, Human
caucacagcagccucc

SEQ ID NO: 2791909 - RNA, 19 nt, Human
caucacagcagccuccaac

SEQ ID NO: 2791910 - RNA, 21 nt, Human
caucaagaggugggagggccc

SEQ ID NO: 2791911 - RNA, 16 nt, Human
caucaaggcacugccu

SEQ ID NO: 2791912 - RNA, 13 nt, Human
caucaagacugga

SEQ ID NO: 2791913 - RNA, 17 nt, Human
caucaaggcacugccug

SEQ ID NO: 2791914 - RNA, 18 nt, Human
caucaaggcacugccuga

SEQ ID NO: 2791915 - RNA, 16 nt, Human
caucaaggggucacuu

SEQ ID NO: 2791916 - RNA, 17 nt, Human
caucaaggggucacuua

SEQ ID NO: 2791917 - RNA, 15 nt, Human
caucaagacuggaag

SEQ ID NO: 2791918 - RNA, 16 nt, Human
caucaagacuggaagg

SEQ ID NO: 2791919 - RNA, 14 nt, Human
caucaaacuguaaa

SEQ ID NO: 2791920 - RNA, 15 nt, Human
caucaaaaugcuuuu

SEQ ID NO: 2791921 - RNA, 13 nt, Human
caucaaaaugcuu

SEQ ID NO: 2791922 - RNA, 18 nt, Human
caucaaaaacuuuggagu

SEQ ID NO: 2791923 - RNA, 19 nt, Human
cauauuuuuuauaucugga

SEQ ID NO: 2791924 - RNA, 13 nt, Human
cauauuuuguaua

SEQ ID NO: 2791925 - RNA, 13 nt, Human
cauauuuucacag

SEQ ID NO: 2791926 - RNA, 15 nt, Human
cauaugcccacauuu

SEQ ID NO: 2791927 - RNA, 20 nt, Human
cauaugcccacauuuagucu

SEQ ID NO: 2791928 - RNA, 23 nt, Human
cauaugcccacauuuagucucuu

SEQ ID NO: 2791929 - RNA, 16 nt, Human
cauaugcaccuugugu

SEQ ID NO: 2791930 - RNA, 17 nt, Human
cauaugcaccuuguguc

SEQ ID NO: 2791931 - RNA, 18 nt, Human
cauaugcaccuugugucu

SEQ ID NO: 2791932 - RNA, 19 nt, Human
cauaugcaccuugugucug

SEQ ID NO: 2791933 - RNA, 20 nt, Human
cauaugcaccuugugucugu

SEQ ID NO: 2791934 - RNA, 21 nt, Human
cauaugcaccuugugucugua

SEQ ID NO: 2791935 - RNA, 23 nt, Human
cauaugcaccuugugucuguaca

SEQ ID NO: 2791936 - RNA, 15 nt, Human
cauauuugagacuag

SEQ ID NO: 2791937 - RNA, 13 nt, Human
cauauuuacuacc

SEQ ID NO: 2791938 - RNA, 16 nt, Human
cauauuuacuaccuua

SEQ ID NO: 2791939 - RNA, 17 nt, Human
cauauuuacuaccuuau

SEQ ID NO: 2791940 - RNA, 12 nt, Human
cauauuuaucca

SEQ ID NO: 2791941 - RNA, 21 nt, Human
cauauuuauccaaaaugugua

SEQ ID NO: 2791942 - RNA, 22 nt, Human
cauauuuauccaaaauguguau

SEQ ID NO: 2791943 - RNA, 17 nt, Human
cauauuuauccauuugu

SEQ ID NO: 2791944 - RNA, 14 nt, Human
cauauuuauuuucu

SEQ ID NO: 2791945 - RNA, 18 nt, Human
cauauuuauuuucuuuug

SEQ ID NO: 2791946 - RNA, 15 nt, Human
cauauaccuauaaug

SEQ ID NO: 2791947 - RNA, 17 nt, Human
cauauaccuauaaugug

SEQ ID NO: 2791948 - RNA, 18 nt, Human
cauauaccuauaaugugu

SEQ ID NO: 2791949 - RNA, 19 nt, Human
cauauaccuauaaugugug

SEQ ID NO: 2791950 - RNA, 20 nt, Human
cauauaccuauaaugugugu

SEQ ID NO: 2791951 - RNA, 21 nt, Human
cauauaccuauaaugugugua

SEQ ID NO: 2791952 - RNA, 22 nt, Human
cauauaccuauaauguguguau

SEQ ID NO: 2791953 - RNA, 16 nt, Human
cauauauacaggcaua

SEQ ID NO: 2791954 - RNA, 20 nt, Human
cauauauagacagcuuugac

SEQ ID NO: 2791955 - RNA, 21 nt, Human
cauauauagacagcuuugacu

SEQ ID NO: 2791956 - RNA, 22 nt, Human
cauauauagacagcuuugacug

SEQ ID NO: 2791957 - RNA, 12 nt, Human
cauauacacuug

SEQ ID NO: 2791958 - RNA, 13 nt, Human
cauauacacuugg

SEQ ID NO: 2791959 - RNA, 13 nt, Human
cauauacacacac

SEQ ID NO: 2791960 - RNA, 14 nt, Human
cauauacacacaca

SEQ ID NO: 2791961 - RNA, 15 nt, Human
cauauacacacacac

SEQ ID NO: 2791962 - RNA, 19 nt, Human
cauauauaacagauacauu

SEQ ID NO: 2791963 - RNA, 20 nt, Human
cauauauaacagauacauuu

SEQ ID NO: 2791964 - RNA, 24 nt, Human
cauauaaguuugaaggaaacaguu

SEQ ID NO: 2791965 - RNA, 22 nt, Human
cauauaaguuugaaggaaacag

SEQ ID NO: 2791966 - RNA, 23 nt, Human
cauauaaguuugaaggaaacagu

SEQ ID NO: 2791967 - RNA, 20 nt, Human
cauaguuuugaugacuggca

SEQ ID NO: 2791968 - RNA, 23 nt, Human
cauaucaaaaaguauuaaaacua

SEQ ID NO: 2791969 - RNA, 22 nt, Human
cauauauauguuuuaagaggca

SEQ ID NO: 2791970 - RNA, 20 nt, Human
cauaugacucacaugaugca

SEQ ID NO: 2791971 - RNA, 22 nt, Human
cauaugacucacaugaugcaua

SEQ ID NO: 2791972 - RNA, 15 nt, Human
cauaugacuugaucu

SEQ ID NO: 2791973 - RNA, 22 nt, Human
cauaugagccgugaacugugca

SEQ ID NO: 2791974 - RNA, 14 nt, Human
cauaucaugcuuug

SEQ ID NO: 2791975 - RNA, 16 nt, Human
cauauccaccaccucc

SEQ ID NO: 2791976 - RNA, 20 nt, Human
cauaugauuucacuagaaaa

SEQ ID NO: 2791977 - RNA, 21 nt, Human
cauaugauuucacuagaaaag

SEQ ID NO: 2791978 - RNA, 13 nt, Human
cauaugaucuguu

SEQ ID NO: 2791979 - RNA, 15 nt, Human
cauaugaucuguuuu

SEQ ID NO: 2791980 - RNA, 22 nt, Human
cauaguggcuuaaaacaacacu

SEQ ID NO: 2791981 - RNA, 15 nt, Human
cauaguggugcagag

SEQ ID NO: 2791982 - RNA, 11 nt, Human
cauagugcugg

SEQ ID NO: 2791983 - RNA, 13 nt, Human
cauagugcuggga

SEQ ID NO: 2791984 - RNA, 17 nt, Human
cauagugcugggaugga

SEQ ID NO: 2791985 - RNA, 13 nt, Human
cauaguguaaugu

SEQ ID NO: 2791986 - RNA, 15 nt, Human
cauauaaguuugaag

SEQ ID NO: 2791987 - RNA, 14 nt, Human
cauauaaguuugaa

SEQ ID NO: 2791988 - RNA, 20 nt, Human
cauauaaguuugaaggaaac

SEQ ID NO: 2791989 - RNA, 21 nt, Human
cauauaaguuugaaggaaaca

SEQ ID NO: 2791990 - RNA, 20 nt, Human
cauauaaacaucacacacac

SEQ ID NO: 2791991 - RNA, 14 nt, Human
cauauaaaauaaug

SEQ ID NO: 2791992 - RNA, 15 nt, Human
cauauaaaauaaugc

SEQ ID NO: 2791993 - RNA, 21 nt, Human
cauauaaaauaaugcaaagaa

SEQ ID NO: 2791994 - RNA, 22 nt, Human
cauauaaaauaaugcaaagaau

SEQ ID NO: 2791995 - RNA, 23 nt, Human
cauauaaaauaaugcaaagaauc

SEQ ID NO: 2791996 - RNA, 19 nt, Human
cauauaaacaucacacaca

SEQ ID NO: 2791997 - RNA, 14 nt, Human
cauaguuuuaaacu

SEQ ID NO: 2791998 - RNA, 18 nt, Human
cauaguuuuaaacucauu

SEQ ID NO: 2791999 - RNA, 19 nt, Human
cauaguuuuaaacucauuu

SEQ ID NO: 2792000 - RNA, 19 nt, Human
cauaguaugguggcugggu

SEQ ID NO: 2792001 - RNA, 18 nt, Human
cauaguaugguggcuggg

SEQ ID NO: 2792002 - RNA, 20 nt, Human
cauaguaugguggcuggguu

SEQ ID NO: 2792003 - RNA, 19 nt, Human
cauagugcauuguuucugu

SEQ ID NO: 2792004 - RNA, 22 nt, Human
cauagugaugguuccccuguuc

SEQ ID NO: 2792005 - RNA, 14 nt, Human
cauagauauuuuca

SEQ ID NO: 2792006 - RNA, 13 nt, Human
cauagaucuucug

SEQ ID NO: 2792007 - RNA, 17 nt, Human
cauaguaugguggcugg

SEQ ID NO: 2792008 - RNA, 14 nt, Human
cauagaguuuaaca

SEQ ID NO: 2792009 - RNA, 17 nt, Human
cauagaguccccccucc

SEQ ID NO: 2792010 - RNA, 23 nt, Human
cauagagugacuccaagaacaau

SEQ ID NO: 2792011 - RNA, 15 nt, Human
cauagaguuuaacac

SEQ ID NO: 2792012 - RNA, 18 nt, Human
cauagaguuuaacacaag

SEQ ID NO: 2792013 - RNA, 17 nt, Human
cauagagauuugucuaa

SEQ ID NO: 2792014 - RNA, 19 nt, Human
cauacugagggaccaacug

SEQ ID NO: 2792015 - RNA, 15 nt, Human
cauacugagggacca

SEQ ID NO: 2792016 - RNA, 19 nt, Human
cauacugagccaaguauaa

SEQ ID NO: 2792017 - RNA, 22 nt, Human
cauacugagccaaguauaauuu

SEQ ID NO: 2792018 - RNA, 23 nt, Human
cauacuccaucaguuagagcuga

SEQ ID NO: 2792019 - RNA, 18 nt, Human
cauacucauuucuaaaag

SEQ ID NO: 2792020 - RNA, 20 nt, Human
cauacucauuucuaaaagaa

SEQ ID NO: 2792021 - RNA, 21 nt, Human
cauacucauuucuaaaagaau

SEQ ID NO: 2792022 - RNA, 15 nt, Human
cauacuggacucuuc

SEQ ID NO: 2792023 - RNA, 20 nt, Human
cauacugagggaccaacugg

SEQ ID NO: 2792024 - RNA, 13 nt, Human
cauacuuaucucu

SEQ ID NO: 2792025 - RNA, 16 nt, Human
cauacuuaucucucug

SEQ ID NO: 2792026 - RNA, 13 nt, Human
cauacuggccugg

SEQ ID NO: 2792027 - RNA, 15 nt, Human
cauacuggccuggac

SEQ ID NO: 2792028 - RNA, 18 nt, Human
cauacuggccuggacugu

SEQ ID NO: 2792029 - RNA, 22 nt, Human
cauacuggccuggacuguuuuc

SEQ ID NO: 2792030 - RNA, 14 nt, Human
cauagaacugggua

SEQ ID NO: 2792031 - RNA, 15 nt, Human
cauagaacuggguaa

SEQ ID NO: 2792032 - RNA, 16 nt, Human
cauagaacuggguaaa

SEQ ID NO: 2792033 - RNA, 19 nt, Human
cauagaacuggguaaaugc

SEQ ID NO: 2792034 - RNA, 20 nt, Human
cauagaacuggguaaaugca

SEQ ID NO: 2792035 - RNA, 23 nt, Human
cauagaacuggguaaaugcaaag

SEQ ID NO: 2792036 - RNA, 23 nt, Human
cauagaaauguaacuuuuguaag

SEQ ID NO: 2792037 - RNA, 17 nt, Human
cauacuuucauccugac

SEQ ID NO: 2792038 - RNA, 21 nt, Human
cauacuuucauccugacucug

SEQ ID NO: 2792039 - RNA, 22 nt, Human
cauacuuucauccugacucugc

SEQ ID NO: 2792040 - RNA, 12 nt, Human
cauacuuugucu

SEQ ID NO: 2792041 - RNA, 13 nt, Human
cauacuuugucug

SEQ ID NO: 2792042 - RNA, 14 nt, Human
cauacuuugucuga

SEQ ID NO: 2792043 - RNA, 16 nt, Human
cauacuuugucugaaa

SEQ ID NO: 2792044 - RNA, 18 nt, Human
cauacuuugucugaaaaa

SEQ ID NO: 2792045 - RNA, 11 nt, Human
cauagaaaaau

SEQ ID NO: 2792046 - RNA, 14 nt, Human
cauagaaacaugac

SEQ ID NO: 2792047 - RNA, 15 nt, Human
cauagaaacaugaca

SEQ ID NO: 2792048 - RNA, 16 nt, Human
cauagaaacaugacac

SEQ ID NO: 2792049 - RNA, 17 nt, Human
cauagaaacaugacacu

SEQ ID NO: 2792050 - RNA, 18 nt, Human
cauagaaacaugacacug

SEQ ID NO: 2792051 - RNA, 19 nt, Human
cauagaaacaugacacuga

SEQ ID NO: 2792052 - RNA, 20 nt, Human
cauagaaacaugacacugac

SEQ ID NO: 2792053 - RNA, 18 nt, Human
cauacuuaucucucugug

SEQ ID NO: 2792054 - RNA, 20 nt, Human
cauacuuaucucucugugcu

SEQ ID NO: 2792055 - RNA, 22 nt, Human
cauacuuaucucucugugcugu

SEQ ID NO: 2792056 - RNA, 14 nt, Human
cauacuuucauccu

SEQ ID NO: 2792057 - RNA, 13 nt, Human
caugcggucgggc

SEQ ID NO: 2792058 - RNA, 15 nt, Human
caugcuaagcaagcu

SEQ ID NO: 2792059 - RNA, 16 nt, Human
caugcuaagcaagcua

SEQ ID NO: 2792060 - RNA, 22 nt, Human
caugcuaagcaagcuaaccuua

SEQ ID NO: 2792061 - RNA, 20 nt, Human
caugccugccccccucaucu

SEQ ID NO: 2792062 - RNA, 13 nt, Human
caugccuggcuuc

SEQ ID NO: 2792063 - RNA, 20 nt, Human
caugccugccccaaacaaau

SEQ ID NO: 2792064 - RNA, 12 nt, Human
caugccuugugc

SEQ ID NO: 2792065 - RNA, 20 nt, Human
caugccuugugcuguuaaua

SEQ ID NO: 2792066 - RNA, 14 nt, Human
caugccuggcuucg

SEQ ID NO: 2792067 - RNA, 21 nt, Human
caugccuguccagccugggca

SEQ ID NO: 2792068 - RNA, 23 nt, Human
caugccuguccagccugggcagc

SEQ ID NO: 2792069 - RNA, 13 nt, Human
caugccuguggcu

SEQ ID NO: 2792070 - RNA, 14 nt, Human
caugccuguggcug

SEQ ID NO: 2792071 - RNA, 15 nt, Human
caugccuguggcugc

SEQ ID NO: 2792072 - RNA, 16 nt, Human
caugccuguggcugcg

SEQ ID NO: 2792073 - RNA, 17 nt, Human
caugccuguggcugcgc

SEQ ID NO: 2792074 - RNA, 19 nt, Human
caugccuguggcugcgcuu

SEQ ID NO: 2792075 - RNA, 20 nt, Human
caugccuguccagccugggc

SEQ ID NO: 2792076 - RNA, 18 nt, Human
caugccuguccagccugg

SEQ ID NO: 2792077 - RNA, 17 nt, Human
caugccuguccagccug

SEQ ID NO: 2792078 - RNA, 16 nt, Human
caugccuguccagccu

SEQ ID NO: 2792079 - RNA, 22 nt, Human
caugcuucaauaguucaaggaa

SEQ ID NO: 2792080 - RNA, 14 nt, Human
caugcuucaucauu

SEQ ID NO: 2792081 - RNA, 23 nt, Human
caugcuucaucauucccucucau

SEQ ID NO: 2792082 - RNA, 15 nt, Human
caugcuuaugacaau

SEQ ID NO: 2792083 - RNA, 19 nt, Human
caugcugugauugugccua

SEQ ID NO: 2792084 - RNA, 12 nt, Human
cauggacacucc

SEQ ID NO: 2792085 - RNA, 18 nt, Human
cauggaauggacauccug

SEQ ID NO: 2792086 - RNA, 19 nt, Human
cauggaauggacauccugu

SEQ ID NO: 2792087 - RNA, 13 nt, Human
cauggacuuuaua

SEQ ID NO: 2792088 - RNA, 14 nt, Human
cauggacagaauuu

SEQ ID NO: 2792089 - RNA, 14 nt, Human
cauggacacuccag

SEQ ID NO: 2792090 - RNA, 18 nt, Human
cauggacacuccagugcc

SEQ ID NO: 2792091 - RNA, 19 nt, Human
cauggacacuccagugcca

SEQ ID NO: 2792092 - RNA, 15 nt, Human
caugggccuccugug

SEQ ID NO: 2792093 - RNA, 21 nt, Human
cauggcagaauaaucuuuggg

SEQ ID NO: 2792094 - RNA, 17 nt, Human
caugggccuccugugug

SEQ ID NO: 2792095 - RNA, 16 nt, Human
caugggccuccugugu

SEQ ID NO: 2792096 - RNA, 22 nt, Human
cauggaguagagguacuagaau

SEQ ID NO: 2792097 - RNA, 16 nt, Human
cauggucacacacuga

SEQ ID NO: 2792098 - RNA, 21 nt, Human
cauggucacacacugaugcuu

SEQ ID NO: 2792099 - RNA, 17 nt, Human
cauggucacacacugau

SEQ ID NO: 2792100 - RNA, 20 nt, Human
cauggagagcuggagccugg

SEQ ID NO: 2792101 - RNA, 21 nt, Human
cauggagagcuggagccuggu

SEQ ID NO: 2792102 - RNA, 17 nt, Human
cauggagguucuaaggc

SEQ ID NO: 2792103 - RNA, 18 nt, Human
cauggagguucuaaggcc

SEQ ID NO: 2792104 - RNA, 14 nt, Human
cauggaguugugau

SEQ ID NO: 2792105 - RNA, 13 nt, Human
cauggcacucccu

SEQ ID NO: 2792106 - RNA, 16 nt, Human
cauggcacucccucca

SEQ ID NO: 2792107 - RNA, 17 nt, Human
cauggcacucccuccag

SEQ ID NO: 2792108 - RNA, 18 nt, Human
cauggcacucccuccagc

SEQ ID NO: 2792109 - RNA, 19 nt, Human
cauggcacucccuccagca

SEQ ID NO: 2792110 - RNA, 20 nt, Human
cauggcacucccuccagcac

SEQ ID NO: 2792111 - RNA, 21 nt, Human
cauggcacucccuccagcaca

SEQ ID NO: 2792112 - RNA, 22 nt, Human
cauggcacucccuccagcacaa

SEQ ID NO: 2792113 - RNA, 21 nt, Human
cauggauuucugucuucucua

SEQ ID NO: 2792114 - RNA, 20 nt, Human
cauggcaccaaagccaccag

SEQ ID NO: 2792115 - RNA, 19 nt, Human
cauggcaccaaagccacca

SEQ ID NO: 2792116 - RNA, 17 nt, Human
cauggacuuuauaagcc

SEQ ID NO: 2792117 - RNA, 10 nt, Human
cauggagcca

SEQ ID NO: 2792118 - RNA, 16 nt, Human
cauggagguucuaagg

SEQ ID NO: 2792119 - RNA, 16 nt, Human
cauggagacgcauuuc

SEQ ID NO: 2792120 - RNA, 13 nt, Human
cauggagagcugg

SEQ ID NO: 2792121 - RNA, 14 nt, Human
cauggagagcugga

SEQ ID NO: 2792122 - RNA, 16 nt, Human
cauggagagcuggagc

SEQ ID NO: 2792123 - RNA, 17 nt, Human
cauggagagcuggagcc

SEQ ID NO: 2792124 - RNA, 12 nt, Human
caugccucugau

SEQ ID NO: 2792125 - RNA, 21 nt, Human
caugccucugauaugggacug

SEQ ID NO: 2792126 - RNA, 22 nt, Human
caugccucugauaugggacuga

SEQ ID NO: 2792127 - RNA, 23 nt, Human
caugccucugauaugggacugag

SEQ ID NO: 2792128 - RNA, 14 nt, Human
caugccugagagac

SEQ ID NO: 2792129 - RNA, 21 nt, Human
caugccugagagacauggcuu

SEQ ID NO: 2792130 - RNA, 23 nt, Human
caugcagucuaaaaugcuucagu

SEQ ID NO: 2792131 - RNA, 21 nt, Human
caugccuauaugagaagaaua

SEQ ID NO: 2792132 - RNA, 21 nt, Human
caugcccggcuaauuuuugua

SEQ ID NO: 2792133 - RNA, 17 nt, Human
caugcccggucccaccc

SEQ ID NO: 2792134 - RNA, 18 nt, Human
caugcccggucccacccc

SEQ ID NO: 2792135 - RNA, 20 nt, Human
caugcccggucccaccccuc

SEQ ID NO: 2792136 - RNA, 19 nt, Human
caugccccggccaccucug

SEQ ID NO: 2792137 - RNA, 20 nt, Human
caugccccggccaccucugc

SEQ ID NO: 2792138 - RNA, 21 nt, Human
caugccccggccaccucugcg

SEQ ID NO: 2792139 - RNA, 16 nt, Human
caugccccggccaccu

SEQ ID NO: 2792140 - RNA, 17 nt, Human
caugccccggccaccuc

SEQ ID NO: 2792141 - RNA, 18 nt, Human
caugccccggccaccucu

SEQ ID NO: 2792142 - RNA, 21 nt, Human
caugcccaccugcccaucaca

SEQ ID NO: 2792143 - RNA, 19 nt, Human
caugcccacguucuuuccc

SEQ ID NO: 2792144 - RNA, 13 nt, Human
caugccaggaacc

SEQ ID NO: 2792145 - RNA, 19 nt, Human
caugccaggaaccuguccu

SEQ ID NO: 2792146 - RNA, 17 nt, Human
caugcccaccugcccau

SEQ ID NO: 2792147 - RNA, 16 nt, Human
caugcccaccugccca

SEQ ID NO: 2792148 - RNA, 14 nt, Human
caugcccaccugcc

SEQ ID NO: 2792149 - RNA, 13 nt, Human
caugcccaccugc

SEQ ID NO: 2792150 - RNA, 21 nt, Human
caugccagcuacuuccuccuc

SEQ ID NO: 2792151 - RNA, 21 nt, Human
caugccaccauggccagccaa

SEQ ID NO: 2792152 - RNA, 17 nt, Human
caugccacguuccacag

SEQ ID NO: 2792153 - RNA, 19 nt, Human
caugccacguuccacaguu

SEQ ID NO: 2792154 - RNA, 18 nt, Human
caugccaagcacugugcu

SEQ ID NO: 2792155 - RNA, 15 nt, Human
caugcaugacagccu

SEQ ID NO: 2792156 - RNA, 19 nt, Human
caugcaugacagccucuau

SEQ ID NO: 2792157 - RNA, 16 nt, Human
caugccaacaagaaug

SEQ ID NO: 2792158 - RNA, 17 nt, Human
caugccaacaagaaugc

SEQ ID NO: 2792159 - RNA, 20 nt, Human
caugccaacaagaaugcauu

SEQ ID NO: 2792160 - RNA, 21 nt, Human
caugccaacaagaaugcauug

SEQ ID NO: 2792161 - RNA, 22 nt, Human
caugccaacaagaaugcauuga

SEQ ID NO: 2792162 - RNA, 14 nt, Human
caugcauucauaca

SEQ ID NO: 2792163 - RNA, 22 nt, Human
caugcauaaauaugcagugaua

SEQ ID NO: 2792164 - RNA, 20 nt, Human
caugcagcucaacuuucugu

SEQ ID NO: 2792165 - RNA, 12 nt, Human
caugcaggcccu

SEQ ID NO: 2792166 - RNA, 13 nt, Human
caugcaggcccuu

SEQ ID NO: 2792167 - RNA, 18 nt, Human
caugcagggggcuccugg

SEQ ID NO: 2792168 - RNA, 19 nt, Human
caugcagggggcuccuggg

SEQ ID NO: 2792169 - RNA, 12 nt, Human
caugcauaaaua

SEQ ID NO: 2792170 - RNA, 13 nt, Human
caugcauaaauau

SEQ ID NO: 2792171 - RNA, 15 nt, Human
caugcauaaauaugc

SEQ ID NO: 2792172 - RNA, 16 nt, Human
caugcauaaauaugca

SEQ ID NO: 2792173 - RNA, 17 nt, Human
caugcauaaauaugcag

SEQ ID NO: 2792174 - RNA, 18 nt, Human
caugcauaaauaugcagu

SEQ ID NO: 2792175 - RNA, 19 nt, Human
caugcauaaauaugcagug

SEQ ID NO: 2792176 - RNA, 13 nt, Human
cauguuuaugaaa

SEQ ID NO: 2792177 - RNA, 14 nt, Human
cauguuuaugaaaa

SEQ ID NO: 2792178 - RNA, 15 nt, Human
cauguuuaugaaaau

SEQ ID NO: 2792179 - RNA, 16 nt, Human
cauguuuaugaaaaua

SEQ ID NO: 2792180 - RNA, 19 nt, Human
cauguuuaugaaaauaaau

SEQ ID NO: 2792181 - RNA, 20 nt, Human
cauguuuaugaaaauaaaua

SEQ ID NO: 2792182 - RNA, 23 nt, Human
cauguuuaugaaaauaaauagcu

SEQ ID NO: 2792183 - RNA, 21 nt, Human
cauguuuauaacuauucaguu

SEQ ID NO: 2792184 - RNA, 13 nt, Human
caugugugugugu

SEQ ID NO: 2792185 - RNA, 14 nt, Human
caugugugcugaac

SEQ ID NO: 2792186 - RNA, 11 nt, Human
cauguguguau

SEQ ID NO: 2792187 - RNA, 12 nt, Human
cauguguguaua

SEQ ID NO: 2792188 - RNA, 13 nt, Human
cauguguguauaa

SEQ ID NO: 2792189 - RNA, 14 nt, Human
cauguguguauaag

SEQ ID NO: 2792190 - RNA, 13 nt, Human
cauguguguauau

SEQ ID NO: 2792191 - RNA, 14 nt, Human
cauguguguauaua

SEQ ID NO: 2792192 - RNA, 15 nt, Human
cauguguguauauau

SEQ ID NO: 2792193 - RNA, 16 nt, Human
cauguguguauauaug

SEQ ID NO: 2792194 - RNA, 17 nt, Human
cauguguguauauaugu

SEQ ID NO: 2792195 - RNA, 18 nt, Human
cauguguguauauaugug

SEQ ID NO: 2792196 - RNA, 19 nt, Human
cauguguguauauaugugu

SEQ ID NO: 2792197 - RNA, 20 nt, Human
cauguguguauauaugugua

SEQ ID NO: 2792198 - RNA, 18 nt, Human
cauguuuuaaagcuugcu

SEQ ID NO: 2792199 - RNA, 15 nt, Human
cauguuuuaaaugua

SEQ ID NO: 2792200 - RNA, 23 nt, Human
cauguuuuaaauguacaguuugg

SEQ ID NO: 2792201 - RNA, 14 nt, Human
cauguuuuccguga

SEQ ID NO: 2792202 - RNA, 12 nt, Human
cauguuuuguau

SEQ ID NO: 2792203 - RNA, 13 nt, Human
cauguuuuguaua

SEQ ID NO: 2792204 - RNA, 14 nt, Human
cauguuuuguauac

SEQ ID NO: 2792205 - RNA, 15 nt, Human
cauguuuuguauaca

SEQ ID NO: 2792206 - RNA, 17 nt, Human
cauguuuuguauacaaa

SEQ ID NO: 2792207 - RNA, 19 nt, Human
cauguuuuguauacaaaua

SEQ ID NO: 2792208 - RNA, 20 nt, Human
cauguuuuguauacaaauau

SEQ ID NO: 2792209 - RNA, 22 nt, Human
cauguuuuguauacaaauauau

SEQ ID NO: 2792210 - RNA, 14 nt, Human
cauguuuugugacu

SEQ ID NO: 2792211 - RNA, 13 nt, Human
caugugggcuuca

SEQ ID NO: 2792212 - RNA, 11 nt, Human
cauguuuuggu

SEQ ID NO: 2792213 - RNA, 18 nt, Human
cauguuuuccagcuccuc

SEQ ID NO: 2792214 - RNA, 23 nt, Human
caugugguggcacaggcccccuu

SEQ ID NO: 2792215 - RNA, 15 nt, Human
caugugggucuucca

SEQ ID NO: 2792216 - RNA, 19 nt, Human
caugugggucuuccagggg

SEQ ID NO: 2792217 - RNA, 14 nt, Human
cauguggugaugau

SEQ ID NO: 2792218 - RNA, 23 nt, Human
cauguggugaugauguguauaua

SEQ ID NO: 2792219 - RNA, 22 nt, Human
caugugguggcacaggcccccu

SEQ ID NO: 2792220 - RNA, 20 nt, Human
caugugguuugguuccucuc

SEQ ID NO: 2792221 - RNA, 21 nt, Human
caugugguuugguuccucucu

SEQ ID NO: 2792222 - RNA, 22 nt, Human
caugugguuugguuccucucug

SEQ ID NO: 2792223 - RNA, 23 nt, Human
caugugguuugguuccucucugg

SEQ ID NO: 2792224 - RNA, 20 nt, Human
caugugguuuauagagggcc

SEQ ID NO: 2792225 - RNA, 15 nt, Human
caugugguuuauaga

SEQ ID NO: 2792226 - RNA, 22 nt, Human
cauguggcuguagaucccaaga

SEQ ID NO: 2792227 - RNA, 20 nt, Human
cauguggcuuuuuuaaaaaa

SEQ ID NO: 2792228 - RNA, 21 nt, Human
cauguggcuuuuuuaaaaaag

SEQ ID NO: 2792229 - RNA, 22 nt, Human
caugugggaaaaaaaugaauga

SEQ ID NO: 2792230 - RNA, 17 nt, Human
cauguggaauauaaaga

SEQ ID NO: 2792231 - RNA, 15 nt, Human
caugugcacaugcac

SEQ ID NO: 2792232 - RNA, 16 nt, Human
caugugacacauaugc

SEQ ID NO: 2792233 - RNA, 14 nt, Human
caugugacacauau

SEQ ID NO: 2792234 - RNA, 15 nt, Human
caugugacacauaug

SEQ ID NO: 2792235 - RNA, 12 nt, Human
caugugacacau

SEQ ID NO: 2792236 - RNA, 13 nt, Human
caugugacacaua

SEQ ID NO: 2792237 - RNA, 21 nt, Human
caugugaaaccuuuuuuaaga

SEQ ID NO: 2792238 - RNA, 22 nt, Human
caugugaaaccuuuuuuaagau

SEQ ID NO: 2792239 - RNA, 24 nt, Human
caugugaaaccuuuuuuaagauuu

SEQ ID NO: 2792240 - RNA, 21 nt, Human
caugugccagguuuuuggucu

SEQ ID NO: 2792241 - RNA, 16 nt, Human
caugugcauaacaaau

SEQ ID NO: 2792242 - RNA, 23 nt, Human
caugugcauaacaaauucugaau

SEQ ID NO: 2792243 - RNA, 24 nt, Human
caugugccagggcaaugaugaaug

SEQ ID NO: 2792244 - RNA, 22 nt, Human
caugugccagggcaaugaugaa

SEQ ID NO: 2792245 - RNA, 20 nt, Human
caugugccacaacgccuggc

SEQ ID NO: 2792246 - RNA, 22 nt, Human
caugugccacaacgccuggcua

SEQ ID NO: 2792247 - RNA, 19 nt, Human
caugugaaaaucaaauaca

SEQ ID NO: 2792248 - RNA, 17 nt, Human
caugugaaaaucaaaua

SEQ ID NO: 2792249 - RNA, 12 nt, Human
caugugaaaccu

SEQ ID NO: 2792250 - RNA, 13 nt, Human
caugugaaaccuu

SEQ ID NO: 2792251 - RNA, 14 nt, Human
caugugaaaccuuu

SEQ ID NO: 2792252 - RNA, 18 nt, Human
caugugaaaccuuuuuua

SEQ ID NO: 2792253 - RNA, 14 nt, Human
cauguacagacaga

SEQ ID NO: 2792254 - RNA, 16 nt, Human
cauguacagacagaga

SEQ ID NO: 2792255 - RNA, 23 nt, Human
caugucuuguacauguguagccu

SEQ ID NO: 2792256 - RNA, 20 nt, Human
caugucuuucuccaaaguua

SEQ ID NO: 2792257 - RNA, 21 nt, Human
caugucuuucuccaaaguuau

SEQ ID NO: 2792258 - RNA, 19 nt, Human
cauguccuuugcgccugug

SEQ ID NO: 2792259 - RNA, 21 nt, Human
cauguccuuugcgccugugac

SEQ ID NO: 2792260 - RNA, 18 nt, Human
caugucgccucugcauuc

SEQ ID NO: 2792261 - RNA, 20 nt, Human
caugucgccucugcauucag

SEQ ID NO: 2792262 - RNA, 14 nt, Human
caugucgccucugc

SEQ ID NO: 2792263 - RNA, 15 nt, Human
caugucgccucugca

SEQ ID NO: 2792264 - RNA, 13 nt, Human
cauggucccugcc

SEQ ID NO: 2792265 - RNA, 14 nt, Human
cauggucccugccu

SEQ ID NO: 2792266 - RNA, 15 nt, Human
cauggucccugccuu

SEQ ID NO: 2792267 - RNA, 17 nt, Human
cauggucccugccuuag

SEQ ID NO: 2792268 - RNA, 21 nt, Human
cauggugaaaauguacugaga

SEQ ID NO: 2792269 - RNA, 18 nt, Human
cauggugccccuagcuuu

SEQ ID NO: 2792270 - RNA, 17 nt, Human
cauguaaccggcauguu

SEQ ID NO: 2792271 - RNA, 18 nt, Human
cauguaaccggcauguuu

SEQ ID NO: 2792272 - RNA, 22 nt, Human
cauguaaccggcauguuuccag

SEQ ID NO: 2792273 - RNA, 19 nt, Human
cauguaacgaaacacuuca

SEQ ID NO: 2792274 - RNA, 16 nt, Human
cauguaacuauagacu

SEQ ID NO: 2792275 - RNA, 19 nt, Human
cauguaauguuaauguuau

SEQ ID NO: 2792276 - RNA, 23 nt, Human
cauguaauguuaauguuauauca

SEQ ID NO: 2792277 - RNA, 23 nt, Human
cauguaauauaaagauguuaaaa

SEQ ID NO: 2792278 - RNA, 15 nt, Human
caugguguaauaaga

SEQ ID NO: 2792279 - RNA, 16 nt, Human
caugguguaauaagac

SEQ ID NO: 2792280 - RNA, 18 nt, Human
caugguguaauaagacau

SEQ ID NO: 2792281 - RNA, 19 nt, Human
caugguguaauaagacaua

SEQ ID NO: 2792282 - RNA, 21 nt, Human
caugguguaauaagacauaac

SEQ ID NO: 2792283 - RNA, 22 nt, Human
cauggugugaaagucagaugcc

SEQ ID NO: 2792284 - RNA, 12 nt, Human
cauggugucugg

SEQ ID NO: 2792285 - RNA, 23 nt, Human
cauggugugaaagucagaugccc

SEQ ID NO: 2792286 - RNA, 14 nt, Human
caugguguguuaca

SEQ ID NO: 2792287 - RNA, 15 nt, Human
caugguguguuacac

SEQ ID NO: 2792288 - RNA, 19 nt, Human
caugguuaagguaaaguaa

SEQ ID NO: 2792289 - RNA, 19 nt, Human
caugguuaagaguccaaga

SEQ ID NO: 2792290 - RNA, 22 nt, Human
caugguguaauaagacauaacg

SEQ ID NO: 2792291 - RNA, 13 nt, Human
caugguuaagagu

SEQ ID NO: 2792292 - RNA, 16 nt, Human
caugguuaagagucca

SEQ ID NO: 2792293 - RNA, 22 nt, Human
cauuauuuauucagcuucauuu

SEQ ID NO: 2792294 - RNA, 13 nt, Human
cauuauuucuagu

SEQ ID NO: 2792295 - RNA, 20 nt, Human
cauuauuucuaguccaaaau

SEQ ID NO: 2792296 - RNA, 23 nt, Human
cauuauuuauauggggaauauau

SEQ ID NO: 2792297 - RNA, 16 nt, Human
cauuagcacagauuuu

SEQ ID NO: 2792298 - RNA, 20 nt, Human
cauuagcacagauuuuaauu

SEQ ID NO: 2792299 - RNA, 21 nt, Human
cauuagcacagauuuuaauug

SEQ ID NO: 2792300 - RNA, 22 nt, Human
cauuagcacagauuuuaauugu

SEQ ID NO: 2792301 - RNA, 23 nt, Human
cauuagcacagauuuuaauuguc

SEQ ID NO: 2792302 - RNA, 17 nt, Human
cauuagcaguuugcuuu

SEQ ID NO: 2792303 - RNA, 11 nt, Human
cauuagagcag

SEQ ID NO: 2792304 - RNA, 12 nt, Human
cauuagagcagg

SEQ ID NO: 2792305 - RNA, 17 nt, Human
cauuagacuccuccucc

SEQ ID NO: 2792306 - RNA, 15 nt, Human
cauuagacuccuccu

SEQ ID NO: 2792307 - RNA, 16 nt, Human
cauuagacuccuccuc

SEQ ID NO: 2792308 - RNA, 23 nt, Human
cauuagagcaggcguucagcuca

SEQ ID NO: 2792309 - RNA, 19 nt, Human
cauuagauuuuauuuuacu

SEQ ID NO: 2792310 - RNA, 21 nt, Human
cauuagauuuuauuuuacuau

SEQ ID NO: 2792311 - RNA, 13 nt, Human
cauuagagcaggc

SEQ ID NO: 2792312 - RNA, 14 nt, Human
cauuagagcaggcg

SEQ ID NO: 2792313 - RNA, 19 nt, Human
cauuagagcccauuucaau

SEQ ID NO: 2792314 - RNA, 17 nt, Human
cauuaccuuacugugga

SEQ ID NO: 2792315 - RNA, 13 nt, Human
cauuaccuuacug

SEQ ID NO: 2792316 - RNA, 20 nt, Human
cauuaccuuacuguggagga

SEQ ID NO: 2792317 - RNA, 18 nt, Human
cauuaccuuuuaccagcu

SEQ ID NO: 2792318 - RNA, 19 nt, Human
cauuaccuuuuaccagcuu

SEQ ID NO: 2792319 - RNA, 22 nt, Human
cauuaccuuuuaccagcuuuua

SEQ ID NO: 2792320 - RNA, 13 nt, Human
cauuaacacaaag

SEQ ID NO: 2792321 - RNA, 21 nt, Human
cauuaaauucacaaacuuuua

SEQ ID NO: 2792322 - RNA, 18 nt, Human
cauuaaauucacaaacuu

SEQ ID NO: 2792323 - RNA, 17 nt, Human
cauuaaauucacaaacu

SEQ ID NO: 2792324 - RNA, 14 nt, Human
cauuaaauucacaa

SEQ ID NO: 2792325 - RNA, 17 nt, Human
cauuaauauuugcugac

SEQ ID NO: 2792326 - RNA, 18 nt, Human
cauuaaucaaucaucugu

SEQ ID NO: 2792327 - RNA, 16 nt, Human
cauuaauauuugcuga

SEQ ID NO: 2792328 - RNA, 16 nt, Human
cauuaaucauuucccc

SEQ ID NO: 2792329 - RNA, 17 nt, Human
cauuaaucauuucccca

SEQ ID NO: 2792330 - RNA, 13 nt, Human
cauuacccuuccc

SEQ ID NO: 2792331 - RNA, 15 nt, Human
cauuacccuucccug

SEQ ID NO: 2792332 - RNA, 16 nt, Human
cauuacccuucccugc

SEQ ID NO: 2792333 - RNA, 19 nt, Human
cauuacccuucccugcacu

SEQ ID NO: 2792334 - RNA, 12 nt, Human
cauuaauguuuc

SEQ ID NO: 2792335 - RNA, 15 nt, Human
cauuaauguuucuau

SEQ ID NO: 2792336 - RNA, 22 nt, Human
cauuaaucaaucaucuguguga

SEQ ID NO: 2792337 - RNA, 23 nt, Human
cauuaaucaaucaucugugugaa

SEQ ID NO: 2792338 - RNA, 13 nt, Human
cauuaauguguug

SEQ ID NO: 2792339 - RNA, 14 nt, Human
cauuaauguguugg

SEQ ID NO: 2792340 - RNA, 13 nt, Human
cauuaaaccuguc

SEQ ID NO: 2792341 - RNA, 14 nt, Human
cauuaaaccugucu

SEQ ID NO: 2792342 - RNA, 22 nt, Human
cauuaaaccugucuccacugug

SEQ ID NO: 2792343 - RNA, 23 nt, Human
cauuaaaccugucuccacugugc

SEQ ID NO: 2792344 - RNA, 15 nt, Human
cauguuuugugacua

SEQ ID NO: 2792345 - RNA, 17 nt, Human
cauguuuugugacuaua

SEQ ID NO: 2792346 - RNA, 23 nt, Human
cauguuuugugacuauauagaga

SEQ ID NO: 2792347 - RNA, 21 nt, Human
cauguuuugugcauuuguaaa

SEQ ID NO: 2792348 - RNA, 20 nt, Human
cauuaaaggcauaaaugacu

SEQ ID NO: 2792349 - RNA, 12 nt, Human
cauuaaagccau

SEQ ID NO: 2792350 - RNA, 13 nt, Human
cauuaaagucuga

SEQ ID NO: 2792351 - RNA, 17 nt, Human
cauuaaagucugaauca

SEQ ID NO: 2792352 - RNA, 13 nt, Human
cauuaaauucaca

SEQ ID NO: 2792353 - RNA, 12 nt, Human
cauuaaauguuu

SEQ ID NO: 2792354 - RNA, 13 nt, Human
cauuaaauguuug

SEQ ID NO: 2792355 - RNA, 14 nt, Human
cauuaaauguuuga

SEQ ID NO: 2792356 - RNA, 11 nt, Human
cauuaaaugaa

SEQ ID NO: 2792357 - RNA, 14 nt, Human
cauuaaaugaauau

SEQ ID NO: 2792358 - RNA, 15 nt, Human
cauuaaaugaauauu

SEQ ID NO: 2792359 - RNA, 18 nt, Human
cauuaaaugaauauuuug

SEQ ID NO: 2792360 - RNA, 22 nt, Human
cauuaaaugaauauuuugauaa

SEQ ID NO: 2792361 - RNA, 20 nt, Human
ccaacacccaaagcauggac

SEQ ID NO: 2792362 - RNA, 22 nt, Human
ccaacacccaaagcauggacua

SEQ ID NO: 2792363 - RNA, 15 nt, Human
ccaacagucauguuu

SEQ ID NO: 2792364 - RNA, 20 nt, Human
ccaacacccugucuaaaaaa

SEQ ID NO: 2792365 - RNA, 12 nt, Human
ccaacagugagu

SEQ ID NO: 2792366 - RNA, 20 nt, Human
ccaacagugagucugucagc

SEQ ID NO: 2792367 - RNA, 12 nt, Human
ccaacaguuccu

SEQ ID NO: 2792368 - RNA, 18 nt, Human
ccaaauuuaagacucucg

SEQ ID NO: 2792369 - RNA, 12 nt, Human
ccaaauuuauca

SEQ ID NO: 2792370 - RNA, 14 nt, Human
ccaaauuuaucaaa

SEQ ID NO: 2792371 - RNA, 14 nt, Human
ccaaauugugcuuc

SEQ ID NO: 2792372 - RNA, 16 nt, Human
ccaaauugugcuucuc

SEQ ID NO: 2792373 - RNA, 17 nt, Human
ccaaauugugcuucucc

SEQ ID NO: 2792374 - RNA, 20 nt, Human
ccaaauugugcuucucccca

SEQ ID NO: 2792375 - RNA, 21 nt, Human
ccaaauugugcuucuccccag

SEQ ID NO: 2792376 - RNA, 23 nt, Human
ccaaauugugcuucuccccagaa

SEQ ID NO: 2792377 - RNA, 22 nt, Human
ccaaauugcuccuaagcuucaa

SEQ ID NO: 2792378 - RNA, 12 nt, Human
cauuuuuaucua

SEQ ID NO: 2792379 - RNA, 22 nt, Human
ccaaagaguagaauugcauuga

SEQ ID NO: 2792380 - RNA, 16 nt, Human
ccaaagaugcagccgc

SEQ ID NO: 2792381 - RNA, 18 nt, Human
ccaaagaugcagccgccu

SEQ ID NO: 2792382 - RNA, 19 nt, Human
ccaaagaugcagccgccuu

SEQ ID NO: 2792383 - RNA, 22 nt, Human
ccaaagaugcagccgccuuccu

SEQ ID NO: 2792384 - RNA, 23 nt, Human
ccaaagaugcagccgccuuccuu

SEQ ID NO: 2792385 - RNA, 12 nt, Human
ccaaagcagggu

SEQ ID NO: 2792386 - RNA, 15 nt, Human
ccaaagcagggucug

SEQ ID NO: 2792387 - RNA, 16 nt, Human
ccaaagcagggucugg

SEQ ID NO: 2792388 - RNA, 13 nt, Human
ccaaccuaaccug

SEQ ID NO: 2792389 - RNA, 14 nt, Human
ccaaccuaaccugu

SEQ ID NO: 2792390 - RNA, 16 nt, Human
ccaaccuaaccugugu

SEQ ID NO: 2792391 - RNA, 17 nt, Human
ccaaccuaaccuguguc

SEQ ID NO: 2792392 - RNA, 13 nt, Human
ccaaccgacaggc

SEQ ID NO: 2792393 - RNA, 16 nt, Human
ccaaccgacaggcccu

SEQ ID NO: 2792394 - RNA, 18 nt, Human
ccaaccgacaggcccugg

SEQ ID NO: 2792395 - RNA, 18 nt, Human
ccaacccuggcacccagg

SEQ ID NO: 2792396 - RNA, 24 nt, Human
ccaagacagaugccccagagcugu

SEQ ID NO: 2792397 - RNA, 22 nt, Human
ccaagacagaugccccagagcu

SEQ ID NO: 2792398 - RNA, 12 nt, Human
ccaaccuuccca

SEQ ID NO: 2792399 - RNA, 23 nt, Human
ccaagacagaugccccagagcug

SEQ ID NO: 2792400 - RNA, 12 nt, Human
ccaaccugcuga

SEQ ID NO: 2792401 - RNA, 14 nt, Human
ccaagaccagacuc

SEQ ID NO: 2792402 - RNA, 16 nt, Human
ccaagagauugcuaau

SEQ ID NO: 2792403 - RNA, 17 nt, Human
ccaagagauugcuaauu

SEQ ID NO: 2792404 - RNA, 20 nt, Human
ccaagagauugcuaauugcu

SEQ ID NO: 2792405 - RNA, 21 nt, Human
ccaagagauugcuaauugcug

SEQ ID NO: 2792406 - RNA, 13 nt, Human
ccaagacucuaga

SEQ ID NO: 2792407 - RNA, 19 nt, Human
ccaagagcagaggcagcga

SEQ ID NO: 2792408 - RNA, 13 nt, Human
ccaaagaugcagc

SEQ ID NO: 2792409 - RNA, 22 nt, Human
ccaaagaggcugccccucucac

SEQ ID NO: 2792410 - RNA, 21 nt, Human
ccaaagaggcugccccucuca

SEQ ID NO: 2792411 - RNA, 20 nt, Human
ccaaagaggcugccccucuc

SEQ ID NO: 2792412 - RNA, 17 nt, Human
ccaaagaggcugccccu

SEQ ID NO: 2792413 - RNA, 23 nt, Human
ccaaagaggcugccccucucacc

SEQ ID NO: 2792414 - RNA, 9 nt, Human
ccacaaagg

SEQ ID NO: 2792415 - RNA, 22 nt, Human
ccacaaaggccaaacugcugga

SEQ ID NO: 2792416 - RNA, 16 nt, Human
ccacaacgugcaacug

SEQ ID NO: 2792417 - RNA, 12 nt, Human
ccacaacugaca

SEQ ID NO: 2792418 - RNA, 14 nt, Human
ccacaacugacaca

SEQ ID NO: 2792419 - RNA, 15 nt, Human
ccacaacugacacag

SEQ ID NO: 2792420 - RNA, 16 nt, Human
ccacaacugacacagg

SEQ ID NO: 2792421 - RNA, 17 nt, Human
ccacaacugacacagga

SEQ ID NO: 2792422 - RNA, 19 nt, Human
ccacaacugacacaggaaa

SEQ ID NO: 2792423 - RNA, 14 nt, Human
ccacaacuuuuaac

SEQ ID NO: 2792424 - RNA, 13 nt, Human
ccacaacacacag

SEQ ID NO: 2792425 - RNA, 23 nt, Human
ccaauuuuuuguucuucagagau

SEQ ID NO: 2792426 - RNA, 13 nt, Human
ccacaaaaauuga

SEQ ID NO: 2792427 - RNA, 20 nt, Human
ccacaaagcacaguuugaac

SEQ ID NO: 2792428 - RNA, 16 nt, Human
ccaauuuuaauuuagu

SEQ ID NO: 2792429 - RNA, 21 nt, Human
ccaauuuuaauuuaguaaaug

SEQ ID NO: 2792430 - RNA, 22 nt, Human
ccaauuuuaauuuaguaaaugu

SEQ ID NO: 2792431 - RNA, 23 nt, Human
ccaauuuuaauuuaguaaauguu

SEQ ID NO: 2792432 - RNA, 13 nt, Human
ccaauuuucaaag

SEQ ID NO: 2792433 - RNA, 22 nt, Human
ccaauuucccacccccacccac

SEQ ID NO: 2792434 - RNA, 22 nt, Human
ccaauauuggagcauaucaaaa

SEQ ID NO: 2792435 - RNA, 21 nt, Human
ccaauuguugacaguucugaa

SEQ ID NO: 2792436 - RNA, 22 nt, Human
ccaauuguugacaguucugaag

SEQ ID NO: 2792437 - RNA, 13 nt, Human
ccaauuggaggaa

SEQ ID NO: 2792438 - RNA, 13 nt, Human
ccaauugugcugc

SEQ ID NO: 2792439 - RNA, 14 nt, Human
ccaauugugcugcc

SEQ ID NO: 2792440 - RNA, 15 nt, Human
ccaauugugcugcca

SEQ ID NO: 2792441 - RNA, 16 nt, Human
ccaauugugcugccau

SEQ ID NO: 2792442 - RNA, 20 nt, Human
ccaauuguugacaguucuga

SEQ ID NO: 2792443 - RNA, 23 nt, Human
ccaagugguuuccacaugcucug

SEQ ID NO: 2792444 - RNA, 14 nt, Human
ccaagugugaacaa

SEQ ID NO: 2792445 - RNA, 19 nt, Human
ccaaguggcagagcuugga

SEQ ID NO: 2792446 - RNA, 17 nt, Human
ccaaguggcagagcuug

SEQ ID NO: 2792447 - RNA, 18 nt, Human
ccaaguggcagagcuugg

SEQ ID NO: 2792448 - RNA, 16 nt, Human
ccaaguggcucccaca

SEQ ID NO: 2792449 - RNA, 22 nt, Human
ccaagguuuaaagagucuagau

SEQ ID NO: 2792450 - RNA, 16 nt, Human
ccaagugcacuuucua

SEQ ID NO: 2792451 - RNA, 17 nt, Human
ccaagugcacuuucuaa

SEQ ID NO: 2792452 - RNA, 13 nt, Human
ccaaguggcuccc

SEQ ID NO: 2792453 - RNA, 13 nt, Human
ccaaguggcagag

SEQ ID NO: 2792454 - RNA, 14 nt, Human
ccaaguggcagagc

SEQ ID NO: 2792455 - RNA, 15 nt, Human
ccaaguggcagagcu

SEQ ID NO: 2792456 - RNA, 22 nt, Human
ccaagugccagucuugugucug

SEQ ID NO: 2792457 - RNA, 13 nt, Human
ccaagugcgugcc

SEQ ID NO: 2792458 - RNA, 16 nt, Human
ccaagugccagucuug

SEQ ID NO: 2792459 - RNA, 16 nt, Human
ccaaggcggccccucc

SEQ ID NO: 2792460 - RNA, 16 nt, Human
ccaaggcucugagcaa

SEQ ID NO: 2792461 - RNA, 22 nt, Human
ccaaggcuucuccaauucugcc

SEQ ID NO: 2792462 - RNA, 23 nt, Human
ccaaggugggcugagcccuggca

SEQ ID NO: 2792463 - RNA, 20 nt, Human
ccaaggugggcugagcccug

SEQ ID NO: 2792464 - RNA, 18 nt, Human
ccaaggugggcugagccc

SEQ ID NO: 2792465 - RNA, 17 nt, Human
ccaaggugggcugagcc

SEQ ID NO: 2792466 - RNA, 21 nt, Human
ccaaggugucauuuauguguc

SEQ ID NO: 2792467 - RNA, 16 nt, Human
ccaagguucccuugug

SEQ ID NO: 2792468 - RNA, 19 nt, Human
ccaagguuuaaagagucua

SEQ ID NO: 2792469 - RNA, 20 nt, Human
ccaagguuuaaagagucuag

SEQ ID NO: 2792470 - RNA, 23 nt, Human
ccaagguuuaaagagucuagauu

SEQ ID NO: 2792471 - RNA, 14 nt, Human
ccaagucucagugg

SEQ ID NO: 2792472 - RNA, 14 nt, Human
ccaaggccuucucc

SEQ ID NO: 2792473 - RNA, 16 nt, Human
ccaaggccuucuccuc

SEQ ID NO: 2792474 - RNA, 14 nt, Human
ccaaggcggccccu

SEQ ID NO: 2792475 - RNA, 15 nt, Human
ccaaggcggccccuc

SEQ ID NO: 2792476 - RNA, 21 nt, Human
ccaaggcggccccucccgccc

SEQ ID NO: 2792477 - RNA, 20 nt, Human
ccaaggcgggcggaucacuu

SEQ ID NO: 2792478 - RNA, 16 nt, Human
ccaaggccagggacag

SEQ ID NO: 2792479 - RNA, 14 nt, Human
ccaagcuccaucuc

SEQ ID NO: 2792480 - RNA, 19 nt, Human
ccaagcucaggaccaggca

SEQ ID NO: 2792481 - RNA, 20 nt, Human
ccaagcucaggaccaggcaa

SEQ ID NO: 2792482 - RNA, 23 nt, Human
ccaagccguggcuucccgcucag

SEQ ID NO: 2792483 - RNA, 14 nt, Human
ccaagcaggagacg

SEQ ID NO: 2792484 - RNA, 17 nt, Human
ccaagcaggagacgaca

SEQ ID NO: 2792485 - RNA, 20 nt, Human
ccaagcaggagacgacaggc

SEQ ID NO: 2792486 - RNA, 22 nt, Human
ccaagcaggagacgacaggcga

SEQ ID NO: 2792487 - RNA, 14 nt, Human
ccaagccguggcuu

SEQ ID NO: 2792488 - RNA, 15 nt, Human
ccaagccguggcuuc

SEQ ID NO: 2792489 - RNA, 16 nt, Human
ccaagccguggcuucc

SEQ ID NO: 2792490 - RNA, 17 nt, Human
ccaagccguggcuuccc

SEQ ID NO: 2792491 - RNA, 21 nt, Human
ccaagccguggcuucccgcuc

SEQ ID NO: 2792492 - RNA, 21 nt, Human
ccacaagaaauuugauuucua

SEQ ID NO: 2792493 - RNA, 15 nt, Human
ccacaagaaauuuga

SEQ ID NO: 2792494 - RNA, 16 nt, Human
ccacaagaaauuugau

SEQ ID NO: 2792495 - RNA, 19 nt, Human
ccacaacuccuacaugaug

SEQ ID NO: 2792496 - RNA, 14 nt, Human
ccacaagggcucuc

SEQ ID NO: 2792497 - RNA, 15 nt, Human
ccacaagucuuccag

SEQ ID NO: 2792498 - RNA, 22 nt, Human
ccacaagucuuccagaggaugc

SEQ ID NO: 2792499 - RNA, 20 nt, Human
ccacaagugccgcaaauugu

SEQ ID NO: 2792500 - RNA, 21 nt, Human
ccacaagugccgcaaauugua

SEQ ID NO: 2792501 - RNA, 13 nt, Human
ccacacacaacag

SEQ ID NO: 2792502 - RNA, 14 nt, Human
ccacacacaacagc

SEQ ID NO: 2792503 - RNA, 21 nt, Human
ccacacacaacagccaacagc

SEQ ID NO: 2792504 - RNA, 22 nt, Human
ccacacacaacagccaacagcu

SEQ ID NO: 2792505 - RNA, 12 nt, Human
cauuuaaagcau

SEQ ID NO: 2792506 - RNA, 14 nt, Human
cauuuaaagcauug

SEQ ID NO: 2792507 - RNA, 15 nt, Human
cauuuaaagcauugc

SEQ ID NO: 2792508 - RNA, 16 nt, Human
cauuuaaagcauugcu

SEQ ID NO: 2792509 - RNA, 17 nt, Human
cauuuaaagcauugcug

SEQ ID NO: 2792510 - RNA, 18 nt, Human
cauuuaaagcauugcugu

SEQ ID NO: 2792511 - RNA, 21 nt, Human
cauuuacuuuguguucaccuu

SEQ ID NO: 2792512 - RNA, 17 nt, Human
cauuuacuuuguguuca

SEQ ID NO: 2792513 - RNA, 12 nt, Human
cauuuagaaaau

SEQ ID NO: 2792514 - RNA, 15 nt, Human
cauuuagaaaauaga

SEQ ID NO: 2792515 - RNA, 22 nt, Human
cauuuagaaaauagagcuuuua

SEQ ID NO: 2792516 - RNA, 21 nt, Human
cauuuccauguccccucccag

SEQ ID NO: 2792517 - RNA, 23 nt, Human
cauuuagagaacuguggccguua

SEQ ID NO: 2792518 - RNA, 12 nt, Human
cauugcauucua

SEQ ID NO: 2792519 - RNA, 16 nt, Human
cauugcauucuauugc

SEQ ID NO: 2792520 - RNA, 22 nt, Human
cauugcaucaccucuguaauuu

SEQ ID NO: 2792521 - RNA, 15 nt, Human
cauuuaaaauugcua

SEQ ID NO: 2792522 - RNA, 16 nt, Human
cauuuaaaauugcuau

SEQ ID NO: 2792523 - RNA, 19 nt, Human
cauuuaaaauugcuauguu

SEQ ID NO: 2792524 - RNA, 20 nt, Human
cauuuaaaauugcuauguua

SEQ ID NO: 2792525 - RNA, 22 nt, Human
cauuuaaaauugcuauguuacu

SEQ ID NO: 2792526 - RNA, 17 nt, Human
cauugcacuccagccug

SEQ ID NO: 2792527 - RNA, 12 nt, Human
cauugcaguuua

SEQ ID NO: 2792528 - RNA, 20 nt, Human
cauugcaguuuaagagcaga

SEQ ID NO: 2792529 - RNA, 16 nt, Human
cauugcagaauaaugu

SEQ ID NO: 2792530 - RNA, 22 nt, Human
cauugcagaauaauguucuauu

SEQ ID NO: 2792531 - RNA, 18 nt, Human
cauugagaguuuugucuu

SEQ ID NO: 2792532 - RNA, 18 nt, Human
cauugagcugauauaaau

SEQ ID NO: 2792533 - RNA, 19 nt, Human
cauugagcugauauaaauu

SEQ ID NO: 2792534 - RNA, 20 nt, Human
cauugagcugauauaaauuc

SEQ ID NO: 2792535 - RNA, 17 nt, Human
cauugauuuccuguguc

SEQ ID NO: 2792536 - RNA, 18 nt, Human
cauugauuuccuguguca

SEQ ID NO: 2792537 - RNA, 12 nt, Human
cauugcacccag

SEQ ID NO: 2792538 - RNA, 14 nt, Human
cauugcacccagcc

SEQ ID NO: 2792539 - RNA, 16 nt, Human
cauugcacccagccca

SEQ ID NO: 2792540 - RNA, 18 nt, Human
cauugcacccagcccaga

SEQ ID NO: 2792541 - RNA, 17 nt, Human
cauuucugaauagaaau

SEQ ID NO: 2792542 - RNA, 22 nt, Human
cauuucugaguuucauucuccu

SEQ ID NO: 2792543 - RNA, 12 nt, Human
cauuucuccaga

SEQ ID NO: 2792544 - RNA, 13 nt, Human
cauuucuccagaa

SEQ ID NO: 2792545 - RNA, 15 nt, Human
cauuucuccagaacc

SEQ ID NO: 2792546 - RNA, 18 nt, Human
cauuucuccagauuaucu

SEQ ID NO: 2792547 - RNA, 12 nt, Human
cauuucuccguu

SEQ ID NO: 2792548 - RNA, 10 nt, Human
cauugaaaug

SEQ ID NO: 2792549 - RNA, 16 nt, Human
cauugaaaugagcacc

SEQ ID NO: 2792550 - RNA, 19 nt, Human
cauugaaaugagcaccucc

SEQ ID NO: 2792551 - RNA, 20 nt, Human
cauugaaaugagcaccucca

SEQ ID NO: 2792552 - RNA, 21 nt, Human
cauugaaaugagcaccuccau

SEQ ID NO: 2792553 - RNA, 11 nt, Human
cauugaaaugu

SEQ ID NO: 2792554 - RNA, 13 nt, Human
cauugaaauguca

SEQ ID NO: 2792555 - RNA, 14 nt, Human
cauugaaaugucac

SEQ ID NO: 2792556 - RNA, 22 nt, Human
cauugacugguuuacaggcccu

SEQ ID NO: 2792557 - RNA, 23 nt, Human
cauugacugguuuacaggcccug

SEQ ID NO: 2792558 - RNA, 20 nt, Human
cauugacuuucaguaaacau

SEQ ID NO: 2792559 - RNA, 22 nt, Human
cauugacuuucaguaaacauaa

SEQ ID NO: 2792560 - RNA, 18 nt, Human
cauugacgauuccuucuc

SEQ ID NO: 2792561 - RNA, 19 nt, Human
cauugacgauuccuucucu

SEQ ID NO: 2792562 - RNA, 23 nt, Human
cauugacgauuccuucucugaac

SEQ ID NO: 2792563 - RNA, 15 nt, Human
cauugaacacaaacu

SEQ ID NO: 2792564 - RNA, 14 nt, Human
cauugaacacaaac

SEQ ID NO: 2792565 - RNA, 17 nt, Human
cauugaacacaaacugu

SEQ ID NO: 2792566 - RNA, 16 nt, Human
cauugaacacaaacug

SEQ ID NO: 2792567 - RNA, 22 nt, Human
cauugaccgcgacuaauuucaa

SEQ ID NO: 2792568 - RNA, 21 nt, Human
cauugaccgcgacuaauuuca

SEQ ID NO: 2792569 - RNA, 17 nt, Human
cauugacccauagcaca

SEQ ID NO: 2792570 - RNA, 12 nt, Human
cauugacauuau

SEQ ID NO: 2792571 - RNA, 15 nt, Human
cauugacauuauaga

SEQ ID NO: 2792572 - RNA, 21 nt, Human
cauugacauuauagacauuga

SEQ ID NO: 2792573 - RNA, 13 nt, Human
ccaaacugcugga

SEQ ID NO: 2792574 - RNA, 24 nt, Human
ccaaacugcuggacgucuuucuuu

SEQ ID NO: 2792575 - RNA, 16 nt, Human
ccaaacuguucaagaa

SEQ ID NO: 2792576 - RNA, 15 nt, Human
ccaaacuucacucug

SEQ ID NO: 2792577 - RNA, 14 nt, Human
ccaaagaaaugaac

SEQ ID NO: 2792578 - RNA, 16 nt, Human
ccaaagaaaugaacau

SEQ ID NO: 2792579 - RNA, 17 nt, Human
ccaaagaaaugaacauu

SEQ ID NO: 2792580 - RNA, 20 nt, Human
ccaaagaaaugaacauucca

SEQ ID NO: 2792581 - RNA, 23 nt, Human
ccaaagaaaugaacauuccaagg

SEQ ID NO: 2792582 - RNA, 13 nt, Human
ccaaacgccuccc

SEQ ID NO: 2792583 - RNA, 16 nt, Human
ccaaagaggcugcccc

SEQ ID NO: 2792584 - RNA, 14 nt, Human
ccaaagaggcugcc

SEQ ID NO: 2792585 - RNA, 13 nt, Human
ccaaagaggcugc

SEQ ID NO: 2792586 - RNA, 12 nt, Human
ccaaagaggcug

SEQ ID NO: 2792587 - RNA, 14 nt, Human
ccaaagagcacaaa

SEQ ID NO: 2792588 - RNA, 20 nt, Human
ccaaagagcacaaacauuuu

SEQ ID NO: 2792589 - RNA, 21 nt, Human
ccaaagagcacaaacauuuuu

SEQ ID NO: 2792590 - RNA, 22 nt, Human
ccaaagagcacaaacauuuuuc

SEQ ID NO: 2792591 - RNA, 11 nt, Human
ccaaagaaugu

SEQ ID NO: 2792592 - RNA, 18 nt, Human
ccaaagaauguuagagca

SEQ ID NO: 2792593 - RNA, 19 nt, Human
ccaaagaauguuagagcac

SEQ ID NO: 2792594 - RNA, 14 nt, Human
ccaaagaauucuua

SEQ ID NO: 2792595 - RNA, 20 nt, Human
cauuuuuaguagagacaggg

SEQ ID NO: 2792596 - RNA, 16 nt, Human
cauuuugguucuucuc

SEQ ID NO: 2792597 - RNA, 15 nt, Human
cauuuuuauuuauga

SEQ ID NO: 2792598 - RNA, 16 nt, Human
cauuuuuauuuaugaa

SEQ ID NO: 2792599 - RNA, 17 nt, Human
cauuuuuauuuaugaag

SEQ ID NO: 2792600 - RNA, 22 nt, Human
cauuuuuauuucagauuuugau

SEQ ID NO: 2792601 - RNA, 23 nt, Human
cauuuuuauuucagauuuugaua

SEQ ID NO: 2792602 - RNA, 13 nt, Human
ccaaaccucaagu

SEQ ID NO: 2792603 - RNA, 17 nt, Human
ccaaaaguuuuccugag

SEQ ID NO: 2792604 - RNA, 18 nt, Human
ccaaaaguuuuccugaga

SEQ ID NO: 2792605 - RNA, 13 nt, Human
cauuuuauauuga

SEQ ID NO: 2792606 - RNA, 15 nt, Human
cauuuuauauugaaa

SEQ ID NO: 2792607 - RNA, 16 nt, Human
cauuuuauauugaaaa

SEQ ID NO: 2792608 - RNA, 18 nt, Human
cauuuuauauugaaaaaa

SEQ ID NO: 2792609 - RNA, 19 nt, Human
cauuuuauauugaaaaaaa

SEQ ID NO: 2792610 - RNA, 22 nt, Human
cauuuuauauugaaaaaaauaa

SEQ ID NO: 2792611 - RNA, 18 nt, Human
cauuuuaaauaaaagaaa

SEQ ID NO: 2792612 - RNA, 12 nt, Human
cauuuuaaugua

SEQ ID NO: 2792613 - RNA, 13 nt, Human
cauuuuaauguaa

SEQ ID NO: 2792614 - RNA, 14 nt, Human
cauuuuaauguaaa

SEQ ID NO: 2792615 - RNA, 15 nt, Human
cauuuuaaauaaaag

SEQ ID NO: 2792616 - RNA, 18 nt, Human
cauguuuuuaaagggcua

SEQ ID NO: 2792617 - RNA, 16 nt, Human
cauuuuaaauaaaaga

SEQ ID NO: 2792618 - RNA, 17 nt, Human
cauuuuaaauaaaagaa

SEQ ID NO: 2792619 - RNA, 12 nt, Human
cauuuuaacaag

SEQ ID NO: 2792620 - RNA, 13 nt, Human
cauuuuaacaaga

SEQ ID NO: 2792621 - RNA, 14 nt, Human
cauuuuaacaagaa

SEQ ID NO: 2792622 - RNA, 15 nt, Human
cauuuuaacaagaag

SEQ ID NO: 2792623 - RNA, 16 nt, Human
cauuuuaacaagaaga

SEQ ID NO: 2792624 - RNA, 17 nt, Human
cauuuuaacaagaagau

SEQ ID NO: 2792625 - RNA, 18 nt, Human
cauuuuaacaagaagaug

SEQ ID NO: 2792626 - RNA, 20 nt, Human
cauuuuaacaagaagaugaa

SEQ ID NO: 2792627 - RNA, 13 nt, Human
cauuuuaaauaaa

SEQ ID NO: 2792628 - RNA, 18 nt, Human
cauuuucuuuucacuucg

SEQ ID NO: 2792629 - RNA, 20 nt, Human
cauuuucuuauugcgcugcu

SEQ ID NO: 2792630 - RNA, 23 nt, Human
cauuuucuuauugcgcugcuacc

SEQ ID NO: 2792631 - RNA, 15 nt, Human
cauuuugagaacaaa

SEQ ID NO: 2792632 - RNA, 18 nt, Human
cauuuuuaguagagacag

SEQ ID NO: 2792633 - RNA, 19 nt, Human
cauuuuuaguagagacagg

SEQ ID NO: 2792634 - RNA, 23 nt, Human
cauuuugggguacccacugcucu

SEQ ID NO: 2792635 - RNA, 22 nt, Human
cauuuugggacaauuguuuuaa

SEQ ID NO: 2792636 - RNA, 22 nt, Human
cauuuugguaagagacagaaug

SEQ ID NO: 2792637 - RNA, 23 nt, Human
cauuuugguaagagacagaaugu

SEQ ID NO: 2792638 - RNA, 21 nt, Human
cauuuuggcgcuauuacaaau

SEQ ID NO: 2792639 - RNA, 22 nt, Human
cauuuuggcgcuauuacaaaua

SEQ ID NO: 2792640 - RNA, 14 nt, Human
cauuuuguuguaaa

SEQ ID NO: 2792641 - RNA, 15 nt, Human
cauuuuguuguaaaa

SEQ ID NO: 2792642 - RNA, 16 nt, Human
cauuuuguuguaaaaa

SEQ ID NO: 2792643 - RNA, 18 nt, Human
cauuuuguuguaaaaaga

SEQ ID NO: 2792644 - RNA, 19 nt, Human
cauuuuguuguaaaaagaa

SEQ ID NO: 2792645 - RNA, 20 nt, Human
cauuuuguuguaaaaagaaa

SEQ ID NO: 2792646 - RNA, 23 nt, Human
cauuuuguuguaaaaagaaaaac

SEQ ID NO: 2792647 - RNA, 23 nt, Human
cauuuuuaaaguagaagaggguu

SEQ ID NO: 2792648 - RNA, 16 nt, Human
cauuuuuaaauuguua

SEQ ID NO: 2792649 - RNA, 22 nt, Human
cauuuugggguacccacugcuc

SEQ ID NO: 2792650 - RNA, 21 nt, Human
cauuuugggguacccacugcu

SEQ ID NO: 2792651 - RNA, 20 nt, Human
cauuuugggguacccacugc

SEQ ID NO: 2792652 - RNA, 14 nt, Human
cauuugagcagggc

SEQ ID NO: 2792653 - RNA, 23 nt, Human
cauuugacugaagaugcagcuca

SEQ ID NO: 2792654 - RNA, 12 nt, Human
cauuucuuagac

SEQ ID NO: 2792655 - RNA, 22 nt, Human
cauuucuucagucagaaaacuu

SEQ ID NO: 2792656 - RNA, 23 nt, Human
cauuucuucagucagaaaacuuu

SEQ ID NO: 2792657 - RNA, 14 nt, Human
cauuucuguaaaua

SEQ ID NO: 2792658 - RNA, 17 nt, Human
cauuucuguaaauacca

SEQ ID NO: 2792659 - RNA, 16 nt, Human
cauuugagcagggcuc

SEQ ID NO: 2792660 - RNA, 23 nt, Human
cauuugaggauuuagaaguguca

SEQ ID NO: 2792661 - RNA, 13 nt, Human
ccaugugccaggu

SEQ ID NO: 2792662 - RNA, 14 nt, Human
ccauguuggccagg

SEQ ID NO: 2792663 - RNA, 13 nt, Human
ccauguuggccag

SEQ ID NO: 2792664 - RNA, 17 nt, Human
ccauguggugaugaugu

SEQ ID NO: 2792665 - RNA, 18 nt, Human
ccauguggugaugaugug

SEQ ID NO: 2792666 - RNA, 15 nt, Human
ccaugugccucuuug

SEQ ID NO: 2792667 - RNA, 16 nt, Human
ccaugugccucuuugu

SEQ ID NO: 2792668 - RNA, 14 nt, Human
ccauggagccagcu

SEQ ID NO: 2792669 - RNA, 19 nt, Human
ccauggagagcuggagccu

SEQ ID NO: 2792670 - RNA, 22 nt, Human
ccauggagagcuggagccuggu

SEQ ID NO: 2792671 - RNA, 17 nt, Human
ccauggagccagcuccc

SEQ ID NO: 2792672 - RNA, 18 nt, Human
ccauggagccagcucccu

SEQ ID NO: 2792673 - RNA, 22 nt, Human
ccauggagccagcucccucuau

SEQ ID NO: 2792674 - RNA, 17 nt, Human
ccauggagacaagaagg

SEQ ID NO: 2792675 - RNA, 15 nt, Human
ccauggagagcugga

SEQ ID NO: 2792676 - RNA, 18 nt, Human
ccauggagagcuggagcc

SEQ ID NO: 2792677 - RNA, 21 nt, Human
ccauggacacuccagugccag

SEQ ID NO: 2792678 - RNA, 15 nt, Human
ccauggacacuccag

SEQ ID NO: 2792679 - RNA, 17 nt, Human
ccauggacacuccagug

SEQ ID NO: 2792680 - RNA, 19 nt, Human
ccauggacacuccagugcc

SEQ ID NO: 2792681 - RNA, 14 nt, Human
ccauggacacucca

SEQ ID NO: 2792682 - RNA, 18 nt, Human
ccaugccuguccagccug

SEQ ID NO: 2792683 - RNA, 19 nt, Human
ccaugccuguccagccugg

SEQ ID NO: 2792684 - RNA, 13 nt, Human
ccaugccuguggc

SEQ ID NO: 2792685 - RNA, 14 nt, Human
ccaugccuguggcu

SEQ ID NO: 2792686 - RNA, 15 nt, Human
ccaugccuguggcug

SEQ ID NO: 2792687 - RNA, 16 nt, Human
ccaugccuguggcugc

SEQ ID NO: 2792688 - RNA, 17 nt, Human
ccaugccuguggcugcg

SEQ ID NO: 2792689 - RNA, 18 nt, Human
ccaugccuguggcugcgc

SEQ ID NO: 2792690 - RNA, 17 nt, Human
ccaugccuguccagccu

SEQ ID NO: 2792691 - RNA, 14 nt, Human
ccaugccuguccag

SEQ ID NO: 2792692 - RNA, 13 nt, Human
ccaugccugucca

SEQ ID NO: 2792693 - RNA, 21 nt, Human
ccaugaaaaaaaugaucccca

SEQ ID NO: 2792694 - RNA, 13 nt, Human
ccaugaaacaaag

SEQ ID NO: 2792695 - RNA, 16 nt, Human
ccaugaacagaaaaca

SEQ ID NO: 2792696 - RNA, 22 nt, Human
ccaugaacagaaaacauucuga

SEQ ID NO: 2792697 - RNA, 22 nt, Human
ccaugcuucucaucuugugaaa

SEQ ID NO: 2792698 - RNA, 14 nt, Human
ccaugcugccucca

SEQ ID NO: 2792699 - RNA, 22 nt, Human
ccaugccugccccccucaucuc

SEQ ID NO: 2792700 - RNA, 17 nt, Human
cccagacuacuauuuuc

SEQ ID NO: 2792701 - RNA, 18 nt, Human
cccagacuacuauuuucu

SEQ ID NO: 2792702 - RNA, 22 nt, Human
cccagacuacuauuuucuuuuu

SEQ ID NO: 2792703 - RNA, 21 nt, Human
cccagaccuuuuauccacuua

SEQ ID NO: 2792704 - RNA, 13 nt, Human
cccagagauguca

SEQ ID NO: 2792705 - RNA, 20 nt, Human
cccagagaugucaucagagc

SEQ ID NO: 2792706 - RNA, 17 nt, Human
cccagagauucccaagc

SEQ ID NO: 2792707 - RNA, 22 nt, Human
cccagagauugcuucucauccc

SEQ ID NO: 2792708 - RNA, 14 nt, Human
cccagagcaggaag

SEQ ID NO: 2792709 - RNA, 16 nt, Human
cccagagcaggaagca

SEQ ID NO: 2792710 - RNA, 14 nt, Human
cccagagcagggug

SEQ ID NO: 2792711 - RNA, 16 nt, Human
cccacgagggucagga

SEQ ID NO: 2792712 - RNA, 18 nt, Human
cccacgauuuucuccagc

SEQ ID NO: 2792713 - RNA, 19 nt, Human
cccacgauuuucuccagcu

SEQ ID NO: 2792714 - RNA, 20 nt, Human
cccacgauuuucuccagcuc

SEQ ID NO: 2792715 - RNA, 21 nt, Human
cccacgauuuucuccagcuca

SEQ ID NO: 2792716 - RNA, 22 nt, Human
cccacgauuuucuccagcucag

SEQ ID NO: 2792717 - RNA, 19 nt, Human
cccagacagacaucucugc

SEQ ID NO: 2792718 - RNA, 11 nt, Human
cccagaauuca

SEQ ID NO: 2792719 - RNA, 20 nt, Human
cccagacagacaucucugca

SEQ ID NO: 2792720 - RNA, 23 nt, Human
cccagacagacaucucugcaccc

SEQ ID NO: 2792721 - RNA, 20 nt, Human
cccaccuuggcugcagggag

SEQ ID NO: 2792722 - RNA, 19 nt, Human
cccaccuuggcugcaggga

SEQ ID NO: 2792723 - RNA, 17 nt, Human
cccaccuuggcugcagg

SEQ ID NO: 2792724 - RNA, 16 nt, Human
cccaccuuggcugcag

SEQ ID NO: 2792725 - RNA, 17 nt, Human
cccaccugccuggccgg

SEQ ID NO: 2792726 - RNA, 18 nt, Human
cccaccugccuggccggc

SEQ ID NO: 2792727 - RNA, 20 nt, Human
cccaccugccuggccggcca

SEQ ID NO: 2792728 - RNA, 21 nt, Human
cccaccugccuggccggccag

SEQ ID NO: 2792729 - RNA, 15 nt, Human
ccauguuggccaggc

SEQ ID NO: 2792730 - RNA, 18 nt, Human
ccauguuggccaggcugg

SEQ ID NO: 2792731 - RNA, 21 nt, Human
ccauguuggccaggcuggucu

SEQ ID NO: 2792732 - RNA, 19 nt, Human
ccauguuggccaggcuggu

SEQ ID NO: 2792733 - RNA, 14 nt, Human
ccauuccaaagcuu

SEQ ID NO: 2792734 - RNA, 16 nt, Human
ccauuccaaagcuuua

SEQ ID NO: 2792735 - RNA, 22 nt, Human
ccauuccaaagcuuuauuacca

SEQ ID NO: 2792736 - RNA, 17 nt, Human
ccaugugguggcacagg

SEQ ID NO: 2792737 - RNA, 18 nt, Human
ccaugugguggcacaggc

SEQ ID NO: 2792738 - RNA, 12 nt, Human
ccaugugucacu

SEQ ID NO: 2792739 - RNA, 19 nt, Human
ccaugugucacuugugcuu

SEQ ID NO: 2792740 - RNA, 21 nt, Human
ccauucccaagaaaugcuuug

SEQ ID NO: 2792741 - RNA, 20 nt, Human
cccagagcuguuuauggccu

SEQ ID NO: 2792742 - RNA, 22 nt, Human
cccagagcuguuuauggccuca

SEQ ID NO: 2792743 - RNA, 21 nt, Human
cccagagcuguuuauggccuc

SEQ ID NO: 2792744 - RNA, 23 nt, Human
cccagagcuguuuauggccucag

SEQ ID NO: 2792745 - RNA, 23 nt, Human
cccagauugcaacaggcugggcu

SEQ ID NO: 2792746 - RNA, 13 nt, Human
cccagaggaggca

SEQ ID NO: 2792747 - RNA, 11 nt, Human
cccagagcugu

SEQ ID NO: 2792748 - RNA, 20 nt, Human
cccagagcugguggacccag

SEQ ID NO: 2792749 - RNA, 19 nt, Human
cccagagcugguggaccca

SEQ ID NO: 2792750 - RNA, 13 nt, Human
cccagagcuguuu

SEQ ID NO: 2792751 - RNA, 23 nt, Human
cccagagcugguggacccaggga

SEQ ID NO: 2792752 - RNA, 15 nt, Human
cccagagcagggugu

SEQ ID NO: 2792753 - RNA, 13 nt, Human
cccagagccacac

SEQ ID NO: 2792754 - RNA, 14 nt, Human
cccagagccacaca

SEQ ID NO: 2792755 - RNA, 15 nt, Human
cccagagccacacau

SEQ ID NO: 2792756 - RNA, 16 nt, Human
cccagagccacacaug

SEQ ID NO: 2792757 - RNA, 17 nt, Human
cccagagccacacaugg

SEQ ID NO: 2792758 - RNA, 19 nt, Human
cccagagccacacaugggc

SEQ ID NO: 2792759 - RNA, 21 nt, Human
cccagagccacacaugggcau

SEQ ID NO: 2792760 - RNA, 14 nt, Human
cccagaggcguccc

SEQ ID NO: 2792761 - RNA, 22 nt, Human
cccagaggcgucccgcaccugu

SEQ ID NO: 2792762 - RNA, 23 nt, Human
cccagaggcgucccgcaccuguc

SEQ ID NO: 2792763 - RNA, 24 nt, Human
cccagaggcgucccgcaccugucu

SEQ ID NO: 2792764 - RNA, 12 nt, Human
cccagaggcuga

SEQ ID NO: 2792765 - RNA, 15 nt, Human
cccagaggcugaguu

SEQ ID NO: 2792766 - RNA, 11 nt, Human
cccagccucag

SEQ ID NO: 2792767 - RNA, 23 nt, Human
cccagcccuccuuaucaaaggac

SEQ ID NO: 2792768 - RNA, 20 nt, Human
cccagcccggaccuuggcag

SEQ ID NO: 2792769 - RNA, 12 nt, Human
cccagccucagu

SEQ ID NO: 2792770 - RNA, 16 nt, Human
cccagccucaguccuc

SEQ ID NO: 2792771 - RNA, 22 nt, Human
cccagccucaguccuccccuca

SEQ ID NO: 2792772 - RNA, 18 nt, Human
cccagccuccaagcucca

SEQ ID NO: 2792773 - RNA, 20 nt, Human
cccagccuccaagcuccauc

SEQ ID NO: 2792774 - RNA, 15 nt, Human
cccagccucuggcau

SEQ ID NO: 2792775 - RNA, 13 nt, Human
cccagcucuggcu

SEQ ID NO: 2792776 - RNA, 21 nt, Human
cccaggacaccacacccagcc

SEQ ID NO: 2792777 - RNA, 22 nt, Human
cccaggacaccacacccagccu

SEQ ID NO: 2792778 - RNA, 23 nt, Human
cccaggacaccacacccagccuc

SEQ ID NO: 2792779 - RNA, 14 nt, Human
cccagcgagcccug

SEQ ID NO: 2792780 - RNA, 12 nt, Human
cccagcucaggg

SEQ ID NO: 2792781 - RNA, 13 nt, Human
cccagcucagggg

SEQ ID NO: 2792782 - RNA, 16 nt, Human
cccagcucaggggcag

SEQ ID NO: 2792783 - RNA, 17 nt, Human
cccagcucaggggcagc

SEQ ID NO: 2792784 - RNA, 18 nt, Human
cccagcucaggggcagcu

SEQ ID NO: 2792785 - RNA, 20 nt, Human
cccagcuauaccugugccuc

SEQ ID NO: 2792786 - RNA, 11 nt, Human
cccagcucaau

SEQ ID NO: 2792787 - RNA, 17 nt, Human
cccagcuauaccugugc

SEQ ID NO: 2792788 - RNA, 14 nt, Human
cccaggagccccga

SEQ ID NO: 2792789 - RNA, 13 nt, Human
cccaggagccccg

SEQ ID NO: 2792790 - RNA, 20 nt, Human
cccaggagagagaaagccag

SEQ ID NO: 2792791 - RNA, 17 nt, Human
cccaggagacaguucaa

SEQ ID NO: 2792792 - RNA, 15 nt, Human
cccaggagacaguuc

SEQ ID NO: 2792793 - RNA, 13 nt, Human
cccaggagagaga

SEQ ID NO: 2792794 - RNA, 14 nt, Human
cccaggagagagaa

SEQ ID NO: 2792795 - RNA, 15 nt, Human
cccaggagagagaaa

SEQ ID NO: 2792796 - RNA, 16 nt, Human
cccaggagagagaaag

SEQ ID NO: 2792797 - RNA, 13 nt, Human
cccaggacuccuc

SEQ ID NO: 2792798 - RNA, 15 nt, Human
cccaggacucugacc

SEQ ID NO: 2792799 - RNA, 23 nt, Human
cccaggacucugaccccagcauu

SEQ ID NO: 2792800 - RNA, 19 nt, Human
cccaggacucugaccccag

SEQ ID NO: 2792801 - RNA, 20 nt, Human
cccaggaccaucuucccgag

SEQ ID NO: 2792802 - RNA, 15 nt, Human
cccaggaccaagcca

SEQ ID NO: 2792803 - RNA, 20 nt, Human
cccaggaccaagccacagca

SEQ ID NO: 2792804 - RNA, 19 nt, Human
cccaguucaggagucccaa

SEQ ID NO: 2792805 - RNA, 20 nt, Human
cccaggacaccacacccagc

SEQ ID NO: 2792806 - RNA, 19 nt, Human
cccaguguaugucuuguau

SEQ ID NO: 2792807 - RNA, 16 nt, Human
cccaguggcugcugcc

SEQ ID NO: 2792808 - RNA, 17 nt, Human
cccaguggcugcugccc

SEQ ID NO: 2792809 - RNA, 15 nt, Human
cccaguggcugcugc

SEQ ID NO: 2792810 - RNA, 18 nt, Human
cccaguggcugcugccca

SEQ ID NO: 2792811 - RNA, 21 nt, Human
cccaguggcugcugcccaggc

SEQ ID NO: 2792812 - RNA, 19 nt, Human
cccagucuggaaugcagug

SEQ ID NO: 2792813 - RNA, 18 nt, Human
cccagucuggaaugcagu

SEQ ID NO: 2792814 - RNA, 10 nt, Human
cccagucugg

SEQ ID NO: 2792815 - RNA, 14 nt, Human
cccaguccuuccac

SEQ ID NO: 2792816 - RNA, 16 nt, Human
cccaguccuuccaccu

SEQ ID NO: 2792817 - RNA, 17 nt, Human
cccaguccuuccaccuc

SEQ ID NO: 2792818 - RNA, 13 nt, Human
cccagucgcccuu

SEQ ID NO: 2792819 - RNA, 21 nt, Human
cccagugcccacaggaucagu

SEQ ID NO: 2792820 - RNA, 15 nt, Human
cccagucucuggcag

SEQ ID NO: 2792821 - RNA, 21 nt, Human
cccagucucucuuaaaguugg

SEQ ID NO: 2792822 - RNA, 16 nt, Human
cccagucucugcucca

SEQ ID NO: 2792823 - RNA, 20 nt, Human
cccagucucuggcaguucug

SEQ ID NO: 2792824 - RNA, 13 nt, Human
cccagguuucuau

SEQ ID NO: 2792825 - RNA, 15 nt, Human
cccagguagcuggga

SEQ ID NO: 2792826 - RNA, 16 nt, Human
cccagguagcugggau

SEQ ID NO: 2792827 - RNA, 20 nt, Human
cccagguagcugggauuaca

SEQ ID NO: 2792828 - RNA, 13 nt, Human
cccagguuucugg

SEQ ID NO: 2792829 - RNA, 19 nt, Human
cccagguuucuggucucua

SEQ ID NO: 2792830 - RNA, 22 nt, Human
cccagguuucuggucucuaggc

SEQ ID NO: 2792831 - RNA, 20 nt, Human
cccaguaccuccugucucug

SEQ ID NO: 2792832 - RNA, 21 nt, Human
cccaguaccuccugucucugg

SEQ ID NO: 2792833 - RNA, 22 nt, Human
cccaguaccuccugucucuggc

SEQ ID NO: 2792834 - RNA, 14 nt, Human
cccaguaccuccug

SEQ ID NO: 2792835 - RNA, 15 nt, Human
cccaguccucuccca

SEQ ID NO: 2792836 - RNA, 23 nt, Human
cccaggcaggucuugaacuccug

SEQ ID NO: 2792837 - RNA, 20 nt, Human
cccaggguggagugcagugg

SEQ ID NO: 2792838 - RNA, 19 nt, Human
cccagggugggaagggcua

SEQ ID NO: 2792839 - RNA, 16 nt, Human
cccaugagccucagca

SEQ ID NO: 2792840 - RNA, 15 nt, Human
cccaugagccucagc

SEQ ID NO: 2792841 - RNA, 20 nt, Human
cccaugagccucagcauccu

SEQ ID NO: 2792842 - RNA, 13 nt, Human
cccaugccugucc

SEQ ID NO: 2792843 - RNA, 14 nt, Human
cccaugccugucca

SEQ ID NO: 2792844 - RNA, 19 nt, Human
cccaugccuguccagccug

SEQ ID NO: 2792845 - RNA, 16 nt, Human
cccaugccuguccagc

SEQ ID NO: 2792846 - RNA, 22 nt, Human
cccauggguuguguguuuauuu

SEQ ID NO: 2792847 - RNA, 23 nt, Human
cccauggguuguguguuuauuuc

SEQ ID NO: 2792848 - RNA, 20 nt, Human
cccaugccuguccagccugg

SEQ ID NO: 2792849 - RNA, 14 nt, Human
cccaugccuguggc

SEQ ID NO: 2792850 - RNA, 17 nt, Human
cccaugccuguggcugc

SEQ ID NO: 2792851 - RNA, 18 nt, Human
cccaugccuguggcugcg

SEQ ID NO: 2792852 - RNA, 16 nt, Human
cccaugggcucugaca

SEQ ID NO: 2792853 - RNA, 17 nt, Human
cccaugggcucugacag

SEQ ID NO: 2792854 - RNA, 21 nt, Human
cccaucuaugucccuugcugu

SEQ ID NO: 2792855 - RNA, 16 nt, Human
cccaucuaagcugcag

SEQ ID NO: 2792856 - RNA, 18 nt, Human
cccaucuaagcugcagcu

SEQ ID NO: 2792857 - RNA, 21 nt, Human
cccaucuaagcugcagcuucc

SEQ ID NO: 2792858 - RNA, 22 nt, Human
cccaucuaagcugcagcuuccu

SEQ ID NO: 2792859 - RNA, 15 nt, Human
cccaucuucgggacc

SEQ ID NO: 2792860 - RNA, 16 nt, Human
cccaucugugcauucu

SEQ ID NO: 2792861 - RNA, 13 nt, Human
cccaucuucaccc

SEQ ID NO: 2792862 - RNA, 21 nt, Human
cccaucuucgggaccaggauu

SEQ ID NO: 2792863 - RNA, 18 nt, Human
cccaucuucgggaccagg

SEQ ID NO: 2792864 - RNA, 17 nt, Human
cccaucuucgggaccag

SEQ ID NO: 2792865 - RNA, 22 nt, Human
cccaugaagacaggacagugcu

SEQ ID NO: 2792866 - RNA, 11 nt, Human
cccaugaagcc

SEQ ID NO: 2792867 - RNA, 12 nt, Human
cccaugaagccu

SEQ ID NO: 2792868 - RNA, 13 nt, Human
cccaugaagccuu

SEQ ID NO: 2792869 - RNA, 17 nt, Human
cccaugaagccuuuuga

SEQ ID NO: 2792870 - RNA, 19 nt, Human
cccaugaagacaggacagu

SEQ ID NO: 2792871 - RNA, 18 nt, Human
cccaugaagacaggacag

SEQ ID NO: 2792872 - RNA, 17 nt, Human
ccccaaagcagcccuuc

SEQ ID NO: 2792873 - RNA, 18 nt, Human
ccccaaagcagcccuucc

SEQ ID NO: 2792874 - RNA, 12 nt, Human
ccccaaagcccc

SEQ ID NO: 2792875 - RNA, 23 nt, Human
cccauguggugaugauguguaua

SEQ ID NO: 2792876 - RNA, 18 nt, Human
cccauguucugcccccag

SEQ ID NO: 2792877 - RNA, 19 nt, Human
cccauguucugcccccagc

SEQ ID NO: 2792878 - RNA, 21 nt, Human
cccauguucugcccccagccc

SEQ ID NO: 2792879 - RNA, 14 nt, Human
cccauguuguaaug

SEQ ID NO: 2792880 - RNA, 18 nt, Human
cccauguuguaaugcugc

SEQ ID NO: 2792881 - RNA, 19 nt, Human
cccauguuguaaugcugca

SEQ ID NO: 2792882 - RNA, 20 nt, Human
cccauguuguaaugcugcac

SEQ ID NO: 2792883 - RNA, 21 nt, Human
cccauguguccugguucccgu

SEQ ID NO: 2792884 - RNA, 14 nt, Human
cccauguagccccc

SEQ ID NO: 2792885 - RNA, 15 nt, Human
cccauguaaauacca

SEQ ID NO: 2792886 - RNA, 15 nt, Human
cccauguagcccccu

SEQ ID NO: 2792887 - RNA, 21 nt, Human
cccauguagcccccuggccuc

SEQ ID NO: 2792888 - RNA, 22 nt, Human
cccauguagcccccuggccucu

SEQ ID NO: 2792889 - RNA, 23 nt, Human
cccauguagcccccuggccucug

SEQ ID NO: 2792890 - RNA, 23 nt, Human
cccauguauuuaucucuauuuaa

SEQ ID NO: 2792891 - RNA, 22 nt, Human
cccaugucuuucuccaaaguua

SEQ ID NO: 2792892 - RNA, 17 nt, Human
cccaugucucgacucau

SEQ ID NO: 2792893 - RNA, 16 nt, Human
cccaugucucgacuca

SEQ ID NO: 2792894 - RNA, 13 nt, Human
ccccaacccccac

SEQ ID NO: 2792895 - RNA, 12 nt, Human
ccccaaauauag

SEQ ID NO: 2792896 - RNA, 15 nt, Human
ccccaaaguaaaaga

SEQ ID NO: 2792897 - RNA, 18 nt, Human
ccccaaaguaaaagaaac

SEQ ID NO: 2792898 - RNA, 14 nt, Human
ccccaaccugcuga

SEQ ID NO: 2792899 - RNA, 22 nt, Human
ccccacacuuguuccagcucuu

SEQ ID NO: 2792900 - RNA, 16 nt, Human
ccaucaugucuggcua

SEQ ID NO: 2792901 - RNA, 14 nt, Human
ccaucaugucuggc

SEQ ID NO: 2792902 - RNA, 19 nt, Human
ccaucauuacccuucccug

SEQ ID NO: 2792903 - RNA, 13 nt, Human
ccauccuggcugc

SEQ ID NO: 2792904 - RNA, 15 nt, Human
ccauccuucccuuug

SEQ ID NO: 2792905 - RNA, 16 nt, Human
ccaucgcugucaucuc

SEQ ID NO: 2792906 - RNA, 15 nt, Human
ccaucuuuacuccca

SEQ ID NO: 2792907 - RNA, 17 nt, Human
ccaucuuuacucccaag

SEQ ID NO: 2792908 - RNA, 20 nt, Human
ccaucuuuacucccaagacu

SEQ ID NO: 2792909 - RNA, 20 nt, Human
ccaucucauguaucaucugg

SEQ ID NO: 2792910 - RNA, 20 nt, Human
ccaucacccucuuccuguga

SEQ ID NO: 2792911 - RNA, 18 nt, Human
ccaucacccucuuccugu

SEQ ID NO: 2792912 - RNA, 16 nt, Human
ccaucacccucuuccu

SEQ ID NO: 2792913 - RNA, 13 nt, Human
ccaucacccucuu

SEQ ID NO: 2792914 - RNA, 11 nt, Human
ccauauuuuca

SEQ ID NO: 2792915 - RNA, 23 nt, Human
ccauauuuucacagguguggugu

SEQ ID NO: 2792916 - RNA, 19 nt, Human
ccaucaaaaugcuuuuuau

SEQ ID NO: 2792917 - RNA, 16 nt, Human
ccaucaaaaugcuuuu

SEQ ID NO: 2792918 - RNA, 22 nt, Human
ccauauucagugcuguggccug

SEQ ID NO: 2792919 - RNA, 12 nt, Human
ccauauuuauuc

SEQ ID NO: 2792920 - RNA, 14 nt, Human
ccauauuuggaaga

SEQ ID NO: 2792921 - RNA, 18 nt, Human
ccauauuuacuaccuuau

SEQ ID NO: 2792922 - RNA, 14 nt, Human
ccauauuuagcagu

SEQ ID NO: 2792923 - RNA, 17 nt, Human
ccauauuuagcagugca

SEQ ID NO: 2792924 - RNA, 21 nt, Human
ccauauuuauccauuuguaau

SEQ ID NO: 2792925 - RNA, 18 nt, Human
ccauauucuguuggccag

SEQ ID NO: 2792926 - RNA, 15 nt, Human
ccauauucuguuggc

SEQ ID NO: 2792927 - RNA, 18 nt, Human
ccauagccaccccagaaa

SEQ ID NO: 2792928 - RNA, 14 nt, Human
ccauagcaacagga

SEQ ID NO: 2792929 - RNA, 13 nt, Human
ccaguggucucac

SEQ ID NO: 2792930 - RNA, 19 nt, Human
ccauacuuugucugaaaaa

SEQ ID NO: 2792931 - RNA, 13 nt, Human
ccauagaaacaug

SEQ ID NO: 2792932 - RNA, 16 nt, Human
ccauagaaacaugaca

SEQ ID NO: 2792933 - RNA, 17 nt, Human
ccauagaaacaugacac

SEQ ID NO: 2792934 - RNA, 18 nt, Human
ccauagaaacaugacacu

SEQ ID NO: 2792935 - RNA, 20 nt, Human
ccauagaaacaugacacuga

SEQ ID NO: 2792936 - RNA, 21 nt, Human
ccauagaaacaugacacugac

SEQ ID NO: 2792937 - RNA, 22 nt, Human
ccauagaaacaugacacugacc

SEQ ID NO: 2792938 - RNA, 13 nt, Human
ccauagaguuuaa

SEQ ID NO: 2792939 - RNA, 14 nt, Human
ccaguggugccuug

SEQ ID NO: 2792940 - RNA, 17 nt, Human
ccaguggucucacaugg

SEQ ID NO: 2792941 - RNA, 21 nt, Human
ccauagcaagauugcuuaaaa

SEQ ID NO: 2792942 - RNA, 18 nt, Human
ccauagcaagauugcuua

SEQ ID NO: 2792943 - RNA, 16 nt, Human
ccauagaguuuaacac

SEQ ID NO: 2792944 - RNA, 17 nt, Human
ccauagaguuuaacaca

SEQ ID NO: 2792945 - RNA, 14 nt, Human
ccauagaucuucug

SEQ ID NO: 2792946 - RNA, 15 nt, Human
ccauagaucuucuga

SEQ ID NO: 2792947 - RNA, 16 nt, Human
ccauagaucuucugaa

SEQ ID NO: 2792948 - RNA, 17 nt, Human
ccauagaucuucugaaa

SEQ ID NO: 2792949 - RNA, 20 nt, Human
ccauagaucuucugaaauga

SEQ ID NO: 2792950 - RNA, 21 nt, Human
ccauagaucuucugaaaugaa

SEQ ID NO: 2792951 - RNA, 18 nt, Human
ccagggacgaagaagagc

SEQ ID NO: 2792952 - RNA, 19 nt, Human
ccagggacgaagaagagcc

SEQ ID NO: 2792953 - RNA, 20 nt, Human
ccagggacgaagaagagcca

SEQ ID NO: 2792954 - RNA, 21 nt, Human
ccagggacgaagaagagccac

SEQ ID NO: 2792955 - RNA, 23 nt, Human
ccagggacgaagaagagccacag

SEQ ID NO: 2792956 - RNA, 21 nt, Human
ccagggaauccaagccuccac

SEQ ID NO: 2792957 - RNA, 18 nt, Human
ccagggaauccaagccuc

SEQ ID NO: 2792958 - RNA, 17 nt, Human
ccagggaauccaagccu

SEQ ID NO: 2792959 - RNA, 15 nt, Human
ccagggaauccaagc

SEQ ID NO: 2792960 - RNA, 24 nt, Human
ccaggccuauguugauccauccag

SEQ ID NO: 2792961 - RNA, 16 nt, Human
ccaguggagguuuguc

SEQ ID NO: 2792962 - RNA, 21 nt, Human
ccagugcuguccaugcuucuc

SEQ ID NO: 2792963 - RNA, 22 nt, Human
ccagugcuguccaugcuucuca

SEQ ID NO: 2792964 - RNA, 16 nt, Human
ccagugggagauguua

SEQ ID NO: 2792965 - RNA, 21 nt, Human
ccaguggcugcugcccaggcc

SEQ ID NO: 2792966 - RNA, 19 nt, Human
ccaguggcugcugcccagg

SEQ ID NO: 2792967 - RNA, 18 nt, Human
ccaguggcugcugcccag

SEQ ID NO: 2792968 - RNA, 21 nt, Human
ccaguggaugccacagcccag

SEQ ID NO: 2792969 - RNA, 20 nt, Human
ccagugcuccaggcacccag

SEQ ID NO: 2792970 - RNA, 19 nt, Human
ccaguggaugccacagccc

SEQ ID NO: 2792971 - RNA, 13 nt, Human
ccaguggggccug

SEQ ID NO: 2792972 - RNA, 14 nt, Human
ccaguggggccugu

SEQ ID NO: 2792973 - RNA, 15 nt, Human
ccaguggggccugug

SEQ ID NO: 2792974 - RNA, 16 nt, Human
ccaguggggccugugg

SEQ ID NO: 2792975 - RNA, 17 nt, Human
ccaguggggccugugga

SEQ ID NO: 2792976 - RNA, 18 nt, Human
ccaguggggccuguggaa

SEQ ID NO: 2792977 - RNA, 22 nt, Human
ccaguggggccuguggaaugag

SEQ ID NO: 2792978 - RNA, 13 nt, Human
ccaggccugggcc

SEQ ID NO: 2792979 - RNA, 17 nt, Human
ccaggccugggccagag

SEQ ID NO: 2792980 - RNA, 18 nt, Human
ccaggccuuaucuccaag

SEQ ID NO: 2792981 - RNA, 12 nt, Human
ccagggaagggg

SEQ ID NO: 2792982 - RNA, 13 nt, Human
ccaggccucugug

SEQ ID NO: 2792983 - RNA, 15 nt, Human
ccaggccucuguguc

SEQ ID NO: 2792984 - RNA, 16 nt, Human
ccaggccucugugucc

SEQ ID NO: 2792985 - RNA, 17 nt, Human
ccaggccucuguguccu

SEQ ID NO: 2792986 - RNA, 18 nt, Human
ccaggccucuguguccuu

SEQ ID NO: 2792987 - RNA, 12 nt, Human
ccaggccugccu

SEQ ID NO: 2792988 - RNA, 13 nt, Human
ccaggccugcagc

SEQ ID NO: 2792989 - RNA, 14 nt, Human
ccaggccugcagca

SEQ ID NO: 2792990 - RNA, 16 nt, Human
ccaggccugcagcagg

SEQ ID NO: 2792991 - RNA, 18 nt, Human
ccaggccugcagcaggag

SEQ ID NO: 2792992 - RNA, 11 nt, Human
ccagccuggcc

SEQ ID NO: 2792993 - RNA, 10 nt, Human
ccagccuggc

SEQ ID NO: 2792994 - RNA, 12 nt, Human
ccagccuggcca

SEQ ID NO: 2792995 - RNA, 17 nt, Human
ccagccuggccaacaug

SEQ ID NO: 2792996 - RNA, 12 nt, Human
ccagccugagca

SEQ ID NO: 2792997 - RNA, 11 nt, Human
ccagccugagc

SEQ ID NO: 2792998 - RNA, 17 nt, Human
ccagccugaccuuccuu

SEQ ID NO: 2792999 - RNA, 20 nt, Human
ccagccuggagaugaaaucu

SEQ ID NO: 2793000 - RNA, 13 nt, Human
ccagccuggagau

SEQ ID NO: 2793001 - RNA, 13 nt, Human
ccagcugcaccag

SEQ ID NO: 2793002 - RNA, 16 nt, Human
ccagcugcaccagagc

SEQ ID NO: 2793003 - RNA, 17 nt, Human
ccagcugcaccagagca

SEQ ID NO: 2793004 - RNA, 22 nt, Human
ccagcucugccgucucuggagc

SEQ ID NO: 2793005 - RNA, 21 nt, Human
ccagcucugccgucucuggag

SEQ ID NO: 2793006 - RNA, 20 nt, Human
ccagcucugccgucucugga

SEQ ID NO: 2793007 - RNA, 20 nt, Human
ccagcuggccgggagccuga

SEQ ID NO: 2793008 - RNA, 14 nt, Human
ccagcuggccggga

SEQ ID NO: 2793009 - RNA, 12 nt, Human
ccagcuggccgg

SEQ ID NO: 2793010 - RNA, 23 nt, Human
ccagcugcaccugccagccuggc

SEQ ID NO: 2793011 - RNA, 22 nt, Human
ccagcugcaccugccagccugg

SEQ ID NO: 2793012 - RNA, 20 nt, Human
ccagcugcaccugccagccu

SEQ ID NO: 2793013 - RNA, 19 nt, Human
ccagcugcaccugccagcc

SEQ ID NO: 2793014 - RNA, 18 nt, Human
ccagcugcaccugccagc

SEQ ID NO: 2793015 - RNA, 17 nt, Human
ccagcugcaccugccag

SEQ ID NO: 2793016 - RNA, 21 nt, Human
ccagcugugcucuggacaggc

SEQ ID NO: 2793017 - RNA, 20 nt, Human
ccagcugugcucuggacagg

SEQ ID NO: 2793018 - RNA, 18 nt, Human
ccagcugugcucuggaca

SEQ ID NO: 2793019 - RNA, 14 nt, Human
ccagcugugagccu

SEQ ID NO: 2793020 - RNA, 21 nt, Human
ccagcuggugagugaugcggc

SEQ ID NO: 2793021 - RNA, 16 nt, Human
ccagcuggccuggaca

SEQ ID NO: 2793022 - RNA, 15 nt, Human
ccagcuggccuggac

SEQ ID NO: 2793023 - RNA, 13 nt, Human
ccagcuggccugg

SEQ ID NO: 2793024 - RNA, 12 nt, Human
ccagcuggccug

SEQ ID NO: 2793025 - RNA, 17 nt, Human
ccagcuggccuggacag

SEQ ID NO: 2793026 - RNA, 16 nt, Human
ccagcuggguuggaaa

SEQ ID NO: 2793027 - RNA, 17 nt, Human
ccagcuggguuggaaaa

SEQ ID NO: 2793028 - RNA, 14 nt, Human
ccagcugggcucug

SEQ ID NO: 2793029 - RNA, 19 nt, Human
ccagccucguuggaagagg

SEQ ID NO: 2793030 - RNA, 22 nt, Human
ccagccucguuggaagaggaac

SEQ ID NO: 2793031 - RNA, 15 nt, Human
ccagccucuggcauu

SEQ ID NO: 2793032 - RNA, 23 nt, Human
ccaggagaaccacuacaugcagc

SEQ ID NO: 2793033 - RNA, 21 nt, Human
ccaggagaaccacuacaugca

SEQ ID NO: 2793034 - RNA, 19 nt, Human
ccaggagaaccacuacaug

SEQ ID NO: 2793035 - RNA, 14 nt, Human
ccaggacugagccc

SEQ ID NO: 2793036 - RNA, 15 nt, Human
ccaggacugagcccc

SEQ ID NO: 2793037 - RNA, 16 nt, Human
ccaggacugagccccg

SEQ ID NO: 2793038 - RNA, 19 nt, Human
ccaggacugagccccgcag

SEQ ID NO: 2793039 - RNA, 13 nt, Human
ccaggacugagcc

SEQ ID NO: 2793040 - RNA, 23 nt, Human
ccagcugugcucuggacaggcau

SEQ ID NO: 2793041 - RNA, 22 nt, Human
ccagcugugcucuggacaggca

SEQ ID NO: 2793042 - RNA, 19 nt, Human
ccagcugugagccuuggcu

SEQ ID NO: 2793043 - RNA, 20 nt, Human
ccagcugugagccuuggcug

SEQ ID NO: 2793044 - RNA, 15 nt, Human
ccagcugugagccuu

SEQ ID NO: 2793045 - RNA, 16 nt, Human
ccagcugugagccuug

SEQ ID NO: 2793046 - RNA, 17 nt, Human
ccagcugugagccuugg

SEQ ID NO: 2793047 - RNA, 18 nt, Human
ccagcugugagccuuggc

SEQ ID NO: 2793048 - RNA, 21 nt, Human
ccaggccagagggagugacag

SEQ ID NO: 2793049 - RNA, 14 nt, Human
ccaggccagaggga

SEQ ID NO: 2793050 - RNA, 23 nt, Human
ccaggccccugccacccugggga

SEQ ID NO: 2793051 - RNA, 21 nt, Human
ccaggccccugccacccuggg

SEQ ID NO: 2793052 - RNA, 19 nt, Human
ccaggccccugccacccug

SEQ ID NO: 2793053 - RNA, 16 nt, Human
ccuaaaccaaaaacug

SEQ ID NO: 2793054 - RNA, 19 nt, Human
ccguuauaaagugugccac

SEQ ID NO: 2793055 - RNA, 16 nt, Human
ccuaaaauucagugga

SEQ ID NO: 2793056 - RNA, 22 nt, Human
ccguguugcaugaaggagcagc

SEQ ID NO: 2793057 - RNA, 13 nt, Human
ccuaaauuuaaug

SEQ ID NO: 2793058 - RNA, 16 nt, Human
ccuaaauuuaaugcug

SEQ ID NO: 2793059 - RNA, 18 nt, Human
ccuaaauuuaaugcugcc

SEQ ID NO: 2793060 - RNA, 19 nt, Human
ccuaaauuuaaugcugccu

SEQ ID NO: 2793061 - RNA, 20 nt, Human
ccuaaauuuaaugcugccuu

SEQ ID NO: 2793062 - RNA, 13 nt, Human
ccuacagagcugu

SEQ ID NO: 2793063 - RNA, 12 nt, Human
ccuacagcacua

SEQ ID NO: 2793064 - RNA, 15 nt, Human
ccuacagcacuacug

SEQ ID NO: 2793065 - RNA, 18 nt, Human
ccuacagcacuacugggu

SEQ ID NO: 2793066 - RNA, 19 nt, Human
ccuacagcacuacugggug

SEQ ID NO: 2793067 - RNA, 20 nt, Human
ccuacagcacuacugggugu

SEQ ID NO: 2793068 - RNA, 21 nt, Human
ccuacagcacuacuggguguc

SEQ ID NO: 2793069 - RNA, 22 nt, Human
ccuacagcacuacuggguguca

SEQ ID NO: 2793070 - RNA, 12 nt, Human
ccuacagcauug

SEQ ID NO: 2793071 - RNA, 17 nt, Human
ccuacagcuuugauccc

SEQ ID NO: 2793072 - RNA, 20 nt, Human
ccuacagcuuugaucccuga

SEQ ID NO: 2793073 - RNA, 21 nt, Human
ccuacagcuuugaucccugac

SEQ ID NO: 2793074 - RNA, 22 nt, Human
ccuacccagagauugcuucuca

SEQ ID NO: 2793075 - RNA, 18 nt, Human
ccuacccacccuccuuuc

SEQ ID NO: 2793076 - RNA, 17 nt, Human
ccuacccacaccucugc

SEQ ID NO: 2793077 - RNA, 18 nt, Human
ccuacccacaccucugcc

SEQ ID NO: 2793078 - RNA, 19 nt, Human
ccuacccacaccucugcca

SEQ ID NO: 2793079 - RNA, 20 nt, Human
ccuacccacaccucugccag

SEQ ID NO: 2793080 - RNA, 13 nt, Human
ccuacccacccuc

SEQ ID NO: 2793081 - RNA, 16 nt, Human
ccuacccacaccucug

SEQ ID NO: 2793082 - RNA, 19 nt, Human
ccuacaugaaacagaaaca

SEQ ID NO: 2793083 - RNA, 13 nt, Human
ccuaggugacaga

SEQ ID NO: 2793084 - RNA, 21 nt, Human
ccuagaacacuaacucaccag

SEQ ID NO: 2793085 - RNA, 12 nt, Human
ccuagaagaagc

SEQ ID NO: 2793086 - RNA, 21 nt, Human
ccuagacucuguaacaucacu

SEQ ID NO: 2793087 - RNA, 16 nt, Human
ccuagacccuccuccu

SEQ ID NO: 2793088 - RNA, 19 nt, Human
ccuagacuguaaaccucuc

SEQ ID NO: 2793089 - RNA, 12 nt, Human
ccuagacuuuag

SEQ ID NO: 2793090 - RNA, 20 nt, Human
ccuagacuuuaggcuuucag

SEQ ID NO: 2793091 - RNA, 23 nt, Human
ccuagacuuuaggcuuucagcuu

SEQ ID NO: 2793092 - RNA, 17 nt, Human
ccuagaaacccaagcuc

SEQ ID NO: 2793093 - RNA, 18 nt, Human
ccuagaaacccaagcucc

SEQ ID NO: 2793094 - RNA, 23 nt, Human
ccuagaaacccaagcuccuccuc

SEQ ID NO: 2793095 - RNA, 13 nt, Human
ccuacuuccccuu

SEQ ID NO: 2793096 - RNA, 13 nt, Human
ccuacuguucuaa

SEQ ID NO: 2793097 - RNA, 15 nt, Human
ccuacuguucuaaag

SEQ ID NO: 2793098 - RNA, 16 nt, Human
ccuacuguucuaaagc

SEQ ID NO: 2793099 - RNA, 19 nt, Human
ccuacuguucuaaagcucu

SEQ ID NO: 2793100 - RNA, 16 nt, Human
ccuacuuccccuuccu

SEQ ID NO: 2793101 - RNA, 22 nt, Human
ccuacuguucuaaagcucugac

SEQ ID NO: 2793102 - RNA, 23 nt, Human
ccuacuguucuaaagcucugaca

SEQ ID NO: 2793103 - RNA, 11 nt, Human
cccuucuuuuu

SEQ ID NO: 2793104 - RNA, 17 nt, Human
cccuugaaauuuuaaac

SEQ ID NO: 2793105 - RNA, 15 nt, Human
cccuugacaccgggg

SEQ ID NO: 2793106 - RNA, 19 nt, Human
cccuucuuuuucuucuuuu

SEQ ID NO: 2793107 - RNA, 15 nt, Human
cccuucuuuuaugag

SEQ ID NO: 2793108 - RNA, 22 nt, Human
cccuucuuuuaugagcagaagg

SEQ ID NO: 2793109 - RNA, 13 nt, Human
cccuuggccucag

SEQ ID NO: 2793110 - RNA, 12 nt, Human
cccuuggccuca

SEQ ID NO: 2793111 - RNA, 20 nt, Human
cccuuggcagguccuggcca

SEQ ID NO: 2793112 - RNA, 21 nt, Human
cccuuggcagguccuggccag

SEQ ID NO: 2793113 - RNA, 22 nt, Human
cccuuggacaagacaaaccaag

SEQ ID NO: 2793114 - RNA, 18 nt, Human
cccuugacaucuggaaac

SEQ ID NO: 2793115 - RNA, 12 nt, Human
cccuuggccugu

SEQ ID NO: 2793116 - RNA, 14 nt, Human
cccuuggccucaga

SEQ ID NO: 2793117 - RNA, 17 nt, Human
cccuugguggcaagagc

SEQ ID NO: 2793118 - RNA, 12 nt, Human
cccuugugugug

SEQ ID NO: 2793119 - RNA, 16 nt, Human
cccuuucagagacagc

SEQ ID NO: 2793120 - RNA, 13 nt, Human
cccuuuccaguua

SEQ ID NO: 2793121 - RNA, 15 nt, Human
cccuuccaaauaaua

SEQ ID NO: 2793122 - RNA, 19 nt, Human
cccuucccaaucagcacug

SEQ ID NO: 2793123 - RNA, 20 nt, Human
cccuucccaaucagcacuga

SEQ ID NO: 2793124 - RNA, 21 nt, Human
cccuucccaaucagcacugaa

SEQ ID NO: 2793125 - RNA, 11 nt, Human
cccuucauuug

SEQ ID NO: 2793126 - RNA, 19 nt, Human
cccuucauugauuuccugu

SEQ ID NO: 2793127 - RNA, 21 nt, Human
cccuucauugauuuccugugu

SEQ ID NO: 2793128 - RNA, 21 nt, Human
cccuucccaugacccaggcug

SEQ ID NO: 2793129 - RNA, 13 nt, Human
cccuucccccacc

SEQ ID NO: 2793130 - RNA, 14 nt, Human
cccuuccgacccuc

SEQ ID NO: 2793131 - RNA, 15 nt, Human
cccuuccgacccucu

SEQ ID NO: 2793132 - RNA, 16 nt, Human
cccuuccgacccucug

SEQ ID NO: 2793133 - RNA, 17 nt, Human
cccuuccgacccucugg

SEQ ID NO: 2793134 - RNA, 18 nt, Human
cccuuccgacccucuggg

SEQ ID NO: 2793135 - RNA, 19 nt, Human
cccuuccgacccucuggga

SEQ ID NO: 2793136 - RNA, 20 nt, Human
cccuuccgacccucugggaa

SEQ ID NO: 2793137 - RNA, 21 nt, Human
cccuuccgacccucugggaac

SEQ ID NO: 2793138 - RNA, 20 nt, Human
cccuuccuaauuccacagcu

SEQ ID NO: 2793139 - RNA, 19 nt, Human
cccuuccuaauuccacagc

SEQ ID NO: 2793140 - RNA, 14 nt, Human
cccuuccuaauucc

SEQ ID NO: 2793141 - RNA, 13 nt, Human
cccuuccuaauuc

SEQ ID NO: 2793142 - RNA, 13 nt, Human
cccuguucacucu

SEQ ID NO: 2793143 - RNA, 21 nt, Human
cccuucaguacccucucagcu

SEQ ID NO: 2793144 - RNA, 19 nt, Human
cccuucaguacccucucag

SEQ ID NO: 2793145 - RNA, 20 nt, Human
cccuucaguacccucucagc

SEQ ID NO: 2793146 - RNA, 12 nt, Human
cccuucagcccc

SEQ ID NO: 2793147 - RNA, 20 nt, Human
cccuucagcccccagccccu

SEQ ID NO: 2793148 - RNA, 22 nt, Human
cccuucagcccccagccccucc

SEQ ID NO: 2793149 - RNA, 17 nt, Human
cccuucaguacccucuc

SEQ ID NO: 2793150 - RNA, 16 nt, Human
cccuguuacaaagcug

SEQ ID NO: 2793151 - RNA, 12 nt, Human
cccuguuauuuu

SEQ ID NO: 2793152 - RNA, 21 nt, Human
cccuguuauuuucaaguagcu

SEQ ID NO: 2793153 - RNA, 14 nt, Human
cccuguucacucua

SEQ ID NO: 2793154 - RNA, 22 nt, Human
cccuguucacucuacuuagcau

SEQ ID NO: 2793155 - RNA, 17 nt, Human
ccgggaaccaagcagga

SEQ ID NO: 2793156 - RNA, 13 nt, Human
ccggaucagagca

SEQ ID NO: 2793157 - RNA, 17 nt, Human
ccggaucagagcaggac

SEQ ID NO: 2793158 - RNA, 19 nt, Human
ccggaucagagcaggaccu

SEQ ID NO: 2793159 - RNA, 20 nt, Human
ccggaucagagcaggaccuc

SEQ ID NO: 2793160 - RNA, 21 nt, Human
ccggaucagagcaggaccucc

SEQ ID NO: 2793161 - RNA, 17 nt, Human
ccggaggggccuggcag

SEQ ID NO: 2793162 - RNA, 21 nt, Human
ccggaggggccuggcagccgu

SEQ ID NO: 2793163 - RNA, 23 nt, Human
cccuuuccccgacgcccacccaa

SEQ ID NO: 2793164 - RNA, 22 nt, Human
cccuuuccccagcaucacuccc

SEQ ID NO: 2793165 - RNA, 21 nt, Human
ccggagauuggacggccugau

SEQ ID NO: 2793166 - RNA, 20 nt, Human
ccggagauuggacggccuga

SEQ ID NO: 2793167 - RNA, 19 nt, Human
ccggagauuggacggccug

SEQ ID NO: 2793168 - RNA, 17 nt, Human
ccggagauuggacggcc

SEQ ID NO: 2793169 - RNA, 12 nt, Human
ccggagaggaag

SEQ ID NO: 2793170 - RNA, 20 nt, Human
ccggagaggaagagacacuc

SEQ ID NO: 2793171 - RNA, 20 nt, Human
ccgguggcggccccagcacc

SEQ ID NO: 2793172 - RNA, 18 nt, Human
ccgguggcggccccagca

SEQ ID NO: 2793173 - RNA, 17 nt, Human
ccggugugccugcagcc

SEQ ID NO: 2793174 - RNA, 12 nt, Human
ccgguguucuaa

SEQ ID NO: 2793175 - RNA, 13 nt, Human
ccgguguucuaag

SEQ ID NO: 2793176 - RNA, 16 nt, Human
ccggugugccugcagc

SEQ ID NO: 2793177 - RNA, 15 nt, Human
ccggugugccugcag

SEQ ID NO: 2793178 - RNA, 21 nt, Human
ccggugugccugacugcccag

SEQ ID NO: 2793179 - RNA, 17 nt, Human
ccguggccaucccugug

SEQ ID NO: 2793180 - RNA, 19 nt, Human
ccguggccaucccugugag

SEQ ID NO: 2793181 - RNA, 20 nt, Human
ccguggccaucccugugagg

SEQ ID NO: 2793182 - RNA, 21 nt, Human
ccgguccagcuggccuggaca

SEQ ID NO: 2793183 - RNA, 18 nt, Human
ccggucccaccccucccu

SEQ ID NO: 2793184 - RNA, 20 nt, Human
ccggucccaccccucccucu

SEQ ID NO: 2793185 - RNA, 23 nt, Human
ccggucccaccccucccucuguc

SEQ ID NO: 2793186 - RNA, 15 nt, Human
ccgguccagcuggcc

SEQ ID NO: 2793187 - RNA, 16 nt, Human
ccggggccagcaccac

SEQ ID NO: 2793188 - RNA, 12 nt, Human
ccggggcccagg

SEQ ID NO: 2793189 - RNA, 13 nt, Human
ccggggcccaggg

SEQ ID NO: 2793190 - RNA, 15 nt, Human
ccggggacagaggcc

SEQ ID NO: 2793191 - RNA, 23 nt, Human
ccgggagccugaucaccugcccu

SEQ ID NO: 2793192 - RNA, 16 nt, Human
ccgggagccugaucac

SEQ ID NO: 2793193 - RNA, 17 nt, Human
ccgggagccuaggacca

SEQ ID NO: 2793194 - RNA, 18 nt, Human
ccgggagccuaggaccac

SEQ ID NO: 2793195 - RNA, 19 nt, Human
ccgggagccuaggaccacu

SEQ ID NO: 2793196 - RNA, 23 nt, Human
ccgggagccuaggaccacucagc

SEQ ID NO: 2793197 - RNA, 16 nt, Human
ccucacuguugaauuu

SEQ ID NO: 2793198 - RNA, 19 nt, Human
ccucacuuggucugccagg

SEQ ID NO: 2793199 - RNA, 21 nt, Human
ccucacuuggucugccaggcc

SEQ ID NO: 2793200 - RNA, 22 nt, Human
ccucacuuggucugccaggccc

SEQ ID NO: 2793201 - RNA, 23 nt, Human
ccucacuuggucugccaggcccc

SEQ ID NO: 2793202 - RNA, 17 nt, Human
ccucagacugcacccag

SEQ ID NO: 2793203 - RNA, 18 nt, Human
ccucagacugcacccagg

SEQ ID NO: 2793204 - RNA, 19 nt, Human
ccucagacugcacccagga

SEQ ID NO: 2793205 - RNA, 20 nt, Human
ccucagacugcacccaggag

SEQ ID NO: 2793206 - RNA, 21 nt, Human
ccucagacugcacccaggagg

SEQ ID NO: 2793207 - RNA, 16 nt, Human
ccucagagccaccccu

SEQ ID NO: 2793208 - RNA, 18 nt, Human
ccucacuggccaucccuc

SEQ ID NO: 2793209 - RNA, 22 nt, Human
ccucacuggccaucccucgugg

SEQ ID NO: 2793210 - RNA, 23 nt, Human
ccucacucuuuauagugcacaaa

SEQ ID NO: 2793211 - RNA, 14 nt, Human
ccucacugcccgca

SEQ ID NO: 2793212 - RNA, 15 nt, Human
ccucacugcccgcac

SEQ ID NO: 2793213 - RNA, 16 nt, Human
ccucacugcccgcaca

SEQ ID NO: 2793214 - RNA, 18 nt, Human
ccucacugcccgcacacc

SEQ ID NO: 2793215 - RNA, 20 nt, Human
ccucacugcccgcacacccu

SEQ ID NO: 2793216 - RNA, 21 nt, Human
ccucacugcccgcacacccuc

SEQ ID NO: 2793217 - RNA, 22 nt, Human
ccucacugcccgcacacccuca

SEQ ID NO: 2793218 - RNA, 16 nt, Human
ccucacugcucccuga

SEQ ID NO: 2793219 - RNA, 17 nt, Human
ccucacugcucccugaa

SEQ ID NO: 2793220 - RNA, 19 nt, Human
ccucacugcucccugaagc

SEQ ID NO: 2793221 - RNA, 21 nt, Human
ccucacugcucccugaagcca

SEQ ID NO: 2793222 - RNA, 12 nt, Human
ccucacuggcca

SEQ ID NO: 2793223 - RNA, 15 nt, Human
ccucacuggccaucc

SEQ ID NO: 2793224 - RNA, 17 nt, Human
ccucacuggccaucccu

SEQ ID NO: 2793225 - RNA, 17 nt, Human
ccucacucuggccucag

SEQ ID NO: 2793226 - RNA, 12 nt, Human
ccucacucugcc

SEQ ID NO: 2793227 - RNA, 13 nt, Human
ccucacucugcca

SEQ ID NO: 2793228 - RNA, 14 nt, Human
ccucacucugccag

SEQ ID NO: 2793229 - RNA, 15 nt, Human
ccucacucugccagg

SEQ ID NO: 2793230 - RNA, 16 nt, Human
ccucacucugccaggg

SEQ ID NO: 2793231 - RNA, 18 nt, Human
ccucacucugccagggca

SEQ ID NO: 2793232 - RNA, 19 nt, Human
ccucacucugccagggcag

SEQ ID NO: 2793233 - RNA, 22 nt, Human
ccucacucugccagggcagugc

SEQ ID NO: 2793234 - RNA, 13 nt, Human
ccucacccuugcg

SEQ ID NO: 2793235 - RNA, 16 nt, Human
ccucaccaugaugggg

SEQ ID NO: 2793236 - RNA, 14 nt, Human
ccucacccuggggc

SEQ ID NO: 2793237 - RNA, 18 nt, Human
ccucaccgagugggggca

SEQ ID NO: 2793238 - RNA, 14 nt, Human
ccucaccgcuuccc

SEQ ID NO: 2793239 - RNA, 15 nt, Human
ccucaccgcuucccu

SEQ ID NO: 2793240 - RNA, 17 nt, Human
ccucaccgcuucccucc

SEQ ID NO: 2793241 - RNA, 11 nt, Human
ccucacccugc

SEQ ID NO: 2793242 - RNA, 21 nt, Human
ccucagagugcaagccccugc

SEQ ID NO: 2793243 - RNA, 14 nt, Human
ccucagagugcaag

SEQ ID NO: 2793244 - RNA, 14 nt, Human
ccucagcaagcccu

SEQ ID NO: 2793245 - RNA, 16 nt, Human
ccucagaugucccuug

SEQ ID NO: 2793246 - RNA, 17 nt, Human
ccucagaugucccuuga

SEQ ID NO: 2793247 - RNA, 23 nt, Human
ccucagaugucccuugaugcaca

SEQ ID NO: 2793248 - RNA, 23 nt, Human
ccucagggagcagggaaggccug

SEQ ID NO: 2793249 - RNA, 22 nt, Human
ccucagggagcagggaaggccu

SEQ ID NO: 2793250 - RNA, 21 nt, Human
ccucagggagcagggaaggcc

SEQ ID NO: 2793251 - RNA, 17 nt, Human
ccucaggcuuccuuggc

SEQ ID NO: 2793252 - RNA, 16 nt, Human
ccucaggcuuccuugg

SEQ ID NO: 2793253 - RNA, 20 nt, Human
ccucagggagcagggaaggc

SEQ ID NO: 2793254 - RNA, 19 nt, Human
ccucagggagcagggaagg

SEQ ID NO: 2793255 - RNA, 17 nt, Human
ccucagggagcagggaa

SEQ ID NO: 2793256 - RNA, 18 nt, Human
ccuauuccugaacuauaa

SEQ ID NO: 2793257 - RNA, 20 nt, Human
ccuauguugauccauccagc

SEQ ID NO: 2793258 - RNA, 22 nt, Human
ccuauguugauccauccagcuu

SEQ ID NO: 2793259 - RNA, 15 nt, Human
ccuaucuccugacag

SEQ ID NO: 2793260 - RNA, 14 nt, Human
ccuaucuccugaca

SEQ ID NO: 2793261 - RNA, 16 nt, Human
ccuaucuccugacaga

SEQ ID NO: 2793262 - RNA, 22 nt, Human
ccucacagccucugaccccucc

SEQ ID NO: 2793263 - RNA, 23 nt, Human
ccucacagccucugaccccuccu

SEQ ID NO: 2793264 - RNA, 13 nt, Human
ccucacagugacc

SEQ ID NO: 2793265 - RNA, 18 nt, Human
ccucacagugacccuucc

SEQ ID NO: 2793266 - RNA, 19 nt, Human
ccucacagugacccuuccc

SEQ ID NO: 2793267 - RNA, 24 nt, Human
ccucacagugacccuucccaauca

SEQ ID NO: 2793268 - RNA, 21 nt, Human
ccucacauagcuacccaaaag

SEQ ID NO: 2793269 - RNA, 18 nt, Human
ccucacagccucugaccc

SEQ ID NO: 2793270 - RNA, 19 nt, Human
ccucacagccucugacccc

SEQ ID NO: 2793271 - RNA, 20 nt, Human
ccucacagccucugaccccu

SEQ ID NO: 2793272 - RNA, 21 nt, Human
ccucacagccucugaccccuc

SEQ ID NO: 2793273 - RNA, 12 nt, Human
ccucacagccuc

SEQ ID NO: 2793274 - RNA, 13 nt, Human
ccucacagccucu

SEQ ID NO: 2793275 - RNA, 14 nt, Human
ccucacagccucug

SEQ ID NO: 2793276 - RNA, 15 nt, Human
ccucacagccucuga

SEQ ID NO: 2793277 - RNA, 16 nt, Human
ccucacagccucugac

SEQ ID NO: 2793278 - RNA, 22 nt, Human
ccuauugcaaagguuccaacug

SEQ ID NO: 2793279 - RNA, 17 nt, Human
ccucacacacccugagg

SEQ ID NO: 2793280 - RNA, 23 nt, Human
ccucacacacccugaggucaggg

SEQ ID NO: 2793281 - RNA, 15 nt, Human
ccuaggugacagagu

SEQ ID NO: 2793282 - RNA, 12 nt, Human
ccuagugaaccu

SEQ ID NO: 2793283 - RNA, 18 nt, Human
ccuagugaaccucacccc

SEQ ID NO: 2793284 - RNA, 13 nt, Human
ccuaucuccugac

SEQ ID NO: 2793285 - RNA, 16 nt, Human
ccuaucuaucuuccaa

SEQ ID NO: 2793286 - RNA, 21 nt, Human
ccuaucuaucuuccaaaugca

SEQ ID NO: 2793287 - RNA, 13 nt, Human
ccuauccuuggca

SEQ ID NO: 2793288 - RNA, 14 nt, Human
ccuauccuuggcac

SEQ ID NO: 2793289 - RNA, 16 nt, Human
ccuauccuuggcacca

SEQ ID NO: 2793290 - RNA, 17 nt, Human
ccuauccuuggcaccaa

SEQ ID NO: 2793291 - RNA, 19 nt, Human
ccuauccuuggcaccaaag

SEQ ID NO: 2793292 - RNA, 22 nt, Human
ccuaucgcccccuacgcgccuu

SEQ ID NO: 2793293 - RNA, 15 nt, Human
ccuauccucacugcc

SEQ ID NO: 2793294 - RNA, 13 nt, Human
ccuauccugcugu

SEQ ID NO: 2793295 - RNA, 17 nt, Human
ccuauccacugggcaca

SEQ ID NO: 2793296 - RNA, 13 nt, Human
ccuaucccaccuc

SEQ ID NO: 2793297 - RNA, 13 nt, Human
ccuaguggcuugu

SEQ ID NO: 2793298 - RNA, 15 nt, Human
ccuaguggcuugucc

SEQ ID NO: 2793299 - RNA, 16 nt, Human
ccuaguggcuuguccu

SEQ ID NO: 2793300 - RNA, 15 nt, Human
ccuccccuccuccug

SEQ ID NO: 2793301 - RNA, 13 nt, Human
ccuccccucacag

SEQ ID NO: 2793302 - RNA, 15 nt, Human
ccuccccucacagcc

SEQ ID NO: 2793303 - RNA, 16 nt, Human
ccuccccucacagccu

SEQ ID NO: 2793304 - RNA, 21 nt, Human
ccuccccucacagccucugac

SEQ ID NO: 2793305 - RNA, 18 nt, Human
ccuccccucacagccucu

SEQ ID NO: 2793306 - RNA, 19 nt, Human
ccuccccucacagccucug

SEQ ID NO: 2793307 - RNA, 15 nt, Human
ccuccccuccccugc

SEQ ID NO: 2793308 - RNA, 16 nt, Human
ccuccccuccccugcu

SEQ ID NO: 2793309 - RNA, 19 nt, Human
ccuccccuccccugcugca

SEQ ID NO: 2793310 - RNA, 14 nt, Human
ccuccccuccccug

SEQ ID NO: 2793311 - RNA, 15 nt, Human
ccuccccugcccugg

SEQ ID NO: 2793312 - RNA, 13 nt, Human
ccuccccugcccu

SEQ ID NO: 2793313 - RNA, 14 nt, Human
ccuccccugccauu

SEQ ID NO: 2793314 - RNA, 18 nt, Human
ccucccgaauagcuggga

SEQ ID NO: 2793315 - RNA, 23 nt, Human
ccucccaaagugcugggauuaca

SEQ ID NO: 2793316 - RNA, 13 nt, Human
ccucccaacccag

SEQ ID NO: 2793317 - RNA, 16 nt, Human
ccucccccgccacucc

SEQ ID NO: 2793318 - RNA, 17 nt, Human
ccucccccgccacuccu

SEQ ID NO: 2793319 - RNA, 23 nt, Human
ccuccccggcucgagcaguccug

SEQ ID NO: 2793320 - RNA, 17 nt, Human
ccuccccgucucauucc

SEQ ID NO: 2793321 - RNA, 17 nt, Human
ccuccccggcacccucu

SEQ ID NO: 2793322 - RNA, 20 nt, Human
ccuccccggcacccucuggc

SEQ ID NO: 2793323 - RNA, 21 nt, Human
ccuccccgcaccccccaagcu

SEQ ID NO: 2793324 - RNA, 15 nt, Human
ccuccccgcaccccc

SEQ ID NO: 2793325 - RNA, 20 nt, Human
ccucccgaauagcugggacu

SEQ ID NO: 2793326 - RNA, 19 nt, Human
ccucccgaauagcugggac

SEQ ID NO: 2793327 - RNA, 21 nt, Human
ccucccgaauagcugggacua

SEQ ID NO: 2793328 - RNA, 16 nt, Human
ccuccccugcccuggu

SEQ ID NO: 2793329 - RNA, 13 nt, Human
ccuccccugccuu

SEQ ID NO: 2793330 - RNA, 14 nt, Human
ccuccccugccuug

SEQ ID NO: 2793331 - RNA, 15 nt, Human
ccuccccugccuugc

SEQ ID NO: 2793332 - RNA, 12 nt, Human
ccuccccugcug

SEQ ID NO: 2793333 - RNA, 13 nt, Human
ccuccccugcugc

SEQ ID NO: 2793334 - RNA, 14 nt, Human
ccuccccugcugca

SEQ ID NO: 2793335 - RNA, 18 nt, Human
ccucccgaguagcuggga

SEQ ID NO: 2793336 - RNA, 17 nt, Human
ccucccgaguagcuggg

SEQ ID NO: 2793337 - RNA, 18 nt, Human
ccucccucucucuucugc

SEQ ID NO: 2793338 - RNA, 13 nt, Human
ccucccucucucu

SEQ ID NO: 2793339 - RNA, 20 nt, Human
ccuccucacuggccaucccu

SEQ ID NO: 2793340 - RNA, 14 nt, Human
ccuccucacuggcc

SEQ ID NO: 2793341 - RNA, 15 nt, Human
ccuccucacuggcca

SEQ ID NO: 2793342 - RNA, 17 nt, Human
ccuccucacuggccauc

SEQ ID NO: 2793343 - RNA, 19 nt, Human
ccuccucacuggccauccc

SEQ ID NO: 2793344 - RNA, 22 nt, Human
ccuccucaccucuggacuggcu

SEQ ID NO: 2793345 - RNA, 21 nt, Human
ccuccucaccucuggacuggc

SEQ ID NO: 2793346 - RNA, 16 nt, Human
ccuccucaccucugga

SEQ ID NO: 2793347 - RNA, 18 nt, Human
ccucccucugaccugcag

SEQ ID NO: 2793348 - RNA, 14 nt, Human
ccucccucugaccu

SEQ ID NO: 2793349 - RNA, 22 nt, Human
ccucccucucucuucugcucca

SEQ ID NO: 2793350 - RNA, 20 nt, Human
ccucccucucucuucugcuc

SEQ ID NO: 2793351 - RNA, 15 nt, Human
ccucccucuuguuuu

SEQ ID NO: 2793352 - RNA, 18 nt, Human
ccucccucugauuuuuca

SEQ ID NO: 2793353 - RNA, 19 nt, Human
ccucccucugaccugcagg

SEQ ID NO: 2793354 - RNA, 13 nt, Human
ccuccucaccucu

SEQ ID NO: 2793355 - RNA, 15 nt, Human
ccuccucaccucugg

SEQ ID NO: 2793356 - RNA, 14 nt, Human
ccuccucaccucug

SEQ ID NO: 2793357 - RNA, 19 nt, Human
ccuccaugcugccuccaga

SEQ ID NO: 2793358 - RNA, 16 nt, Human
ccuccaugcugccucc

SEQ ID NO: 2793359 - RNA, 17 nt, Human
ccucccaaagugcuggg

SEQ ID NO: 2793360 - RNA, 15 nt, Human
ccuccaugugggcua

SEQ ID NO: 2793361 - RNA, 12 nt, Human
ccuccauguggg

SEQ ID NO: 2793362 - RNA, 23 nt, Human
ccuccaguccaaggaaaccacag

SEQ ID NO: 2793363 - RNA, 14 nt, Human
ccuccagucccccu

SEQ ID NO: 2793364 - RNA, 16 nt, Human
ccuccaguaccuugcu

SEQ ID NO: 2793365 - RNA, 17 nt, Human
ccuccaguaccuugcuu

SEQ ID NO: 2793366 - RNA, 19 nt, Human
ccuccauauuuucuuuaaa

SEQ ID NO: 2793367 - RNA, 21 nt, Human
ccuccauccuauccacugggc

SEQ ID NO: 2793368 - RNA, 22 nt, Human
ccucacugugguaaaugccaca

SEQ ID NO: 2793369 - RNA, 14 nt, Human
ccucaguugugcag

SEQ ID NO: 2793370 - RNA, 15 nt, Human
ccucaguugugcagc

SEQ ID NO: 2793371 - RNA, 16 nt, Human
ccucaguugugcagcu

SEQ ID NO: 2793372 - RNA, 17 nt, Human
ccucaguugugcagcuu

SEQ ID NO: 2793373 - RNA, 22 nt, Human
ccucaguucccuuggccucaga

SEQ ID NO: 2793374 - RNA, 21 nt, Human
ccucaguucccuuggccucag

SEQ ID NO: 2793375 - RNA, 20 nt, Human
ccucaguucccuuggccuca

SEQ ID NO: 2793376 - RNA, 19 nt, Human
ccucaguucccuuggccuc

SEQ ID NO: 2793377 - RNA, 18 nt, Human
ccucaguucccuuggccu

SEQ ID NO: 2793378 - RNA, 17 nt, Human
ccucaguucccuuggcc

SEQ ID NO: 2793379 - RNA, 16 nt, Human
ccucaguucccuuggc

SEQ ID NO: 2793380 - RNA, 15 nt, Human
ccucaguucccuugg

SEQ ID NO: 2793381 - RNA, 21 nt, Human
ccuccagaacucacuggggcc

SEQ ID NO: 2793382 - RNA, 22 nt, Human
ccuccagaacucacuggggccu

SEQ ID NO: 2793383 - RNA, 12 nt, Human
ccuccagaagcc

SEQ ID NO: 2793384 - RNA, 13 nt, Human
ccuccagaagccu

SEQ ID NO: 2793385 - RNA, 21 nt, Human
ccuccagccugcccaagccca

SEQ ID NO: 2793386 - RNA, 23 nt, Human
ccuccagccugcccaagcccagg

SEQ ID NO: 2793387 - RNA, 22 nt, Human
ccuccagccuuuggccuuggcu

SEQ ID NO: 2793388 - RNA, 12 nt, Human
ccuccacuguca

SEQ ID NO: 2793389 - RNA, 13 nt, Human
ccuccacugucac

SEQ ID NO: 2793390 - RNA, 16 nt, Human
ccuccaggcccgucug

SEQ ID NO: 2793391 - RNA, 20 nt, Human
ccuccaggcccgucugucca

SEQ ID NO: 2793392 - RNA, 19 nt, Human
ccuccagaagcacugggau

SEQ ID NO: 2793393 - RNA, 22 nt, Human
ccuccaggaaugaucucuucuu

SEQ ID NO: 2793394 - RNA, 20 nt, Human
ccuccagcuucaggcaggcc

SEQ ID NO: 2793395 - RNA, 14 nt, Human
ccuccagcugcacc

SEQ ID NO: 2793396 - RNA, 15 nt, Human
ccuccagcugcacca

SEQ ID NO: 2793397 - RNA, 16 nt, Human
ccuccagcugcaccag

SEQ ID NO: 2793398 - RNA, 18 nt, Human
ccuccagcugcaccagag

SEQ ID NO: 2793399 - RNA, 19 nt, Human
ccuccagcugcaccagagc

SEQ ID NO: 2793400 - RNA, 20 nt, Human
ccuccagcugcaccagagca

SEQ ID NO: 2793401 - RNA, 20 nt, Human
ccucuccccagcaagugaga

SEQ ID NO: 2793402 - RNA, 13 nt, Human
ccucuccccaccc

SEQ ID NO: 2793403 - RNA, 14 nt, Human
ccucuccccacccc

SEQ ID NO: 2793404 - RNA, 15 nt, Human
ccucuccccaccccu

SEQ ID NO: 2793405 - RNA, 10 nt, Human
ccucucccug

SEQ ID NO: 2793406 - RNA, 22 nt, Human
ccucucccgccagacuguuaga

SEQ ID NO: 2793407 - RNA, 19 nt, Human
ccucucccuguccccaccc

SEQ ID NO: 2793408 - RNA, 15 nt, Human
ccucuccccagcaag

SEQ ID NO: 2793409 - RNA, 11 nt, Human
ccucucccagg

SEQ ID NO: 2793410 - RNA, 15 nt, Human
ccucucccacgggac

SEQ ID NO: 2793411 - RNA, 15 nt, Human
ccucucccaagucca

SEQ ID NO: 2793412 - RNA, 15 nt, Human
ccucuccauccugcu

SEQ ID NO: 2793413 - RNA, 14 nt, Human
ccucuacuuuccag

SEQ ID NO: 2793414 - RNA, 16 nt, Human
ccucuacuuuccaggc

SEQ ID NO: 2793415 - RNA, 18 nt, Human
ccucuacuuuccaggcua

SEQ ID NO: 2793416 - RNA, 22 nt, Human
ccucuagaaacgaguugguguc

SEQ ID NO: 2793417 - RNA, 14 nt, Human
ccucuacccaaacc

SEQ ID NO: 2793418 - RNA, 16 nt, Human
ccucuacccaaacccu

SEQ ID NO: 2793419 - RNA, 19 nt, Human
ccucuacccaaacccuagg

SEQ ID NO: 2793420 - RNA, 18 nt, Human
ccucuacauggacucaga

SEQ ID NO: 2793421 - RNA, 21 nt, Human
ccucuacauggacucagagaa

SEQ ID NO: 2793422 - RNA, 12 nt, Human
ccuccuccaggg

SEQ ID NO: 2793423 - RNA, 20 nt, Human
ccuccuccagggugauuuua

SEQ ID NO: 2793424 - RNA, 19 nt, Human
ccuccucuaagguugggca

SEQ ID NO: 2793425 - RNA, 23 nt, Human
ccuccucggaaccgcucaccuag

SEQ ID NO: 2793426 - RNA, 24 nt, Human
ccuccucggaaccgcucaccuaga

SEQ ID NO: 2793427 - RNA, 16 nt, Human
ccuccucucugcccua

SEQ ID NO: 2793428 - RNA, 18 nt, Human
ccuccucguuccuuucuc

SEQ ID NO: 2793429 - RNA, 13 nt, Human
ccuccucucagug

SEQ ID NO: 2793430 - RNA, 14 nt, Human
ccuccucucagugu

SEQ ID NO: 2793431 - RNA, 15 nt, Human
ccuccucucugcccu

SEQ ID NO: 2793432 - RNA, 13 nt, Human
ccuccucucugcc

SEQ ID NO: 2793433 - RNA, 13 nt, Human
ccuccuuuaucac

SEQ ID NO: 2793434 - RNA, 17 nt, Human
ccuccuugcuuguuaca

SEQ ID NO: 2793435 - RNA, 15 nt, Human
ccuccuuggugccug

SEQ ID NO: 2793436 - RNA, 17 nt, Human
ccuccuuggugccuggc

SEQ ID NO: 2793437 - RNA, 15 nt, Human
ccuccuuguccaccc

SEQ ID NO: 2793438 - RNA, 16 nt, Human
ccuccuuguccaccca

SEQ ID NO: 2793439 - RNA, 14 nt, Human
ccucuaaugagacu

SEQ ID NO: 2793440 - RNA, 19 nt, Human
ccucuaagguugggcaggg

SEQ ID NO: 2793441 - RNA, 15 nt, Human
ccucuaaugagacug

SEQ ID NO: 2793442 - RNA, 18 nt, Human
ccucugauaugggacuga

SEQ ID NO: 2793443 - RNA, 19 nt, Human
ccucugagucaccaucuua

SEQ ID NO: 2793444 - RNA, 12 nt, Human
ccucugagccuu

SEQ ID NO: 2793445 - RNA, 11 nt, Human
ccucugagccu

SEQ ID NO: 2793446 - RNA, 13 nt, Human
ccucugaggcuga

SEQ ID NO: 2793447 - RNA, 20 nt, Human
ccucugacacacagcucugu

SEQ ID NO: 2793448 - RNA, 19 nt, Human
ccucugacacacagcucug

SEQ ID NO: 2793449 - RNA, 14 nt, Human
ccucugacacacag

SEQ ID NO: 2793450 - RNA, 20 nt, Human
ccucugaaugaaccuucugg

SEQ ID NO: 2793451 - RNA, 13 nt, Human
ccucugacacaca

SEQ ID NO: 2793452 - RNA, 14 nt, Human
ccucuccguuuauu

SEQ ID NO: 2793453 - RNA, 23 nt, Human
ccucuccguuuauuauaaacugu

SEQ ID NO: 2793454 - RNA, 15 nt, Human
ccucuccuacucacu

SEQ ID NO: 2793455 - RNA, 19 nt, Human
ccucugaaacccuggacca

SEQ ID NO: 2793456 - RNA, 17 nt, Human
ccucugaaaguuguaca

SEQ ID NO: 2793457 - RNA, 18 nt, Human
ccucugaaaguuguacau

SEQ ID NO: 2793458 - RNA, 19 nt, Human
ccucugaaaguuguacaug

SEQ ID NO: 2793459 - RNA, 16 nt, Human
ccucugaaacccugga

SEQ ID NO: 2793460 - RNA, 18 nt, Human
ccucuccucauguucugc

SEQ ID NO: 2793461 - RNA, 13 nt, Human
ccucucccuguug

SEQ ID NO: 2793462 - RNA, 17 nt, Human
ccucucccuuacccugg

SEQ ID NO: 2793463 - RNA, 21 nt, Human
ccucugacacacagcucuguc

SEQ ID NO: 2793464 - RNA, 13 nt, Human
ccucugaccaaca

SEQ ID NO: 2793465 - RNA, 17 nt, Human
ccucugaccaacaggcu

SEQ ID NO: 2793466 - RNA, 18 nt, Human
ccucugaccaacaggcug

SEQ ID NO: 2793467 - RNA, 20 nt, Human
ccucugaccaacaggcuguu

SEQ ID NO: 2793468 - RNA, 22 nt, Human
ccucugacccuagcucuuuccu

SEQ ID NO: 2793469 - RNA, 20 nt, Human
ccucugaccccuccucacug

SEQ ID NO: 2793470 - RNA, 22 nt, Human
ccucugaccccuccucacuggc

SEQ ID NO: 2793471 - RNA, 14 nt, Human
ccucugaccugcac

SEQ ID NO: 2793472 - RNA, 16 nt, Human
ccucugaccugcacug

SEQ ID NO: 2793473 - RNA, 13 nt, Human
ccucugaccccuc

SEQ ID NO: 2793474 - RNA, 14 nt, Human
ccucugaccccucc

SEQ ID NO: 2793475 - RNA, 15 nt, Human
ccucugaccccuccu

SEQ ID NO: 2793476 - RNA, 16 nt, Human
ccucugaccccuccuc

SEQ ID NO: 2793477 - RNA, 17 nt, Human
ccucugaccccuccuca

SEQ ID NO: 2793478 - RNA, 18 nt, Human
ccucugaccccuccucac

SEQ ID NO: 2793479 - RNA, 19 nt, Human
ccucugaccccuccucacu

SEQ ID NO: 2793480 - RNA, 17 nt, Human
ccucugaccugcaggcc

SEQ ID NO: 2793481 - RNA, 16 nt, Human
ccucugaccugcaggc

SEQ ID NO: 2793482 - RNA, 15 nt, Human
ccucugaccugcagg

SEQ ID NO: 2793483 - RNA, 17 nt, Human
ccucugaccugcacugg

SEQ ID NO: 2793484 - RNA, 20 nt, Human
ccucugaccugcaggccaag

SEQ ID NO: 2793485 - RNA, 19 nt, Human
ccucugaccugcaggccaa

SEQ ID NO: 2793486 - RNA, 12 nt, Human
cccuccccuccc

SEQ ID NO: 2793487 - RNA, 16 nt, Human
cccuccccuccccugc

SEQ ID NO: 2793488 - RNA, 17 nt, Human
cccuccccuccccugcu

SEQ ID NO: 2793489 - RNA, 22 nt, Human
cccuccaucuguacuuggucca

SEQ ID NO: 2793490 - RNA, 21 nt, Human
cccuccgaccacuuccagggg

SEQ ID NO: 2793491 - RNA, 14 nt, Human
cccucccuucaacc

SEQ ID NO: 2793492 - RNA, 17 nt, Human
cccuccaugugggcuag

SEQ ID NO: 2793493 - RNA, 16 nt, Human
cccuccacagccgcag

SEQ ID NO: 2793494 - RNA, 16 nt, Human
cccuccagcacaaaca

SEQ ID NO: 2793495 - RNA, 18 nt, Human
cccuccagcacaaacaca

SEQ ID NO: 2793496 - RNA, 12 nt, Human
cccuccagccuu

SEQ ID NO: 2793497 - RNA, 23 nt, Human
cccuccagccuuuggccuuggcu

SEQ ID NO: 2793498 - RNA, 21 nt, Human
cccuccccggcacccucuggc

SEQ ID NO: 2793499 - RNA, 17 nt, Human
cccuccccgcacccccc

SEQ ID NO: 2793500 - RNA, 16 nt, Human
cccuccccgcaccccc

SEQ ID NO: 2793501 - RNA, 13 nt, Human
cccucccccuugu

SEQ ID NO: 2793502 - RNA, 15 nt, Human
cccucccccuugucc

SEQ ID NO: 2793503 - RNA, 12 nt, Human
cccucccccuug

SEQ ID NO: 2793504 - RNA, 19 nt, Human
cccuccaucuaaacugccc

SEQ ID NO: 2793505 - RNA, 15 nt, Human
cccucccaagcuggc

SEQ ID NO: 2793506 - RNA, 21 nt, Human
cccucccaagcuggcuggggu

SEQ ID NO: 2793507 - RNA, 18 nt, Human
cccucaucuugaagggcc

SEQ ID NO: 2793508 - RNA, 21 nt, Human
cccucaucuugaagggcccag

SEQ ID NO: 2793509 - RNA, 23 nt, Human
cccucaucuugaagggcccagga

SEQ ID NO: 2793510 - RNA, 17 nt, Human
cccucaucuaugaggaa

SEQ ID NO: 2793511 - RNA, 16 nt, Human
cccucauuucaggagc

SEQ ID NO: 2793512 - RNA, 11 nt, Human
cccucauuuuu

SEQ ID NO: 2793513 - RNA, 17 nt, Human
cccucauuacugggccu

SEQ ID NO: 2793514 - RNA, 18 nt, Human
cccucauuacugggccuu

SEQ ID NO: 2793515 - RNA, 22 nt, Human
cccucauuccaccuucccaugc

SEQ ID NO: 2793516 - RNA, 21 nt, Human
cccucauggccccucugaccu

SEQ ID NO: 2793517 - RNA, 16 nt, Human
cccucauggccccucu

SEQ ID NO: 2793518 - RNA, 17 nt, Human
cccucauggccccucug

SEQ ID NO: 2793519 - RNA, 19 nt, Human
cccucauagcccucacccu

SEQ ID NO: 2793520 - RNA, 13 nt, Human
cccucaguugugc

SEQ ID NO: 2793521 - RNA, 14 nt, Human
cccucaguugugca

SEQ ID NO: 2793522 - RNA, 16 nt, Human
cccucaguugugcagc

SEQ ID NO: 2793523 - RNA, 17 nt, Human
cccucaguugugcagcu

SEQ ID NO: 2793524 - RNA, 18 nt, Human
cccucaguugugcagcuu

SEQ ID NO: 2793525 - RNA, 15 nt, Human
cccucaggggaaaac

SEQ ID NO: 2793526 - RNA, 22 nt, Human
cccucaggggaaaacuguuacc

SEQ ID NO: 2793527 - RNA, 15 nt, Human
cccucauagcccuca

SEQ ID NO: 2793528 - RNA, 13 nt, Human
cccucauagcccu

SEQ ID NO: 2793529 - RNA, 13 nt, Human
cccggcagacgcc

SEQ ID NO: 2793530 - RNA, 12 nt, Human
cccggcaggccc

SEQ ID NO: 2793531 - RNA, 13 nt, Human
cccggcaggcccu

SEQ ID NO: 2793532 - RNA, 14 nt, Human
cccggcaggcccug

SEQ ID NO: 2793533 - RNA, 15 nt, Human
cccggcaggcccugc

SEQ ID NO: 2793534 - RNA, 16 nt, Human
cccggcaggcccugca

SEQ ID NO: 2793535 - RNA, 17 nt, Human
cccggcaggcccugcag

SEQ ID NO: 2793536 - RNA, 18 nt, Human
cccggcaggcccugcagu

SEQ ID NO: 2793537 - RNA, 19 nt, Human
cccggcaggcccugcagug

SEQ ID NO: 2793538 - RNA, 16 nt, Human
cccggcacccucuggc

SEQ ID NO: 2793539 - RNA, 17 nt, Human
cccggcacccucuggcc

SEQ ID NO: 2793540 - RNA, 19 nt, Human
cccggcacccucuggccgc

SEQ ID NO: 2793541 - RNA, 14 nt, Human
cccggaggaaaucu

SEQ ID NO: 2793542 - RNA, 15 nt, Human
cccggaggaaaucug

SEQ ID NO: 2793543 - RNA, 16 nt, Human
cccggaggaaaucugc

SEQ ID NO: 2793544 - RNA, 20 nt, Human
cccggaggaaaucugcagag

SEQ ID NO: 2793545 - RNA, 22 nt, Human
cccggaggaaaucugcagaggg

SEQ ID NO: 2793546 - RNA, 17 nt, Human
cccggagcugccccucu

SEQ ID NO: 2793547 - RNA, 22 nt, Human
cccggagcugccccucucuggg

SEQ ID NO: 2793548 - RNA, 19 nt, Human
cccggagauuggacggccu

SEQ ID NO: 2793549 - RNA, 17 nt, Human
cccggaggggccuggca

SEQ ID NO: 2793550 - RNA, 18 nt, Human
cccggaggggccuggcag

SEQ ID NO: 2793551 - RNA, 16 nt, Human
cccggauucugggagg

SEQ ID NO: 2793552 - RNA, 14 nt, Human
cccggauucuggga

SEQ ID NO: 2793553 - RNA, 18 nt, Human
cccggagguugggugggc

SEQ ID NO: 2793554 - RNA, 14 nt, Human
cccggaucagagca

SEQ ID NO: 2793555 - RNA, 15 nt, Human
cccggaucagagcag

SEQ ID NO: 2793556 - RNA, 16 nt, Human
cccggaucagagcagg

SEQ ID NO: 2793557 - RNA, 17 nt, Human
cccggaucagagcagga

SEQ ID NO: 2793558 - RNA, 20 nt, Human
cccggaucagagcaggaccu

SEQ ID NO: 2793559 - RNA, 21 nt, Human
cccggaucagagcaggaccuc

SEQ ID NO: 2793560 - RNA, 22 nt, Human
cccggaucagagcaggaccucc

SEQ ID NO: 2793561 - RNA, 13 nt, Human
cccggaugcugcu

SEQ ID NO: 2793562 - RNA, 15 nt, Human
cccggaugcugcuuc

SEQ ID NO: 2793563 - RNA, 18 nt, Human
cccuaaaccccuguccca

SEQ ID NO: 2793564 - RNA, 14 nt, Human
cccuaaaagcacac

SEQ ID NO: 2793565 - RNA, 17 nt, Human
cccuaaccccuuccaga

SEQ ID NO: 2793566 - RNA, 21 nt, Human
cccuaaccccuuccagaucac

SEQ ID NO: 2793567 - RNA, 12 nt, Human
cccuaaacugua

SEQ ID NO: 2793568 - RNA, 12 nt, Human
cccguuucucca

SEQ ID NO: 2793569 - RNA, 16 nt, Human
cccguuucuccaccua

SEQ ID NO: 2793570 - RNA, 18 nt, Human
cccguggccaucccugug

SEQ ID NO: 2793571 - RNA, 19 nt, Human
cccguggccaucccuguga

SEQ ID NO: 2793572 - RNA, 20 nt, Human
cccuagcccagcgcucugcc

SEQ ID NO: 2793573 - RNA, 13 nt, Human
cccuagcccagga

SEQ ID NO: 2793574 - RNA, 16 nt, Human
cccuagcccaggagag

SEQ ID NO: 2793575 - RNA, 17 nt, Human
cccuagcccaggagaga

SEQ ID NO: 2793576 - RNA, 20 nt, Human
cccuagccaaugucuccucc

SEQ ID NO: 2793577 - RNA, 17 nt, Human
cccuagccagcacuugu

SEQ ID NO: 2793578 - RNA, 13 nt, Human
cccuagcagugaa

SEQ ID NO: 2793579 - RNA, 22 nt, Human
cccuagaucuuucuauuccaaa

SEQ ID NO: 2793580 - RNA, 13 nt, Human
cccuagacuuuag

SEQ ID NO: 2793581 - RNA, 22 nt, Human
cccuagacuuuaggcuuucagc

SEQ ID NO: 2793582 - RNA, 15 nt, Human
cccuagagccugccu

SEQ ID NO: 2793583 - RNA, 18 nt, Human
cccuagagccugccugga

SEQ ID NO: 2793584 - RNA, 13 nt, Human
cccuagauaguuu

SEQ ID NO: 2793585 - RNA, 18 nt, Human
cccuagauaguuuauuau

SEQ ID NO: 2793586 - RNA, 20 nt, Human
cccuagagccugccuggagc

SEQ ID NO: 2793587 - RNA, 21 nt, Human
cccuagagccugccuggagcg

SEQ ID NO: 2793588 - RNA, 18 nt, Human
cccuaaggcaugugugaa

SEQ ID NO: 2793589 - RNA, 20 nt, Human
cccuaaggcaugugugaaac

SEQ ID NO: 2793590 - RNA, 14 nt, Human
cccuaagccagccu

SEQ ID NO: 2793591 - RNA, 15 nt, Human
cccuaagccagccug

SEQ ID NO: 2793592 - RNA, 16 nt, Human
cccuaagccagccugg

SEQ ID NO: 2793593 - RNA, 23 nt, Human
cccuaagccagccugguccaugc

SEQ ID NO: 2793594 - RNA, 18 nt, Human
cccuacuucuuuugcucu

SEQ ID NO: 2793595 - RNA, 19 nt, Human
cccuacuucuuuugcucuu

SEQ ID NO: 2793596 - RNA, 17 nt, Human
cccuagaaacccaagcu

SEQ ID NO: 2793597 - RNA, 18 nt, Human
cccuagaaacccaagcuc

SEQ ID NO: 2793598 - RNA, 19 nt, Human
cccuagaaacccaagcucc

SEQ ID NO: 2793599 - RNA, 12 nt, Human
cccuaagagacu

SEQ ID NO: 2793600 - RNA, 19 nt, Human
ccccagggucuucccuacc

SEQ ID NO: 2793601 - RNA, 16 nt, Human
ccccagggucuucccu

SEQ ID NO: 2793602 - RNA, 17 nt, Human
ccccagguggaaggcag

SEQ ID NO: 2793603 - RNA, 17 nt, Human
ccccaggggucccagcc

SEQ ID NO: 2793604 - RNA, 22 nt, Human
ccccaggggucccagccacccc

SEQ ID NO: 2793605 - RNA, 19 nt, Human
ccccaggggucccagccac

SEQ ID NO: 2793606 - RNA, 21 nt, Human
ccccagggccugagccuggcc

SEQ ID NO: 2793607 - RNA, 19 nt, Human
ccccagggccugagccugg

SEQ ID NO: 2793608 - RNA, 14 nt, Human
ccccagggcacccu

SEQ ID NO: 2793609 - RNA, 15 nt, Human
ccccagggcacccug

SEQ ID NO: 2793610 - RNA, 16 nt, Human
ccccagggccugagcc

SEQ ID NO: 2793611 - RNA, 15 nt, Human
ccccagggccugagc

SEQ ID NO: 2793612 - RNA, 14 nt, Human
ccccagggccugag

SEQ ID NO: 2793613 - RNA, 13 nt, Human
ccccaccacacau

SEQ ID NO: 2793614 - RNA, 14 nt, Human
ccccaccacacauc

SEQ ID NO: 2793615 - RNA, 18 nt, Human
ccccaccacacaucccag

SEQ ID NO: 2793616 - RNA, 19 nt, Human
ccccaccacacaucccagc

SEQ ID NO: 2793617 - RNA, 23 nt, Human
ccccacacuuguuccagcucuuu

SEQ ID NO: 2793618 - RNA, 17 nt, Human
ccccaccacuucuuuua

SEQ ID NO: 2793619 - RNA, 22 nt, Human
ccccagcccccaaagcagcccu

SEQ ID NO: 2793620 - RNA, 15 nt, Human
ccccagccccuagcc

SEQ ID NO: 2793621 - RNA, 18 nt, Human
ccccagccccuagcccag

SEQ ID NO: 2793622 - RNA, 20 nt, Human
ccccagccccuagcccagga

SEQ ID NO: 2793623 - RNA, 22 nt, Human
ccccagccccuagcccaggaga

SEQ ID NO: 2793624 - RNA, 18 nt, Human
ccccagccccucccccau

SEQ ID NO: 2793625 - RNA, 20 nt, Human
ccccagccccucccccaucu

SEQ ID NO: 2793626 - RNA, 22 nt, Human
ccccagccccucccccaucucc

SEQ ID NO: 2793627 - RNA, 23 nt, Human
ccccagccccucccccaucuccc

SEQ ID NO: 2793628 - RNA, 13 nt, Human
ccccagccugcua

SEQ ID NO: 2793629 - RNA, 17 nt, Human
ccccagcucuggcuucc

SEQ ID NO: 2793630 - RNA, 15 nt, Human
cccgaggccuucucu

SEQ ID NO: 2793631 - RNA, 13 nt, Human
cccgaggcccugc

SEQ ID NO: 2793632 - RNA, 14 nt, Human
cccgaggcccugca

SEQ ID NO: 2793633 - RNA, 15 nt, Human
cccgaggcccugcau

SEQ ID NO: 2793634 - RNA, 16 nt, Human
cccgaggcccugcaug

SEQ ID NO: 2793635 - RNA, 19 nt, Human
cccgaggccgcgugcguga

SEQ ID NO: 2793636 - RNA, 20 nt, Human
cccgaggccuucucugaagg

SEQ ID NO: 2793637 - RNA, 14 nt, Human
cccgagucugggac

SEQ ID NO: 2793638 - RNA, 18 nt, Human
cccgagucugggacacaa

SEQ ID NO: 2793639 - RNA, 21 nt, Human
cccgcacacccucacucugcc

SEQ ID NO: 2793640 - RNA, 22 nt, Human
cccgcacacccucacucugcca

SEQ ID NO: 2793641 - RNA, 11 nt, Human
cccgcacagca

SEQ ID NO: 2793642 - RNA, 12 nt, Human
cccgcacagcag

SEQ ID NO: 2793643 - RNA, 13 nt, Human
cccgcacagcagc

SEQ ID NO: 2793644 - RNA, 14 nt, Human
cccgcacagcagcc

SEQ ID NO: 2793645 - RNA, 15 nt, Human
cccgcacagcagccu

SEQ ID NO: 2793646 - RNA, 16 nt, Human
cccgcacagcagccug

SEQ ID NO: 2793647 - RNA, 16 nt, Human
cccgauguggaccucu

SEQ ID NO: 2793648 - RNA, 12 nt, Human
cccgccugcccu

SEQ ID NO: 2793649 - RNA, 13 nt, Human
cccgccugcccuc

SEQ ID NO: 2793650 - RNA, 14 nt, Human
cccgccugcccuca

SEQ ID NO: 2793651 - RNA, 15 nt, Human
cccgcgccuccuucc

SEQ ID NO: 2793652 - RNA, 21 nt, Human
cccgcguguccccggggccca

SEQ ID NO: 2793653 - RNA, 15 nt, Human
cccgcucagcccucc

SEQ ID NO: 2793654 - RNA, 21 nt, Human
cccgcggggacauugggaagg

SEQ ID NO: 2793655 - RNA, 19 nt, Human
cccgcucagcccucccugc

SEQ ID NO: 2793656 - RNA, 23 nt, Human
cccgccuuccgccccuucccuuc

SEQ ID NO: 2793657 - RNA, 17 nt, Human
cccgccugcccucaugg

SEQ ID NO: 2793658 - RNA, 12 nt, Human
cccgcugcugcu

SEQ ID NO: 2793659 - RNA, 15 nt, Human
cccgcugcugcugcu

SEQ ID NO: 2793660 - RNA, 23 nt, Human
cccgcucagcccucccugccccu

SEQ ID NO: 2793661 - RNA, 21 nt, Human
cccgcucuacaucuucugccu

SEQ ID NO: 2793662 - RNA, 14 nt, Human
ccccuuaccacugc

SEQ ID NO: 2793663 - RNA, 19 nt, Human
ccccuguuucaaucacugu

SEQ ID NO: 2793664 - RNA, 20 nt, Human
ccccuguuucaaucacuguc

SEQ ID NO: 2793665 - RNA, 16 nt, Human
ccccuuaagcccuggc

SEQ ID NO: 2793666 - RNA, 10 nt, Human
ccccuuagau

SEQ ID NO: 2793667 - RNA, 22 nt, Human
ccccuuccuaauuccacagcug

SEQ ID NO: 2793668 - RNA, 21 nt, Human
ccccuuccuaauuccacagcu

SEQ ID NO: 2793669 - RNA, 20 nt, Human
ccccuuccuaauuccacagc

SEQ ID NO: 2793670 - RNA, 12 nt, Human
ccccuucccccu

SEQ ID NO: 2793671 - RNA, 13 nt, Human
ccccuucccuguc

SEQ ID NO: 2793672 - RNA, 18 nt, Human
ccccugucccaugcaggc

SEQ ID NO: 2793673 - RNA, 22 nt, Human
ccccugucccaugcaggcccuu

SEQ ID NO: 2793674 - RNA, 13 nt, Human
ccccuguccucac

SEQ ID NO: 2793675 - RNA, 14 nt, Human
ccccuguccucacu

SEQ ID NO: 2793676 - RNA, 15 nt, Human
ccccuguccucacug

SEQ ID NO: 2793677 - RNA, 16 nt, Human
ccccuguccucacugc

SEQ ID NO: 2793678 - RNA, 23 nt, Human
ccccuggcuuuucacugcuggcu

SEQ ID NO: 2793679 - RNA, 15 nt, Human
ccccugggcucugcc

SEQ ID NO: 2793680 - RNA, 13 nt, Human
ccccugggcucug

SEQ ID NO: 2793681 - RNA, 11 nt, Human
ccccugggcuc

SEQ ID NO: 2793682 - RNA, 22 nt, Human
ccccuggcuuuucacugcuggc

SEQ ID NO: 2793683 - RNA, 14 nt, Human
ccccuggggaccca

SEQ ID NO: 2793684 - RNA, 15 nt, Human
ccccuggggacccac

SEQ ID NO: 2793685 - RNA, 11 nt, Human
ccccuggggcc

SEQ ID NO: 2793686 - RNA, 12 nt, Human
ccccuggggccu

SEQ ID NO: 2793687 - RNA, 15 nt, Human
ccccuggggccuaga

SEQ ID NO: 2793688 - RNA, 23 nt, Human
ccccuggggccuagacucuguaa

SEQ ID NO: 2793689 - RNA, 23 nt, Human
ccccugggcucugccccagcucu

SEQ ID NO: 2793690 - RNA, 21 nt, Human
ccccugggcucugccccagcu

SEQ ID NO: 2793691 - RNA, 14 nt, Human
cccugcaaggccca

SEQ ID NO: 2793692 - RNA, 15 nt, Human
cccugcaaggcccac

SEQ ID NO: 2793693 - RNA, 16 nt, Human
cccugcaaggcccaca

SEQ ID NO: 2793694 - RNA, 17 nt, Human
cccugcaaggcccacag

SEQ ID NO: 2793695 - RNA, 18 nt, Human
cccugcaaggcccacagg

SEQ ID NO: 2793696 - RNA, 21 nt, Human
cccugcaaggcccacaggagg

SEQ ID NO: 2793697 - RNA, 22 nt, Human
cccugcacuugcagacucuaca

SEQ ID NO: 2793698 - RNA, 20 nt, Human
cccugcaauguaucccuucu

SEQ ID NO: 2793699 - RNA, 23 nt, Human
cccugcaauguaucccuucucac

SEQ ID NO: 2793700 - RNA, 13 nt, Human
cccucucaccaaa

SEQ ID NO: 2793701 - RNA, 15 nt, Human
cccucuaggcucugc

SEQ ID NO: 2793702 - RNA, 19 nt, Human
cccucuaggcucugccuuc

SEQ ID NO: 2793703 - RNA, 13 nt, Human
cccucucagcucc

SEQ ID NO: 2793704 - RNA, 20 nt, Human
cccugaguucauccaggccc

SEQ ID NO: 2793705 - RNA, 14 nt, Human
cccucucagcucca

SEQ ID NO: 2793706 - RNA, 17 nt, Human
cccucucagcuccaggu

SEQ ID NO: 2793707 - RNA, 16 nt, Human
cccugauuucuugcuu

SEQ ID NO: 2793708 - RNA, 20 nt, Human
cccugauguguccucaggga

SEQ ID NO: 2793709 - RNA, 15 nt, Human
cccugauccugugaa

SEQ ID NO: 2793710 - RNA, 16 nt, Human
cccugauugaccugcu

SEQ ID NO: 2793711 - RNA, 17 nt, Human
cccugauugaccugcuc

SEQ ID NO: 2793712 - RNA, 18 nt, Human
cccugauugaccugcucc

SEQ ID NO: 2793713 - RNA, 19 nt, Human
cccugauugaccugcuccg

SEQ ID NO: 2793714 - RNA, 21 nt, Human
cccugauugaccugcuccgcu

SEQ ID NO: 2793715 - RNA, 22 nt, Human
cccugauugaccugcuccgcug

SEQ ID NO: 2793716 - RNA, 23 nt, Human
cccugauugaccugcuccgcugc

SEQ ID NO: 2793717 - RNA, 24 nt, Human
cccugauugaccugcuccgcugcu

SEQ ID NO: 2793718 - RNA, 18 nt, Human
cccugccacccuggggag

SEQ ID NO: 2793719 - RNA, 17 nt, Human
cccugccacccugggga

SEQ ID NO: 2793720 - RNA, 14 nt, Human
cccugccaccuccc

SEQ ID NO: 2793721 - RNA, 17 nt, Human
cccugccaccucccuga

SEQ ID NO: 2793722 - RNA, 15 nt, Human
cccugccacccuggg

SEQ ID NO: 2793723 - RNA, 14 nt, Human
cccugccacccugg

SEQ ID NO: 2793724 - RNA, 12 nt, Human
cccugccacccu

SEQ ID NO: 2793725 - RNA, 16 nt, Human
cccugccaaacugaag

SEQ ID NO: 2793726 - RNA, 14 nt, Human
cccugcaugggcca

SEQ ID NO: 2793727 - RNA, 20 nt, Human
cccugcaugggccagccccu

SEQ ID NO: 2793728 - RNA, 22 nt, Human
cccugcaugggccagccccucc

SEQ ID NO: 2793729 - RNA, 22 nt, Human
cccugguggcagugggagcugc

SEQ ID NO: 2793730 - RNA, 19 nt, Human
cccugguggacaguccugg

SEQ ID NO: 2793731 - RNA, 18 nt, Human
cccugguggacaguccug

SEQ ID NO: 2793732 - RNA, 17 nt, Human
cccugguggacaguccu

SEQ ID NO: 2793733 - RNA, 21 nt, Human
cccugguggacaguccuggga

SEQ ID NO: 2793734 - RNA, 20 nt, Human
cccugguggacaguccuggg

SEQ ID NO: 2793735 - RNA, 23 nt, Human
cccugguggacaguccugggaga

SEQ ID NO: 2793736 - RNA, 16 nt, Human
cccuggugcugccaca

SEQ ID NO: 2793737 - RNA, 17 nt, Human
cccuggugcugccacac

SEQ ID NO: 2793738 - RNA, 21 nt, Human
cccuggugcugccacacuuca

SEQ ID NO: 2793739 - RNA, 18 nt, Human
cccuggagccuccacugc

SEQ ID NO: 2793740 - RNA, 19 nt, Human
cccuggaggcacugaagug

SEQ ID NO: 2793741 - RNA, 13 nt, Human
cccuggggcuggc

SEQ ID NO: 2793742 - RNA, 14 nt, Human
cccuggggcuggcu

SEQ ID NO: 2793743 - RNA, 16 nt, Human
cccuggggcuggcuuu

SEQ ID NO: 2793744 - RNA, 18 nt, Human
cccuggggcuggcuuuuc

SEQ ID NO: 2793745 - RNA, 14 nt, Human
cccuggggcugggc

SEQ ID NO: 2793746 - RNA, 16 nt, Human
cccuggggcugggccc

SEQ ID NO: 2793747 - RNA, 22 nt, Human
cccuggggcugggccccccagc

SEQ ID NO: 2793748 - RNA, 12 nt, Human
cccugggccagg

SEQ ID NO: 2793749 - RNA, 13 nt, Human
cccugggccaggg

SEQ ID NO: 2793750 - RNA, 16 nt, Human
cccugggccagggucu

SEQ ID NO: 2793751 - RNA, 17 nt, Human
cccugggccagggucug

SEQ ID NO: 2793752 - RNA, 22 nt, Human
cccugggccagggucuguguga

SEQ ID NO: 2793753 - RNA, 13 nt, Human
cccugcugguuca

SEQ ID NO: 2793754 - RNA, 13 nt, Human
cccugccugccau

SEQ ID NO: 2793755 - RNA, 14 nt, Human
cccugccugccaug

SEQ ID NO: 2793756 - RNA, 20 nt, Human
cccugccugccauguaccuc

SEQ ID NO: 2793757 - RNA, 9 nt, Human
cccugccug

SEQ ID NO: 2793758 - RNA, 20 nt, Human
cccugcugguucaggguugg

SEQ ID NO: 2793759 - RNA, 19 nt, Human
cccugcugguucaggguug

SEQ ID NO: 2793760 - RNA, 22 nt, Human
cccugcuuugggcugcccuggu

SEQ ID NO: 2793761 - RNA, 23 nt, Human
cccugcuuugggcugcccuggug

SEQ ID NO: 2793762 - RNA, 19 nt, Human
cccuggaacauccuuugca

SEQ ID NO: 2793763 - RNA, 20 nt, Human
cccuggaacucuaucugggc

SEQ ID NO: 2793764 - RNA, 22 nt, Human
cccuggaacucuaucugggccu

SEQ ID NO: 2793765 - RNA, 23 nt, Human
cccuggaacucuaucugggccug

SEQ ID NO: 2793766 - RNA, 15 nt, Human
cuaguaguucucuug

SEQ ID NO: 2793767 - RNA, 16 nt, Human
cuaguaguucucuugg

SEQ ID NO: 2793768 - RNA, 12 nt, Human
cuaguauuugaa

SEQ ID NO: 2793769 - RNA, 13 nt, Human
cuaguauuugaau

SEQ ID NO: 2793770 - RNA, 14 nt, Human
cuaguauuugaauu

SEQ ID NO: 2793771 - RNA, 15 nt, Human
cuaguauuugaauua

SEQ ID NO: 2793772 - RNA, 18 nt, Human
cuaguauuugaauuaaaa

SEQ ID NO: 2793773 - RNA, 20 nt, Human
cuaguauuugaauuaaaacu

SEQ ID NO: 2793774 - RNA, 21 nt, Human
cuaguauuugaauuaaaacuu

SEQ ID NO: 2793775 - RNA, 23 nt, Human
cuaguauuugaauuaaaacuucu

SEQ ID NO: 2793776 - RNA, 24 nt, Human
cuaguauuugaauuaaaacuucuu

SEQ ID NO: 2793777 - RNA, 17 nt, Human
cuaggcaucucuguacu

SEQ ID NO: 2793778 - RNA, 16 nt, Human
cuaggcaguaggccgg

SEQ ID NO: 2793779 - RNA, 12 nt, Human
cuaguacugugu

SEQ ID NO: 2793780 - RNA, 15 nt, Human
cuaguacuguguacu

SEQ ID NO: 2793781 - RNA, 17 nt, Human
cuaguacuguguacugu

SEQ ID NO: 2793782 - RNA, 20 nt, Human
cuaguacuguguacuguaua

SEQ ID NO: 2793783 - RNA, 22 nt, Human
cuaguacuguguacuguauaga

SEQ ID NO: 2793784 - RNA, 16 nt, Human
cuaguacuugaaaaag

SEQ ID NO: 2793785 - RNA, 19 nt, Human
cuaggccacaccaucuccu

SEQ ID NO: 2793786 - RNA, 14 nt, Human
cuaguguugcuugg

SEQ ID NO: 2793787 - RNA, 13 nt, Human
cuaguguucuguc

SEQ ID NO: 2793788 - RNA, 15 nt, Human
cuaguguucugucua

SEQ ID NO: 2793789 - RNA, 23 nt, Human
cuaguguucugucuaaaaaccag

SEQ ID NO: 2793790 - RNA, 18 nt, Human
cuaguguucuguuuguua

SEQ ID NO: 2793791 - RNA, 22 nt, Human
cuaguggucuuuguaagagugu

SEQ ID NO: 2793792 - RNA, 19 nt, Human
cuaguggucuuuguaagag

SEQ ID NO: 2793793 - RNA, 20 nt, Human
cuaguggucuuuguaagagu

SEQ ID NO: 2793794 - RNA, 19 nt, Human
cuaguguaccuccucucag

SEQ ID NO: 2793795 - RNA, 21 nt, Human
cuaguguaccuccucucagug

SEQ ID NO: 2793796 - RNA, 23 nt, Human
cuaguguaccuccucucaguguu

SEQ ID NO: 2793797 - RNA, 14 nt, Human
cuaguggucuuugu

SEQ ID NO: 2793798 - RNA, 15 nt, Human
cuaguggucuuugua

SEQ ID NO: 2793799 - RNA, 16 nt, Human
cuaguggucuuuguaa

SEQ ID NO: 2793800 - RNA, 17 nt, Human
cuaguggucuuuguaag

SEQ ID NO: 2793801 - RNA, 18 nt, Human
cuaguggucuuuguaaga

SEQ ID NO: 2793802 - RNA, 21 nt, Human
cuaguauuucaugcugggaau

SEQ ID NO: 2793803 - RNA, 21 nt, Human
cuagucccuuccccucccugg

SEQ ID NO: 2793804 - RNA, 20 nt, Human
cuagucccuuccccucccug

SEQ ID NO: 2793805 - RNA, 23 nt, Human
cuagucccuuccccucccuggcu

SEQ ID NO: 2793806 - RNA, 14 nt, Human
cuaguccggaccca

SEQ ID NO: 2793807 - RNA, 15 nt, Human
cuaguccggacccac

SEQ ID NO: 2793808 - RNA, 21 nt, Human
cuaguccggacccaccucacc

SEQ ID NO: 2793809 - RNA, 23 nt, Human
cuaguccggacccaccucacccc

SEQ ID NO: 2793810 - RNA, 17 nt, Human
cuaguccuagugaaccu

SEQ ID NO: 2793811 - RNA, 15 nt, Human
cuaguccuuuacuaa

SEQ ID NO: 2793812 - RNA, 22 nt, Human
cuagucccuuccccucccuggc

SEQ ID NO: 2793813 - RNA, 12 nt, Human
cuagucucuccu

SEQ ID NO: 2793814 - RNA, 16 nt, Human
cuagucucuccuguaa

SEQ ID NO: 2793815 - RNA, 23 nt, Human
cuagugcccuccacagccgcagc

SEQ ID NO: 2793816 - RNA, 19 nt, Human
cuagugcccuccacagccg

SEQ ID NO: 2793817 - RNA, 18 nt, Human
cuagugcccuccacagcc

SEQ ID NO: 2793818 - RNA, 17 nt, Human
cuaggaaauccagggug

SEQ ID NO: 2793819 - RNA, 16 nt, Human
cuaggaaauccagggu

SEQ ID NO: 2793820 - RNA, 23 nt, Human
cuagcagagcaggggcaggguga

SEQ ID NO: 2793821 - RNA, 19 nt, Human
cuagcagagcaggggcagg

SEQ ID NO: 2793822 - RNA, 13 nt, Human
cuaggagggagac

SEQ ID NO: 2793823 - RNA, 18 nt, Human
cuaggagggagacacugg

SEQ ID NO: 2793824 - RNA, 22 nt, Human
cuaggagggagacacuggcccc

SEQ ID NO: 2793825 - RNA, 18 nt, Human
cuaggaugcggaaauccc

SEQ ID NO: 2793826 - RNA, 23 nt, Human
cuaggagggagacacuggccccu

SEQ ID NO: 2793827 - RNA, 19 nt, Human
cuaggaguauauuuccgca

SEQ ID NO: 2793828 - RNA, 13 nt, Human
cuaggcaggacau

SEQ ID NO: 2793829 - RNA, 22 nt, Human
cuaggcaggacaugcugaagcc

SEQ ID NO: 2793830 - RNA, 20 nt, Human
cuaggcacuguaguucuaag

SEQ ID NO: 2793831 - RNA, 21 nt, Human
cuaggcacuguaguucuaaga

SEQ ID NO: 2793832 - RNA, 13 nt, Human
cuaggauucuaaa

SEQ ID NO: 2793833 - RNA, 19 nt, Human
cuaggcacuguaguucuaa

SEQ ID NO: 2793834 - RNA, 16 nt, Human
cuaggauuugaacacu

SEQ ID NO: 2793835 - RNA, 17 nt, Human
cuaggauuugaacacuu

SEQ ID NO: 2793836 - RNA, 16 nt, Human
cuaggacucugaggcu

SEQ ID NO: 2793837 - RNA, 15 nt, Human
cuaggacucugaggc

SEQ ID NO: 2793838 - RNA, 14 nt, Human
cuaggacucugagg

SEQ ID NO: 2793839 - RNA, 12 nt, Human
cuaggacucuga

SEQ ID NO: 2793840 - RNA, 22 nt, Human
cuaggacgccacccagcaaaag

SEQ ID NO: 2793841 - RNA, 12 nt, Human
cuaggacuccuu

SEQ ID NO: 2793842 - RNA, 13 nt, Human
cuaggagaagagu

SEQ ID NO: 2793843 - RNA, 20 nt, Human
cuaggagaagaguugaggaa

SEQ ID NO: 2793844 - RNA, 18 nt, Human
cuaggacgccacccagca

SEQ ID NO: 2793845 - RNA, 20 nt, Human
cuaggagaccaaggcgggag

SEQ ID NO: 2793846 - RNA, 16 nt, Human
cuaggagaccaaggcg

SEQ ID NO: 2793847 - RNA, 22 nt, Human
cuaggacucugaggcucuuucu

SEQ ID NO: 2793848 - RNA, 22 nt, Human
cuaggaccccuccaugugggcu

SEQ ID NO: 2793849 - RNA, 16 nt, Human
cuaggaccacucagcc

SEQ ID NO: 2793850 - RNA, 17 nt, Human
cuaggaccacucagccc

SEQ ID NO: 2793851 - RNA, 18 nt, Human
cuaggaccacucagcccc

SEQ ID NO: 2793852 - RNA, 19 nt, Human
cuaggaccacucagccccu

SEQ ID NO: 2793853 - RNA, 20 nt, Human
cuaggaccacucagccccua

SEQ ID NO: 2793854 - RNA, 21 nt, Human
cuaggaccacucagccccuag

SEQ ID NO: 2793855 - RNA, 22 nt, Human
cuaggaccacucagccccuagg

SEQ ID NO: 2793856 - RNA, 21 nt, Human
cuaggaccaugguuaagaguc

SEQ ID NO: 2793857 - RNA, 23 nt, Human
cuaggaccaugguuaagagucca

SEQ ID NO: 2793858 - RNA, 17 nt, Human
cuaggaaugaaauccug

SEQ ID NO: 2793859 - RNA, 16 nt, Human
cuaggaaugaaauccu

SEQ ID NO: 2793860 - RNA, 13 nt, Human
cuauaugauuuau

SEQ ID NO: 2793861 - RNA, 16 nt, Human
cuauaugauuuauagu

SEQ ID NO: 2793862 - RNA, 17 nt, Human
cuauaugauuuauaguu

SEQ ID NO: 2793863 - RNA, 18 nt, Human
cuauaugauuuauaguuu

SEQ ID NO: 2793864 - RNA, 15 nt, Human
cuauaugaauuuaaa

SEQ ID NO: 2793865 - RNA, 16 nt, Human
cuauaugaauuuaaau

SEQ ID NO: 2793866 - RNA, 20 nt, Human
cuauaugaauuuaaauauaa

SEQ ID NO: 2793867 - RNA, 23 nt, Human
cuauaugaauuuaaauauaauuc

SEQ ID NO: 2793868 - RNA, 16 nt, Human
cuauaugagaagaaua

SEQ ID NO: 2793869 - RNA, 17 nt, Human
cuauaugagaagaauag

SEQ ID NO: 2793870 - RNA, 18 nt, Human
cuauaugagaagaauagc

SEQ ID NO: 2793871 - RNA, 15 nt, Human
cuauauccugugacu

SEQ ID NO: 2793872 - RNA, 17 nt, Human
cuauauccugugacugu

SEQ ID NO: 2793873 - RNA, 23 nt, Human
cuaguuaccacauuacucugccu

SEQ ID NO: 2793874 - RNA, 14 nt, Human
cuaguaguuaaaaa

SEQ ID NO: 2793875 - RNA, 14 nt, Human
cuauauauauaugc

SEQ ID NO: 2793876 - RNA, 18 nt, Human
cuauauauauaugccuuu

SEQ ID NO: 2793877 - RNA, 15 nt, Human
cuauauauauaaaua

SEQ ID NO: 2793878 - RNA, 16 nt, Human
cuauauauauaaauau

SEQ ID NO: 2793879 - RNA, 13 nt, Human
cuauauauauaaa

SEQ ID NO: 2793880 - RNA, 22 nt, Human
cuauauaguuuauugacaauaa

SEQ ID NO: 2793881 - RNA, 16 nt, Human
cuauauaguuuauuga

SEQ ID NO: 2793882 - RNA, 14 nt, Human
cuauaucaugcuuu

SEQ ID NO: 2793883 - RNA, 20 nt, Human
cuauaucaugcuuuaaagug

SEQ ID NO: 2793884 - RNA, 15 nt, Human
cuauaucauuaaaag

SEQ ID NO: 2793885 - RNA, 21 nt, Human
cuauaucauuaaaagaacaua

SEQ ID NO: 2793886 - RNA, 17 nt, Human
cuauauauguguaugua

SEQ ID NO: 2793887 - RNA, 13 nt, Human
cuauauaugugua

SEQ ID NO: 2793888 - RNA, 15 nt, Human
cuauauauguguaug

SEQ ID NO: 2793889 - RNA, 13 nt, Human
cuaucuuccaaau

SEQ ID NO: 2793890 - RNA, 14 nt, Human
cuaucuuccaaaug

SEQ ID NO: 2793891 - RNA, 21 nt, Human
cuaucuuagugguuccccacc

SEQ ID NO: 2793892 - RNA, 17 nt, Human
cuaugacagaaaaguaa

SEQ ID NO: 2793893 - RNA, 17 nt, Human
cuaucuuguuccaaggc

SEQ ID NO: 2793894 - RNA, 18 nt, Human
cuaugaaaccuuuuuccu

SEQ ID NO: 2793895 - RNA, 15 nt, Human
cuaucaagucaauca

SEQ ID NO: 2793896 - RNA, 17 nt, Human
cuaucaagucaaucauu

SEQ ID NO: 2793897 - RNA, 19 nt, Human
cuaucaagucaaucauuuc

SEQ ID NO: 2793898 - RNA, 21 nt, Human
cuaucaagucaaucauuucuc

SEQ ID NO: 2793899 - RNA, 19 nt, Human
cuaucaagaggcugagaca

SEQ ID NO: 2793900 - RNA, 20 nt, Human
cuaucaagaggcugagacag

SEQ ID NO: 2793901 - RNA, 21 nt, Human
cuaucaagaggcugagacagg

SEQ ID NO: 2793902 - RNA, 23 nt, Human
cuaucaagaggcugagacaggag

SEQ ID NO: 2793903 - RNA, 15 nt, Human
cuaucaagcccaggu

SEQ ID NO: 2793904 - RNA, 16 nt, Human
cucacuaggcuucugg

SEQ ID NO: 2793905 - RNA, 13 nt, Human
cucacuaggcuuc

SEQ ID NO: 2793906 - RNA, 13 nt, Human
cucaccccugucc

SEQ ID NO: 2793907 - RNA, 15 nt, Human
cucaccccuguccuc

SEQ ID NO: 2793908 - RNA, 18 nt, Human
cucaccccuguccucacu

SEQ ID NO: 2793909 - RNA, 19 nt, Human
cucaccccuguccucacug

SEQ ID NO: 2793910 - RNA, 20 nt, Human
cucaccccuguccucacugc

SEQ ID NO: 2793911 - RNA, 21 nt, Human
cucaccccuguccucacugcu

SEQ ID NO: 2793912 - RNA, 22 nt, Human
cucaccccuguccucacugcuc

SEQ ID NO: 2793913 - RNA, 17 nt, Human
cucacuauguugcccag

SEQ ID NO: 2793914 - RNA, 16 nt, Human
cucacuauguugccca

SEQ ID NO: 2793915 - RNA, 20 nt, Human
cucacuaggcuucugguuga

SEQ ID NO: 2793916 - RNA, 21 nt, Human
cucacuaucccggcugcccuu

SEQ ID NO: 2793917 - RNA, 20 nt, Human
cucacuaucccggcugcccu

SEQ ID NO: 2793918 - RNA, 23 nt, Human
cucaccccagacuccugacuguc

SEQ ID NO: 2793919 - RNA, 20 nt, Human
cucaccccguuacagcuccc

SEQ ID NO: 2793920 - RNA, 13 nt, Human
cucaccccggcag

SEQ ID NO: 2793921 - RNA, 15 nt, Human
cucaccccgaggccc

SEQ ID NO: 2793922 - RNA, 16 nt, Human
cucaccccgaggcccu

SEQ ID NO: 2793923 - RNA, 17 nt, Human
cucaccccgaggcccug

SEQ ID NO: 2793924 - RNA, 18 nt, Human
cucaccccgaggcccugc

SEQ ID NO: 2793925 - RNA, 19 nt, Human
cucaccccgaggcccugca

SEQ ID NO: 2793926 - RNA, 20 nt, Human
cucaccccgaggcccugcau

SEQ ID NO: 2793927 - RNA, 21 nt, Human
cucaccccgaggcccugcaug

SEQ ID NO: 2793928 - RNA, 22 nt, Human
cucaccccgaggcccugcaugg

SEQ ID NO: 2793929 - RNA, 19 nt, Human
cucaccagccccagugccc

SEQ ID NO: 2793930 - RNA, 20 nt, Human
cucacauagcuuacaagcca

SEQ ID NO: 2793931 - RNA, 14 nt, Human
cucaaccuccugug

SEQ ID NO: 2793932 - RNA, 21 nt, Human
cucacauggugcuacgccugc

SEQ ID NO: 2793933 - RNA, 21 nt, Human
cucaccagccccagugcccac

SEQ ID NO: 2793934 - RNA, 20 nt, Human
cucaccagccccagugccca

SEQ ID NO: 2793935 - RNA, 23 nt, Human
cucacauggugcuacgccugcau

SEQ ID NO: 2793936 - RNA, 15 nt, Human
cucacauuccuaggg

SEQ ID NO: 2793937 - RNA, 20 nt, Human
cucaagugauucuccugccu

SEQ ID NO: 2793938 - RNA, 19 nt, Human
cucaagugauucuccugcc

SEQ ID NO: 2793939 - RNA, 18 nt, Human
cucaagugauucuccugc

SEQ ID NO: 2793940 - RNA, 12 nt, Human
cucacagugacc

SEQ ID NO: 2793941 - RNA, 14 nt, Human
cucacagugacccu

SEQ ID NO: 2793942 - RNA, 16 nt, Human
cucacagugacccuuc

SEQ ID NO: 2793943 - RNA, 18 nt, Human
cucacagugacccuuccc

SEQ ID NO: 2793944 - RNA, 19 nt, Human
cucacagugacccuuccca

SEQ ID NO: 2793945 - RNA, 21 nt, Human
cucacaguguugcccaggcug

SEQ ID NO: 2793946 - RNA, 17 nt, Human
cucacaguguugcccag

SEQ ID NO: 2793947 - RNA, 13 nt, Human
cucaacuuucugu

SEQ ID NO: 2793948 - RNA, 21 nt, Human
cucaacugcucuuuuauacug

SEQ ID NO: 2793949 - RNA, 17 nt, Human
cucaagagggcacuggu

SEQ ID NO: 2793950 - RNA, 19 nt, Human
cucaagagggcacuggugg

SEQ ID NO: 2793951 - RNA, 21 nt, Human
cucaagagggcacugguggcc

SEQ ID NO: 2793952 - RNA, 17 nt, Human
cucaaggaaaggccuga

SEQ ID NO: 2793953 - RNA, 23 nt, Human
cucaaggaauaaugggcuuagag

SEQ ID NO: 2793954 - RNA, 13 nt, Human
cucaaggaaucuu

SEQ ID NO: 2793955 - RNA, 14 nt, Human
cucaaggaaucuuu

SEQ ID NO: 2793956 - RNA, 21 nt, Human
cucaaggaaucuuuaagcaga

SEQ ID NO: 2793957 - RNA, 17 nt, Human
cucaagcgauucuccug

SEQ ID NO: 2793958 - RNA, 16 nt, Human
cucaagcgauucuccu

SEQ ID NO: 2793959 - RNA, 21 nt, Human
cucaaccucuucuggcucaaa

SEQ ID NO: 2793960 - RNA, 15 nt, Human
cuauuuucuuuuuua

SEQ ID NO: 2793961 - RNA, 17 nt, Human
cucaaauugucagcaau

SEQ ID NO: 2793962 - RNA, 16 nt, Human
cucaaccuuaagaccu

SEQ ID NO: 2793963 - RNA, 16 nt, Human
cucaacguauuguuuc

SEQ ID NO: 2793964 - RNA, 15 nt, Human
cucaacguauuguuu

SEQ ID NO: 2793965 - RNA, 13 nt, Human
cucaaccucuucu

SEQ ID NO: 2793966 - RNA, 14 nt, Human
cucaaccucuucug

SEQ ID NO: 2793967 - RNA, 18 nt, Human
cucaaccucuucuggcuc

SEQ ID NO: 2793968 - RNA, 20 nt, Human
cucaaccucuucuggcucaa

SEQ ID NO: 2793969 - RNA, 12 nt, Human
cucaaccucuuc

SEQ ID NO: 2793970 - RNA, 13 nt, Human
cucaaauguucua

SEQ ID NO: 2793971 - RNA, 15 nt, Human
cucaaauguucuaag

SEQ ID NO: 2793972 - RNA, 24 nt, Human
cucaaauguucuaaguuucuaaga

SEQ ID NO: 2793973 - RNA, 22 nt, Human
cucaaauguucuaaguuucuaa

SEQ ID NO: 2793974 - RNA, 23 nt, Human
cucaaauguucuaaguuucuaag

SEQ ID NO: 2793975 - RNA, 16 nt, Human
cucaaauguucuaagu

SEQ ID NO: 2793976 - RNA, 17 nt, Human
cucaaauguucuaaguu

SEQ ID NO: 2793977 - RNA, 19 nt, Human
cucaaauguucuaaguuuc

SEQ ID NO: 2793978 - RNA, 21 nt, Human
cucaaauguucuaaguuucua

SEQ ID NO: 2793979 - RNA, 19 nt, Human
cuauuugcuuauuuaauaa

SEQ ID NO: 2793980 - RNA, 18 nt, Human
cuauuugcuuauuuaaua

SEQ ID NO: 2793981 - RNA, 22 nt, Human
cuauuugccaugggcuucacug

SEQ ID NO: 2793982 - RNA, 23 nt, Human
cuauuugccaugggcuucacugu

SEQ ID NO: 2793983 - RNA, 13 nt, Human
cuauuuuaaaaua

SEQ ID NO: 2793984 - RNA, 14 nt, Human
cuauuuuaaaauaa

SEQ ID NO: 2793985 - RNA, 20 nt, Human
cuauuuuaaaauaaauuagu

SEQ ID NO: 2793986 - RNA, 22 nt, Human
cuauuuuaaaauaaauuaguug

SEQ ID NO: 2793987 - RNA, 12 nt, Human
cuauuuuauucc

SEQ ID NO: 2793988 - RNA, 23 nt, Human
cuauuuuauucuaaacagacuca

SEQ ID NO: 2793989 - RNA, 15 nt, Human
cuauuuuagaauaaa

SEQ ID NO: 2793990 - RNA, 17 nt, Human
cuauuugucuuucagga

SEQ ID NO: 2793991 - RNA, 22 nt, Human
cuauuuguucuucaagaacuuu

SEQ ID NO: 2793992 - RNA, 16 nt, Human
cuauuuguuuucaugg

SEQ ID NO: 2793993 - RNA, 14 nt, Human
cuauuuucuacaau

SEQ ID NO: 2793994 - RNA, 11 nt, Human
cuauuuucuau

SEQ ID NO: 2793995 - RNA, 16 nt, Human
cuauuuucuauguacu

SEQ ID NO: 2793996 - RNA, 17 nt, Human
cuauuuuggauuguaua

SEQ ID NO: 2793997 - RNA, 12 nt, Human
cuauuuuguaaa

SEQ ID NO: 2793998 - RNA, 19 nt, Human
cuauuuugacaguuauuuu

SEQ ID NO: 2793999 - RNA, 13 nt, Human
cuauuuugaugca

SEQ ID NO: 2794000 - RNA, 14 nt, Human
cuauuuugaugcag

SEQ ID NO: 2794001 - RNA, 15 nt, Human
cuauuuugaugcagc

SEQ ID NO: 2794002 - RNA, 21 nt, Human
cuauuuugaugcagcauuuga

SEQ ID NO: 2794003 - RNA, 22 nt, Human
cucaaaugcucagaccagcucu

SEQ ID NO: 2794004 - RNA, 15 nt, Human
cuaugacugcucccc

SEQ ID NO: 2794005 - RNA, 16 nt, Human
cuaugacugcucccca

SEQ ID NO: 2794006 - RNA, 17 nt, Human
cuaugacugcuccccag

SEQ ID NO: 2794007 - RNA, 19 nt, Human
cuacuucaggaacaccccc

SEQ ID NO: 2794008 - RNA, 13 nt, Human
cuacuugguuugu

SEQ ID NO: 2794009 - RNA, 14 nt, Human
cuacuugguuugug

SEQ ID NO: 2794010 - RNA, 15 nt, Human
cuacuugguuugugu

SEQ ID NO: 2794011 - RNA, 17 nt, Human
cuacuugguuuguguuc

SEQ ID NO: 2794012 - RNA, 22 nt, Human
cuacuucuuuugcucuuagcug

SEQ ID NO: 2794013 - RNA, 22 nt, Human
cuacuucuuugcuuugcccagc

SEQ ID NO: 2794014 - RNA, 17 nt, Human
cuacuugauuuuauugu

SEQ ID NO: 2794015 - RNA, 18 nt, Human
cuacuugauuuuauugua

SEQ ID NO: 2794016 - RNA, 22 nt, Human
cuacuuagcaugucccuaccga

SEQ ID NO: 2794017 - RNA, 20 nt, Human
cuacugugugugugaaugaa

SEQ ID NO: 2794018 - RNA, 11 nt, Human
cuacuguguaa

SEQ ID NO: 2794019 - RNA, 19 nt, Human
cuacugugugugugaauga

SEQ ID NO: 2794020 - RNA, 17 nt, Human
cuacugugugugugaau

SEQ ID NO: 2794021 - RNA, 15 nt, Human
cuacuguguguguga

SEQ ID NO: 2794022 - RNA, 19 nt, Human
cuacuucucucuguauuuu

SEQ ID NO: 2794023 - RNA, 20 nt, Human
cuacuuccugugacuucagc

SEQ ID NO: 2794024 - RNA, 20 nt, Human
cuacuuccuccuccccacuu

SEQ ID NO: 2794025 - RNA, 17 nt, Human
cuacuuccuccucccca

SEQ ID NO: 2794026 - RNA, 19 nt, Human
cuacuuccuccuccccacu

SEQ ID NO: 2794027 - RNA, 20 nt, Human
cuacuuccccuuccuaauuc

SEQ ID NO: 2794028 - RNA, 13 nt, Human
cuacuuccuccuc

SEQ ID NO: 2794029 - RNA, 15 nt, Human
cuacuuccccuuccu

SEQ ID NO: 2794030 - RNA, 14 nt, Human
cuacuuccccuucc

SEQ ID NO: 2794031 - RNA, 20 nt, Human
cuacugucuuuggaaaaaug

SEQ ID NO: 2794032 - RNA, 22 nt, Human
cuacugucuuuggaaaaauguu

SEQ ID NO: 2794033 - RNA, 17 nt, Human
cuacuggucuuguggaa

SEQ ID NO: 2794034 - RNA, 12 nt, Human
cuacucuuugau

SEQ ID NO: 2794035 - RNA, 14 nt, Human
cuacucuuugauuu

SEQ ID NO: 2794036 - RNA, 12 nt, Human
cuacugaaacag

SEQ ID NO: 2794037 - RNA, 13 nt, Human
cuacugaaacaga

SEQ ID NO: 2794038 - RNA, 18 nt, Human
cuacugaaacagauuuca

SEQ ID NO: 2794039 - RNA, 20 nt, Human
cuacugaaacagauuucaua

SEQ ID NO: 2794040 - RNA, 22 nt, Human
cuacugaaacagauuucauacc

SEQ ID NO: 2794041 - RNA, 21 nt, Human
cuacucugugucagguggggc

SEQ ID NO: 2794042 - RNA, 16 nt, Human
cuacucugugucaggu

SEQ ID NO: 2794043 - RNA, 13 nt, Human
cuacucuguguca

SEQ ID NO: 2794044 - RNA, 15 nt, Human
cuacccguuccaaaa

SEQ ID NO: 2794045 - RNA, 15 nt, Human
cuagauuauaucaaa

SEQ ID NO: 2794046 - RNA, 16 nt, Human
cuagauuauaucaaag

SEQ ID NO: 2794047 - RNA, 17 nt, Human
cuagauuauaucaaagu

SEQ ID NO: 2794048 - RNA, 18 nt, Human
cuagauuauaucaaagua

SEQ ID NO: 2794049 - RNA, 21 nt, Human
cuagauuauaucaaaguauuu

SEQ ID NO: 2794050 - RNA, 21 nt, Human
cuagauguuuauucuucuaga

SEQ ID NO: 2794051 - RNA, 23 nt, Human
cuagauguuuauucuucuagagu

SEQ ID NO: 2794052 - RNA, 15 nt, Human
cuagauccuaagggu

SEQ ID NO: 2794053 - RNA, 16 nt, Human
cuagauccuaaggguc

SEQ ID NO: 2794054 - RNA, 22 nt, Human
cuagaucauaaggcuucaaaau

SEQ ID NO: 2794055 - RNA, 14 nt, Human
cuagaucauuuguu

SEQ ID NO: 2794056 - RNA, 21 nt, Human
cuagaucauuuguucugggag

SEQ ID NO: 2794057 - RNA, 23 nt, Human
cuagaucauuuguucugggagua

SEQ ID NO: 2794058 - RNA, 17 nt, Human
cuagaucauaaggcuuc

SEQ ID NO: 2794059 - RNA, 18 nt, Human
cuagaucauaaggcuuca

SEQ ID NO: 2794060 - RNA, 15 nt, Human
cuagaucagaugcuc

SEQ ID NO: 2794061 - RNA, 18 nt, Human
cuagaucagaugcuccaa

SEQ ID NO: 2794062 - RNA, 20 nt, Human
cuagaucagaugcuccaaga

SEQ ID NO: 2794063 - RNA, 15 nt, Human
cuagaucauaaggcu

SEQ ID NO: 2794064 - RNA, 17 nt, Human
cuagaugaaguuuuaca

SEQ ID NO: 2794065 - RNA, 12 nt, Human
cuagaugaccuc

SEQ ID NO: 2794066 - RNA, 13 nt, Human
cuagaugaccuca

SEQ ID NO: 2794067 - RNA, 16 nt, Human
cuagaugaccucauua

SEQ ID NO: 2794068 - RNA, 23 nt, Human
cuagaugagcccagcccuguucu

SEQ ID NO: 2794069 - RNA, 17 nt, Human
cuagauccuaagggucg

SEQ ID NO: 2794070 - RNA, 21 nt, Human
cuagaugcuuuccuaaaucag

SEQ ID NO: 2794071 - RNA, 22 nt, Human
cuagaugauuaaauaagauucu

SEQ ID NO: 2794072 - RNA, 20 nt, Human
cuagaugauuaaauaagauu

SEQ ID NO: 2794073 - RNA, 21 nt, Human
cuagaugauuaaauaagauuc

SEQ ID NO: 2794074 - RNA, 23 nt, Human
cuagaugauuaaauaagauucua

SEQ ID NO: 2794075 - RNA, 18 nt, Human
cuagcaccugccagggag

SEQ ID NO: 2794076 - RNA, 14 nt, Human
cuagcacaugcuuc

SEQ ID NO: 2794077 - RNA, 15 nt, Human
cuagcacaugcuuca

SEQ ID NO: 2794078 - RNA, 16 nt, Human
cuagcacaugcuucaa

SEQ ID NO: 2794079 - RNA, 18 nt, Human
cuagcacaugcuucaaua

SEQ ID NO: 2794080 - RNA, 20 nt, Human
cuagcacaugcuucaauagu

SEQ ID NO: 2794081 - RNA, 18 nt, Human
cuagcacucauuuucuau

SEQ ID NO: 2794082 - RNA, 19 nt, Human
cuagcacucauuuucuaua

SEQ ID NO: 2794083 - RNA, 21 nt, Human
cuagcaaccgccucaaaaugu

SEQ ID NO: 2794084 - RNA, 21 nt, Human
cuagcaagcugccgaaccaaa

SEQ ID NO: 2794085 - RNA, 14 nt, Human
cuagcaagcuggcc

SEQ ID NO: 2794086 - RNA, 15 nt, Human
cuagcaagcuggccu

SEQ ID NO: 2794087 - RNA, 16 nt, Human
cuagcaagcuggccuc

SEQ ID NO: 2794088 - RNA, 17 nt, Human
cuagcaagcuggccucu

SEQ ID NO: 2794089 - RNA, 15 nt, Human
cuagcaagugagaga

SEQ ID NO: 2794090 - RNA, 18 nt, Human
cuagcaagugagagagau

SEQ ID NO: 2794091 - RNA, 17 nt, Human
cuagcacaauuugcacu

SEQ ID NO: 2794092 - RNA, 19 nt, Human
cuagcaagugagagagaug

SEQ ID NO: 2794093 - RNA, 22 nt, Human
cuagauuggaguggggaagugu

SEQ ID NO: 2794094 - RNA, 20 nt, Human
cuagauucuacauauucuuu

SEQ ID NO: 2794095 - RNA, 24 nt, Human
cuagauugagagaagagacaaaca

SEQ ID NO: 2794096 - RNA, 21 nt, Human
cuagauucaaagguucuaggu

SEQ ID NO: 2794097 - RNA, 22 nt, Human
cuagauuccauugguccaagau

SEQ ID NO: 2794098 - RNA, 23 nt, Human
cuagauuccauugguccaagauu

SEQ ID NO: 2794099 - RNA, 22 nt, Human
cuagauguuuauucuucuagag

SEQ ID NO: 2794100 - RNA, 12 nt, Human
cuagauucaaag

SEQ ID NO: 2794101 - RNA, 14 nt, Human
cuagauucaaaggu

SEQ ID NO: 2794102 - RNA, 15 nt, Human
cuagauucaaagguu

SEQ ID NO: 2794103 - RNA, 16 nt, Human
cuagauucaaagguuc

SEQ ID NO: 2794104 - RNA, 17 nt, Human
cuagauucaaagguucu

SEQ ID NO: 2794105 - RNA, 18 nt, Human
cuagauucaaagguucua

SEQ ID NO: 2794106 - RNA, 20 nt, Human
cuagauucaaagguucuagg

SEQ ID NO: 2794107 - RNA, 20 nt, Human
cuagacguucauuugugugc

SEQ ID NO: 2794108 - RNA, 21 nt, Human
cuagacccacuggacucaccu

SEQ ID NO: 2794109 - RNA, 14 nt, Human
cuacuuuccaggcu

SEQ ID NO: 2794110 - RNA, 20 nt, Human
cuacuuugguuucugucugu

SEQ ID NO: 2794111 - RNA, 21 nt, Human
cuacuuugguuucugucugua

SEQ ID NO: 2794112 - RNA, 15 nt, Human
cuagagccugccugg

SEQ ID NO: 2794113 - RNA, 16 nt, Human
cuagagccugccugga

SEQ ID NO: 2794114 - RNA, 17 nt, Human
cuagagccugccuggag

SEQ ID NO: 2794115 - RNA, 18 nt, Human
cuagagccugccuggagc

SEQ ID NO: 2794116 - RNA, 19 nt, Human
cuagagccugccuggagcg

SEQ ID NO: 2794117 - RNA, 17 nt, Human
cuagaccguuauaaagu

SEQ ID NO: 2794118 - RNA, 17 nt, Human
cuagaggccagccccac

SEQ ID NO: 2794119 - RNA, 19 nt, Human
cuagaguccucacucccag

SEQ ID NO: 2794120 - RNA, 15 nt, Human
cuagaguccucacuc

SEQ ID NO: 2794121 - RNA, 20 nt, Human
cuagaguccaagguuuaaag

SEQ ID NO: 2794122 - RNA, 23 nt, Human
cuagaguccaagguuuaaagagu

SEQ ID NO: 2794123 - RNA, 15 nt, Human
cuagaguccaagguu

SEQ ID NO: 2794124 - RNA, 21 nt, Human
cuagagggaccucucccaggg

SEQ ID NO: 2794125 - RNA, 20 nt, Human
cuagagggaccucucccagg

SEQ ID NO: 2794126 - RNA, 19 nt, Human
cuagagggaccucucccag

SEQ ID NO: 2794127 - RNA, 18 nt, Human
cuagagggaccucuccca

SEQ ID NO: 2794128 - RNA, 20 nt, Human
cuagaggccagccccaccca

SEQ ID NO: 2794129 - RNA, 19 nt, Human
cuagaggccagccccaccc

SEQ ID NO: 2794130 - RNA, 18 nt, Human
cuagaggccagccccacc

SEQ ID NO: 2794131 - RNA, 22 nt, Human
cuagaggggggauuuccagcca

SEQ ID NO: 2794132 - RNA, 17 nt, Human
cuagagggaccucuccc

SEQ ID NO: 2794133 - RNA, 19 nt, Human
cuaagauucugauuuuagg

SEQ ID NO: 2794134 - RNA, 15 nt, Human
cuaagcaagcuaacc

SEQ ID NO: 2794135 - RNA, 12 nt, Human
cuaagcaauuuc

SEQ ID NO: 2794136 - RNA, 13 nt, Human
cuaagcaauuucu

SEQ ID NO: 2794137 - RNA, 15 nt, Human
cuaagcaauuucuug

SEQ ID NO: 2794138 - RNA, 13 nt, Human
cuaagcaucuaag

SEQ ID NO: 2794139 - RNA, 21 nt, Human
cuaagcauagcaaacagagga

SEQ ID NO: 2794140 - RNA, 14 nt, Human
cuaagcaucuaagu

SEQ ID NO: 2794141 - RNA, 15 nt, Human
cuaagcaucuaaguu

SEQ ID NO: 2794142 - RNA, 15 nt, Human
cuaagcauugccugg

SEQ ID NO: 2794143 - RNA, 16 nt, Human
cuaagcauugccuggc

SEQ ID NO: 2794144 - RNA, 13 nt, Human
cuaagccagccug

SEQ ID NO: 2794145 - RNA, 14 nt, Human
cuaagccagccugg

SEQ ID NO: 2794146 - RNA, 18 nt, Human
cuaagccagccuggucca

SEQ ID NO: 2794147 - RNA, 14 nt, Human
cuaagauucuagau

SEQ ID NO: 2794148 - RNA, 15 nt, Human
cuaagauucuagauc

SEQ ID NO: 2794149 - RNA, 16 nt, Human
cuaagauucuagauca

SEQ ID NO: 2794150 - RNA, 18 nt, Human
cuaagauucuagaucaga

SEQ ID NO: 2794151 - RNA, 22 nt, Human
cuaagauucuagaucagaugcu

SEQ ID NO: 2794152 - RNA, 11 nt, Human
cuaagauucug

SEQ ID NO: 2794153 - RNA, 12 nt, Human
cuaagauucuga

SEQ ID NO: 2794154 - RNA, 18 nt, Human
cuaagauucugauuuuag

SEQ ID NO: 2794155 - RNA, 16 nt, Human
cuaagauucuaaaggu

SEQ ID NO: 2794156 - RNA, 18 nt, Human
cuaagauucuaaaggucc

SEQ ID NO: 2794157 - RNA, 13 nt, Human
cuaagauucuaau

SEQ ID NO: 2794158 - RNA, 15 nt, Human
cuaagauucuaauga

SEQ ID NO: 2794159 - RNA, 21 nt, Human
cuaagauucuaaugaugauca

SEQ ID NO: 2794160 - RNA, 12 nt, Human
cuaagauucuag

SEQ ID NO: 2794161 - RNA, 13 nt, Human
cuaagauucuaga

SEQ ID NO: 2794162 - RNA, 17 nt, Human
cuaaccacgcuggaccu

SEQ ID NO: 2794163 - RNA, 21 nt, Human
cuaaccacgucugucuucaca

SEQ ID NO: 2794164 - RNA, 20 nt, Human
cuaaccacgucugucuucac

SEQ ID NO: 2794165 - RNA, 22 nt, Human
cuaagcuaggaaugaaauccug

SEQ ID NO: 2794166 - RNA, 17 nt, Human
cuaagcuaggaaugaaa

SEQ ID NO: 2794167 - RNA, 22 nt, Human
cuaagcgcacauucaugugggc

SEQ ID NO: 2794168 - RNA, 15 nt, Human
cuaagcuaacccccu

SEQ ID NO: 2794169 - RNA, 14 nt, Human
cuaagcuaggaaug

SEQ ID NO: 2794170 - RNA, 11 nt, Human
cuaagccugug

SEQ ID NO: 2794171 - RNA, 13 nt, Human
cuaagccuguggc

SEQ ID NO: 2794172 - RNA, 14 nt, Human
cuaagccuguggcu

SEQ ID NO: 2794173 - RNA, 15 nt, Human
cuaagccuguggcug

SEQ ID NO: 2794174 - RNA, 16 nt, Human
cuaagccuaccugcuc

SEQ ID NO: 2794175 - RNA, 17 nt, Human
cuaagccuaccugcucu

SEQ ID NO: 2794176 - RNA, 20 nt, Human
cuaagccuaccugcucucca

SEQ ID NO: 2794177 - RNA, 23 nt, Human
cuaagccuaccugcucuccaagu

SEQ ID NO: 2794178 - RNA, 16 nt, Human
cuaagcccaugggaca

SEQ ID NO: 2794179 - RNA, 14 nt, Human
cuaagccuaccugc

SEQ ID NO: 2794180 - RNA, 17 nt, Human
cuaaggaggggaaaaaa

SEQ ID NO: 2794181 - RNA, 20 nt, Human
cuaaggaggggaaaaaaaug

SEQ ID NO: 2794182 - RNA, 21 nt, Human
cuaaggaggggaaaaaaaugu

SEQ ID NO: 2794183 - RNA, 22 nt, Human
cuaaggaggggaaaaaaauguu

SEQ ID NO: 2794184 - RNA, 23 nt, Human
cuaaggaggggaaaaaaauguug

SEQ ID NO: 2794185 - RNA, 20 nt, Human
cuaaggauagcaccgcuuuu

SEQ ID NO: 2794186 - RNA, 20 nt, Human
cuaaggcaugugugaaacau

SEQ ID NO: 2794187 - RNA, 20 nt, Human
cuaaggcucugagagucuag

SEQ ID NO: 2794188 - RNA, 21 nt, Human
cuaaggcucugagagucuaga

SEQ ID NO: 2794189 - RNA, 20 nt, Human
cuaaggaugucacagggcca

SEQ ID NO: 2794190 - RNA, 18 nt, Human
cuaaggaugucacagggc

SEQ ID NO: 2794191 - RNA, 19 nt, Human
cuaaggaugucacagggcc

SEQ ID NO: 2794192 - RNA, 14 nt, Human
cuaaggcugaacuu

SEQ ID NO: 2794193 - RNA, 22 nt, Human
cuaaggcucugagagucuagau

SEQ ID NO: 2794194 - RNA, 23 nt, Human
cuaaggcucugagagucuagauu

SEQ ID NO: 2794195 - RNA, 15 nt, Human
cuaaggcuguuugcu

SEQ ID NO: 2794196 - RNA, 17 nt, Human
cuaaggcuguuugcuuc

SEQ ID NO: 2794197 - RNA, 15 nt, Human
cuaagggaagacauu

SEQ ID NO: 2794198 - RNA, 16 nt, Human
cuaagggaagacauuu

SEQ ID NO: 2794199 - RNA, 17 nt, Human
cuaagggaagacauuuc

SEQ ID NO: 2794200 - RNA, 18 nt, Human
cuaagggaagacauuucu

SEQ ID NO: 2794201 - RNA, 19 nt, Human
cuaagggaagacauuucuu

SEQ ID NO: 2794202 - RNA, 15 nt, Human
cuaaggugugcucug

SEQ ID NO: 2794203 - RNA, 22 nt, Human
cuaagggucgaaagcucuagaa

SEQ ID NO: 2794204 - RNA, 19 nt, Human
cuaagguccgguguucuaa

SEQ ID NO: 2794205 - RNA, 20 nt, Human
cuaagguccgguguucuaag

SEQ ID NO: 2794206 - RNA, 21 nt, Human
cuaagguccgguguucuaaga

SEQ ID NO: 2794207 - RNA, 22 nt, Human
cuaagguccgguguucuaagau

SEQ ID NO: 2794208 - RNA, 11 nt, Human
cuaagggggag

SEQ ID NO: 2794209 - RNA, 18 nt, Human
cuaagggggaggggaagu

SEQ ID NO: 2794210 - RNA, 19 nt, Human
cuaagggggaggggaaguc

SEQ ID NO: 2794211 - RNA, 17 nt, Human
cuaagggucgaaagcuc

SEQ ID NO: 2794212 - RNA, 18 nt, Human
cuaagggucgaaagcucu

SEQ ID NO: 2794213 - RNA, 19 nt, Human
cuaagggucgaaagcucua

SEQ ID NO: 2794214 - RNA, 21 nt, Human
cuaagggucgaaagcucuaga

SEQ ID NO: 2794215 - RNA, 23 nt, Human
cuaagggucgaaagcucuagaau

SEQ ID NO: 2794216 - RNA, 14 nt, Human
cuaagggugggugc

SEQ ID NO: 2794217 - RNA, 18 nt, Human
cuaagggugggugcucag

SEQ ID NO: 2794218 - RNA, 19 nt, Human
cuaagggugggugcucaga

SEQ ID NO: 2794219 - RNA, 20 nt, Human
cuaagggugggugcucagaa

SEQ ID NO: 2794220 - RNA, 21 nt, Human
cuaagggugggugcucagaau

SEQ ID NO: 2794221 - RNA, 22 nt, Human
cuaagggugggugcucagaaua

SEQ ID NO: 2794222 - RNA, 16 nt, Human
cuacacuccagccuga

SEQ ID NO: 2794223 - RNA, 18 nt, Human
cuacacuccagccugagc

SEQ ID NO: 2794224 - RNA, 17 nt, Human
cuacacuccagccugag

SEQ ID NO: 2794225 - RNA, 21 nt, Human
cuacaauuaauaguuugucua

SEQ ID NO: 2794226 - RNA, 22 nt, Human
cuacaauuaauaguuugucuau

SEQ ID NO: 2794227 - RNA, 15 nt, Human
cuacagaggccaugg

SEQ ID NO: 2794228 - RNA, 21 nt, Human
cuacagagccgagcaauauuu

SEQ ID NO: 2794229 - RNA, 23 nt, Human
cuacagagccgagcaauauuuau

SEQ ID NO: 2794230 - RNA, 12 nt, Human
cuacagagcugu

SEQ ID NO: 2794231 - RNA, 13 nt, Human
cuacagagcugug

SEQ ID NO: 2794232 - RNA, 14 nt, Human
cuacagagcugugg

SEQ ID NO: 2794233 - RNA, 15 nt, Human
cuacagaccugcuuu

SEQ ID NO: 2794234 - RNA, 22 nt, Human
cuacagaccugcuuuuugaaau

SEQ ID NO: 2794235 - RNA, 23 nt, Human
cuacagaccugcuuuuugaaaug

SEQ ID NO: 2794236 - RNA, 18 nt, Human
cuaccagugcaggcuggc

SEQ ID NO: 2794237 - RNA, 19 nt, Human
cuaccagugcaggcuggcc

SEQ ID NO: 2794238 - RNA, 20 nt, Human
cuaccagugcaggcuggcca

SEQ ID NO: 2794239 - RNA, 21 nt, Human
cuaccagugcaggcuggccag

SEQ ID NO: 2794240 - RNA, 22 nt, Human
cuaccagugcaggcuggccagc

SEQ ID NO: 2794241 - RNA, 23 nt, Human
cuaccagugcaggcuggccagcc

SEQ ID NO: 2794242 - RNA, 21 nt, Human
cuaccagcguauauauaagaa

SEQ ID NO: 2794243 - RNA, 12 nt, Human
cuaccacuccug

SEQ ID NO: 2794244 - RNA, 14 nt, Human
cuaccacuccugcc

SEQ ID NO: 2794245 - RNA, 21 nt, Human
cuacagaggaaacaauauuua

SEQ ID NO: 2794246 - RNA, 18 nt, Human
cuaccagauaacugagga

SEQ ID NO: 2794247 - RNA, 17 nt, Human
cuaccacuccugccaag

SEQ ID NO: 2794248 - RNA, 22 nt, Human
cuacccacccuccuuucaccac

SEQ ID NO: 2794249 - RNA, 14 nt, Human
cuacccacuucuaa

SEQ ID NO: 2794250 - RNA, 15 nt, Human
cuacccacuauccuu

SEQ ID NO: 2794251 - RNA, 19 nt, Human
cuacccacuauccuucgug

SEQ ID NO: 2794252 - RNA, 20 nt, Human
cuacccacuauccuucguga

SEQ ID NO: 2794253 - RNA, 14 nt, Human
cuaccaucagggac

SEQ ID NO: 2794254 - RNA, 15 nt, Human
cuaccaucagggaca

SEQ ID NO: 2794255 - RNA, 16 nt, Human
cuaccaucagggacag

SEQ ID NO: 2794256 - RNA, 18 nt, Human
cuaccaucagggacagga

SEQ ID NO: 2794257 - RNA, 13 nt, Human
cuacccacccucc

SEQ ID NO: 2794258 - RNA, 17 nt, Human
cuacccacccuccuuuc

SEQ ID NO: 2794259 - RNA, 19 nt, Human
cuacccagcgagcccuggu

SEQ ID NO: 2794260 - RNA, 20 nt, Human
cuacccagcgagcccuggug

SEQ ID NO: 2794261 - RNA, 11 nt, Human
cuacccagggc

SEQ ID NO: 2794262 - RNA, 22 nt, Human
cuacccacuucuaaauagcaau

SEQ ID NO: 2794263 - RNA, 16 nt, Human
cuacccacuucuaaau

SEQ ID NO: 2794264 - RNA, 19 nt, Human
cuacccagggccugcagga

SEQ ID NO: 2794265 - RNA, 16 nt, Human
cuacccagggccugca

SEQ ID NO: 2794266 - RNA, 15 nt, Human
cuacccagggccugc

SEQ ID NO: 2794267 - RNA, 14 nt, Human
cuacccagggccug

SEQ ID NO: 2794268 - RNA, 17 nt, Human
cuacccgcaucuucugu

SEQ ID NO: 2794269 - RNA, 12 nt, Human
cuaccccuggcu

SEQ ID NO: 2794270 - RNA, 13 nt, Human
cuaccccuggcug

SEQ ID NO: 2794271 - RNA, 14 nt, Human
cuaccccuggcugu

SEQ ID NO: 2794272 - RNA, 19 nt, Human
cuaccccuggcuguacugc

SEQ ID NO: 2794273 - RNA, 19 nt, Human
cuaauguaauaacugugaa

SEQ ID NO: 2794274 - RNA, 13 nt, Human
cuaaugagacuga

SEQ ID NO: 2794275 - RNA, 17 nt, Human
cuaaugaggagagaaaa

SEQ ID NO: 2794276 - RNA, 18 nt, Human
cuaaugaggagagaaaau

SEQ ID NO: 2794277 - RNA, 19 nt, Human
cuaaugaggagagaaaaua

SEQ ID NO: 2794278 - RNA, 20 nt, Human
cuaaugaggagagaaaauau

SEQ ID NO: 2794279 - RNA, 21 nt, Human
cuaaugaggagagaaaauaua

SEQ ID NO: 2794280 - RNA, 23 nt, Human
cuaaugaggagagaaaauauaug

SEQ ID NO: 2794281 - RNA, 23 nt, Human
cuaaugacaugccuauaugagaa

SEQ ID NO: 2794282 - RNA, 19 nt, Human
cuaaugaaugcauaaaaug

SEQ ID NO: 2794283 - RNA, 22 nt, Human
cuaaugaaugcauaaaauguua

SEQ ID NO: 2794284 - RNA, 13 nt, Human
cuaaugaaaguga

SEQ ID NO: 2794285 - RNA, 18 nt, Human
cuaaugaaagugaugaca

SEQ ID NO: 2794286 - RNA, 20 nt, Human
cuaaugaaagugaugacaua

SEQ ID NO: 2794287 - RNA, 15 nt, Human
cuacaauacaucuga

SEQ ID NO: 2794288 - RNA, 12 nt, Human
cuacaaggccua

SEQ ID NO: 2794289 - RNA, 22 nt, Human
cuacaagagcagccuguggcau

SEQ ID NO: 2794290 - RNA, 21 nt, Human
cuacaagagcagccuguggca

SEQ ID NO: 2794291 - RNA, 23 nt, Human
cuacaagagcagccuguggcauc

SEQ ID NO: 2794292 - RNA, 15 nt, Human
cuacaagauuuagaa

SEQ ID NO: 2794293 - RNA, 20 nt, Human
cuacaagagcagccuguggc

SEQ ID NO: 2794294 - RNA, 19 nt, Human
cuacaagagcagccugugg

SEQ ID NO: 2794295 - RNA, 18 nt, Human
cuacaagagcagccugug

SEQ ID NO: 2794296 - RNA, 17 nt, Human
cuacaagagcagccugu

SEQ ID NO: 2794297 - RNA, 15 nt, Human
cuacaagagcagccu

SEQ ID NO: 2794298 - RNA, 15 nt, Human
cuacaagacacagug

SEQ ID NO: 2794299 - RNA, 15 nt, Human
cuaauuaaaaaguua

SEQ ID NO: 2794300 - RNA, 16 nt, Human
cuaauuaaaaaguuaa

SEQ ID NO: 2794301 - RNA, 20 nt, Human
cuaauuaaaacacuuucaaa

SEQ ID NO: 2794302 - RNA, 13 nt, Human
cuaaugucuucau

SEQ ID NO: 2794303 - RNA, 15 nt, Human
cuaaugucuucauaa

SEQ ID NO: 2794304 - RNA, 16 nt, Human
cuaaugucuucauaaa

SEQ ID NO: 2794305 - RNA, 17 nt, Human
cuaaugucuucauaaag

SEQ ID NO: 2794306 - RNA, 19 nt, Human
cuaaugucuucauuucauu

SEQ ID NO: 2794307 - RNA, 21 nt, Human
cuaaugucuucauuucauugu

SEQ ID NO: 2794308 - RNA, 22 nt, Human
cuaaugucuucauuucauugua

SEQ ID NO: 2794309 - RNA, 16 nt, Human
cuaaggugugcucuga

SEQ ID NO: 2794310 - RNA, 15 nt, Human
cuaaggugcuaaauc

SEQ ID NO: 2794311 - RNA, 13 nt, Human
cuaaucaaagcca

SEQ ID NO: 2794312 - RNA, 16 nt, Human
cuaaucaaagccaggg

SEQ ID NO: 2794313 - RNA, 19 nt, Human
cuaaucaaagccagggucu

SEQ ID NO: 2794314 - RNA, 20 nt, Human
cuaaucaaagccagggucuc

SEQ ID NO: 2794315 - RNA, 13 nt, Human
cuaauauuaaaaa

SEQ ID NO: 2794316 - RNA, 14 nt, Human
cuaauauuaaaaau

SEQ ID NO: 2794317 - RNA, 16 nt, Human
cuaauauuaaaaauau

SEQ ID NO: 2794318 - RNA, 18 nt, Human
cuaauauuaaaaauaugg

SEQ ID NO: 2794319 - RNA, 13 nt, Human
cuaauauuaaaag

SEQ ID NO: 2794320 - RNA, 16 nt, Human
cuaauauuaaaaguca

SEQ ID NO: 2794321 - RNA, 11 nt, Human
cuaagguucua

SEQ ID NO: 2794322 - RNA, 12 nt, Human
cuaagguucuaa

SEQ ID NO: 2794323 - RNA, 16 nt, Human
cuaauccucuuuuucu

SEQ ID NO: 2794324 - RNA, 15 nt, Human
cuaaucucauaccuc

SEQ ID NO: 2794325 - RNA, 18 nt, Human
cuaaucucauaccucuga

SEQ ID NO: 2794326 - RNA, 20 nt, Human
cuaaucucauaccucugacc

SEQ ID NO: 2794327 - RNA, 21 nt, Human
cuaaucucauaccucugacca

SEQ ID NO: 2794328 - RNA, 22 nt, Human
cuaaucucauaccucugaccaa

SEQ ID NO: 2794329 - RNA, 17 nt, Human
cuaaucagaaauuuuua

SEQ ID NO: 2794330 - RNA, 22 nt, Human
cuaaucagaaauuuuuaucagu

SEQ ID NO: 2794331 - RNA, 23 nt, Human
cuaaucagaaauuuuuaucaguu

SEQ ID NO: 2794332 - RNA, 17 nt, Human
cuaaucagcauucucac

SEQ ID NO: 2794333 - RNA, 19 nt, Human
cuaaucagcauucucacuc

SEQ ID NO: 2794334 - RNA, 22 nt, Human
cuaaauguucuaugguuaugaa

SEQ ID NO: 2794335 - RNA, 14 nt, Human
cuaaauuuaaauuu

SEQ ID NO: 2794336 - RNA, 15 nt, Human
cuaaauuuaaauuua

SEQ ID NO: 2794337 - RNA, 17 nt, Human
cuaaauuuaaauuuaaa

SEQ ID NO: 2794338 - RNA, 19 nt, Human
cuaaauuuaaauuuaaaga

SEQ ID NO: 2794339 - RNA, 13 nt, Human
cuaaauuuaaugc

SEQ ID NO: 2794340 - RNA, 15 nt, Human
cuaaauuuaaugcug

SEQ ID NO: 2794341 - RNA, 16 nt, Human
cuaaauuuaaugcugc

SEQ ID NO: 2794342 - RNA, 17 nt, Human
cuaaauuuaaugcugcc

SEQ ID NO: 2794343 - RNA, 18 nt, Human
cuaaauuuaaugcugccu

SEQ ID NO: 2794344 - RNA, 19 nt, Human
cuaaauggucgcccaggag

SEQ ID NO: 2794345 - RNA, 18 nt, Human
cuaaauggucgcccagga

SEQ ID NO: 2794346 - RNA, 21 nt, Human
cuaaauggucgcccaggagac

SEQ ID NO: 2794347 - RNA, 20 nt, Human
cuaaauggucgcccaggaga

SEQ ID NO: 2794348 - RNA, 15 nt, Human
cuaaaugcugaaaaa

SEQ ID NO: 2794349 - RNA, 20 nt, Human
cuaacacuggcauguucaaa

SEQ ID NO: 2794350 - RNA, 23 nt, Human
cuaaauuugaauguuaagcagau

SEQ ID NO: 2794351 - RNA, 14 nt, Human
cuaaauuugauacu

SEQ ID NO: 2794352 - RNA, 15 nt, Human
cuaaauuugauacuu

SEQ ID NO: 2794353 - RNA, 16 nt, Human
cuaaauuugauacuua

SEQ ID NO: 2794354 - RNA, 17 nt, Human
cuaaauuugauacuuau

SEQ ID NO: 2794355 - RNA, 18 nt, Human
cuaaauuugauacuuaua

SEQ ID NO: 2794356 - RNA, 19 nt, Human
cuaaauuugauacuuauau

SEQ ID NO: 2794357 - RNA, 20 nt, Human
cuaaauuugauacuuauauu

SEQ ID NO: 2794358 - RNA, 21 nt, Human
cuaaauuugauacuuauauuu

SEQ ID NO: 2794359 - RNA, 23 nt, Human
cuaaauuugauacuuauauuuuc

SEQ ID NO: 2794360 - RNA, 13 nt, Human
cuaaauuugggga

SEQ ID NO: 2794361 - RNA, 18 nt, Human
cuaaauuuggggacagau

SEQ ID NO: 2794362 - RNA, 15 nt, Human
cuaacacacagcucc

SEQ ID NO: 2794363 - RNA, 13 nt, Human
cuaacacaaggac

SEQ ID NO: 2794364 - RNA, 17 nt, Human
cuaacacacacagaaaa

SEQ ID NO: 2794365 - RNA, 15 nt, Human
cuaacaccagacaga

SEQ ID NO: 2794366 - RNA, 16 nt, Human
cuaacacacagcuccc

SEQ ID NO: 2794367 - RNA, 23 nt, Human
cuaacacggugcucauuuuuucu

SEQ ID NO: 2794368 - RNA, 18 nt, Human
cuaacacgugaugugaua

SEQ ID NO: 2794369 - RNA, 14 nt, Human
cuaaaucagagaca

SEQ ID NO: 2794370 - RNA, 15 nt, Human
cuaaaucagagacaa

SEQ ID NO: 2794371 - RNA, 23 nt, Human
cuaaauauucagaaucuuuguua

SEQ ID NO: 2794372 - RNA, 21 nt, Human
cuaaauaugaacccuuuguuu

SEQ ID NO: 2794373 - RNA, 23 nt, Human
cuaaauaugaacccuuuguuucu

SEQ ID NO: 2794374 - RNA, 17 nt, Human
cuaaacggauuccaaag

SEQ ID NO: 2794375 - RNA, 15 nt, Human
cuaaacgguucaguu

SEQ ID NO: 2794376 - RNA, 20 nt, Human
cuaaacgguucaguuucuuc

SEQ ID NO: 2794377 - RNA, 18 nt, Human
cuaaacguaagcacuguu

SEQ ID NO: 2794378 - RNA, 19 nt, Human
cuaaacguaagcacuguuu

SEQ ID NO: 2794379 - RNA, 16 nt, Human
cuaaacggauuccaaa

SEQ ID NO: 2794380 - RNA, 15 nt, Human
cuaaacggauuccaa

SEQ ID NO: 2794381 - RNA, 16 nt, Human
cuaaaucuauuuauua

SEQ ID NO: 2794382 - RNA, 19 nt, Human
cuaaaucuauuuauuaaua

SEQ ID NO: 2794383 - RNA, 12 nt, Human
cuaaaucuauuu

SEQ ID NO: 2794384 - RNA, 19 nt, Human
cuaaaucagagacaaaaua

SEQ ID NO: 2794385 - RNA, 14 nt, Human
cuaaaucuauuuau

SEQ ID NO: 2794386 - RNA, 21 nt, Human
cuaaaucuauuuauuaauauu

SEQ ID NO: 2794387 - RNA, 17 nt, Human
cuaaaugccuaauaaac

SEQ ID NO: 2794388 - RNA, 18 nt, Human
cuaaaugccuaauaaaca

SEQ ID NO: 2794389 - RNA, 19 nt, Human
cuaaaugccuaauaaacaa

SEQ ID NO: 2794390 - RNA, 17 nt, Human
cuaaaugccuaguuuuu

SEQ ID NO: 2794391 - RNA, 20 nt, Human
cuaaaugccuaguuuuuagu

SEQ ID NO: 2794392 - RNA, 21 nt, Human
cuaaaugccuaguuuuuagua

SEQ ID NO: 2794393 - RNA, 19 nt, Human
cuaaaugccuuagaaaugu

SEQ ID NO: 2794394 - RNA, 19 nt, Human
cuaaacaaugcugauuugg

SEQ ID NO: 2794395 - RNA, 16 nt, Human
cuaaacacugcgcuuu

SEQ ID NO: 2794396 - RNA, 18 nt, Human
cuaaacacugcgcuuuau

SEQ ID NO: 2794397 - RNA, 19 nt, Human
cuaaacacugcgcuuuauu

SEQ ID NO: 2794398 - RNA, 14 nt, Human
cuaaacagacucau

SEQ ID NO: 2794399 - RNA, 17 nt, Human
cuaaacauaugauuuca

SEQ ID NO: 2794400 - RNA, 16 nt, Human
cuaaacccaauccaaa

SEQ ID NO: 2794401 - RNA, 19 nt, Human
cuaaacccaauccaaaugg

SEQ ID NO: 2794402 - RNA, 15 nt, Human
cuaaaccccuguccc

SEQ ID NO: 2794403 - RNA, 16 nt, Human
cuaaaccccuguccca

SEQ ID NO: 2794404 - RNA, 15 nt, Human
cuaaacccaauccaa

SEQ ID NO: 2794405 - RNA, 21 nt, Human
cuaaaauuuguggguuuuuuu

SEQ ID NO: 2794406 - RNA, 23 nt, Human
cguggcugugcucucaccagcug

SEQ ID NO: 2794407 - RNA, 21 nt, Human
cuaaaauuguuuuuuguugua

SEQ ID NO: 2794408 - RNA, 20 nt, Human
cuaaaagaauauucagagaa

SEQ ID NO: 2794409 - RNA, 13 nt, Human
cuaaaagacaggc

SEQ ID NO: 2794410 - RNA, 14 nt, Human
cuaaaagacauuug

SEQ ID NO: 2794411 - RNA, 17 nt, Human
cuaaaagacauuuguua

SEQ ID NO: 2794412 - RNA, 22 nt, Human
cuaaaagacuucccuaacacuu

SEQ ID NO: 2794413 - RNA, 18 nt, Human
cuaaaacuggccugacuu

SEQ ID NO: 2794414 - RNA, 14 nt, Human
cguugguccagagc

SEQ ID NO: 2794415 - RNA, 15 nt, Human
cguugguccagagcg

SEQ ID NO: 2794416 - RNA, 13 nt, Human
cguuggucucugc

SEQ ID NO: 2794417 - RNA, 23 nt, Human
cguuggucucugcauuuuucugc

SEQ ID NO: 2794418 - RNA, 23 nt, Human
cguugggagggggagaaaaggaa

SEQ ID NO: 2794419 - RNA, 14 nt, Human
cguugcuuucacuc

SEQ ID NO: 2794420 - RNA, 20 nt, Human
cguuguugcauguuugaaau

SEQ ID NO: 2794421 - RNA, 18 nt, Human
cguuguuuacuuaaagau

SEQ ID NO: 2794422 - RNA, 20 nt, Human
cguuguuuacuuaaagauuu

SEQ ID NO: 2794423 - RNA, 17 nt, Human
cguugucuguggauggu

SEQ ID NO: 2794424 - RNA, 13 nt, Human
cuaaaaauccaga

SEQ ID NO: 2794425 - RNA, 17 nt, Human
cguuuacuaugccugug

SEQ ID NO: 2794426 - RNA, 15 nt, Human
cguuuaccuagaaga

SEQ ID NO: 2794427 - RNA, 17 nt, Human
cguuuaccuagaagaag

SEQ ID NO: 2794428 - RNA, 23 nt, Human
cguuuacaagcccccccuuccac

SEQ ID NO: 2794429 - RNA, 14 nt, Human
cguuuacuaugccu

SEQ ID NO: 2794430 - RNA, 11 nt, Human
cuaaaaccauu

SEQ ID NO: 2794431 - RNA, 17 nt, Human
cuaaaaccauuccauuu

SEQ ID NO: 2794432 - RNA, 13 nt, Human
cuaaaaaugcaac

SEQ ID NO: 2794433 - RNA, 20 nt, Human
cuaaaacaaaagcucaucca

SEQ ID NO: 2794434 - RNA, 20 nt, Human
cgugggcucccguguuuugu

SEQ ID NO: 2794435 - RNA, 18 nt, Human
cguugaagaggaagggca

SEQ ID NO: 2794436 - RNA, 17 nt, Human
cguugauguuggcuggg

SEQ ID NO: 2794437 - RNA, 18 nt, Human
cguugauguuggcuggga

SEQ ID NO: 2794438 - RNA, 20 nt, Human
cguggcuucccgcucagccc

SEQ ID NO: 2794439 - RNA, 21 nt, Human
cguggcuucccgcucagcccu

SEQ ID NO: 2794440 - RNA, 22 nt, Human
cgugggagacaagaaaucccug

SEQ ID NO: 2794441 - RNA, 16 nt, Human
cgugggauucagagaa

SEQ ID NO: 2794442 - RNA, 23 nt, Human
cgugggauucagagaaaggcaag

SEQ ID NO: 2794443 - RNA, 12 nt, Human
cgugggcucccg

SEQ ID NO: 2794444 - RNA, 22 nt, Human
cguggaggagcagugcaggcac

SEQ ID NO: 2794445 - RNA, 13 nt, Human
cguggcaaauaua

SEQ ID NO: 2794446 - RNA, 14 nt, Human
cguggcaaauauaa

SEQ ID NO: 2794447 - RNA, 15 nt, Human
cguggcaaauauaaa

SEQ ID NO: 2794448 - RNA, 17 nt, Human
cguggcaaauauaaaac

SEQ ID NO: 2794449 - RNA, 18 nt, Human
cguggcaaauauaaaacu

SEQ ID NO: 2794450 - RNA, 13 nt, Human
cguggauuaaacu

SEQ ID NO: 2794451 - RNA, 19 nt, Human
cguggauuaaacuuaugaa

SEQ ID NO: 2794452 - RNA, 20 nt, Human
cguggauuaaacuuaugaau

SEQ ID NO: 2794453 - RNA, 17 nt, Human
cguggauucgcuugagu

SEQ ID NO: 2794454 - RNA, 20 nt, Human
cguggcagauaaucagccuc

SEQ ID NO: 2794455 - RNA, 22 nt, Human
cguggcagauaaucagccucuu

SEQ ID NO: 2794456 - RNA, 21 nt, Human
cguggcagauaaucagccucu

SEQ ID NO: 2794457 - RNA, 16 nt, Human
cguggccaucccugug

SEQ ID NO: 2794458 - RNA, 17 nt, Human
cguggccaucccuguga

SEQ ID NO: 2794459 - RNA, 19 nt, Human
cguggccaucccugugagg

SEQ ID NO: 2794460 - RNA, 18 nt, Human
cguggcuucccgcucagc

SEQ ID NO: 2794461 - RNA, 19 nt, Human
cguggcuucccgcucagcc

SEQ ID NO: 2794462 - RNA, 21 nt, Human
cgugccagucaagaagaaaaa

SEQ ID NO: 2794463 - RNA, 19 nt, Human
cgugcgcugggcacuuccc

SEQ ID NO: 2794464 - RNA, 23 nt, Human
cgugcgcugggcacuucccugcu

SEQ ID NO: 2794465 - RNA, 20 nt, Human
cguggagagcuggugcccgg

SEQ ID NO: 2794466 - RNA, 17 nt, Human
cguggagagcuggugcc

SEQ ID NO: 2794467 - RNA, 16 nt, Human
cguggaggagcagugc

SEQ ID NO: 2794468 - RNA, 14 nt, Human
cguggagcugccug

SEQ ID NO: 2794469 - RNA, 15 nt, Human
cguggagcugccuga

SEQ ID NO: 2794470 - RNA, 22 nt, Human
cguggagcaggcgguggggaga

SEQ ID NO: 2794471 - RNA, 20 nt, Human
cguggagcgggguaugaaga

SEQ ID NO: 2794472 - RNA, 21 nt, Human
cguggagcgggguaugaagag

SEQ ID NO: 2794473 - RNA, 22 nt, Human
cguggagcgggguaugaagagc

SEQ ID NO: 2794474 - RNA, 16 nt, Human
cguggaaccucugucu

SEQ ID NO: 2794475 - RNA, 17 nt, Human
cguggaaccucugucuc

SEQ ID NO: 2794476 - RNA, 18 nt, Human
cguggaaccucugucuca

SEQ ID NO: 2794477 - RNA, 19 nt, Human
cguggaaccucugucucau

SEQ ID NO: 2794478 - RNA, 13 nt, Human
cguggacucugca

SEQ ID NO: 2794479 - RNA, 16 nt, Human
cguggacucugcacau

SEQ ID NO: 2794480 - RNA, 16 nt, Human
cguggacaggugugcc

SEQ ID NO: 2794481 - RNA, 22 nt, Human
cgugcacguggagagcuggugc

SEQ ID NO: 2794482 - RNA, 21 nt, Human
cgugcacguggagagcuggug

SEQ ID NO: 2794483 - RNA, 20 nt, Human
cgugcacguggagagcuggu

SEQ ID NO: 2794484 - RNA, 17 nt, Human
cgugcacguggagagcu

SEQ ID NO: 2794485 - RNA, 19 nt, Human
cgugcacacaccagagccc

SEQ ID NO: 2794486 - RNA, 18 nt, Human
cgugcacacaccagagcc

SEQ ID NO: 2794487 - RNA, 19 nt, Human
cgugcauuagcacagauuu

SEQ ID NO: 2794488 - RNA, 21 nt, Human
cgugcauuagcacagauuuua

SEQ ID NO: 2794489 - RNA, 22 nt, Human
cgugcauuagcacagauuuuaa

SEQ ID NO: 2794490 - RNA, 23 nt, Human
cgugcauuagcacagauuuuaau

SEQ ID NO: 2794491 - RNA, 18 nt, Human
cgugccaaagucucccuu

SEQ ID NO: 2794492 - RNA, 20 nt, Human
cgugccaaagucucccuucu

SEQ ID NO: 2794493 - RNA, 21 nt, Human
cgugcaguggugcgaucuggg

SEQ ID NO: 2794494 - RNA, 19 nt, Human
cgucuucuguauacugugg

SEQ ID NO: 2794495 - RNA, 17 nt, Human
cgucuuccgccccugcc

SEQ ID NO: 2794496 - RNA, 18 nt, Human
cgucuuccgccccugccu

SEQ ID NO: 2794497 - RNA, 19 nt, Human
cgucuuccgccccugccug

SEQ ID NO: 2794498 - RNA, 20 nt, Human
cgucuuccgccccugccugc

SEQ ID NO: 2794499 - RNA, 21 nt, Human
cgucuuccgccccugccugcc

SEQ ID NO: 2794500 - RNA, 13 nt, Human
cgucuuucuuuuu

SEQ ID NO: 2794501 - RNA, 16 nt, Human
cgugcacacaccagag

SEQ ID NO: 2794502 - RNA, 16 nt, Human
cgugaaaacggagcug

SEQ ID NO: 2794503 - RNA, 17 nt, Human
cgugaaaacggagcuga

SEQ ID NO: 2794504 - RNA, 15 nt, Human
cgugaaaacggagcu

SEQ ID NO: 2794505 - RNA, 22 nt, Human
cgucugacaggcaaugcuggcu

SEQ ID NO: 2794506 - RNA, 21 nt, Human
cgucugacaggcaaugcuggc

SEQ ID NO: 2794507 - RNA, 20 nt, Human
cgucugacaggcaaugcugg

SEQ ID NO: 2794508 - RNA, 13 nt, Human
cggugcccacacc

SEQ ID NO: 2794509 - RNA, 17 nt, Human
cgucucaaccccucaca

SEQ ID NO: 2794510 - RNA, 11 nt, Human
cgucucagugu

SEQ ID NO: 2794511 - RNA, 23 nt, Human
cgcuccaccagcaucaccugccu

SEQ ID NO: 2794512 - RNA, 14 nt, Human
cgcugggugguacc

SEQ ID NO: 2794513 - RNA, 19 nt, Human
cgcugggugguacccucug

SEQ ID NO: 2794514 - RNA, 22 nt, Human
cgcugggugguacccucuggag

SEQ ID NO: 2794515 - RNA, 13 nt, Human
cgcugucacaggc

SEQ ID NO: 2794516 - RNA, 12 nt, Human
cgcuaaggaaga

SEQ ID NO: 2794517 - RNA, 22 nt, Human
cgcuggguccuaauuaccaguc

SEQ ID NO: 2794518 - RNA, 12 nt, Human
cgcuggugcuga

SEQ ID NO: 2794519 - RNA, 13 nt, Human
cgcuggugcugag

SEQ ID NO: 2794520 - RNA, 23 nt, Human
cgcugucccuaguaaaaauacaa

SEQ ID NO: 2794521 - RNA, 16 nt, Human
cgcuuugauucauagu

SEQ ID NO: 2794522 - RNA, 11 nt, Human
cgcuuuggccu

SEQ ID NO: 2794523 - RNA, 15 nt, Human
cgcuuuggccugagu

SEQ ID NO: 2794524 - RNA, 12 nt, Human
cgcuuugucaca

SEQ ID NO: 2794525 - RNA, 18 nt, Human
cgcuuguaaauaccagga

SEQ ID NO: 2794526 - RNA, 12 nt, Human
cgcuuggcucca

SEQ ID NO: 2794527 - RNA, 16 nt, Human
cgcuuggcuccaugcu

SEQ ID NO: 2794528 - RNA, 21 nt, Human
cgcuuggcuccaugcuccuca

SEQ ID NO: 2794529 - RNA, 11 nt, Human
cgcuacccacu

SEQ ID NO: 2794530 - RNA, 20 nt, Human
cgcuacaaaacgcgcagaug

SEQ ID NO: 2794531 - RNA, 23 nt, Human
cgcuacaaaacgcgcagaugugc

SEQ ID NO: 2794532 - RNA, 16 nt, Human
cgcucagcccucccug

SEQ ID NO: 2794533 - RNA, 21 nt, Human
cgcucagcccucccugccccu

SEQ ID NO: 2794534 - RNA, 12 nt, Human
cgcucagcccuc

SEQ ID NO: 2794535 - RNA, 23 nt, Human
cgcggcggagcuggccccgccgc

SEQ ID NO: 2794536 - RNA, 15 nt, Human
cgcggcggagcuggc

SEQ ID NO: 2794537 - RNA, 12 nt, Human
cgcggccagccc

SEQ ID NO: 2794538 - RNA, 14 nt, Human
cgcggccagccccg

SEQ ID NO: 2794539 - RNA, 15 nt, Human
cgcggccagccccgg

SEQ ID NO: 2794540 - RNA, 22 nt, Human
cgcggccagccccggcccuggg

SEQ ID NO: 2794541 - RNA, 17 nt, Human
cgcggcggagcuggccc

SEQ ID NO: 2794542 - RNA, 18 nt, Human
cgcggcggagcuggcccc

SEQ ID NO: 2794543 - RNA, 21 nt, Human
cgcggcggagcuggccccgcc

SEQ ID NO: 2794544 - RNA, 22 nt, Human
cgcggcggagcuggccccgccg

SEQ ID NO: 2794545 - RNA, 16 nt, Human
cgcgcccgccccugca

SEQ ID NO: 2794546 - RNA, 17 nt, Human
cgcgcccgccccugcag

SEQ ID NO: 2794547 - RNA, 11 nt, Human
cgcgcgcacac

SEQ ID NO: 2794548 - RNA, 13 nt, Human
cgcgcgcacacac

SEQ ID NO: 2794549 - RNA, 14 nt, Human
cgcgcgcacacaca

SEQ ID NO: 2794550 - RNA, 13 nt, Human
cgcgcgcgcacac

SEQ ID NO: 2794551 - RNA, 13 nt, Human
cgcgcucugcuca

SEQ ID NO: 2794552 - RNA, 14 nt, Human
cgcgcucugcucag

SEQ ID NO: 2794553 - RNA, 19 nt, Human
cgcgcgcacacacacacau

SEQ ID NO: 2794554 - RNA, 18 nt, Human
cgcgccacucgcuucccc

SEQ ID NO: 2794555 - RNA, 15 nt, Human
cgcgccacucgcuuc

SEQ ID NO: 2794556 - RNA, 23 nt, Human
cgcgccacuacacuccagccuga

SEQ ID NO: 2794557 - RNA, 22 nt, Human
cgcgccacuacacuccagccug

SEQ ID NO: 2794558 - RNA, 22 nt, Human
cgcgccacucgcuucccccaua

SEQ ID NO: 2794559 - RNA, 20 nt, Human
cgcgccacucgcuuccccca

SEQ ID NO: 2794560 - RNA, 16 nt, Human
cgcgccccccucccag

SEQ ID NO: 2794561 - RNA, 17 nt, Human
cgcgccccccucccaga

SEQ ID NO: 2794562 - RNA, 18 nt, Human
cgcgccccccucccagag

SEQ ID NO: 2794563 - RNA, 19 nt, Human
cgcgccccccucccagagg

SEQ ID NO: 2794564 - RNA, 20 nt, Human
cgcgccccccucccagaggc

SEQ ID NO: 2794565 - RNA, 21 nt, Human
cgcgccccccucccagaggcg

SEQ ID NO: 2794566 - RNA, 14 nt, Human
cgcccaguccuucc

SEQ ID NO: 2794567 - RNA, 15 nt, Human
cgcccaguccuucca

SEQ ID NO: 2794568 - RNA, 20 nt, Human
cgcccaggcuggagugcagu

SEQ ID NO: 2794569 - RNA, 21 nt, Human
cgccccucauuuaucccucaa

SEQ ID NO: 2794570 - RNA, 15 nt, Human
cgcccccugcccucc

SEQ ID NO: 2794571 - RNA, 19 nt, Human
cgcccccugcccuccccuc

SEQ ID NO: 2794572 - RNA, 16 nt, Human
cgcccaguccuuccac

SEQ ID NO: 2794573 - RNA, 14 nt, Human
cgcccccugcccuc

SEQ ID NO: 2794574 - RNA, 20 nt, Human
cgcccuuggcuucugugaug

SEQ ID NO: 2794575 - RNA, 17 nt, Human
cgcccuuggcuucugug

SEQ ID NO: 2794576 - RNA, 11 nt, Human
cgcccuuggcu

SEQ ID NO: 2794577 - RNA, 15 nt, Human
cgcccuuaccuuccc

SEQ ID NO: 2794578 - RNA, 19 nt, Human
cgcccuuacuucuugcccu

SEQ ID NO: 2794579 - RNA, 20 nt, Human
cgcccuuacuucuugcccug

SEQ ID NO: 2794580 - RNA, 19 nt, Human
cgcccuuagucccccaacu

SEQ ID NO: 2794581 - RNA, 21 nt, Human
cgcccuuagucccccaacucu

SEQ ID NO: 2794582 - RNA, 19 nt, Human
cgcgcagaugugcagcaga

SEQ ID NO: 2794583 - RNA, 18 nt, Human
cgcgcacacacacacaua

SEQ ID NO: 2794584 - RNA, 12 nt, Human
cgcgcacacaca

SEQ ID NO: 2794585 - RNA, 12 nt, Human
cgccccugcagc

SEQ ID NO: 2794586 - RNA, 19 nt, Human
cgccccugcagcacggaca

SEQ ID NO: 2794587 - RNA, 14 nt, Human
cgccccugccaccu

SEQ ID NO: 2794588 - RNA, 12 nt, Human
cgccccugccug

SEQ ID NO: 2794589 - RNA, 13 nt, Human
cgccccugccugc

SEQ ID NO: 2794590 - RNA, 15 nt, Human
cgccccugccugcca

SEQ ID NO: 2794591 - RNA, 18 nt, Human
cgccccugccugccaugu

SEQ ID NO: 2794592 - RNA, 20 nt, Human
cgcccacaggaagccugcag

SEQ ID NO: 2794593 - RNA, 21 nt, Human
cgccaguguaaucccccagga

SEQ ID NO: 2794594 - RNA, 22 nt, Human
cgccaguguaaucccccaggag

SEQ ID NO: 2794595 - RNA, 13 nt, Human
cgccaucagccca

SEQ ID NO: 2794596 - RNA, 14 nt, Human
cgccaucagcccaa

SEQ ID NO: 2794597 - RNA, 18 nt, Human
cgcccacaggaagccugc

SEQ ID NO: 2794598 - RNA, 21 nt, Human
cgcccacaggaagccugcagu

SEQ ID NO: 2794599 - RNA, 22 nt, Human
cgcccacaggaagccugcaguc

SEQ ID NO: 2794600 - RNA, 11 nt, Human
cgcccaccucc

SEQ ID NO: 2794601 - RNA, 12 nt, Human
cgcccaccuccc

SEQ ID NO: 2794602 - RNA, 14 nt, Human
cgcccaccucccca

SEQ ID NO: 2794603 - RNA, 11 nt, Human
ccucugccaga

SEQ ID NO: 2794604 - RNA, 23 nt, Human
ccucugccagaagauccccucag

SEQ ID NO: 2794605 - RNA, 12 nt, Human
cggcugcccuuu

SEQ ID NO: 2794606 - RNA, 11 nt, Human
cggcugcccuu

SEQ ID NO: 2794607 - RNA, 11 nt, Human
cggcugcugag

SEQ ID NO: 2794608 - RNA, 24 nt, Human
cggccaggccagagggagugacag

SEQ ID NO: 2794609 - RNA, 10 nt, Human
cggccagcca

SEQ ID NO: 2794610 - RNA, 14 nt, Human
cggccagccagcca

SEQ ID NO: 2794611 - RNA, 12 nt, Human
cggccaccucug

SEQ ID NO: 2794612 - RNA, 13 nt, Human
cggccaccucugc

SEQ ID NO: 2794613 - RNA, 14 nt, Human
cggccaccucugcg

SEQ ID NO: 2794614 - RNA, 22 nt, Human
cggccaucucuuuguacaggaa

SEQ ID NO: 2794615 - RNA, 20 nt, Human
cggccagccccggcccuggg

SEQ ID NO: 2794616 - RNA, 19 nt, Human
cggccccugcugguucagg

SEQ ID NO: 2794617 - RNA, 18 nt, Human
cggccccugcugguucag

SEQ ID NO: 2794618 - RNA, 13 nt, Human
cggccccugcugg

SEQ ID NO: 2794619 - RNA, 22 nt, Human
cggccccugcauccccuuggcu

SEQ ID NO: 2794620 - RNA, 17 nt, Human
cgcuuuuguucucgcaa

SEQ ID NO: 2794621 - RNA, 17 nt, Human
cggaagguuuuuaaaca

SEQ ID NO: 2794622 - RNA, 18 nt, Human
cggaaggcuggcugggca

SEQ ID NO: 2794623 - RNA, 22 nt, Human
cggcagaaaggaaaaccugaag

SEQ ID NO: 2794624 - RNA, 17 nt, Human
cggcacggucuucccuc

SEQ ID NO: 2794625 - RNA, 20 nt, Human
cggcacuccaaccuaaccug

SEQ ID NO: 2794626 - RNA, 13 nt, Human
cggcacccucugg

SEQ ID NO: 2794627 - RNA, 15 nt, Human
cggcacccucuggcc

SEQ ID NO: 2794628 - RNA, 16 nt, Human
cggcacccucuggccg

SEQ ID NO: 2794629 - RNA, 17 nt, Human
cggaauaagagaccugu

SEQ ID NO: 2794630 - RNA, 21 nt, Human
cggaauaagagaccuguuuua

SEQ ID NO: 2794631 - RNA, 18 nt, Human
cggccaagauaggaccuu

SEQ ID NO: 2794632 - RNA, 19 nt, Human
cggccaagauaggaccuug

SEQ ID NO: 2794633 - RNA, 22 nt, Human
cggccaagauaggaccuugggc

SEQ ID NO: 2794634 - RNA, 23 nt, Human
cggccaagauaggaccuugggcc

SEQ ID NO: 2794635 - RNA, 12 nt, Human
cggccaauggaa

SEQ ID NO: 2794636 - RNA, 14 nt, Human
cggccaauggaaac

SEQ ID NO: 2794637 - RNA, 15 nt, Human
cggccaauggaaacc

SEQ ID NO: 2794638 - RNA, 11 nt, Human
cggccaccucu

SEQ ID NO: 2794639 - RNA, 14 nt, Human
cggcauuccugcuu

SEQ ID NO: 2794640 - RNA, 18 nt, Human
cggcauguuuccagcaga

SEQ ID NO: 2794641 - RNA, 15 nt, Human
cggcauuaaagccau

SEQ ID NO: 2794642 - RNA, 14 nt, Human
cggcauuucaaaug

SEQ ID NO: 2794643 - RNA, 17 nt, Human
cgggucccuucaccucc

SEQ ID NO: 2794644 - RNA, 16 nt, Human
cggguuccgcaggcag

SEQ ID NO: 2794645 - RNA, 15 nt, Human
cgguagggaggcagc

SEQ ID NO: 2794646 - RNA, 16 nt, Human
cgguagggaggcagcc

SEQ ID NO: 2794647 - RNA, 17 nt, Human
cgguagggaggcagccu

SEQ ID NO: 2794648 - RNA, 19 nt, Human
cgguagggaggcagccucc

SEQ ID NO: 2794649 - RNA, 20 nt, Human
cgguccacccaggagccccg

SEQ ID NO: 2794650 - RNA, 16 nt, Human
cgguccacccaggagc

SEQ ID NO: 2794651 - RNA, 15 nt, Human
cgguccacccaggag

SEQ ID NO: 2794652 - RNA, 14 nt, Human
cgguccacccagga

SEQ ID NO: 2794653 - RNA, 19 nt, Human
cgggguggugggaaccaug

SEQ ID NO: 2794654 - RNA, 11 nt, Human
cgggucacagg

SEQ ID NO: 2794655 - RNA, 12 nt, Human
cgggguggagca

SEQ ID NO: 2794656 - RNA, 18 nt, Human
cgggguggugggaaccau

SEQ ID NO: 2794657 - RNA, 19 nt, Human
cgggucacaggagggaggg

SEQ ID NO: 2794658 - RNA, 17 nt, Human
cggguugugugucuguu

SEQ ID NO: 2794659 - RNA, 16 nt, Human
cggguugugugucugu

SEQ ID NO: 2794660 - RNA, 19 nt, Human
cggguggaucaccugaggu

SEQ ID NO: 2794661 - RNA, 18 nt, Human
cggguggaucaccugagg

SEQ ID NO: 2794662 - RNA, 21 nt, Human
cgguccagcuggccuggacag

SEQ ID NO: 2794663 - RNA, 16 nt, Human
cgguccagcuggccug

SEQ ID NO: 2794664 - RNA, 15 nt, Human
cgguccagcuggccu

SEQ ID NO: 2794665 - RNA, 13 nt, Human
cggucccaccccu

SEQ ID NO: 2794666 - RNA, 16 nt, Human
cggucccaccccuccc

SEQ ID NO: 2794667 - RNA, 14 nt, Human
cgguccagcuggcc

SEQ ID NO: 2794668 - RNA, 13 nt, Human
cgguccagcuggc

SEQ ID NO: 2794669 - RNA, 11 nt, Human
cgguccagcug

SEQ ID NO: 2794670 - RNA, 14 nt, Human
cggucagguuuaac

SEQ ID NO: 2794671 - RNA, 16 nt, Human
cggucagguuuaacau

SEQ ID NO: 2794672 - RNA, 18 nt, Human
cggucagguuuaacauuu

SEQ ID NO: 2794673 - RNA, 21 nt, Human
cggucagguuuaacauuugcc

SEQ ID NO: 2794674 - RNA, 11 nt, Human
cggucucaggc

SEQ ID NO: 2794675 - RNA, 21 nt, Human
cggugacaaagauggcucaga

SEQ ID NO: 2794676 - RNA, 21 nt, Human
cggucuguucuguuucaaggc

SEQ ID NO: 2794677 - RNA, 21 nt, Human
cggucuucaacauccugccag

SEQ ID NO: 2794678 - RNA, 18 nt, Human
cggugaaggugacagcag

SEQ ID NO: 2794679 - RNA, 21 nt, Human
cggugagaggggaacagacug

SEQ ID NO: 2794680 - RNA, 20 nt, Human
cggugagaggggaacagacu

SEQ ID NO: 2794681 - RNA, 14 nt, Human
cgggagcaucucuu

SEQ ID NO: 2794682 - RNA, 22 nt, Human
cgggagcaucucuugaggccag

SEQ ID NO: 2794683 - RNA, 17 nt, Human
cgggagccuaggaccac

SEQ ID NO: 2794684 - RNA, 22 nt, Human
cgggcacucagaagacacugau

SEQ ID NO: 2794685 - RNA, 14 nt, Human
cgggcacucagaag

SEQ ID NO: 2794686 - RNA, 22 nt, Human
cggggacagcuccuucuguccu

SEQ ID NO: 2794687 - RNA, 21 nt, Human
cgggcaccuauagucccagcu

SEQ ID NO: 2794688 - RNA, 19 nt, Human
cgggcaccuauagucccag

SEQ ID NO: 2794689 - RNA, 14 nt, Human
cgggcaccagccag

SEQ ID NO: 2794690 - RNA, 15 nt, Human
cgggcaccagccagc

SEQ ID NO: 2794691 - RNA, 16 nt, Human
cgggcaccagccagcg

SEQ ID NO: 2794692 - RNA, 18 nt, Human
cgggaugguccuggggcu

SEQ ID NO: 2794693 - RNA, 16 nt, Human
cgggaugguccugggg

SEQ ID NO: 2794694 - RNA, 17 nt, Human
cgggauuaguacacacu

SEQ ID NO: 2794695 - RNA, 12 nt, Human
cgggggcagcug

SEQ ID NO: 2794696 - RNA, 13 nt, Human
cgggggcagcuga

SEQ ID NO: 2794697 - RNA, 20 nt, Human
cgggggcugcccuugggcca

SEQ ID NO: 2794698 - RNA, 15 nt, Human
cgggguauccugggg

SEQ ID NO: 2794699 - RNA, 21 nt, Human
cgggguauccugggggaccca

SEQ ID NO: 2794700 - RNA, 14 nt, Human
cgggguaugaagag

SEQ ID NO: 2794701 - RNA, 23 nt, Human
cggggacagcuccuucuguccua

SEQ ID NO: 2794702 - RNA, 18 nt, Human
cggggccucgggaccuca

SEQ ID NO: 2794703 - RNA, 17 nt, Human
cggggccucgggaccuc

SEQ ID NO: 2794704 - RNA, 23 nt, Human
cggggagcggcggaaagccugua

SEQ ID NO: 2794705 - RNA, 16 nt, Human
cgggaguuggagaccc

SEQ ID NO: 2794706 - RNA, 21 nt, Human
cucuccugacuuuuaauguca

SEQ ID NO: 2794707 - RNA, 20 nt, Human
cucuccuugcuccuggccuu

SEQ ID NO: 2794708 - RNA, 16 nt, Human
cucuccuuucuuucua

SEQ ID NO: 2794709 - RNA, 12 nt, Human
cucuccuuccuu

SEQ ID NO: 2794710 - RNA, 17 nt, Human
cucuccuuccuuaccca

SEQ ID NO: 2794711 - RNA, 14 nt, Human
cucuccuuccuugu

SEQ ID NO: 2794712 - RNA, 19 nt, Human
cucuccuguuucccuuccc

SEQ ID NO: 2794713 - RNA, 20 nt, Human
cucuccuguuucccuucccu

SEQ ID NO: 2794714 - RNA, 12 nt, Human
cucuccugccac

SEQ ID NO: 2794715 - RNA, 13 nt, Human
cucuccugccaca

SEQ ID NO: 2794716 - RNA, 12 nt, Human
cucuccuggagg

SEQ ID NO: 2794717 - RNA, 13 nt, Human
cucuccuggagga

SEQ ID NO: 2794718 - RNA, 22 nt, Human
cucucuagcacaauuugcacua

SEQ ID NO: 2794719 - RNA, 13 nt, Human
cucucuagcacaa

SEQ ID NO: 2794720 - RNA, 22 nt, Human
cucucuacuccuaccucagccu

SEQ ID NO: 2794721 - RNA, 20 nt, Human
cucucuacuccuaccucagc

SEQ ID NO: 2794722 - RNA, 19 nt, Human
cucucuacuccuaccucag

SEQ ID NO: 2794723 - RNA, 12 nt, Human
cucucuccagau

SEQ ID NO: 2794724 - RNA, 14 nt, Human
cucucuccacccua

SEQ ID NO: 2794725 - RNA, 14 nt, Human
cucucuccagaugu

SEQ ID NO: 2794726 - RNA, 17 nt, Human
cucucuccagauguuuc

SEQ ID NO: 2794727 - RNA, 14 nt, Human
cucucucaaaagag

SEQ ID NO: 2794728 - RNA, 13 nt, Human
cucuccccagcaa

SEQ ID NO: 2794729 - RNA, 14 nt, Human
cucuccagccugac

SEQ ID NO: 2794730 - RNA, 24 nt, Human
cucuccccagcaagugagagcugg

SEQ ID NO: 2794731 - RNA, 22 nt, Human
cucuccccagcaagugagagcu

SEQ ID NO: 2794732 - RNA, 14 nt, Human
cucuccccagcaag

SEQ ID NO: 2794733 - RNA, 21 nt, Human
cucuccugauagucuuucagu

SEQ ID NO: 2794734 - RNA, 19 nt, Human
cucuccucuugccacugcc

SEQ ID NO: 2794735 - RNA, 22 nt, Human
cucuccucuugccacugccucu

SEQ ID NO: 2794736 - RNA, 14 nt, Human
cucuccucuugcca

SEQ ID NO: 2794737 - RNA, 15 nt, Human
cucuccucuugccac

SEQ ID NO: 2794738 - RNA, 16 nt, Human
cucuccucuugccacu

SEQ ID NO: 2794739 - RNA, 17 nt, Human
cucuccucuugccacug

SEQ ID NO: 2794740 - RNA, 12 nt, Human
cucuccacugcc

SEQ ID NO: 2794741 - RNA, 14 nt, Human
cucuccacugccuu

SEQ ID NO: 2794742 - RNA, 11 nt, Human
cucuccacugc

SEQ ID NO: 2794743 - RNA, 17 nt, Human
cucuccaagucucagug

SEQ ID NO: 2794744 - RNA, 15 nt, Human
cucuauacaucucuc

SEQ ID NO: 2794745 - RNA, 18 nt, Human
cucuauacaucucucccc

SEQ ID NO: 2794746 - RNA, 21 nt, Human
cucuagugcccuccacagccg

SEQ ID NO: 2794747 - RNA, 12 nt, Human
cucuagauucca

SEQ ID NO: 2794748 - RNA, 14 nt, Human
cucuagaucauaag

SEQ ID NO: 2794749 - RNA, 15 nt, Human
cucuagaugagcugg

SEQ ID NO: 2794750 - RNA, 16 nt, Human
cucuagaugagcuggg

SEQ ID NO: 2794751 - RNA, 23 nt, Human
cucuagaugagcugggccggagg

SEQ ID NO: 2794752 - RNA, 13 nt, Human
cucuagaguccaa

SEQ ID NO: 2794753 - RNA, 15 nt, Human
cucuagaguccaagg

SEQ ID NO: 2794754 - RNA, 16 nt, Human
cucuagaguccaaggu

SEQ ID NO: 2794755 - RNA, 19 nt, Human
cucuagauaccuaaaacau

SEQ ID NO: 2794756 - RNA, 21 nt, Human
cucuagauaccuaaaacauaa

SEQ ID NO: 2794757 - RNA, 12 nt, Human
cucuagaaucug

SEQ ID NO: 2794758 - RNA, 16 nt, Human
cucuagacaagauauu

SEQ ID NO: 2794759 - RNA, 21 nt, Human
cucuagacaagauauuguaca

SEQ ID NO: 2794760 - RNA, 21 nt, Human
cucuagacacugccacacagg

SEQ ID NO: 2794761 - RNA, 16 nt, Human
cucuagacacugccac

SEQ ID NO: 2794762 - RNA, 12 nt, Human
cucuaggcucug

SEQ ID NO: 2794763 - RNA, 15 nt, Human
cucuaggcucugccu

SEQ ID NO: 2794764 - RNA, 16 nt, Human
cucuaggcucugccuu

SEQ ID NO: 2794765 - RNA, 17 nt, Human
cucuaggcucugccuuc

SEQ ID NO: 2794766 - RNA, 21 nt, Human
cucuaggaagacauuuuuccg

SEQ ID NO: 2794767 - RNA, 16 nt, Human
cucuagcugugggggu

SEQ ID NO: 2794768 - RNA, 12 nt, Human
cucuaggcuggg

SEQ ID NO: 2794769 - RNA, 13 nt, Human
cucuaggcugggg

SEQ ID NO: 2794770 - RNA, 14 nt, Human
cucuaggcugggga

SEQ ID NO: 2794771 - RNA, 15 nt, Human
cucuaggcuggggaa

SEQ ID NO: 2794772 - RNA, 12 nt, Human
cucuagggucca

SEQ ID NO: 2794773 - RNA, 14 nt, Human
cucuaggguugcug

SEQ ID NO: 2794774 - RNA, 18 nt, Human
cucuaggguugcuggagc

SEQ ID NO: 2794775 - RNA, 19 nt, Human
cucuaggguugcuggagcc

SEQ ID NO: 2794776 - RNA, 21 nt, Human
cucuaggguugcuggagccug

SEQ ID NO: 2794777 - RNA, 18 nt, Human
cucuagugcccuccacag

SEQ ID NO: 2794778 - RNA, 14 nt, Human
cucuagugcccucc

SEQ ID NO: 2794779 - RNA, 13 nt, Human
cucuagugcccuc

SEQ ID NO: 2794780 - RNA, 16 nt, Human
cucuaguaguuaaaaa

SEQ ID NO: 2794781 - RNA, 17 nt, Human
cucuaguaguuaaaaaa

SEQ ID NO: 2794782 - RNA, 18 nt, Human
cucuaguaguuaaaaaaa

SEQ ID NO: 2794783 - RNA, 22 nt, Human
cucuacccucccacccccuucu

SEQ ID NO: 2794784 - RNA, 18 nt, Human
cucuacccucccaccccc

SEQ ID NO: 2794785 - RNA, 17 nt, Human
cucuacccucccacccc

SEQ ID NO: 2794786 - RNA, 16 nt, Human
cucuacccucccaccc

SEQ ID NO: 2794787 - RNA, 15 nt, Human
cucuacccucccacc

SEQ ID NO: 2794788 - RNA, 14 nt, Human
cucuacccucccac

SEQ ID NO: 2794789 - RNA, 20 nt, Human
cucuaccagauaacugagga

SEQ ID NO: 2794790 - RNA, 20 nt, Human
cucuaccaagcuauccuggc

SEQ ID NO: 2794791 - RNA, 13 nt, Human
cucuacagugcca

SEQ ID NO: 2794792 - RNA, 20 nt, Human
cucuacagugccaacuccuc

SEQ ID NO: 2794793 - RNA, 12 nt, Human
cucuacauauuu

SEQ ID NO: 2794794 - RNA, 17 nt, Human
cucuacaucuucugccu

SEQ ID NO: 2794795 - RNA, 18 nt, Human
cucuacaucuucugccuu

SEQ ID NO: 2794796 - RNA, 19 nt, Human
cucuacauggacucagaga

SEQ ID NO: 2794797 - RNA, 14 nt, Human
cucuacccaaaccc

SEQ ID NO: 2794798 - RNA, 17 nt, Human
cucuacccaaacccuag

SEQ ID NO: 2794799 - RNA, 18 nt, Human
cucuacccaaacccuagg

SEQ ID NO: 2794800 - RNA, 21 nt, Human
cucuaccagauaacugaggag

SEQ ID NO: 2794801 - RNA, 23 nt, Human
cucuaccagauaacugaggaggg

SEQ ID NO: 2794802 - RNA, 17 nt, Human
cucuaccagugcaggcu

SEQ ID NO: 2794803 - RNA, 20 nt, Human
cucuaccagugcaggcuggc

SEQ ID NO: 2794804 - RNA, 22 nt, Human
cucuaccagugcaggcuggcca

SEQ ID NO: 2794805 - RNA, 23 nt, Human
cucuaccagugcaggcuggccag

SEQ ID NO: 2794806 - RNA, 18 nt, Human
cucuacccagggccugca

SEQ ID NO: 2794807 - RNA, 17 nt, Human
cucuacccagggccugc

SEQ ID NO: 2794808 - RNA, 14 nt, Human
cucuacccagggcc

SEQ ID NO: 2794809 - RNA, 13 nt, Human
cucuacccagggc

SEQ ID NO: 2794810 - RNA, 16 nt, Human
cucuacuuagcauguc

SEQ ID NO: 2794811 - RNA, 17 nt, Human
cucuacuuagcaugucc

SEQ ID NO: 2794812 - RNA, 19 nt, Human
cucuacuuagcaugucccu

SEQ ID NO: 2794813 - RNA, 13 nt, Human
cucuacuguguaa

SEQ ID NO: 2794814 - RNA, 14 nt, Human
cucuacuguguaau

SEQ ID NO: 2794815 - RNA, 13 nt, Human
cucuacuucagga

SEQ ID NO: 2794816 - RNA, 13 nt, Human
cucuacuuuccag

SEQ ID NO: 2794817 - RNA, 15 nt, Human
cucuacuuuccaggc

SEQ ID NO: 2794818 - RNA, 17 nt, Human
cucuacuuuccaggcua

SEQ ID NO: 2794819 - RNA, 18 nt, Human
cucuacuuuccaggcuag

SEQ ID NO: 2794820 - RNA, 20 nt, Human
cucuacuuagcaugucccua

SEQ ID NO: 2794821 - RNA, 19 nt, Human
cucuacuccuaccucagcc

SEQ ID NO: 2794822 - RNA, 16 nt, Human
cucuacuccuaccuca

SEQ ID NO: 2794823 - RNA, 19 nt, Human
cucuacuaaggcuuuccua

SEQ ID NO: 2794824 - RNA, 19 nt, Human
cucuacuaaaaauacagaa

SEQ ID NO: 2794825 - RNA, 23 nt, Human
cuccugauaaaacaacagcucga

SEQ ID NO: 2794826 - RNA, 14 nt, Human
cucgcuucccccau

SEQ ID NO: 2794827 - RNA, 18 nt, Human
cucgcuucccccauagcc

SEQ ID NO: 2794828 - RNA, 16 nt, Human
cucgcuucccccauag

SEQ ID NO: 2794829 - RNA, 19 nt, Human
cucgcuucccccauagcca

SEQ ID NO: 2794830 - RNA, 16 nt, Human
cucggcucagugcaac

SEQ ID NO: 2794831 - RNA, 18 nt, Human
cucggcucagugcaaccu

SEQ ID NO: 2794832 - RNA, 22 nt, Human
cucggcucagugcaaccucugc

SEQ ID NO: 2794833 - RNA, 23 nt, Human
cucggcucagugcaaccucugcu

SEQ ID NO: 2794834 - RNA, 19 nt, Human
cucggcuccccaugugucc

SEQ ID NO: 2794835 - RNA, 22 nt, Human
cucggcuccccauguguccugg

SEQ ID NO: 2794836 - RNA, 18 nt, Human
cucggcucacugcauccu

SEQ ID NO: 2794837 - RNA, 17 nt, Human
cucggcucacugcaucc

SEQ ID NO: 2794838 - RNA, 21 nt, Human
cucggaguguguaugccaaga

SEQ ID NO: 2794839 - RNA, 14 nt, Human
cucggcucacugca

SEQ ID NO: 2794840 - RNA, 16 nt, Human
cucggaggcugccccc

SEQ ID NO: 2794841 - RNA, 12 nt, Human
cucggaggcugc

SEQ ID NO: 2794842 - RNA, 13 nt, Human
cucggaggcugcc

SEQ ID NO: 2794843 - RNA, 15 nt, Human
cucggaggcugcccc

SEQ ID NO: 2794844 - RNA, 14 nt, Human
cuccugugugugcg

SEQ ID NO: 2794845 - RNA, 14 nt, Human
cuccuguguacugu

SEQ ID NO: 2794846 - RNA, 15 nt, Human
cuccuguguacugug

SEQ ID NO: 2794847 - RNA, 16 nt, Human
cuccuguguacugugu

SEQ ID NO: 2794848 - RNA, 17 nt, Human
cuccuguguacuguguc

SEQ ID NO: 2794849 - RNA, 20 nt, Human
cuccugugugugcgccuaca

SEQ ID NO: 2794850 - RNA, 15 nt, Human
cucgcugcuucugug

SEQ ID NO: 2794851 - RNA, 21 nt, Human
cucuaacuuauuuuauuucca

SEQ ID NO: 2794852 - RNA, 22 nt, Human
cucuaagaucuuagauucucug

SEQ ID NO: 2794853 - RNA, 14 nt, Human
cucuaagaucuuag

SEQ ID NO: 2794854 - RNA, 16 nt, Human
cucuaagaucuuagau

SEQ ID NO: 2794855 - RNA, 19 nt, Human
cucuaagaucuuagauucu

SEQ ID NO: 2794856 - RNA, 17 nt, Human
cucggcuuuucucagcu

SEQ ID NO: 2794857 - RNA, 16 nt, Human
cucuacagaggccaug

SEQ ID NO: 2794858 - RNA, 14 nt, Human
cucuacagaggcca

SEQ ID NO: 2794859 - RNA, 19 nt, Human
cucuacagaggccaugggc

SEQ ID NO: 2794860 - RNA, 21 nt, Human
cucuacagcuaaucagcauuc

SEQ ID NO: 2794861 - RNA, 15 nt, Human
cucuacaucuucugc

SEQ ID NO: 2794862 - RNA, 13 nt, Human
cucuacagaggcc

SEQ ID NO: 2794863 - RNA, 18 nt, Human
cucuaauucuauuaaagu

SEQ ID NO: 2794864 - RNA, 16 nt, Human
cucuacaaacucccac

SEQ ID NO: 2794865 - RNA, 17 nt, Human
cucuacaauuggaagau

SEQ ID NO: 2794866 - RNA, 17 nt, Human
cucuacaaacucccacu

SEQ ID NO: 2794867 - RNA, 14 nt, Human
cucccuccaccuac

SEQ ID NO: 2794868 - RNA, 13 nt, Human
cucccucauucca

SEQ ID NO: 2794869 - RNA, 23 nt, Human
cucccucagugcccucauuuuau

SEQ ID NO: 2794870 - RNA, 14 nt, Human
cucccucagugccc

SEQ ID NO: 2794871 - RNA, 15 nt, Human
cuccgaccagacacc

SEQ ID NO: 2794872 - RNA, 22 nt, Human
cuccgaacacccucgaagcgcg

SEQ ID NO: 2794873 - RNA, 21 nt, Human
cucccuuuuuauaucccauuu

SEQ ID NO: 2794874 - RNA, 22 nt, Human
cucccucauuucaggagcagcc

SEQ ID NO: 2794875 - RNA, 14 nt, Human
cucccuuuuuauau

SEQ ID NO: 2794876 - RNA, 14 nt, Human
cuccgcccuuaguc

SEQ ID NO: 2794877 - RNA, 15 nt, Human
cuccgcccccagccu

SEQ ID NO: 2794878 - RNA, 16 nt, Human
cuccgcccccagccua

SEQ ID NO: 2794879 - RNA, 17 nt, Human
cuccgcccccagccuau

SEQ ID NO: 2794880 - RNA, 20 nt, Human
cuccgcccccagccuaugag

SEQ ID NO: 2794881 - RNA, 21 nt, Human
cuccgcccccagccuaugagc

SEQ ID NO: 2794882 - RNA, 21 nt, Human
cuccucacccccagcuuugcu

SEQ ID NO: 2794883 - RNA, 20 nt, Human
cuccucacccccagcuuugc

SEQ ID NO: 2794884 - RNA, 15 nt, Human
cuccucacccccagc

SEQ ID NO: 2794885 - RNA, 17 nt, Human
cuccucacccccagcuu

SEQ ID NO: 2794886 - RNA, 12 nt, Human
cuccucaucccg

SEQ ID NO: 2794887 - RNA, 21 nt, Human
cuccucaccucuggacuggcu

SEQ ID NO: 2794888 - RNA, 18 nt, Human
cuccucaccucuggacug

SEQ ID NO: 2794889 - RNA, 16 nt, Human
cuccucaccucuggac

SEQ ID NO: 2794890 - RNA, 15 nt, Human
cuccucaccucugga

SEQ ID NO: 2794891 - RNA, 14 nt, Human
cuccucaccucugg

SEQ ID NO: 2794892 - RNA, 13 nt, Human
cuccucaccucug

SEQ ID NO: 2794893 - RNA, 14 nt, Human
cuccuccaaaggcc

SEQ ID NO: 2794894 - RNA, 18 nt, Human
cuccuccaaaggcccccu

SEQ ID NO: 2794895 - RNA, 16 nt, Human
cuccuccaccaccgcc

SEQ ID NO: 2794896 - RNA, 21 nt, Human
cuccuccaccaccgcccgucu

SEQ ID NO: 2794897 - RNA, 15 nt, Human
cuccucaucccgugu

SEQ ID NO: 2794898 - RNA, 11 nt, Human
cuccucaugua

SEQ ID NO: 2794899 - RNA, 20 nt, Human
cuccucauguacauacccug

SEQ ID NO: 2794900 - RNA, 21 nt, Human
cuccuccagggugauuuuaug

SEQ ID NO: 2794901 - RNA, 22 nt, Human
cuccucuccccagcaagugaga

SEQ ID NO: 2794902 - RNA, 19 nt, Human
cuccuccuuggugccuggc

SEQ ID NO: 2794903 - RNA, 16 nt, Human
cuccucgacaucacug

SEQ ID NO: 2794904 - RNA, 17 nt, Human
cuccucgacaucacugu

SEQ ID NO: 2794905 - RNA, 20 nt, Human
cuccucgacaucacuguuca

SEQ ID NO: 2794906 - RNA, 19 nt, Human
cuccuccccaacugugggg

SEQ ID NO: 2794907 - RNA, 18 nt, Human
cuccuccccacccuccug

SEQ ID NO: 2794908 - RNA, 19 nt, Human
cuccuccccacccuccugg

SEQ ID NO: 2794909 - RNA, 20 nt, Human
cuccuccccacccuccuggc

SEQ ID NO: 2794910 - RNA, 14 nt, Human
cuccucccggugcc

SEQ ID NO: 2794911 - RNA, 15 nt, Human
cuccucccggugccc

SEQ ID NO: 2794912 - RNA, 17 nt, Human
cuccucccggugcccaa

SEQ ID NO: 2794913 - RNA, 11 nt, Human
cuccucccucc

SEQ ID NO: 2794914 - RNA, 12 nt, Human
cuccugccuuug

SEQ ID NO: 2794915 - RNA, 15 nt, Human
cuccugccuuugccu

SEQ ID NO: 2794916 - RNA, 16 nt, Human
cuccugccuuugccuc

SEQ ID NO: 2794917 - RNA, 18 nt, Human
cuccugccugugcuguga

SEQ ID NO: 2794918 - RNA, 15 nt, Human
cuccugccucagccu

SEQ ID NO: 2794919 - RNA, 19 nt, Human
cuccugccuguagcaguga

SEQ ID NO: 2794920 - RNA, 14 nt, Human
cuccugccugugcu

SEQ ID NO: 2794921 - RNA, 14 nt, Human
cuccugccuguagc

SEQ ID NO: 2794922 - RNA, 15 nt, Human
cuccugccuguagca

SEQ ID NO: 2794923 - RNA, 16 nt, Human
cuccugccuguagcag

SEQ ID NO: 2794924 - RNA, 18 nt, Human
cuccugccuguagcagug

SEQ ID NO: 2794925 - RNA, 14 nt, Human
cuccugccugcccc

SEQ ID NO: 2794926 - RNA, 17 nt, Human
cuccugccugccccucu

SEQ ID NO: 2794927 - RNA, 19 nt, Human
cuccugugugugcgccuac

SEQ ID NO: 2794928 - RNA, 16 nt, Human
cuccugugugugcgcc

SEQ ID NO: 2794929 - RNA, 16 nt, Human
cuccuguggggaaagg

SEQ ID NO: 2794930 - RNA, 16 nt, Human
cuccuguggaacccag

SEQ ID NO: 2794931 - RNA, 18 nt, Human
cuccuguggaacccagca

SEQ ID NO: 2794932 - RNA, 20 nt, Human
cuccuguggaacccagcagu

SEQ ID NO: 2794933 - RNA, 13 nt, Human
cuccugugcuggg

SEQ ID NO: 2794934 - RNA, 17 nt, Human
cuccugugcaacuuucc

SEQ ID NO: 2794935 - RNA, 14 nt, Human
cuccugcacuguuu

SEQ ID NO: 2794936 - RNA, 15 nt, Human
cuccugcacuguuua

SEQ ID NO: 2794937 - RNA, 14 nt, Human
cuccugccucagcc

SEQ ID NO: 2794938 - RNA, 13 nt, Human
cuccugccucagc

SEQ ID NO: 2794939 - RNA, 20 nt, Human
cuccugcccgcagaccucug

SEQ ID NO: 2794940 - RNA, 21 nt, Human
cuccugcccgcagaccucugg

SEQ ID NO: 2794941 - RNA, 22 nt, Human
cuccugcccgcagaccucugga

SEQ ID NO: 2794942 - RNA, 23 nt, Human
cuccugcccgcagaccucuggau

SEQ ID NO: 2794943 - RNA, 19 nt, Human
cuccugcccgccacacaga

SEQ ID NO: 2794944 - RNA, 14 nt, Human
cuccugcagcaugg

SEQ ID NO: 2794945 - RNA, 19 nt, Human
cuccugcagcauggucccu

SEQ ID NO: 2794946 - RNA, 14 nt, Human
cuccaucuccacuc

SEQ ID NO: 2794947 - RNA, 18 nt, Human
cucacuauguugcccagg

SEQ ID NO: 2794948 - RNA, 17 nt, Human
cucacuauccuacccca

SEQ ID NO: 2794949 - RNA, 13 nt, Human
cuccaugugggcu

SEQ ID NO: 2794950 - RNA, 17 nt, Human
cucccaaagugcuggga

SEQ ID NO: 2794951 - RNA, 22 nt, Human
cuccaugucucugagcauuaga

SEQ ID NO: 2794952 - RNA, 13 nt, Human
cuccaugucucug

SEQ ID NO: 2794953 - RNA, 12 nt, Human
cuccaucuuauu

SEQ ID NO: 2794954 - RNA, 18 nt, Human
cuccaugcuccucacugc

SEQ ID NO: 2794955 - RNA, 19 nt, Human
cuccaugcuccucacugcc

SEQ ID NO: 2794956 - RNA, 20 nt, Human
cuccaugcuccucacugccc

SEQ ID NO: 2794957 - RNA, 20 nt, Human
cuccauccuauccacugggc

SEQ ID NO: 2794958 - RNA, 16 nt, Human
cuccaucuccacucca

SEQ ID NO: 2794959 - RNA, 19 nt, Human
cuccaucucucauccucca

SEQ ID NO: 2794960 - RNA, 20 nt, Human
cuccaucucucauccuccag

SEQ ID NO: 2794961 - RNA, 21 nt, Human
cuccaucucucauccuccagu

SEQ ID NO: 2794962 - RNA, 18 nt, Human
cucccaaagugcugggau

SEQ ID NO: 2794963 - RNA, 22 nt, Human
cucccaaagugcugggauuaca

SEQ ID NO: 2794964 - RNA, 21 nt, Human
cucccaagacuucauuguccc

SEQ ID NO: 2794965 - RNA, 22 nt, Human
cucccaagacuucauugucccu

SEQ ID NO: 2794966 - RNA, 20 nt, Human
cucccaagcuaucuaaaguu

SEQ ID NO: 2794967 - RNA, 15 nt, Human
cucccaagcuggcug

SEQ ID NO: 2794968 - RNA, 16 nt, Human
cucccaagcuggcugg

SEQ ID NO: 2794969 - RNA, 17 nt, Human
cucccaagcuggcuggg

SEQ ID NO: 2794970 - RNA, 18 nt, Human
cucccaagcuggcugggg

SEQ ID NO: 2794971 - RNA, 19 nt, Human
cucccaagcuggcuggggu

SEQ ID NO: 2794972 - RNA, 16 nt, Human
cucccaaggagaacaa

SEQ ID NO: 2794973 - RNA, 17 nt, Human
cucccaaggagaacaaa

SEQ ID NO: 2794974 - RNA, 18 nt, Human
cucccaaggagaacaaau

SEQ ID NO: 2794975 - RNA, 15 nt, Human
cuccaugugccucuu

SEQ ID NO: 2794976 - RNA, 23 nt, Human
cucccagggccagggcccugcag

SEQ ID NO: 2794977 - RNA, 22 nt, Human
cucccagggccagggcccugca

SEQ ID NO: 2794978 - RNA, 14 nt, Human
cuccccugcccugg

SEQ ID NO: 2794979 - RNA, 12 nt, Human
cuccccugccuu

SEQ ID NO: 2794980 - RNA, 13 nt, Human
cuccccugccuug

SEQ ID NO: 2794981 - RNA, 14 nt, Human
cuccccugccuugc

SEQ ID NO: 2794982 - RNA, 15 nt, Human
cuccccugccuugcu

SEQ ID NO: 2794983 - RNA, 16 nt, Human
cuccccugcccugcug

SEQ ID NO: 2794984 - RNA, 15 nt, Human
cuccccugcccugcu

SEQ ID NO: 2794985 - RNA, 18 nt, Human
cuccccaggaauuuggga

SEQ ID NO: 2794986 - RNA, 21 nt, Human
cuccccaggaauuugggaccc

SEQ ID NO: 2794987 - RNA, 20 nt, Human
cuccccagcaagugagagcu

SEQ ID NO: 2794988 - RNA, 15 nt, Human
cuccccagcccuggc

SEQ ID NO: 2794989 - RNA, 16 nt, Human
cuccccagcccuggcu

SEQ ID NO: 2794990 - RNA, 19 nt, Human
cuccccagccccuagccca

SEQ ID NO: 2794991 - RNA, 21 nt, Human
cuccccagccccuagcccagg

SEQ ID NO: 2794992 - RNA, 22 nt, Human
cuccccagccccuagcccagga

SEQ ID NO: 2794993 - RNA, 13 nt, Human
cuccccagcccug

SEQ ID NO: 2794994 - RNA, 20 nt, Human
cuccccagaguuccccaugc

SEQ ID NO: 2794995 - RNA, 13 nt, Human
cuccccagccccu

SEQ ID NO: 2794996 - RNA, 15 nt, Human
cuccccagccccuag

SEQ ID NO: 2794997 - RNA, 17 nt, Human
cuccccagccccuagcc

SEQ ID NO: 2794998 - RNA, 12 nt, Human
cuccccagcaag

SEQ ID NO: 2794999 - RNA, 11 nt, Human
cuccccagaau

SEQ ID NO: 2795000 - RNA, 14 nt, Human
cuccccagaauuca

SEQ ID NO: 2795001 - RNA, 23 nt, Human
cuccccagaauucacgccucucc

SEQ ID NO: 2795002 - RNA, 19 nt, Human
cuccccaacccuagguucc

SEQ ID NO: 2795003 - RNA, 23 nt, Human
cuccccaacccuagguucccugu

SEQ ID NO: 2795004 - RNA, 21 nt, Human
cuccccacacuaaccuggguu

SEQ ID NO: 2795005 - RNA, 23 nt, Human
cuccccaagugguuuccacaugc

SEQ ID NO: 2795006 - RNA, 18 nt, Human
cuccccaaugagacuugc

SEQ ID NO: 2795007 - RNA, 20 nt, Human
cuccccaaugagacuugccu

SEQ ID NO: 2795008 - RNA, 21 nt, Human
cuccccaaugagacuugccuu

SEQ ID NO: 2795009 - RNA, 22 nt, Human
cuccccaaugagacuugccuuc

SEQ ID NO: 2795010 - RNA, 23 nt, Human
cuccccaaugagacuugccuucc

SEQ ID NO: 2795011 - RNA, 18 nt, Human
cuccccaaggaagagcca

SEQ ID NO: 2795012 - RNA, 11 nt, Human
cuccccaaccc

SEQ ID NO: 2795013 - RNA, 15 nt, Human
cuccccaacccccau

SEQ ID NO: 2795014 - RNA, 22 nt, Human
cuccccaacccccauucucauc

SEQ ID NO: 2795015 - RNA, 14 nt, Human
cucccauuuccuga

SEQ ID NO: 2795016 - RNA, 21 nt, Human
cucccaugaccauacugaggg

SEQ ID NO: 2795017 - RNA, 16 nt, Human
cucccaugaccauacu

SEQ ID NO: 2795018 - RNA, 12 nt, Human
cucccaugaagc

SEQ ID NO: 2795019 - RNA, 13 nt, Human
cucccaugaagcc

SEQ ID NO: 2795020 - RNA, 14 nt, Human
cucccaugaagccu

SEQ ID NO: 2795021 - RNA, 15 nt, Human
cucccaugaagccuu

SEQ ID NO: 2795022 - RNA, 16 nt, Human
cucccaugaagccuuu

SEQ ID NO: 2795023 - RNA, 17 nt, Human
cucccaugaagccuuuu

SEQ ID NO: 2795024 - RNA, 19 nt, Human
cucccaugaagccuuuuga

SEQ ID NO: 2795025 - RNA, 22 nt, Human
cucccaugaagccuuuugaaag

SEQ ID NO: 2795026 - RNA, 17 nt, Human
cucccgaguagcuggga

SEQ ID NO: 2795027 - RNA, 16 nt, Human
cucccgaguagcuggg

SEQ ID NO: 2795028 - RNA, 18 nt, Human
cucccgaauagcugggac

SEQ ID NO: 2795029 - RNA, 15 nt, Human
cucccgaguagcugg

SEQ ID NO: 2795030 - RNA, 13 nt, Human
cuccccugcugca

SEQ ID NO: 2795031 - RNA, 15 nt, Human
cuccccugcugcagg

SEQ ID NO: 2795032 - RNA, 16 nt, Human
cuccccugcugcaggg

SEQ ID NO: 2795033 - RNA, 16 nt, Human
cucccgaauagcuggg

SEQ ID NO: 2795034 - RNA, 17 nt, Human
cucccgaauagcuggga

SEQ ID NO: 2795035 - RNA, 20 nt, Human
cucccggcuaugggggcacu

SEQ ID NO: 2795036 - RNA, 21 nt, Human
cucccuagccagcacuuguau

SEQ ID NO: 2795037 - RNA, 18 nt, Human
cucccuaucccucacaca

SEQ ID NO: 2795038 - RNA, 18 nt, Human
cuccccugcugcaggggc

SEQ ID NO: 2795039 - RNA, 13 nt, Human
cucccgcugcugc

SEQ ID NO: 2795040 - RNA, 14 nt, Human
cucccgcugcugcu

SEQ ID NO: 2795041 - RNA, 15 nt, Human
cucccgcugcugcug

SEQ ID NO: 2795042 - RNA, 16 nt, Human
cucccgcugcugcugc

SEQ ID NO: 2795043 - RNA, 19 nt, Human
cucccggagguuggguggg

SEQ ID NO: 2795044 - RNA, 20 nt, Human
cucccggagguugggugggc

SEQ ID NO: 2795045 - RNA, 17 nt, Human
cucccgcugcugcugcu

SEQ ID NO: 2795046 - RNA, 17 nt, Human
cugagccuucagucuug

SEQ ID NO: 2795047 - RNA, 12 nt, Human
cugagccuucag

SEQ ID NO: 2795048 - RNA, 17 nt, Human
cugagccuggccagccu

SEQ ID NO: 2795049 - RNA, 19 nt, Human
cugagccuggcccauagaa

SEQ ID NO: 2795050 - RNA, 22 nt, Human
cugagccuggcccauagaaaca

SEQ ID NO: 2795051 - RNA, 15 nt, Human
cugagccuggccagc

SEQ ID NO: 2795052 - RNA, 14 nt, Human
cugagccuggccag

SEQ ID NO: 2795053 - RNA, 13 nt, Human
cugagccuggcca

SEQ ID NO: 2795054 - RNA, 14 nt, Human
cugagccucugcuc

SEQ ID NO: 2795055 - RNA, 15 nt, Human
cugagccucugcucc

SEQ ID NO: 2795056 - RNA, 16 nt, Human
cugagccucugcuccc

SEQ ID NO: 2795057 - RNA, 18 nt, Human
cugagccucugcucccca

SEQ ID NO: 2795058 - RNA, 12 nt, Human
cugagccucugc

SEQ ID NO: 2795059 - RNA, 22 nt, Human
cugagccucagucucccucccu

SEQ ID NO: 2795060 - RNA, 13 nt, Human
cugagcucacucg

SEQ ID NO: 2795061 - RNA, 19 nt, Human
cugagcgccuggauuucug

SEQ ID NO: 2795062 - RNA, 21 nt, Human
cugagcgccuggauuucuggu

SEQ ID NO: 2795063 - RNA, 15 nt, Human
cugagcgccuggguc

SEQ ID NO: 2795064 - RNA, 23 nt, Human
cugagcgugcuuuccaaaaccca

SEQ ID NO: 2795065 - RNA, 22 nt, Human
cugagcgccuggguccagggga

SEQ ID NO: 2795066 - RNA, 13 nt, Human
cugagcgggaggc

SEQ ID NO: 2795067 - RNA, 14 nt, Human
cugagcgggaggca

SEQ ID NO: 2795068 - RNA, 15 nt, Human
cugagcgggaggcag

SEQ ID NO: 2795069 - RNA, 16 nt, Human
cugagcgggaggcaga

SEQ ID NO: 2795070 - RNA, 18 nt, Human
cugagcgggaggcagagu

SEQ ID NO: 2795071 - RNA, 22 nt, Human
cugagcggugggggaggagggu

SEQ ID NO: 2795072 - RNA, 18 nt, Human
cugagcguccagaaaugg

SEQ ID NO: 2795073 - RNA, 11 nt, Human
cugagccaggc

SEQ ID NO: 2795074 - RNA, 12 nt, Human
cugagccaggcu

SEQ ID NO: 2795075 - RNA, 14 nt, Human
cugagccaggcuag

SEQ ID NO: 2795076 - RNA, 23 nt, Human
cugagccaggcuagcuggagccu

SEQ ID NO: 2795077 - RNA, 22 nt, Human
cugagccagugcuuuaauggca

SEQ ID NO: 2795078 - RNA, 23 nt, Human
cugagcccuacucccugcagaug

SEQ ID NO: 2795079 - RNA, 22 nt, Human
cugagcccuacucccugcagau

SEQ ID NO: 2795080 - RNA, 21 nt, Human
cugagcccuacucccugcaga

SEQ ID NO: 2795081 - RNA, 20 nt, Human
cugagcccuacucccugcag

SEQ ID NO: 2795082 - RNA, 18 nt, Human
cugagcccuacucccugc

SEQ ID NO: 2795083 - RNA, 16 nt, Human
cugagccagugucagg

SEQ ID NO: 2795084 - RNA, 22 nt, Human
cugagccagugucaggaggaag

SEQ ID NO: 2795085 - RNA, 15 nt, Human
cugagcccuggcagg

SEQ ID NO: 2795086 - RNA, 14 nt, Human
cugagcccuggcag

SEQ ID NO: 2795087 - RNA, 13 nt, Human
cugagcccuggca

SEQ ID NO: 2795088 - RNA, 12 nt, Human
cugagcccuggc

SEQ ID NO: 2795089 - RNA, 11 nt, Human
cugagcccugg

SEQ ID NO: 2795090 - RNA, 21 nt, Human
cugagccucagucucccuccc

SEQ ID NO: 2795091 - RNA, 16 nt, Human
cugagccucagucucc

SEQ ID NO: 2795092 - RNA, 14 nt, Human
cugagcugagccag

SEQ ID NO: 2795093 - RNA, 15 nt, Human
cugagcugagccagg

SEQ ID NO: 2795094 - RNA, 16 nt, Human
cugagcugagccaggc

SEQ ID NO: 2795095 - RNA, 17 nt, Human
cugagcugagccaggcu

SEQ ID NO: 2795096 - RNA, 20 nt, Human
cugaggcacaagaaucacuu

SEQ ID NO: 2795097 - RNA, 15 nt, Human
cugaggcaggaggau

SEQ ID NO: 2795098 - RNA, 15 nt, Human
cugaggcauccagca

SEQ ID NO: 2795099 - RNA, 20 nt, Human
cugaggcauccagcagucuc

SEQ ID NO: 2795100 - RNA, 22 nt, Human
cugaggcauccagcagucucug

SEQ ID NO: 2795101 - RNA, 14 nt, Human
cugacuuugcucuu

SEQ ID NO: 2795102 - RNA, 21 nt, Human
cugacuuggggagauggaguu

SEQ ID NO: 2795103 - RNA, 22 nt, Human
cugacuuggggagauggaguuc

SEQ ID NO: 2795104 - RNA, 13 nt, Human
cugacuuggggga

SEQ ID NO: 2795105 - RNA, 15 nt, Human
cugacuuguuugucu

SEQ ID NO: 2795106 - RNA, 17 nt, Human
cugacuuguuugucuuc

SEQ ID NO: 2795107 - RNA, 20 nt, Human
cugacuuguuugucuuccau

SEQ ID NO: 2795108 - RNA, 13 nt, Human
cugacuuuacacu

SEQ ID NO: 2795109 - RNA, 20 nt, Human
cugacuuggggagauggagu

SEQ ID NO: 2795110 - RNA, 17 nt, Human
cugagaacacugugaaa

SEQ ID NO: 2795111 - RNA, 22 nt, Human
cugagaacacugugaaaacauu

SEQ ID NO: 2795112 - RNA, 15 nt, Human
cugacuuugcucuuu

SEQ ID NO: 2795113 - RNA, 11 nt, Human
cugagaacacu

SEQ ID NO: 2795114 - RNA, 15 nt, Human
cugagaacacuguga

SEQ ID NO: 2795115 - RNA, 18 nt, Human
cugacuucuaauaucauu

SEQ ID NO: 2795116 - RNA, 16 nt, Human
cugagaaagcccuguc

SEQ ID NO: 2795117 - RNA, 15 nt, Human
cugagaauaagaaag

SEQ ID NO: 2795118 - RNA, 18 nt, Human
cugagaagaggagcccuc

SEQ ID NO: 2795119 - RNA, 21 nt, Human
cugagaagaggagcccucauc

SEQ ID NO: 2795120 - RNA, 22 nt, Human
cugagaagaggagcccucaucu

SEQ ID NO: 2795121 - RNA, 13 nt, Human
cugagaacuccug

SEQ ID NO: 2795122 - RNA, 14 nt, Human
cugagaacuccuga

SEQ ID NO: 2795123 - RNA, 15 nt, Human
cugagaacuccugac

SEQ ID NO: 2795124 - RNA, 16 nt, Human
cugagaacuccugacu

SEQ ID NO: 2795125 - RNA, 14 nt, Human
cugagaagcugcuc

SEQ ID NO: 2795126 - RNA, 15 nt, Human
cugagaagcugcucc

SEQ ID NO: 2795127 - RNA, 17 nt, Human
cugagaagcugcuccag

SEQ ID NO: 2795128 - RNA, 18 nt, Human
cugagaagcugcuccagg

SEQ ID NO: 2795129 - RNA, 21 nt, Human
cugagaagcugcuccaggccu

SEQ ID NO: 2795130 - RNA, 23 nt, Human
cugagaagcugcuccaggccugc

SEQ ID NO: 2795131 - RNA, 18 nt, Human
cugacuuaagcaaaagaa

SEQ ID NO: 2795132 - RNA, 19 nt, Human
cugacuuaagcaaaagaaa

SEQ ID NO: 2795133 - RNA, 20 nt, Human
cugacuuaagcaaaagaaaa

SEQ ID NO: 2795134 - RNA, 24 nt, Human
cugacuuaagcaaaagaaaaagau

SEQ ID NO: 2795135 - RNA, 20 nt, Human
cugacuucauggaauggaca

SEQ ID NO: 2795136 - RNA, 22 nt, Human
cugacuucauggaauggacauc

SEQ ID NO: 2795137 - RNA, 18 nt, Human
cugacucucugugaccug

SEQ ID NO: 2795138 - RNA, 16 nt, Human
cugacucucugugacc

SEQ ID NO: 2795139 - RNA, 21 nt, Human
cugacucugcccccugcuggc

SEQ ID NO: 2795140 - RNA, 20 nt, Human
cugacugucucccgggacua

SEQ ID NO: 2795141 - RNA, 19 nt, Human
cugacucugcccccugcug

SEQ ID NO: 2795142 - RNA, 20 nt, Human
cugacucugcccccugcugg

SEQ ID NO: 2795143 - RNA, 12 nt, Human
cugacucugccc

SEQ ID NO: 2795144 - RNA, 14 nt, Human
cugacucugccccc

SEQ ID NO: 2795145 - RNA, 15 nt, Human
cugacucugcccccu

SEQ ID NO: 2795146 - RNA, 14 nt, Human
cugacucucuguga

SEQ ID NO: 2795147 - RNA, 13 nt, Human
cugacucucugug

SEQ ID NO: 2795148 - RNA, 23 nt, Human
cugacuauuauguuguuagagaa

SEQ ID NO: 2795149 - RNA, 21 nt, Human
cugacaggcaaugcuggcugu

SEQ ID NO: 2795150 - RNA, 23 nt, Human
cugaagaguugccccgucucugu

SEQ ID NO: 2795151 - RNA, 15 nt, Human
cugacagucuugugc

SEQ ID NO: 2795152 - RNA, 13 nt, Human
cugacaucacagc

SEQ ID NO: 2795153 - RNA, 14 nt, Human
cugacaucacagca

SEQ ID NO: 2795154 - RNA, 15 nt, Human
cugacaucacagcag

SEQ ID NO: 2795155 - RNA, 16 nt, Human
cugacaucacagcagc

SEQ ID NO: 2795156 - RNA, 17 nt, Human
cugacaucacagcagcc

SEQ ID NO: 2795157 - RNA, 18 nt, Human
cugacaucacagcagccu

SEQ ID NO: 2795158 - RNA, 23 nt, Human
cugacaucacagcagccuccaac

SEQ ID NO: 2795159 - RNA, 14 nt, Human
cugacaguuuuucu

SEQ ID NO: 2795160 - RNA, 15 nt, Human
cugacaguuuuucug

SEQ ID NO: 2795161 - RNA, 16 nt, Human
cugacaguuuuucugu

SEQ ID NO: 2795162 - RNA, 21 nt, Human
cugacauuguuggccaaagcc

SEQ ID NO: 2795163 - RNA, 13 nt, Human
cugacauggcucu

SEQ ID NO: 2795164 - RNA, 14 nt, Human
cugacauggcucug

SEQ ID NO: 2795165 - RNA, 17 nt, Human
cugacauggcucuggac

SEQ ID NO: 2795166 - RNA, 18 nt, Human
cugacauggcucuggacu

SEQ ID NO: 2795167 - RNA, 19 nt, Human
cugacauggcucuggacuc

SEQ ID NO: 2795168 - RNA, 16 nt, Human
cugacaucuggaaucu

SEQ ID NO: 2795169 - RNA, 16 nt, Human
cugaagcaacauuuua

SEQ ID NO: 2795170 - RNA, 21 nt, Human
cugaagcaaggcgguggacuu

SEQ ID NO: 2795171 - RNA, 15 nt, Human
cugacagcaugugcc

SEQ ID NO: 2795172 - RNA, 18 nt, Human
cugacagcaugugcccuc

SEQ ID NO: 2795173 - RNA, 20 nt, Human
cugacagcaugugcccuccu

SEQ ID NO: 2795174 - RNA, 22 nt, Human
cugacagcaugugcccuccuga

SEQ ID NO: 2795175 - RNA, 20 nt, Human
cugacagccucccaccccca

SEQ ID NO: 2795176 - RNA, 17 nt, Human
cugacagccucccaccc

SEQ ID NO: 2795177 - RNA, 14 nt, Human
cugacagccuccca

SEQ ID NO: 2795178 - RNA, 13 nt, Human
cugacagccuccc

SEQ ID NO: 2795179 - RNA, 12 nt, Human
cugacagccucc

SEQ ID NO: 2795180 - RNA, 16 nt, Human
cugaagaugcagcuca

SEQ ID NO: 2795181 - RNA, 22 nt, Human
cugaagaugcagcucacuaccc

SEQ ID NO: 2795182 - RNA, 23 nt, Human
cugaagauauaacuauugcccag

SEQ ID NO: 2795183 - RNA, 15 nt, Human
cugaagaugcagcuc

SEQ ID NO: 2795184 - RNA, 14 nt, Human
cugaagaguccucu

SEQ ID NO: 2795185 - RNA, 16 nt, Human
cugaagaguccucuga

SEQ ID NO: 2795186 - RNA, 15 nt, Human
cugaagaguccucug

SEQ ID NO: 2795187 - RNA, 18 nt, Human
cugaagaguccucugaau

SEQ ID NO: 2795188 - RNA, 14 nt, Human
cugacccacugcuu

SEQ ID NO: 2795189 - RNA, 13 nt, Human
cugacccacugcu

SEQ ID NO: 2795190 - RNA, 22 nt, Human
cugacuagaagggccaguccug

SEQ ID NO: 2795191 - RNA, 15 nt, Human
cugacuacuuugccu

SEQ ID NO: 2795192 - RNA, 23 nt, Human
cugacuagaagggccaguccugc

SEQ ID NO: 2795193 - RNA, 12 nt, Human
cugacccacugc

SEQ ID NO: 2795194 - RNA, 14 nt, Human
cugaccaauugugc

SEQ ID NO: 2795195 - RNA, 16 nt, Human
cugaccaauugugcug

SEQ ID NO: 2795196 - RNA, 17 nt, Human
cugaccaauugugcugc

SEQ ID NO: 2795197 - RNA, 18 nt, Human
cugaccaauugugcugcc

SEQ ID NO: 2795198 - RNA, 19 nt, Human
cugaccaauugugcugcca

SEQ ID NO: 2795199 - RNA, 20 nt, Human
cugaccaauugugcugccau

SEQ ID NO: 2795200 - RNA, 21 nt, Human
cugaccaauugugcugccauu

SEQ ID NO: 2795201 - RNA, 22 nt, Human
cugaccaauugugcugccauuu

SEQ ID NO: 2795202 - RNA, 22 nt, Human
cugacauuguuggccaaagcca

SEQ ID NO: 2795203 - RNA, 21 nt, Human
cugacauuuucuuucaugggc

SEQ ID NO: 2795204 - RNA, 19 nt, Human
cugaccaacaguuccuuca

SEQ ID NO: 2795205 - RNA, 12 nt, Human
cugaccaacagg

SEQ ID NO: 2795206 - RNA, 13 nt, Human
cugaccaacaggc

SEQ ID NO: 2795207 - RNA, 14 nt, Human
cugaccaacaggcu

SEQ ID NO: 2795208 - RNA, 15 nt, Human
cugaccaacaggcug

SEQ ID NO: 2795209 - RNA, 18 nt, Human
cugaccaacaggcuguuc

SEQ ID NO: 2795210 - RNA, 19 nt, Human
cucuggcuagaggccagcc

SEQ ID NO: 2795211 - RNA, 16 nt, Human
cucuggcuagaggcca

SEQ ID NO: 2795212 - RNA, 22 nt, Human
cucuggcuagaggccagcccca

SEQ ID NO: 2795213 - RNA, 21 nt, Human
cucuggcuagaggccagcccc

SEQ ID NO: 2795214 - RNA, 20 nt, Human
cucuggcuagaggccagccc

SEQ ID NO: 2795215 - RNA, 16 nt, Human
cucuggcuccagcugg

SEQ ID NO: 2795216 - RNA, 15 nt, Human
cucuggcuccagcug

SEQ ID NO: 2795217 - RNA, 18 nt, Human
cucuggccucagccgacu

SEQ ID NO: 2795218 - RNA, 19 nt, Human
cucuggaugccugauugcc

SEQ ID NO: 2795219 - RNA, 12 nt, Human
cucucucccucu

SEQ ID NO: 2795220 - RNA, 22 nt, Human
cucuggacaggcauguucucug

SEQ ID NO: 2795221 - RNA, 16 nt, Human
cucuggacaggcaugu

SEQ ID NO: 2795222 - RNA, 14 nt, Human
cucuggacaggcau

SEQ ID NO: 2795223 - RNA, 13 nt, Human
cucuggagcccua

SEQ ID NO: 2795224 - RNA, 19 nt, Human
cucuggagggguguggcuc

SEQ ID NO: 2795225 - RNA, 20 nt, Human
cucuggagggguguggcucc

SEQ ID NO: 2795226 - RNA, 21 nt, Human
cucuggagggguguggcuccu

SEQ ID NO: 2795227 - RNA, 15 nt, Human
cucuggaugccugau

SEQ ID NO: 2795228 - RNA, 15 nt, Human
cucuggacaggcaug

SEQ ID NO: 2795229 - RNA, 13 nt, Human
cucugcuuucuga

SEQ ID NO: 2795230 - RNA, 18 nt, Human
cucugcuuucugauguug

SEQ ID NO: 2795231 - RNA, 18 nt, Human
cucugcuugccuggagac

SEQ ID NO: 2795232 - RNA, 17 nt, Human
cucugcuucucucaccu

SEQ ID NO: 2795233 - RNA, 18 nt, Human
cucugcuucuccaaggaa

SEQ ID NO: 2795234 - RNA, 12 nt, Human
cucugcuuccca

SEQ ID NO: 2795235 - RNA, 13 nt, Human
cucugcuucccag

SEQ ID NO: 2795236 - RNA, 14 nt, Human
cucugcuucccagg

SEQ ID NO: 2795237 - RNA, 23 nt, Human
cucugcuguacauauuugagacu

SEQ ID NO: 2795238 - RNA, 21 nt, Human
cucugccugaagucacacagu

SEQ ID NO: 2795239 - RNA, 16 nt, Human
cucucugaaccccucc

SEQ ID NO: 2795240 - RNA, 21 nt, Human
cucucucuucugcuccacccu

SEQ ID NO: 2795241 - RNA, 22 nt, Human
cucugccugaagucacacagug

SEQ ID NO: 2795242 - RNA, 18 nt, Human
cucucucuucugcuccac

SEQ ID NO: 2795243 - RNA, 12 nt, Human
cucucucuucug

SEQ ID NO: 2795244 - RNA, 15 nt, Human
cucucuccuuugcug

SEQ ID NO: 2795245 - RNA, 22 nt, Human
cucucuccuguuucccuucccu

SEQ ID NO: 2795246 - RNA, 15 nt, Human
cucugugucaggugg

SEQ ID NO: 2795247 - RNA, 13 nt, Human
cucuguggugucu

SEQ ID NO: 2795248 - RNA, 14 nt, Human
cucuguggugucug

SEQ ID NO: 2795249 - RNA, 16 nt, Human
cucuguggugucugcc

SEQ ID NO: 2795250 - RNA, 11 nt, Human
cucuguggaug

SEQ ID NO: 2795251 - RNA, 19 nt, Human
cucuguggcauugaaauga

SEQ ID NO: 2795252 - RNA, 22 nt, Human
cucugugcuuuuaaaugcauaa

SEQ ID NO: 2795253 - RNA, 18 nt, Human
cucugugcuguggaagca

SEQ ID NO: 2795254 - RNA, 13 nt, Human
cucugugugcucc

SEQ ID NO: 2795255 - RNA, 22 nt, Human
cucuguuacccaggguggagug

SEQ ID NO: 2795256 - RNA, 19 nt, Human
cucuguuauguacuguacu

SEQ ID NO: 2795257 - RNA, 20 nt, Human
cucuguuauguacuguacua

SEQ ID NO: 2795258 - RNA, 22 nt, Human
cucuuacgaauauuuucaguaa

SEQ ID NO: 2795259 - RNA, 13 nt, Human
cucuguuccaugu

SEQ ID NO: 2795260 - RNA, 15 nt, Human
cucuguuccaugucu

SEQ ID NO: 2795261 - RNA, 16 nt, Human
cucuguuccaugucuc

SEQ ID NO: 2795262 - RNA, 16 nt, Human
cucuuacuaauguaaa

SEQ ID NO: 2795263 - RNA, 17 nt, Human
cucuuacuaauguaaaa

SEQ ID NO: 2795264 - RNA, 18 nt, Human
cucuuacuacacugagga

SEQ ID NO: 2795265 - RNA, 14 nt, Human
cucuuacugcuaac

SEQ ID NO: 2795266 - RNA, 22 nt, Human
cucuuacuuuccuuuccccagc

SEQ ID NO: 2795267 - RNA, 23 nt, Human
cucuuacuuuccuuuccccagcc

SEQ ID NO: 2795268 - RNA, 14 nt, Human
cucuggcuuggccu

SEQ ID NO: 2795269 - RNA, 16 nt, Human
cucuggcuuggccuau

SEQ ID NO: 2795270 - RNA, 17 nt, Human
cucuggcuuggccuauc

SEQ ID NO: 2795271 - RNA, 23 nt, Human
cucugggaaaugagaaggcagcc

SEQ ID NO: 2795272 - RNA, 13 nt, Human
cucugggaaccuc

SEQ ID NO: 2795273 - RNA, 15 nt, Human
cucugggaaccuccc

SEQ ID NO: 2795274 - RNA, 17 nt, Human
cucugggaaccucccag

SEQ ID NO: 2795275 - RNA, 18 nt, Human
cucugggaaccucccaga

SEQ ID NO: 2795276 - RNA, 19 nt, Human
cucugggaaccucccagag

SEQ ID NO: 2795277 - RNA, 20 nt, Human
cucugggaaccucccagagg

SEQ ID NO: 2795278 - RNA, 19 nt, Human
cucugucuagcaugccaac

SEQ ID NO: 2795279 - RNA, 20 nt, Human
cucugucuagcaugccaaca

SEQ ID NO: 2795280 - RNA, 10 nt, Human
cucugucuca

SEQ ID NO: 2795281 - RNA, 14 nt, Human
cucugucucauccu

SEQ ID NO: 2795282 - RNA, 17 nt, Human
cucugucucauccuccu

SEQ ID NO: 2795283 - RNA, 18 nt, Human
cucugucucauccuccug

SEQ ID NO: 2795284 - RNA, 19 nt, Human
cucugucucauccuccugg

SEQ ID NO: 2795285 - RNA, 21 nt, Human
cucugucucauccuccuggaa

SEQ ID NO: 2795286 - RNA, 22 nt, Human
cucugucucauccuccuggaac

SEQ ID NO: 2795287 - RNA, 20 nt, Human
cucugggaaaugagaaggca

SEQ ID NO: 2795288 - RNA, 22 nt, Human
cucugggaaaugagaaggcagc

SEQ ID NO: 2795289 - RNA, 22 nt, Human
cucugucucagacuuuuguaca

SEQ ID NO: 2795290 - RNA, 23 nt, Human
cucugucucagacuuuuguacau

SEQ ID NO: 2795291 - RNA, 22 nt, Human
cucugucugaguaagaaacaga

SEQ ID NO: 2795292 - RNA, 14 nt, Human
cucugucugcccuu

SEQ ID NO: 2795293 - RNA, 17 nt, Human
cucugucugcccuucac

SEQ ID NO: 2795294 - RNA, 19 nt, Human
cucuggcuguaaggcucua

SEQ ID NO: 2795295 - RNA, 20 nt, Human
cucuggcuguaaggcucuag

SEQ ID NO: 2795296 - RNA, 21 nt, Human
cucuggcuguaaggcucuaga

SEQ ID NO: 2795297 - RNA, 22 nt, Human
cucuggcuguaaggcucuagau

SEQ ID NO: 2795298 - RNA, 19 nt, Human
cucuggcugacuaaauuug

SEQ ID NO: 2795299 - RNA, 12 nt, Human
cucuggcucuca

SEQ ID NO: 2795300 - RNA, 13 nt, Human
cucuggcucucau

SEQ ID NO: 2795301 - RNA, 16 nt, Human
cucuggcucucauggg

SEQ ID NO: 2795302 - RNA, 22 nt, Human
cucuggcuccagcuggccggga

SEQ ID NO: 2795303 - RNA, 15 nt, Human
cucugugcuguggaa

SEQ ID NO: 2795304 - RNA, 14 nt, Human
cucugugcugugga

SEQ ID NO: 2795305 - RNA, 15 nt, Human
cucugugccuucuuu

SEQ ID NO: 2795306 - RNA, 16 nt, Human
cucugugccuucuuuu

SEQ ID NO: 2795307 - RNA, 14 nt, Human
cucugugcugacau

SEQ ID NO: 2795308 - RNA, 22 nt, Human
cucugucugcccuucaccccag

SEQ ID NO: 2795309 - RNA, 21 nt, Human
cucuucuuuauacuguaauuu

SEQ ID NO: 2795310 - RNA, 22 nt, Human
cucuucuuuauacuguaauuua

SEQ ID NO: 2795311 - RNA, 16 nt, Human
cucuucuuuuggcuuc

SEQ ID NO: 2795312 - RNA, 19 nt, Human
cucuucuuuuggcuuccau

SEQ ID NO: 2795313 - RNA, 22 nt, Human
cucuugaaaaaugcccauuugc

SEQ ID NO: 2795314 - RNA, 24 nt, Human
cucuucuuuauacuguaauuuagu

SEQ ID NO: 2795315 - RNA, 20 nt, Human
cucuucuuucagacuugcca

SEQ ID NO: 2795316 - RNA, 22 nt, Human
cucuucuuucagacuugccaug

SEQ ID NO: 2795317 - RNA, 19 nt, Human
cucuuggguucaagcgauu

SEQ ID NO: 2795318 - RNA, 15 nt, Human
cucuugaacuccuga

SEQ ID NO: 2795319 - RNA, 21 nt, Human
cucuuggguucaagcgauucu

SEQ ID NO: 2795320 - RNA, 19 nt, Human
cucuuggguucaagugauu

SEQ ID NO: 2795321 - RNA, 16 nt, Human
cucuuccuauuuuugu

SEQ ID NO: 2795322 - RNA, 19 nt, Human
cucuucuuaacuuaaauuu

SEQ ID NO: 2795323 - RNA, 18 nt, Human
cucuucuggguuccuucc

SEQ ID NO: 2795324 - RNA, 20 nt, Human
cucuuccgugacgucacugg

SEQ ID NO: 2795325 - RNA, 22 nt, Human
cucuucccugcgccugugaugc

SEQ ID NO: 2795326 - RNA, 14 nt, Human
cucuucccuucaac

SEQ ID NO: 2795327 - RNA, 14 nt, Human
cucuucccuuuccc

SEQ ID NO: 2795328 - RNA, 17 nt, Human
cucuucccuuuccccag

SEQ ID NO: 2795329 - RNA, 21 nt, Human
cucuucccuuuccccagcauc

SEQ ID NO: 2795330 - RNA, 13 nt, Human
cucuuuauagugc

SEQ ID NO: 2795331 - RNA, 21 nt, Human
cucuuuaagaguuaguuucuu

SEQ ID NO: 2795332 - RNA, 19 nt, Human
cucuuuaagggcaugccuu

SEQ ID NO: 2795333 - RNA, 20 nt, Human
cucuuuaagggcaugccuug

SEQ ID NO: 2795334 - RNA, 21 nt, Human
cucuuuaagggcaugccuugu

SEQ ID NO: 2795335 - RNA, 22 nt, Human
cucuuuaagggcaugccuugug

SEQ ID NO: 2795336 - RNA, 23 nt, Human
cucuuuaaugucacaggcagguc

SEQ ID NO: 2795337 - RNA, 22 nt, Human
cucuuuaaugucacaggcaggu

SEQ ID NO: 2795338 - RNA, 21 nt, Human
cucuuuaaugucacaggcagg

SEQ ID NO: 2795339 - RNA, 20 nt, Human
cucuuuaaugucacaggcag

SEQ ID NO: 2795340 - RNA, 18 nt, Human
cucuuuaaugucacaggc

SEQ ID NO: 2795341 - RNA, 17 nt, Human
cucuuuaaaucaagucc

SEQ ID NO: 2795342 - RNA, 13 nt, Human
cucuuuaaaaaca

SEQ ID NO: 2795343 - RNA, 12 nt, Human
cucuuuaaaaca

SEQ ID NO: 2795344 - RNA, 14 nt, Human
cucuuuaaaacaaa

SEQ ID NO: 2795345 - RNA, 15 nt, Human
cucuuuaaaacaaaa

SEQ ID NO: 2795346 - RNA, 17 nt, Human
cucuuuaaaacaaaaca

SEQ ID NO: 2795347 - RNA, 16 nt, Human
cucuuguuuucaguuu

SEQ ID NO: 2795348 - RNA, 13 nt, Human
cucuuguuuuguu

SEQ ID NO: 2795349 - RNA, 15 nt, Human
cucuuguuuuguuug

SEQ ID NO: 2795350 - RNA, 17 nt, Human
cucuuguuuuguuuguc

SEQ ID NO: 2795351 - RNA, 18 nt, Human
cucuuguuuuguuugucu

SEQ ID NO: 2795352 - RNA, 20 nt, Human
cucuuguuuuguuugucucu

SEQ ID NO: 2795353 - RNA, 19 nt, Human
cucuuguuuuuauuaauuu

SEQ ID NO: 2795354 - RNA, 20 nt, Human
cucuuguuuuuauuaauuua

SEQ ID NO: 2795355 - RNA, 21 nt, Human
cucuuguuuuuauuaauuuau

SEQ ID NO: 2795356 - RNA, 23 nt, Human
cucuuguuuuuauuaauuuauau

SEQ ID NO: 2795357 - RNA, 17 nt, Human
cucuuguugaguucugu

SEQ ID NO: 2795358 - RNA, 19 nt, Human
cugaacugauggguuucuc

SEQ ID NO: 2795359 - RNA, 15 nt, Human
cugaacuguguguaa

SEQ ID NO: 2795360 - RNA, 20 nt, Human
cugaacuguguguaauuguu

SEQ ID NO: 2795361 - RNA, 21 nt, Human
cugaacuguuaagaaaucugu

SEQ ID NO: 2795362 - RNA, 15 nt, Human
cugaagaauuaagau

SEQ ID NO: 2795363 - RNA, 17 nt, Human
cugaagaauuaagauac

SEQ ID NO: 2795364 - RNA, 20 nt, Human
cugaagaauuaagauacaaa

SEQ ID NO: 2795365 - RNA, 23 nt, Human
cugaagacgccgucuccauggca

SEQ ID NO: 2795366 - RNA, 17 nt, Human
cugaacucugacaacag

SEQ ID NO: 2795367 - RNA, 16 nt, Human
cugaacucugacaaca

SEQ ID NO: 2795368 - RNA, 13 nt, Human
cugaacucacuuu

SEQ ID NO: 2795369 - RNA, 14 nt, Human
cugaaauuucagau

SEQ ID NO: 2795370 - RNA, 14 nt, Human
cugaaauuucacca

SEQ ID NO: 2795371 - RNA, 13 nt, Human
cugaaauuucaga

SEQ ID NO: 2795372 - RNA, 18 nt, Human
cugaaaugaaacaaauaa

SEQ ID NO: 2795373 - RNA, 19 nt, Human
cugaaaugaaacaaauaau

SEQ ID NO: 2795374 - RNA, 22 nt, Human
cugaaaugaaacaaauaaucac

SEQ ID NO: 2795375 - RNA, 14 nt, Human
cugaaaucuccuuu

SEQ ID NO: 2795376 - RNA, 11 nt, Human
cucuuguugag

SEQ ID NO: 2795377 - RNA, 22 nt, Human
cucuuugaaauagucuguguga

SEQ ID NO: 2795378 - RNA, 13 nt, Human
cucuuuauuccua

SEQ ID NO: 2795379 - RNA, 14 nt, Human
cucuuuauuccuag

SEQ ID NO: 2795380 - RNA, 21 nt, Human
cucuuuauuccuaguugguga

SEQ ID NO: 2795381 - RNA, 19 nt, Human
cucuuucugucccuucugu

SEQ ID NO: 2795382 - RNA, 21 nt, Human
cucuuucuuauaauacucugu

SEQ ID NO: 2795383 - RNA, 23 nt, Human
cucuuucuuauaauacucuguug

SEQ ID NO: 2795384 - RNA, 13 nt, Human
cucuuucuuccuu

SEQ ID NO: 2795385 - RNA, 14 nt, Human
cucuuucuuccuuu

SEQ ID NO: 2795386 - RNA, 17 nt, Human
cucuuucuuccuuuacu

SEQ ID NO: 2795387 - RNA, 23 nt, Human
cucuuucuuccuuuacuuucccu

SEQ ID NO: 2795388 - RNA, 15 nt, Human
cucuuucuguauaua

SEQ ID NO: 2795389 - RNA, 15 nt, Human
cucuuucgucacccu

SEQ ID NO: 2795390 - RNA, 16 nt, Human
cucuuucgucacccuu

SEQ ID NO: 2795391 - RNA, 18 nt, Human
cucuuucgucacccuugg

SEQ ID NO: 2795392 - RNA, 19 nt, Human
cucuuucgucacccuugga

SEQ ID NO: 2795393 - RNA, 16 nt, Human
cucuuucuaaugcuga

SEQ ID NO: 2795394 - RNA, 14 nt, Human
cucuuucuguauau

SEQ ID NO: 2795395 - RNA, 20 nt, Human
cugaaagccuuagggaagcu

SEQ ID NO: 2795396 - RNA, 18 nt, Human
cugaaauaggaaacaagu

SEQ ID NO: 2795397 - RNA, 16 nt, Human
cugaaauaggaaacaa

SEQ ID NO: 2795398 - RNA, 22 nt, Human
cugaaauagacccacaagaggc

SEQ ID NO: 2795399 - RNA, 17 nt, Human
cugaaaggaaagugcuu

SEQ ID NO: 2795400 - RNA, 12 nt, Human
cugcccucuccu

SEQ ID NO: 2795401 - RNA, 16 nt, Human
cugccugaagucacac

SEQ ID NO: 2795402 - RNA, 18 nt, Human
cugccugaagucacacag

SEQ ID NO: 2795403 - RNA, 19 nt, Human
cugccugaagucacacagu

SEQ ID NO: 2795404 - RNA, 20 nt, Human
cugccugcaauauuugaauu

SEQ ID NO: 2795405 - RNA, 20 nt, Human
cugccugcaguacuuuaccu

SEQ ID NO: 2795406 - RNA, 21 nt, Human
cugccugcaguacuuuaccuc

SEQ ID NO: 2795407 - RNA, 23 nt, Human
cugccugccgguaaacacgccug

SEQ ID NO: 2795408 - RNA, 15 nt, Human
cugccugcgucuucc

SEQ ID NO: 2795409 - RNA, 17 nt, Human
cugccugcgucuuccgc

SEQ ID NO: 2795410 - RNA, 12 nt, Human
cugccugcccac

SEQ ID NO: 2795411 - RNA, 12 nt, Human
cugccugccaug

SEQ ID NO: 2795412 - RNA, 17 nt, Human
cugccugccauguaccu

SEQ ID NO: 2795413 - RNA, 22 nt, Human
cugccugccauguaccuccccu

SEQ ID NO: 2795414 - RNA, 23 nt, Human
cugcgguccacccaggagccccg

SEQ ID NO: 2795415 - RNA, 23 nt, Human
cugcgggucacaggagggagggg

SEQ ID NO: 2795416 - RNA, 22 nt, Human
cugcgggucacaggagggaggg

SEQ ID NO: 2795417 - RNA, 21 nt, Human
cugcgggucacaggagggagg

SEQ ID NO: 2795418 - RNA, 15 nt, Human
cugcgggucacagga

SEQ ID NO: 2795419 - RNA, 12 nt, Human
cugcgccucagg

SEQ ID NO: 2795420 - RNA, 13 nt, Human
cugcgccucaggc

SEQ ID NO: 2795421 - RNA, 17 nt, Human
cugcgcccuuaccuucc

SEQ ID NO: 2795422 - RNA, 18 nt, Human
cugcgcccuuaccuuccc

SEQ ID NO: 2795423 - RNA, 18 nt, Human
cugccuucccaugaaucu

SEQ ID NO: 2795424 - RNA, 12 nt, Human
cugccugcuuug

SEQ ID NO: 2795425 - RNA, 13 nt, Human
cugccugcuuugg

SEQ ID NO: 2795426 - RNA, 20 nt, Human
cugccuucgaggucagagga

SEQ ID NO: 2795427 - RNA, 18 nt, Human
cugcgcccaguccuucca

SEQ ID NO: 2795428 - RNA, 19 nt, Human
cugcgcccaguccuuccac

SEQ ID NO: 2795429 - RNA, 23 nt, Human
cugcgcccaguccuuccaccucg

SEQ ID NO: 2795430 - RNA, 17 nt, Human
cugcgauuuugccugug

SEQ ID NO: 2795431 - RNA, 21 nt, Human
cugcucuauuccaaaaagguu

SEQ ID NO: 2795432 - RNA, 20 nt, Human
cugcucuagaugagcugggc

SEQ ID NO: 2795433 - RNA, 22 nt, Human
cugcucuagaugagcugggccg

SEQ ID NO: 2795434 - RNA, 15 nt, Human
cugcucuccgaccag

SEQ ID NO: 2795435 - RNA, 20 nt, Human
cugcuccucuccccagcaag

SEQ ID NO: 2795436 - RNA, 19 nt, Human
cugcuccucuccccagcaa

SEQ ID NO: 2795437 - RNA, 23 nt, Human
cugcuccucuccccagcaaguga

SEQ ID NO: 2795438 - RNA, 16 nt, Human
cugcuccccaggggag

SEQ ID NO: 2795439 - RNA, 19 nt, Human
cugcuccccagcccuggcu

SEQ ID NO: 2795440 - RNA, 20 nt, Human
cugcuccccagcccuggcuc

SEQ ID NO: 2795441 - RNA, 16 nt, Human
cugcuccccagcccug

SEQ ID NO: 2795442 - RNA, 17 nt, Human
cugcuccccagcccugg

SEQ ID NO: 2795443 - RNA, 18 nt, Human
cugcuccccagcccuggc

SEQ ID NO: 2795444 - RNA, 21 nt, Human
cugcugccugcccgcacagca

SEQ ID NO: 2795445 - RNA, 22 nt, Human
cugcugccugcccgcacagcag

SEQ ID NO: 2795446 - RNA, 21 nt, Human
cugcugccgccucccagccug

SEQ ID NO: 2795447 - RNA, 20 nt, Human
cugcugccgccucccagccu

SEQ ID NO: 2795448 - RNA, 21 nt, Human
cugcugcaggggcucuggaga

SEQ ID NO: 2795449 - RNA, 20 nt, Human
cugcugcaggggcucuggag

SEQ ID NO: 2795450 - RNA, 12 nt, Human
cugcucugguua

SEQ ID NO: 2795451 - RNA, 19 nt, Human
cugcucuugaacuccugac

SEQ ID NO: 2795452 - RNA, 18 nt, Human
cugcucuugaacuccuga

SEQ ID NO: 2795453 - RNA, 16 nt, Human
cugcucuugaacuccu

SEQ ID NO: 2795454 - RNA, 20 nt, Human
cugcucuccaagucucagug

SEQ ID NO: 2795455 - RNA, 20 nt, Human
cugcucugaugaagaggagu

SEQ ID NO: 2795456 - RNA, 20 nt, Human
cugcuugaguucccagaugg

SEQ ID NO: 2795457 - RNA, 21 nt, Human
cugcuugauaggaauucaucu

SEQ ID NO: 2795458 - RNA, 16 nt, Human
cugcuugaugaagcaa

SEQ ID NO: 2795459 - RNA, 17 nt, Human
cugcuugaugaagcaag

SEQ ID NO: 2795460 - RNA, 18 nt, Human
cugcuugaugaagcaagg

SEQ ID NO: 2795461 - RNA, 20 nt, Human
cugcuugaugaagcaaggaa

SEQ ID NO: 2795462 - RNA, 21 nt, Human
cugcuugaugaagcaaggaag

SEQ ID NO: 2795463 - RNA, 14 nt, Human
cugcuuucuuugau

SEQ ID NO: 2795464 - RNA, 15 nt, Human
cugcuuucuuugauu

SEQ ID NO: 2795465 - RNA, 16 nt, Human
cugcuuuagagcuagg

SEQ ID NO: 2795466 - RNA, 17 nt, Human
cugcuuuaaagggccug

SEQ ID NO: 2795467 - RNA, 19 nt, Human
cugcuuuaaagggccugcc

SEQ ID NO: 2795468 - RNA, 20 nt, Human
cugcuuuaaagggccugccu

SEQ ID NO: 2795469 - RNA, 21 nt, Human
cugcuuuaaagggccugccug

SEQ ID NO: 2795470 - RNA, 22 nt, Human
cugcuuuaaagggccugccugg

SEQ ID NO: 2795471 - RNA, 15 nt, Human
cugcuuuuggucugu

SEQ ID NO: 2795472 - RNA, 22 nt, Human
cugcuuugggauuuaauuucca

SEQ ID NO: 2795473 - RNA, 23 nt, Human
cugcuuugggauuuaauuuccag

SEQ ID NO: 2795474 - RNA, 16 nt, Human
cugcuuugggcugccc

SEQ ID NO: 2795475 - RNA, 13 nt, Human
cugcuuuggaaau

SEQ ID NO: 2795476 - RNA, 17 nt, Human
cugcuuuuggucugugu

SEQ ID NO: 2795477 - RNA, 17 nt, Human
cuggaagcuaauuugca

SEQ ID NO: 2795478 - RNA, 14 nt, Human
cuggaagcccugga

SEQ ID NO: 2795479 - RNA, 16 nt, Human
cuggaagcccuggaga

SEQ ID NO: 2795480 - RNA, 17 nt, Human
cuggaagcccuggagac

SEQ ID NO: 2795481 - RNA, 13 nt, Human
cugcuuuuggccu

SEQ ID NO: 2795482 - RNA, 14 nt, Human
cugcuuuuggccug

SEQ ID NO: 2795483 - RNA, 15 nt, Human
cugcuuuuggccugg

SEQ ID NO: 2795484 - RNA, 19 nt, Human
cuggaaggggaagggacac

SEQ ID NO: 2795485 - RNA, 13 nt, Human
cuggaagggccaa

SEQ ID NO: 2795486 - RNA, 19 nt, Human
cuggaaguccaauguggca

SEQ ID NO: 2795487 - RNA, 16 nt, Human
cuggaaguccaaugug

SEQ ID NO: 2795488 - RNA, 14 nt, Human
cuggaagcuuuguc

SEQ ID NO: 2795489 - RNA, 15 nt, Human
cuggaagcuuugucc

SEQ ID NO: 2795490 - RNA, 18 nt, Human
cuggaagcuuuguccccu

SEQ ID NO: 2795491 - RNA, 20 nt, Human
cuggaagcuuuguccccugc

SEQ ID NO: 2795492 - RNA, 21 nt, Human
cuggaagcuuuguccccugcu

SEQ ID NO: 2795493 - RNA, 22 nt, Human
cuggaagcuuuguccccugcuu

SEQ ID NO: 2795494 - RNA, 22 nt, Human
cuggaagcuaauuugcauuaaa

SEQ ID NO: 2795495 - RNA, 19 nt, Human
cuggaagcuaauuugcauu

SEQ ID NO: 2795496 - RNA, 18 nt, Human
cuggaagcuaauuugcau

SEQ ID NO: 2795497 - RNA, 15 nt, Human
cugcuucugaaugug

SEQ ID NO: 2795498 - RNA, 19 nt, Human
cugcuucugaaugugcuga

SEQ ID NO: 2795499 - RNA, 20 nt, Human
cugcuugagaauauugaagu

SEQ ID NO: 2795500 - RNA, 20 nt, Human
cugcuugagcucaggaguuc

SEQ ID NO: 2795501 - RNA, 17 nt, Human
cugcugucccucccccu

SEQ ID NO: 2795502 - RNA, 18 nt, Human
cugcuguccccuuggcag

SEQ ID NO: 2795503 - RNA, 13 nt, Human
cugcuucuccaag

SEQ ID NO: 2795504 - RNA, 16 nt, Human
cugcuucuccaaggaa

SEQ ID NO: 2795505 - RNA, 15 nt, Human
cugcugucaccucuc

SEQ ID NO: 2795506 - RNA, 16 nt, Human
cugcugucaccucucc

SEQ ID NO: 2795507 - RNA, 18 nt, Human
cugcugucaccucuccca

SEQ ID NO: 2795508 - RNA, 19 nt, Human
cugcugucaccucucccac

SEQ ID NO: 2795509 - RNA, 20 nt, Human
cugcugucaccucucccacg

SEQ ID NO: 2795510 - RNA, 21 nt, Human
cugcugucaccucucccacgg

SEQ ID NO: 2795511 - RNA, 15 nt, Human
cugcugcaguagggg

SEQ ID NO: 2795512 - RNA, 15 nt, Human
cugcuguaagaaauc

SEQ ID NO: 2795513 - RNA, 20 nt, Human
cugcuggucacagccuccuc

SEQ ID NO: 2795514 - RNA, 17 nt, Human
cugcuggucacagccuc

SEQ ID NO: 2795515 - RNA, 18 nt, Human
cugcuggucacagccucc

SEQ ID NO: 2795516 - RNA, 15 nt, Human
cugcuggucacagcc

SEQ ID NO: 2795517 - RNA, 16 nt, Human
cugcuggucacagccu

SEQ ID NO: 2795518 - RNA, 18 nt, Human
cugcugggggcaacuggc

SEQ ID NO: 2795519 - RNA, 20 nt, Human
cugcugggggcaacuggcca

SEQ ID NO: 2795520 - RNA, 17 nt, Human
cugcuggggccucagac

SEQ ID NO: 2795521 - RNA, 23 nt, Human
cugcuggggccucagacgagacc

SEQ ID NO: 2795522 - RNA, 15 nt, Human
cugcugcugcgcccu

SEQ ID NO: 2795523 - RNA, 16 nt, Human
cugcugcugcgcccuu

SEQ ID NO: 2795524 - RNA, 20 nt, Human
cugcugcugcgcccuuaccu

SEQ ID NO: 2795525 - RNA, 16 nt, Human
cugcugcugcugcgcc

SEQ ID NO: 2795526 - RNA, 14 nt, Human
cugcugcugccugg

SEQ ID NO: 2795527 - RNA, 15 nt, Human
cugcugcugccuggc

SEQ ID NO: 2795528 - RNA, 17 nt, Human
cugcugcugccuggcca

SEQ ID NO: 2795529 - RNA, 11 nt, Human
cugcugccugg

SEQ ID NO: 2795530 - RNA, 12 nt, Human
cugcugccuggc

SEQ ID NO: 2795531 - RNA, 14 nt, Human
cugcugccuggcca

SEQ ID NO: 2795532 - RNA, 16 nt, Human
cugcugccuggccacu

SEQ ID NO: 2795533 - RNA, 19 nt, Human
cugcugccuggccacugcu

SEQ ID NO: 2795534 - RNA, 21 nt, Human
cugcugccuggccacugcucc

SEQ ID NO: 2795535 - RNA, 23 nt, Human
cugcugccuggccacugcucccu

SEQ ID NO: 2795536 - RNA, 23 nt, Human
cugcugccuucugacggcccugc

SEQ ID NO: 2795537 - RNA, 13 nt, Human
cugcuggcugccu

SEQ ID NO: 2795538 - RNA, 14 nt, Human
cugcuggcugccuu

SEQ ID NO: 2795539 - RNA, 15 nt, Human
cugcuggcugccuua

SEQ ID NO: 2795540 - RNA, 17 nt, Human
cugcugggacuggccag

SEQ ID NO: 2795541 - RNA, 16 nt, Human
cugcuggcuugcagug

SEQ ID NO: 2795542 - RNA, 14 nt, Human
cugcuggcuugcag

SEQ ID NO: 2795543 - RNA, 12 nt, Human
cugcuggcugcc

SEQ ID NO: 2795544 - RNA, 19 nt, Human
cugcugggacuggccaggu

SEQ ID NO: 2795545 - RNA, 19 nt, Human
cugcugggauggugggcuu

SEQ ID NO: 2795546 - RNA, 23 nt, Human
cugcugggauggugggcuucagg

SEQ ID NO: 2795547 - RNA, 16 nt, Human
cugcacuggggagccc

SEQ ID NO: 2795548 - RNA, 22 nt, Human
cugcacuggggagcccgucuca

SEQ ID NO: 2795549 - RNA, 14 nt, Human
cugcagacacgccu

SEQ ID NO: 2795550 - RNA, 13 nt, Human
cugcacuuacaau

SEQ ID NO: 2795551 - RNA, 21 nt, Human
cugcacuuacaaucccaccuu

SEQ ID NO: 2795552 - RNA, 13 nt, Human
cugcagacugcua

SEQ ID NO: 2795553 - RNA, 14 nt, Human
cugcagacugcuag

SEQ ID NO: 2795554 - RNA, 21 nt, Human
cugcagaggggaaaccagugu

SEQ ID NO: 2795555 - RNA, 23 nt, Human
cugcacccuggggccuggaccug

SEQ ID NO: 2795556 - RNA, 13 nt, Human
cugcacccuucuu

SEQ ID NO: 2795557 - RNA, 14 nt, Human
cugcacccuucuuu

SEQ ID NO: 2795558 - RNA, 17 nt, Human
cugcacccuucuuuucu

SEQ ID NO: 2795559 - RNA, 18 nt, Human
cugcacccuucuuuucuc

SEQ ID NO: 2795560 - RNA, 19 nt, Human
cugcacccuucuuuucuca

SEQ ID NO: 2795561 - RNA, 20 nt, Human
cugcacccuucuuuucucau

SEQ ID NO: 2795562 - RNA, 22 nt, Human
cugcacccuucuuuucucaugu

SEQ ID NO: 2795563 - RNA, 18 nt, Human
cugcaccgggccacagag

SEQ ID NO: 2795564 - RNA, 21 nt, Human
cugaggccccuucuagguggc

SEQ ID NO: 2795565 - RNA, 16 nt, Human
cugaggcccugcccaa

SEQ ID NO: 2795566 - RNA, 16 nt, Human
cugcacccuggggccu

SEQ ID NO: 2795567 - RNA, 21 nt, Human
cugcacccuggggccuggacc

SEQ ID NO: 2795568 - RNA, 22 nt, Human
cugcacccuggggccuggaccu

SEQ ID NO: 2795569 - RNA, 15 nt, Human
cugcaccgggccaca

SEQ ID NO: 2795570 - RNA, 14 nt, Human
cugcaccgggccac

SEQ ID NO: 2795571 - RNA, 23 nt, Human
cugcagauuugggcuggaacaga

SEQ ID NO: 2795572 - RNA, 18 nt, Human
cugcagauuugggcugga

SEQ ID NO: 2795573 - RNA, 19 nt, Human
cugcagauuugggcuggaa

SEQ ID NO: 2795574 - RNA, 20 nt, Human
cugcagauuugggcuggaac

SEQ ID NO: 2795575 - RNA, 14 nt, Human
cugcagcacggaca

SEQ ID NO: 2795576 - RNA, 19 nt, Human
cugcagcacggacaauaaa

SEQ ID NO: 2795577 - RNA, 20 nt, Human
cugcagcacggacaauaaac

SEQ ID NO: 2795578 - RNA, 22 nt, Human
cugcagcacggacaauaaaccu

SEQ ID NO: 2795579 - RNA, 20 nt, Human
cugcacuccaggcuggguga

SEQ ID NO: 2795580 - RNA, 18 nt, Human
cugcagcaaucuuugaaa

SEQ ID NO: 2795581 - RNA, 20 nt, Human
cugcagcauggucccugccu

SEQ ID NO: 2795582 - RNA, 23 nt, Human
cugcagcauggucccugccuuag

SEQ ID NO: 2795583 - RNA, 13 nt, Human
cugcagcaggagu

SEQ ID NO: 2795584 - RNA, 20 nt, Human
cugcagcaggaguggugcag

SEQ ID NO: 2795585 - RNA, 21 nt, Human
cugcagcaggaguggugcaga

SEQ ID NO: 2795586 - RNA, 15 nt, Human
cugcaggggcucugg

SEQ ID NO: 2795587 - RNA, 14 nt, Human
cugcaggggcucug

SEQ ID NO: 2795588 - RNA, 16 nt, Human
cugcaggggcucugga

SEQ ID NO: 2795589 - RNA, 17 nt, Human
cugcaggggcucuggag

SEQ ID NO: 2795590 - RNA, 23 nt, Human
cugcagggggugugucugcucag

SEQ ID NO: 2795591 - RNA, 23 nt, Human
cugcagggguuauguggaagugu

SEQ ID NO: 2795592 - RNA, 21 nt, Human
cugcaggggcucuggagagaa

SEQ ID NO: 2795593 - RNA, 20 nt, Human
cugcagggggugugucugcu

SEQ ID NO: 2795594 - RNA, 17 nt, Human
cugcagggggugugucu

SEQ ID NO: 2795595 - RNA, 18 nt, Human
cugcaggggcucuggaga

SEQ ID NO: 2795596 - RNA, 19 nt, Human
cugcaggggcucuggagag

SEQ ID NO: 2795597 - RNA, 22 nt, Human
cugcaggggcucuggagagaaa

SEQ ID NO: 2795598 - RNA, 20 nt, Human
cugcaggggguggacaaacu

SEQ ID NO: 2795599 - RNA, 14 nt, Human
cugcaguuuuucag

SEQ ID NO: 2795600 - RNA, 15 nt, Human
cugcaguuuuucagg

SEQ ID NO: 2795601 - RNA, 18 nt, Human
cugcaguuuuucaggagc

SEQ ID NO: 2795602 - RNA, 24 nt, Human
cugcaguuuuucaggagcgcaaga

SEQ ID NO: 2795603 - RNA, 19 nt, Human
cugcaguccuccgguugca

SEQ ID NO: 2795604 - RNA, 23 nt, Human
cugcaguccguguggauccaaug

SEQ ID NO: 2795605 - RNA, 13 nt, Human
cugcaguccugga

SEQ ID NO: 2795606 - RNA, 21 nt, Human
cugcagucagucaugauggca

SEQ ID NO: 2795607 - RNA, 17 nt, Human
cugcaguguucgcuugg

SEQ ID NO: 2795608 - RNA, 18 nt, Human
cugcaguguucgcuuggc

SEQ ID NO: 2795609 - RNA, 19 nt, Human
cugcaguguucgcuuggcu

SEQ ID NO: 2795610 - RNA, 20 nt, Human
cugcaguguucgcuuggcuc

SEQ ID NO: 2795611 - RNA, 22 nt, Human
cugcaguguucgcuuggcucca

SEQ ID NO: 2795612 - RNA, 13 nt, Human
cugcaguuaauua

SEQ ID NO: 2795613 - RNA, 14 nt, Human
cugcaguuaauuag

SEQ ID NO: 2795614 - RNA, 16 nt, Human
cugcaguuaauuagca

SEQ ID NO: 2795615 - RNA, 21 nt, Human
cugcaguuaauuagcauucug

SEQ ID NO: 2795616 - RNA, 23 nt, Human
cugcagguucucucucacugcca

SEQ ID NO: 2795617 - RNA, 17 nt, Human
cugcaguaaaucuuuua

SEQ ID NO: 2795618 - RNA, 14 nt, Human
cugcaguaaaucuu

SEQ ID NO: 2795619 - RNA, 16 nt, Human
cugcagguuggacccc

SEQ ID NO: 2795620 - RNA, 17 nt, Human
cugcagguuggacccca

SEQ ID NO: 2795621 - RNA, 18 nt, Human
cugcagguuggaccccag

SEQ ID NO: 2795622 - RNA, 19 nt, Human
cugcagguuggaccccaga

SEQ ID NO: 2795623 - RNA, 21 nt, Human
cugcagguuggaccccagaga

SEQ ID NO: 2795624 - RNA, 10 nt, Human
cugccagagg

SEQ ID NO: 2795625 - RNA, 21 nt, Human
cugccauccagguucagcuug

SEQ ID NO: 2795626 - RNA, 17 nt, Human
cugccauguaccucccc

SEQ ID NO: 2795627 - RNA, 18 nt, Human
cugccauguaccuccccu

SEQ ID NO: 2795628 - RNA, 20 nt, Human
cugccauguaccuccccugc

SEQ ID NO: 2795629 - RNA, 21 nt, Human
cugccauguaccuccccugcc

SEQ ID NO: 2795630 - RNA, 22 nt, Human
cugccauguaccuccccugccu

SEQ ID NO: 2795631 - RNA, 23 nt, Human
cugccauguaccuccccugccuu

SEQ ID NO: 2795632 - RNA, 19 nt, Human
cugccauguacuaguuuua

SEQ ID NO: 2795633 - RNA, 22 nt, Human
cugccauggcgugucccucucg

SEQ ID NO: 2795634 - RNA, 21 nt, Human
cugccauggcgugucccucuc

SEQ ID NO: 2795635 - RNA, 14 nt, Human
cugccauggcgugu

SEQ ID NO: 2795636 - RNA, 21 nt, Human
cugcauauguugaauacuuuu

SEQ ID NO: 2795637 - RNA, 14 nt, Human
cugcauauguugaa

SEQ ID NO: 2795638 - RNA, 16 nt, Human
cugcauaccaaccugg

SEQ ID NO: 2795639 - RNA, 20 nt, Human
cugcauaagugaaaaucuua

SEQ ID NO: 2795640 - RNA, 15 nt, Human
cugcauaccaaccug

SEQ ID NO: 2795641 - RNA, 12 nt, Human
cugccacccugg

SEQ ID NO: 2795642 - RNA, 21 nt, Human
cugccacccuggggagaaagu

SEQ ID NO: 2795643 - RNA, 15 nt, Human
cugccacccuguagc

SEQ ID NO: 2795644 - RNA, 23 nt, Human
cugccagaagauccccucaggac

SEQ ID NO: 2795645 - RNA, 17 nt, Human
cugccaccucccugacc

SEQ ID NO: 2795646 - RNA, 23 nt, Human
cugccacuuugguacauggccag

SEQ ID NO: 2795647 - RNA, 21 nt, Human
cugccagaagauccccucagg

SEQ ID NO: 2795648 - RNA, 22 nt, Human
cugccagaagauccccucagga

SEQ ID NO: 2795649 - RNA, 12 nt, Human
cugccaccuccc

SEQ ID NO: 2795650 - RNA, 13 nt, Human
cugccaccucccu

SEQ ID NO: 2795651 - RNA, 15 nt, Human
cugccaccucccuga

SEQ ID NO: 2795652 - RNA, 16 nt, Human
cugccaccucccugac

SEQ ID NO: 2795653 - RNA, 21 nt, Human
cugcccuaaugcgcaggcugg

SEQ ID NO: 2795654 - RNA, 20 nt, Human
cugcccuaaugcgcaggcug

SEQ ID NO: 2795655 - RNA, 14 nt, Human
cugcccguguacau

SEQ ID NO: 2795656 - RNA, 15 nt, Human
cugcccguguacaua

SEQ ID NO: 2795657 - RNA, 22 nt, Human
cugcccuaaugcgcaggcuggc

SEQ ID NO: 2795658 - RNA, 21 nt, Human
cugcccgggcgcggccagccc

SEQ ID NO: 2795659 - RNA, 19 nt, Human
cugcccgggcgcggccagc

SEQ ID NO: 2795660 - RNA, 19 nt, Human
cugcccguaaacacgccug

SEQ ID NO: 2795661 - RNA, 18 nt, Human
cugcccguaaacacgccu

SEQ ID NO: 2795662 - RNA, 21 nt, Human
cugcccguaaacacgccugca

SEQ ID NO: 2795663 - RNA, 13 nt, Human
cugccccagcucu

SEQ ID NO: 2795664 - RNA, 14 nt, Human
cugccccagcucug

SEQ ID NO: 2795665 - RNA, 22 nt, Human
cugccccuuccuuuaaaaaacu

SEQ ID NO: 2795666 - RNA, 16 nt, Human
cugcccgcacacccuc

SEQ ID NO: 2795667 - RNA, 17 nt, Human
cugcccgcacacccuca

SEQ ID NO: 2795668 - RNA, 22 nt, Human
cugcccgcacacccucacucug

SEQ ID NO: 2795669 - RNA, 15 nt, Human
cugcccgcacagcag

SEQ ID NO: 2795670 - RNA, 16 nt, Human
cugcccgcacagcagc

SEQ ID NO: 2795671 - RNA, 17 nt, Human
cugcccgcacagcagcc

SEQ ID NO: 2795672 - RNA, 18 nt, Human
cugcccgcacagcagccu

SEQ ID NO: 2795673 - RNA, 20 nt, Human
cugcccgcacagcagccugc

SEQ ID NO: 2795674 - RNA, 21 nt, Human
cugcccgcacagcagccugcu

SEQ ID NO: 2795675 - RNA, 17 nt, Human
cugcccgcagaccucug

SEQ ID NO: 2795676 - RNA, 18 nt, Human
cugcccgcagaccucugg

SEQ ID NO: 2795677 - RNA, 19 nt, Human
cugcccgcagaccucugga

SEQ ID NO: 2795678 - RNA, 20 nt, Human
cugcccgcagaccucuggau

SEQ ID NO: 2795679 - RNA, 13 nt, Human
cugcccgccugcc

SEQ ID NO: 2795680 - RNA, 15 nt, Human
cugcccgccugccca

SEQ ID NO: 2795681 - RNA, 16 nt, Human
cugcccgccugcccac

SEQ ID NO: 2795682 - RNA, 17 nt, Human
cugcccgccugcccacc

SEQ ID NO: 2795683 - RNA, 19 nt, Human
cugcccgccugcccaccug

SEQ ID NO: 2795684 - RNA, 20 nt, Human
cugcccgccugcccaccugc

SEQ ID NO: 2795685 - RNA, 21 nt, Human
cugcccgccugcccaccugcc

SEQ ID NO: 2795686 - RNA, 22 nt, Human
cugcccgccugcccaccugccu

SEQ ID NO: 2795687 - RNA, 15 nt, Human
cugccauuauuuucu

SEQ ID NO: 2795688 - RNA, 19 nt, Human
cugccauuauuuucuguca

SEQ ID NO: 2795689 - RNA, 20 nt, Human
cugccauuauuuucugucag

SEQ ID NO: 2795690 - RNA, 21 nt, Human
cugccauuauuuucugucaga

SEQ ID NO: 2795691 - RNA, 22 nt, Human
cugccauuauuuucugucagau

SEQ ID NO: 2795692 - RNA, 13 nt, Human
cugccauuuaaaa

SEQ ID NO: 2795693 - RNA, 19 nt, Human
cugcccaaccugcucuccu

SEQ ID NO: 2795694 - RNA, 17 nt, Human
cugcccacauuggaccc

SEQ ID NO: 2795695 - RNA, 16 nt, Human
cugcccaauuggagga

SEQ ID NO: 2795696 - RNA, 14 nt, Human
cugcccaacugugu

SEQ ID NO: 2795697 - RNA, 14 nt, Human
cugcccaagcccag

SEQ ID NO: 2795698 - RNA, 16 nt, Human
cugcccaagcccaggc

SEQ ID NO: 2795699 - RNA, 18 nt, Human
cugcccaagcccaggcca

SEQ ID NO: 2795700 - RNA, 21 nt, Human
cugcccaccucagccucccaa

SEQ ID NO: 2795701 - RNA, 11 nt, Human
cugcccaccug

SEQ ID NO: 2795702 - RNA, 15 nt, Human
cugcccaggccccug

SEQ ID NO: 2795703 - RNA, 14 nt, Human
cugcccaggccccu

SEQ ID NO: 2795704 - RNA, 14 nt, Human
cugcccaccugccu

SEQ ID NO: 2795705 - RNA, 15 nt, Human
cugcccaccugccug

SEQ ID NO: 2795706 - RNA, 16 nt, Human
cugcccaccugccugg

SEQ ID NO: 2795707 - RNA, 17 nt, Human
cugcccaccugccuggc

SEQ ID NO: 2795708 - RNA, 18 nt, Human
cugcccaccugccuggcc

SEQ ID NO: 2795709 - RNA, 19 nt, Human
cugcccaccugccuggccg

SEQ ID NO: 2795710 - RNA, 20 nt, Human
cugcccaccugccuggccgg

SEQ ID NO: 2795711 - RNA, 21 nt, Human
cugcccaccugccuggccggc

SEQ ID NO: 2795712 - RNA, 20 nt, Human
cugcccaggccccugccacc

SEQ ID NO: 2795713 - RNA, 19 nt, Human
cugcccaggccccugccac

SEQ ID NO: 2795714 - RNA, 18 nt, Human
cugcccaggccccugcca

SEQ ID NO: 2795715 - RNA, 16 nt, Human
cugcccaggccccugc

SEQ ID NO: 2795716 - RNA, 13 nt, Human
cugcccaccugcc

SEQ ID NO: 2795717 - RNA, 18 nt, Human
cugcccaggccggccagc

SEQ ID NO: 2795718 - RNA, 22 nt, Human
cugcccaggccggccagccuca

SEQ ID NO: 2795719 - RNA, 23 nt, Human
cuggccuggacaguaucccacau

SEQ ID NO: 2795720 - RNA, 18 nt, Human
cuggccucucuagcacaa

SEQ ID NO: 2795721 - RNA, 17 nt, Human
cuggccucucuagcaca

SEQ ID NO: 2795722 - RNA, 16 nt, Human
cuggccucucuagcac

SEQ ID NO: 2795723 - RNA, 14 nt, Human
cuggccucucuagc

SEQ ID NO: 2795724 - RNA, 22 nt, Human
cuggccucaagugauucuccug

SEQ ID NO: 2795725 - RNA, 12 nt, Human
cuggccucagac

SEQ ID NO: 2795726 - RNA, 13 nt, Human
cuggccucagacu

SEQ ID NO: 2795727 - RNA, 21 nt, Human
cuggccucagacugcacccag

SEQ ID NO: 2795728 - RNA, 22 nt, Human
cuggccucagacugcacccagg

SEQ ID NO: 2795729 - RNA, 23 nt, Human
cuggccucagacugcacccagga

SEQ ID NO: 2795730 - RNA, 11 nt, Human
cuggccuccag

SEQ ID NO: 2795731 - RNA, 12 nt, Human
cuggccuccagg

SEQ ID NO: 2795732 - RNA, 15 nt, Human
cuggccuccaggccc

SEQ ID NO: 2795733 - RNA, 20 nt, Human
cuggccuccaggcccgucug

SEQ ID NO: 2795734 - RNA, 23 nt, Human
cuggccuccaggcccgucugucc

SEQ ID NO: 2795735 - RNA, 14 nt, Human
cuggccucccacag

SEQ ID NO: 2795736 - RNA, 13 nt, Human
cuggccucccaca

SEQ ID NO: 2795737 - RNA, 23 nt, Human
cuggccucaagugauucuccugc

SEQ ID NO: 2795738 - RNA, 20 nt, Human
cuggccccagguagaaacuu

SEQ ID NO: 2795739 - RNA, 14 nt, Human
cuggccccagggca

SEQ ID NO: 2795740 - RNA, 15 nt, Human
cuggccccagggcac

SEQ ID NO: 2795741 - RNA, 16 nt, Human
cuggccccagggcacc

SEQ ID NO: 2795742 - RNA, 18 nt, Human
cuggccccagggcacccu

SEQ ID NO: 2795743 - RNA, 23 nt, Human
cuggccagggccuggaagacaga

SEQ ID NO: 2795744 - RNA, 15 nt, Human
cuggccagggccugg

SEQ ID NO: 2795745 - RNA, 16 nt, Human
cuggccagggccugga

SEQ ID NO: 2795746 - RNA, 22 nt, Human
cuggccaggcagaucugugccc

SEQ ID NO: 2795747 - RNA, 21 nt, Human
cuggccaggcagaucugugcc

SEQ ID NO: 2795748 - RNA, 14 nt, Human
cuggccaggcagau

SEQ ID NO: 2795749 - RNA, 13 nt, Human
cuggccaggcaga

SEQ ID NO: 2795750 - RNA, 14 nt, Human
cuggccagggccug

SEQ ID NO: 2795751 - RNA, 12 nt, Human
cuggccaggagc

SEQ ID NO: 2795752 - RNA, 13 nt, Human
cuggccagccgcu

SEQ ID NO: 2795753 - RNA, 14 nt, Human
cuggccagccgcuc

SEQ ID NO: 2795754 - RNA, 19 nt, Human
cuggccagccgcucuccug

SEQ ID NO: 2795755 - RNA, 20 nt, Human
cuggccagccgcucuccugc

SEQ ID NO: 2795756 - RNA, 22 nt, Human
cuggccagccgcucuccugcca

SEQ ID NO: 2795757 - RNA, 23 nt, Human
cuggccagccgcucuccugccac

SEQ ID NO: 2795758 - RNA, 12 nt, Human
cuggccagccug

SEQ ID NO: 2795759 - RNA, 13 nt, Human
cuggccagccugg

SEQ ID NO: 2795760 - RNA, 14 nt, Human
cuggccagccuggg

SEQ ID NO: 2795761 - RNA, 15 nt, Human
cuggccagccugggg

SEQ ID NO: 2795762 - RNA, 17 nt, Human
cuggccagccuggggcc

SEQ ID NO: 2795763 - RNA, 19 nt, Human
cuggccagccuggggccug

SEQ ID NO: 2795764 - RNA, 20 nt, Human
cuggccagccuggggccugg

SEQ ID NO: 2795765 - RNA, 21 nt, Human
cuggccagccuggggccuggc

SEQ ID NO: 2795766 - RNA, 22 nt, Human
cuggccagccuggggccuggca

SEQ ID NO: 2795767 - RNA, 23 nt, Human
cuggccagccuggggccuggcag

SEQ ID NO: 2795768 - RNA, 24 nt, Human
cuggccagccuggggccuggcagg

SEQ ID NO: 2795769 - RNA, 13 nt, Human
cuggccaggagcu

SEQ ID NO: 2795770 - RNA, 17 nt, Human
cuggccaggagcucuuc

SEQ ID NO: 2795771 - RNA, 15 nt, Human
cuggccaggagcucu

SEQ ID NO: 2795772 - RNA, 11 nt, Human
cuggccaggca

SEQ ID NO: 2795773 - RNA, 22 nt, Human
cuggccaggagcucuucaggcc

SEQ ID NO: 2795774 - RNA, 20 nt, Human
cuggccaggagcucuucagg

SEQ ID NO: 2795775 - RNA, 22 nt, Human
cuggccagaugcaccagcccuu

SEQ ID NO: 2795776 - RNA, 16 nt, Human
cuggccaccucucucc

SEQ ID NO: 2795777 - RNA, 18 nt, Human
cuggccaccucucuccuu

SEQ ID NO: 2795778 - RNA, 16 nt, Human
cuggcauuacagcugg

SEQ ID NO: 2795779 - RNA, 15 nt, Human
cuggcauuacagcug

SEQ ID NO: 2795780 - RNA, 18 nt, Human
cuggcauuagaauuauuu

SEQ ID NO: 2795781 - RNA, 20 nt, Human
cuggcauguucaaagccaca

SEQ ID NO: 2795782 - RNA, 21 nt, Human
cuggcacgguggcucaggccu

SEQ ID NO: 2795783 - RNA, 13 nt, Human
cuggcaagaaugg

SEQ ID NO: 2795784 - RNA, 16 nt, Human
cuggcaaggacacaga

SEQ ID NO: 2795785 - RNA, 24 nt, Human
cuggaaucuggagaccagggagcc

SEQ ID NO: 2795786 - RNA, 18 nt, Human
cuggaaucuggagaccag

SEQ ID NO: 2795787 - RNA, 19 nt, Human
cuggaaucuggagaccagg

SEQ ID NO: 2795788 - RNA, 17 nt, Human
cuggaaucuggagacca

SEQ ID NO: 2795789 - RNA, 23 nt, Human
cuggaaucaagaugucagacugg

SEQ ID NO: 2795790 - RNA, 18 nt, Human
cuggaauacaugaaauau

SEQ ID NO: 2795791 - RNA, 15 nt, Human
cuggaauacaugaaa

SEQ ID NO: 2795792 - RNA, 20 nt, Human
cuggaagguggggacaggga

SEQ ID NO: 2795793 - RNA, 22 nt, Human
cuggcacccggccccugcuggu

SEQ ID NO: 2795794 - RNA, 18 nt, Human
cuggcacccggccccugc

SEQ ID NO: 2795795 - RNA, 17 nt, Human
cuggcacccggccccug

SEQ ID NO: 2795796 - RNA, 16 nt, Human
cuggcacccggccccu

SEQ ID NO: 2795797 - RNA, 17 nt, Human
cuggcaaggacacagau

SEQ ID NO: 2795798 - RNA, 18 nt, Human
cuggcaaggacacagaug

SEQ ID NO: 2795799 - RNA, 15 nt, Human
cuggcacagggcagu

SEQ ID NO: 2795800 - RNA, 14 nt, Human
cuggcacaggacug

SEQ ID NO: 2795801 - RNA, 15 nt, Human
cuggcacaggacuga

SEQ ID NO: 2795802 - RNA, 18 nt, Human
cuggcacaggacugauuc

SEQ ID NO: 2795803 - RNA, 22 nt, Human
cuggcacaggacugauucuggg

SEQ ID NO: 2795804 - RNA, 16 nt, Human
cugggagaaccucagg

SEQ ID NO: 2795805 - RNA, 15 nt, Human
cugggagaaccucag

SEQ ID NO: 2795806 - RNA, 14 nt, Human
cugggagaaccuca

SEQ ID NO: 2795807 - RNA, 12 nt, Human
cugggagaaccu

SEQ ID NO: 2795808 - RNA, 18 nt, Human
cugggagaaccucaggcu

SEQ ID NO: 2795809 - RNA, 12 nt, Human
cugggagacaga

SEQ ID NO: 2795810 - RNA, 14 nt, Human
cugggagacagacc

SEQ ID NO: 2795811 - RNA, 17 nt, Human
cugggagaaccucaggc

SEQ ID NO: 2795812 - RNA, 18 nt, Human
cuggcuguuggcuggggg

SEQ ID NO: 2795813 - RNA, 13 nt, Human
cuggcuuggccua

SEQ ID NO: 2795814 - RNA, 16 nt, Human
cuggcuuguuguaaag

SEQ ID NO: 2795815 - RNA, 17 nt, Human
cuggcuuguuguaaagc

SEQ ID NO: 2795816 - RNA, 20 nt, Human
cuggcuuguuguaaagcaau

SEQ ID NO: 2795817 - RNA, 13 nt, Human
cuggcuuguuuau

SEQ ID NO: 2795818 - RNA, 14 nt, Human
cuggcuuguuuauu

SEQ ID NO: 2795819 - RNA, 18 nt, Human
cuggcuuguuuauuuugu

SEQ ID NO: 2795820 - RNA, 15 nt, Human
cuggcuuuuuaacuc

SEQ ID NO: 2795821 - RNA, 12 nt, Human
cuggcuuuucug

SEQ ID NO: 2795822 - RNA, 20 nt, Human
cuggcuuuucuguuuccugu

SEQ ID NO: 2795823 - RNA, 23 nt, Human
cuggcuuuucacugcuggcugcc

SEQ ID NO: 2795824 - RNA, 16 nt, Human
cugggaaacagaggcu

SEQ ID NO: 2795825 - RNA, 21 nt, Human
cugggaaaccccuucucugug

SEQ ID NO: 2795826 - RNA, 23 nt, Human
cugggaaaccccuucucugugac

SEQ ID NO: 2795827 - RNA, 15 nt, Human
cugggaaacagaggc

SEQ ID NO: 2795828 - RNA, 11 nt, Human
cugggaaacag

SEQ ID NO: 2795829 - RNA, 12 nt, Human
cugggaaacacu

SEQ ID NO: 2795830 - RNA, 17 nt, Human
cugggaaacacuccuug

SEQ ID NO: 2795831 - RNA, 18 nt, Human
cugggaaacacuccuugc

SEQ ID NO: 2795832 - RNA, 19 nt, Human
cugggaaacacuccuugca

SEQ ID NO: 2795833 - RNA, 21 nt, Human
cugggaaacacuccuugcauc

SEQ ID NO: 2795834 - RNA, 22 nt, Human
cugggaaacacuccuugcauca

SEQ ID NO: 2795835 - RNA, 17 nt, Human
cuggccuuccacuuggc

SEQ ID NO: 2795836 - RNA, 15 nt, Human
cuggccuuuccucuc

SEQ ID NO: 2795837 - RNA, 22 nt, Human
cuggcgagugaaugccagugug

SEQ ID NO: 2795838 - RNA, 23 nt, Human
cuggcgagugaaugccagugugc

SEQ ID NO: 2795839 - RNA, 19 nt, Human
cuggcuggagaauguggag

SEQ ID NO: 2795840 - RNA, 17 nt, Human
cuggcuggcugcaguga

SEQ ID NO: 2795841 - RNA, 15 nt, Human
cuggcuggcugcagu

SEQ ID NO: 2795842 - RNA, 15 nt, Human
cuggcuguaaggcuc

SEQ ID NO: 2795843 - RNA, 16 nt, Human
cuggcuguaaggcucu

SEQ ID NO: 2795844 - RNA, 17 nt, Human
cuggcuguaaggcucua

SEQ ID NO: 2795845 - RNA, 17 nt, Human
cuggcuguuggcugggg

SEQ ID NO: 2795846 - RNA, 16 nt, Human
cuggcuguuggcuggg

SEQ ID NO: 2795847 - RNA, 20 nt, Human
cuggcuguaaggcucuagau

SEQ ID NO: 2795848 - RNA, 18 nt, Human
cuggcuguacugcucagg

SEQ ID NO: 2795849 - RNA, 21 nt, Human
cuggcuguacugcucaggcug

SEQ ID NO: 2795850 - RNA, 19 nt, Human
cuggcuguaaggcucuaga

SEQ ID NO: 2795851 - RNA, 20 nt, Human
cugggaucacauguggacuu

SEQ ID NO: 2795852 - RNA, 20 nt, Human
cugggauuacaggugugaac

SEQ ID NO: 2795853 - RNA, 18 nt, Human
cugggauuacagguguga

SEQ ID NO: 2795854 - RNA, 16 nt, Human
cugggauuacaggugu

SEQ ID NO: 2795855 - RNA, 17 nt, Human
cugggauuacaggugug

SEQ ID NO: 2795856 - RNA, 17 nt, Human
cugggauggaggggagu

SEQ ID NO: 2795857 - RNA, 23 nt, Human
cugggauuacaggcuccugccac

SEQ ID NO: 2795858 - RNA, 20 nt, Human
cugggaugggaggagaggac

SEQ ID NO: 2795859 - RNA, 17 nt, Human
cugggaugagccgcugu

SEQ ID NO: 2795860 - RNA, 21 nt, Human
cugggaugagccgcugugagc

SEQ ID NO: 2795861 - RNA, 22 nt, Human
cugggaugagccgcugugagcc

SEQ ID NO: 2795862 - RNA, 17 nt, Human
cugggccccccagcuca

SEQ ID NO: 2795863 - RNA, 18 nt, Human
cugggccccccagcucag

SEQ ID NO: 2795864 - RNA, 19 nt, Human
cugggccccccagcucagg

SEQ ID NO: 2795865 - RNA, 20 nt, Human
cugggccccccagcucaggg

SEQ ID NO: 2795866 - RNA, 17 nt, Human
cugggccggagggucag

SEQ ID NO: 2795867 - RNA, 13 nt, Human
cugggccccagcu

SEQ ID NO: 2795868 - RNA, 15 nt, Human
cugggccccaguugu

SEQ ID NO: 2795869 - RNA, 19 nt, Human
cugggccccaguuguauuu

SEQ ID NO: 2795870 - RNA, 24 nt, Human
cugggccccaaacgggcugcccug

SEQ ID NO: 2795871 - RNA, 21 nt, Human
cugggaguaguugucuuuccu

SEQ ID NO: 2795872 - RNA, 23 nt, Human
cugggaguaguugucuuuccugg

SEQ ID NO: 2795873 - RNA, 18 nt, Human
cuggccagauggcccgga

SEQ ID NO: 2795874 - RNA, 21 nt, Human
cugggagguugguuuaaugca

SEQ ID NO: 2795875 - RNA, 22 nt, Human
cugggaggaauggacagacaga

SEQ ID NO: 2795876 - RNA, 19 nt, Human
cugggaggaauggacagac

SEQ ID NO: 2795877 - RNA, 15 nt, Human
cugggaggaagcagg

SEQ ID NO: 2795878 - RNA, 21 nt, Human
cugggaggaagcagguugagg

SEQ ID NO: 2795879 - RNA, 17 nt, Human
cugggaggaauggacag

SEQ ID NO: 2795880 - RNA, 23 nt, Human
cugucuccuuucaccccagggcc

SEQ ID NO: 2795881 - RNA, 22 nt, Human
cugucuccuuucaccccagggc

SEQ ID NO: 2795882 - RNA, 16 nt, Human
cugucucuaacuuauu

SEQ ID NO: 2795883 - RNA, 20 nt, Human
cugucucuaacuuauuuuau

SEQ ID NO: 2795884 - RNA, 20 nt, Human
cugucuccuuaacacugagc

SEQ ID NO: 2795885 - RNA, 20 nt, Human
cugucucauccccagggguc

SEQ ID NO: 2795886 - RNA, 21 nt, Human
cugucucauccccaggggucc

SEQ ID NO: 2795887 - RNA, 14 nt, Human
cugucucauccucc

SEQ ID NO: 2795888 - RNA, 15 nt, Human
cugucucauccuccu

SEQ ID NO: 2795889 - RNA, 16 nt, Human
cugucucauccuccug

SEQ ID NO: 2795890 - RNA, 17 nt, Human
cugucucauccuccugg

SEQ ID NO: 2795891 - RNA, 18 nt, Human
cugucucauccuccugga

SEQ ID NO: 2795892 - RNA, 22 nt, Human
cugucucauccuccuggaaccu

SEQ ID NO: 2795893 - RNA, 14 nt, Human
cugucuccacugug

SEQ ID NO: 2795894 - RNA, 15 nt, Human
cugucuccacugugc

SEQ ID NO: 2795895 - RNA, 19 nt, Human
cugucucauccccaggggu

SEQ ID NO: 2795896 - RNA, 17 nt, Human
cugucucauccccaggg

SEQ ID NO: 2795897 - RNA, 16 nt, Human
cugucucauccccagg

SEQ ID NO: 2795898 - RNA, 15 nt, Human
cugucucauccccag

SEQ ID NO: 2795899 - RNA, 14 nt, Human
cugucucaucccca

SEQ ID NO: 2795900 - RNA, 13 nt, Human
cugucucaucccc

SEQ ID NO: 2795901 - RNA, 21 nt, Human
cuguccuacucugugucaggu

SEQ ID NO: 2795902 - RNA, 15 nt, Human
cuguccuaggccaca

SEQ ID NO: 2795903 - RNA, 16 nt, Human
cuguccuaugaaugcu

SEQ ID NO: 2795904 - RNA, 23 nt, Human
cuguccuaugaaugcuuugcauu

SEQ ID NO: 2795905 - RNA, 13 nt, Human
cuguccucacugc

SEQ ID NO: 2795906 - RNA, 14 nt, Human
cuguccucacugcu

SEQ ID NO: 2795907 - RNA, 16 nt, Human
cuguccucacugcucc

SEQ ID NO: 2795908 - RNA, 18 nt, Human
cugucucaagagggcacu

SEQ ID NO: 2795909 - RNA, 19 nt, Human
cugucucaagagggcacug

SEQ ID NO: 2795910 - RNA, 20 nt, Human
cugucucaagagggcacugg

SEQ ID NO: 2795911 - RNA, 21 nt, Human
cugucucaagagggcacuggu

SEQ ID NO: 2795912 - RNA, 19 nt, Human
cuguccucacugcucccug

SEQ ID NO: 2795913 - RNA, 21 nt, Human
cuguccucacugcucccugaa

SEQ ID NO: 2795914 - RNA, 18 nt, Human
cugucccauggacacucc

SEQ ID NO: 2795915 - RNA, 21 nt, Human
cugucccuaguaaaaauacaa

SEQ ID NO: 2795916 - RNA, 19 nt, Human
cugucccuaguaaaaauac

SEQ ID NO: 2795917 - RNA, 12 nt, Human
cugucccucaca

SEQ ID NO: 2795918 - RNA, 16 nt, Human
cugucccucacagcac

SEQ ID NO: 2795919 - RNA, 13 nt, Human
cugucccucacag

SEQ ID NO: 2795920 - RNA, 13 nt, Human
cugucccucacug

SEQ ID NO: 2795921 - RNA, 12 nt, Human
cugucccucacu

SEQ ID NO: 2795922 - RNA, 13 nt, Human
cugucccucccac

SEQ ID NO: 2795923 - RNA, 15 nt, Human
cugucccucccaccu

SEQ ID NO: 2795924 - RNA, 16 nt, Human
cugucccucccaccuc

SEQ ID NO: 2795925 - RNA, 15 nt, Human
cugucccucccccuu

SEQ ID NO: 2795926 - RNA, 17 nt, Human
cugucccucccaccucu

SEQ ID NO: 2795927 - RNA, 18 nt, Human
cugucccucccaccucug

SEQ ID NO: 2795928 - RNA, 19 nt, Human
cugucccucccaccucugu

SEQ ID NO: 2795929 - RNA, 21 nt, Human
cugucccucccaccucuguga

SEQ ID NO: 2795930 - RNA, 20 nt, Human
cuguccuacucugugucagg

SEQ ID NO: 2795931 - RNA, 18 nt, Human
cuguccuacucuguguca

SEQ ID NO: 2795932 - RNA, 17 nt, Human
cuguccuacucuguguc

SEQ ID NO: 2795933 - RNA, 16 nt, Human
cuguccuacucugugu

SEQ ID NO: 2795934 - RNA, 19 nt, Human
cugucccuuggaacucuug

SEQ ID NO: 2795935 - RNA, 14 nt, Human
cugucccuugcugu

SEQ ID NO: 2795936 - RNA, 18 nt, Human
cugucccuugcuguaugc

SEQ ID NO: 2795937 - RNA, 23 nt, Human
cugucccucccaccucugugacc

SEQ ID NO: 2795938 - RNA, 17 nt, Human
cugucccuucugucccu

SEQ ID NO: 2795939 - RNA, 19 nt, Human
cugucccuucugucccuca

SEQ ID NO: 2795940 - RNA, 18 nt, Human
cugucccuucugucccuc

SEQ ID NO: 2795941 - RNA, 23 nt, Human
cuguauuuguaucucugaagcau

SEQ ID NO: 2795942 - RNA, 18 nt, Human
cuguccaaaggaggcugg

SEQ ID NO: 2795943 - RNA, 17 nt, Human
cuguccaaaggaggcug

SEQ ID NO: 2795944 - RNA, 22 nt, Human
cuguccaaaggaggcuggcagg

SEQ ID NO: 2795945 - RNA, 21 nt, Human
cuguccaaaggaggcuggcag

SEQ ID NO: 2795946 - RNA, 20 nt, Human
cuguccaaaggaggcuggca

SEQ ID NO: 2795947 - RNA, 19 nt, Human
cuguccaaaggaggcuggc

SEQ ID NO: 2795948 - RNA, 16 nt, Human
cugucauuuguuguga

SEQ ID NO: 2795949 - RNA, 18 nt, Human
cugucauuuguugugaug

SEQ ID NO: 2795950 - RNA, 17 nt, Human
cugucccauggacacuc

SEQ ID NO: 2795951 - RNA, 15 nt, Human
cugucccaugcaggc

SEQ ID NO: 2795952 - RNA, 18 nt, Human
cugucccaugcaggcccu

SEQ ID NO: 2795953 - RNA, 19 nt, Human
cugucccauggacacucca

SEQ ID NO: 2795954 - RNA, 16 nt, Human
cugucccacccccacc

SEQ ID NO: 2795955 - RNA, 19 nt, Human
cugucccagguuaucuggg

SEQ ID NO: 2795956 - RNA, 22 nt, Human
cugucccagguuaucugggcau

SEQ ID NO: 2795957 - RNA, 17 nt, Human
cuguccaggcacugcug

SEQ ID NO: 2795958 - RNA, 14 nt, Human
cuguauagcuccuu

SEQ ID NO: 2795959 - RNA, 14 nt, Human
cugucccaccccca

SEQ ID NO: 2795960 - RNA, 16 nt, Human
cuguccaccagcccau

SEQ ID NO: 2795961 - RNA, 18 nt, Human
cuguccaggcacugcugc

SEQ ID NO: 2795962 - RNA, 19 nt, Human
cuguccaggcacugcugcc

SEQ ID NO: 2795963 - RNA, 20 nt, Human
cuguccaggcacugcugccc

SEQ ID NO: 2795964 - RNA, 21 nt, Human
cuguccaggcacugcugccca

SEQ ID NO: 2795965 - RNA, 22 nt, Human
cuguccaggcacugcugcccag

SEQ ID NO: 2795966 - RNA, 23 nt, Human
cuguccaucugcccgccugccca

SEQ ID NO: 2795967 - RNA, 14 nt, Human
cuguccaugcuucu

SEQ ID NO: 2795968 - RNA, 16 nt, Human
cuguccaugcuucuca

SEQ ID NO: 2795969 - RNA, 21 nt, Human
cuguccauuuauccacaggaa

SEQ ID NO: 2795970 - RNA, 18 nt, Human
cuguaucccaugagccuc

SEQ ID NO: 2795971 - RNA, 12 nt, Human
cuguaugucugu

SEQ ID NO: 2795972 - RNA, 15 nt, Human
cuguaugucugucau

SEQ ID NO: 2795973 - RNA, 17 nt, Human
cuguaugucugucauug

SEQ ID NO: 2795974 - RNA, 12 nt, Human
cuguaugucaga

SEQ ID NO: 2795975 - RNA, 16 nt, Human
cuguauguauuaguga

SEQ ID NO: 2795976 - RNA, 17 nt, Human
cuguauguauuagugau

SEQ ID NO: 2795977 - RNA, 20 nt, Human
cuguauguauuagugauauu

SEQ ID NO: 2795978 - RNA, 13 nt, Human
cuguauauacuuu

SEQ ID NO: 2795979 - RNA, 12 nt, Human
cuguaugauuua

SEQ ID NO: 2795980 - RNA, 15 nt, Human
cuguaugcugaucau

SEQ ID NO: 2795981 - RNA, 16 nt, Human
cuguaugcugaucauc

SEQ ID NO: 2795982 - RNA, 22 nt, Human
cuguaugcugaucaucgccaga

SEQ ID NO: 2795983 - RNA, 14 nt, Human
cuguauuuguaucu

SEQ ID NO: 2795984 - RNA, 17 nt, Human
cuguauuuaugugugag

SEQ ID NO: 2795985 - RNA, 23 nt, Human
cuguauuuaugugugaggagcug

SEQ ID NO: 2795986 - RNA, 14 nt, Human
cuguauuucaugug

SEQ ID NO: 2795987 - RNA, 15 nt, Human
cuguauuucaugugg

SEQ ID NO: 2795988 - RNA, 17 nt, Human
cuguauuucauguggcu

SEQ ID NO: 2795989 - RNA, 19 nt, Human
cuguauuucauguggcugu

SEQ ID NO: 2795990 - RNA, 18 nt, Human
cuguauuuaugugugagg

SEQ ID NO: 2795991 - RNA, 15 nt, Human
cuguauguuguccaa

SEQ ID NO: 2795992 - RNA, 18 nt, Human
cuguauguuguccaauug

SEQ ID NO: 2795993 - RNA, 13 nt, Human
cuguauguugucc

SEQ ID NO: 2795994 - RNA, 18 nt, Human
cuguaugugcuguaauuu

SEQ ID NO: 2795995 - RNA, 19 nt, Human
cuguaugugcuguaauuua

SEQ ID NO: 2795996 - RNA, 15 nt, Human
cuguauaguacuggc

SEQ ID NO: 2795997 - RNA, 22 nt, Human
cuguaccuuuugaggagcccca

SEQ ID NO: 2795998 - RNA, 21 nt, Human
cuguaccuguuccuuagaccu

SEQ ID NO: 2795999 - RNA, 20 nt, Human
cuguaccuuuugaggagccc

SEQ ID NO: 2796000 - RNA, 15 nt, Human
cuguaucccaugagc

SEQ ID NO: 2796001 - RNA, 14 nt, Human
cuguaucccaugag

SEQ ID NO: 2796002 - RNA, 13 nt, Human
cuguauauaaaug

SEQ ID NO: 2796003 - RNA, 14 nt, Human
cuguauauaaaugg

SEQ ID NO: 2796004 - RNA, 15 nt, Human
cuguauauaaauggg

SEQ ID NO: 2796005 - RNA, 16 nt, Human
cuguauauaaauggga

SEQ ID NO: 2796006 - RNA, 18 nt, Human
cuguauauaaaugggaac

SEQ ID NO: 2796007 - RNA, 19 nt, Human
cuguauauaaaugggaaca

SEQ ID NO: 2796008 - RNA, 22 nt, Human
cuguauauaaaugggaacauuu

SEQ ID NO: 2796009 - RNA, 16 nt, Human
cuguauaguuaggaua

SEQ ID NO: 2796010 - RNA, 21 nt, Human
cuguauaguuaggauagcauu

SEQ ID NO: 2796011 - RNA, 23 nt, Human
cuguauauacaauaacauaauuu

SEQ ID NO: 2796012 - RNA, 19 nt, Human
cuguauauacaauaacaua

SEQ ID NO: 2796013 - RNA, 18 nt, Human
cuguauauacaauaacau

SEQ ID NO: 2796014 - RNA, 15 nt, Human
cuguauauacaauaa

SEQ ID NO: 2796015 - RNA, 13 nt, Human
cuguaaggcucua

SEQ ID NO: 2796016 - RNA, 14 nt, Human
cuguaaggcucuag

SEQ ID NO: 2796017 - RNA, 15 nt, Human
cuguaaggcucuaga

SEQ ID NO: 2796018 - RNA, 16 nt, Human
cuguaaggcucuagau

SEQ ID NO: 2796019 - RNA, 17 nt, Human
cuguaaggcucuagauc

SEQ ID NO: 2796020 - RNA, 18 nt, Human
cuguaaggcucuagauca

SEQ ID NO: 2796021 - RNA, 20 nt, Human
cuguaaggcucuagaucaua

SEQ ID NO: 2796022 - RNA, 22 nt, Human
cuguaaggcucuagaucauaag

SEQ ID NO: 2796023 - RNA, 13 nt, Human
cuguacauuuaaa

SEQ ID NO: 2796024 - RNA, 14 nt, Human
cuguacauuuaaaa

SEQ ID NO: 2796025 - RNA, 16 nt, Human
cuguacauuuaaaauu

SEQ ID NO: 2796026 - RNA, 19 nt, Human
cuguacauuuaaaauugcu

SEQ ID NO: 2796027 - RNA, 16 nt, Human
cuguacauuuuguugu

SEQ ID NO: 2796028 - RNA, 17 nt, Human
cuguacauuuuguugua

SEQ ID NO: 2796029 - RNA, 18 nt, Human
cuguacauuuuguuguaa

SEQ ID NO: 2796030 - RNA, 19 nt, Human
cuguacauuuuguuguaaa

SEQ ID NO: 2796031 - RNA, 20 nt, Human
cuguacauuuuguuguaaaa

SEQ ID NO: 2796032 - RNA, 21 nt, Human
cuguacauuuuguuguaaaaa

SEQ ID NO: 2796033 - RNA, 23 nt, Human
cuguacauuuuguuguaaaaaga

SEQ ID NO: 2796034 - RNA, 23 nt, Human
cuguaccauauagcaaaacuuuu

SEQ ID NO: 2796035 - RNA, 13 nt, Human
cuguaccucaucc

SEQ ID NO: 2796036 - RNA, 15 nt, Human
cuguaccucauccca

SEQ ID NO: 2796037 - RNA, 18 nt, Human
cuguaccucaucccauga

SEQ ID NO: 2796038 - RNA, 11 nt, Human
cuguacagucu

SEQ ID NO: 2796039 - RNA, 13 nt, Human
cuguacagucugu

SEQ ID NO: 2796040 - RNA, 14 nt, Human
cuguacagucuguc

SEQ ID NO: 2796041 - RNA, 15 nt, Human
cuguacagucugucu

SEQ ID NO: 2796042 - RNA, 16 nt, Human
cuguacagucugucuu

SEQ ID NO: 2796043 - RNA, 17 nt, Human
cuguacagucugucuuc

SEQ ID NO: 2796044 - RNA, 19 nt, Human
cuguacagucugucuucug

SEQ ID NO: 2796045 - RNA, 20 nt, Human
cuguacagucugucuucugu

SEQ ID NO: 2796046 - RNA, 22 nt, Human
cuguacagucugucuucuguau

SEQ ID NO: 2796047 - RNA, 23 nt, Human
cuguacagucugucuucuguaua

SEQ ID NO: 2796048 - RNA, 17 nt, Human
cuguacauaaacaauga

SEQ ID NO: 2796049 - RNA, 20 nt, Human
cugguucaggguuggccccu

SEQ ID NO: 2796050 - RNA, 20 nt, Human
cugguuaacagcaguccuuu

SEQ ID NO: 2796051 - RNA, 16 nt, Human
cugguuauaagcagca

SEQ ID NO: 2796052 - RNA, 22 nt, Human
cugguguuuaggugaauuaauu

SEQ ID NO: 2796053 - RNA, 20 nt, Human
cugguuaacuuguuuggccu

SEQ ID NO: 2796054 - RNA, 16 nt, Human
cuggugugaccugagg

SEQ ID NO: 2796055 - RNA, 17 nt, Human
cuggugugaccugaggg

SEQ ID NO: 2796056 - RNA, 18 nt, Human
cuggugugaccugagggc

SEQ ID NO: 2796057 - RNA, 12 nt, Human
cugguggcagcu

SEQ ID NO: 2796058 - RNA, 16 nt, Human
cuggucucgaacuccu

SEQ ID NO: 2796059 - RNA, 21 nt, Human
cuggucucaaacuccugggcu

SEQ ID NO: 2796060 - RNA, 16 nt, Human
cuggucaggcccuggu

SEQ ID NO: 2796061 - RNA, 23 nt, Human
cuggucucaaacucuugaccuca

SEQ ID NO: 2796062 - RNA, 13 nt, Human
cuggucccacuca

SEQ ID NO: 2796063 - RNA, 16 nt, Human
cugguccaugcagggg

SEQ ID NO: 2796064 - RNA, 18 nt, Human
cugguccaugcagggggc

SEQ ID NO: 2796065 - RNA, 22 nt, Human
cugguccagggaagcuggccga

SEQ ID NO: 2796066 - RNA, 21 nt, Human
cugguccagggaagcuggccg

SEQ ID NO: 2796067 - RNA, 17 nt, Human
cugguccagggaagcug

SEQ ID NO: 2796068 - RNA, 15 nt, Human
cugguccagggaagc

SEQ ID NO: 2796069 - RNA, 19 nt, Human
cuggucacaggacucugcc

SEQ ID NO: 2796070 - RNA, 19 nt, Human
cugguacuuagaguuucug

SEQ ID NO: 2796071 - RNA, 20 nt, Human
cugguacuuagaguuucugu

SEQ ID NO: 2796072 - RNA, 18 nt, Human
cugguaggaaagggcaag

SEQ ID NO: 2796073 - RNA, 23 nt, Human
cugguaggaaagggcaagucuuu

SEQ ID NO: 2796074 - RNA, 23 nt, Human
cuggucacagggcaugccccggc

SEQ ID NO: 2796075 - RNA, 20 nt, Human
cuggucacaggacucugccu

SEQ ID NO: 2796076 - RNA, 21 nt, Human
cuggucacaggacucugccuc

SEQ ID NO: 2796077 - RNA, 22 nt, Human
cuggucacaggacucugccucc

SEQ ID NO: 2796078 - RNA, 23 nt, Human
cuggucacaggacucugccuccu

SEQ ID NO: 2796079 - RNA, 14 nt, Human
cuggguacuugugg

SEQ ID NO: 2796080 - RNA, 16 nt, Human
cuggguacuuguggac

SEQ ID NO: 2796081 - RNA, 18 nt, Human
cuggguacuuguggacac

SEQ ID NO: 2796082 - RNA, 15 nt, Human
cuggguuggagggug

SEQ ID NO: 2796083 - RNA, 18 nt, Human
cuggguuucucuguauag

SEQ ID NO: 2796084 - RNA, 18 nt, Human
cuggguuuaaggggagag

SEQ ID NO: 2796085 - RNA, 22 nt, Human
cuggguuuaaggggagaggaaa

SEQ ID NO: 2796086 - RNA, 21 nt, Human
cugggucuucagcauucccuc

SEQ ID NO: 2796087 - RNA, 22 nt, Human
cugggucucgcuuuguugccca

SEQ ID NO: 2796088 - RNA, 15 nt, Human
gaacuccuaaaucaa

SEQ ID NO: 2796089 - RNA, 14 nt, Human
gaacuguguguaau

SEQ ID NO: 2796090 - RNA, 18 nt, Human
gaacuguguguaauuguu

SEQ ID NO: 2796091 - RNA, 16 nt, Human
gaacuccuaaaucaag

SEQ ID NO: 2796092 - RNA, 13 nt, Human
gaacuccugaccu

SEQ ID NO: 2796093 - RNA, 18 nt, Human
gaaccacaucuugcucug

SEQ ID NO: 2796094 - RNA, 14 nt, Human
gaacuucuaauaua

SEQ ID NO: 2796095 - RNA, 17 nt, Human
gaacuucucucagacuu

SEQ ID NO: 2796096 - RNA, 13 nt, Human
gaacuucuaauau

SEQ ID NO: 2796097 - RNA, 15 nt, Human
gaacuucuaauauau

SEQ ID NO: 2796098 - RNA, 16 nt, Human
gaacuucuccguccuc

SEQ ID NO: 2796099 - RNA, 19 nt, Human
gaacuucuccguccucgau

SEQ ID NO: 2796100 - RNA, 14 nt, Human
gaacuugaaugugu

SEQ ID NO: 2796101 - RNA, 23 nt, Human
gaacuccuaaaccuuugccccug

SEQ ID NO: 2796102 - RNA, 24 nt, Human
gaacuuuccacauucagagcuuac

SEQ ID NO: 2796103 - RNA, 14 nt, Human
gaacuuguagcugu

SEQ ID NO: 2796104 - RNA, 15 nt, Human
gaacuuguagcugua

SEQ ID NO: 2796105 - RNA, 17 nt, Human
gaacuuguagcuguaaa

SEQ ID NO: 2796106 - RNA, 18 nt, Human
gaacuuguagcuguaaaa

SEQ ID NO: 2796107 - RNA, 15 nt, Human
gaacuuguuuucugg

SEQ ID NO: 2796108 - RNA, 23 nt, Human
gaacuuucucuucauacuuuuuu

SEQ ID NO: 2796109 - RNA, 15 nt, Human
gaacuuugaagaccc

SEQ ID NO: 2796110 - RNA, 15 nt, Human
gaacuuuccauuuug

SEQ ID NO: 2796111 - RNA, 12 nt, Human
gaacuuuccugg

SEQ ID NO: 2796112 - RNA, 20 nt, Human
gaacuuuccuggaugucuga

SEQ ID NO: 2796113 - RNA, 21 nt, Human
gaacuuucucuucauacuuuu

SEQ ID NO: 2796114 - RNA, 18 nt, Human
gaagaaauuauaaagaua

SEQ ID NO: 2796115 - RNA, 22 nt, Human
gaagaaauuauaaagauaaagc

SEQ ID NO: 2796116 - RNA, 17 nt, Human
gaagaaauacugcacuu

SEQ ID NO: 2796117 - RNA, 15 nt, Human
gaagagcucaaggga

SEQ ID NO: 2796118 - RNA, 20 nt, Human
gaagagcucaagggacaagg

SEQ ID NO: 2796119 - RNA, 21 nt, Human
gaagagcucaagggacaagga

SEQ ID NO: 2796120 - RNA, 23 nt, Human
gaagagcucaagggacaaggaca

SEQ ID NO: 2796121 - RNA, 22 nt, Human
gaagagcuccccuacggaccag

SEQ ID NO: 2796122 - RNA, 14 nt, Human
gaagagcuugcuuu

SEQ ID NO: 2796123 - RNA, 16 nt, Human
gaagagcuugcuuuga

SEQ ID NO: 2796124 - RNA, 20 nt, Human
gaagagcuugcuuugauuua

SEQ ID NO: 2796125 - RNA, 16 nt, Human
gaagaguccucugaau

SEQ ID NO: 2796126 - RNA, 14 nt, Human
gaagaguccucuga

SEQ ID NO: 2796127 - RNA, 17 nt, Human
gaagaggaacugggccu

SEQ ID NO: 2796128 - RNA, 16 nt, Human
gaagaagggcacccua

SEQ ID NO: 2796129 - RNA, 18 nt, Human
gaagaaggggacaauggc

SEQ ID NO: 2796130 - RNA, 20 nt, Human
gaagaagguggaccuuuuaa

SEQ ID NO: 2796131 - RNA, 21 nt, Human
gaagaagguggaccuuuuaaa

SEQ ID NO: 2796132 - RNA, 23 nt, Human
gaagaagguggaccuuuuaaagu

SEQ ID NO: 2796133 - RNA, 18 nt, Human
gaagcauuuacuuugugu

SEQ ID NO: 2796134 - RNA, 22 nt, Human
gaagaugcuccagcaacacagc

SEQ ID NO: 2796135 - RNA, 13 nt, Human
gaagaugcagcuc

SEQ ID NO: 2796136 - RNA, 14 nt, Human
gaagaugcagcuca

SEQ ID NO: 2796137 - RNA, 18 nt, Human
gaagaugcauuguaguuu

SEQ ID NO: 2796138 - RNA, 24 nt, Human
gaagaugcgagcgcuaucuucaca

SEQ ID NO: 2796139 - RNA, 13 nt, Human
gaagauggcuguu

SEQ ID NO: 2796140 - RNA, 16 nt, Human
gaagauggcuguuagc

SEQ ID NO: 2796141 - RNA, 13 nt, Human
gaagaugaucaga

SEQ ID NO: 2796142 - RNA, 16 nt, Human
gaagaugaucagaccu

SEQ ID NO: 2796143 - RNA, 15 nt, Human
gaagaugaauggcgu

SEQ ID NO: 2796144 - RNA, 14 nt, Human
gaagaguugaggaa

SEQ ID NO: 2796145 - RNA, 23 nt, Human
gaagaguugaggaacuguacaga

SEQ ID NO: 2796146 - RNA, 21 nt, Human
gaagaguugccccgucucugu

SEQ ID NO: 2796147 - RNA, 22 nt, Human
gaagaguugccccgucucuguu

SEQ ID NO: 2796148 - RNA, 14 nt, Human
gaagaguugugcac

SEQ ID NO: 2796149 - RNA, 21 nt, Human
gaagaguugugcacgcagauu

SEQ ID NO: 2796150 - RNA, 13 nt, Human
gaagagugugugu

SEQ ID NO: 2796151 - RNA, 14 nt, Human
gaagagugugugug

SEQ ID NO: 2796152 - RNA, 14 nt, Human
gaagauaguaacug

SEQ ID NO: 2796153 - RNA, 22 nt, Human
gaagauauaacuauugcccagg

SEQ ID NO: 2796154 - RNA, 15 nt, Human
gaagauauacaugaa

SEQ ID NO: 2796155 - RNA, 21 nt, Human
gaagauauaacuauugcccag

SEQ ID NO: 2796156 - RNA, 22 nt, Human
gaagagucuugguuucucucua

SEQ ID NO: 2796157 - RNA, 15 nt, Human
gaagauccccucagg

SEQ ID NO: 2796158 - RNA, 16 nt, Human
gaagauccccucagga

SEQ ID NO: 2796159 - RNA, 20 nt, Human
gaagauccccucaggacugc

SEQ ID NO: 2796160 - RNA, 17 nt, Human
gaagauccuaaaacaaa

SEQ ID NO: 2796161 - RNA, 13 nt, Human
gaagauccuguga

SEQ ID NO: 2796162 - RNA, 14 nt, Human
gaagauccugugag

SEQ ID NO: 2796163 - RNA, 15 nt, Human
gaagauccugugagg

SEQ ID NO: 2796164 - RNA, 20 nt, Human
gaagauccugugaggagccc

SEQ ID NO: 2796165 - RNA, 13 nt, Human
gaagaucuguaau

SEQ ID NO: 2796166 - RNA, 21 nt, Human
gaagaucucacucugcccccc

SEQ ID NO: 2796167 - RNA, 17 nt, Human
gaaguccaauguggcaa

SEQ ID NO: 2796168 - RNA, 14 nt, Human
gaaguccaaugugg

SEQ ID NO: 2796169 - RNA, 22 nt, Human
gaagucaccuuguguguuccaa

SEQ ID NO: 2796170 - RNA, 18 nt, Human
gaagucccuugccauccu

SEQ ID NO: 2796171 - RNA, 18 nt, Human
gaaguccuauggaaaccc

SEQ ID NO: 2796172 - RNA, 22 nt, Human
gaaguccuauggaaacccgagg

SEQ ID NO: 2796173 - RNA, 18 nt, Human
gaaguccuguaugucugu

SEQ ID NO: 2796174 - RNA, 15 nt, Human
gaagucacugcacag

SEQ ID NO: 2796175 - RNA, 16 nt, Human
gaagucaagcucaaca

SEQ ID NO: 2796176 - RNA, 13 nt, Human
gaagucacacagu

SEQ ID NO: 2796177 - RNA, 12 nt, Human
gaaguaaagccu

SEQ ID NO: 2796178 - RNA, 15 nt, Human
gaaguaaagccucaa

SEQ ID NO: 2796179 - RNA, 14 nt, Human
gaaguaacaguaac

SEQ ID NO: 2796180 - RNA, 19 nt, Human
gaaguaaccauuugcacug

SEQ ID NO: 2796181 - RNA, 14 nt, Human
gaaggaggggaagc

SEQ ID NO: 2796182 - RNA, 16 nt, Human
gaaggaggggaagcug

SEQ ID NO: 2796183 - RNA, 17 nt, Human
gaaggaggggaagcugc

SEQ ID NO: 2796184 - RNA, 18 nt, Human
gaaggaggggaagcugca

SEQ ID NO: 2796185 - RNA, 19 nt, Human
gaaggaggggaagcugcag

SEQ ID NO: 2796186 - RNA, 20 nt, Human
gaaggaggggaagcugcagc

SEQ ID NO: 2796187 - RNA, 20 nt, Human
gaaggaggguacagcugggc

SEQ ID NO: 2796188 - RNA, 13 nt, Human
gaaggauuguaaa

SEQ ID NO: 2796189 - RNA, 18 nt, Human
gaaggcagggagggccug

SEQ ID NO: 2796190 - RNA, 14 nt, Human
gaaggauuguaaaa

SEQ ID NO: 2796191 - RNA, 21 nt, Human
gaaggcagggggaaggugggg

SEQ ID NO: 2796192 - RNA, 23 nt, Human
gaaggcagggagggccugggccc

SEQ ID NO: 2796193 - RNA, 22 nt, Human
gaaggcagggagggccugggcc

SEQ ID NO: 2796194 - RNA, 20 nt, Human
gaaggcagggagggccuggg

SEQ ID NO: 2796195 - RNA, 23 nt, Human
gaaggggcccugguccuuccagg

SEQ ID NO: 2796196 - RNA, 22 nt, Human
gaaggggccucaccgagugggg

SEQ ID NO: 2796197 - RNA, 19 nt, Human
gaaggauuuuuuaaaguuu

SEQ ID NO: 2796198 - RNA, 22 nt, Human
gaaggcagggggaagguggggu

SEQ ID NO: 2796199 - RNA, 17 nt, Human
gaaggcaucagucccua

SEQ ID NO: 2796200 - RNA, 23 nt, Human
gaaggggcaaauucuuuugaauu

SEQ ID NO: 2796201 - RNA, 14 nt, Human
gaaggucaccagca

SEQ ID NO: 2796202 - RNA, 14 nt, Human
gaaggugacagcag

SEQ ID NO: 2796203 - RNA, 15 nt, Human
gaaggugacagcagu

SEQ ID NO: 2796204 - RNA, 15 nt, Human
gaaggucucauucuu

SEQ ID NO: 2796205 - RNA, 13 nt, Human
gaagccucuggga

SEQ ID NO: 2796206 - RNA, 13 nt, Human
gaagccugaggcu

SEQ ID NO: 2796207 - RNA, 12 nt, Human
gaagccugaggc

SEQ ID NO: 2796208 - RNA, 21 nt, Human
gaagccucugggucagugguc

SEQ ID NO: 2796209 - RNA, 16 nt, Human
gaagccaaauuuauca

SEQ ID NO: 2796210 - RNA, 15 nt, Human
gaagauuuucagucu

SEQ ID NO: 2796211 - RNA, 16 nt, Human
gaagauuuucagucua

SEQ ID NO: 2796212 - RNA, 17 nt, Human
gaagauuuucagucuag

SEQ ID NO: 2796213 - RNA, 12 nt, Human
gaagcauuugua

SEQ ID NO: 2796214 - RNA, 14 nt, Human
gaagcauuuguauu

SEQ ID NO: 2796215 - RNA, 15 nt, Human
gaagcauuuguauuu

SEQ ID NO: 2796216 - RNA, 16 nt, Human
gaagcauuuguauuuu

SEQ ID NO: 2796217 - RNA, 18 nt, Human
gaagcauuuguauuuugu

SEQ ID NO: 2796218 - RNA, 20 nt, Human
gaagcauuuguauuuugugu

SEQ ID NO: 2796219 - RNA, 22 nt, Human
gaagcauuuguauuuuguguga

SEQ ID NO: 2796220 - RNA, 15 nt, Human
gaagcuucagaaguu

SEQ ID NO: 2796221 - RNA, 22 nt, Human
gaagcuguuguacauuuaugau

SEQ ID NO: 2796222 - RNA, 16 nt, Human
gaagcuguuguacauu

SEQ ID NO: 2796223 - RNA, 18 nt, Human
gaagcuguuguacauuua

SEQ ID NO: 2796224 - RNA, 19 nt, Human
gaagcuguuguacauuuau

SEQ ID NO: 2796225 - RNA, 21 nt, Human
gaagcuguuguacauuuauga

SEQ ID NO: 2796226 - RNA, 18 nt, Human
gaagccuguggaugauca

SEQ ID NO: 2796227 - RNA, 20 nt, Human
gaagccuguggaugaucaau

SEQ ID NO: 2796228 - RNA, 23 nt, Human
gaagccugcguugguccagagcg

SEQ ID NO: 2796229 - RNA, 13 nt, Human
gaagccuggaaca

SEQ ID NO: 2796230 - RNA, 15 nt, Human
gaagccuucagcucc

SEQ ID NO: 2796231 - RNA, 17 nt, Human
gaagccuucagcuccag

SEQ ID NO: 2796232 - RNA, 16 nt, Human
gaagccuucagcucca

SEQ ID NO: 2796233 - RNA, 13 nt, Human
gaagcuguuguac

SEQ ID NO: 2796234 - RNA, 21 nt, Human
gaaggacauugcggacagcca

SEQ ID NO: 2796235 - RNA, 20 nt, Human
gaaggacauugcggacagcc

SEQ ID NO: 2796236 - RNA, 19 nt, Human
gaaggacauugcggacagc

SEQ ID NO: 2796237 - RNA, 22 nt, Human
gaaggaauaaauugcuccuuga

SEQ ID NO: 2796238 - RNA, 15 nt, Human
gaaggacagaaagga

SEQ ID NO: 2796239 - RNA, 17 nt, Human
gaaggacagaaaggaga

SEQ ID NO: 2796240 - RNA, 13 nt, Human
gaaggacauagag

SEQ ID NO: 2796241 - RNA, 15 nt, Human
gaaggaccagcccuu

SEQ ID NO: 2796242 - RNA, 22 nt, Human
gaaggacccggaggggccuggc

SEQ ID NO: 2796243 - RNA, 11 nt, Human
gaagcuucuaa

SEQ ID NO: 2796244 - RNA, 13 nt, Human
gaagcuucuaaua

SEQ ID NO: 2796245 - RNA, 15 nt, Human
gaagcuucuaauaaa

SEQ ID NO: 2796246 - RNA, 19 nt, Human
gaagcuucuaauaaauuau

SEQ ID NO: 2796247 - RNA, 19 nt, Human
gaaggaaagaaagaaggaa

SEQ ID NO: 2796248 - RNA, 22 nt, Human
gaaggaagccaaauuuaucaaa

SEQ ID NO: 2796249 - RNA, 16 nt, Human
gaaggaagugaagagg

SEQ ID NO: 2796250 - RNA, 15 nt, Human
gaaaugagaaggcag

SEQ ID NO: 2796251 - RNA, 24 nt, Human
gaaaugaccuucauucugagacca

SEQ ID NO: 2796252 - RNA, 23 nt, Human
gaaauauauuuuaccauacauuu

SEQ ID NO: 2796253 - RNA, 13 nt, Human
gaaauaucauuua

SEQ ID NO: 2796254 - RNA, 14 nt, Human
gaaauaucauuuau

SEQ ID NO: 2796255 - RNA, 19 nt, Human
gaaauaaaagugaaugaaa

SEQ ID NO: 2796256 - RNA, 21 nt, Human
gaaauaaaagugaaugaaaga

SEQ ID NO: 2796257 - RNA, 23 nt, Human
gaaauaaaagugaaugaaagauu

SEQ ID NO: 2796258 - RNA, 17 nt, Human
gaaauaaaggaugugau

SEQ ID NO: 2796259 - RNA, 12 nt, Human
gaaauaucauuu

SEQ ID NO: 2796260 - RNA, 16 nt, Human
gaaauauauacgaaca

SEQ ID NO: 2796261 - RNA, 20 nt, Human
gaaaguuuacccaugaagau

SEQ ID NO: 2796262 - RNA, 17 nt, Human
gaaauaaacuucacuga

SEQ ID NO: 2796263 - RNA, 20 nt, Human
gaaauaaaggaugugauugu

SEQ ID NO: 2796264 - RNA, 18 nt, Human
gaaauauauacgaacaaa

SEQ ID NO: 2796265 - RNA, 19 nt, Human
gaaauauauacgaacaaaa

SEQ ID NO: 2796266 - RNA, 20 nt, Human
gaaauauauacgaacaaaac

SEQ ID NO: 2796267 - RNA, 22 nt, Human
gaaauauauacgaacaaaacac

SEQ ID NO: 2796268 - RNA, 14 nt, Human
gaaauauauauaca

SEQ ID NO: 2796269 - RNA, 15 nt, Human
gaaauauauauacau

SEQ ID NO: 2796270 - RNA, 16 nt, Human
gaaauauauauacaua

SEQ ID NO: 2796271 - RNA, 18 nt, Human
gaaauauauauacauaug

SEQ ID NO: 2796272 - RNA, 19 nt, Human
gaaauauauauacauaugu

SEQ ID NO: 2796273 - RNA, 21 nt, Human
gaaauauauauacauauguag

SEQ ID NO: 2796274 - RNA, 18 nt, Human
gaaaugcugauggauaac

SEQ ID NO: 2796275 - RNA, 16 nt, Human
gaaaugugguuuuccu

SEQ ID NO: 2796276 - RNA, 14 nt, Human
gaaauguaguugau

SEQ ID NO: 2796277 - RNA, 18 nt, Human
gaaauguaguugauguau

SEQ ID NO: 2796278 - RNA, 21 nt, Human
gaaaugucacguacugucuga

SEQ ID NO: 2796279 - RNA, 22 nt, Human
gaaauguaggcaucaugcaugu

SEQ ID NO: 2796280 - RNA, 13 nt, Human
gaaaugacuaauu

SEQ ID NO: 2796281 - RNA, 12 nt, Human
gaaauguaaugc

SEQ ID NO: 2796282 - RNA, 16 nt, Human
gaaauguaccuucuuu

SEQ ID NO: 2796283 - RNA, 17 nt, Human
gaaaugaggcaugaguu

SEQ ID NO: 2796284 - RNA, 19 nt, Human
gaaaugagaaggcagccac

SEQ ID NO: 2796285 - RNA, 22 nt, Human
gaaaugagcaccuccauuaaag

SEQ ID NO: 2796286 - RNA, 17 nt, Human
gaaaugagaaggcagcc

SEQ ID NO: 2796287 - RNA, 18 nt, Human
gaaaugagaaggcagcca

SEQ ID NO: 2796288 - RNA, 18 nt, Human
gaaaugaggucagagccu

SEQ ID NO: 2796289 - RNA, 11 nt, Human
gaaaugauguu

SEQ ID NO: 2796290 - RNA, 16 nt, Human
gaaaugaggucuguuu

SEQ ID NO: 2796291 - RNA, 17 nt, Human
gaaaugaggucuguuua

SEQ ID NO: 2796292 - RNA, 21 nt, Human
gaaaugaggucuguuuaaagu

SEQ ID NO: 2796293 - RNA, 22 nt, Human
gaaaugaggucuguuuaaagug

SEQ ID NO: 2796294 - RNA, 23 nt, Human
gaaaugaggucuguuuaaagugg

SEQ ID NO: 2796295 - RNA, 16 nt, Human
gaaaugauagauuuga

SEQ ID NO: 2796296 - RNA, 17 nt, Human
gaaaugauagauuugac

SEQ ID NO: 2796297 - RNA, 21 nt, Human
gaaaugauagauuugaccucc

SEQ ID NO: 2796298 - RNA, 16 nt, Human
gaacaggugguuuuua

SEQ ID NO: 2796299 - RNA, 15 nt, Human
gaacagguguuuuuc

SEQ ID NO: 2796300 - RNA, 17 nt, Human
gaacagcuucagguuau

SEQ ID NO: 2796301 - RNA, 14 nt, Human
gaacaggcugggcu

SEQ ID NO: 2796302 - RNA, 14 nt, Human
gaacaguaacugcc

SEQ ID NO: 2796303 - RNA, 14 nt, Human
gaacagcuucaggu

SEQ ID NO: 2796304 - RNA, 15 nt, Human
gaacagcuucagguu

SEQ ID NO: 2796305 - RNA, 16 nt, Human
gaacagcuucagguua

SEQ ID NO: 2796306 - RNA, 22 nt, Human
gaacagacuggaagcacagcuu

SEQ ID NO: 2796307 - RNA, 18 nt, Human
gaacagauaaucagugug

SEQ ID NO: 2796308 - RNA, 19 nt, Human
gaacauccuuugcagggca

SEQ ID NO: 2796309 - RNA, 20 nt, Human
gaacauccuuugcagggcag

SEQ ID NO: 2796310 - RNA, 21 nt, Human
gaacauccuuugcagggcagc

SEQ ID NO: 2796311 - RNA, 22 nt, Human
gaacauccuuugcagggcagcc

SEQ ID NO: 2796312 - RNA, 23 nt, Human
gaacauccuuugcagggcagccc

SEQ ID NO: 2796313 - RNA, 22 nt, Human
gaacaucgcgaugggaaccgau

SEQ ID NO: 2796314 - RNA, 20 nt, Human
gaacaucuuugacacucugc

SEQ ID NO: 2796315 - RNA, 21 nt, Human
gaacaucuuugacacucugca

SEQ ID NO: 2796316 - RNA, 22 nt, Human
gaacaucuuugacacucugcag

SEQ ID NO: 2796317 - RNA, 13 nt, Human
gaaccaaagcuca

SEQ ID NO: 2796318 - RNA, 22 nt, Human
gaacauguccuaauucuucugu

SEQ ID NO: 2796319 - RNA, 24 nt, Human
gaacauguccuaauucuucugucc

SEQ ID NO: 2796320 - RNA, 17 nt, Human
gaaccaagcaggagacg

SEQ ID NO: 2796321 - RNA, 20 nt, Human
gaaccaagcaggagacgaca

SEQ ID NO: 2796322 - RNA, 16 nt, Human
gaaccaagcuauuccu

SEQ ID NO: 2796323 - RNA, 19 nt, Human
gaacagacuggaagcacag

SEQ ID NO: 2796324 - RNA, 20 nt, Human
gaacagacuggaagcacagc

SEQ ID NO: 2796325 - RNA, 17 nt, Human
gaaauuucucaucacag

SEQ ID NO: 2796326 - RNA, 13 nt, Human
gaaauuucuguga

SEQ ID NO: 2796327 - RNA, 14 nt, Human
gaaauuucugugaa

SEQ ID NO: 2796328 - RNA, 13 nt, Human
gaaauuauaucug

SEQ ID NO: 2796329 - RNA, 15 nt, Human
gaaauuauaucugug

SEQ ID NO: 2796330 - RNA, 19 nt, Human
gaaauuauaucuguggucu

SEQ ID NO: 2796331 - RNA, 21 nt, Human
gaaauuacuuaucauccacau

SEQ ID NO: 2796332 - RNA, 13 nt, Human
gaaauuagccggg

SEQ ID NO: 2796333 - RNA, 17 nt, Human
gaaauuauuuaauaaaa

SEQ ID NO: 2796334 - RNA, 12 nt, Human
gaaauuccaaag

SEQ ID NO: 2796335 - RNA, 13 nt, Human
gaaauuauuuaau

SEQ ID NO: 2796336 - RNA, 15 nt, Human
gaaauuauuuaauaa

SEQ ID NO: 2796337 - RNA, 23 nt, Human
gaaauuaugugacauuuuacauu

SEQ ID NO: 2796338 - RNA, 22 nt, Human
gaaauuaugugacauuuuacau

SEQ ID NO: 2796339 - RNA, 23 nt, Human
gaaauuucagauucccagagcaa

SEQ ID NO: 2796340 - RNA, 22 nt, Human
gaaacugaggaauuuucuuugu

SEQ ID NO: 2796341 - RNA, 18 nt, Human
gaaacugaggaauuuucu

SEQ ID NO: 2796342 - RNA, 11 nt, Human
gaaagagagag

SEQ ID NO: 2796343 - RNA, 17 nt, Human
gaaagagagagaaacaa

SEQ ID NO: 2796344 - RNA, 12 nt, Human
gaaagcaacuuu

SEQ ID NO: 2796345 - RNA, 11 nt, Human
gaaagcacaca

SEQ ID NO: 2796346 - RNA, 23 nt, Human
gaaagauggcugugccucugccu

SEQ ID NO: 2796347 - RNA, 13 nt, Human
gaaagcaaaaaug

SEQ ID NO: 2796348 - RNA, 14 nt, Human
gaaagcaaaaaugc

SEQ ID NO: 2796349 - RNA, 15 nt, Human
gaaagcaaaaaugcu

SEQ ID NO: 2796350 - RNA, 16 nt, Human
gaaagcaaaaaugcua

SEQ ID NO: 2796351 - RNA, 17 nt, Human
gaaagcaaaaaugcuaa

SEQ ID NO: 2796352 - RNA, 18 nt, Human
gaaagcaaaaaugcuaau

SEQ ID NO: 2796353 - RNA, 23 nt, Human
gaaagcaaaaaugcuaauauuaa

SEQ ID NO: 2796354 - RNA, 22 nt, Human
gaaagauggcugugccucugcc

SEQ ID NO: 2796355 - RNA, 17 nt, Human
gaaagaugauuugcaau

SEQ ID NO: 2796356 - RNA, 16 nt, Human
gaaagauaaaauagug

SEQ ID NO: 2796357 - RNA, 17 nt, Human
gaaagagucuucaacau

SEQ ID NO: 2796358 - RNA, 22 nt, Human
gaaagagagagagagagagaaa

SEQ ID NO: 2796359 - RNA, 13 nt, Human
gaaagagagcagg

SEQ ID NO: 2796360 - RNA, 21 nt, Human
gaaagagagagaaacaaacuu

SEQ ID NO: 2796361 - RNA, 23 nt, Human
gaaagagauaccaagaugccauc

SEQ ID NO: 2796362 - RNA, 23 nt, Human
gaaaccuuuuuuaagauuuuucu

SEQ ID NO: 2796363 - RNA, 21 nt, Human
gaaaccuuuuuuaagauuuuu

SEQ ID NO: 2796364 - RNA, 22 nt, Human
gaaaccuuuuuuaagauuuuuc

SEQ ID NO: 2796365 - RNA, 13 nt, Human
gaaacgcuaccuc

SEQ ID NO: 2796366 - RNA, 14 nt, Human
gaaacgcuaccucu

SEQ ID NO: 2796367 - RNA, 18 nt, Human
gaaacgcuaccucucugu

SEQ ID NO: 2796368 - RNA, 20 nt, Human
gaaacgcuaccucucugucc

SEQ ID NO: 2796369 - RNA, 21 nt, Human
gaaacgcuaccucucuguccc

SEQ ID NO: 2796370 - RNA, 23 nt, Human
gaaacgcuaccucucugucccuu

SEQ ID NO: 2796371 - RNA, 20 nt, Human
gaaaaaugcccuuaaaucau

SEQ ID NO: 2796372 - RNA, 11 nt, Human
gaaaaaucuug

SEQ ID NO: 2796373 - RNA, 14 nt, Human
gaaaaaucuugugc

SEQ ID NO: 2796374 - RNA, 21 nt, Human
gaaaaaucuugugcuagaaua

SEQ ID NO: 2796375 - RNA, 22 nt, Human
gaaaaaucuugugcuagaauac

SEQ ID NO: 2796376 - RNA, 15 nt, Human
gaaaaaugaaagaug

SEQ ID NO: 2796377 - RNA, 16 nt, Human
gaaaaaugaaagauga

SEQ ID NO: 2796378 - RNA, 17 nt, Human
gaaaaaugaaagaugau

SEQ ID NO: 2796379 - RNA, 18 nt, Human
gaaaaaugaaagaugauu

SEQ ID NO: 2796380 - RNA, 19 nt, Human
gaaaaaugaaagaugauuu

SEQ ID NO: 2796381 - RNA, 20 nt, Human
gaaaaagacuuuaaaaguga

SEQ ID NO: 2796382 - RNA, 14 nt, Human
gaaaaagaaaauaa

SEQ ID NO: 2796383 - RNA, 16 nt, Human
gaaaaaugcuuugcuu

SEQ ID NO: 2796384 - RNA, 16 nt, Human
gaaaaauggagcaaag

SEQ ID NO: 2796385 - RNA, 11 nt, Human
gaaaaauguuu

SEQ ID NO: 2796386 - RNA, 12 nt, Human
gaaaaauguuug

SEQ ID NO: 2796387 - RNA, 13 nt, Human
gaaaaauguuugu

SEQ ID NO: 2796388 - RNA, 14 nt, Human
gaaaaauguuuguc

SEQ ID NO: 2796389 - RNA, 16 nt, Human
gaaaccuuuaagaaaa

SEQ ID NO: 2796390 - RNA, 14 nt, Human
gaaaccuuuuuuaa

SEQ ID NO: 2796391 - RNA, 17 nt, Human
gaaaccuuuuuuaagau

SEQ ID NO: 2796392 - RNA, 18 nt, Human
gaaaccuuuuuuaagauu

SEQ ID NO: 2796393 - RNA, 19 nt, Human
gaaaccuuuuuuaagauuu

SEQ ID NO: 2796394 - RNA, 20 nt, Human
gaaaccuuuuuuaagauuuu

SEQ ID NO: 2796395 - RNA, 15 nt, Human
gaaagcuuuggcagu

SEQ ID NO: 2796396 - RNA, 23 nt, Human
gaaagccaggcagguagccaggg

SEQ ID NO: 2796397 - RNA, 11 nt, Human
gaaagccaggc

SEQ ID NO: 2796398 - RNA, 14 nt, Human
gaaagccaggcagg

SEQ ID NO: 2796399 - RNA, 15 nt, Human
gaaagcacagguggg

SEQ ID NO: 2796400 - RNA, 23 nt, Human
gaaagcacaggugggcuucccag

SEQ ID NO: 2796401 - RNA, 16 nt, Human
gaaagcacaggagaca

SEQ ID NO: 2796402 - RNA, 22 nt, Human
gaaaguacuucuccacccugcu

SEQ ID NO: 2796403 - RNA, 14 nt, Human
gaaaggauucaugu

SEQ ID NO: 2796404 - RNA, 13 nt, Human
gaaaggcaaggga

SEQ ID NO: 2796405 - RNA, 20 nt, Human
gaaagucagaugcccagagg

SEQ ID NO: 2796406 - RNA, 17 nt, Human
gaaagucagaugcccag

SEQ ID NO: 2796407 - RNA, 22 nt, Human
gaaagucgaauuaauagcuuuu

SEQ ID NO: 2796408 - RNA, 21 nt, Human
gaaagucuaucuaaugacaug

SEQ ID NO: 2796409 - RNA, 13 nt, Human
gaaaggagacuag

SEQ ID NO: 2796410 - RNA, 17 nt, Human
gaaaggaggcaugccuc

SEQ ID NO: 2796411 - RNA, 18 nt, Human
gaaaggaggcaugccucu

SEQ ID NO: 2796412 - RNA, 19 nt, Human
gaaaggaggcaugccucug

SEQ ID NO: 2796413 - RNA, 20 nt, Human
gaaaggaggcaugccucuga

SEQ ID NO: 2796414 - RNA, 21 nt, Human
gaaaggaggcaugccucugau

SEQ ID NO: 2796415 - RNA, 11 nt, Human
gaaaggagacu

SEQ ID NO: 2796416 - RNA, 18 nt, Human
gaaaggaagcuccacugu

SEQ ID NO: 2796417 - RNA, 22 nt, Human
gaaaggaagcuccacugucacc

SEQ ID NO: 2796418 - RNA, 18 nt, Human
gaaaggaaaaccugaaga

SEQ ID NO: 2796419 - RNA, 20 nt, Human
gaaaggaaaaccugaagacu

SEQ ID NO: 2796420 - RNA, 17 nt, Human
gaaaguguuauuuuuca

SEQ ID NO: 2796421 - RNA, 23 nt, Human
gaaaguguuauuuuucaaggaag

SEQ ID NO: 2796422 - RNA, 15 nt, Human
gaaaguguaaauguu

SEQ ID NO: 2796423 - RNA, 16 nt, Human
gaaaguagaacuuacu

SEQ ID NO: 2796424 - RNA, 23 nt, Human
gaaagugggugagaugcuggaga

SEQ ID NO: 2796425 - RNA, 21 nt, Human
gaaagugggugagaugcugga

SEQ ID NO: 2796426 - RNA, 21 nt, Human
gaaagugggaggucaggaaac

SEQ ID NO: 2796427 - RNA, 14 nt, Human
gaaagugaugacau

SEQ ID NO: 2796428 - RNA, 15 nt, Human
gaaagugaugacaua

SEQ ID NO: 2796429 - RNA, 13 nt, Human
gaaagugaggaaa

SEQ ID NO: 2796430 - RNA, 20 nt, Human
gaaagugaggaaauaaaguu

SEQ ID NO: 2796431 - RNA, 15 nt, Human
gaaagugaauaaacu

SEQ ID NO: 2796432 - RNA, 17 nt, Human
gaaagugaauaaacuuc

SEQ ID NO: 2796433 - RNA, 18 nt, Human
gaaagugaauaaacuuca

SEQ ID NO: 2796434 - RNA, 20 nt, Human
gaaagugaauaaacuucagc

SEQ ID NO: 2796435 - RNA, 21 nt, Human
gaaagugaauaaacuucagca

SEQ ID NO: 2796436 - RNA, 22 nt, Human
gaaagugaauaaacuucagcac

SEQ ID NO: 2796437 - RNA, 16 nt, Human
gaaagugaaaguccag

SEQ ID NO: 2796438 - RNA, 19 nt, Human
gaaaguugcacggcugcug

SEQ ID NO: 2796439 - RNA, 20 nt, Human
gaaaguugcacggcugcuga

SEQ ID NO: 2796440 - RNA, 13 nt, Human
gaaaguuguacau

SEQ ID NO: 2796441 - RNA, 17 nt, Human
gaaaguuguacaugaaa

SEQ ID NO: 2796442 - RNA, 18 nt, Human
gaaaguuguacaugaaau

SEQ ID NO: 2796443 - RNA, 16 nt, Human
gaaaguuuacaggaaa

SEQ ID NO: 2796444 - RNA, 18 nt, Human
gaaaguugcacggcugcu

SEQ ID NO: 2796445 - RNA, 14 nt, Human
gaaaguuuacagga

SEQ ID NO: 2796446 - RNA, 20 nt, Human
gaaaguuucguuauauuaaa

SEQ ID NO: 2796447 - RNA, 22 nt, Human
gaaaguuuucagaaccucuucc

SEQ ID NO: 2796448 - RNA, 23 nt, Human
gaaaguuuugaguagauauuacu

SEQ ID NO: 2796449 - RNA, 14 nt, Human
gaaauaaaaccuuu

SEQ ID NO: 2796450 - RNA, 18 nt, Human
gaaauaaaaccuuucaaa

SEQ ID NO: 2796451 - RNA, 17 nt, Human
gaaauaaaaccuuucaa

SEQ ID NO: 2796452 - RNA, 16 nt, Human
gaaauaaaaccuuuca

SEQ ID NO: 2796453 - RNA, 15 nt, Human
gaaauaaaaccuuuc

SEQ ID NO: 2796454 - RNA, 11 nt, Human
cuugcauugac

SEQ ID NO: 2796455 - RNA, 14 nt, Human
cuugcauugacauu

SEQ ID NO: 2796456 - RNA, 10 nt, Human
cuugcauuga

SEQ ID NO: 2796457 - RNA, 21 nt, Human
cuugcuggacggggacugggg

SEQ ID NO: 2796458 - RNA, 17 nt, Human
cuugcuggacggggacu

SEQ ID NO: 2796459 - RNA, 12 nt, Human
cuugcugcuaga

SEQ ID NO: 2796460 - RNA, 13 nt, Human
cuugcugcuagaa

SEQ ID NO: 2796461 - RNA, 14 nt, Human
cuugcugcuagaac

SEQ ID NO: 2796462 - RNA, 15 nt, Human
cuugcugcuagaacu

SEQ ID NO: 2796463 - RNA, 16 nt, Human
cuugcugcuagaacuu

SEQ ID NO: 2796464 - RNA, 17 nt, Human
cuugcugcuagaacuuu

SEQ ID NO: 2796465 - RNA, 18 nt, Human
cuugcugcuagaacuuuu

SEQ ID NO: 2796466 - RNA, 14 nt, Human
cuugcuguccuagg

SEQ ID NO: 2796467 - RNA, 13 nt, Human
cuugcuguaugcu

SEQ ID NO: 2796468 - RNA, 19 nt, Human
cuugcuguaugcugaucau

SEQ ID NO: 2796469 - RNA, 19 nt, Human
cuugcugucccuuggaacu

SEQ ID NO: 2796470 - RNA, 11 nt, Human
cuugcuuucua

SEQ ID NO: 2796471 - RNA, 21 nt, Human
cuugcuuucuaugcuguuugu

SEQ ID NO: 2796472 - RNA, 18 nt, Human
cuugcuuucuuuuuuaaa

SEQ ID NO: 2796473 - RNA, 22 nt, Human
cuugcuuucuuuuuuaaaauca

SEQ ID NO: 2796474 - RNA, 23 nt, Human
cuugcuuucuuuuuuaaaaucaa

SEQ ID NO: 2796475 - RNA, 13 nt, Human
cuugcuuugauuu

SEQ ID NO: 2796476 - RNA, 14 nt, Human
cuugcuuugauuua

SEQ ID NO: 2796477 - RNA, 20 nt, Human
cuugcuuugauuuacagcaa

SEQ ID NO: 2796478 - RNA, 21 nt, Human
cuugcuuugauuuacagcaag

SEQ ID NO: 2796479 - RNA, 12 nt, Human
cuugcuuguacc

SEQ ID NO: 2796480 - RNA, 16 nt, Human
cuugcuuguaccucug

SEQ ID NO: 2796481 - RNA, 18 nt, Human
cuugcuuguaccucuggc

SEQ ID NO: 2796482 - RNA, 13 nt, Human
cuugcuuguuaca

SEQ ID NO: 2796483 - RNA, 14 nt, Human
cuugcuuguuacau

SEQ ID NO: 2796484 - RNA, 22 nt, Human
cuugcuggacggggacugggga

SEQ ID NO: 2796485 - RNA, 15 nt, Human
cuuggcguggagcag

SEQ ID NO: 2796486 - RNA, 16 nt, Human
cuuggcguggagcagg

SEQ ID NO: 2796487 - RNA, 18 nt, Human
cuuggcguggagcaggcg

SEQ ID NO: 2796488 - RNA, 17 nt, Human
cuuggcuacacagggau

SEQ ID NO: 2796489 - RNA, 23 nt, Human
cuuggcucaaguccucuuuucug

SEQ ID NO: 2796490 - RNA, 12 nt, Human
cuuggcucagac

SEQ ID NO: 2796491 - RNA, 21 nt, Human
cuuggcucaauccucuaagcu

SEQ ID NO: 2796492 - RNA, 24 nt, Human
cuuggcucacugcaacuucugccu

SEQ ID NO: 2796493 - RNA, 13 nt, Human
cuuggcugcaggg

SEQ ID NO: 2796494 - RNA, 12 nt, Human
cuuggcugcagg

SEQ ID NO: 2796495 - RNA, 14 nt, Human
cuuggcucagacau

SEQ ID NO: 2796496 - RNA, 16 nt, Human
cuuggcucagacaugu

SEQ ID NO: 2796497 - RNA, 14 nt, Human
cuuggcuccaugcu

SEQ ID NO: 2796498 - RNA, 16 nt, Human
cuuggcuccaugcucc

SEQ ID NO: 2796499 - RNA, 22 nt, Human
cuuggcuccaugcuccucacug

SEQ ID NO: 2796500 - RNA, 21 nt, Human
cuuggauagcuaauaaugagc

SEQ ID NO: 2796501 - RNA, 23 nt, Human
cuuggauaccuagaccguuauaa

SEQ ID NO: 2796502 - RNA, 21 nt, Human
cuuggauuauuuuaaaucauu

SEQ ID NO: 2796503 - RNA, 22 nt, Human
cuuggaguauuggggucugacc

SEQ ID NO: 2796504 - RNA, 22 nt, Human
cuuggaguuuuucauugucgcu

SEQ ID NO: 2796505 - RNA, 21 nt, Human
cuuguaaauagcucagguguc

SEQ ID NO: 2796506 - RNA, 22 nt, Human
cuuggggccaccaaagcugccc

SEQ ID NO: 2796507 - RNA, 21 nt, Human
cuuggggccaccaaagcugcc

SEQ ID NO: 2796508 - RNA, 23 nt, Human
cuuggggccaccaaagcugccca

SEQ ID NO: 2796509 - RNA, 18 nt, Human
cuuguaaaaauuaaaagu

SEQ ID NO: 2796510 - RNA, 19 nt, Human
cuuggggccaccaaagcug

SEQ ID NO: 2796511 - RNA, 20 nt, Human
cuuggggcaacauuguucac

SEQ ID NO: 2796512 - RNA, 23 nt, Human
cuuggggcaacauuguucaccuu

SEQ ID NO: 2796513 - RNA, 21 nt, Human
cuuggcuucugugaugagcug

SEQ ID NO: 2796514 - RNA, 14 nt, Human
cuuggcuugcccac

SEQ ID NO: 2796515 - RNA, 14 nt, Human
cuuggcuuaccuga

SEQ ID NO: 2796516 - RNA, 15 nt, Human
cuuggcuuaccugac

SEQ ID NO: 2796517 - RNA, 16 nt, Human
cuuggcuuaccugacc

SEQ ID NO: 2796518 - RNA, 17 nt, Human
cuuggcuuaccugaccu

SEQ ID NO: 2796519 - RNA, 18 nt, Human
cuuggcuuaccugaccuc

SEQ ID NO: 2796520 - RNA, 19 nt, Human
cuuggcuuaccugaccucu

SEQ ID NO: 2796521 - RNA, 22 nt, Human
cuuggcuuaccugaccucuugc

SEQ ID NO: 2796522 - RNA, 23 nt, Human
cuuggcuuaccugaccucuugcu

SEQ ID NO: 2796523 - RNA, 24 nt, Human
cuuggcuuaccugaccucuugcug

SEQ ID NO: 2796524 - RNA, 12 nt, Human
cuuggcugugag

SEQ ID NO: 2796525 - RNA, 13 nt, Human
cuuggcugugagg

SEQ ID NO: 2796526 - RNA, 21 nt, Human
cuuggcugugaggccccugga

SEQ ID NO: 2796527 - RNA, 17 nt, Human
cuuggcuucugugauga

SEQ ID NO: 2796528 - RNA, 13 nt, Human
cuuggcuucugug

SEQ ID NO: 2796529 - RNA, 20 nt, Human
cuuggcuguuggcagugagu

SEQ ID NO: 2796530 - RNA, 13 nt, Human
cuuggcuggugca

SEQ ID NO: 2796531 - RNA, 16 nt, Human
cuuggcuggugcaccu

SEQ ID NO: 2796532 - RNA, 23 nt, Human
cuugucacugguagaccaaaaua

SEQ ID NO: 2796533 - RNA, 11 nt, Human
cuugucacuug

SEQ ID NO: 2796534 - RNA, 13 nt, Human
cuugucacuugca

SEQ ID NO: 2796535 - RNA, 16 nt, Human
cuugucacuugcaugu

SEQ ID NO: 2796536 - RNA, 15 nt, Human
cuugucagacauaaa

SEQ ID NO: 2796537 - RNA, 16 nt, Human
cuugucagacauaaag

SEQ ID NO: 2796538 - RNA, 17 nt, Human
cuugucagacauaaagc

SEQ ID NO: 2796539 - RNA, 18 nt, Human
cuugucagacauaaagcc

SEQ ID NO: 2796540 - RNA, 19 nt, Human
cuugucagacauaaagcca

SEQ ID NO: 2796541 - RNA, 20 nt, Human
cuugucagacauaaagccau

SEQ ID NO: 2796542 - RNA, 15 nt, Human
cuugucacugguaga

SEQ ID NO: 2796543 - RNA, 17 nt, Human
cuugucacugacacaaa

SEQ ID NO: 2796544 - RNA, 18 nt, Human
cuugucacugacacaaag

SEQ ID NO: 2796545 - RNA, 20 nt, Human
cuugucacugacacaaagga

SEQ ID NO: 2796546 - RNA, 21 nt, Human
cuugucacugacacaaaggaa

SEQ ID NO: 2796547 - RNA, 23 nt, Human
cuugucacugacacaaaggaagu

SEQ ID NO: 2796548 - RNA, 18 nt, Human
cuuguggacacagcucuu

SEQ ID NO: 2796549 - RNA, 17 nt, Human
cuuguggacacagcucu

SEQ ID NO: 2796550 - RNA, 16 nt, Human
cuuguggacacagcuc

SEQ ID NO: 2796551 - RNA, 22 nt, Human
cuugucacugguagaccaaaau

SEQ ID NO: 2796552 - RNA, 18 nt, Human
cuuguauccucugguucu

SEQ ID NO: 2796553 - RNA, 15 nt, Human
cuuguaaggcuuuga

SEQ ID NO: 2796554 - RNA, 16 nt, Human
cuuguaauauuuugua

SEQ ID NO: 2796555 - RNA, 17 nt, Human
cuuguaauauuuuguau

SEQ ID NO: 2796556 - RNA, 18 nt, Human
cuuguaauauuuuguauu

SEQ ID NO: 2796557 - RNA, 20 nt, Human
cuuguaauauuuuguauuau

SEQ ID NO: 2796558 - RNA, 21 nt, Human
cuuguaugaaagauggcugug

SEQ ID NO: 2796559 - RNA, 20 nt, Human
cuuguaucaacacuguuacu

SEQ ID NO: 2796560 - RNA, 19 nt, Human
cuuguaucaacacuguuac

SEQ ID NO: 2796561 - RNA, 23 nt, Human
cuuguaaauguguuggacaaaug

SEQ ID NO: 2796562 - RNA, 13 nt, Human
cuugcaucaaggg

SEQ ID NO: 2796563 - RNA, 14 nt, Human
cuugcaucaagggg

SEQ ID NO: 2796564 - RNA, 17 nt, Human
cuugcaucaagggguca

SEQ ID NO: 2796565 - RNA, 18 nt, Human
cuugcagacucuacagag

SEQ ID NO: 2796566 - RNA, 18 nt, Human
cuugcaguucagcaccac

SEQ ID NO: 2796567 - RNA, 15 nt, Human
cuugcagucaucaga

SEQ ID NO: 2796568 - RNA, 16 nt, Human
cuugcagucaucagaa

SEQ ID NO: 2796569 - RNA, 17 nt, Human
cuugcagucaucagaag

SEQ ID NO: 2796570 - RNA, 22 nt, Human
cuugcaguucagcaccacccua

SEQ ID NO: 2796571 - RNA, 14 nt, Human
cuugcaguucuuga

SEQ ID NO: 2796572 - RNA, 16 nt, Human
cuugcaguucuugagu

SEQ ID NO: 2796573 - RNA, 21 nt, Human
cuugagugggguuaucucugu

SEQ ID NO: 2796574 - RNA, 18 nt, Human
cuugaguauaagaaaugc

SEQ ID NO: 2796575 - RNA, 22 nt, Human
cuugagugggguuaucucugug

SEQ ID NO: 2796576 - RNA, 17 nt, Human
cuugaguucccagaugg

SEQ ID NO: 2796577 - RNA, 23 nt, Human
cuugagugggguuaucucugugu

SEQ ID NO: 2796578 - RNA, 16 nt, Human
cuugaguguaauguuu

SEQ ID NO: 2796579 - RNA, 20 nt, Human
cuugaguguaauguuuguua

SEQ ID NO: 2796580 - RNA, 14 nt, Human
cuugcaauggcagc

SEQ ID NO: 2796581 - RNA, 18 nt, Human
cuugcaagcaugcuugug

SEQ ID NO: 2796582 - RNA, 16 nt, Human
cuugcaagcaugcuug

SEQ ID NO: 2796583 - RNA, 17 nt, Human
cuugcaagcaugcuugu

SEQ ID NO: 2796584 - RNA, 21 nt, Human
cuugcacuaaaguauguaaag

SEQ ID NO: 2796585 - RNA, 21 nt, Human
cuugcacgcgcccuuucuacc

SEQ ID NO: 2796586 - RNA, 22 nt, Human
cuugcacgcgcccuuucuacca

SEQ ID NO: 2796587 - RNA, 13 nt, Human
cuugcagaacugc

SEQ ID NO: 2796588 - RNA, 15 nt, Human
cuugcagaacugcca

SEQ ID NO: 2796589 - RNA, 16 nt, Human
cuugcagaacugccau

SEQ ID NO: 2796590 - RNA, 17 nt, Human
cuugcagaacugccauu

SEQ ID NO: 2796591 - RNA, 18 nt, Human
cuugcagaacugccauua

SEQ ID NO: 2796592 - RNA, 21 nt, Human
cuugaggaaacaacagcuuua

SEQ ID NO: 2796593 - RNA, 14 nt, Human
cuugaggccaggag

SEQ ID NO: 2796594 - RNA, 24 nt, Human
cuugaggcuuagcuuugcucugcc

SEQ ID NO: 2796595 - RNA, 14 nt, Human
cuugagggcccaga

SEQ ID NO: 2796596 - RNA, 16 nt, Human
cuugagggcccagagc

SEQ ID NO: 2796597 - RNA, 17 nt, Human
cuugagggcccagagca

SEQ ID NO: 2796598 - RNA, 18 nt, Human
cuugagggcccagagcag

SEQ ID NO: 2796599 - RNA, 19 nt, Human
cuugagggcccagagcagg

SEQ ID NO: 2796600 - RNA, 15 nt, Human
cuugagguggccucc

SEQ ID NO: 2796601 - RNA, 22 nt, Human
cuugagguggccuccuugcuug

SEQ ID NO: 2796602 - RNA, 21 nt, Human
cuugaggugguaguaaaacac

SEQ ID NO: 2796603 - RNA, 22 nt, Human
cuugagaguaucaggucuccca

SEQ ID NO: 2796604 - RNA, 21 nt, Human
cuugagauguaugaaggcuuu

SEQ ID NO: 2796605 - RNA, 22 nt, Human
cuugagauguaugaaggcuuuu

SEQ ID NO: 2796606 - RNA, 20 nt, Human
cuugaacccgggaggcagag

SEQ ID NO: 2796607 - RNA, 18 nt, Human
cuugaacuccuggccuca

SEQ ID NO: 2796608 - RNA, 17 nt, Human
cuugaacuccuggccuc

SEQ ID NO: 2796609 - RNA, 15 nt, Human
cuugaacuccuggcc

SEQ ID NO: 2796610 - RNA, 14 nt, Human
cuugaacuccuggc

SEQ ID NO: 2796611 - RNA, 16 nt, Human
cuugaacuggguacuu

SEQ ID NO: 2796612 - RNA, 19 nt, Human
cuugaacuccuggccucaa

SEQ ID NO: 2796613 - RNA, 20 nt, Human
cuugaaauuaagaaggcaaa

SEQ ID NO: 2796614 - RNA, 19 nt, Human
cuugaaauuuuaaacuaua

SEQ ID NO: 2796615 - RNA, 14 nt, Human
cuugaacucugggc

SEQ ID NO: 2796616 - RNA, 18 nt, Human
cuugaacucugggcucaa

SEQ ID NO: 2796617 - RNA, 20 nt, Human
cuugaacuggguacuugugg

SEQ ID NO: 2796618 - RNA, 18 nt, Human
cuugaacuggguacuugu

SEQ ID NO: 2796619 - RNA, 24 nt, Human
cuugaacuucaccugcaaagcucu

SEQ ID NO: 2796620 - RNA, 19 nt, Human
cuugaacuuuccuggaugu

SEQ ID NO: 2796621 - RNA, 23 nt, Human
cuugaacuuuccuggaugucuga

SEQ ID NO: 2796622 - RNA, 17 nt, Human
cuugaccaggccugggc

SEQ ID NO: 2796623 - RNA, 15 nt, Human
cuugaccaggccugg

SEQ ID NO: 2796624 - RNA, 14 nt, Human
cuucuuugauaaug

SEQ ID NO: 2796625 - RNA, 23 nt, Human
cuucuuucucucagccuuacauu

SEQ ID NO: 2796626 - RNA, 17 nt, Human
cuucuuugauaauguua

SEQ ID NO: 2796627 - RNA, 19 nt, Human
cuucuuugauaauguuaaa

SEQ ID NO: 2796628 - RNA, 12 nt, Human
cuucuuugaaga

SEQ ID NO: 2796629 - RNA, 13 nt, Human
cuucuuugaagaa

SEQ ID NO: 2796630 - RNA, 14 nt, Human
cuucuuugaagaag

SEQ ID NO: 2796631 - RNA, 20 nt, Human
cugucugacaaccucuuggu

SEQ ID NO: 2796632 - RNA, 15 nt, Human
cugucugagacucac

SEQ ID NO: 2796633 - RNA, 14 nt, Human
cuucuuuauacugu

SEQ ID NO: 2796634 - RNA, 20 nt, Human
cuucuuuauacuguaauuua

SEQ ID NO: 2796635 - RNA, 19 nt, Human
cugucucugaaguacuaac

SEQ ID NO: 2796636 - RNA, 11 nt, Human
cugucucucuc

SEQ ID NO: 2796637 - RNA, 12 nt, Human
cugucucugcuc

SEQ ID NO: 2796638 - RNA, 13 nt, Human
cugucucugcucg

SEQ ID NO: 2796639 - RNA, 17 nt, Human
cugucucugcucgcccu

SEQ ID NO: 2796640 - RNA, 21 nt, Human
cugucucugcucgcccuccuu

SEQ ID NO: 2796641 - RNA, 13 nt, Human
cugucucuggccu

SEQ ID NO: 2796642 - RNA, 15 nt, Human
cugucucuugaaaaa

SEQ ID NO: 2796643 - RNA, 18 nt, Human
cugucucuugaaaaaugc

SEQ ID NO: 2796644 - RNA, 19 nt, Human
cugucucuuuaagggcaug

SEQ ID NO: 2796645 - RNA, 23 nt, Human
cugucucuuuaagggcaugccuu

SEQ ID NO: 2796646 - RNA, 21 nt, Human
cugucugaaccacgcgggggc

SEQ ID NO: 2796647 - RNA, 21 nt, Human
cuugaaauuaagaaggcaaaa

SEQ ID NO: 2796648 - RNA, 17 nt, Human
cuugaaauuauaucugu

SEQ ID NO: 2796649 - RNA, 20 nt, Human
cuugaaauuauaucuguggu

SEQ ID NO: 2796650 - RNA, 21 nt, Human
cuugaaauuauaucugugguc

SEQ ID NO: 2796651 - RNA, 24 nt, Human
cuugaaauuauaucuguggucuuc

SEQ ID NO: 2796652 - RNA, 23 nt, Human
cuucuuuuuauuuucuuuuguaa

SEQ ID NO: 2796653 - RNA, 15 nt, Human
cuucuuuuggcuucc

SEQ ID NO: 2796654 - RNA, 16 nt, Human
cuucuuuugauuaugu

SEQ ID NO: 2796655 - RNA, 13 nt, Human
cuucuuuugcucu

SEQ ID NO: 2796656 - RNA, 13 nt, Human
cuucuuuugauua

SEQ ID NO: 2796657 - RNA, 14 nt, Human
cuucuuuugauuau

SEQ ID NO: 2796658 - RNA, 20 nt, Human
cuucuuuuuauuuucuuuug

SEQ ID NO: 2796659 - RNA, 15 nt, Human
cuucuuuuuauuuuc

SEQ ID NO: 2796660 - RNA, 14 nt, Human
cuucuuuugcucuu

SEQ ID NO: 2796661 - RNA, 14 nt, Human
cuucuuuucucaug

SEQ ID NO: 2796662 - RNA, 15 nt, Human
cuucuuuucuuugua

SEQ ID NO: 2796663 - RNA, 16 nt, Human
cuucuuuucuuuguau

SEQ ID NO: 2796664 - RNA, 19 nt, Human
cuucuuugcuuugcccagc

SEQ ID NO: 2796665 - RNA, 19 nt, Human
cuuuuuagggccaggcagg

SEQ ID NO: 2796666 - RNA, 15 nt, Human
cuuuuucauuuucca

SEQ ID NO: 2796667 - RNA, 17 nt, Human
cuuuuucauuuuccaau

SEQ ID NO: 2796668 - RNA, 18 nt, Human
cuuuuucauuuuccaaua

SEQ ID NO: 2796669 - RNA, 18 nt, Human
cuuuuuccuagccuguuu

SEQ ID NO: 2796670 - RNA, 23 nt, Human
cuuuuuccuagccuguuucuucc

SEQ ID NO: 2796671 - RNA, 12 nt, Human
cuuuuuccuccu

SEQ ID NO: 2796672 - RNA, 13 nt, Human
cuuuuuccagagg

SEQ ID NO: 2796673 - RNA, 12 nt, Human
cuuuuucuaaug

SEQ ID NO: 2796674 - RNA, 13 nt, Human
cuuuuucuaauga

SEQ ID NO: 2796675 - RNA, 20 nt, Human
cuuuuucuaaugaggagaga

SEQ ID NO: 2796676 - RNA, 22 nt, Human
cuuuuucuaaugaggagagaaa

SEQ ID NO: 2796677 - RNA, 21 nt, Human
cuuuuucuccagcugggcucu

SEQ ID NO: 2796678 - RNA, 16 nt, Human
cuuuuuaaccugcaaa

SEQ ID NO: 2796679 - RNA, 13 nt, Human
cuuuuuucaaaau

SEQ ID NO: 2796680 - RNA, 22 nt, Human
cuuuuuucaaaauccaaaaaga

SEQ ID NO: 2796681 - RNA, 14 nt, Human
cuuuuuucaaaauc

SEQ ID NO: 2796682 - RNA, 12 nt, Human
cuuuuuucaaaa

SEQ ID NO: 2796683 - RNA, 15 nt, Human
cuuuuuucacaaauu

SEQ ID NO: 2796684 - RNA, 12 nt, Human
gaaaaacuugug

SEQ ID NO: 2796685 - RNA, 18 nt, Human
cuuuucuaaaagacuucc

SEQ ID NO: 2796686 - RNA, 12 nt, Human
cuuuucuuugua

SEQ ID NO: 2796687 - RNA, 13 nt, Human
cuuuucuuuguau

SEQ ID NO: 2796688 - RNA, 14 nt, Human
cuuuucuuuguauc

SEQ ID NO: 2796689 - RNA, 15 nt, Human
cuuuucuuuguuaua

SEQ ID NO: 2796690 - RNA, 13 nt, Human
cuuuucuuuuguu

SEQ ID NO: 2796691 - RNA, 14 nt, Human
cuuuucuuuuguua

SEQ ID NO: 2796692 - RNA, 15 nt, Human
cuuuucuuuuguuac

SEQ ID NO: 2796693 - RNA, 16 nt, Human
cuuuucuuuuguuacu

SEQ ID NO: 2796694 - RNA, 17 nt, Human
cuuuucuuuuguuacug

SEQ ID NO: 2796695 - RNA, 18 nt, Human
cuuuucuuuuguuacugu

SEQ ID NO: 2796696 - RNA, 19 nt, Human
cuuuucuuuuguuacuguu

SEQ ID NO: 2796697 - RNA, 20 nt, Human
cuuuucuuuuguuacuguuc

SEQ ID NO: 2796698 - RNA, 21 nt, Human
cuuuucuuuuguuacuguucu

SEQ ID NO: 2796699 - RNA, 14 nt, Human
cuuuuuaauuguug

SEQ ID NO: 2796700 - RNA, 15 nt, Human
cuuuuuaauuguugu

SEQ ID NO: 2796701 - RNA, 16 nt, Human
cuuuuuaauuguuguu

SEQ ID NO: 2796702 - RNA, 22 nt, Human
cuuuuuaauuguuguuucuuuc

SEQ ID NO: 2796703 - RNA, 12 nt, Human
cuuuuuaguuua

SEQ ID NO: 2796704 - RNA, 21 nt, Human
cuuuuuaguuuacccgguuuc

SEQ ID NO: 2796705 - RNA, 23 nt, Human
cuuuuuaauuguuguuucuuucu

SEQ ID NO: 2796706 - RNA, 11 nt, Human
cuuuuuacaua

SEQ ID NO: 2796707 - RNA, 18 nt, Human
cuuuuuacauaacugccu

SEQ ID NO: 2796708 - RNA, 19 nt, Human
cuuuuuacauaacugccuu

SEQ ID NO: 2796709 - RNA, 21 nt, Human
cuuuuuacauaacugccuuga

SEQ ID NO: 2796710 - RNA, 22 nt, Human
cuuuuuacauaacugccuugaa

SEQ ID NO: 2796711 - RNA, 15 nt, Human
cuuuuuaaguaaugu

SEQ ID NO: 2796712 - RNA, 18 nt, Human
cuuuuuaaguaaugugga

SEQ ID NO: 2796713 - RNA, 19 nt, Human
cuuuuuaaguaauguggaa

SEQ ID NO: 2796714 - RNA, 19 nt, Human
cuuuuuaaaguguuucugu

SEQ ID NO: 2796715 - RNA, 23 nt, Human
cuuuuuaaaguguuucuguuauu

SEQ ID NO: 2796716 - RNA, 18 nt, Human
cuuuugcaagguuccaca

SEQ ID NO: 2796717 - RNA, 19 nt, Human
cuuuugcaagguuccacag

SEQ ID NO: 2796718 - RNA, 20 nt, Human
cuuuugcaagguuccacaga

SEQ ID NO: 2796719 - RNA, 14 nt, Human
cuuuugcagaagag

SEQ ID NO: 2796720 - RNA, 18 nt, Human
cuuuugcagaagagggug

SEQ ID NO: 2796721 - RNA, 23 nt, Human
cuuuugcagaagaggguguguuu

SEQ ID NO: 2796722 - RNA, 12 nt, Human
cuuuggaagcag

SEQ ID NO: 2796723 - RNA, 15 nt, Human
cuuuggagacuuucu

SEQ ID NO: 2796724 - RNA, 20 nt, Human
cuuuggagacuuucuuuaaa

SEQ ID NO: 2796725 - RNA, 16 nt, Human
cuuuggagaucaagga

SEQ ID NO: 2796726 - RNA, 23 nt, Human
cuuuggagaucaaggagaggagg

SEQ ID NO: 2796727 - RNA, 18 nt, Human
cuuuggagaugcugaggg

SEQ ID NO: 2796728 - RNA, 14 nt, Human
cuuuggaguccccu

SEQ ID NO: 2796729 - RNA, 16 nt, Human
cuuuggaguccccuca

SEQ ID NO: 2796730 - RNA, 18 nt, Human
cuuuggaguccccucacc

SEQ ID NO: 2796731 - RNA, 22 nt, Human
cuuuggaguccccucaccuccu

SEQ ID NO: 2796732 - RNA, 18 nt, Human
cuuuuaaaacacuuccau

SEQ ID NO: 2796733 - RNA, 12 nt, Human
cuuuuaaacaca

SEQ ID NO: 2796734 - RNA, 13 nt, Human
cuuuuaaacacau

SEQ ID NO: 2796735 - RNA, 11 nt, Human
cuuuuaaagug

SEQ ID NO: 2796736 - RNA, 13 nt, Human
cuuuuaaaguguu

SEQ ID NO: 2796737 - RNA, 17 nt, Human
cuuuuaaaguguuacuu

SEQ ID NO: 2796738 - RNA, 20 nt, Human
cuuuuaaaguguuacuuuuu

SEQ ID NO: 2796739 - RNA, 16 nt, Human
cuuuuaaaguguuuca

SEQ ID NO: 2796740 - RNA, 17 nt, Human
cuuuuaaaguguuucag

SEQ ID NO: 2796741 - RNA, 19 nt, Human
cuuuuaaaguguuucagcu

SEQ ID NO: 2796742 - RNA, 14 nt, Human
cuuuuaacuucuuu

SEQ ID NO: 2796743 - RNA, 15 nt, Human
cuuuuaacuucuuuc

SEQ ID NO: 2796744 - RNA, 17 nt, Human
cuuuuaacuucuuucua

SEQ ID NO: 2796745 - RNA, 16 nt, Human
cuuuuaaguaaggucc

SEQ ID NO: 2796746 - RNA, 14 nt, Human
cuuuuaaucagaca

SEQ ID NO: 2796747 - RNA, 14 nt, Human
cuuuuaacugugca

SEQ ID NO: 2796748 - RNA, 15 nt, Human
cuuuuaacugugcaa

SEQ ID NO: 2796749 - RNA, 10 nt, Human
cuuuuaacau

SEQ ID NO: 2796750 - RNA, 12 nt, Human
cuuuuaacauuu

SEQ ID NO: 2796751 - RNA, 13 nt, Human
cuuuuaacauuuu

SEQ ID NO: 2796752 - RNA, 14 nt, Human
cuuuuaacauuuug

SEQ ID NO: 2796753 - RNA, 15 nt, Human
cuuuuaacauuuugu

SEQ ID NO: 2796754 - RNA, 18 nt, Human
cuuuuaacauuuuguucu

SEQ ID NO: 2796755 - RNA, 20 nt, Human
cuuuuaacauuuuguucuua

SEQ ID NO: 2796756 - RNA, 21 nt, Human
cuuuuaacauuuuguucuuac

SEQ ID NO: 2796757 - RNA, 16 nt, Human
cuuuuaaccaaacaau

SEQ ID NO: 2796758 - RNA, 15 nt, Human
cuuuuaaccaucuga

SEQ ID NO: 2796759 - RNA, 16 nt, Human
cuuuuaaccaucugau

SEQ ID NO: 2796760 - RNA, 17 nt, Human
cuuuuaaccaucugaua

SEQ ID NO: 2796761 - RNA, 18 nt, Human
cuuuuaaccaucugauau

SEQ ID NO: 2796762 - RNA, 21 nt, Human
cuuuuaaccucuuuaaguauu

SEQ ID NO: 2796763 - RNA, 16 nt, Human
cuuuuccuuugugguu

SEQ ID NO: 2796764 - RNA, 18 nt, Human
cuuuuccucucucccgga

SEQ ID NO: 2796765 - RNA, 19 nt, Human
cuuuuccugauaaagcaca

SEQ ID NO: 2796766 - RNA, 22 nt, Human
cuuuuccugauaaagcacagcu

SEQ ID NO: 2796767 - RNA, 16 nt, Human
cuuuuccuguuguauu

SEQ ID NO: 2796768 - RNA, 15 nt, Human
cuuuucaaugacauu

SEQ ID NO: 2796769 - RNA, 14 nt, Human
cuuuucccuucuuu

SEQ ID NO: 2796770 - RNA, 16 nt, Human
cuuuuccuauuuguuu

SEQ ID NO: 2796771 - RNA, 15 nt, Human
cuuuucccuugcuuc

SEQ ID NO: 2796772 - RNA, 16 nt, Human
cuuuuccucucucccg

SEQ ID NO: 2796773 - RNA, 12 nt, Human
cuuuucacugcu

SEQ ID NO: 2796774 - RNA, 16 nt, Human
cuuuucaccuccuuca

SEQ ID NO: 2796775 - RNA, 18 nt, Human
cuuuucaccuccuucaau

SEQ ID NO: 2796776 - RNA, 19 nt, Human
cuuuucaccuccuucaauu

SEQ ID NO: 2796777 - RNA, 12 nt, Human
cuuuucaccuuu

SEQ ID NO: 2796778 - RNA, 21 nt, Human
cuuuucaccuuuacuuuagaa

SEQ ID NO: 2796779 - RNA, 20 nt, Human
cuuuucacauagcugucuag

SEQ ID NO: 2796780 - RNA, 15 nt, Human
cuuuuaaugcuucau

SEQ ID NO: 2796781 - RNA, 17 nt, Human
cuuuuaaugcuucauuc

SEQ ID NO: 2796782 - RNA, 23 nt, Human
cuuuuaaugcuucauucaauauu

SEQ ID NO: 2796783 - RNA, 20 nt, Human
cuuuuaauuaaauaaaagcu

SEQ ID NO: 2796784 - RNA, 22 nt, Human
cuuuuaauuaaauaaaagcugg

SEQ ID NO: 2796785 - RNA, 21 nt, Human
cuuguggacacagcucuucuc

SEQ ID NO: 2796786 - RNA, 18 nt, Human
cuugugucucugugcuuu

SEQ ID NO: 2796787 - RNA, 17 nt, Human
cuugugucucugugcuu

SEQ ID NO: 2796788 - RNA, 15 nt, Human
cuugugucucugugc

SEQ ID NO: 2796789 - RNA, 14 nt, Human
cuugucaugugaca

SEQ ID NO: 2796790 - RNA, 14 nt, Human
cuugugugcaaaag

SEQ ID NO: 2796791 - RNA, 15 nt, Human
cuugugucuguacac

SEQ ID NO: 2796792 - RNA, 18 nt, Human
cuugugucuguacacgug

SEQ ID NO: 2796793 - RNA, 13 nt, Human
cuugugucugcgu

SEQ ID NO: 2796794 - RNA, 21 nt, Human
cuugugucucugugcuuuuaa

SEQ ID NO: 2796795 - RNA, 12 nt, Human
cuugugucugua

SEQ ID NO: 2796796 - RNA, 14 nt, Human
cuugugucuguaca

SEQ ID NO: 2796797 - RNA, 21 nt, Human
cuuguguguuccaaguuucca

SEQ ID NO: 2796798 - RNA, 23 nt, Human
cuuuauuuuuuaaguauuuauau

SEQ ID NO: 2796799 - RNA, 22 nt, Human
cuuuauuuuuuaaguauuuaua

SEQ ID NO: 2796800 - RNA, 21 nt, Human
cuuuauuuuuuaaguauuuau

SEQ ID NO: 2796801 - RNA, 18 nt, Human
cuuuauuuuuuaaguauu

SEQ ID NO: 2796802 - RNA, 15 nt, Human
cuuucaaauuucaca

SEQ ID NO: 2796803 - RNA, 14 nt, Human
cuuucaaauuucac

SEQ ID NO: 2796804 - RNA, 14 nt, Human
cuuucaacuugcau

SEQ ID NO: 2796805 - RNA, 19 nt, Human
cuuucaaaauuaaaucugu

SEQ ID NO: 2796806 - RNA, 11 nt, Human
cuuucaaauuu

SEQ ID NO: 2796807 - RNA, 14 nt, Human
cuuucaaauuuaga

SEQ ID NO: 2796808 - RNA, 19 nt, Human
cuuucaaauuuagaaacua

SEQ ID NO: 2796809 - RNA, 21 nt, Human
cuuucaaauuuagaaacuaau

SEQ ID NO: 2796810 - RNA, 13 nt, Human
cuuucaaaucggu

SEQ ID NO: 2796811 - RNA, 13 nt, Human
cuuucaagaauga

SEQ ID NO: 2796812 - RNA, 14 nt, Human
cuuucaagugccuu

SEQ ID NO: 2796813 - RNA, 23 nt, Human
cuuucaagugccuuucugcaguu

SEQ ID NO: 2796814 - RNA, 17 nt, Human
cuuucauccugacucug

SEQ ID NO: 2796815 - RNA, 18 nt, Human
cuuucauccugacucugc

SEQ ID NO: 2796816 - RNA, 19 nt, Human
cuuucauccugacucugcc

SEQ ID NO: 2796817 - RNA, 20 nt, Human
cuuucauccugacucugccc

SEQ ID NO: 2796818 - RNA, 21 nt, Human
cuuucauccugacucugcccc

SEQ ID NO: 2796819 - RNA, 22 nt, Human
cuuucauccugacucugccccc

SEQ ID NO: 2796820 - RNA, 16 nt, Human
cuuucauccuugacua

SEQ ID NO: 2796821 - RNA, 22 nt, Human
cuuucaugugugccaaggcuga

SEQ ID NO: 2796822 - RNA, 14 nt, Human
cuuuccacuucuuc

SEQ ID NO: 2796823 - RNA, 17 nt, Human
cuuuccacuucuuccuu

SEQ ID NO: 2796824 - RNA, 20 nt, Human
cuuuccacuucuuccuuucu

SEQ ID NO: 2796825 - RNA, 21 nt, Human
cuuuccaaaggccauggagag

SEQ ID NO: 2796826 - RNA, 20 nt, Human
cuuuccccagcaucacuccc

SEQ ID NO: 2796827 - RNA, 21 nt, Human
cuuuccccagcaucacucccc

SEQ ID NO: 2796828 - RNA, 22 nt, Human
cuuuccccagcaucacucccca

SEQ ID NO: 2796829 - RNA, 13 nt, Human
cuuuccccagccc

SEQ ID NO: 2796830 - RNA, 14 nt, Human
cuuuccccagccca

SEQ ID NO: 2796831 - RNA, 15 nt, Human
cuuuccccagcccag

SEQ ID NO: 2796832 - RNA, 16 nt, Human
cuuuccccagcccagg

SEQ ID NO: 2796833 - RNA, 17 nt, Human
cuuuccccagcccaggg

SEQ ID NO: 2796834 - RNA, 13 nt, Human
cuuuccccauucc

SEQ ID NO: 2796835 - RNA, 19 nt, Human
cuuuccccauuccuaccca

SEQ ID NO: 2796836 - RNA, 21 nt, Human
cuuuccccaugucucgacuca

SEQ ID NO: 2796837 - RNA, 20 nt, Human
cuuuccccaugucucgacuc

SEQ ID NO: 2796838 - RNA, 15 nt, Human
cuuuccccaugucuc

SEQ ID NO: 2796839 - RNA, 13 nt, Human
cuuucccuugcuu

SEQ ID NO: 2796840 - RNA, 16 nt, Human
cuuucccuugcuuuuc

SEQ ID NO: 2796841 - RNA, 19 nt, Human
cuuucccuugcuuuucccu

SEQ ID NO: 2796842 - RNA, 21 nt, Human
cuuucccuugcuuuucccucu

SEQ ID NO: 2796843 - RNA, 22 nt, Human
cuuucccuugcuuuucccucuu

SEQ ID NO: 2796844 - RNA, 23 nt, Human
cuuucccuugcuuuucccucuuu

SEQ ID NO: 2796845 - RNA, 21 nt, Human
cuuuccgguguuuaagacauu

SEQ ID NO: 2796846 - RNA, 21 nt, Human
cuuuccgucaacguuguacug

SEQ ID NO: 2796847 - RNA, 22 nt, Human
cuuuccgucaacguuguacugu

SEQ ID NO: 2796848 - RNA, 16 nt, Human
cuuuccuaagaccugg

SEQ ID NO: 2796849 - RNA, 20 nt, Human
cuuuccuaagaccugggguu

SEQ ID NO: 2796850 - RNA, 15 nt, Human
cuuucuguuggugua

SEQ ID NO: 2796851 - RNA, 21 nt, Human
cuuucuguuggauuccaugcu

SEQ ID NO: 2796852 - RNA, 22 nt, Human
cuuucuuacaaggaagguggug

SEQ ID NO: 2796853 - RNA, 21 nt, Human
cuuucuuauaauacucuguug

SEQ ID NO: 2796854 - RNA, 22 nt, Human
cuuucuuauccuagcacaugcu

SEQ ID NO: 2796855 - RNA, 17 nt, Human
cuuucuuucuaacucca

SEQ ID NO: 2796856 - RNA, 12 nt, Human
cuuucuuugauu

SEQ ID NO: 2796857 - RNA, 17 nt, Human
cuuucuuugauucuccu

SEQ ID NO: 2796858 - RNA, 19 nt, Human
cuuugaaauagucugugug

SEQ ID NO: 2796859 - RNA, 22 nt, Human
cuuugaaauaccucauguuuau

SEQ ID NO: 2796860 - RNA, 11 nt, Human
cuuucuuuucu

SEQ ID NO: 2796861 - RNA, 21 nt, Human
cuuugaaauagucugugugaa

SEQ ID NO: 2796862 - RNA, 22 nt, Human
cuuugaacuaaugauaaaguaa

SEQ ID NO: 2796863 - RNA, 16 nt, Human
cuuugaagaaggugga

SEQ ID NO: 2796864 - RNA, 14 nt, Human
cuuugaagcaguug

SEQ ID NO: 2796865 - RNA, 16 nt, Human
cuuugaaggggccuca

SEQ ID NO: 2796866 - RNA, 19 nt, Human
cuuugaagcaguuguguca

SEQ ID NO: 2796867 - RNA, 13 nt, Human
cuuugaagccuca

SEQ ID NO: 2796868 - RNA, 16 nt, Human
cuuugaagccucagcu

SEQ ID NO: 2796869 - RNA, 17 nt, Human
cuuugaagcugaaaaua

SEQ ID NO: 2796870 - RNA, 19 nt, Human
cuuugaagcugaaaauaua

SEQ ID NO: 2796871 - RNA, 23 nt, Human
cuuugaagcugaaaauauaaaac

SEQ ID NO: 2796872 - RNA, 15 nt, Human
cuuugcagacaggca

SEQ ID NO: 2796873 - RNA, 14 nt, Human
cuuugcagacaggc

SEQ ID NO: 2796874 - RNA, 13 nt, Human
cuuugaauguuaa

SEQ ID NO: 2796875 - RNA, 14 nt, Human
cuuugaauguuaau

SEQ ID NO: 2796876 - RNA, 17 nt, Human
cuuugaauguuaauuuu

SEQ ID NO: 2796877 - RNA, 13 nt, Human
cuuugaaugcuuu

SEQ ID NO: 2796878 - RNA, 16 nt, Human
cuuugaaugcuuuuug

SEQ ID NO: 2796879 - RNA, 23 nt, Human
cuuugaaugcuuuuugaauguua

SEQ ID NO: 2796880 - RNA, 18 nt, Human
cuuugaaggggccucacc

SEQ ID NO: 2796881 - RNA, 13 nt, Human
gaccugcaggcca

SEQ ID NO: 2796882 - RNA, 20 nt, Human
gaccugcacuggggagcccg

SEQ ID NO: 2796883 - RNA, 16 nt, Human
gaccugcacuggggag

SEQ ID NO: 2796884 - RNA, 20 nt, Human
gaccugcaggccaagagcag

SEQ ID NO: 2796885 - RNA, 21 nt, Human
gaccugccccuccucucugcc

SEQ ID NO: 2796886 - RNA, 21 nt, Human
gaccugccccgcccagcugca

SEQ ID NO: 2796887 - RNA, 13 nt, Human
gaccugccuccug

SEQ ID NO: 2796888 - RNA, 14 nt, Human
gaccugccuccugc

SEQ ID NO: 2796889 - RNA, 15 nt, Human
gaccugccucggccu

SEQ ID NO: 2796890 - RNA, 16 nt, Human
gaccugccuccugccu

SEQ ID NO: 2796891 - RNA, 19 nt, Human
gaccugccuccugccugcc

SEQ ID NO: 2796892 - RNA, 20 nt, Human
gaccugccuccugccugccc

SEQ ID NO: 2796893 - RNA, 22 nt, Human
gaccugccuccugccugccccu

SEQ ID NO: 2796894 - RNA, 14 nt, Human
gaccugaucacuag

SEQ ID NO: 2796895 - RNA, 17 nt, Human
gaccucaggcacuagcc

SEQ ID NO: 2796896 - RNA, 18 nt, Human
gaccucaggcacuagccu

SEQ ID NO: 2796897 - RNA, 19 nt, Human
gaccucaggcacuagccuu

SEQ ID NO: 2796898 - RNA, 21 nt, Human
gaccucaggcacuagccuuug

SEQ ID NO: 2796899 - RNA, 16 nt, Human
gaccucacugugaccu

SEQ ID NO: 2796900 - RNA, 22 nt, Human
gaccguuauaaagugugccaca

SEQ ID NO: 2796901 - RNA, 21 nt, Human
gaccucacagugacccuuccc

SEQ ID NO: 2796902 - RNA, 22 nt, Human
gaccucacagugacccuuccca

SEQ ID NO: 2796903 - RNA, 13 nt, Human
gaccguggcccug

SEQ ID NO: 2796904 - RNA, 17 nt, Human
gaccguggcccugcccu

SEQ ID NO: 2796905 - RNA, 13 nt, Human
gaccguccucacc

SEQ ID NO: 2796906 - RNA, 15 nt, Human
gacccuuccagacau

SEQ ID NO: 2796907 - RNA, 17 nt, Human
gacccuuccagacauac

SEQ ID NO: 2796908 - RNA, 20 nt, Human
gacccuuccagacauacgaa

SEQ ID NO: 2796909 - RNA, 21 nt, Human
gacccuucccaaucagcacug

SEQ ID NO: 2796910 - RNA, 22 nt, Human
gacccuucccaaucagcacuga

SEQ ID NO: 2796911 - RNA, 23 nt, Human
gacccuucccaaucagcacugaa

SEQ ID NO: 2796912 - RNA, 12 nt, Human
gacccugucucu

SEQ ID NO: 2796913 - RNA, 14 nt, Human
gaccaacugucacu

SEQ ID NO: 2796914 - RNA, 12 nt, Human
gaccaacugugu

SEQ ID NO: 2796915 - RNA, 13 nt, Human
gaccaacuguguu

SEQ ID NO: 2796916 - RNA, 15 nt, Human
gaccaacuguguugu

SEQ ID NO: 2796917 - RNA, 18 nt, Human
gaccaacuguguuguauu

SEQ ID NO: 2796918 - RNA, 19 nt, Human
gaccaacuguguuguauua

SEQ ID NO: 2796919 - RNA, 21 nt, Human
gaccaacuguguuguauuaac

SEQ ID NO: 2796920 - RNA, 22 nt, Human
gaccaacuguguuguauuaaca

SEQ ID NO: 2796921 - RNA, 19 nt, Human
gaccaacugggcccaagac

SEQ ID NO: 2796922 - RNA, 14 nt, Human
gaccaacugggccc

SEQ ID NO: 2796923 - RNA, 13 nt, Human
gaccaacugggcc

SEQ ID NO: 2796924 - RNA, 20 nt, Human
gaccaacguuacucagggcu

SEQ ID NO: 2796925 - RNA, 21 nt, Human
gaccaacguuacucagggcuc

SEQ ID NO: 2796926 - RNA, 12 nt, Human
gacccacugcuu

SEQ ID NO: 2796927 - RNA, 18 nt, Human
gacccacguggcugcgug

SEQ ID NO: 2796928 - RNA, 16 nt, Human
gacccaccucaccccg

SEQ ID NO: 2796929 - RNA, 11 nt, Human
gacccacugcu

SEQ ID NO: 2796930 - RNA, 23 nt, Human
gacccacagacugguuuugcaac

SEQ ID NO: 2796931 - RNA, 13 nt, Human
gacccacauguaa

SEQ ID NO: 2796932 - RNA, 15 nt, Human
gacccaccccaccug

SEQ ID NO: 2796933 - RNA, 16 nt, Human
gacccaccccaccugc

SEQ ID NO: 2796934 - RNA, 17 nt, Human
gacccaccccaccugca

SEQ ID NO: 2796935 - RNA, 18 nt, Human
gacccaccccaccugcag

SEQ ID NO: 2796936 - RNA, 13 nt, Human
gacccagggggag

SEQ ID NO: 2796937 - RNA, 22 nt, Human
gacccagggaacagccacuccc

SEQ ID NO: 2796938 - RNA, 20 nt, Human
gacccagggaacagccacuc

SEQ ID NO: 2796939 - RNA, 13 nt, Human
gacccaggcuggg

SEQ ID NO: 2796940 - RNA, 14 nt, Human
gacccaggcugggc

SEQ ID NO: 2796941 - RNA, 15 nt, Human
gacccaggcugggca

SEQ ID NO: 2796942 - RNA, 15 nt, Human
gacccagggaacagc

SEQ ID NO: 2796943 - RNA, 19 nt, Human
gacccagggaacagccacu

SEQ ID NO: 2796944 - RNA, 17 nt, Human
gacccagggaacagcca

SEQ ID NO: 2796945 - RNA, 13 nt, Human
gacccaggacucc

SEQ ID NO: 2796946 - RNA, 20 nt, Human
gacccaggacuccuccccac

SEQ ID NO: 2796947 - RNA, 12 nt, Human
gacccaggcucc

SEQ ID NO: 2796948 - RNA, 16 nt, Human
gacccaggcuccgccc

SEQ ID NO: 2796949 - RNA, 17 nt, Human
gacccaggcuccgcccu

SEQ ID NO: 2796950 - RNA, 18 nt, Human
gacccaggcuccgcccuu

SEQ ID NO: 2796951 - RNA, 23 nt, Human
gacccaggcuccgcccuuagucc

SEQ ID NO: 2796952 - RNA, 23 nt, Human
gaccccucauagcccucacccug

SEQ ID NO: 2796953 - RNA, 13 nt, Human
gaccccuccaugu

SEQ ID NO: 2796954 - RNA, 22 nt, Human
gaccccgguggcggccccagca

SEQ ID NO: 2796955 - RNA, 14 nt, Human
gaccccuaguuccc

SEQ ID NO: 2796956 - RNA, 17 nt, Human
gaccccuaguucccucu

SEQ ID NO: 2796957 - RNA, 18 nt, Human
gaccccuaguucccucug

SEQ ID NO: 2796958 - RNA, 21 nt, Human
gaccccuaguucccucugcuc

SEQ ID NO: 2796959 - RNA, 22 nt, Human
gaccccuaguucccucugcuca

SEQ ID NO: 2796960 - RNA, 21 nt, Human
gaccccuaugaaguaaagaac

SEQ ID NO: 2796961 - RNA, 19 nt, Human
gaccccggcuuccuuuccc

SEQ ID NO: 2796962 - RNA, 22 nt, Human
gaccccucauagcccucacccu

SEQ ID NO: 2796963 - RNA, 21 nt, Human
gaccccagcugugagccuugg

SEQ ID NO: 2796964 - RNA, 18 nt, Human
gaccccagcugugagccu

SEQ ID NO: 2796965 - RNA, 22 nt, Human
gaccccagcugugagccuuggc

SEQ ID NO: 2796966 - RNA, 13 nt, Human
gaccccaggccca

SEQ ID NO: 2796967 - RNA, 15 nt, Human
gaccccaggcccacu

SEQ ID NO: 2796968 - RNA, 17 nt, Human
gaccccaggcccacuca

SEQ ID NO: 2796969 - RNA, 18 nt, Human
gaccccaggcccacucag

SEQ ID NO: 2796970 - RNA, 19 nt, Human
gaccccaggcccacucagg

SEQ ID NO: 2796971 - RNA, 17 nt, Human
gaccccaggcuggacau

SEQ ID NO: 2796972 - RNA, 17 nt, Human
gacuccaagaacaauug

SEQ ID NO: 2796973 - RNA, 20 nt, Human
gacucauucccuagaucuuu

SEQ ID NO: 2796974 - RNA, 18 nt, Human
gacuccacgauccugcca

SEQ ID NO: 2796975 - RNA, 19 nt, Human
gacuccacgauccugccac

SEQ ID NO: 2796976 - RNA, 20 nt, Human
gacuccacgauccugccacc

SEQ ID NO: 2796977 - RNA, 23 nt, Human
gacuccacgauccugccacccug

SEQ ID NO: 2796978 - RNA, 15 nt, Human
gacucagguugucug

SEQ ID NO: 2796979 - RNA, 15 nt, Human
gacucaguggggagg

SEQ ID NO: 2796980 - RNA, 22 nt, Human
gacucaucaaucaaauaaguau

SEQ ID NO: 2796981 - RNA, 14 nt, Human
gacucaucauuugu

SEQ ID NO: 2796982 - RNA, 15 nt, Human
gacucauccugaaca

SEQ ID NO: 2796983 - RNA, 17 nt, Human
gacucauccugaacagc

SEQ ID NO: 2796984 - RNA, 19 nt, Human
gacucauccugaacagcau

SEQ ID NO: 2796985 - RNA, 20 nt, Human
gacucauccugaacagcaug

SEQ ID NO: 2796986 - RNA, 22 nt, Human
gacucaugaggaggggcccccc

SEQ ID NO: 2796987 - RNA, 18 nt, Human
gacucaugguguguuaca

SEQ ID NO: 2796988 - RNA, 19 nt, Human
gacucaugguguguuacac

SEQ ID NO: 2796989 - RNA, 18 nt, Human
gacucaugaggaggggcc

SEQ ID NO: 2796990 - RNA, 15 nt, Human
gacucaugaggaggg

SEQ ID NO: 2796991 - RNA, 13 nt, Human
gacucaugaggag

SEQ ID NO: 2796992 - RNA, 24 nt, Human
gacucccuccucaccucuggacug

SEQ ID NO: 2796993 - RNA, 22 nt, Human
gacucccuuaaaauagaaauaa

SEQ ID NO: 2796994 - RNA, 23 nt, Human
gacucccuccucaccucuggacu

SEQ ID NO: 2796995 - RNA, 20 nt, Human
gacucccuccucaccucugg

SEQ ID NO: 2796996 - RNA, 17 nt, Human
gacucccaaguuuccau

SEQ ID NO: 2796997 - RNA, 21 nt, Human
gacucccaaguuuccauagca

SEQ ID NO: 2796998 - RNA, 22 nt, Human
gacucccaaguuuccauagcaa

SEQ ID NO: 2796999 - RNA, 13 nt, Human
gacucccaugaag

SEQ ID NO: 2797000 - RNA, 14 nt, Human
gacucccaugaagc

SEQ ID NO: 2797001 - RNA, 15 nt, Human
gacucccaugaagcc

SEQ ID NO: 2797002 - RNA, 16 nt, Human
gacucccaugaagccu

SEQ ID NO: 2797003 - RNA, 17 nt, Human
gacucccaugaagccuu

SEQ ID NO: 2797004 - RNA, 18 nt, Human
gacucccaugaagccuuu

SEQ ID NO: 2797005 - RNA, 21 nt, Human
gacucccaugaagccuuuuga

SEQ ID NO: 2797006 - RNA, 12 nt, Human
gacuccaucucu

SEQ ID NO: 2797007 - RNA, 17 nt, Human
gacuccaucucucaucc

SEQ ID NO: 2797008 - RNA, 21 nt, Human
gacuccaucucucauccucca

SEQ ID NO: 2797009 - RNA, 19 nt, Human
gacucccuccucaccucug

SEQ ID NO: 2797010 - RNA, 16 nt, Human
gacucccuccucaccu

SEQ ID NO: 2797011 - RNA, 14 nt, Human
gacucccuccucac

SEQ ID NO: 2797012 - RNA, 13 nt, Human
gacucccuccuca

SEQ ID NO: 2797013 - RNA, 12 nt, Human
gacucccuccuc

SEQ ID NO: 2797014 - RNA, 21 nt, Human
gacucagggccaugccugccc

SEQ ID NO: 2797015 - RNA, 22 nt, Human
gacucagggccaugccugcccc

SEQ ID NO: 2797016 - RNA, 19 nt, Human
gacucagggccaugccugc

SEQ ID NO: 2797017 - RNA, 20 nt, Human
gacucagggccaugccugcc

SEQ ID NO: 2797018 - RNA, 22 nt, Human
gacucaggauuuaaaaacugga

SEQ ID NO: 2797019 - RNA, 23 nt, Human
gacucaggauuuaaaaacuggaa

SEQ ID NO: 2797020 - RNA, 16 nt, Human
gacuagacguucauuu

SEQ ID NO: 2797021 - RNA, 23 nt, Human
gacuagaagggccaguccugccu

SEQ ID NO: 2797022 - RNA, 22 nt, Human
gacuaauuaggguacauuuaua

SEQ ID NO: 2797023 - RNA, 14 nt, Human
gacguguuuguguu

SEQ ID NO: 2797024 - RNA, 20 nt, Human
gacguucauuugugugcuca

SEQ ID NO: 2797025 - RNA, 15 nt, Human
gacuacaaaaaugaa

SEQ ID NO: 2797026 - RNA, 18 nt, Human
gacuaauuuaaaaaauaa

SEQ ID NO: 2797027 - RNA, 22 nt, Human
gacuaauuucaaaaugcuuuuu

SEQ ID NO: 2797028 - RNA, 13 nt, Human
gacuaauuucaaa

SEQ ID NO: 2797029 - RNA, 12 nt, Human
gacuaauuucaa

SEQ ID NO: 2797030 - RNA, 12 nt, Human
gacuacaggcac

SEQ ID NO: 2797031 - RNA, 14 nt, Human
gacuacuauuuucu

SEQ ID NO: 2797032 - RNA, 13 nt, Human
gacuacuuagcau

SEQ ID NO: 2797033 - RNA, 14 nt, Human
gacuacuuagcauc

SEQ ID NO: 2797034 - RNA, 21 nt, Human
gacuacuuagcauccuaagaa

SEQ ID NO: 2797035 - RNA, 15 nt, Human
gacuagaagggccag

SEQ ID NO: 2797036 - RNA, 23 nt, Human
gaccuugaacuggguacuugugg

SEQ ID NO: 2797037 - RNA, 15 nt, Human
gaccuggauaacuua

SEQ ID NO: 2797038 - RNA, 17 nt, Human
gaccuggauaacuuagg

SEQ ID NO: 2797039 - RNA, 16 nt, Human
gaccuggcaaggacac

SEQ ID NO: 2797040 - RNA, 13 nt, Human
gaccugcuuuuug

SEQ ID NO: 2797041 - RNA, 14 nt, Human
gaccugcuuuuuga

SEQ ID NO: 2797042 - RNA, 16 nt, Human
gaccugcuuuuugaaa

SEQ ID NO: 2797043 - RNA, 17 nt, Human
gaccugcuuuuugaaau

SEQ ID NO: 2797044 - RNA, 18 nt, Human
gaccugcuuuuugaaaug

SEQ ID NO: 2797045 - RNA, 19 nt, Human
gaccugcuuuuugaaauga

SEQ ID NO: 2797046 - RNA, 20 nt, Human
gaccugcuuuuugaaaugaa

SEQ ID NO: 2797047 - RNA, 19 nt, Human
gaccugccucggccuccca

SEQ ID NO: 2797048 - RNA, 23 nt, Human
gaccugccuccugccugccccuc

SEQ ID NO: 2797049 - RNA, 18 nt, Human
gaccugccucucacacac

SEQ ID NO: 2797050 - RNA, 20 nt, Human
gaccugccucucacacacau

SEQ ID NO: 2797051 - RNA, 22 nt, Human
gaccugccucucacacacauag

SEQ ID NO: 2797052 - RNA, 12 nt, Human
gaccugccugua

SEQ ID NO: 2797053 - RNA, 15 nt, Human
gaccugcuccgcugc

SEQ ID NO: 2797054 - RNA, 17 nt, Human
gaccugcuccgcugcuc

SEQ ID NO: 2797055 - RNA, 18 nt, Human
gaccugcuccgcugcucc

SEQ ID NO: 2797056 - RNA, 19 nt, Human
gaccugcuccgcugcuccu

SEQ ID NO: 2797057 - RNA, 21 nt, Human
gaccugcuccgcugcuccuug

SEQ ID NO: 2797058 - RNA, 23 nt, Human
gaccugcuccgcugcuccuuggc

SEQ ID NO: 2797059 - RNA, 16 nt, Human
gaccuuggagagacac

SEQ ID NO: 2797060 - RNA, 18 nt, Human
gaccuuggagagacacag

SEQ ID NO: 2797061 - RNA, 13 nt, Human
gaccuugggccaa

SEQ ID NO: 2797062 - RNA, 21 nt, Human
gaccuugggccaaauccgcuc

SEQ ID NO: 2797063 - RNA, 21 nt, Human
gacgaacauccaaccuuccca

SEQ ID NO: 2797064 - RNA, 21 nt, Human
gaccuuugucaucuuucuucu

SEQ ID NO: 2797065 - RNA, 13 nt, Human
gaccuuuuaaagu

SEQ ID NO: 2797066 - RNA, 14 nt, Human
gaccuuuuaaagug

SEQ ID NO: 2797067 - RNA, 20 nt, Human
gaccuuuuaaaguguuucag

SEQ ID NO: 2797068 - RNA, 22 nt, Human
gaccuuuuaaaguguuucagcu

SEQ ID NO: 2797069 - RNA, 16 nt, Human
gacgaagaagagccac

SEQ ID NO: 2797070 - RNA, 18 nt, Human
gaccuuuguacagcccag

SEQ ID NO: 2797071 - RNA, 19 nt, Human
gaccuuuguacagcccaga

SEQ ID NO: 2797072 - RNA, 21 nt, Human
gacggagucccaccuuggcug

SEQ ID NO: 2797073 - RNA, 19 nt, Human
gacgcagcaggaggccagg

SEQ ID NO: 2797074 - RNA, 18 nt, Human
gacggcugggcacacgcc

SEQ ID NO: 2797075 - RNA, 22 nt, Human
gacggcugggcacacgccuccc

SEQ ID NO: 2797076 - RNA, 16 nt, Human
gacggggacuggggau

SEQ ID NO: 2797077 - RNA, 17 nt, Human
gacgggguuucaccaug

SEQ ID NO: 2797078 - RNA, 18 nt, Human
gacggagucccaccuugg

SEQ ID NO: 2797079 - RNA, 14 nt, Human
gacggagucccacc

SEQ ID NO: 2797080 - RNA, 15 nt, Human
gacgauuccuucucu

SEQ ID NO: 2797081 - RNA, 17 nt, Human
gacgauuccuucucuga

SEQ ID NO: 2797082 - RNA, 18 nt, Human
gacgauuccuucucugaa

SEQ ID NO: 2797083 - RNA, 18 nt, Human
gacgaagaagagccacag

SEQ ID NO: 2797084 - RNA, 15 nt, Human
gacgacaggcgagag

SEQ ID NO: 2797085 - RNA, 22 nt, Human
gacgagacccaagggcagagca

SEQ ID NO: 2797086 - RNA, 14 nt, Human
gacgguuuuuuauu

SEQ ID NO: 2797087 - RNA, 19 nt, Human
gacgguuuuuuauuauugu

SEQ ID NO: 2797088 - RNA, 19 nt, Human
gacggguuggggccgggca

SEQ ID NO: 2797089 - RNA, 21 nt, Human
gacggucaguuuggugucaac

SEQ ID NO: 2797090 - RNA, 22 nt, Human
gacggucaguuuggugucaaca

SEQ ID NO: 2797091 - RNA, 14 nt, Human
gacggugacaaaga

SEQ ID NO: 2797092 - RNA, 21 nt, Human
gacggugacaaagauggcuca

SEQ ID NO: 2797093 - RNA, 24 nt, Human
gacggugacaaagauggcucagag

SEQ ID NO: 2797094 - RNA, 17 nt, Human
gacggugcuccaggcag

SEQ ID NO: 2797095 - RNA, 13 nt, Human
gacggugucuugu

SEQ ID NO: 2797096 - RNA, 23 nt, Human
gacauggcucuggacucuaaaga

SEQ ID NO: 2797097 - RNA, 20 nt, Human
gacauggagguucuaaggcc

SEQ ID NO: 2797098 - RNA, 21 nt, Human
gacauggagguucuaaggccu

SEQ ID NO: 2797099 - RNA, 15 nt, Human
gacaugcugaagcca

SEQ ID NO: 2797100 - RNA, 18 nt, Human
gacaugcugaagccaaag

SEQ ID NO: 2797101 - RNA, 19 nt, Human
gacaugcugaagccaaagc

SEQ ID NO: 2797102 - RNA, 15 nt, Human
gacaugcugacuguc

SEQ ID NO: 2797103 - RNA, 21 nt, Human
gacaugcugacuguccucucc

SEQ ID NO: 2797104 - RNA, 14 nt, Human
gacauggagguucu

SEQ ID NO: 2797105 - RNA, 15 nt, Human
gacauggagguucua

SEQ ID NO: 2797106 - RNA, 16 nt, Human
gacauggagguucuaa

SEQ ID NO: 2797107 - RNA, 19 nt, Human
gacauggagguucuaaggc

SEQ ID NO: 2797108 - RNA, 14 nt, Human
gacaugcugaagcc

SEQ ID NO: 2797109 - RNA, 18 nt, Human
gaccaaacuucacucugg

SEQ ID NO: 2797110 - RNA, 12 nt, Human
gacaugugaaac

SEQ ID NO: 2797111 - RNA, 14 nt, Human
gacaugugaaaccu

SEQ ID NO: 2797112 - RNA, 15 nt, Human
gacaugugaaaccuu

SEQ ID NO: 2797113 - RNA, 23 nt, Human
gacauuuuuccguuugcuuuugu

SEQ ID NO: 2797114 - RNA, 18 nt, Human
gacaugugaaaccuuuuu

SEQ ID NO: 2797115 - RNA, 23 nt, Human
gacauaggccaugaaaaaaauga

SEQ ID NO: 2797116 - RNA, 11 nt, Human
gacauauuuaa

SEQ ID NO: 2797117 - RNA, 14 nt, Human
gacauauuuaacug

SEQ ID NO: 2797118 - RNA, 15 nt, Human
gacauauuuaacugg

SEQ ID NO: 2797119 - RNA, 12 nt, Human
gacauauuuaau

SEQ ID NO: 2797120 - RNA, 16 nt, Human
gacauauuuaauguuu

SEQ ID NO: 2797121 - RNA, 17 nt, Human
gacauauuuaauguuuu

SEQ ID NO: 2797122 - RNA, 18 nt, Human
gacauauuuaauguuuua

SEQ ID NO: 2797123 - RNA, 20 nt, Human
gacauauuuaauguuuuaaa

SEQ ID NO: 2797124 - RNA, 21 nt, Human
gacauauuuaauguuuuaaau

SEQ ID NO: 2797125 - RNA, 22 nt, Human
gacauauuuaauguuuuaaaug

SEQ ID NO: 2797126 - RNA, 23 nt, Human
gacauauuuaauguuuuaaaugu

SEQ ID NO: 2797127 - RNA, 18 nt, Human
gacauagcccaucccugc

SEQ ID NO: 2797128 - RNA, 22 nt, Human
gacauagcccaucccugccugg

SEQ ID NO: 2797129 - RNA, 15 nt, Human
gacauagagguauau

SEQ ID NO: 2797130 - RNA, 14 nt, Human
gacauagauauuuu

SEQ ID NO: 2797131 - RNA, 20 nt, Human
gacauagauauuuucacaau

SEQ ID NO: 2797132 - RNA, 20 nt, Human
gacauagcauccaaguggca

SEQ ID NO: 2797133 - RNA, 21 nt, Human
gacauagcauccaaguggcau

SEQ ID NO: 2797134 - RNA, 14 nt, Human
gacaucuggaaucu

SEQ ID NO: 2797135 - RNA, 15 nt, Human
gacaucucugcaccc

SEQ ID NO: 2797136 - RNA, 17 nt, Human
gacaucucugcacccug

SEQ ID NO: 2797137 - RNA, 18 nt, Human
gacaucuggaaucuggag

SEQ ID NO: 2797138 - RNA, 19 nt, Human
gacaucuggaaucuggaga

SEQ ID NO: 2797139 - RNA, 20 nt, Human
gacaucuggaaucuggagac

SEQ ID NO: 2797140 - RNA, 22 nt, Human
gacaucuggaaucuggagacca

SEQ ID NO: 2797141 - RNA, 21 nt, Human
gacaucuguuucuaaauguuu

SEQ ID NO: 2797142 - RNA, 13 nt, Human
gacaucuuucucu

SEQ ID NO: 2797143 - RNA, 13 nt, Human
gacaucuuuuuaa

SEQ ID NO: 2797144 - RNA, 19 nt, Human
gacaucuuuuuaaagcuua

SEQ ID NO: 2797145 - RNA, 23 nt, Human
gacauaauauauucuauuuuuau

SEQ ID NO: 2797146 - RNA, 12 nt, Human
gacauacgaaac

SEQ ID NO: 2797147 - RNA, 17 nt, Human
gacauacgaaacacaaa

SEQ ID NO: 2797148 - RNA, 15 nt, Human
gacagggaagagcag

SEQ ID NO: 2797149 - RNA, 22 nt, Human
gacauaacguuuuuccuuuaaa

SEQ ID NO: 2797150 - RNA, 23 nt, Human
gacauaacguuuuuccuuuaaaa

SEQ ID NO: 2797151 - RNA, 20 nt, Human
gacagggaacaguauuucca

SEQ ID NO: 2797152 - RNA, 23 nt, Human
gacaggaugggggcuggccucug

SEQ ID NO: 2797153 - RNA, 13 nt, Human
gacaggcccuggc

SEQ ID NO: 2797154 - RNA, 11 nt, Human
gacaggccuca

SEQ ID NO: 2797155 - RNA, 15 nt, Human
gacaggccucaccuc

SEQ ID NO: 2797156 - RNA, 19 nt, Human
gacaggccucaccucuacc

SEQ ID NO: 2797157 - RNA, 20 nt, Human
gacaggccucaccucuaccc

SEQ ID NO: 2797158 - RNA, 21 nt, Human
gacaggccucaccucuaccca

SEQ ID NO: 2797159 - RNA, 15 nt, Human
gacaggccugaagau

SEQ ID NO: 2797160 - RNA, 19 nt, Human
gacaggccugaagauauua

SEQ ID NO: 2797161 - RNA, 15 nt, Human
gacaggcgagagagg

SEQ ID NO: 2797162 - RNA, 19 nt, Human
gacaggcgagagaggagcc

SEQ ID NO: 2797163 - RNA, 21 nt, Human
gacaggcgagagaggagccag

SEQ ID NO: 2797164 - RNA, 23 nt, Human
gacaggcgagagaggagccagac

SEQ ID NO: 2797165 - RNA, 24 nt, Human
gacaggcgagagaggagccagaca

SEQ ID NO: 2797166 - RNA, 22 nt, Human
gacagcuucucauccugcaggc

SEQ ID NO: 2797167 - RNA, 21 nt, Human
gacagcuucucauccugcagg

SEQ ID NO: 2797168 - RNA, 20 nt, Human
gacaggagaaacacuugaac

SEQ ID NO: 2797169 - RNA, 19 nt, Human
gacaggcauguucucugag

SEQ ID NO: 2797170 - RNA, 18 nt, Human
gacaggcauguucucuga

SEQ ID NO: 2797171 - RNA, 17 nt, Human
gacaggcaaugcuggcu

SEQ ID NO: 2797172 - RNA, 24 nt, Human
gacaggcaaugcuggcuguuggcu

SEQ ID NO: 2797173 - RNA, 16 nt, Human
gacaggcaaugcuggc

SEQ ID NO: 2797174 - RNA, 14 nt, Human
gacaggcaaugcug

SEQ ID NO: 2797175 - RNA, 16 nt, Human
gacaggaugggggcug

SEQ ID NO: 2797176 - RNA, 16 nt, Human
gacagacacaggcccg

SEQ ID NO: 2797177 - RNA, 15 nt, Human
gacagacacaggccc

SEQ ID NO: 2797178 - RNA, 15 nt, Human
gacagauccccguuc

SEQ ID NO: 2797179 - RNA, 23 nt, Human
gacagauccccguuccugacauc

SEQ ID NO: 2797180 - RNA, 19 nt, Human
gacagaucucugcuuugga

SEQ ID NO: 2797181 - RNA, 21 nt, Human
gacagaucucugcuuuggaaa

SEQ ID NO: 2797182 - RNA, 23 nt, Human
gacagaucucugcuuuggaaauc

SEQ ID NO: 2797183 - RNA, 21 nt, Human
gacacuaaccacgcuggaccu

SEQ ID NO: 2797184 - RNA, 20 nt, Human
gacacuaaccacgcuggacc

SEQ ID NO: 2797185 - RNA, 14 nt, Human
gacagacacaggcc

SEQ ID NO: 2797186 - RNA, 21 nt, Human
gacacguguggcgggcagugg

SEQ ID NO: 2797187 - RNA, 12 nt, Human
gacagacacagg

SEQ ID NO: 2797188 - RNA, 13 nt, Human
gacagccacggcc

SEQ ID NO: 2797189 - RNA, 18 nt, Human
gacagaugccccagagcu

SEQ ID NO: 2797190 - RNA, 13 nt, Human
gacagcaugugcc

SEQ ID NO: 2797191 - RNA, 18 nt, Human
gacagcaugugcccuccu

SEQ ID NO: 2797192 - RNA, 19 nt, Human
gacagcaugugcccuccug

SEQ ID NO: 2797193 - RNA, 20 nt, Human
gacagcaugugcccuccuga

SEQ ID NO: 2797194 - RNA, 21 nt, Human
gacagcaugugcccuccugag

SEQ ID NO: 2797195 - RNA, 14 nt, Human
gacagaugccccag

SEQ ID NO: 2797196 - RNA, 22 nt, Human
gacaaggauugcuacuguccua

SEQ ID NO: 2797197 - RNA, 21 nt, Human
gacaaggauugcuacuguccu

SEQ ID NO: 2797198 - RNA, 14 nt, Human
gacaagauauugua

SEQ ID NO: 2797199 - RNA, 18 nt, Human
gacaagauauuguacaua

SEQ ID NO: 2797200 - RNA, 19 nt, Human
gacaagauauuguacauaa

SEQ ID NO: 2797201 - RNA, 19 nt, Human
gacaagcaauuagacaaga

SEQ ID NO: 2797202 - RNA, 12 nt, Human
gacaagcagagg

SEQ ID NO: 2797203 - RNA, 21 nt, Human
gacaagcagauacugcugugu

SEQ ID NO: 2797204 - RNA, 9 nt, Human
gaagucuug

SEQ ID NO: 2797205 - RNA, 11 nt, Human
gaagucuugua

SEQ ID NO: 2797206 - RNA, 12 nt, Human
gaagucuuguau

SEQ ID NO: 2797207 - RNA, 14 nt, Human
gaagucuuguauaa

SEQ ID NO: 2797208 - RNA, 17 nt, Human
gaagucuuucaagaaug

SEQ ID NO: 2797209 - RNA, 18 nt, Human
gaagucuuucaagaauga

SEQ ID NO: 2797210 - RNA, 22 nt, Human
gacaagagccugaucucuuccu

SEQ ID NO: 2797211 - RNA, 23 nt, Human
gacaagagccugaucucuuccug

SEQ ID NO: 2797212 - RNA, 19 nt, Human
gacaagagguacaggguuu

SEQ ID NO: 2797213 - RNA, 21 nt, Human
gacaaucaugaaauaugcauc

SEQ ID NO: 2797214 - RNA, 19 nt, Human
gacaaucaugaaauaugca

SEQ ID NO: 2797215 - RNA, 20 nt, Human
gacaaucaugaaauaugcau

SEQ ID NO: 2797216 - RNA, 19 nt, Human
gacaauaauucuggagaua

SEQ ID NO: 2797217 - RNA, 19 nt, Human
gacaauaauuucagguuuu

SEQ ID NO: 2797218 - RNA, 16 nt, Human
gacaauacguuugaua

SEQ ID NO: 2797219 - RNA, 13 nt, Human
gacaauaauuuca

SEQ ID NO: 2797220 - RNA, 21 nt, Human
gacaauaauauuguuguauaa

SEQ ID NO: 2797221 - RNA, 21 nt, Human
gacaauaaaccuccgccaaug

SEQ ID NO: 2797222 - RNA, 14 nt, Human
gacaaguuccaugg

SEQ ID NO: 2797223 - RNA, 20 nt, Human
gacaagugacuguaucugug

SEQ ID NO: 2797224 - RNA, 19 nt, Human
gacaagugacuguaucugu

SEQ ID NO: 2797225 - RNA, 12 nt, Human
gacaagggcuga

SEQ ID NO: 2797226 - RNA, 13 nt, Human
gacaagggcugac

SEQ ID NO: 2797227 - RNA, 15 nt, Human
gacaagggcugaccu

SEQ ID NO: 2797228 - RNA, 19 nt, Human
gacaagggcugaccugccu

SEQ ID NO: 2797229 - RNA, 21 nt, Human
gacaagggcugaccugccucu

SEQ ID NO: 2797230 - RNA, 22 nt, Human
gacaagggcugaccugccucuc

SEQ ID NO: 2797231 - RNA, 21 nt, Human
gacaauuguuuuaaucugaaa

SEQ ID NO: 2797232 - RNA, 22 nt, Human
gacaauugagguaaguuuuuug

SEQ ID NO: 2797233 - RNA, 19 nt, Human
gacaauaugugagugccuu

SEQ ID NO: 2797234 - RNA, 14 nt, Human
gacaaucauuguuu

SEQ ID NO: 2797235 - RNA, 17 nt, Human
gacaaucauuguuuuga

SEQ ID NO: 2797236 - RNA, 20 nt, Human
gacaaucauuguuuugaaua

SEQ ID NO: 2797237 - RNA, 22 nt, Human
gacacaaguggaccuuaggccu

SEQ ID NO: 2797238 - RNA, 16 nt, Human
gacaauuugauacaua

SEQ ID NO: 2797239 - RNA, 17 nt, Human
gacaauuugauacauaa

SEQ ID NO: 2797240 - RNA, 18 nt, Human
gacaauuugauacauaau

SEQ ID NO: 2797241 - RNA, 19 nt, Human
gacaauuugauacauaaua

SEQ ID NO: 2797242 - RNA, 22 nt, Human
gacaauuugauacauaauaaaa

SEQ ID NO: 2797243 - RNA, 12 nt, Human
gacacacacaca

SEQ ID NO: 2797244 - RNA, 12 nt, Human
gacacacacacg

SEQ ID NO: 2797245 - RNA, 13 nt, Human
gacacacacacgc

SEQ ID NO: 2797246 - RNA, 14 nt, Human
gacacacacacgca

SEQ ID NO: 2797247 - RNA, 15 nt, Human
gacacacacacgcac

SEQ ID NO: 2797248 - RNA, 17 nt, Human
gacacaggcccggcucc

SEQ ID NO: 2797249 - RNA, 15 nt, Human
gacacaggcccggcu

SEQ ID NO: 2797250 - RNA, 12 nt, Human
gacacaggcccg

SEQ ID NO: 2797251 - RNA, 22 nt, Human
gacacacacacgcacgcacaca

SEQ ID NO: 2797252 - RNA, 23 nt, Human
gacacacacacgcacgcacacac

SEQ ID NO: 2797253 - RNA, 18 nt, Human
gacacacacacgcacgca

SEQ ID NO: 2797254 - RNA, 19 nt, Human
gacacacacacgcacgcac

SEQ ID NO: 2797255 - RNA, 20 nt, Human
gacacacacacgcacgcaca

SEQ ID NO: 2797256 - RNA, 21 nt, Human
gacacacacacgcacgcacac

SEQ ID NO: 2797257 - RNA, 18 nt, Human
gacacaggcccggcucca

SEQ ID NO: 2797258 - RNA, 23 nt, Human
gacacagggugacggugacaaag

SEQ ID NO: 2797259 - RNA, 17 nt, Human
gacacagugaccauacu

SEQ ID NO: 2797260 - RNA, 13 nt, Human
gacacccccucgc

SEQ ID NO: 2797261 - RNA, 22 nt, Human
gacacauaugcaccuugugucu

SEQ ID NO: 2797262 - RNA, 13 nt, Human
gacacccucaacc

SEQ ID NO: 2797263 - RNA, 13 nt, Human
gacacccuggcag

SEQ ID NO: 2797264 - RNA, 10 nt, Human
gacacccggc

SEQ ID NO: 2797265 - RNA, 19 nt, Human
gacacccgugagcgccugu

SEQ ID NO: 2797266 - RNA, 19 nt, Human
gacaccggcuggcagggcu

SEQ ID NO: 2797267 - RNA, 17 nt, Human
gacaccuacugaguggc

SEQ ID NO: 2797268 - RNA, 20 nt, Human
gacaccgggguggugggaac

SEQ ID NO: 2797269 - RNA, 19 nt, Human
gacaccgggccaguaucua

SEQ ID NO: 2797270 - RNA, 22 nt, Human
gacaccgggccaguaucuauau

SEQ ID NO: 2797271 - RNA, 17 nt, Human
gacaccugaacccucca

SEQ ID NO: 2797272 - RNA, 18 nt, Human
gacacuaaccacgcugga

SEQ ID NO: 2797273 - RNA, 17 nt, Human
gacacuaaccacgcugg

SEQ ID NO: 2797274 - RNA, 16 nt, Human
gacacuaaccacgcug

SEQ ID NO: 2797275 - RNA, 15 nt, Human
gacacuaaccacgcu

SEQ ID NO: 2797276 - RNA, 15 nt, Human
gacacggggcagugg

SEQ ID NO: 2797277 - RNA, 17 nt, Human
gacaccuugacagggca

SEQ ID NO: 2797278 - RNA, 15 nt, Human
gacaccuugacaggg

SEQ ID NO: 2797279 - RNA, 15 nt, Human
gacaccugcccugcc

SEQ ID NO: 2797280 - RNA, 14 nt, Human
gacaccugcccugc

SEQ ID NO: 2797281 - RNA, 13 nt, Human
gacaccugcccug

SEQ ID NO: 2797282 - RNA, 20 nt, Human
gacaccuugacagggcacac

SEQ ID NO: 2797283 - RNA, 18 nt, Human
gacaccuugacagggcac

SEQ ID NO: 2797284 - RNA, 14 nt, Human
gacaccuuuagguu

SEQ ID NO: 2797285 - RNA, 20 nt, Human
gagcuugcucauuaauuuug

SEQ ID NO: 2797286 - RNA, 13 nt, Human
gagcuugcuuuga

SEQ ID NO: 2797287 - RNA, 19 nt, Human
gagcuugcuuugauuuaca

SEQ ID NO: 2797288 - RNA, 13 nt, Human
gagcuugggaaug

SEQ ID NO: 2797289 - RNA, 12 nt, Human
gagcuuggggca

SEQ ID NO: 2797290 - RNA, 11 nt, Human
gagcuuuaugg

SEQ ID NO: 2797291 - RNA, 21 nt, Human
gagcuuuaugguccuaaaagc

SEQ ID NO: 2797292 - RNA, 23 nt, Human
gagcuuuaugguccuaaaagcaa

SEQ ID NO: 2797293 - RNA, 20 nt, Human
gaggaaaaccaagccguggc

SEQ ID NO: 2797294 - RNA, 21 nt, Human
gaggaaaaccaagccguggcu

SEQ ID NO: 2797295 - RNA, 23 nt, Human
gaggaaaaccaagccguggcuuc

SEQ ID NO: 2797296 - RNA, 17 nt, Human
gaggaaagacaacacaa

SEQ ID NO: 2797297 - RNA, 22 nt, Human
gaggaaagacaacacaaccaac

SEQ ID NO: 2797298 - RNA, 13 nt, Human
gaggaaagagagc

SEQ ID NO: 2797299 - RNA, 14 nt, Human
gaggaaagagagca

SEQ ID NO: 2797300 - RNA, 16 nt, Human
gaggaaagagagcagg

SEQ ID NO: 2797301 - RNA, 16 nt, Human
gaggaaagagucuuca

SEQ ID NO: 2797302 - RNA, 20 nt, Human
gaggaaagagucuucaacau

SEQ ID NO: 2797303 - RNA, 21 nt, Human
gaggaaagagucuucaacaua

SEQ ID NO: 2797304 - RNA, 18 nt, Human
gaggaaacaacagcuuua

SEQ ID NO: 2797305 - RNA, 21 nt, Human
gaggaaaauaauguaauugua

SEQ ID NO: 2797306 - RNA, 13 nt, Human
gaggaagagucuu

SEQ ID NO: 2797307 - RNA, 18 nt, Human
gaggaaaucugcagaggg

SEQ ID NO: 2797308 - RNA, 15 nt, Human
gaggaacuccuuggc

SEQ ID NO: 2797309 - RNA, 16 nt, Human
gaggaacuccuuggcc

SEQ ID NO: 2797310 - RNA, 23 nt, Human
gaggaacuccuuggccuagccca

SEQ ID NO: 2797311 - RNA, 14 nt, Human
gaggaacugggccu

SEQ ID NO: 2797312 - RNA, 15 nt, Human
gaggaacuguacaga

SEQ ID NO: 2797313 - RNA, 16 nt, Human
gaggaacuguacagaa

SEQ ID NO: 2797314 - RNA, 15 nt, Human
gaggaacuguccaga

SEQ ID NO: 2797315 - RNA, 16 nt, Human
gaggaacuguccagag

SEQ ID NO: 2797316 - RNA, 17 nt, Human
gaggaacuguccagaga

SEQ ID NO: 2797317 - RNA, 18 nt, Human
gaggaacuguccagagag

SEQ ID NO: 2797318 - RNA, 19 nt, Human
gaggaacuguccagagagc

SEQ ID NO: 2797319 - RNA, 21 nt, Human
gaggaacuguccagagagcaa

SEQ ID NO: 2797320 - RNA, 21 nt, Human
gaggaaauaaaguuaaguuug

SEQ ID NO: 2797321 - RNA, 23 nt, Human
gagcucuacccagggccugcagg

SEQ ID NO: 2797322 - RNA, 21 nt, Human
gagcucuacccagggccugca

SEQ ID NO: 2797323 - RNA, 20 nt, Human
gagcucuacccagggccugc

SEQ ID NO: 2797324 - RNA, 15 nt, Human
gagcucuacccaggg

SEQ ID NO: 2797325 - RNA, 14 nt, Human
gagcucuacccagg

SEQ ID NO: 2797326 - RNA, 16 nt, Human
gagcugauauaaauuc

SEQ ID NO: 2797327 - RNA, 17 nt, Human
gagcugauauaaauucu

SEQ ID NO: 2797328 - RNA, 19 nt, Human
gagcugauauaaauucugu

SEQ ID NO: 2797329 - RNA, 14 nt, Human
gagcugaugaaacu

SEQ ID NO: 2797330 - RNA, 21 nt, Human
gagcugaugaaacucacaaau

SEQ ID NO: 2797331 - RNA, 14 nt, Human
gagcugagguuuca

SEQ ID NO: 2797332 - RNA, 23 nt, Human
gagcugagguuucacccuuaacc

SEQ ID NO: 2797333 - RNA, 19 nt, Human
gagcucaagggacaaggac

SEQ ID NO: 2797334 - RNA, 12 nt, Human
gagcugagccag

SEQ ID NO: 2797335 - RNA, 13 nt, Human
gagcugagccagg

SEQ ID NO: 2797336 - RNA, 14 nt, Human
gagcugagccaggc

SEQ ID NO: 2797337 - RNA, 15 nt, Human
gagcugagccaggcu

SEQ ID NO: 2797338 - RNA, 22 nt, Human
gagcugagccaggcuagcugga

SEQ ID NO: 2797339 - RNA, 23 nt, Human
gagcugagccaggcuagcuggag

SEQ ID NO: 2797340 - RNA, 22 nt, Human
gagcugagaucgugccacugca

SEQ ID NO: 2797341 - RNA, 16 nt, Human
gagcugacacaggaug

SEQ ID NO: 2797342 - RNA, 17 nt, Human
gagcugacacaggauga

SEQ ID NO: 2797343 - RNA, 18 nt, Human
gagcugacacaaaccugc

SEQ ID NO: 2797344 - RNA, 22 nt, Human
gagcugacacaaaccugccugg

SEQ ID NO: 2797345 - RNA, 23 nt, Human
gagcugacacaaaccugccuggg

SEQ ID NO: 2797346 - RNA, 15 nt, Human
gagccugcaguuauu

SEQ ID NO: 2797347 - RNA, 13 nt, Human
gagccugccugga

SEQ ID NO: 2797348 - RNA, 14 nt, Human
gagccugccuggag

SEQ ID NO: 2797349 - RNA, 15 nt, Human
gagccugccuggagc

SEQ ID NO: 2797350 - RNA, 14 nt, Human
gagcuauuaaaacu

SEQ ID NO: 2797351 - RNA, 16 nt, Human
gagcuauuaaaacuca

SEQ ID NO: 2797352 - RNA, 20 nt, Human
gagcuauuaaaacucagccu

SEQ ID NO: 2797353 - RNA, 22 nt, Human
gagcuauuaaaacucagccugg

SEQ ID NO: 2797354 - RNA, 13 nt, Human
gagcuauugcugu

SEQ ID NO: 2797355 - RNA, 16 nt, Human
gagcucacucggcacc

SEQ ID NO: 2797356 - RNA, 22 nt, Human
gagcuccagagcaacgaccagg

SEQ ID NO: 2797357 - RNA, 18 nt, Human
gagcucagagagggcagg

SEQ ID NO: 2797358 - RNA, 20 nt, Human
gagcucagagagggcaggca

SEQ ID NO: 2797359 - RNA, 21 nt, Human
gagcucagagagggcaggcau

SEQ ID NO: 2797360 - RNA, 23 nt, Human
gagcucagccccgagcugucccc

SEQ ID NO: 2797361 - RNA, 17 nt, Human
gagccucccaaggagaa

SEQ ID NO: 2797362 - RNA, 20 nt, Human
gagccucccaaggagaacaa

SEQ ID NO: 2797363 - RNA, 21 nt, Human
gagccucccaaggagaacaaa

SEQ ID NO: 2797364 - RNA, 22 nt, Human
gagccucccaaggagaacaaau

SEQ ID NO: 2797365 - RNA, 16 nt, Human
gagccucugcucccca

SEQ ID NO: 2797366 - RNA, 14 nt, Human
gagccucgcucugu

SEQ ID NO: 2797367 - RNA, 12 nt, Human
gagccugcaguu

SEQ ID NO: 2797368 - RNA, 15 nt, Human
gagccugagucaggg

SEQ ID NO: 2797369 - RNA, 16 nt, Human
gagccugagucagggc

SEQ ID NO: 2797370 - RNA, 17 nt, Human
gagccucugcuccccag

SEQ ID NO: 2797371 - RNA, 12 nt, Human
gagccucugggg

SEQ ID NO: 2797372 - RNA, 20 nt, Human
gagccucuucugccaagaga

SEQ ID NO: 2797373 - RNA, 19 nt, Human
gagccugaauuuuguugcu

SEQ ID NO: 2797374 - RNA, 15 nt, Human
gagccucagcauccu

SEQ ID NO: 2797375 - RNA, 14 nt, Human
gagccucagcaucc

SEQ ID NO: 2797376 - RNA, 17 nt, Human
gagccucagcauccugg

SEQ ID NO: 2797377 - RNA, 18 nt, Human
gagccucagucucccucc

SEQ ID NO: 2797378 - RNA, 19 nt, Human
gagccucagucucccuccc

SEQ ID NO: 2797379 - RNA, 13 nt, Human
gagccucagcauc

SEQ ID NO: 2797380 - RNA, 15 nt, Human
gagccuagaagcugg

SEQ ID NO: 2797381 - RNA, 15 nt, Human
gagccuaggaccacu

SEQ ID NO: 2797382 - RNA, 19 nt, Human
gagccuaggaccacucagc

SEQ ID NO: 2797383 - RNA, 20 nt, Human
gagccuaggaccacucagcc

SEQ ID NO: 2797384 - RNA, 21 nt, Human
gagccuaggaccacucagccc

SEQ ID NO: 2797385 - RNA, 22 nt, Human
gagccuaggaccacucagcccc

SEQ ID NO: 2797386 - RNA, 21 nt, Human
gagccuaguuuuuaauagcua

SEQ ID NO: 2797387 - RNA, 18 nt, Human
gagcccacggcuaagagg

SEQ ID NO: 2797388 - RNA, 21 nt, Human
gagcccacggcuaagaggcug

SEQ ID NO: 2797389 - RNA, 22 nt, Human
gagcccacggcuaagaggcugc

SEQ ID NO: 2797390 - RNA, 23 nt, Human
gagcccacggcuaagaggcugcu

SEQ ID NO: 2797391 - RNA, 20 nt, Human
gagccgagaucacgccacug

SEQ ID NO: 2797392 - RNA, 19 nt, Human
gagccgagaucacgccacu

SEQ ID NO: 2797393 - RNA, 22 nt, Human
gagccgagaucacgccacugca

SEQ ID NO: 2797394 - RNA, 21 nt, Human
gagccgagaucacgccacugc

SEQ ID NO: 2797395 - RNA, 20 nt, Human
gagccgagaucgcgccacug

SEQ ID NO: 2797396 - RNA, 19 nt, Human
gagccgcugugagccccug

SEQ ID NO: 2797397 - RNA, 20 nt, Human
gagccgcugugagccccugg

SEQ ID NO: 2797398 - RNA, 21 nt, Human
gagccgggcacauugagcugu

SEQ ID NO: 2797399 - RNA, 17 nt, Human
gagccgugaacugugca

SEQ ID NO: 2797400 - RNA, 18 nt, Human
gagccgugaacugugcau

SEQ ID NO: 2797401 - RNA, 17 nt, Human
gagcagccucagaacaa

SEQ ID NO: 2797402 - RNA, 15 nt, Human
gagcagagcaggcaa

SEQ ID NO: 2797403 - RNA, 13 nt, Human
gagcagaggcagc

SEQ ID NO: 2797404 - RNA, 12 nt, Human
gagcagagagcu

SEQ ID NO: 2797405 - RNA, 21 nt, Human
gagcagagagcuuagccugga

SEQ ID NO: 2797406 - RNA, 18 nt, Human
gagauauaucugaaaacu

SEQ ID NO: 2797407 - RNA, 14 nt, Human
gagauagccugugg

SEQ ID NO: 2797408 - RNA, 16 nt, Human
gagauagccuguggcc

SEQ ID NO: 2797409 - RNA, 17 nt, Human
gagauagccuguggccc

SEQ ID NO: 2797410 - RNA, 19 nt, Human
gagauagccuguggcccug

SEQ ID NO: 2797411 - RNA, 20 nt, Human
gagauagccuguggcccugu

SEQ ID NO: 2797412 - RNA, 21 nt, Human
gagauagccuguggcccuguc

SEQ ID NO: 2797413 - RNA, 17 nt, Human
gagauaccaagaugcca

SEQ ID NO: 2797414 - RNA, 17 nt, Human
gagagugagcuacagag

SEQ ID NO: 2797415 - RNA, 15 nt, Human
gagaguuuugucuug

SEQ ID NO: 2797416 - RNA, 22 nt, Human
gagaguuuugucuugaaugucu

SEQ ID NO: 2797417 - RNA, 17 nt, Human
gagaguuuuuaauagaa

SEQ ID NO: 2797418 - RNA, 18 nt, Human
gagaguuuuuaauagaac

SEQ ID NO: 2797419 - RNA, 17 nt, Human
gagaguuuugucuugaa

SEQ ID NO: 2797420 - RNA, 20 nt, Human
gagccacugcaccgggccac

SEQ ID NO: 2797421 - RNA, 13 nt, Human
gagccacugcacc

SEQ ID NO: 2797422 - RNA, 18 nt, Human
gagcagccuguggcaucu

SEQ ID NO: 2797423 - RNA, 16 nt, Human
gagcagccuguggcau

SEQ ID NO: 2797424 - RNA, 15 nt, Human
gagcagccuguggca

SEQ ID NO: 2797425 - RNA, 14 nt, Human
gagcagccuguggc

SEQ ID NO: 2797426 - RNA, 13 nt, Human
gagcagccugugg

SEQ ID NO: 2797427 - RNA, 11 nt, Human
gagcagccugu

SEQ ID NO: 2797428 - RNA, 19 nt, Human
gagccacugcaccgggcca

SEQ ID NO: 2797429 - RNA, 18 nt, Human
gagccacugcaccgggcc

SEQ ID NO: 2797430 - RNA, 17 nt, Human
gagcccaccuuggcuca

SEQ ID NO: 2797431 - RNA, 15 nt, Human
gagcccaccuuggcu

SEQ ID NO: 2797432 - RNA, 13 nt, Human
gagcccaccuugg

SEQ ID NO: 2797433 - RNA, 21 nt, Human
gagccaggcuagcuggagccu

SEQ ID NO: 2797434 - RNA, 22 nt, Human
gagccaggcuagcuggagccug

SEQ ID NO: 2797435 - RNA, 20 nt, Human
gagccagcuuggggccacca

SEQ ID NO: 2797436 - RNA, 13 nt, Human
gagccagcucccu

SEQ ID NO: 2797437 - RNA, 18 nt, Human
gagccagcucccucuauu

SEQ ID NO: 2797438 - RNA, 14 nt, Human
gagagucugucuca

SEQ ID NO: 2797439 - RNA, 18 nt, Human
gagaggggaacagacugg

SEQ ID NO: 2797440 - RNA, 13 nt, Human
gagaggggaacag

SEQ ID NO: 2797441 - RNA, 20 nt, Human
gagacagagccucgcucugu

SEQ ID NO: 2797442 - RNA, 16 nt, Human
gagagggcaggcauga

SEQ ID NO: 2797443 - RNA, 22 nt, Human
gagagagcuucuguugcugccu

SEQ ID NO: 2797444 - RNA, 15 nt, Human
gagagaggcagagag

SEQ ID NO: 2797445 - RNA, 13 nt, Human
gagagaggcagag

SEQ ID NO: 2797446 - RNA, 16 nt, Human
gagagaauuggcucaa

SEQ ID NO: 2797447 - RNA, 17 nt, Human
gagagaauuggcucaau

SEQ ID NO: 2797448 - RNA, 12 nt, Human
gagagaaggggc

SEQ ID NO: 2797449 - RNA, 16 nt, Human
gagagaaccuaacugu

SEQ ID NO: 2797450 - RNA, 17 nt, Human
gagagaaccuaacugua

SEQ ID NO: 2797451 - RNA, 18 nt, Human
gagagaaccuaacuguau

SEQ ID NO: 2797452 - RNA, 20 nt, Human
gagagaaccuaacuguaucu

SEQ ID NO: 2797453 - RNA, 21 nt, Human
gagagaaccuaacuguaucuu

SEQ ID NO: 2797454 - RNA, 20 nt, Human
gagacuuucuuucuguaggu

SEQ ID NO: 2797455 - RNA, 13 nt, Human
gagacuuuguaga

SEQ ID NO: 2797456 - RNA, 22 nt, Human
gagacuuuuaaucagacaaagu

SEQ ID NO: 2797457 - RNA, 14 nt, Human
gagagaaaaacaaa

SEQ ID NO: 2797458 - RNA, 14 nt, Human
gagacuuuuuucua

SEQ ID NO: 2797459 - RNA, 16 nt, Human
gagacuuuuuucuagu

SEQ ID NO: 2797460 - RNA, 11 nt, Human
gagagaaaaaa

SEQ ID NO: 2797461 - RNA, 14 nt, Human
gagagccugcugca

SEQ ID NO: 2797462 - RNA, 13 nt, Human
gagagccugcugc

SEQ ID NO: 2797463 - RNA, 11 nt, Human
gagagcccagc

SEQ ID NO: 2797464 - RNA, 21 nt, Human
gagagcccagagguaacagaa

SEQ ID NO: 2797465 - RNA, 23 nt, Human
gagagcccagagguaacagaaca

SEQ ID NO: 2797466 - RNA, 14 nt, Human
gagagccauuuugu

SEQ ID NO: 2797467 - RNA, 10 nt, Human
gagagcccag

SEQ ID NO: 2797468 - RNA, 17 nt, Human
gagagccauuuugugaa

SEQ ID NO: 2797469 - RNA, 14 nt, Human
gagagcccagaggu

SEQ ID NO: 2797470 - RNA, 16 nt, Human
gagagaggcagagagc

SEQ ID NO: 2797471 - RNA, 17 nt, Human
gagagaggcagagagcg

SEQ ID NO: 2797472 - RNA, 20 nt, Human
gagacauggcuuucagaaaa

SEQ ID NO: 2797473 - RNA, 21 nt, Human
gagacauggcuuucagaaaac

SEQ ID NO: 2797474 - RNA, 13 nt, Human
gagacagccccag

SEQ ID NO: 2797475 - RNA, 14 nt, Human
gagacagccccaga

SEQ ID NO: 2797476 - RNA, 15 nt, Human
gagacagccccagag

SEQ ID NO: 2797477 - RNA, 18 nt, Human
gagacagccccagagcag

SEQ ID NO: 2797478 - RNA, 19 nt, Human
gagacagccccagagcagg

SEQ ID NO: 2797479 - RNA, 21 nt, Human
gagacaguuucuuagcuuuuu

SEQ ID NO: 2797480 - RNA, 22 nt, Human
gagacaguuucuuagcuuuuua

SEQ ID NO: 2797481 - RNA, 16 nt, Human
gagaccagggagccuu

SEQ ID NO: 2797482 - RNA, 14 nt, Human
gagaccaggcaaag

SEQ ID NO: 2797483 - RNA, 18 nt, Human
gagaccaggcaaagcaag

SEQ ID NO: 2797484 - RNA, 14 nt, Human
gagaccaggcccug

SEQ ID NO: 2797485 - RNA, 15 nt, Human
gagaccaggcccugg

SEQ ID NO: 2797486 - RNA, 18 nt, Human
gagaccaggcccuggcua

SEQ ID NO: 2797487 - RNA, 17 nt, Human
gagaccaggcugugucc

SEQ ID NO: 2797488 - RNA, 23 nt, Human
gagaccaguugaauaaaagugca

SEQ ID NO: 2797489 - RNA, 14 nt, Human
gagaccagccuggc

SEQ ID NO: 2797490 - RNA, 18 nt, Human
gagaccaaggcgggagca

SEQ ID NO: 2797491 - RNA, 19 nt, Human
gagaccagccugggcagca

SEQ ID NO: 2797492 - RNA, 16 nt, Human
gagaccagccugggca

SEQ ID NO: 2797493 - RNA, 23 nt, Human
gagaccagccugggcaacaaagu

SEQ ID NO: 2797494 - RNA, 13 nt, Human
gagaccagccugg

SEQ ID NO: 2797495 - RNA, 14 nt, Human
gagacucugucuca

SEQ ID NO: 2797496 - RNA, 23 nt, Human
gagacucuguggggccuugguuc

SEQ ID NO: 2797497 - RNA, 12 nt, Human
gagacucugugg

SEQ ID NO: 2797498 - RNA, 19 nt, Human
gagacugcgggaugguccu

SEQ ID NO: 2797499 - RNA, 22 nt, Human
gagacugucucaagagggcacu

SEQ ID NO: 2797500 - RNA, 23 nt, Human
gagacugcgggaugguccugggg

SEQ ID NO: 2797501 - RNA, 16 nt, Human
gagacugcguucugca

SEQ ID NO: 2797502 - RNA, 17 nt, Human
gagacugcguucugcaa

SEQ ID NO: 2797503 - RNA, 23 nt, Human
gagacugcguucugcaagcauca

SEQ ID NO: 2797504 - RNA, 22 nt, Human
gagacugcgggaugguccuggg

SEQ ID NO: 2797505 - RNA, 13 nt, Human
gagacuugccaga

SEQ ID NO: 2797506 - RNA, 12 nt, Human
gagacuugccuu

SEQ ID NO: 2797507 - RNA, 13 nt, Human
gagacuugccuuc

SEQ ID NO: 2797508 - RNA, 13 nt, Human
gagacuuguauga

SEQ ID NO: 2797509 - RNA, 23 nt, Human
gagacugucucaagagggcacug

SEQ ID NO: 2797510 - RNA, 22 nt, Human
gagacaaguuccaugggauaca

SEQ ID NO: 2797511 - RNA, 20 nt, Human
gagacacaacaacuccuagg

SEQ ID NO: 2797512 - RNA, 13 nt, Human
gagacacagaugu

SEQ ID NO: 2797513 - RNA, 14 nt, Human
gagacacagauguu

SEQ ID NO: 2797514 - RNA, 16 nt, Human
gagacacagcgucccu

SEQ ID NO: 2797515 - RNA, 14 nt, Human
gagaauugggggcu

SEQ ID NO: 2797516 - RNA, 13 nt, Human
gagaauuggcuca

SEQ ID NO: 2797517 - RNA, 12 nt, Human
gagaauuucuaa

SEQ ID NO: 2797518 - RNA, 13 nt, Human
gagaauuucuaaa

SEQ ID NO: 2797519 - RNA, 23 nt, Human
gagaauuucuaaaaagauuagca

SEQ ID NO: 2797520 - RNA, 19 nt, Human
gagaauugggcggcucuga

SEQ ID NO: 2797521 - RNA, 21 nt, Human
gagaauuucuaccauuucaga

SEQ ID NO: 2797522 - RNA, 18 nt, Human
gagacaaaauauuuccca

SEQ ID NO: 2797523 - RNA, 16 nt, Human
gagacaaaauuuuagu

SEQ ID NO: 2797524 - RNA, 19 nt, Human
gagacaaacaccucccagg

SEQ ID NO: 2797525 - RNA, 22 nt, Human
gagacaaacaccucccaggaga

SEQ ID NO: 2797526 - RNA, 20 nt, Human
gagacaaacaccucccagga

SEQ ID NO: 2797527 - RNA, 17 nt, Human
gagacaagaaaucccug

SEQ ID NO: 2797528 - RNA, 14 nt, Human
gagacaaugucugc

SEQ ID NO: 2797529 - RNA, 19 nt, Human
gagacaaugucugcagccc

SEQ ID NO: 2797530 - RNA, 20 nt, Human
gagacaaugucugcagcccu

SEQ ID NO: 2797531 - RNA, 22 nt, Human
gagacaaugucugcagcccuga

SEQ ID NO: 2797532 - RNA, 19 nt, Human
gagacagaguuuucacucu

SEQ ID NO: 2797533 - RNA, 21 nt, Human
gagaauugcugaagggcauuc

SEQ ID NO: 2797534 - RNA, 16 nt, Human
gagacacggagcccag

SEQ ID NO: 2797535 - RNA, 19 nt, Human
gagacacguguggcgggca

SEQ ID NO: 2797536 - RNA, 21 nt, Human
gagacacucagaccagagaag

SEQ ID NO: 2797537 - RNA, 15 nt, Human
gagacacuggccccu

SEQ ID NO: 2797538 - RNA, 17 nt, Human
gagacacuggccccuca

SEQ ID NO: 2797539 - RNA, 20 nt, Human
gagacacugugcuauaaauc

SEQ ID NO: 2797540 - RNA, 14 nt, Human
gagacagaauguau

SEQ ID NO: 2797541 - RNA, 16 nt, Human
gagacagaauguaucu

SEQ ID NO: 2797542 - RNA, 18 nt, Human
gagacagaauguaucugu

SEQ ID NO: 2797543 - RNA, 20 nt, Human
gagacagaauguaucuguga

SEQ ID NO: 2797544 - RNA, 21 nt, Human
gagacagaauguaucugugaa

SEQ ID NO: 2797545 - RNA, 22 nt, Human
gagaagauaauuguugaaauuu

SEQ ID NO: 2797546 - RNA, 20 nt, Human
gagaaccgagcaaagaucaa

SEQ ID NO: 2797547 - RNA, 22 nt, Human
gagaaccgagcaaagaucaaaa

SEQ ID NO: 2797548 - RNA, 23 nt, Human
gagaaccgagcaaagaucaaaau

SEQ ID NO: 2797549 - RNA, 9 nt, Human
gagaagaag

SEQ ID NO: 2797550 - RNA, 11 nt, Human
gagaagaagaa

SEQ ID NO: 2797551 - RNA, 14 nt, Human
gagaagaagaaaaa

SEQ ID NO: 2797552 - RNA, 15 nt, Human
gagaagaagaaaaaa

SEQ ID NO: 2797553 - RNA, 11 nt, Human
gagaagaauag

SEQ ID NO: 2797554 - RNA, 14 nt, Human
gagaagaauagccu

SEQ ID NO: 2797555 - RNA, 23 nt, Human
gagaagaauagccuagauaugaa

SEQ ID NO: 2797556 - RNA, 12 nt, Human
gagaagaggagc

SEQ ID NO: 2797557 - RNA, 13 nt, Human
gagaaugagccuc

SEQ ID NO: 2797558 - RNA, 16 nt, Human
gagaaaccuguaucuu

SEQ ID NO: 2797559 - RNA, 17 nt, Human
gagaaaccuguaucuuu

SEQ ID NO: 2797560 - RNA, 18 nt, Human
gagaaaccuguaucuuuc

SEQ ID NO: 2797561 - RNA, 21 nt, Human
gagaaaccuguaucuuucuau

SEQ ID NO: 2797562 - RNA, 22 nt, Human
gagaaaguacuucuccacccug

SEQ ID NO: 2797563 - RNA, 16 nt, Human
gagaaagaggaagcuu

SEQ ID NO: 2797564 - RNA, 23 nt, Human
gagaaauaaaguuugcuuagaaa

SEQ ID NO: 2797565 - RNA, 20 nt, Human
gagaaauauggacacuuaau

SEQ ID NO: 2797566 - RNA, 23 nt, Human
gagaaaguacuucuccacccugc

SEQ ID NO: 2797567 - RNA, 15 nt, Human
gagaaacuuuauaca

SEQ ID NO: 2797568 - RNA, 17 nt, Human
gagaaacuuuauacauu

SEQ ID NO: 2797569 - RNA, 19 nt, Human
gagaaacuuuauacauuag

SEQ ID NO: 2797570 - RNA, 17 nt, Human
gagaacaaacagaucga

SEQ ID NO: 2797571 - RNA, 13 nt, Human
gagaacaaagaug

SEQ ID NO: 2797572 - RNA, 12 nt, Human
gagaacaaagcu

SEQ ID NO: 2797573 - RNA, 14 nt, Human
gagaacaaagcugu

SEQ ID NO: 2797574 - RNA, 15 nt, Human
gagaacaaagcuguu

SEQ ID NO: 2797575 - RNA, 22 nt, Human
gagaacaaagcuguuaaacugu

SEQ ID NO: 2797576 - RNA, 12 nt, Human
gagaacaaauau

SEQ ID NO: 2797577 - RNA, 15 nt, Human
gagaacaaauauuca

SEQ ID NO: 2797578 - RNA, 18 nt, Human
gagaacaggugguuuuua

SEQ ID NO: 2797579 - RNA, 22 nt, Human
gagaacacagccgauucaccug

SEQ ID NO: 2797580 - RNA, 23 nt, Human
gagaaauuucugugaaaccugug

SEQ ID NO: 2797581 - RNA, 19 nt, Human
gagaaccacuacaugcagc

SEQ ID NO: 2797582 - RNA, 18 nt, Human
gacuuguuugucuuccau

SEQ ID NO: 2797583 - RNA, 22 nt, Human
gacuuguuugucuuccauucca

SEQ ID NO: 2797584 - RNA, 16 nt, Human
gacuugugucucugug

SEQ ID NO: 2797585 - RNA, 13 nt, Human
gacuugugucucu

SEQ ID NO: 2797586 - RNA, 13 nt, Human
gacuuggaagcuc

SEQ ID NO: 2797587 - RNA, 18 nt, Human
gacuuguuuuaugcucag

SEQ ID NO: 2797588 - RNA, 11 nt, Human
gagaaaauaua

SEQ ID NO: 2797589 - RNA, 16 nt, Human
gagaaaauauauguau

SEQ ID NO: 2797590 - RNA, 17 nt, Human
gagaaaauauauguauu

SEQ ID NO: 2797591 - RNA, 18 nt, Human
gagaaaauauauguauuu

SEQ ID NO: 2797592 - RNA, 19 nt, Human
gagaaaauauauguauuuu

SEQ ID NO: 2797593 - RNA, 15 nt, Human
gagaaacaaacuuuu

SEQ ID NO: 2797594 - RNA, 13 nt, Human
gagaaacacuuga

SEQ ID NO: 2797595 - RNA, 14 nt, Human
gagaaacacuugaa

SEQ ID NO: 2797596 - RNA, 17 nt, Human
gagaaacaauaaagaga

SEQ ID NO: 2797597 - RNA, 13 nt, Human
gagaaacaaacuu

SEQ ID NO: 2797598 - RNA, 14 nt, Human
gacuccggcccucc

SEQ ID NO: 2797599 - RNA, 13 nt, Human
gacucgcuuguaa

SEQ ID NO: 2797600 - RNA, 14 nt, Human
gacucgcuuguaaa

SEQ ID NO: 2797601 - RNA, 15 nt, Human
gacucgcuuguaaau

SEQ ID NO: 2797602 - RNA, 19 nt, Human
gacucgcuuguaaauacca

SEQ ID NO: 2797603 - RNA, 16 nt, Human
gacuuggaagcuccgc

SEQ ID NO: 2797604 - RNA, 15 nt, Human
gacuuggaagcuccg

SEQ ID NO: 2797605 - RNA, 14 nt, Human
gacuuggaagcucc

SEQ ID NO: 2797606 - RNA, 16 nt, Human
gaugaaacucacaaau

SEQ ID NO: 2797607 - RNA, 20 nt, Human
gaugaagcaaggaagauaua

SEQ ID NO: 2797608 - RNA, 21 nt, Human
gaugaagcaaggaagauauac

SEQ ID NO: 2797609 - RNA, 23 nt, Human
gaugaagcaaggaagauauacau

SEQ ID NO: 2797610 - RNA, 19 nt, Human
gaugaagccgaccuuagau

SEQ ID NO: 2797611 - RNA, 17 nt, Human
gaugaacuuauucugua

SEQ ID NO: 2797612 - RNA, 19 nt, Human
gaugaacuuauucuguaga

SEQ ID NO: 2797613 - RNA, 13 nt, Human
gaugaacuuucuc

SEQ ID NO: 2797614 - RNA, 19 nt, Human
gaugaaagagaaggugggu

SEQ ID NO: 2797615 - RNA, 21 nt, Human
gaucugugauaguucaccccc

SEQ ID NO: 2797616 - RNA, 15 nt, Human
gaugaaaauuugaga

SEQ ID NO: 2797617 - RNA, 19 nt, Human
gaugaaaucuuacagcugg

SEQ ID NO: 2797618 - RNA, 18 nt, Human
gaugaacucuuagaaaug

SEQ ID NO: 2797619 - RNA, 22 nt, Human
gaugaacucuuagaaaugaagg

SEQ ID NO: 2797620 - RNA, 17 nt, Human
gaucuuugcagacaggc

SEQ ID NO: 2797621 - RNA, 18 nt, Human
gaucuuugcagacaggca

SEQ ID NO: 2797622 - RNA, 18 nt, Human
gaucuguuuugaaggcaa

SEQ ID NO: 2797623 - RNA, 13 nt, Human
gaucuuuuaaagu

SEQ ID NO: 2797624 - RNA, 17 nt, Human
gaucuuuuaaaguguua

SEQ ID NO: 2797625 - RNA, 20 nt, Human
gaucuuuuaaaguguuacuu

SEQ ID NO: 2797626 - RNA, 22 nt, Human
gaucucagcuuugagaagccuu

SEQ ID NO: 2797627 - RNA, 12 nt, Human
gaucugucuugu

SEQ ID NO: 2797628 - RNA, 13 nt, Human
gaucugucuugua

SEQ ID NO: 2797629 - RNA, 14 nt, Human
gaucugucuuguaa

SEQ ID NO: 2797630 - RNA, 22 nt, Human
gaucugucuuguaauauuuugu

SEQ ID NO: 2797631 - RNA, 13 nt, Human
gaucugugcccca

SEQ ID NO: 2797632 - RNA, 18 nt, Human
gaucugugccccaugccu

SEQ ID NO: 2797633 - RNA, 14 nt, Human
gaucugugccccau

SEQ ID NO: 2797634 - RNA, 17 nt, Human
gaucuguuuugaaggca

SEQ ID NO: 2797635 - RNA, 13 nt, Human
gaucuguuuugaa

SEQ ID NO: 2797636 - RNA, 14 nt, Human
gauccugccacccu

SEQ ID NO: 2797637 - RNA, 15 nt, Human
gauccugccacccug

SEQ ID NO: 2797638 - RNA, 16 nt, Human
gauccugccacccugu

SEQ ID NO: 2797639 - RNA, 17 nt, Human
gauccugccacccugua

SEQ ID NO: 2797640 - RNA, 18 nt, Human
gauccugccacccuguag

SEQ ID NO: 2797641 - RNA, 17 nt, Human
gauccccucaggacugc

SEQ ID NO: 2797642 - RNA, 21 nt, Human
gauccccucugucuacaaaua

SEQ ID NO: 2797643 - RNA, 13 nt, Human
gauccccugagcc

SEQ ID NO: 2797644 - RNA, 14 nt, Human
gauccccugagccc

SEQ ID NO: 2797645 - RNA, 13 nt, Human
gauccccucagga

SEQ ID NO: 2797646 - RNA, 14 nt, Human
gauccccucaggac

SEQ ID NO: 2797647 - RNA, 14 nt, Human
gaucucagcuuuga

SEQ ID NO: 2797648 - RNA, 21 nt, Human
gaucucagcuuugagaagccu

SEQ ID NO: 2797649 - RNA, 16 nt, Human
gaucucagcuuugaga

SEQ ID NO: 2797650 - RNA, 13 nt, Human
gaucucacucugc

SEQ ID NO: 2797651 - RNA, 15 nt, Human
gaucucacucugccc

SEQ ID NO: 2797652 - RNA, 15 nt, Human
gaucuauguuucauc

SEQ ID NO: 2797653 - RNA, 13 nt, Human
gaucuauaaagcg

SEQ ID NO: 2797654 - RNA, 21 nt, Human
gaucgcggcggagcuggcccc

SEQ ID NO: 2797655 - RNA, 23 nt, Human
gaucgcgccacuacacuccagcc

SEQ ID NO: 2797656 - RNA, 22 nt, Human
gaucauuuauuuuaagcacucu

SEQ ID NO: 2797657 - RNA, 14 nt, Human
gauggcucagaggg

SEQ ID NO: 2797658 - RNA, 15 nt, Human
gauggcucagagggg

SEQ ID NO: 2797659 - RNA, 24 nt, Human
gauggcucagagggggacugcugc

SEQ ID NO: 2797660 - RNA, 13 nt, Human
gauggcugugccu

SEQ ID NO: 2797661 - RNA, 17 nt, Human
gauggcugugccucugc

SEQ ID NO: 2797662 - RNA, 18 nt, Human
gauggcugugccucugcc

SEQ ID NO: 2797663 - RNA, 19 nt, Human
gauggcugugccucugccu

SEQ ID NO: 2797664 - RNA, 19 nt, Human
gauggcuggaaggggucca

SEQ ID NO: 2797665 - RNA, 20 nt, Human
gauggcugugccucugccug

SEQ ID NO: 2797666 - RNA, 20 nt, Human
gauggccuggccagggccug

SEQ ID NO: 2797667 - RNA, 21 nt, Human
gauggccuggccagggccugg

SEQ ID NO: 2797668 - RNA, 14 nt, Human
gauggccuggccag

SEQ ID NO: 2797669 - RNA, 19 nt, Human
gaugccugguggcagcugc

SEQ ID NO: 2797670 - RNA, 18 nt, Human
gaugccugguggcagcug

SEQ ID NO: 2797671 - RNA, 20 nt, Human
gaugccugguggcagcugcg

SEQ ID NO: 2797672 - RNA, 23 nt, Human
gauggaugccaauauuaaaucug

SEQ ID NO: 2797673 - RNA, 17 nt, Human
gaugacaacuucccagu

SEQ ID NO: 2797674 - RNA, 16 nt, Human
gaugaaguuuuacauu

SEQ ID NO: 2797675 - RNA, 22 nt, Human
gaugaaguuuguaguuguuuua

SEQ ID NO: 2797676 - RNA, 17 nt, Human
gaugacaagaugguaca

SEQ ID NO: 2797677 - RNA, 20 nt, Human
gaugacaugcacucagcucu

SEQ ID NO: 2797678 - RNA, 13 nt, Human
gaugcaccagccc

SEQ ID NO: 2797679 - RNA, 20 nt, Human
gaugcauuguaguuuaacca

SEQ ID NO: 2797680 - RNA, 14 nt, Human
gaugcagccgccuu

SEQ ID NO: 2797681 - RNA, 20 nt, Human
gaugcagccgccuuccuuga

SEQ ID NO: 2797682 - RNA, 22 nt, Human
gaugcagccgccuuccuugacc

SEQ ID NO: 2797683 - RNA, 23 nt, Human
gaugcagagagccauuuugugaa

SEQ ID NO: 2797684 - RNA, 12 nt, Human
gaugcagcauuu

SEQ ID NO: 2797685 - RNA, 13 nt, Human
gaugcagcauuug

SEQ ID NO: 2797686 - RNA, 15 nt, Human
gaugcagcauuugau

SEQ ID NO: 2797687 - RNA, 23 nt, Human
gaugcagcauuugauaaugauaa

SEQ ID NO: 2797688 - RNA, 16 nt, Human
gaugccacccuagcca

SEQ ID NO: 2797689 - RNA, 15 nt, Human
gaugccacuccuccc

SEQ ID NO: 2797690 - RNA, 17 nt, Human
gaugccacuccucccuc

SEQ ID NO: 2797691 - RNA, 18 nt, Human
gaugccacuccucccucc

SEQ ID NO: 2797692 - RNA, 19 nt, Human
gaugccacuccucccuccg

SEQ ID NO: 2797693 - RNA, 17 nt, Human
gaugccugguggcagcu

SEQ ID NO: 2797694 - RNA, 12 nt, Human
gaugccacccua

SEQ ID NO: 2797695 - RNA, 19 nt, Human
gaugccaauauuaaaucug

SEQ ID NO: 2797696 - RNA, 22 nt, Human
gaugccaauacuagucacccca

SEQ ID NO: 2797697 - RNA, 19 nt, Human
gauacaccgggccuggaga

SEQ ID NO: 2797698 - RNA, 18 nt, Human
gauacaggaaaagcugcu

SEQ ID NO: 2797699 - RNA, 21 nt, Human
gauagaugcacuuaugcagua

SEQ ID NO: 2797700 - RNA, 16 nt, Human
gauacagcaguagaca

SEQ ID NO: 2797701 - RNA, 18 nt, Human
gauacagcaguagacauu

SEQ ID NO: 2797702 - RNA, 23 nt, Human
gauacagcaguagacauuuuaac

SEQ ID NO: 2797703 - RNA, 16 nt, Human
gauaaaguuucucaga

SEQ ID NO: 2797704 - RNA, 14 nt, Human
gauaaaguuucuca

SEQ ID NO: 2797705 - RNA, 15 nt, Human
gauaaaguuucucag

SEQ ID NO: 2797706 - RNA, 14 nt, Human
gauaaggacaugau

SEQ ID NO: 2797707 - RNA, 20 nt, Human
gauaaggacaugaugcuuuu

SEQ ID NO: 2797708 - RNA, 12 nt, Human
gauaaggaagaa

SEQ ID NO: 2797709 - RNA, 13 nt, Human
gauaaggaagaaa

SEQ ID NO: 2797710 - RNA, 15 nt, Human
gauaaggaagaaaca

SEQ ID NO: 2797711 - RNA, 21 nt, Human
gauaaggaagaaacagaagag

SEQ ID NO: 2797712 - RNA, 23 nt, Human
gauaagccacucugucccuuccu

SEQ ID NO: 2797713 - RNA, 20 nt, Human
gauaagagggcacacacugu

SEQ ID NO: 2797714 - RNA, 13 nt, Human
gauaaauauuuga

SEQ ID NO: 2797715 - RNA, 14 nt, Human
gauaaauauuugac

SEQ ID NO: 2797716 - RNA, 16 nt, Human
gauaaauauuugacuu

SEQ ID NO: 2797717 - RNA, 22 nt, Human
gauaaagaugcaaggaccagga

SEQ ID NO: 2797718 - RNA, 14 nt, Human
gauaaagcacagcu

SEQ ID NO: 2797719 - RNA, 15 nt, Human
gauaaagcacagcug

SEQ ID NO: 2797720 - RNA, 16 nt, Human
gauaaagcagcucagg

SEQ ID NO: 2797721 - RNA, 17 nt, Human
gauaaagccucaagguu

SEQ ID NO: 2797722 - RNA, 21 nt, Human
gauaaagcugccccaucuggg

SEQ ID NO: 2797723 - RNA, 14 nt, Human
gauagucuuucagu

SEQ ID NO: 2797724 - RNA, 15 nt, Human
gauaguaacaaugaa

SEQ ID NO: 2797725 - RNA, 17 nt, Human
gauaguacuaagcauuu

SEQ ID NO: 2797726 - RNA, 22 nt, Human
gauagucuuucaguuaaggaga

SEQ ID NO: 2797727 - RNA, 18 nt, Human
gaucaaggagaggaggca

SEQ ID NO: 2797728 - RNA, 16 nt, Human
gaucaaggagaggagg

SEQ ID NO: 2797729 - RNA, 18 nt, Human
gaucacgccacugcacua

SEQ ID NO: 2797730 - RNA, 16 nt, Human
gaucacgccacugcac

SEQ ID NO: 2797731 - RNA, 14 nt, Human
gaucaauccuuuau

SEQ ID NO: 2797732 - RNA, 15 nt, Human
gaucaauccuuuauu

SEQ ID NO: 2797733 - RNA, 22 nt, Human
gaucaauccuuuauuauuauuu

SEQ ID NO: 2797734 - RNA, 12 nt, Human
gaucacggcuca

SEQ ID NO: 2797735 - RNA, 24 nt, Human
gaucacgccacugcacuccagccu

SEQ ID NO: 2797736 - RNA, 14 nt, Human
gaucacgccuggcu

SEQ ID NO: 2797737 - RNA, 15 nt, Human
gaucacgccuggcua

SEQ ID NO: 2797738 - RNA, 23 nt, Human
gaucacgccacugcacuccagcc

SEQ ID NO: 2797739 - RNA, 16 nt, Human
gaucaauuauaguuuc

SEQ ID NO: 2797740 - RNA, 18 nt, Human
gaucaauuauaguuucug

SEQ ID NO: 2797741 - RNA, 14 nt, Human
gaucagcaucugug

SEQ ID NO: 2797742 - RNA, 22 nt, Human
gaucagaugcuccaagauucua

SEQ ID NO: 2797743 - RNA, 17 nt, Human
gaucagaugcuccaaga

SEQ ID NO: 2797744 - RNA, 21 nt, Human
gaucagaugcuccaagauucu

SEQ ID NO: 2797745 - RNA, 19 nt, Human
gaucaauuauaguuucuga

SEQ ID NO: 2797746 - RNA, 22 nt, Human
gaucagucugauucccaagcuc

SEQ ID NO: 2797747 - RNA, 21 nt, Human
gaucauccacugugccaugug

SEQ ID NO: 2797748 - RNA, 16 nt, Human
gaucauccacugugcc

SEQ ID NO: 2797749 - RNA, 14 nt, Human
gaucaucgccagag

SEQ ID NO: 2797750 - RNA, 16 nt, Human
gaucaucgccagaggu

SEQ ID NO: 2797751 - RNA, 19 nt, Human
gaucaucgccagaggugcu

SEQ ID NO: 2797752 - RNA, 21 nt, Human
gaucaucgccagaggugcuuc

SEQ ID NO: 2797753 - RNA, 23 nt, Human
gaucaucgccagaggugcuucac

SEQ ID NO: 2797754 - RNA, 23 nt, Human
gaucaucgucauuugcugugaac

SEQ ID NO: 2797755 - RNA, 19 nt, Human
gaucaugaaaguagacagu

SEQ ID NO: 2797756 - RNA, 14 nt, Human
gaucaugguguaau

SEQ ID NO: 2797757 - RNA, 15 nt, Human
gaucaugguguaaua

SEQ ID NO: 2797758 - RNA, 18 nt, Human
gaucaugguguaauaaga

SEQ ID NO: 2797759 - RNA, 20 nt, Human
gaucaugguguaauaagaca

SEQ ID NO: 2797760 - RNA, 21 nt, Human
gaucaugguguaauaagacau

SEQ ID NO: 2797761 - RNA, 23 nt, Human
gaucaugguguaauaagacauaa

SEQ ID NO: 2797762 - RNA, 22 nt, Human
gaucaucccaucuaagcugcag

SEQ ID NO: 2797763 - RNA, 23 nt, Human
gaucaucccaucuaagcugcagc

SEQ ID NO: 2797764 - RNA, 19 nt, Human
gaucauccacugugccaug

SEQ ID NO: 2797765 - RNA, 17 nt, Human
gaucauccacugugcca

SEQ ID NO: 2797766 - RNA, 18 nt, Human
gaucaguuauaaguagca

SEQ ID NO: 2797767 - RNA, 15 nt, Human
gaucauaaacugacu

SEQ ID NO: 2797768 - RNA, 13 nt, Human
gaucaguggacag

SEQ ID NO: 2797769 - RNA, 20 nt, Human
gaucaguguaccauuugccu

SEQ ID NO: 2797770 - RNA, 11 nt, Human
gaucaguguug

SEQ ID NO: 2797771 - RNA, 14 nt, Human
gaucaguuaacuau

SEQ ID NO: 2797772 - RNA, 17 nt, Human
gauccccguuccugaca

SEQ ID NO: 2797773 - RNA, 23 nt, Human
gaucauuuuccccccacucuccc

SEQ ID NO: 2797774 - RNA, 14 nt, Human
gauccccaagugug

SEQ ID NO: 2797775 - RNA, 18 nt, Human
gauccccaagugugaaca

SEQ ID NO: 2797776 - RNA, 20 nt, Human
gauccccaagugugaacaaa

SEQ ID NO: 2797777 - RNA, 19 nt, Human
gaucauuuuccccccacuc

SEQ ID NO: 2797778 - RNA, 18 nt, Human
gaucauuuuccccccacu

SEQ ID NO: 2797779 - RNA, 20 nt, Human
gauccccaagccuggcaagg

SEQ ID NO: 2797780 - RNA, 15 nt, Human
gaucauguuguuaaa

SEQ ID NO: 2797781 - RNA, 19 nt, Human
gaucauguuguuaaaauua

SEQ ID NO: 2797782 - RNA, 21 nt, Human
gaucauguuguuaaaauuaug

SEQ ID NO: 2797783 - RNA, 18 nt, Human
gaucauguuuuggugaaa

SEQ ID NO: 2797784 - RNA, 15 nt, Human
gaucauuuucccccc

SEQ ID NO: 2797785 - RNA, 14 nt, Human
gaucauuuuccccc

SEQ ID NO: 2797786 - RNA, 18 nt, Human
gaucauuuguuggaauga

SEQ ID NO: 2797787 - RNA, 15 nt, Human
gcaaggcuaugugau

SEQ ID NO: 2797788 - RNA, 16 nt, Human
gcaaggagcacaagcc

SEQ ID NO: 2797789 - RNA, 23 nt, Human
gcaaggcgguggacuugaacuuu

SEQ ID NO: 2797790 - RNA, 14 nt, Human
gcaaggcccugcug

SEQ ID NO: 2797791 - RNA, 15 nt, Human
gcaaggcccugcugc

SEQ ID NO: 2797792 - RNA, 16 nt, Human
gcaaggcccugcugcc

SEQ ID NO: 2797793 - RNA, 19 nt, Human
gcaaggcccugcugcccaa

SEQ ID NO: 2797794 - RNA, 13 nt, Human
gcaaggcccacag

SEQ ID NO: 2797795 - RNA, 14 nt, Human
gcaaggcccacagg

SEQ ID NO: 2797796 - RNA, 16 nt, Human
gcaaggcccacaggag

SEQ ID NO: 2797797 - RNA, 18 nt, Human
gcaagagugauugcagcu

SEQ ID NO: 2797798 - RNA, 19 nt, Human
gcaagagugauugcagcuu

SEQ ID NO: 2797799 - RNA, 19 nt, Human
gcaagaguguggaggcuga

SEQ ID NO: 2797800 - RNA, 19 nt, Human
gcaagauagauuuggaaua

SEQ ID NO: 2797801 - RNA, 15 nt, Human
gcaagccccugcucc

SEQ ID NO: 2797802 - RNA, 15 nt, Human
gcaagcccuacagag

SEQ ID NO: 2797803 - RNA, 20 nt, Human
gcaagcccuacagagcugug

SEQ ID NO: 2797804 - RNA, 21 nt, Human
gcaagcccuacagagcugugg

SEQ ID NO: 2797805 - RNA, 16 nt, Human
gcaagcgacgacagau

SEQ ID NO: 2797806 - RNA, 14 nt, Human
gcaagcuaaccuua

SEQ ID NO: 2797807 - RNA, 15 nt, Human
gcaagcuaaccuuau

SEQ ID NO: 2797808 - RNA, 23 nt, Human
gcaagcuaaccuuauccugcauu

SEQ ID NO: 2797809 - RNA, 13 nt, Human
gcaagcucccaag

SEQ ID NO: 2797810 - RNA, 19 nt, Human
gcaagcucccaagggaugg

SEQ ID NO: 2797811 - RNA, 21 nt, Human
gcaaggaccaggacucccucc

SEQ ID NO: 2797812 - RNA, 15 nt, Human
gcaaucacagaugag

SEQ ID NO: 2797813 - RNA, 18 nt, Human
gcaauauuugaauuuuaa

SEQ ID NO: 2797814 - RNA, 21 nt, Human
gcaauauuuauggaugcaaca

SEQ ID NO: 2797815 - RNA, 14 nt, Human
gcaauauuugaauu

SEQ ID NO: 2797816 - RNA, 22 nt, Human
gcaagggcacaaguccuggaug

SEQ ID NO: 2797817 - RNA, 15 nt, Human
gcaaggucauuucuu

SEQ ID NO: 2797818 - RNA, 23 nt, Human
gcaaugcuggcuguuggcugggg

SEQ ID NO: 2797819 - RNA, 22 nt, Human
gcaaugcuggcuguuggcuggg

SEQ ID NO: 2797820 - RNA, 14 nt, Human
gcaaugcuggcugu

SEQ ID NO: 2797821 - RNA, 13 nt, Human
gcaaugcuggcug

SEQ ID NO: 2797822 - RNA, 17 nt, Human
gcaaugaugaaugagaa

SEQ ID NO: 2797823 - RNA, 16 nt, Human
gcaaugaugaaugaga

SEQ ID NO: 2797824 - RNA, 23 nt, Human
gcaaacagaggaagaauuuguua

SEQ ID NO: 2797825 - RNA, 21 nt, Human
gcaaacaggaucaguuaacua

SEQ ID NO: 2797826 - RNA, 13 nt, Human
gcaaagcccagcu

SEQ ID NO: 2797827 - RNA, 21 nt, Human
gcaaagcccagcuugaaaccu

SEQ ID NO: 2797828 - RNA, 17 nt, Human
gcaaaauugauguguuu

SEQ ID NO: 2797829 - RNA, 15 nt, Human
gauuuuuuaaaagaa

SEQ ID NO: 2797830 - RNA, 16 nt, Human
gauuuuuuaaaagaaa

SEQ ID NO: 2797831 - RNA, 17 nt, Human
gauuuuuuaaaagaaau

SEQ ID NO: 2797832 - RNA, 20 nt, Human
gauuuuugcaauaccaagua

SEQ ID NO: 2797833 - RNA, 14 nt, Human
gauuuuuguugauu

SEQ ID NO: 2797834 - RNA, 13 nt, Human
gcaaacagaacag

SEQ ID NO: 2797835 - RNA, 14 nt, Human
gcaaacagaacagg

SEQ ID NO: 2797836 - RNA, 15 nt, Human
gcaaacagaacaggg

SEQ ID NO: 2797837 - RNA, 16 nt, Human
gcaaacagaacagggu

SEQ ID NO: 2797838 - RNA, 21 nt, Human
gcaaaauuugaugccaggaca

SEQ ID NO: 2797839 - RNA, 22 nt, Human
gcaaaauuugaugccaggacac

SEQ ID NO: 2797840 - RNA, 21 nt, Human
gcaaaauuguuuuugguugga

SEQ ID NO: 2797841 - RNA, 15 nt, Human
gcaaaauuugaugcc

SEQ ID NO: 2797842 - RNA, 20 nt, Human
gcaaaauuugaugccaggac

SEQ ID NO: 2797843 - RNA, 17 nt, Human
gcaaaauugcaaaucuu

SEQ ID NO: 2797844 - RNA, 13 nt, Human
gcaaaauugcaaa

SEQ ID NO: 2797845 - RNA, 21 nt, Human
gcaaagguuccaacuguauau

SEQ ID NO: 2797846 - RNA, 12 nt, Human
gcaaaguacaau

SEQ ID NO: 2797847 - RNA, 16 nt, Human
gcaaaguacaaugugu

SEQ ID NO: 2797848 - RNA, 19 nt, Human
gcaaaguacaauguguuuu

SEQ ID NO: 2797849 - RNA, 12 nt, Human
gcaaaucaaugc

SEQ ID NO: 2797850 - RNA, 19 nt, Human
gcaaagguuccaacuguau

SEQ ID NO: 2797851 - RNA, 15 nt, Human
gcaaaguauuguaaa

SEQ ID NO: 2797852 - RNA, 16 nt, Human
gcaaaguauuguaaau

SEQ ID NO: 2797853 - RNA, 17 nt, Human
gcaaaguauuguaaauu

SEQ ID NO: 2797854 - RNA, 18 nt, Human
gcaaaguauuguaaauua

SEQ ID NO: 2797855 - RNA, 20 nt, Human
gcaaaguauuguaaauuaua

SEQ ID NO: 2797856 - RNA, 21 nt, Human
gcaaaguauuguaaauuauau

SEQ ID NO: 2797857 - RNA, 15 nt, Human
gcaaauauaaacauc

SEQ ID NO: 2797858 - RNA, 16 nt, Human
gcaaauauaaacaucu

SEQ ID NO: 2797859 - RNA, 17 nt, Human
gcaaauauaaacaucuc

SEQ ID NO: 2797860 - RNA, 20 nt, Human
gcaaauaucauacuguucaa

SEQ ID NO: 2797861 - RNA, 19 nt, Human
gcaaaucaguguuuuucuu

SEQ ID NO: 2797862 - RNA, 13 nt, Human
gcaagaaguagca

SEQ ID NO: 2797863 - RNA, 16 nt, Human
gcaagaauaaaaaaga

SEQ ID NO: 2797864 - RNA, 17 nt, Human
gcaagaauaaaaaagaa

SEQ ID NO: 2797865 - RNA, 16 nt, Human
gcaagaacucaucacu

SEQ ID NO: 2797866 - RNA, 20 nt, Human
gcaagaacucaucacugugg

SEQ ID NO: 2797867 - RNA, 21 nt, Human
gcaagaacucaucacuguggc

SEQ ID NO: 2797868 - RNA, 22 nt, Human
gcaagaacucaucacuguggcu

SEQ ID NO: 2797869 - RNA, 19 nt, Human
gcaagaaaaaaaaaugcca

SEQ ID NO: 2797870 - RNA, 16 nt, Human
gcaacacagccugggc

SEQ ID NO: 2797871 - RNA, 18 nt, Human
gcaacacagccugggccc

SEQ ID NO: 2797872 - RNA, 23 nt, Human
gcaacacagccugggccccagcu

SEQ ID NO: 2797873 - RNA, 16 nt, Human
gcaacacgcaugguca

SEQ ID NO: 2797874 - RNA, 17 nt, Human
gcaacacucuauauuua

SEQ ID NO: 2797875 - RNA, 14 nt, Human
gcaacagagugaga

SEQ ID NO: 2797876 - RNA, 13 nt, Human
gcaacagacaagu

SEQ ID NO: 2797877 - RNA, 19 nt, Human
gcaacagagugagacccug

SEQ ID NO: 2797878 - RNA, 19 nt, Human
gcaacagacaagugacugu

SEQ ID NO: 2797879 - RNA, 20 nt, Human
gcaagaaugguggcuucuuu

SEQ ID NO: 2797880 - RNA, 21 nt, Human
gcaagaaugguggcuucuuuu

SEQ ID NO: 2797881 - RNA, 22 nt, Human
gcaagagauauuuugggcaugu

SEQ ID NO: 2797882 - RNA, 13 nt, Human
gcaagagagaacc

SEQ ID NO: 2797883 - RNA, 14 nt, Human
gcaagagagaaccu

SEQ ID NO: 2797884 - RNA, 22 nt, Human
gcaagagagaaccuaacuguau

SEQ ID NO: 2797885 - RNA, 21 nt, Human
gauuuuccugaaacacuaaag

SEQ ID NO: 2797886 - RNA, 22 nt, Human
gauuuuauuacuggcguggauu

SEQ ID NO: 2797887 - RNA, 14 nt, Human
gauuuucauaacuu

SEQ ID NO: 2797888 - RNA, 16 nt, Human
gauuuucauaacuuau

SEQ ID NO: 2797889 - RNA, 23 nt, Human
gauuuucauaacuuauugcugau

SEQ ID NO: 2797890 - RNA, 14 nt, Human
gauuuucauguucu

SEQ ID NO: 2797891 - RNA, 15 nt, Human
gauuuucauguucuu

SEQ ID NO: 2797892 - RNA, 13 nt, Human
gauuuucuccagc

SEQ ID NO: 2797893 - RNA, 14 nt, Human
gauuuucuccagcu

SEQ ID NO: 2797894 - RNA, 15 nt, Human
gauuuucuccagcuc

SEQ ID NO: 2797895 - RNA, 16 nt, Human
gauuuucuccagcuca

SEQ ID NO: 2797896 - RNA, 21 nt, Human
gauuuucugggccuaaaggau

SEQ ID NO: 2797897 - RNA, 16 nt, Human
gauuuuuacuguguuu

SEQ ID NO: 2797898 - RNA, 15 nt, Human
gauuuucugguucua

SEQ ID NO: 2797899 - RNA, 16 nt, Human
gauuuucugguucuaa

SEQ ID NO: 2797900 - RNA, 20 nt, Human
gauuuuuauauuaguugcuu

SEQ ID NO: 2797901 - RNA, 22 nt, Human
gauuuuuauauuaguugcuuug

SEQ ID NO: 2797902 - RNA, 18 nt, Human
gauuuuuacuguguuuua

SEQ ID NO: 2797903 - RNA, 12 nt, Human
gauuuuucucaa

SEQ ID NO: 2797904 - RNA, 13 nt, Human
gauuuuucucaaa

SEQ ID NO: 2797905 - RNA, 23 nt, Human
gauuuuucggaggccccacugau

SEQ ID NO: 2797906 - RNA, 16 nt, Human
gauuuuucuaaccuug

SEQ ID NO: 2797907 - RNA, 22 nt, Human
gauuuuucuaaccuugaaugcu

SEQ ID NO: 2797908 - RNA, 23 nt, Human
gauuuuucuaaccuugaaugcug

SEQ ID NO: 2797909 - RNA, 18 nt, Human
gauuuuucucaaaguuuu

SEQ ID NO: 2797910 - RNA, 15 nt, Human
gauuuuauuuuacua

SEQ ID NO: 2797911 - RNA, 19 nt, Human
gauuuucaaagcuuuuucc

SEQ ID NO: 2797912 - RNA, 21 nt, Human
gauuuucaaccagauaacaua

SEQ ID NO: 2797913 - RNA, 18 nt, Human
gauuuucaaagcuuuuuc

SEQ ID NO: 2797914 - RNA, 14 nt, Human
gauuugucccaggu

SEQ ID NO: 2797915 - RNA, 14 nt, Human
gauuuguacugaaa

SEQ ID NO: 2797916 - RNA, 21 nt, Human
gauuuguaggaaggucucauu

SEQ ID NO: 2797917 - RNA, 23 nt, Human
gauuuguaggaaggucucauucu

SEQ ID NO: 2797918 - RNA, 12 nt, Human
gauuuccccucu

SEQ ID NO: 2797919 - RNA, 18 nt, Human
gauuuccagccagggcug

SEQ ID NO: 2797920 - RNA, 19 nt, Human
gauuuccagccagggcugc

SEQ ID NO: 2797921 - RNA, 11 nt, Human
gauugcagcuu

SEQ ID NO: 2797922 - RNA, 12 nt, Human
gauugcagcuuu

SEQ ID NO: 2797923 - RNA, 18 nt, Human
gauugcagcuuuauguuc

SEQ ID NO: 2797924 - RNA, 21 nt, Human
gauugcaauaucugaagcccu

SEQ ID NO: 2797925 - RNA, 14 nt, Human
gauugcacauuguu

SEQ ID NO: 2797926 - RNA, 21 nt, Human
gauuugcauugaacacaaacu

SEQ ID NO: 2797927 - RNA, 18 nt, Human
gauuugccacaucuuaaa

SEQ ID NO: 2797928 - RNA, 16 nt, Human
gauuucugguucugau

SEQ ID NO: 2797929 - RNA, 18 nt, Human
gauuucugguucugaugc

SEQ ID NO: 2797930 - RNA, 17 nt, Human
gauuugcauugaacaca

SEQ ID NO: 2797931 - RNA, 12 nt, Human
gauuuggaaaaa

SEQ ID NO: 2797932 - RNA, 23 nt, Human
gauuugggcuggaacagauucac

SEQ ID NO: 2797933 - RNA, 22 nt, Human
gauuugguacuuuugagugugu

SEQ ID NO: 2797934 - RNA, 12 nt, Human
gauuugggcugg

SEQ ID NO: 2797935 - RNA, 15 nt, Human
gauuugggaaccaag

SEQ ID NO: 2797936 - RNA, 18 nt, Human
gauucagauuguuaucua

SEQ ID NO: 2797937 - RNA, 19 nt, Human
gauucauaguaacuucuua

SEQ ID NO: 2797938 - RNA, 18 nt, Human
gauucccaagcucugcuc

SEQ ID NO: 2797939 - RNA, 22 nt, Human
gauuccauuuggcagagcuucu

SEQ ID NO: 2797940 - RNA, 18 nt, Human
gauuccauugguccaaga

SEQ ID NO: 2797941 - RNA, 14 nt, Human
gauuccaugcuaag

SEQ ID NO: 2797942 - RNA, 15 nt, Human
gauuccaugcuaagc

SEQ ID NO: 2797943 - RNA, 20 nt, Human
gauuccaugcuaagcaagcu

SEQ ID NO: 2797944 - RNA, 15 nt, Human
gauuccagcccacau

SEQ ID NO: 2797945 - RNA, 18 nt, Human
gauuccagcccacauugg

SEQ ID NO: 2797946 - RNA, 22 nt, Human
gauuccagagaguggcuccucc

SEQ ID NO: 2797947 - RNA, 19 nt, Human
gauuccagagaguggcucc

SEQ ID NO: 2797948 - RNA, 20 nt, Human
gauuccagagaguggcuccu

SEQ ID NO: 2797949 - RNA, 21 nt, Human
gauggggauaaaaugacuacu

SEQ ID NO: 2797950 - RNA, 22 nt, Human
gauggggauaaaaugacuacuu

SEQ ID NO: 2797951 - RNA, 23 nt, Human
gauggggauaaaaugacuacuua

SEQ ID NO: 2797952 - RNA, 17 nt, Human
gaugggggaaagcacag

SEQ ID NO: 2797953 - RNA, 21 nt, Human
gaugggggaaagcacaggugg

SEQ ID NO: 2797954 - RNA, 21 nt, Human
gauggggcccuaauucagcca

SEQ ID NO: 2797955 - RNA, 23 nt, Human
gauggggggggauguggaucagg

SEQ ID NO: 2797956 - RNA, 23 nt, Human
gauggggucucacaguguugccc

SEQ ID NO: 2797957 - RNA, 20 nt, Human
gauucccaagcucugcuccu

SEQ ID NO: 2797958 - RNA, 19 nt, Human
gauucccaagcucugcucc

SEQ ID NO: 2797959 - RNA, 21 nt, Human
gauucccaagcucugcuccuc

SEQ ID NO: 2797960 - RNA, 21 nt, Human
gauucagagaaaggcaaggga

SEQ ID NO: 2797961 - RNA, 13 nt, Human
gauuccuucucug

SEQ ID NO: 2797962 - RNA, 15 nt, Human
gauuccuucucugaa

SEQ ID NO: 2797963 - RNA, 22 nt, Human
gauuccuucucugaacacaggc

SEQ ID NO: 2797964 - RNA, 11 nt, Human
gauucuaaaau

SEQ ID NO: 2797965 - RNA, 12 nt, Human
gauucuaaaaug

SEQ ID NO: 2797966 - RNA, 22 nt, Human
gauucuaaaaugugauguucua

SEQ ID NO: 2797967 - RNA, 11 nt, Human
gauucuaaaga

SEQ ID NO: 2797968 - RNA, 12 nt, Human
gauucuaaagau

SEQ ID NO: 2797969 - RNA, 13 nt, Human
gauucuaaagauu

SEQ ID NO: 2797970 - RNA, 16 nt, Human
gauuccuuuuuucaaa

SEQ ID NO: 2797971 - RNA, 20 nt, Human
gauugcaacaggcugggcuu

SEQ ID NO: 2797972 - RNA, 21 nt, Human
gauugcaacaggcugggcuuc

SEQ ID NO: 2797973 - RNA, 14 nt, Human
gauucuaaagauuc

SEQ ID NO: 2797974 - RNA, 18 nt, Human
gauugcaauaucugaagc

SEQ ID NO: 2797975 - RNA, 17 nt, Human
gcaguuauuaacacuaa

SEQ ID NO: 2797976 - RNA, 11 nt, Human
gcaguucuguu

SEQ ID NO: 2797977 - RNA, 12 nt, Human
gcaguucuguua

SEQ ID NO: 2797978 - RNA, 15 nt, Human
gcagugggagcugcc

SEQ ID NO: 2797979 - RNA, 14 nt, Human
gcagugggagcugc

SEQ ID NO: 2797980 - RNA, 12 nt, Human
gcagugggagcu

SEQ ID NO: 2797981 - RNA, 13 nt, Human
gcagugggagcug

SEQ ID NO: 2797982 - RNA, 23 nt, Human
gcagugucuguaaaagagccuag

SEQ ID NO: 2797983 - RNA, 19 nt, Human
gcagugugaaguacaauaa

SEQ ID NO: 2797984 - RNA, 13 nt, Human
gcaguucaccugc

SEQ ID NO: 2797985 - RNA, 14 nt, Human
gcaguucuugaguu

SEQ ID NO: 2797986 - RNA, 16 nt, Human
gcauagaacuggguaa

SEQ ID NO: 2797987 - RNA, 17 nt, Human
gcauagaacuggguaaa

SEQ ID NO: 2797988 - RNA, 18 nt, Human
gcauauccaccaccuccc

SEQ ID NO: 2797989 - RNA, 18 nt, Human
gcauaucaugcuuugaaa

SEQ ID NO: 2797990 - RNA, 20 nt, Human
gcauaucaugcuuugaaaaa

SEQ ID NO: 2797991 - RNA, 22 nt, Human
gcauagagguaccagcaauaug

SEQ ID NO: 2797992 - RNA, 19 nt, Human
gcauagaugcaggugagcc

SEQ ID NO: 2797993 - RNA, 23 nt, Human
gcauagauguuuugguagauuaa

SEQ ID NO: 2797994 - RNA, 16 nt, Human
gcauagaugcagguga

SEQ ID NO: 2797995 - RNA, 14 nt, Human
gcaucaccucaggc

SEQ ID NO: 2797996 - RNA, 17 nt, Human
gcaucaccucaggccag

SEQ ID NO: 2797997 - RNA, 15 nt, Human
gcaucaccucaggcc

SEQ ID NO: 2797998 - RNA, 12 nt, Human
gcauagugcugg

SEQ ID NO: 2797999 - RNA, 17 nt, Human
gcauauggguuagaugu

SEQ ID NO: 2798000 - RNA, 21 nt, Human
gcauauuuauccaaaaugugu

SEQ ID NO: 2798001 - RNA, 23 nt, Human
gcauauuuauccaaaauguguau

SEQ ID NO: 2798002 - RNA, 21 nt, Human
gcaguggccccuuaggccagu

SEQ ID NO: 2798003 - RNA, 14 nt, Human
gcaguggagguggg

SEQ ID NO: 2798004 - RNA, 23 nt, Human
gcaguggaggugggguguuuggg

SEQ ID NO: 2798005 - RNA, 15 nt, Human
gcagugcaggcacag

SEQ ID NO: 2798006 - RNA, 18 nt, Human
gcagugcaggcacaguau

SEQ ID NO: 2798007 - RNA, 22 nt, Human
gcagguccaggguuugaguuca

SEQ ID NO: 2798008 - RNA, 19 nt, Human
gcagguagccagggggacu

SEQ ID NO: 2798009 - RNA, 21 nt, Human
gcagguagccagggggacuag

SEQ ID NO: 2798010 - RNA, 21 nt, Human
gcaggucaacagcuaugcugg

SEQ ID NO: 2798011 - RNA, 14 nt, Human
gcaggguguuggga

SEQ ID NO: 2798012 - RNA, 20 nt, Human
gcaggucuugaacuccuggc

SEQ ID NO: 2798013 - RNA, 19 nt, Human
gcaggucuugaacuccugg

SEQ ID NO: 2798014 - RNA, 14 nt, Human
gcaggucuuuaaau

SEQ ID NO: 2798015 - RNA, 21 nt, Human
gcaggucuuuaaaucauuuua

SEQ ID NO: 2798016 - RNA, 21 nt, Human
gcagggcucagcggggacagc

SEQ ID NO: 2798017 - RNA, 19 nt, Human
gcagggcucagcggggaca

SEQ ID NO: 2798018 - RNA, 15 nt, Human
gcagggccaggacug

SEQ ID NO: 2798019 - RNA, 19 nt, Human
gcagggccaggacugagcc

SEQ ID NO: 2798020 - RNA, 14 nt, Human
gcagggccaggacu

SEQ ID NO: 2798021 - RNA, 22 nt, Human
gcagggcucagcggggacagcu

SEQ ID NO: 2798022 - RNA, 14 nt, Human
gcagggcucagcgg

SEQ ID NO: 2798023 - RNA, 18 nt, Human
gcagggucucacucuguc

SEQ ID NO: 2798024 - RNA, 14 nt, Human
gcagggucugggca

SEQ ID NO: 2798025 - RNA, 17 nt, Human
gcagggucugggcagga

SEQ ID NO: 2798026 - RNA, 20 nt, Human
gcagggucugggcaggacuc

SEQ ID NO: 2798027 - RNA, 19 nt, Human
gcagggucuguuuggacug

SEQ ID NO: 2798028 - RNA, 21 nt, Human
gcagggucuguuuggacugca

SEQ ID NO: 2798029 - RNA, 17 nt, Human
gcagggucucacucugu

SEQ ID NO: 2798030 - RNA, 17 nt, Human
gcaggggcuacaagagg

SEQ ID NO: 2798031 - RNA, 19 nt, Human
gcaggggcuacaagaggga

SEQ ID NO: 2798032 - RNA, 22 nt, Human
gcauguucucugaggacacuaa

SEQ ID NO: 2798033 - RNA, 21 nt, Human
gcauguucucugaggacacua

SEQ ID NO: 2798034 - RNA, 15 nt, Human
gcauguucucugagg

SEQ ID NO: 2798035 - RNA, 14 nt, Human
gcauguucucugag

SEQ ID NO: 2798036 - RNA, 14 nt, Human
gcauggcacucccu

SEQ ID NO: 2798037 - RNA, 20 nt, Human
gcauggcacucccuccagca

SEQ ID NO: 2798038 - RNA, 21 nt, Human
gcauggcacucccuccagcac

SEQ ID NO: 2798039 - RNA, 20 nt, Human
gcauggcaaggacugcaggg

SEQ ID NO: 2798040 - RNA, 21 nt, Human
gcauggcaagucacaugcgua

SEQ ID NO: 2798041 - RNA, 18 nt, Human
gcauggaguugggcguua

SEQ ID NO: 2798042 - RNA, 14 nt, Human
gcauggauuucugu

SEQ ID NO: 2798043 - RNA, 15 nt, Human
gcauggauuucuguc

SEQ ID NO: 2798044 - RNA, 12 nt, Human
gcauggagcugg

SEQ ID NO: 2798045 - RNA, 15 nt, Human
gcauggagcuggccg

SEQ ID NO: 2798046 - RNA, 16 nt, Human
gcauggaggcccuccu

SEQ ID NO: 2798047 - RNA, 13 nt, Human
gcaugcuggggca

SEQ ID NO: 2798048 - RNA, 15 nt, Human
gcaugcuggggcaag

SEQ ID NO: 2798049 - RNA, 20 nt, Human
gcaugagauagcugguguua

SEQ ID NO: 2798050 - RNA, 22 nt, Human
gcaugagcauuggauacagcag

SEQ ID NO: 2798051 - RNA, 21 nt, Human
gcaugacuuguagcauauucu

SEQ ID NO: 2798052 - RNA, 15 nt, Human
gcaucuuugccucuc

SEQ ID NO: 2798053 - RNA, 23 nt, Human
gcaugagugcuggauauuuuacu

SEQ ID NO: 2798054 - RNA, 16 nt, Human
gcaucucuugaggcca

SEQ ID NO: 2798055 - RNA, 14 nt, Human
gcaucucuugaggc

SEQ ID NO: 2798056 - RNA, 15 nt, Human
gcaucaccugccugu

SEQ ID NO: 2798057 - RNA, 14 nt, Human
gcaucaccugccug

SEQ ID NO: 2798058 - RNA, 15 nt, Human
gcaucaccuccacca

SEQ ID NO: 2798059 - RNA, 15 nt, Human
gcaucaccucuguaa

SEQ ID NO: 2798060 - RNA, 16 nt, Human
gcaucaccugccuguu

SEQ ID NO: 2798061 - RNA, 20 nt, Human
gcaucacuccccaaggaaga

SEQ ID NO: 2798062 - RNA, 21 nt, Human
gcaucacuccccaaggaagag

SEQ ID NO: 2798063 - RNA, 15 nt, Human
gcaucugauuugcau

SEQ ID NO: 2798064 - RNA, 16 nt, Human
gcaucugauuugcaua

SEQ ID NO: 2798065 - RNA, 20 nt, Human
gcaucugauuugcauauuca

SEQ ID NO: 2798066 - RNA, 21 nt, Human
gcaucugauuugcauauucau

SEQ ID NO: 2798067 - RNA, 20 nt, Human
gcaucugaaauaggaaacaa

SEQ ID NO: 2798068 - RNA, 21 nt, Human
gcaucucuugaggccaggagu

SEQ ID NO: 2798069 - RNA, 20 nt, Human
gcaucucuugaggccaggag

SEQ ID NO: 2798070 - RNA, 18 nt, Human
gcaucucuugaggccagg

SEQ ID NO: 2798071 - RNA, 17 nt, Human
gcaucucuugaggccag

SEQ ID NO: 2798072 - RNA, 14 nt, Human
gcaugaagagaagc

SEQ ID NO: 2798073 - RNA, 22 nt, Human
gcaugaagagaagcaauuuugg

SEQ ID NO: 2798074 - RNA, 15 nt, Human
gcaugaagagcaaaa

SEQ ID NO: 2798075 - RNA, 18 nt, Human
gcaugaagagcaaaaaua

SEQ ID NO: 2798076 - RNA, 20 nt, Human
gcaugaagagcaaaaauauc

SEQ ID NO: 2798077 - RNA, 18 nt, Human
gcaugaaggaaacugaac

SEQ ID NO: 2798078 - RNA, 14 nt, Human
gcaugaaaggcuuu

SEQ ID NO: 2798079 - RNA, 18 nt, Human
gcaugaaaggcuuuuaaa

SEQ ID NO: 2798080 - RNA, 12 nt, Human
gcaugaaauuuu

SEQ ID NO: 2798081 - RNA, 15 nt, Human
gcaugaaauuuuuaa

SEQ ID NO: 2798082 - RNA, 17 nt, Human
gcaugaacaaguuuuaa

SEQ ID NO: 2798083 - RNA, 23 nt, Human
gcaucuuugccuugggcugcucc

SEQ ID NO: 2798084 - RNA, 16 nt, Human
gcaucuuuggggaggu

SEQ ID NO: 2798085 - RNA, 23 nt, Human
gcaucuuuggggagguguucacu

SEQ ID NO: 2798086 - RNA, 22 nt, Human
gcaucuuugccuugggcugcuc

SEQ ID NO: 2798087 - RNA, 16 nt, Human
gcaucuuauagcacuu

SEQ ID NO: 2798088 - RNA, 22 nt, Human
gcaucuuauagcacuuugaaau

SEQ ID NO: 2798089 - RNA, 20 nt, Human
gcaucuucgucuucacucuu

SEQ ID NO: 2798090 - RNA, 23 nt, Human
gcaucuucgucuucacucuuagg

SEQ ID NO: 2798091 - RNA, 13 nt, Human
gcaucuuugccuu

SEQ ID NO: 2798092 - RNA, 18 nt, Human
gcaucuuugccuugggcu

SEQ ID NO: 2798093 - RNA, 15 nt, Human
gcaucuuugccuugg

SEQ ID NO: 2798094 - RNA, 20 nt, Human
gcaucuuuagugcuuucuug

SEQ ID NO: 2798095 - RNA, 16 nt, Human
gccaaaaaaagacagg

SEQ ID NO: 2798096 - RNA, 20 nt, Human
gccaaaaaccuuagcucccu

SEQ ID NO: 2798097 - RNA, 13 nt, Human
gccaaaaaggaua

SEQ ID NO: 2798098 - RNA, 16 nt, Human
gccaaaaaggauacau

SEQ ID NO: 2798099 - RNA, 19 nt, Human
gccaaaaaggauacauaau

SEQ ID NO: 2798100 - RNA, 15 nt, Human
gccaaacccugucug

SEQ ID NO: 2798101 - RNA, 22 nt, Human
gccaaacccaugaggcaauguc

SEQ ID NO: 2798102 - RNA, 19 nt, Human
gcauuuuuauuucagauuu

SEQ ID NO: 2798103 - RNA, 23 nt, Human
gcauuuuuauuucagauuuugau

SEQ ID NO: 2798104 - RNA, 12 nt, Human
gcauuuuucugc

SEQ ID NO: 2798105 - RNA, 20 nt, Human
gcauuuuugauuuaugcaug

SEQ ID NO: 2798106 - RNA, 12 nt, Human
gcauuuguucac

SEQ ID NO: 2798107 - RNA, 21 nt, Human
gcauuuuugauuuaugcaugg

SEQ ID NO: 2798108 - RNA, 14 nt, Human
gccaaaaaaagaca

SEQ ID NO: 2798109 - RNA, 20 nt, Human
gccaaagcuaggguggcccu

SEQ ID NO: 2798110 - RNA, 11 nt, Human
gccaaauuauu

SEQ ID NO: 2798111 - RNA, 15 nt, Human
gccaaauuauuugug

SEQ ID NO: 2798112 - RNA, 16 nt, Human
gccaaagcuagggugg

SEQ ID NO: 2798113 - RNA, 22 nt, Human
gccaaagcuaggccuggccaga

SEQ ID NO: 2798114 - RNA, 16 nt, Human
gccaaagcuaggccug

SEQ ID NO: 2798115 - RNA, 20 nt, Human
gccaaagccaaagcuaggcc

SEQ ID NO: 2798116 - RNA, 13 nt, Human
gccaaagccaaag

SEQ ID NO: 2798117 - RNA, 15 nt, Human
gcauuauauaccauu

SEQ ID NO: 2798118 - RNA, 19 nt, Human
gcauuauauaccauuuauc

SEQ ID NO: 2798119 - RNA, 14 nt, Human
gcauuauugcauua

SEQ ID NO: 2798120 - RNA, 15 nt, Human
gcauuauugcauuau

SEQ ID NO: 2798121 - RNA, 23 nt, Human
gcauuauguccacuguguauaga

SEQ ID NO: 2798122 - RNA, 12 nt, Human
gcauuauucauu

SEQ ID NO: 2798123 - RNA, 13 nt, Human
gcauuauucauuu

SEQ ID NO: 2798124 - RNA, 16 nt, Human
gcauuauucauuuagu

SEQ ID NO: 2798125 - RNA, 18 nt, Human
gcauuauucauuuaguga

SEQ ID NO: 2798126 - RNA, 14 nt, Human
gcauuauucucuuu

SEQ ID NO: 2798127 - RNA, 16 nt, Human
gcauuauucucuuuua

SEQ ID NO: 2798128 - RNA, 21 nt, Human
gcauuauucucuuuuaucugu

SEQ ID NO: 2798129 - RNA, 22 nt, Human
gcauuauucucuuuuaucuguu

SEQ ID NO: 2798130 - RNA, 23 nt, Human
gcauuauucucuuuuaucuguuu

SEQ ID NO: 2798131 - RNA, 13 nt, Human
gcauucagagagc

SEQ ID NO: 2798132 - RNA, 16 nt, Human
gcauucagagagcagc

SEQ ID NO: 2798133 - RNA, 20 nt, Human
gcauucugccucucuaggac

SEQ ID NO: 2798134 - RNA, 15 nt, Human
gcauucuggcaguuu

SEQ ID NO: 2798135 - RNA, 21 nt, Human
gcauucuugguuggcuggccu

SEQ ID NO: 2798136 - RNA, 15 nt, Human
gcauucuuguacagu

SEQ ID NO: 2798137 - RNA, 11 nt, Human
gcauucuuucc

SEQ ID NO: 2798138 - RNA, 12 nt, Human
gcauucuuuccc

SEQ ID NO: 2798139 - RNA, 13 nt, Human
gcauucuuuccca

SEQ ID NO: 2798140 - RNA, 18 nt, Human
gcauucuuucccagugag

SEQ ID NO: 2798141 - RNA, 15 nt, Human
gcauuugugucaucu

SEQ ID NO: 2798142 - RNA, 12 nt, Human
gcauuugugaaa

SEQ ID NO: 2798143 - RNA, 23 nt, Human
gcauuugcucuuucaucucugcu

SEQ ID NO: 2798144 - RNA, 17 nt, Human
gcauuugcagauuuuua

SEQ ID NO: 2798145 - RNA, 20 nt, Human
gcauuugauaaugauaaaac

SEQ ID NO: 2798146 - RNA, 21 nt, Human
gcauuugauaaugauaaaaca

SEQ ID NO: 2798147 - RNA, 19 nt, Human
gcauugaacacaaacugua

SEQ ID NO: 2798148 - RNA, 18 nt, Human
gcauugaacacaaacugu

SEQ ID NO: 2798149 - RNA, 16 nt, Human
gcauugaacacaaacu

SEQ ID NO: 2798150 - RNA, 12 nt, Human
gcauugaacaca

SEQ ID NO: 2798151 - RNA, 17 nt, Human
gcauugaaaugagcacc

SEQ ID NO: 2798152 - RNA, 11 nt, Human
gcauugaaauu

SEQ ID NO: 2798153 - RNA, 17 nt, Human
gcauucuugguuggcug

SEQ ID NO: 2798154 - RNA, 17 nt, Human
gcagcaauuuaaauguu

SEQ ID NO: 2798155 - RNA, 23 nt, Human
gcagcaauauauuaccagcaaga

SEQ ID NO: 2798156 - RNA, 14 nt, Human
gcagcaaucuuuga

SEQ ID NO: 2798157 - RNA, 13 nt, Human
gcagcccuagagc

SEQ ID NO: 2798158 - RNA, 17 nt, Human
gcagcccuagagccugc

SEQ ID NO: 2798159 - RNA, 18 nt, Human
gcagcccuagagccugcc

SEQ ID NO: 2798160 - RNA, 19 nt, Human
gcagcccuagagccugccu

SEQ ID NO: 2798161 - RNA, 22 nt, Human
gcagcccuagagccugccugga

SEQ ID NO: 2798162 - RNA, 23 nt, Human
gcagccccgcgccuccuuccuug

SEQ ID NO: 2798163 - RNA, 14 nt, Human
gcagccccgggagg

SEQ ID NO: 2798164 - RNA, 23 nt, Human
gcagccccgggagggcggcacag

SEQ ID NO: 2798165 - RNA, 24 nt, Human
gcagccccauucugccugcccagg

SEQ ID NO: 2798166 - RNA, 21 nt, Human
gcagccccauucugccugccc

SEQ ID NO: 2798167 - RNA, 19 nt, Human
gcagccccauucugccugc

SEQ ID NO: 2798168 - RNA, 18 nt, Human
gcagccccauucugccug

SEQ ID NO: 2798169 - RNA, 17 nt, Human
gcagccccauucugccu

SEQ ID NO: 2798170 - RNA, 12 nt, Human
gcagcaauuuaa

SEQ ID NO: 2798171 - RNA, 16 nt, Human
gcagcaauuuaaaugu

SEQ ID NO: 2798172 - RNA, 15 nt, Human
gcagcaauuuaaaug

SEQ ID NO: 2798173 - RNA, 13 nt, Human
gcagaccucccca

SEQ ID NO: 2798174 - RNA, 15 nt, Human
gcagaccuccccagc

SEQ ID NO: 2798175 - RNA, 16 nt, Human
gcagaccuccccagcc

SEQ ID NO: 2798176 - RNA, 17 nt, Human
gcagaccuccccagccc

SEQ ID NO: 2798177 - RNA, 19 nt, Human
gcagaccuccccagccccu

SEQ ID NO: 2798178 - RNA, 21 nt, Human
gcagaccaccccgccugcccu

SEQ ID NO: 2798179 - RNA, 13 nt, Human
gcagaccaccccg

SEQ ID NO: 2798180 - RNA, 17 nt, Human
gcagaccaccccgccug

SEQ ID NO: 2798181 - RNA, 16 nt, Human
gcagauacugcugugu

SEQ ID NO: 2798182 - RNA, 18 nt, Human
gcagauacugcuguguaa

SEQ ID NO: 2798183 - RNA, 16 nt, Human
gcagauuugggcugga

SEQ ID NO: 2798184 - RNA, 14 nt, Human
gcagauuggaagga

SEQ ID NO: 2798185 - RNA, 16 nt, Human
gcagauuggaaggaga

SEQ ID NO: 2798186 - RNA, 20 nt, Human
gcagauuggaaggagacaca

SEQ ID NO: 2798187 - RNA, 22 nt, Human
gcagauuggaaggagacacaga

SEQ ID NO: 2798188 - RNA, 14 nt, Human
gcagaucaccugag

SEQ ID NO: 2798189 - RNA, 16 nt, Human
gcagaucaccugaggu

SEQ ID NO: 2798190 - RNA, 17 nt, Human
gcagaucaccugagguc

SEQ ID NO: 2798191 - RNA, 18 nt, Human
gcagauaccucacccugc

SEQ ID NO: 2798192 - RNA, 22 nt, Human
gcagauacaggaaaagcugcug

SEQ ID NO: 2798193 - RNA, 21 nt, Human
gcagauaacaaugcagcaagg

SEQ ID NO: 2798194 - RNA, 20 nt, Human
gcagauaacauuuguguguu

SEQ ID NO: 2798195 - RNA, 21 nt, Human
gcagauaacauuuguguguua

SEQ ID NO: 2798196 - RNA, 20 nt, Human
gcagaguuuguguguugucu

SEQ ID NO: 2798197 - RNA, 24 nt, Human
gcagaguuuguguguugucuugaa

SEQ ID NO: 2798198 - RNA, 13 nt, Human
gcagaguuugccu

SEQ ID NO: 2798199 - RNA, 19 nt, Human
gcagauaaucagccucuua

SEQ ID NO: 2798200 - RNA, 18 nt, Human
gcagauaaucagccucuu

SEQ ID NO: 2798201 - RNA, 17 nt, Human
gcagauaaucagccucu

SEQ ID NO: 2798202 - RNA, 16 nt, Human
gcagauaaucagccuc

SEQ ID NO: 2798203 - RNA, 22 nt, Human
gcagccuguggcaucuuugccu

SEQ ID NO: 2798204 - RNA, 19 nt, Human
gcagccuugaacucugggc

SEQ ID NO: 2798205 - RNA, 20 nt, Human
gcagccuugaacucugggcu

SEQ ID NO: 2798206 - RNA, 16 nt, Human
gcagccuguggcaucu

SEQ ID NO: 2798207 - RNA, 14 nt, Human
gcagccuguggcau

SEQ ID NO: 2798208 - RNA, 21 nt, Human
gcagcccugagaaagcccugu

SEQ ID NO: 2798209 - RNA, 13 nt, Human
gcagcccugcuuu

SEQ ID NO: 2798210 - RNA, 23 nt, Human
gcagcucaagcagcgaccgcccc

SEQ ID NO: 2798211 - RNA, 21 nt, Human
gcagcuugggagagccccugg

SEQ ID NO: 2798212 - RNA, 22 nt, Human
gcagcuugggagagccccuggg

SEQ ID NO: 2798213 - RNA, 17 nt, Human
gcagcuuuaaacucagg

SEQ ID NO: 2798214 - RNA, 19 nt, Human
gcagcuuuaaacucaggga

SEQ ID NO: 2798215 - RNA, 21 nt, Human
gcagcuugugugcaaaagcag

SEQ ID NO: 2798216 - RNA, 20 nt, Human
gcagcuuuaaacucagggac

SEQ ID NO: 2798217 - RNA, 21 nt, Human
gcagcuuuaaacucagggaca

SEQ ID NO: 2798218 - RNA, 22 nt, Human
gcagcuuuaaacucagggacag

SEQ ID NO: 2798219 - RNA, 15 nt, Human
gcagccuuggcaaac

SEQ ID NO: 2798220 - RNA, 17 nt, Human
gcagccuuugccucccc

SEQ ID NO: 2798221 - RNA, 18 nt, Human
gcagccuuugccuccccg

SEQ ID NO: 2798222 - RNA, 20 nt, Human
gcagcuaguccuagugaacc

SEQ ID NO: 2798223 - RNA, 21 nt, Human
gcagcuaguccuagugaaccu

SEQ ID NO: 2798224 - RNA, 14 nt, Human
gcagcuaguuuucu

SEQ ID NO: 2798225 - RNA, 17 nt, Human
gcagcucaacuuucugu

SEQ ID NO: 2798226 - RNA, 14 nt, Human
gcaggaggauugcu

SEQ ID NO: 2798227 - RNA, 19 nt, Human
gcaggaaucaaaaauugaa

SEQ ID NO: 2798228 - RNA, 20 nt, Human
gcaggaaggcugagaggaga

SEQ ID NO: 2798229 - RNA, 23 nt, Human
gcaggaaggagagccugcugcau

SEQ ID NO: 2798230 - RNA, 13 nt, Human
gcaggaaggccug

SEQ ID NO: 2798231 - RNA, 14 nt, Human
gcaggaaggccugg

SEQ ID NO: 2798232 - RNA, 15 nt, Human
gcaggaaggccuggg

SEQ ID NO: 2798233 - RNA, 17 nt, Human
gcaggaaggccugggug

SEQ ID NO: 2798234 - RNA, 17 nt, Human
gcaggaaggagagccug

SEQ ID NO: 2798235 - RNA, 16 nt, Human
gcaggaaggagagccu

SEQ ID NO: 2798236 - RNA, 15 nt, Human
gcaggaaggagagcc

SEQ ID NO: 2798237 - RNA, 21 nt, Human
gcaggaaaguuuacccaugaa

SEQ ID NO: 2798238 - RNA, 14 nt, Human
gcagcuuuauguuc

SEQ ID NO: 2798239 - RNA, 14 nt, Human
gcagcuuucuagaa

SEQ ID NO: 2798240 - RNA, 15 nt, Human
gcagcuuucuagaag

SEQ ID NO: 2798241 - RNA, 16 nt, Human
gcaggcagaucaccug

SEQ ID NO: 2798242 - RNA, 18 nt, Human
gcaggcagaucaccugag

SEQ ID NO: 2798243 - RNA, 20 nt, Human
gcaggcagaucaccugaggu

SEQ ID NO: 2798244 - RNA, 19 nt, Human
gcaggcacuuauuguaaau

SEQ ID NO: 2798245 - RNA, 20 nt, Human
gcaggcaccuagcaauucca

SEQ ID NO: 2798246 - RNA, 20 nt, Human
gcaggcagacuacacaggau

SEQ ID NO: 2798247 - RNA, 23 nt, Human
gcaggaggauugcuugagcccag

SEQ ID NO: 2798248 - RNA, 14 nt, Human
gcaggaggccaggc

SEQ ID NO: 2798249 - RNA, 16 nt, Human
gcaggaggccaggccg

SEQ ID NO: 2798250 - RNA, 15 nt, Human
gcaggaggccaggcc

SEQ ID NO: 2798251 - RNA, 17 nt, Human
gcaggaggccaggccgg

SEQ ID NO: 2798252 - RNA, 12 nt, Human
gcacggcugcug

SEQ ID NO: 2798253 - RNA, 23 nt, Human
gcacggccccgaagggcccccac

SEQ ID NO: 2798254 - RNA, 18 nt, Human
gcacggccucgcgucugu

SEQ ID NO: 2798255 - RNA, 12 nt, Human
gcacggacucuu

SEQ ID NO: 2798256 - RNA, 20 nt, Human
gcaccuugugucuguacacg

SEQ ID NO: 2798257 - RNA, 22 nt, Human
gcaccuugugucuguacacgug

SEQ ID NO: 2798258 - RNA, 22 nt, Human
gcaccuuuccuucaagccagca

SEQ ID NO: 2798259 - RNA, 21 nt, Human
gcaccuuaccaacuuucugua

SEQ ID NO: 2798260 - RNA, 16 nt, Human
gcaccuuugcacagga

SEQ ID NO: 2798261 - RNA, 19 nt, Human
gcaccuuugcacaggaugc

SEQ ID NO: 2798262 - RNA, 14 nt, Human
gcacgacgcccucu

SEQ ID NO: 2798263 - RNA, 16 nt, Human
gcacgacgcccucucc

SEQ ID NO: 2798264 - RNA, 17 nt, Human
gcacgacgcccucuccc

SEQ ID NO: 2798265 - RNA, 19 nt, Human
gcacgacgcccucucccca

SEQ ID NO: 2798266 - RNA, 20 nt, Human
gcacgacgcccucuccccac

SEQ ID NO: 2798267 - RNA, 21 nt, Human
gcacgacgcccucuccccacc

SEQ ID NO: 2798268 - RNA, 21 nt, Human
gcacccuaguucuaccucagg

SEQ ID NO: 2798269 - RNA, 20 nt, Human
gcaccuuaccaacuuucugu

SEQ ID NO: 2798270 - RNA, 19 nt, Human
gcacccggccccugcuggu

SEQ ID NO: 2798271 - RNA, 18 nt, Human
gcacccggccccugcugg

SEQ ID NO: 2798272 - RNA, 22 nt, Human
gcacccaccaucaugucuggcu

SEQ ID NO: 2798273 - RNA, 11 nt, Human
gcaccagccag

SEQ ID NO: 2798274 - RNA, 12 nt, Human
gcaccagccagc

SEQ ID NO: 2798275 - RNA, 13 nt, Human
gcaccagccagcg

SEQ ID NO: 2798276 - RNA, 19 nt, Human
gcaccagccagcguagcag

SEQ ID NO: 2798277 - RNA, 20 nt, Human
gcaccaucucugauuuucaa

SEQ ID NO: 2798278 - RNA, 23 nt, Human
gcaccacugcacuccagccuggg

SEQ ID NO: 2798279 - RNA, 23 nt, Human
gcaaugccauccucaaacacugc

SEQ ID NO: 2798280 - RNA, 20 nt, Human
gcaaugcugaugaaucacug

SEQ ID NO: 2798281 - RNA, 13 nt, Human
gcaauggcagccu

SEQ ID NO: 2798282 - RNA, 12 nt, Human
gcaauggcagcc

SEQ ID NO: 2798283 - RNA, 14 nt, Human
gcaauggcagccuu

SEQ ID NO: 2798284 - RNA, 22 nt, Human
gcacugguggcccgacagccug

SEQ ID NO: 2798285 - RNA, 23 nt, Human
gcacugguggcccgacagccugg

SEQ ID NO: 2798286 - RNA, 24 nt, Human
gcacugguggcccgacagccuggc

SEQ ID NO: 2798287 - RNA, 19 nt, Human
gcacugguggcccgacagc

SEQ ID NO: 2798288 - RNA, 22 nt, Human
gcacugguggcuugcaguuugc

SEQ ID NO: 2798289 - RNA, 11 nt, Human
gcacugccuga

SEQ ID NO: 2798290 - RNA, 18 nt, Human
gcacugccugauggaccu

SEQ ID NO: 2798291 - RNA, 18 nt, Human
gcacguggagagcuggug

SEQ ID NO: 2798292 - RNA, 16 nt, Human
gcacguggagagcugg

SEQ ID NO: 2798293 - RNA, 15 nt, Human
gcacguggagagcug

SEQ ID NO: 2798294 - RNA, 13 nt, Human
gcacggcugcuga

SEQ ID NO: 2798295 - RNA, 20 nt, Human
gcacguggagagcuggugcc

SEQ ID NO: 2798296 - RNA, 14 nt, Human
gcacugccaugcag

SEQ ID NO: 2798297 - RNA, 15 nt, Human
gcacugccaugcagg

SEQ ID NO: 2798298 - RNA, 17 nt, Human
gcacugccaugcagggc

SEQ ID NO: 2798299 - RNA, 13 nt, Human
gcacugccacugg

SEQ ID NO: 2798300 - RNA, 14 nt, Human
gcacugccacuggg

SEQ ID NO: 2798301 - RNA, 19 nt, Human
gcagacaggcaagcaccuc

SEQ ID NO: 2798302 - RNA, 23 nt, Human
gcagacaggcaagcaccuccugc

SEQ ID NO: 2798303 - RNA, 19 nt, Human
gcagacagcaggcagcgcc

SEQ ID NO: 2798304 - RNA, 20 nt, Human
gcagacagcaggcagcgcca

SEQ ID NO: 2798305 - RNA, 17 nt, Human
gcacuucaucuggcugc

SEQ ID NO: 2798306 - RNA, 18 nt, Human
gcacuucaucuggcugcc

SEQ ID NO: 2798307 - RNA, 23 nt, Human
gcacuucaucuggcugccuuugc

SEQ ID NO: 2798308 - RNA, 23 nt, Human
gcacuucauugagaguuuugucu

SEQ ID NO: 2798309 - RNA, 11 nt, Human
gcacuuccaaa

SEQ ID NO: 2798310 - RNA, 12 nt, Human
gcacuuccaaaa

SEQ ID NO: 2798311 - RNA, 18 nt, Human
gcacuuccaaaauucuua

SEQ ID NO: 2798312 - RNA, 11 nt, Human
gcacuucccug

SEQ ID NO: 2798313 - RNA, 12 nt, Human
gcacuucccugc

SEQ ID NO: 2798314 - RNA, 13 nt, Human
gcacuucccugcu

SEQ ID NO: 2798315 - RNA, 14 nt, Human
gcacuucccugcug

SEQ ID NO: 2798316 - RNA, 22 nt, Human
gcacuuccuguuuuauaaugaa

SEQ ID NO: 2798317 - RNA, 13 nt, Human
gcagaauguuuuu

SEQ ID NO: 2798318 - RNA, 17 nt, Human
gcagaauguuuuuaaaa

SEQ ID NO: 2798319 - RNA, 18 nt, Human
gcagaauaaucuuugggu

SEQ ID NO: 2798320 - RNA, 23 nt, Human
gcagaauccuaggcuccacccca

SEQ ID NO: 2798321 - RNA, 17 nt, Human
gcacuuagcuaucagaa

SEQ ID NO: 2798322 - RNA, 19 nt, Human
gcacuuagcuaucagaaga

SEQ ID NO: 2798323 - RNA, 14 nt, Human
gcacuuauuguaaa

SEQ ID NO: 2798324 - RNA, 16 nt, Human
gcacuuauuguaaauu

SEQ ID NO: 2798325 - RNA, 17 nt, Human
gcacuucagaauuccau

SEQ ID NO: 2798326 - RNA, 21 nt, Human
gcacuucagaauuccauaucu

SEQ ID NO: 2798327 - RNA, 18 nt, Human
gcacuuauuuaaugccga

SEQ ID NO: 2798328 - RNA, 22 nt, Human
gcacuuaagcacaagcagagug

SEQ ID NO: 2798329 - RNA, 19 nt, Human
gcacuuaaggcacucuguu

SEQ ID NO: 2798330 - RNA, 15 nt, Human
gcacuuacaauccca

SEQ ID NO: 2798331 - RNA, 19 nt, Human
gcgacagagcgagagucug

SEQ ID NO: 2798332 - RNA, 21 nt, Human
gcgccgcaaaccacacuggac

SEQ ID NO: 2798333 - RNA, 19 nt, Human
gcgccgcaaaccacacugg

SEQ ID NO: 2798334 - RNA, 23 nt, Human
gcgacagagcgagagucugucuc

SEQ ID NO: 2798335 - RNA, 18 nt, Human
gcgacaggaguauuuuuu

SEQ ID NO: 2798336 - RNA, 18 nt, Human
gcgccgcaaaccacacug

SEQ ID NO: 2798337 - RNA, 15 nt, Human
gcgccuacaggagug

SEQ ID NO: 2798338 - RNA, 18 nt, Human
gcgcgcacacacacacau

SEQ ID NO: 2798339 - RNA, 13 nt, Human
gcgcgcacacaca

SEQ ID NO: 2798340 - RNA, 20 nt, Human
gcgcgagggccucaaaggcc

SEQ ID NO: 2798341 - RNA, 21 nt, Human
gcgcgaucccacacaggcugg

SEQ ID NO: 2798342 - RNA, 23 nt, Human
gcgccuugucuccuacuccugac

SEQ ID NO: 2798343 - RNA, 21 nt, Human
gcgcggccagccccggcccug

SEQ ID NO: 2798344 - RNA, 23 nt, Human
gcgcggccagccccggcccuggg

SEQ ID NO: 2798345 - RNA, 17 nt, Human
gcgcgcucuucgcgccc

SEQ ID NO: 2798346 - RNA, 23 nt, Human
gcgcgcucuucgcgcccgccccu

SEQ ID NO: 2798347 - RNA, 19 nt, Human
gcgcgcacacacacacaua

SEQ ID NO: 2798348 - RNA, 14 nt, Human
gcgcgccacucgcu

SEQ ID NO: 2798349 - RNA, 13 nt, Human
gcgcggccagccc

SEQ ID NO: 2798350 - RNA, 14 nt, Human
gcgcggccagcccc

SEQ ID NO: 2798351 - RNA, 15 nt, Human
gcgcggccagccccg

SEQ ID NO: 2798352 - RNA, 16 nt, Human
gcgcggccagccccgg

SEQ ID NO: 2798353 - RNA, 13 nt, Human
gcggacagccacg

SEQ ID NO: 2798354 - RNA, 11 nt, Human
gcggacagcca

SEQ ID NO: 2798355 - RNA, 14 nt, Human
gcgcuaucuucaca

SEQ ID NO: 2798356 - RNA, 14 nt, Human
gcgcuauuacaaau

SEQ ID NO: 2798357 - RNA, 17 nt, Human
gcgcucaauaggaccag

SEQ ID NO: 2798358 - RNA, 19 nt, Human
gcgcucagaacaguaucuu

SEQ ID NO: 2798359 - RNA, 16 nt, Human
gcgcuacccacuucua

SEQ ID NO: 2798360 - RNA, 13 nt, Human
gcgcuacccacuu

SEQ ID NO: 2798361 - RNA, 17 nt, Human
gcgucgcccucccaggc

SEQ ID NO: 2798362 - RNA, 23 nt, Human
gcgguuaugaaauucacccccuu

SEQ ID NO: 2798363 - RNA, 18 nt, Human
gcggugggcacccacccu

SEQ ID NO: 2798364 - RNA, 16 nt, Human
gcgguggggagagaug

SEQ ID NO: 2798365 - RNA, 14 nt, Human
gcggugggggagga

SEQ ID NO: 2798366 - RNA, 14 nt, Human
gcgguggcccuguc

SEQ ID NO: 2798367 - RNA, 15 nt, Human
gcgguggcccugucc

SEQ ID NO: 2798368 - RNA, 20 nt, Human
gcgggucacaggagggaggg

SEQ ID NO: 2798369 - RNA, 19 nt, Human
gcgggucacaggagggagg

SEQ ID NO: 2798370 - RNA, 15 nt, Human
gcggacagccacggc

SEQ ID NO: 2798371 - RNA, 15 nt, Human
gcgggaugguccugg

SEQ ID NO: 2798372 - RNA, 17 nt, Human
gcgggaugguccugggg

SEQ ID NO: 2798373 - RNA, 16 nt, Human
gcgggaugguccuggg

SEQ ID NO: 2798374 - RNA, 19 nt, Human
gcgcgggccccggcgcccc

SEQ ID NO: 2798375 - RNA, 20 nt, Human
gcgggcaccuauagucccag

SEQ ID NO: 2798376 - RNA, 17 nt, Human
gcgggcaccuguagucc

SEQ ID NO: 2798377 - RNA, 15 nt, Human
gcgggucacaggagg

SEQ ID NO: 2798378 - RNA, 13 nt, Human
gcgggucacagga

SEQ ID NO: 2798379 - RNA, 14 nt, Human
gcgggcccagcacu

SEQ ID NO: 2798380 - RNA, 18 nt, Human
gcgggcagguucugccug

SEQ ID NO: 2798381 - RNA, 10 nt, Human
gcuagaacuu

SEQ ID NO: 2798382 - RNA, 11 nt, Human
gcuagaacuuu

SEQ ID NO: 2798383 - RNA, 12 nt, Human
gcuagaacuuuu

SEQ ID NO: 2798384 - RNA, 13 nt, Human
gcuagaacuuuuu

SEQ ID NO: 2798385 - RNA, 14 nt, Human
gcuagaacuuuuuu

SEQ ID NO: 2798386 - RNA, 17 nt, Human
gcuagaacuuuuuuaaa

SEQ ID NO: 2798387 - RNA, 19 nt, Human
gcuagaacuuuuuuaaaua

SEQ ID NO: 2798388 - RNA, 20 nt, Human
gcuagaacuuuuuuaaauaa

SEQ ID NO: 2798389 - RNA, 21 nt, Human
gcuagaacuuuuuuaaauaaa

SEQ ID NO: 2798390 - RNA, 22 nt, Human
gcuagaacuuuuuuaaauaaac

SEQ ID NO: 2798391 - RNA, 23 nt, Human
gcuagaacuuuuuuaaauaaacu

SEQ ID NO: 2798392 - RNA, 14 nt, Human
gcuagaagaaaaca

SEQ ID NO: 2798393 - RNA, 23 nt, Human
gcuagaagaaaacaaacugucac

SEQ ID NO: 2798394 - RNA, 13 nt, Human
gcuacauaaauug

SEQ ID NO: 2798395 - RNA, 23 nt, Human
gcuacauaaauuggccugguaug

SEQ ID NO: 2798396 - RNA, 12 nt, Human
gcuaccucccuc

SEQ ID NO: 2798397 - RNA, 13 nt, Human
gcuaccucccucc

SEQ ID NO: 2798398 - RNA, 14 nt, Human
gcuaccucccuccc

SEQ ID NO: 2798399 - RNA, 14 nt, Human
gcuaccucucuguc

SEQ ID NO: 2798400 - RNA, 15 nt, Human
gcuaccucucugucc

SEQ ID NO: 2798401 - RNA, 16 nt, Human
gcuaccucucuguccc

SEQ ID NO: 2798402 - RNA, 21 nt, Human
gcuaccucucugucccuugcu

SEQ ID NO: 2798403 - RNA, 22 nt, Human
gcuaccucucugucccuugcug

SEQ ID NO: 2798404 - RNA, 23 nt, Human
gcuacaggaagcaccccaugcca

SEQ ID NO: 2798405 - RNA, 22 nt, Human
gcuacaggaagcaccccaugcc

SEQ ID NO: 2798406 - RNA, 18 nt, Human
gcuauagcuacaggaagc

SEQ ID NO: 2798407 - RNA, 16 nt, Human
gcuauagcuacaggaa

SEQ ID NO: 2798408 - RNA, 22 nt, Human
gcuaggaaauccaggguggugg

SEQ ID NO: 2798409 - RNA, 16 nt, Human
gcuagcuuuuaggaaa

SEQ ID NO: 2798410 - RNA, 21 nt, Human
gcuagcuuuuaggaaaaucac

SEQ ID NO: 2798411 - RNA, 19 nt, Human
gcuaggaaauccagggugg

SEQ ID NO: 2798412 - RNA, 13 nt, Human
gcuagaauacuuu

SEQ ID NO: 2798413 - RNA, 15 nt, Human
gcuagaauacuuuuu

SEQ ID NO: 2798414 - RNA, 17 nt, Human
gcuaaacguuggugacg

SEQ ID NO: 2798415 - RNA, 13 nt, Human
gcgucugugugcg

SEQ ID NO: 2798416 - RNA, 20 nt, Human
gcgucuccuguuuuucuggg

SEQ ID NO: 2798417 - RNA, 11 nt, Human
gcgucuccugu

SEQ ID NO: 2798418 - RNA, 21 nt, Human
gcgucuggaaguccaaugugg

SEQ ID NO: 2798419 - RNA, 21 nt, Human
gcgucuccuguuuuucugggu

SEQ ID NO: 2798420 - RNA, 21 nt, Human
gcuaaagauaauugcuauuua

SEQ ID NO: 2798421 - RNA, 13 nt, Human
gcuaagaggcugc

SEQ ID NO: 2798422 - RNA, 14 nt, Human
gcuaagaggcugcu

SEQ ID NO: 2798423 - RNA, 14 nt, Human
gcuacacagggaug

SEQ ID NO: 2798424 - RNA, 21 nt, Human
gcuacaggaagcaccccaugc

SEQ ID NO: 2798425 - RNA, 20 nt, Human
gcuacaggaagcaccccaug

SEQ ID NO: 2798426 - RNA, 19 nt, Human
gcuacaggaagcaccccau

SEQ ID NO: 2798427 - RNA, 19 nt, Human
gcuacagcuuucuugcucc

SEQ ID NO: 2798428 - RNA, 21 nt, Human
gcuacagcuuucuugcucccu

SEQ ID NO: 2798429 - RNA, 12 nt, Human
gcuacagagccg

SEQ ID NO: 2798430 - RNA, 22 nt, Human
gcuacagagccgagcaauauuu

SEQ ID NO: 2798431 - RNA, 13 nt, Human
gccuuuggcucug

SEQ ID NO: 2798432 - RNA, 15 nt, Human
gccuuuggcucugga

SEQ ID NO: 2798433 - RNA, 16 nt, Human
gccuuuggccuuggcu

SEQ ID NO: 2798434 - RNA, 16 nt, Human
gccuuuggcucuggag

SEQ ID NO: 2798435 - RNA, 17 nt, Human
gccuuuuucauuuucca

SEQ ID NO: 2798436 - RNA, 19 nt, Human
gccuuuuucauuuuccaau

SEQ ID NO: 2798437 - RNA, 21 nt, Human
gccuuuuuccuagccuguuuc

SEQ ID NO: 2798438 - RNA, 11 nt, Human
gcgaaaauagu

SEQ ID NO: 2798439 - RNA, 19 nt, Human
gcgaaaauaguuuguuuaa

SEQ ID NO: 2798440 - RNA, 15 nt, Human
gccuuugccuccccg

SEQ ID NO: 2798441 - RNA, 17 nt, Human
gccuuugauguuacaga

SEQ ID NO: 2798442 - RNA, 15 nt, Human
gccuuugcaaaucag

SEQ ID NO: 2798443 - RNA, 18 nt, Human
gccuuugcaaaucagugu

SEQ ID NO: 2798444 - RNA, 23 nt, Human
gccuuugagacaguuucuuagcu

SEQ ID NO: 2798445 - RNA, 22 nt, Human
gccuuuggaaacagcucgacuu

SEQ ID NO: 2798446 - RNA, 14 nt, Human
gccuuggcucagac

SEQ ID NO: 2798447 - RNA, 15 nt, Human
gccuuggcucagaca

SEQ ID NO: 2798448 - RNA, 16 nt, Human
gccuuggcucagacau

SEQ ID NO: 2798449 - RNA, 14 nt, Human
gccuuugaauguua

SEQ ID NO: 2798450 - RNA, 15 nt, Human
gccuuugaauguuaa

SEQ ID NO: 2798451 - RNA, 20 nt, Human
gccuuugaauguuaauuuuu

SEQ ID NO: 2798452 - RNA, 12 nt, Human
gccuuugacauu

SEQ ID NO: 2798453 - RNA, 13 nt, Human
gccuuugacauuu

SEQ ID NO: 2798454 - RNA, 15 nt, Human
gccuuugacauuuaa

SEQ ID NO: 2798455 - RNA, 14 nt, Human
gccuuugagacagu

SEQ ID NO: 2798456 - RNA, 19 nt, Human
gccuuugagacaguuucuu

SEQ ID NO: 2798457 - RNA, 20 nt, Human
gccuuugagacaguuucuua

SEQ ID NO: 2798458 - RNA, 21 nt, Human
gccuuugagacaguuucuuag

SEQ ID NO: 2798459 - RNA, 12 nt, Human
gccuuggcucag

SEQ ID NO: 2798460 - RNA, 15 nt, Human
gccuuggccggcugu

SEQ ID NO: 2798461 - RNA, 15 nt, Human
gccuuggccucccaa

SEQ ID NO: 2798462 - RNA, 13 nt, Human
gccuucauuaccu

SEQ ID NO: 2798463 - RNA, 13 nt, Human
gccuucaucuccc

SEQ ID NO: 2798464 - RNA, 16 nt, Human
gccuucagcucuacag

SEQ ID NO: 2798465 - RNA, 21 nt, Human
gccuucagggagugagggauu

SEQ ID NO: 2798466 - RNA, 13 nt, Human
gccuucagggagu

SEQ ID NO: 2798467 - RNA, 13 nt, Human
gccuuccagcugc

SEQ ID NO: 2798468 - RNA, 14 nt, Human
gccuuccagcugcu

SEQ ID NO: 2798469 - RNA, 15 nt, Human
gccuuccagcugcug

SEQ ID NO: 2798470 - RNA, 16 nt, Human
gccuuccagcugcugu

SEQ ID NO: 2798471 - RNA, 17 nt, Human
gccuuccagcugcuguc

SEQ ID NO: 2798472 - RNA, 18 nt, Human
gccuuccagcugcugucu

SEQ ID NO: 2798473 - RNA, 22 nt, Human
gccuuccacuuggcuacacagg

SEQ ID NO: 2798474 - RNA, 14 nt, Human
gccuugcuggacgg

SEQ ID NO: 2798475 - RNA, 19 nt, Human
gccuuggaaguugcauggc

SEQ ID NO: 2798476 - RNA, 23 nt, Human
gccuucgauacaccgggccugga

SEQ ID NO: 2798477 - RNA, 18 nt, Human
gccuucgauacaccgggc

SEQ ID NO: 2798478 - RNA, 22 nt, Human
gccuucgauacaccgggccugg

SEQ ID NO: 2798479 - RNA, 11 nt, Human
gccuuccuucc

SEQ ID NO: 2798480 - RNA, 23 nt, Human
gccuuccuucccgccagagggcu

SEQ ID NO: 2798481 - RNA, 13 nt, Human
gccuuccuugacc

SEQ ID NO: 2798482 - RNA, 18 nt, Human
gccuuccuugaccuuccu

SEQ ID NO: 2798483 - RNA, 19 nt, Human
gccuuccuugaccuuccuc

SEQ ID NO: 2798484 - RNA, 20 nt, Human
gccuuccuugaccuuccucu

SEQ ID NO: 2798485 - RNA, 13 nt, Human
gccuuccuuucuc

SEQ ID NO: 2798486 - RNA, 17 nt, Human
gccuuccuuucuccagg

SEQ ID NO: 2798487 - RNA, 19 nt, Human
gccuuccuuucuccaggac

SEQ ID NO: 2798488 - RNA, 20 nt, Human
gccuuccuuucuccaggacc

SEQ ID NO: 2798489 - RNA, 21 nt, Human
gccuuccuuucuccaggacca

SEQ ID NO: 2798490 - RNA, 16 nt, Human
gccuucgaggucagag

SEQ ID NO: 2798491 - RNA, 20 nt, Human
gccuggugcuuccaaauauu

SEQ ID NO: 2798492 - RNA, 13 nt, Human
gccuguuucuucc

SEQ ID NO: 2798493 - RNA, 16 nt, Human
gccuguuucuuccugu

SEQ ID NO: 2798494 - RNA, 20 nt, Human
gccuguuuuagaagguucuc

SEQ ID NO: 2798495 - RNA, 22 nt, Human
gccuguuuggcguuucccagag

SEQ ID NO: 2798496 - RNA, 18 nt, Human
gccuuagaagucacacag

SEQ ID NO: 2798497 - RNA, 17 nt, Human
gccuuagaagucacaca

SEQ ID NO: 2798498 - RNA, 19 nt, Human
gccuuagaagucacacagu

SEQ ID NO: 2798499 - RNA, 17 nt, Human
gccuuagaaccuuucuu

SEQ ID NO: 2798500 - RNA, 14 nt, Human
gccuuagugggcca

SEQ ID NO: 2798501 - RNA, 16 nt, Human
gccuuagugggccagg

SEQ ID NO: 2798502 - RNA, 17 nt, Human
gccuuagugggccaggg

SEQ ID NO: 2798503 - RNA, 19 nt, Human
gccuuagugggccagggcu

SEQ ID NO: 2798504 - RNA, 20 nt, Human
gccuuagugggccagggcug

SEQ ID NO: 2798505 - RNA, 15 nt, Human
gccuuacauuuguga

SEQ ID NO: 2798506 - RNA, 13 nt, Human
gccuuaccccugc

SEQ ID NO: 2798507 - RNA, 14 nt, Human
gccuuaccccugcc

SEQ ID NO: 2798508 - RNA, 23 nt, Human
gccuuaucuccaagaccagagau

SEQ ID NO: 2798509 - RNA, 23 nt, Human
gccuuaugaggguccucuacuuc

SEQ ID NO: 2798510 - RNA, 22 nt, Human
gccugggguaccaagagacucc

SEQ ID NO: 2798511 - RNA, 15 nt, Human
gccugcaauuucaua

SEQ ID NO: 2798512 - RNA, 18 nt, Human
gccugcaaucugagccag

SEQ ID NO: 2798513 - RNA, 13 nt, Human
gccugguggcagc

SEQ ID NO: 2798514 - RNA, 21 nt, Human
gccugggucacacacggaggc

SEQ ID NO: 2798515 - RNA, 16 nt, Human
gccuggguccagggga

SEQ ID NO: 2798516 - RNA, 21 nt, Human
gccugguggcagcugcggucc

SEQ ID NO: 2798517 - RNA, 19 nt, Human
gccugguggcagcugcggu

SEQ ID NO: 2798518 - RNA, 18 nt, Human
gccugguggcagcugcgg

SEQ ID NO: 2798519 - RNA, 14 nt, Human
gccgugugagugug

SEQ ID NO: 2798520 - RNA, 18 nt, Human
gccgugugagugugacag

SEQ ID NO: 2798521 - RNA, 19 nt, Human
gccgugugagugugacagg

SEQ ID NO: 2798522 - RNA, 22 nt, Human
gccgugugagugugacagggcc

SEQ ID NO: 2798523 - RNA, 23 nt, Human
gccgugugagugugacagggcca

SEQ ID NO: 2798524 - RNA, 18 nt, Human
gccuaaauuuaaugcugc

SEQ ID NO: 2798525 - RNA, 19 nt, Human
gccuaaauuuaaugcugcc

SEQ ID NO: 2798526 - RNA, 20 nt, Human
gccuaaauuuaaugcugccu

SEQ ID NO: 2798527 - RNA, 15 nt, Human
gccuaugaucccagc

SEQ ID NO: 2798528 - RNA, 21 nt, Human
gccuaugagcauccugagccc

SEQ ID NO: 2798529 - RNA, 22 nt, Human
gccuaugagcauccugagcccc

SEQ ID NO: 2798530 - RNA, 18 nt, Human
gccuaugaucccagcacu

SEQ ID NO: 2798531 - RNA, 14 nt, Human
gccuaugcacauau

SEQ ID NO: 2798532 - RNA, 23 nt, Human
gccuaugcacauauggacucugc

SEQ ID NO: 2798533 - RNA, 20 nt, Human
gccuaugcacauauggacuc

SEQ ID NO: 2798534 - RNA, 22 nt, Human
gccuaugcacauauggacucug

SEQ ID NO: 2798535 - RNA, 17 nt, Human
gccucaaccuccugggc

SEQ ID NO: 2798536 - RNA, 20 nt, Human
gccucaagguuuuagguucu

SEQ ID NO: 2798537 - RNA, 21 nt, Human
gccucaagguuuuagguucua

SEQ ID NO: 2798538 - RNA, 22 nt, Human
gccucaagguuuuagguucuaa

SEQ ID NO: 2798539 - RNA, 19 nt, Human
gccucaaccuccugggcua

SEQ ID NO: 2798540 - RNA, 18 nt, Human
gccucaaccuccugggcu

SEQ ID NO: 2798541 - RNA, 16 nt, Human
gccuauggcagaaaaa

SEQ ID NO: 2798542 - RNA, 22 nt, Human
gccuaugugcaugcagcaucua

SEQ ID NO: 2798543 - RNA, 18 nt, Human
gccguggggguugaggca

SEQ ID NO: 2798544 - RNA, 15 nt, Human
gccgugggccugggg

SEQ ID NO: 2798545 - RNA, 21 nt, Human
gccguggcuucccgcucagcc

SEQ ID NO: 2798546 - RNA, 22 nt, Human
gccguggcuucccgcucagccc

SEQ ID NO: 2798547 - RNA, 15 nt, Human
gccguggcuucccgc

SEQ ID NO: 2798548 - RNA, 19 nt, Human
gccguggcuucccgcucag

SEQ ID NO: 2798549 - RNA, 14 nt, Human
gccgugccuucagc

SEQ ID NO: 2798550 - RNA, 15 nt, Human
gccgugccuucagcu

SEQ ID NO: 2798551 - RNA, 17 nt, Human
gccgugccuucagcucu

SEQ ID NO: 2798552 - RNA, 19 nt, Human
gccgugccuucagcucuac

SEQ ID NO: 2798553 - RNA, 21 nt, Human
gccggugugccugacugccca

SEQ ID NO: 2798554 - RNA, 12 nt, Human
gccggucauuuu

SEQ ID NO: 2798555 - RNA, 14 nt, Human
gccgggccuguaca

SEQ ID NO: 2798556 - RNA, 15 nt, Human
gccgggccuguacag

SEQ ID NO: 2798557 - RNA, 19 nt, Human
gccgggcgugguggcgggc

SEQ ID NO: 2798558 - RNA, 22 nt, Human
gccgggaacagacaacagaagu

SEQ ID NO: 2798559 - RNA, 20 nt, Human
gccgggaacagacaacagaa

SEQ ID NO: 2798560 - RNA, 23 nt, Human
gccggcguggcaaauauaaaacu

SEQ ID NO: 2798561 - RNA, 19 nt, Human
gccggcuucaugccagcua

SEQ ID NO: 2798562 - RNA, 16 nt, Human
gccggcugugcucaga

SEQ ID NO: 2798563 - RNA, 17 nt, Human
gccggcugugcucagag

SEQ ID NO: 2798564 - RNA, 18 nt, Human
gccggcugugcucagaga

SEQ ID NO: 2798565 - RNA, 17 nt, Human
gccggcgagcccugugg

SEQ ID NO: 2798566 - RNA, 15 nt, Human
gccggcgagcccugu

SEQ ID NO: 2798567 - RNA, 18 nt, Human
gccggcgagcccugugga

SEQ ID NO: 2798568 - RNA, 22 nt, Human
gccgaccccuaguucccucugc

SEQ ID NO: 2798569 - RNA, 22 nt, Human
gccgcaaaccacacuggacucc

SEQ ID NO: 2798570 - RNA, 22 nt, Human
gccgcaaauuguaccuuuuuug

SEQ ID NO: 2798571 - RNA, 22 nt, Human
gccgagaucacgccacugcacu

SEQ ID NO: 2798572 - RNA, 21 nt, Human
gccgagaucacgccacugcac

SEQ ID NO: 2798573 - RNA, 20 nt, Human
gccgagaucacgccacugca

SEQ ID NO: 2798574 - RNA, 16 nt, Human
gcccugcuuugggcug

SEQ ID NO: 2798575 - RNA, 18 nt, Human
gcccugcuuugggcugcc

SEQ ID NO: 2798576 - RNA, 19 nt, Human
gccgaccagaggagccuuu

SEQ ID NO: 2798577 - RNA, 12 nt, Human
gccgaccagagg

SEQ ID NO: 2798578 - RNA, 12 nt, Human
gccgacacuguu

SEQ ID NO: 2798579 - RNA, 20 nt, Human
gccgaauccccucccuguca

SEQ ID NO: 2798580 - RNA, 15 nt, Human
gccgaaccaaaagaa

SEQ ID NO: 2798581 - RNA, 14 nt, Human
gcccuugggccacc

SEQ ID NO: 2798582 - RNA, 12 nt, Human
gcccuugggcca

SEQ ID NO: 2798583 - RNA, 15 nt, Human
gcccuuggcuucugu

SEQ ID NO: 2798584 - RNA, 17 nt, Human
gccucccgaguagcugg

SEQ ID NO: 2798585 - RNA, 19 nt, Human
gccucccgaguagcuggga

SEQ ID NO: 2798586 - RNA, 18 nt, Human
gccucccgaguagcuggg

SEQ ID NO: 2798587 - RNA, 20 nt, Human
gccucccgaguagcugggac

SEQ ID NO: 2798588 - RNA, 21 nt, Human
gccuccucacccccagcuuug

SEQ ID NO: 2798589 - RNA, 14 nt, Human
gccuccucaccccc

SEQ ID NO: 2798590 - RNA, 19 nt, Human
gccuccucacccccagcuu

SEQ ID NO: 2798591 - RNA, 18 nt, Human
gccuccucacccccagcu

SEQ ID NO: 2798592 - RNA, 17 nt, Human
gccuccucacccccagc

SEQ ID NO: 2798593 - RNA, 16 nt, Human
gccuccucacccccag

SEQ ID NO: 2798594 - RNA, 14 nt, Human
gccuccggaagcug

SEQ ID NO: 2798595 - RNA, 13 nt, Human
gccucccacuggg

SEQ ID NO: 2798596 - RNA, 14 nt, Human
gccucccacugggg

SEQ ID NO: 2798597 - RNA, 10 nt, Human
gccucccagc

SEQ ID NO: 2798598 - RNA, 14 nt, Human
gccucccagccugg

SEQ ID NO: 2798599 - RNA, 13 nt, Human
gccucccagccug

SEQ ID NO: 2798600 - RNA, 19 nt, Human
gccucccaaagugcuggga

SEQ ID NO: 2798601 - RNA, 18 nt, Human
gccucccaaagugcuggg

SEQ ID NO: 2798602 - RNA, 16 nt, Human
gccucagcauccuggc

SEQ ID NO: 2798603 - RNA, 15 nt, Human
gccucagcauccugg

SEQ ID NO: 2798604 - RNA, 15 nt, Human
gccucagacugcacc

SEQ ID NO: 2798605 - RNA, 17 nt, Human
gccucagacugcaccca

SEQ ID NO: 2798606 - RNA, 18 nt, Human
gccucagacugcacccag

SEQ ID NO: 2798607 - RNA, 19 nt, Human
gccucagacugcacccagg

SEQ ID NO: 2798608 - RNA, 20 nt, Human
gccucagacugcacccagga

SEQ ID NO: 2798609 - RNA, 21 nt, Human
gccucagacugcacccaggag

SEQ ID NO: 2798610 - RNA, 23 nt, Human
gccucagaauugaucauuuuccc

SEQ ID NO: 2798611 - RNA, 13 nt, Human
gccucugauaugg

SEQ ID NO: 2798612 - RNA, 15 nt, Human
gccucugauauggga

SEQ ID NO: 2798613 - RNA, 17 nt, Human
gccucugauaugggacu

SEQ ID NO: 2798614 - RNA, 18 nt, Human
gccucugauaugggacug

SEQ ID NO: 2798615 - RNA, 19 nt, Human
gccucugauaugggacuga

SEQ ID NO: 2798616 - RNA, 23 nt, Human
gccucugauaugggacugagccu

SEQ ID NO: 2798617 - RNA, 19 nt, Human
gccucugaccccuccucac

SEQ ID NO: 2798618 - RNA, 20 nt, Human
gccucugaccccuccucacu

SEQ ID NO: 2798619 - RNA, 21 nt, Human
gccucugaccccuccucacug

SEQ ID NO: 2798620 - RNA, 22 nt, Human
gccucugaccccuccucacugg

SEQ ID NO: 2798621 - RNA, 21 nt, Human
gccucugacacacagcucugu

SEQ ID NO: 2798622 - RNA, 13 nt, Human
gccucugaccccu

SEQ ID NO: 2798623 - RNA, 14 nt, Human
gccucugaccccuc

SEQ ID NO: 2798624 - RNA, 15 nt, Human
gccucugaccccucc

SEQ ID NO: 2798625 - RNA, 16 nt, Human
gccucugaccccuccu

SEQ ID NO: 2798626 - RNA, 17 nt, Human
gccucugaccccuccuc

SEQ ID NO: 2798627 - RNA, 18 nt, Human
gccucugaccccuccuca

SEQ ID NO: 2798628 - RNA, 20 nt, Human
gccucugacacacagcucug

SEQ ID NO: 2798629 - RNA, 19 nt, Human
gccucugacacacagcucu

SEQ ID NO: 2798630 - RNA, 18 nt, Human
gccucugacacacagcuc

SEQ ID NO: 2798631 - RNA, 17 nt, Human
gccucugacacacagcu

SEQ ID NO: 2798632 - RNA, 13 nt, Human
gccucucuagcac

SEQ ID NO: 2798633 - RNA, 20 nt, Human
gccugcaaacgcugccugcc

SEQ ID NO: 2798634 - RNA, 19 nt, Human
gccugcaaacgcugccugc

SEQ ID NO: 2798635 - RNA, 21 nt, Human
gccugcaaacgcugccugccc

SEQ ID NO: 2798636 - RNA, 18 nt, Human
gccugcaaacgcugccug

SEQ ID NO: 2798637 - RNA, 22 nt, Human
gccucucgguugaaaccuguau

SEQ ID NO: 2798638 - RNA, 13 nt, Human
gccucugccucug

SEQ ID NO: 2798639 - RNA, 12 nt, Human
gccucugccucu

SEQ ID NO: 2798640 - RNA, 10 nt, Human
gccucugccu

SEQ ID NO: 2798641 - RNA, 19 nt, Human
gccucugccacacucugac

SEQ ID NO: 2798642 - RNA, 15 nt, Human
gccucugcauucagg

SEQ ID NO: 2798643 - RNA, 19 nt, Human
gccugacuucugcuggcau

SEQ ID NO: 2798644 - RNA, 13 nt, Human
gccugacuugggg

SEQ ID NO: 2798645 - RNA, 12 nt, Human
gccugagaccca

SEQ ID NO: 2798646 - RNA, 13 nt, Human
gccugagacccag

SEQ ID NO: 2798647 - RNA, 14 nt, Human
gccugagacccagg

SEQ ID NO: 2798648 - RNA, 15 nt, Human
gccugagacccagga

SEQ ID NO: 2798649 - RNA, 16 nt, Human
gccugagacccaggac

SEQ ID NO: 2798650 - RNA, 17 nt, Human
gccugagacccaggacu

SEQ ID NO: 2798651 - RNA, 19 nt, Human
gccugagagaauuggcuca

SEQ ID NO: 2798652 - RNA, 20 nt, Human
gccugagagaauuggcucaa

SEQ ID NO: 2798653 - RNA, 19 nt, Human
gccugagagacauggcuuu

SEQ ID NO: 2798654 - RNA, 16 nt, Human
gccugacuucugcugg

SEQ ID NO: 2798655 - RNA, 15 nt, Human
gccugaccuuccuuc

SEQ ID NO: 2798656 - RNA, 16 nt, Human
gccaugggccuccugu

SEQ ID NO: 2798657 - RNA, 15 nt, Human
gccaugggccuccug

SEQ ID NO: 2798658 - RNA, 23 nt, Human
gcccaagacagaugccccagagc

SEQ ID NO: 2798659 - RNA, 21 nt, Human
gcccaagacagaugccccaga

SEQ ID NO: 2798660 - RNA, 20 nt, Human
gcccaagacagaugccccag

SEQ ID NO: 2798661 - RNA, 19 nt, Human
gcccaagacagaugcccca

SEQ ID NO: 2798662 - RNA, 21 nt, Human
gcccaagaauagaugcugacu

SEQ ID NO: 2798663 - RNA, 22 nt, Human
gcccaagaauagaugcugacug

SEQ ID NO: 2798664 - RNA, 24 nt, Human
gcccaaccugcucuccucuugcca

SEQ ID NO: 2798665 - RNA, 14 nt, Human
gcccaaccugcucu

SEQ ID NO: 2798666 - RNA, 14 nt, Human
gcccaagcccaggc

SEQ ID NO: 2798667 - RNA, 15 nt, Human
gcccaagcccaggcc

SEQ ID NO: 2798668 - RNA, 17 nt, Human
gcccaagcccaggccac

SEQ ID NO: 2798669 - RNA, 13 nt, Human
gcccaagaugcuu

SEQ ID NO: 2798670 - RNA, 15 nt, Human
gcccaacuguguagc

SEQ ID NO: 2798671 - RNA, 17 nt, Human
gcccaacuguguagcau

SEQ ID NO: 2798672 - RNA, 15 nt, Human
gcccaaggcggcccc

SEQ ID NO: 2798673 - RNA, 16 nt, Human
gcccaaggcggccccu

SEQ ID NO: 2798674 - RNA, 23 nt, Human
gcccaagggaaagaaaaggaagg

SEQ ID NO: 2798675 - RNA, 17 nt, Human
gcccaaggcggccccuc

SEQ ID NO: 2798676 - RNA, 18 nt, Human
gcccaaggcggccccucc

SEQ ID NO: 2798677 - RNA, 20 nt, Human
gcccacauagugaugguucc

SEQ ID NO: 2798678 - RNA, 16 nt, Human
gcccacauuggaccca

SEQ ID NO: 2798679 - RNA, 15 nt, Human
gcccacauuuagucu

SEQ ID NO: 2798680 - RNA, 17 nt, Human
gcccacauuuagucucu

SEQ ID NO: 2798681 - RNA, 20 nt, Human
gcccacauuuagucucuuua

SEQ ID NO: 2798682 - RNA, 21 nt, Human
gcccacauuuagucucuuuau

SEQ ID NO: 2798683 - RNA, 14 nt, Human
gcccaccugccugg

SEQ ID NO: 2798684 - RNA, 15 nt, Human
gcccaccugccuggc

SEQ ID NO: 2798685 - RNA, 16 nt, Human
gcccaccugccuggcc

SEQ ID NO: 2798686 - RNA, 17 nt, Human
gcccaccugccuggccg

SEQ ID NO: 2798687 - RNA, 21 nt, Human
gcccaccugccuggccggcca

SEQ ID NO: 2798688 - RNA, 22 nt, Human
gcccaccugccuggccggccag

SEQ ID NO: 2798689 - RNA, 17 nt, Human
gcccaccuuggcucaag

SEQ ID NO: 2798690 - RNA, 16 nt, Human
gcccaccuuggcucaa

SEQ ID NO: 2798691 - RNA, 15 nt, Human
gcccaccuuggcuca

SEQ ID NO: 2798692 - RNA, 13 nt, Human
gcccaccuuggcu

SEQ ID NO: 2798693 - RNA, 14 nt, Human
gcccacuucugcca

SEQ ID NO: 2798694 - RNA, 15 nt, Human
gcccagaacuucccu

SEQ ID NO: 2798695 - RNA, 16 nt, Human
gcccagaacuucccug

SEQ ID NO: 2798696 - RNA, 17 nt, Human
gcccagaacuucccuga

SEQ ID NO: 2798697 - RNA, 18 nt, Human
gcccagaagaaaauucuc

SEQ ID NO: 2798698 - RNA, 21 nt, Human
gcccagaagaaaauucuccug

SEQ ID NO: 2798699 - RNA, 23 nt, Human
gcccacuuguauccucugguucu

SEQ ID NO: 2798700 - RNA, 22 nt, Human
gccaucacaugaucuguuuuuc

SEQ ID NO: 2798701 - RNA, 17 nt, Human
gccaguccugccuggcc

SEQ ID NO: 2798702 - RNA, 16 nt, Human
gccaguccugccuggc

SEQ ID NO: 2798703 - RNA, 14 nt, Human
gccaguccugccug

SEQ ID NO: 2798704 - RNA, 21 nt, Human
gccaguaucuauauaugugua

SEQ ID NO: 2798705 - RNA, 22 nt, Human
gccaguaucuauauauguguau

SEQ ID NO: 2798706 - RNA, 23 nt, Human
gccaguaucuauauauguguaug

SEQ ID NO: 2798707 - RNA, 17 nt, Human
gccaguauuagacugga

SEQ ID NO: 2798708 - RNA, 23 nt, Human
gccaguauuagacuggaaguuca

SEQ ID NO: 2798709 - RNA, 15 nt, Human
gccaggcuggucuca

SEQ ID NO: 2798710 - RNA, 17 nt, Human
gccaggcuggucuaaaa

SEQ ID NO: 2798711 - RNA, 13 nt, Human
gccaggcuggucu

SEQ ID NO: 2798712 - RNA, 19 nt, Human
gccaucaucaguggagcca

SEQ ID NO: 2798713 - RNA, 14 nt, Human
gccaucauugcugu

SEQ ID NO: 2798714 - RNA, 18 nt, Human
gccaucauugcugucugc

SEQ ID NO: 2798715 - RNA, 19 nt, Human
gccaucauugcugucugca

SEQ ID NO: 2798716 - RNA, 14 nt, Human
gccaucccucgugg

SEQ ID NO: 2798717 - RNA, 21 nt, Human
gccaucccucgugguccccaa

SEQ ID NO: 2798718 - RNA, 12 nt, Human
gccaucccugug

SEQ ID NO: 2798719 - RNA, 13 nt, Human
gccaucccuguga

SEQ ID NO: 2798720 - RNA, 14 nt, Human
gccaucccugugag

SEQ ID NO: 2798721 - RNA, 15 nt, Human
gccaucccugugagg

SEQ ID NO: 2798722 - RNA, 18 nt, Human
gccaucuggggcuccuuc

SEQ ID NO: 2798723 - RNA, 18 nt, Human
gccaucuguguccugguu

SEQ ID NO: 2798724 - RNA, 19 nt, Human
gccauccuaaaagccaccc

SEQ ID NO: 2798725 - RNA, 18 nt, Human
gccauccucaaacacugc

SEQ ID NO: 2798726 - RNA, 19 nt, Human
gccauccucaaacacugca

SEQ ID NO: 2798727 - RNA, 20 nt, Human
gccauccucaaacacugcag

SEQ ID NO: 2798728 - RNA, 21 nt, Human
gccauccucaaacacugcagg

SEQ ID NO: 2798729 - RNA, 23 nt, Human
gccauccucaaacacugcaggca

SEQ ID NO: 2798730 - RNA, 19 nt, Human
gccauccucuuucucuuuu

SEQ ID NO: 2798731 - RNA, 18 nt, Human
gccaugccaggaaccugu

SEQ ID NO: 2798732 - RNA, 16 nt, Human
gccaugccaggaaccu

SEQ ID NO: 2798733 - RNA, 14 nt, Human
gccaugcaagaacu

SEQ ID NO: 2798734 - RNA, 14 nt, Human
gccaugcaauucau

SEQ ID NO: 2798735 - RNA, 15 nt, Human
gccaugaaaccagag

SEQ ID NO: 2798736 - RNA, 21 nt, Human
gccaaggccagaguggccugg

SEQ ID NO: 2798737 - RNA, 20 nt, Human
gccaaggccagaguggccug

SEQ ID NO: 2798738 - RNA, 18 nt, Human
gccaaggccuucuccucc

SEQ ID NO: 2798739 - RNA, 14 nt, Human
gccaaggccuucuc

SEQ ID NO: 2798740 - RNA, 15 nt, Human
gccaaggccuucucc

SEQ ID NO: 2798741 - RNA, 16 nt, Human
gccaacacucaagaag

SEQ ID NO: 2798742 - RNA, 21 nt, Human
gccacuccagaccccuggcuu

SEQ ID NO: 2798743 - RNA, 20 nt, Human
gccacuccagaccccuggcu

SEQ ID NO: 2798744 - RNA, 20 nt, Human
gccaacacucaagaagcagg

SEQ ID NO: 2798745 - RNA, 15 nt, Human
gccaacacugugggu

SEQ ID NO: 2798746 - RNA, 21 nt, Human
gccaacacuguggguguguga

SEQ ID NO: 2798747 - RNA, 13 nt, Human
gccaaauuuauca

SEQ ID NO: 2798748 - RNA, 19 nt, Human
gccaaauuuaucaaagcau

SEQ ID NO: 2798749 - RNA, 18 nt, Human
gccaaauuauuuguguaa

SEQ ID NO: 2798750 - RNA, 19 nt, Human
gccaaauuauuuguguaau

SEQ ID NO: 2798751 - RNA, 23 nt, Human
gccaaauuauuuguguaauagaa

SEQ ID NO: 2798752 - RNA, 14 nt, Human
gccaacaagaaugc

SEQ ID NO: 2798753 - RNA, 19 nt, Human
gccaacaagaaugcauuga

SEQ ID NO: 2798754 - RNA, 20 nt, Human
gccaacaagaaugcauugau

SEQ ID NO: 2798755 - RNA, 22 nt, Human
gccaacaagaaugcauugauau

SEQ ID NO: 2798756 - RNA, 20 nt, Human
gccaacaccacagaaauggg

SEQ ID NO: 2798757 - RNA, 22 nt, Human
gccacugcaccgggccacagag

SEQ ID NO: 2798758 - RNA, 19 nt, Human
gccacugcaccgggccaca

SEQ ID NO: 2798759 - RNA, 21 nt, Human
gccacugcaccgggccacaga

SEQ ID NO: 2798760 - RNA, 20 nt, Human
gccacugcaccgggccacag

SEQ ID NO: 2798761 - RNA, 12 nt, Human
gccacuccuccc

SEQ ID NO: 2798762 - RNA, 16 nt, Human
gccacuccucccuccg

SEQ ID NO: 2798763 - RNA, 16 nt, Human
gccacuccccuccacu

SEQ ID NO: 2798764 - RNA, 22 nt, Human
gccacuccagaccccuggcuuu

SEQ ID NO: 2798765 - RNA, 14 nt, Human
gccagaugcaccag

SEQ ID NO: 2798766 - RNA, 16 nt, Human
gccagauccucuuggu

SEQ ID NO: 2798767 - RNA, 14 nt, Human
gccagaucuuaggu

SEQ ID NO: 2798768 - RNA, 16 nt, Human
gccagaugaucaacuc

SEQ ID NO: 2798769 - RNA, 15 nt, Human
gccagauccucuugg

SEQ ID NO: 2798770 - RNA, 15 nt, Human
gccagaugcaccagc

SEQ ID NO: 2798771 - RNA, 16 nt, Human
gccagccgcucuccug

SEQ ID NO: 2798772 - RNA, 17 nt, Human
gccagccgcucuccugc

SEQ ID NO: 2798773 - RNA, 18 nt, Human
gccagccgcucuccugcc

SEQ ID NO: 2798774 - RNA, 20 nt, Human
gccagccgcucuccugccac

SEQ ID NO: 2798775 - RNA, 22 nt, Human
gccagccgcucuccugccacau

SEQ ID NO: 2798776 - RNA, 20 nt, Human
gccagcugcagcugggcugu

SEQ ID NO: 2798777 - RNA, 20 nt, Human
gccagcugcaggaaucaaaa

SEQ ID NO: 2798778 - RNA, 13 nt, Human
gccagccugaccu

SEQ ID NO: 2798779 - RNA, 17 nt, Human
gccagccugaccuuccu

SEQ ID NO: 2798780 - RNA, 22 nt, Human
gccagccugaccuuccuuccug

SEQ ID NO: 2798781 - RNA, 13 nt, Human
gccagccugaggc

SEQ ID NO: 2798782 - RNA, 11 nt, Human
gccagccuggc

SEQ ID NO: 2798783 - RNA, 19 nt, Human
gccagccuggcuucuggag

SEQ ID NO: 2798784 - RNA, 18 nt, Human
gccagccuggcuucugga

SEQ ID NO: 2798785 - RNA, 17 nt, Human
gccagccuggcuucugg

SEQ ID NO: 2798786 - RNA, 16 nt, Human
gccagccuggcuucug

SEQ ID NO: 2798787 - RNA, 12 nt, Human
gccagccuggcu

SEQ ID NO: 2798788 - RNA, 19 nt, Human
gccagcugcagcugggcug

SEQ ID NO: 2798789 - RNA, 14 nt, Human
gccagcugcagcug

SEQ ID NO: 2798790 - RNA, 22 nt, Human
gccagccuggcuucuggagccc

SEQ ID NO: 2798791 - RNA, 14 nt, Human
gccagccuggggcc

SEQ ID NO: 2798792 - RNA, 15 nt, Human
gccagccuggggccu

SEQ ID NO: 2798793 - RNA, 16 nt, Human
gccagccuggggccug

SEQ ID NO: 2798794 - RNA, 17 nt, Human
gccagccuggggccugg

SEQ ID NO: 2798795 - RNA, 18 nt, Human
gccagccuggggccuggc

SEQ ID NO: 2798796 - RNA, 19 nt, Human
gccagccuggggccuggca

SEQ ID NO: 2798797 - RNA, 20 nt, Human
gccagccuggggccuggcag

SEQ ID NO: 2798798 - RNA, 14 nt, Human
gccagccuggucca

SEQ ID NO: 2798799 - RNA, 21 nt, Human
gccagccugguccaugcaggg

SEQ ID NO: 2798800 - RNA, 21 nt, Human
gccagccuggcuucuggagcc

SEQ ID NO: 2798801 - RNA, 20 nt, Human
gccagccuggcuucuggagc

SEQ ID NO: 2798802 - RNA, 18 nt, Human
gccaggcucaggccaugg

SEQ ID NO: 2798803 - RNA, 17 nt, Human
gccaggcucaggccaug

SEQ ID NO: 2798804 - RNA, 19 nt, Human
gccaggacugagccccgca

SEQ ID NO: 2798805 - RNA, 17 nt, Human
gccaggaaguacuucca

SEQ ID NO: 2798806 - RNA, 13 nt, Human
gccaggaauauug

SEQ ID NO: 2798807 - RNA, 16 nt, Human
gccaggacagucagcu

SEQ ID NO: 2798808 - RNA, 19 nt, Human
gccaggacagucagcucuc

SEQ ID NO: 2798809 - RNA, 15 nt, Human
gccaggacugagccc

SEQ ID NO: 2798810 - RNA, 16 nt, Human
gccaggacugagcccc

SEQ ID NO: 2798811 - RNA, 17 nt, Human
gccaggacugagccccg

SEQ ID NO: 2798812 - RNA, 13 nt, Human
gcccugcagaggg

SEQ ID NO: 2798813 - RNA, 19 nt, Human
gcccugagaaagcccuguc

SEQ ID NO: 2798814 - RNA, 20 nt, Human
gcccugagaagcugcuccag

SEQ ID NO: 2798815 - RNA, 18 nt, Human
gcccugaagaauggcgcc

SEQ ID NO: 2798816 - RNA, 22 nt, Human
gcccuccgaccacuuccagggg

SEQ ID NO: 2798817 - RNA, 14 nt, Human
gcccucuuccugac

SEQ ID NO: 2798818 - RNA, 16 nt, Human
gcccucuuccugacga

SEQ ID NO: 2798819 - RNA, 17 nt, Human
gcccuccuacccugcgc

SEQ ID NO: 2798820 - RNA, 15 nt, Human
gcccuccgccuucac

SEQ ID NO: 2798821 - RNA, 16 nt, Human
gcccuccgccuucaca

SEQ ID NO: 2798822 - RNA, 18 nt, Human
gcccuccgcgaaaauagu

SEQ ID NO: 2798823 - RNA, 21 nt, Human
gcccucccugccccucccuuc

SEQ ID NO: 2798824 - RNA, 17 nt, Human
gcccuccccaucccaug

SEQ ID NO: 2798825 - RNA, 14 nt, Human
gcccuccccaggaa

SEQ ID NO: 2798826 - RNA, 23 nt, Human
gcccuccacagccgcagccuccc

SEQ ID NO: 2798827 - RNA, 20 nt, Human
gcccuccacagccgcagccu

SEQ ID NO: 2798828 - RNA, 14 nt, Human
gcccuccacagccg

SEQ ID NO: 2798829 - RNA, 19 nt, Human
gcccgggcgcggccagccc

SEQ ID NO: 2798830 - RNA, 21 nt, Human
gcccuccaucuaaacugcccc

SEQ ID NO: 2798831 - RNA, 21 nt, Human
gcccucccaggcucucaacag

SEQ ID NO: 2798832 - RNA, 12 nt, Human
gcccucccaggc

SEQ ID NO: 2798833 - RNA, 20 nt, Human
gcccuccaucuaaacugccc

SEQ ID NO: 2798834 - RNA, 22 nt, Human
gcccucauggccccucugaccu

SEQ ID NO: 2798835 - RNA, 18 nt, Human
gcccucauuacugggccu

SEQ ID NO: 2798836 - RNA, 19 nt, Human
gcccucauuacugggccuu

SEQ ID NO: 2798837 - RNA, 21 nt, Human
gcccucauuacugggccuuag

SEQ ID NO: 2798838 - RNA, 18 nt, Human
gcccucauggccccucug

SEQ ID NO: 2798839 - RNA, 19 nt, Human
gcccucauggccccucuga

SEQ ID NO: 2798840 - RNA, 18 nt, Human
gcccgggcgcggccagcc

SEQ ID NO: 2798841 - RNA, 23 nt, Human
gcccgggaaggucaccagcacca

SEQ ID NO: 2798842 - RNA, 13 nt, Human
gcccgggagccua

SEQ ID NO: 2798843 - RNA, 15 nt, Human
gcccgggagccuagg

SEQ ID NO: 2798844 - RNA, 20 nt, Human
gcccgggagccuaggaccac

SEQ ID NO: 2798845 - RNA, 15 nt, Human
gcccgcagaccucug

SEQ ID NO: 2798846 - RNA, 16 nt, Human
gcccgcagaccucugg

SEQ ID NO: 2798847 - RNA, 17 nt, Human
gcccgcagaccucugga

SEQ ID NO: 2798848 - RNA, 18 nt, Human
gcccgcagaccucuggau

SEQ ID NO: 2798849 - RNA, 13 nt, Human
gcccgcacacccu

SEQ ID NO: 2798850 - RNA, 14 nt, Human
gcccgcacacccuc

SEQ ID NO: 2798851 - RNA, 22 nt, Human
gcccgcacacccucacucugcc

SEQ ID NO: 2798852 - RNA, 23 nt, Human
gcccgcacacccucacucugcca

SEQ ID NO: 2798853 - RNA, 24 nt, Human
gcccgcacacccucacucugccag

SEQ ID NO: 2798854 - RNA, 18 nt, Human
gcccgggaaggucaccag

SEQ ID NO: 2798855 - RNA, 20 nt, Human
gcccgggaaggucaccagca

SEQ ID NO: 2798856 - RNA, 21 nt, Human
gccccucccccaacccccacc

SEQ ID NO: 2798857 - RNA, 15 nt, Human
gccccucccccaacc

SEQ ID NO: 2798858 - RNA, 12 nt, Human
gccccuccccca

SEQ ID NO: 2798859 - RNA, 14 nt, Human
gccccucccccauc

SEQ ID NO: 2798860 - RNA, 16 nt, Human
gccccucccccaucuc

SEQ ID NO: 2798861 - RNA, 13 nt, Human
gccccucccgccc

SEQ ID NO: 2798862 - RNA, 16 nt, Human
gccccucccgccccuu

SEQ ID NO: 2798863 - RNA, 23 nt, Human
gccccucccccaacccccacccc

SEQ ID NO: 2798864 - RNA, 22 nt, Human
gccccucccccaacccccaccc

SEQ ID NO: 2798865 - RNA, 16 nt, Human
gccccgaagggccccc

SEQ ID NO: 2798866 - RNA, 17 nt, Human
gccccgaagggccccca

SEQ ID NO: 2798867 - RNA, 18 nt, Human
gccccgaggccuucucug

SEQ ID NO: 2798868 - RNA, 15 nt, Human
gccccgaggccuucu

SEQ ID NO: 2798869 - RNA, 13 nt, Human
gccccgagcuguc

SEQ ID NO: 2798870 - RNA, 12 nt, Human
gccccuggggcc

SEQ ID NO: 2798871 - RNA, 16 nt, Human
gccccuggggccuaga

SEQ ID NO: 2798872 - RNA, 17 nt, Human
gccccuggggccuagac

SEQ ID NO: 2798873 - RNA, 16 nt, Human
gccccugaacaagaau

SEQ ID NO: 2798874 - RNA, 12 nt, Human
gccccucuuucu

SEQ ID NO: 2798875 - RNA, 14 nt, Human
gccccucuuucucu

SEQ ID NO: 2798876 - RNA, 15 nt, Human
gccccucuuucucuu

SEQ ID NO: 2798877 - RNA, 17 nt, Human
gccccucuuucucuuuc

SEQ ID NO: 2798878 - RNA, 18 nt, Human
gccccuguggagacuggg

SEQ ID NO: 2798879 - RNA, 16 nt, Human
gccccugguccugagg

SEQ ID NO: 2798880 - RNA, 21 nt, Human
gccccugggucagucuggugg

SEQ ID NO: 2798881 - RNA, 15 nt, Human
gccccuuuacggaca

SEQ ID NO: 2798882 - RNA, 20 nt, Human
gccccuuuacggacaccccc

SEQ ID NO: 2798883 - RNA, 22 nt, Human
gccccuuuacggacacccccuc

SEQ ID NO: 2798884 - RNA, 13 nt, Human
gccccuuuccaaa

SEQ ID NO: 2798885 - RNA, 20 nt, Human
gccccuugcucuccccugcc

SEQ ID NO: 2798886 - RNA, 16 nt, Human
gccccuuugggcccug

SEQ ID NO: 2798887 - RNA, 17 nt, Human
gccccuuugggcccugc

SEQ ID NO: 2798888 - RNA, 18 nt, Human
gccccuuugggcccugca

SEQ ID NO: 2798889 - RNA, 19 nt, Human
gccccuuugggcccugcau

SEQ ID NO: 2798890 - RNA, 20 nt, Human
gccccuuugggcccugcaug

SEQ ID NO: 2798891 - RNA, 21 nt, Human
gccccuuugggcccugcaugu

SEQ ID NO: 2798892 - RNA, 12 nt, Human
gcccgacagccu

SEQ ID NO: 2798893 - RNA, 14 nt, Human
gcccgacagccugg

SEQ ID NO: 2798894 - RNA, 15 nt, Human
gcccgacagccuggc

SEQ ID NO: 2798895 - RNA, 18 nt, Human
gcccgagcuguuuauguu

SEQ ID NO: 2798896 - RNA, 22 nt, Human
gcccgagcuguuuauguuuuua

SEQ ID NO: 2798897 - RNA, 13 nt, Human
gcccgcacagcag

SEQ ID NO: 2798898 - RNA, 14 nt, Human
gcccgcacagcagc

SEQ ID NO: 2798899 - RNA, 15 nt, Human
gcccgcacagcagcc

SEQ ID NO: 2798900 - RNA, 16 nt, Human
gcccgcacagcagccu

SEQ ID NO: 2798901 - RNA, 17 nt, Human
gcccgcacagcagccug

SEQ ID NO: 2798902 - RNA, 18 nt, Human
gcccgcacagcagccugc

SEQ ID NO: 2798903 - RNA, 14 nt, Human
gccccaggccucug

SEQ ID NO: 2798904 - RNA, 19 nt, Human
gccccagcacuaacguaaa

SEQ ID NO: 2798905 - RNA, 19 nt, Human
gccccagcaccucagccug

SEQ ID NO: 2798906 - RNA, 21 nt, Human
gccccagcaccucagccugca

SEQ ID NO: 2798907 - RNA, 12 nt, Human
gccccagugccc

SEQ ID NO: 2798908 - RNA, 16 nt, Human
gccccagguagaaacu

SEQ ID NO: 2798909 - RNA, 23 nt, Human
gccccagggucuucccuaccuca

SEQ ID NO: 2798910 - RNA, 16 nt, Human
gccccagggugcccag

SEQ ID NO: 2798911 - RNA, 12 nt, Human
gccccagggcac

SEQ ID NO: 2798912 - RNA, 13 nt, Human
gccccagggcacc

SEQ ID NO: 2798913 - RNA, 15 nt, Human
gccccagggcacccu

SEQ ID NO: 2798914 - RNA, 18 nt, Human
gccccagggcuacccucc

SEQ ID NO: 2798915 - RNA, 16 nt, Human
gccccagggcuacccu

SEQ ID NO: 2798916 - RNA, 21 nt, Human
gccccagggucuucccuaccu

SEQ ID NO: 2798917 - RNA, 20 nt, Human
gccccagggucuucccuacc

SEQ ID NO: 2798918 - RNA, 17 nt, Human
gccccagggucuucccu

SEQ ID NO: 2798919 - RNA, 16 nt, Human
gccccagggucuuccc

SEQ ID NO: 2798920 - RNA, 18 nt, Human
gccccaguucaaucuccc

SEQ ID NO: 2798921 - RNA, 21 nt, Human
gccccauaauuuuuuuuuucc

SEQ ID NO: 2798922 - RNA, 19 nt, Human
gccccaguuguauuuauuu

SEQ ID NO: 2798923 - RNA, 14 nt, Human
gccccagugcccac

SEQ ID NO: 2798924 - RNA, 13 nt, Human
gccccagugccca

SEQ ID NO: 2798925 - RNA, 14 nt, Human
gccccauucugccu

SEQ ID NO: 2798926 - RNA, 15 nt, Human
gccccauucugccug

SEQ ID NO: 2798927 - RNA, 19 nt, Human
gcccccaaagcagcccuuc

SEQ ID NO: 2798928 - RNA, 13 nt, Human
gcccccuggccuc

SEQ ID NO: 2798929 - RNA, 14 nt, Human
gcccccuggccucu

SEQ ID NO: 2798930 - RNA, 15 nt, Human
gcccccuggccucug

SEQ ID NO: 2798931 - RNA, 16 nt, Human
gcccccuggccucugu

SEQ ID NO: 2798932 - RNA, 20 nt, Human
gcccccugcuggcucuucug

SEQ ID NO: 2798933 - RNA, 15 nt, Human
gcccccugcuggcuc

SEQ ID NO: 2798934 - RNA, 13 nt, Human
gcccccugccccc

SEQ ID NO: 2798935 - RNA, 13 nt, Human
gcccccugcuggc

SEQ ID NO: 2798936 - RNA, 17 nt, Human
gcccccuggccucugug

SEQ ID NO: 2798937 - RNA, 19 nt, Human
gcccccuggccucugugcc

SEQ ID NO: 2798938 - RNA, 13 nt, Human
gcccccuggucuc

SEQ ID NO: 2798939 - RNA, 14 nt, Human
gcccccuggucucu

SEQ ID NO: 2798940 - RNA, 16 nt, Human
gcccccuggucucugg

SEQ ID NO: 2798941 - RNA, 17 nt, Human
gcccccuggucucuggu

SEQ ID NO: 2798942 - RNA, 22 nt, Human
gcccccugguggacaguccugg

SEQ ID NO: 2798943 - RNA, 21 nt, Human
gcccccugguggacaguccug

SEQ ID NO: 2798944 - RNA, 23 nt, Human
gcccccugguggacaguccuggg

SEQ ID NO: 2798945 - RNA, 21 nt, Human
gcccccacauuugugccgaca

SEQ ID NO: 2798946 - RNA, 22 nt, Human
gcccccacauuugugccgacac

SEQ ID NO: 2798947 - RNA, 13 nt, Human
gcccccaccacac

SEQ ID NO: 2798948 - RNA, 15 nt, Human
gcccccaccacacau

SEQ ID NO: 2798949 - RNA, 16 nt, Human
gcccccaccacacauc

SEQ ID NO: 2798950 - RNA, 17 nt, Human
gcccccaccacacaucc

SEQ ID NO: 2798951 - RNA, 20 nt, Human
gcccccaccacacaucccag

SEQ ID NO: 2798952 - RNA, 21 nt, Human
gcccccaccacacaucccagc

SEQ ID NO: 2798953 - RNA, 23 nt, Human
gcccccaccacacaucccagccc

SEQ ID NO: 2798954 - RNA, 21 nt, Human
gcccccaccacuaggacucug

SEQ ID NO: 2798955 - RNA, 14 nt, Human
gcccccugcccccc

SEQ ID NO: 2798956 - RNA, 12 nt, Human
gcccccugcccu

SEQ ID NO: 2798957 - RNA, 18 nt, Human
gcccccugccccccagcc

SEQ ID NO: 2798958 - RNA, 19 nt, Human
gcccccugcccguguacau

SEQ ID NO: 2798959 - RNA, 14 nt, Human
gcccccugcccucc

SEQ ID NO: 2798960 - RNA, 19 nt, Human
gcccccugcccuccccucu

SEQ ID NO: 2798961 - RNA, 12 nt, Human
gcccaggcuggc

SEQ ID NO: 2798962 - RNA, 20 nt, Human
gcccaggcuggagugcagug

SEQ ID NO: 2798963 - RNA, 19 nt, Human
gcccaggcuggagugcagu

SEQ ID NO: 2798964 - RNA, 12 nt, Human
gcccaggcugga

SEQ ID NO: 2798965 - RNA, 15 nt, Human
gcccaggcuggagug

SEQ ID NO: 2798966 - RNA, 20 nt, Human
gcccaggcuggagugcaaug

SEQ ID NO: 2798967 - RNA, 18 nt, Human
gcccagagcaggaagcau

SEQ ID NO: 2798968 - RNA, 21 nt, Human
gcccaggccgggguggagcau

SEQ ID NO: 2798969 - RNA, 22 nt, Human
gcccaggccgggguggagcaug

SEQ ID NO: 2798970 - RNA, 23 nt, Human
gcccaggccgggguggagcaugg

SEQ ID NO: 2798971 - RNA, 13 nt, Human
gcccaggccggcc

SEQ ID NO: 2798972 - RNA, 14 nt, Human
gcccaggccggcca

SEQ ID NO: 2798973 - RNA, 15 nt, Human
gcccaggccggccag

SEQ ID NO: 2798974 - RNA, 16 nt, Human
gcccaggccggccagc

SEQ ID NO: 2798975 - RNA, 17 nt, Human
gcccaggccggccagcc

SEQ ID NO: 2798976 - RNA, 18 nt, Human
gcccaggccggccagccu

SEQ ID NO: 2798977 - RNA, 19 nt, Human
gcccaggccggccagccuc

SEQ ID NO: 2798978 - RNA, 20 nt, Human
gcccaggccggccagccuca

SEQ ID NO: 2798979 - RNA, 23 nt, Human
gcccaggccccugccacccuggg

SEQ ID NO: 2798980 - RNA, 14 nt, Human
gcccagagcaggaa

SEQ ID NO: 2798981 - RNA, 15 nt, Human
gcccagagcaggaag

SEQ ID NO: 2798982 - RNA, 16 nt, Human
gcccagagcaggaagc

SEQ ID NO: 2798983 - RNA, 21 nt, Human
gcccagagaggguggugaccu

SEQ ID NO: 2798984 - RNA, 15 nt, Human
gcccagagagggugg

SEQ ID NO: 2798985 - RNA, 22 nt, Human
gcccaguuggguggaugccugg

SEQ ID NO: 2798986 - RNA, 23 nt, Human
gcccaggguggacuuagaaagca

SEQ ID NO: 2798987 - RNA, 14 nt, Human
gcccaggguggacu

SEQ ID NO: 2798988 - RNA, 14 nt, Human
gcccauacucagcc

SEQ ID NO: 2798989 - RNA, 15 nt, Human
gcccauacucagccu

SEQ ID NO: 2798990 - RNA, 16 nt, Human
gcccauacucagccug

SEQ ID NO: 2798991 - RNA, 17 nt, Human
gcccauacucagccugc

SEQ ID NO: 2798992 - RNA, 19 nt, Human
gcccauacucagccugcug

SEQ ID NO: 2798993 - RNA, 20 nt, Human
gcccauacucagccugcugc

SEQ ID NO: 2798994 - RNA, 21 nt, Human
gcccauacucagccugcugcc

SEQ ID NO: 2798995 - RNA, 22 nt, Human
gcccaggggaggcggcacucca

SEQ ID NO: 2798996 - RNA, 20 nt, Human
gcccauccauaguaacugac

SEQ ID NO: 2798997 - RNA, 22 nt, Human
gcccaucacaggguugggccca

SEQ ID NO: 2798998 - RNA, 21 nt, Human
gcccaucacaggguugggccc

SEQ ID NO: 2798999 - RNA, 17 nt, Human
gcccaucacaggguugg

SEQ ID NO: 2799000 - RNA, 13 nt, Human
gcccaucacaggg

SEQ ID NO: 2799001 - RNA, 18 nt, Human
gcccauagaaacaugaca

SEQ ID NO: 2799002 - RNA, 21 nt, Human
gcccauagaaacaugacacug

SEQ ID NO: 2799003 - RNA, 22 nt, Human
gcccauagaaacaugacacuga

SEQ ID NO: 2799004 - RNA, 23 nt, Human
gcccauagaaacaugacacugac

SEQ ID NO: 2799005 - RNA, 12 nt, Human
gccccacugaug

SEQ ID NO: 2799006 - RNA, 13 nt, Human
gccccacugaugc

SEQ ID NO: 2799007 - RNA, 18 nt, Human
gccccacugaugcuguuc

SEQ ID NO: 2799008 - RNA, 23 nt, Human
gccccacugaugcuguucucuuc

SEQ ID NO: 2799009 - RNA, 21 nt, Human
gccccaccggcgcgcucuucg

SEQ ID NO: 2799010 - RNA, 23 nt, Human
gccccacugccagcagcagcagg

SEQ ID NO: 2799011 - RNA, 20 nt, Human
gccccacugccagcagcagc

SEQ ID NO: 2799012 - RNA, 17 nt, Human
gccccacugccagcagc

SEQ ID NO: 2799013 - RNA, 16 nt, Human
gccccacugccagcag

SEQ ID NO: 2799014 - RNA, 15 nt, Human
gccccacugccagca

SEQ ID NO: 2799015 - RNA, 14 nt, Human
gccccacugccagc

SEQ ID NO: 2799016 - RNA, 12 nt, Human
gccccacugcca

SEQ ID NO: 2799017 - RNA, 23 nt, Human
gccccagagcuguuuauggccuc

SEQ ID NO: 2799018 - RNA, 22 nt, Human
gccccagagcuguuuauggccu

SEQ ID NO: 2799019 - RNA, 14 nt, Human
gccccagagcuguu

SEQ ID NO: 2799020 - RNA, 13 nt, Human
gccccagagcugu

SEQ ID NO: 2799021 - RNA, 12 nt, Human
gccccagagcug

SEQ ID NO: 2799022 - RNA, 22 nt, Human
gccccagagcaggguguuggga

SEQ ID NO: 2799023 - RNA, 13 nt, Human
uuuuaaauucuga

SEQ ID NO: 2799024 - RNA, 20 nt, Human
uuuuaaauucugagacaugu

SEQ ID NO: 2799025 - RNA, 24 nt, Human
uuuuaaauucugagacauguguca

SEQ ID NO: 2799026 - RNA, 12 nt, Human
uuuuaaauuguu

SEQ ID NO: 2799027 - RNA, 13 nt, Human
uuuuaacaagaag

SEQ ID NO: 2799028 - RNA, 14 nt, Human
uuuuaacaagaaga

SEQ ID NO: 2799029 - RNA, 16 nt, Human
uuuuaacaagaagaug

SEQ ID NO: 2799030 - RNA, 17 nt, Human
uuuuaacaagaagauga

SEQ ID NO: 2799031 - RNA, 19 nt, Human
uuuuaacaagaagaugaau

SEQ ID NO: 2799032 - RNA, 21 nt, Human
uuuuaacaagaagaugaaugg

SEQ ID NO: 2799033 - RNA, 22 nt, Human
uuuuaaucagacaaaguaauuc

SEQ ID NO: 2799034 - RNA, 22 nt, Human
uuuuaauauuauuacuguugau

SEQ ID NO: 2799035 - RNA, 12 nt, Human
uuuuaaucauga

SEQ ID NO: 2799036 - RNA, 14 nt, Human
uuuuaaucaugaaa

SEQ ID NO: 2799037 - RNA, 21 nt, Human
uuuuaauagucauuccaaaua

SEQ ID NO: 2799038 - RNA, 18 nt, Human
uuuuaauagaauaaaaua

SEQ ID NO: 2799039 - RNA, 14 nt, Human
uuuuaauauaaauu

SEQ ID NO: 2799040 - RNA, 12 nt, Human
uuuuaauagaac

SEQ ID NO: 2799041 - RNA, 16 nt, Human
uuuuaaucaugaaauu

SEQ ID NO: 2799042 - RNA, 20 nt, Human
uuuuaaucaugaaauuacuu

SEQ ID NO: 2799043 - RNA, 17 nt, Human
uuuuaauggauuguuaa

SEQ ID NO: 2799044 - RNA, 18 nt, Human
uuuuaauggauuguuaau

SEQ ID NO: 2799045 - RNA, 17 nt, Human
uuuuaauggcagcagaa

SEQ ID NO: 2799046 - RNA, 21 nt, Human
uuuuaauggcagcagaaaacu

SEQ ID NO: 2799047 - RNA, 22 nt, Human
uuuuaauggcagcagaaaacuu

SEQ ID NO: 2799048 - RNA, 17 nt, Human
uuuuaaucugaaauucu

SEQ ID NO: 2799049 - RNA, 16 nt, Human
uuuuaaugcaguugcu

SEQ ID NO: 2799050 - RNA, 20 nt, Human
uuuuaaugucauuuguuaaa

SEQ ID NO: 2799051 - RNA, 18 nt, Human
uuuuaaugugaugaugua

SEQ ID NO: 2799052 - RNA, 12 nt, Human
uuuuaauguaaa

SEQ ID NO: 2799053 - RNA, 15 nt, Human
uuuuaaauuuuguaa

SEQ ID NO: 2799054 - RNA, 16 nt, Human
uuuuaaauuuuguaau

SEQ ID NO: 2799055 - RNA, 17 nt, Human
uuuuaaauuuuguaaug

SEQ ID NO: 2799056 - RNA, 18 nt, Human
uuuuaaauuuuguaauga

SEQ ID NO: 2799057 - RNA, 16 nt, Human
uuuuaaauguauacua

SEQ ID NO: 2799058 - RNA, 21 nt, Human
uuuuaaaucuaaaucuauuua

SEQ ID NO: 2799059 - RNA, 19 nt, Human
uuuuaaaugcauaaaugca

SEQ ID NO: 2799060 - RNA, 14 nt, Human
uuuuaaauguacag

SEQ ID NO: 2799061 - RNA, 15 nt, Human
uuuuaaauguacaga

SEQ ID NO: 2799062 - RNA, 22 nt, Human
uuuuaaauguacagacauauuu

SEQ ID NO: 2799063 - RNA, 12 nt, Human
uuuuaaauguau

SEQ ID NO: 2799064 - RNA, 18 nt, Human
uuuuaaaucuaaaucuau

SEQ ID NO: 2799065 - RNA, 14 nt, Human
uuuuaaaucuaaau

SEQ ID NO: 2799066 - RNA, 15 nt, Human
uuuuaaagaucugua

SEQ ID NO: 2799067 - RNA, 15 nt, Human
uuuuaaauaaacuuu

SEQ ID NO: 2799068 - RNA, 16 nt, Human
uuuuaaauaaacuuuu

SEQ ID NO: 2799069 - RNA, 21 nt, Human
uuuuaaauaaacuuuuuuuca

SEQ ID NO: 2799070 - RNA, 22 nt, Human
uuuuaaauaaacuuuuuuucaa

SEQ ID NO: 2799071 - RNA, 23 nt, Human
uuuuaaauaaacuuuuuuucaau

SEQ ID NO: 2799072 - RNA, 14 nt, Human
uuuuaaaagagaca

SEQ ID NO: 2799073 - RNA, 22 nt, Human
uuuuaaaagagacaaacuguaa

SEQ ID NO: 2799074 - RNA, 23 nt, Human
uuuuaaaagagacaaacuguaaa

SEQ ID NO: 2799075 - RNA, 19 nt, Human
uuuguugacaaaauuuucu

SEQ ID NO: 2799076 - RNA, 21 nt, Human
uuuuaaaagguauuuugaaua

SEQ ID NO: 2799077 - RNA, 12 nt, Human
uuuuaaaaguuu

SEQ ID NO: 2799078 - RNA, 13 nt, Human
uuuuaaaaguuuc

SEQ ID NO: 2799079 - RNA, 15 nt, Human
uuuuaaaaguuucaa

SEQ ID NO: 2799080 - RNA, 14 nt, Human
uuuguucuuuuuau

SEQ ID NO: 2799081 - RNA, 12 nt, Human
uuuguucucugu

SEQ ID NO: 2799082 - RNA, 13 nt, Human
uuuguucucuguc

SEQ ID NO: 2799083 - RNA, 14 nt, Human
uuuguucuuacaca

SEQ ID NO: 2799084 - RNA, 15 nt, Human
uuuguucuuacacau

SEQ ID NO: 2799085 - RNA, 19 nt, Human
uuuguucuuacacauacag

SEQ ID NO: 2799086 - RNA, 15 nt, Human
uuuguucuucaagaa

SEQ ID NO: 2799087 - RNA, 13 nt, Human
uuuguucuucaga

SEQ ID NO: 2799088 - RNA, 18 nt, Human
uuuguucuucagagauca

SEQ ID NO: 2799089 - RNA, 20 nt, Human
uuuguucgcauggucacaca

SEQ ID NO: 2799090 - RNA, 14 nt, Human
uuuguauauuacac

SEQ ID NO: 2799091 - RNA, 19 nt, Human
uuuguauauuacacauuug

SEQ ID NO: 2799092 - RNA, 21 nt, Human
uuuguauauuacacauuugua

SEQ ID NO: 2799093 - RNA, 17 nt, Human
uuuguaucuuaaauuug

SEQ ID NO: 2799094 - RNA, 22 nt, Human
uuuguaucuuccauauuuggaa

SEQ ID NO: 2799095 - RNA, 20 nt, Human
uuuguaucucugaagcaugu

SEQ ID NO: 2799096 - RNA, 21 nt, Human
uuuguaucucugaagcauguu

SEQ ID NO: 2799097 - RNA, 17 nt, Human
uuuguauaguaaaguga

SEQ ID NO: 2799098 - RNA, 16 nt, Human
uuuguauaguaaagug

SEQ ID NO: 2799099 - RNA, 21 nt, Human
uuuggugguuuaaaaauggua

SEQ ID NO: 2799100 - RNA, 20 nt, Human
uuuggugcucauuuaaauau

SEQ ID NO: 2799101 - RNA, 15 nt, Human
uuuggucucccuggg

SEQ ID NO: 2799102 - RNA, 20 nt, Human
uuugguuugcuuugguuuau

SEQ ID NO: 2799103 - RNA, 17 nt, Human
uuuggaguccccucacc

SEQ ID NO: 2799104 - RNA, 22 nt, Human
uuuggaauuuuugcuugacuuc

SEQ ID NO: 2799105 - RNA, 20 nt, Human
uuuggagucagacagaugug

SEQ ID NO: 2799106 - RNA, 11 nt, Human
uuuggaaugug

SEQ ID NO: 2799107 - RNA, 14 nt, Human
uuuggugauucaaa

SEQ ID NO: 2799108 - RNA, 16 nt, Human
uuuggugcauagaacu

SEQ ID NO: 2799109 - RNA, 17 nt, Human
uuuggugcauagaacug

SEQ ID NO: 2799110 - RNA, 18 nt, Human
uuuggugcauagaacugg

SEQ ID NO: 2799111 - RNA, 22 nt, Human
uuuggugcauagaacuggguaa

SEQ ID NO: 2799112 - RNA, 20 nt, Human
uuuggaguccccucaccucc

SEQ ID NO: 2799113 - RNA, 19 nt, Human
uuuggaguguuauguauuu

SEQ ID NO: 2799114 - RNA, 22 nt, Human
uuuggaguguuauguauuuccu

SEQ ID NO: 2799115 - RNA, 15 nt, Human
uuuggaucuugaaug

SEQ ID NO: 2799116 - RNA, 17 nt, Human
uuuggaucuugaaugug

SEQ ID NO: 2799117 - RNA, 13 nt, Human
uuuggauguaauu

SEQ ID NO: 2799118 - RNA, 15 nt, Human
uuuggauguaauuua

SEQ ID NO: 2799119 - RNA, 16 nt, Human
uuuggucuggacugac

SEQ ID NO: 2799120 - RNA, 19 nt, Human
uuuggucuggacugacagc

SEQ ID NO: 2799121 - RNA, 21 nt, Human
uuuggucuggacugacagcau

SEQ ID NO: 2799122 - RNA, 22 nt, Human
uuuggucuggacugacagcaug

SEQ ID NO: 2799123 - RNA, 20 nt, Human
uuugcaucguccccuccccc

SEQ ID NO: 2799124 - RNA, 14 nt, Human
uuugcuuuuugcua

SEQ ID NO: 2799125 - RNA, 15 nt, Human
uuuggaaaaauguuu

SEQ ID NO: 2799126 - RNA, 15 nt, Human
uuugcuuugcccagc

SEQ ID NO: 2799127 - RNA, 22 nt, Human
uuugcauggcuccagaaauguc

SEQ ID NO: 2799128 - RNA, 21 nt, Human
uuugcaugugaaaaucaaaua

SEQ ID NO: 2799129 - RNA, 22 nt, Human
uuugcaucugaaauaggaaaca

SEQ ID NO: 2799130 - RNA, 14 nt, Human
uuugcaucugaaau

SEQ ID NO: 2799131 - RNA, 23 nt, Human
uuugaauguuaagaauugaccau

SEQ ID NO: 2799132 - RNA, 13 nt, Human
uuugaauguuaau

SEQ ID NO: 2799133 - RNA, 16 nt, Human
uuugaauguuaauuuu

SEQ ID NO: 2799134 - RNA, 19 nt, Human
uuugaauguuaauuuuuug

SEQ ID NO: 2799135 - RNA, 11 nt, Human
uuugaauguua

SEQ ID NO: 2799136 - RNA, 12 nt, Human
uuugaauguuaa

SEQ ID NO: 2799137 - RNA, 15 nt, Human
uuucugaauagaaau

SEQ ID NO: 2799138 - RNA, 13 nt, Human
uuucugacaguuu

SEQ ID NO: 2799139 - RNA, 14 nt, Human
uuucugaaggcuuu

SEQ ID NO: 2799140 - RNA, 17 nt, Human
uuucugaaggcuuugug

SEQ ID NO: 2799141 - RNA, 23 nt, Human
uuucucugccgcuaccucccucc

SEQ ID NO: 2799142 - RNA, 21 nt, Human
uuucuagaauuuaucacacuu

SEQ ID NO: 2799143 - RNA, 19 nt, Human
uuucuagaaguuucccuuc

SEQ ID NO: 2799144 - RNA, 20 nt, Human
uuucuagaaguuucccuucc

SEQ ID NO: 2799145 - RNA, 23 nt, Human
uuucuagaaguuucccuuccucc

SEQ ID NO: 2799146 - RNA, 15 nt, Human
uuucuagacuuucug

SEQ ID NO: 2799147 - RNA, 16 nt, Human
uuucuagacuuucugu

SEQ ID NO: 2799148 - RNA, 15 nt, Human
uuaccacacaucuau

SEQ ID NO: 2799149 - RNA, 18 nt, Human
uuaccacacaucuaugau

SEQ ID NO: 2799150 - RNA, 20 nt, Human
uuaccacacaucuaugauau

SEQ ID NO: 2799151 - RNA, 15 nt, Human
uuuccucaaauguug

SEQ ID NO: 2799152 - RNA, 19 nt, Human
uuuccucagcuuaucucuu

SEQ ID NO: 2799153 - RNA, 13 nt, Human
uuuccucccucag

SEQ ID NO: 2799154 - RNA, 13 nt, Human
uuuccugcccugg

SEQ ID NO: 2799155 - RNA, 12 nt, Human
uuuccugcccug

SEQ ID NO: 2799156 - RNA, 16 nt, Human
uuuccuggacacucag

SEQ ID NO: 2799157 - RNA, 20 nt, Human
uuuccuggacacucagaccu

SEQ ID NO: 2799158 - RNA, 16 nt, Human
uuuccuggaugucuga

SEQ ID NO: 2799159 - RNA, 21 nt, Human
uuuccugauaaagcacagcug

SEQ ID NO: 2799160 - RNA, 12 nt, Human
uuuccugcuuca

SEQ ID NO: 2799161 - RNA, 21 nt, Human
uuacauuuuuugggcagcaau

SEQ ID NO: 2799162 - RNA, 14 nt, Human
uuaccaaacagcaa

SEQ ID NO: 2799163 - RNA, 16 nt, Human
uuaccaaacagcaaac

SEQ ID NO: 2799164 - RNA, 17 nt, Human
uuaccaaacagcaaacc

SEQ ID NO: 2799165 - RNA, 19 nt, Human
uuaccaaacagcaaaccaa

SEQ ID NO: 2799166 - RNA, 20 nt, Human
uuaccaaacagcaaaccaag

SEQ ID NO: 2799167 - RNA, 13 nt, Human
uuacauuuuuauu

SEQ ID NO: 2799168 - RNA, 15 nt, Human
uuacauuuuuauuua

SEQ ID NO: 2799169 - RNA, 17 nt, Human
uuacauuuuuauuuaug

SEQ ID NO: 2799170 - RNA, 18 nt, Human
uuacauuuuuauuuauga

SEQ ID NO: 2799171 - RNA, 19 nt, Human
uuacauuuuuauuuaugaa

SEQ ID NO: 2799172 - RNA, 21 nt, Human
uuacauuuuuauuuaugaagu

SEQ ID NO: 2799173 - RNA, 22 nt, Human
uuacauuuuuauuuaugaaguu

SEQ ID NO: 2799174 - RNA, 13 nt, Human
uuaccaacuuucu

SEQ ID NO: 2799175 - RNA, 14 nt, Human
uuaccaacuuucug

SEQ ID NO: 2799176 - RNA, 15 nt, Human
uuaccaacuuucugu

SEQ ID NO: 2799177 - RNA, 16 nt, Human
uuaccaacuuucugua

SEQ ID NO: 2799178 - RNA, 18 nt, Human
uuaccaacuuucuguaaa

SEQ ID NO: 2799179 - RNA, 16 nt, Human
uuugaauauuacuccu

SEQ ID NO: 2799180 - RNA, 14 nt, Human
uuugaauauggaca

SEQ ID NO: 2799181 - RNA, 16 nt, Human
uuucuugcagaucaaa

SEQ ID NO: 2799182 - RNA, 13 nt, Human
uuucuugcauuga

SEQ ID NO: 2799183 - RNA, 18 nt, Human
uuucuugauuugaguuga

SEQ ID NO: 2799184 - RNA, 22 nt, Human
uuucuugacucuuguuuucagu

SEQ ID NO: 2799185 - RNA, 20 nt, Human
uuucuugacaaaaccuaacu

SEQ ID NO: 2799186 - RNA, 21 nt, Human
uuucuugacaaaaccuaacuu

SEQ ID NO: 2799187 - RNA, 17 nt, Human
uuugaacuggcaauugu

SEQ ID NO: 2799188 - RNA, 19 nt, Human
uuugaacuggcaauugucu

SEQ ID NO: 2799189 - RNA, 22 nt, Human
uuugaacuggcaauugucuauu

SEQ ID NO: 2799190 - RNA, 21 nt, Human
uuugaacucagaucugucuga

SEQ ID NO: 2799191 - RNA, 16 nt, Human
uuugaacucagaucug

SEQ ID NO: 2799192 - RNA, 18 nt, Human
uuugaagaacaugugaga

SEQ ID NO: 2799193 - RNA, 21 nt, Human
uuugaagaagguggaccuuuu

SEQ ID NO: 2799194 - RNA, 17 nt, Human
uuugaagaacaugugag

SEQ ID NO: 2799195 - RNA, 23 nt, Human
uuugaagacccgcuacaaaacgc

SEQ ID NO: 2799196 - RNA, 13 nt, Human
uuucuuauugcgc

SEQ ID NO: 2799197 - RNA, 14 nt, Human
uuucuuauugcgcu

SEQ ID NO: 2799198 - RNA, 17 nt, Human
uuucuuauugcgcugcu

SEQ ID NO: 2799199 - RNA, 16 nt, Human
uuucuuagugccugug

SEQ ID NO: 2799200 - RNA, 19 nt, Human
uuucuuauaauacucuguu

SEQ ID NO: 2799201 - RNA, 21 nt, Human
uuucuuauaauacucuguugu

SEQ ID NO: 2799202 - RNA, 12 nt, Human
uuucugagaaaa

SEQ ID NO: 2799203 - RNA, 15 nt, Human
uuucugagaaaagaa

SEQ ID NO: 2799204 - RNA, 15 nt, Human
uuucuguugguguau

SEQ ID NO: 2799205 - RNA, 14 nt, Human
uuucuguuguaacu

SEQ ID NO: 2799206 - RNA, 15 nt, Human
uuucuguuguaacuu

SEQ ID NO: 2799207 - RNA, 16 nt, Human
uuucuguuguaacuua

SEQ ID NO: 2799208 - RNA, 17 nt, Human
uuucuguuguaacuuau

SEQ ID NO: 2799209 - RNA, 19 nt, Human
uuucuguuguaacuuaugu

SEQ ID NO: 2799210 - RNA, 23 nt, Human
uuucuguuguaacuuauguagau

SEQ ID NO: 2799211 - RNA, 15 nt, Human
uuucuguuggauucc

SEQ ID NO: 2799212 - RNA, 13 nt, Human
uuucuguuucuca

SEQ ID NO: 2799213 - RNA, 16 nt, Human
uuucuguuugauucuu

SEQ ID NO: 2799214 - RNA, 16 nt, Human
uuucuuagcuuuuuaa

SEQ ID NO: 2799215 - RNA, 19 nt, Human
uuucuuagcuuuuuaauug

SEQ ID NO: 2799216 - RNA, 20 nt, Human
uuucuuagcuuuuuaauugu

SEQ ID NO: 2799217 - RNA, 21 nt, Human
uuucuuagcuuuuuaauuguu

SEQ ID NO: 2799218 - RNA, 22 nt, Human
uuucuuagcuuuuuaauuguug

SEQ ID NO: 2799219 - RNA, 14 nt, Human
uuucuuccucugcu

SEQ ID NO: 2799220 - RNA, 16 nt, Human
uuucuuccucugcuga

SEQ ID NO: 2799221 - RNA, 12 nt, Human
uuucuucuauuu

SEQ ID NO: 2799222 - RNA, 12 nt, Human
uuucuuccuggc

SEQ ID NO: 2799223 - RNA, 18 nt, Human
uuucuuccuguuaaugua

SEQ ID NO: 2799224 - RNA, 11 nt, Human
uuucuuccuuu

SEQ ID NO: 2799225 - RNA, 15 nt, Human
uuucuuccuuuacuu

SEQ ID NO: 2799226 - RNA, 13 nt, Human
uuucuucuacuuu

SEQ ID NO: 2799227 - RNA, 12 nt, Human
uuucuucuaugu

SEQ ID NO: 2799228 - RNA, 16 nt, Human
uuucuucagggcugcu

SEQ ID NO: 2799229 - RNA, 13 nt, Human
uuucuucauccaa

SEQ ID NO: 2799230 - RNA, 15 nt, Human
uuucuucauccaacu

SEQ ID NO: 2799231 - RNA, 12 nt, Human
uuucuucaugag

SEQ ID NO: 2799232 - RNA, 15 nt, Human
uuucuucagggcugc

SEQ ID NO: 2799233 - RNA, 21 nt, Human
uuucuucacuguugaaaauua

SEQ ID NO: 2799234 - RNA, 13 nt, Human
uuucuucacuuuu

SEQ ID NO: 2799235 - RNA, 15 nt, Human
uuucuucaaaaugua

SEQ ID NO: 2799236 - RNA, 16 nt, Human
uuucuucaaaauguau

SEQ ID NO: 2799237 - RNA, 21 nt, Human
uuucuucaaaauguauauauu

SEQ ID NO: 2799238 - RNA, 11 nt, Human
uuucuuccucu

SEQ ID NO: 2799239 - RNA, 13 nt, Human
uuucuuccucugc

SEQ ID NO: 2799240 - RNA, 14 nt, Human
uuuuucuaguacac

SEQ ID NO: 2799241 - RNA, 16 nt, Human
uuuuucucaaaguuuu

SEQ ID NO: 2799242 - RNA, 19 nt, Human
uuuuucucaugaaucugca

SEQ ID NO: 2799243 - RNA, 15 nt, Human
uuuuucuccagugcu

SEQ ID NO: 2799244 - RNA, 18 nt, Human
uuuuucucaaaguuuuga

SEQ ID NO: 2799245 - RNA, 11 nt, Human
uuuuuccuuuu

SEQ ID NO: 2799246 - RNA, 11 nt, Human
uuuuuccuuua

SEQ ID NO: 2799247 - RNA, 16 nt, Human
uuuuuccuuuuucuga

SEQ ID NO: 2799248 - RNA, 17 nt, Human
uuuuuccuuuuucugau

SEQ ID NO: 2799249 - RNA, 18 nt, Human
uuuuuccuagcccucuca

SEQ ID NO: 2799250 - RNA, 15 nt, Human
uuuuuccuagccugu

SEQ ID NO: 2799251 - RNA, 19 nt, Human
uuuuuccuagccuguuucu

SEQ ID NO: 2799252 - RNA, 21 nt, Human
uuuuuccuagccuguuucuuc

SEQ ID NO: 2799253 - RNA, 21 nt, Human
uuuuuaaguaauguggaagaa

SEQ ID NO: 2799254 - RNA, 23 nt, Human
uuuuuccuaacaaaagaugaaag

SEQ ID NO: 2799255 - RNA, 11 nt, Human
uuuuuaaauaa

SEQ ID NO: 2799256 - RNA, 16 nt, Human
uuuuuaagauuuuucu

SEQ ID NO: 2799257 - RNA, 13 nt, Human
uuuuuaagauuuu

SEQ ID NO: 2799258 - RNA, 16 nt, Human
uuuuuaaguauuuaua

SEQ ID NO: 2799259 - RNA, 23 nt, Human
uuuuuaaggguuaucuuagaugu

SEQ ID NO: 2799260 - RNA, 13 nt, Human
uuuuucuuuugua

SEQ ID NO: 2799261 - RNA, 10 nt, Human
uuuuugaaaa

SEQ ID NO: 2799262 - RNA, 17 nt, Human
uuuuugaaaaaagcuca

SEQ ID NO: 2799263 - RNA, 23 nt, Human
uuuuugaaaggcauguuccucug

SEQ ID NO: 2799264 - RNA, 11 nt, Human
uuuuugaaaug

SEQ ID NO: 2799265 - RNA, 12 nt, Human
uuuuugaaauga

SEQ ID NO: 2799266 - RNA, 15 nt, Human
uuuuugaaaugaaau

SEQ ID NO: 2799267 - RNA, 16 nt, Human
uuuuugaaaugaaauu

SEQ ID NO: 2799268 - RNA, 17 nt, Human
uuuuugaaaugaaauuu

SEQ ID NO: 2799269 - RNA, 21 nt, Human
uuuuugaaccauccacuuaca

SEQ ID NO: 2799270 - RNA, 19 nt, Human
uuuuugaacuaagaaacuu

SEQ ID NO: 2799271 - RNA, 23 nt, Human
uuuuugaacuaagaaacuuuugu

SEQ ID NO: 2799272 - RNA, 12 nt, Human
uuuuuugauaaa

SEQ ID NO: 2799273 - RNA, 12 nt, Human
uuuuuuguaguu

SEQ ID NO: 2799274 - RNA, 13 nt, Human
uuuuuugguacaa

SEQ ID NO: 2799275 - RNA, 16 nt, Human
uuuuuugguacaaaaa

SEQ ID NO: 2799276 - RNA, 16 nt, Human
uuuuuugggcagcaau

SEQ ID NO: 2799277 - RNA, 12 nt, Human
uuuuuugucaac

SEQ ID NO: 2799278 - RNA, 10 nt, Human
uuuuaauuua

SEQ ID NO: 2799279 - RNA, 15 nt, Human
uuuuaauuuaaagcu

SEQ ID NO: 2799280 - RNA, 16 nt, Human
uuuuaauuuaaagcuu

SEQ ID NO: 2799281 - RNA, 17 nt, Human
uuuuaauuuaaagcuua

SEQ ID NO: 2799282 - RNA, 12 nt, Human
uuuuaauuuaac

SEQ ID NO: 2799283 - RNA, 17 nt, Human
uuuuaauuuaacaugaa

SEQ ID NO: 2799284 - RNA, 12 nt, Human
uuuuccugcuuc

SEQ ID NO: 2799285 - RNA, 14 nt, Human
uuuuccuguucaua

SEQ ID NO: 2799286 - RNA, 16 nt, Human
uuuuccuguuucugaa

SEQ ID NO: 2799287 - RNA, 18 nt, Human
uuuuccuguuucugaaaa

SEQ ID NO: 2799288 - RNA, 12 nt, Human
uuuuaauuguca

SEQ ID NO: 2799289 - RNA, 13 nt, Human
uuuuaauugucau

SEQ ID NO: 2799290 - RNA, 14 nt, Human
uuuuaauugucaug

SEQ ID NO: 2799291 - RNA, 15 nt, Human
uuuuaauugucaugg

SEQ ID NO: 2799292 - RNA, 23 nt, Human
uuuuaauugucaugguuacaaac

SEQ ID NO: 2799293 - RNA, 18 nt, Human
uuuuaauuccaauaugau

SEQ ID NO: 2799294 - RNA, 19 nt, Human
uuuuaauuccaauaugaug

SEQ ID NO: 2799295 - RNA, 22 nt, Human
uuuuaauuccaauaugaugacu

SEQ ID NO: 2799296 - RNA, 16 nt, Human
uuuuaauuaaaaacua

SEQ ID NO: 2799297 - RNA, 16 nt, Human
uuuucuacauuauugc

SEQ ID NO: 2799298 - RNA, 17 nt, Human
uuuucuuugaaugcuuu

SEQ ID NO: 2799299 - RNA, 12 nt, Human
uuuucuuugcaa

SEQ ID NO: 2799300 - RNA, 15 nt, Human
uuuucuuugcaaagu

SEQ ID NO: 2799301 - RNA, 16 nt, Human
uuuucuuuguguagcu

SEQ ID NO: 2799302 - RNA, 21 nt, Human
uuuucuuuuguaagugcuaca

SEQ ID NO: 2799303 - RNA, 14 nt, Human
uuuucuuuuguuac

SEQ ID NO: 2799304 - RNA, 15 nt, Human
uuuucuuuuguuacu

SEQ ID NO: 2799305 - RNA, 16 nt, Human
uuuucuuuuguuacug

SEQ ID NO: 2799306 - RNA, 17 nt, Human
uuuucuuuuguuacugu

SEQ ID NO: 2799307 - RNA, 18 nt, Human
uuuucuuuuguuacuguu

SEQ ID NO: 2799308 - RNA, 19 nt, Human
uuuucuuuuguuacuguuc

SEQ ID NO: 2799309 - RNA, 20 nt, Human
uuuucuuuuguuacuguucu

SEQ ID NO: 2799310 - RNA, 19 nt, Human
uuuucuuuguguagcuuug

SEQ ID NO: 2799311 - RNA, 12 nt, Human
uuuucuuugugu

SEQ ID NO: 2799312 - RNA, 12 nt, Human
uuuucuuuguau

SEQ ID NO: 2799313 - RNA, 15 nt, Human
uuuucuuuguaucau

SEQ ID NO: 2799314 - RNA, 18 nt, Human
uuuucuuuguaucauuca

SEQ ID NO: 2799315 - RNA, 20 nt, Human
uuuucuuuguaucauucauc

SEQ ID NO: 2799316 - RNA, 13 nt, Human
uuuucuaaccuug

SEQ ID NO: 2799317 - RNA, 14 nt, Human
uuuucuaaccuuga

SEQ ID NO: 2799318 - RNA, 19 nt, Human
uuuucuaagcaauuucuug

SEQ ID NO: 2799319 - RNA, 21 nt, Human
uuuucuaagcaauuucuugcu

SEQ ID NO: 2799320 - RNA, 21 nt, Human
uuuucuaaugaggagagaaaa

SEQ ID NO: 2799321 - RNA, 13 nt, Human
uuuucuacaaaua

SEQ ID NO: 2799322 - RNA, 22 nt, Human
uuuucuaaacguaagcacuguu

SEQ ID NO: 2799323 - RNA, 23 nt, Human
uuuucuaaacguaagcacuguuu

SEQ ID NO: 2799324 - RNA, 15 nt, Human
uuuuggucuguguga

SEQ ID NO: 2799325 - RNA, 17 nt, Human
uuuugguauuacacugu

SEQ ID NO: 2799326 - RNA, 14 nt, Human
uuuugguagagaug

SEQ ID NO: 2799327 - RNA, 16 nt, Human
uuuugguagauuaaau

SEQ ID NO: 2799328 - RNA, 17 nt, Human
uuuugguagauuaaaua

SEQ ID NO: 2799329 - RNA, 23 nt, Human
uuuugguauuacacuguauuugu

SEQ ID NO: 2799330 - RNA, 17 nt, Human
uuuugggacaauuguuu

SEQ ID NO: 2799331 - RNA, 17 nt, Human
uuuuggcgcuauuacaa

SEQ ID NO: 2799332 - RNA, 19 nt, Human
uuuuggcgcuauuacaaau

SEQ ID NO: 2799333 - RNA, 15 nt, Human
uuuuggccuggaguu

SEQ ID NO: 2799334 - RNA, 14 nt, Human
uuuugguacaaaaa

SEQ ID NO: 2799335 - RNA, 16 nt, Human
uuuugguacaaaaaua

SEQ ID NO: 2799336 - RNA, 19 nt, Human
uuuugggguuguguuguca

SEQ ID NO: 2799337 - RNA, 13 nt, Human
uuuuggguagcug

SEQ ID NO: 2799338 - RNA, 14 nt, Human
uuuuggguagcugc

SEQ ID NO: 2799339 - RNA, 18 nt, Human
uuuugggggucaggcagc

SEQ ID NO: 2799340 - RNA, 18 nt, Human
uuuugggggugggucugg

SEQ ID NO: 2799341 - RNA, 18 nt, Human
uuuugggggugugagugu

SEQ ID NO: 2799342 - RNA, 13 nt, Human
uuuugaauguuau

SEQ ID NO: 2799343 - RNA, 16 nt, Human
uuuuggauuguauauu

SEQ ID NO: 2799344 - RNA, 14 nt, Human
uuuugaauguuauu

SEQ ID NO: 2799345 - RNA, 14 nt, Human
uuuugaauuguuac

SEQ ID NO: 2799346 - RNA, 15 nt, Human
uuuugaauuguuaca

SEQ ID NO: 2799347 - RNA, 16 nt, Human
uuuugaauuguuacau

SEQ ID NO: 2799348 - RNA, 14 nt, Human
uuuugaauuuagug

SEQ ID NO: 2799349 - RNA, 14 nt, Human
uuuugaaaaaagcu

SEQ ID NO: 2799350 - RNA, 16 nt, Human
uuuugaaaaaagcuca

SEQ ID NO: 2799351 - RNA, 23 nt, Human
uuuugaaaaaagcucauuucaug

SEQ ID NO: 2799352 - RNA, 15 nt, Human
uuuucuuuuuacaua

SEQ ID NO: 2799353 - RNA, 23 nt, Human
uuuucuuuuuacauaacugccuu

SEQ ID NO: 2799354 - RNA, 12 nt, Human
uuuugucuugaa

SEQ ID NO: 2799355 - RNA, 13 nt, Human
uuuugucuugaau

SEQ ID NO: 2799356 - RNA, 18 nt, Human
uuuugugaaaaugucaaa

SEQ ID NO: 2799357 - RNA, 23 nt, Human
uuuuuaaaacacauguuuuuaua

SEQ ID NO: 2799358 - RNA, 15 nt, Human
uuuuuaaaagagaca

SEQ ID NO: 2799359 - RNA, 20 nt, Human
uuuuuaaaagagacaaacug

SEQ ID NO: 2799360 - RNA, 12 nt, Human
uuuuuaaaagau

SEQ ID NO: 2799361 - RNA, 23 nt, Human
uuuuuaaaagaucuucaaaagua

SEQ ID NO: 2799362 - RNA, 14 nt, Human
uuuuuaaaacacau

SEQ ID NO: 2799363 - RNA, 18 nt, Human
uuuuuaaaacacauguuu

SEQ ID NO: 2799364 - RNA, 22 nt, Human
uuuuuaaaaguuucaaugugau

SEQ ID NO: 2799365 - RNA, 19 nt, Human
uuuuuaaaaguuucaaugu

SEQ ID NO: 2799366 - RNA, 15 nt, Human
uuuugucaacauugu

SEQ ID NO: 2799367 - RNA, 16 nt, Human
uuuugucaacauugug

SEQ ID NO: 2799368 - RNA, 15 nt, Human
uuuugucuaauuaaa

SEQ ID NO: 2799369 - RNA, 16 nt, Human
uuuugucccccaacuu

SEQ ID NO: 2799370 - RNA, 20 nt, Human
uuuugucccccaacuugaga

SEQ ID NO: 2799371 - RNA, 17 nt, Human
uuuugucuuuaaauaga

SEQ ID NO: 2799372 - RNA, 14 nt, Human
uuuugucuuuuaug

SEQ ID NO: 2799373 - RNA, 13 nt, Human
uuuugucuuauau

SEQ ID NO: 2799374 - RNA, 16 nt, Human
uuuuuaaaauauuuau

SEQ ID NO: 2799375 - RNA, 17 nt, Human
uuuuuaaaauauuuauu

SEQ ID NO: 2799376 - RNA, 19 nt, Human
uuuuuaaacaaacauugug

SEQ ID NO: 2799377 - RNA, 14 nt, Human
uuuuuaaaauggug

SEQ ID NO: 2799378 - RNA, 17 nt, Human
uuuuuaaaauggugcuu

SEQ ID NO: 2799379 - RNA, 19 nt, Human
uuuuuaaaauggugcuuaa

SEQ ID NO: 2799380 - RNA, 17 nt, Human
uuuuuaaagacagaguc

SEQ ID NO: 2799381 - RNA, 12 nt, Human
uuuuuaaagauc

SEQ ID NO: 2799382 - RNA, 20 nt, Human
uuuuuaaaguguuucuguua

SEQ ID NO: 2799383 - RNA, 12 nt, Human
uuuuuaaagcuu

SEQ ID NO: 2799384 - RNA, 13 nt, Human
uuuuuaaagcuua

SEQ ID NO: 2799385 - RNA, 13 nt, Human
uuuuuaaauaaac

SEQ ID NO: 2799386 - RNA, 14 nt, Human
uuuuuaaauaaacu

SEQ ID NO: 2799387 - RNA, 15 nt, Human
uuuuuaaauaaacuu

SEQ ID NO: 2799388 - RNA, 16 nt, Human
uuuuuaaauaaacuuu

SEQ ID NO: 2799389 - RNA, 17 nt, Human
uuuuuaaauaaacuuuu

SEQ ID NO: 2799390 - RNA, 23 nt, Human
uuuuuaaauaaacuuuuuuucaa

SEQ ID NO: 2799391 - RNA, 11 nt, Human
uuuuguauaca

SEQ ID NO: 2799392 - RNA, 13 nt, Human
uuuuguauacaaa

SEQ ID NO: 2799393 - RNA, 15 nt, Human
uuuuguauacaaaua

SEQ ID NO: 2799394 - RNA, 19 nt, Human
uuuuguauacaaauauauu

SEQ ID NO: 2799395 - RNA, 21 nt, Human
uuuuguauacaaauauauugu

SEQ ID NO: 2799396 - RNA, 13 nt, Human
uuuuguauacauc

SEQ ID NO: 2799397 - RNA, 19 nt, Human
uuuuguauacauccugggu

SEQ ID NO: 2799398 - RNA, 13 nt, Human
uuuuguauauauc

SEQ ID NO: 2799399 - RNA, 19 nt, Human
uuuuguaucuacaucuuuu

SEQ ID NO: 2799400 - RNA, 13 nt, Human
uuuuguaucuuaa

SEQ ID NO: 2799401 - RNA, 14 nt, Human
uuuuguaucuacau

SEQ ID NO: 2799402 - RNA, 17 nt, Human
uuuuguauaguaaagug

SEQ ID NO: 2799403 - RNA, 16 nt, Human
uuuuguauaguaaagu

SEQ ID NO: 2799404 - RNA, 18 nt, Human
uuuuguauaguaaaguga

SEQ ID NO: 2799405 - RNA, 14 nt, Human
uuuuguaauugcuu

SEQ ID NO: 2799406 - RNA, 22 nt, Human
uuuuguaggggucaaagaaaug

SEQ ID NO: 2799407 - RNA, 23 nt, Human
uuuuguaggggucaaagaaaugc

SEQ ID NO: 2799408 - RNA, 19 nt, Human
uuuuguagagccagggucu

SEQ ID NO: 2799409 - RNA, 12 nt, Human
uuuuguacaucu

SEQ ID NO: 2799410 - RNA, 18 nt, Human
uuuuguacaucuggcuua

SEQ ID NO: 2799411 - RNA, 21 nt, Human
uuuuguacaucuggcuuauuu

SEQ ID NO: 2799412 - RNA, 19 nt, Human
uuuuguaaagaaauuuacu

SEQ ID NO: 2799413 - RNA, 13 nt, Human
uuuuguaaugaau

SEQ ID NO: 2799414 - RNA, 19 nt, Human
uuuuguaaacgacaagaau

SEQ ID NO: 2799415 - RNA, 21 nt, Human
uuuuguaaacgacaagaauaa

SEQ ID NO: 2799416 - RNA, 16 nt, Human
uuuugguuguccucaa

SEQ ID NO: 2799417 - RNA, 13 nt, Human
uuuugguguguug

SEQ ID NO: 2799418 - RNA, 14 nt, Human
uuuuggucuuuuug

SEQ ID NO: 2799419 - RNA, 17 nt, Human
uuuuggugauucaaaug

SEQ ID NO: 2799420 - RNA, 21 nt, Human
uuuuguaaaucacauccuuau

SEQ ID NO: 2799421 - RNA, 13 nt, Human
uuuuguaaauuaa

SEQ ID NO: 2799422 - RNA, 14 nt, Human
uuuuguaagacaaa

SEQ ID NO: 2799423 - RNA, 15 nt, Human
uuuuguaaagaugcc

SEQ ID NO: 2799424 - RNA, 21 nt, Human
uuuuguaaagaugccggguuu

SEQ ID NO: 2799425 - RNA, 18 nt, Human
uuuuguaaacucaaaaua

SEQ ID NO: 2799426 - RNA, 21 nt, Human
uuuuguaaacuggaauuaaaa

SEQ ID NO: 2799427 - RNA, 16 nt, Human
gucagcucucaucuga

SEQ ID NO: 2799428 - RNA, 19 nt, Human
gucagcucucaucugaggc

SEQ ID NO: 2799429 - RNA, 15 nt, Human
gucauguuugcaggg

SEQ ID NO: 2799430 - RNA, 16 nt, Human
gucauguuugcagggg

SEQ ID NO: 2799431 - RNA, 23 nt, Human
gucauguuugcaggggugacggc

SEQ ID NO: 2799432 - RNA, 16 nt, Human
gucauguuuuaaaugu

SEQ ID NO: 2799433 - RNA, 17 nt, Human
gucauguuuuaaaugua

SEQ ID NO: 2799434 - RNA, 20 nt, Human
gucauguuuuaaauguacag

SEQ ID NO: 2799435 - RNA, 21 nt, Human
gucauguuuuaaauguacagu

SEQ ID NO: 2799436 - RNA, 11 nt, Human
gucauuaaaug

SEQ ID NO: 2799437 - RNA, 17 nt, Human
gucaggaaacccagucg

SEQ ID NO: 2799438 - RNA, 18 nt, Human
gucauugcaguuuaagag

SEQ ID NO: 2799439 - RNA, 11 nt, Human
gucauugcugu

SEQ ID NO: 2799440 - RNA, 15 nt, Human
gucauugcuguagga

SEQ ID NO: 2799441 - RNA, 21 nt, Human
gucauuauggguuaggcauua

SEQ ID NO: 2799442 - RNA, 16 nt, Human
gucauuagacuccucc

SEQ ID NO: 2799443 - RNA, 13 nt, Human
gucauuaaugugu

SEQ ID NO: 2799444 - RNA, 14 nt, Human
gucauuaauguguu

SEQ ID NO: 2799445 - RNA, 17 nt, Human
gucauuccuucuuuuua

SEQ ID NO: 2799446 - RNA, 20 nt, Human
gucauuguaaacaaacucuu

SEQ ID NO: 2799447 - RNA, 15 nt, Human
gucauuguauguuau

SEQ ID NO: 2799448 - RNA, 13 nt, Human
gucauuuaaaugu

SEQ ID NO: 2799449 - RNA, 13 nt, Human
guccagccugggc

SEQ ID NO: 2799450 - RNA, 11 nt, Human
guccagccugg

SEQ ID NO: 2799451 - RNA, 18 nt, Human
guccaggggaggccuucc

SEQ ID NO: 2799452 - RNA, 14 nt, Human
guccagcagucacu

SEQ ID NO: 2799453 - RNA, 15 nt, Human
guccagcccaucucg

SEQ ID NO: 2799454 - RNA, 19 nt, Human
guccagcccaucucggagc

SEQ ID NO: 2799455 - RNA, 22 nt, Human
guccagccgccauugccaccag

SEQ ID NO: 2799456 - RNA, 20 nt, Human
guccagccgccauugccacc

SEQ ID NO: 2799457 - RNA, 21 nt, Human
gucccaccuuggcugcaggga

SEQ ID NO: 2799458 - RNA, 12 nt, Human
guccacccagga

SEQ ID NO: 2799459 - RNA, 13 nt, Human
guccacaggaagu

SEQ ID NO: 2799460 - RNA, 23 nt, Human
guccacccaggagccccgaggcc

SEQ ID NO: 2799461 - RNA, 13 nt, Human
guccaccuguggg

SEQ ID NO: 2799462 - RNA, 14 nt, Human
guccaccugugggu

SEQ ID NO: 2799463 - RNA, 23 nt, Human
guccaccuguggguguagccagg

SEQ ID NO: 2799464 - RNA, 20 nt, Human
guccacccaccuaugugcca

SEQ ID NO: 2799465 - RNA, 21 nt, Human
guccagagcggaggcugugug

SEQ ID NO: 2799466 - RNA, 21 nt, Human
gucccuaccgagucucuucuc

SEQ ID NO: 2799467 - RNA, 22 nt, Human
gucccuaccgagucucuucucc

SEQ ID NO: 2799468 - RNA, 23 nt, Human
gucccuaccgagucucuucucca

SEQ ID NO: 2799469 - RNA, 22 nt, Human
gucccuauguauuugcaguuca

SEQ ID NO: 2799470 - RNA, 12 nt, Human
gucccucccacc

SEQ ID NO: 2799471 - RNA, 21 nt, Human
gucccucccaccucugugacc

SEQ ID NO: 2799472 - RNA, 12 nt, Human
gucccuccuggu

SEQ ID NO: 2799473 - RNA, 19 nt, Human
gucccuccuggugucaccc

SEQ ID NO: 2799474 - RNA, 21 nt, Human
gucccuccuggugucacccca

SEQ ID NO: 2799475 - RNA, 22 nt, Human
gucccuccuggugucaccccag

SEQ ID NO: 2799476 - RNA, 23 nt, Human
gucccuccuggugucaccccaga

SEQ ID NO: 2799477 - RNA, 16 nt, Human
gucccucccccuuguc

SEQ ID NO: 2799478 - RNA, 17 nt, Human
gucccucccaccucugu

SEQ ID NO: 2799479 - RNA, 18 nt, Human
gucccucccaccucugug

SEQ ID NO: 2799480 - RNA, 13 nt, Human
gucccucccaccu

SEQ ID NO: 2799481 - RNA, 14 nt, Human
gucccucccaccuc

SEQ ID NO: 2799482 - RNA, 15 nt, Human
gucccucccaccucu

SEQ ID NO: 2799483 - RNA, 16 nt, Human
gucccucccaccucug

SEQ ID NO: 2799484 - RNA, 21 nt, Human
gucccugcacuugcagacucu

SEQ ID NO: 2799485 - RNA, 19 nt, Human
gucccugcacuugcagacu

SEQ ID NO: 2799486 - RNA, 16 nt, Human
gucccugcacuugcag

SEQ ID NO: 2799487 - RNA, 20 nt, Human
gucccugacucucugugacc

SEQ ID NO: 2799488 - RNA, 18 nt, Human
gucccugacucucuguga

SEQ ID NO: 2799489 - RNA, 17 nt, Human
gucccugacucucugug

SEQ ID NO: 2799490 - RNA, 21 nt, Human
gucccucucggaaggcuggcu

SEQ ID NO: 2799491 - RNA, 23 nt, Human
gucccaccuuggcugcagggagu

SEQ ID NO: 2799492 - RNA, 20 nt, Human
gucccaccuuggcugcaggg

SEQ ID NO: 2799493 - RNA, 22 nt, Human
gucccacgaauuugcuggggaa

SEQ ID NO: 2799494 - RNA, 13 nt, Human
gucccacgugucu

SEQ ID NO: 2799495 - RNA, 14 nt, Human
gucccacgugucuu

SEQ ID NO: 2799496 - RNA, 16 nt, Human
gucccacgugucuucc

SEQ ID NO: 2799497 - RNA, 18 nt, Human
gucccacgugucuuccac

SEQ ID NO: 2799498 - RNA, 21 nt, Human
gucccacgugucuuccacuuu

SEQ ID NO: 2799499 - RNA, 12 nt, Human
gucccaggcaga

SEQ ID NO: 2799500 - RNA, 20 nt, Human
gucccacgaauuugcugggg

SEQ ID NO: 2799501 - RNA, 15 nt, Human
gucccaggcugagcc

SEQ ID NO: 2799502 - RNA, 17 nt, Human
gucccaggcugagccuc

SEQ ID NO: 2799503 - RNA, 16 nt, Human
gucccaggcugagccu

SEQ ID NO: 2799504 - RNA, 19 nt, Human
gucccaggcugagccucag

SEQ ID NO: 2799505 - RNA, 18 nt, Human
gucccaggcugagccuca

SEQ ID NO: 2799506 - RNA, 21 nt, Human
gucccaucacguguacuggcu

SEQ ID NO: 2799507 - RNA, 22 nt, Human
gucccauugguguugucauugu

SEQ ID NO: 2799508 - RNA, 13 nt, Human
gucccauguggug

SEQ ID NO: 2799509 - RNA, 23 nt, Human
gucccauggacacuccagugcca

SEQ ID NO: 2799510 - RNA, 16 nt, Human
gucccaugcaggcccu

SEQ ID NO: 2799511 - RNA, 21 nt, Human
gucccauggacacuccagugc

SEQ ID NO: 2799512 - RNA, 22 nt, Human
gucccauggacacuccagugcc

SEQ ID NO: 2799513 - RNA, 21 nt, Human
gucaagucucugcuggcccag

SEQ ID NO: 2799514 - RNA, 20 nt, Human
gucaagggcuuacuauuucu

SEQ ID NO: 2799515 - RNA, 17 nt, Human
gucaagucucugcuggc

SEQ ID NO: 2799516 - RNA, 14 nt, Human
gucaagucucugcu

SEQ ID NO: 2799517 - RNA, 22 nt, Human
gucaauccaagagucugaugau

SEQ ID NO: 2799518 - RNA, 22 nt, Human
gucaauccagauggugggaugu

SEQ ID NO: 2799519 - RNA, 17 nt, Human
gucaaucccaaaaguca

SEQ ID NO: 2799520 - RNA, 20 nt, Human
gucaaucccaaaagucacca

SEQ ID NO: 2799521 - RNA, 14 nt, Human
gucaaucauuucuc

SEQ ID NO: 2799522 - RNA, 15 nt, Human
gucaaucauuucuca

SEQ ID NO: 2799523 - RNA, 16 nt, Human
gucaaucauuucucac

SEQ ID NO: 2799524 - RNA, 12 nt, Human
gucaccaguggc

SEQ ID NO: 2799525 - RNA, 18 nt, Human
gucaccacuccauuccca

SEQ ID NO: 2799526 - RNA, 16 nt, Human
guauuaaucuuggaua

SEQ ID NO: 2799527 - RNA, 15 nt, Human
guauuaauaaauaga

SEQ ID NO: 2799528 - RNA, 18 nt, Human
guauuaauaaauagagca

SEQ ID NO: 2799529 - RNA, 19 nt, Human
guauuaauaaauagagcaa

SEQ ID NO: 2799530 - RNA, 21 nt, Human
guauuaauaaauagagcaauu

SEQ ID NO: 2799531 - RNA, 14 nt, Human
guauuaauacuaaa

SEQ ID NO: 2799532 - RNA, 15 nt, Human
guauuaauacuaaaa

SEQ ID NO: 2799533 - RNA, 16 nt, Human
guauuaauacuaaaau

SEQ ID NO: 2799534 - RNA, 19 nt, Human
guauuaauacuaaaauaug

SEQ ID NO: 2799535 - RNA, 21 nt, Human
guauuaauacuaaaauauguc

SEQ ID NO: 2799536 - RNA, 22 nt, Human
guauuaauacuaaaauaugucu

SEQ ID NO: 2799537 - RNA, 15 nt, Human
guauuaagggauuua

SEQ ID NO: 2799538 - RNA, 18 nt, Human
guauuaagucaagaauau

SEQ ID NO: 2799539 - RNA, 21 nt, Human
guauuuuaguaagagauuccu

SEQ ID NO: 2799540 - RNA, 15 nt, Human
guauuuuaaaagcca

SEQ ID NO: 2799541 - RNA, 12 nt, Human
guauuuugaagu

SEQ ID NO: 2799542 - RNA, 13 nt, Human
guauuuugaaguu

SEQ ID NO: 2799543 - RNA, 14 nt, Human
guauuuugaaguuu

SEQ ID NO: 2799544 - RNA, 18 nt, Human
guauuuugaaguuuacau

SEQ ID NO: 2799545 - RNA, 19 nt, Human
guauuuugaaguuuacauu

SEQ ID NO: 2799546 - RNA, 20 nt, Human
guauuuugaaguuuacauuu

SEQ ID NO: 2799547 - RNA, 11 nt, Human
guauuuugaau

SEQ ID NO: 2799548 - RNA, 15 nt, Human
guauuuugaauacca

SEQ ID NO: 2799549 - RNA, 16 nt, Human
guauuuugaauaccau

SEQ ID NO: 2799550 - RNA, 17 nt, Human
guauuuuggagaaauua

SEQ ID NO: 2799551 - RNA, 12 nt, Human
guauuuugugug

SEQ ID NO: 2799552 - RNA, 18 nt, Human
guauuuugugugaccaac

SEQ ID NO: 2799553 - RNA, 23 nt, Human
guauuuugugugaccaacugugu

SEQ ID NO: 2799554 - RNA, 14 nt, Human
guauuuuggagaaa

SEQ ID NO: 2799555 - RNA, 23 nt, Human
gucagcuagaucauuuguucugg

SEQ ID NO: 2799556 - RNA, 22 nt, Human
gucagaugcugugcaaauguua

SEQ ID NO: 2799557 - RNA, 14 nt, Human
gucagaugagaaca

SEQ ID NO: 2799558 - RNA, 15 nt, Human
gucagaugagaacaa

SEQ ID NO: 2799559 - RNA, 16 nt, Human
gucagaugagaacaaa

SEQ ID NO: 2799560 - RNA, 18 nt, Human
gucagaugagaacaaagc

SEQ ID NO: 2799561 - RNA, 21 nt, Human
gucagaugagaacaaagcugu

SEQ ID NO: 2799562 - RNA, 22 nt, Human
gucagaugagaacaaagcuguu

SEQ ID NO: 2799563 - RNA, 15 nt, Human
gucagauacaaugua

SEQ ID NO: 2799564 - RNA, 16 nt, Human
gucagagccugcaguu

SEQ ID NO: 2799565 - RNA, 15 nt, Human
gucagagccugcagu

SEQ ID NO: 2799566 - RNA, 15 nt, Human
gucagaggaccugua

SEQ ID NO: 2799567 - RNA, 16 nt, Human
gucagaggagagauag

SEQ ID NO: 2799568 - RNA, 21 nt, Human
gucagaggagagauagccugu

SEQ ID NO: 2799569 - RNA, 22 nt, Human
gucagaggagagauagccugug

SEQ ID NO: 2799570 - RNA, 23 nt, Human
gucagaggagagauagccugugg

SEQ ID NO: 2799571 - RNA, 14 nt, Human
gucagagccugcag

SEQ ID NO: 2799572 - RNA, 22 nt, Human
gucagacuggcuggcugcagug

SEQ ID NO: 2799573 - RNA, 18 nt, Human
gucagacuggcuggcugc

SEQ ID NO: 2799574 - RNA, 14 nt, Human
gucagacuggcugg

SEQ ID NO: 2799575 - RNA, 24 nt, Human
gucagacugcugggacuggccagg

SEQ ID NO: 2799576 - RNA, 22 nt, Human
gucagacugcugggacuggcca

SEQ ID NO: 2799577 - RNA, 20 nt, Human
gucagacugcugggacuggc

SEQ ID NO: 2799578 - RNA, 16 nt, Human
gucagacugcugggac

SEQ ID NO: 2799579 - RNA, 15 nt, Human
gucagacugcuggga

SEQ ID NO: 2799580 - RNA, 14 nt, Human
gucagacugcuggg

SEQ ID NO: 2799581 - RNA, 15 nt, Human
gucagacuaagaaau

SEQ ID NO: 2799582 - RNA, 14 nt, Human
gucacuaauacaca

SEQ ID NO: 2799583 - RNA, 15 nt, Human
gucaccccuccagga

SEQ ID NO: 2799584 - RNA, 20 nt, Human
gucaccccuccaggaaugau

SEQ ID NO: 2799585 - RNA, 18 nt, Human
gucacucauugcugagcc

SEQ ID NO: 2799586 - RNA, 19 nt, Human
gucacucauugcugagccu

SEQ ID NO: 2799587 - RNA, 20 nt, Human
gucacucauugcugagccuc

SEQ ID NO: 2799588 - RNA, 21 nt, Human
gucacucauugcugagccucu

SEQ ID NO: 2799589 - RNA, 22 nt, Human
gucacucauugcugagccucug

SEQ ID NO: 2799590 - RNA, 23 nt, Human
gucacucauugcugagccucugc

SEQ ID NO: 2799591 - RNA, 24 nt, Human
gucacucauugcugagccucugcu

SEQ ID NO: 2799592 - RNA, 14 nt, Human
gucacucauugcug

SEQ ID NO: 2799593 - RNA, 14 nt, Human
gucacucaggcugg

SEQ ID NO: 2799594 - RNA, 15 nt, Human
gucacucaggcugga

SEQ ID NO: 2799595 - RNA, 12 nt, Human
gucacuagaaug

SEQ ID NO: 2799596 - RNA, 19 nt, Human
guaguguaagcuagaagaa

SEQ ID NO: 2799597 - RNA, 19 nt, Human
guaguguccauuuugugaa

SEQ ID NO: 2799598 - RNA, 20 nt, Human
guaguguccauuuugugaag

SEQ ID NO: 2799599 - RNA, 23 nt, Human
guaguguccauuuugugaagccc

SEQ ID NO: 2799600 - RNA, 14 nt, Human
guaguccuuggcau

SEQ ID NO: 2799601 - RNA, 21 nt, Human
guaguccuuggcauagacaug

SEQ ID NO: 2799602 - RNA, 12 nt, Human
guagucccagcu

SEQ ID NO: 2799603 - RNA, 17 nt, Human
guagucauuuacuaaac

SEQ ID NO: 2799604 - RNA, 12 nt, Human
guagucuugaug

SEQ ID NO: 2799605 - RNA, 13 nt, Human
guagucugcucac

SEQ ID NO: 2799606 - RNA, 13 nt, Human
guagugagcagug

SEQ ID NO: 2799607 - RNA, 16 nt, Human
guagucuugaugacca

SEQ ID NO: 2799608 - RNA, 22 nt, Human
guagugaaauaauagaaugagc

SEQ ID NO: 2799609 - RNA, 22 nt, Human
guagugugggaggcuccuguua

SEQ ID NO: 2799610 - RNA, 15 nt, Human
guauacaaauauauu

SEQ ID NO: 2799611 - RNA, 19 nt, Human
guauacaaauauauuguua

SEQ ID NO: 2799612 - RNA, 19 nt, Human
guauacaacccuggcauua

SEQ ID NO: 2799613 - RNA, 14 nt, Human
guauaauuucgaga

SEQ ID NO: 2799614 - RNA, 17 nt, Human
guauaauuucgagauuu

SEQ ID NO: 2799615 - RNA, 18 nt, Human
guauaauuucgagauuug

SEQ ID NO: 2799616 - RNA, 21 nt, Human
guauaauuucgagauuuguag

SEQ ID NO: 2799617 - RNA, 19 nt, Human
guauaccggaauuacuuuu

SEQ ID NO: 2799618 - RNA, 19 nt, Human
guauacaguucaauaaacu

SEQ ID NO: 2799619 - RNA, 17 nt, Human
guauacauccuggguaa

SEQ ID NO: 2799620 - RNA, 18 nt, Human
guauacauccuggguaau

SEQ ID NO: 2799621 - RNA, 20 nt, Human
guauacauccuggguaauga

SEQ ID NO: 2799622 - RNA, 14 nt, Human
guauacaauauaua

SEQ ID NO: 2799623 - RNA, 15 nt, Human
guauacaauauauaa

SEQ ID NO: 2799624 - RNA, 17 nt, Human
guauacaauauauaaaa

SEQ ID NO: 2799625 - RNA, 18 nt, Human
guauacaauauauaaaaa

SEQ ID NO: 2799626 - RNA, 19 nt, Human
guauacaauauauaaaaau

SEQ ID NO: 2799627 - RNA, 21 nt, Human
guauacaauauauaaaaauau

SEQ ID NO: 2799628 - RNA, 22 nt, Human
guauacaauauauaaaaauaua

SEQ ID NO: 2799629 - RNA, 23 nt, Human
guauacaccauauacuguucuuc

SEQ ID NO: 2799630 - RNA, 15 nt, Human
guauacuauaguacc

SEQ ID NO: 2799631 - RNA, 16 nt, Human
guaguauaaagaaaag

SEQ ID NO: 2799632 - RNA, 22 nt, Human
guaguagcguuuuuuaaaugua

SEQ ID NO: 2799633 - RNA, 15 nt, Human
guaguauucuucccu

SEQ ID NO: 2799634 - RNA, 15 nt, Human
guaguaaaacacaga

SEQ ID NO: 2799635 - RNA, 17 nt, Human
guaguaaaacacagagg

SEQ ID NO: 2799636 - RNA, 17 nt, Human
guaguagcccuuucugu

SEQ ID NO: 2799637 - RNA, 20 nt, Human
guaguagcccuuucugugug

SEQ ID NO: 2799638 - RNA, 21 nt, Human
guaguagcccuuucugugugc

SEQ ID NO: 2799639 - RNA, 15 nt, Human
guaguaauugacaug

SEQ ID NO: 2799640 - RNA, 22 nt, Human
guagggugggccuucagggagu

SEQ ID NO: 2799641 - RNA, 17 nt, Human
guagggugggccuucag

SEQ ID NO: 2799642 - RNA, 20 nt, Human
guagguacuuuuugugaaga

SEQ ID NO: 2799643 - RNA, 22 nt, Human
guagguacuuuuugugaagacg

SEQ ID NO: 2799644 - RNA, 14 nt, Human
guagguaaaaugua

SEQ ID NO: 2799645 - RNA, 18 nt, Human
guagguaaaauguauuuu

SEQ ID NO: 2799646 - RNA, 20 nt, Human
guagguaaaauguauuuuuc

SEQ ID NO: 2799647 - RNA, 22 nt, Human
guagguaaaauguauuuuucua

SEQ ID NO: 2799648 - RNA, 14 nt, Human
guagggugggccuu

SEQ ID NO: 2799649 - RNA, 20 nt, Human
guaggggucaaagaaaugcu

SEQ ID NO: 2799650 - RNA, 22 nt, Human
guaggggcuuauaauaaaggac

SEQ ID NO: 2799651 - RNA, 18 nt, Human
guagaguuaagaagcugu

SEQ ID NO: 2799652 - RNA, 12 nt, Human
guagaguuaaga

SEQ ID NO: 2799653 - RNA, 14 nt, Human
guagaguuaagaag

SEQ ID NO: 2799654 - RNA, 15 nt, Human
guagaguuaagaagc

SEQ ID NO: 2799655 - RNA, 16 nt, Human
guagaguuaagaagcu

SEQ ID NO: 2799656 - RNA, 17 nt, Human
guagaguuaagaagcug

SEQ ID NO: 2799657 - RNA, 13 nt, Human
guagauauuacuu

SEQ ID NO: 2799658 - RNA, 15 nt, Human
guagauauuacuuua

SEQ ID NO: 2799659 - RNA, 17 nt, Human
guagauauuacuuuauc

SEQ ID NO: 2799660 - RNA, 18 nt, Human
guagauauuacuuuauca

SEQ ID NO: 2799661 - RNA, 15 nt, Human
guagauaaauauuug

SEQ ID NO: 2799662 - RNA, 13 nt, Human
guagauauuuggc

SEQ ID NO: 2799663 - RNA, 14 nt, Human
guagauauuuggcu

SEQ ID NO: 2799664 - RNA, 21 nt, Human
guagauauuuggcuuaaauau

SEQ ID NO: 2799665 - RNA, 15 nt, Human
guagaugcgcagccc

SEQ ID NO: 2799666 - RNA, 23 nt, Human
guagcagugugaaguacaauaau

SEQ ID NO: 2799667 - RNA, 19 nt, Human
guagcagggucgggaaagg

SEQ ID NO: 2799668 - RNA, 14 nt, Human
guagcacucaggcu

SEQ ID NO: 2799669 - RNA, 17 nt, Human
guagcacucaggcucuc

SEQ ID NO: 2799670 - RNA, 19 nt, Human
guagauucuguggaacaag

SEQ ID NO: 2799671 - RNA, 13 nt, Human
guagauucugugg

SEQ ID NO: 2799672 - RNA, 16 nt, Human
guagauucuguggaac

SEQ ID NO: 2799673 - RNA, 19 nt, Human
guagccaaggugggcugag

SEQ ID NO: 2799674 - RNA, 18 nt, Human
guagccaaggugggcuga

SEQ ID NO: 2799675 - RNA, 14 nt, Human
guagccaaagguuc

SEQ ID NO: 2799676 - RNA, 16 nt, Human
guagcccccuggccuc

SEQ ID NO: 2799677 - RNA, 17 nt, Human
guagcccccuggccucu

SEQ ID NO: 2799678 - RNA, 20 nt, Human
guagcccacucugcucgccu

SEQ ID NO: 2799679 - RNA, 14 nt, Human
guagcccaggcugg

SEQ ID NO: 2799680 - RNA, 15 nt, Human
guagcccaggcugga

SEQ ID NO: 2799681 - RNA, 17 nt, Human
guagcccauccuucccu

SEQ ID NO: 2799682 - RNA, 16 nt, Human
guagcccacucugcuc

SEQ ID NO: 2799683 - RNA, 20 nt, Human
guagccauguuaacaugaca

SEQ ID NO: 2799684 - RNA, 14 nt, Human
guagccagcaccug

SEQ ID NO: 2799685 - RNA, 19 nt, Human
guagccagggggacuagcc

SEQ ID NO: 2799686 - RNA, 22 nt, Human
guagccagggggacuagccccu

SEQ ID NO: 2799687 - RNA, 18 nt, Human
guagccagguauggcucu

SEQ ID NO: 2799688 - RNA, 20 nt, Human
guagccaggucccccugcag

SEQ ID NO: 2799689 - RNA, 21 nt, Human
guagccaggucccccugcagc

SEQ ID NO: 2799690 - RNA, 22 nt, Human
guagccaggucccccugcagcu

SEQ ID NO: 2799691 - RNA, 23 nt, Human
guagccagggggacuagccccug

SEQ ID NO: 2799692 - RNA, 22 nt, Human
guagggcgggaggauguucugg

SEQ ID NO: 2799693 - RNA, 21 nt, Human
guagggcgggaggauguucug

SEQ ID NO: 2799694 - RNA, 23 nt, Human
guagggcgggaggauguucuggg

SEQ ID NO: 2799695 - RNA, 21 nt, Human
guagggcugccaccaagguga

SEQ ID NO: 2799696 - RNA, 12 nt, Human
guagggcugacu

SEQ ID NO: 2799697 - RNA, 16 nt, Human
guagggcgggaggaug

SEQ ID NO: 2799698 - RNA, 13 nt, Human
guagggaauaaaa

SEQ ID NO: 2799699 - RNA, 16 nt, Human
guagggaggaccacag

SEQ ID NO: 2799700 - RNA, 13 nt, Human
guagggaggcagc

SEQ ID NO: 2799701 - RNA, 14 nt, Human
guagggaggcagcc

SEQ ID NO: 2799702 - RNA, 15 nt, Human
guagggaggcagccu

SEQ ID NO: 2799703 - RNA, 16 nt, Human
guagggaggcagccuc

SEQ ID NO: 2799704 - RNA, 23 nt, Human
guaggcuccugccaguguggaac

SEQ ID NO: 2799705 - RNA, 18 nt, Human
guagcccccuggccucug

SEQ ID NO: 2799706 - RNA, 19 nt, Human
guagcccccuggccucugu

SEQ ID NO: 2799707 - RNA, 23 nt, Human
guagcccccuggccucugugccu

SEQ ID NO: 2799708 - RNA, 13 nt, Human
guauguguguaga

SEQ ID NO: 2799709 - RNA, 21 nt, Human
guaugaucacggcucacugca

SEQ ID NO: 2799710 - RNA, 20 nt, Human
guaugaucacggcucacugc

SEQ ID NO: 2799711 - RNA, 17 nt, Human
guauguugaagccuuug

SEQ ID NO: 2799712 - RNA, 11 nt, Human
guauguugucc

SEQ ID NO: 2799713 - RNA, 18 nt, Human
guauguuguccaauuguu

SEQ ID NO: 2799714 - RNA, 21 nt, Human
guauguuguccaauuguugac

SEQ ID NO: 2799715 - RNA, 19 nt, Human
guauguuuaaucuguuaug

SEQ ID NO: 2799716 - RNA, 15 nt, Human
guauguuuuacacug

SEQ ID NO: 2799717 - RNA, 23 nt, Human
guauuaaaacauuggauuauccu

SEQ ID NO: 2799718 - RNA, 12 nt, Human
guauuaaaacau

SEQ ID NO: 2799719 - RNA, 13 nt, Human
guauuaaaacauu

SEQ ID NO: 2799720 - RNA, 14 nt, Human
guauuaaaacauug

SEQ ID NO: 2799721 - RNA, 15 nt, Human
guauuaaaacauugg

SEQ ID NO: 2799722 - RNA, 17 nt, Human
guauuaaaacauuggau

SEQ ID NO: 2799723 - RNA, 20 nt, Human
guauuaaaacauuggauuau

SEQ ID NO: 2799724 - RNA, 14 nt, Human
guaugaaagauugu

SEQ ID NO: 2799725 - RNA, 18 nt, Human
guaugaauaaagacaccu

SEQ ID NO: 2799726 - RNA, 19 nt, Human
guaugaauaaagacaccua

SEQ ID NO: 2799727 - RNA, 19 nt, Human
guaugaacuuuaucuaaag

SEQ ID NO: 2799728 - RNA, 19 nt, Human
guaugaagagcuugcuuug

SEQ ID NO: 2799729 - RNA, 16 nt, Human
guaugacgcugauaca

SEQ ID NO: 2799730 - RNA, 17 nt, Human
guaugacgcugauacau

SEQ ID NO: 2799731 - RNA, 19 nt, Human
guaugacgcugauacauaa

SEQ ID NO: 2799732 - RNA, 15 nt, Human
guaugaauacagcag

SEQ ID NO: 2799733 - RNA, 20 nt, Human
guaugaauacagcagcaaga

SEQ ID NO: 2799734 - RNA, 13 nt, Human
guaugaaggcuuu

SEQ ID NO: 2799735 - RNA, 14 nt, Human
guaucugaguugcc

SEQ ID NO: 2799736 - RNA, 15 nt, Human
guaucugaguugcca

SEQ ID NO: 2799737 - RNA, 17 nt, Human
guaucugaguugccaag

SEQ ID NO: 2799738 - RNA, 18 nt, Human
guaucugaguugccaaga

SEQ ID NO: 2799739 - RNA, 20 nt, Human
guaucugaguugccaagaca

SEQ ID NO: 2799740 - RNA, 22 nt, Human
guaucugaguugccaagacaaa

SEQ ID NO: 2799741 - RNA, 23 nt, Human
guaucugaguugccaagacaaau

SEQ ID NO: 2799742 - RNA, 14 nt, Human
guaugaaaaugagu

SEQ ID NO: 2799743 - RNA, 20 nt, Human
guaugaaaaugaguugugaa

SEQ ID NO: 2799744 - RNA, 20 nt, Human
guaucugugaaguaguucug

SEQ ID NO: 2799745 - RNA, 16 nt, Human
guaucuuuuuucaaaa

SEQ ID NO: 2799746 - RNA, 22 nt, Human
guaugaaagauggcugugccuc

SEQ ID NO: 2799747 - RNA, 23 nt, Human
guaugaaagauggcugugccucu

SEQ ID NO: 2799748 - RNA, 17 nt, Human
guaucuuucuaugcugc

SEQ ID NO: 2799749 - RNA, 19 nt, Human
guaucuuucuaugcugcuu

SEQ ID NO: 2799750 - RNA, 20 nt, Human
guaucuuucuaugcugcuuu

SEQ ID NO: 2799751 - RNA, 18 nt, Human
guaucuuugcacuccaau

SEQ ID NO: 2799752 - RNA, 13 nt, Human
guaucuuaaauuu

SEQ ID NO: 2799753 - RNA, 17 nt, Human
guaucuuccauauuugg

SEQ ID NO: 2799754 - RNA, 19 nt, Human
guaucuuccauauuuggaa

SEQ ID NO: 2799755 - RNA, 20 nt, Human
guaucuuccauauuuggaag

SEQ ID NO: 2799756 - RNA, 21 nt, Human
guaucuuccauauuuggaaga

SEQ ID NO: 2799757 - RNA, 22 nt, Human
guaucuuccauauuuggaagaa

SEQ ID NO: 2799758 - RNA, 12 nt, Human
guauacuuuaaa

SEQ ID NO: 2799759 - RNA, 13 nt, Human
guauacuuuaaau

SEQ ID NO: 2799760 - RNA, 20 nt, Human
guauacuuuaaauaauuuaa

SEQ ID NO: 2799761 - RNA, 22 nt, Human
guauacuuuaaauaauuuaacu

SEQ ID NO: 2799762 - RNA, 23 nt, Human
guauacuuuaaauaauuuaacua

SEQ ID NO: 2799763 - RNA, 12 nt, Human
guauacuuuagu

SEQ ID NO: 2799764 - RNA, 13 nt, Human
guauacuuuagua

SEQ ID NO: 2799765 - RNA, 14 nt, Human
guauacuuuaguau

SEQ ID NO: 2799766 - RNA, 15 nt, Human
guauagacaguuugu

SEQ ID NO: 2799767 - RNA, 17 nt, Human
guauagacaguuuguaa

SEQ ID NO: 2799768 - RNA, 19 nt, Human
guauagacaguuuguaaau

SEQ ID NO: 2799769 - RNA, 22 nt, Human
guauagacaguuuguaaauguu

SEQ ID NO: 2799770 - RNA, 23 nt, Human
guauagacaguuuguaaauguua

SEQ ID NO: 2799771 - RNA, 21 nt, Human
guauagccuauggcagaaaaa

SEQ ID NO: 2799772 - RNA, 23 nt, Human
guauagccuauggcagaaaaaau

SEQ ID NO: 2799773 - RNA, 19 nt, Human
guauaguacuggcauggua

SEQ ID NO: 2799774 - RNA, 19 nt, Human
guauaguuaggauagcauu

SEQ ID NO: 2799775 - RNA, 13 nt, Human
guauaguguaaaa

SEQ ID NO: 2799776 - RNA, 14 nt, Human
guauaguguaaaau

SEQ ID NO: 2799777 - RNA, 15 nt, Human
guauaguguaaaaua

SEQ ID NO: 2799778 - RNA, 16 nt, Human
guauaguguaaaauaa

SEQ ID NO: 2799779 - RNA, 19 nt, Human
guauaguugauguaacauu

SEQ ID NO: 2799780 - RNA, 13 nt, Human
guauaguugcuuu

SEQ ID NO: 2799781 - RNA, 16 nt, Human
guauauacgcaucuau

SEQ ID NO: 2799782 - RNA, 13 nt, Human
guauauaaauggg

SEQ ID NO: 2799783 - RNA, 20 nt, Human
guauauaaaugggaacauuu

SEQ ID NO: 2799784 - RNA, 21 nt, Human
guauauaaaugggaacauuua

SEQ ID NO: 2799785 - RNA, 12 nt, Human
guauauacacau

SEQ ID NO: 2799786 - RNA, 13 nt, Human
guauauacacaua

SEQ ID NO: 2799787 - RNA, 14 nt, Human
guauauacacauau

SEQ ID NO: 2799788 - RNA, 15 nt, Human
guauauacacauaua

SEQ ID NO: 2799789 - RNA, 16 nt, Human
guauauacacauauac

SEQ ID NO: 2799790 - RNA, 18 nt, Human
guauauacacauauaccu

SEQ ID NO: 2799791 - RNA, 15 nt, Human
guauauauaagaaag

SEQ ID NO: 2799792 - RNA, 17 nt, Human
guauauauaagaaagac

SEQ ID NO: 2799793 - RNA, 19 nt, Human
guauauauaagaaagacau

SEQ ID NO: 2799794 - RNA, 11 nt, Human
guauauauaca

SEQ ID NO: 2799795 - RNA, 13 nt, Human
guauauauacaua

SEQ ID NO: 2799796 - RNA, 12 nt, Human
guauauacuuuu

SEQ ID NO: 2799797 - RNA, 14 nt, Human
guauauauagaauc

SEQ ID NO: 2799798 - RNA, 13 nt, Human
guauauacuuuuu

SEQ ID NO: 2799799 - RNA, 15 nt, Human
guauauauacauaca

SEQ ID NO: 2799800 - RNA, 17 nt, Human
guauauauacauacacu

SEQ ID NO: 2799801 - RNA, 13 nt, Human
guauauaugugua

SEQ ID NO: 2799802 - RNA, 14 nt, Human
guauauauguguau

SEQ ID NO: 2799803 - RNA, 16 nt, Human
guauauauguguauau

SEQ ID NO: 2799804 - RNA, 20 nt, Human
guauauauguguauauauac

SEQ ID NO: 2799805 - RNA, 23 nt, Human
guauauauguguauauauacaua

SEQ ID NO: 2799806 - RNA, 22 nt, Human
guauauaucugcuucaguggag

SEQ ID NO: 2799807 - RNA, 13 nt, Human
guauauauuccca

SEQ ID NO: 2799808 - RNA, 14 nt, Human
guauauauucccaa

SEQ ID NO: 2799809 - RNA, 11 nt, Human
guauauauuua

SEQ ID NO: 2799810 - RNA, 21 nt, Human
guauaucugggcuggccaguu

SEQ ID NO: 2799811 - RNA, 14 nt, Human
guauaucugggcug

SEQ ID NO: 2799812 - RNA, 14 nt, Human
guauaucagaaaag

SEQ ID NO: 2799813 - RNA, 19 nt, Human
guauaucagaaaagggaag

SEQ ID NO: 2799814 - RNA, 12 nt, Human
guauaucaugua

SEQ ID NO: 2799815 - RNA, 24 nt, Human
guauaucauguaaagaaaugucuu

SEQ ID NO: 2799816 - RNA, 13 nt, Human
guauaugucucag

SEQ ID NO: 2799817 - RNA, 15 nt, Human
guauaugucucaggu

SEQ ID NO: 2799818 - RNA, 21 nt, Human
guauaugucucaggucccugc

SEQ ID NO: 2799819 - RNA, 16 nt, Human
guauauguugggugca

SEQ ID NO: 2799820 - RNA, 20 nt, Human
guaucuauauauguguaugu

SEQ ID NO: 2799821 - RNA, 17 nt, Human
guaucucugaagcaugu

SEQ ID NO: 2799822 - RNA, 19 nt, Human
guaucucugaagcauguuu

SEQ ID NO: 2799823 - RNA, 20 nt, Human
guaucucugaagcauguuuc

SEQ ID NO: 2799824 - RNA, 20 nt, Human
guaucucuuucacauuguuu

SEQ ID NO: 2799825 - RNA, 22 nt, Human
guaucucuuucacauuguuugc

SEQ ID NO: 2799826 - RNA, 18 nt, Human
guauccugggggacccaa

SEQ ID NO: 2799827 - RNA, 14 nt, Human
guaucgauguuuua

SEQ ID NO: 2799828 - RNA, 15 nt, Human
guaucgauguuuuau

SEQ ID NO: 2799829 - RNA, 15 nt, Human
guaucguaaccagcc

SEQ ID NO: 2799830 - RNA, 16 nt, Human
guaucuaaaaguguca

SEQ ID NO: 2799831 - RNA, 16 nt, Human
guaucguaaccagcca

SEQ ID NO: 2799832 - RNA, 17 nt, Human
guaucguaaccagccag

SEQ ID NO: 2799833 - RNA, 21 nt, Human
gucugugaauuggaccauccu

SEQ ID NO: 2799834 - RNA, 20 nt, Human
gucugugaccugcaucuaag

SEQ ID NO: 2799835 - RNA, 19 nt, Human
gucugagagcaaagugacc

SEQ ID NO: 2799836 - RNA, 20 nt, Human
gucugagagcaaagugaccu

SEQ ID NO: 2799837 - RNA, 14 nt, Human
gucugccaggcccc

SEQ ID NO: 2799838 - RNA, 21 nt, Human
gucugccaggcccccaccaca

SEQ ID NO: 2799839 - RNA, 23 nt, Human
gucugccaggcccccaccacaca

SEQ ID NO: 2799840 - RNA, 22 nt, Human
gucugccuguugcgugacacuc

SEQ ID NO: 2799841 - RNA, 14 nt, Human
gucugcgaaguccu

SEQ ID NO: 2799842 - RNA, 15 nt, Human
gucugcgaaguccua

SEQ ID NO: 2799843 - RNA, 21 nt, Human
gucugcgaaguccuauggaaa

SEQ ID NO: 2799844 - RNA, 15 nt, Human
gucugcgugggucag

SEQ ID NO: 2799845 - RNA, 16 nt, Human
gucugcgugggucaga

SEQ ID NO: 2799846 - RNA, 17 nt, Human
gucugcccuucacccca

SEQ ID NO: 2799847 - RNA, 10 nt, Human
gucugcccuu

SEQ ID NO: 2799848 - RNA, 15 nt, Human
gucugucuucacagc

SEQ ID NO: 2799849 - RNA, 12 nt, Human
gucugucuucug

SEQ ID NO: 2799850 - RNA, 14 nt, Human
gucugucuucugua

SEQ ID NO: 2799851 - RNA, 15 nt, Human
gucugucuucuguau

SEQ ID NO: 2799852 - RNA, 16 nt, Human
gucugucuucuguaua

SEQ ID NO: 2799853 - RNA, 23 nt, Human
gucugucuucuguauauaaaugg

SEQ ID NO: 2799854 - RNA, 22 nt, Human
gucugucuucacagcucugugu

SEQ ID NO: 2799855 - RNA, 16 nt, Human
gucugucuucacagcu

SEQ ID NO: 2799856 - RNA, 22 nt, Human
gucuguugugugucaugccagu

SEQ ID NO: 2799857 - RNA, 13 nt, Human
gucuguuuaaagu

SEQ ID NO: 2799858 - RNA, 14 nt, Human
gucuguuuaaagug

SEQ ID NO: 2799859 - RNA, 17 nt, Human
gucuguuuaaaguggca

SEQ ID NO: 2799860 - RNA, 14 nt, Human
gucuguuuaagaaa

SEQ ID NO: 2799861 - RNA, 15 nt, Human
gucuguuuaagaaaa

SEQ ID NO: 2799862 - RNA, 16 nt, Human
gucuguuuaagaaaag

SEQ ID NO: 2799863 - RNA, 18 nt, Human
gucuguuuaagaaaagua

SEQ ID NO: 2799864 - RNA, 20 nt, Human
gucuguuuaagaaaaguauu

SEQ ID NO: 2799865 - RNA, 21 nt, Human
gucuguuugcugauggucugg

SEQ ID NO: 2799866 - RNA, 13 nt, Human
gucuguuuggacu

SEQ ID NO: 2799867 - RNA, 21 nt, Human
gucuguuuggacugcagaagc

SEQ ID NO: 2799868 - RNA, 14 nt, Human
gucuguuuguuuca

SEQ ID NO: 2799869 - RNA, 17 nt, Human
gucuguuuguuucaaga

SEQ ID NO: 2799870 - RNA, 18 nt, Human
gucuguuuguuucaagaa

SEQ ID NO: 2799871 - RNA, 23 nt, Human
gucuguuuguuucaagaaccugg

SEQ ID NO: 2799872 - RNA, 20 nt, Human
gucuguugugugucaugcca

SEQ ID NO: 2799873 - RNA, 18 nt, Human
gucuguugugugucaugc

SEQ ID NO: 2799874 - RNA, 20 nt, Human
gucugugugcgcucugugga

SEQ ID NO: 2799875 - RNA, 20 nt, Human
gucugugugaugaacuuucu

SEQ ID NO: 2799876 - RNA, 13 nt, Human
gucugugugaaug

SEQ ID NO: 2799877 - RNA, 14 nt, Human
gucugugugaaugu

SEQ ID NO: 2799878 - RNA, 15 nt, Human
gucugugugaaugug

SEQ ID NO: 2799879 - RNA, 16 nt, Human
gucugugugaaugugg

SEQ ID NO: 2799880 - RNA, 22 nt, Human
gucuguguugcgugucgugggu

SEQ ID NO: 2799881 - RNA, 17 nt, Human
gucuguucacuuuuccu

SEQ ID NO: 2799882 - RNA, 18 nt, Human
gucuguucuguuucaagg

SEQ ID NO: 2799883 - RNA, 20 nt, Human
gucugugugugaccccuccu

SEQ ID NO: 2799884 - RNA, 21 nt, Human
gucugugugugaccccuccug

SEQ ID NO: 2799885 - RNA, 22 nt, Human
gucugugugugaccccuccugg

SEQ ID NO: 2799886 - RNA, 23 nt, Human
gucugugugugaccccuccuggg

SEQ ID NO: 2799887 - RNA, 15 nt, Human
gucuugcuguugaca

SEQ ID NO: 2799888 - RNA, 19 nt, Human
gucuugcuguugacauauu

SEQ ID NO: 2799889 - RNA, 21 nt, Human
gucuugcuauauugcccaggc

SEQ ID NO: 2799890 - RNA, 23 nt, Human
gucuugcuauauugcccaggcug

SEQ ID NO: 2799891 - RNA, 14 nt, Human
gucuuggacacugu

SEQ ID NO: 2799892 - RNA, 15 nt, Human
gucuuggacacugua

SEQ ID NO: 2799893 - RNA, 21 nt, Human
gucuugcaauggcagccuugg

SEQ ID NO: 2799894 - RNA, 20 nt, Human
gucuugcaauggcagccuug

SEQ ID NO: 2799895 - RNA, 23 nt, Human
gucuugcaauggcagccuuggca

SEQ ID NO: 2799896 - RNA, 18 nt, Human
gucuugaugaccaaaguc

SEQ ID NO: 2799897 - RNA, 16 nt, Human
gucuuuuuucacuaca

SEQ ID NO: 2799898 - RNA, 15 nt, Human
gucuugguauucuua

SEQ ID NO: 2799899 - RNA, 16 nt, Human
gucuuguaauauuuug

SEQ ID NO: 2799900 - RNA, 19 nt, Human
gucuuguaauauuuuguau

SEQ ID NO: 2799901 - RNA, 20 nt, Human
gucuuguaauauuuuguauu

SEQ ID NO: 2799902 - RNA, 20 nt, Human
gucuuggcagcaccugucuc

SEQ ID NO: 2799903 - RNA, 22 nt, Human
gucuuggaauuccauuugagga

SEQ ID NO: 2799904 - RNA, 18 nt, Human
gucuuggacacuguacaa

SEQ ID NO: 2799905 - RNA, 22 nt, Human
gucuuggcagcaccugucuccu

SEQ ID NO: 2799906 - RNA, 19 nt, Human
gucuugcaauggcagccuu

SEQ ID NO: 2799907 - RNA, 18 nt, Human
gucuugcaauggcagccu

SEQ ID NO: 2799908 - RNA, 17 nt, Human
gucuugcaauggcagcc

SEQ ID NO: 2799909 - RNA, 16 nt, Human
gucuugcaauggcagc

SEQ ID NO: 2799910 - RNA, 20 nt, Human
gucuugaacuccuggccuca

SEQ ID NO: 2799911 - RNA, 18 nt, Human
gucuugaacuccuggccu

SEQ ID NO: 2799912 - RNA, 21 nt, Human
gucuugaacuccuggccucaa

SEQ ID NO: 2799913 - RNA, 12 nt, Human
gucuugaaagau

SEQ ID NO: 2799914 - RNA, 15 nt, Human
gucuugaaugucuuu

SEQ ID NO: 2799915 - RNA, 13 nt, Human
gucuugaaguccu

SEQ ID NO: 2799916 - RNA, 15 nt, Human
gucuugaaguccugg

SEQ ID NO: 2799917 - RNA, 16 nt, Human
gucuugaaguccuggc

SEQ ID NO: 2799918 - RNA, 17 nt, Human
gucuugaaugucuuuug

SEQ ID NO: 2799919 - RNA, 19 nt, Human
gucuugaaugucuuuugaa

SEQ ID NO: 2799920 - RNA, 17 nt, Human
gucuugaacuccuggcc

SEQ ID NO: 2799921 - RNA, 16 nt, Human
gucuugaacuccuggc

SEQ ID NO: 2799922 - RNA, 18 nt, Human
gucuucuggacaggcucu

SEQ ID NO: 2799923 - RNA, 23 nt, Human
gucuucuggacaggcucugcuuc

SEQ ID NO: 2799924 - RNA, 12 nt, Human
gucuucuguaua

SEQ ID NO: 2799925 - RNA, 18 nt, Human
gucuucuguauauaaaug

SEQ ID NO: 2799926 - RNA, 20 nt, Human
gucuucuguauauaaauggg

SEQ ID NO: 2799927 - RNA, 20 nt, Human
gucuucuccaccacgcuggg

SEQ ID NO: 2799928 - RNA, 17 nt, Human
gucuucuccaccacgcu

SEQ ID NO: 2799929 - RNA, 13 nt, Human
gucuucucugucu

SEQ ID NO: 2799930 - RNA, 16 nt, Human
gucuucucugucucag

SEQ ID NO: 2799931 - RNA, 18 nt, Human
gucuucugacaaacugug

SEQ ID NO: 2799932 - RNA, 20 nt, Human
gucguagccaaggugggcug

SEQ ID NO: 2799933 - RNA, 19 nt, Human
gucgucacuaauacacagu

SEQ ID NO: 2799934 - RNA, 22 nt, Human
gucguggcagauaaucagccuc

SEQ ID NO: 2799935 - RNA, 15 nt, Human
gucguggcagauaau

SEQ ID NO: 2799936 - RNA, 23 nt, Human
gucguggcagauaaucagccucu

SEQ ID NO: 2799937 - RNA, 22 nt, Human
gucuaaagauggaguuucuaag

SEQ ID NO: 2799938 - RNA, 21 nt, Human
gucuaagauaguaacaaugaa

SEQ ID NO: 2799939 - RNA, 16 nt, Human
gucuaacucagaauua

SEQ ID NO: 2799940 - RNA, 22 nt, Human
gucuaacuuuagaagugcauuu

SEQ ID NO: 2799941 - RNA, 23 nt, Human
gucuaacuuuagaagugcauuuc

SEQ ID NO: 2799942 - RNA, 14 nt, Human
gucuaacuuuugug

SEQ ID NO: 2799943 - RNA, 15 nt, Human
gucggaggaaagaca

SEQ ID NO: 2799944 - RNA, 13 nt, Human
gucuaaauuugaa

SEQ ID NO: 2799945 - RNA, 15 nt, Human
gucuaaaugcugaaa

SEQ ID NO: 2799946 - RNA, 23 nt, Human
gucuaaagauggaguuucuaagg

SEQ ID NO: 2799947 - RNA, 19 nt, Human
gucucacuauguugcccag

SEQ ID NO: 2799948 - RNA, 11 nt, Human
gucucacucug

SEQ ID NO: 2799949 - RNA, 18 nt, Human
gucucacuauguugccca

SEQ ID NO: 2799950 - RNA, 16 nt, Human
gucgggcuuuguguga

SEQ ID NO: 2799951 - RNA, 14 nt, Human
gucgggcaccagcc

SEQ ID NO: 2799952 - RNA, 18 nt, Human
gucgggcaccagccagcg

SEQ ID NO: 2799953 - RNA, 14 nt, Human
gucggaacagcaga

SEQ ID NO: 2799954 - RNA, 15 nt, Human
gucggaacagcagau

SEQ ID NO: 2799955 - RNA, 16 nt, Human
gucccugcccuucuuc

SEQ ID NO: 2799956 - RNA, 21 nt, Human
gucugagacucacaggaagga

SEQ ID NO: 2799957 - RNA, 22 nt, Human
gucugagacucacaggaaggag

SEQ ID NO: 2799958 - RNA, 20 nt, Human
gucucugcuggcccagccaa

SEQ ID NO: 2799959 - RNA, 16 nt, Human
gucucuggcaguucug

SEQ ID NO: 2799960 - RNA, 21 nt, Human
gucucuggcaguucuggaaug

SEQ ID NO: 2799961 - RNA, 12 nt, Human
gucucuggccug

SEQ ID NO: 2799962 - RNA, 13 nt, Human
gucucuggccugu

SEQ ID NO: 2799963 - RNA, 19 nt, Human
gucucuggggcaggcugcu

SEQ ID NO: 2799964 - RNA, 21 nt, Human
gucucuggggcaggcugcuuc

SEQ ID NO: 2799965 - RNA, 18 nt, Human
gucucuucuccacuggau

SEQ ID NO: 2799966 - RNA, 14 nt, Human
gucucuucucccag

SEQ ID NO: 2799967 - RNA, 15 nt, Human
gucucuucucccaga

SEQ ID NO: 2799968 - RNA, 16 nt, Human
gucucuucucccagaa

SEQ ID NO: 2799969 - RNA, 17 nt, Human
gucucuucucccagaau

SEQ ID NO: 2799970 - RNA, 22 nt, Human
gucucuucucccagaaucccag

SEQ ID NO: 2799971 - RNA, 23 nt, Human
gucucuucucccagaaucccagc

SEQ ID NO: 2799972 - RNA, 17 nt, Human
gucucugguuccucccc

SEQ ID NO: 2799973 - RNA, 16 nt, Human
gucucugguuccuccc

SEQ ID NO: 2799974 - RNA, 19 nt, Human
gucucucucucucuacaaa

SEQ ID NO: 2799975 - RNA, 16 nt, Human
gucucucuuaaaguug

SEQ ID NO: 2799976 - RNA, 20 nt, Human
gucucucuucagacucucag

SEQ ID NO: 2799977 - RNA, 21 nt, Human
gucucucuucagacucucagc

SEQ ID NO: 2799978 - RNA, 22 nt, Human
gucucucuucagacucucagcc

SEQ ID NO: 2799979 - RNA, 15 nt, Human
gucucugaagcguga

SEQ ID NO: 2799980 - RNA, 17 nt, Human
gucucugaaguacuaac

SEQ ID NO: 2799981 - RNA, 19 nt, Human
gucucugaaguacuaacac

SEQ ID NO: 2799982 - RNA, 13 nt, Human
gucucugagcauu

SEQ ID NO: 2799983 - RNA, 14 nt, Human
gucucugcugcauu

SEQ ID NO: 2799984 - RNA, 22 nt, Human
gucucugcugcauuugugucau

SEQ ID NO: 2799985 - RNA, 21 nt, Human
gucucugcauuuuucugcaga

SEQ ID NO: 2799986 - RNA, 12 nt, Human
gucucugcugcc

SEQ ID NO: 2799987 - RNA, 13 nt, Human
gucucugcugccg

SEQ ID NO: 2799988 - RNA, 14 nt, Human
gucucugcugccgc

SEQ ID NO: 2799989 - RNA, 15 nt, Human
gucucugccuugccu

SEQ ID NO: 2799990 - RNA, 16 nt, Human
gucucugccuugccuu

SEQ ID NO: 2799991 - RNA, 12 nt, Human
gucucugcucca

SEQ ID NO: 2799992 - RNA, 21 nt, Human
gucucugcuccaccuuucagc

SEQ ID NO: 2799993 - RNA, 15 nt, Human
gucucugcucgcccu

SEQ ID NO: 2799994 - RNA, 22 nt, Human
gucucugcucgcccuccuuucu

SEQ ID NO: 2799995 - RNA, 23 nt, Human
gucucugcucgcccuccuuucug

SEQ ID NO: 2799996 - RNA, 17 nt, Human
gucucugcuggcccagc

SEQ ID NO: 2799997 - RNA, 16 nt, Human
gucucugcuggcccag

SEQ ID NO: 2799998 - RNA, 15 nt, Human
gucucugcuggccca

SEQ ID NO: 2799999 - RNA, 13 nt, Human
gucucugcuggcc

SEQ ID NO: 2800000 - RNA, 21 nt, Human
gucucacugaaacauuuaaau

SEQ ID NO: 2800001 - RNA, 23 nt, Human
gucucacgggcaugggcacuccc

SEQ ID NO: 2800002 - RNA, 15 nt, Human
gucucacugaaacau

SEQ ID NO: 2800003 - RNA, 22 nt, Human
gucucacucugucgcccagucu

SEQ ID NO: 2800004 - RNA, 19 nt, Human
gucucacucugucgcccag

SEQ ID NO: 2800005 - RNA, 18 nt, Human
gucucacucugucgccca

SEQ ID NO: 2800006 - RNA, 16 nt, Human
gucucacucugucgcc

SEQ ID NO: 2800007 - RNA, 15 nt, Human
gucucacucugucgc

SEQ ID NO: 2800008 - RNA, 13 nt, Human
gucucagccuccc

SEQ ID NO: 2800009 - RNA, 16 nt, Human
gucucguuugugauuc

SEQ ID NO: 2800010 - RNA, 13 nt, Human
gucucuaaagcac

SEQ ID NO: 2800011 - RNA, 14 nt, Human
gucucuaaagcacu

SEQ ID NO: 2800012 - RNA, 21 nt, Human
gucucuaauucuauuaaagug

SEQ ID NO: 2800013 - RNA, 22 nt, Human
gucucuacuuuucccuguacuu

SEQ ID NO: 2800014 - RNA, 16 nt, Human
gucucaggagcauggg

SEQ ID NO: 2800015 - RNA, 12 nt, Human
gucucaggagca

SEQ ID NO: 2800016 - RNA, 13 nt, Human
gucucuaggcugg

SEQ ID NO: 2800017 - RNA, 14 nt, Human
gucucuaggcuggg

SEQ ID NO: 2800018 - RNA, 15 nt, Human
gucucuaggcugggg

SEQ ID NO: 2800019 - RNA, 15 nt, Human
gucucucucucucua

SEQ ID NO: 2800020 - RNA, 17 nt, Human
gucucuaggcuggggaa

SEQ ID NO: 2800021 - RNA, 22 nt, Human
gugcgcucuguggaugccaggg

SEQ ID NO: 2800022 - RNA, 15 nt, Human
gugcgcucuguggau

SEQ ID NO: 2800023 - RNA, 19 nt, Human
gugcgcugggcacuucccu

SEQ ID NO: 2800024 - RNA, 21 nt, Human
gugcgcugggcacuucccugc

SEQ ID NO: 2800025 - RNA, 22 nt, Human
gugcgcugggcacuucccugcu

SEQ ID NO: 2800026 - RNA, 23 nt, Human
gugcgcugggcacuucccugcug

SEQ ID NO: 2800027 - RNA, 14 nt, Human
gugcgccuacagga

SEQ ID NO: 2800028 - RNA, 18 nt, Human
gugcgaucucggcucagu

SEQ ID NO: 2800029 - RNA, 13 nt, Human
gugcgugaaugua

SEQ ID NO: 2800030 - RNA, 16 nt, Human
gugcgugccgugugag

SEQ ID NO: 2800031 - RNA, 22 nt, Human
gugcgugccgugugagugugac

SEQ ID NO: 2800032 - RNA, 23 nt, Human
gugcuaaccacgucugucuucac

SEQ ID NO: 2800033 - RNA, 22 nt, Human
gugcuaaauggucgcccaggag

SEQ ID NO: 2800034 - RNA, 12 nt, Human
gugcgugcucag

SEQ ID NO: 2800035 - RNA, 13 nt, Human
gugcguguguaga

SEQ ID NO: 2800036 - RNA, 15 nt, Human
gugcguguguagagu

SEQ ID NO: 2800037 - RNA, 17 nt, Human
gugcguguguagaguua

SEQ ID NO: 2800038 - RNA, 13 nt, Human
gugcuaagguucu

SEQ ID NO: 2800039 - RNA, 14 nt, Human
gugcuaagguucua

SEQ ID NO: 2800040 - RNA, 15 nt, Human
gugcuaagguucuaa

SEQ ID NO: 2800041 - RNA, 16 nt, Human
gugcuaagguucuaag

SEQ ID NO: 2800042 - RNA, 17 nt, Human
gugcuaagguucuaagg

SEQ ID NO: 2800043 - RNA, 20 nt, Human
gugcccaagaauagaugcug

SEQ ID NO: 2800044 - RNA, 16 nt, Human
gugccaucauugcugu

SEQ ID NO: 2800045 - RNA, 22 nt, Human
gugccaucauugcugucugcag

SEQ ID NO: 2800046 - RNA, 21 nt, Human
gugccccucuccuucuuagcu

SEQ ID NO: 2800047 - RNA, 12 nt, Human
gugccccugcug

SEQ ID NO: 2800048 - RNA, 21 nt, Human
gugcccccuucaagccugugc

SEQ ID NO: 2800049 - RNA, 16 nt, Human
gugccaugugccaggu

SEQ ID NO: 2800050 - RNA, 14 nt, Human
gugccaugugccag

SEQ ID NO: 2800051 - RNA, 21 nt, Human
gugcgaucuggguucacugca

SEQ ID NO: 2800052 - RNA, 18 nt, Human
gugccuuuugcagaagag

SEQ ID NO: 2800053 - RNA, 21 nt, Human
gugccuuuugcagaagagggu

SEQ ID NO: 2800054 - RNA, 23 nt, Human
gugccuuuugcagaagagggugu

SEQ ID NO: 2800055 - RNA, 14 nt, Human
gugcgaauggacuu

SEQ ID NO: 2800056 - RNA, 19 nt, Human
gugccuucuucagggccug

SEQ ID NO: 2800057 - RNA, 20 nt, Human
gugccuucuucagggccugg

SEQ ID NO: 2800058 - RNA, 21 nt, Human
gugccuucuucagggccuggu

SEQ ID NO: 2800059 - RNA, 20 nt, Human
gugcccuacucauugggguu

SEQ ID NO: 2800060 - RNA, 20 nt, Human
gugcccuccacagccgcagc

SEQ ID NO: 2800061 - RNA, 21 nt, Human
gugcccuccugagggaggacc

SEQ ID NO: 2800062 - RNA, 23 nt, Human
gugcccuccugagggaggaccug

SEQ ID NO: 2800063 - RNA, 15 nt, Human
gugccuucagcucua

SEQ ID NO: 2800064 - RNA, 23 nt, Human
gugcaguggugcgaucuggguuc

SEQ ID NO: 2800065 - RNA, 20 nt, Human
gugcaguggugcgaucuggg

SEQ ID NO: 2800066 - RNA, 16 nt, Human
gugcagacagaagucu

SEQ ID NO: 2800067 - RNA, 14 nt, Human
gugcagcagauugg

SEQ ID NO: 2800068 - RNA, 21 nt, Human
gugcagcagauuggaaggaga

SEQ ID NO: 2800069 - RNA, 17 nt, Human
gugcagaugagguugcu

SEQ ID NO: 2800070 - RNA, 19 nt, Human
gugcagaugcaauuguuug

SEQ ID NO: 2800071 - RNA, 23 nt, Human
gugcagcucaaggaaaggccuga

SEQ ID NO: 2800072 - RNA, 22 nt, Human
gugcagcucaaggaaaggccug

SEQ ID NO: 2800073 - RNA, 19 nt, Human
gugcauagaacuggguaaa

SEQ ID NO: 2800074 - RNA, 14 nt, Human
gugcauagugcugg

SEQ ID NO: 2800075 - RNA, 16 nt, Human
gugcauagugcuggga

SEQ ID NO: 2800076 - RNA, 13 nt, Human
gugcaggcuggcc

SEQ ID NO: 2800077 - RNA, 14 nt, Human
gugcaggcuggcca

SEQ ID NO: 2800078 - RNA, 15 nt, Human
gugcaggcuggccag

SEQ ID NO: 2800079 - RNA, 19 nt, Human
gugcaguucuaguuugcau

SEQ ID NO: 2800080 - RNA, 20 nt, Human
gugcaguucuaguuugcauu

SEQ ID NO: 2800081 - RNA, 13 nt, Human
gugcaucucagcc

SEQ ID NO: 2800082 - RNA, 15 nt, Human
gugccagccugaggc

SEQ ID NO: 2800083 - RNA, 18 nt, Human
gugccaggaaacucuugc

SEQ ID NO: 2800084 - RNA, 19 nt, Human
gugccaggaaacucuugcu

SEQ ID NO: 2800085 - RNA, 24 nt, Human
gugauccacccaccucagccuccc

SEQ ID NO: 2800086 - RNA, 23 nt, Human
gugauccacccaccucagccucc

SEQ ID NO: 2800087 - RNA, 21 nt, Human
gugauuuagaacuguauguca

SEQ ID NO: 2800088 - RNA, 23 nt, Human
gugauuuagaacuguaugucaga

SEQ ID NO: 2800089 - RNA, 18 nt, Human
gugauuuagaacuguaug

SEQ ID NO: 2800090 - RNA, 19 nt, Human
gugcaaaauauuugacuau

SEQ ID NO: 2800091 - RNA, 21 nt, Human
gugauuuuaugaucaguguug

SEQ ID NO: 2800092 - RNA, 17 nt, Human
gugauuuucaagcagca

SEQ ID NO: 2800093 - RNA, 19 nt, Human
gugcaaaagcuucaaauua

SEQ ID NO: 2800094 - RNA, 19 nt, Human
gugauauagaauuagcuuu

SEQ ID NO: 2800095 - RNA, 12 nt, Human
gugcagaggaag

SEQ ID NO: 2800096 - RNA, 22 nt, Human
gugcagaggucagacuaagaaa

SEQ ID NO: 2800097 - RNA, 23 nt, Human
gugcagaggaaguggaaggcauc

SEQ ID NO: 2800098 - RNA, 17 nt, Human
gugcacuuucuaauguu

SEQ ID NO: 2800099 - RNA, 19 nt, Human
gugcacuuucuaauguuuc

SEQ ID NO: 2800100 - RNA, 13 nt, Human
gugcacuuuguaa

SEQ ID NO: 2800101 - RNA, 14 nt, Human
gugcacuuuguaaa

SEQ ID NO: 2800102 - RNA, 15 nt, Human
gugcacuuuguaaau

SEQ ID NO: 2800103 - RNA, 18 nt, Human
gugaacaaaagaugcucu

SEQ ID NO: 2800104 - RNA, 19 nt, Human
gugaacaaaagaugcucuu

SEQ ID NO: 2800105 - RNA, 13 nt, Human
gugaaugaacacu

SEQ ID NO: 2800106 - RNA, 11 nt, Human
gugaaugaaag

SEQ ID NO: 2800107 - RNA, 12 nt, Human
gugaaugaaaga

SEQ ID NO: 2800108 - RNA, 17 nt, Human
gugaaugaaagauuaaa

SEQ ID NO: 2800109 - RNA, 18 nt, Human
gugaaugaaagauuaaac

SEQ ID NO: 2800110 - RNA, 19 nt, Human
gugaaugaaagauuaaaca

SEQ ID NO: 2800111 - RNA, 18 nt, Human
gucuugguuucucucuac

SEQ ID NO: 2800112 - RNA, 23 nt, Human
gucuuuuuuuggugauucaaaug

SEQ ID NO: 2800113 - RNA, 15 nt, Human
gucuuguacaugugu

SEQ ID NO: 2800114 - RNA, 20 nt, Human
gugacaaggauugcuacugu

SEQ ID NO: 2800115 - RNA, 22 nt, Human
gugaauucuugaaggaaaauga

SEQ ID NO: 2800116 - RNA, 19 nt, Human
gugaauuucuucacuguug

SEQ ID NO: 2800117 - RNA, 20 nt, Human
gugaauuuauaccuaccugu

SEQ ID NO: 2800118 - RNA, 18 nt, Human
gugaauucuugaaggaaa

SEQ ID NO: 2800119 - RNA, 14 nt, Human
gugaaugcuucuca

SEQ ID NO: 2800120 - RNA, 14 nt, Human
gugaauggauugga

SEQ ID NO: 2800121 - RNA, 15 nt, Human
gugaauggauuggau

SEQ ID NO: 2800122 - RNA, 20 nt, Human
gugaauggauuggauuauuu

SEQ ID NO: 2800123 - RNA, 18 nt, Human
gugaaugauucauguuau

SEQ ID NO: 2800124 - RNA, 19 nt, Human
gugaaugauucauguuaua

SEQ ID NO: 2800125 - RNA, 23 nt, Human
gugaaugauucauguuauauuua

SEQ ID NO: 2800126 - RNA, 15 nt, Human
gugaaugccagugug

SEQ ID NO: 2800127 - RNA, 18 nt, Human
gugaaugccagugugcug

SEQ ID NO: 2800128 - RNA, 19 nt, Human
gugaaugccagugugcuga

SEQ ID NO: 2800129 - RNA, 14 nt, Human
gugaccucugccug

SEQ ID NO: 2800130 - RNA, 13 nt, Human
gugaccucugccu

SEQ ID NO: 2800131 - RNA, 15 nt, Human
gugacagaggcagcc

SEQ ID NO: 2800132 - RNA, 12 nt, Human
gugaccucugcc

SEQ ID NO: 2800133 - RNA, 15 nt, Human
gugaccucugccuga

SEQ ID NO: 2800134 - RNA, 14 nt, Human
gugacggcccucau

SEQ ID NO: 2800135 - RNA, 16 nt, Human
gugacggcccucaucu

SEQ ID NO: 2800136 - RNA, 14 nt, Human
gugacagaggcagc

SEQ ID NO: 2800137 - RNA, 13 nt, Human
gugacagaggcag

SEQ ID NO: 2800138 - RNA, 12 nt, Human
gugacagaggca

SEQ ID NO: 2800139 - RNA, 23 nt, Human
gugacagaccacaucuuuaucug

SEQ ID NO: 2800140 - RNA, 21 nt, Human
gugacaauaauauuguuguau

SEQ ID NO: 2800141 - RNA, 22 nt, Human
gugacacagcagcuucaccaga

SEQ ID NO: 2800142 - RNA, 16 nt, Human
gugacacucuccuugc

SEQ ID NO: 2800143 - RNA, 17 nt, Human
gugacacucuccuugca

SEQ ID NO: 2800144 - RNA, 19 nt, Human
gugacacucuccuugcagu

SEQ ID NO: 2800145 - RNA, 20 nt, Human
gugacacucuccuugcaguu

SEQ ID NO: 2800146 - RNA, 12 nt, Human
gugacacagcag

SEQ ID NO: 2800147 - RNA, 19 nt, Human
gugacacagcagcuucacc

SEQ ID NO: 2800148 - RNA, 18 nt, Human
gugacacacuacaccaca

SEQ ID NO: 2800149 - RNA, 20 nt, Human
gugacacacuacaccacaca

SEQ ID NO: 2800150 - RNA, 21 nt, Human
gugacacacuacaccacacac

SEQ ID NO: 2800151 - RNA, 22 nt, Human
gugacacacuacaccacacaca

SEQ ID NO: 2800152 - RNA, 23 nt, Human
gugacacacuacaccacacacaa

SEQ ID NO: 2800153 - RNA, 12 nt, Human
gugacacagacu

SEQ ID NO: 2800154 - RNA, 14 nt, Human
gugacacagacuca

SEQ ID NO: 2800155 - RNA, 19 nt, Human
gugacacagacucauccug

SEQ ID NO: 2800156 - RNA, 22 nt, Human
gugauccacccaccucagccuc

SEQ ID NO: 2800157 - RNA, 17 nt, Human
gugaucacagcagcuuc

SEQ ID NO: 2800158 - RNA, 13 nt, Human
gugauauuucucu

SEQ ID NO: 2800159 - RNA, 15 nt, Human
gugauauuucucuag

SEQ ID NO: 2800160 - RNA, 16 nt, Human
gugauauuucucuagu

SEQ ID NO: 2800161 - RNA, 13 nt, Human
gugaucaaagcca

SEQ ID NO: 2800162 - RNA, 17 nt, Human
gugauaguucacccccu

SEQ ID NO: 2800163 - RNA, 18 nt, Human
gugauagcuaacauuuua

SEQ ID NO: 2800164 - RNA, 12 nt, Human
gugauagcauug

SEQ ID NO: 2800165 - RNA, 19 nt, Human
gugauagcauugcuuucgu

SEQ ID NO: 2800166 - RNA, 16 nt, Human
gugauauggcagaaga

SEQ ID NO: 2800167 - RNA, 19 nt, Human
gugauauggcagaagacac

SEQ ID NO: 2800168 - RNA, 13 nt, Human
gugauauucuaag

SEQ ID NO: 2800169 - RNA, 16 nt, Human
gugauauccugaaaaa

SEQ ID NO: 2800170 - RNA, 13 nt, Human
gugauauggagca

SEQ ID NO: 2800171 - RNA, 17 nt, Human
gugauauggagcaagag

SEQ ID NO: 2800172 - RNA, 15 nt, Human
gugauauauguauua

SEQ ID NO: 2800173 - RNA, 16 nt, Human
gugauauauguauuaa

SEQ ID NO: 2800174 - RNA, 20 nt, Human
gugauauauuccuaaacuau

SEQ ID NO: 2800175 - RNA, 16 nt, Human
gugaguuuggucugga

SEQ ID NO: 2800176 - RNA, 18 nt, Human
gugaguuuggucuggacu

SEQ ID NO: 2800177 - RNA, 19 nt, Human
gugaguuuggucuggacug

SEQ ID NO: 2800178 - RNA, 21 nt, Human
gugaguuuggucuggacugac

SEQ ID NO: 2800179 - RNA, 20 nt, Human
gugaguguguguuugugcug

SEQ ID NO: 2800180 - RNA, 15 nt, Human
gugaguguuucuaug

SEQ ID NO: 2800181 - RNA, 16 nt, Human
gugaguguuucuauga

SEQ ID NO: 2800182 - RNA, 23 nt, Human
gugaguguuucuaugaguggaaa

SEQ ID NO: 2800183 - RNA, 21 nt, Human
gugauacagaacucuuaaaaa

SEQ ID NO: 2800184 - RNA, 14 nt, Human
gugauaaacuuugc

SEQ ID NO: 2800185 - RNA, 15 nt, Human
gugauaauuuaagag

SEQ ID NO: 2800186 - RNA, 13 nt, Human
gugauaaacuuug

SEQ ID NO: 2800187 - RNA, 21 nt, Human
gugauaacuccuaagaggagc

SEQ ID NO: 2800188 - RNA, 12 nt, Human
gugauaaggaca

SEQ ID NO: 2800189 - RNA, 21 nt, Human
gugauaaggacaugaugcuuu

SEQ ID NO: 2800190 - RNA, 20 nt, Human
gugagccacugcaccgggcc

SEQ ID NO: 2800191 - RNA, 15 nt, Human
gugagccacugcacc

SEQ ID NO: 2800192 - RNA, 14 nt, Human
gugagccacugcac

SEQ ID NO: 2800193 - RNA, 18 nt, Human
gugagcccauggcccucc

SEQ ID NO: 2800194 - RNA, 12 nt, Human
gugagccccauc

SEQ ID NO: 2800195 - RNA, 16 nt, Human
gugagccccaucuuca

SEQ ID NO: 2800196 - RNA, 17 nt, Human
gugagcccauggcccuc

SEQ ID NO: 2800197 - RNA, 14 nt, Human
gugagccccugguc

SEQ ID NO: 2800198 - RNA, 15 nt, Human
gugacuauauagaga

SEQ ID NO: 2800199 - RNA, 17 nt, Human
gugacuauauagagaug

SEQ ID NO: 2800200 - RNA, 20 nt, Human
gugacuauauagagauguuu

SEQ ID NO: 2800201 - RNA, 14 nt, Human
gugacuaugaacuu

SEQ ID NO: 2800202 - RNA, 13 nt, Human
gugaauugacuac

SEQ ID NO: 2800203 - RNA, 19 nt, Human
gugacuaguacaaauuaua

SEQ ID NO: 2800204 - RNA, 23 nt, Human
gugacuaacuagacaccaaaguu

SEQ ID NO: 2800205 - RNA, 19 nt, Human
gugagccgagaucacgcca

SEQ ID NO: 2800206 - RNA, 17 nt, Human
gugagccccugguccug

SEQ ID NO: 2800207 - RNA, 13 nt, Human
gugagccuggcuc

SEQ ID NO: 2800208 - RNA, 14 nt, Human
gugagccuggcucu

SEQ ID NO: 2800209 - RNA, 16 nt, Human
gugagccuggcucuug

SEQ ID NO: 2800210 - RNA, 23 nt, Human
gugagccuggcucuugugcugga

SEQ ID NO: 2800211 - RNA, 15 nt, Human
gugaggagcugcugg

SEQ ID NO: 2800212 - RNA, 17 nt, Human
gugaggagcugcuggcu

SEQ ID NO: 2800213 - RNA, 14 nt, Human
gugagccuuggcug

SEQ ID NO: 2800214 - RNA, 19 nt, Human
gugagcgccugugcacaca

SEQ ID NO: 2800215 - RNA, 20 nt, Human
gugagcgccugugcacacac

SEQ ID NO: 2800216 - RNA, 18 nt, Human
gugaggagcugcuggcuu

SEQ ID NO: 2800217 - RNA, 13 nt, Human
gugagugugacag

SEQ ID NO: 2800218 - RNA, 14 nt, Human
gugagugugacagg

SEQ ID NO: 2800219 - RNA, 15 nt, Human
gugagugugacaggg

SEQ ID NO: 2800220 - RNA, 16 nt, Human
gugagugugacagggc

SEQ ID NO: 2800221 - RNA, 17 nt, Human
gugagugugacagggcc

SEQ ID NO: 2800222 - RNA, 18 nt, Human
gugagugugacagggcca

SEQ ID NO: 2800223 - RNA, 19 nt, Human
gugagugugacagggccag

SEQ ID NO: 2800224 - RNA, 20 nt, Human
gugagugugacagggccagu

SEQ ID NO: 2800225 - RNA, 15 nt, Human
guucugaaauaaacu

SEQ ID NO: 2800226 - RNA, 16 nt, Human
guucucuguccagcag

SEQ ID NO: 2800227 - RNA, 17 nt, Human
guucuaauaauuucuaa

SEQ ID NO: 2800228 - RNA, 19 nt, Human
guucuaauaauuucuaaug

SEQ ID NO: 2800229 - RNA, 18 nt, Human
guucuaaguuucuaagau

SEQ ID NO: 2800230 - RNA, 19 nt, Human
guucuaaguuucuaagauu

SEQ ID NO: 2800231 - RNA, 21 nt, Human
guucuaaguuucuaagauucu

SEQ ID NO: 2800232 - RNA, 22 nt, Human
guucuaaguuucuaagauucua

SEQ ID NO: 2800233 - RNA, 14 nt, Human
guucuaaguuucua

SEQ ID NO: 2800234 - RNA, 15 nt, Human
guucuaaguuucuaa

SEQ ID NO: 2800235 - RNA, 16 nt, Human
guucuaaguuucuaag

SEQ ID NO: 2800236 - RNA, 17 nt, Human
guucuaaguuucuaaga

SEQ ID NO: 2800237 - RNA, 17 nt, Human
guucugaugaugugccu

SEQ ID NO: 2800238 - RNA, 18 nt, Human
guucugaugaugugccug

SEQ ID NO: 2800239 - RNA, 16 nt, Human
guucugcacacagcac

SEQ ID NO: 2800240 - RNA, 15 nt, Human
guucugcacacagca

SEQ ID NO: 2800241 - RNA, 15 nt, Human
guucugcccccagcc

SEQ ID NO: 2800242 - RNA, 16 nt, Human
guucugcccccagccc

SEQ ID NO: 2800243 - RNA, 17 nt, Human
guucugcccccagccca

SEQ ID NO: 2800244 - RNA, 19 nt, Human
guucugcccccagcccaaa

SEQ ID NO: 2800245 - RNA, 20 nt, Human
guucugcccccagcccaaag

SEQ ID NO: 2800246 - RNA, 12 nt, Human
guucugcacuga

SEQ ID NO: 2800247 - RNA, 13 nt, Human
guucugcacugaa

SEQ ID NO: 2800248 - RNA, 14 nt, Human
guucugcacugaaa

SEQ ID NO: 2800249 - RNA, 15 nt, Human
guucugcacugaaaa

SEQ ID NO: 2800250 - RNA, 16 nt, Human
guucugcacugaaaag

SEQ ID NO: 2800251 - RNA, 20 nt, Human
guucugcagacacgccuucc

SEQ ID NO: 2800252 - RNA, 21 nt, Human
guucugcagacacgccuuccc

SEQ ID NO: 2800253 - RNA, 14 nt, Human
guucguugguuaua

SEQ ID NO: 2800254 - RNA, 14 nt, Human
guucuaaagaugga

SEQ ID NO: 2800255 - RNA, 17 nt, Human
guucuaaagauggaaaa

SEQ ID NO: 2800256 - RNA, 20 nt, Human
guucuaaagauggaaaaacc

SEQ ID NO: 2800257 - RNA, 23 nt, Human
guucuaaagauggaaaaaccacc

SEQ ID NO: 2800258 - RNA, 10 nt, Human
guucuaaagc

SEQ ID NO: 2800259 - RNA, 12 nt, Human
guucuaaagcuc

SEQ ID NO: 2800260 - RNA, 14 nt, Human
guucuaaagcucug

SEQ ID NO: 2800261 - RNA, 16 nt, Human
guucuaaagcucugac

SEQ ID NO: 2800262 - RNA, 12 nt, Human
guucuaaaguuc

SEQ ID NO: 2800263 - RNA, 13 nt, Human
guucuaaaguucu

SEQ ID NO: 2800264 - RNA, 14 nt, Human
guucuaaaguucua

SEQ ID NO: 2800265 - RNA, 15 nt, Human
guucuaaaguucuaa

SEQ ID NO: 2800266 - RNA, 16 nt, Human
guucuaaaguucuaag

SEQ ID NO: 2800267 - RNA, 17 nt, Human
guucuaaaguucuaaga

SEQ ID NO: 2800268 - RNA, 18 nt, Human
guucuaaaguucuaagau

SEQ ID NO: 2800269 - RNA, 19 nt, Human
guucuaaaguucuaagauu

SEQ ID NO: 2800270 - RNA, 17 nt, Human
guucuaaggcucugaga

SEQ ID NO: 2800271 - RNA, 14 nt, Human
guucuaagggggag

SEQ ID NO: 2800272 - RNA, 12 nt, Human
guucuaaggcuc

SEQ ID NO: 2800273 - RNA, 13 nt, Human
guucuaaggcucu

SEQ ID NO: 2800274 - RNA, 14 nt, Human
guucuaaggcucug

SEQ ID NO: 2800275 - RNA, 16 nt, Human
guucuaaggcucugag

SEQ ID NO: 2800276 - RNA, 15 nt, Human
guucuaagauucuga

SEQ ID NO: 2800277 - RNA, 11 nt, Human
guucuaaggcc

SEQ ID NO: 2800278 - RNA, 13 nt, Human
guucuaaggccua

SEQ ID NO: 2800279 - RNA, 20 nt, Human
guucuaaggccuaggauucu

SEQ ID NO: 2800280 - RNA, 21 nt, Human
guucuaaggccuaggauucua

SEQ ID NO: 2800281 - RNA, 22 nt, Human
guucuaaggccuaggauucuaa

SEQ ID NO: 2800282 - RNA, 23 nt, Human
guucuaaggccuaggauucuaaa

SEQ ID NO: 2800283 - RNA, 11 nt, Human
guucuaaggcu

SEQ ID NO: 2800284 - RNA, 21 nt, Human
guucuaaaguucuaagauucu

SEQ ID NO: 2800285 - RNA, 14 nt, Human
guucuaagaaaccc

SEQ ID NO: 2800286 - RNA, 15 nt, Human
guucuaagacucaaa

SEQ ID NO: 2800287 - RNA, 17 nt, Human
guucuaagacucaaaug

SEQ ID NO: 2800288 - RNA, 20 nt, Human
guucuaagacucaaauguuc

SEQ ID NO: 2800289 - RNA, 21 nt, Human
guucuaagacucaaauguucu

SEQ ID NO: 2800290 - RNA, 13 nt, Human
guucuaagaugug

SEQ ID NO: 2800291 - RNA, 21 nt, Human
guucuaagaugugauauucua

SEQ ID NO: 2800292 - RNA, 22 nt, Human
guucuaagaugugauauucuaa

SEQ ID NO: 2800293 - RNA, 13 nt, Human
guucuaagauucu

SEQ ID NO: 2800294 - RNA, 14 nt, Human
guucuaagauucua

SEQ ID NO: 2800295 - RNA, 15 nt, Human
guucuaagauucuaa

SEQ ID NO: 2800296 - RNA, 17 nt, Human
guucuaagauucuaaug

SEQ ID NO: 2800297 - RNA, 20 nt, Human
guucuaagauucuaaugaug

SEQ ID NO: 2800298 - RNA, 14 nt, Human
guucuaagauucug

SEQ ID NO: 2800299 - RNA, 21 nt, Human
guuccuuuccaacguuuggaa

SEQ ID NO: 2800300 - RNA, 23 nt, Human
guuccuuuccuuuucuuuaaaga

SEQ ID NO: 2800301 - RNA, 23 nt, Human
guuccuugaucuguauauacaau

SEQ ID NO: 2800302 - RNA, 18 nt, Human
guuccuuuguguguacuc

SEQ ID NO: 2800303 - RNA, 19 nt, Human
guuccuuuguguguacuca

SEQ ID NO: 2800304 - RNA, 14 nt, Human
guuccuuuuuauga

SEQ ID NO: 2800305 - RNA, 15 nt, Human
guucgagaccagccu

SEQ ID NO: 2800306 - RNA, 17 nt, Human
guuccuuccucugagcc

SEQ ID NO: 2800307 - RNA, 19 nt, Human
guuccuuccucugagccuu

SEQ ID NO: 2800308 - RNA, 18 nt, Human
guuccuuccucugagccu

SEQ ID NO: 2800309 - RNA, 16 nt, Human
guucgagaccagccug

SEQ ID NO: 2800310 - RNA, 17 nt, Human
guucgagaccagccugg

SEQ ID NO: 2800311 - RNA, 19 nt, Human
guucgagaccagccuggcc

SEQ ID NO: 2800312 - RNA, 18 nt, Human
guucgagaccagccuggc

SEQ ID NO: 2800313 - RNA, 20 nt, Human
guucgagaccagccuggcca

SEQ ID NO: 2800314 - RNA, 22 nt, Human
guucgaggacuacaaccaauuu

SEQ ID NO: 2800315 - RNA, 13 nt, Human
guucguagcuuuc

SEQ ID NO: 2800316 - RNA, 17 nt, Human
guucgguuuuuuuccug

SEQ ID NO: 2800317 - RNA, 19 nt, Human
guucgguuuuuuuccuguu

SEQ ID NO: 2800318 - RNA, 14 nt, Human
guucggcucugggu

SEQ ID NO: 2800319 - RNA, 20 nt, Human
guucgcauggucacacacug

SEQ ID NO: 2800320 - RNA, 15 nt, Human
guucgccuggagccc

SEQ ID NO: 2800321 - RNA, 16 nt, Human
guucgccuggagcccu

SEQ ID NO: 2800322 - RNA, 12 nt, Human
guucgcuuggcu

SEQ ID NO: 2800323 - RNA, 19 nt, Human
guucgcuuggcuccaugcu

SEQ ID NO: 2800324 - RNA, 14 nt, Human
guucgcauggucac

SEQ ID NO: 2800325 - RNA, 19 nt, Human
guugaaaauuauuuuaaac

SEQ ID NO: 2800326 - RNA, 18 nt, Human
guugaaaauucaaaaagu

SEQ ID NO: 2800327 - RNA, 17 nt, Human
guugaaaaccaaaauga

SEQ ID NO: 2800328 - RNA, 15 nt, Human
guucuuuuuaaguua

SEQ ID NO: 2800329 - RNA, 17 nt, Human
guucuuuuuaaguuaau

SEQ ID NO: 2800330 - RNA, 23 nt, Human
guucuuugcugcauucugccucu

SEQ ID NO: 2800331 - RNA, 21 nt, Human
guucuuugagggacugccucu

SEQ ID NO: 2800332 - RNA, 22 nt, Human
guucuuugagggacugccucug

SEQ ID NO: 2800333 - RNA, 23 nt, Human
guucuuugagggacugccucugc

SEQ ID NO: 2800334 - RNA, 15 nt, Human
guucugccagaucuu

SEQ ID NO: 2800335 - RNA, 15 nt, Human
guucuuucuggaguc

SEQ ID NO: 2800336 - RNA, 14 nt, Human
guucuuucuuccuc

SEQ ID NO: 2800337 - RNA, 15 nt, Human
guucuuucuuccucu

SEQ ID NO: 2800338 - RNA, 16 nt, Human
guucuuucuuccucug

SEQ ID NO: 2800339 - RNA, 17 nt, Human
guucuuucuuccucugc

SEQ ID NO: 2800340 - RNA, 18 nt, Human
guucuuucuuccucugcu

SEQ ID NO: 2800341 - RNA, 19 nt, Human
guucuuucuuccucugcug

SEQ ID NO: 2800342 - RNA, 11 nt, Human
guucuuuauau

SEQ ID NO: 2800343 - RNA, 13 nt, Human
guucuuuauauac

SEQ ID NO: 2800344 - RNA, 16 nt, Human
guucuuuauauacaau

SEQ ID NO: 2800345 - RNA, 19 nt, Human
guucuuuauauacaauaau

SEQ ID NO: 2800346 - RNA, 20 nt, Human
guucuuuauauacaauaaug

SEQ ID NO: 2800347 - RNA, 21 nt, Human
guucuuuauauacaauaaugg

SEQ ID NO: 2800348 - RNA, 22 nt, Human
guucuuuauauacaauaaugga

SEQ ID NO: 2800349 - RNA, 16 nt, Human
guucugggacacaguu

SEQ ID NO: 2800350 - RNA, 15 nt, Human
guucugggacacagu

SEQ ID NO: 2800351 - RNA, 14 nt, Human
guucugggacacag

SEQ ID NO: 2800352 - RNA, 12 nt, Human
guucugggacac

SEQ ID NO: 2800353 - RNA, 11 nt, Human
guucugggaca

SEQ ID NO: 2800354 - RNA, 16 nt, Human
guucuggccagaaugc

SEQ ID NO: 2800355 - RNA, 20 nt, Human
guucuggcugccccaaccug

SEQ ID NO: 2800356 - RNA, 22 nt, Human
guucuggcugccccaaccugcu

SEQ ID NO: 2800357 - RNA, 12 nt, Human
guucuggccaga

SEQ ID NO: 2800358 - RNA, 13 nt, Human
guucuggccagaa

SEQ ID NO: 2800359 - RNA, 23 nt, Human
guucugcuucaaggcuuccacug

SEQ ID NO: 2800360 - RNA, 21 nt, Human
guucugcuucaauaaaucuuu

SEQ ID NO: 2800361 - RNA, 14 nt, Human
guucugcuuucucc

SEQ ID NO: 2800362 - RNA, 20 nt, Human
guucuggaaaagaacuguuu

SEQ ID NO: 2800363 - RNA, 17 nt, Human
guugauguuggcuggga

SEQ ID NO: 2800364 - RNA, 13 nt, Human
guugauuaaacuc

SEQ ID NO: 2800365 - RNA, 16 nt, Human
guugauguuggcuggg

SEQ ID NO: 2800366 - RNA, 17 nt, Human
guugauguacugauuga

SEQ ID NO: 2800367 - RNA, 13 nt, Human
guugauguaucug

SEQ ID NO: 2800368 - RNA, 14 nt, Human
guugauguaucuga

SEQ ID NO: 2800369 - RNA, 21 nt, Human
guugauguaucugaguugcca

SEQ ID NO: 2800370 - RNA, 19 nt, Human
guugaaugacaacagaagc

SEQ ID NO: 2800371 - RNA, 16 nt, Human
guugaauggccugccu

SEQ ID NO: 2800372 - RNA, 15 nt, Human
guugaaugacaacag

SEQ ID NO: 2800373 - RNA, 17 nt, Human
guugaauacuuuuuaca

SEQ ID NO: 2800374 - RNA, 13 nt, Human
guugaauacuuuu

SEQ ID NO: 2800375 - RNA, 13 nt, Human
guugaauaaaagu

SEQ ID NO: 2800376 - RNA, 18 nt, Human
guugaauaaaagugcaca

SEQ ID NO: 2800377 - RNA, 22 nt, Human
guugaagggagguggcaagagu

SEQ ID NO: 2800378 - RNA, 12 nt, Human
guugaagucacc

SEQ ID NO: 2800379 - RNA, 14 nt, Human
guugaagccuuugu

SEQ ID NO: 2800380 - RNA, 13 nt, Human
guugaagccuuug

SEQ ID NO: 2800381 - RNA, 15 nt, Human
guugaaagaguccua

SEQ ID NO: 2800382 - RNA, 12 nt, Human
guugaaagcaaa

SEQ ID NO: 2800383 - RNA, 15 nt, Human
guugaaagcaaaaau

SEQ ID NO: 2800384 - RNA, 16 nt, Human
guugaaagcaaaaaug

SEQ ID NO: 2800385 - RNA, 21 nt, Human
guugaaagcaaaaaugcuaau

SEQ ID NO: 2800386 - RNA, 22 nt, Human
guugaaaauucaaaaaguguuu

SEQ ID NO: 2800387 - RNA, 15 nt, Human
guugaagaggaaggg

SEQ ID NO: 2800388 - RNA, 16 nt, Human
guugaagacuuuguuu

SEQ ID NO: 2800389 - RNA, 24 nt, Human
guugaaauuuugcaaauauaaaca

SEQ ID NO: 2800390 - RNA, 18 nt, Human
guugaaccaaaccucccu

SEQ ID NO: 2800391 - RNA, 14 nt, Human
guugcacuuuguag

SEQ ID NO: 2800392 - RNA, 14 nt, Human
guugcacugauauu

SEQ ID NO: 2800393 - RNA, 19 nt, Human
guugcauacugagccaagu

SEQ ID NO: 2800394 - RNA, 18 nt, Human
guugcauuccuuugucuu

SEQ ID NO: 2800395 - RNA, 18 nt, Human
guugccaaacagccacac

SEQ ID NO: 2800396 - RNA, 17 nt, Human
guugccaaacagccaca

SEQ ID NO: 2800397 - RNA, 13 nt, Human
guugccaagacaa

SEQ ID NO: 2800398 - RNA, 14 nt, Human
guugccaagacaaa

SEQ ID NO: 2800399 - RNA, 15 nt, Human
guugccaagacaaau

SEQ ID NO: 2800400 - RNA, 16 nt, Human
guugccaagacaaauc

SEQ ID NO: 2800401 - RNA, 17 nt, Human
guugccaagacaaauca

SEQ ID NO: 2800402 - RNA, 20 nt, Human
guugccaagacaaaucaaca

SEQ ID NO: 2800403 - RNA, 20 nt, Human
guugcacacccacucagcuc

SEQ ID NO: 2800404 - RNA, 22 nt, Human
guugcaauagaacagagaaaga

SEQ ID NO: 2800405 - RNA, 17 nt, Human
guugauuuuuacugugu

SEQ ID NO: 2800406 - RNA, 12 nt, Human
guugauuaaggc

SEQ ID NO: 2800407 - RNA, 13 nt, Human
guugauuaaggca

SEQ ID NO: 2800408 - RNA, 16 nt, Human
guuggcagugagugag

SEQ ID NO: 2800409 - RNA, 22 nt, Human
guuggcagugagugagccuggc

SEQ ID NO: 2800410 - RNA, 23 nt, Human
guuggcagugagugagccuggcu

SEQ ID NO: 2800411 - RNA, 23 nt, Human
guuggccaaagccaaagcuaggc

SEQ ID NO: 2800412 - RNA, 14 nt, Human
guuggauguagcau

SEQ ID NO: 2800413 - RNA, 15 nt, Human
guuggauuccaugcu

SEQ ID NO: 2800414 - RNA, 16 nt, Human
guuggauuccaugcua

SEQ ID NO: 2800415 - RNA, 17 nt, Human
guuggauuccaugcuaa

SEQ ID NO: 2800416 - RNA, 12 nt, Human
guuggauuuguu

SEQ ID NO: 2800417 - RNA, 14 nt, Human
guuggccaggcugc

SEQ ID NO: 2800418 - RNA, 13 nt, Human
guuggccaggcug

SEQ ID NO: 2800419 - RNA, 14 nt, Human
guuggccaggcugg

SEQ ID NO: 2800420 - RNA, 15 nt, Human
guuggccaggcuggu

SEQ ID NO: 2800421 - RNA, 14 nt, Human
guuggccaguguga

SEQ ID NO: 2800422 - RNA, 19 nt, Human
guuggccaggcuggucuca

SEQ ID NO: 2800423 - RNA, 17 nt, Human
guuggccaggcuggucu

SEQ ID NO: 2800424 - RNA, 18 nt, Human
guuggccaggcuggucuc

SEQ ID NO: 2800425 - RNA, 19 nt, Human
guuggccaggcugcucuug

SEQ ID NO: 2800426 - RNA, 14 nt, Human
guugcccaggcagg

SEQ ID NO: 2800427 - RNA, 12 nt, Human
guugcccaggca

SEQ ID NO: 2800428 - RNA, 17 nt, Human
guugccaccaccucugu

SEQ ID NO: 2800429 - RNA, 19 nt, Human
guugccaccaccucugugg

SEQ ID NO: 2800430 - RNA, 20 nt, Human
guugccaccaccucuguggc

SEQ ID NO: 2800431 - RNA, 21 nt, Human
guugccaccaccucuguggca

SEQ ID NO: 2800432 - RNA, 15 nt, Human
guuggacaaauguga

SEQ ID NO: 2800433 - RNA, 21 nt, Human
guuggacaaaugugaagaugc

SEQ ID NO: 2800434 - RNA, 14 nt, Human
guuggaccccagag

SEQ ID NO: 2800435 - RNA, 17 nt, Human
guuggaccccagagauu

SEQ ID NO: 2800436 - RNA, 21 nt, Human
guuggacaccuuuagguucuu

SEQ ID NO: 2800437 - RNA, 13 nt, Human
guuggacuaaaug

SEQ ID NO: 2800438 - RNA, 14 nt, Human
guuggacuaaaugc

SEQ ID NO: 2800439 - RNA, 15 nt, Human
guuggacuaaaugcc

SEQ ID NO: 2800440 - RNA, 18 nt, Human
guuggacuaaaugccuag

SEQ ID NO: 2800441 - RNA, 23 nt, Human
guuggacuaaaugccuaguuuuu

SEQ ID NO: 2800442 - RNA, 20 nt, Human
guugccaaaucuggcuccuu

SEQ ID NO: 2800443 - RNA, 22 nt, Human
guuaccuccaacagaacuaaau

SEQ ID NO: 2800444 - RNA, 23 nt, Human
guuaccuccaacagaacuaaaug

SEQ ID NO: 2800445 - RNA, 20 nt, Human
guuacccaggguggagugca

SEQ ID NO: 2800446 - RNA, 14 nt, Human
guuacccaugaaaa

SEQ ID NO: 2800447 - RNA, 16 nt, Human
guuaccgccugucucu

SEQ ID NO: 2800448 - RNA, 16 nt, Human
guuaccuaaaguauuu

SEQ ID NO: 2800449 - RNA, 20 nt, Human
guuaccuaaaguauuuuuau

SEQ ID NO: 2800450 - RNA, 13 nt, Human
guuaccauucaca

SEQ ID NO: 2800451 - RNA, 23 nt, Human
guuaccauuuugggguacccacu

SEQ ID NO: 2800452 - RNA, 23 nt, Human
guuaccacacaucuaugauauaa

SEQ ID NO: 2800453 - RNA, 21 nt, Human
guuaccauauuuauccauuug

SEQ ID NO: 2800454 - RNA, 16 nt, Human
guuacaguaugcuugc

SEQ ID NO: 2800455 - RNA, 17 nt, Human
guuacaguaugcuugcu

SEQ ID NO: 2800456 - RNA, 18 nt, Human
guuacaguaugcuugcuc

SEQ ID NO: 2800457 - RNA, 13 nt, Human
guuacagcucccc

SEQ ID NO: 2800458 - RNA, 13 nt, Human
guuacagagaccu

SEQ ID NO: 2800459 - RNA, 17 nt, Human
guuacagagaccuaugu

SEQ ID NO: 2800460 - RNA, 22 nt, Human
guuacagagaccuauguaagaa

SEQ ID NO: 2800461 - RNA, 15 nt, Human
guuacagcacaaaau

SEQ ID NO: 2800462 - RNA, 21 nt, Human
guuacagcacaaaaugauggc

SEQ ID NO: 2800463 - RNA, 16 nt, Human
guuacagccaagugcc

SEQ ID NO: 2800464 - RNA, 23 nt, Human
guuacagccaagugccaaaugcu

SEQ ID NO: 2800465 - RNA, 23 nt, Human
guuacuaauuggccucuuuaaga

SEQ ID NO: 2800466 - RNA, 12 nt, Human
guuacuauuuuc

SEQ ID NO: 2800467 - RNA, 14 nt, Human
guuacucagggcuc

SEQ ID NO: 2800468 - RNA, 20 nt, Human
guuacucagggcuccuccca

SEQ ID NO: 2800469 - RNA, 22 nt, Human
guuacucagggcuccucccagc

SEQ ID NO: 2800470 - RNA, 19 nt, Human
guuaacauaguaaguucag

SEQ ID NO: 2800471 - RNA, 19 nt, Human
guuaguuauagaugucuag

SEQ ID NO: 2800472 - RNA, 16 nt, Human
guuaguuucuuuggga

SEQ ID NO: 2800473 - RNA, 13 nt, Human
guuaguuucuugg

SEQ ID NO: 2800474 - RNA, 17 nt, Human
guuauaaagugugccac

SEQ ID NO: 2800475 - RNA, 13 nt, Human
guuaucucugugu

SEQ ID NO: 2800476 - RNA, 14 nt, Human
guuaucucuguguu

SEQ ID NO: 2800477 - RNA, 12 nt, Human
guuaucucugug

SEQ ID NO: 2800478 - RNA, 14 nt, Human
guuaucgaaauaac

SEQ ID NO: 2800479 - RNA, 15 nt, Human
guuaucgaaauaaca

SEQ ID NO: 2800480 - RNA, 17 nt, Human
guuaucgaaauaacaau

SEQ ID NO: 2800481 - RNA, 23 nt, Human
guuaucgaaauaacaauguuaag

SEQ ID NO: 2800482 - RNA, 18 nt, Human
guuaucgaaauaacaaug

SEQ ID NO: 2800483 - RNA, 21 nt, Human
guuaucgaaauaacaauguua

SEQ ID NO: 2800484 - RNA, 18 nt, Human
guuaucccaaucauuguu

SEQ ID NO: 2800485 - RNA, 17 nt, Human
guuaugacuauguaaac

SEQ ID NO: 2800486 - RNA, 17 nt, Human
guuaucuguucuuuuga

SEQ ID NO: 2800487 - RNA, 18 nt, Human
guuaucuucucaaguucu

SEQ ID NO: 2800488 - RNA, 19 nt, Human
guuaucuuauacuguacaa

SEQ ID NO: 2800489 - RNA, 20 nt, Human
guuaucuuauacuguacaau

SEQ ID NO: 2800490 - RNA, 22 nt, Human
guuaucuuauacuguacaauaa

SEQ ID NO: 2800491 - RNA, 23 nt, Human
guuaucuuauacuguacaauaaa

SEQ ID NO: 2800492 - RNA, 19 nt, Human
guuaucuucucaaguucua

SEQ ID NO: 2800493 - RNA, 21 nt, Human
guuaucuucucaaguucuaag

SEQ ID NO: 2800494 - RNA, 23 nt, Human
guuaucuucucaaguucuaagau

SEQ ID NO: 2800495 - RNA, 13 nt, Human
guuaugaaagaau

SEQ ID NO: 2800496 - RNA, 17 nt, Human
guuaugaaagaauauau

SEQ ID NO: 2800497 - RNA, 18 nt, Human
guuaugaaagaauauauu

SEQ ID NO: 2800498 - RNA, 20 nt, Human
guuaugaaagaauauauuua

SEQ ID NO: 2800499 - RNA, 13 nt, Human
guuaugaaucagu

SEQ ID NO: 2800500 - RNA, 15 nt, Human
guuaugacuauguaa

SEQ ID NO: 2800501 - RNA, 15 nt, Human
guuaugaaauaaaga

SEQ ID NO: 2800502 - RNA, 22 nt, Human
guuaucuucucaaguucuaaga

SEQ ID NO: 2800503 - RNA, 20 nt, Human
guuaugaaauucacccccuu

SEQ ID NO: 2800504 - RNA, 13 nt, Human
guuauaagacucu

SEQ ID NO: 2800505 - RNA, 14 nt, Human
guuauaagacucuc

SEQ ID NO: 2800506 - RNA, 16 nt, Human
guuauauaauucacuc

SEQ ID NO: 2800507 - RNA, 17 nt, Human
guuauaguaacucccau

SEQ ID NO: 2800508 - RNA, 17 nt, Human
guuauauuuaaugcauu

SEQ ID NO: 2800509 - RNA, 10 nt, Human
guuauauuuc

SEQ ID NO: 2800510 - RNA, 12 nt, Human
guuauauuucag

SEQ ID NO: 2800511 - RNA, 15 nt, Human
guuauauuucagaug

SEQ ID NO: 2800512 - RNA, 21 nt, Human
guuauauuucagauguaaugu

SEQ ID NO: 2800513 - RNA, 23 nt, Human
guuauauuucagauguaauguuu

SEQ ID NO: 2800514 - RNA, 17 nt, Human
guuauauauuuuuugua

SEQ ID NO: 2800515 - RNA, 14 nt, Human
guuauaucaacaga

SEQ ID NO: 2800516 - RNA, 16 nt, Human
guuauaucauauguau

SEQ ID NO: 2800517 - RNA, 16 nt, Human
guuauauccccugcua

SEQ ID NO: 2800518 - RNA, 17 nt, Human
guuauauccccugcuac

SEQ ID NO: 2800519 - RNA, 23 nt, Human
guuaucaaacuucagcuguacuu

SEQ ID NO: 2800520 - RNA, 16 nt, Human
guucaauucucauuug

SEQ ID NO: 2800521 - RNA, 23 nt, Human
guucaauucucauuugucacaca

SEQ ID NO: 2800522 - RNA, 14 nt, Human
guucacacccugca

SEQ ID NO: 2800523 - RNA, 15 nt, Human
guucacacccugcaa

SEQ ID NO: 2800524 - RNA, 16 nt, Human
guucacacccugcaag

SEQ ID NO: 2800525 - RNA, 17 nt, Human
guucacacccugcaagg

SEQ ID NO: 2800526 - RNA, 19 nt, Human
guucacacccugcaaggcc

SEQ ID NO: 2800527 - RNA, 17 nt, Human
guucaaugguucugaaa

SEQ ID NO: 2800528 - RNA, 20 nt, Human
guucaagcgauucuucugcu

SEQ ID NO: 2800529 - RNA, 18 nt, Human
guucaauaauaaauauuu

SEQ ID NO: 2800530 - RNA, 18 nt, Human
guucaaucucccgcugcu

SEQ ID NO: 2800531 - RNA, 22 nt, Human
guucaaggaacuugaaaaauac

SEQ ID NO: 2800532 - RNA, 12 nt, Human
guucaaguuuug

SEQ ID NO: 2800533 - RNA, 20 nt, Human
guucaauaaacuuaacuuua

SEQ ID NO: 2800534 - RNA, 23 nt, Human
guucaagugauucucaugccuca

SEQ ID NO: 2800535 - RNA, 12 nt, Human
guuauguauuuc

SEQ ID NO: 2800536 - RNA, 13 nt, Human
guuauguauuucc

SEQ ID NO: 2800537 - RNA, 23 nt, Human
guuauguauuuccuggauguuug

SEQ ID NO: 2800538 - RNA, 15 nt, Human
guuaugucuguuuaa

SEQ ID NO: 2800539 - RNA, 16 nt, Human
guuaugucuguuuaag

SEQ ID NO: 2800540 - RNA, 18 nt, Human
guuaugucuguuuaagaa

SEQ ID NO: 2800541 - RNA, 19 nt, Human
guuauguguaugugccauu

SEQ ID NO: 2800542 - RNA, 18 nt, Human
guuauguguaugugccau

SEQ ID NO: 2800543 - RNA, 22 nt, Human
guuauguaccauaugaucuguu

SEQ ID NO: 2800544 - RNA, 17 nt, Human
guuauguacuaguguuc

SEQ ID NO: 2800545 - RNA, 22 nt, Human
guuauguacuaguguucuguuu

SEQ ID NO: 2800546 - RNA, 13 nt, Human
guuauguacugua

SEQ ID NO: 2800547 - RNA, 14 nt, Human
guuauguacuguac

SEQ ID NO: 2800548 - RNA, 15 nt, Human
guuauguacuguacu

SEQ ID NO: 2800549 - RNA, 17 nt, Human
guuauguacuguacuaa

SEQ ID NO: 2800550 - RNA, 19 nt, Human
guuauguacuguacuaauu

SEQ ID NO: 2800551 - RNA, 23 nt, Human
guuauggcagaugacaagauggu

SEQ ID NO: 2800552 - RNA, 19 nt, Human
guucaagcgauucuucugc

SEQ ID NO: 2800553 - RNA, 20 nt, Human
guuauguguaugugccauuu

SEQ ID NO: 2800554 - RNA, 13 nt, Human
guucagaacaacu

SEQ ID NO: 2800555 - RNA, 14 nt, Human
guucacugaagacg

SEQ ID NO: 2800556 - RNA, 20 nt, Human
guucacugaaggugauucac

SEQ ID NO: 2800557 - RNA, 19 nt, Human
guucagaguccuuaaaaug

SEQ ID NO: 2800558 - RNA, 13 nt, Human
guucagaguuuuc

SEQ ID NO: 2800559 - RNA, 19 nt, Human
guucagauaauugaauaag

SEQ ID NO: 2800560 - RNA, 19 nt, Human
guucacugcaaccuccgcc

SEQ ID NO: 2800561 - RNA, 14 nt, Human
guucaccuuuguag

SEQ ID NO: 2800562 - RNA, 15 nt, Human
guucaccuuuguagc

SEQ ID NO: 2800563 - RNA, 17 nt, Human
guucaccuuuguagcac

SEQ ID NO: 2800564 - RNA, 23 nt, Human
guucaccuuuguagcacucaggc

SEQ ID NO: 2800565 - RNA, 15 nt, Human
guucacgcaacuuga

SEQ ID NO: 2800566 - RNA, 16 nt, Human
guucacgcaacuugaa

SEQ ID NO: 2800567 - RNA, 19 nt, Human
guucacgugcagcucaagg

SEQ ID NO: 2800568 - RNA, 24 nt, Human
guucacucuacuuagcaugucccu

SEQ ID NO: 2800569 - RNA, 15 nt, Human
guucacuaaagcagu

SEQ ID NO: 2800570 - RNA, 22 nt, Human
guucaauuuguuaguuccugua

SEQ ID NO: 2800571 - RNA, 16 nt, Human
guucacauuagaauua

SEQ ID NO: 2800572 - RNA, 17 nt, Human
guucacauuagaauuag

SEQ ID NO: 2800573 - RNA, 19 nt, Human
guucacccaucuuaucaag

SEQ ID NO: 2800574 - RNA, 15 nt, Human
guucaauucccugaa

SEQ ID NO: 2800575 - RNA, 17 nt, Human
guucaauucccugaagg

SEQ ID NO: 2800576 - RNA, 16 nt, Human
guucaucccagcccca

SEQ ID NO: 2800577 - RNA, 19 nt, Human
guucauauuccauauuuau

SEQ ID NO: 2800578 - RNA, 17 nt, Human
guucagcaccacccuag

SEQ ID NO: 2800579 - RNA, 16 nt, Human
guucagcaccacccua

SEQ ID NO: 2800580 - RNA, 13 nt, Human
guucagcacuugu

SEQ ID NO: 2800581 - RNA, 15 nt, Human
guucagcacuugucu

SEQ ID NO: 2800582 - RNA, 20 nt, Human
guucagcacuugucucauuu

SEQ ID NO: 2800583 - RNA, 22 nt, Human
guucagcacuugucucauuuua

SEQ ID NO: 2800584 - RNA, 23 nt, Human
guucagcacuugucucauuuuaa

SEQ ID NO: 2800585 - RNA, 12 nt, Human
guucauguagag

SEQ ID NO: 2800586 - RNA, 15 nt, Human
guucauguagagaaa

SEQ ID NO: 2800587 - RNA, 16 nt, Human
guucauguagagaaaa

SEQ ID NO: 2800588 - RNA, 19 nt, Human
guucauguagagaaaagca

SEQ ID NO: 2800589 - RNA, 10 nt, Human
guucauguuu

SEQ ID NO: 2800590 - RNA, 14 nt, Human
guucauguuugcuu

SEQ ID NO: 2800591 - RNA, 24 nt, Human
guucauguuugcuucauaaaugaa

SEQ ID NO: 2800592 - RNA, 16 nt, Human
guucauguuuggugca

SEQ ID NO: 2800593 - RNA, 20 nt, Human
guucauguuuggugcauaga

SEQ ID NO: 2800594 - RNA, 14 nt, Human
guucaugagaaucu

SEQ ID NO: 2800595 - RNA, 16 nt, Human
guucaugccaccaugg

SEQ ID NO: 2800596 - RNA, 12 nt, Human
guucaugagaau

SEQ ID NO: 2800597 - RNA, 19 nt, Human
guucaugagaaucuauauu

SEQ ID NO: 2800598 - RNA, 17 nt, Human
guucaugaugcagucuc

SEQ ID NO: 2800599 - RNA, 23 nt, Human
guucaugaugcagucuccucuuu

SEQ ID NO: 2800600 - RNA, 17 nt, Human
guucauccuauuguuga

SEQ ID NO: 2800601 - RNA, 18 nt, Human
guucauccuauuguugau

SEQ ID NO: 2800602 - RNA, 19 nt, Human
guuccuaagagugcugggc

SEQ ID NO: 2800603 - RNA, 21 nt, Human
guuccagcagaugccacauaa

SEQ ID NO: 2800604 - RNA, 17 nt, Human
guuccuaagaagcuucu

SEQ ID NO: 2800605 - RNA, 18 nt, Human
guuccuaagaagcuucua

SEQ ID NO: 2800606 - RNA, 19 nt, Human
guuccuaagaagcuucuaa

SEQ ID NO: 2800607 - RNA, 21 nt, Human
guuccuaagaagcuucuaaua

SEQ ID NO: 2800608 - RNA, 21 nt, Human
guuccaucuccuauaaucugu

SEQ ID NO: 2800609 - RNA, 22 nt, Human
guuccaucuccuauaaucuguc

SEQ ID NO: 2800610 - RNA, 16 nt, Human
guuccagcucuuugaa

SEQ ID NO: 2800611 - RNA, 14 nt, Human
guuccagcucuuug

SEQ ID NO: 2800612 - RNA, 12 nt, Human
guuccagcucuu

SEQ ID NO: 2800613 - RNA, 13 nt, Human
guuccuuagaccu

SEQ ID NO: 2800614 - RNA, 22 nt, Human
guuccucuuugguguacagacu

SEQ ID NO: 2800615 - RNA, 17 nt, Human
guuccugacaucacagc

SEQ ID NO: 2800616 - RNA, 20 nt, Human
guuccugacaucacagcagc

SEQ ID NO: 2800617 - RNA, 21 nt, Human
guuccugacaucacagcagcc

SEQ ID NO: 2800618 - RNA, 23 nt, Human
guuccugacaucacagcagccuc

SEQ ID NO: 2800619 - RNA, 17 nt, Human
guuccuccccgccuucc

SEQ ID NO: 2800620 - RNA, 23 nt, Human
guuccuccccuccuccuggacuc

SEQ ID NO: 2800621 - RNA, 12 nt, Human
guuccucucugg

SEQ ID NO: 2800622 - RNA, 22 nt, Human
guuccucucugguggcucuuug

SEQ ID NO: 2800623 - RNA, 12 nt, Human
guuccacagagu

SEQ ID NO: 2800624 - RNA, 20 nt, Human
guuccacagaguaagacauu

SEQ ID NO: 2800625 - RNA, 14 nt, Human
guuccacaguugcc

SEQ ID NO: 2800626 - RNA, 16 nt, Human
guuccacaguugccac

SEQ ID NO: 2800627 - RNA, 18 nt, Human
guuccacaguugccacca

SEQ ID NO: 2800628 - RNA, 23 nt, Human
guuccaauccuggcucuguggcu

SEQ ID NO: 2800629 - RNA, 16 nt, Human
guuccacguguuuuau

SEQ ID NO: 2800630 - RNA, 21 nt, Human
guuccagcaauucuccugccu

SEQ ID NO: 2800631 - RNA, 20 nt, Human
guuccagcaauucuccugcc

SEQ ID NO: 2800632 - RNA, 23 nt, Human
guuccagcaauucuccugccuca

SEQ ID NO: 2800633 - RNA, 16 nt, Human
guucauugcacuuuga

SEQ ID NO: 2800634 - RNA, 20 nt, Human
guucauuaaagcaugaaugg

SEQ ID NO: 2800635 - RNA, 16 nt, Human
guucauuaaagcauga

SEQ ID NO: 2800636 - RNA, 15 nt, Human
guucauguuugcuuc

SEQ ID NO: 2800637 - RNA, 16 nt, Human
guucauuugugugcuc

SEQ ID NO: 2800638 - RNA, 18 nt, Human
guucauuugugugcucau

SEQ ID NO: 2800639 - RNA, 17 nt, Human
guucauuugugugcuca

SEQ ID NO: 2800640 - RNA, 19 nt, Human
guuccaaaagccaauggcu

SEQ ID NO: 2800641 - RNA, 15 nt, Human
guucauuuguuuguu

SEQ ID NO: 2800642 - RNA, 14 nt, Human
guuccaagagucua

SEQ ID NO: 2800643 - RNA, 16 nt, Human
guuccaagagucuaaa

SEQ ID NO: 2800644 - RNA, 18 nt, Human
guuccaagagucuaaaga

SEQ ID NO: 2800645 - RNA, 16 nt, Human
guuccaauccuggcuc

SEQ ID NO: 2800646 - RNA, 15 nt, Human
guuccaauccuggcu

SEQ ID NO: 2800647 - RNA, 16 nt, Human
guuccaaguuuccaaa

SEQ ID NO: 2800648 - RNA, 17 nt, Human
guuccaaguuuccaaac

SEQ ID NO: 2800649 - RNA, 20 nt, Human
guuccaagagucuaaagaug

SEQ ID NO: 2800650 - RNA, 13 nt, Human
guuccaaggccag

SEQ ID NO: 2800651 - RNA, 14 nt, Human
guuccaaggccagg

SEQ ID NO: 2800652 - RNA, 17 nt, Human
guuccaaguccaauaag

SEQ ID NO: 2800653 - RNA, 19 nt, Human
guuccaaguccaauaagac

SEQ ID NO: 2800654 - RNA, 18 nt, Human
guuaaaacuguacauuua

SEQ ID NO: 2800655 - RNA, 19 nt, Human
guuaaaacuguacauuuaa

SEQ ID NO: 2800656 - RNA, 20 nt, Human
guuaaaacuguacauuuaaa

SEQ ID NO: 2800657 - RNA, 22 nt, Human
guuaaaacuguacauuuaaaau

SEQ ID NO: 2800658 - RNA, 23 nt, Human
guuaaaacuguacauuuaaaauu

SEQ ID NO: 2800659 - RNA, 20 nt, Human
guuaaaaaaaggcauuguuu

SEQ ID NO: 2800660 - RNA, 15 nt, Human
guuaaaaaaauggca

SEQ ID NO: 2800661 - RNA, 19 nt, Human
guuaaaaaaauggcaguga

SEQ ID NO: 2800662 - RNA, 13 nt, Human
guuaaaaaaaaaa

SEQ ID NO: 2800663 - RNA, 19 nt, Human
guuaaaaaaaaaaaaagga

SEQ ID NO: 2800664 - RNA, 21 nt, Human
guuaaaaaaaaaaaaaggaaa

SEQ ID NO: 2800665 - RNA, 23 nt, Human
guuaaaaaaaaaaaaaggaaaaa

SEQ ID NO: 2800666 - RNA, 11 nt, Human
guuaaaaauaa

SEQ ID NO: 2800667 - RNA, 21 nt, Human
guuaaaauaacuaguguugcu

SEQ ID NO: 2800668 - RNA, 22 nt, Human
guuaaaauacaguucugucaua

SEQ ID NO: 2800669 - RNA, 12 nt, Human
guuaaagaugca

SEQ ID NO: 2800670 - RNA, 12 nt, Human
guuaaacuguua

SEQ ID NO: 2800671 - RNA, 13 nt, Human
guuaaacuguuag

SEQ ID NO: 2800672 - RNA, 21 nt, Human
guuaaacuguuagcacuguug

SEQ ID NO: 2800673 - RNA, 22 nt, Human
guuaaacuguuagcacuguuga

SEQ ID NO: 2800674 - RNA, 19 nt, Human
guuaaaaugugaggaagaa

SEQ ID NO: 2800675 - RNA, 20 nt, Human
guuaaauacuguguggaacu

SEQ ID NO: 2800676 - RNA, 21 nt, Human
guuaaauagaguauaugcacu

SEQ ID NO: 2800677 - RNA, 19 nt, Human
guuaaauagaguauaugca

SEQ ID NO: 2800678 - RNA, 20 nt, Human
guuaaauagaguauaugcac

SEQ ID NO: 2800679 - RNA, 12 nt, Human
guuacacccuuu

SEQ ID NO: 2800680 - RNA, 22 nt, Human
guuacacccuuucuugacaaaa

SEQ ID NO: 2800681 - RNA, 17 nt, Human
guuaacugauuugcaau

SEQ ID NO: 2800682 - RNA, 18 nt, Human
guuaacugagugccuuuu

SEQ ID NO: 2800683 - RNA, 20 nt, Human
guuaagaaaucuguuuuugu

SEQ ID NO: 2800684 - RNA, 18 nt, Human
guuaacaucaugaauuua

SEQ ID NO: 2800685 - RNA, 20 nt, Human
guuaacaucaugaauuuauu

SEQ ID NO: 2800686 - RNA, 23 nt, Human
guuaacauuccaagacucuagag

SEQ ID NO: 2800687 - RNA, 13 nt, Human
guuaacauuguug

SEQ ID NO: 2800688 - RNA, 22 nt, Human
guuaacauuguugcucccugug

SEQ ID NO: 2800689 - RNA, 12 nt, Human
guuaacagauuu

SEQ ID NO: 2800690 - RNA, 24 nt, Human
guuaacauuccaagacucuagagu

SEQ ID NO: 2800691 - RNA, 15 nt, Human
guuaaccauuuaagu

SEQ ID NO: 2800692 - RNA, 17 nt, Human
guuaacuauugcauuua

SEQ ID NO: 2800693 - RNA, 15 nt, Human
guuaaaugaaauugu

SEQ ID NO: 2800694 - RNA, 17 nt, Human
guuaaaugaaauuguaa

SEQ ID NO: 2800695 - RNA, 18 nt, Human
guuaaaugaaauuguaaa

SEQ ID NO: 2800696 - RNA, 20 nt, Human
guuaaaugaaauuguaaaac

SEQ ID NO: 2800697 - RNA, 19 nt, Human
guuaaauuuguaaguuuca

SEQ ID NO: 2800698 - RNA, 23 nt, Human
guuaaauuuguaaguuucaggug

SEQ ID NO: 2800699 - RNA, 13 nt, Human
guuaaauuuguaa

SEQ ID NO: 2800700 - RNA, 14 nt, Human
guuaaauuuguaag

SEQ ID NO: 2800701 - RNA, 15 nt, Human
guuaaauuuguaagu

SEQ ID NO: 2800702 - RNA, 16 nt, Human
guuaaauuuguaaguu

SEQ ID NO: 2800703 - RNA, 17 nt, Human
guuaaauuuguaaguuu

SEQ ID NO: 2800704 - RNA, 18 nt, Human
guuaaauuuguaaguuuc

SEQ ID NO: 2800705 - RNA, 13 nt, Human
guguuauguauuu

SEQ ID NO: 2800706 - RNA, 14 nt, Human
guguuauguauuuc

SEQ ID NO: 2800707 - RNA, 16 nt, Human
guguuauucuuugcgu

SEQ ID NO: 2800708 - RNA, 17 nt, Human
guguucauacauuugag

SEQ ID NO: 2800709 - RNA, 12 nt, Human
guguucauacau

SEQ ID NO: 2800710 - RNA, 16 nt, Human
guguucacugaagacg

SEQ ID NO: 2800711 - RNA, 13 nt, Human
guguuauuuuuca

SEQ ID NO: 2800712 - RNA, 17 nt, Human
guguuccaaguuuccaa

SEQ ID NO: 2800713 - RNA, 19 nt, Human
guguuccccaucugggucc

SEQ ID NO: 2800714 - RNA, 15 nt, Human
guguucccuuugucu

SEQ ID NO: 2800715 - RNA, 20 nt, Human
guguucccuuugucuuucaa

SEQ ID NO: 2800716 - RNA, 21 nt, Human
guguucccuuugucuuucaaa

SEQ ID NO: 2800717 - RNA, 14 nt, Human
guguucgcuuggcu

SEQ ID NO: 2800718 - RNA, 13 nt, Human
guguucuaagaug

SEQ ID NO: 2800719 - RNA, 22 nt, Human
guguucuaagaugugauauucu

SEQ ID NO: 2800720 - RNA, 23 nt, Human
guguucuauccaaacauguauuu

SEQ ID NO: 2800721 - RNA, 11 nt, Human
guguucuccuu

SEQ ID NO: 2800722 - RNA, 16 nt, Human
guguucuccuuuuccu

SEQ ID NO: 2800723 - RNA, 21 nt, Human
guguuuuucuuguaaaugugu

SEQ ID NO: 2800724 - RNA, 13 nt, Human
guguuuuucucca

SEQ ID NO: 2800725 - RNA, 14 nt, Human
guguuuuucuccag

SEQ ID NO: 2800726 - RNA, 15 nt, Human
guguuuuucuccagu

SEQ ID NO: 2800727 - RNA, 18 nt, Human
guguuuuucuccagugcu

SEQ ID NO: 2800728 - RNA, 16 nt, Human
guguuuuagaugguuu

SEQ ID NO: 2800729 - RNA, 15 nt, Human
guguuuuaauuuaaa

SEQ ID NO: 2800730 - RNA, 14 nt, Human
guguucucucuuau

SEQ ID NO: 2800731 - RNA, 14 nt, Human
guguuuuaauuuaa

SEQ ID NO: 2800732 - RNA, 15 nt, Human
guguuuuauaaaaua

SEQ ID NO: 2800733 - RNA, 14 nt, Human
guguuuucugugua

SEQ ID NO: 2800734 - RNA, 16 nt, Human
guguuuucuguguaac

SEQ ID NO: 2800735 - RNA, 13 nt, Human
guguguuggacag

SEQ ID NO: 2800736 - RNA, 12 nt, Human
guguuaauuuau

SEQ ID NO: 2800737 - RNA, 16 nt, Human
guguuacugcaguuga

SEQ ID NO: 2800738 - RNA, 21 nt, Human
guguuacugcaguugaaaggg

SEQ ID NO: 2800739 - RNA, 15 nt, Human
guguuacuguaauuc

SEQ ID NO: 2800740 - RNA, 19 nt, Human
guguuacuguaauuccuca

SEQ ID NO: 2800741 - RNA, 16 nt, Human
guguuacuuauggaag

SEQ ID NO: 2800742 - RNA, 14 nt, Human
guguuacuuuuugu

SEQ ID NO: 2800743 - RNA, 17 nt, Human
guguuaacauuccaaga

SEQ ID NO: 2800744 - RNA, 14 nt, Human
guguuaacauucca

SEQ ID NO: 2800745 - RNA, 19 nt, Human
guguuaaaugaaauuguaa

SEQ ID NO: 2800746 - RNA, 18 nt, Human
gugugccugcagccccgc

SEQ ID NO: 2800747 - RNA, 16 nt, Human
gugugccugggggagu

SEQ ID NO: 2800748 - RNA, 23 nt, Human
gugugccugggggaguuuuccuc

SEQ ID NO: 2800749 - RNA, 16 nt, Human
gugugccugcagcccc

SEQ ID NO: 2800750 - RNA, 15 nt, Human
gugugccugcagccc

SEQ ID NO: 2800751 - RNA, 14 nt, Human
gugugccugcagcc

SEQ ID NO: 2800752 - RNA, 13 nt, Human
gugugccugcagc

SEQ ID NO: 2800753 - RNA, 18 nt, Human
gugugccugacugcccag

SEQ ID NO: 2800754 - RNA, 19 nt, Human
gugugccugacugcccagc

SEQ ID NO: 2800755 - RNA, 20 nt, Human
gugugccugacugcccagca

SEQ ID NO: 2800756 - RNA, 16 nt, Human
gugugcccccuucaag

SEQ ID NO: 2800757 - RNA, 19 nt, Human
gugugccucaguauauuua

SEQ ID NO: 2800758 - RNA, 22 nt, Human
gugugccucaguauauuuaaac

SEQ ID NO: 2800759 - RNA, 22 nt, Human
gugugcucugaucauccacugu

SEQ ID NO: 2800760 - RNA, 15 nt, Human
gugugcucugaucau

SEQ ID NO: 2800761 - RNA, 16 nt, Human
gugugcugagguguua

SEQ ID NO: 2800762 - RNA, 17 nt, Human
gugugcugaugggcgua

SEQ ID NO: 2800763 - RNA, 12 nt, Human
gugugcucugau

SEQ ID NO: 2800764 - RNA, 16 nt, Human
gugugcgcucugugga

SEQ ID NO: 2800765 - RNA, 21 nt, Human
guguggacuguggcacuugcc

SEQ ID NO: 2800766 - RNA, 15 nt, Human
guguggcagagagag

SEQ ID NO: 2800767 - RNA, 13 nt, Human
guguggcagcagg

SEQ ID NO: 2800768 - RNA, 14 nt, Human
guguggcagcaggc

SEQ ID NO: 2800769 - RNA, 16 nt, Human
guguggcagcaggcag

SEQ ID NO: 2800770 - RNA, 15 nt, Human
guguggccacuucug

SEQ ID NO: 2800771 - RNA, 19 nt, Human
guguggccacuucugucca

SEQ ID NO: 2800772 - RNA, 18 nt, Human
guguggauccaauguuag

SEQ ID NO: 2800773 - RNA, 13 nt, Human
guguggcugagga

SEQ ID NO: 2800774 - RNA, 14 nt, Human
guguggcuccuucc

SEQ ID NO: 2800775 - RNA, 14 nt, Human
gugugggcuguguc

SEQ ID NO: 2800776 - RNA, 15 nt, Human
guguggcugaggagg

SEQ ID NO: 2800777 - RNA, 20 nt, Human
guguggcugaggaggccucc

SEQ ID NO: 2800778 - RNA, 13 nt, Human
guguguugucuug

SEQ ID NO: 2800779 - RNA, 16 nt, Human
guguguugucuugaaa

SEQ ID NO: 2800780 - RNA, 18 nt, Human
guguguugucuugaaaga

SEQ ID NO: 2800781 - RNA, 14 nt, Human
guguguuugugauu

SEQ ID NO: 2800782 - RNA, 15 nt, Human
guguguuucugaucu

SEQ ID NO: 2800783 - RNA, 12 nt, Human
guguccuucccu

SEQ ID NO: 2800784 - RNA, 15 nt, Human
guguccuucccugca

SEQ ID NO: 2800785 - RNA, 21 nt, Human
guguccuguaguugcguggac

SEQ ID NO: 2800786 - RNA, 23 nt, Human
gugucccugcacuugcagacucu

SEQ ID NO: 2800787 - RNA, 20 nt, Human
guguccccuccacugucaca

SEQ ID NO: 2800788 - RNA, 23 nt, Human
gugucucagggugcagaggucag

SEQ ID NO: 2800789 - RNA, 20 nt, Human
gugucuaagauucuagauca

SEQ ID NO: 2800790 - RNA, 23 nt, Human
gugucucaaucugaucugaguga

SEQ ID NO: 2800791 - RNA, 16 nt, Human
gugucuaagauucuag

SEQ ID NO: 2800792 - RNA, 17 nt, Human
gugucuaagauucuaga

SEQ ID NO: 2800793 - RNA, 18 nt, Human
gugucuaagauucuagau

SEQ ID NO: 2800794 - RNA, 19 nt, Human
gugucuaagauucuagauc

SEQ ID NO: 2800795 - RNA, 15 nt, Human
gugucguagccaagg

SEQ ID NO: 2800796 - RNA, 17 nt, Human
gugucuaaaaacaccaa

SEQ ID NO: 2800797 - RNA, 14 nt, Human
gugucuaaaaacac

SEQ ID NO: 2800798 - RNA, 14 nt, Human
gugucuaagauucu

SEQ ID NO: 2800799 - RNA, 15 nt, Human
gugucuaagauucua

SEQ ID NO: 2800800 - RNA, 15 nt, Human
gugucugcucaguaa

SEQ ID NO: 2800801 - RNA, 21 nt, Human
gugucugcuuuaaagggccug

SEQ ID NO: 2800802 - RNA, 17 nt, Human
gugucugcgaaguccua

SEQ ID NO: 2800803 - RNA, 20 nt, Human
gugugagucaccaagcccag

SEQ ID NO: 2800804 - RNA, 14 nt, Human
gugugagugugaca

SEQ ID NO: 2800805 - RNA, 15 nt, Human
gugugagugugacag

SEQ ID NO: 2800806 - RNA, 18 nt, Human
gugugagugugacagggc

SEQ ID NO: 2800807 - RNA, 19 nt, Human
gugugagugugacagggcc

SEQ ID NO: 2800808 - RNA, 17 nt, Human
gugucuggauucccagg

SEQ ID NO: 2800809 - RNA, 21 nt, Human
gugucuggauucccaggauga

SEQ ID NO: 2800810 - RNA, 19 nt, Human
gugugaucccaagugccag

SEQ ID NO: 2800811 - RNA, 17 nt, Human
gugugaucccaagugcc

SEQ ID NO: 2800812 - RNA, 18 nt, Human
gugugaucucuucagggu

SEQ ID NO: 2800813 - RNA, 21 nt, Human
gugugaucuuaauauauuuga

SEQ ID NO: 2800814 - RNA, 22 nt, Human
gugugaucuuaauauauuugaa

SEQ ID NO: 2800815 - RNA, 17 nt, Human
gugugaugaacuuucuc

SEQ ID NO: 2800816 - RNA, 22 nt, Human
gugugaugaacuuucucuucau

SEQ ID NO: 2800817 - RNA, 20 nt, Human
gugugcacaaauauuuauuu

SEQ ID NO: 2800818 - RNA, 15 nt, Human
gugugcaacagacaa

SEQ ID NO: 2800819 - RNA, 16 nt, Human
gugugcaacagacaag

SEQ ID NO: 2800820 - RNA, 21 nt, Human
gugugccauagaguuuaacac

SEQ ID NO: 2800821 - RNA, 16 nt, Human
gugugcauguguguau

SEQ ID NO: 2800822 - RNA, 17 nt, Human
gugugcauguguguaua

SEQ ID NO: 2800823 - RNA, 22 nt, Human
gugugcauggaggcccuccugu

SEQ ID NO: 2800824 - RNA, 22 nt, Human
gugugcaccuuaccaacuuucu

SEQ ID NO: 2800825 - RNA, 13 nt, Human
gugugcagugaag

SEQ ID NO: 2800826 - RNA, 14 nt, Human
guguaauaagacau

SEQ ID NO: 2800827 - RNA, 13 nt, Human
guguaauaagaca

SEQ ID NO: 2800828 - RNA, 15 nt, Human
guguaauaagacaua

SEQ ID NO: 2800829 - RNA, 22 nt, Human
guguaauaagacuuagauugug

SEQ ID NO: 2800830 - RNA, 12 nt, Human
guguaauaagac

SEQ ID NO: 2800831 - RNA, 17 nt, Human
guggugccauccccagg

SEQ ID NO: 2800832 - RNA, 16 nt, Human
guggugccauccccag

SEQ ID NO: 2800833 - RNA, 23 nt, Human
guggugagcagaaguggagcugg

SEQ ID NO: 2800834 - RNA, 14 nt, Human
guggugcagacaga

SEQ ID NO: 2800835 - RNA, 18 nt, Human
guggugccaucauugcug

SEQ ID NO: 2800836 - RNA, 23 nt, Human
guggugccaucauugcugucugc

SEQ ID NO: 2800837 - RNA, 19 nt, Human
guggugcgaucuggguuca

SEQ ID NO: 2800838 - RNA, 22 nt, Human
guggugccauccccagggggca

SEQ ID NO: 2800839 - RNA, 17 nt, Human
guggugaccucugccug

SEQ ID NO: 2800840 - RNA, 14 nt, Human
guggugaccucugc

SEQ ID NO: 2800841 - RNA, 19 nt, Human
guggucuucaaauugucuu

SEQ ID NO: 2800842 - RNA, 23 nt, Human
guggucuucaaauugucuuuugu

SEQ ID NO: 2800843 - RNA, 15 nt, Human
guggucuuuguaaga

SEQ ID NO: 2800844 - RNA, 19 nt, Human
guggucuuuguaagagugu

SEQ ID NO: 2800845 - RNA, 19 nt, Human
gugguaugaucacggcuca

SEQ ID NO: 2800846 - RNA, 14 nt, Human
guggguggggcugc

SEQ ID NO: 2800847 - RNA, 13 nt, Human
gugguaugugaca

SEQ ID NO: 2800848 - RNA, 14 nt, Human
gugguacccucugg

SEQ ID NO: 2800849 - RNA, 12 nt, Human
gugguacucuga

SEQ ID NO: 2800850 - RNA, 19 nt, Human
gugguaggccuuuuaacau

SEQ ID NO: 2800851 - RNA, 22 nt, Human
gugguaggccuuuuaacauuuu

SEQ ID NO: 2800852 - RNA, 23 nt, Human
gugguaggccuuuuaacauuuug

SEQ ID NO: 2800853 - RNA, 21 nt, Human
gugguagguacuuuuugugaa

SEQ ID NO: 2800854 - RNA, 23 nt, Human
gugguagguacuuuuugugaaga

SEQ ID NO: 2800855 - RNA, 18 nt, Human
gugguaguaaaacacaga

SEQ ID NO: 2800856 - RNA, 19 nt, Human
gugguaguaaaacacagag

SEQ ID NO: 2800857 - RNA, 20 nt, Human
gugguaguaaaacacagagg

SEQ ID NO: 2800858 - RNA, 11 nt, Human
guggucucagg

SEQ ID NO: 2800859 - RNA, 12 nt, Human
guggucucagga

SEQ ID NO: 2800860 - RNA, 13 nt, Human
guggucucaggau

SEQ ID NO: 2800861 - RNA, 13 nt, Human
gugguccccaaca

SEQ ID NO: 2800862 - RNA, 12 nt, Human
guguacagguac

SEQ ID NO: 2800863 - RNA, 17 nt, Human
guguaauuuauaaaauu

SEQ ID NO: 2800864 - RNA, 12 nt, Human
guguaauuuaug

SEQ ID NO: 2800865 - RNA, 14 nt, Human
guguacaauguaca

SEQ ID NO: 2800866 - RNA, 16 nt, Human
guguacaauguacaca

SEQ ID NO: 2800867 - RNA, 20 nt, Human
guguacaauguacacacugg

SEQ ID NO: 2800868 - RNA, 22 nt, Human
guguaauguagcguguuuacau

SEQ ID NO: 2800869 - RNA, 18 nt, Human
guguacauaguguaaugu

SEQ ID NO: 2800870 - RNA, 17 nt, Human
guguaccauuugccucc

SEQ ID NO: 2800871 - RNA, 21 nt, Human
guguaccuccucucaguguuu

SEQ ID NO: 2800872 - RNA, 20 nt, Human
guguaccuguguacauaacu

SEQ ID NO: 2800873 - RNA, 15 nt, Human
guguacuuaacuauu

SEQ ID NO: 2800874 - RNA, 18 nt, Human
guguacucacugaagccu

SEQ ID NO: 2800875 - RNA, 12 nt, Human
guguacuguaua

SEQ ID NO: 2800876 - RNA, 19 nt, Human
guguacuguauagacaguu

SEQ ID NO: 2800877 - RNA, 11 nt, Human
guguacugugu

SEQ ID NO: 2800878 - RNA, 13 nt, Human
guguacuguguca

SEQ ID NO: 2800879 - RNA, 16 nt, Human
guguacuggcuccucu

SEQ ID NO: 2800880 - RNA, 15 nt, Human
guguagaguuaagaa

SEQ ID NO: 2800881 - RNA, 19 nt, Human
guguagaagcauuccuucu

SEQ ID NO: 2800882 - RNA, 23 nt, Human
guguagaagcauuccuucuuuga

SEQ ID NO: 2800883 - RNA, 13 nt, Human
guguagaagcauu

SEQ ID NO: 2800884 - RNA, 14 nt, Human
guguagaagcauuc

SEQ ID NO: 2800885 - RNA, 17 nt, Human
guguagaagcauuccuu

SEQ ID NO: 2800886 - RNA, 20 nt, Human
guguagaguuaagaagcugu

SEQ ID NO: 2800887 - RNA, 17 nt, Human
guguagaguuaagaagc

SEQ ID NO: 2800888 - RNA, 18 nt, Human
guguagaguuaagaagcu

SEQ ID NO: 2800889 - RNA, 14 nt, Human
guguagccaagguc

SEQ ID NO: 2800890 - RNA, 21 nt, Human
guguagccagguauggcucug

SEQ ID NO: 2800891 - RNA, 23 nt, Human
guguagccagguauggcucugca

SEQ ID NO: 2800892 - RNA, 22 nt, Human
guguagccaggucccccugcag

SEQ ID NO: 2800893 - RNA, 17 nt, Human
guguagccuugcccgga

SEQ ID NO: 2800894 - RNA, 16 nt, Human
guguagccuugcccgg

SEQ ID NO: 2800895 - RNA, 14 nt, Human
guguagccugugca

SEQ ID NO: 2800896 - RNA, 18 nt, Human
gugucccugcacuugcag

SEQ ID NO: 2800897 - RNA, 16 nt, Human
gugucccugcacuugc

SEQ ID NO: 2800898 - RNA, 13 nt, Human
gugucccugcacu

SEQ ID NO: 2800899 - RNA, 17 nt, Human
guguccccggggcccag

SEQ ID NO: 2800900 - RNA, 18 nt, Human
guguccccggggcccagg

SEQ ID NO: 2800901 - RNA, 19 nt, Human
guguccccggggcccaggg

SEQ ID NO: 2800902 - RNA, 13 nt, Human
guguccccuccac

SEQ ID NO: 2800903 - RNA, 21 nt, Human
guguauggaaaaaccauuuga

SEQ ID NO: 2800904 - RNA, 19 nt, Human
guguauggaaauaaaugua

SEQ ID NO: 2800905 - RNA, 19 nt, Human
gugucccauugguguuguc

SEQ ID NO: 2800906 - RNA, 14 nt, Human
guguauauuauuug

SEQ ID NO: 2800907 - RNA, 15 nt, Human
guguauauuauuugg

SEQ ID NO: 2800908 - RNA, 16 nt, Human
guguauauuauuuggc

SEQ ID NO: 2800909 - RNA, 17 nt, Human
guguauauuauuuggca

SEQ ID NO: 2800910 - RNA, 19 nt, Human
guguauauuauuuggcagu

SEQ ID NO: 2800911 - RNA, 13 nt, Human
guguauaucagaa

SEQ ID NO: 2800912 - RNA, 13 nt, Human
guguauauaugug

SEQ ID NO: 2800913 - RNA, 18 nt, Human
guguauauauguguauau

SEQ ID NO: 2800914 - RNA, 22 nt, Human
guguauauauguguauauauac

SEQ ID NO: 2800915 - RNA, 17 nt, Human
guguauaagugcacaca

SEQ ID NO: 2800916 - RNA, 18 nt, Human
guguaucguaaccagcca

SEQ ID NO: 2800917 - RNA, 21 nt, Human
guguauccccccccuguauag

SEQ ID NO: 2800918 - RNA, 22 nt, Human
guguauccccccccuguauagu

SEQ ID NO: 2800919 - RNA, 14 nt, Human
guguaguuaauuua

SEQ ID NO: 2800920 - RNA, 18 nt, Human
guguauagaaguagauua

SEQ ID NO: 2800921 - RNA, 13 nt, Human
guguauauauaca

SEQ ID NO: 2800922 - RNA, 14 nt, Human
guguauauauacau

SEQ ID NO: 2800923 - RNA, 15 nt, Human
guguauauauacaua

SEQ ID NO: 2800924 - RNA, 16 nt, Human
guguauauauacauac

SEQ ID NO: 2800925 - RNA, 14 nt, Human
guguagcuuugcuc

SEQ ID NO: 2800926 - RNA, 12 nt, Human
guggcugcugcc

SEQ ID NO: 2800927 - RNA, 19 nt, Human
guggcugcgugccccugcu

SEQ ID NO: 2800928 - RNA, 20 nt, Human
guggcugcgugccccugcug

SEQ ID NO: 2800929 - RNA, 16 nt, Human
guggcugcugcccagg

SEQ ID NO: 2800930 - RNA, 13 nt, Human
guggcugcugccc

SEQ ID NO: 2800931 - RNA, 15 nt, Human
guggcugcugcccag

SEQ ID NO: 2800932 - RNA, 13 nt, Human
guggcuccuuccc

SEQ ID NO: 2800933 - RNA, 13 nt, Human
guggcuccucccg

SEQ ID NO: 2800934 - RNA, 20 nt, Human
guggcuccucccggugccca

SEQ ID NO: 2800935 - RNA, 22 nt, Human
guggcuuaaaacaacacucaca

SEQ ID NO: 2800936 - RNA, 12 nt, Human
guggcugucugg

SEQ ID NO: 2800937 - RNA, 13 nt, Human
guggcugucugga

SEQ ID NO: 2800938 - RNA, 15 nt, Human
guggcugucuggaaa

SEQ ID NO: 2800939 - RNA, 23 nt, Human
guggcuguggagacaaugucugc

SEQ ID NO: 2800940 - RNA, 22 nt, Human
guggcugggggcaggagggccc

SEQ ID NO: 2800941 - RNA, 17 nt, Human
guggcugggggcaggag

SEQ ID NO: 2800942 - RNA, 21 nt, Human
guggcuucauuagagcaggcg

SEQ ID NO: 2800943 - RNA, 18 nt, Human
guggcuucccaugucuuu

SEQ ID NO: 2800944 - RNA, 16 nt, Human
gugggcacccacccug

SEQ ID NO: 2800945 - RNA, 20 nt, Human
gugggcacccacccugggac

SEQ ID NO: 2800946 - RNA, 16 nt, Human
gugggcacuggcccag

SEQ ID NO: 2800947 - RNA, 21 nt, Human
gugggcagagcccccaggaag

SEQ ID NO: 2800948 - RNA, 19 nt, Human
guggcuucauuagagcagg

SEQ ID NO: 2800949 - RNA, 20 nt, Human
guggcuucauuagagcaggc

SEQ ID NO: 2800950 - RNA, 15 nt, Human
guggcuucagcucca

SEQ ID NO: 2800951 - RNA, 19 nt, Human
guggcuucagcuccagccc

SEQ ID NO: 2800952 - RNA, 18 nt, Human
guggcuucccgcucagcc

SEQ ID NO: 2800953 - RNA, 19 nt, Human
guggcuucccgcucagccc

SEQ ID NO: 2800954 - RNA, 20 nt, Human
guggcuucccgcucagcccu

SEQ ID NO: 2800955 - RNA, 19 nt, Human
guggcuggguuggagggug

SEQ ID NO: 2800956 - RNA, 16 nt, Human
guggcugggggcagga

SEQ ID NO: 2800957 - RNA, 11 nt, Human
guggcuggggg

SEQ ID NO: 2800958 - RNA, 20 nt, Human
gugggcauuucuugcgagcc

SEQ ID NO: 2800959 - RNA, 13 nt, Human
gugggccagggcu

SEQ ID NO: 2800960 - RNA, 14 nt, Human
gugggccagggcug

SEQ ID NO: 2800961 - RNA, 19 nt, Human
gugggccagggcugcccug

SEQ ID NO: 2800962 - RNA, 21 nt, Human
gugggccagggcugcccugag

SEQ ID NO: 2800963 - RNA, 15 nt, Human
gugggcuaguugggc

SEQ ID NO: 2800964 - RNA, 14 nt, Human
gugggcuaauuaaa

SEQ ID NO: 2800965 - RNA, 13 nt, Human
gugggcuccuggc

SEQ ID NO: 2800966 - RNA, 16 nt, Human
gugggcugagcccugg

SEQ ID NO: 2800967 - RNA, 15 nt, Human
gugggcugagcccug

SEQ ID NO: 2800968 - RNA, 14 nt, Human
gugggcugagcccu

SEQ ID NO: 2800969 - RNA, 13 nt, Human
gugggcugagccc

SEQ ID NO: 2800970 - RNA, 18 nt, Human
gugggcgugagaccugcc

SEQ ID NO: 2800971 - RNA, 22 nt, Human
gugggcgugagaccugccccuc

SEQ ID NO: 2800972 - RNA, 21 nt, Human
gugggcgugagaccugccccu

SEQ ID NO: 2800973 - RNA, 19 nt, Human
gugggccuucagggaguga

SEQ ID NO: 2800974 - RNA, 17 nt, Human
guggggcagcuugaggg

SEQ ID NO: 2800975 - RNA, 13 nt, Human
guggggcagcuug

SEQ ID NO: 2800976 - RNA, 21 nt, Human
guggguuuucaucaagacugg

SEQ ID NO: 2800977 - RNA, 22 nt, Human
gugguaaaugccacacaccuuu

SEQ ID NO: 2800978 - RNA, 14 nt, Human
guggguguagccag

SEQ ID NO: 2800979 - RNA, 12 nt, Human
guggguguguga

SEQ ID NO: 2800980 - RNA, 15 nt, Human
gugggugugugacuc

SEQ ID NO: 2800981 - RNA, 16 nt, Human
guggguuauucuggag

SEQ ID NO: 2800982 - RNA, 13 nt, Human
guggguucuaugu

SEQ ID NO: 2800983 - RNA, 13 nt, Human
guggguugcuaac

SEQ ID NO: 2800984 - RNA, 18 nt, Human
gugggcugagcccuggca

SEQ ID NO: 2800985 - RNA, 16 nt, Human
gugggcuucccagugg

SEQ ID NO: 2800986 - RNA, 22 nt, Human
gugggcuucccaguggcugcug

SEQ ID NO: 2800987 - RNA, 23 nt, Human
gugggcuucccaguggcugcugc

SEQ ID NO: 2800988 - RNA, 15 nt, Human
gugggcuucagggca

SEQ ID NO: 2800989 - RNA, 16 nt, Human
gugggcuucagggcag

SEQ ID NO: 2800990 - RNA, 13 nt, Human
guggggagguguc

SEQ ID NO: 2800991 - RNA, 13 nt, Human
guggggaggggcu

SEQ ID NO: 2800992 - RNA, 15 nt, Human
guggggcagagccuc

SEQ ID NO: 2800993 - RNA, 14 nt, Human
gugggcuugauucu

SEQ ID NO: 2800994 - RNA, 13 nt, Human
guggggacccagg

SEQ ID NO: 2800995 - RNA, 16 nt, Human
guggggacccaggcuc

SEQ ID NO: 2800996 - RNA, 18 nt, Human
guggggacccaggcuccg

SEQ ID NO: 2800997 - RNA, 21 nt, Human
guggggacccaggcuccgccc

SEQ ID NO: 2800998 - RNA, 16 nt, Human
guuguggauuucaguu

SEQ ID NO: 2800999 - RNA, 12 nt, Human
guuuagaccaag

SEQ ID NO: 2801000 - RNA, 15 nt, Human
guuuagaccaaggaa

SEQ ID NO: 2801001 - RNA, 20 nt, Human
guuuagaccaaggaacaaaa

SEQ ID NO: 2801002 - RNA, 22 nt, Human
guuuagaccaaggaacaaaaaa

SEQ ID NO: 2801003 - RNA, 19 nt, Human
guuuauaaaauauaaacaa

SEQ ID NO: 2801004 - RNA, 20 nt, Human
guuuauagagggccaagacu

SEQ ID NO: 2801005 - RNA, 21 nt, Human
guuuauagagggccaagacuu

SEQ ID NO: 2801006 - RNA, 18 nt, Human
guuuauaaaauauaaaca

SEQ ID NO: 2801007 - RNA, 13 nt, Human
guuuauaaaauau

SEQ ID NO: 2801008 - RNA, 17 nt, Human
guuuauaauuuucugaa

SEQ ID NO: 2801009 - RNA, 17 nt, Human
guuuauaacuauucagu

SEQ ID NO: 2801010 - RNA, 19 nt, Human
guuuauaacuauucaguug

SEQ ID NO: 2801011 - RNA, 15 nt, Human
guuuauaccuuugcc

SEQ ID NO: 2801012 - RNA, 20 nt, Human
guuuauacuccaguguacau

SEQ ID NO: 2801013 - RNA, 23 nt, Human
guuuauagagaaugaugauaaca

SEQ ID NO: 2801014 - RNA, 18 nt, Human
guuucauguuuugugacu

SEQ ID NO: 2801015 - RNA, 16 nt, Human
guuucauucuccugcc

SEQ ID NO: 2801016 - RNA, 19 nt, Human
guuucauguuuugugacua

SEQ ID NO: 2801017 - RNA, 15 nt, Human
guuucauucuccugc

SEQ ID NO: 2801018 - RNA, 18 nt, Human
guuucauaauuguguacu

SEQ ID NO: 2801019 - RNA, 14 nt, Human
guuucaggugacau

SEQ ID NO: 2801020 - RNA, 15 nt, Human
guuucaggugacaug

SEQ ID NO: 2801021 - RNA, 16 nt, Human
guuucaggugacaugu

SEQ ID NO: 2801022 - RNA, 20 nt, Human
guuucaggugacaugugaaa

SEQ ID NO: 2801023 - RNA, 22 nt, Human
guuuagugcaucuuugccucuc

SEQ ID NO: 2801024 - RNA, 12 nt, Human
guuuaugaaaau

SEQ ID NO: 2801025 - RNA, 14 nt, Human
guuuaucaugaagc

SEQ ID NO: 2801026 - RNA, 15 nt, Human
guuuaucaugaagcc

SEQ ID NO: 2801027 - RNA, 16 nt, Human
guuuaucaugaagccu

SEQ ID NO: 2801028 - RNA, 17 nt, Human
guuuaucaugaagccug

SEQ ID NO: 2801029 - RNA, 21 nt, Human
guuuauauuuuuucaguuguu

SEQ ID NO: 2801030 - RNA, 18 nt, Human
guuuaucaacucaagaau

SEQ ID NO: 2801031 - RNA, 14 nt, Human
guuuauauguguug

SEQ ID NO: 2801032 - RNA, 18 nt, Human
guuuauauguguugaaaa

SEQ ID NO: 2801033 - RNA, 15 nt, Human
guuuaucagauacau

SEQ ID NO: 2801034 - RNA, 16 nt, Human
guuuaucagauacauc

SEQ ID NO: 2801035 - RNA, 18 nt, Human
guuuaucagauacaucac

SEQ ID NO: 2801036 - RNA, 19 nt, Human
guuuaucagauacaucacu

SEQ ID NO: 2801037 - RNA, 21 nt, Human
guuuaucagauacaucacugc

SEQ ID NO: 2801038 - RNA, 23 nt, Human
guuuaucagauacaucacugcuu

SEQ ID NO: 2801039 - RNA, 15 nt, Human
guuuaucagcaaaaa

SEQ ID NO: 2801040 - RNA, 14 nt, Human
guuuagaagcugag

SEQ ID NO: 2801041 - RNA, 15 nt, Human
guuuagaagcugaga

SEQ ID NO: 2801042 - RNA, 22 nt, Human
guuuagaagcugagacacaaag

SEQ ID NO: 2801043 - RNA, 11 nt, Human
guuuacauuuu

SEQ ID NO: 2801044 - RNA, 16 nt, Human
guuuaccauuuuucau

SEQ ID NO: 2801045 - RNA, 17 nt, Human
guuuaccauuuuucauu

SEQ ID NO: 2801046 - RNA, 16 nt, Human
guuuacccaugaagau

SEQ ID NO: 2801047 - RNA, 16 nt, Human
guuuacccgguuucuu

SEQ ID NO: 2801048 - RNA, 13 nt, Human
guuuaccuagaag

SEQ ID NO: 2801049 - RNA, 23 nt, Human
guuuaccuagaagaagcuauguc

SEQ ID NO: 2801050 - RNA, 12 nt, Human
guuuacauuuuu

SEQ ID NO: 2801051 - RNA, 20 nt, Human
guuuacauuuuuauuuauga

SEQ ID NO: 2801052 - RNA, 21 nt, Human
guuuacauuuuuauuuaugaa

SEQ ID NO: 2801053 - RNA, 22 nt, Human
guuuacauuuuuauuuaugaag

SEQ ID NO: 2801054 - RNA, 23 nt, Human
guuuacauuuuuauuuaugaagu

SEQ ID NO: 2801055 - RNA, 16 nt, Human
guuuaccugaauaaau

SEQ ID NO: 2801056 - RNA, 22 nt, Human
guuuaccugaauaaaugguagu

SEQ ID NO: 2801057 - RNA, 20 nt, Human
guuuacuaugccugugucuu

SEQ ID NO: 2801058 - RNA, 17 nt, Human
guuuacuaugccugugu

SEQ ID NO: 2801059 - RNA, 16 nt, Human
guuuacuaugccugug

SEQ ID NO: 2801060 - RNA, 13 nt, Human
guuguuaugcuau

SEQ ID NO: 2801061 - RNA, 13 nt, Human
guuguucaacuau

SEQ ID NO: 2801062 - RNA, 15 nt, Human
guuguucaacuauuu

SEQ ID NO: 2801063 - RNA, 16 nt, Human
guuguucaacuauuuu

SEQ ID NO: 2801064 - RNA, 11 nt, Human
guuguuagaga

SEQ ID NO: 2801065 - RNA, 14 nt, Human
guuguuagagaaaa

SEQ ID NO: 2801066 - RNA, 12 nt, Human
guuguuucagug

SEQ ID NO: 2801067 - RNA, 23 nt, Human
guuguuucagugaauaugccugu

SEQ ID NO: 2801068 - RNA, 20 nt, Human
guuguuuacuuaaagauuua

SEQ ID NO: 2801069 - RNA, 14 nt, Human
guuguugcauguuu

SEQ ID NO: 2801070 - RNA, 17 nt, Human
guuguugcauguuugaa

SEQ ID NO: 2801071 - RNA, 18 nt, Human
guuguugcuucuugugaa

SEQ ID NO: 2801072 - RNA, 20 nt, Human
guuguugcuucuugugaagg

SEQ ID NO: 2801073 - RNA, 11 nt, Human
guuguuucuuu

SEQ ID NO: 2801074 - RNA, 13 nt, Human
guuguuucuuucu

SEQ ID NO: 2801075 - RNA, 14 nt, Human
guuguuucuuucua

SEQ ID NO: 2801076 - RNA, 15 nt, Human
guuguuucuuucuag

SEQ ID NO: 2801077 - RNA, 12 nt, Human
guuuacauuuaa

SEQ ID NO: 2801078 - RNA, 14 nt, Human
guuuacauuuaaag

SEQ ID NO: 2801079 - RNA, 15 nt, Human
guuuacauuuaaagc

SEQ ID NO: 2801080 - RNA, 17 nt, Human
guuuacauuuaaagcau

SEQ ID NO: 2801081 - RNA, 18 nt, Human
guuuacauuuaaagcauu

SEQ ID NO: 2801082 - RNA, 21 nt, Human
guuuacauuuaaagcauugcu

SEQ ID NO: 2801083 - RNA, 23 nt, Human
guuuacauuuaaagcauugcugu

SEQ ID NO: 2801084 - RNA, 12 nt, Human
guuggcuggggg

SEQ ID NO: 2801085 - RNA, 17 nt, Human
guuggcugggaacucac

SEQ ID NO: 2801086 - RNA, 14 nt, Human
guuggcuggaugaa

SEQ ID NO: 2801087 - RNA, 12 nt, Human
guuggcuggccu

SEQ ID NO: 2801088 - RNA, 13 nt, Human
guuggcuggccuu

SEQ ID NO: 2801089 - RNA, 20 nt, Human
guuggcugacuuccacaccu

SEQ ID NO: 2801090 - RNA, 14 nt, Human
guuggccccugccc

SEQ ID NO: 2801091 - RNA, 13 nt, Human
guuggccccugcc

SEQ ID NO: 2801092 - RNA, 20 nt, Human
guuggccccugcccggcugc

SEQ ID NO: 2801093 - RNA, 13 nt, Human
guuggccugcacu

SEQ ID NO: 2801094 - RNA, 18 nt, Human
guuggccaggcuggucua

SEQ ID NO: 2801095 - RNA, 19 nt, Human
guuggcugggggccucagu

SEQ ID NO: 2801096 - RNA, 16 nt, Human
guugucacugcuuuug

SEQ ID NO: 2801097 - RNA, 21 nt, Human
guugucacugcuuuuggccug

SEQ ID NO: 2801098 - RNA, 22 nt, Human
guugucacugcuuuuggccugg

SEQ ID NO: 2801099 - RNA, 22 nt, Human
guugucaagucucugcuggccc

SEQ ID NO: 2801100 - RNA, 17 nt, Human
guugucaagucucugcu

SEQ ID NO: 2801101 - RNA, 20 nt, Human
guugucauuguaaacaaacu

SEQ ID NO: 2801102 - RNA, 22 nt, Human
guugucaguauuauucuacuau

SEQ ID NO: 2801103 - RNA, 22 nt, Human
guuguccaauuguugacaguuc

SEQ ID NO: 2801104 - RNA, 18 nt, Human
guuguccauauuuucaca

SEQ ID NO: 2801105 - RNA, 22 nt, Human
guugucugaagucacugcacag

SEQ ID NO: 2801106 - RNA, 19 nt, Human
guugucugaagucacugca

SEQ ID NO: 2801107 - RNA, 14 nt, Human
guugugaauguugu

SEQ ID NO: 2801108 - RNA, 19 nt, Human
guugugaaaguuuugagua

SEQ ID NO: 2801109 - RNA, 17 nt, Human
guugugcaaauuaacag

SEQ ID NO: 2801110 - RNA, 10 nt, Human
guugugcagc

SEQ ID NO: 2801111 - RNA, 18 nt, Human
guugugcagcuuuugguc

SEQ ID NO: 2801112 - RNA, 21 nt, Human
guugugccacagaguguagcc

SEQ ID NO: 2801113 - RNA, 22 nt, Human
guugugccacagaguguagcca

SEQ ID NO: 2801114 - RNA, 21 nt, Human
guugugauagcuaacauuuua

SEQ ID NO: 2801115 - RNA, 21 nt, Human
guugugaucaucccaucuaag

SEQ ID NO: 2801116 - RNA, 21 nt, Human
guugugaugucuuuucuuggc

SEQ ID NO: 2801117 - RNA, 19 nt, Human
guuguggaaagccucugcu

SEQ ID NO: 2801118 - RNA, 18 nt, Human
guuguggguucuauguuu

SEQ ID NO: 2801119 - RNA, 12 nt, Human
guugugucuuuu

SEQ ID NO: 2801120 - RNA, 23 nt, Human
guuguuaaaauuaugaaucugau

SEQ ID NO: 2801121 - RNA, 12 nt, Human
guuguguuguca

SEQ ID NO: 2801122 - RNA, 14 nt, Human
guuguguugucacc

SEQ ID NO: 2801123 - RNA, 20 nt, Human
guuguguuuguugcuggcuu

SEQ ID NO: 2801124 - RNA, 20 nt, Human
guuuuccucuauacaucucu

SEQ ID NO: 2801125 - RNA, 22 nt, Human
guuuuccucuauacaucucucc

SEQ ID NO: 2801126 - RNA, 24 nt, Human
guuuuccucuauacaucucucccc

SEQ ID NO: 2801127 - RNA, 20 nt, Human
guuuucccuugaggaaacaa

SEQ ID NO: 2801128 - RNA, 19 nt, Human
guuuuguacauguaacauu

SEQ ID NO: 2801129 - RNA, 14 nt, Human
guuuugguuuuuuu

SEQ ID NO: 2801130 - RNA, 16 nt, Human
guuuugguguaacauc

SEQ ID NO: 2801131 - RNA, 15 nt, Human
guuuugggggucagg

SEQ ID NO: 2801132 - RNA, 22 nt, Human
guuuugggggucaggcagccag

SEQ ID NO: 2801133 - RNA, 21 nt, Human
guuuugggggugugaguguuu

SEQ ID NO: 2801134 - RNA, 18 nt, Human
guuuuggguagcugccac

SEQ ID NO: 2801135 - RNA, 15 nt, Human
guuuuggguauguuu

SEQ ID NO: 2801136 - RNA, 17 nt, Human
guuuugguagauuaaau

SEQ ID NO: 2801137 - RNA, 14 nt, Human
guuuuguacauaga

SEQ ID NO: 2801138 - RNA, 17 nt, Human
guuuuguacauagauuu

SEQ ID NO: 2801139 - RNA, 18 nt, Human
guuuuguacauagauuua

SEQ ID NO: 2801140 - RNA, 12 nt, Human
guuuuguacaug

SEQ ID NO: 2801141 - RNA, 14 nt, Human
guuuguuauauccu

SEQ ID NO: 2801142 - RNA, 21 nt, Human
guuuguguguugucuugaaag

SEQ ID NO: 2801143 - RNA, 11 nt, Human
guuuguuuguc

SEQ ID NO: 2801144 - RNA, 14 nt, Human
guuuguuugucugu

SEQ ID NO: 2801145 - RNA, 15 nt, Human
guuuguuugucuguu

SEQ ID NO: 2801146 - RNA, 17 nt, Human
guuuguuuguuugucug

SEQ ID NO: 2801147 - RNA, 13 nt, Human
guuuguuuuugcu

SEQ ID NO: 2801148 - RNA, 16 nt, Human
guuuguuuuugcuugu

SEQ ID NO: 2801149 - RNA, 12 nt, Human
guuuguuuuuuu

SEQ ID NO: 2801150 - RNA, 15 nt, Human
guuuguuuuuuugcc

SEQ ID NO: 2801151 - RNA, 17 nt, Human
guuuguuuuuuugccac

SEQ ID NO: 2801152 - RNA, 12 nt, Human
guuuguuucuuu

SEQ ID NO: 2801153 - RNA, 14 nt, Human
guuuguuucuuugu

SEQ ID NO: 2801154 - RNA, 15 nt, Human
guuuguuucuuugug

SEQ ID NO: 2801155 - RNA, 20 nt, Human
guuuuaaaaaggaacugcag

SEQ ID NO: 2801156 - RNA, 21 nt, Human
guuuuaaaaaggaacugcagc

SEQ ID NO: 2801157 - RNA, 22 nt, Human
guuuuaaaaaggaacugcagca

SEQ ID NO: 2801158 - RNA, 21 nt, Human
guuuuauuuuuuauuguuuuc

SEQ ID NO: 2801159 - RNA, 17 nt, Human
guuuucaaauuggacuu

SEQ ID NO: 2801160 - RNA, 23 nt, Human
guuuucaaauuggacuuucaaaa

SEQ ID NO: 2801161 - RNA, 12 nt, Human
guuuucacucuu

SEQ ID NO: 2801162 - RNA, 11 nt, Human
guuuucacucu

SEQ ID NO: 2801163 - RNA, 21 nt, Human
guuuucagaaccucuucccca

SEQ ID NO: 2801164 - RNA, 20 nt, Human
guuuucagaaccucuucccc

SEQ ID NO: 2801165 - RNA, 19 nt, Human
guuuucagaaccucuuccc

SEQ ID NO: 2801166 - RNA, 20 nt, Human
guuuucacauaaaugcagcc

SEQ ID NO: 2801167 - RNA, 22 nt, Human
guuuucacauaaaugcagccca

SEQ ID NO: 2801168 - RNA, 23 nt, Human
guuuucacauaaaugcagcccau

SEQ ID NO: 2801169 - RNA, 15 nt, Human
guuuguguguugucu

SEQ ID NO: 2801170 - RNA, 16 nt, Human
guuuguuaaaaauaaa

SEQ ID NO: 2801171 - RNA, 19 nt, Human
guuuguuaaaaauaaaucc

SEQ ID NO: 2801172 - RNA, 13 nt, Human
guuuguggcuggg

SEQ ID NO: 2801173 - RNA, 22 nt, Human
guuuguggcugggggcaggagg

SEQ ID NO: 2801174 - RNA, 20 nt, Human
guuuguggcugggggcagga

SEQ ID NO: 2801175 - RNA, 22 nt, Human
guuuguguauuuacgcuuugau

SEQ ID NO: 2801176 - RNA, 13 nt, Human
guuugugugucuu

SEQ ID NO: 2801177 - RNA, 14 nt, Human
guuugugugucuua

SEQ ID NO: 2801178 - RNA, 15 nt, Human
guuugugugucuuaa

SEQ ID NO: 2801179 - RNA, 13 nt, Human
guuugucuauuuu

SEQ ID NO: 2801180 - RNA, 14 nt, Human
guuugucuauuuua

SEQ ID NO: 2801181 - RNA, 15 nt, Human
guuugucuauuuuaa

SEQ ID NO: 2801182 - RNA, 16 nt, Human
guuugucuauuuuaaa

SEQ ID NO: 2801183 - RNA, 19 nt, Human
guuugucuauuuuaaaaua

SEQ ID NO: 2801184 - RNA, 18 nt, Human
guuugucucaguuggaaa

SEQ ID NO: 2801185 - RNA, 19 nt, Human
guuugucucaguuggaaau

SEQ ID NO: 2801186 - RNA, 15 nt, Human
guuugucucuccuuu

SEQ ID NO: 2801187 - RNA, 16 nt, Human
guuugucucuccuuuu

SEQ ID NO: 2801188 - RNA, 16 nt, Human
guuuguggccucagaa

SEQ ID NO: 2801189 - RNA, 13 nt, Human
guuuguaugugug

SEQ ID NO: 2801190 - RNA, 15 nt, Human
guuuguggccucaga

SEQ ID NO: 2801191 - RNA, 17 nt, Human
guuugucacaugaaaca

SEQ ID NO: 2801192 - RNA, 20 nt, Human
guuugucaucagauggaaau

SEQ ID NO: 2801193 - RNA, 22 nt, Human
guuuguccugaugcuuuugucu

SEQ ID NO: 2801194 - RNA, 17 nt, Human
guuuguaguuguuuuaa

SEQ ID NO: 2801195 - RNA, 15 nt, Human
guuuguauaacuucu

SEQ ID NO: 2801196 - RNA, 13 nt, Human
guuuguaagaaaa

SEQ ID NO: 2801197 - RNA, 14 nt, Human
guuuguagguaaaa

SEQ ID NO: 2801198 - RNA, 16 nt, Human
guuuguauaacuucuu

SEQ ID NO: 2801199 - RNA, 20 nt, Human
guuuguauguguguagacaa

SEQ ID NO: 2801200 - RNA, 12 nt, Human
guuuguauuugg

SEQ ID NO: 2801201 - RNA, 18 nt, Human
guuuggggcaagucaugu

SEQ ID NO: 2801202 - RNA, 21 nt, Human
guuuggggcaagucauguaaa

SEQ ID NO: 2801203 - RNA, 15 nt, Human
guuugguguguccca

SEQ ID NO: 2801204 - RNA, 17 nt, Human
guuugggugauuccuaa

SEQ ID NO: 2801205 - RNA, 15 nt, Human
guuuggucuggacug

SEQ ID NO: 2801206 - RNA, 17 nt, Human
guuuggucuggacugac

SEQ ID NO: 2801207 - RNA, 20 nt, Human
guuugggggacguuucucau

SEQ ID NO: 2801208 - RNA, 19 nt, Human
guuugacuagaugauggau

SEQ ID NO: 2801209 - RNA, 18 nt, Human
guuugacuagaugaugga

SEQ ID NO: 2801210 - RNA, 16 nt, Human
guuugacuagaugaug

SEQ ID NO: 2801211 - RNA, 15 nt, Human
guuugacauuguaug

SEQ ID NO: 2801212 - RNA, 13 nt, Human
guuugaccucaca

SEQ ID NO: 2801213 - RNA, 21 nt, Human
guuugaccucacagugacccu

SEQ ID NO: 2801214 - RNA, 18 nt, Human
guuugaaagugaauaaac

SEQ ID NO: 2801215 - RNA, 19 nt, Human
guuugaaagugaauaaacu

SEQ ID NO: 2801216 - RNA, 14 nt, Human
guuugaaaucuuuu

SEQ ID NO: 2801217 - RNA, 20 nt, Human
guuugaaaugaggucuguuu

SEQ ID NO: 2801218 - RNA, 22 nt, Human
guuugaaaugaggucuguuuaa

SEQ ID NO: 2801219 - RNA, 19 nt, Human
guuucuuuuuaaguaaugu

SEQ ID NO: 2801220 - RNA, 14 nt, Human
guuucuuuguguug

SEQ ID NO: 2801221 - RNA, 22 nt, Human
guuucuuaacccuuuccagagu

SEQ ID NO: 2801222 - RNA, 13 nt, Human
guuucuuagcuuu

SEQ ID NO: 2801223 - RNA, 16 nt, Human
guuucuuagcuuuuua

SEQ ID NO: 2801224 - RNA, 17 nt, Human
guuucuugcaagcaugc

SEQ ID NO: 2801225 - RNA, 14 nt, Human
guuucuucacuuuu

SEQ ID NO: 2801226 - RNA, 11 nt, Human
guuucuuccug

SEQ ID NO: 2801227 - RNA, 14 nt, Human
guuucuuccuguua

SEQ ID NO: 2801228 - RNA, 20 nt, Human
guuucuuccuguuaauguau

SEQ ID NO: 2801229 - RNA, 20 nt, Human
guuucuucuaacugccccuc

SEQ ID NO: 2801230 - RNA, 20 nt, Human
guuucuucugcgccucaggc

SEQ ID NO: 2801231 - RNA, 13 nt, Human
guuucuugcuugu

SEQ ID NO: 2801232 - RNA, 14 nt, Human
guuucuugcuugua

SEQ ID NO: 2801233 - RNA, 17 nt, Human
guuucuugcuuguaccu

SEQ ID NO: 2801234 - RNA, 18 nt, Human
guuucuugcuuguaccuc

SEQ ID NO: 2801235 - RNA, 19 nt, Human
guuucuugcuuguaccucu

SEQ ID NO: 2801236 - RNA, 13 nt, Human
guuucuugguaaa

SEQ ID NO: 2801237 - RNA, 13 nt, Human
guuucuuguuuau

SEQ ID NO: 2801238 - RNA, 21 nt, Human
guuucccccaacauauaaaau

SEQ ID NO: 2801239 - RNA, 17 nt, Human
guuucuguuugauucuu

SEQ ID NO: 2801240 - RNA, 18 nt, Human
guuucuguuugauucuuu

SEQ ID NO: 2801241 - RNA, 22 nt, Human
uaaaagguauuaaauugauguu

SEQ ID NO: 2801242 - RNA, 12 nt, Human
uaaaaggagcca

SEQ ID NO: 2801243 - RNA, 19 nt, Human
uaaaaggcaaauguguaca

SEQ ID NO: 2801244 - RNA, 18 nt, Human
uaaaaggcaaauguguac

SEQ ID NO: 2801245 - RNA, 15 nt, Human
uaaaaggauaguauu

SEQ ID NO: 2801246 - RNA, 18 nt, Human
uaaaaggauaguauuuuu

SEQ ID NO: 2801247 - RNA, 23 nt, Human
uaaaaggauaguauuuuuaucca

SEQ ID NO: 2801248 - RNA, 17 nt, Human
uaaaagggcaaaucugc

SEQ ID NO: 2801249 - RNA, 19 nt, Human
uaaaaggggguccguggaa

SEQ ID NO: 2801250 - RNA, 21 nt, Human
uaaaaggggguccguggaaga

SEQ ID NO: 2801251 - RNA, 22 nt, Human
uaaaagcagaaaauaaaggaag

SEQ ID NO: 2801252 - RNA, 21 nt, Human
uaaaaggaaaucucaccccau

SEQ ID NO: 2801253 - RNA, 11 nt, Human
uaaaagcacac

SEQ ID NO: 2801254 - RNA, 13 nt, Human
uaaaagcaaaaua

SEQ ID NO: 2801255 - RNA, 15 nt, Human
uaaaagcaaaauaaa

SEQ ID NO: 2801256 - RNA, 21 nt, Human
uaaaagcaaaauaaaaacuau

SEQ ID NO: 2801257 - RNA, 12 nt, Human
uaaaagauucau

SEQ ID NO: 2801258 - RNA, 14 nt, Human
uaaaagauucauuu

SEQ ID NO: 2801259 - RNA, 19 nt, Human
uaaaagauucauuuuuaau

SEQ ID NO: 2801260 - RNA, 20 nt, Human
uaaaagauucauuuuuaauc

SEQ ID NO: 2801261 - RNA, 13 nt, Human
uaaaagauucacc

SEQ ID NO: 2801262 - RNA, 16 nt, Human
uaaaagagagagagag

SEQ ID NO: 2801263 - RNA, 19 nt, Human
uaaaagagagagagagaaa

SEQ ID NO: 2801264 - RNA, 22 nt, Human
uaaaacauuggauuauccugag

SEQ ID NO: 2801265 - RNA, 17 nt, Human
uaaaacauuggauuauc

SEQ ID NO: 2801266 - RNA, 19 nt, Human
uaaaacauuggauuauccu

SEQ ID NO: 2801267 - RNA, 20 nt, Human
uaaaacauuggauuauccug

SEQ ID NO: 2801268 - RNA, 21 nt, Human
uaaaacauuggauuauccuga

SEQ ID NO: 2801269 - RNA, 12 nt, Human
uaaaacauguaa

SEQ ID NO: 2801270 - RNA, 13 nt, Human
uaaaacaguauuu

SEQ ID NO: 2801271 - RNA, 14 nt, Human
uaaaacaguauuua

SEQ ID NO: 2801272 - RNA, 17 nt, Human
uaaaacaguauuuauuu

SEQ ID NO: 2801273 - RNA, 20 nt, Human
uaaaacaguauuuauuuugu

SEQ ID NO: 2801274 - RNA, 21 nt, Human
uaaaacaguauuuauuuugua

SEQ ID NO: 2801275 - RNA, 22 nt, Human
uaaaacaguauuuauuuuguaa

SEQ ID NO: 2801276 - RNA, 14 nt, Human
uaaaacauguaaua

SEQ ID NO: 2801277 - RNA, 20 nt, Human
uaaaacauuauagauuuuca

SEQ ID NO: 2801278 - RNA, 12 nt, Human
uaaaacauuaug

SEQ ID NO: 2801279 - RNA, 15 nt, Human
uaaaacauuggauua

SEQ ID NO: 2801280 - RNA, 16 nt, Human
uaaaacauuggauuau

SEQ ID NO: 2801281 - RNA, 15 nt, Human
uaaaacaacacucac

SEQ ID NO: 2801282 - RNA, 16 nt, Human
uaaaacaacagcucga

SEQ ID NO: 2801283 - RNA, 17 nt, Human
uaaaacaacagcucgau

SEQ ID NO: 2801284 - RNA, 22 nt, Human
uaaaacaacagcucgauccaaa

SEQ ID NO: 2801285 - RNA, 14 nt, Human
uaaaacaaagggca

SEQ ID NO: 2801286 - RNA, 16 nt, Human
uaaaacaaaagcucau

SEQ ID NO: 2801287 - RNA, 17 nt, Human
uaaaacaaaauuuguuu

SEQ ID NO: 2801288 - RNA, 11 nt, Human
uaaaacaaaac

SEQ ID NO: 2801289 - RNA, 12 nt, Human
uaaaacaaaaca

SEQ ID NO: 2801290 - RNA, 17 nt, Human
uaaaacaaaacaaaaca

SEQ ID NO: 2801291 - RNA, 20 nt, Human
uaaaacaaaacaaaacaaca

SEQ ID NO: 2801292 - RNA, 21 nt, Human
uaaaacaaaacaaaacaacau

SEQ ID NO: 2801293 - RNA, 21 nt, Human
uaaaaauguaaauauucuaua

SEQ ID NO: 2801294 - RNA, 22 nt, Human
uaaaaaugucuugcuguugaca

SEQ ID NO: 2801295 - RNA, 23 nt, Human
uaaaaaugucuugcuguugacau

SEQ ID NO: 2801296 - RNA, 19 nt, Human
uaaaaauguaaauauucua

SEQ ID NO: 2801297 - RNA, 20 nt, Human
uaaaaauguaaauauucuau

SEQ ID NO: 2801298 - RNA, 23 nt, Human
uaaaaauguuuuuucauguguuu

SEQ ID NO: 2801299 - RNA, 22 nt, Human
uaaaaauugccauuggacaguu

SEQ ID NO: 2801300 - RNA, 18 nt, Human
uaaaaauugucuucaugu

SEQ ID NO: 2801301 - RNA, 19 nt, Human
uaaaaauugucuucaugua

SEQ ID NO: 2801302 - RNA, 23 nt, Human
uaaaaauugucuucauguacauu

SEQ ID NO: 2801303 - RNA, 18 nt, Human
uaaaacagcugucucuaa

SEQ ID NO: 2801304 - RNA, 23 nt, Human
uaaaacagcugucucuaacuuau

SEQ ID NO: 2801305 - RNA, 12 nt, Human
uaaaacacagag

SEQ ID NO: 2801306 - RNA, 13 nt, Human
uaaaacacagagg

SEQ ID NO: 2801307 - RNA, 19 nt, Human
uaaaacacuuccauaaucu

SEQ ID NO: 2801308 - RNA, 17 nt, Human
uaaaacacuuucaaaac

SEQ ID NO: 2801309 - RNA, 16 nt, Human
uaaaacaccucugcuu

SEQ ID NO: 2801310 - RNA, 19 nt, Human
uaaaacaccucugcuuucu

SEQ ID NO: 2801311 - RNA, 22 nt, Human
uaaaacaccucugcuuucugau

SEQ ID NO: 2801312 - RNA, 13 nt, Human
uaaaacacuucug

SEQ ID NO: 2801313 - RNA, 14 nt, Human
uaaaacacuucugu

SEQ ID NO: 2801314 - RNA, 18 nt, Human
uaaaacacuucuguccug

SEQ ID NO: 2801315 - RNA, 20 nt, Human
uaaaaagccacuagacucuu

SEQ ID NO: 2801316 - RNA, 23 nt, Human
uaaaaagccacuagacucuucac

SEQ ID NO: 2801317 - RNA, 13 nt, Human
uaaaaauguaaau

SEQ ID NO: 2801318 - RNA, 18 nt, Human
uaaaaauguaaauauucu

SEQ ID NO: 2801319 - RNA, 21 nt, Human
uaaaaagacauucuuccaaaa

SEQ ID NO: 2801320 - RNA, 16 nt, Human
uaaaaagaaacaagau

SEQ ID NO: 2801321 - RNA, 18 nt, Human
uaaaaagaaacaagaugc

SEQ ID NO: 2801322 - RNA, 19 nt, Human
uaaaaagaaacaagaugcu

SEQ ID NO: 2801323 - RNA, 16 nt, Human
uaaaaagaaaucuggu

SEQ ID NO: 2801324 - RNA, 15 nt, Human
uaaaaagauuagcaa

SEQ ID NO: 2801325 - RNA, 16 nt, Human
uaaaaagauuagcaag

SEQ ID NO: 2801326 - RNA, 13 nt, Human
uaaaaagauucuu

SEQ ID NO: 2801327 - RNA, 19 nt, Human
uaaaaagauucuuuuucug

SEQ ID NO: 2801328 - RNA, 11 nt, Human
guuuuuacagc

SEQ ID NO: 2801329 - RNA, 17 nt, Human
guuuuuacagcuguguu

SEQ ID NO: 2801330 - RNA, 18 nt, Human
guuuuuaauauaaagccu

SEQ ID NO: 2801331 - RNA, 17 nt, Human
guuuuuaauaaagacag

SEQ ID NO: 2801332 - RNA, 13 nt, Human
guuuuuaauagaa

SEQ ID NO: 2801333 - RNA, 20 nt, Human
guuuuuaauagcuauggaau

SEQ ID NO: 2801334 - RNA, 21 nt, Human
guuuuuaaggguuuguggaaa

SEQ ID NO: 2801335 - RNA, 20 nt, Human
guuuuguuuggcaaggaaag

SEQ ID NO: 2801336 - RNA, 14 nt, Human
guuuuuaacucuac

SEQ ID NO: 2801337 - RNA, 21 nt, Human
guuuuuaacucuacuguguaa

SEQ ID NO: 2801338 - RNA, 16 nt, Human
uaaaggcuaacuauga

SEQ ID NO: 2801339 - RNA, 13 nt, Human
uaaaguguuacuu

SEQ ID NO: 2801340 - RNA, 17 nt, Human
uaaaguguuacuuuuug

SEQ ID NO: 2801341 - RNA, 20 nt, Human
uaaaguguucugccagaucu

SEQ ID NO: 2801342 - RNA, 11 nt, Human
uaaaguguuuc

SEQ ID NO: 2801343 - RNA, 12 nt, Human
uaaaguguuuca

SEQ ID NO: 2801344 - RNA, 15 nt, Human
uaaaguguuucagcu

SEQ ID NO: 2801345 - RNA, 18 nt, Human
uaaaguguuucagcuaag

SEQ ID NO: 2801346 - RNA, 21 nt, Human
uaaaguguuucagcuaaggga

SEQ ID NO: 2801347 - RNA, 17 nt, Human
uaaaguguuucuguuau

SEQ ID NO: 2801348 - RNA, 14 nt, Human
uaaaguuagaaucu

SEQ ID NO: 2801349 - RNA, 16 nt, Human
uaaaguuagaaucuau

SEQ ID NO: 2801350 - RNA, 19 nt, Human
uaaaguuagaaucuauuuu

SEQ ID NO: 2801351 - RNA, 20 nt, Human
uaaaguuagaaucuauuuuc

SEQ ID NO: 2801352 - RNA, 22 nt, Human
uaaaguuagaaucuauuuucua

SEQ ID NO: 2801353 - RNA, 18 nt, Human
uaaaguguuucuguuauu

SEQ ID NO: 2801354 - RNA, 13 nt, Human
uaaaguuauauuu

SEQ ID NO: 2801355 - RNA, 16 nt, Human
uaaaguuauauuucag

SEQ ID NO: 2801356 - RNA, 12 nt, Human
uaaaguucuaag

SEQ ID NO: 2801357 - RNA, 19 nt, Human
uaaaggcaccaucuaauag

SEQ ID NO: 2801358 - RNA, 15 nt, Human
uaaaggcccagcccc

SEQ ID NO: 2801359 - RNA, 16 nt, Human
uaaaggcccagccccu

SEQ ID NO: 2801360 - RNA, 17 nt, Human
uaaaggcccagccccua

SEQ ID NO: 2801361 - RNA, 22 nt, Human
uaaagcuuacucuguccauuua

SEQ ID NO: 2801362 - RNA, 16 nt, Human
uaaagcuuauccauaa

SEQ ID NO: 2801363 - RNA, 21 nt, Human
uaaagcugccuguaguuagga

SEQ ID NO: 2801364 - RNA, 18 nt, Human
uaaagcugccuguaguua

SEQ ID NO: 2801365 - RNA, 23 nt, Human
uaaagcugccuguaguuaggaaa

SEQ ID NO: 2801366 - RNA, 21 nt, Human
uaaagccucaagguuuuaggu

SEQ ID NO: 2801367 - RNA, 17 nt, Human
uaaagcugccuguaguu

SEQ ID NO: 2801368 - RNA, 16 nt, Human
uaaagcugccuguagu

SEQ ID NO: 2801369 - RNA, 14 nt, Human
uaaagcugaaaacu

SEQ ID NO: 2801370 - RNA, 14 nt, Human
uaaagccagccuga

SEQ ID NO: 2801371 - RNA, 17 nt, Human
uaaagccagccugaccu

SEQ ID NO: 2801372 - RNA, 16 nt, Human
uaaagcaauaaaauuu

SEQ ID NO: 2801373 - RNA, 23 nt, Human
uaaagcccgccugacagaaacca

SEQ ID NO: 2801374 - RNA, 12 nt, Human
uaaagccuccuc

SEQ ID NO: 2801375 - RNA, 12 nt, Human
uaaagaaaacug

SEQ ID NO: 2801376 - RNA, 13 nt, Human
uaaagaaaacuuc

SEQ ID NO: 2801377 - RNA, 13 nt, Human
uaaagaaacagcu

SEQ ID NO: 2801378 - RNA, 14 nt, Human
uaaagaaacagcuu

SEQ ID NO: 2801379 - RNA, 15 nt, Human
uaaagaaacagcuuu

SEQ ID NO: 2801380 - RNA, 19 nt, Human
uaaagaaacagcuuucaag

SEQ ID NO: 2801381 - RNA, 20 nt, Human
uaaagaaacagcuuucaagu

SEQ ID NO: 2801382 - RNA, 23 nt, Human
uaaagaaacagcuuucaagugcc

SEQ ID NO: 2801383 - RNA, 20 nt, Human
uaaagcaacuguuaugaaau

SEQ ID NO: 2801384 - RNA, 22 nt, Human
uaaagcaacuguuaugaaauaa

SEQ ID NO: 2801385 - RNA, 19 nt, Human
uaaagaaaauaucugaaau

SEQ ID NO: 2801386 - RNA, 15 nt, Human
uaaacuugucuuuuc

SEQ ID NO: 2801387 - RNA, 13 nt, Human
uaaacuugugaau

SEQ ID NO: 2801388 - RNA, 17 nt, Human
uaaacuuguuugcugug

SEQ ID NO: 2801389 - RNA, 20 nt, Human
uaaacuuguuugcugugaac

SEQ ID NO: 2801390 - RNA, 22 nt, Human
uaaacuuguuugcugugaacaa

SEQ ID NO: 2801391 - RNA, 18 nt, Human
uaaacuuccccaucuucu

SEQ ID NO: 2801392 - RNA, 15 nt, Human
uaaacuuauaaauca

SEQ ID NO: 2801393 - RNA, 16 nt, Human
uaaacuuauaaaucau

SEQ ID NO: 2801394 - RNA, 18 nt, Human
uaaacuuauaaaucauau

SEQ ID NO: 2801395 - RNA, 12 nt, Human
uaaacuuaugaa

SEQ ID NO: 2801396 - RNA, 13 nt, Human
uaaacuuaugaau

SEQ ID NO: 2801397 - RNA, 14 nt, Human
uaaacuuaugaaug

SEQ ID NO: 2801398 - RNA, 15 nt, Human
uaaacuuaugaaugu

SEQ ID NO: 2801399 - RNA, 16 nt, Human
uaaacuuaugaauguu

SEQ ID NO: 2801400 - RNA, 17 nt, Human
uaaacuuaugaauguuu

SEQ ID NO: 2801401 - RNA, 18 nt, Human
uaaacuuaugaauguuuc

SEQ ID NO: 2801402 - RNA, 19 nt, Human
uaaacuuaugaauguuucc

SEQ ID NO: 2801403 - RNA, 12 nt, Human
uaaacuucagca

SEQ ID NO: 2801404 - RNA, 13 nt, Human
uaaacuucagcac

SEQ ID NO: 2801405 - RNA, 14 nt, Human
uaaacuucagcacc

SEQ ID NO: 2801406 - RNA, 16 nt, Human
uaaacuucagcaccau

SEQ ID NO: 2801407 - RNA, 13 nt, Human
uaaacuguguuua

SEQ ID NO: 2801408 - RNA, 14 nt, Human
uaaacuuaacuuua

SEQ ID NO: 2801409 - RNA, 20 nt, Human
uaaacuuaacuuuaacugaa

SEQ ID NO: 2801410 - RNA, 12 nt, Human
uaaacuguguuu

SEQ ID NO: 2801411 - RNA, 16 nt, Human
uaaacuguuagcacug

SEQ ID NO: 2801412 - RNA, 17 nt, Human
uaaacuguuagcacugu

SEQ ID NO: 2801413 - RNA, 18 nt, Human
uaaacuguuagcacuguu

SEQ ID NO: 2801414 - RNA, 19 nt, Human
uaaacuguuagcacuguug

SEQ ID NO: 2801415 - RNA, 20 nt, Human
uaaacuguuagcacuguuga

SEQ ID NO: 2801416 - RNA, 22 nt, Human
uaaacuguuagcacuguugaug

SEQ ID NO: 2801417 - RNA, 23 nt, Human
uaaacuguuagcacuguugaugu

SEQ ID NO: 2801418 - RNA, 13 nt, Human
uaaacuguugcuc

SEQ ID NO: 2801419 - RNA, 18 nt, Human
uaaacuguuucagauuuu

SEQ ID NO: 2801420 - RNA, 20 nt, Human
uaaacauugacgauuccuuc

SEQ ID NO: 2801421 - RNA, 14 nt, Human
uaaacauucuuuua

SEQ ID NO: 2801422 - RNA, 18 nt, Human
uaaacauucuuuuaacuu

SEQ ID NO: 2801423 - RNA, 22 nt, Human
uaaacauuaaucaaucaucugu

SEQ ID NO: 2801424 - RNA, 16 nt, Human
uaaaccaaaaacugaa

SEQ ID NO: 2801425 - RNA, 14 nt, Human
uaaaccaaaggaca

SEQ ID NO: 2801426 - RNA, 15 nt, Human
uaaaccaaaggacau

SEQ ID NO: 2801427 - RNA, 19 nt, Human
uaaaccaaaggacauuaug

SEQ ID NO: 2801428 - RNA, 20 nt, Human
uaaaccaaaggacauuaugu

SEQ ID NO: 2801429 - RNA, 21 nt, Human
uaaaccaaaggacauuaugug

SEQ ID NO: 2801430 - RNA, 23 nt, Human
uaaaccaaaggacauuaugugug

SEQ ID NO: 2801431 - RNA, 13 nt, Human
uaaacauguguuu

SEQ ID NO: 2801432 - RNA, 12 nt, Human
uaaacauguguu

SEQ ID NO: 2801433 - RNA, 15 nt, Human
uaaacauguguuuua

SEQ ID NO: 2801434 - RNA, 17 nt, Human
uaaacauuaaaaaugga

SEQ ID NO: 2801435 - RNA, 15 nt, Human
uaaacauuaaauguc

SEQ ID NO: 2801436 - RNA, 16 nt, Human
uaaacauuaaaugucu

SEQ ID NO: 2801437 - RNA, 17 nt, Human
uaaacauuaaaugucuu

SEQ ID NO: 2801438 - RNA, 18 nt, Human
uaaacauuaaaugucuua

SEQ ID NO: 2801439 - RNA, 21 nt, Human
uaaacauuaaaugucuuauau

SEQ ID NO: 2801440 - RNA, 13 nt, Human
uaaaaucuuauag

SEQ ID NO: 2801441 - RNA, 17 nt, Human
uaaaaucuuauaguucu

SEQ ID NO: 2801442 - RNA, 18 nt, Human
uaaaaucuuauaguucua

SEQ ID NO: 2801443 - RNA, 16 nt, Human
uaaaaucuugaaaaug

SEQ ID NO: 2801444 - RNA, 13 nt, Human
uaaaaucuuggaa

SEQ ID NO: 2801445 - RNA, 17 nt, Human
uaaaaucuuggaaguac

SEQ ID NO: 2801446 - RNA, 22 nt, Human
uaaaaucuuggaaguacaugaa

SEQ ID NO: 2801447 - RNA, 24 nt, Human
uaaaaucuuggaaguacaugaaua

SEQ ID NO: 2801448 - RNA, 19 nt, Human
uaaaaucuuauaguucuag

SEQ ID NO: 2801449 - RNA, 13 nt, Human
uaaacacauuuug

SEQ ID NO: 2801450 - RNA, 18 nt, Human
uaaacacgccugcaaacg

SEQ ID NO: 2801451 - RNA, 22 nt, Human
uaaacauaugauuucacuagaa

SEQ ID NO: 2801452 - RNA, 17 nt, Human
uaaacauccuucaagaa

SEQ ID NO: 2801453 - RNA, 15 nt, Human
uaaacaucacacaca

SEQ ID NO: 2801454 - RNA, 16 nt, Human
uaaacaucacacacac

SEQ ID NO: 2801455 - RNA, 11 nt, Human
uaaucugucaa

SEQ ID NO: 2801456 - RNA, 15 nt, Human
uaaucugucaaaaca

SEQ ID NO: 2801457 - RNA, 16 nt, Human
uaaucugucaaaacac

SEQ ID NO: 2801458 - RNA, 17 nt, Human
uaaucugucaaaacacu

SEQ ID NO: 2801459 - RNA, 18 nt, Human
uaaucugucaaaacacug

SEQ ID NO: 2801460 - RNA, 19 nt, Human
uaaucugucaaaacacugu

SEQ ID NO: 2801461 - RNA, 20 nt, Human
uaaucugucaaaacacugug

SEQ ID NO: 2801462 - RNA, 21 nt, Human
uaaucugucaaaacacugugg

SEQ ID NO: 2801463 - RNA, 22 nt, Human
uaaucugucaaaacacugugga

SEQ ID NO: 2801464 - RNA, 15 nt, Human
uaauggggcggugag

SEQ ID NO: 2801465 - RNA, 16 nt, Human
uaauggcaugucagac

SEQ ID NO: 2801466 - RNA, 13 nt, Human
uaauggcacugau

SEQ ID NO: 2801467 - RNA, 17 nt, Human
uaauggcacuuaucauu

SEQ ID NO: 2801468 - RNA, 12 nt, Human
uaauggcagcag

SEQ ID NO: 2801469 - RNA, 14 nt, Human
uaauggcagcagaa

SEQ ID NO: 2801470 - RNA, 20 nt, Human
uaauggcagcagaaaacuug

SEQ ID NO: 2801471 - RNA, 14 nt, Human
uaauggauuaaauu

SEQ ID NO: 2801472 - RNA, 22 nt, Human
uaauggauuaaauuuaauucuu

SEQ ID NO: 2801473 - RNA, 15 nt, Human
uaauggauuguuaau

SEQ ID NO: 2801474 - RNA, 16 nt, Human
uaauggauuguuaauu

SEQ ID NO: 2801475 - RNA, 20 nt, Human
uaauggauuguuaauuucag

SEQ ID NO: 2801476 - RNA, 13 nt, Human
uaauggacacuuu

SEQ ID NO: 2801477 - RNA, 19 nt, Human
uaauggacacuuuucaccu

SEQ ID NO: 2801478 - RNA, 12 nt, Human
uaauggauccuu

SEQ ID NO: 2801479 - RNA, 19 nt, Human
uaaugcuaauuuaaagaga

SEQ ID NO: 2801480 - RNA, 13 nt, Human
uaaugcuacuguc

SEQ ID NO: 2801481 - RNA, 15 nt, Human
uaaugcuacugucuc

SEQ ID NO: 2801482 - RNA, 24 nt, Human
uaaugcugcaaacuuaauguucuu

SEQ ID NO: 2801483 - RNA, 16 nt, Human
uaaugcugcacuuccu

SEQ ID NO: 2801484 - RNA, 12 nt, Human
uaaugcugccuu

SEQ ID NO: 2801485 - RNA, 16 nt, Human
uaaugcuuaagaggga

SEQ ID NO: 2801486 - RNA, 20 nt, Human
uaaugcuuaagggaguuuaa

SEQ ID NO: 2801487 - RNA, 16 nt, Human
uaaugcuuaauuucua

SEQ ID NO: 2801488 - RNA, 19 nt, Human
uaaugcuuagagaauguuc

SEQ ID NO: 2801489 - RNA, 20 nt, Human
uaaugcuuagagaauguucu

SEQ ID NO: 2801490 - RNA, 14 nt, Human
uaaugcuucagaua

SEQ ID NO: 2801491 - RNA, 14 nt, Human
uaaugcuucauuca

SEQ ID NO: 2801492 - RNA, 20 nt, Human
uaaugcuucauucaauauug

SEQ ID NO: 2801493 - RNA, 21 nt, Human
uaauggaaaaaaaaaaaagag

SEQ ID NO: 2801494 - RNA, 22 nt, Human
uaauggaaaaaaaaaaaagagg

SEQ ID NO: 2801495 - RNA, 13 nt, Human
uaauggaagagaa

SEQ ID NO: 2801496 - RNA, 14 nt, Human
uaauggaagagaaa

SEQ ID NO: 2801497 - RNA, 17 nt, Human
uaauggaagagaaaucu

SEQ ID NO: 2801498 - RNA, 17 nt, Human
uaaugcuuucacaacau

SEQ ID NO: 2801499 - RNA, 19 nt, Human
uaaugcuuucacaacauuu

SEQ ID NO: 2801500 - RNA, 21 nt, Human
uaauguuggacaccuuuaggu

SEQ ID NO: 2801501 - RNA, 18 nt, Human
uaauguuauaucauaugu

SEQ ID NO: 2801502 - RNA, 15 nt, Human
uaauguucugugaua

SEQ ID NO: 2801503 - RNA, 18 nt, Human
uaauguucugugauacag

SEQ ID NO: 2801504 - RNA, 22 nt, Human
uaauguucuuaugcaaaaugga

SEQ ID NO: 2801505 - RNA, 23 nt, Human
uaauguucuuaugcaaaauggaa

SEQ ID NO: 2801506 - RNA, 18 nt, Human
uaaugggcuuagagcagu

SEQ ID NO: 2801507 - RNA, 18 nt, Human
uaauuaaaaacuaguagu

SEQ ID NO: 2801508 - RNA, 18 nt, Human
uaauuaagacugaaaaua

SEQ ID NO: 2801509 - RNA, 13 nt, Human
uaauguuuucuuu

SEQ ID NO: 2801510 - RNA, 18 nt, Human
uaauguuuucuuugcaaa

SEQ ID NO: 2801511 - RNA, 19 nt, Human
uaauguuuucuuugcaaag

SEQ ID NO: 2801512 - RNA, 20 nt, Human
uaauguuuucuuugcaaagu

SEQ ID NO: 2801513 - RNA, 21 nt, Human
uaauguuuucuuugcaaagua

SEQ ID NO: 2801514 - RNA, 22 nt, Human
uaauguuuucuuugcaaaguau

SEQ ID NO: 2801515 - RNA, 18 nt, Human
uaauguuuguuaccucca

SEQ ID NO: 2801516 - RNA, 15 nt, Human
uaauguuuuaaaugu

SEQ ID NO: 2801517 - RNA, 16 nt, Human
uaauguuuuaaaugua

SEQ ID NO: 2801518 - RNA, 17 nt, Human
uaauguuuuaaauguac

SEQ ID NO: 2801519 - RNA, 20 nt, Human
uaauguuuuaaauguacaga

SEQ ID NO: 2801520 - RNA, 11 nt, Human
uaauguuuccu

SEQ ID NO: 2801521 - RNA, 17 nt, Human
uaauguuucuaucugau

SEQ ID NO: 2801522 - RNA, 17 nt, Human
uaauuaggcaaggcuau

SEQ ID NO: 2801523 - RNA, 14 nt, Human
uaauuaggaaaaaa

SEQ ID NO: 2801524 - RNA, 16 nt, Human
uaauuaggaaaaaaac

SEQ ID NO: 2801525 - RNA, 13 nt, Human
uaauuagcauucu

SEQ ID NO: 2801526 - RNA, 14 nt, Human
uaauuagcauucug

SEQ ID NO: 2801527 - RNA, 22 nt, Human
uaauauggccacaguagucuug

SEQ ID NO: 2801528 - RNA, 18 nt, Human
uaauauggcuaugcuuaa

SEQ ID NO: 2801529 - RNA, 20 nt, Human
uaauauggcuaugcuuaaaa

SEQ ID NO: 2801530 - RNA, 21 nt, Human
uaauauggcuaugcuuaaaag

SEQ ID NO: 2801531 - RNA, 15 nt, Human
uaauauggcaaaaau

SEQ ID NO: 2801532 - RNA, 16 nt, Human
uaauauggcaaaaaug

SEQ ID NO: 2801533 - RNA, 18 nt, Human
uaauauggcaaaaauggc

SEQ ID NO: 2801534 - RNA, 10 nt, Human
uaauaugcau

SEQ ID NO: 2801535 - RNA, 22 nt, Human
uaauauauuuuuauauuuaguu

SEQ ID NO: 2801536 - RNA, 21 nt, Human
uaauaucaaaugcaguauauu

SEQ ID NO: 2801537 - RNA, 18 nt, Human
uaauaauguuaaccaagg

SEQ ID NO: 2801538 - RNA, 22 nt, Human
uaauaauguuaaccaaggaaau

SEQ ID NO: 2801539 - RNA, 21 nt, Human
uaauaaugagcuauuaaaacu

SEQ ID NO: 2801540 - RNA, 22 nt, Human
uaauaaugagcuauuaaaacuc

SEQ ID NO: 2801541 - RNA, 23 nt, Human
uaauaaugagcuauuaaaacuca

SEQ ID NO: 2801542 - RNA, 14 nt, Human
uaauaauauuguuu

SEQ ID NO: 2801543 - RNA, 19 nt, Human
uaauaauauuguuuuucuu

SEQ ID NO: 2801544 - RNA, 13 nt, Human
uaauaugaaguau

SEQ ID NO: 2801545 - RNA, 23 nt, Human
uaauaugauuuuuuaaaagaaau

SEQ ID NO: 2801546 - RNA, 14 nt, Human
uaauaucuuuguga

SEQ ID NO: 2801547 - RNA, 19 nt, Human
uaauaucuuugugauaauu

SEQ ID NO: 2801548 - RNA, 20 nt, Human
uaauaucuuugugauaauuu

SEQ ID NO: 2801549 - RNA, 21 nt, Human
uaauaucuuugugauaauuua

SEQ ID NO: 2801550 - RNA, 13 nt, Human
uaauaauggguuu

SEQ ID NO: 2801551 - RNA, 14 nt, Human
uaauaucauucacu

SEQ ID NO: 2801552 - RNA, 19 nt, Human
uaauauccaggucaacaga

SEQ ID NO: 2801553 - RNA, 20 nt, Human
uaauauccaggucaacagaa

SEQ ID NO: 2801554 - RNA, 22 nt, Human
uaauauccaggucaacagaaug

SEQ ID NO: 2801555 - RNA, 24 nt, Human
uaauauccaggucaacagaaugaa

SEQ ID NO: 2801556 - RNA, 15 nt, Human
uaauaucuaaaguua

SEQ ID NO: 2801557 - RNA, 16 nt, Human
uaauaucuaaaguuau

SEQ ID NO: 2801558 - RNA, 21 nt, Human
uaauaucuaaaguuauauuuc

SEQ ID NO: 2801559 - RNA, 12 nt, Human
uaauauggauuu

SEQ ID NO: 2801560 - RNA, 19 nt, Human
uaauccccaguucgccugg

SEQ ID NO: 2801561 - RNA, 14 nt, Human
uaaucccccaggag

SEQ ID NO: 2801562 - RNA, 15 nt, Human
uaaucccccaggaga

SEQ ID NO: 2801563 - RNA, 22 nt, Human
uaauauuaauuuucuacaaaua

SEQ ID NO: 2801564 - RNA, 19 nt, Human
uaauauuaccuaaugaaag

SEQ ID NO: 2801565 - RNA, 22 nt, Human
uaauauuaccuaaugaaaguga

SEQ ID NO: 2801566 - RNA, 22 nt, Human
uaauauuacuguuuauuucugu

SEQ ID NO: 2801567 - RNA, 11 nt, Human
uaauauuauua

SEQ ID NO: 2801568 - RNA, 15 nt, Human
uaaucuaguuuacag

SEQ ID NO: 2801569 - RNA, 17 nt, Human
uaaucuaguuuacagaa

SEQ ID NO: 2801570 - RNA, 18 nt, Human
uaaucuaguuuacagaaa

SEQ ID NO: 2801571 - RNA, 20 nt, Human
uaaucuaguuuacagaaaaa

SEQ ID NO: 2801572 - RNA, 22 nt, Human
uaaucuagaacacaggcaaaau

SEQ ID NO: 2801573 - RNA, 14 nt, Human
uaaucuagacaaua

SEQ ID NO: 2801574 - RNA, 14 nt, Human
uaaucuagaacaca

SEQ ID NO: 2801575 - RNA, 17 nt, Human
uaaucuggacuccucug

SEQ ID NO: 2801576 - RNA, 18 nt, Human
uaaucuggacuccucugu

SEQ ID NO: 2801577 - RNA, 21 nt, Human
uaaucugauggcuucuccagg

SEQ ID NO: 2801578 - RNA, 21 nt, Human
uaaucugcaaagaaugagaag

SEQ ID NO: 2801579 - RNA, 15 nt, Human
uaaucuggacuccuc

SEQ ID NO: 2801580 - RNA, 19 nt, Human
uaaucuggacuccucuguc

SEQ ID NO: 2801581 - RNA, 20 nt, Human
uaaucuggacuccucugucc

SEQ ID NO: 2801582 - RNA, 21 nt, Human
uaaucuggacuccucugucca

SEQ ID NO: 2801583 - RNA, 22 nt, Human
uaaucuggacuccucuguccag

SEQ ID NO: 2801584 - RNA, 17 nt, Human
uaaucugggaagggaag

SEQ ID NO: 2801585 - RNA, 13 nt, Human
uaaucuguacauu

SEQ ID NO: 2801586 - RNA, 18 nt, Human
uaaucuguacauuuuguu

SEQ ID NO: 2801587 - RNA, 22 nt, Human
uaaucuguacauuuuguuguaa

SEQ ID NO: 2801588 - RNA, 23 nt, Human
uaaucuguacauuuuguuguaaa

SEQ ID NO: 2801589 - RNA, 23 nt, Human
uaaucugggccagaauuucaaac

SEQ ID NO: 2801590 - RNA, 18 nt, Human
uaaucugggccagaauuu

SEQ ID NO: 2801591 - RNA, 15 nt, Human
uaagugaaaaucuua

SEQ ID NO: 2801592 - RNA, 19 nt, Human
uaagugaaagugaggaaau

SEQ ID NO: 2801593 - RNA, 22 nt, Human
uaagucuuaucaagcagccaag

SEQ ID NO: 2801594 - RNA, 20 nt, Human
uaagucuuaucaagcagcca

SEQ ID NO: 2801595 - RNA, 13 nt, Human
uaagucucaacug

SEQ ID NO: 2801596 - RNA, 15 nt, Human
uaaguccuuuaugug

SEQ ID NO: 2801597 - RNA, 17 nt, Human
uaaguccuuuaugugga

SEQ ID NO: 2801598 - RNA, 20 nt, Human
uaaguccuuuauguggaaaa

SEQ ID NO: 2801599 - RNA, 12 nt, Human
uaagucucugug

SEQ ID NO: 2801600 - RNA, 11 nt, Human
uaagucucugu

SEQ ID NO: 2801601 - RNA, 16 nt, Human
uaagugcguguguaga

SEQ ID NO: 2801602 - RNA, 17 nt, Human
uaagugcguguguagag

SEQ ID NO: 2801603 - RNA, 18 nt, Human
uaagugcguguguagagu

SEQ ID NO: 2801604 - RNA, 19 nt, Human
uaagugcguguguagaguu

SEQ ID NO: 2801605 - RNA, 14 nt, Human
uaagugcacaacau

SEQ ID NO: 2801606 - RNA, 22 nt, Human
uaagugcacaacauuacaggga

SEQ ID NO: 2801607 - RNA, 15 nt, Human
uaagugcacacagaa

SEQ ID NO: 2801608 - RNA, 17 nt, Human
uaagugcacacagaaau

SEQ ID NO: 2801609 - RNA, 18 nt, Human
uaagugcacacagaaaua

SEQ ID NO: 2801610 - RNA, 19 nt, Human
uaagugcacacagaaauau

SEQ ID NO: 2801611 - RNA, 22 nt, Human
uaagugcacacagaaauauaua

SEQ ID NO: 2801612 - RNA, 15 nt, Human
uaagugagugugcug

SEQ ID NO: 2801613 - RNA, 20 nt, Human
uaagugagugugcugcugua

SEQ ID NO: 2801614 - RNA, 14 nt, Human
uaagugaauaauaa

SEQ ID NO: 2801615 - RNA, 13 nt, Human
uaagugaauuuau

SEQ ID NO: 2801616 - RNA, 14 nt, Human
uaagugaauuuaua

SEQ ID NO: 2801617 - RNA, 15 nt, Human
uaagugacauuugua

SEQ ID NO: 2801618 - RNA, 21 nt, Human
uaauaacugugaaguuuacau

SEQ ID NO: 2801619 - RNA, 19 nt, Human
uaauaaauauuuuugccau

SEQ ID NO: 2801620 - RNA, 11 nt, Human
uaauaagaaaa

SEQ ID NO: 2801621 - RNA, 19 nt, Human
uaauaagaaugguugccuu

SEQ ID NO: 2801622 - RNA, 12 nt, Human
uaauaagacaua

SEQ ID NO: 2801623 - RNA, 14 nt, Human
uaauaagacauaac

SEQ ID NO: 2801624 - RNA, 17 nt, Human
uaauaagacauaacguu

SEQ ID NO: 2801625 - RNA, 19 nt, Human
uaauaagacauaacguuuu

SEQ ID NO: 2801626 - RNA, 20 nt, Human
uaauaagacauaacguuuuu

SEQ ID NO: 2801627 - RNA, 22 nt, Human
uaauaagacauaacguuuuucc

SEQ ID NO: 2801628 - RNA, 18 nt, Human
uaauaaaguuuuuuucca

SEQ ID NO: 2801629 - RNA, 16 nt, Human
uaauaaauacauacgg

SEQ ID NO: 2801630 - RNA, 15 nt, Human
uaauaaauagagcaa

SEQ ID NO: 2801631 - RNA, 20 nt, Human
uaauaaaggacuguaaucuu

SEQ ID NO: 2801632 - RNA, 16 nt, Human
uaauaaaggacuguaa

SEQ ID NO: 2801633 - RNA, 13 nt, Human
uaauaaaggacug

SEQ ID NO: 2801634 - RNA, 12 nt, Human
uaauaaaggacu

SEQ ID NO: 2801635 - RNA, 21 nt, Human
uaagugcguguguagaguuaa

SEQ ID NO: 2801636 - RNA, 15 nt, Human
uaaguggugugugua

SEQ ID NO: 2801637 - RNA, 23 nt, Human
uaagugcguguguagaguuaaga

SEQ ID NO: 2801638 - RNA, 16 nt, Human
uaagugcuacauaaau

SEQ ID NO: 2801639 - RNA, 19 nt, Human
uaagugcuacauaaauugg

SEQ ID NO: 2801640 - RNA, 16 nt, Human
uaagugguguguguau

SEQ ID NO: 2801641 - RNA, 17 nt, Human
uaagugguuugaucauu

SEQ ID NO: 2801642 - RNA, 20 nt, Human
uaaggguuaguuuacaauca

SEQ ID NO: 2801643 - RNA, 22 nt, Human
uaaggguuucccccaacauaua

SEQ ID NO: 2801644 - RNA, 17 nt, Human
uaagggucgaaagcucu

SEQ ID NO: 2801645 - RNA, 23 nt, Human
uaagggguuugccauuugauacc

SEQ ID NO: 2801646 - RNA, 13 nt, Human
uaagggugggugc

SEQ ID NO: 2801647 - RNA, 18 nt, Human
uaagggugggugcucaga

SEQ ID NO: 2801648 - RNA, 19 nt, Human
uaagggugggugcucagaa

SEQ ID NO: 2801649 - RNA, 20 nt, Human
uaagggugggugcucagaau

SEQ ID NO: 2801650 - RNA, 16 nt, Human
uaagguccugaaagua

SEQ ID NO: 2801651 - RNA, 20 nt, Human
uaagguccgguguucuaaga

SEQ ID NO: 2801652 - RNA, 21 nt, Human
uaagguccgguguucuaagau

SEQ ID NO: 2801653 - RNA, 17 nt, Human
uaagguccgguguucua

SEQ ID NO: 2801654 - RNA, 18 nt, Human
uaagguccgguguucuaa

SEQ ID NO: 2801655 - RNA, 18 nt, Human
uaagguagaaccucaccu

SEQ ID NO: 2801656 - RNA, 13 nt, Human
uaagggcagaguc

SEQ ID NO: 2801657 - RNA, 14 nt, Human
uaagggcagaguca

SEQ ID NO: 2801658 - RNA, 15 nt, Human
uaagggcaugccuug

SEQ ID NO: 2801659 - RNA, 18 nt, Human
uaagggcaugccuugugc

SEQ ID NO: 2801660 - RNA, 16 nt, Human
uaagggaggaggagcu

SEQ ID NO: 2801661 - RNA, 21 nt, Human
uaagggaggaggagcuucugg

SEQ ID NO: 2801662 - RNA, 22 nt, Human
uaagggaggaggagcuucuggg

SEQ ID NO: 2801663 - RNA, 14 nt, Human
uaagggauuucuua

SEQ ID NO: 2801664 - RNA, 16 nt, Human
uaagggauuucuuagg

SEQ ID NO: 2801665 - RNA, 17 nt, Human
uaagggauuucuuaggg

SEQ ID NO: 2801666 - RNA, 15 nt, Human
uaagggaagacauuu

SEQ ID NO: 2801667 - RNA, 16 nt, Human
uaagggaagacauuuc

SEQ ID NO: 2801668 - RNA, 17 nt, Human
uaagggaagacauuucu

SEQ ID NO: 2801669 - RNA, 18 nt, Human
uaagggaagacauuucuu

SEQ ID NO: 2801670 - RNA, 19 nt, Human
uaagggaagacauuucuuu

SEQ ID NO: 2801671 - RNA, 15 nt, Human
uaaggugugcucuga

SEQ ID NO: 2801672 - RNA, 15 nt, Human
uaaggugcuaaaucu

SEQ ID NO: 2801673 - RNA, 15 nt, Human
uaaggugaggccugu

SEQ ID NO: 2801674 - RNA, 17 nt, Human
uaaggugaggccugucu

SEQ ID NO: 2801675 - RNA, 22 nt, Human
uaaggugaggccugucugugac

SEQ ID NO: 2801676 - RNA, 16 nt, Human
uaagguguuuucugug

SEQ ID NO: 2801677 - RNA, 17 nt, Human
uaagguguuuucugugu

SEQ ID NO: 2801678 - RNA, 18 nt, Human
uaagguguuuucugugua

SEQ ID NO: 2801679 - RNA, 19 nt, Human
uaagguguuuucuguguaa

SEQ ID NO: 2801680 - RNA, 20 nt, Human
uaagguguuuucuguguaac

SEQ ID NO: 2801681 - RNA, 17 nt, Human
uaaguauuugaaacuga

SEQ ID NO: 2801682 - RNA, 22 nt, Human
uaagucacccuagcccucuccc

SEQ ID NO: 2801683 - RNA, 19 nt, Human
uaagucaguauggucuaac

SEQ ID NO: 2801684 - RNA, 12 nt, Human
uaagucaguguu

SEQ ID NO: 2801685 - RNA, 13 nt, Human
uaagucaguguug

SEQ ID NO: 2801686 - RNA, 14 nt, Human
uaagucaguguuga

SEQ ID NO: 2801687 - RNA, 15 nt, Human
uaagucaguguugag

SEQ ID NO: 2801688 - RNA, 16 nt, Human
uaagucaguguugaga

SEQ ID NO: 2801689 - RNA, 17 nt, Human
uaagucaguguugagau

SEQ ID NO: 2801690 - RNA, 15 nt, Human
uaagaggcagggucu

SEQ ID NO: 2801691 - RNA, 12 nt, Human
uaagaggcaggg

SEQ ID NO: 2801692 - RNA, 16 nt, Human
uaagcuaacccccuuc

SEQ ID NO: 2801693 - RNA, 22 nt, Human
uaagcuaacccccuucuacuga

SEQ ID NO: 2801694 - RNA, 17 nt, Human
uaagcuagaagaaguga

SEQ ID NO: 2801695 - RNA, 18 nt, Human
uaagcuagaagaagugag

SEQ ID NO: 2801696 - RNA, 13 nt, Human
uaagcccuggccc

SEQ ID NO: 2801697 - RNA, 15 nt, Human
uaagcccuggccccc

SEQ ID NO: 2801698 - RNA, 15 nt, Human
uaagccuaccugcuc

SEQ ID NO: 2801699 - RNA, 16 nt, Human
uaagccuaaaaguggg

SEQ ID NO: 2801700 - RNA, 16 nt, Human
uaagccucauauuuaa

SEQ ID NO: 2801701 - RNA, 17 nt, Human
uaagccuaccugcucuc

SEQ ID NO: 2801702 - RNA, 17 nt, Human
uaagccucauauuuaaa

SEQ ID NO: 2801703 - RNA, 14 nt, Human
uaaggcucuagauc

SEQ ID NO: 2801704 - RNA, 19 nt, Human
uaaggcucuaugagucuag

SEQ ID NO: 2801705 - RNA, 22 nt, Human
uaaggcucuaugagucuagaug

SEQ ID NO: 2801706 - RNA, 14 nt, Human
uaaggcucugagag

SEQ ID NO: 2801707 - RNA, 15 nt, Human
uaaggcucugagagu

SEQ ID NO: 2801708 - RNA, 22 nt, Human
uaaggcuuugauuaguuuucuu

SEQ ID NO: 2801709 - RNA, 24 nt, Human
uaaggcucugagagucuagauucu

SEQ ID NO: 2801710 - RNA, 19 nt, Human
uaaggcucugagagucuag

SEQ ID NO: 2801711 - RNA, 22 nt, Human
uaaggcucugagagucuagauu

SEQ ID NO: 2801712 - RNA, 12 nt, Human
uaaaugucuguu

SEQ ID NO: 2801713 - RNA, 13 nt, Human
uaaaugucuuaua

SEQ ID NO: 2801714 - RNA, 14 nt, Human
uaaaugucuuauau

SEQ ID NO: 2801715 - RNA, 13 nt, Human
uaaaugucuuugu

SEQ ID NO: 2801716 - RNA, 14 nt, Human
uaaaugucuuugua

SEQ ID NO: 2801717 - RNA, 15 nt, Human
uaaaugucuuuguaa

SEQ ID NO: 2801718 - RNA, 16 nt, Human
uaaaugucuuuguaag

SEQ ID NO: 2801719 - RNA, 17 nt, Human
uaaaugucuuuguaagu

SEQ ID NO: 2801720 - RNA, 21 nt, Human
uaaaugucuuuguaagucagu

SEQ ID NO: 2801721 - RNA, 22 nt, Human
uaaaugucuuuguaagucagug

SEQ ID NO: 2801722 - RNA, 16 nt, Human
uaaauucacaaacuuu

SEQ ID NO: 2801723 - RNA, 23 nt, Human
uaaaugugauaugauuggcaaua

SEQ ID NO: 2801724 - RNA, 18 nt, Human
uaaauucacaaacuuuua

SEQ ID NO: 2801725 - RNA, 16 nt, Human
uaaauuccacuggacu

SEQ ID NO: 2801726 - RNA, 17 nt, Human
uaaauucccaacuucuc

SEQ ID NO: 2801727 - RNA, 18 nt, Human
uaaauucccaacuucucu

SEQ ID NO: 2801728 - RNA, 14 nt, Human
uaaauuccacugga

SEQ ID NO: 2801729 - RNA, 13 nt, Human
uaaauuccacugg

SEQ ID NO: 2801730 - RNA, 19 nt, Human
uaaauucgugauuuucaag

SEQ ID NO: 2801731 - RNA, 15 nt, Human
uaaauucugagacau

SEQ ID NO: 2801732 - RNA, 19 nt, Human
uaaauucugagacaugugu

SEQ ID NO: 2801733 - RNA, 22 nt, Human
uaaauucugagacaugugucaa

SEQ ID NO: 2801734 - RNA, 13 nt, Human
uaaauucuuuauu

SEQ ID NO: 2801735 - RNA, 21 nt, Human
uaaauucuuuauuucugucau

SEQ ID NO: 2801736 - RNA, 13 nt, Human
uaaauugaaauug

SEQ ID NO: 2801737 - RNA, 14 nt, Human
uaaauuugaauguu

SEQ ID NO: 2801738 - RNA, 22 nt, Human
uaaauuugaauguuaagcagau

SEQ ID NO: 2801739 - RNA, 12 nt, Human
uaaauuuguaag

SEQ ID NO: 2801740 - RNA, 20 nt, Human
uaaauuuggggacagauuca

SEQ ID NO: 2801741 - RNA, 13 nt, Human
uaaauuugauacu

SEQ ID NO: 2801742 - RNA, 14 nt, Human
uaaauuugauacuu

SEQ ID NO: 2801743 - RNA, 15 nt, Human
uaaauuugauacuua

SEQ ID NO: 2801744 - RNA, 16 nt, Human
uaaauuugauacuuau

SEQ ID NO: 2801745 - RNA, 17 nt, Human
uaaauuugauacuuaua

SEQ ID NO: 2801746 - RNA, 18 nt, Human
uaaauuugauacuuauau

SEQ ID NO: 2801747 - RNA, 21 nt, Human
uaaauuugauacuuauauuuu

SEQ ID NO: 2801748 - RNA, 13 nt, Human
uaaauuugauuua

SEQ ID NO: 2801749 - RNA, 20 nt, Human
uaaauuugauuuacauauau

SEQ ID NO: 2801750 - RNA, 22 nt, Human
uaaauuugauuuacauauauua

SEQ ID NO: 2801751 - RNA, 13 nt, Human
uaaauuugcuagc

SEQ ID NO: 2801752 - RNA, 14 nt, Human
uaaauuugcuagca

SEQ ID NO: 2801753 - RNA, 13 nt, Human
uaaauuuguaagu

SEQ ID NO: 2801754 - RNA, 15 nt, Human
uaaauuuguaaguuu

SEQ ID NO: 2801755 - RNA, 16 nt, Human
uaaauuuguaaguuuc

SEQ ID NO: 2801756 - RNA, 17 nt, Human
uaaauuuguaaguuuca

SEQ ID NO: 2801757 - RNA, 18 nt, Human
uaaauuuguaaguuucag

SEQ ID NO: 2801758 - RNA, 19 nt, Human
uaaauuuguaaguuucagg

SEQ ID NO: 2801759 - RNA, 20 nt, Human
uaaauuuguaaguuucaggu

SEQ ID NO: 2801760 - RNA, 23 nt, Human
uaaauuuguaaguuucaggugac

SEQ ID NO: 2801761 - RNA, 19 nt, Human
uaacacuauguuuauuuac

SEQ ID NO: 2801762 - RNA, 13 nt, Human
uaacacccuuccu

SEQ ID NO: 2801763 - RNA, 15 nt, Human
uaacacccuuccuuc

SEQ ID NO: 2801764 - RNA, 23 nt, Human
uaacacccuuccuucuguaaaua

SEQ ID NO: 2801765 - RNA, 24 nt, Human
uaacacccuuccuucuguaaauac

SEQ ID NO: 2801766 - RNA, 16 nt, Human
uaacacgugaugugau

SEQ ID NO: 2801767 - RNA, 18 nt, Human
uaacacuaaaauuuuagg

SEQ ID NO: 2801768 - RNA, 11 nt, Human
uaaauggaaau

SEQ ID NO: 2801769 - RNA, 15 nt, Human
uaaaugggaacauuu

SEQ ID NO: 2801770 - RNA, 16 nt, Human
uaaaugggaacauuua

SEQ ID NO: 2801771 - RNA, 17 nt, Human
uaaaugggaacauuuau

SEQ ID NO: 2801772 - RNA, 23 nt, Human
uaaaugggaacauuuauuuuaug

SEQ ID NO: 2801773 - RNA, 17 nt, Human
uaaauggggcucacaaa

SEQ ID NO: 2801774 - RNA, 17 nt, Human
uaaauggucgcccagga

SEQ ID NO: 2801775 - RNA, 22 nt, Human
uaaaugucucuuuaaugucaca

SEQ ID NO: 2801776 - RNA, 20 nt, Human
uaaauguauacuauaguacc

SEQ ID NO: 2801777 - RNA, 12 nt, Human
uaaauguauaua

SEQ ID NO: 2801778 - RNA, 13 nt, Human
uaaauguauauac

SEQ ID NO: 2801779 - RNA, 14 nt, Human
uaaauguauauaca

SEQ ID NO: 2801780 - RNA, 15 nt, Human
uaaauguauauacac

SEQ ID NO: 2801781 - RNA, 17 nt, Human
uaaauguauauacacau

SEQ ID NO: 2801782 - RNA, 18 nt, Human
uaaauguauauacacaua

SEQ ID NO: 2801783 - RNA, 17 nt, Human
uaaauguauacuauagu

SEQ ID NO: 2801784 - RNA, 15 nt, Human
uaaauguauacuaua

SEQ ID NO: 2801785 - RNA, 18 nt, Human
uaaauguacagacauauu

SEQ ID NO: 2801786 - RNA, 21 nt, Human
uaaauguacagacauauuuaa

SEQ ID NO: 2801787 - RNA, 13 nt, Human
uaaauguauacua

SEQ ID NO: 2801788 - RNA, 12 nt, Human
uaaauguauacu

SEQ ID NO: 2801789 - RNA, 14 nt, Human
uaaaguuggaauuu

SEQ ID NO: 2801790 - RNA, 18 nt, Human
uaaaguuggaauuuacca

SEQ ID NO: 2801791 - RNA, 13 nt, Human
uaaaguucuaaga

SEQ ID NO: 2801792 - RNA, 14 nt, Human
uaaaguucuaagau

SEQ ID NO: 2801793 - RNA, 15 nt, Human
uaaaguucuaagauu

SEQ ID NO: 2801794 - RNA, 16 nt, Human
uaaaguucuaagauuc

SEQ ID NO: 2801795 - RNA, 17 nt, Human
uaaaguucuaagauucu

SEQ ID NO: 2801796 - RNA, 18 nt, Human
uaaaguucuaagauucug

SEQ ID NO: 2801797 - RNA, 19 nt, Human
uaaaguucuaagauucuga

SEQ ID NO: 2801798 - RNA, 22 nt, Human
uaaaguucuaagauucugauuu

SEQ ID NO: 2801799 - RNA, 14 nt, Human
uaaaugccuaauaa

SEQ ID NO: 2801800 - RNA, 14 nt, Human
uaaaugccuaguuu

SEQ ID NO: 2801801 - RNA, 17 nt, Human
uaaaugccuaguuuuua

SEQ ID NO: 2801802 - RNA, 20 nt, Human
uaaaugccuaguuuuuagua

SEQ ID NO: 2801803 - RNA, 17 nt, Human
uaaauggaaaaaaugau

SEQ ID NO: 2801804 - RNA, 17 nt, Human
uaacugugaaguuuaca

SEQ ID NO: 2801805 - RNA, 13 nt, Human
uaacugugaaguu

SEQ ID NO: 2801806 - RNA, 18 nt, Human
uaacuuuuguaagacaaa

SEQ ID NO: 2801807 - RNA, 13 nt, Human
uaacuuuuguaag

SEQ ID NO: 2801808 - RNA, 18 nt, Human
uaacugugaaguuuacau

SEQ ID NO: 2801809 - RNA, 15 nt, Human
uaacugugcugaaug

SEQ ID NO: 2801810 - RNA, 16 nt, Human
uaacugugcugaaugc

SEQ ID NO: 2801811 - RNA, 17 nt, Human
uaacugugcugaaugcu

SEQ ID NO: 2801812 - RNA, 20 nt, Human
uaagaaaaaauaacacacau

SEQ ID NO: 2801813 - RNA, 16 nt, Human
uaagaaaacaucacug

SEQ ID NO: 2801814 - RNA, 21 nt, Human
uaagaaaaccaccccuuagau

SEQ ID NO: 2801815 - RNA, 16 nt, Human
uaagaaaacaaucaca

SEQ ID NO: 2801816 - RNA, 20 nt, Human
uaagaaaacaaucacacuca

SEQ ID NO: 2801817 - RNA, 21 nt, Human
uaagagacagucaccccagga

SEQ ID NO: 2801818 - RNA, 14 nt, Human
uaagagacucagcc

SEQ ID NO: 2801819 - RNA, 15 nt, Human
uaagagacucagccu

SEQ ID NO: 2801820 - RNA, 18 nt, Human
uaagagacucagccugca

SEQ ID NO: 2801821 - RNA, 12 nt, Human
uaagagagaaau

SEQ ID NO: 2801822 - RNA, 14 nt, Human
uaagagagaaaucu

SEQ ID NO: 2801823 - RNA, 18 nt, Human
uaagagagaaaucugaaa

SEQ ID NO: 2801824 - RNA, 18 nt, Human
uaagaacaaaagcgaccc

SEQ ID NO: 2801825 - RNA, 23 nt, Human
uaagaggcagaaaauugcacaau

SEQ ID NO: 2801826 - RNA, 20 nt, Human
uaagaggcagaaaauugcac

SEQ ID NO: 2801827 - RNA, 17 nt, Human
uaagaggcagaaaauug

SEQ ID NO: 2801828 - RNA, 16 nt, Human
uaagaggaucuccugu

SEQ ID NO: 2801829 - RNA, 21 nt, Human
uaacuuuuuuucuucuacuuu

SEQ ID NO: 2801830 - RNA, 13 nt, Human
uaagagacaguca

SEQ ID NO: 2801831 - RNA, 14 nt, Human
uaagaaaaguauuu

SEQ ID NO: 2801832 - RNA, 15 nt, Human
uaagaaaaguauuuu

SEQ ID NO: 2801833 - RNA, 19 nt, Human
uaagaaaaguauuuugaag

SEQ ID NO: 2801834 - RNA, 20 nt, Human
uaagaaaaguauuuugaagu

SEQ ID NO: 2801835 - RNA, 21 nt, Human
uaagaaaaguauuuugaaguu

SEQ ID NO: 2801836 - RNA, 22 nt, Human
uaagaaaaguauuuugaaguuu

SEQ ID NO: 2801837 - RNA, 18 nt, Human
uaagaaaaugcuagaaga

SEQ ID NO: 2801838 - RNA, 23 nt, Human
uaagaaaaugcuagaagaaaaca

SEQ ID NO: 2801839 - RNA, 19 nt, Human
uaagaaaucaaagagagaa

SEQ ID NO: 2801840 - RNA, 24 nt, Human
uaagaaaucuaguauuucaugcug

SEQ ID NO: 2801841 - RNA, 19 nt, Human
uaagaaaucucccaugugc

SEQ ID NO: 2801842 - RNA, 21 nt, Human
uaagaaaucucccaugugcau

SEQ ID NO: 2801843 - RNA, 22 nt, Human
uaagaaaucucccaugugcaua

SEQ ID NO: 2801844 - RNA, 15 nt, Human
uaagaaaucuguuuu

SEQ ID NO: 2801845 - RNA, 14 nt, Human
uaagaaacuuuugu

SEQ ID NO: 2801846 - RNA, 15 nt, Human
uaagaaacuuuugua

SEQ ID NO: 2801847 - RNA, 18 nt, Human
uaagaaacuuuuguaaag

SEQ ID NO: 2801848 - RNA, 19 nt, Human
uaagaaacuuuuguaaaga

SEQ ID NO: 2801849 - RNA, 12 nt, Human
uaagaaagacau

SEQ ID NO: 2801850 - RNA, 14 nt, Human
uaagaaagacaucu

SEQ ID NO: 2801851 - RNA, 16 nt, Human
uaagaaagacaucuuu

SEQ ID NO: 2801852 - RNA, 21 nt, Human
uaagaaagacaucuuucucuu

SEQ ID NO: 2801853 - RNA, 12 nt, Human
uaagaaacagag

SEQ ID NO: 2801854 - RNA, 16 nt, Human
uaagaaacagagcagu

SEQ ID NO: 2801855 - RNA, 21 nt, Human
uaagaaacccucugucauucg

SEQ ID NO: 2801856 - RNA, 20 nt, Human
uaaccauggaguagagguac

SEQ ID NO: 2801857 - RNA, 22 nt, Human
uaaccaguuaccacacaucuau

SEQ ID NO: 2801858 - RNA, 22 nt, Human
uaaccaguuguggugugaguau

SEQ ID NO: 2801859 - RNA, 19 nt, Human
uaaccccagcucccuagga

SEQ ID NO: 2801860 - RNA, 13 nt, Human
uaaccccagcucc

SEQ ID NO: 2801861 - RNA, 19 nt, Human
uaacccaggccugucugac

SEQ ID NO: 2801862 - RNA, 14 nt, Human
uaacccacuuguca

SEQ ID NO: 2801863 - RNA, 24 nt, Human
uaacccacuugucacugacacaaa

SEQ ID NO: 2801864 - RNA, 14 nt, Human
uaaccauuugcacu

SEQ ID NO: 2801865 - RNA, 10 nt, Human
uaaccauuuu

SEQ ID NO: 2801866 - RNA, 18 nt, Human
uaaccauuuuauaaagug

SEQ ID NO: 2801867 - RNA, 20 nt, Human
uaaccauuuuauaaagugcu

SEQ ID NO: 2801868 - RNA, 12 nt, Human
uaacccaaggag

SEQ ID NO: 2801869 - RNA, 18 nt, Human
uaacccaaggagcacagg

SEQ ID NO: 2801870 - RNA, 20 nt, Human
uaaccacgucugucuucaca

SEQ ID NO: 2801871 - RNA, 15 nt, Human
uaaccacugaaggga

SEQ ID NO: 2801872 - RNA, 17 nt, Human
uaaccacugcaaguccu

SEQ ID NO: 2801873 - RNA, 18 nt, Human
uaaccacugcaaguccuu

SEQ ID NO: 2801874 - RNA, 20 nt, Human
uaaccacugcaaguccuuuu

SEQ ID NO: 2801875 - RNA, 19 nt, Human
uaaccacgucugucuucac

SEQ ID NO: 2801876 - RNA, 15 nt, Human
uaaccacggaaaaga

SEQ ID NO: 2801877 - RNA, 16 nt, Human
uaaccaaacaauuauu

SEQ ID NO: 2801878 - RNA, 13 nt, Human
uaaccacggaaaa

SEQ ID NO: 2801879 - RNA, 11 nt, Human
uaacauuugcc

SEQ ID NO: 2801880 - RNA, 12 nt, Human
uaacauuugccu

SEQ ID NO: 2801881 - RNA, 13 nt, Human
uaacauuugccuu

SEQ ID NO: 2801882 - RNA, 15 nt, Human
uaacauuugccuugc

SEQ ID NO: 2801883 - RNA, 16 nt, Human
uaacauuugccuugca

SEQ ID NO: 2801884 - RNA, 21 nt, Human
uaacauuugccuugcagaacu

SEQ ID NO: 2801885 - RNA, 23 nt, Human
uaacauuugccuugcagaacugc

SEQ ID NO: 2801886 - RNA, 13 nt, Human
uaacauuuuaaau

SEQ ID NO: 2801887 - RNA, 21 nt, Human
uaacauuuuaaauaaaagaaa

SEQ ID NO: 2801888 - RNA, 10 nt, Human
uaacauuuug

SEQ ID NO: 2801889 - RNA, 11 nt, Human
uaacauuuugu

SEQ ID NO: 2801890 - RNA, 12 nt, Human
uaacauuuuguu

SEQ ID NO: 2801891 - RNA, 14 nt, Human
uaacauuuuguucu

SEQ ID NO: 2801892 - RNA, 15 nt, Human
uaacauuuuguucuu

SEQ ID NO: 2801893 - RNA, 16 nt, Human
uaacauuuuguucuua

SEQ ID NO: 2801894 - RNA, 21 nt, Human
uaacauuuuguucuuacacau

SEQ ID NO: 2801895 - RNA, 22 nt, Human
uaacauuuuguucuuacacaua

SEQ ID NO: 2801896 - RNA, 15 nt, Human
uaacucaccagcccc

SEQ ID NO: 2801897 - RNA, 23 nt, Human
uaacuauugcauuuauauguacc

SEQ ID NO: 2801898 - RNA, 21 nt, Human
uaacuauugcauuuauaugua

SEQ ID NO: 2801899 - RNA, 16 nt, Human
uaacuauugcauuuau

SEQ ID NO: 2801900 - RNA, 14 nt, Human
uaacuccagugaag

SEQ ID NO: 2801901 - RNA, 21 nt, Human
uaacucaccagccccacugcc

SEQ ID NO: 2801902 - RNA, 16 nt, Human
uaacucaccagcccca

SEQ ID NO: 2801903 - RNA, 17 nt, Human
uaacuauugcccagguu

SEQ ID NO: 2801904 - RNA, 16 nt, Human
uaacuccccuguuuca

SEQ ID NO: 2801905 - RNA, 19 nt, Human
uaacuccccuguuucaauc

SEQ ID NO: 2801906 - RNA, 23 nt, Human
uaacuccccuguuucaaucacug

SEQ ID NO: 2801907 - RNA, 17 nt, Human
uaacuccuaagaggagc

SEQ ID NO: 2801908 - RNA, 14 nt, Human
uaacccuacaccca

SEQ ID NO: 2801909 - RNA, 17 nt, Human
uaacccuguuacaaagc

SEQ ID NO: 2801910 - RNA, 16 nt, Human
uaacuauguugauaaa

SEQ ID NO: 2801911 - RNA, 12 nt, Human
uaacuauucagu

SEQ ID NO: 2801912 - RNA, 14 nt, Human
uaacuauucaguug

SEQ ID NO: 2801913 - RNA, 22 nt, Human
uaacuauucaguuguguuuguu

SEQ ID NO: 2801914 - RNA, 15 nt, Human
uaacuauugcauuua

SEQ ID NO: 2801915 - RNA, 18 nt, Human
uaacucuguaaaaacacu

SEQ ID NO: 2801916 - RNA, 17 nt, Human
uaacuccugagaaaugu

SEQ ID NO: 2801917 - RNA, 19 nt, Human
uaacuccugagaaauguua

SEQ ID NO: 2801918 - RNA, 15 nt, Human
uaacugaacuuugaa

SEQ ID NO: 2801919 - RNA, 14 nt, Human
uaacugaagagaca

SEQ ID NO: 2801920 - RNA, 17 nt, Human
uaacugaagauguugag

SEQ ID NO: 2801921 - RNA, 19 nt, Human
uaacugaagauguugagaa

SEQ ID NO: 2801922 - RNA, 14 nt, Human
uaacucuugucuau

SEQ ID NO: 2801923 - RNA, 16 nt, Human
uaacucuugucuauuu

SEQ ID NO: 2801924 - RNA, 12 nt, Human
uaacugccuuga

SEQ ID NO: 2801925 - RNA, 21 nt, Human
uaacugccuugaaccugugag

SEQ ID NO: 2801926 - RNA, 22 nt, Human
uaacugccuugaaccugugagu

SEQ ID NO: 2801927 - RNA, 14 nt, Human
uauaugaaaaccug

SEQ ID NO: 2801928 - RNA, 12 nt, Human
uauaugaaaacu

SEQ ID NO: 2801929 - RNA, 19 nt, Human
uauaugaaaacuauacaac

SEQ ID NO: 2801930 - RNA, 15 nt, Human
uauauggacauggca

SEQ ID NO: 2801931 - RNA, 19 nt, Human
uauauggaugauucagaaa

SEQ ID NO: 2801932 - RNA, 16 nt, Human
uauauggaugauucag

SEQ ID NO: 2801933 - RNA, 18 nt, Human
uauauggaugauucagaa

SEQ ID NO: 2801934 - RNA, 14 nt, Human
uauauuugcuuuuu

SEQ ID NO: 2801935 - RNA, 13 nt, Human
uauauuuguagga

SEQ ID NO: 2801936 - RNA, 17 nt, Human
uauauuuguaggagaaa

SEQ ID NO: 2801937 - RNA, 13 nt, Human
uauauuuguaucg

SEQ ID NO: 2801938 - RNA, 21 nt, Human
uauauuuuuauaauaaacaua

SEQ ID NO: 2801939 - RNA, 13 nt, Human
uauauuuuuauau

SEQ ID NO: 2801940 - RNA, 18 nt, Human
uauauuuuuuuaauuuaa

SEQ ID NO: 2801941 - RNA, 12 nt, Human
uauauuuucgua

SEQ ID NO: 2801942 - RNA, 16 nt, Human
uauauuuucguaugaa

SEQ ID NO: 2801943 - RNA, 18 nt, Human
uauauuuucguaugaaaa

SEQ ID NO: 2801944 - RNA, 20 nt, Human
uauauuuucguaugaaaaug

SEQ ID NO: 2801945 - RNA, 11 nt, Human
uauauuuugac

SEQ ID NO: 2801946 - RNA, 18 nt, Human
uauauuuuuaaaaaauga

SEQ ID NO: 2801947 - RNA, 21 nt, Human
uauauuuuuaaaaaaugaaau

SEQ ID NO: 2801948 - RNA, 20 nt, Human
uaucaaacagaauuuuaaag

SEQ ID NO: 2801949 - RNA, 19 nt, Human
uaucaggugcugccaucca

SEQ ID NO: 2801950 - RNA, 20 nt, Human
uaucaggugcugccauccag

SEQ ID NO: 2801951 - RNA, 21 nt, Human
uaucagucaauauuuuuagau

SEQ ID NO: 2801952 - RNA, 20 nt, Human
uaucagucaauauuuuuaga

SEQ ID NO: 2801953 - RNA, 20 nt, Human
uaucaguuuguccuguagag

SEQ ID NO: 2801954 - RNA, 16 nt, Human
uaucauacaaaucagu

SEQ ID NO: 2801955 - RNA, 22 nt, Human
uaucauacaaaucaguuaguuu

SEQ ID NO: 2801956 - RNA, 15 nt, Human
uaucauacuguucaa

SEQ ID NO: 2801957 - RNA, 15 nt, Human
uaucauagaaaugua

SEQ ID NO: 2801958 - RNA, 14 nt, Human
uaucauagaaaugu

SEQ ID NO: 2801959 - RNA, 13 nt, Human
uaucaugacaugu

SEQ ID NO: 2801960 - RNA, 14 nt, Human
uaucaugacauguu

SEQ ID NO: 2801961 - RNA, 18 nt, Human
uaucauagaaauguaacu

SEQ ID NO: 2801962 - RNA, 23 nt, Human
uaucauagaaauguaacuuuugu

SEQ ID NO: 2801963 - RNA, 13 nt, Human
uaucauaguuaac

SEQ ID NO: 2801964 - RNA, 15 nt, Human
uaucauaguuaacau

SEQ ID NO: 2801965 - RNA, 16 nt, Human
uaucauaguuaacaua

SEQ ID NO: 2801966 - RNA, 15 nt, Human
uaucauauugguauu

SEQ ID NO: 2801967 - RNA, 18 nt, Human
uaucauuaaaagaacaua

SEQ ID NO: 2801968 - RNA, 16 nt, Human
uaucauguaaagaaau

SEQ ID NO: 2801969 - RNA, 21 nt, Human
uaucauguaaagaaaugucuu

SEQ ID NO: 2801970 - RNA, 21 nt, Human
uaucaugcuuuaaaguguaau

SEQ ID NO: 2801971 - RNA, 22 nt, Human
uaucaugcuuuaaaguguaaua

SEQ ID NO: 2801972 - RNA, 23 nt, Human
uaucaugcuuuaaaguguaauaa

SEQ ID NO: 2801973 - RNA, 17 nt, Human
uaucaugcuuugaaaaa

SEQ ID NO: 2801974 - RNA, 15 nt, Human
uauauaaagaauaua

SEQ ID NO: 2801975 - RNA, 18 nt, Human
uauauaaagaauauauau

SEQ ID NO: 2801976 - RNA, 19 nt, Human
uauauaaagaauauauaua

SEQ ID NO: 2801977 - RNA, 12 nt, Human
uauauaaaguau

SEQ ID NO: 2801978 - RNA, 13 nt, Human
uauauaagaaaga

SEQ ID NO: 2801979 - RNA, 14 nt, Human
uauauaagaaagac

SEQ ID NO: 2801980 - RNA, 15 nt, Human
uauauaagaaagaca

SEQ ID NO: 2801981 - RNA, 16 nt, Human
uauauaagaaagacau

SEQ ID NO: 2801982 - RNA, 17 nt, Human
uauauaagaaagacauc

SEQ ID NO: 2801983 - RNA, 20 nt, Human
uauauaagagcaugaaauuu

SEQ ID NO: 2801984 - RNA, 23 nt, Human
uauauaagagcaugaaauuuuua

SEQ ID NO: 2801985 - RNA, 13 nt, Human
uauauaacagaua

SEQ ID NO: 2801986 - RNA, 17 nt, Human
uauauaacagauacauu

SEQ ID NO: 2801987 - RNA, 18 nt, Human
uauauaacagauacauuu

SEQ ID NO: 2801988 - RNA, 20 nt, Human
uauaucugggcuggccaguu

SEQ ID NO: 2801989 - RNA, 11 nt, Human
uauaucuguau

SEQ ID NO: 2801990 - RNA, 14 nt, Human
uauaucuguaugua

SEQ ID NO: 2801991 - RNA, 15 nt, Human
uauaucuguauguau

SEQ ID NO: 2801992 - RNA, 20 nt, Human
uauaucuguauguauuagug

SEQ ID NO: 2801993 - RNA, 14 nt, Human
uauaucuguggucu

SEQ ID NO: 2801994 - RNA, 18 nt, Human
uauaucuguggucuucaa

SEQ ID NO: 2801995 - RNA, 16 nt, Human
uauaucugcuucagug

SEQ ID NO: 2801996 - RNA, 17 nt, Human
uauaucugcuucagugg

SEQ ID NO: 2801997 - RNA, 14 nt, Human
uauaucuggaauga

SEQ ID NO: 2801998 - RNA, 22 nt, Human
uauagagauguuuuuaaaaguu

SEQ ID NO: 2801999 - RNA, 16 nt, Human
uauagaguucauccca

SEQ ID NO: 2802000 - RNA, 17 nt, Human
uauagaguucaucccag

SEQ ID NO: 2802001 - RNA, 21 nt, Human
uauagaggacccuaacacagu

SEQ ID NO: 2802002 - RNA, 12 nt, Human
uauaguacauga

SEQ ID NO: 2802003 - RNA, 16 nt, Human
uauaguacaugauaaa

SEQ ID NO: 2802004 - RNA, 14 nt, Human
uauaguacaugaua

SEQ ID NO: 2802005 - RNA, 13 nt, Human
uauaguacaugau

SEQ ID NO: 2802006 - RNA, 13 nt, Human
uauagucauuuau

SEQ ID NO: 2802007 - RNA, 21 nt, Human
uauagucauuuauuuuaaaaa

SEQ ID NO: 2802008 - RNA, 22 nt, Human
uauagucauuuauuuuaaaaaa

SEQ ID NO: 2802009 - RNA, 18 nt, Human
uauaguauuugauucaaa

SEQ ID NO: 2802010 - RNA, 19 nt, Human
uauaguauuugauucaaaa

SEQ ID NO: 2802011 - RNA, 20 nt, Human
uauagucccagcuacucaga

SEQ ID NO: 2802012 - RNA, 22 nt, Human
uauaguuuugaauccuuugccu

SEQ ID NO: 2802013 - RNA, 23 nt, Human
uauaguuuugaauccuuugccug

SEQ ID NO: 2802014 - RNA, 14 nt, Human
uauauaaaaauaua

SEQ ID NO: 2802015 - RNA, 15 nt, Human
uauauaaaaauauau

SEQ ID NO: 2802016 - RNA, 18 nt, Human
uauauaaaaauauauaua

SEQ ID NO: 2802017 - RNA, 21 nt, Human
uauauaaaaauauauauagug

SEQ ID NO: 2802018 - RNA, 15 nt, Human
uauacuuuaguauga

SEQ ID NO: 2802019 - RNA, 19 nt, Human
uauagaaauauauacgaac

SEQ ID NO: 2802020 - RNA, 21 nt, Human
uauagaaauauauacgaacaa

SEQ ID NO: 2802021 - RNA, 19 nt, Human
uauagacugccgugcauua

SEQ ID NO: 2802022 - RNA, 22 nt, Human
uauagagaaaggucuaugcaga

SEQ ID NO: 2802023 - RNA, 23 nt, Human
uauagacaguccuuaaaaaucac

SEQ ID NO: 2802024 - RNA, 14 nt, Human
uauagacaguuugu

SEQ ID NO: 2802025 - RNA, 15 nt, Human
uauagacaguuugua

SEQ ID NO: 2802026 - RNA, 16 nt, Human
uauagacaguuuguaa

SEQ ID NO: 2802027 - RNA, 17 nt, Human
uauagacaguuuguaaa

SEQ ID NO: 2802028 - RNA, 21 nt, Human
uauagacaguuuguaaauguu

SEQ ID NO: 2802029 - RNA, 19 nt, Human
uauagacauugaggaccuc

SEQ ID NO: 2802030 - RNA, 16 nt, Human
uauagacaaauaauaa

SEQ ID NO: 2802031 - RNA, 16 nt, Human
uauagacacccuggca

SEQ ID NO: 2802032 - RNA, 14 nt, Human
uauagacagcuuug

SEQ ID NO: 2802033 - RNA, 17 nt, Human
uauagacagcuuugacu

SEQ ID NO: 2802034 - RNA, 15 nt, Human
uauagaauuagcuuu

SEQ ID NO: 2802035 - RNA, 16 nt, Human
uauagaauuagcuuuu

SEQ ID NO: 2802036 - RNA, 20 nt, Human
uauagaauuagcuuuuucau

SEQ ID NO: 2802037 - RNA, 22 nt, Human
uauagaauuagcuuuuucaucc

SEQ ID NO: 2802038 - RNA, 16 nt, Human
uauagaaguuugucca

SEQ ID NO: 2802039 - RNA, 14 nt, Human
uauacuuuaaauaa

SEQ ID NO: 2802040 - RNA, 11 nt, Human
uauacuuuuuu

SEQ ID NO: 2802041 - RNA, 23 nt, Human
uauacuuugguuggcagcauucc

SEQ ID NO: 2802042 - RNA, 14 nt, Human
uauacuuuguggac

SEQ ID NO: 2802043 - RNA, 20 nt, Human
uauacuuuguggaccaauua

SEQ ID NO: 2802044 - RNA, 13 nt, Human
uauaaauaggaga

SEQ ID NO: 2802045 - RNA, 19 nt, Human
uauacuugugguuuucaaa

SEQ ID NO: 2802046 - RNA, 22 nt, Human
uauacuugugguuuucaaauug

SEQ ID NO: 2802047 - RNA, 16 nt, Human
uauacuuuaaauaauu

SEQ ID NO: 2802048 - RNA, 21 nt, Human
uauacuuuaaauaauuuaacu

SEQ ID NO: 2802049 - RNA, 12 nt, Human
uauacuuuagua

SEQ ID NO: 2802050 - RNA, 12 nt, Human
uauagaaagaua

SEQ ID NO: 2802051 - RNA, 13 nt, Human
uauaaagugcuug

SEQ ID NO: 2802052 - RNA, 17 nt, Human
uauaaagugcuugugua

SEQ ID NO: 2802053 - RNA, 18 nt, Human
uauaaagugcuuguguaa

SEQ ID NO: 2802054 - RNA, 19 nt, Human
uauaaagugcuuguguaau

SEQ ID NO: 2802055 - RNA, 15 nt, Human
uauaaaguauagaga

SEQ ID NO: 2802056 - RNA, 18 nt, Human
uauaaaguauagagagaa

SEQ ID NO: 2802057 - RNA, 19 nt, Human
uauaaaguauagagagaag

SEQ ID NO: 2802058 - RNA, 20 nt, Human
uauaaaguauagagagaagu

SEQ ID NO: 2802059 - RNA, 19 nt, Human
uauaaacuaucaguuuguc

SEQ ID NO: 2802060 - RNA, 20 nt, Human
uauaaacagacaauauguga

SEQ ID NO: 2802061 - RNA, 19 nt, Human
uauaaaguacccaucuagu

SEQ ID NO: 2802062 - RNA, 23 nt, Human
uauaaaguacccaucuaguacuu

SEQ ID NO: 2802063 - RNA, 17 nt, Human
uaguauucauucugcau

SEQ ID NO: 2802064 - RNA, 22 nt, Human
uaguauugaauacuuacauucu

SEQ ID NO: 2802065 - RNA, 16 nt, Human
uaguaugguggcuggg

SEQ ID NO: 2802066 - RNA, 20 nt, Human
uaguggcuuaaaacaacacu

SEQ ID NO: 2802067 - RNA, 20 nt, Human
uaguggcuucauuagagcag

SEQ ID NO: 2802068 - RNA, 16 nt, Human
uaguggcuuguccuca

SEQ ID NO: 2802069 - RNA, 18 nt, Human
uagugggcaccccacugc

SEQ ID NO: 2802070 - RNA, 14 nt, Human
uagugggccagggc

SEQ ID NO: 2802071 - RNA, 15 nt, Human
uagugggccagggcu

SEQ ID NO: 2802072 - RNA, 18 nt, Human
uaguauuuauuuauguac

SEQ ID NO: 2802073 - RNA, 16 nt, Human
uaguauuuauuuaugu

SEQ ID NO: 2802074 - RNA, 16 nt, Human
uaguggucuuuguaag

SEQ ID NO: 2802075 - RNA, 13 nt, Human
uaguggucuuugu

SEQ ID NO: 2802076 - RNA, 14 nt, Human
uaguggucuuugua

SEQ ID NO: 2802077 - RNA, 15 nt, Human
uaguggucuuuguaa

SEQ ID NO: 2802078 - RNA, 22 nt, Human
uaguucuguuugguguguccca

SEQ ID NO: 2802079 - RNA, 15 nt, Human
uauaaaauuagaaag

SEQ ID NO: 2802080 - RNA, 18 nt, Human
uauaaaauuagaaagcaa

SEQ ID NO: 2802081 - RNA, 13 nt, Human
uaguuuacagaaa

SEQ ID NO: 2802082 - RNA, 19 nt, Human
uaguuuacagaaaaaucuu

SEQ ID NO: 2802083 - RNA, 20 nt, Human
uaguuuacagaaaaaucuug

SEQ ID NO: 2802084 - RNA, 16 nt, Human
uaguuguuuuaaguac

SEQ ID NO: 2802085 - RNA, 16 nt, Human
uaguuuaaaacacauu

SEQ ID NO: 2802086 - RNA, 22 nt, Human
uaguuuaaccauaugcccacau

SEQ ID NO: 2802087 - RNA, 12 nt, Human
uaguuucuugug

SEQ ID NO: 2802088 - RNA, 17 nt, Human
uaguuuaccucuuuaaa

SEQ ID NO: 2802089 - RNA, 14 nt, Human
uauaaacaucacac

SEQ ID NO: 2802090 - RNA, 17 nt, Human
uauaaacaucacacaca

SEQ ID NO: 2802091 - RNA, 18 nt, Human
uauaaacaucacacacac

SEQ ID NO: 2802092 - RNA, 18 nt, Human
uauaaacaaagauucaug

SEQ ID NO: 2802093 - RNA, 14 nt, Human
uaguuucuuuggga

SEQ ID NO: 2802094 - RNA, 20 nt, Human
uaguuugaccucacagugac

SEQ ID NO: 2802095 - RNA, 21 nt, Human
uaguuugaccucacagugacc

SEQ ID NO: 2802096 - RNA, 17 nt, Human
uaguuugacucaguaua

SEQ ID NO: 2802097 - RNA, 16 nt, Human
uauaaacauuaaaugu

SEQ ID NO: 2802098 - RNA, 18 nt, Human
uauaaacauuaaaugucu

SEQ ID NO: 2802099 - RNA, 19 nt, Human
uauaaacauuaaaugucuu

SEQ ID NO: 2802100 - RNA, 19 nt, Human
uauaaagggggagggaaau

SEQ ID NO: 2802101 - RNA, 21 nt, Human
uauaaagggggagggaaauag

SEQ ID NO: 2802102 - RNA, 14 nt, Human
uaggucuuuguaag

SEQ ID NO: 2802103 - RNA, 16 nt, Human
uaggugacagagugag

SEQ ID NO: 2802104 - RNA, 11 nt, Human
uaggugacaga

SEQ ID NO: 2802105 - RNA, 14 nt, Human
uaggcuuucagcuu

SEQ ID NO: 2802106 - RNA, 19 nt, Human
uaggucucggacuaagccu

SEQ ID NO: 2802107 - RNA, 17 nt, Human
uaggucucuucucccag

SEQ ID NO: 2802108 - RNA, 18 nt, Human
uaggucucuucucccaga

SEQ ID NO: 2802109 - RNA, 19 nt, Human
uaggucucuucucccagaa

SEQ ID NO: 2802110 - RNA, 20 nt, Human
uaggucucuucucccagaau

SEQ ID NO: 2802111 - RNA, 21 nt, Human
uagcugucugcucagacagaa

SEQ ID NO: 2802112 - RNA, 17 nt, Human
uagcugucuagaguagc

SEQ ID NO: 2802113 - RNA, 13 nt, Human
uaggcucugccuu

SEQ ID NO: 2802114 - RNA, 15 nt, Human
uaggcucugccuucg

SEQ ID NO: 2802115 - RNA, 12 nt, Human
uagcuguaaaac

SEQ ID NO: 2802116 - RNA, 15 nt, Human
uagcugucuagagua

SEQ ID NO: 2802117 - RNA, 16 nt, Human
uaguagcccuuucugu

SEQ ID NO: 2802118 - RNA, 17 nt, Human
uaguagcccuuucugug

SEQ ID NO: 2802119 - RNA, 18 nt, Human
uaguagcccuuucugugu

SEQ ID NO: 2802120 - RNA, 19 nt, Human
uaguagcguuuuuuaaaug

SEQ ID NO: 2802121 - RNA, 19 nt, Human
uaguagcccuuucugugug

SEQ ID NO: 2802122 - RNA, 23 nt, Human
uaguagcguuuuuuaaauguaua

SEQ ID NO: 2802123 - RNA, 21 nt, Human
uaguagcguuuuuuaaaugua

SEQ ID NO: 2802124 - RNA, 17 nt, Human
uagguucccuguucuuc

SEQ ID NO: 2802125 - RNA, 20 nt, Human
uagguucccuguucuuccuc

SEQ ID NO: 2802126 - RNA, 21 nt, Human
uagguucccuguucuuccucc

SEQ ID NO: 2802127 - RNA, 22 nt, Human
uagguucccuguucuuccucca

SEQ ID NO: 2802128 - RNA, 13 nt, Human
uagguucuaaagu

SEQ ID NO: 2802129 - RNA, 14 nt, Human
uagguucaauuccc

SEQ ID NO: 2802130 - RNA, 22 nt, Human
uagguucuaaaguucuaagauu

SEQ ID NO: 2802131 - RNA, 20 nt, Human
uagguucuaaaguucuaaga

SEQ ID NO: 2802132 - RNA, 21 nt, Human
uagguucuaaaguucuaagau

SEQ ID NO: 2802133 - RNA, 15 nt, Human
uagguucuaaaguuc

SEQ ID NO: 2802134 - RNA, 16 nt, Human
uagguucuaaaguucu

SEQ ID NO: 2802135 - RNA, 17 nt, Human
uagguucuaaaguucua

SEQ ID NO: 2802136 - RNA, 18 nt, Human
uagguucuaaaguucuaa

SEQ ID NO: 2802137 - RNA, 18 nt, Human
uagguucuuugcugcauu

SEQ ID NO: 2802138 - RNA, 16 nt, Human
uagguggcaaggcugu

SEQ ID NO: 2802139 - RNA, 15 nt, Human
uagguggcaaggcug

SEQ ID NO: 2802140 - RNA, 22 nt, Human
uagguuaauuccaauuauauga

SEQ ID NO: 2802141 - RNA, 13 nt, Human
uagguuaaaaaaa

SEQ ID NO: 2802142 - RNA, 17 nt, Human
uagguuaaaaaaaggca

SEQ ID NO: 2802143 - RNA, 14 nt, Human
uagaguucauccca

SEQ ID NO: 2802144 - RNA, 16 nt, Human
uagauuagaaaaauuc

SEQ ID NO: 2802145 - RNA, 15 nt, Human
uagauuaauggcacu

SEQ ID NO: 2802146 - RNA, 16 nt, Human
uagauuaauggcacug

SEQ ID NO: 2802147 - RNA, 17 nt, Human
uagauuaauggcacuga

SEQ ID NO: 2802148 - RNA, 18 nt, Human
uagauuaauggcacugau

SEQ ID NO: 2802149 - RNA, 22 nt, Human
uagauagcugcauguggcuuuu

SEQ ID NO: 2802150 - RNA, 14 nt, Human
uagauuauaucaaa

SEQ ID NO: 2802151 - RNA, 15 nt, Human
uagauuauaucaaag

SEQ ID NO: 2802152 - RNA, 17 nt, Human
uagauuauaucaaagua

SEQ ID NO: 2802153 - RNA, 19 nt, Human
uagauuauaucaaaguauu

SEQ ID NO: 2802154 - RNA, 13 nt, Human
uagauucaaaggu

SEQ ID NO: 2802155 - RNA, 15 nt, Human
uagauucaaagguuc

SEQ ID NO: 2802156 - RNA, 16 nt, Human
uagauucaaagguucu

SEQ ID NO: 2802157 - RNA, 20 nt, Human
uagauuccauugguccaaga

SEQ ID NO: 2802158 - RNA, 21 nt, Human
uagauuccauugguccaagau

SEQ ID NO: 2802159 - RNA, 17 nt, Human
uagauucaaagguucua

SEQ ID NO: 2802160 - RNA, 18 nt, Human
uagauucaaagguucuag

SEQ ID NO: 2802161 - RNA, 14 nt, Human
uagauuugaccucc

SEQ ID NO: 2802162 - RNA, 21 nt, Human
uagauuuauuuuucaguucca

SEQ ID NO: 2802163 - RNA, 22 nt, Human
uagauuuauuuuucaguuccaa

SEQ ID NO: 2802164 - RNA, 14 nt, Human
uagauucuaaagau

SEQ ID NO: 2802165 - RNA, 14 nt, Human
uagauuuaguguaa

SEQ ID NO: 2802166 - RNA, 11 nt, Human
uagauucuaaa

SEQ ID NO: 2802167 - RNA, 12 nt, Human
uagauucuaaag

SEQ ID NO: 2802168 - RNA, 13 nt, Human
uagauucuaaaga

SEQ ID NO: 2802169 - RNA, 11 nt, Human
uagcagggaaa

SEQ ID NO: 2802170 - RNA, 22 nt, Human
uagcagcggaacaaggagucag

SEQ ID NO: 2802171 - RNA, 15 nt, Human
uagcaucauccugca

SEQ ID NO: 2802172 - RNA, 15 nt, Human
uagcauccuaagaaa

SEQ ID NO: 2802173 - RNA, 16 nt, Human
uagcauccuaagaaau

SEQ ID NO: 2802174 - RNA, 17 nt, Human
uagcauccuaagaaaua

SEQ ID NO: 2802175 - RNA, 18 nt, Human
uagcauccuaagaaauau

SEQ ID NO: 2802176 - RNA, 19 nt, Human
uagcauccuaagaaauaug

SEQ ID NO: 2802177 - RNA, 20 nt, Human
uagcauccuaagaaauaugu

SEQ ID NO: 2802178 - RNA, 22 nt, Human
uagcauccuaagaaauauguga

SEQ ID NO: 2802179 - RNA, 23 nt, Human
uagcauccuaagaaauaugugag

SEQ ID NO: 2802180 - RNA, 22 nt, Human
uagcaucucaggagauuucaug

SEQ ID NO: 2802181 - RNA, 18 nt, Human
uagcaucugcauugccca

SEQ ID NO: 2802182 - RNA, 14 nt, Human
uagcaucuguacaa

SEQ ID NO: 2802183 - RNA, 15 nt, Human
uagcaucuguacaaa

SEQ ID NO: 2802184 - RNA, 17 nt, Human
uagcaucuguacaaagg

SEQ ID NO: 2802185 - RNA, 22 nt, Human
uagcauauucuuuucugcaaaa

SEQ ID NO: 2802186 - RNA, 19 nt, Human
uagcauagcuuauuauuga

SEQ ID NO: 2802187 - RNA, 18 nt, Human
uagcaggccaaggucuga

SEQ ID NO: 2802188 - RNA, 22 nt, Human
uagcaggccaaggucugagcca

SEQ ID NO: 2802189 - RNA, 19 nt, Human
uagccgcccaugcacuggg

SEQ ID NO: 2802190 - RNA, 16 nt, Human
uagcccccuggccucu

SEQ ID NO: 2802191 - RNA, 17 nt, Human
uagcccccuggccucug

SEQ ID NO: 2802192 - RNA, 18 nt, Human
uagcccccuggccucugu

SEQ ID NO: 2802193 - RNA, 15 nt, Human
uagcccccuggccuc

SEQ ID NO: 2802194 - RNA, 14 nt, Human
uagccccucccaag

SEQ ID NO: 2802195 - RNA, 20 nt, Human
uagccccucccaagcuggcu

SEQ ID NO: 2802196 - RNA, 22 nt, Human
uagccccucccaagcuggcugg

SEQ ID NO: 2802197 - RNA, 13 nt, Human
uagcaugccaaca

SEQ ID NO: 2802198 - RNA, 14 nt, Human
uagcaugccaacaa

SEQ ID NO: 2802199 - RNA, 19 nt, Human
uagcaugccaacaagaaug

SEQ ID NO: 2802200 - RNA, 20 nt, Human
uagcaugccaacaagaaugc

SEQ ID NO: 2802201 - RNA, 21 nt, Human
uagcaugccaacaagaaugca

SEQ ID NO: 2802202 - RNA, 17 nt, Human
uagcauggauagaguau

SEQ ID NO: 2802203 - RNA, 13 nt, Human
uagauuuggaaua

SEQ ID NO: 2802204 - RNA, 19 nt, Human
uagccagcacuuguauaua

SEQ ID NO: 2802205 - RNA, 13 nt, Human
uagccaggaucau

SEQ ID NO: 2802206 - RNA, 15 nt, Human
uagccaggaucaugg

SEQ ID NO: 2802207 - RNA, 18 nt, Human
uagccaggaucauggugu

SEQ ID NO: 2802208 - RNA, 20 nt, Human
uagccaggaucaugguguaa

SEQ ID NO: 2802209 - RNA, 22 nt, Human
uagccaggaucaugguguaaua

SEQ ID NO: 2802210 - RNA, 23 nt, Human
uagccaggaucaugguguaauaa

SEQ ID NO: 2802211 - RNA, 22 nt, Human
uagccagggggacuagccccug

SEQ ID NO: 2802212 - RNA, 18 nt, Human
uagccaggucccccugca

SEQ ID NO: 2802213 - RNA, 19 nt, Human
uagccaggucccccugcag

SEQ ID NO: 2802214 - RNA, 21 nt, Human
uagccaggucccccugcagcu

SEQ ID NO: 2802215 - RNA, 16 nt, Human
uagccagugcuccagg

SEQ ID NO: 2802216 - RNA, 23 nt, Human
uagccagugcuccaggcacccag

SEQ ID NO: 2802217 - RNA, 13 nt, Human
uagccccauaauu

SEQ ID NO: 2802218 - RNA, 21 nt, Human
uagcucaggugucccugcacu

SEQ ID NO: 2802219 - RNA, 20 nt, Human
uagcucaggugucccugcac

SEQ ID NO: 2802220 - RNA, 20 nt, Human
uagccuggagcaccuuuccu

SEQ ID NO: 2802221 - RNA, 20 nt, Human
uagccuggauacaguauaaa

SEQ ID NO: 2802222 - RNA, 22 nt, Human
uagccuggauauuauucuugua

SEQ ID NO: 2802223 - RNA, 20 nt, Human
uagccuaauacaacauguag

SEQ ID NO: 2802224 - RNA, 18 nt, Human
uagccuagauaugaauau

SEQ ID NO: 2802225 - RNA, 22 nt, Human
uagccuagauaugaauauaugg

SEQ ID NO: 2802226 - RNA, 19 nt, Human
uagcugggacuacaggcac

SEQ ID NO: 2802227 - RNA, 17 nt, Human
uagcugggacuacaggc

SEQ ID NO: 2802228 - RNA, 15 nt, Human
uagcugggacuacag

SEQ ID NO: 2802229 - RNA, 12 nt, Human
uagcugggacua

SEQ ID NO: 2802230 - RNA, 19 nt, Human
uagcucuuuuuuguuuguu

SEQ ID NO: 2802231 - RNA, 22 nt, Human
uagcucuuuuuuguuuguuucu

SEQ ID NO: 2802232 - RNA, 23 nt, Human
uagcucuuuuuuguuuguuucuu

SEQ ID NO: 2802233 - RNA, 21 nt, Human
uagcugaugaacuuauucugu

SEQ ID NO: 2802234 - RNA, 23 nt, Human
uagcugaugaacuuauucuguag

SEQ ID NO: 2802235 - RNA, 16 nt, Human
uagaauuauuuaaaca

SEQ ID NO: 2802236 - RNA, 20 nt, Human
uagaauuauuucacaaauaa

SEQ ID NO: 2802237 - RNA, 23 nt, Human
uagaauuauuucacaaauaauag

SEQ ID NO: 2802238 - RNA, 12 nt, Human
uagaauuauuua

SEQ ID NO: 2802239 - RNA, 15 nt, Human
uagaauuauuuaaac

SEQ ID NO: 2802240 - RNA, 14 nt, Human
uagaauuagcuuuu

SEQ ID NO: 2802241 - RNA, 19 nt, Human
uagaauuagcuuuuucauc

SEQ ID NO: 2802242 - RNA, 17 nt, Human
uagaauuauaagucaca

SEQ ID NO: 2802243 - RNA, 18 nt, Human
uagaaucugcaauucaaa

SEQ ID NO: 2802244 - RNA, 22 nt, Human
uagaaucugcaauucaaaaguu

SEQ ID NO: 2802245 - RNA, 13 nt, Human
uagaaucuauuuu

SEQ ID NO: 2802246 - RNA, 15 nt, Human
uagaaucuauuuucu

SEQ ID NO: 2802247 - RNA, 16 nt, Human
uagaaucuauuuucua

SEQ ID NO: 2802248 - RNA, 17 nt, Human
uagaaucuauuuucuau

SEQ ID NO: 2802249 - RNA, 18 nt, Human
uagaaucuauuuucuaug

SEQ ID NO: 2802250 - RNA, 19 nt, Human
uagaaucuauuuucuaugu

SEQ ID NO: 2802251 - RNA, 20 nt, Human
uagaaucuauuuucuaugua

SEQ ID NO: 2802252 - RNA, 22 nt, Human
uagaaucuauuuucuauguacu

SEQ ID NO: 2802253 - RNA, 20 nt, Human
uagaauccacguauuccccu

SEQ ID NO: 2802254 - RNA, 17 nt, Human
uagaaugaaaacucauu

SEQ ID NO: 2802255 - RNA, 18 nt, Human
uagaaugaaccacugccc

SEQ ID NO: 2802256 - RNA, 21 nt, Human
uagaaugauuucaugcuaucu

SEQ ID NO: 2802257 - RNA, 21 nt, Human
uagaauggauaaaauaaugcu

SEQ ID NO: 2802258 - RNA, 22 nt, Human
uagaauggauaaaauaaugcug

SEQ ID NO: 2802259 - RNA, 16 nt, Human
uagaaugauuucaugc

SEQ ID NO: 2802260 - RNA, 14 nt, Human
uagaaugagaucug

SEQ ID NO: 2802261 - RNA, 17 nt, Human
uagaaugagaucugaau

SEQ ID NO: 2802262 - RNA, 14 nt, Human
uagaaguuugucca

SEQ ID NO: 2802263 - RNA, 21 nt, Human
uagaaguuuguccauuuguaa

SEQ ID NO: 2802264 - RNA, 23 nt, Human
uagaaguuuguccauuuguaaaa

SEQ ID NO: 2802265 - RNA, 18 nt, Human
uagaaguuguuugucauc

SEQ ID NO: 2802266 - RNA, 16 nt, Human
uagaaguuucccuucc

SEQ ID NO: 2802267 - RNA, 18 nt, Human
uagaauacuuuuuaaaag

SEQ ID NO: 2802268 - RNA, 17 nt, Human
uagaauaaucuugcuca

SEQ ID NO: 2802269 - RNA, 15 nt, Human
uagaauauaggucuc

SEQ ID NO: 2802270 - RNA, 16 nt, Human
uagaauauaggucucu

SEQ ID NO: 2802271 - RNA, 19 nt, Human
uagaauauaggucucuucu

SEQ ID NO: 2802272 - RNA, 21 nt, Human
uagaauauaggucucuucucc

SEQ ID NO: 2802273 - RNA, 22 nt, Human
uagaauauaggucucuucuccc

SEQ ID NO: 2802274 - RNA, 21 nt, Human
uagaauagccuguggccuuug

SEQ ID NO: 2802275 - RNA, 15 nt, Human
uagaaucaaucagua

SEQ ID NO: 2802276 - RNA, 14 nt, Human
uacuuuaaacuugu

SEQ ID NO: 2802277 - RNA, 17 nt, Human
uacuuuaaacuugucuu

SEQ ID NO: 2802278 - RNA, 21 nt, Human
uacuguuuaccauuuuucauu

SEQ ID NO: 2802279 - RNA, 16 nt, Human
uacuuguuucucuguu

SEQ ID NO: 2802280 - RNA, 20 nt, Human
uacuuguuucucuguuguaa

SEQ ID NO: 2802281 - RNA, 15 nt, Human
uagaagugcauuucu

SEQ ID NO: 2802282 - RNA, 16 nt, Human
uagaagugcauuucug

SEQ ID NO: 2802283 - RNA, 17 nt, Human
uagaagugcauuucuga

SEQ ID NO: 2802284 - RNA, 18 nt, Human
uagaagugcauuucugaa

SEQ ID NO: 2802285 - RNA, 23 nt, Human
uagaagugcauuucugaauagaa

SEQ ID NO: 2802286 - RNA, 16 nt, Human
uagaagugcuccccuc

SEQ ID NO: 2802287 - RNA, 16 nt, Human
uacuuuaaauaauuua

SEQ ID NO: 2802288 - RNA, 15 nt, Human
uagaagugucauguu

SEQ ID NO: 2802289 - RNA, 16 nt, Human
uagaagugucauguuu

SEQ ID NO: 2802290 - RNA, 17 nt, Human
uacuugugguuuucaaa

SEQ ID NO: 2802291 - RNA, 18 nt, Human
uacuugugguuuucaaau

SEQ ID NO: 2802292 - RNA, 18 nt, Human
uacuugugaaacacagcu

SEQ ID NO: 2802293 - RNA, 19 nt, Human
uacuugugaaacacagcug

SEQ ID NO: 2802294 - RNA, 20 nt, Human
uacuugugaaacacagcugu

SEQ ID NO: 2802295 - RNA, 21 nt, Human
uacuugugaaacacagcuguu

SEQ ID NO: 2802296 - RNA, 16 nt, Human
uacuugugauuucgau

SEQ ID NO: 2802297 - RNA, 18 nt, Human
uagaccccauacaaguuu

SEQ ID NO: 2802298 - RNA, 20 nt, Human
uagacccacuggacucaccu

SEQ ID NO: 2802299 - RNA, 15 nt, Human
uagaauaaaguugaa

SEQ ID NO: 2802300 - RNA, 21 nt, Human
uagaauucuguauuggauaua

SEQ ID NO: 2802301 - RNA, 13 nt, Human
uagaccaaggaac

SEQ ID NO: 2802302 - RNA, 14 nt, Human
uagaccaaggaaca

SEQ ID NO: 2802303 - RNA, 15 nt, Human
uagaccaaggaacaa

SEQ ID NO: 2802304 - RNA, 18 nt, Human
uagaccaaggaacaaaaa

SEQ ID NO: 2802305 - RNA, 16 nt, Human
uagaccaggauuucua

SEQ ID NO: 2802306 - RNA, 17 nt, Human
uagaccaggauuucuaa

SEQ ID NO: 2802307 - RNA, 18 nt, Human
uagacuuaauagaaacau

SEQ ID NO: 2802308 - RNA, 19 nt, Human
uagacucuguaacaucacu

SEQ ID NO: 2802309 - RNA, 19 nt, Human
uagacucaucuuacuguac

SEQ ID NO: 2802310 - RNA, 17 nt, Human
uagacucaucuuacugu

SEQ ID NO: 2802311 - RNA, 18 nt, Human
uagacucaucuuacugua

SEQ ID NO: 2802312 - RNA, 21 nt, Human
uagacucaucuuacuguaccu

SEQ ID NO: 2802313 - RNA, 21 nt, Human
uagacucaugguguguuacac

SEQ ID NO: 2802314 - RNA, 13 nt, Human
uagacuauauaca

SEQ ID NO: 2802315 - RNA, 14 nt, Human
uagacuauauacau

SEQ ID NO: 2802316 - RNA, 19 nt, Human
uagacuauauacaugugug

SEQ ID NO: 2802317 - RNA, 20 nt, Human
uagacuauauacaugugugu

SEQ ID NO: 2802318 - RNA, 22 nt, Human
uagacuauauacauguguguau

SEQ ID NO: 2802319 - RNA, 23 nt, Human
uagacuauauacauguguguaua

SEQ ID NO: 2802320 - RNA, 19 nt, Human
uagagguccucuggagccc

SEQ ID NO: 2802321 - RNA, 18 nt, Human
uagagguccucuggagcc

SEQ ID NO: 2802322 - RNA, 17 nt, Human
uagagguccucuggagc

SEQ ID NO: 2802323 - RNA, 17 nt, Human
uagagguauauuggaag

SEQ ID NO: 2802324 - RNA, 23 nt, Human
uagagguaccagcaauauguaaa

SEQ ID NO: 2802325 - RNA, 15 nt, Human
uagagguacuagaau

SEQ ID NO: 2802326 - RNA, 18 nt, Human
uagagguacuagaaugcu

SEQ ID NO: 2802327 - RNA, 14 nt, Human
uagagaagauaauu

SEQ ID NO: 2802328 - RNA, 17 nt, Human
uagagaaggaaagcuuu

SEQ ID NO: 2802329 - RNA, 13 nt, Human
uagagaaggaccc

SEQ ID NO: 2802330 - RNA, 22 nt, Human
uagagaaggacccggaggggcc

SEQ ID NO: 2802331 - RNA, 13 nt, Human
uagagaaugcaca

SEQ ID NO: 2802332 - RNA, 14 nt, Human
uagagaaugcacag

SEQ ID NO: 2802333 - RNA, 22 nt, Human
uagagaaugcacagauauacuu

SEQ ID NO: 2802334 - RNA, 16 nt, Human
uagaguuaagaagcug

SEQ ID NO: 2802335 - RNA, 17 nt, Human
uagaguuaagaagcugu

SEQ ID NO: 2802336 - RNA, 19 nt, Human
uagaguuaagaagcuguug

SEQ ID NO: 2802337 - RNA, 23 nt, Human
uagaguuaagaagcuguuguaca

SEQ ID NO: 2802338 - RNA, 12 nt, Human
uagaguuaagaa

SEQ ID NO: 2802339 - RNA, 13 nt, Human
uagaguuaagaag

SEQ ID NO: 2802340 - RNA, 15 nt, Human
uagaguuaagaagcu

SEQ ID NO: 2802341 - RNA, 20 nt, Human
uagaguguaguuuacagaaa

SEQ ID NO: 2802342 - RNA, 20 nt, Human
uagagguccucuggagcccu

SEQ ID NO: 2802343 - RNA, 13 nt, Human
uagaguccucacu

SEQ ID NO: 2802344 - RNA, 20 nt, Human
uagaguccucacucccaguc

SEQ ID NO: 2802345 - RNA, 14 nt, Human
uagaguccucacuc

SEQ ID NO: 2802346 - RNA, 23 nt, Human
uaauucuauuaaagugcuaaggu

SEQ ID NO: 2802347 - RNA, 12 nt, Human
uaauucucaggc

SEQ ID NO: 2802348 - RNA, 11 nt, Human
uaauucuaaag

SEQ ID NO: 2802349 - RNA, 12 nt, Human
uaauucuaaagg

SEQ ID NO: 2802350 - RNA, 21 nt, Human
uaauuaggcaaggcuauguga

SEQ ID NO: 2802351 - RNA, 22 nt, Human
uaauuaggcaaggcuaugugau

SEQ ID NO: 2802352 - RNA, 16 nt, Human
uaauuagguuaacauu

SEQ ID NO: 2802353 - RNA, 15 nt, Human
uaauuaggguacauu

SEQ ID NO: 2802354 - RNA, 18 nt, Human
uaauuaggguacauuuau

SEQ ID NO: 2802355 - RNA, 19 nt, Human
uaauuaggguacauuuaua

SEQ ID NO: 2802356 - RNA, 20 nt, Human
uaauuaggguacauuuauaa

SEQ ID NO: 2802357 - RNA, 21 nt, Human
uaauuaggguacauuuauaau

SEQ ID NO: 2802358 - RNA, 22 nt, Human
uaauuaggguacauuuauaauu

SEQ ID NO: 2802359 - RNA, 22 nt, Human
uaauuccucucacuaaacuuua

SEQ ID NO: 2802360 - RNA, 19 nt, Human
uaauuccucaacguauugu

SEQ ID NO: 2802361 - RNA, 14 nt, Human
uaauuuuuacccua

SEQ ID NO: 2802362 - RNA, 18 nt, Human
uaauuuuuacccuaaugu

SEQ ID NO: 2802363 - RNA, 20 nt, Human
uaauuuuuacccuaaugucu

SEQ ID NO: 2802364 - RNA, 21 nt, Human
uaauuuuuacccuaaugucuu

SEQ ID NO: 2802365 - RNA, 14 nt, Human
uacaaacaaucucu

SEQ ID NO: 2802366 - RNA, 15 nt, Human
uacaaacaaucucuu

SEQ ID NO: 2802367 - RNA, 20 nt, Human
uacaaacaaucucuuaaauu

SEQ ID NO: 2802368 - RNA, 15 nt, Human
uaauucucaggccau

SEQ ID NO: 2802369 - RNA, 16 nt, Human
uacaaauauaaaucuu

SEQ ID NO: 2802370 - RNA, 17 nt, Human
uacaaauauaaaucuua

SEQ ID NO: 2802371 - RNA, 16 nt, Human
uacaaaucaaguauuu

SEQ ID NO: 2802372 - RNA, 17 nt, Human
uacaaauauaagauuuu

SEQ ID NO: 2802373 - RNA, 13 nt, Human
uacaaauauauug

SEQ ID NO: 2802374 - RNA, 14 nt, Human
uacaaauauauugu

SEQ ID NO: 2802375 - RNA, 15 nt, Human
uacaaauauauuguu

SEQ ID NO: 2802376 - RNA, 17 nt, Human
uacaaauauauuguuaa

SEQ ID NO: 2802377 - RNA, 13 nt, Human
uacaaaccuacca

SEQ ID NO: 2802378 - RNA, 16 nt, Human
uacaaacuaaggugcu

SEQ ID NO: 2802379 - RNA, 19 nt, Human
uacaaacucccacuuguca

SEQ ID NO: 2802380 - RNA, 18 nt, Human
uacaaagcacuagagaau

SEQ ID NO: 2802381 - RNA, 23 nt, Human
uacaaagcacuagagaaugcaca

SEQ ID NO: 2802382 - RNA, 16 nt, Human
uaauuuuuauauuuaa

SEQ ID NO: 2802383 - RNA, 21 nt, Human
uacaaagagguguacagguac

SEQ ID NO: 2802384 - RNA, 18 nt, Human
uacaaaggggaaagaaca

SEQ ID NO: 2802385 - RNA, 19 nt, Human
uacaaaggggaaagaacau

SEQ ID NO: 2802386 - RNA, 23 nt, Human
uacaaaggggaaagaacauaaag

SEQ ID NO: 2802387 - RNA, 16 nt, Human
uacaaagcgugcacaa

SEQ ID NO: 2802388 - RNA, 17 nt, Human
uacaaagcgugcacaag

SEQ ID NO: 2802389 - RNA, 15 nt, Human
uacacacacacacac

SEQ ID NO: 2802390 - RNA, 18 nt, Human
uacacacacacacacaca

SEQ ID NO: 2802391 - RNA, 13 nt, Human
uacacacacacac

SEQ ID NO: 2802392 - RNA, 12 nt, Human
uacacacacaca

SEQ ID NO: 2802393 - RNA, 13 nt, Human
uacacaauucuua

SEQ ID NO: 2802394 - RNA, 9 nt, Human
uacacacac

SEQ ID NO: 2802395 - RNA, 10 nt, Human
uacacacaca

SEQ ID NO: 2802396 - RNA, 22 nt, Human
uacacagugggaacucugacaa

SEQ ID NO: 2802397 - RNA, 23 nt, Human
uacacagugggaacucugacaag

SEQ ID NO: 2802398 - RNA, 15 nt, Human
uacacagcucuagac

SEQ ID NO: 2802399 - RNA, 13 nt, Human
uacacauuuguac

SEQ ID NO: 2802400 - RNA, 15 nt, Human
uacacauuuguacag

SEQ ID NO: 2802401 - RNA, 16 nt, Human
uacacauuuguacaga

SEQ ID NO: 2802402 - RNA, 18 nt, Human
uacacauuuguacagaau

SEQ ID NO: 2802403 - RNA, 18 nt, Human
uacacauuaaguaaucaa

SEQ ID NO: 2802404 - RNA, 13 nt, Human
uacacauuagauu

SEQ ID NO: 2802405 - RNA, 14 nt, Human
uacacauuagauuu

SEQ ID NO: 2802406 - RNA, 15 nt, Human
uacacauuagauuuu

SEQ ID NO: 2802407 - RNA, 23 nt, Human
uacacauuagauuuuauuuuacu

SEQ ID NO: 2802408 - RNA, 13 nt, Human
uacacauauaccu

SEQ ID NO: 2802409 - RNA, 14 nt, Human
uacacauauaccua

SEQ ID NO: 2802410 - RNA, 18 nt, Human
uacacauauaccuauaau

SEQ ID NO: 2802411 - RNA, 21 nt, Human
uacacauauaccuauaaugug

SEQ ID NO: 2802412 - RNA, 16 nt, Human
uacacauacaguuuua

SEQ ID NO: 2802413 - RNA, 23 nt, Human
uacacauacaguuuuaugcucuu

SEQ ID NO: 2802414 - RNA, 20 nt, Human
uacacagggauguacaaggc

SEQ ID NO: 2802415 - RNA, 15 nt, Human
uacacugacuugaga

SEQ ID NO: 2802416 - RNA, 13 nt, Human
uacacucuuauag

SEQ ID NO: 2802417 - RNA, 12 nt, Human
uacacucuuaua

SEQ ID NO: 2802418 - RNA, 17 nt, Human
uacacaaugguuuuuaa

SEQ ID NO: 2802419 - RNA, 20 nt, Human
uacacaaugguuuuuaaauu

SEQ ID NO: 2802420 - RNA, 21 nt, Human
uacacaaugguuuuuaaauuu

SEQ ID NO: 2802421 - RNA, 11 nt, Human
uacacacacac

SEQ ID NO: 2802422 - RNA, 23 nt, Human
uacaacaaaggcaaguuaagaga

SEQ ID NO: 2802423 - RNA, 23 nt, Human
uacaacugccucgaaacacagaa

SEQ ID NO: 2802424 - RNA, 13 nt, Human
uacaauugugggc

SEQ ID NO: 2802425 - RNA, 22 nt, Human
uacaauugugggcauaaacugu

SEQ ID NO: 2802426 - RNA, 13 nt, Human
uacaaaugccuua

SEQ ID NO: 2802427 - RNA, 19 nt, Human
uacaaaugccuuaaaaugg

SEQ ID NO: 2802428 - RNA, 20 nt, Human
uacaaaugccuuaaaaugga

SEQ ID NO: 2802429 - RNA, 21 nt, Human
uacaaaugccuuaaaauggaa

SEQ ID NO: 2802430 - RNA, 22 nt, Human
uacaaaugccuuaaaauggaau

SEQ ID NO: 2802431 - RNA, 14 nt, Human
uacaaauuaaaaag

SEQ ID NO: 2802432 - RNA, 15 nt, Human
uacaaauuaaaaaga

SEQ ID NO: 2802433 - RNA, 16 nt, Human
uacaaauuaaaaagau

SEQ ID NO: 2802434 - RNA, 19 nt, Human
uacaaauuaaaaagauucu

SEQ ID NO: 2802435 - RNA, 19 nt, Human
uacaacaagaguuuauuuc

SEQ ID NO: 2802436 - RNA, 13 nt, Human
uacaaauuauaaa

SEQ ID NO: 2802437 - RNA, 15 nt, Human
uacaaauuauaaaaa

SEQ ID NO: 2802438 - RNA, 19 nt, Human
uacaaauuauaaaaagcca

SEQ ID NO: 2802439 - RNA, 21 nt, Human
uacaaauuauaaaaagccacu

SEQ ID NO: 2802440 - RNA, 15 nt, Human
uacaaccucccucuu

SEQ ID NO: 2802441 - RNA, 16 nt, Human
uacaaccucccucuug

SEQ ID NO: 2802442 - RNA, 17 nt, Human
uacaaccucccucuugu

SEQ ID NO: 2802443 - RNA, 21 nt, Human
uacaaccucccucuuguuuug

SEQ ID NO: 2802444 - RNA, 22 nt, Human
uacaaccucccucuuguuuugu

SEQ ID NO: 2802445 - RNA, 13 nt, Human
uacaacagccuca

SEQ ID NO: 2802446 - RNA, 15 nt, Human
uacaacagccucacu

SEQ ID NO: 2802447 - RNA, 21 nt, Human
uacaacauaaucuaguuuaca

SEQ ID NO: 2802448 - RNA, 22 nt, Human
uacaacauaaucuaguuuacag

SEQ ID NO: 2802449 - RNA, 23 nt, Human
uacaacauaaucuaguuuacaga

SEQ ID NO: 2802450 - RNA, 22 nt, Human
uacaacaagaguuuauuuccaa

SEQ ID NO: 2802451 - RNA, 15 nt, Human
uacaggagugagcac

SEQ ID NO: 2802452 - RNA, 16 nt, Human
uacagcuguuuaagau

SEQ ID NO: 2802453 - RNA, 13 nt, Human
uacaggaaguccc

SEQ ID NO: 2802454 - RNA, 23 nt, Human
uacaguuuauuuuuaaagauaga

SEQ ID NO: 2802455 - RNA, 22 nt, Human
uacaguuuggggcaagucaugu

SEQ ID NO: 2802456 - RNA, 23 nt, Human
uacaguuuggggcaagucaugua

SEQ ID NO: 2802457 - RNA, 21 nt, Human
uacagcuggguggcacugcca

SEQ ID NO: 2802458 - RNA, 24 nt, Human
uacagcuggguggcacugccaugc

SEQ ID NO: 2802459 - RNA, 14 nt, Human
uacagcuguuuaag

SEQ ID NO: 2802460 - RNA, 12 nt, Human
uacagcuguguu

SEQ ID NO: 2802461 - RNA, 17 nt, Human
uacagcuguguuauucu

SEQ ID NO: 2802462 - RNA, 11 nt, Human
uacagcucccc

SEQ ID NO: 2802463 - RNA, 15 nt, Human
uacagcuccccaagu

SEQ ID NO: 2802464 - RNA, 13 nt, Human
uacagcucugacu

SEQ ID NO: 2802465 - RNA, 20 nt, Human
uacagcucuggccacaacag

SEQ ID NO: 2802466 - RNA, 14 nt, Human
uacagcugccugca

SEQ ID NO: 2802467 - RNA, 20 nt, Human
uacagcuggguggcacugcc

SEQ ID NO: 2802468 - RNA, 10 nt, Human
uacagcuggg

SEQ ID NO: 2802469 - RNA, 20 nt, Human
uacagcugggcuggggagga

SEQ ID NO: 2802470 - RNA, 13 nt, Human
uacagcugccugc

SEQ ID NO: 2802471 - RNA, 16 nt, Human
uacagcuaaucagcau

SEQ ID NO: 2802472 - RNA, 18 nt, Human
uacagcuaaucagcauuc

SEQ ID NO: 2802473 - RNA, 13 nt, Human
uacacuugcccug

SEQ ID NO: 2802474 - RNA, 14 nt, Human
uacacuugcccugc

SEQ ID NO: 2802475 - RNA, 16 nt, Human
uacacugaggagagau

SEQ ID NO: 2802476 - RNA, 16 nt, Human
uacacugcaaucauau

SEQ ID NO: 2802477 - RNA, 19 nt, Human
uacacugcaaucauaugug

SEQ ID NO: 2802478 - RNA, 20 nt, Human
uacacugcaaucauauguga

SEQ ID NO: 2802479 - RNA, 21 nt, Human
uacacugcaaucauaugugau

SEQ ID NO: 2802480 - RNA, 16 nt, Human
uacagcuaugaagaaa

SEQ ID NO: 2802481 - RNA, 13 nt, Human
uacaguuuuaugc

SEQ ID NO: 2802482 - RNA, 17 nt, Human
uacaguuuuaugcucuu

SEQ ID NO: 2802483 - RNA, 18 nt, Human
uacaguuuuaugcucuuu

SEQ ID NO: 2802484 - RNA, 19 nt, Human
uacaguuuuaugcucuuuu

SEQ ID NO: 2802485 - RNA, 17 nt, Human
uacaguuugucacauga

SEQ ID NO: 2802486 - RNA, 15 nt, Human
uacauaaaagaauuu

SEQ ID NO: 2802487 - RNA, 16 nt, Human
uacauaaaagaauuuu

SEQ ID NO: 2802488 - RNA, 21 nt, Human
uacauaaauugcauaaagcau

SEQ ID NO: 2802489 - RNA, 22 nt, Human
uacauaaauugcauaaagcaua

SEQ ID NO: 2802490 - RNA, 12 nt, Human
uacauaaauugg

SEQ ID NO: 2802491 - RNA, 16 nt, Human
uacauaaauuggccug

SEQ ID NO: 2802492 - RNA, 13 nt, Human
uacauaacaagaa

SEQ ID NO: 2802493 - RNA, 18 nt, Human
uacauaacaagaaaauca

SEQ ID NO: 2802494 - RNA, 19 nt, Human
uacauaacaagaaaaucaa

SEQ ID NO: 2802495 - RNA, 13 nt, Human
uacauaacuaaau

SEQ ID NO: 2802496 - RNA, 18 nt, Human
uacauaacuaaauuugau

SEQ ID NO: 2802497 - RNA, 19 nt, Human
uacauaacuaaauuugaua

SEQ ID NO: 2802498 - RNA, 20 nt, Human
uacauaacucuguaaaaaca

SEQ ID NO: 2802499 - RNA, 23 nt, Human
uacauaacucuguaaaaacacug

SEQ ID NO: 2802500 - RNA, 13 nt, Human
uacauaacugccu

SEQ ID NO: 2802501 - RNA, 14 nt, Human
uacauaacugccuu

SEQ ID NO: 2802502 - RNA, 16 nt, Human
uacauaacugccuuga

SEQ ID NO: 2802503 - RNA, 22 nt, Human
uacauaacugccuugaaccugu

SEQ ID NO: 2802504 - RNA, 17 nt, Human
uacaucuuuuuucacaa

SEQ ID NO: 2802505 - RNA, 18 nt, Human
uacaucuuuuuucacaaa

SEQ ID NO: 2802506 - RNA, 20 nt, Human
uacaucuuuuuucacaaauu

SEQ ID NO: 2802507 - RNA, 16 nt, Human
uacauggacagaauuu

SEQ ID NO: 2802508 - RNA, 17 nt, Human
uacauggacagaauuuu

SEQ ID NO: 2802509 - RNA, 16 nt, Human
uacauggcagaguuug

SEQ ID NO: 2802510 - RNA, 19 nt, Human
uacauggcagaguuugugu

SEQ ID NO: 2802511 - RNA, 17 nt, Human
uacaugcagcccaugcc

SEQ ID NO: 2802512 - RNA, 14 nt, Human
uacaugcagcccau

SEQ ID NO: 2802513 - RNA, 22 nt, Human
uacaugcagcccaugcccaccu

SEQ ID NO: 2802514 - RNA, 17 nt, Human
uacaugcauacaaagag

SEQ ID NO: 2802515 - RNA, 21 nt, Human
uacaugaaacagaaacaaaaa

SEQ ID NO: 2802516 - RNA, 14 nt, Human
uacauaaacaauga

SEQ ID NO: 2802517 - RNA, 21 nt, Human
uacaugaaaauuuuaaaaaua

SEQ ID NO: 2802518 - RNA, 22 nt, Human
uacaugcaauuuauuaaaauga

SEQ ID NO: 2802519 - RNA, 18 nt, Human
uacaugaaauuuuuguaa

SEQ ID NO: 2802520 - RNA, 19 nt, Human
uacaugaaauuuuuguaaa

SEQ ID NO: 2802521 - RNA, 15 nt, Human
uacaugaaacagaaa

SEQ ID NO: 2802522 - RNA, 14 nt, Human
uacaugaaacagaa

SEQ ID NO: 2802523 - RNA, 13 nt, Human
uacaugaaacaga

SEQ ID NO: 2802524 - RNA, 12 nt, Human
uacaugaaacag

SEQ ID NO: 2802525 - RNA, 16 nt, Human
uacuguccuacccacc

SEQ ID NO: 2802526 - RNA, 14 nt, Human
uacugcucaggcug

SEQ ID NO: 2802527 - RNA, 15 nt, Human
uacugcucaggcugc

SEQ ID NO: 2802528 - RNA, 22 nt, Human
uacugcucaggcugcagcugga

SEQ ID NO: 2802529 - RNA, 14 nt, Human
uacugucucacuga

SEQ ID NO: 2802530 - RNA, 22 nt, Human
uacugucucacugaaacauuua

SEQ ID NO: 2802531 - RNA, 15 nt, Human
uacugucugauuggc

SEQ ID NO: 2802532 - RNA, 17 nt, Human
uacugucugauuggcuu

SEQ ID NO: 2802533 - RNA, 22 nt, Human
uacugucugguuuuaacaauuu

SEQ ID NO: 2802534 - RNA, 15 nt, Human
uacugugaaacuggc

SEQ ID NO: 2802535 - RNA, 16 nt, Human
uacugucugguuuuaa

SEQ ID NO: 2802536 - RNA, 19 nt, Human
uacugucugguuuuaacaa

SEQ ID NO: 2802537 - RNA, 20 nt, Human
uacugucugguuuuaacaau

SEQ ID NO: 2802538 - RNA, 21 nt, Human
uacugucugguuuuaacaauu

SEQ ID NO: 2802539 - RNA, 15 nt, Human
uacuguuaaccauuu

SEQ ID NO: 2802540 - RNA, 18 nt, Human
uacuguuaaccauuuaag

SEQ ID NO: 2802541 - RNA, 19 nt, Human
uacuguuaaccauuuaagu

SEQ ID NO: 2802542 - RNA, 18 nt, Human
uacuguguuuuauaaaau

SEQ ID NO: 2802543 - RNA, 18 nt, Human
uacuguggaaaagaaaca

SEQ ID NO: 2802544 - RNA, 12 nt, Human
uacuguggagga

SEQ ID NO: 2802545 - RNA, 14 nt, Human
uacuguggaggaag

SEQ ID NO: 2802546 - RNA, 16 nt, Human
uacuguggaggaagga

SEQ ID NO: 2802547 - RNA, 18 nt, Human
uacuguggaggaaggauu

SEQ ID NO: 2802548 - RNA, 21 nt, Human
uacugugugugugaaugaaca

SEQ ID NO: 2802549 - RNA, 23 nt, Human
uacugugugugugaaugaacacu

SEQ ID NO: 2802550 - RNA, 22 nt, Human
uacugugugugugaaugaacac

SEQ ID NO: 2802551 - RNA, 22 nt, Human
uacuguggaggaaggauuguaa

SEQ ID NO: 2802552 - RNA, 13 nt, Human
uacuuguggacac

SEQ ID NO: 2802553 - RNA, 13 nt, Human
uacuuaacuauuc

SEQ ID NO: 2802554 - RNA, 20 nt, Human
uacuuaaauggaaaaaauga

SEQ ID NO: 2802555 - RNA, 12 nt, Human
uacuuaaagauu

SEQ ID NO: 2802556 - RNA, 14 nt, Human
uacuuaaagauuua

SEQ ID NO: 2802557 - RNA, 19 nt, Human
uacuuaaagauuuaucaaa

SEQ ID NO: 2802558 - RNA, 15 nt, Human
uacuguuuauuucug

SEQ ID NO: 2802559 - RNA, 23 nt, Human
uacuguuuauuucuguuucucau

SEQ ID NO: 2802560 - RNA, 23 nt, Human
uacuguucaaugguucugaaaua

SEQ ID NO: 2802561 - RNA, 19 nt, Human
uacuguuuuaucuggcccc

SEQ ID NO: 2802562 - RNA, 21 nt, Human
uacuuaaaaaaaaaaaaaagc

SEQ ID NO: 2802563 - RNA, 23 nt, Human
uacuuaaaaaaaaaaaaaagcuu

SEQ ID NO: 2802564 - RNA, 21 nt, Human
uacuugaacaaaagggucaga

SEQ ID NO: 2802565 - RNA, 16 nt, Human
uacuuaagaauaugcu

SEQ ID NO: 2802566 - RNA, 12 nt, Human
uacuuaagagaa

SEQ ID NO: 2802567 - RNA, 13 nt, Human
uacuuaagagaaa

SEQ ID NO: 2802568 - RNA, 14 nt, Human
uacuuaagagaaau

SEQ ID NO: 2802569 - RNA, 15 nt, Human
uacuuaagagaaaug

SEQ ID NO: 2802570 - RNA, 16 nt, Human
uacuuaagagaaaugg

SEQ ID NO: 2802571 - RNA, 18 nt, Human
uacuuaagagaaauggca

SEQ ID NO: 2802572 - RNA, 19 nt, Human
uacuuaagagaaauggcaa

SEQ ID NO: 2802573 - RNA, 16 nt, Human
uacuaauuuucuagau

SEQ ID NO: 2802574 - RNA, 16 nt, Human
uacuaauuccacaccu

SEQ ID NO: 2802575 - RNA, 15 nt, Human
uacuaauuuuacaca

SEQ ID NO: 2802576 - RNA, 17 nt, Human
uacuaauuuuacacauu

SEQ ID NO: 2802577 - RNA, 18 nt, Human
uacuaauuuuacacauua

SEQ ID NO: 2802578 - RNA, 16 nt, Human
uacuaauguaaaauga

SEQ ID NO: 2802579 - RNA, 20 nt, Human
uacuaauguaaaaugauuug

SEQ ID NO: 2802580 - RNA, 13 nt, Human
uacuaauuccaca

SEQ ID NO: 2802581 - RNA, 15 nt, Human
uacuaaggcuuuccu

SEQ ID NO: 2802582 - RNA, 14 nt, Human
uacuaaguucacau

SEQ ID NO: 2802583 - RNA, 22 nt, Human
uacuaaguucacauuagaauua

SEQ ID NO: 2802584 - RNA, 13 nt, Human
uacucauugaaau

SEQ ID NO: 2802585 - RNA, 14 nt, Human
uacucauugaaaug

SEQ ID NO: 2802586 - RNA, 15 nt, Human
uacucauugaaaugu

SEQ ID NO: 2802587 - RNA, 16 nt, Human
uacucauugaaauguc

SEQ ID NO: 2802588 - RNA, 17 nt, Human
uacucauugaaauguca

SEQ ID NO: 2802589 - RNA, 11 nt, Human
uacucauuucu

SEQ ID NO: 2802590 - RNA, 15 nt, Human
uacucauuucuaaaa

SEQ ID NO: 2802591 - RNA, 18 nt, Human
uacucauuucuaaaagaa

SEQ ID NO: 2802592 - RNA, 22 nt, Human
uacucauuucuaaaagaauauu

SEQ ID NO: 2802593 - RNA, 17 nt, Human
uacuccuaccucagccu

SEQ ID NO: 2802594 - RNA, 16 nt, Human
uacuccuaccucagcc

SEQ ID NO: 2802595 - RNA, 15 nt, Human
uacuccuaccucagc

SEQ ID NO: 2802596 - RNA, 14 nt, Human
uacuccuaccucag

SEQ ID NO: 2802597 - RNA, 12 nt, Human
uacuccucccag

SEQ ID NO: 2802598 - RNA, 13 nt, Human
uacuccuauuuuu

SEQ ID NO: 2802599 - RNA, 14 nt, Human
uacuccuauuuuug

SEQ ID NO: 2802600 - RNA, 18 nt, Human
uacuccuauuuuuguaaa

SEQ ID NO: 2802601 - RNA, 20 nt, Human
uacuccuauuuuuguaaacu

SEQ ID NO: 2802602 - RNA, 21 nt, Human
uacuccuauuuuuguaaacug

SEQ ID NO: 2802603 - RNA, 14 nt, Human
uacuccucacacuu

SEQ ID NO: 2802604 - RNA, 15 nt, Human
uacuccucacacuua

SEQ ID NO: 2802605 - RNA, 21 nt, Human
uacuccucacacuuacuguaa

SEQ ID NO: 2802606 - RNA, 19 nt, Human
uacucccugcagaugccac

SEQ ID NO: 2802607 - RNA, 15 nt, Human
uacucccuugcccua

SEQ ID NO: 2802608 - RNA, 18 nt, Human
uacucccugcagaugcca

SEQ ID NO: 2802609 - RNA, 16 nt, Human
uacucccugcagaugc

SEQ ID NO: 2802610 - RNA, 13 nt, Human
uacucccugcaga

SEQ ID NO: 2802611 - RNA, 14 nt, Human
uacucccucucagg

SEQ ID NO: 2802612 - RNA, 15 nt, Human
uacuccauaaacaga

SEQ ID NO: 2802613 - RNA, 19 nt, Human
uacugcccaggccugccug

SEQ ID NO: 2802614 - RNA, 20 nt, Human
uacugcccaggccugccugu

SEQ ID NO: 2802615 - RNA, 21 nt, Human
uacugcccaggccugccuguu

SEQ ID NO: 2802616 - RNA, 22 nt, Human
uacugcccaggccugccuguuc

SEQ ID NO: 2802617 - RNA, 19 nt, Human
uacugccauguacuaguuu

SEQ ID NO: 2802618 - RNA, 21 nt, Human
uacugccauguacuaguuuua

SEQ ID NO: 2802619 - RNA, 11 nt, Human
uacugccaaag

SEQ ID NO: 2802620 - RNA, 22 nt, Human
uacugcagccuuugccuccccg

SEQ ID NO: 2802621 - RNA, 20 nt, Human
uacugcagccuuugccuccc

SEQ ID NO: 2802622 - RNA, 15 nt, Human
uacugauuuuuguga

SEQ ID NO: 2802623 - RNA, 17 nt, Human
uacugauuuuugugauu

SEQ ID NO: 2802624 - RNA, 13 nt, Human
uacugauuuuugu

SEQ ID NO: 2802625 - RNA, 21 nt, Human
uacucuaagaucuuagauucu

SEQ ID NO: 2802626 - RNA, 22 nt, Human
uacucuaagaucuuagauucuc

SEQ ID NO: 2802627 - RNA, 15 nt, Human
uacgaaacacaaacc

SEQ ID NO: 2802628 - RNA, 11 nt, Human
uacuccuccuc

SEQ ID NO: 2802629 - RNA, 19 nt, Human
uacucggaaauuaaaguuu

SEQ ID NO: 2802630 - RNA, 22 nt, Human
uacucgggaggcugaggcacaa

SEQ ID NO: 2802631 - RNA, 13 nt, Human
uacucuaagaucu

SEQ ID NO: 2802632 - RNA, 15 nt, Human
uacucuaagaucuua

SEQ ID NO: 2802633 - RNA, 18 nt, Human
uacucuaagaucuuagau

SEQ ID NO: 2802634 - RNA, 20 nt, Human
uacucuaagaucuuagauuc

SEQ ID NO: 2802635 - RNA, 18 nt, Human
uaccuuaucacugcauua

SEQ ID NO: 2802636 - RNA, 21 nt, Human
uaccuuuugaggagccccagc

SEQ ID NO: 2802637 - RNA, 17 nt, Human
uaccuuuuaccagcuuu

SEQ ID NO: 2802638 - RNA, 18 nt, Human
uaccuuuuaccagcuuuu

SEQ ID NO: 2802639 - RNA, 16 nt, Human
uaccuuuuauguagca

SEQ ID NO: 2802640 - RNA, 13 nt, Human
uaccuuuuauuuu

SEQ ID NO: 2802641 - RNA, 17 nt, Human
uaccucuuauugcaaaa

SEQ ID NO: 2802642 - RNA, 22 nt, Human
uaccuuacuguggaggaaggau

SEQ ID NO: 2802643 - RNA, 12 nt, Human
uaccucugugug

SEQ ID NO: 2802644 - RNA, 14 nt, Human
uaccucugugugcu

SEQ ID NO: 2802645 - RNA, 14 nt, Human
uaccucuuauugca

SEQ ID NO: 2802646 - RNA, 14 nt, Human
uaccucucuguccc

SEQ ID NO: 2802647 - RNA, 15 nt, Human
uaccucucugucccu

SEQ ID NO: 2802648 - RNA, 18 nt, Human
uaccucucugucccuugc

SEQ ID NO: 2802649 - RNA, 20 nt, Human
uaccucucugucccuugcug

SEQ ID NO: 2802650 - RNA, 21 nt, Human
uaccucucugucccuugcugu

SEQ ID NO: 2802651 - RNA, 17 nt, Human
uaccucugaccaacagg

SEQ ID NO: 2802652 - RNA, 17 nt, Human
uaccucuggcugacuaa

SEQ ID NO: 2802653 - RNA, 21 nt, Human
uaccucuggcugacuaaauuu

SEQ ID NO: 2802654 - RNA, 12 nt, Human
uaccucucuguc

SEQ ID NO: 2802655 - RNA, 11 nt, Human
uaccuccuccu

SEQ ID NO: 2802656 - RNA, 13 nt, Human
uaccuccucucag

SEQ ID NO: 2802657 - RNA, 14 nt, Human
uaccuccucucagu

SEQ ID NO: 2802658 - RNA, 15 nt, Human
uaccuccucucagug

SEQ ID NO: 2802659 - RNA, 17 nt, Human
uaccuccucucaguguu

SEQ ID NO: 2802660 - RNA, 19 nt, Human
uaccuccucucaguguuuu

SEQ ID NO: 2802661 - RNA, 14 nt, Human
uaccuccugucucu

SEQ ID NO: 2802662 - RNA, 15 nt, Human
uaccuccugucucug

SEQ ID NO: 2802663 - RNA, 12 nt, Human
uacuaaacauau

SEQ ID NO: 2802664 - RNA, 18 nt, Human
uacuaaacauaugauuuc

SEQ ID NO: 2802665 - RNA, 14 nt, Human
uacuaacacaagga

SEQ ID NO: 2802666 - RNA, 13 nt, Human
uacuaaauuuaaa

SEQ ID NO: 2802667 - RNA, 14 nt, Human
uacuaaauuuaaau

SEQ ID NO: 2802668 - RNA, 15 nt, Human
uacuaaauuuaaauu

SEQ ID NO: 2802669 - RNA, 17 nt, Human
uacuaaauuuaaauuua

SEQ ID NO: 2802670 - RNA, 21 nt, Human
uacuaaauuuaaauuuaaaga

SEQ ID NO: 2802671 - RNA, 22 nt, Human
uacuaaauuuaaauuuaaagau

SEQ ID NO: 2802672 - RNA, 23 nt, Human
uacuaaauuuaaauuuaaagaua

SEQ ID NO: 2802673 - RNA, 20 nt, Human
uacuaagcauagcaaacaga

SEQ ID NO: 2802674 - RNA, 12 nt, Human
uacgaacaaaac

SEQ ID NO: 2802675 - RNA, 16 nt, Human
uacgaacaaaacacac

SEQ ID NO: 2802676 - RNA, 21 nt, Human
uaccuuuuuugauaaaguuuc

SEQ ID NO: 2802677 - RNA, 21 nt, Human
uaccuuuuuuguuuuuucaaa

SEQ ID NO: 2802678 - RNA, 22 nt, Human
uaccuuuuuuguuuuuucaaaa

SEQ ID NO: 2802679 - RNA, 23 nt, Human
uaccuuuuuuguuuuuucaaaau

SEQ ID NO: 2802680 - RNA, 23 nt, Human
uaccuaaaaggaaaucucacccc

SEQ ID NO: 2802681 - RNA, 22 nt, Human
uaccuaaaaggaaaucucaccc

SEQ ID NO: 2802682 - RNA, 19 nt, Human
uaccuaaaaggaaaucuca

SEQ ID NO: 2802683 - RNA, 22 nt, Human
uaccgagucucuucuccacugg

SEQ ID NO: 2802684 - RNA, 20 nt, Human
uaccgaguucaagugauuuu

SEQ ID NO: 2802685 - RNA, 15 nt, Human
uaccgccugucucuu

SEQ ID NO: 2802686 - RNA, 17 nt, Human
uaccgccugucucuuua

SEQ ID NO: 2802687 - RNA, 20 nt, Human
uaccguaggcuuuguauuca

SEQ ID NO: 2802688 - RNA, 17 nt, Human
uaccgagucucuucucc

SEQ ID NO: 2802689 - RNA, 18 nt, Human
uaccgagucucuucucca

SEQ ID NO: 2802690 - RNA, 21 nt, Human
uaccgagucucuucuccacug

SEQ ID NO: 2802691 - RNA, 15 nt, Human
uacccacugcucugg

SEQ ID NO: 2802692 - RNA, 21 nt, Human
uacccacuucuaaauagcaau

SEQ ID NO: 2802693 - RNA, 16 nt, Human
uacccagagaguccug

SEQ ID NO: 2802694 - RNA, 20 nt, Human
uacauuuuuugggcagcaau

SEQ ID NO: 2802695 - RNA, 14 nt, Human
uacauuuuuauuua

SEQ ID NO: 2802696 - RNA, 16 nt, Human
uacauuuuuauuuaug

SEQ ID NO: 2802697 - RNA, 17 nt, Human
uacauuuuuauuuauga

SEQ ID NO: 2802698 - RNA, 19 nt, Human
uacauuuuuauuuaugaag

SEQ ID NO: 2802699 - RNA, 22 nt, Human
uacauuuuuauuuaugaaguuu

SEQ ID NO: 2802700 - RNA, 16 nt, Human
uacauggccaguguga

SEQ ID NO: 2802701 - RNA, 20 nt, Human
uacauuuuguuguaaaaaga

SEQ ID NO: 2802702 - RNA, 21 nt, Human
uacauuuuguuguaaaaagaa

SEQ ID NO: 2802703 - RNA, 22 nt, Human
uacauuuuguuguaaaaagaaa

SEQ ID NO: 2802704 - RNA, 23 nt, Human
uacauuuuguuguaaaaagaaaa

SEQ ID NO: 2802705 - RNA, 22 nt, Human
uacauggcagaguuuguguguu

SEQ ID NO: 2802706 - RNA, 14 nt, Human
uaccuauaaugugu

SEQ ID NO: 2802707 - RNA, 16 nt, Human
uaccuauaaugugugu

SEQ ID NO: 2802708 - RNA, 17 nt, Human
uaccuauaaugugugua

SEQ ID NO: 2802709 - RNA, 18 nt, Human
uaccuauaauguguguau

SEQ ID NO: 2802710 - RNA, 19 nt, Human
uaccuauaauguguguaug

SEQ ID NO: 2802711 - RNA, 23 nt, Human
uaccuauaauguguguaugugua

SEQ ID NO: 2802712 - RNA, 13 nt, Human
uaccuagaagaag

SEQ ID NO: 2802713 - RNA, 14 nt, Human
uaccuaccugugug

SEQ ID NO: 2802714 - RNA, 20 nt, Human
uaccuaaaguauuuuuauaa

SEQ ID NO: 2802715 - RNA, 15 nt, Human
uaccuaacauuauuu

SEQ ID NO: 2802716 - RNA, 13 nt, Human
uaccuaaguacug

SEQ ID NO: 2802717 - RNA, 15 nt, Human
uaccuaaguacugua

SEQ ID NO: 2802718 - RNA, 16 nt, Human
uaccuaaguacuguaa

SEQ ID NO: 2802719 - RNA, 17 nt, Human
uaccuaaguacuguaau

SEQ ID NO: 2802720 - RNA, 19 nt, Human
uaccuaagugacauuugua

SEQ ID NO: 2802721 - RNA, 20 nt, Human
uaccuaagugacauuuguag

SEQ ID NO: 2802722 - RNA, 11 nt, Human
uaccucagccu

SEQ ID NO: 2802723 - RNA, 15 nt, Human
uaccucacccugcua

SEQ ID NO: 2802724 - RNA, 14 nt, Human
uaccucagccuaga

SEQ ID NO: 2802725 - RNA, 12 nt, Human
uaccucagccua

SEQ ID NO: 2802726 - RNA, 16 nt, Human
uaccucagccuagacc

SEQ ID NO: 2802727 - RNA, 18 nt, Human
uaccucacccugcuacac

SEQ ID NO: 2802728 - RNA, 19 nt, Human
uaccucaaccauccuggcu

SEQ ID NO: 2802729 - RNA, 14 nt, Human
uaccucaaacuauc

SEQ ID NO: 2802730 - RNA, 15 nt, Human
uaccucaaacuaucu

SEQ ID NO: 2802731 - RNA, 12 nt, Human
uaccuauuugac

SEQ ID NO: 2802732 - RNA, 21 nt, Human
uaccuaucccaccuccauccc

SEQ ID NO: 2802733 - RNA, 17 nt, Human
uaccucaaccuauggua

SEQ ID NO: 2802734 - RNA, 13 nt, Human
uaccucaauguuu

SEQ ID NO: 2802735 - RNA, 14 nt, Human
uaccucaauguuug

SEQ ID NO: 2802736 - RNA, 15 nt, Human
uaccucaauguuuga

SEQ ID NO: 2802737 - RNA, 16 nt, Human
uaccucaauguuugag

SEQ ID NO: 2802738 - RNA, 13 nt, Human
uaccuccccugcc

SEQ ID NO: 2802739 - RNA, 14 nt, Human
uaccuccccugccu

SEQ ID NO: 2802740 - RNA, 15 nt, Human
uaccuccccugccuu

SEQ ID NO: 2802741 - RNA, 17 nt, Human
uaccuccccugccuugc

SEQ ID NO: 2802742 - RNA, 11 nt, Human
uaccucccucc

SEQ ID NO: 2802743 - RNA, 12 nt, Human
uaccucccuccc

SEQ ID NO: 2802744 - RNA, 21 nt, Human
uaccucccuccccgucucauu

SEQ ID NO: 2802745 - RNA, 12 nt, Human
uaccucauguuu

SEQ ID NO: 2802746 - RNA, 13 nt, Human
uaccucauguuua

SEQ ID NO: 2802747 - RNA, 14 nt, Human
uaccucauguuuau

SEQ ID NO: 2802748 - RNA, 15 nt, Human
uaccucauguuuaug

SEQ ID NO: 2802749 - RNA, 17 nt, Human
uaccucauguuuaugaa

SEQ ID NO: 2802750 - RNA, 18 nt, Human
uaccucauguuuaugaaa

SEQ ID NO: 2802751 - RNA, 19 nt, Human
uaccucauguuuaugaaaa

SEQ ID NO: 2802752 - RNA, 20 nt, Human
uaccucauguuuaugaaaau

SEQ ID NO: 2802753 - RNA, 20 nt, Human
uaccuccaacagaacuaaau

SEQ ID NO: 2802754 - RNA, 22 nt, Human
uaccuccaacagaacuaaaugu

SEQ ID NO: 2802755 - RNA, 23 nt, Human
uaccuccaacagaacuaaauguu

SEQ ID NO: 2802756 - RNA, 15 nt, Human
uaccucaggcaggaa

SEQ ID NO: 2802757 - RNA, 14 nt, Human
uaccucaggcagga

SEQ ID NO: 2802758 - RNA, 17 nt, Human
uaccucaggcagcucaa

SEQ ID NO: 2802759 - RNA, 18 nt, Human
uaccucaggcagcucaag

SEQ ID NO: 2802760 - RNA, 14 nt, Human
uaccucaggcagcu

SEQ ID NO: 2802761 - RNA, 16 nt, Human
uaccucaggcagcuca

SEQ ID NO: 2802762 - RNA, 12 nt, Human
uaccucaggaaa

SEQ ID NO: 2802763 - RNA, 14 nt, Human
uaccucaggaaaga

SEQ ID NO: 2802764 - RNA, 16 nt, Human
uaccucaggaaagaau

SEQ ID NO: 2802765 - RNA, 18 nt, Human
uaccucaggaaagaauag

SEQ ID NO: 2802766 - RNA, 17 nt, Human
ugaauuaaauaaacccu

SEQ ID NO: 2802767 - RNA, 23 nt, Human
ugaauuaaucaucuauaaagaag

SEQ ID NO: 2802768 - RNA, 23 nt, Human
ugacaaauguguaucggaugcuu

SEQ ID NO: 2802769 - RNA, 15 nt, Human
ugacaaaucugugua

SEQ ID NO: 2802770 - RNA, 16 nt, Human
ugacaaaucuguguau

SEQ ID NO: 2802771 - RNA, 23 nt, Human
ugacaaaucuguguauauuauuu

SEQ ID NO: 2802772 - RNA, 17 nt, Human
ugacaaauguaaacauu

SEQ ID NO: 2802773 - RNA, 13 nt, Human
ugaauuguuacau

SEQ ID NO: 2802774 - RNA, 17 nt, Human
ugaauuguuuucuuuaa

SEQ ID NO: 2802775 - RNA, 19 nt, Human
ugaauuguuuuuauuguuu

SEQ ID NO: 2802776 - RNA, 12 nt, Human
ugaauuuaaaua

SEQ ID NO: 2802777 - RNA, 14 nt, Human
ugacaaaguuacug

SEQ ID NO: 2802778 - RNA, 12 nt, Human
ugacaacacagc

SEQ ID NO: 2802779 - RNA, 15 nt, Human
ugacaacagacuucu

SEQ ID NO: 2802780 - RNA, 22 nt, Human
ugacaacagaagcuucagaagu

SEQ ID NO: 2802781 - RNA, 13 nt, Human
ugacaacagaagc

SEQ ID NO: 2802782 - RNA, 14 nt, Human
ugacaacagaagcu

SEQ ID NO: 2802783 - RNA, 19 nt, Human
ugacaacagacuucugaaa

SEQ ID NO: 2802784 - RNA, 18 nt, Human
ugacaacagacuucugaa

SEQ ID NO: 2802785 - RNA, 23 nt, Human
ugacaaggauugcuacuguccua

SEQ ID NO: 2802786 - RNA, 15 nt, Human
ugacaacugugacug

SEQ ID NO: 2802787 - RNA, 16 nt, Human
ugacaacugugacugu

SEQ ID NO: 2802788 - RNA, 16 nt, Human
ugacaagggcugaccu

SEQ ID NO: 2802789 - RNA, 21 nt, Human
ugacaagggcugaccugccuc

SEQ ID NO: 2802790 - RNA, 22 nt, Human
ugacaagggcugaccugccucu

SEQ ID NO: 2802791 - RNA, 22 nt, Human
ugacaacuucccagugaauucu

SEQ ID NO: 2802792 - RNA, 12 nt, Human
ugacaacuguga

SEQ ID NO: 2802793 - RNA, 13 nt, Human
ugacaacugugac

SEQ ID NO: 2802794 - RNA, 14 nt, Human
ugacaacugugacu

SEQ ID NO: 2802795 - RNA, 13 nt, Human
ugacaacugucua

SEQ ID NO: 2802796 - RNA, 21 nt, Human
ugacaacugucuaacuuuaga

SEQ ID NO: 2802797 - RNA, 22 nt, Human
ugacaacugucuaacuuuagaa

SEQ ID NO: 2802798 - RNA, 13 nt, Human
ugacaaccuccau

SEQ ID NO: 2802799 - RNA, 20 nt, Human
ugacaaccuccauucuauuu

SEQ ID NO: 2802800 - RNA, 21 nt, Human
ugacaaccuccauucuauuuu

SEQ ID NO: 2802801 - RNA, 13 nt, Human
ugacagacacagg

SEQ ID NO: 2802802 - RNA, 16 nt, Human
ugacagacacaggccc

SEQ ID NO: 2802803 - RNA, 14 nt, Human
ugacagacacaggc

SEQ ID NO: 2802804 - RNA, 14 nt, Human
ugacacacagcucu

SEQ ID NO: 2802805 - RNA, 16 nt, Human
ugacacaaguggaccu

SEQ ID NO: 2802806 - RNA, 17 nt, Human
ugacacaaaccugccug

SEQ ID NO: 2802807 - RNA, 18 nt, Human
ugacacaaaccugccugg

SEQ ID NO: 2802808 - RNA, 19 nt, Human
ugacacaaaccugccuggg

SEQ ID NO: 2802809 - RNA, 13 nt, Human
ugacacaaaggaa

SEQ ID NO: 2802810 - RNA, 14 nt, Human
ugacacaaaggaag

SEQ ID NO: 2802811 - RNA, 15 nt, Human
ugacacaaaggaagu

SEQ ID NO: 2802812 - RNA, 15 nt, Human
ugacacacagcucug

SEQ ID NO: 2802813 - RNA, 17 nt, Human
ugacacaaguggaccuu

SEQ ID NO: 2802814 - RNA, 19 nt, Human
ugacacaaguggaccuuag

SEQ ID NO: 2802815 - RNA, 17 nt, Human
ugacacaauuggaauug

SEQ ID NO: 2802816 - RNA, 19 nt, Human
ugacauguuauauauuuuu

SEQ ID NO: 2802817 - RNA, 18 nt, Human
ugacauguuauauauuuu

SEQ ID NO: 2802818 - RNA, 20 nt, Human
ugacacaagaggaauaagaa

SEQ ID NO: 2802819 - RNA, 21 nt, Human
ugaccagccuccaugcugccu

SEQ ID NO: 2802820 - RNA, 23 nt, Human
ugaccauccacucuacccuccca

SEQ ID NO: 2802821 - RNA, 14 nt, Human
ugaccaucugcuuu

SEQ ID NO: 2802822 - RNA, 15 nt, Human
ugaccaucugcuuuu

SEQ ID NO: 2802823 - RNA, 22 nt, Human
ugaccauccacucuacccuccc

SEQ ID NO: 2802824 - RNA, 19 nt, Human
ugaccauccacucuacccu

SEQ ID NO: 2802825 - RNA, 22 nt, Human
ugaccagccuccaugcugccuc

SEQ ID NO: 2802826 - RNA, 14 nt, Human
ugacaucuggaauc

SEQ ID NO: 2802827 - RNA, 17 nt, Human
ugacaucuuuuuaaagc

SEQ ID NO: 2802828 - RNA, 19 nt, Human
ugacaucuuuuuaaagcuu

SEQ ID NO: 2802829 - RNA, 20 nt, Human
ugacaucuuuuuaaagcuua

SEQ ID NO: 2802830 - RNA, 21 nt, Human
ugacaugauuagcagaagaaa

SEQ ID NO: 2802831 - RNA, 23 nt, Human
ugacaugaggaaaauaauguaau

SEQ ID NO: 2802832 - RNA, 18 nt, Human
ugacaugcacucagcucu

SEQ ID NO: 2802833 - RNA, 13 nt, Human
ugacaugcacuga

SEQ ID NO: 2802834 - RNA, 14 nt, Human
ugacaugcacugac

SEQ ID NO: 2802835 - RNA, 15 nt, Human
ugacaugcacugacc

SEQ ID NO: 2802836 - RNA, 17 nt, Human
ugacaugcacugacccu

SEQ ID NO: 2802837 - RNA, 19 nt, Human
ugacaugcacugacccuuc

SEQ ID NO: 2802838 - RNA, 21 nt, Human
ugacaugcacugacccuucca

SEQ ID NO: 2802839 - RNA, 11 nt, Human
ugacaugcacu

SEQ ID NO: 2802840 - RNA, 17 nt, Human
ugacaugccuauaugag

SEQ ID NO: 2802841 - RNA, 23 nt, Human
ugacaugccuauaugagaagaau

SEQ ID NO: 2802842 - RNA, 15 nt, Human
ugacaugugaaaccu

SEQ ID NO: 2802843 - RNA, 16 nt, Human
ugacaugugaaaccuu

SEQ ID NO: 2802844 - RNA, 13 nt, Human
ugacaugugaaac

SEQ ID NO: 2802845 - RNA, 17 nt, Human
ugacaugugaaaccuuu

SEQ ID NO: 2802846 - RNA, 19 nt, Human
ugacaugugaaaccuuuuu

SEQ ID NO: 2802847 - RNA, 21 nt, Human
ugacaugugaaaccuuuuuua

SEQ ID NO: 2802848 - RNA, 19 nt, Human
ugacauguguuggcagccu

SEQ ID NO: 2802849 - RNA, 18 nt, Human
ugacagacacaggcccgg

SEQ ID NO: 2802850 - RNA, 17 nt, Human
ugacagacacaggcccg

SEQ ID NO: 2802851 - RNA, 22 nt, Human
ugacagaccacaucuuuaucug

SEQ ID NO: 2802852 - RNA, 19 nt, Human
ugacagagcgagacuccau

SEQ ID NO: 2802853 - RNA, 11 nt, Human
ugacauauuua

SEQ ID NO: 2802854 - RNA, 12 nt, Human
ugacauauuuaa

SEQ ID NO: 2802855 - RNA, 13 nt, Human
ugacauauuuaau

SEQ ID NO: 2802856 - RNA, 14 nt, Human
ugacauauuuaaug

SEQ ID NO: 2802857 - RNA, 15 nt, Human
ugacauauuuaaugu

SEQ ID NO: 2802858 - RNA, 16 nt, Human
ugacauauuuaauguu

SEQ ID NO: 2802859 - RNA, 17 nt, Human
ugacauauuuaauguuu

SEQ ID NO: 2802860 - RNA, 18 nt, Human
ugacauauuuaauguuuu

SEQ ID NO: 2802861 - RNA, 19 nt, Human
ugacauauuuaauguuuua

SEQ ID NO: 2802862 - RNA, 20 nt, Human
ugacauauuuaauguuuuaa

SEQ ID NO: 2802863 - RNA, 21 nt, Human
ugacauauuuaauguuuuaaa

SEQ ID NO: 2802864 - RNA, 22 nt, Human
ugacauauuuaauguuuuaaau

SEQ ID NO: 2802865 - RNA, 23 nt, Human
ugacauauuuaauguuuuaaaug

SEQ ID NO: 2802866 - RNA, 14 nt, Human
ugacaucucagggg

SEQ ID NO: 2802867 - RNA, 15 nt, Human
ugacaucucaggggc

SEQ ID NO: 2802868 - RNA, 23 nt, Human
ugacaucaguuccuuugugugua

SEQ ID NO: 2802869 - RNA, 13 nt, Human
ugacaucagccag

SEQ ID NO: 2802870 - RNA, 14 nt, Human
ugacaucagccagc

SEQ ID NO: 2802871 - RNA, 17 nt, Human
ugacaucagccagcugc

SEQ ID NO: 2802872 - RNA, 18 nt, Human
ugacaucagccagcugcc

SEQ ID NO: 2802873 - RNA, 14 nt, Human
ugacaucucuuuga

SEQ ID NO: 2802874 - RNA, 13 nt, Human
ugacaucucuuug

SEQ ID NO: 2802875 - RNA, 12 nt, Human
ugacaucucuuu

SEQ ID NO: 2802876 - RNA, 18 nt, Human
ugacaucucaggggccag

SEQ ID NO: 2802877 - RNA, 19 nt, Human
ugacaucucaggggccaga

SEQ ID NO: 2802878 - RNA, 21 nt, Human
ugacaucucaggggccagagg

SEQ ID NO: 2802879 - RNA, 22 nt, Human
ugacaucucaggggccagagga

SEQ ID NO: 2802880 - RNA, 15 nt, Human
ugacauauuuuugcu

SEQ ID NO: 2802881 - RNA, 14 nt, Human
ugacaucacagcag

SEQ ID NO: 2802882 - RNA, 15 nt, Human
ugacaucacagcagc

SEQ ID NO: 2802883 - RNA, 16 nt, Human
ugacaucacagcagcc

SEQ ID NO: 2802884 - RNA, 18 nt, Human
ugacaucacagcagccuc

SEQ ID NO: 2802885 - RNA, 13 nt, Human
ugacaucacuugu

SEQ ID NO: 2802886 - RNA, 23 nt, Human
ugacaucacuuguacaaaauaaa

SEQ ID NO: 2802887 - RNA, 22 nt, Human
ugacaucacuuguacaaaauaa

SEQ ID NO: 2802888 - RNA, 21 nt, Human
ugacaucacuuguacaaaaua

SEQ ID NO: 2802889 - RNA, 20 nt, Human
ugacaucacuuguacaaaau

SEQ ID NO: 2802890 - RNA, 19 nt, Human
ugacaucacuuguacaaaa

SEQ ID NO: 2802891 - RNA, 18 nt, Human
ugacaucacuuguacaaa

SEQ ID NO: 2802892 - RNA, 17 nt, Human
ugacaucacuuguacaa

SEQ ID NO: 2802893 - RNA, 16 nt, Human
ugacaucacuuguaca

SEQ ID NO: 2802894 - RNA, 17 nt, Human
ugaaugauucauguuau

SEQ ID NO: 2802895 - RNA, 18 nt, Human
ugaaugauucauguuaua

SEQ ID NO: 2802896 - RNA, 19 nt, Human
ugaauguuuauuccuugau

SEQ ID NO: 2802897 - RNA, 11 nt, Human
ugaauguuucc

SEQ ID NO: 2802898 - RNA, 22 nt, Human
ugaauguuuccaaccuggagua

SEQ ID NO: 2802899 - RNA, 21 nt, Human
ugaauguuuccaaccuggagu

SEQ ID NO: 2802900 - RNA, 14 nt, Human
ugaauuaaaacuuc

SEQ ID NO: 2802901 - RNA, 16 nt, Human
ugaauuaaaacuucuu

SEQ ID NO: 2802902 - RNA, 18 nt, Human
ugaauuaaaacuucuuaa

SEQ ID NO: 2802903 - RNA, 22 nt, Human
ugaauuaaaacuucuuaaauau

SEQ ID NO: 2802904 - RNA, 23 nt, Human
ugaauuaaaauugucccauuugc

SEQ ID NO: 2802905 - RNA, 15 nt, Human
ugaaucugauuuuua

SEQ ID NO: 2802906 - RNA, 16 nt, Human
ugaaucugcucacuuu

SEQ ID NO: 2802907 - RNA, 14 nt, Human
ugaaucuauuuaag

SEQ ID NO: 2802908 - RNA, 16 nt, Human
ugaaucuauuuaagua

SEQ ID NO: 2802909 - RNA, 16 nt, Human
ugaaugaaccuucugg

SEQ ID NO: 2802910 - RNA, 15 nt, Human
ugaaugaaccuucug

SEQ ID NO: 2802911 - RNA, 15 nt, Human
ugaaugaacacucuu

SEQ ID NO: 2802912 - RNA, 12 nt, Human
ugaaugaacacu

SEQ ID NO: 2802913 - RNA, 11 nt, Human
ugaaugaacac

SEQ ID NO: 2802914 - RNA, 16 nt, Human
ugaaucuuggugucua

SEQ ID NO: 2802915 - RNA, 14 nt, Human
ugaaguuuacauug

SEQ ID NO: 2802916 - RNA, 20 nt, Human
ugaaggcuucucuguucuac

SEQ ID NO: 2802917 - RNA, 19 nt, Human
ugaaguuuaaaacaguauu

SEQ ID NO: 2802918 - RNA, 20 nt, Human
ugaaguuuaaaacaguauuu

SEQ ID NO: 2802919 - RNA, 21 nt, Human
ugaaguuuaaaacaguauuua

SEQ ID NO: 2802920 - RNA, 20 nt, Human
ugaaguuuacauuguaaaua

SEQ ID NO: 2802921 - RNA, 16 nt, Human
ugaaguuuacauugua

SEQ ID NO: 2802922 - RNA, 12 nt, Human
ugaaguuuacau

SEQ ID NO: 2802923 - RNA, 13 nt, Human
ugaaguuuacauu

SEQ ID NO: 2802924 - RNA, 14 nt, Human
ugaaguuuacauuu

SEQ ID NO: 2802925 - RNA, 15 nt, Human
ugaaguuuacauuuu

SEQ ID NO: 2802926 - RNA, 16 nt, Human
ugaaguuuacauuuuu

SEQ ID NO: 2802927 - RNA, 17 nt, Human
ugaaguuuacauuuuua

SEQ ID NO: 2802928 - RNA, 19 nt, Human
ugaaguuuacauuuuuauu

SEQ ID NO: 2802929 - RNA, 16 nt, Human
ugaaguuuccuuggcu

SEQ ID NO: 2802930 - RNA, 19 nt, Human
ugaaguuuccuuggcuggu

SEQ ID NO: 2802931 - RNA, 21 nt, Human
ugaaguuuccuuggcuggugc

SEQ ID NO: 2802932 - RNA, 17 nt, Human
ugaaguuuuacauuguu

SEQ ID NO: 2802933 - RNA, 16 nt, Human
ugaaguuuuacauugu

SEQ ID NO: 2802934 - RNA, 15 nt, Human
ugaaguuuuacauug

SEQ ID NO: 2802935 - RNA, 14 nt, Human
ugaaguuuuacauu

SEQ ID NO: 2802936 - RNA, 18 nt, Human
ugaaguuugaacuucaua

SEQ ID NO: 2802937 - RNA, 20 nt, Human
ugaaguuuguaguuguuuua

SEQ ID NO: 2802938 - RNA, 15 nt, Human
ugaauccuuugccug

SEQ ID NO: 2802939 - RNA, 17 nt, Human
ugaauccucuucuuuau

SEQ ID NO: 2802940 - RNA, 21 nt, Human
ugaaucccccuugccacccca

SEQ ID NO: 2802941 - RNA, 14 nt, Human
ugaaucacuguuuu

SEQ ID NO: 2802942 - RNA, 16 nt, Human
ugaaucacuguuuuua

SEQ ID NO: 2802943 - RNA, 19 nt, Human
ugaaucacuguuuuuagac

SEQ ID NO: 2802944 - RNA, 21 nt, Human
ugaaucacuguuuuuagacac

SEQ ID NO: 2802945 - RNA, 22 nt, Human
ugaaucacuguuuuuagacacc

SEQ ID NO: 2802946 - RNA, 20 nt, Human
ugaaucaguuuccaauuauu

SEQ ID NO: 2802947 - RNA, 22 nt, Human
ugaaucaguuuccaauuauuug

SEQ ID NO: 2802948 - RNA, 23 nt, Human
ugaaucaguuuccaauuauuuga

SEQ ID NO: 2802949 - RNA, 18 nt, Human
ugaacuucucucagacuu

SEQ ID NO: 2802950 - RNA, 16 nt, Human
ugaacuuauucuguag

SEQ ID NO: 2802951 - RNA, 15 nt, Human
ugaacuucucucaga

SEQ ID NO: 2802952 - RNA, 22 nt, Human
ugaacuucucucagacuuacuu

SEQ ID NO: 2802953 - RNA, 17 nt, Human
ugaacuucuuugaauuu

SEQ ID NO: 2802954 - RNA, 20 nt, Human
ugaagacucauucuucugua

SEQ ID NO: 2802955 - RNA, 19 nt, Human
ugaagacucauucuucugu

SEQ ID NO: 2802956 - RNA, 23 nt, Human
ugaacuggguacuuguggacaca

SEQ ID NO: 2802957 - RNA, 13 nt, Human
ugaacugguucau

SEQ ID NO: 2802958 - RNA, 22 nt, Human
ugaacuguguguaauuguuccu

SEQ ID NO: 2802959 - RNA, 16 nt, Human
ugaacuguuaagaaau

SEQ ID NO: 2802960 - RNA, 14 nt, Human
ugaaacagauuuca

SEQ ID NO: 2802961 - RNA, 16 nt, Human
ugaaacagaaacaaaa

SEQ ID NO: 2802962 - RNA, 14 nt, Human
ugaaacagaaacaa

SEQ ID NO: 2802963 - RNA, 13 nt, Human
ugaaacagaaaca

SEQ ID NO: 2802964 - RNA, 15 nt, Human
ugaaacacuuugccu

SEQ ID NO: 2802965 - RNA, 20 nt, Human
ugaaacacuuugccuccugu

SEQ ID NO: 2802966 - RNA, 23 nt, Human
ugaaacacuuugccuccugugua

SEQ ID NO: 2802967 - RNA, 13 nt, Human
ugaaacacuuuuu

SEQ ID NO: 2802968 - RNA, 15 nt, Human
ugaaacacuuuuuug

SEQ ID NO: 2802969 - RNA, 14 nt, Human
ugaagagcuugcuu

SEQ ID NO: 2802970 - RNA, 15 nt, Human
ugaagagcuugcuuu

SEQ ID NO: 2802971 - RNA, 16 nt, Human
ugaagagcuugcuuug

SEQ ID NO: 2802972 - RNA, 17 nt, Human
ugaagagcuugcuuuga

SEQ ID NO: 2802973 - RNA, 18 nt, Human
ugaagagcuugcuuugau

SEQ ID NO: 2802974 - RNA, 19 nt, Human
ugaagagcuugcuuugauu

SEQ ID NO: 2802975 - RNA, 23 nt, Human
ugaagaguccucugaaugaaccu

SEQ ID NO: 2802976 - RNA, 18 nt, Human
ugaagagucgauuauuuc

SEQ ID NO: 2802977 - RNA, 22 nt, Human
ugaagagugacuaguacaaauu

SEQ ID NO: 2802978 - RNA, 14 nt, Human
ugaagacugaggac

SEQ ID NO: 2802979 - RNA, 17 nt, Human
ugaagaguccucugaau

SEQ ID NO: 2802980 - RNA, 13 nt, Human
ugaagaguaguuu

SEQ ID NO: 2802981 - RNA, 15 nt, Human
ugaagagagauauau

SEQ ID NO: 2802982 - RNA, 21 nt, Human
ugaagagagauauaucugaaa

SEQ ID NO: 2802983 - RNA, 22 nt, Human
ugaagagagauauaucugaaaa

SEQ ID NO: 2802984 - RNA, 17 nt, Human
ugaagagacaguuauuu

SEQ ID NO: 2802985 - RNA, 23 nt, Human
ugaagagacaguuauuuauaguc

SEQ ID NO: 2802986 - RNA, 16 nt, Human
ugaagagcaaaaauau

SEQ ID NO: 2802987 - RNA, 22 nt, Human
ugaagagccagaagugaagagu

SEQ ID NO: 2802988 - RNA, 24 nt, Human
ugaagagaaccgagcaaagaucaa

SEQ ID NO: 2802989 - RNA, 19 nt, Human
ugaagagaagcaauuuugg

SEQ ID NO: 2802990 - RNA, 15 nt, Human
ugaagacuggaagcu

SEQ ID NO: 2802991 - RNA, 11 nt, Human
ugaaggccugg

SEQ ID NO: 2802992 - RNA, 19 nt, Human
ugaaggaacauuccuuagu

SEQ ID NO: 2802993 - RNA, 15 nt, Human
ugaaggaaaaugaua

SEQ ID NO: 2802994 - RNA, 12 nt, Human
ugaaggaaacag

SEQ ID NO: 2802995 - RNA, 14 nt, Human
ugaaggaaacaguu

SEQ ID NO: 2802996 - RNA, 16 nt, Human
ugaaggaaacaguuaa

SEQ ID NO: 2802997 - RNA, 22 nt, Human
ugaagaguugccccgucucugu

SEQ ID NO: 2802998 - RNA, 14 nt, Human
ugacuaaaauauuu

SEQ ID NO: 2802999 - RNA, 23 nt, Human
ugacuaacuagacaccaaaguuc

SEQ ID NO: 2803000 - RNA, 11 nt, Human
ugacuaauuag

SEQ ID NO: 2803001 - RNA, 14 nt, Human
ugacuaauuagggu

SEQ ID NO: 2803002 - RNA, 21 nt, Human
ugacuaauuaggguacauuua

SEQ ID NO: 2803003 - RNA, 22 nt, Human
ugacuaauuaggguacauuuau

SEQ ID NO: 2803004 - RNA, 23 nt, Human
ugacuaauuaggguacauuuaua

SEQ ID NO: 2803005 - RNA, 20 nt, Human
ugacuaacuagacaccaaag

SEQ ID NO: 2803006 - RNA, 15 nt, Human
ugacuaaauucguga

SEQ ID NO: 2803007 - RNA, 18 nt, Human
ugacuaaauucgugauuu

SEQ ID NO: 2803008 - RNA, 19 nt, Human
ugacuaaauucgugauuuu

SEQ ID NO: 2803009 - RNA, 13 nt, Human
ugacuaaauuugg

SEQ ID NO: 2803010 - RNA, 16 nt, Human
ugacuaaauuugggga

SEQ ID NO: 2803011 - RNA, 15 nt, Human
ugaccaugucuauga

SEQ ID NO: 2803012 - RNA, 23 nt, Human
ugacguggagcgggguaugaaga

SEQ ID NO: 2803013 - RNA, 16 nt, Human
ugacuuugcucuuucu

SEQ ID NO: 2803014 - RNA, 13 nt, Human
ugacuuucaggua

SEQ ID NO: 2803015 - RNA, 14 nt, Human
ugacuuucaguaaa

SEQ ID NO: 2803016 - RNA, 17 nt, Human
ugacuggggugggaggu

SEQ ID NO: 2803017 - RNA, 20 nt, Human
ugacuggggugggaggucuu

SEQ ID NO: 2803018 - RNA, 20 nt, Human
ugacucuuguuuucaguuuc

SEQ ID NO: 2803019 - RNA, 23 nt, Human
ugacucuuuuuagggccaggcag

SEQ ID NO: 2803020 - RNA, 22 nt, Human
ugacucuuuuuagggccaggca

SEQ ID NO: 2803021 - RNA, 21 nt, Human
ugacugcccagcauuugggua

SEQ ID NO: 2803022 - RNA, 18 nt, Human
ugacugcccauucaccaa

SEQ ID NO: 2803023 - RNA, 14 nt, Human
ugacuggcauuuua

SEQ ID NO: 2803024 - RNA, 17 nt, Human
ugacuggcauuuuauag

SEQ ID NO: 2803025 - RNA, 18 nt, Human
ugacuggcauuuuauaga

SEQ ID NO: 2803026 - RNA, 21 nt, Human
ugacuggcauuuuauagacac

SEQ ID NO: 2803027 - RNA, 23 nt, Human
ugacuggaggguccauuuuucuu

SEQ ID NO: 2803028 - RNA, 15 nt, Human
ugacugcugauucuc

SEQ ID NO: 2803029 - RNA, 23 nt, Human
ugacugcuccccagcccuggcuc

SEQ ID NO: 2803030 - RNA, 20 nt, Human
ugacugcuccccagcccugg

SEQ ID NO: 2803031 - RNA, 21 nt, Human
ugacugcuccccagcccuggc

SEQ ID NO: 2803032 - RNA, 22 nt, Human
ugacugcuccccagcccuggcu

SEQ ID NO: 2803033 - RNA, 13 nt, Human
ugagaaagcccug

SEQ ID NO: 2803034 - RNA, 21 nt, Human
ugagaaagcccugucgggcuu

SEQ ID NO: 2803035 - RNA, 21 nt, Human
ugagaaauauggacacuuaau

SEQ ID NO: 2803036 - RNA, 17 nt, Human
ugagacagugcacauga

SEQ ID NO: 2803037 - RNA, 18 nt, Human
ugagacagugcacaugaa

SEQ ID NO: 2803038 - RNA, 19 nt, Human
ugagacagugcacaugaac

SEQ ID NO: 2803039 - RNA, 17 nt, Human
ugagaaauauggacacu

SEQ ID NO: 2803040 - RNA, 15 nt, Human
ugagaaauauggaca

SEQ ID NO: 2803041 - RNA, 23 nt, Human
ugagacaguuucuuagcuuuuua

SEQ ID NO: 2803042 - RNA, 20 nt, Human
ugagacaguuucuuagcuuu

SEQ ID NO: 2803043 - RNA, 21 nt, Human
ugagacaguuucuuagcuuuu

SEQ ID NO: 2803044 - RNA, 14 nt, Human
ugagacaguuucuu

SEQ ID NO: 2803045 - RNA, 15 nt, Human
ugagacaguuucuua

SEQ ID NO: 2803046 - RNA, 16 nt, Human
ugagacaguuucuuag

SEQ ID NO: 2803047 - RNA, 18 nt, Human
ugagacaguuucuuagcu

SEQ ID NO: 2803048 - RNA, 19 nt, Human
ugagacaguuucuuagcuu

SEQ ID NO: 2803049 - RNA, 16 nt, Human
ugagaaaccuguaucu

SEQ ID NO: 2803050 - RNA, 17 nt, Human
ugagaaaccuguaucuu

SEQ ID NO: 2803051 - RNA, 18 nt, Human
ugagaaaccuguaucuuu

SEQ ID NO: 2803052 - RNA, 20 nt, Human
ugagaaaccuguaucuuucu

SEQ ID NO: 2803053 - RNA, 21 nt, Human
ugagaaaccuguaucuuucua

SEQ ID NO: 2803054 - RNA, 22 nt, Human
ugagaaaccuguaucuuucuau

SEQ ID NO: 2803055 - RNA, 24 nt, Human
ugagaaaccuguaucuuucuaugc

SEQ ID NO: 2803056 - RNA, 23 nt, Human
ugagaaaacaagcaaguucugag

SEQ ID NO: 2803057 - RNA, 14 nt, Human
ugagaaaacaagca

SEQ ID NO: 2803058 - RNA, 13 nt, Human
ugagaaaacaagc

SEQ ID NO: 2803059 - RNA, 18 nt, Human
ugagaaaaauauauacua

SEQ ID NO: 2803060 - RNA, 16 nt, Human
ugagaaaaagcuccug

SEQ ID NO: 2803061 - RNA, 17 nt, Human
ugagaaaaagcuccugu

SEQ ID NO: 2803062 - RNA, 18 nt, Human
ugagaaaaagcuccuguc

SEQ ID NO: 2803063 - RNA, 16 nt, Human
ugagcaggaaggccug

SEQ ID NO: 2803064 - RNA, 17 nt, Human
ugagcaggaaggccugg

SEQ ID NO: 2803065 - RNA, 18 nt, Human
ugagcaggaaggccuggg

SEQ ID NO: 2803066 - RNA, 19 nt, Human
ugagcaggaaggccugggu

SEQ ID NO: 2803067 - RNA, 18 nt, Human
ugagaguuuugucuugaa

SEQ ID NO: 2803068 - RNA, 21 nt, Human
ugagaguuuugucuugaaugu

SEQ ID NO: 2803069 - RNA, 22 nt, Human
ugagauagcugguguuagggcu

SEQ ID NO: 2803070 - RNA, 15 nt, Human
ugagauacuuuuucu

SEQ ID NO: 2803071 - RNA, 21 nt, Human
ugagauacuuuuucuuuugua

SEQ ID NO: 2803072 - RNA, 23 nt, Human
ugagauacuuuuucuuuuguaag

SEQ ID NO: 2803073 - RNA, 14 nt, Human
ugagaggggaacag

SEQ ID NO: 2803074 - RNA, 18 nt, Human
ugagaggggaacagacug

SEQ ID NO: 2803075 - RNA, 12 nt, Human
ugagaccugccc

SEQ ID NO: 2803076 - RNA, 22 nt, Human
ugagaccugccccuccucucug

SEQ ID NO: 2803077 - RNA, 15 nt, Human
ugagaccugccccuc

SEQ ID NO: 2803078 - RNA, 14 nt, Human
ugagaccugccccu

SEQ ID NO: 2803079 - RNA, 13 nt, Human
ugagaccugcccc

SEQ ID NO: 2803080 - RNA, 21 nt, Human
ugaggcaaugucaggaacaga

SEQ ID NO: 2803081 - RNA, 22 nt, Human
ugaggcacaagaaucacuugaa

SEQ ID NO: 2803082 - RNA, 20 nt, Human
ugaggcaaugucaggaacag

SEQ ID NO: 2803083 - RNA, 17 nt, Human
ugaggcaaugucaggaa

SEQ ID NO: 2803084 - RNA, 16 nt, Human
ugaggcaaugucagga

SEQ ID NO: 2803085 - RNA, 13 nt, Human
ugaggcagggcaa

SEQ ID NO: 2803086 - RNA, 18 nt, Human
ugaggcagggcaaaugac

SEQ ID NO: 2803087 - RNA, 18 nt, Human
ugaggcucuuucugggcc

SEQ ID NO: 2803088 - RNA, 17 nt, Human
ugaggcucuuucugggc

SEQ ID NO: 2803089 - RNA, 16 nt, Human
ugaggcucuuucuggg

SEQ ID NO: 2803090 - RNA, 23 nt, Human
ugaggcggguggaucaccugagg

SEQ ID NO: 2803091 - RNA, 14 nt, Human
ugaggccugucugu

SEQ ID NO: 2803092 - RNA, 16 nt, Human
ugaggccugucuguga

SEQ ID NO: 2803093 - RNA, 19 nt, Human
ugaggccugucugugaccu

SEQ ID NO: 2803094 - RNA, 19 nt, Human
ugaggucagagccugcagu

SEQ ID NO: 2803095 - RNA, 18 nt, Human
ugaggucagagccugcag

SEQ ID NO: 2803096 - RNA, 13 nt, Human
ugaggcugagacu

SEQ ID NO: 2803097 - RNA, 19 nt, Human
ugaggcucuuucugggcca

SEQ ID NO: 2803098 - RNA, 15 nt, Human
ugaggucccaggaag

SEQ ID NO: 2803099 - RNA, 16 nt, Human
ugaggucccaggaagu

SEQ ID NO: 2803100 - RNA, 12 nt, Human
ugaggucaggga

SEQ ID NO: 2803101 - RNA, 14 nt, Human
ugaggucagggagu

SEQ ID NO: 2803102 - RNA, 15 nt, Human
ugaggucagggagug

SEQ ID NO: 2803103 - RNA, 16 nt, Human
ugaggucagggagugc

SEQ ID NO: 2803104 - RNA, 18 nt, Human
ugaggucagggagugcug

SEQ ID NO: 2803105 - RNA, 16 nt, Human
ugaggugaaagggagc

SEQ ID NO: 2803106 - RNA, 15 nt, Human
ugaggugaaagggag

SEQ ID NO: 2803107 - RNA, 18 nt, Human
ugaggugaaagggagcua

SEQ ID NO: 2803108 - RNA, 17 nt, Human
ugaggugaaagggagcu

SEQ ID NO: 2803109 - RNA, 16 nt, Human
ugaggugccuguccca

SEQ ID NO: 2803110 - RNA, 14 nt, Human
ugaggugccugucc

SEQ ID NO: 2803111 - RNA, 15 nt, Human
ugaggugccuguccc

SEQ ID NO: 2803112 - RNA, 12 nt, Human
ugaggugguagg

SEQ ID NO: 2803113 - RNA, 21 nt, Human
ugaggugguaguaaaacacag

SEQ ID NO: 2803114 - RNA, 23 nt, Human
ugaggugguaguaaaacacagag

SEQ ID NO: 2803115 - RNA, 19 nt, Human
ugagucccaggcugagccu

SEQ ID NO: 2803116 - RNA, 12 nt, Human
ugagguguacca

SEQ ID NO: 2803117 - RNA, 21 nt, Human
ugagucccaggcugagccuca

SEQ ID NO: 2803118 - RNA, 20 nt, Human
ugagucccaggcugagccuc

SEQ ID NO: 2803119 - RNA, 18 nt, Human
ugagucccccagagaugu

SEQ ID NO: 2803120 - RNA, 20 nt, Human
ugagucccccagagauguca

SEQ ID NO: 2803121 - RNA, 20 nt, Human
ugaggauuauuauaaaaggg

SEQ ID NO: 2803122 - RNA, 20 nt, Human
ugaggauuauugauaguacu

SEQ ID NO: 2803123 - RNA, 16 nt, Human
ugaggauuuagaagug

SEQ ID NO: 2803124 - RNA, 19 nt, Human
ugaggauuuagaaguguca

SEQ ID NO: 2803125 - RNA, 15 nt, Human
ugaggcaaguguggg

SEQ ID NO: 2803126 - RNA, 16 nt, Human
ugaggcaagugugggc

SEQ ID NO: 2803127 - RNA, 20 nt, Human
ugaggcaaccugauuguaaa

SEQ ID NO: 2803128 - RNA, 22 nt, Human
ugaggaggggccccccugcccu

SEQ ID NO: 2803129 - RNA, 19 nt, Human
ugagcuuggcagcugaacu

SEQ ID NO: 2803130 - RNA, 20 nt, Human
ugagcuuggcagcugaacua

SEQ ID NO: 2803131 - RNA, 17 nt, Human
ugaggaggccuccaucu

SEQ ID NO: 2803132 - RNA, 23 nt, Human
ugagcuuaagaauuuugagcagg

SEQ ID NO: 2803133 - RNA, 16 nt, Human
ugagcugaucugcgga

SEQ ID NO: 2803134 - RNA, 13 nt, Human
ugagcugagccag

SEQ ID NO: 2803135 - RNA, 14 nt, Human
ugagcugagccagg

SEQ ID NO: 2803136 - RNA, 15 nt, Human
ugagcugagccaggc

SEQ ID NO: 2803137 - RNA, 16 nt, Human
ugagcugagccaggcu

SEQ ID NO: 2803138 - RNA, 22 nt, Human
ugagccgagaucacgccacugc

SEQ ID NO: 2803139 - RNA, 23 nt, Human
ugagcagggcucagcggggacag

SEQ ID NO: 2803140 - RNA, 22 nt, Human
ugagcagggcucagcggggaca

SEQ ID NO: 2803141 - RNA, 20 nt, Human
ugagcagggcucagcgggga

SEQ ID NO: 2803142 - RNA, 23 nt, Human
ugagccgagaucacgccacugca

SEQ ID NO: 2803143 - RNA, 16 nt, Human
ugagcuauugcuguuc

SEQ ID NO: 2803144 - RNA, 15 nt, Human
ugagcuauuaaaacu

SEQ ID NO: 2803145 - RNA, 18 nt, Human
ugagcuauuaaaacucag

SEQ ID NO: 2803146 - RNA, 21 nt, Human
ugagcuauuaaaacucagccu

SEQ ID NO: 2803147 - RNA, 12 nt, Human
ugagcucagccc

SEQ ID NO: 2803148 - RNA, 11 nt, Human
ugagcucagcc

SEQ ID NO: 2803149 - RNA, 20 nt, Human
ugagcucagcccuggugggc

SEQ ID NO: 2803150 - RNA, 15 nt, Human
ugagcugauauaaau

SEQ ID NO: 2803151 - RNA, 16 nt, Human
ugagcugauauaaauu

SEQ ID NO: 2803152 - RNA, 17 nt, Human
ugagcugauauaaauuc

SEQ ID NO: 2803153 - RNA, 21 nt, Human
ugagcugauauaaauucugug

SEQ ID NO: 2803154 - RNA, 12 nt, Human
ucugucucaucc

SEQ ID NO: 2803155 - RNA, 17 nt, Human
ucugucucauccuccug

SEQ ID NO: 2803156 - RNA, 18 nt, Human
ucugucucauccuccugg

SEQ ID NO: 2803157 - RNA, 19 nt, Human
ucugucucauccuccugga

SEQ ID NO: 2803158 - RNA, 20 nt, Human
ucugucucauccuccuggaa

SEQ ID NO: 2803159 - RNA, 14 nt, Human
ucugucuccuuaac

SEQ ID NO: 2803160 - RNA, 19 nt, Human
ucugucuccuuaacacuga

SEQ ID NO: 2803161 - RNA, 22 nt, Human
ucugucucccaguuaugaauca

SEQ ID NO: 2803162 - RNA, 14 nt, Human
ucuguguauauuau

SEQ ID NO: 2803163 - RNA, 18 nt, Human
ucuguguauauuauuugg

SEQ ID NO: 2803164 - RNA, 19 nt, Human
ucuguguauauuauuuggc

SEQ ID NO: 2803165 - RNA, 15 nt, Human
ucugucucagacuuu

SEQ ID NO: 2803166 - RNA, 19 nt, Human
ucugucucagacuuuugua

SEQ ID NO: 2803167 - RNA, 22 nt, Human
ucugucucagacuuuuguacau

SEQ ID NO: 2803168 - RNA, 19 nt, Human
ucugucuagcaugccaaca

SEQ ID NO: 2803169 - RNA, 23 nt, Human
ucugucuagcaugccaacaagaa

SEQ ID NO: 2803170 - RNA, 16 nt, Human
ucugucuaaaaaccag

SEQ ID NO: 2803171 - RNA, 17 nt, Human
ucugucuaaaaaccaga

SEQ ID NO: 2803172 - RNA, 15 nt, Human
ucugucuaaagauag

SEQ ID NO: 2803173 - RNA, 14 nt, Human
ucugucuacaaaua

SEQ ID NO: 2803174 - RNA, 22 nt, Human
ucugucuacaaauauaagauuu

SEQ ID NO: 2803175 - RNA, 16 nt, Human
ucuguccugagaagca

SEQ ID NO: 2803176 - RNA, 12 nt, Human
ucuguccugcug

SEQ ID NO: 2803177 - RNA, 15 nt, Human
ucuguccugcuucug

SEQ ID NO: 2803178 - RNA, 16 nt, Human
ucuguccugcuucuga

SEQ ID NO: 2803179 - RNA, 16 nt, Human
ucugucgcccagucug

SEQ ID NO: 2803180 - RNA, 17 nt, Human
ucugucgcccagucugg

SEQ ID NO: 2803181 - RNA, 12 nt, Human
ucuguccuggga

SEQ ID NO: 2803182 - RNA, 17 nt, Human
ucuguacacguguccug

SEQ ID NO: 2803183 - RNA, 14 nt, Human
ucuguaauuuuuca

SEQ ID NO: 2803184 - RNA, 15 nt, Human
ucuguaauuuuucag

SEQ ID NO: 2803185 - RNA, 12 nt, Human
ucuguacaaagg

SEQ ID NO: 2803186 - RNA, 23 nt, Human
ucuguacaaaggggaaagaacau

SEQ ID NO: 2803187 - RNA, 20 nt, Human
ucuguccuacucugugucag

SEQ ID NO: 2803188 - RNA, 13 nt, Human
ucuguacacgugu

SEQ ID NO: 2803189 - RNA, 19 nt, Human
ucuggucucuaggcugggg

SEQ ID NO: 2803190 - RNA, 21 nt, Human
ucuggucucuaggcuggggaa

SEQ ID NO: 2803191 - RNA, 16 nt, Human
ucuggucucuaggcug

SEQ ID NO: 2803192 - RNA, 17 nt, Human
ucuggucucuaggcugg

SEQ ID NO: 2803193 - RNA, 18 nt, Human
ucuggucucuaggcuggg

SEQ ID NO: 2803194 - RNA, 12 nt, Human
ucuguaaauaug

SEQ ID NO: 2803195 - RNA, 13 nt, Human
ucuguaaauacca

SEQ ID NO: 2803196 - RNA, 21 nt, Human
ucuguaaauaccauugacaca

SEQ ID NO: 2803197 - RNA, 22 nt, Human
ucuguaaauaccauugacacau

SEQ ID NO: 2803198 - RNA, 16 nt, Human
ucuguaaauauguuuu

SEQ ID NO: 2803199 - RNA, 23 nt, Human
ucuguaacagguauuuuguuucu

SEQ ID NO: 2803200 - RNA, 23 nt, Human
ucuguaacaucacuauccaugca

SEQ ID NO: 2803201 - RNA, 15 nt, Human
ucuguaaacucaaaa

SEQ ID NO: 2803202 - RNA, 18 nt, Human
ucuguaaacucaaaacuu

SEQ ID NO: 2803203 - RNA, 23 nt, Human
ucuggcuuccagaaaaccccagc

SEQ ID NO: 2803204 - RNA, 16 nt, Human
ucuggcuguaaggcuc

SEQ ID NO: 2803205 - RNA, 18 nt, Human
ucuggcuguaaggcucua

SEQ ID NO: 2803206 - RNA, 22 nt, Human
ucuggcuguaaggcucuagauc

SEQ ID NO: 2803207 - RNA, 16 nt, Human
ucuggcuuauuuuaau

SEQ ID NO: 2803208 - RNA, 17 nt, Human
ucuggcuuauuuuaaug

SEQ ID NO: 2803209 - RNA, 18 nt, Human
ucuggcuuauuuuaaugu

SEQ ID NO: 2803210 - RNA, 20 nt, Human
ucuggcuuauuuuaauguga

SEQ ID NO: 2803211 - RNA, 21 nt, Human
ucuggcuuauuuuaaugugau

SEQ ID NO: 2803212 - RNA, 21 nt, Human
ucuggcuguaaggcucuagau

SEQ ID NO: 2803213 - RNA, 21 nt, Human
ucuggcugccccaaccugcug

SEQ ID NO: 2803214 - RNA, 22 nt, Human
ucuggcugccccaaccugcuga

SEQ ID NO: 2803215 - RNA, 21 nt, Human
ucugcugccgccccacccaga

SEQ ID NO: 2803216 - RNA, 17 nt, Human
ucugcugccugcccgca

SEQ ID NO: 2803217 - RNA, 22 nt, Human
ucugcugccugcccgcacagca

SEQ ID NO: 2803218 - RNA, 23 nt, Human
ucugcugccugcccgcacagcag

SEQ ID NO: 2803219 - RNA, 13 nt, Human
ucugcuggaguuu

SEQ ID NO: 2803220 - RNA, 18 nt, Human
ucugcugcugucccuccc

SEQ ID NO: 2803221 - RNA, 19 nt, Human
ucugcuggaguuucaugua

SEQ ID NO: 2803222 - RNA, 22 nt, Human
ucugcugccgccccacccagau

SEQ ID NO: 2803223 - RNA, 16 nt, Human
ucugcugaagacuugc

SEQ ID NO: 2803224 - RNA, 23 nt, Human
ucuggaaugguacaugucuucca

SEQ ID NO: 2803225 - RNA, 14 nt, Human
ucuggacucuaaag

SEQ ID NO: 2803226 - RNA, 15 nt, Human
ucuggacucuaaaga

SEQ ID NO: 2803227 - RNA, 18 nt, Human
ucuggacucuaaagacca

SEQ ID NO: 2803228 - RNA, 20 nt, Human
ucuggacucuaaagaccaaa

SEQ ID NO: 2803229 - RNA, 22 nt, Human
ucuggacuccucuguccaggca

SEQ ID NO: 2803230 - RNA, 14 nt, Human
ucuggacugacagc

SEQ ID NO: 2803231 - RNA, 17 nt, Human
ucuggacugacagcaug

SEQ ID NO: 2803232 - RNA, 19 nt, Human
ucuggacugccccagaaaa

SEQ ID NO: 2803233 - RNA, 15 nt, Human
ucuggacuggcuaga

SEQ ID NO: 2803234 - RNA, 14 nt, Human
ucuggacuggcuag

SEQ ID NO: 2803235 - RNA, 15 nt, Human
ucuggacuccucugu

SEQ ID NO: 2803236 - RNA, 16 nt, Human
ucuggacuccucuguc

SEQ ID NO: 2803237 - RNA, 18 nt, Human
ucuggacuccucugucca

SEQ ID NO: 2803238 - RNA, 20 nt, Human
ucugccugcccaggccccug

SEQ ID NO: 2803239 - RNA, 18 nt, Human
ucugccugcccaggcccc

SEQ ID NO: 2803240 - RNA, 17 nt, Human
ucugccugcccaggccc

SEQ ID NO: 2803241 - RNA, 16 nt, Human
ucugcucgccuuagca

SEQ ID NO: 2803242 - RNA, 16 nt, Human
ucugcuccuuuccccu

SEQ ID NO: 2803243 - RNA, 21 nt, Human
ucugcuccuuuccccuuccuu

SEQ ID NO: 2803244 - RNA, 17 nt, Human
ucugcucgcccuccuuu

SEQ ID NO: 2803245 - RNA, 19 nt, Human
ucugcucgcccuccuuucu

SEQ ID NO: 2803246 - RNA, 21 nt, Human
ucugcucgcccuccuuucugu

SEQ ID NO: 2803247 - RNA, 21 nt, Human
ucugcuccucuccccagcaag

SEQ ID NO: 2803248 - RNA, 22 nt, Human
ucugcugauccucccaggcuuc

SEQ ID NO: 2803249 - RNA, 13 nt, Human
ucugcugaaggaa

SEQ ID NO: 2803250 - RNA, 22 nt, Human
ucugcccaccucagccucccaa

SEQ ID NO: 2803251 - RNA, 18 nt, Human
ucugcccacauuggaccc

SEQ ID NO: 2803252 - RNA, 19 nt, Human
ucugcccaaaaauaugguu

SEQ ID NO: 2803253 - RNA, 18 nt, Human
ucugcccaauuggaggaa

SEQ ID NO: 2803254 - RNA, 23 nt, Human
ucugccauauucuguuggccagu

SEQ ID NO: 2803255 - RNA, 22 nt, Human
ucugccauauucuguuggccag

SEQ ID NO: 2803256 - RNA, 13 nt, Human
ucugccaucaacu

SEQ ID NO: 2803257 - RNA, 21 nt, Human
ucugcauauguugaauacuuu

SEQ ID NO: 2803258 - RNA, 19 nt, Human
ucugcauauguugaauacu

SEQ ID NO: 2803259 - RNA, 18 nt, Human
ucugccauauucuguugg

SEQ ID NO: 2803260 - RNA, 18 nt, Human
ucugcauauguugaauac

SEQ ID NO: 2803261 - RNA, 16 nt, Human
ucugcauauguugaau

SEQ ID NO: 2803262 - RNA, 15 nt, Human
ucugcauauguugaa

SEQ ID NO: 2803263 - RNA, 15 nt, Human
ucugcaguaaaucuu

SEQ ID NO: 2803264 - RNA, 20 nt, Human
ucugccugaagucacacagu

SEQ ID NO: 2803265 - RNA, 19 nt, Human
ucugccugaagucacacag

SEQ ID NO: 2803266 - RNA, 22 nt, Human
ucugccucugacacacagcucu

SEQ ID NO: 2803267 - RNA, 21 nt, Human
ucugccucugacacacagcuc

SEQ ID NO: 2803268 - RNA, 23 nt, Human
ucugccucugacacacagcucug

SEQ ID NO: 2803269 - RNA, 18 nt, Human
ucugccucugacacacag

SEQ ID NO: 2803270 - RNA, 15 nt, Human
ucugccucugacaca

SEQ ID NO: 2803271 - RNA, 20 nt, Human
ucugccucacauagcuuaca

SEQ ID NO: 2803272 - RNA, 21 nt, Human
ucugccucaccgcuucccucc

SEQ ID NO: 2803273 - RNA, 20 nt, Human
ucugccuccaugcugcagug

SEQ ID NO: 2803274 - RNA, 15 nt, Human
ucugccuauccuggc

SEQ ID NO: 2803275 - RNA, 15 nt, Human
ucugccuccucuuca

SEQ ID NO: 2803276 - RNA, 15 nt, Human
ucugccucucuagga

SEQ ID NO: 2803277 - RNA, 16 nt, Human
ucugcaguaaaucuuu

SEQ ID NO: 2803278 - RNA, 18 nt, Human
ucugcaccguacugugga

SEQ ID NO: 2803279 - RNA, 21 nt, Human
ucugcaccuauguagcucugc

SEQ ID NO: 2803280 - RNA, 22 nt, Human
ucugcaccuauguagcucugca

SEQ ID NO: 2803281 - RNA, 23 nt, Human
ucugcacccuggggccuggaccu

SEQ ID NO: 2803282 - RNA, 20 nt, Human
ucugcaagcacaucugcauu

SEQ ID NO: 2803283 - RNA, 17 nt, Human
ucugcaaggucuuuggu

SEQ ID NO: 2803284 - RNA, 16 nt, Human
ucugcaaugggcacug

SEQ ID NO: 2803285 - RNA, 19 nt, Human
ucugcaaugggcacuggga

SEQ ID NO: 2803286 - RNA, 21 nt, Human
ucugcaaugggcacugggaug

SEQ ID NO: 2803287 - RNA, 24 nt, Human
ucugcacccuggggccuggaccug

SEQ ID NO: 2803288 - RNA, 13 nt, Human
ucugcacccuucu

SEQ ID NO: 2803289 - RNA, 15 nt, Human
ucugcacccuucuuu

SEQ ID NO: 2803290 - RNA, 16 nt, Human
ucugcacccuucuuuu

SEQ ID NO: 2803291 - RNA, 19 nt, Human
ucugcacccuucuuuucuc

SEQ ID NO: 2803292 - RNA, 20 nt, Human
ucugcacccuucuuuucuca

SEQ ID NO: 2803293 - RNA, 21 nt, Human
ucugcacccuucuuuucucau

SEQ ID NO: 2803294 - RNA, 14 nt, Human
ucugcaauucaaaa

SEQ ID NO: 2803295 - RNA, 16 nt, Human
ucugcaauucaaaagu

SEQ ID NO: 2803296 - RNA, 19 nt, Human
ucugcaauucaaaaguucc

SEQ ID NO: 2803297 - RNA, 21 nt, Human
ucugcaauucaaaaguuccaa

SEQ ID NO: 2803298 - RNA, 21 nt, Human
ucugaggaauccagacccggc

SEQ ID NO: 2803299 - RNA, 18 nt, Human
ucugaggaauccagaccc

SEQ ID NO: 2803300 - RNA, 22 nt, Human
ucugaggaauccagacccggcu

SEQ ID NO: 2803301 - RNA, 16 nt, Human
ucugcaaacaaacacc

SEQ ID NO: 2803302 - RNA, 22 nt, Human
ucugcaaacaaacaccuucuua

SEQ ID NO: 2803303 - RNA, 18 nt, Human
ucugcaaagaaugagaag

SEQ ID NO: 2803304 - RNA, 13 nt, Human
ucucaaugugaaa

SEQ ID NO: 2803305 - RNA, 17 nt, Human
ucugauuugcauauuca

SEQ ID NO: 2803306 - RNA, 15 nt, Human
ucugcaaaaggagag

SEQ ID NO: 2803307 - RNA, 16 nt, Human
ucugcaaaaggagaga

SEQ ID NO: 2803308 - RNA, 21 nt, Human
ucugauuuugugcaaaagcuu

SEQ ID NO: 2803309 - RNA, 14 nt, Human
ucugauuuuuauga

SEQ ID NO: 2803310 - RNA, 13 nt, Human
ucugauuuuagga

SEQ ID NO: 2803311 - RNA, 22 nt, Human
ucugauuuuaggagcuaaggcu

SEQ ID NO: 2803312 - RNA, 21 nt, Human
ucucauauauagacagcuuug

SEQ ID NO: 2803313 - RNA, 22 nt, Human
ucucauauauagacagcuuuga

SEQ ID NO: 2803314 - RNA, 12 nt, Human
ucucaucacaca

SEQ ID NO: 2803315 - RNA, 14 nt, Human
ucucaucacacaca

SEQ ID NO: 2803316 - RNA, 15 nt, Human
ucucaucacacacau

SEQ ID NO: 2803317 - RNA, 16 nt, Human
ucucaucacacacaug

SEQ ID NO: 2803318 - RNA, 18 nt, Human
ucucaucacacacaugga

SEQ ID NO: 2803319 - RNA, 22 nt, Human
ucucauccccaggggucccagc

SEQ ID NO: 2803320 - RNA, 16 nt, Human
ucucauccccaguccc

SEQ ID NO: 2803321 - RNA, 23 nt, Human
ucucauccccagucccaaugcac

SEQ ID NO: 2803322 - RNA, 14 nt, Human
ucucauccuccagu

SEQ ID NO: 2803323 - RNA, 21 nt, Human
ucucauccuccaguaccuugc

SEQ ID NO: 2803324 - RNA, 13 nt, Human
ucucauccuccug

SEQ ID NO: 2803325 - RNA, 14 nt, Human
ucucauccuccugg

SEQ ID NO: 2803326 - RNA, 15 nt, Human
ucucauccuccugga

SEQ ID NO: 2803327 - RNA, 16 nt, Human
ucucauccuccuggaa

SEQ ID NO: 2803328 - RNA, 17 nt, Human
ucucauccuccuggaac

SEQ ID NO: 2803329 - RNA, 18 nt, Human
ucucauccuccuggaacc

SEQ ID NO: 2803330 - RNA, 14 nt, Human
ucucauccccaggg

SEQ ID NO: 2803331 - RNA, 18 nt, Human
ucugagaggacuuuucuu

SEQ ID NO: 2803332 - RNA, 15 nt, Human
ucucauccccagggg

SEQ ID NO: 2803333 - RNA, 14 nt, Human
ucugagagucuaga

SEQ ID NO: 2803334 - RNA, 15 nt, Human
ucugagagucuagau

SEQ ID NO: 2803335 - RNA, 16 nt, Human
ucugagagucuagauu

SEQ ID NO: 2803336 - RNA, 17 nt, Human
ucugagagucuagauuc

SEQ ID NO: 2803337 - RNA, 18 nt, Human
ucugagagucuagauucu

SEQ ID NO: 2803338 - RNA, 19 nt, Human
ucugagagucuagauucuc

SEQ ID NO: 2803339 - RNA, 21 nt, Human
ucugagagucuagauucucug

SEQ ID NO: 2803340 - RNA, 16 nt, Human
ucugagcgggaggcag

SEQ ID NO: 2803341 - RNA, 17 nt, Human
ucugagcgggaggcaga

SEQ ID NO: 2803342 - RNA, 22 nt, Human
ucugagcgggaggcagaguuug

SEQ ID NO: 2803343 - RNA, 20 nt, Human
ucugagccagugcuuuaaug

SEQ ID NO: 2803344 - RNA, 22 nt, Human
ucugagagucuagauucucugg

SEQ ID NO: 2803345 - RNA, 12 nt, Human
ucugagcccaug

SEQ ID NO: 2803346 - RNA, 23 nt, Human
ucugagcccauguucugccccca

SEQ ID NO: 2803347 - RNA, 22 nt, Human
ucuuucccacccuguucccagu

SEQ ID NO: 2803348 - RNA, 14 nt, Human
ucuuugaaugcuuu

SEQ ID NO: 2803349 - RNA, 14 nt, Human
ucuugugcuagaau

SEQ ID NO: 2803350 - RNA, 17 nt, Human
ucuugugcuagaauacu

SEQ ID NO: 2803351 - RNA, 18 nt, Human
ucuugugcuagaauacuu

SEQ ID NO: 2803352 - RNA, 19 nt, Human
ucuugugcuagaauacuuu

SEQ ID NO: 2803353 - RNA, 21 nt, Human
ucuugugcuagaauacuuuuu

SEQ ID NO: 2803354 - RNA, 23 nt, Human
ucuugugcuagaauacuuuuuaa

SEQ ID NO: 2803355 - RNA, 18 nt, Human
ucuugugugauuaacuua

SEQ ID NO: 2803356 - RNA, 19 nt, Human
ucuugugugauuaacuuau

SEQ ID NO: 2803357 - RNA, 22 nt, Human
ucuugugcuggauggagcccag

SEQ ID NO: 2803358 - RNA, 23 nt, Human
ucuugugcuggauggagcccagg

SEQ ID NO: 2803359 - RNA, 21 nt, Human
ucuugugcuuuuccuauuugu

SEQ ID NO: 2803360 - RNA, 18 nt, Human
ucuugugcuuuuccugau

SEQ ID NO: 2803361 - RNA, 14 nt, Human
ucuuugcuguaaga

SEQ ID NO: 2803362 - RNA, 19 nt, Human
ucuuugcuguaagaugucu

SEQ ID NO: 2803363 - RNA, 21 nt, Human
ucuuugccuugggcugcuccu

SEQ ID NO: 2803364 - RNA, 20 nt, Human
ucuuugccuugggcugcucc

SEQ ID NO: 2803365 - RNA, 14 nt, Human
ucuuugccuugggc

SEQ ID NO: 2803366 - RNA, 12 nt, Human
ucuuugccuggu

SEQ ID NO: 2803367 - RNA, 12 nt, Human
ucuuugccucuc

SEQ ID NO: 2803368 - RNA, 17 nt, Human
ucuuugcagacaggcaa

SEQ ID NO: 2803369 - RNA, 14 nt, Human
ucuuugcagacagg

SEQ ID NO: 2803370 - RNA, 16 nt, Human
ucuuugacacucugca

SEQ ID NO: 2803371 - RNA, 17 nt, Human
ucuuugacacucugcag

SEQ ID NO: 2803372 - RNA, 13 nt, Human
ucuuugcagacag

SEQ ID NO: 2803373 - RNA, 19 nt, Human
ucuuugagggacugccucu

SEQ ID NO: 2803374 - RNA, 21 nt, Human
ucuuugagggacugccucugc

SEQ ID NO: 2803375 - RNA, 22 nt, Human
ucuuugagggacugccucugcc

SEQ ID NO: 2803376 - RNA, 23 nt, Human
ucuuugagggacugccucugcca

SEQ ID NO: 2803377 - RNA, 12 nt, Human
ucuuugcaaagu

SEQ ID NO: 2803378 - RNA, 15 nt, Human
ucuuugcaaaguauu

SEQ ID NO: 2803379 - RNA, 21 nt, Human
ucuuugcaaaguauuguaaau

SEQ ID NO: 2803380 - RNA, 22 nt, Human
ucuuugcaaaguauuguaaauu

SEQ ID NO: 2803381 - RNA, 23 nt, Human
ucuuugcaaaguauuguaaauua

SEQ ID NO: 2803382 - RNA, 15 nt, Human
ucuuuuuaaguaaug

SEQ ID NO: 2803383 - RNA, 16 nt, Human
ucuuuuuaaguaaugu

SEQ ID NO: 2803384 - RNA, 19 nt, Human
ucuuuuuaaguaaugugga

SEQ ID NO: 2803385 - RNA, 15 nt, Human
ucuuuuuaaguuaau

SEQ ID NO: 2803386 - RNA, 12 nt, Human
ucuuuuuacaua

SEQ ID NO: 2803387 - RNA, 20 nt, Human
ucuuuuuacauaacugccuu

SEQ ID NO: 2803388 - RNA, 12 nt, Human
ucuuuuuaguuu

SEQ ID NO: 2803389 - RNA, 15 nt, Human
ucuuuuuaaaauggu

SEQ ID NO: 2803390 - RNA, 23 nt, Human
ucuuuuuaaaguguuucuguuau

SEQ ID NO: 2803391 - RNA, 16 nt, Human
ucuuuucuaaaagacu

SEQ ID NO: 2803392 - RNA, 14 nt, Human
ucuuuuuaaagcuu

SEQ ID NO: 2803393 - RNA, 20 nt, Human
ucuuuuguucgcauggucac

SEQ ID NO: 2803394 - RNA, 13 nt, Human
ucuuuuguuacug

SEQ ID NO: 2803395 - RNA, 14 nt, Human
ucuuuuguuacugu

SEQ ID NO: 2803396 - RNA, 15 nt, Human
ucuuuuguuacuguu

SEQ ID NO: 2803397 - RNA, 16 nt, Human
ucuuuuguuacuguuc

SEQ ID NO: 2803398 - RNA, 17 nt, Human
ucuuuuguuacuguucu

SEQ ID NO: 2803399 - RNA, 18 nt, Human
ucuuuuguuacuguucuu

SEQ ID NO: 2803400 - RNA, 19 nt, Human
ucuuuuguuacuguucuug

SEQ ID NO: 2803401 - RNA, 21 nt, Human
ucuuuuguuacuguucuugcu

SEQ ID NO: 2803402 - RNA, 22 nt, Human
ucuuuuguuacuguucuugcug

SEQ ID NO: 2803403 - RNA, 23 nt, Human
ucuuuuguuacuguucuugcugc

SEQ ID NO: 2803404 - RNA, 16 nt, Human
ucuuuucauucucauu

SEQ ID NO: 2803405 - RNA, 22 nt, Human
ucuuuuccaaaauaaaacaaag

SEQ ID NO: 2803406 - RNA, 15 nt, Human
ucuuuuccuguugua

SEQ ID NO: 2803407 - RNA, 14 nt, Human
ucuuuucuaguuug

SEQ ID NO: 2803408 - RNA, 15 nt, Human
ucuuuuguuaaauaa

SEQ ID NO: 2803409 - RNA, 22 nt, Human
ucuuuuguuaaauaauauggcu

SEQ ID NO: 2803410 - RNA, 11 nt, Human
ucuuuuguuac

SEQ ID NO: 2803411 - RNA, 12 nt, Human
ucuuuuguuacu

SEQ ID NO: 2803412 - RNA, 15 nt, Human
ugaaaaccaaaauga

SEQ ID NO: 2803413 - RNA, 17 nt, Human
ugaaaaccaaaaugaca

SEQ ID NO: 2803414 - RNA, 21 nt, Human
ugaaaaccaaaaugacaucuu

SEQ ID NO: 2803415 - RNA, 23 nt, Human
ugaaaauucaaaaaguguuuauu

SEQ ID NO: 2803416 - RNA, 18 nt, Human
ugaaaauucaaaaagugu

SEQ ID NO: 2803417 - RNA, 19 nt, Human
ugaaaauucaaaaaguguu

SEQ ID NO: 2803418 - RNA, 18 nt, Human
ugaaaauuauuuuaaaca

SEQ ID NO: 2803419 - RNA, 19 nt, Human
ugaaaauuauuuuaaacaa

SEQ ID NO: 2803420 - RNA, 21 nt, Human
ugaaaauuauuuuaaacaaaa

SEQ ID NO: 2803421 - RNA, 17 nt, Human
ugaaaauucaaaaagug

SEQ ID NO: 2803422 - RNA, 20 nt, Human
ugaaaauucgcccgagcugu

SEQ ID NO: 2803423 - RNA, 21 nt, Human
ugaaaauucgcccgagcuguu

SEQ ID NO: 2803424 - RNA, 22 nt, Human
ugaaaauucgcccgagcuguuu

SEQ ID NO: 2803425 - RNA, 23 nt, Human
ugaaacacucaguuguucaauaa

SEQ ID NO: 2803426 - RNA, 15 nt, Human
ugaaacacgaaacuu

SEQ ID NO: 2803427 - RNA, 17 nt, Human
ugaaacacgaaacuugu

SEQ ID NO: 2803428 - RNA, 19 nt, Human
ugaaacacgaaacuuguua

SEQ ID NO: 2803429 - RNA, 20 nt, Human
ugaaacacgaaacuuguuau

SEQ ID NO: 2803430 - RNA, 21 nt, Human
ugaaacacgaaacuuguuauu

SEQ ID NO: 2803431 - RNA, 13 nt, Human
ugaaaauuugaga

SEQ ID NO: 2803432 - RNA, 22 nt, Human
ugaaaauuugagacuauuuaaa

SEQ ID NO: 2803433 - RNA, 19 nt, Human
ugaaaauuuuaaaaauaca

SEQ ID NO: 2803434 - RNA, 20 nt, Human
ugaaaauuuuaaaaauacau

SEQ ID NO: 2803435 - RNA, 21 nt, Human
ugaaaauuuuaaaaauacaua

SEQ ID NO: 2803436 - RNA, 22 nt, Human
ugaaaauuuuaaaaauacauau

SEQ ID NO: 2803437 - RNA, 14 nt, Human
ugaaaauuuuacca

SEQ ID NO: 2803438 - RNA, 15 nt, Human
ugaaaauuauuuuaa

SEQ ID NO: 2803439 - RNA, 16 nt, Human
ugaaaauuauuuuaaa

SEQ ID NO: 2803440 - RNA, 20 nt, Human
ugaaaauuaggauuucauga

SEQ ID NO: 2803441 - RNA, 20 nt, Human
ugaaaacggagcugaacaau

SEQ ID NO: 2803442 - RNA, 18 nt, Human
ugaaaaccuaaaagacag

SEQ ID NO: 2803443 - RNA, 15 nt, Human
ugaaaaccuacauau

SEQ ID NO: 2803444 - RNA, 16 nt, Human
ugaaaaccuacauauu

SEQ ID NO: 2803445 - RNA, 18 nt, Human
ugaaaaccaucuggccug

SEQ ID NO: 2803446 - RNA, 20 nt, Human
ugaaaaccaucuggccuggc

SEQ ID NO: 2803447 - RNA, 21 nt, Human
ugaaaaccaucuggccuggcc

SEQ ID NO: 2803448 - RNA, 22 nt, Human
ugaaaaccaucuggccuggccu

SEQ ID NO: 2803449 - RNA, 20 nt, Human
ucuuagcuaucauugcuucc

SEQ ID NO: 2803450 - RNA, 21 nt, Human
ucuuagcuaucauugcuuccu

SEQ ID NO: 2803451 - RNA, 20 nt, Human
ucugugucagguggggcagc

SEQ ID NO: 2803452 - RNA, 17 nt, Human
ucugugucagguggggc

SEQ ID NO: 2803453 - RNA, 20 nt, Human
ucugugugaugaacuuucuc

SEQ ID NO: 2803454 - RNA, 18 nt, Human
ucugugugaugaacuuuc

SEQ ID NO: 2803455 - RNA, 21 nt, Human
ucugugugcacaaauauuuau

SEQ ID NO: 2803456 - RNA, 14 nt, Human
ucugugugcacaaa

SEQ ID NO: 2803457 - RNA, 13 nt, Human
ucugugugaaaau

SEQ ID NO: 2803458 - RNA, 13 nt, Human
ucugugugaaugu

SEQ ID NO: 2803459 - RNA, 14 nt, Human
ucugugugaaugug

SEQ ID NO: 2803460 - RNA, 15 nt, Human
ucugugugaaugugg

SEQ ID NO: 2803461 - RNA, 22 nt, Human
ucugugugaaugugggcacugg

SEQ ID NO: 2803462 - RNA, 21 nt, Human
ucugugucuuucacagcuccu

SEQ ID NO: 2803463 - RNA, 18 nt, Human
ucugugugcaccuuacca

SEQ ID NO: 2803464 - RNA, 19 nt, Human
ucugugugcaccuuaccaa

SEQ ID NO: 2803465 - RNA, 18 nt, Human
ucugugugugaccccucc

SEQ ID NO: 2803466 - RNA, 19 nt, Human
ucugugugugaccccuccu

SEQ ID NO: 2803467 - RNA, 20 nt, Human
ucugugugugaccccuccug

SEQ ID NO: 2803468 - RNA, 21 nt, Human
ucugugugugaccccuccugg

SEQ ID NO: 2803469 - RNA, 22 nt, Human
ucugugugugaccccuccuggg

SEQ ID NO: 2803470 - RNA, 23 nt, Human
ucugugugugaccccuccugggg

SEQ ID NO: 2803471 - RNA, 21 nt, Human
ucuuagauucucugugucuaa

SEQ ID NO: 2803472 - RNA, 22 nt, Human
ucugugugcaccuuaccaacuu

SEQ ID NO: 2803473 - RNA, 12 nt, Human
ucuuagauucuc

SEQ ID NO: 2803474 - RNA, 22 nt, Human
ucuuagcauagcuuauuauuga

SEQ ID NO: 2803475 - RNA, 13 nt, Human
ucuuaucaagcag

SEQ ID NO: 2803476 - RNA, 16 nt, Human
ucuuaucaagcagcca

SEQ ID NO: 2803477 - RNA, 23 nt, Human
ucuuaucaaggacucugguuucu

SEQ ID NO: 2803478 - RNA, 20 nt, Human
ucuuauauauauuucuuugu

SEQ ID NO: 2803479 - RNA, 14 nt, Human
ucuuauacacauug

SEQ ID NO: 2803480 - RNA, 12 nt, Human
ucuuaucucagu

SEQ ID NO: 2803481 - RNA, 14 nt, Human
ucuuaucucaguca

SEQ ID NO: 2803482 - RNA, 20 nt, Human
ucuuaucucagucaugcaua

SEQ ID NO: 2803483 - RNA, 22 nt, Human
ucuuaucucagucaugcauaaa

SEQ ID NO: 2803484 - RNA, 18 nt, Human
ucuuaucugagcugagcc

SEQ ID NO: 2803485 - RNA, 15 nt, Human
ucuuaugcaaaaugg

SEQ ID NO: 2803486 - RNA, 16 nt, Human
ucuuaugcaaaaugga

SEQ ID NO: 2803487 - RNA, 17 nt, Human
ucuuaugcaaaauggaa

SEQ ID NO: 2803488 - RNA, 13 nt, Human
ucuucagagauca

SEQ ID NO: 2803489 - RNA, 18 nt, Human
ucuucagagaucauggaa

SEQ ID NO: 2803490 - RNA, 12 nt, Human
ucuucagagcug

SEQ ID NO: 2803491 - RNA, 13 nt, Human
ucuucagagcuga

SEQ ID NO: 2803492 - RNA, 20 nt, Human
ucuucauucuaucaagccca

SEQ ID NO: 2803493 - RNA, 14 nt, Human
ucuucauuucauug

SEQ ID NO: 2803494 - RNA, 15 nt, Human
ucuucauuucauugu

SEQ ID NO: 2803495 - RNA, 24 nt, Human
ucuucauuucauuguaugaugugu

SEQ ID NO: 2803496 - RNA, 16 nt, Human
ucuucauuucauugua

SEQ ID NO: 2803497 - RNA, 17 nt, Human
ucuucauuucauuguau

SEQ ID NO: 2803498 - RNA, 21 nt, Human
ucuucauuucauuguaugaug

SEQ ID NO: 2803499 - RNA, 22 nt, Human
ucuucauuucauuguaugaugu

SEQ ID NO: 2803500 - RNA, 20 nt, Human
ucuucauaaaguacuugagu

SEQ ID NO: 2803501 - RNA, 21 nt, Human
ucuucauguacauuuggaacu

SEQ ID NO: 2803502 - RNA, 19 nt, Human
ucuucagauacaaacugca

SEQ ID NO: 2803503 - RNA, 21 nt, Human
ucuucaguugguugugucuuu

SEQ ID NO: 2803504 - RNA, 22 nt, Human
ucuucaguugguugugucuuuu

SEQ ID NO: 2803505 - RNA, 22 nt, Human
ucuucaguuaagccuuuggaaa

SEQ ID NO: 2803506 - RNA, 20 nt, Human
ucuucaguuaagccuuugga

SEQ ID NO: 2803507 - RNA, 19 nt, Human
ucuucaguuaagccuuugg

SEQ ID NO: 2803508 - RNA, 23 nt, Human
ucuugcauggcaaggacugcagg

SEQ ID NO: 2803509 - RNA, 17 nt, Human
ucuugcauugacauuau

SEQ ID NO: 2803510 - RNA, 14 nt, Human
ucuugcucugcuga

SEQ ID NO: 2803511 - RNA, 14 nt, Human
ucuugcccugggga

SEQ ID NO: 2803512 - RNA, 16 nt, Human
ucuugccacugccucu

SEQ ID NO: 2803513 - RNA, 17 nt, Human
ucuugccacugccucuu

SEQ ID NO: 2803514 - RNA, 23 nt, Human
ucuugcucugcugacagacacag

SEQ ID NO: 2803515 - RNA, 15 nt, Human
ucuugcucugcugac

SEQ ID NO: 2803516 - RNA, 14 nt, Human
ucuuguacaugugu

SEQ ID NO: 2803517 - RNA, 17 nt, Human
ucuuguacauguguagc

SEQ ID NO: 2803518 - RNA, 14 nt, Human
ucuuguaauuucca

SEQ ID NO: 2803519 - RNA, 21 nt, Human
ucuuguaauuuccagcuuucu

SEQ ID NO: 2803520 - RNA, 17 nt, Human
ucuugccgaggagccag

SEQ ID NO: 2803521 - RNA, 19 nt, Human
ucuugccgaggagccaggc

SEQ ID NO: 2803522 - RNA, 19 nt, Human
ucuuguacauguguagccu

SEQ ID NO: 2803523 - RNA, 24 nt, Human
ucuuguacauguguagccugugca

SEQ ID NO: 2803524 - RNA, 17 nt, Human
ucuuguagcccaggcug

SEQ ID NO: 2803525 - RNA, 23 nt, Human
ucuuguagcggaugauucuucaa

SEQ ID NO: 2803526 - RNA, 20 nt, Human
ucuuguauaagauccuagau

SEQ ID NO: 2803527 - RNA, 21 nt, Human
ucuuguauaagauccuagauc

SEQ ID NO: 2803528 - RNA, 20 nt, Human
ucuuguccucauucuugccu

SEQ ID NO: 2803529 - RNA, 13 nt, Human
ucuuguccuagcu

SEQ ID NO: 2803530 - RNA, 17 nt, Human
ucuuguccucaguccau

SEQ ID NO: 2803531 - RNA, 19 nt, Human
ucuuguccucaguccauuu

SEQ ID NO: 2803532 - RNA, 14 nt, Human
ucuucuuguuucuc

SEQ ID NO: 2803533 - RNA, 15 nt, Human
ucuucuuguuucucc

SEQ ID NO: 2803534 - RNA, 17 nt, Human
ucuucuuucagacuugc

SEQ ID NO: 2803535 - RNA, 19 nt, Human
ucuucuuucagacuugcca

SEQ ID NO: 2803536 - RNA, 18 nt, Human
ucuucuuuuggcuuccau

SEQ ID NO: 2803537 - RNA, 16 nt, Human
ucuucuuuuggcuucc

SEQ ID NO: 2803538 - RNA, 17 nt, Human
ucuucgaagccuugccu

SEQ ID NO: 2803539 - RNA, 18 nt, Human
ucuucgaagccuugccua

SEQ ID NO: 2803540 - RNA, 20 nt, Human
ucuuccaaaguaaaauugcu

SEQ ID NO: 2803541 - RNA, 13 nt, Human
ucuuccuuuacuu

SEQ ID NO: 2803542 - RNA, 16 nt, Human
ucuuccuuuacuuucc

SEQ ID NO: 2803543 - RNA, 17 nt, Human
ucuuccuuuacuuuccc

SEQ ID NO: 2803544 - RNA, 18 nt, Human
ucuuccuuuacuuucccu

SEQ ID NO: 2803545 - RNA, 19 nt, Human
ucuuccuuuacuuucccuu

SEQ ID NO: 2803546 - RNA, 20 nt, Human
ucuuccuuuacuuucccuug

SEQ ID NO: 2803547 - RNA, 22 nt, Human
ucuuccuuuacuuucccuugcu

SEQ ID NO: 2803548 - RNA, 16 nt, Human
ucuuccuuucucuuuc

SEQ ID NO: 2803549 - RNA, 17 nt, Human
ucuuccuuucucuuucu

SEQ ID NO: 2803550 - RNA, 18 nt, Human
ucuuccuuucucuuucuc

SEQ ID NO: 2803551 - RNA, 15 nt, Human
ucuucgcgcccgccc

SEQ ID NO: 2803552 - RNA, 20 nt, Human
ucuucgcgcccgccccugca

SEQ ID NO: 2803553 - RNA, 23 nt, Human
ucuucgcgcccgccccugcagca

SEQ ID NO: 2803554 - RNA, 17 nt, Human
ucuucgggaccaggauu

SEQ ID NO: 2803555 - RNA, 14 nt, Human
ucuucgggaccagg

SEQ ID NO: 2803556 - RNA, 22 nt, Human
ucuucggcccucagaugucccu

SEQ ID NO: 2803557 - RNA, 23 nt, Human
ucuucggcccucagaugucccuu

SEQ ID NO: 2803558 - RNA, 21 nt, Human
ucuugaaauuaagaaggcaaa

SEQ ID NO: 2803559 - RNA, 20 nt, Human
ucuugaaauuaagaaggcaa

SEQ ID NO: 2803560 - RNA, 14 nt, Human
ucuugaaauuaaga

SEQ ID NO: 2803561 - RNA, 24 nt, Human
ucagcugccucacuuccuacaaga

SEQ ID NO: 2803562 - RNA, 22 nt, Human
ucagcugcucagcaaccuuuca

SEQ ID NO: 2803563 - RNA, 15 nt, Human
ucagcugccucacuu

SEQ ID NO: 2803564 - RNA, 14 nt, Human
ucagcugccucacu

SEQ ID NO: 2803565 - RNA, 12 nt, Human
ucagcugccuca

SEQ ID NO: 2803566 - RNA, 15 nt, Human
ucagcucucaucuga

SEQ ID NO: 2803567 - RNA, 13 nt, Human
ucaggaccaggca

SEQ ID NO: 2803568 - RNA, 14 nt, Human
ucaggaccaggcaa

SEQ ID NO: 2803569 - RNA, 14 nt, Human
ucaggaccuuuuga

SEQ ID NO: 2803570 - RNA, 21 nt, Human
ucaggacucagaagccucugg

SEQ ID NO: 2803571 - RNA, 14 nt, Human
ucaggacucagaag

SEQ ID NO: 2803572 - RNA, 22 nt, Human
ucaggagaguagaacagauaau

SEQ ID NO: 2803573 - RNA, 12 nt, Human
ucaggagaaaaa

SEQ ID NO: 2803574 - RNA, 14 nt, Human
ucaggaggcgcccu

SEQ ID NO: 2803575 - RNA, 12 nt, Human
ucaggaggcgcc

SEQ ID NO: 2803576 - RNA, 12 nt, Human
ucaggaggcuga

SEQ ID NO: 2803577 - RNA, 18 nt, Human
ucaggaguccaagaccag

SEQ ID NO: 2803578 - RNA, 18 nt, Human
ucaggaggcugaggggag

SEQ ID NO: 2803579 - RNA, 15 nt, Human
ucaggaggcugaggg

SEQ ID NO: 2803580 - RNA, 16 nt, Human
ucaggaggaaggcuua

SEQ ID NO: 2803581 - RNA, 23 nt, Human
ucaggaggaaggcuuacacccac

SEQ ID NO: 2803582 - RNA, 17 nt, Human
ucagcucggggagccuu

SEQ ID NO: 2803583 - RNA, 18 nt, Human
ucagcucggggagccuua

SEQ ID NO: 2803584 - RNA, 22 nt, Human
ucagcuccagcucaccagcccc

SEQ ID NO: 2803585 - RNA, 21 nt, Human
ucagcuccagcucaccagccc

SEQ ID NO: 2803586 - RNA, 18 nt, Human
ucagcuccagcucaccag

SEQ ID NO: 2803587 - RNA, 15 nt, Human
ucagcuccagcucac

SEQ ID NO: 2803588 - RNA, 12 nt, Human
ucagccugcaca

SEQ ID NO: 2803589 - RNA, 20 nt, Human
ucagccugcaguuaauuagc

SEQ ID NO: 2803590 - RNA, 20 nt, Human
ucagccucccgaauagcugg

SEQ ID NO: 2803591 - RNA, 12 nt, Human
ucagccucccga

SEQ ID NO: 2803592 - RNA, 22 nt, Human
ucagccucccaaagugcuggga

SEQ ID NO: 2803593 - RNA, 20 nt, Human
ucagccucccaaguagcugg

SEQ ID NO: 2803594 - RNA, 18 nt, Human
ucagccugaggcugagac

SEQ ID NO: 2803595 - RNA, 13 nt, Human
ucagccugaggcu

SEQ ID NO: 2803596 - RNA, 20 nt, Human
ucagccugaggcugagacug

SEQ ID NO: 2803597 - RNA, 21 nt, Human
ucagccucuuaaagcugccug

SEQ ID NO: 2803598 - RNA, 12 nt, Human
ucagccucuuaa

SEQ ID NO: 2803599 - RNA, 22 nt, Human
ucagccucuuaaagcugccugu

SEQ ID NO: 2803600 - RNA, 14 nt, Human
ucagauacaaugua

SEQ ID NO: 2803601 - RNA, 12 nt, Human
ucagauacauca

SEQ ID NO: 2803602 - RNA, 14 nt, Human
ucagauacaucacu

SEQ ID NO: 2803603 - RNA, 15 nt, Human
ucagauacaucacug

SEQ ID NO: 2803604 - RNA, 16 nt, Human
ucagauacaucacugc

SEQ ID NO: 2803605 - RNA, 17 nt, Human
ucagauacaucacugcu

SEQ ID NO: 2803606 - RNA, 19 nt, Human
ucagauacaucacugcuug

SEQ ID NO: 2803607 - RNA, 21 nt, Human
ucagauacaucacugcuugau

SEQ ID NO: 2803608 - RNA, 13 nt, Human
uaucauucaucuu

SEQ ID NO: 2803609 - RNA, 19 nt, Human
uaucauucaucuucuucuu

SEQ ID NO: 2803610 - RNA, 19 nt, Human
uaucauugcuuccuccucc

SEQ ID NO: 2803611 - RNA, 19 nt, Human
ucagaucacugaauuuaua

SEQ ID NO: 2803612 - RNA, 21 nt, Human
ucagaucacugaauuuauaaa

SEQ ID NO: 2803613 - RNA, 23 nt, Human
ucagaucaguguaccauuugccu

SEQ ID NO: 2803614 - RNA, 16 nt, Human
ucagauccuuguuuca

SEQ ID NO: 2803615 - RNA, 17 nt, Human
ucagauccuuguuucaa

SEQ ID NO: 2803616 - RNA, 18 nt, Human
ucagauccuuguuucaaa

SEQ ID NO: 2803617 - RNA, 20 nt, Human
ucagauccugaucuuaagag

SEQ ID NO: 2803618 - RNA, 19 nt, Human
ucagauccuuguuucaaac

SEQ ID NO: 2803619 - RNA, 16 nt, Human
uaucauaaaaucaaaa

SEQ ID NO: 2803620 - RNA, 18 nt, Human
ucagcacauauuuucugu

SEQ ID NO: 2803621 - RNA, 18 nt, Human
ucagcacagauaaaaagu

SEQ ID NO: 2803622 - RNA, 20 nt, Human
ucagcacagauaaaaagugg

SEQ ID NO: 2803623 - RNA, 22 nt, Human
ucagcacagauaaaaaguggaa

SEQ ID NO: 2803624 - RNA, 14 nt, Human
ucagcaccacccua

SEQ ID NO: 2803625 - RNA, 13 nt, Human
ucagcaccacccu

SEQ ID NO: 2803626 - RNA, 12 nt, Human
ucagcaccaccc

SEQ ID NO: 2803627 - RNA, 23 nt, Human
ucagcaccacccuagucccuucc

SEQ ID NO: 2803628 - RNA, 15 nt, Human
ucagcaccacccuag

SEQ ID NO: 2803629 - RNA, 19 nt, Human
ucagccuaguggcuugucc

SEQ ID NO: 2803630 - RNA, 20 nt, Human
ucagccuaguggcuuguccu

SEQ ID NO: 2803631 - RNA, 14 nt, Human
ucagcaucugugau

SEQ ID NO: 2803632 - RNA, 15 nt, Human
ucagcaucugugaug

SEQ ID NO: 2803633 - RNA, 17 nt, Human
ucagcaucugugauggg

SEQ ID NO: 2803634 - RNA, 13 nt, Human
ucagccucccaaa

SEQ ID NO: 2803635 - RNA, 12 nt, Human
ucagccucccaa

SEQ ID NO: 2803636 - RNA, 18 nt, Human
ucagcauccuggcacccg

SEQ ID NO: 2803637 - RNA, 17 nt, Human
ucagcauccuggcaccc

SEQ ID NO: 2803638 - RNA, 16 nt, Human
ucagcauccuggcacc

SEQ ID NO: 2803639 - RNA, 15 nt, Human
ucagcauccuggcac

SEQ ID NO: 2803640 - RNA, 15 nt, Human
ucaguccauagcaga

SEQ ID NO: 2803641 - RNA, 21 nt, Human
ucagucauuagacuccuccuc

SEQ ID NO: 2803642 - RNA, 17 nt, Human
ucagucaugcauaaaua

SEQ ID NO: 2803643 - RNA, 20 nt, Human
ucagucaugcauaaauaugc

SEQ ID NO: 2803644 - RNA, 14 nt, Human
ucaguccauuuaua

SEQ ID NO: 2803645 - RNA, 15 nt, Human
ucaguccauuuauau

SEQ ID NO: 2803646 - RNA, 16 nt, Human
ucaguccauuuauaua

SEQ ID NO: 2803647 - RNA, 23 nt, Human
ucaguccauuuauauaugaaaac

SEQ ID NO: 2803648 - RNA, 18 nt, Human
ucaguccccgugaaggag

SEQ ID NO: 2803649 - RNA, 17 nt, Human
ucagucccaucagagag

SEQ ID NO: 2803650 - RNA, 15 nt, Human
ucagucagaaaacuu

SEQ ID NO: 2803651 - RNA, 17 nt, Human
ucagucagaaaacuuua

SEQ ID NO: 2803652 - RNA, 20 nt, Human
ucagucagaaaacuuuaaaa

SEQ ID NO: 2803653 - RNA, 23 nt, Human
ucagucagaaaacuuuaaaaaau

SEQ ID NO: 2803654 - RNA, 19 nt, Human
ucagucagugcaaauguca

SEQ ID NO: 2803655 - RNA, 14 nt, Human
ucagucaugcauaa

SEQ ID NO: 2803656 - RNA, 15 nt, Human
ucagucaugcauaaa

SEQ ID NO: 2803657 - RNA, 16 nt, Human
ucagucaugcauaaau

SEQ ID NO: 2803658 - RNA, 17 nt, Human
ucagguggggcagcuug

SEQ ID NO: 2803659 - RNA, 21 nt, Human
ucagguggggcagcuugaggg

SEQ ID NO: 2803660 - RNA, 16 nt, Human
ucagguggggcagcuu

SEQ ID NO: 2803661 - RNA, 15 nt, Human
ucagguggggcagcu

SEQ ID NO: 2803662 - RNA, 20 nt, Human
ucaggugcugccauccaggu

SEQ ID NO: 2803663 - RNA, 18 nt, Human
ucaggugcugccauccag

SEQ ID NO: 2803664 - RNA, 14 nt, Human
ucagguggggcagc

SEQ ID NO: 2803665 - RNA, 20 nt, Human
ucaggagucccaaggaaagc

SEQ ID NO: 2803666 - RNA, 19 nt, Human
ucaggagucccaaggaaag

SEQ ID NO: 2803667 - RNA, 19 nt, Human
ucaguccuccccucacagc

SEQ ID NO: 2803668 - RNA, 13 nt, Human
ucaguccuccccu

SEQ ID NO: 2803669 - RNA, 17 nt, Human
ucaguccuccccucaca

SEQ ID NO: 2803670 - RNA, 18 nt, Human
ucaguccuccccucacag

SEQ ID NO: 2803671 - RNA, 16 nt, Human
ucagucccuauguauu

SEQ ID NO: 2803672 - RNA, 17 nt, Human
ucagucccuauguauuu

SEQ ID NO: 2803673 - RNA, 18 nt, Human
ucagucccuauguauuug

SEQ ID NO: 2803674 - RNA, 23 nt, Human
ucagucccuauguauuugcaguu

SEQ ID NO: 2803675 - RNA, 13 nt, Human
ucagucccuaugu

SEQ ID NO: 2803676 - RNA, 19 nt, Human
ucagucugauucccaagcu

SEQ ID NO: 2803677 - RNA, 17 nt, Human
ucagucugauucccaag

SEQ ID NO: 2803678 - RNA, 19 nt, Human
ucagugugucuaaauuuga

SEQ ID NO: 2803679 - RNA, 18 nt, Human
ucaguguuguugcucuag

SEQ ID NO: 2803680 - RNA, 15 nt, Human
ucaguguugagaugg

SEQ ID NO: 2803681 - RNA, 22 nt, Human
ucaguguuugggucaccccucc

SEQ ID NO: 2803682 - RNA, 15 nt, Human
ucaguguuuuaaauu

SEQ ID NO: 2803683 - RNA, 17 nt, Human
ucaguguuuuaaauucu

SEQ ID NO: 2803684 - RNA, 18 nt, Human
ucaguguuuuaaauucug

SEQ ID NO: 2803685 - RNA, 15 nt, Human
ucaguguuuuggacu

SEQ ID NO: 2803686 - RNA, 16 nt, Human
ucaguguuuuggacuc

SEQ ID NO: 2803687 - RNA, 20 nt, Human
ucaguguuuuggacuccauc

SEQ ID NO: 2803688 - RNA, 23 nt, Human
ucaguguuuuggacuccaucucu

SEQ ID NO: 2803689 - RNA, 14 nt, Human
ucaguguuuuuccu

SEQ ID NO: 2803690 - RNA, 20 nt, Human
ucaguuaacuauugcauuua

SEQ ID NO: 2803691 - RNA, 16 nt, Human
ucaguuaacuauugca

SEQ ID NO: 2803692 - RNA, 17 nt, Human
ucaguuaagccuuugga

SEQ ID NO: 2803693 - RNA, 16 nt, Human
ucaguuaagccuuugg

SEQ ID NO: 2803694 - RNA, 22 nt, Human
ucaguucccuuggccucagaau

SEQ ID NO: 2803695 - RNA, 19 nt, Human
ucaguuccgucagaaagug

SEQ ID NO: 2803696 - RNA, 20 nt, Human
ucaguucccuuggccucaga

SEQ ID NO: 2803697 - RNA, 19 nt, Human
ucaguucccuuggccucag

SEQ ID NO: 2803698 - RNA, 18 nt, Human
ucaguucccuuggccuca

SEQ ID NO: 2803699 - RNA, 17 nt, Human
ucaguucccuuggccuc

SEQ ID NO: 2803700 - RNA, 16 nt, Human
ucaguucccuuggccu

SEQ ID NO: 2803701 - RNA, 15 nt, Human
ucaguucccuuggcc

SEQ ID NO: 2803702 - RNA, 16 nt, Human
ucauggaccacuguuu

SEQ ID NO: 2803703 - RNA, 18 nt, Human
ucauggaccacuguuucu

SEQ ID NO: 2803704 - RNA, 19 nt, Human
ucauggaccacuguuucuu

SEQ ID NO: 2803705 - RNA, 21 nt, Human
ucauggaccacuguuucuugc

SEQ ID NO: 2803706 - RNA, 22 nt, Human
ucauggaccacuguuucuugcu

SEQ ID NO: 2803707 - RNA, 23 nt, Human
ucauggaccacuguuucuugcuu

SEQ ID NO: 2803708 - RNA, 12 nt, Human
ucauggccacac

SEQ ID NO: 2803709 - RNA, 14 nt, Human
ucauggccacacug

SEQ ID NO: 2803710 - RNA, 15 nt, Human
ucauggccacacugu

SEQ ID NO: 2803711 - RNA, 17 nt, Human
ucauggccacacuguga

SEQ ID NO: 2803712 - RNA, 18 nt, Human
ucauggccacacugugac

SEQ ID NO: 2803713 - RNA, 19 nt, Human
ucauggccacacugugaca

SEQ ID NO: 2803714 - RNA, 21 nt, Human
ucauggccacacugugacaca

SEQ ID NO: 2803715 - RNA, 13 nt, Human
ucauggccccucu

SEQ ID NO: 2803716 - RNA, 14 nt, Human
ucauggccccucug

SEQ ID NO: 2803717 - RNA, 18 nt, Human
ucauggccccucugaccu

SEQ ID NO: 2803718 - RNA, 15 nt, Human
ucauggccuugucua

SEQ ID NO: 2803719 - RNA, 14 nt, Human
ucauccaccccauc

SEQ ID NO: 2803720 - RNA, 14 nt, Human
ucauccacauuguu

SEQ ID NO: 2803721 - RNA, 12 nt, Human
ucauccacccca

SEQ ID NO: 2803722 - RNA, 19 nt, Human
ucauccacauuguuuuaaa

SEQ ID NO: 2803723 - RNA, 22 nt, Human
ucauccacauuguuuuaaaaag

SEQ ID NO: 2803724 - RNA, 15 nt, Human
ucauccacauuguuu

SEQ ID NO: 2803725 - RNA, 16 nt, Human
ucauccacauuguuuu

SEQ ID NO: 2803726 - RNA, 17 nt, Human
ucauccacauuguuuua

SEQ ID NO: 2803727 - RNA, 21 nt, Human
ucaucuggauaggagccugcu

SEQ ID NO: 2803728 - RNA, 22 nt, Human
ucaucuggauaggagccugcug

SEQ ID NO: 2803729 - RNA, 12 nt, Human
ucaucuggcugc

SEQ ID NO: 2803730 - RNA, 23 nt, Human
ucaucuggauaggagccugcugg

SEQ ID NO: 2803731 - RNA, 16 nt, Human
ucaucuuuuaaagaaa

SEQ ID NO: 2803732 - RNA, 16 nt, Human
ucaguuccuuugugug

SEQ ID NO: 2803733 - RNA, 20 nt, Human
ucaguuccuuuguguguacu

SEQ ID NO: 2803734 - RNA, 22 nt, Human
ucaguuccuuuguguguacuca

SEQ ID NO: 2803735 - RNA, 19 nt, Human
ucaguucuacggaucauca

SEQ ID NO: 2803736 - RNA, 15 nt, Human
ucauauuuuguauau

SEQ ID NO: 2803737 - RNA, 13 nt, Human
ucauagaaaugua

SEQ ID NO: 2803738 - RNA, 22 nt, Human
ucauagaaauaguuugagaaau

SEQ ID NO: 2803739 - RNA, 22 nt, Human
ucauagaaauguaacuuuugua

SEQ ID NO: 2803740 - RNA, 15 nt, Human
ucaucaguggagcca

SEQ ID NO: 2803741 - RNA, 16 nt, Human
ucaucaaggcacugcc

SEQ ID NO: 2803742 - RNA, 19 nt, Human
ucaucaagacuggaaggug

SEQ ID NO: 2803743 - RNA, 15 nt, Human
ucaucaaggcacugc

SEQ ID NO: 2803744 - RNA, 23 nt, Human
ucauauuuuguauauaucugcuu

SEQ ID NO: 2803745 - RNA, 19 nt, Human
ucaucaaauggaagacaca

SEQ ID NO: 2803746 - RNA, 23 nt, Human
ucaucaaauggaagacacauuga

SEQ ID NO: 2803747 - RNA, 16 nt, Human
ucaucaacaaagaaau

SEQ ID NO: 2803748 - RNA, 18 nt, Human
ucaucaacaaagaaauau

SEQ ID NO: 2803749 - RNA, 13 nt, Human
ucaucaacaagau

SEQ ID NO: 2803750 - RNA, 19 nt, Human
ucaucaacaagauuuccuu

SEQ ID NO: 2803751 - RNA, 11 nt, Human
ucaucaagacu

SEQ ID NO: 2803752 - RNA, 19 nt, Human
ucauccaaacaauuuaaaa

SEQ ID NO: 2803753 - RNA, 17 nt, Human
ucauccaacuuauguuu

SEQ ID NO: 2803754 - RNA, 12 nt, Human
ucaucauuguuu

SEQ ID NO: 2803755 - RNA, 22 nt, Human
ucaucauuguuucugcaugaau

SEQ ID NO: 2803756 - RNA, 19 nt, Human
ucaucauaaaauaaaguau

SEQ ID NO: 2803757 - RNA, 15 nt, Human
ucaucauaaaauaaa

SEQ ID NO: 2803758 - RNA, 14 nt, Human
ucaucauaaaauaa

SEQ ID NO: 2803759 - RNA, 13 nt, Human
ucaucauaaaaua

SEQ ID NO: 2803760 - RNA, 19 nt, Human
ucaucauaguaaaagaaau

SEQ ID NO: 2803761 - RNA, 11 nt, Human
ucaucaucagg

SEQ ID NO: 2803762 - RNA, 13 nt, Human
ucaucaucagggc

SEQ ID NO: 2803763 - RNA, 14 nt, Human
ucaucaucagggcc

SEQ ID NO: 2803764 - RNA, 15 nt, Human
ucaucaucagggccu

SEQ ID NO: 2803765 - RNA, 16 nt, Human
ucaucaucagggccug

SEQ ID NO: 2803766 - RNA, 22 nt, Human
uccauaaucuggacuccucugu

SEQ ID NO: 2803767 - RNA, 23 nt, Human
uccauaaucuggacuccucuguc

SEQ ID NO: 2803768 - RNA, 13 nt, Human
uccagggcucuga

SEQ ID NO: 2803769 - RNA, 14 nt, Human
uccaggggaaccug

SEQ ID NO: 2803770 - RNA, 18 nt, Human
uccauaaugcuacugucu

SEQ ID NO: 2803771 - RNA, 16 nt, Human
uccauaaugcuacugu

SEQ ID NO: 2803772 - RNA, 15 nt, Human
uccauagcaacagga

SEQ ID NO: 2803773 - RNA, 16 nt, Human
uccauagcaacaggaa

SEQ ID NO: 2803774 - RNA, 15 nt, Human
uccauaguaacugac

SEQ ID NO: 2803775 - RNA, 16 nt, Human
uccauaguaacugaca

SEQ ID NO: 2803776 - RNA, 13 nt, Human
uccauaguuuuga

SEQ ID NO: 2803777 - RNA, 15 nt, Human
uccauaguuuugaug

SEQ ID NO: 2803778 - RNA, 19 nt, Human
uccauaguuuugaugacug

SEQ ID NO: 2803779 - RNA, 22 nt, Human
uccauaguuuugaugacuggca

SEQ ID NO: 2803780 - RNA, 23 nt, Human
uccauaguuuugaugacuggcau

SEQ ID NO: 2803781 - RNA, 18 nt, Human
uccauaguaguaugauga

SEQ ID NO: 2803782 - RNA, 23 nt, Human
uccauaucuuaaagaaacagcuu

SEQ ID NO: 2803783 - RNA, 14 nt, Human
uccauaucuugcga

SEQ ID NO: 2803784 - RNA, 21 nt, Human
uccauaucuugcgaauccaag

SEQ ID NO: 2803785 - RNA, 22 nt, Human
uccauaucuugcgaauccaagc

SEQ ID NO: 2803786 - RNA, 14 nt, Human
uccaugaugcuggg

SEQ ID NO: 2803787 - RNA, 20 nt, Human
uccauauauccuuuucuucu

SEQ ID NO: 2803788 - RNA, 19 nt, Human
uccaugaguuugcccuggu

SEQ ID NO: 2803789 - RNA, 19 nt, Human
uccauauuuauagguaccc

SEQ ID NO: 2803790 - RNA, 14 nt, Human
ucccaacuuguaaa

SEQ ID NO: 2803791 - RNA, 16 nt, Human
ucccaacagucauguu

SEQ ID NO: 2803792 - RNA, 21 nt, Human
ucccaacuucucuugcuuucu

SEQ ID NO: 2803793 - RNA, 14 nt, Human
ucccaaccagugcc

SEQ ID NO: 2803794 - RNA, 17 nt, Human
ucccaaccagugccaag

SEQ ID NO: 2803795 - RNA, 18 nt, Human
ucccaaccagugccaagg

SEQ ID NO: 2803796 - RNA, 19 nt, Human
ucccaaccagugccaagga

SEQ ID NO: 2803797 - RNA, 20 nt, Human
ucccaaccagugccaaggac

SEQ ID NO: 2803798 - RNA, 23 nt, Human
ucccaaccagugccaaggaccuc

SEQ ID NO: 2803799 - RNA, 21 nt, Human
ucccaaccccuuaagcccugg

SEQ ID NO: 2803800 - RNA, 22 nt, Human
ucccaaccccuuaagcccuggc

SEQ ID NO: 2803801 - RNA, 15 nt, Human
ucccaacagccaugc

SEQ ID NO: 2803802 - RNA, 16 nt, Human
ucccaacagccaugcc

SEQ ID NO: 2803803 - RNA, 17 nt, Human
ucccaacagccaugccc

SEQ ID NO: 2803804 - RNA, 16 nt, Human
uccaugucgccucugc

SEQ ID NO: 2803805 - RNA, 16 nt, Human
uccauguccccuccca

SEQ ID NO: 2803806 - RNA, 21 nt, Human
uccaugcagggggcuccuggg

SEQ ID NO: 2803807 - RNA, 17 nt, Human
uccaugcaugacagccu

SEQ ID NO: 2803808 - RNA, 19 nt, Human
uccaugcaugacagccucu

SEQ ID NO: 2803809 - RNA, 15 nt, Human
uccaugaugcuggga

SEQ ID NO: 2803810 - RNA, 12 nt, Human
uccaugauucua

SEQ ID NO: 2803811 - RNA, 13 nt, Human
uccaugcaccaaa

SEQ ID NO: 2803812 - RNA, 14 nt, Human
uccaugcaccaaac

SEQ ID NO: 2803813 - RNA, 15 nt, Human
ucccaacaagcagcu

SEQ ID NO: 2803814 - RNA, 19 nt, Human
uccaugucgccucugcauu

SEQ ID NO: 2803815 - RNA, 17 nt, Human
uccauguccccucccag

SEQ ID NO: 2803816 - RNA, 18 nt, Human
uccauguccccucccaga

SEQ ID NO: 2803817 - RNA, 17 nt, Human
uccauguccuaugugug

SEQ ID NO: 2803818 - RNA, 18 nt, Human
uccauguccuauguguga

SEQ ID NO: 2803819 - RNA, 17 nt, Human
uccaugucgccucugca

SEQ ID NO: 2803820 - RNA, 18 nt, Human
uccaugucgccucugcau

SEQ ID NO: 2803821 - RNA, 16 nt, Human
ucccaugagccucagc

SEQ ID NO: 2803822 - RNA, 15 nt, Human
ucccaugagccucag

SEQ ID NO: 2803823 - RNA, 14 nt, Human
ucccaugacccagg

SEQ ID NO: 2803824 - RNA, 15 nt, Human
ucccaugacccaggc

SEQ ID NO: 2803825 - RNA, 16 nt, Human
ucccaugacccaggcu

SEQ ID NO: 2803826 - RNA, 20 nt, Human
ucccaugacccaggcugggc

SEQ ID NO: 2803827 - RNA, 21 nt, Human
ucccaugagacccuggugccu

SEQ ID NO: 2803828 - RNA, 22 nt, Human
ucccaugagacccuggugccug

SEQ ID NO: 2803829 - RNA, 22 nt, Human
ucccagggccagggcccugcag

SEQ ID NO: 2803830 - RNA, 21 nt, Human
ucccagggccagggcccugca

SEQ ID NO: 2803831 - RNA, 23 nt, Human
ucccagggccagggcccugcaga

SEQ ID NO: 2803832 - RNA, 18 nt, Human
ucccaggcugagccucag

SEQ ID NO: 2803833 - RNA, 19 nt, Human
ucccaggcugagccucagu

SEQ ID NO: 2803834 - RNA, 20 nt, Human
ucccagggccagggcccugc

SEQ ID NO: 2803835 - RNA, 17 nt, Human
ucccagggccagggccc

SEQ ID NO: 2803836 - RNA, 16 nt, Human
ucccagggccagggcc

SEQ ID NO: 2803837 - RNA, 13 nt, Human
ucccaagaaaugc

SEQ ID NO: 2803838 - RNA, 16 nt, Human
ucccaggauguacaag

SEQ ID NO: 2803839 - RNA, 22 nt, Human
ucccacugggguccagggagca

SEQ ID NO: 2803840 - RNA, 13 nt, Human
ucccacuguauga

SEQ ID NO: 2803841 - RNA, 18 nt, Human
ucccacuguaugauuuau

SEQ ID NO: 2803842 - RNA, 15 nt, Human
ucccacucaccccgg

SEQ ID NO: 2803843 - RNA, 23 nt, Human
ucccacucaccccggcagacgcc

SEQ ID NO: 2803844 - RNA, 14 nt, Human
ucccacucagucca

SEQ ID NO: 2803845 - RNA, 13 nt, Human
ucccacucacccc

SEQ ID NO: 2803846 - RNA, 21 nt, Human
ucccacgaauuugcuggggaa

SEQ ID NO: 2803847 - RNA, 14 nt, Human
ucccacgugggaga

SEQ ID NO: 2803848 - RNA, 14 nt, Human
ucccacgugucuuc

SEQ ID NO: 2803849 - RNA, 15 nt, Human
ucccacgugucuucc

SEQ ID NO: 2803850 - RNA, 17 nt, Human
ucccacgugucuuccac

SEQ ID NO: 2803851 - RNA, 18 nt, Human
ucccacgugucuuccacu

SEQ ID NO: 2803852 - RNA, 18 nt, Human
ucccacgggaccuggggc

SEQ ID NO: 2803853 - RNA, 15 nt, Human
ucccacgaauuugcu

SEQ ID NO: 2803854 - RNA, 20 nt, Human
ucccaccuuucgggccaugu

SEQ ID NO: 2803855 - RNA, 18 nt, Human
ucccacgaauuugcuggg

SEQ ID NO: 2803856 - RNA, 20 nt, Human
ucccacgaauuugcugggga

SEQ ID NO: 2803857 - RNA, 14 nt, Human
ucccaccucccugc

SEQ ID NO: 2803858 - RNA, 15 nt, Human
ucccaccucccugcc

SEQ ID NO: 2803859 - RNA, 16 nt, Human
ucccaccucccugccc

SEQ ID NO: 2803860 - RNA, 17 nt, Human
ucccaccucccugccca

SEQ ID NO: 2803861 - RNA, 18 nt, Human
ucccaccucccugcccag

SEQ ID NO: 2803862 - RNA, 19 nt, Human
ucccaccucccugcccagg

SEQ ID NO: 2803863 - RNA, 20 nt, Human
ucccaccucccugcccaggc

SEQ ID NO: 2803864 - RNA, 21 nt, Human
ucccaccuuggcugcagggag

SEQ ID NO: 2803865 - RNA, 19 nt, Human
ucccaccuuggcugcaggg

SEQ ID NO: 2803866 - RNA, 17 nt, Human
ucccaccuccaucccag

SEQ ID NO: 2803867 - RNA, 15 nt, Human
ucccaccuccauccc

SEQ ID NO: 2803868 - RNA, 16 nt, Human
ucccaccucagccucc

SEQ ID NO: 2803869 - RNA, 23 nt, Human
ucccaagauguugauuuuuacug

SEQ ID NO: 2803870 - RNA, 14 nt, Human
ucccaagauuuuuu

SEQ ID NO: 2803871 - RNA, 19 nt, Human
ucccaagauuuuuucauuu

SEQ ID NO: 2803872 - RNA, 14 nt, Human
ucccaagauguuga

SEQ ID NO: 2803873 - RNA, 22 nt, Human
ucccaagagaaggggaagcacu

SEQ ID NO: 2803874 - RNA, 18 nt, Human
ucccaccucagccucccg

SEQ ID NO: 2803875 - RNA, 14 nt, Human
ucccaagccuucgg

SEQ ID NO: 2803876 - RNA, 13 nt, Human
ucccaccuccagc

SEQ ID NO: 2803877 - RNA, 15 nt, Human
ucccaccuccagccc

SEQ ID NO: 2803878 - RNA, 16 nt, Human
ucccaccuccagcccg

SEQ ID NO: 2803879 - RNA, 17 nt, Human
ucccaccuccagcccgg

SEQ ID NO: 2803880 - RNA, 22 nt, Human
ucccaccuccagcccgggagcc

SEQ ID NO: 2803881 - RNA, 13 nt, Human
ucccaccuccagu

SEQ ID NO: 2803882 - RNA, 14 nt, Human
ucccaccuccaguc

SEQ ID NO: 2803883 - RNA, 17 nt, Human
ucccaccuccagucccc

SEQ ID NO: 2803884 - RNA, 13 nt, Human
uccaggaccccug

SEQ ID NO: 2803885 - RNA, 13 nt, Human
uccagcuggccug

SEQ ID NO: 2803886 - RNA, 12 nt, Human
uccagcuggccu

SEQ ID NO: 2803887 - RNA, 11 nt, Human
uccagcuggcc

SEQ ID NO: 2803888 - RNA, 22 nt, Human
uccagcuggccgggagccugau

SEQ ID NO: 2803889 - RNA, 21 nt, Human
uccagcuggccgggagccuga

SEQ ID NO: 2803890 - RNA, 15 nt, Human
uccagcuggccggga

SEQ ID NO: 2803891 - RNA, 18 nt, Human
uccagcuggccuggacag

SEQ ID NO: 2803892 - RNA, 17 nt, Human
uccagcuggccuggaca

SEQ ID NO: 2803893 - RNA, 19 nt, Human
uccagcugggcucugcaau

SEQ ID NO: 2803894 - RNA, 19 nt, Human
uccagcuggguuggaaaac

SEQ ID NO: 2803895 - RNA, 16 nt, Human
uccagcaacacagccu

SEQ ID NO: 2803896 - RNA, 21 nt, Human
uccagcaacacagccugggcc

SEQ ID NO: 2803897 - RNA, 20 nt, Human
uccagcaacacagccugggc

SEQ ID NO: 2803898 - RNA, 17 nt, Human
uccagcaacacagccug

SEQ ID NO: 2803899 - RNA, 20 nt, Human
uccagcaacuucuucuccau

SEQ ID NO: 2803900 - RNA, 19 nt, Human
uccagcaacuucuucucca

SEQ ID NO: 2803901 - RNA, 18 nt, Human
uccagcaacuucuucucc

SEQ ID NO: 2803902 - RNA, 22 nt, Human
uccagcaacacagccugggccc

SEQ ID NO: 2803903 - RNA, 18 nt, Human
uccagcaauucuccugcc

SEQ ID NO: 2803904 - RNA, 20 nt, Human
uccagcaauucuccugccuc

SEQ ID NO: 2803905 - RNA, 19 nt, Human
uccagcaauucuccugccu

SEQ ID NO: 2803906 - RNA, 12 nt, Human
uccagcugcugu

SEQ ID NO: 2803907 - RNA, 14 nt, Human
uccagcugcugucu

SEQ ID NO: 2803908 - RNA, 15 nt, Human
uccagcugcugucuu

SEQ ID NO: 2803909 - RNA, 17 nt, Human
uccagcugcugucuucu

SEQ ID NO: 2803910 - RNA, 18 nt, Human
uccagauguuuccagacu

SEQ ID NO: 2803911 - RNA, 19 nt, Human
uccagauguuuccagacuu

SEQ ID NO: 2803912 - RNA, 19 nt, Human
uccagauuaucuauuugug

SEQ ID NO: 2803913 - RNA, 23 nt, Human
uccagauuaucuauuugugugug

SEQ ID NO: 2803914 - RNA, 22 nt, Human
uccagauuuuuuacagcugccu

SEQ ID NO: 2803915 - RNA, 12 nt, Human
uccagauuuuua

SEQ ID NO: 2803916 - RNA, 19 nt, Human
uccagauuuuucggaggcc

SEQ ID NO: 2803917 - RNA, 14 nt, Human
uccagaugguggga

SEQ ID NO: 2803918 - RNA, 13 nt, Human
uccagaugugaug

SEQ ID NO: 2803919 - RNA, 14 nt, Human
uccagaugugaugc

SEQ ID NO: 2803920 - RNA, 17 nt, Human
uccagaugugaugcuug

SEQ ID NO: 2803921 - RNA, 19 nt, Human
uccagaugugaugcuugau

SEQ ID NO: 2803922 - RNA, 14 nt, Human
uccacuucaaugca

SEQ ID NO: 2803923 - RNA, 22 nt, Human
uccagagaguggcuccucccgg

SEQ ID NO: 2803924 - RNA, 19 nt, Human
uccagagaguggcuccucc

SEQ ID NO: 2803925 - RNA, 20 nt, Human
uccagaggcuauuauuuuca

SEQ ID NO: 2803926 - RNA, 20 nt, Human
uccagagcggaggcugugug

SEQ ID NO: 2803927 - RNA, 21 nt, Human
uccagagcggaggcugugugc

SEQ ID NO: 2803928 - RNA, 23 nt, Human
uccagagcggaggcugugugccu

SEQ ID NO: 2803929 - RNA, 20 nt, Human
uccagaggguugugauuuug

SEQ ID NO: 2803930 - RNA, 22 nt, Human
uccacugugccaugugccaggu

SEQ ID NO: 2803931 - RNA, 17 nt, Human
uccacugugccuuugca

SEQ ID NO: 2803932 - RNA, 12 nt, Human
uccacuguguau

SEQ ID NO: 2803933 - RNA, 20 nt, Human
uccacuguguauagaaguag

SEQ ID NO: 2803934 - RNA, 21 nt, Human
uccacuuagaaauugcauuuc

SEQ ID NO: 2803935 - RNA, 23 nt, Human
uccacuuagaaauugcauuuccu

SEQ ID NO: 2803936 - RNA, 14 nt, Human
uccacccugcucuc

SEQ ID NO: 2803937 - RNA, 13 nt, Human
uccacccugcucu

SEQ ID NO: 2803938 - RNA, 21 nt, Human
uccacccugcucuccgaccag

SEQ ID NO: 2803939 - RNA, 22 nt, Human
uccacagcgagggcagcugcua

SEQ ID NO: 2803940 - RNA, 13 nt, Human
uccacaggaagug

SEQ ID NO: 2803941 - RNA, 12 nt, Human
uccacccuggaa

SEQ ID NO: 2803942 - RNA, 22 nt, Human
uccaagcuaagcacugccacug

SEQ ID NO: 2803943 - RNA, 14 nt, Human
uccaagcuaagcac

SEQ ID NO: 2803944 - RNA, 20 nt, Human
uccaagccuccacagcgagg

SEQ ID NO: 2803945 - RNA, 17 nt, Human
uccaagccuccacagcg

SEQ ID NO: 2803946 - RNA, 21 nt, Human
uccaagccuccacagcgaggg

SEQ ID NO: 2803947 - RNA, 16 nt, Human
uccaagccuccacagc

SEQ ID NO: 2803948 - RNA, 15 nt, Human
uccaagccuccacag

SEQ ID NO: 2803949 - RNA, 14 nt, Human
uccaagccuccaca

SEQ ID NO: 2803950 - RNA, 15 nt, Human
uccaagccagcggga

SEQ ID NO: 2803951 - RNA, 23 nt, Human
uccaagcagccugagcaacucuu

SEQ ID NO: 2803952 - RNA, 18 nt, Human
uccacacccaauuccacu

SEQ ID NO: 2803953 - RNA, 22 nt, Human
uccacacccaggcauagccugg

SEQ ID NO: 2803954 - RNA, 21 nt, Human
uccacaccuuuuauugacaca

SEQ ID NO: 2803955 - RNA, 15 nt, Human
uccacaccuuuuauu

SEQ ID NO: 2803956 - RNA, 21 nt, Human
uccacagcgagggcagcugcu

SEQ ID NO: 2803957 - RNA, 20 nt, Human
uccacagcgagggcagcugc

SEQ ID NO: 2803958 - RNA, 14 nt, Human
uccacagcuaccuc

SEQ ID NO: 2803959 - RNA, 13 nt, Human
uccacagcuuccu

SEQ ID NO: 2803960 - RNA, 14 nt, Human
uccacagcuuccug

SEQ ID NO: 2803961 - RNA, 15 nt, Human
uccacagcuuccugu

SEQ ID NO: 2803962 - RNA, 23 nt, Human
uccacagcuuccuguccccaucu

SEQ ID NO: 2803963 - RNA, 12 nt, Human
uccacagcuucc

SEQ ID NO: 2803964 - RNA, 19 nt, Human
uccacagcgagggcagcug

SEQ ID NO: 2803965 - RNA, 18 nt, Human
uccacagcgagggcagcu

SEQ ID NO: 2803966 - RNA, 17 nt, Human
uccacagcgagggcagc

SEQ ID NO: 2803967 - RNA, 18 nt, Human
uccacagccgcagccucc

SEQ ID NO: 2803968 - RNA, 17 nt, Human
uccacagccgcagccuc

SEQ ID NO: 2803969 - RNA, 16 nt, Human
uccacagccgcagccu

SEQ ID NO: 2803970 - RNA, 14 nt, Human
uccacagccgcagc

SEQ ID NO: 2803971 - RNA, 19 nt, Human
uccaagaggguccuuuagu

SEQ ID NO: 2803972 - RNA, 15 nt, Human
uccaagagucuaaag

SEQ ID NO: 2803973 - RNA, 20 nt, Human
uccaagacucuagaguccaa

SEQ ID NO: 2803974 - RNA, 23 nt, Human
uccaagacucuagaguccaaggu

SEQ ID NO: 2803975 - RNA, 13 nt, Human
uccaagacucuag

SEQ ID NO: 2803976 - RNA, 14 nt, Human
uccaagacucuaga

SEQ ID NO: 2803977 - RNA, 15 nt, Human
uccaagacucuagag

SEQ ID NO: 2803978 - RNA, 16 nt, Human
uccaagacucuagagu

SEQ ID NO: 2803979 - RNA, 20 nt, Human
ucauguaucaucuggauagg

SEQ ID NO: 2803980 - RNA, 18 nt, Human
ucaugggcaccaaccugc

SEQ ID NO: 2803981 - RNA, 19 nt, Human
ucauguacauuuggaacua

SEQ ID NO: 2803982 - RNA, 18 nt, Human
ucauguacaagaugaagg

SEQ ID NO: 2803983 - RNA, 17 nt, Human
ucauguacaagaugaag

SEQ ID NO: 2803984 - RNA, 16 nt, Human
ucauguacaagaugaa

SEQ ID NO: 2803985 - RNA, 16 nt, Human
ucauguagagaaaagc

SEQ ID NO: 2803986 - RNA, 17 nt, Human
ucauguagagaaaagca

SEQ ID NO: 2803987 - RNA, 19 nt, Human
ucauguagagaaaagcaca

SEQ ID NO: 2803988 - RNA, 20 nt, Human
ucauguagagaaaagcacac

SEQ ID NO: 2803989 - RNA, 15 nt, Human
ucauguaucaucugg

SEQ ID NO: 2803990 - RNA, 18 nt, Human
ucauguaucaucuggaua

SEQ ID NO: 2803991 - RNA, 19 nt, Human
ucauguaucaucuggauag

SEQ ID NO: 2803992 - RNA, 19 nt, Human
ucuaauuucaaaaauauaa

SEQ ID NO: 2803993 - RNA, 22 nt, Human
ucuaauuucaaaaauauaacuu

SEQ ID NO: 2803994 - RNA, 20 nt, Human
ucuaauuucaaaaauauaac

SEQ ID NO: 2803995 - RNA, 14 nt, Human
ucuacuauuuaugu

SEQ ID NO: 2803996 - RNA, 15 nt, Human
ucuacuaauuccaca

SEQ ID NO: 2803997 - RNA, 15 nt, Human
ucuaauucucugugg

SEQ ID NO: 2803998 - RNA, 21 nt, Human
ucuaauucuauuaaagugcua

SEQ ID NO: 2803999 - RNA, 17 nt, Human
ucuaauugcaucucaaa

SEQ ID NO: 2804000 - RNA, 19 nt, Human
ucuaauugcaucucaaaau

SEQ ID NO: 2804001 - RNA, 17 nt, Human
ucuaaugucuucauuuc

SEQ ID NO: 2804002 - RNA, 20 nt, Human
ucuaauggguauuuaaacaa

SEQ ID NO: 2804003 - RNA, 14 nt, Human
ucuaaugucuucau

SEQ ID NO: 2804004 - RNA, 15 nt, Human
ucuaaugucuucauu

SEQ ID NO: 2804005 - RNA, 18 nt, Human
ucuaauauuaaaaauaug

SEQ ID NO: 2804006 - RNA, 17 nt, Human
ucuaaucgaaagaaaau

SEQ ID NO: 2804007 - RNA, 20 nt, Human
ucuaaucgaaagaaaauggg

SEQ ID NO: 2804008 - RNA, 12 nt, Human
ucuaaucaaaag

SEQ ID NO: 2804009 - RNA, 22 nt, Human
ucuaaugaggagagaaaauaua

SEQ ID NO: 2804010 - RNA, 24 nt, Human
ucuaaugaggagagaaaauauaug

SEQ ID NO: 2804011 - RNA, 21 nt, Human
ucuaaugacaugccuauauga

SEQ ID NO: 2804012 - RNA, 17 nt, Human
ucuaauauuaaaaauau

SEQ ID NO: 2804013 - RNA, 16 nt, Human
ucgucuuaacucacca

SEQ ID NO: 2804014 - RNA, 12 nt, Human
ucgucuucacuc

SEQ ID NO: 2804015 - RNA, 14 nt, Human
ucgucuucacucuu

SEQ ID NO: 2804016 - RNA, 17 nt, Human
ucuagguggcaaggcug

SEQ ID NO: 2804017 - RNA, 18 nt, Human
ucuagguggcaaggcugu

SEQ ID NO: 2804018 - RNA, 20 nt, Human
ucuagguggcaaggcugugc

SEQ ID NO: 2804019 - RNA, 21 nt, Human
ucuauaugaauuuaaauauaa

SEQ ID NO: 2804020 - RNA, 12 nt, Human
ucuaggcucugc

SEQ ID NO: 2804021 - RNA, 14 nt, Human
ucuaggcucugccu

SEQ ID NO: 2804022 - RNA, 15 nt, Human
ucuaggcucugccuu

SEQ ID NO: 2804023 - RNA, 17 nt, Human
ucuaggcucugccuucg

SEQ ID NO: 2804024 - RNA, 18 nt, Human
ucuaggguugcuggagcc

SEQ ID NO: 2804025 - RNA, 21 nt, Human
ucuaggguugcuggagccuga

SEQ ID NO: 2804026 - RNA, 22 nt, Human
ucuaggguugcuggagccugag

SEQ ID NO: 2804027 - RNA, 12 nt, Human
ucuaggcugggg

SEQ ID NO: 2804028 - RNA, 20 nt, Human
ucuagguaggggcccacuuc

SEQ ID NO: 2804029 - RNA, 20 nt, Human
ucuaauggcacuuaucauua

SEQ ID NO: 2804030 - RNA, 18 nt, Human
ucuacuaauuccacaccu

SEQ ID NO: 2804031 - RNA, 19 nt, Human
ucuacuccuaccucagccu

SEQ ID NO: 2804032 - RNA, 17 nt, Human
ucuacuccuaccucagc

SEQ ID NO: 2804033 - RNA, 22 nt, Human
ucuacuccuaccucagccuaga

SEQ ID NO: 2804034 - RNA, 15 nt, Human
ucuaggcacuguagu

SEQ ID NO: 2804035 - RNA, 21 nt, Human
ucuaggcacuguaguucuaag

SEQ ID NO: 2804036 - RNA, 22 nt, Human
ucuaggcacuguaguucuaaga

SEQ ID NO: 2804037 - RNA, 24 nt, Human
ucuaggcacuguaguucuaagacu

SEQ ID NO: 2804038 - RNA, 15 nt, Human
ucuauccaaacaugu

SEQ ID NO: 2804039 - RNA, 22 nt, Human
ucuauccaaacauguauuuaug

SEQ ID NO: 2804040 - RNA, 18 nt, Human
ucuauccaaaucugaaga

SEQ ID NO: 2804041 - RNA, 13 nt, Human
ucuaucuaaauga

SEQ ID NO: 2804042 - RNA, 14 nt, Human
ucuaucuaaaugau

SEQ ID NO: 2804043 - RNA, 12 nt, Human
ucuaucuaauga

SEQ ID NO: 2804044 - RNA, 14 nt, Human
ucuaucuaaugaca

SEQ ID NO: 2804045 - RNA, 16 nt, Human
ucuaucuaaugacaug

SEQ ID NO: 2804046 - RNA, 12 nt, Human
ucuaucucucaa

SEQ ID NO: 2804047 - RNA, 12 nt, Human
ucuaucugggcc

SEQ ID NO: 2804048 - RNA, 15 nt, Human
ucuaucugggccugg

SEQ ID NO: 2804049 - RNA, 16 nt, Human
ucuaucugggccuggg

SEQ ID NO: 2804050 - RNA, 17 nt, Human
ucuaucugggccugggc

SEQ ID NO: 2804051 - RNA, 18 nt, Human
ucuaucugggccugggcu

SEQ ID NO: 2804052 - RNA, 16 nt, Human
ucuauccuacaacaag

SEQ ID NO: 2804053 - RNA, 14 nt, Human
ucuaucuuccaaau

SEQ ID NO: 2804054 - RNA, 17 nt, Human
ucuaucuuccaaaugca

SEQ ID NO: 2804055 - RNA, 23 nt, Human
ucuaucuuccaaaugcaauuuga

SEQ ID NO: 2804056 - RNA, 22 nt, Human
ucuaucuuugagcgcccacuag

SEQ ID NO: 2804057 - RNA, 14 nt, Human
ucuaucuuguucca

SEQ ID NO: 2804058 - RNA, 19 nt, Human
ucuaucuuguuccaaggcc

SEQ ID NO: 2804059 - RNA, 22 nt, Human
ucuaucuuguuccaaggccagg

SEQ ID NO: 2804060 - RNA, 13 nt, Human
ucuagguaauuuu

SEQ ID NO: 2804061 - RNA, 12 nt, Human
ucucacacacau

SEQ ID NO: 2804062 - RNA, 14 nt, Human
ucucacacacauag

SEQ ID NO: 2804063 - RNA, 15 nt, Human
ucucacacacauaga

SEQ ID NO: 2804064 - RNA, 23 nt, Human
ucucacucugucgcccagucugg

SEQ ID NO: 2804065 - RNA, 20 nt, Human
ucucagauccuuguuucaaa

SEQ ID NO: 2804066 - RNA, 13 nt, Human
ucucauaaauuua

SEQ ID NO: 2804067 - RNA, 18 nt, Human
ucucauaauuccuacagc

SEQ ID NO: 2804068 - RNA, 20 nt, Human
ucucauaauuccuacagcac

SEQ ID NO: 2804069 - RNA, 16 nt, Human
ucucaguuuguauaga

SEQ ID NO: 2804070 - RNA, 15 nt, Human
ucucaguuggaaaua

SEQ ID NO: 2804071 - RNA, 16 nt, Human
ucucaguuuguguguc

SEQ ID NO: 2804072 - RNA, 17 nt, Human
ucucaguuugugugucu

SEQ ID NO: 2804073 - RNA, 18 nt, Human
ucucaguuugugugucuu

SEQ ID NO: 2804074 - RNA, 19 nt, Human
ucucaguuugugugucuua

SEQ ID NO: 2804075 - RNA, 15 nt, Human
ucucacuguugccca

SEQ ID NO: 2804076 - RNA, 14 nt, Human
ucucacuguugccc

SEQ ID NO: 2804077 - RNA, 17 nt, Human
ucucacuguguacauaa

SEQ ID NO: 2804078 - RNA, 17 nt, Human
ucucacuggaugcaaag

SEQ ID NO: 2804079 - RNA, 20 nt, Human
ucucacugccaucaaacugu

SEQ ID NO: 2804080 - RNA, 18 nt, Human
ucucagauccuuguuuca

SEQ ID NO: 2804081 - RNA, 19 nt, Human
ucucagauccuuguuucaa

SEQ ID NO: 2804082 - RNA, 22 nt, Human
ucucagauccuuguuucaaaca

SEQ ID NO: 2804083 - RNA, 15 nt, Human
ucucagaugcaguuu

SEQ ID NO: 2804084 - RNA, 14 nt, Human
ucucagauccuugu

SEQ ID NO: 2804085 - RNA, 14 nt, Human
ucucagaucacugc

SEQ ID NO: 2804086 - RNA, 17 nt, Human
ucucagaucacugcaac

SEQ ID NO: 2804087 - RNA, 16 nt, Human
ucucagauccuuguuu

SEQ ID NO: 2804088 - RNA, 17 nt, Human
ucucagauccuuguuuc

SEQ ID NO: 2804089 - RNA, 17 nt, Human
ucucagacuuuuguaca

SEQ ID NO: 2804090 - RNA, 18 nt, Human
ucucagacuuuuguacau

SEQ ID NO: 2804091 - RNA, 20 nt, Human
ucucagacuuuuguacaucu

SEQ ID NO: 2804092 - RNA, 16 nt, Human
ucucagacugcaugua

SEQ ID NO: 2804093 - RNA, 15 nt, Human
ucguccacagcuucc

SEQ ID NO: 2804094 - RNA, 16 nt, Human
ucguccacagcuuccu

SEQ ID NO: 2804095 - RNA, 17 nt, Human
ucguccacagcuuccug

SEQ ID NO: 2804096 - RNA, 16 nt, Human
ucggagcaucccggag

SEQ ID NO: 2804097 - RNA, 21 nt, Human
ucggagcaucccggaggaaau

SEQ ID NO: 2804098 - RNA, 23 nt, Human
ucggagcaucccggaggaaaucu

SEQ ID NO: 2804099 - RNA, 13 nt, Human
ucggaggccccac

SEQ ID NO: 2804100 - RNA, 17 nt, Human
ucggaggccccacugau

SEQ ID NO: 2804101 - RNA, 18 nt, Human
ucggaggccccacugaug

SEQ ID NO: 2804102 - RNA, 19 nt, Human
ucggaggccccacugaugc

SEQ ID NO: 2804103 - RNA, 14 nt, Human
ucggaggcugcccc

SEQ ID NO: 2804104 - RNA, 23 nt, Human
ucggaggcugcccccggcccccu

SEQ ID NO: 2804105 - RNA, 16 nt, Human
ucgcuuggcuccaugc

SEQ ID NO: 2804106 - RNA, 22 nt, Human
ucgcuuggcuccaugcuccuca

SEQ ID NO: 2804107 - RNA, 12 nt, Human
ucgcuuguaaau

SEQ ID NO: 2804108 - RNA, 16 nt, Human
ucgcuuguaaauacca

SEQ ID NO: 2804109 - RNA, 17 nt, Human
ucgcuuguaaauaccag

SEQ ID NO: 2804110 - RNA, 23 nt, Human
ucgcccagucuggaaugcagugg

SEQ ID NO: 2804111 - RNA, 19 nt, Human
ucgcccagucuggaaugca

SEQ ID NO: 2804112 - RNA, 14 nt, Human
ucgcccagucugga

SEQ ID NO: 2804113 - RNA, 16 nt, Human
ucgccaacauggugaa

SEQ ID NO: 2804114 - RNA, 14 nt, Human
ucgauccaaauugu

SEQ ID NO: 2804115 - RNA, 15 nt, Human
ucgauccaaauugug

SEQ ID NO: 2804116 - RNA, 21 nt, Human
ucgauccaaauugugcuucuc

SEQ ID NO: 2804117 - RNA, 15 nt, Human
ucgaugaaggcugcc

SEQ ID NO: 2804118 - RNA, 15 nt, Human
ucgaugauucaggug

SEQ ID NO: 2804119 - RNA, 18 nt, Human
ucgaugcguucacuccaa

SEQ ID NO: 2804120 - RNA, 23 nt, Human
ucgaugguacgugacccucugcu

SEQ ID NO: 2804121 - RNA, 20 nt, Human
ucgauguguacucuaacuua

SEQ ID NO: 2804122 - RNA, 15 nt, Human
uccuuuguguuucua

SEQ ID NO: 2804123 - RNA, 20 nt, Human
uccuuuguguuucuauugac

SEQ ID NO: 2804124 - RNA, 12 nt, Human
uccuuugucuuc

SEQ ID NO: 2804125 - RNA, 21 nt, Human
uccuuugucuucaaacuguga

SEQ ID NO: 2804126 - RNA, 17 nt, Human
uccuuugugguuuuaug

SEQ ID NO: 2804127 - RNA, 20 nt, Human
uccuuuguguguacucacug

SEQ ID NO: 2804128 - RNA, 13 nt, Human
uccuuuucuuuaa

SEQ ID NO: 2804129 - RNA, 15 nt, Human
uccuuuucuuuuguu

SEQ ID NO: 2804130 - RNA, 16 nt, Human
uccuuuucuuuuguua

SEQ ID NO: 2804131 - RNA, 17 nt, Human
uccuuuucuuuuguuac

SEQ ID NO: 2804132 - RNA, 18 nt, Human
uccuuuucuuuuguuacu

SEQ ID NO: 2804133 - RNA, 19 nt, Human
uccuuuucuuuuguuacug

SEQ ID NO: 2804134 - RNA, 20 nt, Human
uccuuuucuuuuguuacugu

SEQ ID NO: 2804135 - RNA, 21 nt, Human
uccuuuucuuuuguuacuguu

SEQ ID NO: 2804136 - RNA, 22 nt, Human
uccuuuucuuuuguuacuguuc

SEQ ID NO: 2804137 - RNA, 23 nt, Human
uccuuuucuuuuguuacuguucu

SEQ ID NO: 2804138 - RNA, 10 nt, Human
uccuuuucuu

SEQ ID NO: 2804139 - RNA, 15 nt, Human
uccuuuucuucuaug

SEQ ID NO: 2804140 - RNA, 16 nt, Human
uccuuuucuucuaugu

SEQ ID NO: 2804141 - RNA, 14 nt, Human
uccuuuucuugcuu

SEQ ID NO: 2804142 - RNA, 20 nt, Human
ucgcauggucacacacugau

SEQ ID NO: 2804143 - RNA, 19 nt, Human
ucgcauggucacacacuga

SEQ ID NO: 2804144 - RNA, 13 nt, Human
ucgcaucauugca

SEQ ID NO: 2804145 - RNA, 15 nt, Human
ucgcaucauugcaga

SEQ ID NO: 2804146 - RNA, 14 nt, Human
ucgcaucuucccaa

SEQ ID NO: 2804147 - RNA, 11 nt, Human
ucgcagccuga

SEQ ID NO: 2804148 - RNA, 13 nt, Human
ucgcagccugagu

SEQ ID NO: 2804149 - RNA, 14 nt, Human
ucgcagccugaguc

SEQ ID NO: 2804150 - RNA, 15 nt, Human
ucgauucauauugaa

SEQ ID NO: 2804151 - RNA, 22 nt, Human
ucgauguuuuauuauuucuauu

SEQ ID NO: 2804152 - RNA, 15 nt, Human
uccuucuuuuuaaaa

SEQ ID NO: 2804153 - RNA, 22 nt, Human
uccuucuuugauaauguuaaau

SEQ ID NO: 2804154 - RNA, 19 nt, Human
uccuucuuugauaauguua

SEQ ID NO: 2804155 - RNA, 20 nt, Human
uccuucuuugauaauguuaa

SEQ ID NO: 2804156 - RNA, 17 nt, Human
uccuugcuccuggccuu

SEQ ID NO: 2804157 - RNA, 21 nt, Human
uccuugcuccuggccuugcug

SEQ ID NO: 2804158 - RNA, 16 nt, Human
uccuuggucuuuguau

SEQ ID NO: 2804159 - RNA, 17 nt, Human
uccuuggucuuuguauc

SEQ ID NO: 2804160 - RNA, 23 nt, Human
uccuuggucuuuguaucuuccau

SEQ ID NO: 2804161 - RNA, 14 nt, Human
uccuuggugccugg

SEQ ID NO: 2804162 - RNA, 21 nt, Human
uccuugcuguccuaggccaca

SEQ ID NO: 2804163 - RNA, 19 nt, Human
uccuugcuguccuaggcca

SEQ ID NO: 2804164 - RNA, 17 nt, Human
uccuugcuguccuaggc

SEQ ID NO: 2804165 - RNA, 18 nt, Human
uccuuggugccuggccug

SEQ ID NO: 2804166 - RNA, 12 nt, Human
uccuuugaagau

SEQ ID NO: 2804167 - RNA, 22 nt, Human
uccuuugaagauaguaacugua

SEQ ID NO: 2804168 - RNA, 14 nt, Human
uccuuugcagggca

SEQ ID NO: 2804169 - RNA, 15 nt, Human
uccuuugcagggcag

SEQ ID NO: 2804170 - RNA, 16 nt, Human
uccuuugcagggcagc

SEQ ID NO: 2804171 - RNA, 17 nt, Human
uccuuugcagggcagcc

SEQ ID NO: 2804172 - RNA, 18 nt, Human
uccuuugcagggcagccc

SEQ ID NO: 2804173 - RNA, 17 nt, Human
uccuuugcgccugugac

SEQ ID NO: 2804174 - RNA, 18 nt, Human
uccuuugguccugucccc

SEQ ID NO: 2804175 - RNA, 15 nt, Human
uccuuaucaaaggac

SEQ ID NO: 2804176 - RNA, 14 nt, Human
uccuuaucaaagga

SEQ ID NO: 2804177 - RNA, 21 nt, Human
uccuuaccuuuaccccauccc

SEQ ID NO: 2804178 - RNA, 20 nt, Human
uccuuacgcuuugucacaca

SEQ ID NO: 2804179 - RNA, 17 nt, Human
uccuuaucaaaggacac

SEQ ID NO: 2804180 - RNA, 13 nt, Human
uccuucuuugaua

SEQ ID NO: 2804181 - RNA, 16 nt, Human
uccuucuuugauaaug

SEQ ID NO: 2804182 - RNA, 14 nt, Human
uccuuaucagagcu

SEQ ID NO: 2804183 - RNA, 15 nt, Human
uccuuaucagagcua

SEQ ID NO: 2804184 - RNA, 22 nt, Human
uccuuaucagagcuaagggugg

SEQ ID NO: 2804185 - RNA, 16 nt, Human
uccuguccccaucugu

SEQ ID NO: 2804186 - RNA, 17 nt, Human
uccuguccccaucuguc

SEQ ID NO: 2804187 - RNA, 20 nt, Human
uccuguccccaucugucggc

SEQ ID NO: 2804188 - RNA, 19 nt, Human
uccugaggggcaucugccc

SEQ ID NO: 2804189 - RNA, 16 nt, Human
uccugaggggcaucug

SEQ ID NO: 2804190 - RNA, 15 nt, Human
uccugaggggcaucu

SEQ ID NO: 2804191 - RNA, 18 nt, Human
uccugaggcuuuggauuu

SEQ ID NO: 2804192 - RNA, 17 nt, Human
uccugagggaggaccug

SEQ ID NO: 2804193 - RNA, 21 nt, Human
uccugagggaggaccuggggc

SEQ ID NO: 2804194 - RNA, 23 nt, Human
uccugagggaggaccuggggcac

SEQ ID NO: 2804195 - RNA, 17 nt, Human
uccugaggcuuuggauu

SEQ ID NO: 2804196 - RNA, 16 nt, Human
uccugaggcuuuggau

SEQ ID NO: 2804197 - RNA, 17 nt, Human
uccucuguccaggcacu

SEQ ID NO: 2804198 - RNA, 13 nt, Human
uccucuggggcuc

SEQ ID NO: 2804199 - RNA, 17 nt, Human
uccucuggggcucuagg

SEQ ID NO: 2804200 - RNA, 18 nt, Human
uccucucacuaaacuuua

SEQ ID NO: 2804201 - RNA, 14 nt, Human
uccucucagccccu

SEQ ID NO: 2804202 - RNA, 12 nt, Human
uccucuggagcc

SEQ ID NO: 2804203 - RNA, 16 nt, Human
uccucuauacaucucu

SEQ ID NO: 2804204 - RNA, 17 nt, Human
uccucuauacaucucuc

SEQ ID NO: 2804205 - RNA, 20 nt, Human
uccucuauacaucucucccc

SEQ ID NO: 2804206 - RNA, 21 nt, Human
uccucuauacaucucucccca

SEQ ID NO: 2804207 - RNA, 20 nt, Human
uccucgaugggagggauggc

SEQ ID NO: 2804208 - RNA, 17 nt, Human
uccucgacaucacuguu

SEQ ID NO: 2804209 - RNA, 21 nt, Human
uccucgacaucacuguucaug

SEQ ID NO: 2804210 - RNA, 18 nt, Human
uccuccuggaaccuugcu

SEQ ID NO: 2804211 - RNA, 19 nt, Human
uccuccuggaaccuugcug

SEQ ID NO: 2804212 - RNA, 20 nt, Human
uccuccuggaaccuugcugu

SEQ ID NO: 2804213 - RNA, 21 nt, Human
uccuccuggaaccuugcuguc

SEQ ID NO: 2804214 - RNA, 22 nt, Human
uccuccuggaaccuugcugucc

SEQ ID NO: 2804215 - RNA, 13 nt, Human
uccuccuggacuc

SEQ ID NO: 2804216 - RNA, 14 nt, Human
uccuaagccuaaaa

SEQ ID NO: 2804217 - RNA, 13 nt, Human
uccuaagccugug

SEQ ID NO: 2804218 - RNA, 14 nt, Human
uccuaagccugugg

SEQ ID NO: 2804219 - RNA, 16 nt, Human
uccuaagccuguggcu

SEQ ID NO: 2804220 - RNA, 17 nt, Human
uccuaagccuguggcug

SEQ ID NO: 2804221 - RNA, 20 nt, Human
uccuaagccuguggcugugg

SEQ ID NO: 2804222 - RNA, 17 nt, Human
uccuaagagugcugggc

SEQ ID NO: 2804223 - RNA, 19 nt, Human
uccuaagagugcugggcau

SEQ ID NO: 2804224 - RNA, 16 nt, Human
uccuaagagugcuggg

SEQ ID NO: 2804225 - RNA, 13 nt, Human
uccuaagcaucua

SEQ ID NO: 2804226 - RNA, 14 nt, Human
uccuaagcaucuaa

SEQ ID NO: 2804227 - RNA, 16 nt, Human
uccggaaugccaccca

SEQ ID NO: 2804228 - RNA, 18 nt, Human
uccggaaugccacccaca

SEQ ID NO: 2804229 - RNA, 17 nt, Human
uccggaaugccacccac

SEQ ID NO: 2804230 - RNA, 15 nt, Human
uccggaguagcuggg

SEQ ID NO: 2804231 - RNA, 16 nt, Human
uccggauccuaagcau

SEQ ID NO: 2804232 - RNA, 15 nt, Human
uccggacacuccuag

SEQ ID NO: 2804233 - RNA, 18 nt, Human
uccggacacuccuagaga

SEQ ID NO: 2804234 - RNA, 15 nt, Human
uccuauccacugggc

SEQ ID NO: 2804235 - RNA, 17 nt, Human
uccuauccacugggcac

SEQ ID NO: 2804236 - RNA, 21 nt, Human
uccuauccacugggcacaacu

SEQ ID NO: 2804237 - RNA, 15 nt, Human
uccuaagcaucuaag

SEQ ID NO: 2804238 - RNA, 16 nt, Human
uccuaagcaucuaagu

SEQ ID NO: 2804239 - RNA, 17 nt, Human
uccuaucuaucuuccaa

SEQ ID NO: 2804240 - RNA, 17 nt, Human
uccuaagcaucuaaguu

SEQ ID NO: 2804241 - RNA, 15 nt, Human
uccuaugaaugcuuu

SEQ ID NO: 2804242 - RNA, 17 nt, Human
uccuaugaaugcuuugc

SEQ ID NO: 2804243 - RNA, 18 nt, Human
uccuaugaaugcuuugca

SEQ ID NO: 2804244 - RNA, 12 nt, Human
uccuaugcaaua

SEQ ID NO: 2804245 - RNA, 13 nt, Human
uccuaugcaauaa

SEQ ID NO: 2804246 - RNA, 16 nt, Human
uccuaugcaauaaaau

SEQ ID NO: 2804247 - RNA, 13 nt, Human
uccuauggaaacc

SEQ ID NO: 2804248 - RNA, 16 nt, Human
uccuauuugcacugua

SEQ ID NO: 2804249 - RNA, 18 nt, Human
uccuauuugccaugggcu

SEQ ID NO: 2804250 - RNA, 15 nt, Human
uccuauuucuuauag

SEQ ID NO: 2804251 - RNA, 13 nt, Human
uccuauuucagua

SEQ ID NO: 2804252 - RNA, 16 nt, Human
uccuauuucaguacuu

SEQ ID NO: 2804253 - RNA, 21 nt, Human
uccuauuucaguacuucagca

SEQ ID NO: 2804254 - RNA, 18 nt, Human
uccuauuucuagggcugg

SEQ ID NO: 2804255 - RNA, 16 nt, Human
uccuccguccagccgc

SEQ ID NO: 2804256 - RNA, 14 nt, Human
uccuccguccagcc

SEQ ID NO: 2804257 - RNA, 18 nt, Human
uccuccguccagccgcca

SEQ ID NO: 2804258 - RNA, 17 nt, Human
uccuauuuguuuucaug

SEQ ID NO: 2804259 - RNA, 14 nt, Human
uccuauuuguuuuc

SEQ ID NO: 2804260 - RNA, 16 nt, Human
uccuauuuguuuucau

SEQ ID NO: 2804261 - RNA, 13 nt, Human
uccuauuuuugua

SEQ ID NO: 2804262 - RNA, 14 nt, Human
uccuauuuuuguaa

SEQ ID NO: 2804263 - RNA, 17 nt, Human
uccuauuuuuguaaacu

SEQ ID NO: 2804264 - RNA, 17 nt, Human
uccuccgguugcauacu

SEQ ID NO: 2804265 - RNA, 20 nt, Human
uccuccgguugcauacugga

SEQ ID NO: 2804266 - RNA, 23 nt, Human
uccuccgguugcauacuggacuc

SEQ ID NO: 2804267 - RNA, 17 nt, Human
uccuccaguaccuugcu

SEQ ID NO: 2804268 - RNA, 18 nt, Human
uccuccaguaccuugcuu

SEQ ID NO: 2804269 - RNA, 18 nt, Human
uccucccuuuccuuccua

SEQ ID NO: 2804270 - RNA, 19 nt, Human
uccucccuuuccuuccuaa

SEQ ID NO: 2804271 - RNA, 21 nt, Human
uccgcccacaggaagccugca

SEQ ID NO: 2804272 - RNA, 11 nt, Human
uccgcccccag

SEQ ID NO: 2804273 - RNA, 12 nt, Human
uccgcccccagc

SEQ ID NO: 2804274 - RNA, 13 nt, Human
uccgcccccagcc

SEQ ID NO: 2804275 - RNA, 14 nt, Human
uccgcccccagccu

SEQ ID NO: 2804276 - RNA, 15 nt, Human
uccgcccccagccua

SEQ ID NO: 2804277 - RNA, 16 nt, Human
uccgcccccagccuau

SEQ ID NO: 2804278 - RNA, 21 nt, Human
uccgcuuucuacccagcgagc

SEQ ID NO: 2804279 - RNA, 13 nt, Human
uccgccccugccu

SEQ ID NO: 2804280 - RNA, 14 nt, Human
uccgccccugccug

SEQ ID NO: 2804281 - RNA, 15 nt, Human
uccgccccugccugc

SEQ ID NO: 2804282 - RNA, 16 nt, Human
uccgccccugccugcc

SEQ ID NO: 2804283 - RNA, 19 nt, Human
uccgccccugccugccaug

SEQ ID NO: 2804284 - RNA, 15 nt, Human
uccgccccuucccuu

SEQ ID NO: 2804285 - RNA, 17 nt, Human
uccgccccuucccuucc

SEQ ID NO: 2804286 - RNA, 22 nt, Human
uccgaaagggacuuggaagcuc

SEQ ID NO: 2804287 - RNA, 19 nt, Human
uccgaacacccucgaagcg

SEQ ID NO: 2804288 - RNA, 15 nt, Human
uccgacccucuggga

SEQ ID NO: 2804289 - RNA, 17 nt, Human
uccgacccucugggaac

SEQ ID NO: 2804290 - RNA, 18 nt, Human
uccgacccucugggaacc

SEQ ID NO: 2804291 - RNA, 21 nt, Human
uccgacccucugggaaccucc

SEQ ID NO: 2804292 - RNA, 21 nt, Human
uccgaaagggacuuggaagcu

SEQ ID NO: 2804293 - RNA, 17 nt, Human
ucccuugaaauuuuaaa

SEQ ID NO: 2804294 - RNA, 17 nt, Human
ucccuugaccaggccug

SEQ ID NO: 2804295 - RNA, 21 nt, Human
ucccuugaccaggccugggcc

SEQ ID NO: 2804296 - RNA, 17 nt, Human
ucccuucuuuuucuucu

SEQ ID NO: 2804297 - RNA, 13 nt, Human
ucccuucuugcau

SEQ ID NO: 2804298 - RNA, 16 nt, Human
ucccuucuugcauccu

SEQ ID NO: 2804299 - RNA, 23 nt, Human
ucccuucuugcauccuuccuaua

SEQ ID NO: 2804300 - RNA, 22 nt, Human
ucccuucugucccucacagcac

SEQ ID NO: 2804301 - RNA, 17 nt, Human
ucccuucugucccucac

SEQ ID NO: 2804302 - RNA, 20 nt, Human
ucccuggggaaaacuugcag

SEQ ID NO: 2804303 - RNA, 16 nt, Human
ucccuucugucccuca

SEQ ID NO: 2804304 - RNA, 16 nt, Human
ucccugggccaggguc

SEQ ID NO: 2804305 - RNA, 17 nt, Human
ucccugggccagggucu

SEQ ID NO: 2804306 - RNA, 18 nt, Human
ucccugggccagggucug

SEQ ID NO: 2804307 - RNA, 24 nt, Human
ucccugggccagggucugugugaa

SEQ ID NO: 2804308 - RNA, 14 nt, Human
ucccugggaggccc

SEQ ID NO: 2804309 - RNA, 14 nt, Human
ucccuggcucccau

SEQ ID NO: 2804310 - RNA, 12 nt, Human
ucccugcccagg

SEQ ID NO: 2804311 - RNA, 13 nt, Human
ucccugcccaggc

SEQ ID NO: 2804312 - RNA, 16 nt, Human
ucccugcccaggccgg

SEQ ID NO: 2804313 - RNA, 19 nt, Human
ucccugcccaggccggcca

SEQ ID NO: 2804314 - RNA, 16 nt, Human
ucccugcccauuucau

SEQ ID NO: 2804315 - RNA, 13 nt, Human
ucccugccccaaa

SEQ ID NO: 2804316 - RNA, 18 nt, Human
ucccugccccucccuuca

SEQ ID NO: 2804317 - RNA, 18 nt, Human
ucccucuguccaccagcc

SEQ ID NO: 2804318 - RNA, 12 nt, Human
ucccugccagag

SEQ ID NO: 2804319 - RNA, 14 nt, Human
ucccugcauuucug

SEQ ID NO: 2804320 - RNA, 17 nt, Human
ucccugcauuucugagu

SEQ ID NO: 2804321 - RNA, 15 nt, Human
ucccugccaaacuga

SEQ ID NO: 2804322 - RNA, 14 nt, Human
ucccugccccuccc

SEQ ID NO: 2804323 - RNA, 16 nt, Human
ucccugccccccagcc

SEQ ID NO: 2804324 - RNA, 20 nt, Human
ucccugcacuugcagacucu

SEQ ID NO: 2804325 - RNA, 23 nt, Human
ucccugcagaugccacccuagcc

SEQ ID NO: 2804326 - RNA, 22 nt, Human
ucccugcagaugccacccuagc

SEQ ID NO: 2804327 - RNA, 16 nt, Human
ucccugcagaugccac

SEQ ID NO: 2804328 - RNA, 12 nt, Human
ucccucuucacu

SEQ ID NO: 2804329 - RNA, 15 nt, Human
ucccucuucacuccc

SEQ ID NO: 2804330 - RNA, 16 nt, Human
ucccucuucacucccc

SEQ ID NO: 2804331 - RNA, 15 nt, Human
ucccucuucccucag

SEQ ID NO: 2804332 - RNA, 12 nt, Human
ucccucugcuca

SEQ ID NO: 2804333 - RNA, 13 nt, Human
ucccucugcucag

SEQ ID NO: 2804334 - RNA, 14 nt, Human
ucccucugcucagc

SEQ ID NO: 2804335 - RNA, 15 nt, Human
ucccucugcucagcc

SEQ ID NO: 2804336 - RNA, 16 nt, Human
ucccucugcucagcca

SEQ ID NO: 2804337 - RNA, 18 nt, Human
ucccucugcucagccaag

SEQ ID NO: 2804338 - RNA, 21 nt, Human
ucccucugcucagccaagcuu

SEQ ID NO: 2804339 - RNA, 19 nt, Human
ucccucugaccugcaggcc

SEQ ID NO: 2804340 - RNA, 18 nt, Human
ucccucugaccugcaggc

SEQ ID NO: 2804341 - RNA, 17 nt, Human
ucccucugaccugcagg

SEQ ID NO: 2804342 - RNA, 13 nt, Human
ucccucugaccug

SEQ ID NO: 2804343 - RNA, 23 nt, Human
ucccucucucuucugcuccaccc

SEQ ID NO: 2804344 - RNA, 13 nt, Human
ucccucuauuuau

SEQ ID NO: 2804345 - RNA, 19 nt, Human
ucccucuauuuauguuugc

SEQ ID NO: 2804346 - RNA, 16 nt, Human
ucccucucaggaucca

SEQ ID NO: 2804347 - RNA, 13 nt, Human
ucccuccucaccu

SEQ ID NO: 2804348 - RNA, 18 nt, Human
ucccucuaggcucugccu

SEQ ID NO: 2804349 - RNA, 20 nt, Human
ucccucuaggcucugccuuc

SEQ ID NO: 2804350 - RNA, 20 nt, Human
ucccucucucuucugcucca

SEQ ID NO: 2804351 - RNA, 21 nt, Human
ucccucucucuucugcuccac

SEQ ID NO: 2804352 - RNA, 14 nt, Human
ucccucucaucuca

SEQ ID NO: 2804353 - RNA, 17 nt, Human
ucccucucaucucaggu

SEQ ID NO: 2804354 - RNA, 13 nt, Human
ucccuagcaguga

SEQ ID NO: 2804355 - RNA, 15 nt, Human
ucccuagcagugaac

SEQ ID NO: 2804356 - RNA, 16 nt, Human
ucccuagcagugaacu

SEQ ID NO: 2804357 - RNA, 16 nt, Human
ucccuagccagcacuu

SEQ ID NO: 2804358 - RNA, 17 nt, Human
ucccuagccagcacuug

SEQ ID NO: 2804359 - RNA, 20 nt, Human
ucccuagccagcacuuguau

SEQ ID NO: 2804360 - RNA, 22 nt, Human
ucccuagccagcacuuguauau

SEQ ID NO: 2804361 - RNA, 16 nt, Human
ucccuagaucuuucua

SEQ ID NO: 2804362 - RNA, 23 nt, Human
ucccuagaucuuucuauuccaaa

SEQ ID NO: 2804363 - RNA, 17 nt, Human
ucccuacuuccugugac

SEQ ID NO: 2804364 - RNA, 12 nt, Human
ucccuagacuuu

SEQ ID NO: 2804365 - RNA, 13 nt, Human
ucccuagacuuua

SEQ ID NO: 2804366 - RNA, 14 nt, Human
ucccuagacuuuag

SEQ ID NO: 2804367 - RNA, 20 nt, Human
ucccuagacuuuaggcuuuc

SEQ ID NO: 2804368 - RNA, 22 nt, Human
ucccuagacuuuaggcuuucag

SEQ ID NO: 2804369 - RNA, 14 nt, Human
ucccucccuugggg

SEQ ID NO: 2804370 - RNA, 13 nt, Human
ucccucccuuggg

SEQ ID NO: 2804371 - RNA, 12 nt, Human
ucccuccucacc

SEQ ID NO: 2804372 - RNA, 22 nt, Human
ucccuagaaaacaaugcaaaac

SEQ ID NO: 2804373 - RNA, 19 nt, Human
ucccuccggcuugaccugu

SEQ ID NO: 2804374 - RNA, 22 nt, Human
ucccaugagccucagcauccug

SEQ ID NO: 2804375 - RNA, 17 nt, Human
ucccaugagccucagca

SEQ ID NO: 2804376 - RNA, 19 nt, Human
ucccaugacccaggcuggg

SEQ ID NO: 2804377 - RNA, 20 nt, Human
ucccuacccccuaagagcca

SEQ ID NO: 2804378 - RNA, 19 nt, Human
ucccuacccccuaagagcc

SEQ ID NO: 2804379 - RNA, 15 nt, Human
ucccaugcaggcccu

SEQ ID NO: 2804380 - RNA, 16 nt, Human
ucccaugcaggcccuu

SEQ ID NO: 2804381 - RNA, 19 nt, Human
ucccuaccgagucucuucu

SEQ ID NO: 2804382 - RNA, 21 nt, Human
ucccuaccgagucucuucucc

SEQ ID NO: 2804383 - RNA, 22 nt, Human
ucccuaccgagucucuucucca

SEQ ID NO: 2804384 - RNA, 23 nt, Human
ucccuaccgagucucuucuccac

SEQ ID NO: 2804385 - RNA, 16 nt, Human
ugccugguggcagcug

SEQ ID NO: 2804386 - RNA, 15 nt, Human
ugccugguggcagcu

SEQ ID NO: 2804387 - RNA, 14 nt, Human
ugccugguggcagc

SEQ ID NO: 2804388 - RNA, 18 nt, Human
ugccuguaauucagugua

SEQ ID NO: 2804389 - RNA, 20 nt, Human
ugccuggugcuuccaaauau

SEQ ID NO: 2804390 - RNA, 13 nt, Human
ugccuguaaacau

SEQ ID NO: 2804391 - RNA, 15 nt, Human
ugccuguaaacauag

SEQ ID NO: 2804392 - RNA, 23 nt, Human
ugccuguagcccacucugcucgc

SEQ ID NO: 2804393 - RNA, 20 nt, Human
ugccuguagcccacucugcu

SEQ ID NO: 2804394 - RNA, 18 nt, Human
ugccuguagcccacucug

SEQ ID NO: 2804395 - RNA, 13 nt, Human
ugccuguaguuag

SEQ ID NO: 2804396 - RNA, 15 nt, Human
ugccuguagcaguga

SEQ ID NO: 2804397 - RNA, 14 nt, Human
ugccugugaacuga

SEQ ID NO: 2804398 - RNA, 22 nt, Human
ugccuggcuucgcaaaauguuu

SEQ ID NO: 2804399 - RNA, 19 nt, Human
ugccuggugcacugugucu

SEQ ID NO: 2804400 - RNA, 17 nt, Human
ugccuggugaauggccu

SEQ ID NO: 2804401 - RNA, 18 nt, Human
ugccuggugaauggccuu

SEQ ID NO: 2804402 - RNA, 21 nt, Human
ugccugacugcccagcauuug

SEQ ID NO: 2804403 - RNA, 23 nt, Human
ugccugacccuacuucuuuugcu

SEQ ID NO: 2804404 - RNA, 19 nt, Human
ugccucgaacuggcugcaa

SEQ ID NO: 2804405 - RNA, 18 nt, Human
ugccucgaacuggcugca

SEQ ID NO: 2804406 - RNA, 20 nt, Human
ugccucgaacuggcugcaaa

SEQ ID NO: 2804407 - RNA, 12 nt, Human
ugccucucacac

SEQ ID NO: 2804408 - RNA, 13 nt, Human
ugccucucacaca

SEQ ID NO: 2804409 - RNA, 15 nt, Human
ugccucucacacaca

SEQ ID NO: 2804410 - RNA, 19 nt, Human
ugccucucacacacauaga

SEQ ID NO: 2804411 - RNA, 21 nt, Human
ugccucgaaacacagaaaccu

SEQ ID NO: 2804412 - RNA, 22 nt, Human
ugccccuucauugauuuccugu

SEQ ID NO: 2804413 - RNA, 23 nt, Human
ugccucgaaacacagaaaccuuu

SEQ ID NO: 2804414 - RNA, 13 nt, Human
ugccugaagaaca

SEQ ID NO: 2804415 - RNA, 13 nt, Human
ugccuucuucagg

SEQ ID NO: 2804416 - RNA, 14 nt, Human
ugccuucuucaggg

SEQ ID NO: 2804417 - RNA, 15 nt, Human
ugccuucuucagggc

SEQ ID NO: 2804418 - RNA, 17 nt, Human
ugccuucuucagggccu

SEQ ID NO: 2804419 - RNA, 18 nt, Human
ugccuucuucagggccug

SEQ ID NO: 2804420 - RNA, 19 nt, Human
ugccuucuucagggccugg

SEQ ID NO: 2804421 - RNA, 20 nt, Human
ugccuucuucagggccuggu

SEQ ID NO: 2804422 - RNA, 16 nt, Human
ugccuucuuuugauua

SEQ ID NO: 2804423 - RNA, 13 nt, Human
ugccuucuuuugu

SEQ ID NO: 2804424 - RNA, 14 nt, Human
ugccuucuuuugua

SEQ ID NO: 2804425 - RNA, 12 nt, Human
ugccuucuuuga

SEQ ID NO: 2804426 - RNA, 13 nt, Human
ugccuucuuugaa

SEQ ID NO: 2804427 - RNA, 14 nt, Human
ugccuucuuugaag

SEQ ID NO: 2804428 - RNA, 15 nt, Human
ugccuucuuugaaga

SEQ ID NO: 2804429 - RNA, 16 nt, Human
ugccuucuuugaagaa

SEQ ID NO: 2804430 - RNA, 17 nt, Human
ugccuucuuugaagaag

SEQ ID NO: 2804431 - RNA, 20 nt, Human
ugccuucuuugaagaaggug

SEQ ID NO: 2804432 - RNA, 21 nt, Human
ugccugugaacugaacucuga

SEQ ID NO: 2804433 - RNA, 18 nt, Human
ugccugugaacugaacuc

SEQ ID NO: 2804434 - RNA, 17 nt, Human
ugccugugaacugaacu

SEQ ID NO: 2804435 - RNA, 21 nt, Human
ugcgaucuggguucacugcaa

SEQ ID NO: 2804436 - RNA, 20 nt, Human
ugcgaucuggguucacugca

SEQ ID NO: 2804437 - RNA, 19 nt, Human
ugcgaucuggguucacugc

SEQ ID NO: 2804438 - RNA, 15 nt, Human
ugcgaucuggguuca

SEQ ID NO: 2804439 - RNA, 14 nt, Human
ugcgaucuggguuc

SEQ ID NO: 2804440 - RNA, 13 nt, Human
ugcgauagagucu

SEQ ID NO: 2804441 - RNA, 19 nt, Human
ugcgaucucggcucagugc

SEQ ID NO: 2804442 - RNA, 14 nt, Human
ugcgauagagucuc

SEQ ID NO: 2804443 - RNA, 16 nt, Human
ugcgauagagucucac

SEQ ID NO: 2804444 - RNA, 14 nt, Human
ugccuugaagccac

SEQ ID NO: 2804445 - RNA, 17 nt, Human
ugccuugaaccugugag

SEQ ID NO: 2804446 - RNA, 18 nt, Human
ugccuugaaccugugagu

SEQ ID NO: 2804447 - RNA, 19 nt, Human
ugccuugaaccugugagua

SEQ ID NO: 2804448 - RNA, 23 nt, Human
ugccuugaaccugugaguaaaua

SEQ ID NO: 2804449 - RNA, 15 nt, Human
ugccuugaagccacu

SEQ ID NO: 2804450 - RNA, 12 nt, Human
ugccuugaauaa

SEQ ID NO: 2804451 - RNA, 15 nt, Human
ugccuugaauaauaa

SEQ ID NO: 2804452 - RNA, 22 nt, Human
ugcuaaauggucgcccaggaga

SEQ ID NO: 2804453 - RNA, 21 nt, Human
ugcuaaauggucgcccaggag

SEQ ID NO: 2804454 - RNA, 20 nt, Human
ugcuaaauggucgcccagga

SEQ ID NO: 2804455 - RNA, 22 nt, Human
ugcuaagacucaguggggaggg

SEQ ID NO: 2804456 - RNA, 16 nt, Human
ugcgccuacaggagug

SEQ ID NO: 2804457 - RNA, 14 nt, Human
ugcgccuacaggag

SEQ ID NO: 2804458 - RNA, 22 nt, Human
ugcgccuacaggagugagcacu

SEQ ID NO: 2804459 - RNA, 17 nt, Human
ugcgccucaggcugcug

SEQ ID NO: 2804460 - RNA, 12 nt, Human
ugcgucccaaga

SEQ ID NO: 2804461 - RNA, 14 nt, Human
ugcgucuuccgccc

SEQ ID NO: 2804462 - RNA, 19 nt, Human
ugcgucuuccgccccugcc

SEQ ID NO: 2804463 - RNA, 20 nt, Human
ugcgucuuccgccccugccu

SEQ ID NO: 2804464 - RNA, 21 nt, Human
ugcgucuuccgccccugccug

SEQ ID NO: 2804465 - RNA, 12 nt, Human
ugcgugaaugua

SEQ ID NO: 2804466 - RNA, 20 nt, Human
ugcgugaauguauguaaugu

SEQ ID NO: 2804467 - RNA, 15 nt, Human
ugcgugacacucucc

SEQ ID NO: 2804468 - RNA, 19 nt, Human
ugcgugacacucuccuugc

SEQ ID NO: 2804469 - RNA, 20 nt, Human
ugcgugacacucuccuugca

SEQ ID NO: 2804470 - RNA, 21 nt, Human
ugcgugacacucuccuugcag

SEQ ID NO: 2804471 - RNA, 22 nt, Human
ugcgugacacucuccuugcagu

SEQ ID NO: 2804472 - RNA, 17 nt, Human
ugcucacaacuuagugu

SEQ ID NO: 2804473 - RNA, 15 nt, Human
ugcucacaguaaccc

SEQ ID NO: 2804474 - RNA, 21 nt, Human
ugcucaauaaaugauucuuag

SEQ ID NO: 2804475 - RNA, 20 nt, Human
ugcuaagcaagcuaaccuua

SEQ ID NO: 2804476 - RNA, 16 nt, Human
ugcucacauaucuguc

SEQ ID NO: 2804477 - RNA, 15 nt, Human
ugcucacauaucugu

SEQ ID NO: 2804478 - RNA, 17 nt, Human
ugcucagaccagcucuu

SEQ ID NO: 2804479 - RNA, 20 nt, Human
ugcucagagaccugaagugu

SEQ ID NO: 2804480 - RNA, 16 nt, Human
ugcucagaccagcucu

SEQ ID NO: 2804481 - RNA, 17 nt, Human
ugcucaguaauuugagg

SEQ ID NO: 2804482 - RNA, 21 nt, Human
ugcucaguggguaaaauuaga

SEQ ID NO: 2804483 - RNA, 23 nt, Human
ugcucaguggguaaaauuagaug

SEQ ID NO: 2804484 - RNA, 20 nt, Human
ugcucagggucaauuucuuu

SEQ ID NO: 2804485 - RNA, 16 nt, Human
ugcucagggucaauuu

SEQ ID NO: 2804486 - RNA, 14 nt, Human
ugcuccucucccca

SEQ ID NO: 2804487 - RNA, 19 nt, Human
ugcuccuccuuggugccug

SEQ ID NO: 2804488 - RNA, 23 nt, Human
ugcuccuccuuggugccuggccu

SEQ ID NO: 2804489 - RNA, 22 nt, Human
ugcucagggaaaagcagcucuc

SEQ ID NO: 2804490 - RNA, 21 nt, Human
ugcucagggaaaagcagcucu

SEQ ID NO: 2804491 - RNA, 19 nt, Human
ugcucagggaaaagcagcu

SEQ ID NO: 2804492 - RNA, 12 nt, Human
ugcucagccaag

SEQ ID NO: 2804493 - RNA, 14 nt, Human
ugcucagccaagcu

SEQ ID NO: 2804494 - RNA, 22 nt, Human
ugcucuccucuugccacugccu

SEQ ID NO: 2804495 - RNA, 18 nt, Human
ugcugaacaaaaaauaaa

SEQ ID NO: 2804496 - RNA, 15 nt, Human
ugcugaacaaaaaau

SEQ ID NO: 2804497 - RNA, 18 nt, Human
ugcucuccaagucucagu

SEQ ID NO: 2804498 - RNA, 19 nt, Human
ugcucuccaagucucagug

SEQ ID NO: 2804499 - RNA, 13 nt, Human
ugcucuccccugc

SEQ ID NO: 2804500 - RNA, 12 nt, Human
ugcucuccccug

SEQ ID NO: 2804501 - RNA, 20 nt, Human
ugcucuccaagucucagugg

SEQ ID NO: 2804502 - RNA, 20 nt, Human
ugcucuccagccugggaggc

SEQ ID NO: 2804503 - RNA, 16 nt, Human
ugcucuccucuugcca

SEQ ID NO: 2804504 - RNA, 14 nt, Human
ugcucuccccugcc

SEQ ID NO: 2804505 - RNA, 14 nt, Human
ugcucuccucuugc

SEQ ID NO: 2804506 - RNA, 18 nt, Human
ugcucuccucuugccacu

SEQ ID NO: 2804507 - RNA, 21 nt, Human
ugcucuccucuugccacugcc

SEQ ID NO: 2804508 - RNA, 17 nt, Human
ugcuccucuccccagca

SEQ ID NO: 2804509 - RNA, 14 nt, Human
ugcuccuuuccccu

SEQ ID NO: 2804510 - RNA, 23 nt, Human
ugcucgcccuccuuucugugccc

SEQ ID NO: 2804511 - RNA, 17 nt, Human
ugcucuaucucucaaaa

SEQ ID NO: 2804512 - RNA, 22 nt, Human
ugcucucaccagcugcugcucu

SEQ ID NO: 2804513 - RNA, 16 nt, Human
ugcugcaaacuuaaug

SEQ ID NO: 2804514 - RNA, 16 nt, Human
ugcugauuuccccucu

SEQ ID NO: 2804515 - RNA, 19 nt, Human
ugcugauuuccccucuucc

SEQ ID NO: 2804516 - RNA, 14 nt, Human
ugcugauggucugg

SEQ ID NO: 2804517 - RNA, 19 nt, Human
ugcugauggucuggucuau

SEQ ID NO: 2804518 - RNA, 18 nt, Human
ugcugauuuggugaccaa

SEQ ID NO: 2804519 - RNA, 12 nt, Human
ugcugauuuuaa

SEQ ID NO: 2804520 - RNA, 13 nt, Human
ugcugauuuuaau

SEQ ID NO: 2804521 - RNA, 14 nt, Human
ugcugauuuuaaug

SEQ ID NO: 2804522 - RNA, 16 nt, Human
ugcugauuuuaaugga

SEQ ID NO: 2804523 - RNA, 15 nt, Human
ugcugacagcugacc

SEQ ID NO: 2804524 - RNA, 20 nt, Human
ugcugacauggcucuggacu

SEQ ID NO: 2804525 - RNA, 23 nt, Human
ugcugaaggaauaaauugcuccu

SEQ ID NO: 2804526 - RNA, 20 nt, Human
ugcugaacaaaaaauaaaaa

SEQ ID NO: 2804527 - RNA, 23 nt, Human
ugcugacagacacaggcccggcu

SEQ ID NO: 2804528 - RNA, 22 nt, Human
ugcugacagacacaggcccggc

SEQ ID NO: 2804529 - RNA, 15 nt, Human
ugcugcaugccuggu

SEQ ID NO: 2804530 - RNA, 23 nt, Human
ugcugcaucuuauagcacuuuga

SEQ ID NO: 2804531 - RNA, 20 nt, Human
ugcugcgcccuuaccuuccc

SEQ ID NO: 2804532 - RNA, 16 nt, Human
ugcugcgcccuuaccu

SEQ ID NO: 2804533 - RNA, 21 nt, Human
ugcugccuuuucuuuaacuuu

SEQ ID NO: 2804534 - RNA, 17 nt, Human
ugcugcugcugcgcccu

SEQ ID NO: 2804535 - RNA, 12 nt, Human
ugcugcuagaac

SEQ ID NO: 2804536 - RNA, 13 nt, Human
ugcugcuagaacu

SEQ ID NO: 2804537 - RNA, 14 nt, Human
ugcugcuagaacuu

SEQ ID NO: 2804538 - RNA, 15 nt, Human
ugcugcuagaacuuu

SEQ ID NO: 2804539 - RNA, 16 nt, Human
ugcugcuagaacuuuu

SEQ ID NO: 2804540 - RNA, 17 nt, Human
ugcugcuagaacuuuuu

SEQ ID NO: 2804541 - RNA, 19 nt, Human
ugcugcuagaacuuuuuua

SEQ ID NO: 2804542 - RNA, 20 nt, Human
ugcugcuagaacuuuuuuaa

SEQ ID NO: 2804543 - RNA, 13 nt, Human
ugcugcugucacc

SEQ ID NO: 2804544 - RNA, 21 nt, Human
ugcugcaaggacauucuugua

SEQ ID NO: 2804545 - RNA, 19 nt, Human
ugcugcuuuuauaucugua

SEQ ID NO: 2804546 - RNA, 17 nt, Human
ugcuggaaccugcaaaa

SEQ ID NO: 2804547 - RNA, 19 nt, Human
ugcuggaaccugcaaaaaa

SEQ ID NO: 2804548 - RNA, 13 nt, Human
ugcugcugucccu

SEQ ID NO: 2804549 - RNA, 20 nt, Human
ugcugcuuagacauaacaaa

SEQ ID NO: 2804550 - RNA, 14 nt, Human
ugcacggcugcuga

SEQ ID NO: 2804551 - RNA, 15 nt, Human
ugcacggcugcugag

SEQ ID NO: 2804552 - RNA, 16 nt, Human
ugcacugacccuucca

SEQ ID NO: 2804553 - RNA, 17 nt, Human
ugcacugacccuuccag

SEQ ID NO: 2804554 - RNA, 20 nt, Human
ugcacugacccuuccagaca

SEQ ID NO: 2804555 - RNA, 23 nt, Human
ugcacugacccuuccagacauac

SEQ ID NO: 2804556 - RNA, 13 nt, Human
ugcacgcagauua

SEQ ID NO: 2804557 - RNA, 21 nt, Human
ugcacgcagauuagcaggcca

SEQ ID NO: 2804558 - RNA, 19 nt, Human
ugcacgcgcccuuucuacc

SEQ ID NO: 2804559 - RNA, 20 nt, Human
ugcacgcgcccuuucuacca

SEQ ID NO: 2804560 - RNA, 13 nt, Human
ugcacggcugcug

SEQ ID NO: 2804561 - RNA, 15 nt, Human
ugcaccgggccacag

SEQ ID NO: 2804562 - RNA, 14 nt, Human
ugcaccgggccaca

SEQ ID NO: 2804563 - RNA, 22 nt, Human
ugcaccgggccacagagaaagu

SEQ ID NO: 2804564 - RNA, 17 nt, Human
ugcaccgggccacagag

SEQ ID NO: 2804565 - RNA, 13 nt, Human
ugcagcagauugg

SEQ ID NO: 2804566 - RNA, 16 nt, Human
ugcagcagauuggaag

SEQ ID NO: 2804567 - RNA, 22 nt, Human
ugcagcagauuggaaggagaca

SEQ ID NO: 2804568 - RNA, 23 nt, Human
ugcagcagauuggaaggagacac

SEQ ID NO: 2804569 - RNA, 16 nt, Human
ugcagcacggacaaua

SEQ ID NO: 2804570 - RNA, 17 nt, Human
ugcagcacggacaauaa

SEQ ID NO: 2804571 - RNA, 18 nt, Human
ugcagcacggacaauaaa

SEQ ID NO: 2804572 - RNA, 19 nt, Human
ugcagcacggacaauaaac

SEQ ID NO: 2804573 - RNA, 20 nt, Human
ugcagcacggacaauaaacc

SEQ ID NO: 2804574 - RNA, 22 nt, Human
ugcagcacggacaauaaaccuc

SEQ ID NO: 2804575 - RNA, 16 nt, Human
ugcagcaaucuuugaa

SEQ ID NO: 2804576 - RNA, 17 nt, Human
ugcagcaaucuuugaaa

SEQ ID NO: 2804577 - RNA, 18 nt, Human
ugcagcaauuaaaaauug

SEQ ID NO: 2804578 - RNA, 22 nt, Human
ugcagcaauuaaaaauugucuu

SEQ ID NO: 2804579 - RNA, 23 nt, Human
ugcagagcaccuuugcacaggau

SEQ ID NO: 2804580 - RNA, 21 nt, Human
ugcagagcaggaaacaugacu

SEQ ID NO: 2804581 - RNA, 13 nt, Human
ugcagaggggaaa

SEQ ID NO: 2804582 - RNA, 17 nt, Human
ugcacuuugaugucaug

SEQ ID NO: 2804583 - RNA, 19 nt, Human
ugcacuuugaugucaugug

SEQ ID NO: 2804584 - RNA, 20 nt, Human
ugcacuuugaugucaugugu

SEQ ID NO: 2804585 - RNA, 19 nt, Human
ugcacuuucuaauguuucu

SEQ ID NO: 2804586 - RNA, 12 nt, Human
ugcacuuuguaa

SEQ ID NO: 2804587 - RNA, 13 nt, Human
ugcacuuuguaaa

SEQ ID NO: 2804588 - RNA, 14 nt, Human
ugcacuuuguaaau

SEQ ID NO: 2804589 - RNA, 15 nt, Human
ugcacuuuguaaauu

SEQ ID NO: 2804590 - RNA, 16 nt, Human
ugcacuuuguaaauuc

SEQ ID NO: 2804591 - RNA, 17 nt, Human
ugcacuuuguaaauucc

SEQ ID NO: 2804592 - RNA, 12 nt, Human
ugcacuuuguag

SEQ ID NO: 2804593 - RNA, 13 nt, Human
ugcacuuuguagu

SEQ ID NO: 2804594 - RNA, 15 nt, Human
ugcacuuuguagugu

SEQ ID NO: 2804595 - RNA, 18 nt, Human
ugcacuuuguaguguuug

SEQ ID NO: 2804596 - RNA, 21 nt, Human
ugcacuugugauuauuuauua

SEQ ID NO: 2804597 - RNA, 16 nt, Human
ugcacuguaugcugga

SEQ ID NO: 2804598 - RNA, 15 nt, Human
ugcacuguaugcugg

SEQ ID NO: 2804599 - RNA, 16 nt, Human
ugcacuggggagcccg

SEQ ID NO: 2804600 - RNA, 20 nt, Human
ugcacuggggagcccgucuc

SEQ ID NO: 2804601 - RNA, 15 nt, Human
ugcaggccaggccag

SEQ ID NO: 2804602 - RNA, 21 nt, Human
ugcaggccaagagcagaggca

SEQ ID NO: 2804603 - RNA, 20 nt, Human
ugcaggccaagagcagaggc

SEQ ID NO: 2804604 - RNA, 16 nt, Human
ugcaggcaucacagcu

SEQ ID NO: 2804605 - RNA, 17 nt, Human
ugcagugauauggcaga

SEQ ID NO: 2804606 - RNA, 20 nt, Human
ugcagugauauggcagaaga

SEQ ID NO: 2804607 - RNA, 23 nt, Human
ugcagugauauggcagaagacac

SEQ ID NO: 2804608 - RNA, 21 nt, Human
ugcagugauauggcagaagac

SEQ ID NO: 2804609 - RNA, 22 nt, Human
ugcagugauauggcagaagaca

SEQ ID NO: 2804610 - RNA, 20 nt, Human
ugcaggcacuuauuguaaau

SEQ ID NO: 2804611 - RNA, 21 nt, Human
ugcagcaggaucuagaggggg

SEQ ID NO: 2804612 - RNA, 13 nt, Human
ugcagcaggagug

SEQ ID NO: 2804613 - RNA, 14 nt, Human
ugcagcaggagugg

SEQ ID NO: 2804614 - RNA, 20 nt, Human
ugcagcaggaguggugcaga

SEQ ID NO: 2804615 - RNA, 22 nt, Human
ugcagcaggaguggugcagaca

SEQ ID NO: 2804616 - RNA, 23 nt, Human
ugcagcaggaguggugcagacag

SEQ ID NO: 2804617 - RNA, 16 nt, Human
ugcagcauggucccug

SEQ ID NO: 2804618 - RNA, 18 nt, Human
ugcagcauggucccugcc

SEQ ID NO: 2804619 - RNA, 19 nt, Human
ugcagcauggucccugccu

SEQ ID NO: 2804620 - RNA, 21 nt, Human
ugcagaggaaguacaaacuaa

SEQ ID NO: 2804621 - RNA, 19 nt, Human
ugcaggauuuguucucugu

SEQ ID NO: 2804622 - RNA, 22 nt, Human
ugcagugguaugaucacggcuc

SEQ ID NO: 2804623 - RNA, 17 nt, Human
ugcaguggcucacgccu

SEQ ID NO: 2804624 - RNA, 13 nt, Human
ugcagugggguuu

SEQ ID NO: 2804625 - RNA, 21 nt, Human
ugcagugggguuucgcagccu

SEQ ID NO: 2804626 - RNA, 23 nt, Human
ugcagugggguuucgcagccuga

SEQ ID NO: 2804627 - RNA, 22 nt, Human
ugcaguggccccuuaggccagu

SEQ ID NO: 2804628 - RNA, 13 nt, Human
ugcaguucuugag

SEQ ID NO: 2804629 - RNA, 16 nt, Human
ugcaguucuugaguug

SEQ ID NO: 2804630 - RNA, 17 nt, Human
ugcaguucuugaguugc

SEQ ID NO: 2804631 - RNA, 23 nt, Human
ugcaguggugcgaucucggcuca

SEQ ID NO: 2804632 - RNA, 20 nt, Human
ugccauccagguucagcuug

SEQ ID NO: 2804633 - RNA, 21 nt, Human
ugccauccagguucagcuugu

SEQ ID NO: 2804634 - RNA, 13 nt, Human
ugcccaccugccu

SEQ ID NO: 2804635 - RNA, 15 nt, Human
ugcccaccugccugg

SEQ ID NO: 2804636 - RNA, 16 nt, Human
ugcccaccugccuggc

SEQ ID NO: 2804637 - RNA, 17 nt, Human
ugcccaccugccuggcc

SEQ ID NO: 2804638 - RNA, 19 nt, Human
ugcccaccugccuggccgg

SEQ ID NO: 2804639 - RNA, 20 nt, Human
ugcccaccugccuggccggc

SEQ ID NO: 2804640 - RNA, 21 nt, Human
ugcccaccugccuggccggcc

SEQ ID NO: 2804641 - RNA, 22 nt, Human
ugcccaccugccuggccggcca

SEQ ID NO: 2804642 - RNA, 23 nt, Human
ugcccaccugccuggccggccag

SEQ ID NO: 2804643 - RNA, 19 nt, Human
ugcccaccugcccaucaca

SEQ ID NO: 2804644 - RNA, 17 nt, Human
ugcccaccugcccauca

SEQ ID NO: 2804645 - RNA, 15 nt, Human
ugcccaccugcccau

SEQ ID NO: 2804646 - RNA, 14 nt, Human
ugcccaccugccca

SEQ ID NO: 2804647 - RNA, 18 nt, Human
ugcccacccugggagaca

SEQ ID NO: 2804648 - RNA, 22 nt, Human
ugcccacccugggagacagacc

SEQ ID NO: 2804649 - RNA, 22 nt, Human
ugcccaccucagccucccaaag

SEQ ID NO: 2804650 - RNA, 11 nt, Human
ugcccaccugc

SEQ ID NO: 2804651 - RNA, 12 nt, Human
ugcccaccugcc

SEQ ID NO: 2804652 - RNA, 14 nt, Human
ugcccaggcuccau

SEQ ID NO: 2804653 - RNA, 13 nt, Human
ugcccaggcuggc

SEQ ID NO: 2804654 - RNA, 18 nt, Human
ugcccaggcuggagugca

SEQ ID NO: 2804655 - RNA, 20 nt, Human
ugcccaggcuggagugcaau

SEQ ID NO: 2804656 - RNA, 13 nt, Human
ugcccaggcugga

SEQ ID NO: 2804657 - RNA, 11 nt, Human
ugcccaggcug

SEQ ID NO: 2804658 - RNA, 14 nt, Human
ugcccagucuuuca

SEQ ID NO: 2804659 - RNA, 17 nt, Human
ugcccagucuuucaugu

SEQ ID NO: 2804660 - RNA, 20 nt, Human
ugcccagguuucuggucucu

SEQ ID NO: 2804661 - RNA, 22 nt, Human
ugcccaugauggucacuuaaaa

SEQ ID NO: 2804662 - RNA, 23 nt, Human
ugcccaucacaggguugggccca

SEQ ID NO: 2804663 - RNA, 20 nt, Human
ugcccaucacaggguugggc

SEQ ID NO: 2804664 - RNA, 16 nt, Human
ugcccaugggagcugg

SEQ ID NO: 2804665 - RNA, 19 nt, Human
ugccccagcucuggcuucc

SEQ ID NO: 2804666 - RNA, 15 nt, Human
ugccccagggcuccc

SEQ ID NO: 2804667 - RNA, 20 nt, Human
ugccccagucguuagaauau

SEQ ID NO: 2804668 - RNA, 23 nt, Human
ugccccucccccaacccccaccc

SEQ ID NO: 2804669 - RNA, 22 nt, Human
ugccccucccccaacccccacc

SEQ ID NO: 2804670 - RNA, 21 nt, Human
ugccccucccccaacccccac

SEQ ID NO: 2804671 - RNA, 17 nt, Human
ugccccucccccaaccc

SEQ ID NO: 2804672 - RNA, 12 nt, Human
ugccccuccccc

SEQ ID NO: 2804673 - RNA, 19 nt, Human
ugccacccuggggagaaag

SEQ ID NO: 2804674 - RNA, 22 nt, Human
ugccacuacggaauaguuggcu

SEQ ID NO: 2804675 - RNA, 18 nt, Human
ugccacuaauuuuaguau

SEQ ID NO: 2804676 - RNA, 14 nt, Human
ugccacccuagcca

SEQ ID NO: 2804677 - RNA, 23 nt, Human
ugccaccagagaccguccucacc

SEQ ID NO: 2804678 - RNA, 18 nt, Human
ugccaccauggccagcca

SEQ ID NO: 2804679 - RNA, 22 nt, Human
ugccagguuuuuggucugaccc

SEQ ID NO: 2804680 - RNA, 19 nt, Human
ugccagguuuuuggucuga

SEQ ID NO: 2804681 - RNA, 18 nt, Human
ugccagguuuuuggucug

SEQ ID NO: 2804682 - RNA, 20 nt, Human
ugccaggaucaagcaugaaa

SEQ ID NO: 2804683 - RNA, 15 nt, Human
ugcauaugaaauccu

SEQ ID NO: 2804684 - RNA, 17 nt, Human
ugcauauguugaauacu

SEQ ID NO: 2804685 - RNA, 15 nt, Human
ugcauauguugaaua

SEQ ID NO: 2804686 - RNA, 19 nt, Human
ugcauaugucacuagaaug

SEQ ID NO: 2804687 - RNA, 21 nt, Human
ugcauaugucacuagaaugga

SEQ ID NO: 2804688 - RNA, 13 nt, Human
ugcauauguugaa

SEQ ID NO: 2804689 - RNA, 15 nt, Human
ugcauauuuauccaa

SEQ ID NO: 2804690 - RNA, 22 nt, Human
ugcauauuuauccaaaaugugu

SEQ ID NO: 2804691 - RNA, 22 nt, Human
ugccaccaggagaaccacuaca

SEQ ID NO: 2804692 - RNA, 17 nt, Human
ugccaccaggagaacca

SEQ ID NO: 2804693 - RNA, 14 nt, Human
ugccaccaggagaa

SEQ ID NO: 2804694 - RNA, 13 nt, Human
ugccaccaggaga

SEQ ID NO: 2804695 - RNA, 12 nt, Human
ugccaccaggag

SEQ ID NO: 2804696 - RNA, 18 nt, Human
ugccaccagagaccgucc

SEQ ID NO: 2804697 - RNA, 19 nt, Human
ugccaccagagaccguccu

SEQ ID NO: 2804698 - RNA, 21 nt, Human
ugccaccagagaccguccuca

SEQ ID NO: 2804699 - RNA, 22 nt, Human
ugccaccagagaccguccucac

SEQ ID NO: 2804700 - RNA, 22 nt, Human
ugggagcugccuguucagcucc

SEQ ID NO: 2804701 - RNA, 21 nt, Human
ugggagcugccuguucagcuc

SEQ ID NO: 2804702 - RNA, 17 nt, Human
ugggagcugccuguuca

SEQ ID NO: 2804703 - RNA, 15 nt, Human
ugggagugagcuggu

SEQ ID NO: 2804704 - RNA, 12 nt, Human
ugggaguccagg

SEQ ID NO: 2804705 - RNA, 14 nt, Human
ugggaguccaggca

SEQ ID NO: 2804706 - RNA, 17 nt, Human
ugggaguccaggcacag

SEQ ID NO: 2804707 - RNA, 18 nt, Human
ugggaguccaggcacagg

SEQ ID NO: 2804708 - RNA, 19 nt, Human
ugggaguccaggcacagga

SEQ ID NO: 2804709 - RNA, 16 nt, Human
ugggauuacaggugug

SEQ ID NO: 2804710 - RNA, 18 nt, Human
ugggauuacaggcuccug

SEQ ID NO: 2804711 - RNA, 21 nt, Human
ugggauuacagggaugagcca

SEQ ID NO: 2804712 - RNA, 17 nt, Human
ugggauuacagguguga

SEQ ID NO: 2804713 - RNA, 14 nt, Human
ugggauucagagaa

SEQ ID NO: 2804714 - RNA, 18 nt, Human
ugggagagugucaaccag

SEQ ID NO: 2804715 - RNA, 21 nt, Human
ugggagagugucaaccagaca

SEQ ID NO: 2804716 - RNA, 22 nt, Human
ugggagagugucaaccagacag

SEQ ID NO: 2804717 - RNA, 23 nt, Human
ugggagagugucaaccagacaga

SEQ ID NO: 2804718 - RNA, 14 nt, Human
ugggagcugccugu

SEQ ID NO: 2804719 - RNA, 13 nt, Human
ugggagcugccug

SEQ ID NO: 2804720 - RNA, 12 nt, Human
ugggagcugccu

SEQ ID NO: 2804721 - RNA, 14 nt, Human
ugggagauguuaga

SEQ ID NO: 2804722 - RNA, 16 nt, Human
ugggacaauuguuuua

SEQ ID NO: 2804723 - RNA, 17 nt, Human
ugggacaauuguuuuaa

SEQ ID NO: 2804724 - RNA, 20 nt, Human
ugggacacaaaacuccgccc

SEQ ID NO: 2804725 - RNA, 14 nt, Human
uggcuuuucuguuu

SEQ ID NO: 2804726 - RNA, 16 nt, Human
uggcuuuucuguuucc

SEQ ID NO: 2804727 - RNA, 18 nt, Human
uggcuuuucuguuuccug

SEQ ID NO: 2804728 - RNA, 19 nt, Human
uggcuuuucuguuuccugu

SEQ ID NO: 2804729 - RNA, 24 nt, Human
ugggaccuccaccguugguguuca

SEQ ID NO: 2804730 - RNA, 19 nt, Human
ugggaccuaggggcgccgc

SEQ ID NO: 2804731 - RNA, 17 nt, Human
uggcuuucauuauuagu

SEQ ID NO: 2804732 - RNA, 17 nt, Human
uggcuuuccuuguggca

SEQ ID NO: 2804733 - RNA, 19 nt, Human
uggcuuuccuuguggcaga

SEQ ID NO: 2804734 - RNA, 20 nt, Human
uggcuuuccuuguggcagag

SEQ ID NO: 2804735 - RNA, 21 nt, Human
uggcuuuccuuguggcagagg

SEQ ID NO: 2804736 - RNA, 20 nt, Human
uggcuuucucccacugaguu

SEQ ID NO: 2804737 - RNA, 17 nt, Human
uggcuuuauuuguuuuu

SEQ ID NO: 2804738 - RNA, 15 nt, Human
uggcuuucagaaaac

SEQ ID NO: 2804739 - RNA, 13 nt, Human
uggcuuccuccug

SEQ ID NO: 2804740 - RNA, 14 nt, Human
uggcuuccuccuga

SEQ ID NO: 2804741 - RNA, 11 nt, Human
uggcuuccucc

SEQ ID NO: 2804742 - RNA, 22 nt, Human
uggcuuccuaaaauucagugga

SEQ ID NO: 2804743 - RNA, 22 nt, Human
uggcuucugugaugagcugauc

SEQ ID NO: 2804744 - RNA, 21 nt, Human
uggcuucugugaugagcugau

SEQ ID NO: 2804745 - RNA, 17 nt, Human
uggcuucugugaugagc

SEQ ID NO: 2804746 - RNA, 14 nt, Human
uggcuucugugaug

SEQ ID NO: 2804747 - RNA, 13 nt, Human
uggcuucugugau

SEQ ID NO: 2804748 - RNA, 19 nt, Human
uggcuucuuuucuuuguau

SEQ ID NO: 2804749 - RNA, 22 nt, Human
uggcuucuuuucuuuguaucau

SEQ ID NO: 2804750 - RNA, 19 nt, Human
uggcuugacucaggauuua

SEQ ID NO: 2804751 - RNA, 15 nt, Human
uggcuugagaaauau

SEQ ID NO: 2804752 - RNA, 14 nt, Human
uggcuucuccaggg

SEQ ID NO: 2804753 - RNA, 14 nt, Human
uggcuucuggagcc

SEQ ID NO: 2804754 - RNA, 21 nt, Human
uggcugggggccucagugcca

SEQ ID NO: 2804755 - RNA, 13 nt, Human
uggcuggaagggg

SEQ ID NO: 2804756 - RNA, 18 nt, Human
uggcuggaagggguccag

SEQ ID NO: 2804757 - RNA, 22 nt, Human
uggcugguaacaguucauguuu

SEQ ID NO: 2804758 - RNA, 19 nt, Human
uggcuggaugaaauuuucu

SEQ ID NO: 2804759 - RNA, 16 nt, Human
uggcugggguggccug

SEQ ID NO: 2804760 - RNA, 18 nt, Human
uggcugggguggccugug

SEQ ID NO: 2804761 - RNA, 19 nt, Human
uggcugggguggccugugu

SEQ ID NO: 2804762 - RNA, 20 nt, Human
uggcugggguggccugugug

SEQ ID NO: 2804763 - RNA, 21 nt, Human
uggcugggguggccugugugg

SEQ ID NO: 2804764 - RNA, 22 nt, Human
uggcugggguggccuguguggc

SEQ ID NO: 2804765 - RNA, 19 nt, Human
uggcucugcuguccccuug

SEQ ID NO: 2804766 - RNA, 15 nt, Human
uggcucuggacucua

SEQ ID NO: 2804767 - RNA, 14 nt, Human
uggcucugcaaugg

SEQ ID NO: 2804768 - RNA, 22 nt, Human
uggcucugaggugccuguccca

SEQ ID NO: 2804769 - RNA, 23 nt, Human
uggcucugcaaugggcacuggga

SEQ ID NO: 2804770 - RNA, 13 nt, Human
uggcucuggagac

SEQ ID NO: 2804771 - RNA, 17 nt, Human
uggccagauggcccgga

SEQ ID NO: 2804772 - RNA, 20 nt, Human
uggcucugaggugccugucc

SEQ ID NO: 2804773 - RNA, 21 nt, Human
uggcucugaggugccuguccc

SEQ ID NO: 2804774 - RNA, 17 nt, Human
uggcucucccauuuccu

SEQ ID NO: 2804775 - RNA, 16 nt, Human
ugguauuccugccucc

SEQ ID NO: 2804776 - RNA, 19 nt, Human
ugguauucaggauuacaug

SEQ ID NO: 2804777 - RNA, 18 nt, Human
ugguauuacacuguauuu

SEQ ID NO: 2804778 - RNA, 20 nt, Human
ugguauuacacuguauuugu

SEQ ID NO: 2804779 - RNA, 18 nt, Human
ugguaugaucacggcuca

SEQ ID NO: 2804780 - RNA, 16 nt, Human
uggguuuuaugagaug

SEQ ID NO: 2804781 - RNA, 15 nt, Human
ugguauaaguaacuu

SEQ ID NO: 2804782 - RNA, 19 nt, Human
ugguauaaguaacuuuauu

SEQ ID NO: 2804783 - RNA, 14 nt, Human
uggguuaguggaug

SEQ ID NO: 2804784 - RNA, 14 nt, Human
ugggugugugacuc

SEQ ID NO: 2804785 - RNA, 22 nt, Human
uggguuaggcauuaauguuucu

SEQ ID NO: 2804786 - RNA, 16 nt, Human
uggguucuauguuuac

SEQ ID NO: 2804787 - RNA, 17 nt, Human
uggguucuauguuuacu

SEQ ID NO: 2804788 - RNA, 18 nt, Human
uggguguguguagccaag

SEQ ID NO: 2804789 - RNA, 14 nt, Human
uggguguagccagg

SEQ ID NO: 2804790 - RNA, 23 nt, Human
uggguuacaguaugcuugcucua

SEQ ID NO: 2804791 - RNA, 15 nt, Human
ugggggugagggucc

SEQ ID NO: 2804792 - RNA, 14 nt, Human
ugggguuguguugu

SEQ ID NO: 2804793 - RNA, 15 nt, Human
ugggguuucgcagcc

SEQ ID NO: 2804794 - RNA, 18 nt, Human
ugggguuucgcagccuga

SEQ ID NO: 2804795 - RNA, 14 nt, Human
uggguaaaauuaga

SEQ ID NO: 2804796 - RNA, 15 nt, Human
uggguaaaauuagau

SEQ ID NO: 2804797 - RNA, 19 nt, Human
uggguaaaauuagaugcau

SEQ ID NO: 2804798 - RNA, 24 nt, Human
uggguaaaauuagaugcauguuga

SEQ ID NO: 2804799 - RNA, 15 nt, Human
uggguaaaugcaaag

SEQ ID NO: 2804800 - RNA, 18 nt, Human
uggguaaaugcaaaguuc

SEQ ID NO: 2804801 - RNA, 20 nt, Human
uggguaaaugcaaaguucug

SEQ ID NO: 2804802 - RNA, 15 nt, Human
uggguaaaugcagcg

SEQ ID NO: 2804803 - RNA, 16 nt, Human
ugggugggguauuuuu

SEQ ID NO: 2804804 - RNA, 13 nt, Human
ugggugguacccu

SEQ ID NO: 2804805 - RNA, 14 nt, Human
ugggugguacccuc

SEQ ID NO: 2804806 - RNA, 18 nt, Human
ugggugguacccucugga

SEQ ID NO: 2804807 - RNA, 22 nt, Human
ugggugguacccucuggagggg

SEQ ID NO: 2804808 - RNA, 20 nt, Human
uggggaaagggguuggggug

SEQ ID NO: 2804809 - RNA, 11 nt, Human
uggggaaaggg

SEQ ID NO: 2804810 - RNA, 18 nt, Human
uggggaacauuucuguaa

SEQ ID NO: 2804811 - RNA, 23 nt, Human
uggggaacauuucuguaaauacc

SEQ ID NO: 2804812 - RNA, 14 nt, Human
uggggaugugggag

SEQ ID NO: 2804813 - RNA, 15 nt, Human
uggggaugugggagg

SEQ ID NO: 2804814 - RNA, 16 nt, Human
uggggaugugggaggg

SEQ ID NO: 2804815 - RNA, 14 nt, Human
ugggggcuggccuc

SEQ ID NO: 2804816 - RNA, 22 nt, Human
ugggcuaagugauccucccacc

SEQ ID NO: 2804817 - RNA, 20 nt, Human
ugggcgugagaccugccccu

SEQ ID NO: 2804818 - RNA, 17 nt, Human
ugggcuggugucaccug

SEQ ID NO: 2804819 - RNA, 16 nt, Human
ugggcuaguugggcuu

SEQ ID NO: 2804820 - RNA, 17 nt, Human
ugggcuaauuaaauaaa

SEQ ID NO: 2804821 - RNA, 20 nt, Human
ugggcguuaggggcaggcag

SEQ ID NO: 2804822 - RNA, 15 nt, Human
ugggcuucaguggca

SEQ ID NO: 2804823 - RNA, 16 nt, Human
ugggcuucacuguaua

SEQ ID NO: 2804824 - RNA, 17 nt, Human
ugggcuucacuguauaa

SEQ ID NO: 2804825 - RNA, 23 nt, Human
ugggcuucacuguauaaauagga

SEQ ID NO: 2804826 - RNA, 11 nt, Human
ugggcuucagc

SEQ ID NO: 2804827 - RNA, 13 nt, Human
ugggcuucagccu

SEQ ID NO: 2804828 - RNA, 19 nt, Human
ugggcuucagccuaguggc

SEQ ID NO: 2804829 - RNA, 22 nt, Human
ugggcuucagccuaguggcuug

SEQ ID NO: 2804830 - RNA, 14 nt, Human
ugggcuuaagaaau

SEQ ID NO: 2804831 - RNA, 14 nt, Human
ugggcuuagagcag

SEQ ID NO: 2804832 - RNA, 22 nt, Human
ugggcugguauugguggcuuuc

SEQ ID NO: 2804833 - RNA, 23 nt, Human
ugggcuagguagaaaaaggguca

SEQ ID NO: 2804834 - RNA, 13 nt, Human
ugggcuauggaca

SEQ ID NO: 2804835 - RNA, 17 nt, Human
ugggcuucaguggcagc

SEQ ID NO: 2804836 - RNA, 18 nt, Human
ugggcuucacuguauaaa

SEQ ID NO: 2804837 - RNA, 13 nt, Human
ugggcuucagggc

SEQ ID NO: 2804838 - RNA, 15 nt, Human
ugggcuucagggcag

SEQ ID NO: 2804839 - RNA, 18 nt, Human
ugggcuucagggcaggug

SEQ ID NO: 2804840 - RNA, 22 nt, Human
uggggaaagacacugccugggc

SEQ ID NO: 2804841 - RNA, 21 nt, Human
uggggaaagacacugccuggg

SEQ ID NO: 2804842 - RNA, 20 nt, Human
uggggaaagacacugccugg

SEQ ID NO: 2804843 - RNA, 19 nt, Human
uggggaaagacacugccug

SEQ ID NO: 2804844 - RNA, 18 nt, Human
uggggaaagacacugccu

SEQ ID NO: 2804845 - RNA, 14 nt, Human
uggggaaaccuaga

SEQ ID NO: 2804846 - RNA, 17 nt, Human
uggggaaaaaaaucauc

SEQ ID NO: 2804847 - RNA, 16 nt, Human
ugggcuuugauuucca

SEQ ID NO: 2804848 - RNA, 22 nt, Human
uggaggagcagugcaggcacag

SEQ ID NO: 2804849 - RNA, 20 nt, Human
uggaggagcagugcaggcac

SEQ ID NO: 2804850 - RNA, 21 nt, Human
uggaggagcagugcaggcaca

SEQ ID NO: 2804851 - RNA, 18 nt, Human
uggaggagcaaaggcuga

SEQ ID NO: 2804852 - RNA, 20 nt, Human
uggaggagcaaaggcugaga

SEQ ID NO: 2804853 - RNA, 21 nt, Human
uggaggagcaaaggcugagaa

SEQ ID NO: 2804854 - RNA, 13 nt, Human
uggaggagcagug

SEQ ID NO: 2804855 - RNA, 11 nt, Human
uggaggagcaa

SEQ ID NO: 2804856 - RNA, 14 nt, Human
uggaggagcaaagg

SEQ ID NO: 2804857 - RNA, 16 nt, Human
uggaggagcaaaggcu

SEQ ID NO: 2804858 - RNA, 19 nt, Human
uggaggaacaacucuccag

SEQ ID NO: 2804859 - RNA, 13 nt, Human
uggacucugcaca

SEQ ID NO: 2804860 - RNA, 14 nt, Human
uggaggaaagcaac

SEQ ID NO: 2804861 - RNA, 15 nt, Human
uggacuccucugucc

SEQ ID NO: 2804862 - RNA, 14 nt, Human
uggacuccucuguc

SEQ ID NO: 2804863 - RNA, 15 nt, Human
uggacuccugcacac

SEQ ID NO: 2804864 - RNA, 16 nt, Human
uggacucuaaagacca

SEQ ID NO: 2804865 - RNA, 17 nt, Human
uggacucuaaagaccaa

SEQ ID NO: 2804866 - RNA, 18 nt, Human
uggacucuaaagaccaaa

SEQ ID NO: 2804867 - RNA, 21 nt, Human
uggacucuaaagaccaaacuu

SEQ ID NO: 2804868 - RNA, 14 nt, Human
uggauuucuuuugu

SEQ ID NO: 2804869 - RNA, 14 nt, Human
uggauccaauguua

SEQ ID NO: 2804870 - RNA, 18 nt, Human
uggauccaauguuagaga

SEQ ID NO: 2804871 - RNA, 22 nt, Human
uggauccaauguuagagacuuu

SEQ ID NO: 2804872 - RNA, 23 nt, Human
uggauccaauguuagagacuuuu

SEQ ID NO: 2804873 - RNA, 17 nt, Human
uggauccccucugucua

SEQ ID NO: 2804874 - RNA, 20 nt, Human
uggauccccucugucuacaa

SEQ ID NO: 2804875 - RNA, 23 nt, Human
uggauccccucugucuacaaaua

SEQ ID NO: 2804876 - RNA, 18 nt, Human
uggaucccgaagaaugga

SEQ ID NO: 2804877 - RNA, 16 nt, Human
uggaucagaugaacuc

SEQ ID NO: 2804878 - RNA, 19 nt, Human
uggaucacgacgcugcaga

SEQ ID NO: 2804879 - RNA, 20 nt, Human
uggaucacgacgcugcagag

SEQ ID NO: 2804880 - RNA, 15 nt, Human
uggauuuguuuaaaa

SEQ ID NO: 2804881 - RNA, 16 nt, Human
uggauuuguuuaaaag

SEQ ID NO: 2804882 - RNA, 17 nt, Human
uggauuuguuuaaaagg

SEQ ID NO: 2804883 - RNA, 15 nt, Human
uggauuuuuaauuaa

SEQ ID NO: 2804884 - RNA, 16 nt, Human
uggauuuuuaauuaaa

SEQ ID NO: 2804885 - RNA, 17 nt, Human
uggauuuuuaauuaaaa

SEQ ID NO: 2804886 - RNA, 19 nt, Human
uggauuuuuaauuaaaaac

SEQ ID NO: 2804887 - RNA, 14 nt, Human
uggauuugacauug

SEQ ID NO: 2804888 - RNA, 13 nt, Human
uggauuugaugcu

SEQ ID NO: 2804889 - RNA, 13 nt, Human
uggauuugacauu

SEQ ID NO: 2804890 - RNA, 16 nt, Human
uggauuucuuuuguaa

SEQ ID NO: 2804891 - RNA, 12 nt, Human
uggcaaauauaa

SEQ ID NO: 2804892 - RNA, 14 nt, Human
uggcaaauauaaaa

SEQ ID NO: 2804893 - RNA, 12 nt, Human
uggcaacagaag

SEQ ID NO: 2804894 - RNA, 13 nt, Human
uggcaacagaagc

SEQ ID NO: 2804895 - RNA, 15 nt, Human
uggcaacagaagcag

SEQ ID NO: 2804896 - RNA, 23 nt, Human
uggccaggcagaucugugcccca

SEQ ID NO: 2804897 - RNA, 14 nt, Human
uggccaggagcucu

SEQ ID NO: 2804898 - RNA, 16 nt, Human
uggccaggagcucuuc

SEQ ID NO: 2804899 - RNA, 15 nt, Human
uggccaggagcucuu

SEQ ID NO: 2804900 - RNA, 22 nt, Human
uggccaggagcucuucaggccu

SEQ ID NO: 2804901 - RNA, 20 nt, Human
uggccaggagcucuucaggc

SEQ ID NO: 2804902 - RNA, 23 nt, Human
uggccaggagcucuucaggccuc

SEQ ID NO: 2804903 - RNA, 20 nt, Human
uggccaggcagaucugugcc

SEQ ID NO: 2804904 - RNA, 19 nt, Human
uggccaggcagaucugugc

SEQ ID NO: 2804905 - RNA, 17 nt, Human
uggccaggcagaucugu

SEQ ID NO: 2804906 - RNA, 16 nt, Human
uggccaggcagaucug

SEQ ID NO: 2804907 - RNA, 12 nt, Human
uggccaggcaga

SEQ ID NO: 2804908 - RNA, 21 nt, Human
uggccagaugcaccagcccuu

SEQ ID NO: 2804909 - RNA, 20 nt, Human
uggccagaugcaccagcccu

SEQ ID NO: 2804910 - RNA, 21 nt, Human
uggccagccaacuuuugcaug

SEQ ID NO: 2804911 - RNA, 15 nt, Human
uggccacucagcuuc

SEQ ID NO: 2804912 - RNA, 22 nt, Human
uggccacucagcuuccuaccca

SEQ ID NO: 2804913 - RNA, 21 nt, Human
uggcagugagugagccuggcu

SEQ ID NO: 2804914 - RNA, 12 nt, Human
uggcaguggagg

SEQ ID NO: 2804915 - RNA, 17 nt, Human
uggccacuccagacccc

SEQ ID NO: 2804916 - RNA, 12 nt, Human
uggccacucagc

SEQ ID NO: 2804917 - RNA, 13 nt, Human
uggccacucagcu

SEQ ID NO: 2804918 - RNA, 13 nt, Human
uggcagcugcuuu

SEQ ID NO: 2804919 - RNA, 20 nt, Human
uggcacgguggcucaggccu

SEQ ID NO: 2804920 - RNA, 19 nt, Human
uggcacgguggcucaggcc

SEQ ID NO: 2804921 - RNA, 19 nt, Human
uggcaggaguuggaagugu

SEQ ID NO: 2804922 - RNA, 21 nt, Human
uggcacccggccccugcuggu

SEQ ID NO: 2804923 - RNA, 21 nt, Human
uggcaacaguuagcuggagcu

SEQ ID NO: 2804924 - RNA, 12 nt, Human
uggcaccuccua

SEQ ID NO: 2804925 - RNA, 19 nt, Human
uggauuucugguucugaug

SEQ ID NO: 2804926 - RNA, 19 nt, Human
uggcagguuggguaacccu

SEQ ID NO: 2804927 - RNA, 20 nt, Human
uggccaccucucuccuuugc

SEQ ID NO: 2804928 - RNA, 14 nt, Human
uggcagugagugag

SEQ ID NO: 2804929 - RNA, 17 nt, Human
uggcagugagugagccu

SEQ ID NO: 2804930 - RNA, 18 nt, Human
uggcagugagugagccug

SEQ ID NO: 2804931 - RNA, 19 nt, Human
uggcagugagugagccugg

SEQ ID NO: 2804932 - RNA, 23 nt, Human
uggcagugagugagccuggcucu

SEQ ID NO: 2804933 - RNA, 14 nt, Human
uggcagugaugaau

SEQ ID NO: 2804934 - RNA, 21 nt, Human
uggcagggcuggccccagggc

SEQ ID NO: 2804935 - RNA, 23 nt, Human
uggcagggcuggccccagggcac

SEQ ID NO: 2804936 - RNA, 22 nt, Human
uggcaggaugacccugcgaagg

SEQ ID NO: 2804937 - RNA, 18 nt, Human
uggcaggauggccuggcc

SEQ ID NO: 2804938 - RNA, 21 nt, Human
uggaaccacggagaucuccuu

SEQ ID NO: 2804939 - RNA, 22 nt, Human
uggaacauccuuugcagggcag

SEQ ID NO: 2804940 - RNA, 23 nt, Human
uggaacauccuuugcagggcagc

SEQ ID NO: 2804941 - RNA, 20 nt, Human
uggaacauaaaaaggacauc

SEQ ID NO: 2804942 - RNA, 21 nt, Human
uggaacaucaucaaggcacug

SEQ ID NO: 2804943 - RNA, 23 nt, Human
uggaacaucaucaaggcacugcc

SEQ ID NO: 2804944 - RNA, 21 nt, Human
uggaaagcaucaccucaggcc

SEQ ID NO: 2804945 - RNA, 20 nt, Human
uggaaagcaucaccucaggc

SEQ ID NO: 2804946 - RNA, 19 nt, Human
uggaaagcaucaccucagg

SEQ ID NO: 2804947 - RNA, 16 nt, Human
uggaaagcaucaccuc

SEQ ID NO: 2804948 - RNA, 23 nt, Human
uggaaagacagcuucucauccug

SEQ ID NO: 2804949 - RNA, 16 nt, Human
uggaaagaaucuaaua

SEQ ID NO: 2804950 - RNA, 22 nt, Human
uggaaacagcucgacuuuaaaa

SEQ ID NO: 2804951 - RNA, 19 nt, Human
uggaaagacagcuucucau

SEQ ID NO: 2804952 - RNA, 14 nt, Human
uggaaaaauguuug

SEQ ID NO: 2804953 - RNA, 15 nt, Human
uggaaaaauguuugu

SEQ ID NO: 2804954 - RNA, 16 nt, Human
uggaaaaauuccagaa

SEQ ID NO: 2804955 - RNA, 17 nt, Human
uggaaacagcucgacuu

SEQ ID NO: 2804956 - RNA, 19 nt, Human
ugcuuugaagcaguugugu

SEQ ID NO: 2804957 - RNA, 22 nt, Human
ugcuuugaagcaguugugucag

SEQ ID NO: 2804958 - RNA, 15 nt, Human
ugcuuugaagcaguu

SEQ ID NO: 2804959 - RNA, 14 nt, Human
ugcuuugaagcagu

SEQ ID NO: 2804960 - RNA, 13 nt, Human
uggaaaaaucaca

SEQ ID NO: 2804961 - RNA, 23 nt, Human
uggaaaaaucacaauuuuuaaug

SEQ ID NO: 2804962 - RNA, 19 nt, Human
ugcuuucugauguugccuu

SEQ ID NO: 2804963 - RNA, 17 nt, Human
ugcuuuaccaaacagca

SEQ ID NO: 2804964 - RNA, 18 nt, Human
ugcuuuaccaaacagcaa

SEQ ID NO: 2804965 - RNA, 19 nt, Human
ugcuuuaccaaacagcaaa

SEQ ID NO: 2804966 - RNA, 22 nt, Human
ugcuuuaccaaacagcaaacca

SEQ ID NO: 2804967 - RNA, 20 nt, Human
ugcuuucuuuuuuaaaauca

SEQ ID NO: 2804968 - RNA, 22 nt, Human
ugcuuugaaaaaguuaaugcuu

SEQ ID NO: 2804969 - RNA, 13 nt, Human
ugcuggagacucc

SEQ ID NO: 2804970 - RNA, 20 nt, Human
ugcuggacggggacugggga

SEQ ID NO: 2804971 - RNA, 13 nt, Human
ugcuggagaagag

SEQ ID NO: 2804972 - RNA, 18 nt, Human
ugcuggagaagagaggag

SEQ ID NO: 2804973 - RNA, 22 nt, Human
ugcuggagaagagaggagagga

SEQ ID NO: 2804974 - RNA, 20 nt, Human
ugcuggacggcauuccugcu

SEQ ID NO: 2804975 - RNA, 19 nt, Human
ugcuggacggcauuccugc

SEQ ID NO: 2804976 - RNA, 19 nt, Human
ugcuggacugucauagaaa

SEQ ID NO: 2804977 - RNA, 15 nt, Human
ugcuggacugucaua

SEQ ID NO: 2804978 - RNA, 14 nt, Human
ugcuggacugucau

SEQ ID NO: 2804979 - RNA, 21 nt, Human
ugcuggacggggacuggggau

SEQ ID NO: 2804980 - RNA, 16 nt, Human
ugcuggacgucuuucu

SEQ ID NO: 2804981 - RNA, 15 nt, Human
ugcuuuaaaguguaa

SEQ ID NO: 2804982 - RNA, 17 nt, Human
ugcuuuaaaguguaaua

SEQ ID NO: 2804983 - RNA, 23 nt, Human
ugcuuuaaaguguaauaauauga

SEQ ID NO: 2804984 - RNA, 12 nt, Human
ugcuggagccug

SEQ ID NO: 2804985 - RNA, 13 nt, Human
uggaauauaaaga

SEQ ID NO: 2804986 - RNA, 14 nt, Human
uggaacuaauaaau

SEQ ID NO: 2804987 - RNA, 17 nt, Human
uggaacuaauaaauaca

SEQ ID NO: 2804988 - RNA, 15 nt, Human
uggaacucuaucugg

SEQ ID NO: 2804989 - RNA, 20 nt, Human
uggaacucuaucugggccug

SEQ ID NO: 2804990 - RNA, 23 nt, Human
uggaacucagcugucuguggcuu

SEQ ID NO: 2804991 - RNA, 17 nt, Human
uggaacgcuaaugaaac

SEQ ID NO: 2804992 - RNA, 18 nt, Human
uggaacgcuaaugaaaca

SEQ ID NO: 2804993 - RNA, 20 nt, Human
uggaacggugaaggugacag

SEQ ID NO: 2804994 - RNA, 18 nt, Human
uggaauaaaaggcuugaa

SEQ ID NO: 2804995 - RNA, 15 nt, Human
uggaauaaaaggcuu

SEQ ID NO: 2804996 - RNA, 22 nt, Human
uggaauaaaaggcuugaagcug

SEQ ID NO: 2804997 - RNA, 16 nt, Human
uggaaugcuguguuaa

SEQ ID NO: 2804998 - RNA, 17 nt, Human
uggaaugaauuaaauaa

SEQ ID NO: 2804999 - RNA, 18 nt, Human
uggaaugaauuaaauaaa

SEQ ID NO: 2805000 - RNA, 17 nt, Human
uggaaugagugugcaug

SEQ ID NO: 2805001 - RNA, 18 nt, Human
uggaaugagugugcaugg

SEQ ID NO: 2805002 - RNA, 19 nt, Human
uggaaugagugugcaugga

SEQ ID NO: 2805003 - RNA, 21 nt, Human
uggaaugagugugcauggagg

SEQ ID NO: 2805004 - RNA, 15 nt, Human
uggaauggacauccu

SEQ ID NO: 2805005 - RNA, 17 nt, Human
uggaaugggcagcucau

SEQ ID NO: 2805006 - RNA, 22 nt, Human
uggaaugguacaugucuuccau

SEQ ID NO: 2805007 - RNA, 14 nt, Human
uggacacuuuucac

SEQ ID NO: 2805008 - RNA, 16 nt, Human
uggacacuuuucaccu

SEQ ID NO: 2805009 - RNA, 23 nt, Human
uggacacuuuucaccuccuucaa

SEQ ID NO: 2805010 - RNA, 16 nt, Human
uggacagacagaggau

SEQ ID NO: 2805011 - RNA, 22 nt, Human
uggacagacagaggaugagcuc

SEQ ID NO: 2805012 - RNA, 15 nt, Human
uggacagagaagggc

SEQ ID NO: 2805013 - RNA, 12 nt, Human
uggacagagggg

SEQ ID NO: 2805014 - RNA, 13 nt, Human
uggacagagggga

SEQ ID NO: 2805015 - RNA, 14 nt, Human
uggacagaggggac

SEQ ID NO: 2805016 - RNA, 18 nt, Human
uggacagaggggacucug

SEQ ID NO: 2805017 - RNA, 19 nt, Human
uggacagaggggacucugg

SEQ ID NO: 2805018 - RNA, 20 nt, Human
uggacagaggggacucuggg

SEQ ID NO: 2805019 - RNA, 18 nt, Human
uggacuauuauaauuuaa

SEQ ID NO: 2805020 - RNA, 17 nt, Human
uggacucaaucccuagg

SEQ ID NO: 2805021 - RNA, 19 nt, Human
uggacucaaucccuagggc

SEQ ID NO: 2805022 - RNA, 20 nt, Human
uggacucaccucccccaucu

SEQ ID NO: 2805023 - RNA, 18 nt, Human
uggacucaccucccccau

SEQ ID NO: 2805024 - RNA, 21 nt, Human
uggacuagagggaccucuccc

SEQ ID NO: 2805025 - RNA, 22 nt, Human
uggacauggcaggccgauuugg

SEQ ID NO: 2805026 - RNA, 19 nt, Human
ugugcgccuacaggaguga

SEQ ID NO: 2805027 - RNA, 14 nt, Human
ugugcgccuacagg

SEQ ID NO: 2805028 - RNA, 16 nt, Human
ugugccuuuuauagcu

SEQ ID NO: 2805029 - RNA, 18 nt, Human
ugugccuuuuauagcuau

SEQ ID NO: 2805030 - RNA, 14 nt, Human
ugugcuagaauacu

SEQ ID NO: 2805031 - RNA, 16 nt, Human
ugugcuagaauacuuu

SEQ ID NO: 2805032 - RNA, 18 nt, Human
ugugcuagaauacuuuuu

SEQ ID NO: 2805033 - RNA, 13 nt, Human
ugugcuauaguau

SEQ ID NO: 2805034 - RNA, 17 nt, Human
ugugcuauaguauuuga

SEQ ID NO: 2805035 - RNA, 18 nt, Human
ugugcuauaguauuugau

SEQ ID NO: 2805036 - RNA, 22 nt, Human
ugugcucagagaccugaagugu

SEQ ID NO: 2805037 - RNA, 18 nt, Human
ugugcucaggacucagaa

SEQ ID NO: 2805038 - RNA, 15 nt, Human
ugugcuauaaauccu

SEQ ID NO: 2805039 - RNA, 12 nt, Human
ugugcucagaga

SEQ ID NO: 2805040 - RNA, 13 nt, Human
ugugcuuugcucu

SEQ ID NO: 2805041 - RNA, 16 nt, Human
ugugcuuugcucuugu

SEQ ID NO: 2805042 - RNA, 17 nt, Human
ugugcuuugcucuuguc

SEQ ID NO: 2805043 - RNA, 18 nt, Human
ugugcuuugcucuugucc

SEQ ID NO: 2805044 - RNA, 16 nt, Human
uguggaacauaaaaag

SEQ ID NO: 2805045 - RNA, 14 nt, Human
ugugcuuguuuuau

SEQ ID NO: 2805046 - RNA, 19 nt, Human
ugugcuuguuuuauaaaau

SEQ ID NO: 2805047 - RNA, 14 nt, Human
ugugcuuguuaacu

SEQ ID NO: 2805048 - RNA, 14 nt, Human
ugugcacguacaca

SEQ ID NO: 2805049 - RNA, 15 nt, Human
ugugcaugugugugu

SEQ ID NO: 2805050 - RNA, 16 nt, Human
ugugccuucuuuugau

SEQ ID NO: 2805051 - RNA, 15 nt, Human
ugugccuuuuauagc

SEQ ID NO: 2805052 - RNA, 16 nt, Human
ugugccuuugcaaauc

SEQ ID NO: 2805053 - RNA, 18 nt, Human
ugugccuuugcaaaucag

SEQ ID NO: 2805054 - RNA, 20 nt, Human
ugugccuuugcaaaucagug

SEQ ID NO: 2805055 - RNA, 17 nt, Human
uguguacaauguacaca

SEQ ID NO: 2805056 - RNA, 17 nt, Human
uguguacaccucuggau

SEQ ID NO: 2805057 - RNA, 18 nt, Human
uguguacauaacucugua

SEQ ID NO: 2805058 - RNA, 20 nt, Human
uguguacauaacucuguaaa

SEQ ID NO: 2805059 - RNA, 17 nt, Human
uguguaauuguuccuuu

SEQ ID NO: 2805060 - RNA, 12 nt, Human
uguguagggcgg

SEQ ID NO: 2805061 - RNA, 17 nt, Human
uguguagcuuugcucuu

SEQ ID NO: 2805062 - RNA, 14 nt, Human
uguguagcuuugcu

SEQ ID NO: 2805063 - RNA, 15 nt, Human
uguguagccugugca

SEQ ID NO: 2805064 - RNA, 16 nt, Human
uguguagccugugcau

SEQ ID NO: 2805065 - RNA, 14 nt, Human
uguguagccugugc

SEQ ID NO: 2805066 - RNA, 23 nt, Human
uguguagccugugcauguauguc

SEQ ID NO: 2805067 - RNA, 13 nt, Human
uguguaaugaaaa

SEQ ID NO: 2805068 - RNA, 22 nt, Human
ugugggcuaguugggcuuccuc

SEQ ID NO: 2805069 - RNA, 22 nt, Human
ugugggcgugagaccugccccu

SEQ ID NO: 2805070 - RNA, 17 nt, Human
ugugggcgggcccagca

SEQ ID NO: 2805071 - RNA, 21 nt, Human
uguguaauagaaaacugaaaa

SEQ ID NO: 2805072 - RNA, 21 nt, Human
ugugggcgugagaccugcccc

SEQ ID NO: 2805073 - RNA, 20 nt, Human
ugugggcgugagaccugccc

SEQ ID NO: 2805074 - RNA, 21 nt, Human
ugugggcauuucuugcgagcc

SEQ ID NO: 2805075 - RNA, 14 nt, Human
ugugggcacuggcc

SEQ ID NO: 2805076 - RNA, 16 nt, Human
ugugggcacuggccca

SEQ ID NO: 2805077 - RNA, 17 nt, Human
ugugggcacuggcccag

SEQ ID NO: 2805078 - RNA, 18 nt, Human
ugugggcacuggcccagg

SEQ ID NO: 2805079 - RNA, 23 nt, Human
ugugggcacuggcccagguucau

SEQ ID NO: 2805080 - RNA, 21 nt, Human
ugugggagggagcagacagga

SEQ ID NO: 2805081 - RNA, 13 nt, Human
ugugggagggagc

SEQ ID NO: 2805082 - RNA, 16 nt, Human
ugugggaggcuccugu

SEQ ID NO: 2805083 - RNA, 20 nt, Human
uguggccuuccauuuauaug

SEQ ID NO: 2805084 - RNA, 17 nt, Human
uguggccugcacaguga

SEQ ID NO: 2805085 - RNA, 15 nt, Human
uguggccugggccuc

SEQ ID NO: 2805086 - RNA, 16 nt, Human
uguggccugggccucc

SEQ ID NO: 2805087 - RNA, 11 nt, Human
uguggccugca

SEQ ID NO: 2805088 - RNA, 13 nt, Human
uguggccucagaa

SEQ ID NO: 2805089 - RNA, 21 nt, Human
uguggcuaaaugccuaauaaa

SEQ ID NO: 2805090 - RNA, 16 nt, Human
uguggcgggcaguggg

SEQ ID NO: 2805091 - RNA, 10 nt, Human
uguggcucac

SEQ ID NO: 2805092 - RNA, 19 nt, Human
uguggacacagcucuucuc

SEQ ID NO: 2805093 - RNA, 17 nt, Human
uguggaccacugcauga

SEQ ID NO: 2805094 - RNA, 19 nt, Human
uguggaccacugcaugagc

SEQ ID NO: 2805095 - RNA, 15 nt, Human
uguggaccaauuauu

SEQ ID NO: 2805096 - RNA, 17 nt, Human
uguggaccaauuauuga

SEQ ID NO: 2805097 - RNA, 11 nt, Human
uguggccucag

SEQ ID NO: 2805098 - RNA, 10 nt, Human
uguggccuca

SEQ ID NO: 2805099 - RNA, 18 nt, Human
uguggccguuaucuggaa

SEQ ID NO: 2805100 - RNA, 18 nt, Human
uguggacacagcucuucu

SEQ ID NO: 2805101 - RNA, 20 nt, Human
uguggaaguguguguggcag

SEQ ID NO: 2805102 - RNA, 13 nt, Human
uguggaaugagug

SEQ ID NO: 2805103 - RNA, 16 nt, Human
uguggaaugagugugc

SEQ ID NO: 2805104 - RNA, 18 nt, Human
uguggaaugagugugcau

SEQ ID NO: 2805105 - RNA, 19 nt, Human
uguggaagaaaaugguuua

SEQ ID NO: 2805106 - RNA, 20 nt, Human
uguggaagaaaaugguuuau

SEQ ID NO: 2805107 - RNA, 22 nt, Human
uguggaagaaaaugguuuauuu

SEQ ID NO: 2805108 - RNA, 19 nt, Human
uguggaacauaaaaaggac

SEQ ID NO: 2805109 - RNA, 21 nt, Human
uguggaacauaaaaaggacau

SEQ ID NO: 2805110 - RNA, 15 nt, Human
uguggaacccagcag

SEQ ID NO: 2805111 - RNA, 21 nt, Human
uguggaacccagcaguucugu

SEQ ID NO: 2805112 - RNA, 20 nt, Human
uguggaacuaauaaauacau

SEQ ID NO: 2805113 - RNA, 22 nt, Human
uguggaacuaauaaauacauac

SEQ ID NO: 2805114 - RNA, 23 nt, Human
uguggaacuaauaaauacauacg

SEQ ID NO: 2805115 - RNA, 19 nt, Human
ugugaauugaaauguucgu

SEQ ID NO: 2805116 - RNA, 15 nt, Human
ugugaauugacuacc

SEQ ID NO: 2805117 - RNA, 18 nt, Human
ugugaauugcaugacuug

SEQ ID NO: 2805118 - RNA, 18 nt, Human
ugugaagugaaugaaaca

SEQ ID NO: 2805119 - RNA, 18 nt, Human
ugugaaaauaucugcuca

SEQ ID NO: 2805120 - RNA, 14 nt, Human
ugugaaggccauga

SEQ ID NO: 2805121 - RNA, 15 nt, Human
ugugaaggcagagaa

SEQ ID NO: 2805122 - RNA, 19 nt, Human
ugugaaggcagagaaaggg

SEQ ID NO: 2805123 - RNA, 23 nt, Human
ugugaaggcagagaaagggacaa

SEQ ID NO: 2805124 - RNA, 21 nt, Human
ugugaauguugugauguauuc

SEQ ID NO: 2805125 - RNA, 21 nt, Human
ugugaaguuagguucuuaaaa

SEQ ID NO: 2805126 - RNA, 19 nt, Human
ugugaauggauuggauuau

SEQ ID NO: 2805127 - RNA, 16 nt, Human
ugugaauggauuggau

SEQ ID NO: 2805128 - RNA, 22 nt, Human
ugugaauggauuggauuauuua

SEQ ID NO: 2805129 - RNA, 12 nt, Human
ugugaauguggg

SEQ ID NO: 2805130 - RNA, 15 nt, Human
ugugaaugugggcac

SEQ ID NO: 2805131 - RNA, 18 nt, Human
ugugaaugugggcacugg

SEQ ID NO: 2805132 - RNA, 13 nt, Human
ugugaccaacugu

SEQ ID NO: 2805133 - RNA, 14 nt, Human
ugugaccaacugug

SEQ ID NO: 2805134 - RNA, 15 nt, Human
ugugaccaacugugu

SEQ ID NO: 2805135 - RNA, 16 nt, Human
ugugaccaacuguguu

SEQ ID NO: 2805136 - RNA, 17 nt, Human
ugugaccaacuguguug

SEQ ID NO: 2805137 - RNA, 19 nt, Human
ugugaccaacuguguugua

SEQ ID NO: 2805138 - RNA, 21 nt, Human
ugugaccaacuguguuguauu

SEQ ID NO: 2805139 - RNA, 22 nt, Human
ugugaccaacuguguuguauua

SEQ ID NO: 2805140 - RNA, 15 nt, Human
ugugacauuuuacau

SEQ ID NO: 2805141 - RNA, 18 nt, Human
ugugacauuuuacauuaa

SEQ ID NO: 2805142 - RNA, 17 nt, Human
ugugacauuuuacauua

SEQ ID NO: 2805143 - RNA, 13 nt, Human
ugugaggagcugc

SEQ ID NO: 2805144 - RNA, 20 nt, Human
ugugaggagcugcuggcuug

SEQ ID NO: 2805145 - RNA, 18 nt, Human
ugugaggagcugcuggcu

SEQ ID NO: 2805146 - RNA, 17 nt, Human
ugugaggagcugcuggc

SEQ ID NO: 2805147 - RNA, 14 nt, Human
ugugaggagcugcu

SEQ ID NO: 2805148 - RNA, 17 nt, Human
ugugagucaccaagccc

SEQ ID NO: 2805149 - RNA, 15 nt, Human
ugugagucaccaagc

SEQ ID NO: 2805150 - RNA, 13 nt, Human
ugugaggccccug

SEQ ID NO: 2805151 - RNA, 14 nt, Human
ugugaggccccugg

SEQ ID NO: 2805152 - RNA, 22 nt, Human
ugugaggccccuggacaagcag

SEQ ID NO: 2805153 - RNA, 21 nt, Human
ugugagucaccaagcccaguu

SEQ ID NO: 2805154 - RNA, 19 nt, Human
ugugagucaccaagcccag

SEQ ID NO: 2805155 - RNA, 22 nt, Human
ugugagucuuugguucuaagga

SEQ ID NO: 2805156 - RNA, 16 nt, Human
ugugagugccuuuugc

SEQ ID NO: 2805157 - RNA, 17 nt, Human
ugugagugccuuuugca

SEQ ID NO: 2805158 - RNA, 19 nt, Human
ugugagugccuuuugcaga

SEQ ID NO: 2805159 - RNA, 21 nt, Human
ugugagugccuuuugcagaag

SEQ ID NO: 2805160 - RNA, 18 nt, Human
ugugagucuuugguucua

SEQ ID NO: 2805161 - RNA, 20 nt, Human
ugugagucuuugguucuaag

SEQ ID NO: 2805162 - RNA, 21 nt, Human
ugugagucuuugguucuaagg

SEQ ID NO: 2805163 - RNA, 19 nt, Human
ugugaguguguguuugugc

SEQ ID NO: 2805164 - RNA, 11 nt, Human
ugugaguguga

SEQ ID NO: 2805165 - RNA, 12 nt, Human
ugugagugugac

SEQ ID NO: 2805166 - RNA, 13 nt, Human
ugugagugugaca

SEQ ID NO: 2805167 - RNA, 14 nt, Human
ugugagugugacag

SEQ ID NO: 2805168 - RNA, 15 nt, Human
ugugagugugacagg

SEQ ID NO: 2805169 - RNA, 16 nt, Human
ugugagugugacaggg

SEQ ID NO: 2805170 - RNA, 17 nt, Human
ugugagugugacagggc

SEQ ID NO: 2805171 - RNA, 18 nt, Human
ugugagugugacagggcc

SEQ ID NO: 2805172 - RNA, 20 nt, Human
ugugcacaauucuguuuuag

SEQ ID NO: 2805173 - RNA, 20 nt, Human
ugugcacacacacacacaug

SEQ ID NO: 2805174 - RNA, 15 nt, Human
ugugcacaauucugu

SEQ ID NO: 2805175 - RNA, 17 nt, Human
ugugaucacgccuggcu

SEQ ID NO: 2805176 - RNA, 18 nt, Human
ugugaucacgccuggcua

SEQ ID NO: 2805177 - RNA, 22 nt, Human
ugugaucagcuuucaaagcauu

SEQ ID NO: 2805178 - RNA, 23 nt, Human
ugugaucagcuuucaaagcauuu

SEQ ID NO: 2805179 - RNA, 19 nt, Human
ugugauauucuaagacuua

SEQ ID NO: 2805180 - RNA, 14 nt, Human
ugugauauucuaag

SEQ ID NO: 2805181 - RNA, 15 nt, Human
ugugauauucuaaga

SEQ ID NO: 2805182 - RNA, 16 nt, Human
ugugaguuuaaagcaa

SEQ ID NO: 2805183 - RNA, 22 nt, Human
ugugaguguguguuugugcuga

SEQ ID NO: 2805184 - RNA, 17 nt, Human
ugugaguguuuggggga

SEQ ID NO: 2805185 - RNA, 14 nt, Human
ugugauauuaacag

SEQ ID NO: 2805186 - RNA, 16 nt, Human
ugugauauauguauua

SEQ ID NO: 2805187 - RNA, 17 nt, Human
ugugauauauguauuaa

SEQ ID NO: 2805188 - RNA, 13 nt, Human
ugucuuuugaaua

SEQ ID NO: 2805189 - RNA, 14 nt, Human
ugucuuuucuuggc

SEQ ID NO: 2805190 - RNA, 15 nt, Human
ugucuuuucuuggca

SEQ ID NO: 2805191 - RNA, 22 nt, Human
ugucuuuucuuggcaaaagccu

SEQ ID NO: 2805192 - RNA, 23 nt, Human
ugucuuuucuuggcaaaagccuu

SEQ ID NO: 2805193 - RNA, 22 nt, Human
ugucuuuccuaagaccuggggu

SEQ ID NO: 2805194 - RNA, 13 nt, Human
ugucuuuugucau

SEQ ID NO: 2805195 - RNA, 14 nt, Human
ugucuuuugaauau

SEQ ID NO: 2805196 - RNA, 17 nt, Human
ugugaaaaucaaauaca

SEQ ID NO: 2805197 - RNA, 13 nt, Human
ugugaaaaugggu

SEQ ID NO: 2805198 - RNA, 14 nt, Human
ugugaaaauggguu

SEQ ID NO: 2805199 - RNA, 16 nt, Human
ugugaaaaugugugug

SEQ ID NO: 2805200 - RNA, 17 nt, Human
ugugaaaaugugugugu

SEQ ID NO: 2805201 - RNA, 17 nt, Human
ugugaagcccuguugug

SEQ ID NO: 2805202 - RNA, 15 nt, Human
ugucuuucugagcac

SEQ ID NO: 2805203 - RNA, 13 nt, Human
ugucuuuggaaaa

SEQ ID NO: 2805204 - RNA, 21 nt, Human
ugucuuuggaaaaauguuugu

SEQ ID NO: 2805205 - RNA, 12 nt, Human
ugucuuucugag

SEQ ID NO: 2805206 - RNA, 17 nt, Human
ugucuuucuccaaaguu

SEQ ID NO: 2805207 - RNA, 19 nt, Human
ugucuuucuccaaaguuau

SEQ ID NO: 2805208 - RNA, 12 nt, Human
ugucuguaaaua

SEQ ID NO: 2805209 - RNA, 21 nt, Human
ugucuguacacguguccugua

SEQ ID NO: 2805210 - RNA, 15 nt, Human
ugucuguacuaaaaa

SEQ ID NO: 2805211 - RNA, 19 nt, Human
ugucuguacacguguccug

SEQ ID NO: 2805212 - RNA, 20 nt, Human
ugucuguacacguguccugu

SEQ ID NO: 2805213 - RNA, 17 nt, Human
ugucuguaaauauguuu

SEQ ID NO: 2805214 - RNA, 22 nt, Human
ugucugguuuuaacaauuuccu

SEQ ID NO: 2805215 - RNA, 18 nt, Human
ugucuguaaaagagccua

SEQ ID NO: 2805216 - RNA, 13 nt, Human
ugucuguacacgu

SEQ ID NO: 2805217 - RNA, 15 nt, Human
ugucuguacacgugu

SEQ ID NO: 2805218 - RNA, 14 nt, Human
ugucuguauuucau

SEQ ID NO: 2805219 - RNA, 20 nt, Human
ugucuguauuucauguggcu

SEQ ID NO: 2805220 - RNA, 22 nt, Human
ugucuguauuucauguggcugu

SEQ ID NO: 2805221 - RNA, 13 nt, Human
ugucugucauugu

SEQ ID NO: 2805222 - RNA, 15 nt, Human
ugucugguuuuaaca

SEQ ID NO: 2805223 - RNA, 16 nt, Human
ugucugguuuuaacaa

SEQ ID NO: 2805224 - RNA, 15 nt, Human
ugucuggauucccag

SEQ ID NO: 2805225 - RNA, 19 nt, Human
ugucuggauucccaggaug

SEQ ID NO: 2805226 - RNA, 18 nt, Human
ugucuggcaaaagaaaaa

SEQ ID NO: 2805227 - RNA, 19 nt, Human
ugucugaagucacugcaca

SEQ ID NO: 2805228 - RNA, 23 nt, Human
ugucugcuuaguaucucaucaac

SEQ ID NO: 2805229 - RNA, 20 nt, Human
ugucugcuuuaaagggccug

SEQ ID NO: 2805230 - RNA, 21 nt, Human
ugucugcuuuaaagggccugc

SEQ ID NO: 2805231 - RNA, 22 nt, Human
ugucugcuuuaaagggccugcc

SEQ ID NO: 2805232 - RNA, 17 nt, Human
ugucugaagucacugca

SEQ ID NO: 2805233 - RNA, 18 nt, Human
ugucugaagucacugcac

SEQ ID NO: 2805234 - RNA, 16 nt, Human
ugucugaagucacugc

SEQ ID NO: 2805235 - RNA, 13 nt, Human
uguccucccucca

SEQ ID NO: 2805236 - RNA, 19 nt, Human
uguccucccuccaccuacc

SEQ ID NO: 2805237 - RNA, 20 nt, Human
uguccucaguccauuuauau

SEQ ID NO: 2805238 - RNA, 16 nt, Human
uguccucauuucucca

SEQ ID NO: 2805239 - RNA, 17 nt, Human
uguccucauuucuccag

SEQ ID NO: 2805240 - RNA, 18 nt, Human
uguccucauuucuccaga

SEQ ID NO: 2805241 - RNA, 23 nt, Human
uguccucagggagcagggaaggc

SEQ ID NO: 2805242 - RNA, 19 nt, Human
uguccucagggagcaggga

SEQ ID NO: 2805243 - RNA, 14 nt, Human
uguccucagggagc

SEQ ID NO: 2805244 - RNA, 12 nt, Human
uguccucaggga

SEQ ID NO: 2805245 - RNA, 13 nt, Human
ugucaugcaugaa

SEQ ID NO: 2805246 - RNA, 13 nt, Human
uguccucuccccu

SEQ ID NO: 2805247 - RNA, 20 nt, Human
uguccucuccccuccagccu

SEQ ID NO: 2805248 - RNA, 22 nt, Human
uguccucuccccuccagccuuu

SEQ ID NO: 2805249 - RNA, 12 nt, Human
ugucugaacuuu

SEQ ID NO: 2805250 - RNA, 17 nt, Human
ugucugaacuuugggaa

SEQ ID NO: 2805251 - RNA, 23 nt, Human
uguccugaaaauuguuucaagaa

SEQ ID NO: 2805252 - RNA, 13 nt, Human
uguaugauguguu

SEQ ID NO: 2805253 - RNA, 13 nt, Human
uguaguucuaaga

SEQ ID NO: 2805254 - RNA, 15 nt, Human
uguaguucuaagacu

SEQ ID NO: 2805255 - RNA, 15 nt, Human
uguaguugcguggac

SEQ ID NO: 2805256 - RNA, 20 nt, Human
uguaguugcguggacucugc

SEQ ID NO: 2805257 - RNA, 22 nt, Human
uguaguugcaauagaacagaga

SEQ ID NO: 2805258 - RNA, 16 nt, Human
uguaguugauguaucc

SEQ ID NO: 2805259 - RNA, 17 nt, Human
uguaguugauguaucca

SEQ ID NO: 2805260 - RNA, 16 nt, Human
uguaguuuacagaaaa

SEQ ID NO: 2805261 - RNA, 21 nt, Human
uguaguuguucguugguuaua

SEQ ID NO: 2805262 - RNA, 21 nt, Human
uguaguugcguggacucugca

SEQ ID NO: 2805263 - RNA, 19 nt, Human
uguaguuuaccucuuuaaa

SEQ ID NO: 2805264 - RNA, 17 nt, Human
uguaguuuuauuuuaug

SEQ ID NO: 2805265 - RNA, 23 nt, Human
uguaguuuuauuuuauguuuaga

SEQ ID NO: 2805266 - RNA, 13 nt, Human
uguauugugguau

SEQ ID NO: 2805267 - RNA, 14 nt, Human
uguauugugguauu

SEQ ID NO: 2805268 - RNA, 14 nt, Human
uguauucuuaaaau

SEQ ID NO: 2805269 - RNA, 20 nt, Human
uguauucuuaaaaugcaaua

SEQ ID NO: 2805270 - RNA, 22 nt, Human
uguauucuuaaaaugcaauauu

SEQ ID NO: 2805271 - RNA, 18 nt, Human
uguaugauguguugugau

SEQ ID NO: 2805272 - RNA, 17 nt, Human
uguauuuaugugugagg

SEQ ID NO: 2805273 - RNA, 15 nt, Human
uguauuuauuuaaaa

SEQ ID NO: 2805274 - RNA, 20 nt, Human
uguauuuauuuaguauuuau

SEQ ID NO: 2805275 - RNA, 16 nt, Human
uguauuuauuuaaaag

SEQ ID NO: 2805276 - RNA, 19 nt, Human
uguauuguuuucugacagu

SEQ ID NO: 2805277 - RNA, 23 nt, Human
uguauuuauugaagaaacagaua

SEQ ID NO: 2805278 - RNA, 18 nt, Human
uguauuuauuuaaaagau

SEQ ID NO: 2805279 - RNA, 20 nt, Human
uguauuuauuuaaaagauuc

SEQ ID NO: 2805280 - RNA, 13 nt, Human
uguauuucuuaua

SEQ ID NO: 2805281 - RNA, 18 nt, Human
uguauuucuuauacgcuu

SEQ ID NO: 2805282 - RNA, 12 nt, Human
ugucacaggcag

SEQ ID NO: 2805283 - RNA, 14 nt, Human
ugucacaccagcca

SEQ ID NO: 2805284 - RNA, 15 nt, Human
ugucacaccagccau

SEQ ID NO: 2805285 - RNA, 14 nt, Human
ugucacacuggcua

SEQ ID NO: 2805286 - RNA, 15 nt, Human
ugucacacuggcuau

SEQ ID NO: 2805287 - RNA, 13 nt, Human
ugucacaccagcc

SEQ ID NO: 2805288 - RNA, 17 nt, Human
ugucacacacuuuggcu

SEQ ID NO: 2805289 - RNA, 19 nt, Human
uguauuuuguaaauaauaa

SEQ ID NO: 2805290 - RNA, 22 nt, Human
uguauuuuguaaauaauaaaau

SEQ ID NO: 2805291 - RNA, 13 nt, Human
ugucacacacuuu

SEQ ID NO: 2805292 - RNA, 14 nt, Human
ugucaccccagagc

SEQ ID NO: 2805293 - RNA, 15 nt, Human
ugucaccccagagcc

SEQ ID NO: 2805294 - RNA, 16 nt, Human
ugucaccccagagcca

SEQ ID NO: 2805295 - RNA, 17 nt, Human
ugucaccccagagccac

SEQ ID NO: 2805296 - RNA, 18 nt, Human
ugucaccccagagccaca

SEQ ID NO: 2805297 - RNA, 19 nt, Human
ugucaccccagagccacac

SEQ ID NO: 2805298 - RNA, 20 nt, Human
ugucaccccagagccacaca

SEQ ID NO: 2805299 - RNA, 21 nt, Human
ugucaccccagagccacacau

SEQ ID NO: 2805300 - RNA, 22 nt, Human
ugucaccccagagccacacaug

SEQ ID NO: 2805301 - RNA, 18 nt, Human
ugucacccuccaccucuu

SEQ ID NO: 2805302 - RNA, 22 nt, Human
ugucacccuccaccucuucacc

SEQ ID NO: 2805303 - RNA, 14 nt, Human
ugucaccaaggaaa

SEQ ID NO: 2805304 - RNA, 15 nt, Human
ugucaccaaggaaac

SEQ ID NO: 2805305 - RNA, 23 nt, Human
ugucaccaaggaaacgcuaccuc

SEQ ID NO: 2805306 - RNA, 17 nt, Human
ugucacauggugccccu

SEQ ID NO: 2805307 - RNA, 18 nt, Human
ugucacauggugccccua

SEQ ID NO: 2805308 - RNA, 20 nt, Human
ugucacauggugccccuagc

SEQ ID NO: 2805309 - RNA, 21 nt, Human
ugucacauggugccccuagcu

SEQ ID NO: 2805310 - RNA, 14 nt, Human
ugucacauugcauu

SEQ ID NO: 2805311 - RNA, 16 nt, Human
ugucacauugcauucu

SEQ ID NO: 2805312 - RNA, 17 nt, Human
ugucacauugcauucua

SEQ ID NO: 2805313 - RNA, 19 nt, Human
ugucacauugcauucuauu

SEQ ID NO: 2805314 - RNA, 21 nt, Human
ugucacauugcauucuauugc

SEQ ID NO: 2805315 - RNA, 22 nt, Human
ugucacauugcauucuauugcc

SEQ ID NO: 2805316 - RNA, 16 nt, Human
uguccauauuuucaca

SEQ ID NO: 2805317 - RNA, 16 nt, Human
ugucccaacuuguaaa

SEQ ID NO: 2805318 - RNA, 23 nt, Human
ugucccaaaaagaaaggagggga

SEQ ID NO: 2805319 - RNA, 12 nt, Human
uguccaucugcc

SEQ ID NO: 2805320 - RNA, 13 nt, Human
uguccaucugccc

SEQ ID NO: 2805321 - RNA, 14 nt, Human
uguccaucugcccg

SEQ ID NO: 2805322 - RNA, 16 nt, Human
uguccaucugcccgcc

SEQ ID NO: 2805323 - RNA, 17 nt, Human
uguccaucugcccgccu

SEQ ID NO: 2805324 - RNA, 19 nt, Human
uguccaucugcccgccugc

SEQ ID NO: 2805325 - RNA, 22 nt, Human
uguccaucugcccgccugccca

SEQ ID NO: 2805326 - RNA, 23 nt, Human
uguccaucugcccgccugcccac

SEQ ID NO: 2805327 - RNA, 19 nt, Human
ugucauuugagcagggcuc

SEQ ID NO: 2805328 - RNA, 16 nt, Human
ugucauuugagcaggg

SEQ ID NO: 2805329 - RNA, 15 nt, Human
ugucauuucauucca

SEQ ID NO: 2805330 - RNA, 16 nt, Human
ugucauuucauuccau

SEQ ID NO: 2805331 - RNA, 20 nt, Human
ugucauuucauuccauugcc

SEQ ID NO: 2805332 - RNA, 13 nt, Human
ugucaccugaaga

SEQ ID NO: 2805333 - RNA, 16 nt, Human
ugucacgauugucauc

SEQ ID NO: 2805334 - RNA, 13 nt, Human
ugucaccuuuucu

SEQ ID NO: 2805335 - RNA, 16 nt, Human
ugucaccuuuucuugc

SEQ ID NO: 2805336 - RNA, 20 nt, Human
ugucaccuuuucuugccuga

SEQ ID NO: 2805337 - RNA, 17 nt, Human
ugucauuuaugugucag

SEQ ID NO: 2805338 - RNA, 16 nt, Human
ugucauguguucccuu

SEQ ID NO: 2805339 - RNA, 17 nt, Human
ugucauguguucccuuu

SEQ ID NO: 2805340 - RNA, 18 nt, Human
ugucauguguucccuuug

SEQ ID NO: 2805341 - RNA, 19 nt, Human
ugucauguguucccuuugu

SEQ ID NO: 2805342 - RNA, 22 nt, Human
ugucauguguucccuuugucuu

SEQ ID NO: 2805343 - RNA, 17 nt, Human
ugucaugcuucaucauu

SEQ ID NO: 2805344 - RNA, 22 nt, Human
ugucaugcuucaucauucccuc

SEQ ID NO: 2805345 - RNA, 17 nt, Human
ugucaugguuacaaacu

SEQ ID NO: 2805346 - RNA, 23 nt, Human
ugucaucuuucuucuauuuuauu

SEQ ID NO: 2805347 - RNA, 16 nt, Human
ugucaugaauucuuau

SEQ ID NO: 2805348 - RNA, 19 nt, Human
ugucaugaauucuuaugcu

SEQ ID NO: 2805349 - RNA, 21 nt, Human
ugucaugaauucuuaugcuua

SEQ ID NO: 2805350 - RNA, 20 nt, Human
uguccuacccacccuccuuu

SEQ ID NO: 2805351 - RNA, 17 nt, Human
uguccuacucuguguca

SEQ ID NO: 2805352 - RNA, 12 nt, Human
uguccuacucug

SEQ ID NO: 2805353 - RNA, 23 nt, Human
ugucccacccccacccccagcuc

SEQ ID NO: 2805354 - RNA, 17 nt, Human
ugucccacccccacccc

SEQ ID NO: 2805355 - RNA, 18 nt, Human
ugucccacccccaccccc

SEQ ID NO: 2805356 - RNA, 22 nt, Human
ugucccacccccacccccagcu

SEQ ID NO: 2805357 - RNA, 13 nt, Human
uguccccaucugu

SEQ ID NO: 2805358 - RNA, 9 nt, Human
uguccccca

SEQ ID NO: 2805359 - RNA, 13 nt, Human
ugucccccaacuu

SEQ ID NO: 2805360 - RNA, 20 nt, Human
ugucccccagguuccgaaga

SEQ ID NO: 2805361 - RNA, 17 nt, Human
ugucccacgugucuucc

SEQ ID NO: 2805362 - RNA, 21 nt, Human
ugucccacgugucuuccacuu

SEQ ID NO: 2805363 - RNA, 14 nt, Human
ugucccccaacuug

SEQ ID NO: 2805364 - RNA, 16 nt, Human
ugucccccaacuugag

SEQ ID NO: 2805365 - RNA, 14 nt, Human
uguaguuaggaaau

SEQ ID NO: 2805366 - RNA, 13 nt, Human
uguaguuaggaaa

SEQ ID NO: 2805367 - RNA, 12 nt, Human
uguaguuaggaa

SEQ ID NO: 2805368 - RNA, 14 nt, Human
uguaguuaauuuau

SEQ ID NO: 2805369 - RNA, 17 nt, Human
uguaguuaauuuaucua

SEQ ID NO: 2805370 - RNA, 18 nt, Human
uguaguuaauuuaucuaa

SEQ ID NO: 2805371 - RNA, 23 nt, Human
uguaguuaggaaauaaaaccuuu

SEQ ID NO: 2805372 - RNA, 15 nt, Human
uguaguuaggaaaua

SEQ ID NO: 2805373 - RNA, 20 nt, Human
uguagcucugcaucuccugu

SEQ ID NO: 2805374 - RNA, 12 nt, Human
uguagcuguaaa

SEQ ID NO: 2805375 - RNA, 13 nt, Human
uguagcuguaaaa

SEQ ID NO: 2805376 - RNA, 14 nt, Human
uguagcuguaaaac

SEQ ID NO: 2805377 - RNA, 17 nt, Human
uguagcuguaaaacgcu

SEQ ID NO: 2805378 - RNA, 18 nt, Human
uguagcuguaaaacgcug

SEQ ID NO: 2805379 - RNA, 17 nt, Human
uguagccuugcccggau

SEQ ID NO: 2805380 - RNA, 16 nt, Human
uguagccuugcccgga

SEQ ID NO: 2805381 - RNA, 16 nt, Human
uguagcguguuuacau

SEQ ID NO: 2805382 - RNA, 17 nt, Human
uguagcguguuuacaug

SEQ ID NO: 2805383 - RNA, 20 nt, Human
uguagcguguuuacaugugu

SEQ ID NO: 2805384 - RNA, 21 nt, Human
uguagcguguuuacaugugua

SEQ ID NO: 2805385 - RNA, 19 nt, Human
uguagcccccuggccucug

SEQ ID NO: 2805386 - RNA, 20 nt, Human
uguagcccccuggccucugu

SEQ ID NO: 2805387 - RNA, 22 nt, Human
uguagccucgccgucugugaau

SEQ ID NO: 2805388 - RNA, 13 nt, Human
uguagccugugca

SEQ ID NO: 2805389 - RNA, 14 nt, Human
uguagccugugcau

SEQ ID NO: 2805390 - RNA, 15 nt, Human
uguagccugugcaug

SEQ ID NO: 2805391 - RNA, 22 nt, Human
uguagccugugcauguaugucu

SEQ ID NO: 2805392 - RNA, 23 nt, Human
uguagccuggauauuauucuugu

SEQ ID NO: 2805393 - RNA, 16 nt, Human
uguagccugugcaugu

SEQ ID NO: 2805394 - RNA, 20 nt, Human
uguagccugugcauguaugu

SEQ ID NO: 2805395 - RNA, 16 nt, Human
uguagcccccuggccu

SEQ ID NO: 2805396 - RNA, 17 nt, Human
uguagcccccuggccuc

SEQ ID NO: 2805397 - RNA, 18 nt, Human
uguagcccccuggccucu

SEQ ID NO: 2805398 - RNA, 22 nt, Human
uguagcccacucugcucgccuu

SEQ ID NO: 2805399 - RNA, 16 nt, Human
uguagcccaggcugga

SEQ ID NO: 2805400 - RNA, 23 nt, Human
uguagcccauccuucccuuugga

SEQ ID NO: 2805401 - RNA, 17 nt, Human
uguagcccacucugcuc

SEQ ID NO: 2805402 - RNA, 16 nt, Human
uguagcccacucugcu

SEQ ID NO: 2805403 - RNA, 20 nt, Human
uguagccacuaguaaguaau

SEQ ID NO: 2805404 - RNA, 17 nt, Human
uguagccagguauggcu

SEQ ID NO: 2805405 - RNA, 20 nt, Human
uguagccagguauggcucug

SEQ ID NO: 2805406 - RNA, 21 nt, Human
uguagccagguauggcucugc

SEQ ID NO: 2805407 - RNA, 22 nt, Human
uguagccagguauggcucugca

SEQ ID NO: 2805408 - RNA, 14 nt, Human
uguagccagguccc

SEQ ID NO: 2805409 - RNA, 18 nt, Human
uguagccaggucccccug

SEQ ID NO: 2805410 - RNA, 20 nt, Human
uguagccaggucccccugca

SEQ ID NO: 2805411 - RNA, 21 nt, Human
uguagccaggucccccugcag

SEQ ID NO: 2805412 - RNA, 18 nt, Human
uguacugcauguuaccau

SEQ ID NO: 2805413 - RNA, 15 nt, Human
uguacugcucaggcu

SEQ ID NO: 2805414 - RNA, 16 nt, Human
uguacugcucaggcug

SEQ ID NO: 2805415 - RNA, 17 nt, Human
uguacugcucaggcugc

SEQ ID NO: 2805416 - RNA, 20 nt, Human
uguacugcucaggcugcagc

SEQ ID NO: 2805417 - RNA, 15 nt, Human
uguacuguucugugu

SEQ ID NO: 2805418 - RNA, 17 nt, Human
uguacuguauagacagu

SEQ ID NO: 2805419 - RNA, 19 nt, Human
uguacuguauagacaguuu

SEQ ID NO: 2805420 - RNA, 21 nt, Human
uguacuguauagacaguuugu

SEQ ID NO: 2805421 - RNA, 23 nt, Human
uguacuguauagacaguuuguaa

SEQ ID NO: 2805422 - RNA, 17 nt, Human
uguacuguaugugauga

SEQ ID NO: 2805423 - RNA, 19 nt, Human
uguacugugucauaaacag

SEQ ID NO: 2805424 - RNA, 20 nt, Human
uguacuggcuccucuguggu

SEQ ID NO: 2805425 - RNA, 15 nt, Human
uguacuguacuaauu

SEQ ID NO: 2805426 - RNA, 16 nt, Human
uguacuguacuaauuc

SEQ ID NO: 2805427 - RNA, 21 nt, Human
uguaccuuuugaggagcccca

SEQ ID NO: 2805428 - RNA, 17 nt, Human
uguaccucuggcugacu

SEQ ID NO: 2805429 - RNA, 20 nt, Human
uguaccucuggcugacuaaa

SEQ ID NO: 2805430 - RNA, 15 nt, Human
uguacgucugacagg

SEQ ID NO: 2805431 - RNA, 22 nt, Human
uguaccuuuugaggagccccag

SEQ ID NO: 2805432 - RNA, 21 nt, Human
uguaccuuuuuuguuuuuuca

SEQ ID NO: 2805433 - RNA, 11 nt, Human
uguagcaguga

SEQ ID NO: 2805434 - RNA, 22 nt, Human
uguagauuuaguguaauaagac

SEQ ID NO: 2805435 - RNA, 15 nt, Human
uguagcauauaggug

SEQ ID NO: 2805436 - RNA, 23 nt, Human
uguagcagugagaaaaagcuccu

SEQ ID NO: 2805437 - RNA, 10 nt, Human
uguagccaag

SEQ ID NO: 2805438 - RNA, 15 nt, Human
uguagaugauguauu

SEQ ID NO: 2805439 - RNA, 16 nt, Human
uguagauggaaaaacu

SEQ ID NO: 2805440 - RNA, 19 nt, Human
uguagauggaaaaacuugu

SEQ ID NO: 2805441 - RNA, 23 nt, Human
uguagauggaaaaacuugugcua

SEQ ID NO: 2805442 - RNA, 21 nt, Human
uguagauuaaggugaugugau

SEQ ID NO: 2805443 - RNA, 15 nt, Human
uguagauucugugga

SEQ ID NO: 2805444 - RNA, 12 nt, Human
uguagaugaugu

SEQ ID NO: 2805445 - RNA, 16 nt, Human
uguacuguucuguguc

SEQ ID NO: 2805446 - RNA, 19 nt, Human
uguacuguucugugucuuu

SEQ ID NO: 2805447 - RNA, 19 nt, Human
uguacuguuuaauguucug

SEQ ID NO: 2805448 - RNA, 24 nt, Human
uguacuguuuaauguucugugaua

SEQ ID NO: 2805449 - RNA, 13 nt, Human
uguagaucccaag

SEQ ID NO: 2805450 - RNA, 22 nt, Human
uguagaucccaagaugacuggg

SEQ ID NO: 2805451 - RNA, 14 nt, Human
uguagauauuuggc

SEQ ID NO: 2805452 - RNA, 15 nt, Human
uguagauauuuggcu

SEQ ID NO: 2805453 - RNA, 16 nt, Human
uguagauauuuggcuu

SEQ ID NO: 2805454 - RNA, 17 nt, Human
uguagauauuuggcuua

SEQ ID NO: 2805455 - RNA, 19 nt, Human
uguagauauuuggcuuaaa

SEQ ID NO: 2805456 - RNA, 22 nt, Human
uguagauauuuggcuuaaauau

SEQ ID NO: 2805457 - RNA, 22 nt, Human
uguaccguaggcuuuguauuca

SEQ ID NO: 2805458 - RNA, 13 nt, Human
uguaccuccccug

SEQ ID NO: 2805459 - RNA, 15 nt, Human
uguaccuccccugcc

SEQ ID NO: 2805460 - RNA, 17 nt, Human
uguaccuccccugccuu

SEQ ID NO: 2805461 - RNA, 18 nt, Human
uguaccuccccugccuug

SEQ ID NO: 2805462 - RNA, 22 nt, Human
uguaccuccccugccuugcugu

SEQ ID NO: 2805463 - RNA, 15 nt, Human
uguaccuccucucag

SEQ ID NO: 2805464 - RNA, 19 nt, Human
uguaccuccucucaguguu

SEQ ID NO: 2805465 - RNA, 20 nt, Human
uguaccuccucucaguguuu

SEQ ID NO: 2805466 - RNA, 15 nt, Human
uguacaguuuggggc

SEQ ID NO: 2805467 - RNA, 22 nt, Human
uguacacacugguacuuagagu

SEQ ID NO: 2805468 - RNA, 18 nt, Human
uguacaauguacacacug

SEQ ID NO: 2805469 - RNA, 16 nt, Human
uguacaauuaaaaacc

SEQ ID NO: 2805470 - RNA, 17 nt, Human
uguaauuaaauuauggu

SEQ ID NO: 2805471 - RNA, 18 nt, Human
uguaauuaaauuauggua

SEQ ID NO: 2805472 - RNA, 16 nt, Human
uguaauguuuguuacc

SEQ ID NO: 2805473 - RNA, 13 nt, Human
uguaauguuuucu

SEQ ID NO: 2805474 - RNA, 18 nt, Human
uguaauguuuucuuugca

SEQ ID NO: 2805475 - RNA, 19 nt, Human
uguaauguuuucuuugcaa

SEQ ID NO: 2805476 - RNA, 21 nt, Human
uguaauguuuucuuugcaaag

SEQ ID NO: 2805477 - RNA, 16 nt, Human
uguacaagaugaagga

SEQ ID NO: 2805478 - RNA, 12 nt, Human
uguacaauaaaa

SEQ ID NO: 2805479 - RNA, 16 nt, Human
uguacaauaaaaacau

SEQ ID NO: 2805480 - RNA, 20 nt, Human
uguacaauaaaaacauugcc

SEQ ID NO: 2805481 - RNA, 23 nt, Human
uguacaaggacagccccuccucc

SEQ ID NO: 2805482 - RNA, 20 nt, Human
uguacaaggacagccccucc

SEQ ID NO: 2805483 - RNA, 16 nt, Human
uguacaaggacagccc

SEQ ID NO: 2805484 - RNA, 23 nt, Human
uguaaguuucaggugacauguga

SEQ ID NO: 2805485 - RNA, 15 nt, Human
uguaaguuucaggug

SEQ ID NO: 2805486 - RNA, 16 nt, Human
uguaaguuucagguga

SEQ ID NO: 2805487 - RNA, 18 nt, Human
uguaaguuucaggugaca

SEQ ID NO: 2805488 - RNA, 19 nt, Human
uguaaguuucaggugacau

SEQ ID NO: 2805489 - RNA, 20 nt, Human
uguaaguuucaggugacaug

SEQ ID NO: 2805490 - RNA, 21 nt, Human
uguaaguuucaggugacaugu

SEQ ID NO: 2805491 - RNA, 16 nt, Human
uguaauagaaaacuga

SEQ ID NO: 2805492 - RNA, 18 nt, Human
uguaauagaaaacugaaa

SEQ ID NO: 2805493 - RNA, 20 nt, Human
uguaauagaaaacugaaaau

SEQ ID NO: 2805494 - RNA, 14 nt, Human
uguaaguuucaggu

SEQ ID NO: 2805495 - RNA, 13 nt, Human
uggucacagccuc

SEQ ID NO: 2805496 - RNA, 14 nt, Human
uggucacagccucc

SEQ ID NO: 2805497 - RNA, 15 nt, Human
uggucacagccuccu

SEQ ID NO: 2805498 - RNA, 16 nt, Human
uggucacagccuccuc

SEQ ID NO: 2805499 - RNA, 17 nt, Human
uggucacagccuccucu

SEQ ID NO: 2805500 - RNA, 18 nt, Human
uggucacagccuccucug

SEQ ID NO: 2805501 - RNA, 15 nt, Human
uggucaaucaacacu

SEQ ID NO: 2805502 - RNA, 22 nt, Human
uggucaauccgaaguaugaggg

SEQ ID NO: 2805503 - RNA, 16 nt, Human
uggucacacacugaug

SEQ ID NO: 2805504 - RNA, 15 nt, Human
uggucacacacugau

SEQ ID NO: 2805505 - RNA, 14 nt, Human
uggucacacacuga

SEQ ID NO: 2805506 - RNA, 20 nt, Human
uguaaucccagcuacucggg

SEQ ID NO: 2805507 - RNA, 13 nt, Human
uguaaucccccag

SEQ ID NO: 2805508 - RNA, 17 nt, Human
uguaauauaaagauguu

SEQ ID NO: 2805509 - RNA, 19 nt, Human
uguaauauaccagcuugua

SEQ ID NO: 2805510 - RNA, 14 nt, Human
uguaauauuuugua

SEQ ID NO: 2805511 - RNA, 17 nt, Human
uguaauauuuuguauua

SEQ ID NO: 2805512 - RNA, 22 nt, Human
uguaauauuuuguauuauugcu

SEQ ID NO: 2805513 - RNA, 23 nt, Human
uguaauauuuuguauuauugcug

SEQ ID NO: 2805514 - RNA, 22 nt, Human
uguaauauuuuuauauacagag

SEQ ID NO: 2805515 - RNA, 20 nt, Human
uguaaucuuauuuaggaagu

SEQ ID NO: 2805516 - RNA, 14 nt, Human
uguaaucucucugc

SEQ ID NO: 2805517 - RNA, 17 nt, Human
uguaaucucucugcagc

SEQ ID NO: 2805518 - RNA, 18 nt, Human
uguaaucucucugcagcu

SEQ ID NO: 2805519 - RNA, 19 nt, Human
uguaaucucucugcagcug

SEQ ID NO: 2805520 - RNA, 20 nt, Human
uguaaucucucugcagcugc

SEQ ID NO: 2805521 - RNA, 21 nt, Human
uguaaucucucugcagcugcc

SEQ ID NO: 2805522 - RNA, 22 nt, Human
uguaaucucucugcagcugccg

SEQ ID NO: 2805523 - RNA, 22 nt, Human
uguaaugucccuuucagagaca

SEQ ID NO: 2805524 - RNA, 19 nt, Human
uguaaugugugaaaaagau

SEQ ID NO: 2805525 - RNA, 23 nt, Human
uguaaugugugaaaaagaugcca

SEQ ID NO: 2805526 - RNA, 18 nt, Human
uguaaugugugguggccu

SEQ ID NO: 2805527 - RNA, 20 nt, Human
uguaaugugugguggccuca

SEQ ID NO: 2805528 - RNA, 21 nt, Human
uguaaugugugguggccucag

SEQ ID NO: 2805529 - RNA, 22 nt, Human
uguaaugugugguggccucagc

SEQ ID NO: 2805530 - RNA, 15 nt, Human
uuaaacuacagguag

SEQ ID NO: 2805531 - RNA, 14 nt, Human
uuaaacuagaugac

SEQ ID NO: 2805532 - RNA, 16 nt, Human
uuaaacuagaugaccu

SEQ ID NO: 2805533 - RNA, 18 nt, Human
uuaaacuagaugaccuca

SEQ ID NO: 2805534 - RNA, 20 nt, Human
uuaaacuagaugaccucauu

SEQ ID NO: 2805535 - RNA, 23 nt, Human
uuaaacuagaugaccucauuaac

SEQ ID NO: 2805536 - RNA, 13 nt, Human
uuaaacucaggga

SEQ ID NO: 2805537 - RNA, 14 nt, Human
uuaaacucagggac

SEQ ID NO: 2805538 - RNA, 14 nt, Human
uuaaacuaucuugu

SEQ ID NO: 2805539 - RNA, 16 nt, Human
uuaaacuaucuugugu

SEQ ID NO: 2805540 - RNA, 14 nt, Human
uuaaacucaagaca

SEQ ID NO: 2805541 - RNA, 16 nt, Human
uuaaacucaagacaau

SEQ ID NO: 2805542 - RNA, 15 nt, Human
uuaaacuugucuuuu

SEQ ID NO: 2805543 - RNA, 14 nt, Human
uuaaacuugugaau

SEQ ID NO: 2805544 - RNA, 15 nt, Human
uuaaacuugugaaug

SEQ ID NO: 2805545 - RNA, 17 nt, Human
uuaaacuugugaaugcu

SEQ ID NO: 2805546 - RNA, 16 nt, Human
uuaaacuuauaaauca

SEQ ID NO: 2805547 - RNA, 23 nt, Human
uuaaacuuauaaaucauauugau

SEQ ID NO: 2805548 - RNA, 14 nt, Human
uuaaacuuaugaau

SEQ ID NO: 2805549 - RNA, 16 nt, Human
uuaaacuuaugaaugu

SEQ ID NO: 2805550 - RNA, 18 nt, Human
uuaaaaaaaaagaucugu

SEQ ID NO: 2805551 - RNA, 14 nt, Human
uuaaaacucagccu

SEQ ID NO: 2805552 - RNA, 19 nt, Human
uuaaaacucagccugggac

SEQ ID NO: 2805553 - RNA, 19 nt, Human
uuaaaauaaacaguuguga

SEQ ID NO: 2805554 - RNA, 20 nt, Human
uuaaaauaaacaguugugaa

SEQ ID NO: 2805555 - RNA, 19 nt, Human
uuaaaaguuucaaugugau

SEQ ID NO: 2805556 - RNA, 22 nt, Human
uuaaaaguuucaaugugauucu

SEQ ID NO: 2805557 - RNA, 15 nt, Human
uuaaaauaacuagug

SEQ ID NO: 2805558 - RNA, 12 nt, Human
uuaaaacugcuu

SEQ ID NO: 2805559 - RNA, 13 nt, Human
uuaaaacugcuuu

SEQ ID NO: 2805560 - RNA, 22 nt, Human
uuaaaacugcuuuuuuuuuucc

SEQ ID NO: 2805561 - RNA, 9 nt, Human
uuaaaagaa

SEQ ID NO: 2805562 - RNA, 14 nt, Human
uuaaaacuucuuaa

SEQ ID NO: 2805563 - RNA, 15 nt, Human
uuaaaacuucuuaaa

SEQ ID NO: 2805564 - RNA, 19 nt, Human
uuaaaacuucuuaaauauc

SEQ ID NO: 2805565 - RNA, 16 nt, Human
uuaaaaguuucaaugu

SEQ ID NO: 2805566 - RNA, 17 nt, Human
uuaaaaguuucaaugug

SEQ ID NO: 2805567 - RNA, 17 nt, Human
uuaaauaucugaacauu

SEQ ID NO: 2805568 - RNA, 21 nt, Human
uuaaauaucugaacauuuacu

SEQ ID NO: 2805569 - RNA, 22 nt, Human
uuaaauaucugaacauuuacua

SEQ ID NO: 2805570 - RNA, 14 nt, Human
uuaaauaucuuuua

SEQ ID NO: 2805571 - RNA, 16 nt, Human
uuaaauaucuuuuaug

SEQ ID NO: 2805572 - RNA, 17 nt, Human
uuaaauaucuuuuaugu

SEQ ID NO: 2805573 - RNA, 18 nt, Human
uuaaauaucuuuuauguu

SEQ ID NO: 2805574 - RNA, 19 nt, Human
uuaaauaucuuuuauguuu

SEQ ID NO: 2805575 - RNA, 20 nt, Human
uuaaauaucuuuuauguuug

SEQ ID NO: 2805576 - RNA, 21 nt, Human
uuaaauaucuuuuauguuuga

SEQ ID NO: 2805577 - RNA, 22 nt, Human
uuaaauaucuuuuauguuugaa

SEQ ID NO: 2805578 - RNA, 13 nt, Human
uuaaagccuccuc

SEQ ID NO: 2805579 - RNA, 19 nt, Human
uuaaagcauauagagauga

SEQ ID NO: 2805580 - RNA, 14 nt, Human
uuaaagcauugcug

SEQ ID NO: 2805581 - RNA, 20 nt, Human
uuaaagcauugcuguuaugu

SEQ ID NO: 2805582 - RNA, 21 nt, Human
uuaaagcauugcuguuauguc

SEQ ID NO: 2805583 - RNA, 22 nt, Human
uuaaagcauugcuguuaugucu

SEQ ID NO: 2805584 - RNA, 16 nt, Human
uuaaagcauugcuuuu

SEQ ID NO: 2805585 - RNA, 22 nt, Human
uuaaagcauugcuuuuauuuug

SEQ ID NO: 2805586 - RNA, 14 nt, Human
uuaaagaaacagcu

SEQ ID NO: 2805587 - RNA, 16 nt, Human
uuaaagaaacagcuuu

SEQ ID NO: 2805588 - RNA, 21 nt, Human
uuaaagaaacagcuuucaagu

SEQ ID NO: 2805589 - RNA, 22 nt, Human
uuaaagcaagcaacacagagga

SEQ ID NO: 2805590 - RNA, 16 nt, Human
uuaaaugaggauuauu

SEQ ID NO: 2805591 - RNA, 14 nt, Human
uuaaaugaaauugu

SEQ ID NO: 2805592 - RNA, 23 nt, Human
uuaaaugaaauuguaaaaccugu

SEQ ID NO: 2805593 - RNA, 21 nt, Human
uuaaaugaauauuuugauaau

SEQ ID NO: 2805594 - RNA, 20 nt, Human
uuaaauauuaguuaauggau

SEQ ID NO: 2805595 - RNA, 14 nt, Human
uuaaaucaaagaua

SEQ ID NO: 2805596 - RNA, 13 nt, Human
uuaaaucauuuua

SEQ ID NO: 2805597 - RNA, 18 nt, Human
uuaaaucauuuuaggaaa

SEQ ID NO: 2805598 - RNA, 20 nt, Human
uuaaaucauuuuaggaaagg

SEQ ID NO: 2805599 - RNA, 21 nt, Human
uuaaaucauuuuaggaaagga

SEQ ID NO: 2805600 - RNA, 20 nt, Human
uuaaaucuaaaucuauuuau

SEQ ID NO: 2805601 - RNA, 16 nt, Human
uuaaaucugucccuga

SEQ ID NO: 2805602 - RNA, 13 nt, Human
uuaaaaaaaaaga

SEQ ID NO: 2805603 - RNA, 20 nt, Human
uuaaaaaaaaaaaaaagcuu

SEQ ID NO: 2805604 - RNA, 22 nt, Human
uuaaaaaaaaaaaaaagcuuua

SEQ ID NO: 2805605 - RNA, 23 nt, Human
uuaaaaaaaaaaaaaagcuuuau

SEQ ID NO: 2805606 - RNA, 20 nt, Human
uuaaaaaaaaaaaaaggaaa

SEQ ID NO: 2805607 - RNA, 21 nt, Human
uuaaaaaaaaaaaaaggaaaa

SEQ ID NO: 2805608 - RNA, 20 nt, Human
uguuuuugcuuguuauauua

SEQ ID NO: 2805609 - RNA, 16 nt, Human
uguuuuucuuucuaca

SEQ ID NO: 2805610 - RNA, 12 nt, Human
uguuuuucuggg

SEQ ID NO: 2805611 - RNA, 17 nt, Human
uguuuuuagacaccuuc

SEQ ID NO: 2805612 - RNA, 15 nt, Human
uguuuuuauaaaaau

SEQ ID NO: 2805613 - RNA, 21 nt, Human
uguuuuucucacuccuuuugg

SEQ ID NO: 2805614 - RNA, 12 nt, Human
uguuuuucucca

SEQ ID NO: 2805615 - RNA, 14 nt, Human
uguuuuucuccagu

SEQ ID NO: 2805616 - RNA, 15 nt, Human
uguuuuaagaaaugu

SEQ ID NO: 2805617 - RNA, 16 nt, Human
uguuuuaagaaaugua

SEQ ID NO: 2805618 - RNA, 23 nt, Human
uguuuuaagaaauguaguugaug

SEQ ID NO: 2805619 - RNA, 17 nt, Human
uguuuuaagaggcaggg

SEQ ID NO: 2805620 - RNA, 22 nt, Human
uguuuuaauuuaaacaccuccu

SEQ ID NO: 2805621 - RNA, 15 nt, Human
uguuuuaaucugaaa

SEQ ID NO: 2805622 - RNA, 18 nt, Human
uguuuuaaucugaaauuc

SEQ ID NO: 2805623 - RNA, 20 nt, Human
uguuuuaaucugaaauucua

SEQ ID NO: 2805624 - RNA, 20 nt, Human
uguuucuggguccugaagaa

SEQ ID NO: 2805625 - RNA, 18 nt, Human
uguuuuaaguacuacaca

SEQ ID NO: 2805626 - RNA, 19 nt, Human
uguuuuuaaaaguuucaau

SEQ ID NO: 2805627 - RNA, 23 nt, Human
uguuuuaauuuaaacaccuccuc

SEQ ID NO: 2805628 - RNA, 12 nt, Human
uguuuguggccu

SEQ ID NO: 2805629 - RNA, 14 nt, Human
uguuuguggccuca

SEQ ID NO: 2805630 - RNA, 13 nt, Human
uguuuguggccuc

SEQ ID NO: 2805631 - RNA, 15 nt, Human
uguuuguggccucag

SEQ ID NO: 2805632 - RNA, 12 nt, Human
uguuuguguauu

SEQ ID NO: 2805633 - RNA, 16 nt, Human
uguuuuaagaggcagg

SEQ ID NO: 2805634 - RNA, 22 nt, Human
uguuuuaaauacgcacuacaug

SEQ ID NO: 2805635 - RNA, 14 nt, Human
uguuuuaaauguac

SEQ ID NO: 2805636 - RNA, 15 nt, Human
uguuuuaaauguaca

SEQ ID NO: 2805637 - RNA, 23 nt, Human
uguuuuaaauguacagacauauu

SEQ ID NO: 2805638 - RNA, 12 nt, Human
uguuuuaaauuc

SEQ ID NO: 2805639 - RNA, 13 nt, Human
uguuuuaaauucu

SEQ ID NO: 2805640 - RNA, 14 nt, Human
uguuuuaaauucug

SEQ ID NO: 2805641 - RNA, 15 nt, Human
uguuuuaaauucuga

SEQ ID NO: 2805642 - RNA, 17 nt, Human
uguuuuaaauucugaga

SEQ ID NO: 2805643 - RNA, 22 nt, Human
uguuuuaaauucugagacaugu

SEQ ID NO: 2805644 - RNA, 11 nt, Human
uguuugugugu

SEQ ID NO: 2805645 - RNA, 14 nt, Human
uguuuguguauuua

SEQ ID NO: 2805646 - RNA, 16 nt, Human
uguuuguugcuggcuu

SEQ ID NO: 2805647 - RNA, 17 nt, Human
uguuuguugcuggcuug

SEQ ID NO: 2805648 - RNA, 13 nt, Human
uguuuaaaguggc

SEQ ID NO: 2805649 - RNA, 15 nt, Human
uguuuccucuuccaa

SEQ ID NO: 2805650 - RNA, 16 nt, Human
uguuuccucuuccaaa

SEQ ID NO: 2805651 - RNA, 18 nt, Human
uguuucccuucccuucca

SEQ ID NO: 2805652 - RNA, 17 nt, Human
uguuuccuaauaucaaa

SEQ ID NO: 2805653 - RNA, 21 nt, Human
uguuuccuaauaucaaaugca

SEQ ID NO: 2805654 - RNA, 16 nt, Human
uguuuccugcaggcca

SEQ ID NO: 2805655 - RNA, 16 nt, Human
uguuucugaaaagaaa

SEQ ID NO: 2805656 - RNA, 19 nt, Human
uguuucugaaaagaaauaa

SEQ ID NO: 2805657 - RNA, 22 nt, Human
uguuucugaaaagaaauaauaa

SEQ ID NO: 2805658 - RNA, 23 nt, Human
uguuucugaaaagaaauaauaau

SEQ ID NO: 2805659 - RNA, 17 nt, Human
uguuucugagaaaagaa

SEQ ID NO: 2805660 - RNA, 19 nt, Human
uguuuccauauuuuauagg

SEQ ID NO: 2805661 - RNA, 23 nt, Human
uguuuacuuaaagauuuaucaaa

SEQ ID NO: 2805662 - RNA, 17 nt, Human
uguuuacuuuaaacuug

SEQ ID NO: 2805663 - RNA, 18 nt, Human
uguuuacuuuaaacuugu

SEQ ID NO: 2805664 - RNA, 14 nt, Human
uguuuaccauuuuu

SEQ ID NO: 2805665 - RNA, 15 nt, Human
uguuuacuuaaagau

SEQ ID NO: 2805666 - RNA, 16 nt, Human
uguuuacuuaaagauu

SEQ ID NO: 2805667 - RNA, 17 nt, Human
uguuuacuuaaagauuu

SEQ ID NO: 2805668 - RNA, 18 nt, Human
uguuuacuuaaagauuua

SEQ ID NO: 2805669 - RNA, 19 nt, Human
uguuuacuuaaagauuuau

SEQ ID NO: 2805670 - RNA, 13 nt, Human
uuacauuguaaau

SEQ ID NO: 2805671 - RNA, 12 nt, Human
uuacauuguaaa

SEQ ID NO: 2805672 - RNA, 15 nt, Human
uuacauuuaaagcau

SEQ ID NO: 2805673 - RNA, 16 nt, Human
uuacauuuaaagcauu

SEQ ID NO: 2805674 - RNA, 21 nt, Human
uuacauuuaaagcauugcugu

SEQ ID NO: 2805675 - RNA, 22 nt, Human
uuacauuuaaagcauugcuguu

SEQ ID NO: 2805676 - RNA, 16 nt, Human
uuacauucucuaauaa

SEQ ID NO: 2805677 - RNA, 15 nt, Human
uuacagaaauacuau

SEQ ID NO: 2805678 - RNA, 16 nt, Human
uuacagaaauacuaua

SEQ ID NO: 2805679 - RNA, 17 nt, Human
uuacagaaauacuauaa

SEQ ID NO: 2805680 - RNA, 18 nt, Human
uuacagaaaaagacuuua

SEQ ID NO: 2805681 - RNA, 15 nt, Human
uuacagaaaaaucuu

SEQ ID NO: 2805682 - RNA, 13 nt, Human
uuacagaaaaaga

SEQ ID NO: 2805683 - RNA, 14 nt, Human
uuacacugccaucu

SEQ ID NO: 2805684 - RNA, 17 nt, Human
uuacacugccuguauac

SEQ ID NO: 2805685 - RNA, 18 nt, Human
uuacacugccuguauacu

SEQ ID NO: 2805686 - RNA, 19 nt, Human
uuacacugccuguauacuu

SEQ ID NO: 2805687 - RNA, 21 nt, Human
uuacacugccuguauacuuua

SEQ ID NO: 2805688 - RNA, 22 nt, Human
uuacacugccuguauacuuuag

SEQ ID NO: 2805689 - RNA, 20 nt, Human
uuacacuguaccauauagca

SEQ ID NO: 2805690 - RNA, 21 nt, Human
uuacacuguaccauauagcaa

SEQ ID NO: 2805691 - RNA, 14 nt, Human
uuacacuguauuug

SEQ ID NO: 2805692 - RNA, 17 nt, Human
uuacacuguauuuguau

SEQ ID NO: 2805693 - RNA, 20 nt, Human
uuacacccuuucuugacaaa

SEQ ID NO: 2805694 - RNA, 18 nt, Human
uuacaccgacuagccagg

SEQ ID NO: 2805695 - RNA, 22 nt, Human
uuaaugaaucguaaugaaguug

SEQ ID NO: 2805696 - RNA, 16 nt, Human
uuaaugauaaguaaau

SEQ ID NO: 2805697 - RNA, 13 nt, Human
uuaauuaauuuga

SEQ ID NO: 2805698 - RNA, 16 nt, Human
uuaauuaauuugauua

SEQ ID NO: 2805699 - RNA, 20 nt, Human
uuaauuaauuugauuaacaa

SEQ ID NO: 2805700 - RNA, 21 nt, Human
uuaauuaauuugauuaacaaa

SEQ ID NO: 2805701 - RNA, 13 nt, Human
uuaauuacaccau

SEQ ID NO: 2805702 - RNA, 16 nt, Human
uuaauuaagacugaaa

SEQ ID NO: 2805703 - RNA, 15 nt, Human
uuaauuaaacauugu

SEQ ID NO: 2805704 - RNA, 16 nt, Human
uuaauuaaacauugug

SEQ ID NO: 2805705 - RNA, 18 nt, Human
uuacacagaaacacugcc

SEQ ID NO: 2805706 - RNA, 16 nt, Human
uuacacagaaacacug

SEQ ID NO: 2805707 - RNA, 14 nt, Human
uuacacagaaacac

SEQ ID NO: 2805708 - RNA, 13 nt, Human
uuacacagaaaca

SEQ ID NO: 2805709 - RNA, 20 nt, Human
uuacacagaaacacugccuu

SEQ ID NO: 2805710 - RNA, 19 nt, Human
uuacacagaaacacugccu

SEQ ID NO: 2805711 - RNA, 14 nt, Human
uuacacauacaguu

SEQ ID NO: 2805712 - RNA, 14 nt, Human
uuacacauuaagua

SEQ ID NO: 2805713 - RNA, 16 nt, Human
uuacacauuagauuuu

SEQ ID NO: 2805714 - RNA, 16 nt, Human
uuacacauuuguacag

SEQ ID NO: 2805715 - RNA, 17 nt, Human
uuacacauuuguacaga

SEQ ID NO: 2805716 - RNA, 13 nt, Human
uuacaagaaguuu

SEQ ID NO: 2805717 - RNA, 18 nt, Human
uuacaagaaguuuauucu

SEQ ID NO: 2805718 - RNA, 20 nt, Human
uuacaagaaguuuauucuca

SEQ ID NO: 2805719 - RNA, 16 nt, Human
uuacacaauucuuacc

SEQ ID NO: 2805720 - RNA, 20 nt, Human
uuacacaauucuuacccugu

SEQ ID NO: 2805721 - RNA, 16 nt, Human
uuacacacacagaugu

SEQ ID NO: 2805722 - RNA, 23 nt, Human
uuacaacugccucgaaacacaga

SEQ ID NO: 2805723 - RNA, 22 nt, Human
uuacaacugccucgaaacacag

SEQ ID NO: 2805724 - RNA, 19 nt, Human
uuacaacauaaucuaguuu

SEQ ID NO: 2805725 - RNA, 14 nt, Human
uuaauuaggaaaaa

SEQ ID NO: 2805726 - RNA, 21 nt, Human
uuaauuacucagcagaauggu

SEQ ID NO: 2805727 - RNA, 14 nt, Human
uuaauuacuuaaaa

SEQ ID NO: 2805728 - RNA, 15 nt, Human
uuaauuagcauucug

SEQ ID NO: 2805729 - RNA, 18 nt, Human
uuaauuagcauucuggca

SEQ ID NO: 2805730 - RNA, 15 nt, Human
uuaagcacucuuaaa

SEQ ID NO: 2805731 - RNA, 14 nt, Human
uuaagcaacaucuu

SEQ ID NO: 2805732 - RNA, 19 nt, Human
uuaagcaacaucuuuuuaa

SEQ ID NO: 2805733 - RNA, 21 nt, Human
uuaagauuuuucucaaaguuu

SEQ ID NO: 2805734 - RNA, 14 nt, Human
uuaagcaaauacuu

SEQ ID NO: 2805735 - RNA, 15 nt, Human
uuaagcaaauacuua

SEQ ID NO: 2805736 - RNA, 18 nt, Human
uuaagcauuaccacucag

SEQ ID NO: 2805737 - RNA, 13 nt, Human
uuaagcauuacca

SEQ ID NO: 2805738 - RNA, 13 nt, Human
uuaauaauaaucu

SEQ ID NO: 2805739 - RNA, 16 nt, Human
uuaauaauaaucuagg

SEQ ID NO: 2805740 - RNA, 15 nt, Human
uuaauaacauuaccu

SEQ ID NO: 2805741 - RNA, 13 nt, Human
uuaauaacauuac

SEQ ID NO: 2805742 - RNA, 16 nt, Human
uuaauaacauuaccuu

SEQ ID NO: 2805743 - RNA, 17 nt, Human
uuaauaacauuaccuua

SEQ ID NO: 2805744 - RNA, 20 nt, Human
uuaauaacauuaccuuacug

SEQ ID NO: 2805745 - RNA, 21 nt, Human
uuaauaacauuaccuuacugu

SEQ ID NO: 2805746 - RNA, 19 nt, Human
uuaagccucauauuuaaag

SEQ ID NO: 2805747 - RNA, 20 nt, Human
uuaauagagaaggaaagcuu

SEQ ID NO: 2805748 - RNA, 23 nt, Human
uuaauagagaaggaaagcuuugg

SEQ ID NO: 2805749 - RNA, 17 nt, Human
uuaauagaucuuagggu

SEQ ID NO: 2805750 - RNA, 21 nt, Human
uuaauacgcaggcaucugauu

SEQ ID NO: 2805751 - RNA, 15 nt, Human
uuaauacuaaaauau

SEQ ID NO: 2805752 - RNA, 15 nt, Human
uuaauacuaccuuga

SEQ ID NO: 2805753 - RNA, 22 nt, Human
uuaauacaguuuauuuuuaaag

SEQ ID NO: 2805754 - RNA, 17 nt, Human
uuaauacuaccuugaaa

SEQ ID NO: 2805755 - RNA, 13 nt, Human
uuaagaguccaag

SEQ ID NO: 2805756 - RNA, 14 nt, Human
uuaagaguccaaga

SEQ ID NO: 2805757 - RNA, 19 nt, Human
uuaagaguccaagaaucca

SEQ ID NO: 2805758 - RNA, 15 nt, Human
uuaagauuuuacaaa

SEQ ID NO: 2805759 - RNA, 16 nt, Human
uuaagauuuuacaaaa

SEQ ID NO: 2805760 - RNA, 18 nt, Human
uuaagauuuuacaaaaga

SEQ ID NO: 2805761 - RNA, 14 nt, Human
uuaagauuuuucuc

SEQ ID NO: 2805762 - RNA, 15 nt, Human
uuaagauuuuucuca

SEQ ID NO: 2805763 - RNA, 16 nt, Human
uuaagauuuuucucaa

SEQ ID NO: 2805764 - RNA, 17 nt, Human
uuaagauuuuucucaaa

SEQ ID NO: 2805765 - RNA, 20 nt, Human
uuaagauuuuucucaaaguu

SEQ ID NO: 2805766 - RNA, 22 nt, Human
uuaagauuuuucucaaaguuuu

SEQ ID NO: 2805767 - RNA, 19 nt, Human
uuaagcaaaagaaaaagau

SEQ ID NO: 2805768 - RNA, 14 nt, Human
uuaagauacaaauu

SEQ ID NO: 2805769 - RNA, 15 nt, Human
uuaagauacaaauua

SEQ ID NO: 2805770 - RNA, 20 nt, Human
uuaagauacaaauuaauuuu

SEQ ID NO: 2805771 - RNA, 12 nt, Human
uuaaauguauac

SEQ ID NO: 2805772 - RNA, 19 nt, Human
uuaaaugucuuauauagca

SEQ ID NO: 2805773 - RNA, 19 nt, Human
uuaaauguauacuauagua

SEQ ID NO: 2805774 - RNA, 14 nt, Human
uuaaauguauacua

SEQ ID NO: 2805775 - RNA, 17 nt, Human
uuaaauguguacaaugu

SEQ ID NO: 2805776 - RNA, 18 nt, Human
uuaaauguguacaaugua

SEQ ID NO: 2805777 - RNA, 20 nt, Human
uuaaauguuaugacuaugua

SEQ ID NO: 2805778 - RNA, 16 nt, Human
uuaaauguuaugacua

SEQ ID NO: 2805779 - RNA, 16 nt, Human
uguugacaguucugaa

SEQ ID NO: 2805780 - RNA, 18 nt, Human
uguugacauaccuuuuau

SEQ ID NO: 2805781 - RNA, 15 nt, Human
uguugacauauuuaa

SEQ ID NO: 2805782 - RNA, 16 nt, Human
uguugacauauuuaau

SEQ ID NO: 2805783 - RNA, 18 nt, Human
uguugacauauuuaaugu

SEQ ID NO: 2805784 - RNA, 19 nt, Human
uguugacauauuuaauguu

SEQ ID NO: 2805785 - RNA, 20 nt, Human
uguugacauauuuaauguuu

SEQ ID NO: 2805786 - RNA, 21 nt, Human
uguugacauauuuaauguuuu

SEQ ID NO: 2805787 - RNA, 23 nt, Human
uguugacauauuuaauguuuuaa

SEQ ID NO: 2805788 - RNA, 15 nt, Human
uguugacaacuguga

SEQ ID NO: 2805789 - RNA, 18 nt, Human
uguugacaacugugacug

SEQ ID NO: 2805790 - RNA, 15 nt, Human
uguugaauucuuuug

SEQ ID NO: 2805791 - RNA, 18 nt, Human
uguugaauucuuuugcca

SEQ ID NO: 2805792 - RNA, 22 nt, Human
uguugacaaaauuuucucauuu

SEQ ID NO: 2805793 - RNA, 18 nt, Human
uguugaauacuuuuuaca

SEQ ID NO: 2805794 - RNA, 13 nt, Human
uguugaauacuuu

SEQ ID NO: 2805795 - RNA, 15 nt, Human
uguugaagccuuugu

SEQ ID NO: 2805796 - RNA, 17 nt, Human
uguugaagggagguggc

SEQ ID NO: 2805797 - RNA, 13 nt, Human
uguugaagucacc

SEQ ID NO: 2805798 - RNA, 18 nt, Human
uguugaccaugucuauga

SEQ ID NO: 2805799 - RNA, 22 nt, Human
uguugagaaucccaaauuugau

SEQ ID NO: 2805800 - RNA, 18 nt, Human
uguugacauuaagaaugu

SEQ ID NO: 2805801 - RNA, 22 nt, Human
uguugacauuaagaauguuggu

SEQ ID NO: 2805802 - RNA, 15 nt, Human
uguucugcuuuccuc

SEQ ID NO: 2805803 - RNA, 14 nt, Human
uguucuuuuuauug

SEQ ID NO: 2805804 - RNA, 17 nt, Human
uguucuuuuuauugaau

SEQ ID NO: 2805805 - RNA, 15 nt, Human
uguugaaaaccaaaa

SEQ ID NO: 2805806 - RNA, 18 nt, Human
uguugaaaaccaaaauga

SEQ ID NO: 2805807 - RNA, 18 nt, Human
uguucugcccccagccca

SEQ ID NO: 2805808 - RNA, 22 nt, Human
uguucugcccccagcccaaagg

SEQ ID NO: 2805809 - RNA, 18 nt, Human
uguucucggaguguguau

SEQ ID NO: 2805810 - RNA, 17 nt, Human
uguucucggagugugua

SEQ ID NO: 2805811 - RNA, 21 nt, Human
uguucuccuuuuccucucucc

SEQ ID NO: 2805812 - RNA, 21 nt, Human
uguuggaagcuuguuuuccag

SEQ ID NO: 2805813 - RNA, 12 nt, Human
uguuggaaugaa

SEQ ID NO: 2805814 - RNA, 14 nt, Human
uguuggacaaaugu

SEQ ID NO: 2805815 - RNA, 16 nt, Human
uguuggacaaauguga

SEQ ID NO: 2805816 - RNA, 19 nt, Human
uguuggacaaaugugaaga

SEQ ID NO: 2805817 - RNA, 20 nt, Human
uguuggacaaaugugaagau

SEQ ID NO: 2805818 - RNA, 22 nt, Human
uguuggacaaaugugaagaugc

SEQ ID NO: 2805819 - RNA, 23 nt, Human
uguuggacaaaugugaagaugca

SEQ ID NO: 2805820 - RNA, 16 nt, Human
uguugauccauccagc

SEQ ID NO: 2805821 - RNA, 19 nt, Human
uguugauccauccagcuug

SEQ ID NO: 2805822 - RNA, 20 nt, Human
uguugauccauccagcuugc

SEQ ID NO: 2805823 - RNA, 16 nt, Human
uguugaucccaagaca

SEQ ID NO: 2805824 - RNA, 12 nt, Human
uguugaucccaa

SEQ ID NO: 2805825 - RNA, 22 nt, Human
uguugaugggcacuugagaacu

SEQ ID NO: 2805826 - RNA, 13 nt, Human
uguugauguaucu

SEQ ID NO: 2805827 - RNA, 17 nt, Human
uguugauguaucugagu

SEQ ID NO: 2805828 - RNA, 19 nt, Human
uguugauguaucugaguug

SEQ ID NO: 2805829 - RNA, 21 nt, Human
uguugauguaucugaguugcc

SEQ ID NO: 2805830 - RNA, 22 nt, Human
uguugauguaucugaguugcca

SEQ ID NO: 2805831 - RNA, 13 nt, Human
uguugauuaaaac

SEQ ID NO: 2805832 - RNA, 14 nt, Human
uguugauuaaaaca

SEQ ID NO: 2805833 - RNA, 21 nt, Human
uguuggacaccuuuagguucu

SEQ ID NO: 2805834 - RNA, 16 nt, Human
uguuggccaggcuggu

SEQ ID NO: 2805835 - RNA, 15 nt, Human
uguuggccaggcugg

SEQ ID NO: 2805836 - RNA, 18 nt, Human
uguuggccaggcugcucu

SEQ ID NO: 2805837 - RNA, 14 nt, Human
uguuggcagccucu

SEQ ID NO: 2805838 - RNA, 14 nt, Human
uguuggcuuuguuu

SEQ ID NO: 2805839 - RNA, 13 nt, Human
uguugggaaaaag

SEQ ID NO: 2805840 - RNA, 23 nt, Human
uguugggaaaaaggccucugucc

SEQ ID NO: 2805841 - RNA, 15 nt, Human
uguuuacauguguag

SEQ ID NO: 2805842 - RNA, 22 nt, Human
uguuuacauguguagccuaugu

SEQ ID NO: 2805843 - RNA, 14 nt, Human
uguuuaagaaaagu

SEQ ID NO: 2805844 - RNA, 18 nt, Human
uguuuaagaaaaguauuu

SEQ ID NO: 2805845 - RNA, 21 nt, Human
uguuuaagaaaaguauuuuga

SEQ ID NO: 2805846 - RNA, 22 nt, Human
uguuuaagaaaaguauuuugaa

SEQ ID NO: 2805847 - RNA, 14 nt, Human
uguuuaagaugggc

SEQ ID NO: 2805848 - RNA, 19 nt, Human
uguuggcugggggccucag

SEQ ID NO: 2805849 - RNA, 22 nt, Human
uguuggcugggaacucaccugg

SEQ ID NO: 2805850 - RNA, 21 nt, Human
uguuggcagugagugagccug

SEQ ID NO: 2805851 - RNA, 23 nt, Human
uguuggccaggcuggucuaaaac

SEQ ID NO: 2805852 - RNA, 17 nt, Human
uguuggcugggggccuc

SEQ ID NO: 2805853 - RNA, 11 nt, Human
uguguuuccuu

SEQ ID NO: 2805854 - RNA, 16 nt, Human
uguguuugaaaucauc

SEQ ID NO: 2805855 - RNA, 15 nt, Human
uguguuuuuaauaaa

SEQ ID NO: 2805856 - RNA, 14 nt, Human
uguguuuuuauugu

SEQ ID NO: 2805857 - RNA, 19 nt, Human
uguguuuuuauuguuaacu

SEQ ID NO: 2805858 - RNA, 20 nt, Human
uguguuuuuaauaaagacag

SEQ ID NO: 2805859 - RNA, 14 nt, Human
uguguuuauuucac

SEQ ID NO: 2805860 - RNA, 15 nt, Human
uguguuuauuucacu

SEQ ID NO: 2805861 - RNA, 13 nt, Human
uguguuucaaacu

SEQ ID NO: 2805862 - RNA, 19 nt, Human
ugugugugcuuauguauga

SEQ ID NO: 2805863 - RNA, 23 nt, Human
ugugugugaccccuccuggggcc

SEQ ID NO: 2805864 - RNA, 16 nt, Human
ugugugucuuaauuau

SEQ ID NO: 2805865 - RNA, 17 nt, Human
ugugugugaaaaugugu

SEQ ID NO: 2805866 - RNA, 20 nt, Human
ugugugugaaugaacacucu

SEQ ID NO: 2805867 - RNA, 16 nt, Human
ugugugugaaugaaca

SEQ ID NO: 2805868 - RNA, 14 nt, Human
uguguaugccaaga

SEQ ID NO: 2805869 - RNA, 21 nt, Human
uguguaucguaaccagccaga

SEQ ID NO: 2805870 - RNA, 17 nt, Human
uguguaucucuuucaca

SEQ ID NO: 2805871 - RNA, 18 nt, Human
uguguaugcgugugugug

SEQ ID NO: 2805872 - RNA, 16 nt, Human
ugugugaugaacuuuc

SEQ ID NO: 2805873 - RNA, 17 nt, Human
ugugugaugaacuuucu

SEQ ID NO: 2805874 - RNA, 19 nt, Human
ugugugcacguacacacac

SEQ ID NO: 2805875 - RNA, 16 nt, Human
ugugugcaaaagcagu

SEQ ID NO: 2805876 - RNA, 17 nt, Human
ugugugcaaaagcagug

SEQ ID NO: 2805877 - RNA, 17 nt, Human
ugugugcaccuuaccaa

SEQ ID NO: 2805878 - RNA, 22 nt, Human
ugugugcaccuuaccaacuuuc

SEQ ID NO: 2805879 - RNA, 23 nt, Human
ugugugcaccuuaccaacuuucu

SEQ ID NO: 2805880 - RNA, 19 nt, Human
uguguaauuuaugugaaaa

SEQ ID NO: 2805881 - RNA, 15 nt, Human
ugugugcuuauguau

SEQ ID NO: 2805882 - RNA, 11 nt, Human
uguguggccug

SEQ ID NO: 2805883 - RNA, 16 nt, Human
uguguggacuguggca

SEQ ID NO: 2805884 - RNA, 22 nt, Human
ugugugcucauguaugugcgaa

SEQ ID NO: 2805885 - RNA, 17 nt, Human
ugugugcucauguaugu

SEQ ID NO: 2805886 - RNA, 23 nt, Human
uguguggacuguggcacuugccu

SEQ ID NO: 2805887 - RNA, 16 nt, Human
uguguggccacuucug

SEQ ID NO: 2805888 - RNA, 17 nt, Human
uguguggccacuucugu

SEQ ID NO: 2805889 - RNA, 18 nt, Human
uguguggccacuucuguc

SEQ ID NO: 2805890 - RNA, 20 nt, Human
uguguggccacuucugucca

SEQ ID NO: 2805891 - RNA, 12 nt, Human
uguuaaaauaac

SEQ ID NO: 2805892 - RNA, 18 nt, Human
uguuaaaacacuucuguc

SEQ ID NO: 2805893 - RNA, 13 nt, Human
uguuaaaaauaaa

SEQ ID NO: 2805894 - RNA, 16 nt, Human
uguuaaaaauaaaucc

SEQ ID NO: 2805895 - RNA, 14 nt, Human
uguguuuuucucca

SEQ ID NO: 2805896 - RNA, 16 nt, Human
uguguuuuucuccagu

SEQ ID NO: 2805897 - RNA, 18 nt, Human
uguguuuuucuccagugc

SEQ ID NO: 2805898 - RNA, 20 nt, Human
uguguuuuucuccagugcug

SEQ ID NO: 2805899 - RNA, 21 nt, Human
uguuaaaauuaucaauaucua

SEQ ID NO: 2805900 - RNA, 14 nt, Human
uguuaaaauaacua

SEQ ID NO: 2805901 - RNA, 12 nt, Human
uguuaaaaucua

SEQ ID NO: 2805902 - RNA, 14 nt, Human
uguuaaaaucuauu

SEQ ID NO: 2805903 - RNA, 15 nt, Human
uguuaaaagauuuuu

SEQ ID NO: 2805904 - RNA, 23 nt, Human
uguuaaaauuaucaauaucuaau

SEQ ID NO: 2805905 - RNA, 17 nt, Human
uguuaaaauuaugaauc

SEQ ID NO: 2805906 - RNA, 20 nt, Human
uguuaaaauuaugaaucuga

SEQ ID NO: 2805907 - RNA, 17 nt, Human
uguuaaacagccuauuc

SEQ ID NO: 2805908 - RNA, 15 nt, Human
uguuacccaugaaaa

SEQ ID NO: 2805909 - RNA, 15 nt, Human
uguuaccgccugucu

SEQ ID NO: 2805910 - RNA, 17 nt, Human
uguuaccgccugucucu

SEQ ID NO: 2805911 - RNA, 18 nt, Human
uguuaccuaaaguauuuu

SEQ ID NO: 2805912 - RNA, 19 nt, Human
uguuaccuccaacagaacu

SEQ ID NO: 2805913 - RNA, 17 nt, Human
uguuacuaaagaaaaua

SEQ ID NO: 2805914 - RNA, 14 nt, Human
uguuacucuuacga

SEQ ID NO: 2805915 - RNA, 14 nt, Human
uguuacuauuuucu

SEQ ID NO: 2805916 - RNA, 15 nt, Human
uguuacuauuuucua

SEQ ID NO: 2805917 - RNA, 18 nt, Human
uguuacuauuuucuacaa

SEQ ID NO: 2805918 - RNA, 20 nt, Human
uguuacuauuuucuacaauu

SEQ ID NO: 2805919 - RNA, 22 nt, Human
uguuacuauuuucuacaauuaa

SEQ ID NO: 2805920 - RNA, 16 nt, Human
uguuaggaaaauuuca

SEQ ID NO: 2805921 - RNA, 14 nt, Human
uguuagcuuccuua

SEQ ID NO: 2805922 - RNA, 15 nt, Human
uguuagcuuccuuaa

SEQ ID NO: 2805923 - RNA, 20 nt, Human
uguuagcuuccuuaaguaua

SEQ ID NO: 2805924 - RNA, 20 nt, Human
uguuagcuuuuuaaaacauu

SEQ ID NO: 2805925 - RNA, 18 nt, Human
uguuagcuccaaagcauu

SEQ ID NO: 2805926 - RNA, 17 nt, Human
uguuagcuccucacugu

SEQ ID NO: 2805927 - RNA, 18 nt, Human
uguuagcuccucacugug

SEQ ID NO: 2805928 - RNA, 17 nt, Human
uguuagccccauaauuu

SEQ ID NO: 2805929 - RNA, 14 nt, Human
uguuacugcaguug

SEQ ID NO: 2805930 - RNA, 12 nt, Human
uguuacuguaau

SEQ ID NO: 2805931 - RNA, 14 nt, Human
uguuacuguaauuc

SEQ ID NO: 2805932 - RNA, 9 nt, Human
uguuacugu

SEQ ID NO: 2805933 - RNA, 20 nt, Human
uguuagcacuguugauguau

SEQ ID NO: 2805934 - RNA, 22 nt, Human
uguuagcacuguugauguaucu

SEQ ID NO: 2805935 - RNA, 22 nt, Human
uguucagaagguugcucuagau

SEQ ID NO: 2805936 - RNA, 18 nt, Human
uguucagaagguugcucu

SEQ ID NO: 2805937 - RNA, 19 nt, Human
uguucacuuuuccucccuc

SEQ ID NO: 2805938 - RNA, 16 nt, Human
uguucacuuuuccucc

SEQ ID NO: 2805939 - RNA, 22 nt, Human
uguucagcuccagcucaccagc

SEQ ID NO: 2805940 - RNA, 21 nt, Human
uguucagcuccagcucaccag

SEQ ID NO: 2805941 - RNA, 20 nt, Human
uguucagcuccagcucacca

SEQ ID NO: 2805942 - RNA, 18 nt, Human
uguucagcuccagcucac

SEQ ID NO: 2805943 - RNA, 12 nt, Human
uguucauacauu

SEQ ID NO: 2805944 - RNA, 13 nt, Human
cugccagggagcu

SEQ ID NO: 2805945 - RNA, 12 nt, Human
cugccagggagc

SEQ ID NO: 2805946 - RNA, 13 nt, Human
cugccagggcagu

SEQ ID NO: 2805947 - RNA, 15 nt, Human
cugccagggcagugc

SEQ ID NO: 2805948 - RNA, 16 nt, Human
cugccagggcagugcu

SEQ ID NO: 2805949 - RNA, 17 nt, Human
cugccagggcagugcua

SEQ ID NO: 2805950 - RNA, 12 nt, Human
cugccagggcag

SEQ ID NO: 2805951 - RNA, 22 nt, Human
cugccagucccccugccccagg

SEQ ID NO: 2805952 - RNA, 20 nt, Human
cugccagucccccugcccca

SEQ ID NO: 2805953 - RNA, 21 nt, Human
cugccagucccccugccccag

SEQ ID NO: 2805954 - RNA, 17 nt, Human
cugccagucccccugcc

SEQ ID NO: 2805955 - RNA, 15 nt, Human
cugccaguguggaac

SEQ ID NO: 2805956 - RNA, 15 nt, Human
cugccaguguggagu

SEQ ID NO: 2805957 - RNA, 17 nt, Human
cugccauauauaacaga

SEQ ID NO: 2805958 - RNA, 19 nt, Human
cugccauccagguucagcu

SEQ ID NO: 2805959 - RNA, 18 nt, Human
cugccauccagguucagc

SEQ ID NO: 2805960 - RNA, 16 nt, Human
cugccauccagguuca

SEQ ID NO: 2805961 - RNA, 16 nt, Human
cugccauauucuguug

SEQ ID NO: 2805962 - RNA, 12 nt, Human
cugcccccacga

SEQ ID NO: 2805963 - RNA, 21 nt, Human
cugcccccacgagggucagga

SEQ ID NO: 2805964 - RNA, 14 nt, Human
cugcccccagccca

SEQ ID NO: 2805965 - RNA, 15 nt, Human
cugcccccagcccaa

SEQ ID NO: 2805966 - RNA, 16 nt, Human
cugcccccagcccaaa

SEQ ID NO: 2805967 - RNA, 18 nt, Human
cugcccccagcccaaagg

SEQ ID NO: 2805968 - RNA, 16 nt, Human
cugccccaucugggga

SEQ ID NO: 2805969 - RNA, 16 nt, Human
cugcccccggcccccu

SEQ ID NO: 2805970 - RNA, 17 nt, Human
cugcccccggcccccug

SEQ ID NO: 2805971 - RNA, 18 nt, Human
cugcccccggcccccugg

SEQ ID NO: 2805972 - RNA, 17 nt, Human
cugccccgcccagcugc

SEQ ID NO: 2805973 - RNA, 16 nt, Human
cugccccgcccagcug

SEQ ID NO: 2805974 - RNA, 15 nt, Human
cugccccgcccagcu

SEQ ID NO: 2805975 - RNA, 19 nt, Human
cugccccccccccccaucu

SEQ ID NO: 2805976 - RNA, 21 nt, Human
cugccccccagccucuggcau

SEQ ID NO: 2805977 - RNA, 13 nt, Human
cugccccccagcc

SEQ ID NO: 2805978 - RNA, 16 nt, Human
cugccccccagccucu

SEQ ID NO: 2805979 - RNA, 19 nt, Human
cugccccccagccucuggc

SEQ ID NO: 2805980 - RNA, 12 nt, Human
cugccccccagc

SEQ ID NO: 2805981 - RNA, 19 nt, Human
cugccccuccucucugccc

SEQ ID NO: 2805982 - RNA, 18 nt, Human
cugccccuccucucugcc

SEQ ID NO: 2805983 - RNA, 17 nt, Human
cugccccuccucucugc

SEQ ID NO: 2805984 - RNA, 13 nt, Human
cugccccucccuu

SEQ ID NO: 2805985 - RNA, 14 nt, Human
cugccccucccuuc

SEQ ID NO: 2805986 - RNA, 17 nt, Human
cugccccucccuucaac

SEQ ID NO: 2805987 - RNA, 23 nt, Human
cugcacuauagccuaggugacag

SEQ ID NO: 2805988 - RNA, 22 nt, Human
cugcacuauagccuaggugaca

SEQ ID NO: 2805989 - RNA, 16 nt, Human
cugcacuaauuugaug

SEQ ID NO: 2805990 - RNA, 18 nt, Human
cugcacuaaagccagccu

SEQ ID NO: 2805991 - RNA, 19 nt, Human
cugcacuaaagccagccug

SEQ ID NO: 2805992 - RNA, 20 nt, Human
cugcacuaaagccagccuga

SEQ ID NO: 2805993 - RNA, 21 nt, Human
cugcacuaaagccagccugac

SEQ ID NO: 2805994 - RNA, 22 nt, Human
cugcacuaaagccagccugacc

SEQ ID NO: 2805995 - RNA, 23 nt, Human
cugcacuaaagccagccugaccu

SEQ ID NO: 2805996 - RNA, 20 nt, Human
cugcacuauagccuagguga

SEQ ID NO: 2805997 - RNA, 18 nt, Human
cugcacuauagccuaggu

SEQ ID NO: 2805998 - RNA, 17 nt, Human
cugcacuauagccuagg

SEQ ID NO: 2805999 - RNA, 16 nt, Human
cugcacuauagccuag

SEQ ID NO: 2806000 - RNA, 17 nt, Human
cugcacuccagccuggg

SEQ ID NO: 2806001 - RNA, 16 nt, Human
cugcacuccagccugg

SEQ ID NO: 2806002 - RNA, 14 nt, Human
cugcacuccagccu

SEQ ID NO: 2806003 - RNA, 14 nt, Human
cugcacucaagcuu

SEQ ID NO: 2806004 - RNA, 17 nt, Human
cugcacucaaccuuaag

SEQ ID NO: 2806005 - RNA, 19 nt, Human
cugcacuccagccugggcg

SEQ ID NO: 2806006 - RNA, 18 nt, Human
cugcacuccagccugggc

SEQ ID NO: 2806007 - RNA, 24 nt, Human
cugcagccucaaccuccugggcua

SEQ ID NO: 2806008 - RNA, 20 nt, Human
cugcacuccagccugggcga

SEQ ID NO: 2806009 - RNA, 23 nt, Human
cugcagccucaaccuccugggcu

SEQ ID NO: 2806010 - RNA, 15 nt, Human
cugcagcuaguccua

SEQ ID NO: 2806011 - RNA, 21 nt, Human
cugcagcuaguccuagugaac

SEQ ID NO: 2806012 - RNA, 20 nt, Human
cugcagccuuugccuccccg

SEQ ID NO: 2806013 - RNA, 18 nt, Human
cugcagccuuugccuccc

SEQ ID NO: 2806014 - RNA, 17 nt, Human
cugcagccuugaacucu

SEQ ID NO: 2806015 - RNA, 21 nt, Human
cugcagccuugaacucugggc

SEQ ID NO: 2806016 - RNA, 22 nt, Human
cugcagccuugaacucugggcu

SEQ ID NO: 2806017 - RNA, 14 nt, Human
cugcagcugggcug

SEQ ID NO: 2806018 - RNA, 13 nt, Human
cugcagcugggcu

SEQ ID NO: 2806019 - RNA, 11 nt, Human
cugcagcuucc

SEQ ID NO: 2806020 - RNA, 12 nt, Human
cugcagcuuccu

SEQ ID NO: 2806021 - RNA, 13 nt, Human
cugcagcuuccug

SEQ ID NO: 2806022 - RNA, 15 nt, Human
cugcagcuuccuguc

SEQ ID NO: 2806023 - RNA, 19 nt, Human
cugcagcuuccugucaaca

SEQ ID NO: 2806024 - RNA, 12 nt, Human
cugcagcuuggg

SEQ ID NO: 2806025 - RNA, 13 nt, Human
cugcagcuuggga

SEQ ID NO: 2806026 - RNA, 22 nt, Human
cugcagcuugggagagccccug

SEQ ID NO: 2806027 - RNA, 11 nt, Human
cugcagcugcc

SEQ ID NO: 2806028 - RNA, 12 nt, Human
cugcagcugccg

SEQ ID NO: 2806029 - RNA, 13 nt, Human
cugcagcugccgg

SEQ ID NO: 2806030 - RNA, 22 nt, Human
cugcagcugccgggccugauuu

SEQ ID NO: 2806031 - RNA, 13 nt, Human
cugcagcuggaca

SEQ ID NO: 2806032 - RNA, 14 nt, Human
cugcagcuggacag

SEQ ID NO: 2806033 - RNA, 15 nt, Human
cugcagcuggacaga

SEQ ID NO: 2806034 - RNA, 16 nt, Human
cugcagcuggacagag

SEQ ID NO: 2806035 - RNA, 17 nt, Human
cugcagcuggacagagg

SEQ ID NO: 2806036 - RNA, 18 nt, Human
cugcagcuggacagaggg

SEQ ID NO: 2806037 - RNA, 19 nt, Human
cugcagcuggacagagggg

SEQ ID NO: 2806038 - RNA, 17 nt, Human
cugcaggccaggccagc

SEQ ID NO: 2806039 - RNA, 24 nt, Human
cugcaggccaagagcagaggcagc

SEQ ID NO: 2806040 - RNA, 23 nt, Human
cugcaggccaagagcagaggcag

SEQ ID NO: 2806041 - RNA, 22 nt, Human
cugcaggccaagagcagaggca

SEQ ID NO: 2806042 - RNA, 23 nt, Human
cugcaggccaggccagcugccuc

SEQ ID NO: 2806043 - RNA, 18 nt, Human
cugcaggccaggccagcu

SEQ ID NO: 2806044 - RNA, 17 nt, Human
cugcaggcaucacagcu

SEQ ID NO: 2806045 - RNA, 21 nt, Human
cugcaggccaagagcagaggc

SEQ ID NO: 2806046 - RNA, 19 nt, Human
cugcaggccaagagcagag

SEQ ID NO: 2806047 - RNA, 15 nt, Human
cugcaggccaagagc

SEQ ID NO: 2806048 - RNA, 12 nt, Human
cugcagcuuuac

SEQ ID NO: 2806049 - RNA, 14 nt, Human
cugcagcuuuacau

SEQ ID NO: 2806050 - RNA, 21 nt, Human
cugcagcuuuacaugcaauuu

SEQ ID NO: 2806051 - RNA, 19 nt, Human
cugcaggacuugagaagac

SEQ ID NO: 2806052 - RNA, 22 nt, Human
cugcaggaccugccuguagccc

SEQ ID NO: 2806053 - RNA, 23 nt, Human
cugcaggacuugagaagaccuca

SEQ ID NO: 2806054 - RNA, 21 nt, Human
cugcaggaccugccuguagcc

SEQ ID NO: 2806055 - RNA, 18 nt, Human
cugcaggaccugccugua

SEQ ID NO: 2806056 - RNA, 17 nt, Human
cugcaggaccugccugu

SEQ ID NO: 2806057 - RNA, 16 nt, Human
cugcaggaccugccug

SEQ ID NO: 2806058 - RNA, 15 nt, Human
cugcaggaccugccu

SEQ ID NO: 2806059 - RNA, 14 nt, Human
cugcaggaccugcc

SEQ ID NO: 2806060 - RNA, 15 nt, Human
cugcaggaaucaaaa

SEQ ID NO: 2806061 - RNA, 20 nt, Human
cugcaggaaucaaaaauuga

SEQ ID NO: 2806062 - RNA, 22 nt, Human
cugcaggaaucaaaaauugaag

SEQ ID NO: 2806063 - RNA, 15 nt, Human
cugcaagaggcuccu

SEQ ID NO: 2806064 - RNA, 16 nt, Human
cugcaagaggcuccug

SEQ ID NO: 2806065 - RNA, 18 nt, Human
cugcaagaggcuccuguc

SEQ ID NO: 2806066 - RNA, 20 nt, Human
cugcaagcacaucugcauuu

SEQ ID NO: 2806067 - RNA, 17 nt, Human
cugcaaggucuuugguu

SEQ ID NO: 2806068 - RNA, 13 nt, Human
cugcaagccuguc

SEQ ID NO: 2806069 - RNA, 14 nt, Human
cugcaaggacauuc

SEQ ID NO: 2806070 - RNA, 19 nt, Human
cugcaaggacauucuugua

SEQ ID NO: 2806071 - RNA, 13 nt, Human
cugcaaggcccac

SEQ ID NO: 2806072 - RNA, 14 nt, Human
cugcaaggcccaca

SEQ ID NO: 2806073 - RNA, 16 nt, Human
cugcaaggcccacagg

SEQ ID NO: 2806074 - RNA, 17 nt, Human
cugcaaggcccacagga

SEQ ID NO: 2806075 - RNA, 18 nt, Human
cugcaaggcccacaggag

SEQ ID NO: 2806076 - RNA, 19 nt, Human
cugcaaggcccacaggagg

SEQ ID NO: 2806077 - RNA, 20 nt, Human
cugcaaggcccacaggaggc

SEQ ID NO: 2806078 - RNA, 23 nt, Human
cugcaccgggccacagagaaagu

SEQ ID NO: 2806079 - RNA, 20 nt, Human
cugcaccgggccacagagaa

SEQ ID NO: 2806080 - RNA, 17 nt, Human
cugcaccguacugugga

SEQ ID NO: 2806081 - RNA, 20 nt, Human
cugcaccugccagccuggcu

SEQ ID NO: 2806082 - RNA, 19 nt, Human
cugcaccugccagccuggc

SEQ ID NO: 2806083 - RNA, 18 nt, Human
cugcaccugccagccugg

SEQ ID NO: 2806084 - RNA, 17 nt, Human
cugcaccugccagccug

SEQ ID NO: 2806085 - RNA, 16 nt, Human
cugcaccugccagccu

SEQ ID NO: 2806086 - RNA, 13 nt, Human
cugcaccugccag

SEQ ID NO: 2806087 - RNA, 22 nt, Human
cugcaaccuccgccucuugggu

SEQ ID NO: 2806088 - RNA, 20 nt, Human
cugcaaccuccgccucuugg

SEQ ID NO: 2806089 - RNA, 12 nt, Human
cugcaacaggcu

SEQ ID NO: 2806090 - RNA, 22 nt, Human
cugcaaccuucgccaccugggu

SEQ ID NO: 2806091 - RNA, 20 nt, Human
cugcaaccuucgccaccugg

SEQ ID NO: 2806092 - RNA, 19 nt, Human
cugcaaccuucgccaccug

SEQ ID NO: 2806093 - RNA, 17 nt, Human
cugcaaccuucgccacc

SEQ ID NO: 2806094 - RNA, 19 nt, Human
cugcaacuuguaaaugugg

SEQ ID NO: 2806095 - RNA, 15 nt, Human
cugcaacuucugccu

SEQ ID NO: 2806096 - RNA, 18 nt, Human
cugcaacuuguaaaugug

SEQ ID NO: 2806097 - RNA, 14 nt, Human
cugcaacuucugcc

SEQ ID NO: 2806098 - RNA, 24 nt, Human
cugaugcucccuccccugcccugg

SEQ ID NO: 2806099 - RNA, 23 nt, Human
cugaugcucccuccccugcccug

SEQ ID NO: 2806100 - RNA, 16 nt, Human
cugaugcugagauucu

SEQ ID NO: 2806101 - RNA, 23 nt, Human
cugaugcugagauucuucaggcu

SEQ ID NO: 2806102 - RNA, 16 nt, Human
cugaugcuguucucuu

SEQ ID NO: 2806103 - RNA, 17 nt, Human
cugaugcuguucucuuc

SEQ ID NO: 2806104 - RNA, 22 nt, Human
cugaugcucccuccccugcccu

SEQ ID NO: 2806105 - RNA, 21 nt, Human
cugaugcucccuccccugccc

SEQ ID NO: 2806106 - RNA, 19 nt, Human
cugaugcucccuccccugc

SEQ ID NO: 2806107 - RNA, 18 nt, Human
cugaugcucccuccccug

SEQ ID NO: 2806108 - RNA, 17 nt, Human
cugaugcucccuccccu

SEQ ID NO: 2806109 - RNA, 15 nt, Human
cugaugcucccuccc

SEQ ID NO: 2806110 - RNA, 14 nt, Human
cugaugcucccucc

SEQ ID NO: 2806111 - RNA, 12 nt, Human
cugaugcucccu

SEQ ID NO: 2806112 - RNA, 20 nt, Human
cugaugauuucuugaaaagg

SEQ ID NO: 2806113 - RNA, 17 nt, Human
cugaugaugugccuggg

SEQ ID NO: 2806114 - RNA, 23 nt, Human
cugaugcagucacguggaggagc

SEQ ID NO: 2806115 - RNA, 23 nt, Human
cugaugcaggauuuguucucugu

SEQ ID NO: 2806116 - RNA, 18 nt, Human
cugaugccaauacuaguc

SEQ ID NO: 2806117 - RNA, 19 nt, Human
cugaugccaauacuaguca

SEQ ID NO: 2806118 - RNA, 20 nt, Human
cugaugccgugauccugagc

SEQ ID NO: 2806119 - RNA, 11 nt, Human
cucuuaucuca

SEQ ID NO: 2806120 - RNA, 15 nt, Human
cucuuaucucaguca

SEQ ID NO: 2806121 - RNA, 21 nt, Human
cucuuaucucagucaugcaua

SEQ ID NO: 2806122 - RNA, 22 nt, Human
cucuuaucucagucaugcauaa

SEQ ID NO: 2806123 - RNA, 23 nt, Human
cucuuaucucagucaugcauaaa

SEQ ID NO: 2806124 - RNA, 14 nt, Human
cucuuauuacaaag

SEQ ID NO: 2806125 - RNA, 11 nt, Human
cugaugagcaa

SEQ ID NO: 2806126 - RNA, 21 nt, Human
cugaugagcaaccgcuucccu

SEQ ID NO: 2806127 - RNA, 17 nt, Human
cugaugagaauacugag

SEQ ID NO: 2806128 - RNA, 21 nt, Human
cugaugggcaacccccagccu

SEQ ID NO: 2806129 - RNA, 18 nt, Human
cugaugggcaacccccag

SEQ ID NO: 2806130 - RNA, 22 nt, Human
cugauggcacuuagcuaucaga

SEQ ID NO: 2806131 - RNA, 22 nt, Human
cugauggaucccgaagaaugga

SEQ ID NO: 2806132 - RNA, 16 nt, Human
cugauggcaggauggc

SEQ ID NO: 2806133 - RNA, 17 nt, Human
cugauggcaggauggcc

SEQ ID NO: 2806134 - RNA, 19 nt, Human
cugauggcaggauggccug

SEQ ID NO: 2806135 - RNA, 22 nt, Human
cugauggcaggauggccuggcc

SEQ ID NO: 2806136 - RNA, 19 nt, Human
cugaugcuuuugucuaauu

SEQ ID NO: 2806137 - RNA, 15 nt, Human
cugauggaccuguca

SEQ ID NO: 2806138 - RNA, 20 nt, Human
cugauggaaguaaagccuca

SEQ ID NO: 2806139 - RNA, 22 nt, Human
cugcaaaggguaucaggugcug

SEQ ID NO: 2806140 - RNA, 21 nt, Human
cugcaaaggguaucaggugcu

SEQ ID NO: 2806141 - RNA, 18 nt, Human
cugcaaagcccagcuuga

SEQ ID NO: 2806142 - RNA, 17 nt, Human
cugcaaagcccagcuug

SEQ ID NO: 2806143 - RNA, 23 nt, Human
cugaugggcaacccccagccugc

SEQ ID NO: 2806144 - RNA, 22 nt, Human
cugaugggcaacccccagccug

SEQ ID NO: 2806145 - RNA, 24 nt, Human
cugaugggcaacccccagccugcu

SEQ ID NO: 2806146 - RNA, 12 nt, Human
cugauggcuucu

SEQ ID NO: 2806147 - RNA, 18 nt, Human
cugauggcuucuccaggg

SEQ ID NO: 2806148 - RNA, 19 nt, Human
cugauggcuucuccagggu

SEQ ID NO: 2806149 - RNA, 21 nt, Human
cugaugggcguacgcuggugc

SEQ ID NO: 2806150 - RNA, 22 nt, Human
cugaugggcguacgcuggugcu

SEQ ID NO: 2806151 - RNA, 23 nt, Human
cugaugggcguacgcuggugcug

SEQ ID NO: 2806152 - RNA, 23 nt, Human
cuggugcccuaaccucugaguca

SEQ ID NO: 2806153 - RNA, 14 nt, Human
cuggugccuccaga

SEQ ID NO: 2806154 - RNA, 16 nt, Human
cuggugccuccagagg

SEQ ID NO: 2806155 - RNA, 15 nt, Human
cuggugccuggcucu

SEQ ID NO: 2806156 - RNA, 16 nt, Human
cuggugccuggcucuu

SEQ ID NO: 2806157 - RNA, 16 nt, Human
cuggugcgaauggacu

SEQ ID NO: 2806158 - RNA, 17 nt, Human
cuggugcgaauggacuu

SEQ ID NO: 2806159 - RNA, 15 nt, Human
cuggugccuccagag

SEQ ID NO: 2806160 - RNA, 14 nt, Human
cuggugcccggaga

SEQ ID NO: 2806161 - RNA, 20 nt, Human
cuggugcccuaaccucugag

SEQ ID NO: 2806162 - RNA, 19 nt, Human
cugggugguacccucugga

SEQ ID NO: 2806163 - RNA, 16 nt, Human
cugggugguacccucu

SEQ ID NO: 2806164 - RNA, 13 nt, Human
cugggugucauuu

SEQ ID NO: 2806165 - RNA, 20 nt, Human
cugggugucauuucauucca

SEQ ID NO: 2806166 - RNA, 21 nt, Human
cugggugucauuucauuccau

SEQ ID NO: 2806167 - RNA, 17 nt, Human
cuggugcacuuuguaaa

SEQ ID NO: 2806168 - RNA, 18 nt, Human
cuggugcacuuuguaaau

SEQ ID NO: 2806169 - RNA, 19 nt, Human
cuggugcacuuuguaaauu

SEQ ID NO: 2806170 - RNA, 17 nt, Human
cugggcagccaggcugc

SEQ ID NO: 2806171 - RNA, 18 nt, Human
cugggcagccaggcugcc

SEQ ID NO: 2806172 - RNA, 16 nt, Human
cugggcagccaggcug

SEQ ID NO: 2806173 - RNA, 15 nt, Human
cugggcagccaggcu

SEQ ID NO: 2806174 - RNA, 18 nt, Human
cugggcagcauagcaaga

SEQ ID NO: 2806175 - RNA, 17 nt, Human
cugggcagcauagcaag

SEQ ID NO: 2806176 - RNA, 17 nt, Human
cugggcaggacucagcu

SEQ ID NO: 2806177 - RNA, 16 nt, Human
cugggcauagaugcag

SEQ ID NO: 2806178 - RNA, 23 nt, Human
cugggcauagaugcaggugagcc

SEQ ID NO: 2806179 - RNA, 23 nt, Human
cugggccauguccaaagaggcug

SEQ ID NO: 2806180 - RNA, 22 nt, Human
cugggccauguccaaagaggcu

SEQ ID NO: 2806181 - RNA, 19 nt, Human
cugggccauguccaaagag

SEQ ID NO: 2806182 - RNA, 18 nt, Human
cugggccauguccaaaga

SEQ ID NO: 2806183 - RNA, 17 nt, Human
cugggccauguccaaag

SEQ ID NO: 2806184 - RNA, 22 nt, Human
cugggccagggucugugugaau

SEQ ID NO: 2806185 - RNA, 20 nt, Human
cugggcaugguaccagcccu

SEQ ID NO: 2806186 - RNA, 21 nt, Human
cugggcaugguaccagcccug

SEQ ID NO: 2806187 - RNA, 22 nt, Human
cugggcaugguaccagcccugg

SEQ ID NO: 2806188 - RNA, 14 nt, Human
cuggggccuggacc

SEQ ID NO: 2806189 - RNA, 16 nt, Human
cuggggccuggaccug

SEQ ID NO: 2806190 - RNA, 17 nt, Human
cuggggccuggaccugc

SEQ ID NO: 2806191 - RNA, 19 nt, Human
cuggggccuggaccugccu

SEQ ID NO: 2806192 - RNA, 12 nt, Human
cuggggccuggc

SEQ ID NO: 2806193 - RNA, 13 nt, Human
cuggggccuggca

SEQ ID NO: 2806194 - RNA, 18 nt, Human
cuggggccuggcagggag

SEQ ID NO: 2806195 - RNA, 19 nt, Human
cuggggccuggcagggagg

SEQ ID NO: 2806196 - RNA, 18 nt, Human
cuggggccuggaccugcc

SEQ ID NO: 2806197 - RNA, 12 nt, Human
cuggggccugag

SEQ ID NO: 2806198 - RNA, 13 nt, Human
cuggggccugaga

SEQ ID NO: 2806199 - RNA, 14 nt, Human
cuggggccugagag

SEQ ID NO: 2806200 - RNA, 15 nt, Human
cuggggccugagaga

SEQ ID NO: 2806201 - RNA, 16 nt, Human
cuggggccugagagaa

SEQ ID NO: 2806202 - RNA, 17 nt, Human
cuggggccugagagaau

SEQ ID NO: 2806203 - RNA, 13 nt, Human
cuggggagaaagu

SEQ ID NO: 2806204 - RNA, 21 nt, Human
cuggggacgcuccgcugccgu

SEQ ID NO: 2806205 - RNA, 19 nt, Human
cuggggacgcuccgcugcc

SEQ ID NO: 2806206 - RNA, 22 nt, Human
cuggggaccugguacccuccug

SEQ ID NO: 2806207 - RNA, 16 nt, Human
cuggggacagcaaggg

SEQ ID NO: 2806208 - RNA, 20 nt, Human
cuggggaccugguacccucc

SEQ ID NO: 2806209 - RNA, 12 nt, Human
cuggggacccac

SEQ ID NO: 2806210 - RNA, 16 nt, Human
cugggugcugauccuu

SEQ ID NO: 2806211 - RNA, 20 nt, Human
cugggugcugauccuugcac

SEQ ID NO: 2806212 - RNA, 23 nt, Human
cuggguggacauggccccuguga

SEQ ID NO: 2806213 - RNA, 20 nt, Human
cuggguggaucggccuccuc

SEQ ID NO: 2806214 - RNA, 14 nt, Human
cugggugcagcuga

SEQ ID NO: 2806215 - RNA, 15 nt, Human
cugggugcagcugag

SEQ ID NO: 2806216 - RNA, 17 nt, Human
cugggucuuuugcuacu

SEQ ID NO: 2806217 - RNA, 15 nt, Human
cuggcuccuuuacaa

SEQ ID NO: 2806218 - RNA, 17 nt, Human
cuggcuccuuuacaaaa

SEQ ID NO: 2806219 - RNA, 22 nt, Human
cuggcuccuuuacaaaagaaau

SEQ ID NO: 2806220 - RNA, 20 nt, Human
cuggcuccguccaggagccu

SEQ ID NO: 2806221 - RNA, 16 nt, Human
cuggcuccucuguggu

SEQ ID NO: 2806222 - RNA, 17 nt, Human
cuggcuccucuguggug

SEQ ID NO: 2806223 - RNA, 18 nt, Human
cuggcuccucuguggugu

SEQ ID NO: 2806224 - RNA, 22 nt, Human
cuggcuccucuguggugucugc

SEQ ID NO: 2806225 - RNA, 24 nt, Human
cuggcuccucuguggugucugccu

SEQ ID NO: 2806226 - RNA, 17 nt, Human
cuggcuccugaggggca

SEQ ID NO: 2806227 - RNA, 16 nt, Human
cuggcuccugaggggc

SEQ ID NO: 2806228 - RNA, 15 nt, Human
cuggcuccugagggg

SEQ ID NO: 2806229 - RNA, 14 nt, Human
cuggcuccugaggg

SEQ ID NO: 2806230 - RNA, 22 nt, Human
cugggacaguuuaucaugaagc

SEQ ID NO: 2806231 - RNA, 23 nt, Human
cugggacaguuuaucaugaagcc

SEQ ID NO: 2806232 - RNA, 16 nt, Human
cugggacuacaggcac

SEQ ID NO: 2806233 - RNA, 15 nt, Human
cugggacuacaggca

SEQ ID NO: 2806234 - RNA, 13 nt, Human
cugggacuacagg

SEQ ID NO: 2806235 - RNA, 22 nt, Human
cugggaccacagguucaugcca

SEQ ID NO: 2806236 - RNA, 14 nt, Human
cugggaccacguga

SEQ ID NO: 2806237 - RNA, 19 nt, Human
cuggcuagaguccucacuc

SEQ ID NO: 2806238 - RNA, 18 nt, Human
cuggcuagaguccucacu

SEQ ID NO: 2806239 - RNA, 17 nt, Human
cuggcuagaguccucac

SEQ ID NO: 2806240 - RNA, 16 nt, Human
cuggcuagaguccuca

SEQ ID NO: 2806241 - RNA, 21 nt, Human
cuggcuagaguccucacuccc

SEQ ID NO: 2806242 - RNA, 20 nt, Human
cuggcuagaguccucacucc

SEQ ID NO: 2806243 - RNA, 22 nt, Human
cuggcuagaguccucacuccca

SEQ ID NO: 2806244 - RNA, 15 nt, Human
cuggcucacaguaca

SEQ ID NO: 2806245 - RNA, 16 nt, Human
cuggcucacaguacag

SEQ ID NO: 2806246 - RNA, 17 nt, Human
cuggcucacaguacagc

SEQ ID NO: 2806247 - RNA, 19 nt, Human
cuggcucacaguacagcau

SEQ ID NO: 2806248 - RNA, 22 nt, Human
cuggcucacaguacagcaugug

SEQ ID NO: 2806249 - RNA, 24 nt, Human
cuggcucacaguacagcaugugcc

SEQ ID NO: 2806250 - RNA, 23 nt, Human
cuggcuaucaaagaauaagaaaa

SEQ ID NO: 2806251 - RNA, 20 nt, Human
cuggccgaggguccuggcuc

SEQ ID NO: 2806252 - RNA, 19 nt, Human
cuggccgaggguccuggcu

SEQ ID NO: 2806253 - RNA, 23 nt, Human
cuggcuagaggccagccccaccc

SEQ ID NO: 2806254 - RNA, 21 nt, Human
cuggccgaggguccuggcucc

SEQ ID NO: 2806255 - RNA, 17 nt, Human
cuggccgaggguccugg

SEQ ID NO: 2806256 - RNA, 12 nt, Human
cugcugacagug

SEQ ID NO: 2806257 - RNA, 11 nt, Human
cugcugacagu

SEQ ID NO: 2806258 - RNA, 9 nt, Human
cugcugacc

SEQ ID NO: 2806259 - RNA, 23 nt, Human
cugcugagucccaggcugagccu

SEQ ID NO: 2806260 - RNA, 19 nt, Human
cugcugagucccaggcuga

SEQ ID NO: 2806261 - RNA, 15 nt, Human
cugcugacaguguug

SEQ ID NO: 2806262 - RNA, 13 nt, Human
cugcugacagugu

SEQ ID NO: 2806263 - RNA, 19 nt, Human
cugcucacauaucugucau

SEQ ID NO: 2806264 - RNA, 16 nt, Human
cugcucacauaucugu

SEQ ID NO: 2806265 - RNA, 14 nt, Human
cugcucacauaucu

SEQ ID NO: 2806266 - RNA, 14 nt, Human
cugcugucuucugg

SEQ ID NO: 2806267 - RNA, 20 nt, Human
cugcugucccucccccuugu

SEQ ID NO: 2806268 - RNA, 20 nt, Human
cuggaugauggucuucagcc

SEQ ID NO: 2806269 - RNA, 13 nt, Human
cuggaugaaauuu

SEQ ID NO: 2806270 - RNA, 23 nt, Human
cuggauggagcccaggcgggagc

SEQ ID NO: 2806271 - RNA, 11 nt, Human
cuggauggagc

SEQ ID NO: 2806272 - RNA, 15 nt, Human
cuggauggagcccag

SEQ ID NO: 2806273 - RNA, 16 nt, Human
cuggauggagcccagg

SEQ ID NO: 2806274 - RNA, 17 nt, Human
cuggauggagcccaggc

SEQ ID NO: 2806275 - RNA, 18 nt, Human
cuggauggagcccaggcg

SEQ ID NO: 2806276 - RNA, 13 nt, Human
cuggacuugagcu

SEQ ID NO: 2806277 - RNA, 20 nt, Human
cuggagaagagaggagagga

SEQ ID NO: 2806278 - RNA, 18 nt, Human
cuggagaagagaggagag

SEQ ID NO: 2806279 - RNA, 19 nt, Human
cuggagaagagaggagagg

SEQ ID NO: 2806280 - RNA, 15 nt, Human
cuggacuugagcuug

SEQ ID NO: 2806281 - RNA, 15 nt, Human
cuggagaagagagga

SEQ ID NO: 2806282 - RNA, 23 nt, Human
cugcuuaguaucucaucaacaaa

SEQ ID NO: 2806283 - RNA, 16 nt, Human
cuggagaagagaggag

SEQ ID NO: 2806284 - RNA, 23 nt, Human
cugcuuaucaauaaaccuguuug

SEQ ID NO: 2806285 - RNA, 19 nt, Human
cugcuuagcuugcaccuug

SEQ ID NO: 2806286 - RNA, 12 nt, Human
cugcuuagcuug

SEQ ID NO: 2806287 - RNA, 13 nt, Human
cuggagacagccc

SEQ ID NO: 2806288 - RNA, 14 nt, Human
cuggagacagcccc

SEQ ID NO: 2806289 - RNA, 15 nt, Human
cuggagacagcccca

SEQ ID NO: 2806290 - RNA, 16 nt, Human
cuggagacagccccag

SEQ ID NO: 2806291 - RNA, 17 nt, Human
cuggagacagccccaga

SEQ ID NO: 2806292 - RNA, 19 nt, Human
cuggagacagccccagagc

SEQ ID NO: 2806293 - RNA, 20 nt, Human
cuggagacagccccagagca

SEQ ID NO: 2806294 - RNA, 11 nt, Human
cuggagacagc

SEQ ID NO: 2806295 - RNA, 19 nt, Human
cuuugagucccccagagau

SEQ ID NO: 2806296 - RNA, 20 nt, Human
cuuugagucccccagagaug

SEQ ID NO: 2806297 - RNA, 14 nt, Human
cuuucuaaugcuga

SEQ ID NO: 2806298 - RNA, 13 nt, Human
cuuugauaauguu

SEQ ID NO: 2806299 - RNA, 14 nt, Human
cuuugauaauguua

SEQ ID NO: 2806300 - RNA, 15 nt, Human
cuuugauaauguuaa

SEQ ID NO: 2806301 - RNA, 19 nt, Human
cuuugauuaguuuucuugu

SEQ ID NO: 2806302 - RNA, 20 nt, Human
cuuugauuaguuuucuuguu

SEQ ID NO: 2806303 - RNA, 23 nt, Human
cuuugauuaguuuucuuguugcu

SEQ ID NO: 2806304 - RNA, 21 nt, Human
cuuugauucauaguaacuucu

SEQ ID NO: 2806305 - RNA, 13 nt, Human
cuuugauucuccu

SEQ ID NO: 2806306 - RNA, 19 nt, Human
cuuugauucauaguaacuu

SEQ ID NO: 2806307 - RNA, 12 nt, Human
cuuugauucaua

SEQ ID NO: 2806308 - RNA, 16 nt, Human
cuuugagcuuaagaau

SEQ ID NO: 2806309 - RNA, 13 nt, Human
cuuugagggacug

SEQ ID NO: 2806310 - RNA, 14 nt, Human
cuuugagggacugc

SEQ ID NO: 2806311 - RNA, 16 nt, Human
cuuugagggacugccu

SEQ ID NO: 2806312 - RNA, 18 nt, Human
cuuugagggacugccucu

SEQ ID NO: 2806313 - RNA, 19 nt, Human
cuuugagggacugccucug

SEQ ID NO: 2806314 - RNA, 20 nt, Human
cuuugagggacugccucugc

SEQ ID NO: 2806315 - RNA, 21 nt, Human
cuuugagggacugccucugcc

SEQ ID NO: 2806316 - RNA, 22 nt, Human
cuuugagggacugccucugcca

SEQ ID NO: 2806317 - RNA, 15 nt, Human
cuuuccuuuucuuua

SEQ ID NO: 2806318 - RNA, 21 nt, Human
cuuuccuuuccccagcccagg

SEQ ID NO: 2806319 - RNA, 20 nt, Human
cuuuccuuuccccagcccag

SEQ ID NO: 2806320 - RNA, 22 nt, Human
cuuucggggagaggcugaggac

SEQ ID NO: 2806321 - RNA, 15 nt, Human
cuuucguacauuggc

SEQ ID NO: 2806322 - RNA, 14 nt, Human
cuuucgucacccuu

SEQ ID NO: 2806323 - RNA, 15 nt, Human
cuuucgucacccuug

SEQ ID NO: 2806324 - RNA, 18 nt, Human
cuuucguccacagcuucc

SEQ ID NO: 2806325 - RNA, 19 nt, Human
cuuucguccacagcuuccu

SEQ ID NO: 2806326 - RNA, 21 nt, Human
cuuucguccacagcuuccugu

SEQ ID NO: 2806327 - RNA, 22 nt, Human
cuuucguguaaauuauguaaug

SEQ ID NO: 2806328 - RNA, 19 nt, Human
cuuucgauacccaggacca

SEQ ID NO: 2806329 - RNA, 14 nt, Human
cuuucgggccaugu

SEQ ID NO: 2806330 - RNA, 20 nt, Human
cuuucgggccauguugcccc

SEQ ID NO: 2806331 - RNA, 21 nt, Human
cuuucuaguggucuuuguaag

SEQ ID NO: 2806332 - RNA, 22 nt, Human
cuuucuaguggucuuuguaaga

SEQ ID NO: 2806333 - RNA, 23 nt, Human
cuuucuaguggucuuuguaagag

SEQ ID NO: 2806334 - RNA, 16 nt, Human
cuuucuaguggucuuu

SEQ ID NO: 2806335 - RNA, 18 nt, Human
cuuucuaguggucuuugu

SEQ ID NO: 2806336 - RNA, 19 nt, Human
cuuucuaguggucuuugua

SEQ ID NO: 2806337 - RNA, 20 nt, Human
cuuucuaguggucuuuguaa

SEQ ID NO: 2806338 - RNA, 14 nt, Human
cuuucuaugcugcu

SEQ ID NO: 2806339 - RNA, 15 nt, Human
cuuucuaugcugcuu

SEQ ID NO: 2806340 - RNA, 17 nt, Human
cuuucuaugcugcuuuu

SEQ ID NO: 2806341 - RNA, 19 nt, Human
cuuucuaugcugcuuuuau

SEQ ID NO: 2806342 - RNA, 20 nt, Human
cuuucuaugcugcuuuuaua

SEQ ID NO: 2806343 - RNA, 21 nt, Human
cuuucuaugcugcuuuuauau

SEQ ID NO: 2806344 - RNA, 20 nt, Human
cuuucuccccgcuaaggaag

SEQ ID NO: 2806345 - RNA, 15 nt, Human
cuuucuccuugaaua

SEQ ID NO: 2806346 - RNA, 12 nt, Human
cuuucuccuguu

SEQ ID NO: 2806347 - RNA, 22 nt, Human
cuuucuccuguuuauucccauc

SEQ ID NO: 2806348 - RNA, 15 nt, Human
cuuuucaaaacauuu

SEQ ID NO: 2806349 - RNA, 22 nt, Human
cuuuuauuuuacacagaaacac

SEQ ID NO: 2806350 - RNA, 12 nt, Human
cuuuuauuuuga

SEQ ID NO: 2806351 - RNA, 13 nt, Human
cuuuuauuuugaa

SEQ ID NO: 2806352 - RNA, 14 nt, Human
cuuuuauuuugaaa

SEQ ID NO: 2806353 - RNA, 19 nt, Human
cuuuuauuuugaaaagcuu

SEQ ID NO: 2806354 - RNA, 21 nt, Human
cuuuuauuuuacacagaaaca

SEQ ID NO: 2806355 - RNA, 20 nt, Human
cuuuuauuuuacacagaaac

SEQ ID NO: 2806356 - RNA, 13 nt, Human
cuuuucaaggcuu

SEQ ID NO: 2806357 - RNA, 18 nt, Human
cuuuucaaacaagaaugu

SEQ ID NO: 2806358 - RNA, 16 nt, Human
cuuuucaaggcuuaua

SEQ ID NO: 2806359 - RNA, 18 nt, Human
cuuuuaggccaaaaaaau

SEQ ID NO: 2806360 - RNA, 14 nt, Human
cuuuuaggaaaauc

SEQ ID NO: 2806361 - RNA, 20 nt, Human
cuuuuaggaaaaucacuuug

SEQ ID NO: 2806362 - RNA, 21 nt, Human
cuuuuaggaaaaucacuuugu

SEQ ID NO: 2806363 - RNA, 16 nt, Human
cuuuuaggccaaaaaa

SEQ ID NO: 2806364 - RNA, 22 nt, Human
cuuuggugguuuaaaaauggua

SEQ ID NO: 2806365 - RNA, 21 nt, Human
cuuuuauuguauaaacuauca

SEQ ID NO: 2806366 - RNA, 19 nt, Human
cuuuuauuugcaacauuua

SEQ ID NO: 2806367 - RNA, 21 nt, Human
cuuuuauuugcaacauuuaca

SEQ ID NO: 2806368 - RNA, 19 nt, Human
cuuuuauuuagcaccaggg

SEQ ID NO: 2806369 - RNA, 22 nt, Human
cuuuggguuaagcauuaccacu

SEQ ID NO: 2806370 - RNA, 22 nt, Human
cuuugguacauggccaguguga

SEQ ID NO: 2806371 - RNA, 17 nt, Human
cuuuggguuaagcauua

SEQ ID NO: 2806372 - RNA, 20 nt, Human
cuuuggguuaagcauuacca

SEQ ID NO: 2806373 - RNA, 17 nt, Human
cuuuggggucuacacug

SEQ ID NO: 2806374 - RNA, 22 nt, Human
cuuuggggucuacacugcaauc

SEQ ID NO: 2806375 - RNA, 23 nt, Human
cuuuggggucuacacugcaauca

SEQ ID NO: 2806376 - RNA, 17 nt, Human
cuuugggguuuuuuaau

SEQ ID NO: 2806377 - RNA, 14 nt, Human
cuuugguagaaaag

SEQ ID NO: 2806378 - RNA, 23 nt, Human
cuuuggugccaacugguguuuga

SEQ ID NO: 2806379 - RNA, 18 nt, Human
cuuuaaagggccugccug

SEQ ID NO: 2806380 - RNA, 19 nt, Human
cuuuaaagggccugccugg

SEQ ID NO: 2806381 - RNA, 17 nt, Human
cuuuaaaguguaauaau

SEQ ID NO: 2806382 - RNA, 19 nt, Human
cuuuaaaguguaauaauau

SEQ ID NO: 2806383 - RNA, 21 nt, Human
cuuuaaaguguaauaauauga

SEQ ID NO: 2806384 - RNA, 14 nt, Human
cuuuaaauaauuua

SEQ ID NO: 2806385 - RNA, 15 nt, Human
cuuuaaauaauuuaa

SEQ ID NO: 2806386 - RNA, 16 nt, Human
cuuuaaauaauuuaac

SEQ ID NO: 2806387 - RNA, 17 nt, Human
cuuuaaauaauuuaacu

SEQ ID NO: 2806388 - RNA, 18 nt, Human
cuuuaaauaauuuaacua

SEQ ID NO: 2806389 - RNA, 13 nt, Human
cuuuaaauagaua

SEQ ID NO: 2806390 - RNA, 19 nt, Human
cuuuaaauagauacaaaug

SEQ ID NO: 2806391 - RNA, 15 nt, Human
cuuuaaaucauuuua

SEQ ID NO: 2806392 - RNA, 11 nt, Human
cuuuaaauguu

SEQ ID NO: 2806393 - RNA, 15 nt, Human
cuuuaaauguuuuau

SEQ ID NO: 2806394 - RNA, 18 nt, Human
cuuuaaauguuuuauaag

SEQ ID NO: 2806395 - RNA, 22 nt, Human
cuuuaaauguuuuauaaguuca

SEQ ID NO: 2806396 - RNA, 15 nt, Human
cuuguggacacagcu

SEQ ID NO: 2806397 - RNA, 14 nt, Human
cuuguggacacagc

SEQ ID NO: 2806398 - RNA, 13 nt, Human
cuuguggacacag

SEQ ID NO: 2806399 - RNA, 21 nt, Human
cuugugcaaaauauuugacua

SEQ ID NO: 2806400 - RNA, 15 nt, Human
cuugugauuauuuau

SEQ ID NO: 2806401 - RNA, 17 nt, Human
cuugugauuauuuauua

SEQ ID NO: 2806402 - RNA, 14 nt, Human
cuuuacacacacag

SEQ ID NO: 2806403 - RNA, 20 nt, Human
cuuuacaaaagaaauaccuu

SEQ ID NO: 2806404 - RNA, 17 nt, Human
cuuuaaguagauaagca

SEQ ID NO: 2806405 - RNA, 17 nt, Human
cuuuaagugcacaacau

SEQ ID NO: 2806406 - RNA, 19 nt, Human
cuuuaagggcaugccuugu

SEQ ID NO: 2806407 - RNA, 20 nt, Human
cuuuaagggcaugccuugug

SEQ ID NO: 2806408 - RNA, 22 nt, Human
cuuuaagggcaugccuugugcu

SEQ ID NO: 2806409 - RNA, 22 nt, Human
cuuuaaucacuuaacauuccua

SEQ ID NO: 2806410 - RNA, 20 nt, Human
cuuucagaaaacgggaagcg

SEQ ID NO: 2806411 - RNA, 16 nt, Human
cuuucagacuugccau

SEQ ID NO: 2806412 - RNA, 18 nt, Human
cuuucagacuugccaugu

SEQ ID NO: 2806413 - RNA, 19 nt, Human
cuuucagacuugccaugug

SEQ ID NO: 2806414 - RNA, 14 nt, Human
cuuucagagacagc

SEQ ID NO: 2806415 - RNA, 19 nt, Human
cuuuacacucggcuuugga

SEQ ID NO: 2806416 - RNA, 15 nt, Human
cuucugagcacagau

SEQ ID NO: 2806417 - RNA, 13 nt, Human
cuucuuaaauauc

SEQ ID NO: 2806418 - RNA, 18 nt, Human
cuucuuaaauaucuuuua

SEQ ID NO: 2806419 - RNA, 22 nt, Human
cuucugaccuuuuggugaaagc

SEQ ID NO: 2806420 - RNA, 14 nt, Human
cuucugacggcccu

SEQ ID NO: 2806421 - RNA, 16 nt, Human
cuucugacggcccugc

SEQ ID NO: 2806422 - RNA, 17 nt, Human
cuucugacggcccugca

SEQ ID NO: 2806423 - RNA, 18 nt, Human
cuucugacggcccugcaa

SEQ ID NO: 2806424 - RNA, 19 nt, Human
cuucugacggcccugcaau

SEQ ID NO: 2806425 - RNA, 21 nt, Human
cuucugacugcugauucuccc

SEQ ID NO: 2806426 - RNA, 13 nt, Human
cuucugacugcug

SEQ ID NO: 2806427 - RNA, 16 nt, Human
cuugaauauggguggc

SEQ ID NO: 2806428 - RNA, 14 nt, Human
cuugaauaauaagc

SEQ ID NO: 2806429 - RNA, 13 nt, Human
cuugaaguccugg

SEQ ID NO: 2806430 - RNA, 15 nt, Human
cuugaaguccuggcu

SEQ ID NO: 2806431 - RNA, 17 nt, Human
cuugaaguccuggcuuc

SEQ ID NO: 2806432 - RNA, 18 nt, Human
cuugaaguccuggcuuca

SEQ ID NO: 2806433 - RNA, 19 nt, Human
cuugaaguccuggcuucag

SEQ ID NO: 2806434 - RNA, 20 nt, Human
cuugaaguccuggcuucagg

SEQ ID NO: 2806435 - RNA, 19 nt, Human
cuugaagucuaaaagcaga

SEQ ID NO: 2806436 - RNA, 20 nt, Human
cuugaagucuaaaagcagaa

SEQ ID NO: 2806437 - RNA, 17 nt, Human
cuuggcaucagcuggcg

SEQ ID NO: 2806438 - RNA, 16 nt, Human
cuuggcaucagcuggc

SEQ ID NO: 2806439 - RNA, 22 nt, Human
cuuggcaucacagggcagagcc

SEQ ID NO: 2806440 - RNA, 20 nt, Human
cuuggcaucacagggcagag

SEQ ID NO: 2806441 - RNA, 19 nt, Human
cuuggcaucacagggcaga

SEQ ID NO: 2806442 - RNA, 12 nt, Human
cuugacagggca

SEQ ID NO: 2806443 - RNA, 17 nt, Human
cuugccuaaauuuaaug

SEQ ID NO: 2806444 - RNA, 21 nt, Human
cuugccuaaauuuaaugcugc

SEQ ID NO: 2806445 - RNA, 22 nt, Human
cuugccuaaauuuaaugcugcc

SEQ ID NO: 2806446 - RNA, 23 nt, Human
cuugccuaaauuuaaugcugccu

SEQ ID NO: 2806447 - RNA, 12 nt, Human
cuugcucugcug

SEQ ID NO: 2806448 - RNA, 20 nt, Human
cuugcucuccccugcccugc

SEQ ID NO: 2806449 - RNA, 19 nt, Human
cuugcucuccccugcccug

SEQ ID NO: 2806450 - RNA, 17 nt, Human
cuugcucccuucagccc

SEQ ID NO: 2806451 - RNA, 18 nt, Human
cuugcucccuucagcccc

SEQ ID NO: 2806452 - RNA, 19 nt, Human
cuugcucccuucagccccc

SEQ ID NO: 2806453 - RNA, 23 nt, Human
cuugcucccuucagcccccagcc

SEQ ID NO: 2806454 - RNA, 20 nt, Human
cuugcuccuggccuugcuga

SEQ ID NO: 2806455 - RNA, 16 nt, Human
cuugccugcacaaacu

SEQ ID NO: 2806456 - RNA, 14 nt, Human
cuucagacucucag

SEQ ID NO: 2806457 - RNA, 14 nt, Human
cuucauggaacuca

SEQ ID NO: 2806458 - RNA, 21 nt, Human
cuucauggaacucagcugucu

SEQ ID NO: 2806459 - RNA, 18 nt, Human
cuucauggaauggacauc

SEQ ID NO: 2806460 - RNA, 20 nt, Human
cuucauggaauggacauccu

SEQ ID NO: 2806461 - RNA, 16 nt, Human
cuucaugccagcuacu

SEQ ID NO: 2806462 - RNA, 14 nt, Human
cuucaugccagcua

SEQ ID NO: 2806463 - RNA, 15 nt, Human
cuucaugccagcuac

SEQ ID NO: 2806464 - RNA, 22 nt, Human
cuucaucucccaaagugcuggg

SEQ ID NO: 2806465 - RNA, 17 nt, Human
cuucaucgaaucuacua

SEQ ID NO: 2806466 - RNA, 15 nt, Human
cuucaucgaaucuac

SEQ ID NO: 2806467 - RNA, 18 nt, Human
cuucaguggcagcugcuu

SEQ ID NO: 2806468 - RNA, 17 nt, Human
cuucaguguauggaaau

SEQ ID NO: 2806469 - RNA, 17 nt, Human
cuucaguuaagccuuug

SEQ ID NO: 2806470 - RNA, 18 nt, Human
cuucaguuaagccuuugg

SEQ ID NO: 2806471 - RNA, 20 nt, Human
cuucaguguauggaaauaaa

SEQ ID NO: 2806472 - RNA, 17 nt, Human
cuucaucauucccucuc

SEQ ID NO: 2806473 - RNA, 18 nt, Human
cuucaucauucccucuca

SEQ ID NO: 2806474 - RNA, 19 nt, Human
cuucaucauucccucucau

SEQ ID NO: 2806475 - RNA, 13 nt, Human
cuucaucccuuuc

SEQ ID NO: 2806476 - RNA, 14 nt, Human
cuucaucccuuucc

SEQ ID NO: 2806477 - RNA, 15 nt, Human
cuucaucccuuucca

SEQ ID NO: 2806478 - RNA, 16 nt, Human
cuucaucccuuuccag

SEQ ID NO: 2806479 - RNA, 20 nt, Human
cuucagaauuccauaucuug

SEQ ID NO: 2806480 - RNA, 21 nt, Human
cuucagaauuccauaucuugc

SEQ ID NO: 2806481 - RNA, 14 nt, Human
cuucacuuuugcaa

SEQ ID NO: 2806482 - RNA, 21 nt, Human
cuucacuuuugcaagguucca

SEQ ID NO: 2806483 - RNA, 17 nt, Human
cuucacuguccuccaag

SEQ ID NO: 2806484 - RNA, 15 nt, Human
cuucacuguugaaaa

SEQ ID NO: 2806485 - RNA, 16 nt, Human
cuucacuguugaaaau

SEQ ID NO: 2806486 - RNA, 18 nt, Human
cuucacuguugaaaauua

SEQ ID NO: 2806487 - RNA, 19 nt, Human
cuucacuguugaaaauuau

SEQ ID NO: 2806488 - RNA, 21 nt, Human
cuucacuguccuccaagccag

SEQ ID NO: 2806489 - RNA, 18 nt, Human
cuucacuguccuccaagc

SEQ ID NO: 2806490 - RNA, 18 nt, Human
cuuauugcccacgcugga

SEQ ID NO: 2806491 - RNA, 21 nt, Human
cuuaugggucccccucagcaa

SEQ ID NO: 2806492 - RNA, 14 nt, Human
cuucaccuccucgc

SEQ ID NO: 2806493 - RNA, 14 nt, Human
cuuauugcgcugcu

SEQ ID NO: 2806494 - RNA, 16 nt, Human
cuuauugcgcugcuac

SEQ ID NO: 2806495 - RNA, 17 nt, Human
cuuauugcgcugcuacc

SEQ ID NO: 2806496 - RNA, 14 nt, Human
cuuauugcugauuu

SEQ ID NO: 2806497 - RNA, 16 nt, Human
cuuauugcugauuuua

SEQ ID NO: 2806498 - RNA, 20 nt, Human
cuucaccuaagucucuguga

SEQ ID NO: 2806499 - RNA, 15 nt, Human
cuuccaugucgccuc

SEQ ID NO: 2806500 - RNA, 16 nt, Human
cuuccaugucgccucu

SEQ ID NO: 2806501 - RNA, 17 nt, Human
cuuccaugauucuauuu

SEQ ID NO: 2806502 - RNA, 14 nt, Human
cuuccaugauuuua

SEQ ID NO: 2806503 - RNA, 14 nt, Human
cuuccaugauucua

SEQ ID NO: 2806504 - RNA, 17 nt, Human
cuuccaugucgccucug

SEQ ID NO: 2806505 - RNA, 18 nt, Human
cuuccaugucgccucugc

SEQ ID NO: 2806506 - RNA, 19 nt, Human
cuuccaugucgccucugca

SEQ ID NO: 2806507 - RNA, 20 nt, Human
cuuccaugucgccucugcau

SEQ ID NO: 2806508 - RNA, 19 nt, Human
cuuccauguaucuuuugaa

SEQ ID NO: 2806509 - RNA, 13 nt, Human
cuuauugcccacg

SEQ ID NO: 2806510 - RNA, 12 nt, Human
cuuauugcccac

SEQ ID NO: 2806511 - RNA, 13 nt, Human
cuuauuacaauuu

SEQ ID NO: 2806512 - RNA, 20 nt, Human
cuuauguggguugccuggug

SEQ ID NO: 2806513 - RNA, 19 nt, Human
cuuauguagcaggaaauaa

SEQ ID NO: 2806514 - RNA, 13 nt, Human
cuuauuaaaguuc

SEQ ID NO: 2806515 - RNA, 14 nt, Human
cuuauuaaaguucu

SEQ ID NO: 2806516 - RNA, 18 nt, Human
cuuauuaaaguucuguaa

SEQ ID NO: 2806517 - RNA, 15 nt, Human
cuuauguagauauuu

SEQ ID NO: 2806518 - RNA, 16 nt, Human
cuuauguagauauuug

SEQ ID NO: 2806519 - RNA, 17 nt, Human
cuuauguagauauuugg

SEQ ID NO: 2806520 - RNA, 18 nt, Human
cuuauguagauauuuggc

SEQ ID NO: 2806521 - RNA, 19 nt, Human
cuuauguagauauuuggcu

SEQ ID NO: 2806522 - RNA, 18 nt, Human
cuuauggauucauuuaua

SEQ ID NO: 2806523 - RNA, 15 nt, Human
cuuauggccacagcc

SEQ ID NO: 2806524 - RNA, 23 nt, Human
cuuauggaauugauuugcauuga

SEQ ID NO: 2806525 - RNA, 21 nt, Human
cuuauggaauugauuugcauu

SEQ ID NO: 2806526 - RNA, 20 nt, Human
cuuauggaauugauuugcau

SEQ ID NO: 2806527 - RNA, 19 nt, Human
cuuauggaauugauuugca

SEQ ID NO: 2806528 - RNA, 17 nt, Human
cuuauggaauugauuug

SEQ ID NO: 2806529 - RNA, 16 nt, Human
cuuauggaauugauuu

SEQ ID NO: 2806530 - RNA, 14 nt, Human
cuuauggaauugau

SEQ ID NO: 2806531 - RNA, 18 nt, Human
cuuagcagggaaacagcu

SEQ ID NO: 2806532 - RNA, 21 nt, Human
cuuagcagggaaacagcuaau

SEQ ID NO: 2806533 - RNA, 12 nt, Human
cuuacacugccu

SEQ ID NO: 2806534 - RNA, 19 nt, Human
cuuacacugccuguauacu

SEQ ID NO: 2806535 - RNA, 20 nt, Human
cuuacacugccuguauacuu

SEQ ID NO: 2806536 - RNA, 21 nt, Human
cuuacacugccuguauacuuu

SEQ ID NO: 2806537 - RNA, 23 nt, Human
cuuacacugccuguauacuuuag

SEQ ID NO: 2806538 - RNA, 20 nt, Human
cuuacacccacaguggaaag

SEQ ID NO: 2806539 - RNA, 11 nt, Human
cuuacacccac

SEQ ID NO: 2806540 - RNA, 13 nt, Human
cuuacacauacag

SEQ ID NO: 2806541 - RNA, 16 nt, Human
cuuacacauacaguuu

SEQ ID NO: 2806542 - RNA, 17 nt, Human
cuuacacauacaguuuu

SEQ ID NO: 2806543 - RNA, 20 nt, Human
cuuacacauacaguuuuaug

SEQ ID NO: 2806544 - RNA, 14 nt, Human
cuuaaagucaggag

SEQ ID NO: 2806545 - RNA, 23 nt, Human
cuuaaagcugccuguaguuagga

SEQ ID NO: 2806546 - RNA, 18 nt, Human
cuuaaagcugccuguagu

SEQ ID NO: 2806547 - RNA, 20 nt, Human
cuuaaaggcaccaucuaaua

SEQ ID NO: 2806548 - RNA, 19 nt, Human
cuuaaagauuuaucaaauc

SEQ ID NO: 2806549 - RNA, 20 nt, Human
cuuaaagauuuaucaaauca

SEQ ID NO: 2806550 - RNA, 16 nt, Human
cuuaaagauuuaucaa

SEQ ID NO: 2806551 - RNA, 11 nt, Human
cuguuggaagc

SEQ ID NO: 2806552 - RNA, 11 nt, Human
cuguugcuuga

SEQ ID NO: 2806553 - RNA, 15 nt, Human
cuguugcuugaauag

SEQ ID NO: 2806554 - RNA, 16 nt, Human
cuguuggauuccaugc

SEQ ID NO: 2806555 - RNA, 17 nt, Human
cuguuggauuccaugcu

SEQ ID NO: 2806556 - RNA, 18 nt, Human
cuguuggauuccaugcua

SEQ ID NO: 2806557 - RNA, 19 nt, Human
cuguuggauuccaugcuaa

SEQ ID NO: 2806558 - RNA, 13 nt, Human
cuuaaaaugcaau

SEQ ID NO: 2806559 - RNA, 14 nt, Human
cuuaaaaugcaaua

SEQ ID NO: 2806560 - RNA, 15 nt, Human
cuuaaaaugcaauau

SEQ ID NO: 2806561 - RNA, 19 nt, Human
cuuaaaaugcaauauuugu

SEQ ID NO: 2806562 - RNA, 20 nt, Human
cuuaaaaugcaauauuugua

SEQ ID NO: 2806563 - RNA, 21 nt, Human
cuuaaaaugcaauauuuguaa

SEQ ID NO: 2806564 - RNA, 22 nt, Human
cuuaaaaugcaauauuuguaag

SEQ ID NO: 2806565 - RNA, 11 nt, Human
cuuaaaaugga

SEQ ID NO: 2806566 - RNA, 14 nt, Human
cuuaaaauggaauu

SEQ ID NO: 2806567 - RNA, 18 nt, Human
cuuaaaauggaauugaaa

SEQ ID NO: 2806568 - RNA, 18 nt, Human
cuuaaaauauuccugcau

SEQ ID NO: 2806569 - RNA, 20 nt, Human
cuuaaaauauuccugcauuu

SEQ ID NO: 2806570 - RNA, 22 nt, Human
cuguuggauuuguuuaaaagga

SEQ ID NO: 2806571 - RNA, 19 nt, Human
cuguuggauuuguuuaaaa

SEQ ID NO: 2806572 - RNA, 13 nt, Human
cuuaccccugccu

SEQ ID NO: 2806573 - RNA, 19 nt, Human
cuuaccccuggcuguuugg

SEQ ID NO: 2806574 - RNA, 22 nt, Human
cuuaccccuggcuguuuggacu

SEQ ID NO: 2806575 - RNA, 19 nt, Human
cuuaccuaagugacauuug

SEQ ID NO: 2806576 - RNA, 21 nt, Human
cuuaccuaagugacauuugua

SEQ ID NO: 2806577 - RNA, 18 nt, Human
cuuaccuaccacaugcca

SEQ ID NO: 2806578 - RNA, 13 nt, Human
cuuacccuuagaa

SEQ ID NO: 2806579 - RNA, 21 nt, Human
cuuacccuuagaauccacgua

SEQ ID NO: 2806580 - RNA, 22 nt, Human
cuuacccuuuccuccuuuauca

SEQ ID NO: 2806581 - RNA, 20 nt, Human
cuuaccccuuagccucccug

SEQ ID NO: 2806582 - RNA, 11 nt, Human
cuuaccugaca

SEQ ID NO: 2806583 - RNA, 12 nt, Human
cuuaccugacac

SEQ ID NO: 2806584 - RNA, 13 nt, Human
cuuaccugacaca

SEQ ID NO: 2806585 - RNA, 16 nt, Human
cuuaccugacacaaga

SEQ ID NO: 2806586 - RNA, 19 nt, Human
cuuaccugacacaagagga

SEQ ID NO: 2806587 - RNA, 17 nt, Human
cuuaccugaccucuugc

SEQ ID NO: 2806588 - RNA, 18 nt, Human
cuuaccugaccucuugcu

SEQ ID NO: 2806589 - RNA, 19 nt, Human
cuuaccugaccucuugcug

SEQ ID NO: 2806590 - RNA, 20 nt, Human
cuuaccugaccucuugcugu

SEQ ID NO: 2806591 - RNA, 21 nt, Human
cuuaccugaccucuugcuguc

SEQ ID NO: 2806592 - RNA, 17 nt, Human
cuuagauugaaguaaac

SEQ ID NO: 2806593 - RNA, 24 nt, Human
cuuagauucucugugucuaagauu

SEQ ID NO: 2806594 - RNA, 21 nt, Human
cuuagcacuaccacuccugcc

SEQ ID NO: 2806595 - RNA, 15 nt, Human
cuuagcaaaaagugg

SEQ ID NO: 2806596 - RNA, 20 nt, Human
cuuagauguuccaguaaucu

SEQ ID NO: 2806597 - RNA, 16 nt, Human
cuuagauguuucacac

SEQ ID NO: 2806598 - RNA, 11 nt, Human
cuuagauucuc

SEQ ID NO: 2806599 - RNA, 20 nt, Human
cuuagauucucugugucuaa

SEQ ID NO: 2806600 - RNA, 22 nt, Human
cuuagauucucugugucuaaga

SEQ ID NO: 2806601 - RNA, 14 nt, Human
cuguugcugccuca

SEQ ID NO: 2806602 - RNA, 20 nt, Human
cuguugcuguguuuaauuug

SEQ ID NO: 2806603 - RNA, 21 nt, Human
cuguugcuguguuuaauuuga

SEQ ID NO: 2806604 - RNA, 17 nt, Human
cuguugcugccucaugc

SEQ ID NO: 2806605 - RNA, 16 nt, Human
cuguugcugccucaug

SEQ ID NO: 2806606 - RNA, 15 nt, Human
cuguugcugccucau

SEQ ID NO: 2806607 - RNA, 13 nt, Human
cuguucagcucca

SEQ ID NO: 2806608 - RNA, 19 nt, Human
cugugucuugcaauggcag

SEQ ID NO: 2806609 - RNA, 16 nt, Human
cugugucuugcaaugg

SEQ ID NO: 2806610 - RNA, 16 nt, Human
cuguucacuuuuccuc

SEQ ID NO: 2806611 - RNA, 18 nt, Human
cuguucacuuuuccuccc

SEQ ID NO: 2806612 - RNA, 17 nt, Human
cuguucacuuuuccucc

SEQ ID NO: 2806613 - RNA, 15 nt, Human
cuguucacucuacuu

SEQ ID NO: 2806614 - RNA, 18 nt, Human
cugugaccaggaaggaag

SEQ ID NO: 2806615 - RNA, 23 nt, Human
cugugaccaggaaggaagucagc

SEQ ID NO: 2806616 - RNA, 17 nt, Human
cugugcguuacuaauug

SEQ ID NO: 2806617 - RNA, 22 nt, Human
cugugcuacugucuuuggaaaa

SEQ ID NO: 2806618 - RNA, 13 nt, Human
cugugcucagaga

SEQ ID NO: 2806619 - RNA, 15 nt, Human
cugugcucagagacc

SEQ ID NO: 2806620 - RNA, 16 nt, Human
cugugcucaggacuca

SEQ ID NO: 2806621 - RNA, 15 nt, Human
cugugcucaggacuc

SEQ ID NO: 2806622 - RNA, 12 nt, Human
cugugcucagga

SEQ ID NO: 2806623 - RNA, 21 nt, Human
cugugacuucuccaggucuca

SEQ ID NO: 2806624 - RNA, 14 nt, Human
cugugagaccccca

SEQ ID NO: 2806625 - RNA, 16 nt, Human
cugugacuucuccagg

SEQ ID NO: 2806626 - RNA, 22 nt, Human
cugugacuucagcucuguuuua

SEQ ID NO: 2806627 - RNA, 14 nt, Human
cugugacucuuuuu

SEQ ID NO: 2806628 - RNA, 17 nt, Human
cugugacuucagcucug

SEQ ID NO: 2806629 - RNA, 12 nt, Human
cugugacccacu

SEQ ID NO: 2806630 - RNA, 15 nt, Human
cugugacccacuucu

SEQ ID NO: 2806631 - RNA, 21 nt, Human
cugugacccacuucucaucac

SEQ ID NO: 2806632 - RNA, 16 nt, Human
cuguguaaccauuuua

SEQ ID NO: 2806633 - RNA, 22 nt, Human
cuguguaaccauuuuauaaagu

SEQ ID NO: 2806634 - RNA, 17 nt, Human
cuguguacaccucugga

SEQ ID NO: 2806635 - RNA, 18 nt, Human
cuguguacuguauagaca

SEQ ID NO: 2806636 - RNA, 12 nt, Human
cuguguacugug

SEQ ID NO: 2806637 - RNA, 13 nt, Human
cuguguacugugu

SEQ ID NO: 2806638 - RNA, 14 nt, Human
cuguguacuguguc

SEQ ID NO: 2806639 - RNA, 14 nt, Human
cugugucuugcaau

SEQ ID NO: 2806640 - RNA, 18 nt, Human
cugugucugagagcaaag

SEQ ID NO: 2806641 - RNA, 18 nt, Human
cugugucuaagauucuag

SEQ ID NO: 2806642 - RNA, 19 nt, Human
cugugucuaagauucuaga

SEQ ID NO: 2806643 - RNA, 20 nt, Human
cugugucuaagauucuagau

SEQ ID NO: 2806644 - RNA, 21 nt, Human
cugugucuaagauucuagauc

SEQ ID NO: 2806645 - RNA, 21 nt, Human
cugugucagguggggcagcuu

SEQ ID NO: 2806646 - RNA, 19 nt, Human
cugugucagcgccuggccu

SEQ ID NO: 2806647 - RNA, 23 nt, Human
cuguguacauaacucuguaaaaa

SEQ ID NO: 2806648 - RNA, 16 nt, Human
cugugucuaagauucu

SEQ ID NO: 2806649 - RNA, 17 nt, Human
cugugucuaagauucua

SEQ ID NO: 2806650 - RNA, 19 nt, Human
cugugucagguggggcagc

SEQ ID NO: 2806651 - RNA, 15 nt, Human
gagugauauggagca

SEQ ID NO: 2806652 - RNA, 17 nt, Human
gagugauauggagcaag

SEQ ID NO: 2806653 - RNA, 14 nt, Human
gagugacuagacgu

SEQ ID NO: 2806654 - RNA, 19 nt, Human
gagugagacaaaauuuuag

SEQ ID NO: 2806655 - RNA, 17 nt, Human
gagugacuccaagaaca

SEQ ID NO: 2806656 - RNA, 20 nt, Human
gagugacagaggcagcccca

SEQ ID NO: 2806657 - RNA, 18 nt, Human
gagucccaaggaaagccc

SEQ ID NO: 2806658 - RNA, 19 nt, Human
gagugacaguggauugcau

SEQ ID NO: 2806659 - RNA, 21 nt, Human
gagugcaagccccugcuccag

SEQ ID NO: 2806660 - RNA, 10 nt, Human
gagugaucuu

SEQ ID NO: 2806661 - RNA, 12 nt, Human
gagugauugcag

SEQ ID NO: 2806662 - RNA, 15 nt, Human
gagugauugcagcuu

SEQ ID NO: 2806663 - RNA, 20 nt, Human
gagugauugcagcuuuaugu

SEQ ID NO: 2806664 - RNA, 19 nt, Human
gagugcaaugacacagucu

SEQ ID NO: 2806665 - RNA, 12 nt, Human
gagugcacagcu

SEQ ID NO: 2806666 - RNA, 13 nt, Human
gagugcacagcug

SEQ ID NO: 2806667 - RNA, 14 nt, Human
gagugcacagcugu

SEQ ID NO: 2806668 - RNA, 15 nt, Human
gagugcacagcuguc

SEQ ID NO: 2806669 - RNA, 16 nt, Human
gagugcacagcugucc

SEQ ID NO: 2806670 - RNA, 17 nt, Human
gagucaccaagcccagu

SEQ ID NO: 2806671 - RNA, 20 nt, Human
gagucacccaugaagacagg

SEQ ID NO: 2806672 - RNA, 14 nt, Human
gagucaccuuccag

SEQ ID NO: 2806673 - RNA, 15 nt, Human
gagucaccuuccagg

SEQ ID NO: 2806674 - RNA, 18 nt, Human
gagucaccuuccaggacc

SEQ ID NO: 2806675 - RNA, 21 nt, Human
gagucaccuuccaggaccccu

SEQ ID NO: 2806676 - RNA, 23 nt, Human
gagucaccuuccaggaccccugg

SEQ ID NO: 2806677 - RNA, 14 nt, Human
gagucaccuucccu

SEQ ID NO: 2806678 - RNA, 15 nt, Human
gagucaccuucccuu

SEQ ID NO: 2806679 - RNA, 22 nt, Human
gagucaccuucccuugccacuu

SEQ ID NO: 2806680 - RNA, 16 nt, Human
gagucaccaagcccag

SEQ ID NO: 2806681 - RNA, 15 nt, Human
gagucaccaagccca

SEQ ID NO: 2806682 - RNA, 16 nt, Human
gaggugaggagcagag

SEQ ID NO: 2806683 - RNA, 14 nt, Human
gaggugauagcauu

SEQ ID NO: 2806684 - RNA, 12 nt, Human
gaggugcuucac

SEQ ID NO: 2806685 - RNA, 11 nt, Human
gagucagccuu

SEQ ID NO: 2806686 - RNA, 22 nt, Human
gagucagacauuuuaagauggu

SEQ ID NO: 2806687 - RNA, 14 nt, Human
gagucagccaggag

SEQ ID NO: 2806688 - RNA, 16 nt, Human
gagucagccaggagcu

SEQ ID NO: 2806689 - RNA, 15 nt, Human
gagucagggcccaga

SEQ ID NO: 2806690 - RNA, 16 nt, Human
gagucagggcccagag

SEQ ID NO: 2806691 - RNA, 17 nt, Human
gagucagggcccagagg

SEQ ID NO: 2806692 - RNA, 22 nt, Human
gagucagggcccagaggcugag

SEQ ID NO: 2806693 - RNA, 18 nt, Human
gagugacagaggcagccc

SEQ ID NO: 2806694 - RNA, 16 nt, Human
gagucccaaggaaagc

SEQ ID NO: 2806695 - RNA, 15 nt, Human
gagucccaaggaaag

SEQ ID NO: 2806696 - RNA, 12 nt, Human
gagucccaccuu

SEQ ID NO: 2806697 - RNA, 14 nt, Human
gagucccaaggaaa

SEQ ID NO: 2806698 - RNA, 23 nt, Human
gaggugaccccagguuucuaugu

SEQ ID NO: 2806699 - RNA, 16 nt, Human
gaggugaaagggagcu

SEQ ID NO: 2806700 - RNA, 15 nt, Human
gaggugaaagggagc

SEQ ID NO: 2806701 - RNA, 22 nt, Human
gaggucgaccccaaagccccuu

SEQ ID NO: 2806702 - RNA, 21 nt, Human
gagguccugugaucuuauuuu

SEQ ID NO: 2806703 - RNA, 13 nt, Human
gaguuuaaagcaa

SEQ ID NO: 2806704 - RNA, 16 nt, Human
gaguuguuguguacag

SEQ ID NO: 2806705 - RNA, 20 nt, Human
gaguuggagacccgccuggc

SEQ ID NO: 2806706 - RNA, 16 nt, Human
gaguugcauugauuca

SEQ ID NO: 2806707 - RNA, 16 nt, Human
gaguugccaagacaaa

SEQ ID NO: 2806708 - RNA, 17 nt, Human
gaguugccaagacaaau

SEQ ID NO: 2806709 - RNA, 20 nt, Human
gaguugccaagacaaaucaa

SEQ ID NO: 2806710 - RNA, 17 nt, Human
gaguugccccgucucug

SEQ ID NO: 2806711 - RNA, 15 nt, Human
gaggcucaacaauaa

SEQ ID NO: 2806712 - RNA, 17 nt, Human
gaggcugaggcaggagg

SEQ ID NO: 2806713 - RNA, 16 nt, Human
gaggcugaggcaggag

SEQ ID NO: 2806714 - RNA, 20 nt, Human
gaggcuauuauuuucacugu

SEQ ID NO: 2806715 - RNA, 19 nt, Human
gaggcauccuacccuuuuc

SEQ ID NO: 2806716 - RNA, 20 nt, Human
gaggcauccuacccuuuucu

SEQ ID NO: 2806717 - RNA, 16 nt, Human
gaggaccuggggcaca

SEQ ID NO: 2806718 - RNA, 17 nt, Human
gaggaccuggggcacag

SEQ ID NO: 2806719 - RNA, 18 nt, Human
gaggaccuggggcacagu

SEQ ID NO: 2806720 - RNA, 16 nt, Human
gaggaccuguauuuaa

SEQ ID NO: 2806721 - RNA, 17 nt, Human
gaggaccuguauuuaag

SEQ ID NO: 2806722 - RNA, 18 nt, Human
gaggaccuguauuuaagc

SEQ ID NO: 2806723 - RNA, 20 nt, Human
gaggaccuguauuuaagcaa

SEQ ID NO: 2806724 - RNA, 22 nt, Human
gaggaccuguauuuaagcaaau

SEQ ID NO: 2806725 - RNA, 23 nt, Human
gaggaccuguauuuaagcaaaua

SEQ ID NO: 2806726 - RNA, 14 nt, Human
gaggcagggucuca

SEQ ID NO: 2806727 - RNA, 16 nt, Human
gaggaccugacccuac

SEQ ID NO: 2806728 - RNA, 20 nt, Human
gaggaccugacccuacuccc

SEQ ID NO: 2806729 - RNA, 22 nt, Human
gaggaccugacccuacucccuu

SEQ ID NO: 2806730 - RNA, 20 nt, Human
gaggacccuggaaauggacu

SEQ ID NO: 2806731 - RNA, 13 nt, Human
gaggcauccagca

SEQ ID NO: 2806732 - RNA, 18 nt, Human
gaggcauccagcagucuc

SEQ ID NO: 2806733 - RNA, 21 nt, Human
gaggcauccagcagucucugc

SEQ ID NO: 2806734 - RNA, 22 nt, Human
gaggcagggucucacucugucg

SEQ ID NO: 2806735 - RNA, 15 nt, Human
gaggcagggucucac

SEQ ID NO: 2806736 - RNA, 17 nt, Human
gaggggccccccugccc

SEQ ID NO: 2806737 - RNA, 22 nt, Human
gaggggcaucugccccuccccc

SEQ ID NO: 2806738 - RNA, 17 nt, Human
gaggggcaucugccccu

SEQ ID NO: 2806739 - RNA, 14 nt, Human
gagggcucugugcu

SEQ ID NO: 2806740 - RNA, 13 nt, Human
gagggcugcccug

SEQ ID NO: 2806741 - RNA, 12 nt, Human
gaggcugaggcg

SEQ ID NO: 2806742 - RNA, 21 nt, Human
gagcugccuuggcucagacau

SEQ ID NO: 2806743 - RNA, 22 nt, Human
gagcugccuuggcucagacaug

SEQ ID NO: 2806744 - RNA, 12 nt, Human
gagcugcuggcu

SEQ ID NO: 2806745 - RNA, 21 nt, Human
gagcugcuggcuugcagugcg

SEQ ID NO: 2806746 - RNA, 16 nt, Human
gagcugcuggcuugca

SEQ ID NO: 2806747 - RNA, 15 nt, Human
gagcuggaccagugg

SEQ ID NO: 2806748 - RNA, 20 nt, Human
gagccuucgugcccccccuu

SEQ ID NO: 2806749 - RNA, 18 nt, Human
gagcgcaccugcccccug

SEQ ID NO: 2806750 - RNA, 12 nt, Human
gagcgcaagaua

SEQ ID NO: 2806751 - RNA, 13 nt, Human
gagcgcaagauag

SEQ ID NO: 2806752 - RNA, 15 nt, Human
gagcugccuuggcuc

SEQ ID NO: 2806753 - RNA, 18 nt, Human
gagcugccuuggcucaga

SEQ ID NO: 2806754 - RNA, 16 nt, Human
gagcgcaucaggccug

SEQ ID NO: 2806755 - RNA, 15 nt, Human
gagcgcauggcaagu

SEQ ID NO: 2806756 - RNA, 20 nt, Human
gagcgcaccugcccccuggu

SEQ ID NO: 2806757 - RNA, 21 nt, Human
gagcgcccacuagacccacug

SEQ ID NO: 2806758 - RNA, 18 nt, Human
gauuauaucaaaguauuu

SEQ ID NO: 2806759 - RNA, 20 nt, Human
gauuauaucaaaguauuugu

SEQ ID NO: 2806760 - RNA, 16 nt, Human
gauuaucuauuugugu

SEQ ID NO: 2806761 - RNA, 20 nt, Human
gauuaucuauuugugugugu

SEQ ID NO: 2806762 - RNA, 12 nt, Human
gauuauccugag

SEQ ID NO: 2806763 - RNA, 20 nt, Human
gauuauaggcaccuaccacc

SEQ ID NO: 2806764 - RNA, 13 nt, Human
gauuauagauucu

SEQ ID NO: 2806765 - RNA, 14 nt, Human
gauuauagauucua

SEQ ID NO: 2806766 - RNA, 15 nt, Human
gauuauagauucuaa

SEQ ID NO: 2806767 - RNA, 22 nt, Human
gauuauagauucuaaagauucu

SEQ ID NO: 2806768 - RNA, 17 nt, Human
gauuauagauucuaaag

SEQ ID NO: 2806769 - RNA, 18 nt, Human
gauuauagauucuaaaga

SEQ ID NO: 2806770 - RNA, 20 nt, Human
gauguaucgggaagauuucu

SEQ ID NO: 2806771 - RNA, 22 nt, Human
gauguaucgggaagauuucuaa

SEQ ID NO: 2806772 - RNA, 13 nt, Human
gauguaucugagu

SEQ ID NO: 2806773 - RNA, 19 nt, Human
gauguaucugaguugccaa

SEQ ID NO: 2806774 - RNA, 21 nt, Human
gauguaucugaguugccaaga

SEQ ID NO: 2806775 - RNA, 20 nt, Human
gauguaugaaggcuuuuggu

SEQ ID NO: 2806776 - RNA, 22 nt, Human
gauguaugaaggcuuuuggucu

SEQ ID NO: 2806777 - RNA, 20 nt, Human
gauguaugaauacagcagca

SEQ ID NO: 2806778 - RNA, 21 nt, Human
gauguaugaauacagcagcaa

SEQ ID NO: 2806779 - RNA, 20 nt, Human
gauguauguugaagccuuug

SEQ ID NO: 2806780 - RNA, 13 nt, Human
gaugucacagggc

SEQ ID NO: 2806781 - RNA, 15 nt, Human
gaugucacagggcca

SEQ ID NO: 2806782 - RNA, 14 nt, Human
gauguauauuccuu

SEQ ID NO: 2806783 - RNA, 21 nt, Human
gauguauauuccuuugaagau

SEQ ID NO: 2806784 - RNA, 21 nt, Human
gauguauguugaagccuuugu

SEQ ID NO: 2806785 - RNA, 23 nt, Human
gauucuuauguagcaggaaauaa

SEQ ID NO: 2806786 - RNA, 13 nt, Human
gauucuuccagau

SEQ ID NO: 2806787 - RNA, 22 nt, Human
gauucuuccagaugugaugcuu

SEQ ID NO: 2806788 - RNA, 16 nt, Human
gauucuucaaaagcau

SEQ ID NO: 2806789 - RNA, 22 nt, Human
gauucugggaggaagcagguug

SEQ ID NO: 2806790 - RNA, 17 nt, Human
gauucugggaugcuccu

SEQ ID NO: 2806791 - RNA, 15 nt, Human
gauucugggaggaag

SEQ ID NO: 2806792 - RNA, 21 nt, Human
gauucugcaguaaaucuuuua

SEQ ID NO: 2806793 - RNA, 19 nt, Human
gauucugcaguaaaucuuu

SEQ ID NO: 2806794 - RNA, 18 nt, Human
gauucugcaguaaaucuu

SEQ ID NO: 2806795 - RNA, 19 nt, Human
gauucuggacagucagcuc

SEQ ID NO: 2806796 - RNA, 21 nt, Human
gauucuggacagucagcucuu

SEQ ID NO: 2806797 - RNA, 20 nt, Human
gauuuaccuguuuucgcacc

SEQ ID NO: 2806798 - RNA, 12 nt, Human
gauuuagaaaaa

SEQ ID NO: 2806799 - RNA, 20 nt, Human
gauuuagaaaaaaguuuaca

SEQ ID NO: 2806800 - RNA, 21 nt, Human
gauuuagaaaaaaguuuacaa

SEQ ID NO: 2806801 - RNA, 18 nt, Human
gauuuaguguaauaagac

SEQ ID NO: 2806802 - RNA, 13 nt, Human
gauuuaguagugu

SEQ ID NO: 2806803 - RNA, 15 nt, Human
gauuuagaacuguau

SEQ ID NO: 2806804 - RNA, 15 nt, Human
gauuuagaaguguca

SEQ ID NO: 2806805 - RNA, 20 nt, Human
gauuuagaagugucauguuu

SEQ ID NO: 2806806 - RNA, 14 nt, Human
gauuuauaaacaga

SEQ ID NO: 2806807 - RNA, 14 nt, Human
gauuuuuuauugcu

SEQ ID NO: 2806808 - RNA, 16 nt, Human
gauuuuuuauugcuag

SEQ ID NO: 2806809 - RNA, 18 nt, Human
gauuuuuuauugcuagua

SEQ ID NO: 2806810 - RNA, 22 nt, Human
gauuuuuuauugcuaguauuug

SEQ ID NO: 2806811 - RNA, 21 nt, Human
gauuuuuucagacuugucaag

SEQ ID NO: 2806812 - RNA, 20 nt, Human
gauuuuuuacagcugccugc

SEQ ID NO: 2806813 - RNA, 17 nt, Human
gauuuauaguuuguaca

SEQ ID NO: 2806814 - RNA, 20 nt, Human
gauuuauaguuuguacaugc

SEQ ID NO: 2806815 - RNA, 21 nt, Human
gauuuauaguuuguacaugca

SEQ ID NO: 2806816 - RNA, 16 nt, Human
gauuuauauaaaugua

SEQ ID NO: 2806817 - RNA, 19 nt, Human
gauuuauauaaauguaaaa

SEQ ID NO: 2806818 - RNA, 12 nt, Human
gauuuaucaaau

SEQ ID NO: 2806819 - RNA, 13 nt, Human
gauuuaucaaauc

SEQ ID NO: 2806820 - RNA, 14 nt, Human
gauuuaucaaauca

SEQ ID NO: 2806821 - RNA, 15 nt, Human
gauuuaucaaaucag

SEQ ID NO: 2806822 - RNA, 17 nt, Human
gauucuccugccucagc

SEQ ID NO: 2806823 - RNA, 15 nt, Human
gauucuccugccuca

SEQ ID NO: 2806824 - RNA, 18 nt, Human
gauucuccugccucagcc

SEQ ID NO: 2806825 - RNA, 16 nt, Human
gauucugcaguaaauc

SEQ ID NO: 2806826 - RNA, 15 nt, Human
gauucugcaguaaau

SEQ ID NO: 2806827 - RNA, 21 nt, Human
gaucugcggaucucagcuuug

SEQ ID NO: 2806828 - RNA, 19 nt, Human
gaucugcggaucucagcuu

SEQ ID NO: 2806829 - RNA, 18 nt, Human
gaucugcggaucucagcu

SEQ ID NO: 2806830 - RNA, 17 nt, Human
gaucugcggaucucagc

SEQ ID NO: 2806831 - RNA, 20 nt, Human
gaugauaaguuccuuuccuu

SEQ ID NO: 2806832 - RNA, 18 nt, Human
gaugauacaagauuagaa

SEQ ID NO: 2806833 - RNA, 15 nt, Human
gauguagcauuaugc

SEQ ID NO: 2806834 - RNA, 16 nt, Human
gauggagcgcaccugc

SEQ ID NO: 2806835 - RNA, 22 nt, Human
gauggagcccaggcgggagcgg

SEQ ID NO: 2806836 - RNA, 14 nt, Human
gauggagcccaggc

SEQ ID NO: 2806837 - RNA, 17 nt, Human
gauggagcccaggcggg

SEQ ID NO: 2806838 - RNA, 19 nt, Human
gauggagcccaggcgggag

SEQ ID NO: 2806839 - RNA, 14 nt, Human
gaugguuucuugca

SEQ ID NO: 2806840 - RNA, 12 nt, Human
gaugcugccuga

SEQ ID NO: 2806841 - RNA, 16 nt, Human
gaugcugccugaguca

SEQ ID NO: 2806842 - RNA, 22 nt, Human
gaugcugcuuccgguagggagg

SEQ ID NO: 2806843 - RNA, 14 nt, Human
gaugcugccugagu

SEQ ID NO: 2806844 - RNA, 14 nt, Human
gaugcuggagaaga

SEQ ID NO: 2806845 - RNA, 21 nt, Human
gaugauacaagauuagaagcu

SEQ ID NO: 2806846 - RNA, 20 nt, Human
gauggacaguucacacccug

SEQ ID NO: 2806847 - RNA, 22 nt, Human
gauggacaguucacacccugca

SEQ ID NO: 2806848 - RNA, 23 nt, Human
gauggacaguucacacccugcaa

SEQ ID NO: 2806849 - RNA, 16 nt, Human
gaugcuggagaagaga

SEQ ID NO: 2806850 - RNA, 19 nt, Human
gaugcuggagaagagagga

SEQ ID NO: 2806851 - RNA, 20 nt, Human
gaugcuggagaagagaggag

SEQ ID NO: 2806852 - RNA, 21 nt, Human
gaugcuggagaagagaggaga

SEQ ID NO: 2806853 - RNA, 22 nt, Human
gauggagacugguccugugugc

SEQ ID NO: 2806854 - RNA, 23 nt, Human
gauggagacugguccugugugca

SEQ ID NO: 2806855 - RNA, 21 nt, Human
gauuuuuuucccaauugagaa

SEQ ID NO: 2806856 - RNA, 14 nt, Human
gcaaguuaagagaa

SEQ ID NO: 2806857 - RNA, 16 nt, Human
gcaaguuaagagaaac

SEQ ID NO: 2806858 - RNA, 19 nt, Human
gcaaguuaagagaaacuuu

SEQ ID NO: 2806859 - RNA, 20 nt, Human
gcaaguuaagagaaacuuua

SEQ ID NO: 2806860 - RNA, 16 nt, Human
gcaaguucaauuuguu

SEQ ID NO: 2806861 - RNA, 22 nt, Human
gcaagugugggggguccuucuc

SEQ ID NO: 2806862 - RNA, 20 nt, Human
gcaagugauugggacagagg

SEQ ID NO: 2806863 - RNA, 19 nt, Human
gcaagugauugggacagag

SEQ ID NO: 2806864 - RNA, 22 nt, Human
gcaagucccugacucucuguga

SEQ ID NO: 2806865 - RNA, 19 nt, Human
gcaagugagagcugggugu

SEQ ID NO: 2806866 - RNA, 20 nt, Human
gcaagucccugacucucugu

SEQ ID NO: 2806867 - RNA, 12 nt, Human
gcaagucaugua

SEQ ID NO: 2806868 - RNA, 14 nt, Human
gcaagucauguaaa

SEQ ID NO: 2806869 - RNA, 15 nt, Human
gcaagucauguaaau

SEQ ID NO: 2806870 - RNA, 16 nt, Human
gcacauauacacacac

SEQ ID NO: 2806871 - RNA, 17 nt, Human
gcacauauacacacaca

SEQ ID NO: 2806872 - RNA, 14 nt, Human
gcacauaaacuuug

SEQ ID NO: 2806873 - RNA, 16 nt, Human
gcacagugucccccag

SEQ ID NO: 2806874 - RNA, 17 nt, Human
gcacacccucacucugc

SEQ ID NO: 2806875 - RNA, 19 nt, Human
gcacacccucacucugcca

SEQ ID NO: 2806876 - RNA, 20 nt, Human
gcacacccucacucugccag

SEQ ID NO: 2806877 - RNA, 21 nt, Human
gcacacccucacucugccagg

SEQ ID NO: 2806878 - RNA, 23 nt, Human
gcacacccucacucugccagggc

SEQ ID NO: 2806879 - RNA, 17 nt, Human
gcacaguguuaaaugaa

SEQ ID NO: 2806880 - RNA, 20 nt, Human
gcacaguguuaaaugaaauu

SEQ ID NO: 2806881 - RNA, 19 nt, Human
gcacagugcaucucagccc

SEQ ID NO: 2806882 - RNA, 20 nt, Human
gcacagugcaucucagccca

SEQ ID NO: 2806883 - RNA, 21 nt, Human
gcacagugcaucucagcccac

SEQ ID NO: 2806884 - RNA, 22 nt, Human
gcaauauuccuuagucaaauca

SEQ ID NO: 2806885 - RNA, 14 nt, Human
gcaauauguaaaua

SEQ ID NO: 2806886 - RNA, 21 nt, Human
gcaauauauuaccagcaagaa

SEQ ID NO: 2806887 - RNA, 13 nt, Human
gcaauaugaaguu

SEQ ID NO: 2806888 - RNA, 15 nt, Human
gcacaaggauugaaa

SEQ ID NO: 2806889 - RNA, 18 nt, Human
gcacaaggauugaaaauu

SEQ ID NO: 2806890 - RNA, 14 nt, Human
gcacaccgggcacu

SEQ ID NO: 2806891 - RNA, 18 nt, Human
gcacacccacucagcucc

SEQ ID NO: 2806892 - RNA, 17 nt, Human
gcacacccacucagcuc

SEQ ID NO: 2806893 - RNA, 19 nt, Human
gcacaauauugaacuuuuu

SEQ ID NO: 2806894 - RNA, 20 nt, Human
gcacaauauugaacuuuuuu

SEQ ID NO: 2806895 - RNA, 15 nt, Human
gcacaauaguaaccu

SEQ ID NO: 2806896 - RNA, 20 nt, Human
gcacaauaguaaccugggua

SEQ ID NO: 2806897 - RNA, 17 nt, Human
gcacaauauugaacuuu

SEQ ID NO: 2806898 - RNA, 23 nt, Human
gcaccgggccacagagaaaguac

SEQ ID NO: 2806899 - RNA, 21 nt, Human
gcaccuaccaccacgcccggc

SEQ ID NO: 2806900 - RNA, 22 nt, Human
gcaccuaccaccacgcccggcu

SEQ ID NO: 2806901 - RNA, 15 nt, Human
gcaccuaccaucagg

SEQ ID NO: 2806902 - RNA, 14 nt, Human
gcaccgggccacag

SEQ ID NO: 2806903 - RNA, 15 nt, Human
gcacauccauuccca

SEQ ID NO: 2806904 - RNA, 21 nt, Human
gcacauccauucccaagaaau

SEQ ID NO: 2806905 - RNA, 23 nt, Human
gcacauccauucccaagaaaugc

SEQ ID NO: 2806906 - RNA, 16 nt, Human
gcaccucagccugcac

SEQ ID NO: 2806907 - RNA, 15 nt, Human
gcaccucagccugca

SEQ ID NO: 2806908 - RNA, 16 nt, Human
gcaccuaguccaguga

SEQ ID NO: 2806909 - RNA, 13 nt, Human
gcaccucagccug

SEQ ID NO: 2806910 - RNA, 21 nt, Human
gcaccuauagucccagcuacu

SEQ ID NO: 2806911 - RNA, 18 nt, Human
gcaccuauagucccagcu

SEQ ID NO: 2806912 - RNA, 17 nt, Human
gcaccuauagucccagc

SEQ ID NO: 2806913 - RNA, 17 nt, Human
gcaccuaccaucaggga

SEQ ID NO: 2806914 - RNA, 19 nt, Human
gcaccuaccaucagggaca

SEQ ID NO: 2806915 - RNA, 20 nt, Human
gcaccuaccaucagggacag

SEQ ID NO: 2806916 - RNA, 23 nt, Human
gcaccuaccaucagggacaggau

SEQ ID NO: 2806917 - RNA, 16 nt, Human
gcacucagaagacacu

SEQ ID NO: 2806918 - RNA, 13 nt, Human
gcacucagaagac

SEQ ID NO: 2806919 - RNA, 23 nt, Human
gcacucccuugguggcaagagcc

SEQ ID NO: 2806920 - RNA, 16 nt, Human
gcacucccuccagcac

SEQ ID NO: 2806921 - RNA, 17 nt, Human
gcacucccuccagcaca

SEQ ID NO: 2806922 - RNA, 18 nt, Human
gcacucccuccagcacaa

SEQ ID NO: 2806923 - RNA, 15 nt, Human
gcacuugccuggguc

SEQ ID NO: 2806924 - RNA, 14 nt, Human
gcacuugccugggu

SEQ ID NO: 2806925 - RNA, 13 nt, Human
gcacuugccuggg

SEQ ID NO: 2806926 - RNA, 18 nt, Human
gcacuugccugggucaca

SEQ ID NO: 2806927 - RNA, 22 nt, Human
gaagacaccagagcagaugcag

SEQ ID NO: 2806928 - RNA, 18 nt, Human
gaagacaccagagcagau

SEQ ID NO: 2806929 - RNA, 21 nt, Human
gaagacaccagagcagaugca

SEQ ID NO: 2806930 - RNA, 14 nt, Human
gaagacaccagagc

SEQ ID NO: 2806931 - RNA, 15 nt, Human
gaagacaccagagca

SEQ ID NO: 2806932 - RNA, 16 nt, Human
gaagacaccagagcag

SEQ ID NO: 2806933 - RNA, 17 nt, Human
gaagacaccagagcaga

SEQ ID NO: 2806934 - RNA, 21 nt, Human
gaagacacagacugcgauuug

SEQ ID NO: 2806935 - RNA, 12 nt, Human
gaagacacagac

SEQ ID NO: 2806936 - RNA, 18 nt, Human
gaagacaauuugauacau

SEQ ID NO: 2806937 - RNA, 19 nt, Human
gaagacaauuugauacaua

SEQ ID NO: 2806938 - RNA, 20 nt, Human
gaagacaauuugauacauaa

SEQ ID NO: 2806939 - RNA, 15 nt, Human
gaagacaaaaagaca

SEQ ID NO: 2806940 - RNA, 20 nt, Human
gaagacaaaaagacaaacau

SEQ ID NO: 2806941 - RNA, 14 nt, Human
gaagcaaauaaaua

SEQ ID NO: 2806942 - RNA, 15 nt, Human
gaagcaaauaaauau

SEQ ID NO: 2806943 - RNA, 13 nt, Human
gaagcaaggaaga

SEQ ID NO: 2806944 - RNA, 18 nt, Human
gaagcaaggaagauauac

SEQ ID NO: 2806945 - RNA, 20 nt, Human
gaagcaaggaagauauacau

SEQ ID NO: 2806946 - RNA, 23 nt, Human
gaagcaaggaagauauacaugaa

SEQ ID NO: 2806947 - RNA, 14 nt, Human
gaagcaaggcggug

SEQ ID NO: 2806948 - RNA, 14 nt, Human
gaagcaacauuuua

SEQ ID NO: 2806949 - RNA, 22 nt, Human
gaagcaacauuuuagcucuauu

SEQ ID NO: 2806950 - RNA, 12 nt, Human
gaagcagagaga

SEQ ID NO: 2806951 - RNA, 14 nt, Human
gaagcagagagaug

SEQ ID NO: 2806952 - RNA, 15 nt, Human
gaagcagagagaugc

SEQ ID NO: 2806953 - RNA, 12 nt, Human
gaacccuuuguu

SEQ ID NO: 2806954 - RNA, 20 nt, Human
gaacccuuuguuucuuguuu

SEQ ID NO: 2806955 - RNA, 23 nt, Human
gaacccuuuguuucuuguuuauu

SEQ ID NO: 2806956 - RNA, 17 nt, Human
gaaccgagcaaagauca

SEQ ID NO: 2806957 - RNA, 21 nt, Human
gaacccuuggcuugcccacgu

SEQ ID NO: 2806958 - RNA, 20 nt, Human
gaacccuuggcuugcccacg

SEQ ID NO: 2806959 - RNA, 18 nt, Human
gaacccuuggcuugccca

SEQ ID NO: 2806960 - RNA, 17 nt, Human
gaacccuuggcuugccc

SEQ ID NO: 2806961 - RNA, 16 nt, Human
gaacccuuggcuugcc

SEQ ID NO: 2806962 - RNA, 12 nt, Human
gaacccuuggcu

SEQ ID NO: 2806963 - RNA, 12 nt, Human
gaacuccuuggc

SEQ ID NO: 2806964 - RNA, 13 nt, Human
gaacuccuuggcc

SEQ ID NO: 2806965 - RNA, 14 nt, Human
gaacuccuuggccu

SEQ ID NO: 2806966 - RNA, 15 nt, Human
gaacuccuuggccua

SEQ ID NO: 2806967 - RNA, 20 nt, Human
gaacuccuuggccuagccca

SEQ ID NO: 2806968 - RNA, 21 nt, Human
gaacuccuuggccuagcccac

SEQ ID NO: 2806969 - RNA, 17 nt, Human
gaacucucuccacccua

SEQ ID NO: 2806970 - RNA, 19 nt, Human
gaacucuaucugggccugg

SEQ ID NO: 2806971 - RNA, 20 nt, Human
gaacucuaucugggccuggg

SEQ ID NO: 2806972 - RNA, 21 nt, Human
gaacucuaucugggccugggc

SEQ ID NO: 2806973 - RNA, 22 nt, Human
gaacucuaucugggccugggcu

SEQ ID NO: 2806974 - RNA, 20 nt, Human
gaacucugacaacagacuuc

SEQ ID NO: 2806975 - RNA, 15 nt, Human
gaacuccuggccuca

SEQ ID NO: 2806976 - RNA, 15 nt, Human
gaaccgcacagcuca

SEQ ID NO: 2806977 - RNA, 14 nt, Human
gaaccgcacagcuc

SEQ ID NO: 2806978 - RNA, 13 nt, Human
gaaccgcacagcu

SEQ ID NO: 2806979 - RNA, 17 nt, Human
gaaccgcacagcucagg

SEQ ID NO: 2806980 - RNA, 16 nt, Human
gaaccgcacagcucag

SEQ ID NO: 2806981 - RNA, 21 nt, Human
gaaccgcacagcucaggaggc

SEQ ID NO: 2806982 - RNA, 19 nt, Human
gaaccgagcaaagaucaaa

SEQ ID NO: 2806983 - RNA, 21 nt, Human
gaaccgagcaaagaucaaaau

SEQ ID NO: 2806984 - RNA, 23 nt, Human
gaaccgagcaaagaucaaaauaa

SEQ ID NO: 2806985 - RNA, 12 nt, Human
gaacuggcugca

SEQ ID NO: 2806986 - RNA, 11 nt, Human
gaacuggcugc

SEQ ID NO: 2806987 - RNA, 20 nt, Human
gaagaaucuguuucccagca

SEQ ID NO: 2806988 - RNA, 19 nt, Human
gaagaauccuuuuguagaa

SEQ ID NO: 2806989 - RNA, 16 nt, Human
gaagaauuaagauaca

SEQ ID NO: 2806990 - RNA, 15 nt, Human
gaagaauggagagga

SEQ ID NO: 2806991 - RNA, 16 nt, Human
gaagaauggagaggaa

SEQ ID NO: 2806992 - RNA, 17 nt, Human
gaagaauggagaggaac

SEQ ID NO: 2806993 - RNA, 18 nt, Human
gaagaauggagaggaaca

SEQ ID NO: 2806994 - RNA, 18 nt, Human
gaagaauguguuucaaac

SEQ ID NO: 2806995 - RNA, 19 nt, Human
gaagaauguguuucaaacu

SEQ ID NO: 2806996 - RNA, 13 nt, Human
gaagaauuuguua

SEQ ID NO: 2806997 - RNA, 14 nt, Human
gaagaauuuguuau

SEQ ID NO: 2806998 - RNA, 17 nt, Human
gaacuggagccaugggc

SEQ ID NO: 2806999 - RNA, 18 nt, Human
gaacuggagccaugggca

SEQ ID NO: 2807000 - RNA, 18 nt, Human
gaacuggcaauugucuau

SEQ ID NO: 2807001 - RNA, 18 nt, Human
gaacugaacuaauccuuc

SEQ ID NO: 2807002 - RNA, 17 nt, Human
gaacucugaacuuugga

SEQ ID NO: 2807003 - RNA, 20 nt, Human
gaacucugaacuuuggagag

SEQ ID NO: 2807004 - RNA, 11 nt, Human
gaacucugaca

SEQ ID NO: 2807005 - RNA, 13 nt, Human
gaacucugacaag

SEQ ID NO: 2807006 - RNA, 14 nt, Human
gaacucugacaagg

SEQ ID NO: 2807007 - RNA, 15 nt, Human
gaacucugacaaggg

SEQ ID NO: 2807008 - RNA, 17 nt, Human
gaacucugacaagggcu

SEQ ID NO: 2807009 - RNA, 19 nt, Human
gaacucugacaagggcuga

SEQ ID NO: 2807010 - RNA, 19 nt, Human
gaacugccauuauuuucug

SEQ ID NO: 2807011 - RNA, 20 nt, Human
gaacugccauuauuuucugu

SEQ ID NO: 2807012 - RNA, 23 nt, Human
gaacugccauuauuuucugucag

SEQ ID NO: 2807013 - RNA, 12 nt, Human
gaacugaacuca

SEQ ID NO: 2807014 - RNA, 14 nt, Human
gaauauuguuucuu

SEQ ID NO: 2807015 - RNA, 15 nt, Human
gaauauuguuucuuu

SEQ ID NO: 2807016 - RNA, 20 nt, Human
gaauauucagagaauaucaa

SEQ ID NO: 2807017 - RNA, 12 nt, Human
gaauauuguguu

SEQ ID NO: 2807018 - RNA, 23 nt, Human
gaauauuguguuccuuuuuauga

SEQ ID NO: 2807019 - RNA, 17 nt, Human
gaaguugaaguuuagga

SEQ ID NO: 2807020 - RNA, 15 nt, Human
gaauauguuuccuug

SEQ ID NO: 2807021 - RNA, 19 nt, Human
gaauauguuuccuuguuua

SEQ ID NO: 2807022 - RNA, 20 nt, Human
gaauauuagugaccucagcu

SEQ ID NO: 2807023 - RNA, 15 nt, Human
gaauauguauguaua

SEQ ID NO: 2807024 - RNA, 12 nt, Human
gaauaugucugc

SEQ ID NO: 2807025 - RNA, 13 nt, Human
gaauauaacauga

SEQ ID NO: 2807026 - RNA, 15 nt, Human
gaauauaacaugaaa

SEQ ID NO: 2807027 - RNA, 20 nt, Human
gaauauaacaugaaaugaua

SEQ ID NO: 2807028 - RNA, 19 nt, Human
gaauauaauauauuugugu

SEQ ID NO: 2807029 - RNA, 20 nt, Human
gaauauaauauauuugugua

SEQ ID NO: 2807030 - RNA, 18 nt, Human
gaaggggacccccgcccc

SEQ ID NO: 2807031 - RNA, 20 nt, Human
gaaggggacccccgcccccu

SEQ ID NO: 2807032 - RNA, 21 nt, Human
gaaggggacccccgcccccug

SEQ ID NO: 2807033 - RNA, 19 nt, Human
gaaggggaagcacucgugu

SEQ ID NO: 2807034 - RNA, 15 nt, Human
gaaguguguuuccuu

SEQ ID NO: 2807035 - RNA, 18 nt, Human
gaaguguugaagggaggu

SEQ ID NO: 2807036 - RNA, 16 nt, Human
gaaguuacuuuauguu

SEQ ID NO: 2807037 - RNA, 20 nt, Human
gaaguuacuuuauguuuguc

SEQ ID NO: 2807038 - RNA, 15 nt, Human
gaaguuacuuucuua

SEQ ID NO: 2807039 - RNA, 16 nt, Human
gaaguuacuuucuuaa

SEQ ID NO: 2807040 - RNA, 20 nt, Human
gaaguuacuuucuuaaugug

SEQ ID NO: 2807041 - RNA, 22 nt, Human
gaaguuagguucuuaaaagugc

SEQ ID NO: 2807042 - RNA, 15 nt, Human
gaaguucauaccuaa

SEQ ID NO: 2807043 - RNA, 20 nt, Human
gaaguucauaccuaaguacu

SEQ ID NO: 2807044 - RNA, 22 nt, Human
gaaguucauaccuaaguacugu

SEQ ID NO: 2807045 - RNA, 23 nt, Human
gaaguucauaccuaaguacugua

SEQ ID NO: 2807046 - RNA, 23 nt, Human
gaaguugacuuauaguacaugau

SEQ ID NO: 2807047 - RNA, 21 nt, Human
gaaguugacuuauaguacaug

SEQ ID NO: 2807048 - RNA, 21 nt, Human
gaauaguuggucaucuagcaa

SEQ ID NO: 2807049 - RNA, 14 nt, Human
gaaguuguuuguca

SEQ ID NO: 2807050 - RNA, 13 nt, Human
gaaguuuaaaaca

SEQ ID NO: 2807051 - RNA, 14 nt, Human
gaaguuuaaaacag

SEQ ID NO: 2807052 - RNA, 19 nt, Human
gaaguuuaaaacaguauuu

SEQ ID NO: 2807053 - RNA, 21 nt, Human
gaaguuuaaaacaguauuuau

SEQ ID NO: 2807054 - RNA, 20 nt, Human
gaaguugcauuccuuugucu

SEQ ID NO: 2807055 - RNA, 18 nt, Human
gaaguugauauagaacag

SEQ ID NO: 2807056 - RNA, 21 nt, Human
gaaguugauauagaacagugc

SEQ ID NO: 2807057 - RNA, 20 nt, Human
gaaguugugccuuuuauagc

SEQ ID NO: 2807058 - RNA, 19 nt, Human
gaaguuguggauuucaguu

SEQ ID NO: 2807059 - RNA, 20 nt, Human
gaaguuguggauuucaguuu

SEQ ID NO: 2807060 - RNA, 17 nt, Human
gaaguugugugacccua

SEQ ID NO: 2807061 - RNA, 19 nt, Human
gaagcuccgcuuucuaccc

SEQ ID NO: 2807062 - RNA, 17 nt, Human
gaagcugagggcaaauc

SEQ ID NO: 2807063 - RNA, 12 nt, Human
gaagcugcagcu

SEQ ID NO: 2807064 - RNA, 15 nt, Human
gaagcugcagcuugg

SEQ ID NO: 2807065 - RNA, 18 nt, Human
gaagcugcagcuugggag

SEQ ID NO: 2807066 - RNA, 22 nt, Human
gaagcugaaaaccuaaguccuu

SEQ ID NO: 2807067 - RNA, 14 nt, Human
gaagcugaaaauau

SEQ ID NO: 2807068 - RNA, 15 nt, Human
gaagcugaaaauaua

SEQ ID NO: 2807069 - RNA, 20 nt, Human
gaagcucugaagucacauca

SEQ ID NO: 2807070 - RNA, 16 nt, Human
gaagcucugaagucac

SEQ ID NO: 2807071 - RNA, 22 nt, Human
gaagcuccgcuuucuacccagc

SEQ ID NO: 2807072 - RNA, 15 nt, Human
gaagcucugaaguca

SEQ ID NO: 2807073 - RNA, 13 nt, Human
gaagcucugaagu

SEQ ID NO: 2807074 - RNA, 21 nt, Human
gaaggcucuucuccccagagu

SEQ ID NO: 2807075 - RNA, 13 nt, Human
gaagggcccagga

SEQ ID NO: 2807076 - RNA, 16 nt, Human
gaaggggacccccgcc

SEQ ID NO: 2807077 - RNA, 22 nt, Human
gaagggccaguccugccuggcc

SEQ ID NO: 2807078 - RNA, 20 nt, Human
gaagggccaguccugccugg

SEQ ID NO: 2807079 - RNA, 19 nt, Human
gaagggccaguccugccug

SEQ ID NO: 2807080 - RNA, 18 nt, Human
gaagggccaguccugccu

SEQ ID NO: 2807081 - RNA, 16 nt, Human
gaagggccaguccugc

SEQ ID NO: 2807082 - RNA, 14 nt, Human
gaagggccaguccu

SEQ ID NO: 2807083 - RNA, 18 nt, Human
gaaggcucuucuccccag

SEQ ID NO: 2807084 - RNA, 12 nt, Human
gaaggccucuug

SEQ ID NO: 2807085 - RNA, 23 nt, Human
gaaggcucuucuccccagaguuc

SEQ ID NO: 2807086 - RNA, 13 nt, Human
gaaggcugccaac

SEQ ID NO: 2807087 - RNA, 16 nt, Human
gaaggcuggcugggca

SEQ ID NO: 2807088 - RNA, 13 nt, Human
gaaggcuggcugg

SEQ ID NO: 2807089 - RNA, 20 nt, Human
gaaggccucccuagccagca

SEQ ID NO: 2807090 - RNA, 15 nt, Human
gacgcgucuccuguu

SEQ ID NO: 2807091 - RNA, 14 nt, Human
gacgcgucuccugu

SEQ ID NO: 2807092 - RNA, 23 nt, Human
gaccugaaauuccaaagucucua

SEQ ID NO: 2807093 - RNA, 17 nt, Human
gaccugaaauuccaaag

SEQ ID NO: 2807094 - RNA, 19 nt, Human
gaccugaaauuccaaaguc

SEQ ID NO: 2807095 - RNA, 15 nt, Human
gaccugaaauuccaa

SEQ ID NO: 2807096 - RNA, 14 nt, Human
gaccucucccaggg

SEQ ID NO: 2807097 - RNA, 12 nt, Human
gaccucucccag

SEQ ID NO: 2807098 - RNA, 23 nt, Human
gaccucuggauuaggucucuguu

SEQ ID NO: 2807099 - RNA, 12 nt, Human
gaccucuugcug

SEQ ID NO: 2807100 - RNA, 13 nt, Human
gaccucuugcugu

SEQ ID NO: 2807101 - RNA, 14 nt, Human
gaccucuugcuguc

SEQ ID NO: 2807102 - RNA, 15 nt, Human
gaccucuugcugucu

SEQ ID NO: 2807103 - RNA, 16 nt, Human
gaccucuugcugucuc

SEQ ID NO: 2807104 - RNA, 17 nt, Human
gaccucuugcugucucu

SEQ ID NO: 2807105 - RNA, 18 nt, Human
gaccucuugcugucucug

SEQ ID NO: 2807106 - RNA, 20 nt, Human
gaccucuugcugucucugcu

SEQ ID NO: 2807107 - RNA, 22 nt, Human
gaccucuugcugucucugcucg

SEQ ID NO: 2807108 - RNA, 23 nt, Human
gaccauccacucuacccucccac

SEQ ID NO: 2807109 - RNA, 21 nt, Human
gaccauccacucuacccuccc

SEQ ID NO: 2807110 - RNA, 13 nt, Human
gaccauccuauuu

SEQ ID NO: 2807111 - RNA, 15 nt, Human
gaccaucugcuuuua

SEQ ID NO: 2807112 - RNA, 17 nt, Human
gaccaucugcuuuuauu

SEQ ID NO: 2807113 - RNA, 18 nt, Human
gaccucuacuuuccaggc

SEQ ID NO: 2807114 - RNA, 21 nt, Human
gaccucuacuuuccaggcuag

SEQ ID NO: 2807115 - RNA, 19 nt, Human
gacucugucucaaaaaaac

SEQ ID NO: 2807116 - RNA, 22 nt, Human
gacucugcccccugcuggcucu

SEQ ID NO: 2807117 - RNA, 19 nt, Human
gacucugcccccugcuggc

SEQ ID NO: 2807118 - RNA, 21 nt, Human
gacucugcccccugcuggcuc

SEQ ID NO: 2807119 - RNA, 18 nt, Human
gacucuguggggccuugg

SEQ ID NO: 2807120 - RNA, 17 nt, Human
gacucuguggggccuug

SEQ ID NO: 2807121 - RNA, 15 nt, Human
gacucuucaaaaacu

SEQ ID NO: 2807122 - RNA, 17 nt, Human
gacucuucaaaaacugu

SEQ ID NO: 2807123 - RNA, 14 nt, Human
gacucuuguuuuca

SEQ ID NO: 2807124 - RNA, 9 nt, Human
gacucuugu

SEQ ID NO: 2807125 - RNA, 22 nt, Human
gacucaccucccccaucucuuc

SEQ ID NO: 2807126 - RNA, 15 nt, Human
gacucaccuccccca

SEQ ID NO: 2807127 - RNA, 12 nt, Human
gacucugccucc

SEQ ID NO: 2807128 - RNA, 10 nt, Human
gacucugccc

SEQ ID NO: 2807129 - RNA, 12 nt, Human
gacucugccccc

SEQ ID NO: 2807130 - RNA, 13 nt, Human
gacucugcccccu

SEQ ID NO: 2807131 - RNA, 14 nt, Human
gacucugcccccug

SEQ ID NO: 2807132 - RNA, 15 nt, Human
gacucugcccccugc

SEQ ID NO: 2807133 - RNA, 16 nt, Human
gacucugcccccugcu

SEQ ID NO: 2807134 - RNA, 17 nt, Human
gacucugcccccugcug

SEQ ID NO: 2807135 - RNA, 18 nt, Human
gacucugcccccugcugg

SEQ ID NO: 2807136 - RNA, 20 nt, Human
gacucugcacaugucuugua

SEQ ID NO: 2807137 - RNA, 19 nt, Human
gacucugcaucccagcacc

SEQ ID NO: 2807138 - RNA, 20 nt, Human
gacucugcaucccagcaccu

SEQ ID NO: 2807139 - RNA, 21 nt, Human
gacucugcaucccagcaccug

SEQ ID NO: 2807140 - RNA, 22 nt, Human
gacucugcaucccagcaccugc

SEQ ID NO: 2807141 - RNA, 17 nt, Human
gacucagaagccucugg

SEQ ID NO: 2807142 - RNA, 19 nt, Human
gacucugcacaugucuugu

SEQ ID NO: 2807143 - RNA, 16 nt, Human
gacucagaagccucug

SEQ ID NO: 2807144 - RNA, 15 nt, Human
gacucagaagccucu

SEQ ID NO: 2807145 - RNA, 13 nt, Human
gacucagaagccu

SEQ ID NO: 2807146 - RNA, 21 nt, Human
gacuguggcacuugccugggu

SEQ ID NO: 2807147 - RNA, 17 nt, Human
gacuguggcacuugccu

SEQ ID NO: 2807148 - RNA, 23 nt, Human
gacuguucaagagcacacuuggc

SEQ ID NO: 2807149 - RNA, 11 nt, Human
gacuguugaug

SEQ ID NO: 2807150 - RNA, 15 nt, Human
gacuguugauguacu

SEQ ID NO: 2807151 - RNA, 22 nt, Human
gacuguuagaaaauggacacug

SEQ ID NO: 2807152 - RNA, 14 nt, Human
gacuguucaagagc

SEQ ID NO: 2807153 - RNA, 18 nt, Human
gacuguucaagagcacac

SEQ ID NO: 2807154 - RNA, 19 nt, Human
gacuguucaagagcacacu

SEQ ID NO: 2807155 - RNA, 18 nt, Human
gacuguacuccucccagg

SEQ ID NO: 2807156 - RNA, 23 nt, Human
gacuguacuccucccaggcgccc

SEQ ID NO: 2807157 - RNA, 18 nt, Human
gacugaagaugcagcuca

SEQ ID NO: 2807158 - RNA, 21 nt, Human
gacugaaugggaucaugaaag

SEQ ID NO: 2807159 - RNA, 19 nt, Human
gacuguaucuguguagacu

SEQ ID NO: 2807160 - RNA, 17 nt, Human
gacuguaucuguguaga

SEQ ID NO: 2807161 - RNA, 16 nt, Human
gacuguaucuguguag

SEQ ID NO: 2807162 - RNA, 15 nt, Human
gacuguaucugugua

SEQ ID NO: 2807163 - RNA, 14 nt, Human
gacuguaucugugu

SEQ ID NO: 2807164 - RNA, 21 nt, Human
gacuuucaaaauuaaaucugu

SEQ ID NO: 2807165 - RNA, 14 nt, Human
gacuuucagguacu

SEQ ID NO: 2807166 - RNA, 17 nt, Human
gacuuucaguaaacaua

SEQ ID NO: 2807167 - RNA, 12 nt, Human
gacuuucaggua

SEQ ID NO: 2807168 - RNA, 13 nt, Human
gacuuuauaagcc

SEQ ID NO: 2807169 - RNA, 21 nt, Human
gacuuuaucuaauaccucugu

SEQ ID NO: 2807170 - RNA, 22 nt, Human
gacuuuaucuaauaccucugug

SEQ ID NO: 2807171 - RNA, 13 nt, Human
gacugugcuacug

SEQ ID NO: 2807172 - RNA, 17 nt, Human
gacuuuaggcuuucagc

SEQ ID NO: 2807173 - RNA, 19 nt, Human
gacuuuagaaagcugacau

SEQ ID NO: 2807174 - RNA, 12 nt, Human
gacuuuaauuua

SEQ ID NO: 2807175 - RNA, 15 nt, Human
gacuuuaauuuaugu

SEQ ID NO: 2807176 - RNA, 21 nt, Human
gacuuuacacucggcuuugga

SEQ ID NO: 2807177 - RNA, 19 nt, Human
gacauuguuggccaaagcc

SEQ ID NO: 2807178 - RNA, 13 nt, Human
gacauuuaauuua

SEQ ID NO: 2807179 - RNA, 14 nt, Human
gacauuuaauuuag

SEQ ID NO: 2807180 - RNA, 17 nt, Human
gacauuucuuuucuuuu

SEQ ID NO: 2807181 - RNA, 19 nt, Human
gacauuucuuuucuuuuua

SEQ ID NO: 2807182 - RNA, 21 nt, Human
gacauuucuuuucuuuuuaca

SEQ ID NO: 2807183 - RNA, 22 nt, Human
gacauuucuuuucuuuuuacau

SEQ ID NO: 2807184 - RNA, 23 nt, Human
gacauuucuuuucuuuuuacaua

SEQ ID NO: 2807185 - RNA, 15 nt, Human
gacauuugccuugcu

SEQ ID NO: 2807186 - RNA, 13 nt, Human
gacagugcacaug

SEQ ID NO: 2807187 - RNA, 15 nt, Human
gacagugcacaugaa

SEQ ID NO: 2807188 - RNA, 16 nt, Human
gacagugcacaugaac

SEQ ID NO: 2807189 - RNA, 13 nt, Human
gacauucaugccu

SEQ ID NO: 2807190 - RNA, 16 nt, Human
gacagugcuucagccu

SEQ ID NO: 2807191 - RNA, 18 nt, Human
gacagaacuugaaugugu

SEQ ID NO: 2807192 - RNA, 15 nt, Human
gacauugcggacagc

SEQ ID NO: 2807193 - RNA, 14 nt, Human
gacauugcggacag

SEQ ID NO: 2807194 - RNA, 19 nt, Human
gacauuguagagcuucugg

SEQ ID NO: 2807195 - RNA, 15 nt, Human
gacauugaggaccuc

SEQ ID NO: 2807196 - RNA, 18 nt, Human
gacauugccaaaaaggau

SEQ ID NO: 2807197 - RNA, 21 nt, Human
gacauucuuguaaggcuuuga

SEQ ID NO: 2807198 - RNA, 24 nt, Human
gacauucuuguaaggcuuugauua

SEQ ID NO: 2807199 - RNA, 16 nt, Human
gacauucaugccuggc

SEQ ID NO: 2807200 - RNA, 18 nt, Human
gacauucaugccuggcuu

SEQ ID NO: 2807201 - RNA, 22 nt, Human
gaccagccuggccaacauggua

SEQ ID NO: 2807202 - RNA, 17 nt, Human
gaccagccugggcagca

SEQ ID NO: 2807203 - RNA, 12 nt, Human
gaccagccuggg

SEQ ID NO: 2807204 - RNA, 14 nt, Human
gaccagggagccuu

SEQ ID NO: 2807205 - RNA, 15 nt, Human
gaccagggagccuuu

SEQ ID NO: 2807206 - RNA, 22 nt, Human
gaccagggagccuuugguucug

SEQ ID NO: 2807207 - RNA, 13 nt, Human
gaccagggccgag

SEQ ID NO: 2807208 - RNA, 15 nt, Human
gaccagggccgagga

SEQ ID NO: 2807209 - RNA, 19 nt, Human
gaccagggccgaggaggug

SEQ ID NO: 2807210 - RNA, 21 nt, Human
gaccagggccgaggaggugcc

SEQ ID NO: 2807211 - RNA, 19 nt, Human
gaccauccacucuacccuc

SEQ ID NO: 2807212 - RNA, 13 nt, Human
gaccauacuaauu

SEQ ID NO: 2807213 - RNA, 16 nt, Human
gacacagcucuucucc

SEQ ID NO: 2807214 - RNA, 14 nt, Human
gacacagcucuucu

SEQ ID NO: 2807215 - RNA, 13 nt, Human
gacacagcucuuc

SEQ ID NO: 2807216 - RNA, 11 nt, Human
gacacagaaaa

SEQ ID NO: 2807217 - RNA, 18 nt, Human
gacacagaaaauguugag

SEQ ID NO: 2807218 - RNA, 16 nt, Human
gacacagaaaauguug

SEQ ID NO: 2807219 - RNA, 23 nt, Human
gacacagcucuucuccaggcugu

SEQ ID NO: 2807220 - RNA, 18 nt, Human
gacacaggaaaccaacac

SEQ ID NO: 2807221 - RNA, 22 nt, Human
gacacagcucuucuccaggcug

SEQ ID NO: 2807222 - RNA, 17 nt, Human
gacacagcucuucucca

SEQ ID NO: 2807223 - RNA, 17 nt, Human
gacacaggaugaaggca

SEQ ID NO: 2807224 - RNA, 20 nt, Human
gacacaggaugaaggcaaug

SEQ ID NO: 2807225 - RNA, 20 nt, Human
gacagaaccccuacaugaaa

SEQ ID NO: 2807226 - RNA, 21 nt, Human
gacagaaaggagaguggccau

SEQ ID NO: 2807227 - RNA, 22 nt, Human
gacagaaaggagaguggccauu

SEQ ID NO: 2807228 - RNA, 15 nt, Human
aaaacuugugcuaua

SEQ ID NO: 2807229 - RNA, 17 nt, Human
aaaacuugugcuauaaa

SEQ ID NO: 2807230 - RNA, 19 nt, Human
aaaacuugugugaaauuuu

SEQ ID NO: 2807231 - RNA, 22 nt, Human
aaaacuugugugaaauuuucuu

SEQ ID NO: 2807232 - RNA, 19 nt, Human
aaaagccugcaauuucaua

SEQ ID NO: 2807233 - RNA, 22 nt, Human
aaaagcggaaaguuagugcuug

SEQ ID NO: 2807234 - RNA, 20 nt, Human
aaaagcgacccauucagaga

SEQ ID NO: 2807235 - RNA, 11 nt, Human
aaaagccuugu

SEQ ID NO: 2807236 - RNA, 13 nt, Human
aaaagccuugugu

SEQ ID NO: 2807237 - RNA, 14 nt, Human
aaaagccuugugua

SEQ ID NO: 2807238 - RNA, 17 nt, Human
aaaagccuuguguauau

SEQ ID NO: 2807239 - RNA, 18 nt, Human
aaaagccuuguguauauu

SEQ ID NO: 2807240 - RNA, 20 nt, Human
aaaagccuuguguauauuug

SEQ ID NO: 2807241 - RNA, 23 nt, Human
aaaagccuuguguauauuuguau

SEQ ID NO: 2807242 - RNA, 21 nt, Human
aaaagcuaguguaccuccucu

SEQ ID NO: 2807243 - RNA, 15 nt, Human
aaaagcuauuagcca

SEQ ID NO: 2807244 - RNA, 17 nt, Human
aaaagcuauuagccagg

SEQ ID NO: 2807245 - RNA, 14 nt, Human
aaaagcucauauuu

SEQ ID NO: 2807246 - RNA, 20 nt, Human
aaaagcuauuagccaggauc

SEQ ID NO: 2807247 - RNA, 21 nt, Human
aaaagcuauuagccaggauca

SEQ ID NO: 2807248 - RNA, 23 nt, Human
gggacugccagucccccugcccc

SEQ ID NO: 2807249 - RNA, 14 nt, Human
aaaagcuuccauga

SEQ ID NO: 2807250 - RNA, 14 nt, Human
aaaagcuucaaauu

SEQ ID NO: 2807251 - RNA, 15 nt, Human
aaaagcuccuggggc

SEQ ID NO: 2807252 - RNA, 12 nt, Human
aaaagcuccugu

SEQ ID NO: 2807253 - RNA, 18 nt, Human
aaaagcucauauuuugua

SEQ ID NO: 2807254 - RNA, 15 nt, Human
aaaagcucauuucau

SEQ ID NO: 2807255 - RNA, 17 nt, Human
aaaagcucauuucaugc

SEQ ID NO: 2807256 - RNA, 22 nt, Human
aaaagcuccaugugccucuuug

SEQ ID NO: 2807257 - RNA, 13 nt, Human
aaaagcuccuguc

SEQ ID NO: 2807258 - RNA, 20 nt, Human
aaaagcucuuacacuacauu

SEQ ID NO: 2807259 - RNA, 13 nt, Human
aaaagcugcucag

SEQ ID NO: 2807260 - RNA, 23 nt, Human
aaaagcugaucauaagugaauuu

SEQ ID NO: 2807261 - RNA, 15 nt, Human
gggacugcugcugcc

SEQ ID NO: 2807262 - RNA, 17 nt, Human
gggacugcugcugccug

SEQ ID NO: 2807263 - RNA, 18 nt, Human
gggacugcugcugccugg

SEQ ID NO: 2807264 - RNA, 19 nt, Human
gggacugcugcugccuggc

SEQ ID NO: 2807265 - RNA, 21 nt, Human
gggacugcugcugccuggcca

SEQ ID NO: 2807266 - RNA, 22 nt, Human
gggacugcugcugccuggccac

SEQ ID NO: 2807267 - RNA, 14 nt, Human
gggacugccucugc

SEQ ID NO: 2807268 - RNA, 15 nt, Human
gggacugccucugcc

SEQ ID NO: 2807269 - RNA, 16 nt, Human
gggacugccucugcca

SEQ ID NO: 2807270 - RNA, 17 nt, Human
gggacugccucugccac

SEQ ID NO: 2807271 - RNA, 20 nt, Human
gggacuggggaugugggagg

SEQ ID NO: 2807272 - RNA, 12 nt, Human
gggaggcagccu

SEQ ID NO: 2807273 - RNA, 16 nt, Human
gggaggcauggcccug

SEQ ID NO: 2807274 - RNA, 11 nt, Human
gggaggcagcc

SEQ ID NO: 2807275 - RNA, 12 nt, Human
gggagagcccag

SEQ ID NO: 2807276 - RNA, 17 nt, Human
gggaggcauggcccugg

SEQ ID NO: 2807277 - RNA, 13 nt, Human
gggagggccuggg

SEQ ID NO: 2807278 - RNA, 18 nt, Human
aaaaauguccugccuuuu

SEQ ID NO: 2807279 - RNA, 12 nt, Human
aaaaaugccuuu

SEQ ID NO: 2807280 - RNA, 18 nt, Human
aaaaaugcccuuaaauca

SEQ ID NO: 2807281 - RNA, 15 nt, Human
aaaaaugccauaaua

SEQ ID NO: 2807282 - RNA, 17 nt, Human
aaaaaugccauaauaca

SEQ ID NO: 2807283 - RNA, 18 nt, Human
aaaaaugccauaauacaa

SEQ ID NO: 2807284 - RNA, 21 nt, Human
aaaaaugccauaauacaaaag

SEQ ID NO: 2807285 - RNA, 22 nt, Human
aaaaaugccauaauacaaaagg

SEQ ID NO: 2807286 - RNA, 21 nt, Human
aaaaaugucuugcuguugaca

SEQ ID NO: 2807287 - RNA, 22 nt, Human
aaaaauguguguauucuuaaaa

SEQ ID NO: 2807288 - RNA, 12 nt, Human
aaaaauguugaa

SEQ ID NO: 2807289 - RNA, 13 nt, Human
aaaaauuaaaaug

SEQ ID NO: 2807290 - RNA, 17 nt, Human
aaaaauuaaaauggaug

SEQ ID NO: 2807291 - RNA, 16 nt, Human
aaaaauguuuuuucau

SEQ ID NO: 2807292 - RNA, 20 nt, Human
aaaaauguuuuuucaugugu

SEQ ID NO: 2807293 - RNA, 11 nt, Human
aaaaauuaaaa

SEQ ID NO: 2807294 - RNA, 16 nt, Human
aaaaaucuucuccaga

SEQ ID NO: 2807295 - RNA, 13 nt, Human
aaaaaucuugugc

SEQ ID NO: 2807296 - RNA, 20 nt, Human
aaaaaucuugugcuagaaua

SEQ ID NO: 2807297 - RNA, 15 nt, Human
aaaaaugauguucau

SEQ ID NO: 2807298 - RNA, 15 nt, Human
aaaaaugaaugucua

SEQ ID NO: 2807299 - RNA, 20 nt, Human
aaaaaugaaugucuaaaauu

SEQ ID NO: 2807300 - RNA, 14 nt, Human
aaaaaugacagacu

SEQ ID NO: 2807301 - RNA, 12 nt, Human
aaaaaugaaaga

SEQ ID NO: 2807302 - RNA, 14 nt, Human
aaaaaugaaagaug

SEQ ID NO: 2807303 - RNA, 17 nt, Human
aaaaaugaaagaugauu

SEQ ID NO: 2807304 - RNA, 22 nt, Human
gggaacagacuggaagcacagc

SEQ ID NO: 2807305 - RNA, 14 nt, Human
gggaacagacugga

SEQ ID NO: 2807306 - RNA, 19 nt, Human
gggaacagacaacagaagu

SEQ ID NO: 2807307 - RNA, 13 nt, Human
gggaacacugccc

SEQ ID NO: 2807308 - RNA, 20 nt, Human
gggaaagggguuggggugac

SEQ ID NO: 2807309 - RNA, 23 nt, Human
gggaaaggaggcaugccucugau

SEQ ID NO: 2807310 - RNA, 20 nt, Human
gggaaagugcauaugaaauc

SEQ ID NO: 2807311 - RNA, 12 nt, Human
aaaaccaaauuc

SEQ ID NO: 2807312 - RNA, 13 nt, Human
aaaaccaaaauga

SEQ ID NO: 2807313 - RNA, 14 nt, Human
aaaaccaaaaugac

SEQ ID NO: 2807314 - RNA, 21 nt, Human
aaaacauuuuuuaauagaaua

SEQ ID NO: 2807315 - RNA, 21 nt, Human
aaaacauuuuuuuuuuaaauc

SEQ ID NO: 2807316 - RNA, 22 nt, Human
aaaaauuaggacagaaauaaua

SEQ ID NO: 2807317 - RNA, 12 nt, Human
aaaaauguuugu

SEQ ID NO: 2807318 - RNA, 14 nt, Human
aaaaauuacuaauu

SEQ ID NO: 2807319 - RNA, 18 nt, Human
aaaaauuacuaauuuuac

SEQ ID NO: 2807320 - RNA, 11 nt, Human
aaaaauuauua

SEQ ID NO: 2807321 - RNA, 19 nt, Human
aaaaauuaucuauagcuaa

SEQ ID NO: 2807322 - RNA, 19 nt, Human
aaaaccaagccguggcuuc

SEQ ID NO: 2807323 - RNA, 21 nt, Human
aaaacuacaaaucaaguauuu

SEQ ID NO: 2807324 - RNA, 18 nt, Human
aaaacuaaaucucuaaua

SEQ ID NO: 2807325 - RNA, 19 nt, Human
aaaacuaaaucucuaauau

SEQ ID NO: 2807326 - RNA, 12 nt, Human
gggcagcugcua

SEQ ID NO: 2807327 - RNA, 16 nt, Human
gggcagccaggcugcc

SEQ ID NO: 2807328 - RNA, 14 nt, Human
gggcagccaggcug

SEQ ID NO: 2807329 - RNA, 17 nt, Human
gggcagccaaacccaug

SEQ ID NO: 2807330 - RNA, 13 nt, Human
gggcagccaggcu

SEQ ID NO: 2807331 - RNA, 20 nt, Human
gggcagcauagcaagacaca

SEQ ID NO: 2807332 - RNA, 23 nt, Human
gggcaggacucagcuccccagag

SEQ ID NO: 2807333 - RNA, 18 nt, Human
gggcaggagggcccuacc

SEQ ID NO: 2807334 - RNA, 22 nt, Human
gggcaggacucagcuccccaga

SEQ ID NO: 2807335 - RNA, 18 nt, Human
gggcaggaaggagagccu

SEQ ID NO: 2807336 - RNA, 16 nt, Human
gggcaggaaggagagc

SEQ ID NO: 2807337 - RNA, 21 nt, Human
gggcaggaaggagagccugcu

SEQ ID NO: 2807338 - RNA, 19 nt, Human
gggcaggaaggagagccug

SEQ ID NO: 2807339 - RNA, 20 nt, Human
aaaaggcugugcugcccuga

SEQ ID NO: 2807340 - RNA, 19 nt, Human
aaaaggcugugcugcccug

SEQ ID NO: 2807341 - RNA, 16 nt, Human
aaaaggcugugcugcc

SEQ ID NO: 2807342 - RNA, 20 nt, Human
aaaaggcuagguacacagcu

SEQ ID NO: 2807343 - RNA, 14 nt, Human
aaaaggcuugaagc

SEQ ID NO: 2807344 - RNA, 19 nt, Human
aaaagggaaguugugccuu

SEQ ID NO: 2807345 - RNA, 20 nt, Human
aaaagggaaguugugccuuu

SEQ ID NO: 2807346 - RNA, 12 nt, Human
aaaagggaagua

SEQ ID NO: 2807347 - RNA, 18 nt, Human
aaaagggaaguaguccuu

SEQ ID NO: 2807348 - RNA, 16 nt, Human
gggauucaggcugcuu

SEQ ID NO: 2807349 - RNA, 15 nt, Human
gggauucaggcugcu

SEQ ID NO: 2807350 - RNA, 14 nt, Human
gggauucaggcugc

SEQ ID NO: 2807351 - RNA, 16 nt, Human
gggagggggagaaaag

SEQ ID NO: 2807352 - RNA, 12 nt, Human
gggaggggaagu

SEQ ID NO: 2807353 - RNA, 18 nt, Human
gggaggggcgcccaccuc

SEQ ID NO: 2807354 - RNA, 15 nt, Human
gggauuuaauuucca

SEQ ID NO: 2807355 - RNA, 20 nt, Human
gggauuuaauuuccaggguu

SEQ ID NO: 2807356 - RNA, 20 nt, Human
gggauuuccagccagggcug

SEQ ID NO: 2807357 - RNA, 13 nt, Human
gggauuucuuagg

SEQ ID NO: 2807358 - RNA, 14 nt, Human
gggauuucuuaggg

SEQ ID NO: 2807359 - RNA, 14 nt, Human
gggauuucuuugcu

SEQ ID NO: 2807360 - RNA, 14 nt, Human
gggcagagccggga

SEQ ID NO: 2807361 - RNA, 13 nt, Human
gggcagagccggg

SEQ ID NO: 2807362 - RNA, 21 nt, Human
gggcagagcccccaggaagcc

SEQ ID NO: 2807363 - RNA, 16 nt, Human
gggcagcaauuuaaau

SEQ ID NO: 2807364 - RNA, 17 nt, Human
gggcagagccgggaagc

SEQ ID NO: 2807365 - RNA, 15 nt, Human
aaaauaaauaaaagc

SEQ ID NO: 2807366 - RNA, 16 nt, Human
aaaauaaauaaaagcc

SEQ ID NO: 2807367 - RNA, 17 nt, Human
aaaauaaauaaaagccu

SEQ ID NO: 2807368 - RNA, 15 nt, Human
aaaauaaauagaaaa

SEQ ID NO: 2807369 - RNA, 20 nt, Human
aaaauaaauagcuuaaaauu

SEQ ID NO: 2807370 - RNA, 12 nt, Human
aaaauaaagaca

SEQ ID NO: 2807371 - RNA, 20 nt, Human
aaaauaaagacaaccauauu

SEQ ID NO: 2807372 - RNA, 22 nt, Human
aaaauaaagacaaccauauuua

SEQ ID NO: 2807373 - RNA, 13 nt, Human
aaaaguaaugccu

SEQ ID NO: 2807374 - RNA, 16 nt, Human
aaaaguaaugccucug

SEQ ID NO: 2807375 - RNA, 13 nt, Human
aaaaguaauguaa

SEQ ID NO: 2807376 - RNA, 21 nt, Human
aaaaguacauauuuauuuucu

SEQ ID NO: 2807377 - RNA, 23 nt, Human
aaaaguaaguaccacucaggcca

SEQ ID NO: 2807378 - RNA, 12 nt, Human
aaaaguaacuug

SEQ ID NO: 2807379 - RNA, 22 nt, Human
aaaaguaaguaccacucaggcc

SEQ ID NO: 2807380 - RNA, 16 nt, Human
aaaauacaaacacaug

SEQ ID NO: 2807381 - RNA, 12 nt, Human
aaaauaaauuua

SEQ ID NO: 2807382 - RNA, 14 nt, Human
aaaauaaauuuaua

SEQ ID NO: 2807383 - RNA, 20 nt, Human
aaaauaaauuuauaugaaaa

SEQ ID NO: 2807384 - RNA, 18 nt, Human
aaaauacaaaaaucagcc

SEQ ID NO: 2807385 - RNA, 16 nt, Human
aaaauacaaaaauuug

SEQ ID NO: 2807386 - RNA, 17 nt, Human
aaaauacaaaaauuugc

SEQ ID NO: 2807387 - RNA, 11 nt, Human
aaaauaaaugg

SEQ ID NO: 2807388 - RNA, 15 nt, Human
aaaauaaauggaaau

SEQ ID NO: 2807389 - RNA, 16 nt, Human
aaaauaccucaggaaa

SEQ ID NO: 2807390 - RNA, 18 nt, Human
aaaauaccucaggaaaga

SEQ ID NO: 2807391 - RNA, 20 nt, Human
aaaauaccucaggaaagaau

SEQ ID NO: 2807392 - RNA, 24 nt, Human
aaaauaccucaggaaagaauagaa

SEQ ID NO: 2807393 - RNA, 14 nt, Human
aaaauagaugucuu

SEQ ID NO: 2807394 - RNA, 17 nt, Human
aaaauagaugucuuuua

SEQ ID NO: 2807395 - RNA, 22 nt, Human
aaaauagcaacacucuauauuu

SEQ ID NO: 2807396 - RNA, 21 nt, Human
aaaauagcaacacucuauauu

SEQ ID NO: 2807397 - RNA, 15 nt, Human
aaaauagcaaugccu

SEQ ID NO: 2807398 - RNA, 13 nt, Human
aaaauagugaauu

SEQ ID NO: 2807399 - RNA, 18 nt, Human
aaaauaggggauauuuaa

SEQ ID NO: 2807400 - RNA, 12 nt, Human
aaaauagcuugu

SEQ ID NO: 2807401 - RNA, 21 nt, Human
aaaauagcuuguauaguguaa

SEQ ID NO: 2807402 - RNA, 13 nt, Human
aaaauagcuugua

SEQ ID NO: 2807403 - RNA, 19 nt, Human
aaaauagcuuguauagugu

SEQ ID NO: 2807404 - RNA, 16 nt, Human
aaaauaguuguccaua

SEQ ID NO: 2807405 - RNA, 23 nt, Human
aaaauaguuaagacaugauuucc

SEQ ID NO: 2807406 - RNA, 15 nt, Human
aaaauauaaacaaag

SEQ ID NO: 2807407 - RNA, 13 nt, Human
aaaauauaaaaua

SEQ ID NO: 2807408 - RNA, 22 nt, Human
aaaauauaaaauaguuguccau

SEQ ID NO: 2807409 - RNA, 16 nt, Human
aaaauauaaacaaaga

SEQ ID NO: 2807410 - RNA, 12 nt, Human
aaaauaguuugu

SEQ ID NO: 2807411 - RNA, 13 nt, Human
aaaauaguuuguu

SEQ ID NO: 2807412 - RNA, 17 nt, Human
aaaauaguuuguuuaau

SEQ ID NO: 2807413 - RNA, 14 nt, Human
aaaauauauuuaau

SEQ ID NO: 2807414 - RNA, 19 nt, Human
aaaauauauauagugcuau

SEQ ID NO: 2807415 - RNA, 20 nt, Human
aaaauauauauagugcuaua

SEQ ID NO: 2807416 - RNA, 14 nt, Human
aaaauauauacuaa

SEQ ID NO: 2807417 - RNA, 12 nt, Human
aaaauauaugua

SEQ ID NO: 2807418 - RNA, 13 nt, Human
aaaauauauguau

SEQ ID NO: 2807419 - RNA, 14 nt, Human
aaaauauauguauu

SEQ ID NO: 2807420 - RNA, 15 nt, Human
aaaauauauguauuu

SEQ ID NO: 2807421 - RNA, 16 nt, Human
aaaauauauguauuuu

SEQ ID NO: 2807422 - RNA, 20 nt, Human
aaaauauggaacuucuaaua

SEQ ID NO: 2807423 - RNA, 21 nt, Human
aaaauauggaacuucuaauau

SEQ ID NO: 2807424 - RNA, 10 nt, Human
aaaauauaua

SEQ ID NO: 2807425 - RNA, 13 nt, Human
aaaauauauacua

SEQ ID NO: 2807426 - RNA, 17 nt, Human
aaaauauauacuaaaca

SEQ ID NO: 2807427 - RNA, 13 nt, Human
aaaauauauauag

SEQ ID NO: 2807428 - RNA, 23 nt, Human
aaaauauauauagaaauauauac

SEQ ID NO: 2807429 - RNA, 13 nt, Human
aaaaaaaaaguuc

SEQ ID NO: 2807430 - RNA, 12 nt, Human
aaaaaaaaaugc

SEQ ID NO: 2807431 - RNA, 13 nt, Human
aaaaaaaaaaaga

SEQ ID NO: 2807432 - RNA, 13 nt, Human
aaaaaaacacaaa

SEQ ID NO: 2807433 - RNA, 12 nt, Human
aaaaaagaggaa

SEQ ID NO: 2807434 - RNA, 15 nt, Human
aaaaaagagaauuag

SEQ ID NO: 2807435 - RNA, 19 nt, Human
aaaaaagauuguauugcug

SEQ ID NO: 2807436 - RNA, 11 nt, Human
aaaaaagcaug

SEQ ID NO: 2807437 - RNA, 10 nt, Human
aaaaaagcuc

SEQ ID NO: 2807438 - RNA, 11 nt, Human
aaaaaagcuca

SEQ ID NO: 2807439 - RNA, 12 nt, Human
aaaaaagcucau

SEQ ID NO: 2807440 - RNA, 14 nt, Human
aaaaaaaagcuuua

SEQ ID NO: 2807441 - RNA, 11 nt, Human
aaaaaaaagcu

SEQ ID NO: 2807442 - RNA, 12 nt, Human
aaaaaaaagcuu

SEQ ID NO: 2807443 - RNA, 13 nt, Human
aaaaaaaaugcca

SEQ ID NO: 2807444 - RNA, 9 nt, Human
aaaaaauag

SEQ ID NO: 2807445 - RNA, 20 nt, Human
aaaaaauagaugucuuuuau

SEQ ID NO: 2807446 - RNA, 20 nt, Human
aaaaaaguuuacaaguguau

SEQ ID NO: 2807447 - RNA, 11 nt, Human
aaaaaagcuuu

SEQ ID NO: 2807448 - RNA, 13 nt, Human
aaaaaagcuuuau

SEQ ID NO: 2807449 - RNA, 19 nt, Human
aaaaaagcuuuaugauuuu

SEQ ID NO: 2807450 - RNA, 11 nt, Human
aaaaaaggaaa

SEQ ID NO: 2807451 - RNA, 16 nt, Human
aaaaaaggcauuguuu

SEQ ID NO: 2807452 - RNA, 16 nt, Human
aaaaaguccaauuuua

SEQ ID NO: 2807453 - RNA, 20 nt, Human
aaaaaguccaauuuuaauuu

SEQ ID NO: 2807454 - RNA, 23 nt, Human
aaaaaguccaauuuuaauuuagu

SEQ ID NO: 2807455 - RNA, 20 nt, Human
aaaaagucagacugcuggga

SEQ ID NO: 2807456 - RNA, 22 nt, Human
aaaaagucuacgcucuccuuuc

SEQ ID NO: 2807457 - RNA, 13 nt, Human
aaaaagugacaca

SEQ ID NO: 2807458 - RNA, 11 nt, Human
aaaaaggguca

SEQ ID NO: 2807459 - RNA, 19 nt, Human
aaaaagggucaaugcuauu

SEQ ID NO: 2807460 - RNA, 21 nt, Human
aaaaagggucaaugcuauuuu

SEQ ID NO: 2807461 - RNA, 23 nt, Human
aaaaagggucaaugcuauuuuug

SEQ ID NO: 2807462 - RNA, 21 nt, Human
aaaaagggauccguacauuca

SEQ ID NO: 2807463 - RNA, 21 nt, Human
aaaaaguaaguaccacucagg

SEQ ID NO: 2807464 - RNA, 9 nt, Human
aaaaagcuc

SEQ ID NO: 2807465 - RNA, 13 nt, Human
aaaaaggaacugc

SEQ ID NO: 2807466 - RNA, 17 nt, Human
aaaaaggaacugcagca

SEQ ID NO: 2807467 - RNA, 13 nt, Human
aaaaagcuucccc

SEQ ID NO: 2807468 - RNA, 12 nt, Human
aaaaagcuuuau

SEQ ID NO: 2807469 - RNA, 19 nt, Human
aaaaagcuuuaugauuuuc

SEQ ID NO: 2807470 - RNA, 23 nt, Human
aaaaagcuuuaugauuuucauaa

SEQ ID NO: 2807471 - RNA, 19 nt, Human
aaaaagcuuccaugauucu

SEQ ID NO: 2807472 - RNA, 14 nt, Human
aaaaagcuuuuucc

SEQ ID NO: 2807473 - RNA, 16 nt, Human
aaaaaggaaaaaaaga

SEQ ID NO: 2807474 - RNA, 17 nt, Human
aaaaaggaaaaaaagac

SEQ ID NO: 2807475 - RNA, 18 nt, Human
aaaaagcucauauuuugu

SEQ ID NO: 2807476 - RNA, 20 nt, Human
aaaaagcuccuguccuccca

SEQ ID NO: 2807477 - RNA, 19 nt, Human
aaaaagcucauauuuugua

SEQ ID NO: 2807478 - RNA, 17 nt, Human
aaaaagcucauuucaug

SEQ ID NO: 2807479 - RNA, 21 nt, Human
aaaaagcucauuucaugcucu

SEQ ID NO: 2807480 - RNA, 20 nt, Human
aaaaagcuccaaaugcagcu

SEQ ID NO: 2807481 - RNA, 19 nt, Human
ggcuuuuuuaaaaaagcaa

SEQ ID NO: 2807482 - RNA, 13 nt, Human
gggaaaagcagcu

SEQ ID NO: 2807483 - RNA, 22 nt, Human
gggaaagacacugccugggcug

SEQ ID NO: 2807484 - RNA, 18 nt, Human
gggaaagacacugccugg

SEQ ID NO: 2807485 - RNA, 17 nt, Human
gggaaagacacugccug

SEQ ID NO: 2807486 - RNA, 13 nt, Human
gggaaagacacug

SEQ ID NO: 2807487 - RNA, 17 nt, Human
gggaaacuugucacuug

SEQ ID NO: 2807488 - RNA, 15 nt, Human
gggaaacacuccuug

SEQ ID NO: 2807489 - RNA, 16 nt, Human
gggaaacacuccuugc

SEQ ID NO: 2807490 - RNA, 20 nt, Human
gggaaaccuagagaagauaa

SEQ ID NO: 2807491 - RNA, 16 nt, Human
gggaaaaaaaucaucu

SEQ ID NO: 2807492 - RNA, 15 nt, Human
gggaaaaaaauguug

SEQ ID NO: 2807493 - RNA, 13 nt, Human
ggcugucaucuga

SEQ ID NO: 2807494 - RNA, 19 nt, Human
ggcuucguuagaccgcucu

SEQ ID NO: 2807495 - RNA, 16 nt, Human
ggcuucaguggcagcu

SEQ ID NO: 2807496 - RNA, 18 nt, Human
ggcuucagucucauauuu

SEQ ID NO: 2807497 - RNA, 15 nt, Human
ggcuucaugccagcu

SEQ ID NO: 2807498 - RNA, 21 nt, Human
ggcuuccagaaaaccccagca

SEQ ID NO: 2807499 - RNA, 18 nt, Human
ggcuucauuagagcaggc

SEQ ID NO: 2807500 - RNA, 16 nt, Human
ggcuucaugccagcua

SEQ ID NO: 2807501 - RNA, 19 nt, Human
ggcuucccaguggcugcug

SEQ ID NO: 2807502 - RNA, 20 nt, Human
ggcuucccaguggcugcugc

SEQ ID NO: 2807503 - RNA, 21 nt, Human
ggcuucccaguggcugcugcc

SEQ ID NO: 2807504 - RNA, 22 nt, Human
ggcuucccaguggcugcugccc

SEQ ID NO: 2807505 - RNA, 23 nt, Human
ggcuuccaucccaaccagugcca

SEQ ID NO: 2807506 - RNA, 17 nt, Human
ggcuucccaguggcugc

SEQ ID NO: 2807507 - RNA, 16 nt, Human
ggcuggugucaccuga

SEQ ID NO: 2807508 - RNA, 13 nt, Human
ggcuggugggagg

SEQ ID NO: 2807509 - RNA, 17 nt, Human
ggcuggugggaggggcg

SEQ ID NO: 2807510 - RNA, 19 nt, Human
ggcuguaucccaugagccu

SEQ ID NO: 2807511 - RNA, 14 nt, Human
ggcugguggcaagu

SEQ ID NO: 2807512 - RNA, 23 nt, Human
aaaaaguguuuauuuuucauauu

SEQ ID NO: 2807513 - RNA, 15 nt, Human
aaaaaguuaaugcuu

SEQ ID NO: 2807514 - RNA, 13 nt, Human
aaaaaguuccuuc

SEQ ID NO: 2807515 - RNA, 13 nt, Human
aaaaaguguuuau

SEQ ID NO: 2807516 - RNA, 12 nt, Human
aaaaaguguuua

SEQ ID NO: 2807517 - RNA, 17 nt, Human
aaaaaguggaauuucuu

SEQ ID NO: 2807518 - RNA, 19 nt, Human
aaaaaguggaauuucuugu

SEQ ID NO: 2807519 - RNA, 15 nt, Human
aaaaaguggggcaga

SEQ ID NO: 2807520 - RNA, 22 nt, Human
aaaaaguggggcagagccuccc

SEQ ID NO: 2807521 - RNA, 14 nt, Human
aaaaagugacacag

SEQ ID NO: 2807522 - RNA, 15 nt, Human
aaaaagugacacagc

SEQ ID NO: 2807523 - RNA, 16 nt, Human
aaaaagugacacagca

SEQ ID NO: 2807524 - RNA, 17 nt, Human
aaaaagugacacagcag

SEQ ID NO: 2807525 - RNA, 19 nt, Human
aaaaagugacacagcagcu

SEQ ID NO: 2807526 - RNA, 20 nt, Human
aaaaagugacacagcagcuu

SEQ ID NO: 2807527 - RNA, 23 nt, Human
aaaaagugacacagcagcuucac

SEQ ID NO: 2807528 - RNA, 23 nt, Human
ggcuguaucccaugagccucagc

SEQ ID NO: 2807529 - RNA, 22 nt, Human
ggcuguaucccaugagccucag

SEQ ID NO: 2807530 - RNA, 20 nt, Human
ggcuguaucccaugagccuc

SEQ ID NO: 2807531 - RNA, 15 nt, Human
ggcuucaguggcagc

SEQ ID NO: 2807532 - RNA, 11 nt, Human
ggcuucagccu

SEQ ID NO: 2807533 - RNA, 13 nt, Human
ggcuucagccuag

SEQ ID NO: 2807534 - RNA, 21 nt, Human
ggcuucagccuaguggcuugu

SEQ ID NO: 2807535 - RNA, 24 nt, Human
ggcuucagccuaguggcuuguccu

SEQ ID NO: 2807536 - RNA, 13 nt, Human
ggcuucagcucca

SEQ ID NO: 2807537 - RNA, 15 nt, Human
ggcuucagcuccagc

SEQ ID NO: 2807538 - RNA, 16 nt, Human
ggcuucagcuccagcc

SEQ ID NO: 2807539 - RNA, 20 nt, Human
ggcuucagcuccagccccuu

SEQ ID NO: 2807540 - RNA, 19 nt, Human
ggcuucaggcaauucuccu

SEQ ID NO: 2807541 - RNA, 16 nt, Human
ggcuucagggcaggug

SEQ ID NO: 2807542 - RNA, 18 nt, Human
ggcuucagggcagguggg

SEQ ID NO: 2807543 - RNA, 15 nt, Human
ggcuggcccugcccu

SEQ ID NO: 2807544 - RNA, 14 nt, Human
ggcuggcccugccc

SEQ ID NO: 2807545 - RNA, 13 nt, Human
ggcuggcccugcc

SEQ ID NO: 2807546 - RNA, 16 nt, Human
ggcuggccccagggca

SEQ ID NO: 2807547 - RNA, 17 nt, Human
ggcuggccccagggcac

SEQ ID NO: 2807548 - RNA, 20 nt, Human
ggcuggccccagggcacccu

SEQ ID NO: 2807549 - RNA, 20 nt, Human
ggcuggcgugcaguggugcg

SEQ ID NO: 2807550 - RNA, 16 nt, Human
ggcuggcgugcagugg

SEQ ID NO: 2807551 - RNA, 14 nt, Human
ggcuggcgugcagu

SEQ ID NO: 2807552 - RNA, 16 nt, Human
ggcuggcccugcccug

SEQ ID NO: 2807553 - RNA, 19 nt, Human
ggcugccccaaccugcuga

SEQ ID NO: 2807554 - RNA, 19 nt, Human
ggcugcccccggcccccug

SEQ ID NO: 2807555 - RNA, 20 nt, Human
ggcugcccccggcccccugg

SEQ ID NO: 2807556 - RNA, 21 nt, Human
ggcugcccccggcccccuggu

SEQ ID NO: 2807557 - RNA, 15 nt, Human
ggcuggauguggugg

SEQ ID NO: 2807558 - RNA, 15 nt, Human
ggcuggaugaaauuu

SEQ ID NO: 2807559 - RNA, 19 nt, Human
ggcuggaugugguggcaua

SEQ ID NO: 2807560 - RNA, 18 nt, Human
ggcuggaugugguggcau

SEQ ID NO: 2807561 - RNA, 19 nt, Human
ggcugggaacucaccuggg

SEQ ID NO: 2807562 - RNA, 14 nt, Human
ggcuggcuuuucug

SEQ ID NO: 2807563 - RNA, 23 nt, Human
ggcuggcuuuucuguuuccugua

SEQ ID NO: 2807564 - RNA, 22 nt, Human
ggcugggaaacacuccuugcau

SEQ ID NO: 2807565 - RNA, 13 nt, Human
ggcuggcugggca

SEQ ID NO: 2807566 - RNA, 15 nt, Human
ggcuggcugcaguga

SEQ ID NO: 2807567 - RNA, 14 nt, Human
ggcuggcugcagug

SEQ ID NO: 2807568 - RNA, 21 nt, Human
ggcucgagcaguccugccuca

SEQ ID NO: 2807569 - RNA, 17 nt, Human
ggcugcagggaguccga

SEQ ID NO: 2807570 - RNA, 22 nt, Human
ggcugcagugacgugcaccugu

SEQ ID NO: 2807571 - RNA, 15 nt, Human
ggcugcagugagcca

SEQ ID NO: 2807572 - RNA, 17 nt, Human
ggcugcaguagccaugu

SEQ ID NO: 2807573 - RNA, 13 nt, Human
ggcugcaguccuc

SEQ ID NO: 2807574 - RNA, 22 nt, Human
ggcugcaguccuccgguugcau

SEQ ID NO: 2807575 - RNA, 13 nt, Human
ggcugccaccaag

SEQ ID NO: 2807576 - RNA, 15 nt, Human
ggcuccgaacacccu

SEQ ID NO: 2807577 - RNA, 21 nt, Human
ggcuccgcccuuaguccccca

SEQ ID NO: 2807578 - RNA, 22 nt, Human
ggcuccgcccuuagucccccaa

SEQ ID NO: 2807579 - RNA, 14 nt, Human
ggcuccucacauag

SEQ ID NO: 2807580 - RNA, 12 nt, Human
ggcuccugccac

SEQ ID NO: 2807581 - RNA, 12 nt, Human
ggcuccugccag

SEQ ID NO: 2807582 - RNA, 13 nt, Human
ggcuccugccacc

SEQ ID NO: 2807583 - RNA, 12 nt, Human
ggcuccugaggg

SEQ ID NO: 2807584 - RNA, 21 nt, Human
ggcuccucuguggugucugcc

SEQ ID NO: 2807585 - RNA, 17 nt, Human
ggcuccucccggugccc

SEQ ID NO: 2807586 - RNA, 12 nt, Human
ggcuccucccag

SEQ ID NO: 2807587 - RNA, 13 nt, Human
ggcuccucccagc

SEQ ID NO: 2807588 - RNA, 17 nt, Human
aaacauaccaacauguu

SEQ ID NO: 2807589 - RNA, 15 nt, Human
aaacauaaugaaaau

SEQ ID NO: 2807590 - RNA, 18 nt, Human
aaacauaaugaaaauauu

SEQ ID NO: 2807591 - RNA, 14 nt, Human
aaacaauaaagaga

SEQ ID NO: 2807592 - RNA, 15 nt, Human
aaacaauaaagagau

SEQ ID NO: 2807593 - RNA, 12 nt, Human
aaacaagaaugu

SEQ ID NO: 2807594 - RNA, 23 nt, Human
aaacaagccaagaaagauguaua

SEQ ID NO: 2807595 - RNA, 19 nt, Human
aaacaaggggcuguuacau

SEQ ID NO: 2807596 - RNA, 20 nt, Human
aaacaaggggcuguuacaua

SEQ ID NO: 2807597 - RNA, 17 nt, Human
aaacacacugaaagcuc

SEQ ID NO: 2807598 - RNA, 17 nt, Human
aaacauaagaucacugc

SEQ ID NO: 2807599 - RNA, 20 nt, Human
aaacacacuguuguuuaguu

SEQ ID NO: 2807600 - RNA, 21 nt, Human
aaacacacgcgcgcacacaca

SEQ ID NO: 2807601 - RNA, 21 nt, Human
aaacacacagauacacacaca

SEQ ID NO: 2807602 - RNA, 13 nt, Human
aaacacaaaugca

SEQ ID NO: 2807603 - RNA, 14 nt, Human
aaacacaaaugcag

SEQ ID NO: 2807604 - RNA, 19 nt, Human
aaacacaaaugcagggauu

SEQ ID NO: 2807605 - RNA, 22 nt, Human
ggggaaagacacugccugggcu

SEQ ID NO: 2807606 - RNA, 23 nt, Human
ggggaaagacacugccugggcug

SEQ ID NO: 2807607 - RNA, 13 nt, Human
ggggaaagcacag

SEQ ID NO: 2807608 - RNA, 23 nt, Human
ggggaacauuucuguaaauacca

SEQ ID NO: 2807609 - RNA, 22 nt, Human
ggggaaccugccaugccaggaa

SEQ ID NO: 2807610 - RNA, 21 nt, Human
ggggaaccugccaugccagga

SEQ ID NO: 2807611 - RNA, 19 nt, Human
aaacaacuucaauauccaa

SEQ ID NO: 2807612 - RNA, 19 nt, Human
aaacaacauuuugagaaca

SEQ ID NO: 2807613 - RNA, 21 nt, Human
aaacaacauuuugagaacaaa

SEQ ID NO: 2807614 - RNA, 22 nt, Human
aaacaacauuuugagaacaaag

SEQ ID NO: 2807615 - RNA, 20 nt, Human
aaacaacagcucgauccaaa

SEQ ID NO: 2807616 - RNA, 22 nt, Human
aaacaacagcucgauccaaauu

SEQ ID NO: 2807617 - RNA, 20 nt, Human
aaacaaaauuuguuugaaau

SEQ ID NO: 2807618 - RNA, 18 nt, Human
aaacaaacaccuucuuau

SEQ ID NO: 2807619 - RNA, 15 nt, Human
aaacaaacauugugu

SEQ ID NO: 2807620 - RNA, 22 nt, Human
aaacaaacauuguguugacauu

SEQ ID NO: 2807621 - RNA, 13 nt, Human
aaacaaaccagaa

SEQ ID NO: 2807622 - RNA, 23 nt, Human
aaacaaacuuuucaaggcuuaua

SEQ ID NO: 2807623 - RNA, 16 nt, Human
aaacaaaacaaaacaa

SEQ ID NO: 2807624 - RNA, 15 nt, Human
aaacaaaacaaaacu

SEQ ID NO: 2807625 - RNA, 16 nt, Human
aaacaaaacaaaacua

SEQ ID NO: 2807626 - RNA, 17 nt, Human
aaacaaaacaaaacuau

SEQ ID NO: 2807627 - RNA, 12 nt, Human
aaacaaaauaga

SEQ ID NO: 2807628 - RNA, 21 nt, Human
aaacaaaaccccuaagagacu

SEQ ID NO: 2807629 - RNA, 12 nt, Human
aaacaaaacuau

SEQ ID NO: 2807630 - RNA, 18 nt, Human
aaacaaaacuauacuuga

SEQ ID NO: 2807631 - RNA, 20 nt, Human
aaacaaaacuauacuugaac

SEQ ID NO: 2807632 - RNA, 16 nt, Human
aaaauugucuucaugu

SEQ ID NO: 2807633 - RNA, 23 nt, Human
aaaauguaagauuauagauucua

SEQ ID NO: 2807634 - RNA, 14 nt, Human
aaaauggaauaaaa

SEQ ID NO: 2807635 - RNA, 18 nt, Human
aaaauauauaccccccca

SEQ ID NO: 2807636 - RNA, 20 nt, Human
aaaauggaagccaacacauc

SEQ ID NO: 2807637 - RNA, 16 nt, Human
aaaauggagguggaaa

SEQ ID NO: 2807638 - RNA, 14 nt, Human
aaaauggcagugau

SEQ ID NO: 2807639 - RNA, 20 nt, Human
aaaauggcagugaugaauuu

SEQ ID NO: 2807640 - RNA, 20 nt, Human
aaaauggauauuauuagaaa

SEQ ID NO: 2807641 - RNA, 21 nt, Human
aaaauggauauuauuagaaau

SEQ ID NO: 2807642 - RNA, 22 nt, Human
aaaauggauauuauuagaaauu

SEQ ID NO: 2807643 - RNA, 21 nt, Human
aaaauggaugccuugaauaau

SEQ ID NO: 2807644 - RNA, 23 nt, Human
aaaauggaugccuugaauaauaa

SEQ ID NO: 2807645 - RNA, 12 nt, Human
aaaauguauaua

SEQ ID NO: 2807646 - RNA, 14 nt, Human
aaaauguauauauu

SEQ ID NO: 2807647 - RNA, 16 nt, Human
aaaauguauauauuua

SEQ ID NO: 2807648 - RNA, 10 nt, Human
aaaauguacu

SEQ ID NO: 2807649 - RNA, 18 nt, Human
aaaauguacugagauuuu

SEQ ID NO: 2807650 - RNA, 23 nt, Human
aaaauggacaugguggcuuuguu

SEQ ID NO: 2807651 - RNA, 15 nt, Human
aaaauauuauguguu

SEQ ID NO: 2807652 - RNA, 14 nt, Human
aaaauauuaugugu

SEQ ID NO: 2807653 - RNA, 22 nt, Human
aaaauauuacucaguuuauguu

SEQ ID NO: 2807654 - RNA, 13 nt, Human
aaaauaugucucg

SEQ ID NO: 2807655 - RNA, 23 nt, Human
aaaauaugucucgcuagugaugu

SEQ ID NO: 2807656 - RNA, 21 nt, Human
aaaauauuauguguuuccaua

SEQ ID NO: 2807657 - RNA, 11 nt, Human
gggcuggaaca

SEQ ID NO: 2807658 - RNA, 23 nt, Human
gggcuggaacagauucacacugu

SEQ ID NO: 2807659 - RNA, 17 nt, Human
gggcuggccaguuggaa

SEQ ID NO: 2807660 - RNA, 16 nt, Human
aaaccaagcaucaggg

SEQ ID NO: 2807661 - RNA, 14 nt, Human
aaaccacagcugcu

SEQ ID NO: 2807662 - RNA, 12 nt, Human
aaacgcugccug

SEQ ID NO: 2807663 - RNA, 16 nt, Human
aaacgcugccugccca

SEQ ID NO: 2807664 - RNA, 13 nt, Human
aaacgcugucaaa

SEQ ID NO: 2807665 - RNA, 18 nt, Human
aaacgcugucaaaaguug

SEQ ID NO: 2807666 - RNA, 22 nt, Human
aaacgcugucaaaaguuggacu

SEQ ID NO: 2807667 - RNA, 14 nt, Human
aaacgcugccugcc

SEQ ID NO: 2807668 - RNA, 16 nt, Human
aaacgcuaccucucug

SEQ ID NO: 2807669 - RNA, 18 nt, Human
aaacgcuaccucucuguc

SEQ ID NO: 2807670 - RNA, 21 nt, Human
aaacgcuaccucucugucccu

SEQ ID NO: 2807671 - RNA, 23 nt, Human
aaacggccucacuaggcuucugg

SEQ ID NO: 2807672 - RNA, 12 nt, Human
aaacgugaaaau

SEQ ID NO: 2807673 - RNA, 18 nt, Human
aaacuaaaucucuaauau

SEQ ID NO: 2807674 - RNA, 13 nt, Human
aaacuaaggugcu

SEQ ID NO: 2807675 - RNA, 15 nt, Human
aaacuaaggugcuaa

SEQ ID NO: 2807676 - RNA, 16 nt, Human
aaacuaaggugcuaaa

SEQ ID NO: 2807677 - RNA, 22 nt, Human
aaacuacacaucccuaaugugu

SEQ ID NO: 2807678 - RNA, 18 nt, Human
aaacuacagaccugcuuu

SEQ ID NO: 2807679 - RNA, 20 nt, Human
aaacuaaugguccacaccca

SEQ ID NO: 2807680 - RNA, 20 nt, Human
aaacuaccuaacauuauuua

SEQ ID NO: 2807681 - RNA, 12 nt, Human
aaacuacucuuu

SEQ ID NO: 2807682 - RNA, 13 nt, Human
aaacuacucuuug

SEQ ID NO: 2807683 - RNA, 14 nt, Human
aaacuacucuuuga

SEQ ID NO: 2807684 - RNA, 17 nt, Human
aaacuacucuuugauuu

SEQ ID NO: 2807685 - RNA, 20 nt, Human
aaacuacuugauuuuauugu

SEQ ID NO: 2807686 - RNA, 12 nt, Human
aaacuagaugac

SEQ ID NO: 2807687 - RNA, 13 nt, Human
aaacuagaugacc

SEQ ID NO: 2807688 - RNA, 15 nt, Human
aaacuagaugaccuc

SEQ ID NO: 2807689 - RNA, 16 nt, Human
aaacuagaugaccuca

SEQ ID NO: 2807690 - RNA, 17 nt, Human
aaacuagaugaccucau

SEQ ID NO: 2807691 - RNA, 20 nt, Human
aaacuagaugaccucauuaa

SEQ ID NO: 2807692 - RNA, 22 nt, Human
aaacuagaugaccucauuaacc

SEQ ID NO: 2807693 - RNA, 15 nt, Human
aaacuccaccuuccc

SEQ ID NO: 2807694 - RNA, 16 nt, Human
aaacuccgcccccagc

SEQ ID NO: 2807695 - RNA, 17 nt, Human
aaacuccggauugcguu

SEQ ID NO: 2807696 - RNA, 23 nt, Human
aaacucccacuugucaugugaca

SEQ ID NO: 2807697 - RNA, 23 nt, Human
aaacucccauuuacgugucugaa

SEQ ID NO: 2807698 - RNA, 11 nt, Human
aaacuccugac

SEQ ID NO: 2807699 - RNA, 11 nt, Human
aaacugccccc

SEQ ID NO: 2807700 - RNA, 12 nt, Human
aaacugcccccu

SEQ ID NO: 2807701 - RNA, 11 nt, Human
aaacuggaguc

SEQ ID NO: 2807702 - RNA, 15 nt, Human
aaacuggagucugga

SEQ ID NO: 2807703 - RNA, 20 nt, Human
aaacugcccccucugcccug

SEQ ID NO: 2807704 - RNA, 19 nt, Human
aaacugcccccucugcccu

SEQ ID NO: 2807705 - RNA, 17 nt, Human
aaacugcccccucugcc

SEQ ID NO: 2807706 - RNA, 13 nt, Human
aaacugcccccuc

SEQ ID NO: 2807707 - RNA, 17 nt, Human
aaacuggggccuccaga

SEQ ID NO: 2807708 - RNA, 18 nt, Human
aaacuggggccuccagaa

SEQ ID NO: 2807709 - RNA, 15 nt, Human
aaacuggccccggau

SEQ ID NO: 2807710 - RNA, 15 nt, Human
aaacuggccugacuu

SEQ ID NO: 2807711 - RNA, 20 nt, Human
aaacuggggccuccagaacu

SEQ ID NO: 2807712 - RNA, 14 nt, Human
aaacuguaaaaaau

SEQ ID NO: 2807713 - RNA, 21 nt, Human
aaacuguaaaaaaugugugua

SEQ ID NO: 2807714 - RNA, 20 nt, Human
ggguagcugccacuugaaca

SEQ ID NO: 2807715 - RNA, 15 nt, Human
ggguagggaauaaaa

SEQ ID NO: 2807716 - RNA, 12 nt, Human
ggguagugagca

SEQ ID NO: 2807717 - RNA, 20 nt, Human
ggguaucaggugcugccauc

SEQ ID NO: 2807718 - RNA, 16 nt, Human
ggguauaucugggcug

SEQ ID NO: 2807719 - RNA, 23 nt, Human
gggucacugaggccugagaccca

SEQ ID NO: 2807720 - RNA, 20 nt, Human
gggucagaggaccuguauuu

SEQ ID NO: 2807721 - RNA, 19 nt, Human
ggggucucuuuuguaaauu

SEQ ID NO: 2807722 - RNA, 23 nt, Human
ggggucugggaggaauggacaga

SEQ ID NO: 2807723 - RNA, 19 nt, Human
ggggcgcccaccuccccac

SEQ ID NO: 2807724 - RNA, 21 nt, Human
ggggcgaucgcggcggagcug

SEQ ID NO: 2807725 - RNA, 14 nt, Human
ggggcgcccaccuc

SEQ ID NO: 2807726 - RNA, 22 nt, Human
ggggcgccgcaaaccacacugg

SEQ ID NO: 2807727 - RNA, 22 nt, Human
gggguccuucaaguuagcucag

SEQ ID NO: 2807728 - RNA, 12 nt, Human
ggggccugugga

SEQ ID NO: 2807729 - RNA, 13 nt, Human
ggggcgaggcagg

SEQ ID NO: 2807730 - RNA, 14 nt, Human
ggggcgaggcaggc

SEQ ID NO: 2807731 - RNA, 12 nt, Human
ggggcccugguc

SEQ ID NO: 2807732 - RNA, 17 nt, Human
ggggaagaagcagagag

SEQ ID NO: 2807733 - RNA, 18 nt, Human
ggggaagaagcagagaga

SEQ ID NO: 2807734 - RNA, 23 nt, Human
gggucucacuauguugcccaggc

SEQ ID NO: 2807735 - RNA, 15 nt, Human
gggucuauuccagcu

SEQ ID NO: 2807736 - RNA, 17 nt, Human
gggucuauuccagcuca

SEQ ID NO: 2807737 - RNA, 22 nt, Human
gggucguuugcuuuucaggguu

SEQ ID NO: 2807738 - RNA, 22 nt, Human
gggucucacuauguugcccagg

SEQ ID NO: 2807739 - RNA, 15 nt, Human
aaaccaaaaacugaa

SEQ ID NO: 2807740 - RNA, 13 nt, Human
aaaccaaaaugac

SEQ ID NO: 2807741 - RNA, 17 nt, Human
aaaccaaaaugacaucu

SEQ ID NO: 2807742 - RNA, 18 nt, Human
aaaccaaaaugacaucuu

SEQ ID NO: 2807743 - RNA, 19 nt, Human
aaaccaaaaugacaucuuu

SEQ ID NO: 2807744 - RNA, 20 nt, Human
aaaccaaaaugacaucuuuu

SEQ ID NO: 2807745 - RNA, 22 nt, Human
aaaccaaaaugacaucuuuuua

SEQ ID NO: 2807746 - RNA, 23 nt, Human
aaaccaaaaugacaucuuuuuaa

SEQ ID NO: 2807747 - RNA, 14 nt, Human
aaaccaaaaugaua

SEQ ID NO: 2807748 - RNA, 13 nt, Human
aaaccaaaggaca

SEQ ID NO: 2807749 - RNA, 17 nt, Human
aaaccaaaggacauuau

SEQ ID NO: 2807750 - RNA, 23 nt, Human
aaaccaaaggacauuaugugugc

SEQ ID NO: 2807751 - RNA, 14 nt, Human
aaaccaagccgugg

SEQ ID NO: 2807752 - RNA, 16 nt, Human
aaaccaagagauugcu

SEQ ID NO: 2807753 - RNA, 17 nt, Human
aaaccaagagauugcua

SEQ ID NO: 2807754 - RNA, 18 nt, Human
aaaccaagagauugcuaa

SEQ ID NO: 2807755 - RNA, 19 nt, Human
aaaccaagagauugcuaau

SEQ ID NO: 2807756 - RNA, 20 nt, Human
aaaccaagagauugcuaauu

SEQ ID NO: 2807757 - RNA, 23 nt, Human
aaaccaaauucagggacaaaugg

SEQ ID NO: 2807758 - RNA, 19 nt, Human
aaacauugacgauuccuuc

SEQ ID NO: 2807759 - RNA, 24 nt, Human
aaacauugacgauuccuucucuga

SEQ ID NO: 2807760 - RNA, 17 nt, Human
aaacauugccuuugaau

SEQ ID NO: 2807761 - RNA, 18 nt, Human
aaacauugccuuugaaug

SEQ ID NO: 2807762 - RNA, 19 nt, Human
aaacauugccuuugaaugu

SEQ ID NO: 2807763 - RNA, 15 nt, Human
gggucaggcagccag

SEQ ID NO: 2807764 - RNA, 17 nt, Human
aaacauuaaaaauggaa

SEQ ID NO: 2807765 - RNA, 15 nt, Human
aaacauuaaaugucu

SEQ ID NO: 2807766 - RNA, 16 nt, Human
aaacauuaaaugucuu

SEQ ID NO: 2807767 - RNA, 20 nt, Human
aaacauuaaaugucuuauau

SEQ ID NO: 2807768 - RNA, 15 nt, Human
aaacauuggauuauc

SEQ ID NO: 2807769 - RNA, 11 nt, Human
aaacauuuaua

SEQ ID NO: 2807770 - RNA, 17 nt, Human
aaacauuguguugacau

SEQ ID NO: 2807771 - RNA, 19 nt, Human
aaacauuguguugacauua

SEQ ID NO: 2807772 - RNA, 17 nt, Human
ggucuguucuguuucaa

SEQ ID NO: 2807773 - RNA, 22 nt, Human
ggucuugaacuccuggccucaa

SEQ ID NO: 2807774 - RNA, 21 nt, Human
ggucuugaacuccuggccuca

SEQ ID NO: 2807775 - RNA, 21 nt, Human
aaagauuuucagaaaauauua

SEQ ID NO: 2807776 - RNA, 19 nt, Human
aaagauuuuuuuuaaucua

SEQ ID NO: 2807777 - RNA, 16 nt, Human
ggucuggacugacagc

SEQ ID NO: 2807778 - RNA, 19 nt, Human
ggucuggacugacagcaug

SEQ ID NO: 2807779 - RNA, 12 nt, Human
aaagcaaaaaug

SEQ ID NO: 2807780 - RNA, 13 nt, Human
aaagcaaaaaugc

SEQ ID NO: 2807781 - RNA, 14 nt, Human
aaagcaaaaaugcu

SEQ ID NO: 2807782 - RNA, 15 nt, Human
aaagcaaaaaugcua

SEQ ID NO: 2807783 - RNA, 16 nt, Human
aaagcaaaaaugcuaa

SEQ ID NO: 2807784 - RNA, 17 nt, Human
aaagcaaaaaugcuaau

SEQ ID NO: 2807785 - RNA, 19 nt, Human
ggucuggccguacuuguga

SEQ ID NO: 2807786 - RNA, 13 nt, Human
aaagauguauaua

SEQ ID NO: 2807787 - RNA, 21 nt, Human
ggucugggaggaauggacaga

SEQ ID NO: 2807788 - RNA, 22 nt, Human
ggucugggcggcgggcggcugg

SEQ ID NO: 2807789 - RNA, 13 nt, Human
ggugcagaggaag

SEQ ID NO: 2807790 - RNA, 15 nt, Human
ggugcagacagaagu

SEQ ID NO: 2807791 - RNA, 23 nt, Human
ggugcagacagaagucuccucaa

SEQ ID NO: 2807792 - RNA, 15 nt, Human
ggugcacuuuguaaa

SEQ ID NO: 2807793 - RNA, 16 nt, Human
ggugcacuuuguaaau

SEQ ID NO: 2807794 - RNA, 18 nt, Human
ggugauuggaccaggcca

SEQ ID NO: 2807795 - RNA, 14 nt, Human
ggugauucaccaaa

SEQ ID NO: 2807796 - RNA, 18 nt, Human
ggugauguagcccauccu

SEQ ID NO: 2807797 - RNA, 13 nt, Human
ggucuugaucucc

SEQ ID NO: 2807798 - RNA, 13 nt, Human
ggucuugaagucc

SEQ ID NO: 2807799 - RNA, 22 nt, Human
ggucuugaaguccuggcuucag

SEQ ID NO: 2807800 - RNA, 23 nt, Human
ggucuuuaaaucauuuuaggaaa

SEQ ID NO: 2807801 - RNA, 12 nt, Human
ggucuuuguaag

SEQ ID NO: 2807802 - RNA, 13 nt, Human
ggucuuuguaaga

SEQ ID NO: 2807803 - RNA, 14 nt, Human
ggucuuuguaagaa

SEQ ID NO: 2807804 - RNA, 15 nt, Human
ggucuuuguaagaac

SEQ ID NO: 2807805 - RNA, 14 nt, Human
ggucuuuguaagag

SEQ ID NO: 2807806 - RNA, 15 nt, Human
ggucuuuguaagagu

SEQ ID NO: 2807807 - RNA, 20 nt, Human
ggucuuuguaagaguguaga

SEQ ID NO: 2807808 - RNA, 14 nt, Human
ggucuuuguaucuu

SEQ ID NO: 2807809 - RNA, 15 nt, Human
ggucuuuuuaaacca

SEQ ID NO: 2807810 - RNA, 19 nt, Human
ggucuuuguaagaguguag

SEQ ID NO: 2807811 - RNA, 17 nt, Human
ggucuuuuuaugcauuu

SEQ ID NO: 2807812 - RNA, 17 nt, Human
ggucuuuuuguaaguga

SEQ ID NO: 2807813 - RNA, 18 nt, Human
ggugaaaauuaggguugg

SEQ ID NO: 2807814 - RNA, 21 nt, Human
ggugauccacucgccuucauc

SEQ ID NO: 2807815 - RNA, 19 nt, Human
aaaggacagaguaugaaca

SEQ ID NO: 2807816 - RNA, 14 nt, Human
aaaggacaucagca

SEQ ID NO: 2807817 - RNA, 15 nt, Human
aaaggacaucagcaa

SEQ ID NO: 2807818 - RNA, 16 nt, Human
aaaggacaucagcaaa

SEQ ID NO: 2807819 - RNA, 14 nt, Human
aaaggacauuaugu

SEQ ID NO: 2807820 - RNA, 15 nt, Human
aaaggacauuaugug

SEQ ID NO: 2807821 - RNA, 18 nt, Human
aaaggacauuaugugugc

SEQ ID NO: 2807822 - RNA, 15 nt, Human
aaaggaaaagaaaaa

SEQ ID NO: 2807823 - RNA, 16 nt, Human
aaaggaaaagaaaaaa

SEQ ID NO: 2807824 - RNA, 17 nt, Human
aaaggaaaagaaaaaaa

SEQ ID NO: 2807825 - RNA, 17 nt, Human
aaaggaagugcccccuc

SEQ ID NO: 2807826 - RNA, 18 nt, Human
aaaggaagugcccccucc

SEQ ID NO: 2807827 - RNA, 21 nt, Human
aaaggaauccacucccaggca

SEQ ID NO: 2807828 - RNA, 14 nt, Human
aaagcuucagggaa

SEQ ID NO: 2807829 - RNA, 11 nt, Human
aaagcuucccc

SEQ ID NO: 2807830 - RNA, 20 nt, Human
aaagcuuccaugauucuauu

SEQ ID NO: 2807831 - RNA, 18 nt, Human
aaagcuuccaugauucua

SEQ ID NO: 2807832 - RNA, 17 nt, Human
aaagcuuccaugauucu

SEQ ID NO: 2807833 - RNA, 20 nt, Human
aaagcuaguguaccuccucu

SEQ ID NO: 2807834 - RNA, 22 nt, Human
aaagcuaguguaccuccucuca

SEQ ID NO: 2807835 - RNA, 23 nt, Human
aaagcuaguguaccuccucucag

SEQ ID NO: 2807836 - RNA, 16 nt, Human
aaagcuaacccagguc

SEQ ID NO: 2807837 - RNA, 14 nt, Human
aaagcuaaguauag

SEQ ID NO: 2807838 - RNA, 15 nt, Human
aaagcuauuagccag

SEQ ID NO: 2807839 - RNA, 17 nt, Human
aaagcuauuagccagga

SEQ ID NO: 2807840 - RNA, 18 nt, Human
aaagcuauuagccaggau

SEQ ID NO: 2807841 - RNA, 19 nt, Human
aaagcuauuagccaggauc

SEQ ID NO: 2807842 - RNA, 20 nt, Human
aaagcuauuagccaggauca

SEQ ID NO: 2807843 - RNA, 22 nt, Human
aaagcuauuagccaggaucaug

SEQ ID NO: 2807844 - RNA, 23 nt, Human
aaagcuauuagccaggaucaugg

SEQ ID NO: 2807845 - RNA, 12 nt, Human
aaagcuucuuaa

SEQ ID NO: 2807846 - RNA, 17 nt, Human
aaagcuucuuaauuaau

SEQ ID NO: 2807847 - RNA, 20 nt, Human
aaagcuucuuaauuaauuug

SEQ ID NO: 2807848 - RNA, 23 nt, Human
aaagcuucuuaauuaauuugauu

SEQ ID NO: 2807849 - RNA, 14 nt, Human
aaaggaaaaagcuc

SEQ ID NO: 2807850 - RNA, 15 nt, Human
aaaggaaaaagcucc

SEQ ID NO: 2807851 - RNA, 17 nt, Human
aaaggaaaaagcuccau

SEQ ID NO: 2807852 - RNA, 15 nt, Human
aaaggaaaaccugaa

SEQ ID NO: 2807853 - RNA, 18 nt, Human
aaaggaaaaccugaagac

SEQ ID NO: 2807854 - RNA, 12 nt, Human
aaaggaaaagaa

SEQ ID NO: 2807855 - RNA, 13 nt, Human
aaaggaaaagaaa

SEQ ID NO: 2807856 - RNA, 16 nt, Human
aaagcuuuuuccuccu

SEQ ID NO: 2807857 - RNA, 17 nt, Human
aaagcuuuuuccuccug

SEQ ID NO: 2807858 - RNA, 11 nt, Human
aaaggaaaaaa

SEQ ID NO: 2807859 - RNA, 12 nt, Human
aaaggaaaaaaa

SEQ ID NO: 2807860 - RNA, 14 nt, Human
aaaggaaaaaaaga

SEQ ID NO: 2807861 - RNA, 15 nt, Human
aaaggaaaaaaagac

SEQ ID NO: 2807862 - RNA, 16 nt, Human
aaaggaaaaaaagacu

SEQ ID NO: 2807863 - RNA, 18 nt, Human
aaagcguuggauguagca

SEQ ID NO: 2807864 - RNA, 18 nt, Human
aaagcuaggccuggccag

SEQ ID NO: 2807865 - RNA, 17 nt, Human
aaagcuaggccuggcca

SEQ ID NO: 2807866 - RNA, 14 nt, Human
aaagcauaaaaaca

SEQ ID NO: 2807867 - RNA, 16 nt, Human
aaagcauaaaaacauu

SEQ ID NO: 2807868 - RNA, 19 nt, Human
aaagcggacaucagcuggu

SEQ ID NO: 2807869 - RNA, 16 nt, Human
aaagcacaguuugaac

SEQ ID NO: 2807870 - RNA, 17 nt, Human
aaagcacaguuugaaca

SEQ ID NO: 2807871 - RNA, 22 nt, Human
aaagcacaggugggcuucccag

SEQ ID NO: 2807872 - RNA, 14 nt, Human
aaagcacaguguua

SEQ ID NO: 2807873 - RNA, 20 nt, Human
aaagcacaguguuaaaugaa

SEQ ID NO: 2807874 - RNA, 21 nt, Human
aaagcacaguguuaaaugaaa

SEQ ID NO: 2807875 - RNA, 15 nt, Human
aaagcacaguuugaa

SEQ ID NO: 2807876 - RNA, 21 nt, Human
ggugcccacaccggggacagg

SEQ ID NO: 2807877 - RNA, 20 nt, Human
aaagcacacucauccccuca

SEQ ID NO: 2807878 - RNA, 15 nt, Human
aaagcacaggagaca

SEQ ID NO: 2807879 - RNA, 19 nt, Human
aaagcacaggagacacugu

SEQ ID NO: 2807880 - RNA, 19 nt, Human
ggugcccagaacuucccug

SEQ ID NO: 2807881 - RNA, 13 nt, Human
aaacuuuuuuuca

SEQ ID NO: 2807882 - RNA, 14 nt, Human
aaacuuuuuuucaa

SEQ ID NO: 2807883 - RNA, 15 nt, Human
aaacuuuuuuucaau

SEQ ID NO: 2807884 - RNA, 16 nt, Human
aaacuuuuuuucaaug

SEQ ID NO: 2807885 - RNA, 17 nt, Human
aaacuuuuuuucaaugu

SEQ ID NO: 2807886 - RNA, 18 nt, Human
aaacuuuuuuucaaugug

SEQ ID NO: 2807887 - RNA, 20 nt, Human
aaacuuuacccaaaaacuaa

SEQ ID NO: 2807888 - RNA, 13 nt, Human
aaacuuuucugcu

SEQ ID NO: 2807889 - RNA, 16 nt, Human
aaacuuuucugcugau

SEQ ID NO: 2807890 - RNA, 24 nt, Human
aaacuuuuguaaagaaauuuacua

SEQ ID NO: 2807891 - RNA, 19 nt, Human
aaacuuguuugcugugaac

SEQ ID NO: 2807892 - RNA, 20 nt, Human
aaacuuguuugcugugaaca

SEQ ID NO: 2807893 - RNA, 12 nt, Human
aaacuuuaaaaa

SEQ ID NO: 2807894 - RNA, 16 nt, Human
aaacuuuaaaaaauau

SEQ ID NO: 2807895 - RNA, 20 nt, Human
aaacuuuaaaaaauauuuau

SEQ ID NO: 2807896 - RNA, 21 nt, Human
aaacuuuaaaaaauauuuauu

SEQ ID NO: 2807897 - RNA, 22 nt, Human
aaacuuuaaaaaauauuuauua

SEQ ID NO: 2807898 - RNA, 14 nt, Human
aaacuuguuauugu

SEQ ID NO: 2807899 - RNA, 16 nt, Human
aaacuuguuauuguga

SEQ ID NO: 2807900 - RNA, 17 nt, Human
aaacuuguuauugugaa

SEQ ID NO: 2807901 - RNA, 18 nt, Human
aaacuuguuauugugaau

SEQ ID NO: 2807902 - RNA, 19 nt, Human
aaacuuguuauugugaaug

SEQ ID NO: 2807903 - RNA, 21 nt, Human
aaacuuguuauugugaaugau

SEQ ID NO: 2807904 - RNA, 22 nt, Human
aaacuuguuauugugaaugauu

SEQ ID NO: 2807905 - RNA, 18 nt, Human
aaacuuguuacuaaagaa

SEQ ID NO: 2807906 - RNA, 22 nt, Human
gguccacccaggagccccgagg

SEQ ID NO: 2807907 - RNA, 20 nt, Human
gguccacccaggagccccga

SEQ ID NO: 2807908 - RNA, 14 nt, Human
gguauuccugccuc

SEQ ID NO: 2807909 - RNA, 20 nt, Human
gguauuacacuguauuugua

SEQ ID NO: 2807910 - RNA, 19 nt, Human
gguccacccaggagccccg

SEQ ID NO: 2807911 - RNA, 15 nt, Human
gguccaacugcaacu

SEQ ID NO: 2807912 - RNA, 16 nt, Human
gguccaacugcaacuc

SEQ ID NO: 2807913 - RNA, 14 nt, Human
ggucauuucuucag

SEQ ID NO: 2807914 - RNA, 20 nt, Human
ggucauuucuucagucagaa

SEQ ID NO: 2807915 - RNA, 14 nt, Human
ggucauccugcccc

SEQ ID NO: 2807916 - RNA, 18 nt, Human
gguauugguggcuuuccu

SEQ ID NO: 2807917 - RNA, 15 nt, Human
ggucauuuaugaaaa

SEQ ID NO: 2807918 - RNA, 13 nt, Human
ggucauggccaca

SEQ ID NO: 2807919 - RNA, 15 nt, Human
ggucauggccacacu

SEQ ID NO: 2807920 - RNA, 17 nt, Human
ggucauggccacacugu

SEQ ID NO: 2807921 - RNA, 18 nt, Human
ggucaugugggucuucca

SEQ ID NO: 2807922 - RNA, 14 nt, Human
ggucauguuugcag

SEQ ID NO: 2807923 - RNA, 19 nt, Human
ggucauguuugcaggggug

SEQ ID NO: 2807924 - RNA, 12 nt, Human
aaacucauuuuu

SEQ ID NO: 2807925 - RNA, 21 nt, Human
gguauggaaggguuuguggcu

SEQ ID NO: 2807926 - RNA, 12 nt, Human
gguauguuuaau

SEQ ID NO: 2807927 - RNA, 18 nt, Human
gguauguuuaaucuguua

SEQ ID NO: 2807928 - RNA, 17 nt, Human
gguauaaugguugacug

SEQ ID NO: 2807929 - RNA, 18 nt, Human
gguauaaguggugugugu

SEQ ID NO: 2807930 - RNA, 15 nt, Human
aaacuguacauuuaa

SEQ ID NO: 2807931 - RNA, 16 nt, Human
aaacuguacauuuaaa

SEQ ID NO: 2807932 - RNA, 17 nt, Human
aaacuguacauuuaaaa

SEQ ID NO: 2807933 - RNA, 22 nt, Human
aaacuguacauuuaaaauugcu

SEQ ID NO: 2807934 - RNA, 16 nt, Human
gguaguaaaacacaga

SEQ ID NO: 2807935 - RNA, 13 nt, Human
aaacuguaugcuc

SEQ ID NO: 2807936 - RNA, 15 nt, Human
aaacuguaugcucac

SEQ ID NO: 2807937 - RNA, 21 nt, Human
gguaguuaggaugcucaguug

SEQ ID NO: 2807938 - RNA, 17 nt, Human
aaagaauggaaggugga

SEQ ID NO: 2807939 - RNA, 19 nt, Human
aaagaauucuuauacacau

SEQ ID NO: 2807940 - RNA, 17 nt, Human
aaagaauguuagagcac

SEQ ID NO: 2807941 - RNA, 12 nt, Human
aaagagaagaag

SEQ ID NO: 2807942 - RNA, 13 nt, Human
aaagagaagaaga

SEQ ID NO: 2807943 - RNA, 14 nt, Human
aaagagaagaagaa

SEQ ID NO: 2807944 - RNA, 19 nt, Human
aaagagaagaagaaaaaaa

SEQ ID NO: 2807945 - RNA, 21 nt, Human
aaagagaauugggggcuuagg

SEQ ID NO: 2807946 - RNA, 22 nt, Human
aaagagacaaacuguaaaaaau

SEQ ID NO: 2807947 - RNA, 19 nt, Human
aaagagaauuagauuauau

SEQ ID NO: 2807948 - RNA, 18 nt, Human
aaagagagaaaaacaaau

SEQ ID NO: 2807949 - RNA, 18 nt, Human
aaagacuuuaaaagugau

SEQ ID NO: 2807950 - RNA, 19 nt, Human
aaagacuuguaauauuuuu

SEQ ID NO: 2807951 - RNA, 16 nt, Human
aaagacuuccaaagaa

SEQ ID NO: 2807952 - RNA, 19 nt, Human
aaagacuuccaaagaaugu

SEQ ID NO: 2807953 - RNA, 14 nt, Human
aaagacuucccuaa

SEQ ID NO: 2807954 - RNA, 11 nt, Human
aaagagagaga

SEQ ID NO: 2807955 - RNA, 20 nt, Human
aaagagagagagagaaaaaa

SEQ ID NO: 2807956 - RNA, 15 nt, Human
aaagagagcagagaa

SEQ ID NO: 2807957 - RNA, 19 nt, Human
aaagaggcguugcuuucac

SEQ ID NO: 2807958 - RNA, 15 nt, Human
aaagauuuucagaaa

SEQ ID NO: 2807959 - RNA, 14 nt, Human
aaagauuuucagaa

SEQ ID NO: 2807960 - RNA, 15 nt, Human
aaagauucaugauuu

SEQ ID NO: 2807961 - RNA, 13 nt, Human
aaagauucauuuu

SEQ ID NO: 2807962 - RNA, 15 nt, Human
aaagauucauuuuua

SEQ ID NO: 2807963 - RNA, 19 nt, Human
aaagauucauuuuuaauca

SEQ ID NO: 2807964 - RNA, 20 nt, Human
aaagauucauuuuuaaucau

SEQ ID NO: 2807965 - RNA, 12 nt, Human
aaagauucuaua

SEQ ID NO: 2807966 - RNA, 18 nt, Human
aaagauucuauaguucua

SEQ ID NO: 2807967 - RNA, 19 nt, Human
aaagauucuauaguucuag

SEQ ID NO: 2807968 - RNA, 13 nt, Human
aaagauuagcaag

SEQ ID NO: 2807969 - RNA, 18 nt, Human
aaagauuagcaaggucau

SEQ ID NO: 2807970 - RNA, 22 nt, Human
aaagauuagcaaggucauuucu

SEQ ID NO: 2807971 - RNA, 22 nt, Human
aaagauucaccuaagagauucu

SEQ ID NO: 2807972 - RNA, 14 nt, Human
aaagauucaccuga

SEQ ID NO: 2807973 - RNA, 11 nt, Human
aaagauuaaac

SEQ ID NO: 2807974 - RNA, 13 nt, Human
aaagauuaaacag

SEQ ID NO: 2807975 - RNA, 14 nt, Human
aaagauuaaacugc

SEQ ID NO: 2807976 - RNA, 19 nt, Human
aaagauucagguauguugc

SEQ ID NO: 2807977 - RNA, 13 nt, Human
aaagaugcacaga

SEQ ID NO: 2807978 - RNA, 22 nt, Human
aaagauguaaugucccuuucag

SEQ ID NO: 2807979 - RNA, 17 nt, Human
aaagaugcucuucugug

SEQ ID NO: 2807980 - RNA, 22 nt, Human
aaagaugccggguuuuauauuu

SEQ ID NO: 2807981 - RNA, 21 nt, Human
aaagaugccaauuauuguuac

SEQ ID NO: 2807982 - RNA, 16 nt, Human
aaagaugcagccgccu

SEQ ID NO: 2807983 - RNA, 21 nt, Human
aaagaugcagccgccuuccuu

SEQ ID NO: 2807984 - RNA, 20 nt, Human
aaagaugcaaggaccaggac

SEQ ID NO: 2807985 - RNA, 12 nt, Human
aaagagaaaaaa

SEQ ID NO: 2807986 - RNA, 12 nt, Human
aaagaugaaguu

SEQ ID NO: 2807987 - RNA, 13 nt, Human
ggccucccaaagu

SEQ ID NO: 2807988 - RNA, 16 nt, Human
ggccucccaaagugcu

SEQ ID NO: 2807989 - RNA, 18 nt, Human
ggcccuuccucuccacug

SEQ ID NO: 2807990 - RNA, 14 nt, Human
ggcccucccaguac

SEQ ID NO: 2807991 - RNA, 19 nt, Human
ggcccuuccucuccacugc

SEQ ID NO: 2807992 - RNA, 22 nt, Human
ggcccuuccucuccacugccuu

SEQ ID NO: 2807993 - RNA, 23 nt, Human
ggcccuuccucuccacugccuuc

SEQ ID NO: 2807994 - RNA, 23 nt, Human
ggccucccucucucuucugcucc

SEQ ID NO: 2807995 - RNA, 15 nt, Human
ggccucccucucucu

SEQ ID NO: 2807996 - RNA, 16 nt, Human
ggcccagcgaccucgg

SEQ ID NO: 2807997 - RNA, 12 nt, Human
ggcccagccccu

SEQ ID NO: 2807998 - RNA, 13 nt, Human
ggcccagccccua

SEQ ID NO: 2807999 - RNA, 14 nt, Human
ggcccagccccuag

SEQ ID NO: 2808000 - RNA, 24 nt, Human
ggcccagccccuagaaacccaagc

SEQ ID NO: 2808001 - RNA, 15 nt, Human
ggcccaggcaggcca

SEQ ID NO: 2808002 - RNA, 21 nt, Human
ggcccucaucuaugaggaaag

SEQ ID NO: 2808003 - RNA, 22 nt, Human
ggcccucaucuaugaggaaagg

SEQ ID NO: 2808004 - RNA, 12 nt, Human
ggcccucccagu

SEQ ID NO: 2808005 - RNA, 16 nt, Human
ggcccgacagccuggc

SEQ ID NO: 2808006 - RNA, 17 nt, Human
ggcccgacagccuggca

SEQ ID NO: 2808007 - RNA, 15 nt, Human
ggcccgacagccugg

SEQ ID NO: 2808008 - RNA, 24 nt, Human
ggcccauaucugugaaaugcuggc

SEQ ID NO: 2808009 - RNA, 18 nt, Human
ggccccagggcuacccuc

SEQ ID NO: 2808010 - RNA, 17 nt, Human
ggccccagggcuacccu

SEQ ID NO: 2808011 - RNA, 13 nt, Human
ggccccagggcac

SEQ ID NO: 2808012 - RNA, 16 nt, Human
ggccccagggcacccu

SEQ ID NO: 2808013 - RNA, 21 nt, Human
ggccaguaucuauauaugugu

SEQ ID NO: 2808014 - RNA, 17 nt, Human
ggccagguuucugccca

SEQ ID NO: 2808015 - RNA, 19 nt, Human
ggccagguggccacuccag

SEQ ID NO: 2808016 - RNA, 17 nt, Human
ggccagggcugcccuga

SEQ ID NO: 2808017 - RNA, 18 nt, Human
ggccagggcugcccugag

SEQ ID NO: 2808018 - RNA, 19 nt, Human
ggccagggcugcccugaga

SEQ ID NO: 2808019 - RNA, 20 nt, Human
ggccagggcugcccugagaa

SEQ ID NO: 2808020 - RNA, 14 nt, Human
ggccaggugcagug

SEQ ID NO: 2808021 - RNA, 17 nt, Human
ggccagggucuguguga

SEQ ID NO: 2808022 - RNA, 19 nt, Human
ggccagggucugugugaau

SEQ ID NO: 2808023 - RNA, 22 nt, Human
ggccagggucugugugaaugug

SEQ ID NO: 2808024 - RNA, 23 nt, Human
ggccagggucugugugaaugugg

SEQ ID NO: 2808025 - RNA, 11 nt, Human
ggccaggucac

SEQ ID NO: 2808026 - RNA, 20 nt, Human
ggccagaugcaccagcccuu

SEQ ID NO: 2808027 - RNA, 19 nt, Human
ggccagaugcaccagcccu

SEQ ID NO: 2808028 - RNA, 17 nt, Human
ggccagaugcaccagcc

SEQ ID NO: 2808029 - RNA, 19 nt, Human
ggccagaguggccuggcca

SEQ ID NO: 2808030 - RNA, 18 nt, Human
ggccagaguggccuggcc

SEQ ID NO: 2808031 - RNA, 20 nt, Human
ggccagaguggccuggccag

SEQ ID NO: 2808032 - RNA, 15 nt, Human
ggccagccccggccc

SEQ ID NO: 2808033 - RNA, 19 nt, Human
ggccagaguauuggucucc

SEQ ID NO: 2808034 - RNA, 23 nt, Human
ggccagauggcccggaugcugcu

SEQ ID NO: 2808035 - RNA, 20 nt, Human
ggccagccccggcccugggc

SEQ ID NO: 2808036 - RNA, 14 nt, Human
ggccagccccucca

SEQ ID NO: 2808037 - RNA, 17 nt, Human
ggccagccccuccaucu

SEQ ID NO: 2808038 - RNA, 17 nt, Human
ggccagccccggcccug

SEQ ID NO: 2808039 - RNA, 19 nt, Human
ggccagccccggcccuggg

SEQ ID NO: 2808040 - RNA, 13 nt, Human
ggccagccgcucu

SEQ ID NO: 2808041 - RNA, 15 nt, Human
ggccagccgcucucc

SEQ ID NO: 2808042 - RNA, 19 nt, Human
ggccagccgcucuccugcc

SEQ ID NO: 2808043 - RNA, 21 nt, Human
ggccagccgcucuccugccac

SEQ ID NO: 2808044 - RNA, 14 nt, Human
ggccagccucaccc

SEQ ID NO: 2808045 - RNA, 15 nt, Human
ggccagccucacccu

SEQ ID NO: 2808046 - RNA, 16 nt, Human
ggccagccucacccuu

SEQ ID NO: 2808047 - RNA, 17 nt, Human
ggccagccucacccuug

SEQ ID NO: 2808048 - RNA, 18 nt, Human
ggccagccucacccuugc

SEQ ID NO: 2808049 - RNA, 23 nt, Human
ggccagagggagugacagaggca

SEQ ID NO: 2808050 - RNA, 16 nt, Human
ggccagaguggccugg

SEQ ID NO: 2808051 - RNA, 15 nt, Human
ggccagaguggccug

SEQ ID NO: 2808052 - RNA, 14 nt, Human
ggccagaguggccu

SEQ ID NO: 2808053 - RNA, 22 nt, Human
ggccagagggagugacagaggc

SEQ ID NO: 2808054 - RNA, 23 nt, Human
ggccaaguccgcagaagcccuga

SEQ ID NO: 2808055 - RNA, 16 nt, Human
ggccaaguccgcagaa

SEQ ID NO: 2808056 - RNA, 16 nt, Human
ggccaaggagggugag

SEQ ID NO: 2808057 - RNA, 16 nt, Human
ggccaaggccuucucc

SEQ ID NO: 2808058 - RNA, 18 nt, Human
ggccaaggccuucuccuc

SEQ ID NO: 2808059 - RNA, 19 nt, Human
ggccaaggccuucuccucc

SEQ ID NO: 2808060 - RNA, 21 nt, Human
ggccaaggggagucaccuucc

SEQ ID NO: 2808061 - RNA, 21 nt, Human
ggccaaggaugccccgucccc

SEQ ID NO: 2808062 - RNA, 17 nt, Human
ggccaacauggcgaaac

SEQ ID NO: 2808063 - RNA, 13 nt, Human
ggccaacauggua

SEQ ID NO: 2808064 - RNA, 13 nt, Human
ggcauuucacaaa

SEQ ID NO: 2808065 - RNA, 21 nt, Human
ggccaaauuauuuguguaaua

SEQ ID NO: 2808066 - RNA, 11 nt, Human
ggccaaacugc

SEQ ID NO: 2808067 - RNA, 12 nt, Human
ggccaaacugcu

SEQ ID NO: 2808068 - RNA, 14 nt, Human
ggccaaacugcugg

SEQ ID NO: 2808069 - RNA, 17 nt, Human
ggccaaacugcuggacg

SEQ ID NO: 2808070 - RNA, 15 nt, Human
ggccaaagccaaagc

SEQ ID NO: 2808071 - RNA, 19 nt, Human
ggccaaaucacccuuagaa

SEQ ID NO: 2808072 - RNA, 22 nt, Human
ggccaaauccgcucucuuccug

SEQ ID NO: 2808073 - RNA, 16 nt, Human
ggccaaaggcuggugg

SEQ ID NO: 2808074 - RNA, 13 nt, Human
ggcauuccugcuu

SEQ ID NO: 2808075 - RNA, 14 nt, Human
ggcauucuuguaca

SEQ ID NO: 2808076 - RNA, 16 nt, Human
ggcauucuuguacagu

SEQ ID NO: 2808077 - RNA, 18 nt, Human
ggcauucuuguacagugu

SEQ ID NO: 2808078 - RNA, 17 nt, Human
ggcauugacaaaucugu

SEQ ID NO: 2808079 - RNA, 20 nt, Human
ggcauugacaaaucugugua

SEQ ID NO: 2808080 - RNA, 19 nt, Human
ggcauugaggaagagucuu

SEQ ID NO: 2808081 - RNA, 15 nt, Human
ggcauuccugcuuau

SEQ ID NO: 2808082 - RNA, 17 nt, Human
ggaugugguuuucuuaa

SEQ ID NO: 2808083 - RNA, 18 nt, Human
ggaugugguuuucuuaag

SEQ ID NO: 2808084 - RNA, 23 nt, Human
ggaugugggagggagcagacagg

SEQ ID NO: 2808085 - RNA, 15 nt, Human
ggaugugggagggag

SEQ ID NO: 2808086 - RNA, 18 nt, Human
ggaugugauuguggaaug

SEQ ID NO: 2808087 - RNA, 20 nt, Human
ggaugagagcccagagguaa

SEQ ID NO: 2808088 - RNA, 21 nt, Human
ggaugacaugcacucagcucu

SEQ ID NO: 2808089 - RNA, 18 nt, Human
ggaugaaugaggucccag

SEQ ID NO: 2808090 - RNA, 14 nt, Human
ggaugaaugagguc

SEQ ID NO: 2808091 - RNA, 22 nt, Human
ggaugaaugaggucccaggcag

SEQ ID NO: 2808092 - RNA, 17 nt, Human
ggaugaaauuuucuaga

SEQ ID NO: 2808093 - RNA, 13 nt, Human
ggaugaaucuccc

SEQ ID NO: 2808094 - RNA, 22 nt, Human
ggaugagaaagguugaagcacc

SEQ ID NO: 2808095 - RNA, 12 nt, Human
ggaugagaaagg

SEQ ID NO: 2808096 - RNA, 14 nt, Human
ggaugagagcccag

SEQ ID NO: 2808097 - RNA, 15 nt, Human
ggaugagagcccaga

SEQ ID NO: 2808098 - RNA, 16 nt, Human
ggaugagagcccagag

SEQ ID NO: 2808099 - RNA, 18 nt, Human
ggaugagagcccagaggu

SEQ ID NO: 2808100 - RNA, 19 nt, Human
ggaugagagcccagaggua

SEQ ID NO: 2808101 - RNA, 15 nt, Human
ggauuuuaaacuaga

SEQ ID NO: 2808102 - RNA, 19 nt, Human
ggauuuuaaacuagaugac

SEQ ID NO: 2808103 - RNA, 23 nt, Human
ggauuuuaaacuagaugaccuca

SEQ ID NO: 2808104 - RNA, 14 nt, Human
ggauuuguucucug

SEQ ID NO: 2808105 - RNA, 15 nt, Human
ggauuuguucucugu

SEQ ID NO: 2808106 - RNA, 21 nt, Human
ggauuuugauccaagcugguc

SEQ ID NO: 2808107 - RNA, 13 nt, Human
ggcaaaauugcaa

SEQ ID NO: 2808108 - RNA, 16 nt, Human
ggcaaaauccuugcuu

SEQ ID NO: 2808109 - RNA, 23 nt, Human
ggauguuggccaccaggugccuu

SEQ ID NO: 2808110 - RNA, 12 nt, Human
ggauuaaacuua

SEQ ID NO: 2808111 - RNA, 16 nt, Human
ggauuaaacuuaugaa

SEQ ID NO: 2808112 - RNA, 19 nt, Human
ggauuaaacuuaugaaugu

SEQ ID NO: 2808113 - RNA, 20 nt, Human
ggauuaaacuuaugaauguu

SEQ ID NO: 2808114 - RNA, 21 nt, Human
ggauuaaacuuaugaauguuu

SEQ ID NO: 2808115 - RNA, 23 nt, Human
ggauuaaacuuaugaauguuucc

SEQ ID NO: 2808116 - RNA, 18 nt, Human
ggauuugaugcuguuuga

SEQ ID NO: 2808117 - RNA, 22 nt, Human
ggauuugcacagaagcacaugc

SEQ ID NO: 2808118 - RNA, 11 nt, Human
ggcaaaucugc

SEQ ID NO: 2808119 - RNA, 18 nt, Human
ggcaaaugacaugcacug

SEQ ID NO: 2808120 - RNA, 19 nt, Human
ggcaaaugacaugcacuga

SEQ ID NO: 2808121 - RNA, 20 nt, Human
ggcaaaugacaugcacugac

SEQ ID NO: 2808122 - RNA, 21 nt, Human
ggcaaaugacaugcacugacc

SEQ ID NO: 2808123 - RNA, 12 nt, Human
ggcaacagagca

SEQ ID NO: 2808124 - RNA, 13 nt, Human
ggcaaauauaaaa

SEQ ID NO: 2808125 - RNA, 20 nt, Human
ggcaacaaagugagacucca

SEQ ID NO: 2808126 - RNA, 14 nt, Human
ggcaaauucuuuug

SEQ ID NO: 2808127 - RNA, 18 nt, Human
ggcaaauucuuuugaauu

SEQ ID NO: 2808128 - RNA, 18 nt, Human
ggcaaauuuuuauuuuuu

SEQ ID NO: 2808129 - RNA, 21 nt, Human
ggcaaauuuuuauuuuuuagu

SEQ ID NO: 2808130 - RNA, 16 nt, Human
ggcaaaugcccaaggg

SEQ ID NO: 2808131 - RNA, 13 nt, Human
ggcaaaugcccaa

SEQ ID NO: 2808132 - RNA, 16 nt, Human
ggcaaccacuaagaau

SEQ ID NO: 2808133 - RNA, 19 nt, Human
ggcaaccacuaagaauuca

SEQ ID NO: 2808134 - RNA, 18 nt, Human
ggcaacauuccaagaaua

SEQ ID NO: 2808135 - RNA, 19 nt, Human
ggcaacagagcaagauccu

SEQ ID NO: 2808136 - RNA, 21 nt, Human
ggcagaacaucgcgaugggaa

SEQ ID NO: 2808137 - RNA, 13 nt, Human
ggcaggcugggcc

SEQ ID NO: 2808138 - RNA, 12 nt, Human
ggcaggcugggc

SEQ ID NO: 2808139 - RNA, 22 nt, Human
ggcaggcuaaggcguggagcug

SEQ ID NO: 2808140 - RNA, 14 nt, Human
ggcaggcccugcag

SEQ ID NO: 2808141 - RNA, 16 nt, Human
ggcaggcccugcagug

SEQ ID NO: 2808142 - RNA, 17 nt, Human
ggcaggcuaaggcgugg

SEQ ID NO: 2808143 - RNA, 21 nt, Human
ggcaggcuaaggcguggagcu

SEQ ID NO: 2808144 - RNA, 10 nt, Human
ggcaggcugg

SEQ ID NO: 2808145 - RNA, 13 nt, Human
ggcaggcauugag

SEQ ID NO: 2808146 - RNA, 13 nt, Human
ggcaggcccugca

SEQ ID NO: 2808147 - RNA, 10 nt, Human
ggcaggcccu

SEQ ID NO: 2808148 - RNA, 11 nt, Human
ggcaggcccug

SEQ ID NO: 2808149 - RNA, 12 nt, Human
ggcaggcccugc

SEQ ID NO: 2808150 - RNA, 20 nt, Human
ggcagaaagguucugcccgg

SEQ ID NO: 2808151 - RNA, 22 nt, Human
ggcagaaagguucugcccggga

SEQ ID NO: 2808152 - RNA, 12 nt, Human
ggcagaagacac

SEQ ID NO: 2808153 - RNA, 15 nt, Human
ggcagaagacaccag

SEQ ID NO: 2808154 - RNA, 14 nt, Human
ggcagagaaucaua

SEQ ID NO: 2808155 - RNA, 9 nt, Human
ggcagagag

SEQ ID NO: 2808156 - RNA, 11 nt, Human
ggcagagagag

SEQ ID NO: 2808157 - RNA, 12 nt, Human
ggcagagagaga

SEQ ID NO: 2808158 - RNA, 14 nt, Human
ggcagagagagaga

SEQ ID NO: 2808159 - RNA, 16 nt, Human
ggcagagagagagaaa

SEQ ID NO: 2808160 - RNA, 10 nt, Human
ggcagagagc

SEQ ID NO: 2808161 - RNA, 19 nt, Human
ggcagagagcggucucagg

SEQ ID NO: 2808162 - RNA, 22 nt, Human
ggcagaagacaccagagcagau

SEQ ID NO: 2808163 - RNA, 19 nt, Human
ggcagaauaaucuuugggu

SEQ ID NO: 2808164 - RNA, 18 nt, Human
ggcagaauaagaaaacaa

SEQ ID NO: 2808165 - RNA, 20 nt, Human
ggcagaagacaccagagcag

SEQ ID NO: 2808166 - RNA, 21 nt, Human
ggcagaagacaccagagcaga

SEQ ID NO: 2808167 - RNA, 16 nt, Human
ggcagaagacaccaga

SEQ ID NO: 2808168 - RNA, 17 nt, Human
ggcagaagacaccagag

SEQ ID NO: 2808169 - RNA, 18 nt, Human
ggcagaagacaccagagc

SEQ ID NO: 2808170 - RNA, 19 nt, Human
ggcagaagacaccagagca

SEQ ID NO: 2808171 - RNA, 22 nt, Human
ggcacuuugaaggggccucacc

SEQ ID NO: 2808172 - RNA, 12 nt, Human
ggcacuuugggg

SEQ ID NO: 2808173 - RNA, 14 nt, Human
ggcagaaaggaaaa

SEQ ID NO: 2808174 - RNA, 22 nt, Human
ggcagaaaggaaaaccugaaga

SEQ ID NO: 2808175 - RNA, 11 nt, Human
ggcagaaaauu

SEQ ID NO: 2808176 - RNA, 17 nt, Human
ggcagaaaauugcacaa

SEQ ID NO: 2808177 - RNA, 19 nt, Human
ggcagccgugccuucagcu

SEQ ID NO: 2808178 - RNA, 21 nt, Human
ggcagccgugccuucagcucu

SEQ ID NO: 2808179 - RNA, 18 nt, Human
ggcagccgugccuucagc

SEQ ID NO: 2808180 - RNA, 15 nt, Human
ggcagccaggcugcc

SEQ ID NO: 2808181 - RNA, 13 nt, Human
ggcagccaggcug

SEQ ID NO: 2808182 - RNA, 19 nt, Human
ggcagccaggcugccaagg

SEQ ID NO: 2808183 - RNA, 12 nt, Human
ggcagccaggcu

SEQ ID NO: 2808184 - RNA, 23 nt, Human
ggcagagauuggaaugggcagcu

SEQ ID NO: 2808185 - RNA, 16 nt, Human
ggcaggacucagcucc

SEQ ID NO: 2808186 - RNA, 21 nt, Human
ggcaggacucagcuccccaga

SEQ ID NO: 2808187 - RNA, 23 nt, Human
ggcaggacucagcuccccagagu

SEQ ID NO: 2808188 - RNA, 23 nt, Human
ggcaggacaugcugaagccaaag

SEQ ID NO: 2808189 - RNA, 16 nt, Human
ggcagccuccagccug

SEQ ID NO: 2808190 - RNA, 22 nt, Human
ggcagccgugccuucagcucua

SEQ ID NO: 2808191 - RNA, 17 nt, Human
ggaggcugaggcaggag

SEQ ID NO: 2808192 - RNA, 14 nt, Human
ggaggcugaggcag

SEQ ID NO: 2808193 - RNA, 12 nt, Human
ggaggcugaggc

SEQ ID NO: 2808194 - RNA, 19 nt, Human
ggaggcugaggcaggagga

SEQ ID NO: 2808195 - RNA, 13 nt, Human
ggagguguucacu

SEQ ID NO: 2808196 - RNA, 14 nt, Human
ggagguguucacug

SEQ ID NO: 2808197 - RNA, 12 nt, Human
ggaggugugagg

SEQ ID NO: 2808198 - RNA, 23 nt, Human
ggagguucuaaggccuaggauuc

SEQ ID NO: 2808199 - RNA, 12 nt, Human
ggagguucuaag

SEQ ID NO: 2808200 - RNA, 13 nt, Human
ggaggaaagacaa

SEQ ID NO: 2808201 - RNA, 17 nt, Human
ggagguugcagggagcc

SEQ ID NO: 2808202 - RNA, 14 nt, Human
ggagguugcaggga

SEQ ID NO: 2808203 - RNA, 12 nt, Human
ggagguugcagg

SEQ ID NO: 2808204 - RNA, 17 nt, Human
ggagcucuucaggccuc

SEQ ID NO: 2808205 - RNA, 19 nt, Human
ggagcuccucuccuggagg

SEQ ID NO: 2808206 - RNA, 20 nt, Human
ggagcuccucuccuggagga

SEQ ID NO: 2808207 - RNA, 13 nt, Human
ggagcuccucucc

SEQ ID NO: 2808208 - RNA, 17 nt, Human
ggagcuccucuccugga

SEQ ID NO: 2808209 - RNA, 18 nt, Human
ggagcuccucuccuggag

SEQ ID NO: 2808210 - RNA, 22 nt, Human
ggagcugccuguucagcuccag

SEQ ID NO: 2808211 - RNA, 17 nt, Human
ggagcugccuuggcuca

SEQ ID NO: 2808212 - RNA, 21 nt, Human
ggagcuccucuccuggaggau

SEQ ID NO: 2808213 - RNA, 20 nt, Human
ggagcucuucaggccucccu

SEQ ID NO: 2808214 - RNA, 18 nt, Human
ggagcucuucaggccucc

SEQ ID NO: 2808215 - RNA, 18 nt, Human
ggagcugccuuggcucag

SEQ ID NO: 2808216 - RNA, 21 nt, Human
ggagcugccuuggcucagaca

SEQ ID NO: 2808217 - RNA, 12 nt, Human
ggagcuggcccc

SEQ ID NO: 2808218 - RNA, 23 nt, Human
ggagcugcuggcuugcagugcgc

SEQ ID NO: 2808219 - RNA, 15 nt, Human
ggagcugcuggcuug

SEQ ID NO: 2808220 - RNA, 13 nt, Human
ggagcugcuggcu

SEQ ID NO: 2808221 - RNA, 15 nt, Human
ggagcuugggaaugg

SEQ ID NO: 2808222 - RNA, 15 nt, Human
ggagcuucugggguc

SEQ ID NO: 2808223 - RNA, 21 nt, Human
ggagcuucugggguccccagg

SEQ ID NO: 2808224 - RNA, 23 nt, Human
ggagcuucugggguccccagggc

SEQ ID NO: 2808225 - RNA, 15 nt, Human
ggagcuggccccgcc

SEQ ID NO: 2808226 - RNA, 16 nt, Human
ggagcuggccccgccg

SEQ ID NO: 2808227 - RNA, 23 nt, Human
ggagccccaggccucuguguccu

SEQ ID NO: 2808228 - RNA, 13 nt, Human
ggagccccagggu

SEQ ID NO: 2808229 - RNA, 12 nt, Human
ggagccccaggg

SEQ ID NO: 2808230 - RNA, 13 nt, Human
ggagccccaggcc

SEQ ID NO: 2808231 - RNA, 14 nt, Human
ggagccccaggccu

SEQ ID NO: 2808232 - RNA, 20 nt, Human
ggagccccaggccucugugu

SEQ ID NO: 2808233 - RNA, 22 nt, Human
ggagccccaggccucugugucc

SEQ ID NO: 2808234 - RNA, 20 nt, Human
ggagccccagggucuucccu

SEQ ID NO: 2808235 - RNA, 14 nt, Human
ggagccccaggguc

SEQ ID NO: 2808236 - RNA, 12 nt, Human
ggagccccaucu

SEQ ID NO: 2808237 - RNA, 16 nt, Human
ggagccccaucugucu

SEQ ID NO: 2808238 - RNA, 23 nt, Human
ggagcccacggcuaagaggcugc

SEQ ID NO: 2808239 - RNA, 17 nt, Human
ggagccccagcuacccu

SEQ ID NO: 2808240 - RNA, 18 nt, Human
ggagccccagcuacccuu

SEQ ID NO: 2808241 - RNA, 18 nt, Human
ggagccaguaaacagagg

SEQ ID NO: 2808242 - RNA, 17 nt, Human
ggaggcauggcccuggg

SEQ ID NO: 2808243 - RNA, 23 nt, Human
ggaggccaggccggcgagcccug

SEQ ID NO: 2808244 - RNA, 14 nt, Human
ggaggccaggccgg

SEQ ID NO: 2808245 - RNA, 15 nt, Human
ggaggcauggcccug

SEQ ID NO: 2808246 - RNA, 16 nt, Human
ggaggcauggcccugg

SEQ ID NO: 2808247 - RNA, 12 nt, Human
ggaggaaagcaa

SEQ ID NO: 2808248 - RNA, 19 nt, Human
ggaggaagcagguugaggg

SEQ ID NO: 2808249 - RNA, 18 nt, Human
ggaggaacacugcacucu

SEQ ID NO: 2808250 - RNA, 22 nt, Human
ggaggaacagggaagggggagc

SEQ ID NO: 2808251 - RNA, 20 nt, Human
ggaggaaaaccaagccgugg

SEQ ID NO: 2808252 - RNA, 19 nt, Human
ggagcuuuguuuugggggu

SEQ ID NO: 2808253 - RNA, 23 nt, Human
ggagcuuuguuuugggggucagg

SEQ ID NO: 2808254 - RNA, 21 nt, Human
ggaggaaaaccaagccguggc

SEQ ID NO: 2808255 - RNA, 22 nt, Human
ggaggaaaaccaagccguggcu

SEQ ID NO: 2808256 - RNA, 15 nt, Human
ggagcagaccacccc

SEQ ID NO: 2808257 - RNA, 20 nt, Human
ggagcagacaggaggaauca

SEQ ID NO: 2808258 - RNA, 15 nt, Human
ggagcaggagauuga

SEQ ID NO: 2808259 - RNA, 13 nt, Human
ggagcagccucag

SEQ ID NO: 2808260 - RNA, 18 nt, Human
ggagcagccuggagaccc

SEQ ID NO: 2808261 - RNA, 13 nt, Human
ggagcaggaacaa

SEQ ID NO: 2808262 - RNA, 16 nt, Human
ggagcaggagauugag

SEQ ID NO: 2808263 - RNA, 21 nt, Human
ggagcaggagauugagaagga

SEQ ID NO: 2808264 - RNA, 22 nt, Human
ggagcaggagauugagaaggag

SEQ ID NO: 2808265 - RNA, 23 nt, Human
ggagcaggagauugagaaggaga

SEQ ID NO: 2808266 - RNA, 11 nt, Human
ggagccaggcg

SEQ ID NO: 2808267 - RNA, 21 nt, Human
ggagcaggcggugggcaccca

SEQ ID NO: 2808268 - RNA, 18 nt, Human
ggagcaggcgguggggag

SEQ ID NO: 2808269 - RNA, 21 nt, Human
ggagcaggcgguggggagaga

SEQ ID NO: 2808270 - RNA, 23 nt, Human
ggagcaggcgguggggagagaug

SEQ ID NO: 2808271 - RNA, 17 nt, Human
ggagcagggaaggccug

SEQ ID NO: 2808272 - RNA, 16 nt, Human
ggagcagggaaggccu

SEQ ID NO: 2808273 - RNA, 13 nt, Human
ggagcagggaagg

SEQ ID NO: 2808274 - RNA, 16 nt, Human
ggagcaguccaugcau

SEQ ID NO: 2808275 - RNA, 17 nt, Human
ggagcaguccaugcaug

SEQ ID NO: 2808276 - RNA, 18 nt, Human
ggagcaguccaugcauga

SEQ ID NO: 2808277 - RNA, 14 nt, Human
ggagcagugcaggc

SEQ ID NO: 2808278 - RNA, 18 nt, Human
ggagcagugcaggcacag

SEQ ID NO: 2808279 - RNA, 21 nt, Human
ggagcagggaaggccugacuu

SEQ ID NO: 2808280 - RNA, 19 nt, Human
ggagcagggaaggccugac

SEQ ID NO: 2808281 - RNA, 11 nt, Human
ggaccccagcu

SEQ ID NO: 2808282 - RNA, 23 nt, Human
ggacccgaccccccgugggcucc

SEQ ID NO: 2808283 - RNA, 21 nt, Human
ggaccccagcugugagccuug

SEQ ID NO: 2808284 - RNA, 12 nt, Human
ggaccccaggcc

SEQ ID NO: 2808285 - RNA, 13 nt, Human
ggaccccaggccc

SEQ ID NO: 2808286 - RNA, 14 nt, Human
ggaccccaggccca

SEQ ID NO: 2808287 - RNA, 18 nt, Human
ggaccccagcugugagcc

SEQ ID NO: 2808288 - RNA, 20 nt, Human
ggacccggaggggccuggca

SEQ ID NO: 2808289 - RNA, 21 nt, Human
ggacccggaggggccuggcag

SEQ ID NO: 2808290 - RNA, 20 nt, Human
ggaccguggcccugcccucu

SEQ ID NO: 2808291 - RNA, 22 nt, Human
gcuugguguuuguaagaaaaug

SEQ ID NO: 2808292 - RNA, 16 nt, Human
gcuuguaccucuggcu

SEQ ID NO: 2808293 - RNA, 17 nt, Human
gcuuguaccucuggcug

SEQ ID NO: 2808294 - RNA, 18 nt, Human
gcuuguaccucuggcuga

SEQ ID NO: 2808295 - RNA, 22 nt, Human
gcuuguaccucuggcugacuaa

SEQ ID NO: 2808296 - RNA, 17 nt, Human
gcuuguagaauuguuau

SEQ ID NO: 2808297 - RNA, 15 nt, Human
gcuuggggcaacauu

SEQ ID NO: 2808298 - RNA, 17 nt, Human
ggacuuagcugggagaa

SEQ ID NO: 2808299 - RNA, 15 nt, Human
ggacuuagaaagcag

SEQ ID NO: 2808300 - RNA, 17 nt, Human
ggacuuagaaagcaggg

SEQ ID NO: 2808301 - RNA, 18 nt, Human
ggacuuagaaagcagggg

SEQ ID NO: 2808302 - RNA, 20 nt, Human
ggacuuagaaagcaggggcu

SEQ ID NO: 2808303 - RNA, 14 nt, Human
ggaccccuaugaag

SEQ ID NO: 2808304 - RNA, 19 nt, Human
ggacuuauuacaauuuguu

SEQ ID NO: 2808305 - RNA, 17 nt, Human
ggacucagcccugaggu

SEQ ID NO: 2808306 - RNA, 16 nt, Human
ggacucagcccugagg

SEQ ID NO: 2808307 - RNA, 15 nt, Human
ggacucagcccugag

SEQ ID NO: 2808308 - RNA, 14 nt, Human
ggacucagcccuga

SEQ ID NO: 2808309 - RNA, 20 nt, Human
ggacuacaggugugagucac

SEQ ID NO: 2808310 - RNA, 21 nt, Human
ggacuagagggaccucuccca

SEQ ID NO: 2808311 - RNA, 19 nt, Human
ggacuagagggaccucucc

SEQ ID NO: 2808312 - RNA, 18 nt, Human
ggacuagagggaccucuc

SEQ ID NO: 2808313 - RNA, 22 nt, Human
ggacucaaugcacugacauugu

SEQ ID NO: 2808314 - RNA, 14 nt, Human
ggacuagccccugu

SEQ ID NO: 2808315 - RNA, 22 nt, Human
ggacuagccccuguggagacug

SEQ ID NO: 2808316 - RNA, 16 nt, Human
ggacuaggguccuggg

SEQ ID NO: 2808317 - RNA, 20 nt, Human
ggacucacagguuggaagag

SEQ ID NO: 2808318 - RNA, 21 nt, Human
ggacucacagguuggaagaga

SEQ ID NO: 2808319 - RNA, 23 nt, Human
ggacucacagguuggaagagaau

SEQ ID NO: 2808320 - RNA, 13 nt, Human
ggacucagcccug

SEQ ID NO: 2808321 - RNA, 18 nt, Human
ggacucagaagccucugg

SEQ ID NO: 2808322 - RNA, 14 nt, Human
ggacucagagaaaa

SEQ ID NO: 2808323 - RNA, 17 nt, Human
ggacucagaagccucug

SEQ ID NO: 2808324 - RNA, 15 nt, Human
ggagaaccucaggcu

SEQ ID NO: 2808325 - RNA, 23 nt, Human
ggagaacaucuuugacacucugc

SEQ ID NO: 2808326 - RNA, 11 nt, Human
ggagaacaaau

SEQ ID NO: 2808327 - RNA, 22 nt, Human
ggagacugcugagucaacccaa

SEQ ID NO: 2808328 - RNA, 16 nt, Human
ggagacugucucaaga

SEQ ID NO: 2808329 - RNA, 15 nt, Human
ggagacuggggggcu

SEQ ID NO: 2808330 - RNA, 18 nt, Human
ggagacuggggggcuuga

SEQ ID NO: 2808331 - RNA, 20 nt, Human
ggagacugguccugugugca

SEQ ID NO: 2808332 - RNA, 17 nt, Human
ggacuuggaagcuccgc

SEQ ID NO: 2808333 - RNA, 15 nt, Human
ggacuuggaagcucc

SEQ ID NO: 2808334 - RNA, 16 nt, Human
ggacuucggaccgcuu

SEQ ID NO: 2808335 - RNA, 23 nt, Human
ggacuucggaccgcuugugggga

SEQ ID NO: 2808336 - RNA, 20 nt, Human
ggagaaaaaaagcauguguc

SEQ ID NO: 2808337 - RNA, 15 nt, Human
ggagaaaaggaaaag

SEQ ID NO: 2808338 - RNA, 22 nt, Human
ggagaaaaggaaaagaaaaaaa

SEQ ID NO: 2808339 - RNA, 19 nt, Human
ggacuuuguauacuuuaaa

SEQ ID NO: 2808340 - RNA, 20 nt, Human
ggacuuuguauacuuuaaau

SEQ ID NO: 2808341 - RNA, 16 nt, Human
ggacuugugucucugu

SEQ ID NO: 2808342 - RNA, 18 nt, Human
ggacuuuuauuuccagug

SEQ ID NO: 2808343 - RNA, 12 nt, Human
ggagagcccagc

SEQ ID NO: 2808344 - RNA, 11 nt, Human
ggagagcccag

SEQ ID NO: 2808345 - RNA, 17 nt, Human
ggagagccccuggggcc

SEQ ID NO: 2808346 - RNA, 16 nt, Human
ggagacuugccagagc

SEQ ID NO: 2808347 - RNA, 17 nt, Human
ggagagacucccaugaa

SEQ ID NO: 2808348 - RNA, 18 nt, Human
ggagagacucccaugaag

SEQ ID NO: 2808349 - RNA, 19 nt, Human
ggagagacucccaugaagc

SEQ ID NO: 2808350 - RNA, 20 nt, Human
ggagagacucccaugaagcc

SEQ ID NO: 2808351 - RNA, 21 nt, Human
ggagagacucccaugaagccu

SEQ ID NO: 2808352 - RNA, 22 nt, Human
ggagagacucccaugaagccuu

SEQ ID NO: 2808353 - RNA, 10 nt, Human
ggagagagaa

SEQ ID NO: 2808354 - RNA, 11 nt, Human
ggagagagaaa

SEQ ID NO: 2808355 - RNA, 12 nt, Human
ggagagagaaag

SEQ ID NO: 2808356 - RNA, 21 nt, Human
ggagagagaaagccaggcagg

SEQ ID NO: 2808357 - RNA, 10 nt, Human
ggagagaggc

SEQ ID NO: 2808358 - RNA, 13 nt, Human
ggagagaggcaga

SEQ ID NO: 2808359 - RNA, 16 nt, Human
ggagagaggcagagag

SEQ ID NO: 2808360 - RNA, 18 nt, Human
ggagagaggcagagagcg

SEQ ID NO: 2808361 - RNA, 14 nt, Human
ggagagagacucca

SEQ ID NO: 2808362 - RNA, 14 nt, Human
ggagagagaaagcc

SEQ ID NO: 2808363 - RNA, 17 nt, Human
ggagagagaaagccagg

SEQ ID NO: 2808364 - RNA, 18 nt, Human
ggagagagaaagccaggc

SEQ ID NO: 2808365 - RNA, 20 nt, Human
ggagagagaaagccaggcag

SEQ ID NO: 2808366 - RNA, 16 nt, Human
ggagagauagccugug

SEQ ID NO: 2808367 - RNA, 18 nt, Human
ggagagauagccuguggc

SEQ ID NO: 2808368 - RNA, 19 nt, Human
ggagagauagccuguggcc

SEQ ID NO: 2808369 - RNA, 18 nt, Human
gcugccugcccacacagg

SEQ ID NO: 2808370 - RNA, 19 nt, Human
gcugccugcccgcacagca

SEQ ID NO: 2808371 - RNA, 20 nt, Human
gcugccugcccgcacagcag

SEQ ID NO: 2808372 - RNA, 22 nt, Human
gcugccugcccgcacagcagcc

SEQ ID NO: 2808373 - RNA, 23 nt, Human
gcugccugcccgcacagcagccu

SEQ ID NO: 2808374 - RNA, 15 nt, Human
gcugccugcccacac

SEQ ID NO: 2808375 - RNA, 14 nt, Human
gcugccugcccaca

SEQ ID NO: 2808376 - RNA, 17 nt, Human
gcugccuagcaagcugg

SEQ ID NO: 2808377 - RNA, 19 nt, Human
gcugccuagcaagcuggcc

SEQ ID NO: 2808378 - RNA, 22 nt, Human
gcugccugccgguaaacacgcc

SEQ ID NO: 2808379 - RNA, 22 nt, Human
gcugccugcccguaaacacgcc

SEQ ID NO: 2808380 - RNA, 13 nt, Human
gcugccugcccgu

SEQ ID NO: 2808381 - RNA, 17 nt, Human
gcugccugcccacacag

SEQ ID NO: 2808382 - RNA, 22 nt, Human
gcugccgugccgccugcacucc

SEQ ID NO: 2808383 - RNA, 18 nt, Human
gcugccgugccgccugca

SEQ ID NO: 2808384 - RNA, 17 nt, Human
gcugccgccccacccag

SEQ ID NO: 2808385 - RNA, 15 nt, Human
gcugccgggccugau

SEQ ID NO: 2808386 - RNA, 19 nt, Human
gcugccgggccugauuugg

SEQ ID NO: 2808387 - RNA, 15 nt, Human
gcugccuaagacaug

SEQ ID NO: 2808388 - RNA, 15 nt, Human
gcugccgccucccag

SEQ ID NO: 2808389 - RNA, 13 nt, Human
gcugccgccuccc

SEQ ID NO: 2808390 - RNA, 20 nt, Human
gcugccgccucccagccugg

SEQ ID NO: 2808391 - RNA, 19 nt, Human
gcugccgccucccagccug

SEQ ID NO: 2808392 - RNA, 18 nt, Human
gcugccgccucccagccu

SEQ ID NO: 2808393 - RNA, 16 nt, Human
gcugccgccucccagc

SEQ ID NO: 2808394 - RNA, 14 nt, Human
gcugccccaaccug

SEQ ID NO: 2808395 - RNA, 16 nt, Human
gcugccccaaccugcu

SEQ ID NO: 2808396 - RNA, 17 nt, Human
gcugccccaaccugcug

SEQ ID NO: 2808397 - RNA, 18 nt, Human
gcugccccaaccugcuga

SEQ ID NO: 2808398 - RNA, 20 nt, Human
gcugccccaaccugcugaag

SEQ ID NO: 2808399 - RNA, 18 nt, Human
gcugcccacuguuucucu

SEQ ID NO: 2808400 - RNA, 18 nt, Human
gcugccauuugauuuuuc

SEQ ID NO: 2808401 - RNA, 16 nt, Human
gcugcccaaucuccau

SEQ ID NO: 2808402 - RNA, 17 nt, Human
gcugcccaaucuccauc

SEQ ID NO: 2808403 - RNA, 23 nt, Human
gcugcccacuguuucucuugagc

SEQ ID NO: 2808404 - RNA, 22 nt, Human
gcugcccacuguuucucuugag

SEQ ID NO: 2808405 - RNA, 16 nt, Human
gcugcccauuucguga

SEQ ID NO: 2808406 - RNA, 21 nt, Human
gcugcccauuucgugagcccc

SEQ ID NO: 2808407 - RNA, 12 nt, Human
gcugcccaggcc

SEQ ID NO: 2808408 - RNA, 14 nt, Human
gcugcccaggccca

SEQ ID NO: 2808409 - RNA, 12 nt, Human
gcugcugcccag

SEQ ID NO: 2808410 - RNA, 13 nt, Human
gcugcugcccagg

SEQ ID NO: 2808411 - RNA, 15 nt, Human
gcugcugcccaggcc

SEQ ID NO: 2808412 - RNA, 12 nt, Human
gcugcugcucug

SEQ ID NO: 2808413 - RNA, 15 nt, Human
gcugcugcugcgccc

SEQ ID NO: 2808414 - RNA, 12 nt, Human
gcugcugcgccc

SEQ ID NO: 2808415 - RNA, 12 nt, Human
gcugcugccugg

SEQ ID NO: 2808416 - RNA, 13 nt, Human
gcugcugccuggc

SEQ ID NO: 2808417 - RNA, 17 nt, Human
gcugcugccuggccacu

SEQ ID NO: 2808418 - RNA, 18 nt, Human
gcugcugccuggccacug

SEQ ID NO: 2808419 - RNA, 13 nt, Human
gcugcuccucaug

SEQ ID NO: 2808420 - RNA, 14 nt, Human
gcugcuccuuggcu

SEQ ID NO: 2808421 - RNA, 15 nt, Human
gcugcuccuuggcuu

SEQ ID NO: 2808422 - RNA, 13 nt, Human
gcugccugcccac

SEQ ID NO: 2808423 - RNA, 22 nt, Human
gcugaggggaggaucacuggag

SEQ ID NO: 2808424 - RNA, 13 nt, Human
gcugagggcagcu

SEQ ID NO: 2808425 - RNA, 14 nt, Human
gcugaggaggccuc

SEQ ID NO: 2808426 - RNA, 22 nt, Human
gcugcaccugccagccuggcuu

SEQ ID NO: 2808427 - RNA, 21 nt, Human
gcugcaccugccagccuggcu

SEQ ID NO: 2808428 - RNA, 14 nt, Human
gcugccacuuuuua

SEQ ID NO: 2808429 - RNA, 23 nt, Human
gcugccauccagguucagcuugu

SEQ ID NO: 2808430 - RNA, 22 nt, Human
gcugccauggcgugucccucuc

SEQ ID NO: 2808431 - RNA, 23 nt, Human
gcugccauggcgugucccucucg

SEQ ID NO: 2808432 - RNA, 21 nt, Human
gcugccauccagguucagcuu

SEQ ID NO: 2808433 - RNA, 20 nt, Human
gcugcaccugccagccuggc

SEQ ID NO: 2808434 - RNA, 19 nt, Human
gcugcaccugccagccugg

SEQ ID NO: 2808435 - RNA, 18 nt, Human
gcugcaccugccagccug

SEQ ID NO: 2808436 - RNA, 17 nt, Human
gcugcaccugccagccu

SEQ ID NO: 2808437 - RNA, 15 nt, Human
gcuggacgucuuucu

SEQ ID NO: 2808438 - RNA, 16 nt, Human
gcuggacgucuuucuu

SEQ ID NO: 2808439 - RNA, 18 nt, Human
gcuggacgucuuucuuuu

SEQ ID NO: 2808440 - RNA, 20 nt, Human
gcuggacgucuuucuuuuuu

SEQ ID NO: 2808441 - RNA, 19 nt, Human
gcuggacggggacugggga

SEQ ID NO: 2808442 - RNA, 21 nt, Human
gcuggacggggacuggggaug

SEQ ID NO: 2808443 - RNA, 13 nt, Human
gcuggacucugca

SEQ ID NO: 2808444 - RNA, 16 nt, Human
gcuggacucugcaucc

SEQ ID NO: 2808445 - RNA, 12 nt, Human
gcuggagugcag

SEQ ID NO: 2808446 - RNA, 16 nt, Human
gcuggacggcauuccu

SEQ ID NO: 2808447 - RNA, 16 nt, Human
gcugggauuacaggug

SEQ ID NO: 2808448 - RNA, 23 nt, Human
gcugggauuacaggcuccugcca

SEQ ID NO: 2808449 - RNA, 22 nt, Human
gcugggauuacaggcuccugcc

SEQ ID NO: 2808450 - RNA, 15 nt, Human
gcuggagugcaguga

SEQ ID NO: 2808451 - RNA, 14 nt, Human
gcuggagugcagug

SEQ ID NO: 2808452 - RNA, 13 nt, Human
gcugggcacuucc

SEQ ID NO: 2808453 - RNA, 14 nt, Human
gcugggcacuuccc

SEQ ID NO: 2808454 - RNA, 15 nt, Human
gcugggcacuucccu

SEQ ID NO: 2808455 - RNA, 18 nt, Human
gcugggcacuucccugcu

SEQ ID NO: 2808456 - RNA, 19 nt, Human
gcugggcacuucccugcug

SEQ ID NO: 2808457 - RNA, 18 nt, Human
gcugggauuacaggugug

SEQ ID NO: 2808458 - RNA, 17 nt, Human
gcugggauuacagggau

SEQ ID NO: 2808459 - RNA, 17 nt, Human
gcugggauuacaggugu

SEQ ID NO: 2808460 - RNA, 19 nt, Human
gcugggauuacagguguga

SEQ ID NO: 2808461 - RNA, 21 nt, Human
gcugggauuacaggcuccugc

SEQ ID NO: 2808462 - RNA, 14 nt, Human
gcugggauuuuaaa

SEQ ID NO: 2808463 - RNA, 15 nt, Human
gcugggauuuuaaac

SEQ ID NO: 2808464 - RNA, 15 nt, Human
gcugggcaaggaaaa

SEQ ID NO: 2808465 - RNA, 16 nt, Human
gcugggcaaggaaaaa

SEQ ID NO: 2808466 - RNA, 19 nt, Human
gcugggcaaggaaaaagaa

SEQ ID NO: 2808467 - RNA, 20 nt, Human
gcugggcaaggaaaaagaaa

SEQ ID NO: 2808468 - RNA, 20 nt, Human
gcugggcacacgccucccac

SEQ ID NO: 2808469 - RNA, 22 nt, Human
gcugggcacacgccucccacug

SEQ ID NO: 2808470 - RNA, 17 nt, Human
gcugggugguacccucu

SEQ ID NO: 2808471 - RNA, 14 nt, Human
gcuggguggcacug

SEQ ID NO: 2808472 - RNA, 15 nt, Human
gcuggguggcacugc

SEQ ID NO: 2808473 - RNA, 17 nt, Human
gcuggguggcacugcca

SEQ ID NO: 2808474 - RNA, 19 nt, Human
gcuuggcguggagcaggcg

SEQ ID NO: 2808475 - RNA, 15 nt, Human
gcuuggcuccaugcu

SEQ ID NO: 2808476 - RNA, 19 nt, Human
gcuugaaaagcuaguguac

SEQ ID NO: 2808477 - RNA, 17 nt, Human
gcuucuuuucuuuguau

SEQ ID NO: 2808478 - RNA, 20 nt, Human
gcuucuuuucuuuguaucau

SEQ ID NO: 2808479 - RNA, 16 nt, Human
gcuuccuuucccaagc

SEQ ID NO: 2808480 - RNA, 22 nt, Human
gcuuccuuggcaucacagggca

SEQ ID NO: 2808481 - RNA, 24 nt, Human
gcuuccuuucccaagccuucgggc

SEQ ID NO: 2808482 - RNA, 14 nt, Human
gcuucgacuuuucu

SEQ ID NO: 2808483 - RNA, 16 nt, Human
gcuucgacuuuucuua

SEQ ID NO: 2808484 - RNA, 21 nt, Human
gcuucgaggcccagcgaccuc

SEQ ID NO: 2808485 - RNA, 19 nt, Human
gcuucgaggcccagcgacc

SEQ ID NO: 2808486 - RNA, 12 nt, Human
gcuucuugugaa

SEQ ID NO: 2808487 - RNA, 13 nt, Human
gcuucuugugaag

SEQ ID NO: 2808488 - RNA, 14 nt, Human
gcuucuugugaagg

SEQ ID NO: 2808489 - RNA, 18 nt, Human
gcuucuugugaaggccau

SEQ ID NO: 2808490 - RNA, 20 nt, Human
gcuucuugugaaggccauga

SEQ ID NO: 2808491 - RNA, 23 nt, Human
gcuuggggccaccaaagcugccc

SEQ ID NO: 2808492 - RNA, 13 nt, Human
gcuuggggccagg

SEQ ID NO: 2808493 - RNA, 22 nt, Human
gcuuggggccaccaaagcugcc

SEQ ID NO: 2808494 - RNA, 20 nt, Human
gcuuggggccaccaaagcug

SEQ ID NO: 2808495 - RNA, 19 nt, Human
gcuuggggccaccaaagcu

SEQ ID NO: 2808496 - RNA, 20 nt, Human
gcuugggagagccccugggg

SEQ ID NO: 2808497 - RNA, 21 nt, Human
gcuugggagagccccuggggc

SEQ ID NO: 2808498 - RNA, 22 nt, Human
gcuuccuucugugaaaguacau

SEQ ID NO: 2808499 - RNA, 23 nt, Human
gcuuccuacccacaccucugcca

SEQ ID NO: 2808500 - RNA, 17 nt, Human
gcuuccgguagggaggc

SEQ ID NO: 2808501 - RNA, 20 nt, Human
gcuuccgguagggaggcagc

SEQ ID NO: 2808502 - RNA, 21 nt, Human
gcuuccgguagggaggcagcc

SEQ ID NO: 2808503 - RNA, 22 nt, Human
gcuuccgguagggaggcagccu

SEQ ID NO: 2808504 - RNA, 22 nt, Human
gcuuccuacccacaccucugcc

SEQ ID NO: 2808505 - RNA, 13 nt, Human
gcuucccuccugc

SEQ ID NO: 2808506 - RNA, 16 nt, Human
gcuucccuccugcccg

SEQ ID NO: 2808507 - RNA, 18 nt, Human
gcuuccccuuuugccaau

SEQ ID NO: 2808508 - RNA, 23 nt, Human
gcuucccgcucagcccucccugc

SEQ ID NO: 2808509 - RNA, 15 nt, Human
gcuucccgcucagcc

SEQ ID NO: 2808510 - RNA, 16 nt, Human
gcuucccgcucagccc

SEQ ID NO: 2808511 - RNA, 17 nt, Human
gcuucccgcucagcccu

SEQ ID NO: 2808512 - RNA, 18 nt, Human
gcuucccgcucagcccuc

SEQ ID NO: 2808513 - RNA, 22 nt, Human
gcuuccauuuuccuacaggcag

SEQ ID NO: 2808514 - RNA, 15 nt, Human
gcuucccccauagcc

SEQ ID NO: 2808515 - RNA, 14 nt, Human
gcuucccccauagc

SEQ ID NO: 2808516 - RNA, 17 nt, Human
gcuucccaugucuuucu

SEQ ID NO: 2808517 - RNA, 18 nt, Human
gcuucccccauagccacc

SEQ ID NO: 2808518 - RNA, 16 nt, Human
gcuucccccauagcca

SEQ ID NO: 2808519 - RNA, 18 nt, Human
gcuucccaguggcugcug

SEQ ID NO: 2808520 - RNA, 19 nt, Human
gcuucccaguggcugcugc

SEQ ID NO: 2808521 - RNA, 20 nt, Human
gcuucccaguggcugcugcc

SEQ ID NO: 2808522 - RNA, 13 nt, Human
gcuucccaccucc

SEQ ID NO: 2808523 - RNA, 14 nt, Human
gcuucccaccuccc

SEQ ID NO: 2808524 - RNA, 15 nt, Human
gcuucccaccucccu

SEQ ID NO: 2808525 - RNA, 17 nt, Human
gcuucccaccucccugc

SEQ ID NO: 2808526 - RNA, 18 nt, Human
gcuucccaccucccugcc

SEQ ID NO: 2808527 - RNA, 22 nt, Human
gcuucccaccucccugcccagg

SEQ ID NO: 2808528 - RNA, 23 nt, Human
gcuucccaccucccugcccaggc

SEQ ID NO: 2808529 - RNA, 21 nt, Human
gcuucccaguggcugcugccc

SEQ ID NO: 2808530 - RNA, 22 nt, Human
gcuucccaguggcugcugccca

SEQ ID NO: 2808531 - RNA, 19 nt, Human
gcugggugacagagcgaga

SEQ ID NO: 2808532 - RNA, 21 nt, Human
gcuggguuggaggguguccca

SEQ ID NO: 2808533 - RNA, 14 nt, Human
gcuggguuggaggg

SEQ ID NO: 2808534 - RNA, 16 nt, Human
gcuguaacuuaaaaua

SEQ ID NO: 2808535 - RNA, 13 nt, Human
gcuguaagaaauc

SEQ ID NO: 2808536 - RNA, 15 nt, Human
gcuguaaaacgcugu

SEQ ID NO: 2808537 - RNA, 23 nt, Human
gcuguaucccaugagccucagca

SEQ ID NO: 2808538 - RNA, 20 nt, Human
gcuguaucccaugagccuca

SEQ ID NO: 2808539 - RNA, 15 nt, Human
gcuguaugcugauca

SEQ ID NO: 2808540 - RNA, 13 nt, Human
gcuguaaggcucu

SEQ ID NO: 2808541 - RNA, 15 nt, Human
gcuguaaggcucuag

SEQ ID NO: 2808542 - RNA, 16 nt, Human
gcuguaaggcucuaga

SEQ ID NO: 2808543 - RNA, 17 nt, Human
gcuguaaggcucuagau

SEQ ID NO: 2808544 - RNA, 23 nt, Human
gcuguaaggcucuagaucauaag

SEQ ID NO: 2808545 - RNA, 15 nt, Human
gcuguaagaugucug

SEQ ID NO: 2808546 - RNA, 16 nt, Human
gcuguaagaugucugu

SEQ ID NO: 2808547 - RNA, 14 nt, Human
gcuguaagcuccuu

SEQ ID NO: 2808548 - RNA, 14 nt, Human
gcuucacuguauaa

SEQ ID NO: 2808549 - RNA, 15 nt, Human
gcuucacuguauaaa

SEQ ID NO: 2808550 - RNA, 16 nt, Human
gcuucacuguauaaau

SEQ ID NO: 2808551 - RNA, 17 nt, Human
gcuucacuguauaaaua

SEQ ID NO: 2808552 - RNA, 18 nt, Human
gcuucagauguggagcca

SEQ ID NO: 2808553 - RNA, 19 nt, Human
gcuucagauguggagccag

SEQ ID NO: 2808554 - RNA, 20 nt, Human
gcuucagauguggagccagg

SEQ ID NO: 2808555 - RNA, 21 nt, Human
gcuucagauguggagccaggc

SEQ ID NO: 2808556 - RNA, 22 nt, Human
gcuuaaauauaguuccuaagaa

SEQ ID NO: 2808557 - RNA, 23 nt, Human
gcuuaaauauaguuccuaagaag

SEQ ID NO: 2808558 - RNA, 19 nt, Human
gcuuaaaauaaacaguugu

SEQ ID NO: 2808559 - RNA, 22 nt, Human
gcuuaaaauaaacaguugugaa

SEQ ID NO: 2808560 - RNA, 16 nt, Human
gcuucaauaaaucuuu

SEQ ID NO: 2808561 - RNA, 18 nt, Human
gcuucacaguagagccag

SEQ ID NO: 2808562 - RNA, 17 nt, Human
gcuucacaguagagcca

SEQ ID NO: 2808563 - RNA, 19 nt, Human
gcuucaauaguucaaggaa

SEQ ID NO: 2808564 - RNA, 15 nt, Human
gcuucaauuaauaaa

SEQ ID NO: 2808565 - RNA, 20 nt, Human
gcuucaccccaaucccagcu

SEQ ID NO: 2808566 - RNA, 22 nt, Human
gcuucacaguagagccagcuug

SEQ ID NO: 2808567 - RNA, 13 nt, Human
gcuucacagugau

SEQ ID NO: 2808568 - RNA, 21 nt, Human
gcuucacaguagagccagcuu

SEQ ID NO: 2808569 - RNA, 20 nt, Human
gcuucacaguagagccagcu

SEQ ID NO: 2808570 - RNA, 19 nt, Human
gcuucacaguagagccagc

SEQ ID NO: 2808571 - RNA, 19 nt, Human
gcuucaccccaaucccagc

SEQ ID NO: 2808572 - RNA, 14 nt, Human
gcuucaccagagca

SEQ ID NO: 2808573 - RNA, 15 nt, Human
gcuucaccagagcau

SEQ ID NO: 2808574 - RNA, 16 nt, Human
gcugugagccccuggu

SEQ ID NO: 2808575 - RNA, 20 nt, Human
gcugugagccccugguccug

SEQ ID NO: 2808576 - RNA, 15 nt, Human
gcuguggaagcaaca

SEQ ID NO: 2808577 - RNA, 19 nt, Human
gcuguggagacaaugucug

SEQ ID NO: 2808578 - RNA, 20 nt, Human
gcuguggagacaaugucugc

SEQ ID NO: 2808579 - RNA, 21 nt, Human
gcuguggagacaaugucugca

SEQ ID NO: 2808580 - RNA, 23 nt, Human
gcuguggagacaaugucugcagc

SEQ ID NO: 2808581 - RNA, 17 nt, Human
gcuguggaggauugcua

SEQ ID NO: 2808582 - RNA, 23 nt, Human
gcuguggaggauugcuaucugga

SEQ ID NO: 2808583 - RNA, 22 nt, Human
gcuguuggcugggggccucagu

SEQ ID NO: 2808584 - RNA, 21 nt, Human
gcuguuggcugggggccucag

SEQ ID NO: 2808585 - RNA, 15 nt, Human
gcuguuguacauuua

SEQ ID NO: 2808586 - RNA, 16 nt, Human
gcuguuguacauuuau

SEQ ID NO: 2808587 - RNA, 12 nt, Human
gcuguuguacau

SEQ ID NO: 2808588 - RNA, 12 nt, Human
gcuguuggucau

SEQ ID NO: 2808589 - RNA, 13 nt, Human
gcuguuguacauu

SEQ ID NO: 2808590 - RNA, 14 nt, Human
gcuguuguacauuu

SEQ ID NO: 2808591 - RNA, 21 nt, Human
gcugugcucuggacaggcaug

SEQ ID NO: 2808592 - RNA, 13 nt, Human
gcugugcugcccu

SEQ ID NO: 2808593 - RNA, 18 nt, Human
gcugugcucuggacaggc

SEQ ID NO: 2808594 - RNA, 17 nt, Human
gcugugaacugaaauua

SEQ ID NO: 2808595 - RNA, 13 nt, Human
gcugugaacaggc

SEQ ID NO: 2808596 - RNA, 16 nt, Human
gcugugaacaggcugg

SEQ ID NO: 2808597 - RNA, 16 nt, Human
gcugugacuucuccag

SEQ ID NO: 2808598 - RNA, 17 nt, Human
gcugugacuucuccagg

SEQ ID NO: 2808599 - RNA, 12 nt, Human
gcugugagcccc

SEQ ID NO: 2808600 - RNA, 15 nt, Human
gcugugagccccugg

SEQ ID NO: 2808601 - RNA, 11 nt, Human
gcuaguauuug

SEQ ID NO: 2808602 - RNA, 14 nt, Human
gcuaguauuugaau

SEQ ID NO: 2808603 - RNA, 15 nt, Human
gcuaguauuugaauu

SEQ ID NO: 2808604 - RNA, 16 nt, Human
gcuaguauuugaauua

SEQ ID NO: 2808605 - RNA, 18 nt, Human
gcuaguauuugaauuaaa

SEQ ID NO: 2808606 - RNA, 22 nt, Human
gcuaguauuugaauuaaaacuu

SEQ ID NO: 2808607 - RNA, 18 nt, Human
gcuaugggagccccaggg

SEQ ID NO: 2808608 - RNA, 17 nt, Human
gcuaugggagccccagg

SEQ ID NO: 2808609 - RNA, 15 nt, Human
gcuaggccuggccag

SEQ ID NO: 2808610 - RNA, 14 nt, Human
gcuaggccuggcca

SEQ ID NO: 2808611 - RNA, 22 nt, Human
gcuaggaccccuccaugugggc

SEQ ID NO: 2808612 - RNA, 15 nt, Human
gcuauuuauuuuccu

SEQ ID NO: 2808613 - RNA, 21 nt, Human
gcuauugucaccagggcugga

SEQ ID NO: 2808614 - RNA, 20 nt, Human
gcuauugucaccagggcugg

SEQ ID NO: 2808615 - RNA, 20 nt, Human
gcuauuuauuuuccuaaaga

SEQ ID NO: 2808616 - RNA, 16 nt, Human
gcuauuuauuuuccua

SEQ ID NO: 2808617 - RNA, 22 nt, Human
gcuauuuauuuuccuaaagaga

SEQ ID NO: 2808618 - RNA, 14 nt, Human
gcuauggugggaga

SEQ ID NO: 2808619 - RNA, 16 nt, Human
gcuauguuacuauuuu

SEQ ID NO: 2808620 - RNA, 17 nt, Human
gcuauguuacuauuuuc

SEQ ID NO: 2808621 - RNA, 16 nt, Human
gcuauugucaccaggg

SEQ ID NO: 2808622 - RNA, 21 nt, Human
gcuaugggagccccagggucu

SEQ ID NO: 2808623 - RNA, 19 nt, Human
gcuaugggagccccagggu

SEQ ID NO: 2808624 - RNA, 19 nt, Human
gccuguucagcuccagcuc

SEQ ID NO: 2808625 - RNA, 23 nt, Human
gccuguguggccacuucugucca

SEQ ID NO: 2808626 - RNA, 20 nt, Human
gccuguucagcuccagcuca

SEQ ID NO: 2808627 - RNA, 20 nt, Human
gccuguuaggagaagcugca

SEQ ID NO: 2808628 - RNA, 21 nt, Human
gcucaggucacauaaaacuuu

SEQ ID NO: 2808629 - RNA, 22 nt, Human
gcucacgccuaugaucccagca

SEQ ID NO: 2808630 - RNA, 21 nt, Human
gcucacgccuaugaucccagc

SEQ ID NO: 2808631 - RNA, 18 nt, Human
gcucacgcuucacaguga

SEQ ID NO: 2808632 - RNA, 19 nt, Human
gcucaggacucagaagccu

SEQ ID NO: 2808633 - RNA, 16 nt, Human
gcucaggacucagaag

SEQ ID NO: 2808634 - RNA, 18 nt, Human
gcucaggacucagaagcc

SEQ ID NO: 2808635 - RNA, 17 nt, Human
gcucaggacucagaagc

SEQ ID NO: 2808636 - RNA, 17 nt, Human
gcuccucuguccugcuu

SEQ ID NO: 2808637 - RNA, 19 nt, Human
gcuccucuguccugcuucu

SEQ ID NO: 2808638 - RNA, 20 nt, Human
gcuccucuguccugcuucug

SEQ ID NO: 2808639 - RNA, 18 nt, Human
gcuccucuccuggaggau

SEQ ID NO: 2808640 - RNA, 14 nt, Human
gcuccucuccugga

SEQ ID NO: 2808641 - RNA, 15 nt, Human
gcuccucuccuggag

SEQ ID NO: 2808642 - RNA, 16 nt, Human
gcuccucuccuggagg

SEQ ID NO: 2808643 - RNA, 17 nt, Human
gcuccucuccuggagga

SEQ ID NO: 2808644 - RNA, 22 nt, Human
gcuccugccaccacgcccggcu

SEQ ID NO: 2808645 - RNA, 21 nt, Human
gcuccugccaccacgcccggc

SEQ ID NO: 2808646 - RNA, 19 nt, Human
gcuccugccaguguggaac

SEQ ID NO: 2808647 - RNA, 14 nt, Human
gcuccucuguggug

SEQ ID NO: 2808648 - RNA, 19 nt, Human
gcuccucuguggugucugc

SEQ ID NO: 2808649 - RNA, 20 nt, Human
gcuccucuguggugucugcc

SEQ ID NO: 2808650 - RNA, 15 nt, Human
gcucuaagucucaac

SEQ ID NO: 2808651 - RNA, 12 nt, Human
gcucuaauaaaa

SEQ ID NO: 2808652 - RNA, 23 nt, Human
gcucggaggcugcccccggcccc

SEQ ID NO: 2808653 - RNA, 17 nt, Human
gcucggaggcugccccc

SEQ ID NO: 2808654 - RNA, 18 nt, Human
gcucggaggcugcccccg

SEQ ID NO: 2808655 - RNA, 14 nt, Human
gcucggaggcugcc

SEQ ID NO: 2808656 - RNA, 15 nt, Human
gcucggaggcugccc

SEQ ID NO: 2808657 - RNA, 16 nt, Human
gcucggaggcugcccc

SEQ ID NO: 2808658 - RNA, 14 nt, Human
gcuccccagcccug

SEQ ID NO: 2808659 - RNA, 15 nt, Human
gcuccccagcccugg

SEQ ID NO: 2808660 - RNA, 16 nt, Human
gcuccccagcccuggc

SEQ ID NO: 2808661 - RNA, 18 nt, Human
gcuccccagcccuggcuc

SEQ ID NO: 2808662 - RNA, 20 nt, Human
gcuccccagcccuggcucug

SEQ ID NO: 2808663 - RNA, 19 nt, Human
gcuccccagcccuggcucu

SEQ ID NO: 2808664 - RNA, 20 nt, Human
gcucuacagcuaaucagcau

SEQ ID NO: 2808665 - RNA, 22 nt, Human
gcucuacagcuaaucagcauuc

SEQ ID NO: 2808666 - RNA, 16 nt, Human
gcucuacaucuucugc

SEQ ID NO: 2808667 - RNA, 18 nt, Human
gcucucagcucagcgcca

SEQ ID NO: 2808668 - RNA, 20 nt, Human
gcucugacagaaagcagaua

SEQ ID NO: 2808669 - RNA, 15 nt, Human
gcucugacccaguga

SEQ ID NO: 2808670 - RNA, 17 nt, Human
gcucugacccagugaga

SEQ ID NO: 2808671 - RNA, 17 nt, Human
gcucugacuuuacacuc

SEQ ID NO: 2808672 - RNA, 14 nt, Human
gcucugagaagagg

SEQ ID NO: 2808673 - RNA, 22 nt, Human
gcucugagaagaggagcccuca

SEQ ID NO: 2808674 - RNA, 20 nt, Human
gcucugcaggcuuaauaaaa

SEQ ID NO: 2808675 - RNA, 15 nt, Human
gcucugcaccccucu

SEQ ID NO: 2808676 - RNA, 17 nt, Human
gcucugcaccccucugc

SEQ ID NO: 2808677 - RNA, 23 nt, Human
gcucugcaauuccccucugcugc

SEQ ID NO: 2808678 - RNA, 18 nt, Human
gcucugcaauuccccucu

SEQ ID NO: 2808679 - RNA, 16 nt, Human
gcucugacagaaagca

SEQ ID NO: 2808680 - RNA, 21 nt, Human
gcucugagagucuagauucuc

SEQ ID NO: 2808681 - RNA, 20 nt, Human
gcucugagcaaauguggcuc

SEQ ID NO: 2808682 - RNA, 21 nt, Human
gcucugagcaaauguggcucc

SEQ ID NO: 2808683 - RNA, 13 nt, Human
gcucugagagucu

SEQ ID NO: 2808684 - RNA, 14 nt, Human
gcucugagagucua

SEQ ID NO: 2808685 - RNA, 18 nt, Human
gcucugagagucuagauu

SEQ ID NO: 2808686 - RNA, 20 nt, Human
gcucugagagucuagauucu

SEQ ID NO: 2808687 - RNA, 16 nt, Human
gcucuguccugggagu

SEQ ID NO: 2808688 - RNA, 19 nt, Human
gcucugucgcccaggcugg

SEQ ID NO: 2808689 - RNA, 16 nt, Human
gcucuguguugccaug

SEQ ID NO: 2808690 - RNA, 17 nt, Human
gcucuguguugccaugu

SEQ ID NO: 2808691 - RNA, 17 nt, Human
gcucuguuacccagggu

SEQ ID NO: 2808692 - RNA, 23 nt, Human
gcucuguuacccaggguggagug

SEQ ID NO: 2808693 - RNA, 14 nt, Human
gcucuguccuggga

SEQ ID NO: 2808694 - RNA, 15 nt, Human
gcucuguccugggag

SEQ ID NO: 2808695 - RNA, 22 nt, Human
gcucugccaacuucuucagagc

SEQ ID NO: 2808696 - RNA, 13 nt, Human
gcucuucaucugc

SEQ ID NO: 2808697 - RNA, 17 nt, Human
gcucuucaucugcccaa

SEQ ID NO: 2808698 - RNA, 13 nt, Human
gcugaaaguucuu

SEQ ID NO: 2808699 - RNA, 12 nt, Human
gcucuucaggcc

SEQ ID NO: 2808700 - RNA, 18 nt, Human
gcucuucaggccucccuc

SEQ ID NO: 2808701 - RNA, 15 nt, Human
gcucuucaggccucc

SEQ ID NO: 2808702 - RNA, 13 nt, Human
gcucuuaaaugua

SEQ ID NO: 2808703 - RNA, 16 nt, Human
gcugacagacacaggc

SEQ ID NO: 2808704 - RNA, 15 nt, Human
gcugacagacacagg

SEQ ID NO: 2808705 - RNA, 14 nt, Human
gcugacagacacag

SEQ ID NO: 2808706 - RNA, 13 nt, Human
gcugaaugccucc

SEQ ID NO: 2808707 - RNA, 14 nt, Human
gcugaaugccuccu

SEQ ID NO: 2808708 - RNA, 19 nt, Human
gcugaaugccuccuguggg

SEQ ID NO: 2808709 - RNA, 23 nt, Human
gccagaaguuguggauuucaguu

SEQ ID NO: 2808710 - RNA, 15 nt, Human
gccagaaucagcaca

SEQ ID NO: 2808711 - RNA, 20 nt, Human
gccagaaucagcacagauaa

SEQ ID NO: 2808712 - RNA, 22 nt, Human
gccagaaucagcacagauaaaa

SEQ ID NO: 2808713 - RNA, 15 nt, Human
gccagaauuucaaac

SEQ ID NO: 2808714 - RNA, 19 nt, Human
gccagaagauccccucagg

SEQ ID NO: 2808715 - RNA, 17 nt, Human
gccagaagauccccuca

SEQ ID NO: 2808716 - RNA, 18 nt, Human
gccagaagauccccucag

SEQ ID NO: 2808717 - RNA, 16 nt, Human
gccagcaacacagagc

SEQ ID NO: 2808718 - RNA, 17 nt, Human
gccagcaacacagagca

SEQ ID NO: 2808719 - RNA, 23 nt, Human
gccagaccaacguuacucagggc

SEQ ID NO: 2808720 - RNA, 23 nt, Human
gccagcaaagaggacucgcuugu

SEQ ID NO: 2808721 - RNA, 13 nt, Human
gccagcaaugaca

SEQ ID NO: 2808722 - RNA, 20 nt, Human
gccagcaaugacaucucagg

SEQ ID NO: 2808723 - RNA, 23 nt, Human
gccagcaaugacaucucaggggc

SEQ ID NO: 2808724 - RNA, 18 nt, Human
gccagcaccacuuccuuu

SEQ ID NO: 2808725 - RNA, 19 nt, Human
gccagcagcagcaggugau

SEQ ID NO: 2808726 - RNA, 16 nt, Human
gccagcagcagcaggu

SEQ ID NO: 2808727 - RNA, 15 nt, Human
gccagcagcagcagg

SEQ ID NO: 2808728 - RNA, 13 nt, Human
gccagcagcagca

SEQ ID NO: 2808729 - RNA, 15 nt, Human
gccagcacuuguaua

SEQ ID NO: 2808730 - RNA, 16 nt, Human
gccagcacuuguauau

SEQ ID NO: 2808731 - RNA, 13 nt, Human
gccaggccgggcc

SEQ ID NO: 2808732 - RNA, 15 nt, Human
gccaggccgggccug

SEQ ID NO: 2808733 - RNA, 18 nt, Human
gccaggccgggccuguac

SEQ ID NO: 2808734 - RNA, 21 nt, Human
gccaggccgggccuguacagu

SEQ ID NO: 2808735 - RNA, 21 nt, Human
gccaggccucucucaccucuc

SEQ ID NO: 2808736 - RNA, 20 nt, Human
gccaggagcucuucaggccu

SEQ ID NO: 2808737 - RNA, 16 nt, Human
gccagccacucuacca

SEQ ID NO: 2808738 - RNA, 21 nt, Human
gccagccacucuaccagugca

SEQ ID NO: 2808739 - RNA, 22 nt, Human
gccaggagcucuucaggccucc

SEQ ID NO: 2808740 - RNA, 23 nt, Human
gccaggagcugucaccaaggaaa

SEQ ID NO: 2808741 - RNA, 12 nt, Human
gccaggccagag

SEQ ID NO: 2808742 - RNA, 22 nt, Human
gccaggaucaugguguaauaag

SEQ ID NO: 2808743 - RNA, 24 nt, Human
gccaggaucaugguguaauaagac

SEQ ID NO: 2808744 - RNA, 19 nt, Human
gccaggaguuugagaccag

SEQ ID NO: 2808745 - RNA, 17 nt, Human
gccaggaucauggugua

SEQ ID NO: 2808746 - RNA, 19 nt, Human
gccaggaucaugguguaau

SEQ ID NO: 2808747 - RNA, 22 nt, Human
gccaggagggcguucuuaggcu

SEQ ID NO: 2808748 - RNA, 23 nt, Human
gccaggccggcgagcccugugga

SEQ ID NO: 2808749 - RNA, 20 nt, Human
gccaggccggcgagcccugu

SEQ ID NO: 2808750 - RNA, 19 nt, Human
gccaggccggcgagcccug

SEQ ID NO: 2808751 - RNA, 13 nt, Human
gccaggccagagg

SEQ ID NO: 2808752 - RNA, 20 nt, Human
gccauauucuguuggccagu

SEQ ID NO: 2808753 - RNA, 19 nt, Human
gccauauucuguuggccag

SEQ ID NO: 2808754 - RNA, 15 nt, Human
gccauguagaagcug

SEQ ID NO: 2808755 - RNA, 16 nt, Human
gccauguagaagcugc

SEQ ID NO: 2808756 - RNA, 18 nt, Human
gccauguagaagcugcau

SEQ ID NO: 2808757 - RNA, 17 nt, Human
gccauguauaaauguga

SEQ ID NO: 2808758 - RNA, 19 nt, Human
gccauguauaaaugugaua

SEQ ID NO: 2808759 - RNA, 17 nt, Human
gccauguacagacagag

SEQ ID NO: 2808760 - RNA, 15 nt, Human
gccauguaccucccc

SEQ ID NO: 2808761 - RNA, 16 nt, Human
gccauguaccuccccu

SEQ ID NO: 2808762 - RNA, 17 nt, Human
gccauguaccuccccug

SEQ ID NO: 2808763 - RNA, 20 nt, Human
gccauguaccuccccugccu

SEQ ID NO: 2808764 - RNA, 21 nt, Human
gccauguaccuccccugccuu

SEQ ID NO: 2808765 - RNA, 15 nt, Human
gccauguacuaguuu

SEQ ID NO: 2808766 - RNA, 17 nt, Human
gccauguacuaguuuua

SEQ ID NO: 2808767 - RNA, 18 nt, Human
gccauguuggccaggcug

SEQ ID NO: 2808768 - RNA, 17 nt, Human
gccauguuggccaggcu

SEQ ID NO: 2808769 - RNA, 16 nt, Human
gccauguuggccaggc

SEQ ID NO: 2808770 - RNA, 15 nt, Human
gccauguuggccagg

SEQ ID NO: 2808771 - RNA, 14 nt, Human
gccauguuggccag

SEQ ID NO: 2808772 - RNA, 14 nt, Human
gccaugugacucug

SEQ ID NO: 2808773 - RNA, 15 nt, Human
gccaugugacucugg

SEQ ID NO: 2808774 - RNA, 18 nt, Human
gccaugugacucuggcuu

SEQ ID NO: 2808775 - RNA, 23 nt, Human
gccaugugacucuggcuuggccu

SEQ ID NO: 2808776 - RNA, 15 nt, Human
gccauguccaaagag

SEQ ID NO: 2808777 - RNA, 14 nt, Human
gccauguccaaaga

SEQ ID NO: 2808778 - RNA, 19 nt, Human
gccauguccaaagaggcug

SEQ ID NO: 2808779 - RNA, 18 nt, Human
gccauguccaaagaggcu

SEQ ID NO: 2808780 - RNA, 22 nt, Human
gccauguccaaagaggcugccc

SEQ ID NO: 2808781 - RNA, 24 nt, Human
gccauguuggccaggcuggucuca

SEQ ID NO: 2808782 - RNA, 22 nt, Human
gccauguuggccaggcuggucu

SEQ ID NO: 2808783 - RNA, 20 nt, Human
gccauguuggccaggcuggu

SEQ ID NO: 2808784 - RNA, 19 nt, Human
gccauguuggccaggcugg

SEQ ID NO: 2808785 - RNA, 20 nt, Human
gccauuauuuucugucagau

SEQ ID NO: 2808786 - RNA, 22 nt, Human
gccauuauuuucugucagauga

SEQ ID NO: 2808787 - RNA, 18 nt, Human
gccauuccccgucucugg

SEQ ID NO: 2808788 - RNA, 17 nt, Human
gccauuccccgucucug

SEQ ID NO: 2808789 - RNA, 18 nt, Human
gcccaccuuggcucaagu

SEQ ID NO: 2808790 - RNA, 17 nt, Human
gcccacgcuggagugca

SEQ ID NO: 2808791 - RNA, 16 nt, Human
gcccacgcuggagugc

SEQ ID NO: 2808792 - RNA, 15 nt, Human
gcccacgcuggagug

SEQ ID NO: 2808793 - RNA, 22 nt, Human
gccauucugccgcccccuccug

SEQ ID NO: 2808794 - RNA, 14 nt, Human
gccaccaaagcugc

SEQ ID NO: 2808795 - RNA, 12 nt, Human
gccacauuuaau

SEQ ID NO: 2808796 - RNA, 19 nt, Human
gccacauuuggaauacuuu

SEQ ID NO: 2808797 - RNA, 22 nt, Human
gccacauuuggaauacuuuuug

SEQ ID NO: 2808798 - RNA, 16 nt, Human
gccacauuugguucua

SEQ ID NO: 2808799 - RNA, 16 nt, Human
gccacauuuucagcca

SEQ ID NO: 2808800 - RNA, 17 nt, Human
gccacauuuucagccaa

SEQ ID NO: 2808801 - RNA, 14 nt, Human
gccacauuuggaau

SEQ ID NO: 2808802 - RNA, 14 nt, Human
gccacauuagaacu

SEQ ID NO: 2808803 - RNA, 15 nt, Human
gccacauuagaacuu

SEQ ID NO: 2808804 - RNA, 16 nt, Human
gccacauuagaacuuc

SEQ ID NO: 2808805 - RNA, 23 nt, Human
gccacauuagaacuucuccgucc

SEQ ID NO: 2808806 - RNA, 20 nt, Human
gccaccaggugccuuucaaa

SEQ ID NO: 2808807 - RNA, 21 nt, Human
gccaccaggugccuuucaaau

SEQ ID NO: 2808808 - RNA, 22 nt, Human
gccaccauauucagugcugugg

SEQ ID NO: 2808809 - RNA, 23 nt, Human
gccaccauauucagugcuguggc

SEQ ID NO: 2808810 - RNA, 18 nt, Human
gccaccauccuauugcaa

SEQ ID NO: 2808811 - RNA, 18 nt, Human
gccaccauggccagccaa

SEQ ID NO: 2808812 - RNA, 17 nt, Human
gccaccauggccagcca

SEQ ID NO: 2808813 - RNA, 16 nt, Human
gccaccauggccagcc

SEQ ID NO: 2808814 - RNA, 14 nt, Human
gccaccauggccag

SEQ ID NO: 2808815 - RNA, 19 nt, Human
gccaccagcucugccgucu

SEQ ID NO: 2808816 - RNA, 22 nt, Human
gccaccaggaucagccaggagg

SEQ ID NO: 2808817 - RNA, 17 nt, Human
gccaccagcucugccgu

SEQ ID NO: 2808818 - RNA, 15 nt, Human
gccaccagcucugcc

SEQ ID NO: 2808819 - RNA, 10 nt, Human
gccaccagcg

SEQ ID NO: 2808820 - RNA, 19 nt, Human
gccaccagagaccguccuc

SEQ ID NO: 2808821 - RNA, 21 nt, Human
gccaccagagaccguccucac

SEQ ID NO: 2808822 - RNA, 22 nt, Human
gccaccagagaccguccucacc

SEQ ID NO: 2808823 - RNA, 23 nt, Human
gccaccagagaccguccucaccc

SEQ ID NO: 2808824 - RNA, 15 nt, Human
gccaccacguccagc

SEQ ID NO: 2808825 - RNA, 14 nt, Human
gccaccacguccag

SEQ ID NO: 2808826 - RNA, 16 nt, Human
gccaccacguccagcu

SEQ ID NO: 2808827 - RNA, 12 nt, Human
gccaccagagac

SEQ ID NO: 2808828 - RNA, 12 nt, Human
gccaccaccucu

SEQ ID NO: 2808829 - RNA, 14 nt, Human
gccaccaccucugu

SEQ ID NO: 2808830 - RNA, 16 nt, Human
gccaccaccucugugg

SEQ ID NO: 2808831 - RNA, 18 nt, Human
gccaccaccucuguggca

SEQ ID NO: 2808832 - RNA, 14 nt, Human
gccaccacgcccgg

SEQ ID NO: 2808833 - RNA, 13 nt, Human
gccaccacgcccg

SEQ ID NO: 2808834 - RNA, 19 nt, Human
gccaccaaagcugcccacu

SEQ ID NO: 2808835 - RNA, 17 nt, Human
gccaccaaagcugccca

SEQ ID NO: 2808836 - RNA, 16 nt, Human
gccaccaaagcugccc

SEQ ID NO: 2808837 - RNA, 15 nt, Human
gccaccaaagcugcc

SEQ ID NO: 2808838 - RNA, 20 nt, Human
gccaccaaagcugcccacug

SEQ ID NO: 2808839 - RNA, 16 nt, Human
gccacuucggccaggu

SEQ ID NO: 2808840 - RNA, 21 nt, Human
gccacuugaugacccccaacc

SEQ ID NO: 2808841 - RNA, 15 nt, Human
gccacuucuguccau

SEQ ID NO: 2808842 - RNA, 16 nt, Human
gccacuucuguccaua

SEQ ID NO: 2808843 - RNA, 17 nt, Human
gccacuucuguccauau

SEQ ID NO: 2808844 - RNA, 15 nt, Human
gccacuugaaauguu

SEQ ID NO: 2808845 - RNA, 21 nt, Human
gccacuugaacaaaaucuguu

SEQ ID NO: 2808846 - RNA, 22 nt, Human
gccacuugaacaaaaucuguug

SEQ ID NO: 2808847 - RNA, 23 nt, Human
gccacuuuugacuagggauucag

SEQ ID NO: 2808848 - RNA, 23 nt, Human
gccacuuugguacauggccagug

SEQ ID NO: 2808849 - RNA, 22 nt, Human
gccacuuugguacauggccagu

SEQ ID NO: 2808850 - RNA, 21 nt, Human
gccacuuugguacauggccag

SEQ ID NO: 2808851 - RNA, 23 nt, Human
gccacuuuacccaccuagaacac

SEQ ID NO: 2808852 - RNA, 18 nt, Human
gccacuuuacccaccuag

SEQ ID NO: 2808853 - RNA, 15 nt, Human
gccacuuuaagagag

SEQ ID NO: 2808854 - RNA, 17 nt, Human
gccacuuuaagagagaa

SEQ ID NO: 2808855 - RNA, 19 nt, Human
gccacuuuaagagagaaau

SEQ ID NO: 2808856 - RNA, 20 nt, Human
gccacuuuaagagagaaauc

SEQ ID NO: 2808857 - RNA, 22 nt, Human
gccacuuuaagagagaaaucug

SEQ ID NO: 2808858 - RNA, 20 nt, Human
gccacuuuacccaccuagaa

SEQ ID NO: 2808859 - RNA, 19 nt, Human
gccacuuuacccaccuaga

SEQ ID NO: 2808860 - RNA, 22 nt, Human
gccacuuuacccaccuagaaca

SEQ ID NO: 2808861 - RNA, 14 nt, Human
gccacuuugcacga

SEQ ID NO: 2808862 - RNA, 21 nt, Human
gccacuuugcacgacgcccuc

SEQ ID NO: 2808863 - RNA, 23 nt, Human
gccacuuugcacgacgcccucuc

SEQ ID NO: 2808864 - RNA, 19 nt, Human
gccacugcucuccagccug

SEQ ID NO: 2808865 - RNA, 16 nt, Human
gccacugugguggcag

SEQ ID NO: 2808866 - RNA, 12 nt, Human
gccacugcuccc

SEQ ID NO: 2808867 - RNA, 21 nt, Human
gccacugcucccuaagccagc

SEQ ID NO: 2808868 - RNA, 22 nt, Human
gccacugcucccuaagccagcc

SEQ ID NO: 2808869 - RNA, 23 nt, Human
gccacugcucccuaagccagccu

SEQ ID NO: 2808870 - RNA, 12 nt, Human
gccacugccucu

SEQ ID NO: 2808871 - RNA, 13 nt, Human
gccacugccucuu

SEQ ID NO: 2808872 - RNA, 16 nt, Human
gccacugccucuuccu

SEQ ID NO: 2808873 - RNA, 17 nt, Human
gccacugccucuuccuc

SEQ ID NO: 2808874 - RNA, 23 nt, Human
gccacugcaccgggccacagaga

SEQ ID NO: 2808875 - RNA, 19 nt, Human
gccacccuggggagaaagu

SEQ ID NO: 2808876 - RNA, 13 nt, Human
gccacccugggga

SEQ ID NO: 2808877 - RNA, 21 nt, Human
gccacugcacuauagccuagg

SEQ ID NO: 2808878 - RNA, 18 nt, Human
gccacugcacuccagccu

SEQ ID NO: 2808879 - RNA, 19 nt, Human
gccacugcauaccaaccug

SEQ ID NO: 2808880 - RNA, 22 nt, Human
gccacugcacuccagccugggc

SEQ ID NO: 2808881 - RNA, 21 nt, Human
gccacugcacuccagccuggg

SEQ ID NO: 2808882 - RNA, 20 nt, Human
gccacugcacuccagccugg

SEQ ID NO: 2808883 - RNA, 19 nt, Human
gccacugcacuccagccug

SEQ ID NO: 2808884 - RNA, 15 nt, Human
gccaccccacccucc

SEQ ID NO: 2808885 - RNA, 18 nt, Human
gccaccccacccucccug

SEQ ID NO: 2808886 - RNA, 13 nt, Human
gccacccagguga

SEQ ID NO: 2808887 - RNA, 19 nt, Human
gccaccccgggcucucugc

SEQ ID NO: 2808888 - RNA, 18 nt, Human
gccaccccgggcucucug

SEQ ID NO: 2808889 - RNA, 20 nt, Human
gccaccccacccucccugga

SEQ ID NO: 2808890 - RNA, 21 nt, Human
gccaccccacccucccuggag

SEQ ID NO: 2808891 - RNA, 22 nt, Human
gccaccccacccucccuggagu

SEQ ID NO: 2808892 - RNA, 12 nt, Human
gccaccccacuu

SEQ ID NO: 2808893 - RNA, 12 nt, Human
gccacccuagcc

SEQ ID NO: 2808894 - RNA, 22 nt, Human
gccacccuagccaaugucuccu

SEQ ID NO: 2808895 - RNA, 21 nt, Human
gccaccccgggcucucugcug

SEQ ID NO: 2808896 - RNA, 18 nt, Human
gcacuuggagacuuguau

SEQ ID NO: 2808897 - RNA, 14 nt, Human
gcccauguucugcc

SEQ ID NO: 2808898 - RNA, 15 nt, Human
gcccauguucugccc

SEQ ID NO: 2808899 - RNA, 16 nt, Human
gcccauguucugcccc

SEQ ID NO: 2808900 - RNA, 19 nt, Human
gcccauguucugcccccag

SEQ ID NO: 2808901 - RNA, 20 nt, Human
gcccauguucugcccccagc

SEQ ID NO: 2808902 - RNA, 22 nt, Human
gcccauuucgugagccccaucu

SEQ ID NO: 2808903 - RNA, 14 nt, Human
gcccauuucuccag

SEQ ID NO: 2808904 - RNA, 15 nt, Human
gcccauuucuccaga

SEQ ID NO: 2808905 - RNA, 16 nt, Human
gcccauuucuccagaa

SEQ ID NO: 2808906 - RNA, 18 nt, Human
gcccauuucuccagaacc

SEQ ID NO: 2808907 - RNA, 14 nt, Human
gccccugcccggcu

SEQ ID NO: 2808908 - RNA, 13 nt, Human
gccccugcccggc

SEQ ID NO: 2808909 - RNA, 22 nt, Human
gcccccuccugaaccgcacagc

SEQ ID NO: 2808910 - RNA, 15 nt, Human
gcccccucucaggag

SEQ ID NO: 2808911 - RNA, 21 nt, Human
gcccccuccugaaccgcacag

SEQ ID NO: 2808912 - RNA, 15 nt, Human
gcccccuccugaacc

SEQ ID NO: 2808913 - RNA, 13 nt, Human
gcccccuccugaa

SEQ ID NO: 2808914 - RNA, 12 nt, Human
gcccccuccuga

SEQ ID NO: 2808915 - RNA, 19 nt, Human
gcccccuccucuagcugug

SEQ ID NO: 2808916 - RNA, 20 nt, Human
gcccccuccucuagcugugg

SEQ ID NO: 2808917 - RNA, 21 nt, Human
gcccccuccucuagcuguggg

SEQ ID NO: 2808918 - RNA, 16 nt, Human
gcccccuccucuagcu

SEQ ID NO: 2808919 - RNA, 17 nt, Human
gcccuacucccugcaga

SEQ ID NO: 2808920 - RNA, 16 nt, Human
gcccuacucccugcag

SEQ ID NO: 2808921 - RNA, 22 nt, Human
gcccuacucccugcagaugcca

SEQ ID NO: 2808922 - RNA, 20 nt, Human
gcccuacucccugcagaugc

SEQ ID NO: 2808923 - RNA, 21 nt, Human
gcccuacuucuuugcuuugcc

SEQ ID NO: 2808924 - RNA, 14 nt, Human
gcccuacuauucag

SEQ ID NO: 2808925 - RNA, 15 nt, Human
gcccuacucauuggg

SEQ ID NO: 2808926 - RNA, 16 nt, Human
gcccuacagagcugug

SEQ ID NO: 2808927 - RNA, 17 nt, Human
gcccuacagagcugugg

SEQ ID NO: 2808928 - RNA, 20 nt, Human
gcccuacagagcuguggagg

SEQ ID NO: 2808929 - RNA, 23 nt, Human
gcccuaaugcgcaggcuggcccu

SEQ ID NO: 2808930 - RNA, 15 nt, Human
gcccuaauucagcca

SEQ ID NO: 2808931 - RNA, 16 nt, Human
gcccuaauucagccau

SEQ ID NO: 2808932 - RNA, 22 nt, Human
gcccuaauucagccauguacag

SEQ ID NO: 2808933 - RNA, 23 nt, Human
gcccuaauucagccauguacaga

SEQ ID NO: 2808934 - RNA, 15 nt, Human
gcccuaaaagcacac

SEQ ID NO: 2808935 - RNA, 14 nt, Human
gcccguguacauag

SEQ ID NO: 2808936 - RNA, 17 nt, Human
gcccguguacauagugc

SEQ ID NO: 2808937 - RNA, 19 nt, Human
gcccguguacauagugcau

SEQ ID NO: 2808938 - RNA, 17 nt, Human
gcccacucugcucgccu

SEQ ID NO: 2808939 - RNA, 16 nt, Human
gcccacucagggguca

SEQ ID NO: 2808940 - RNA, 23 nt, Human
gcccacuagacccacuggacuca

SEQ ID NO: 2808941 - RNA, 17 nt, Human
gcccacuagacccacug

SEQ ID NO: 2808942 - RNA, 15 nt, Human
gcccacgucacgugu

SEQ ID NO: 2808943 - RNA, 22 nt, Human
gcccauggcccucccaguaccu

SEQ ID NO: 2808944 - RNA, 14 nt, Human
gcccauggcccugu

SEQ ID NO: 2808945 - RNA, 20 nt, Human
gcccaugggagcugguuaga

SEQ ID NO: 2808946 - RNA, 23 nt, Human
gcccugcugccgccucccagccu

SEQ ID NO: 2808947 - RNA, 22 nt, Human
gcccugcugccgccucccagcc

SEQ ID NO: 2808948 - RNA, 21 nt, Human
gcccugcugccgccucccagc

SEQ ID NO: 2808949 - RNA, 22 nt, Human
gcccugcugagucccaggcuga

SEQ ID NO: 2808950 - RNA, 21 nt, Human
gcccugcugagucccaggcug

SEQ ID NO: 2808951 - RNA, 23 nt, Human
gcccugcugagucccaggcugag

SEQ ID NO: 2808952 - RNA, 21 nt, Human
gcccuguucugggugcagcug

SEQ ID NO: 2808953 - RNA, 14 nt, Human
gcccuguugugcca

SEQ ID NO: 2808954 - RNA, 16 nt, Human
gcccuguugugccaca

SEQ ID NO: 2808955 - RNA, 17 nt, Human
gcccuguugugccacag

SEQ ID NO: 2808956 - RNA, 20 nt, Human
gcccuguugugccacagagu

SEQ ID NO: 2808957 - RNA, 22 nt, Human
gcccuguucucuaccaagcuau

SEQ ID NO: 2808958 - RNA, 16 nt, Human
gcccugcugaguccca

SEQ ID NO: 2808959 - RNA, 18 nt, Human
gccgccugguacucaagc

SEQ ID NO: 2808960 - RNA, 15 nt, Human
gccgccuuaagcuga

SEQ ID NO: 2808961 - RNA, 17 nt, Human
gccgccuuaagcugauc

SEQ ID NO: 2808962 - RNA, 22 nt, Human
gccgccuuccuugaccuuccuc

SEQ ID NO: 2808963 - RNA, 15 nt, Human
gccgcucuccugcca

SEQ ID NO: 2808964 - RNA, 16 nt, Human
gccgcucuccugccac

SEQ ID NO: 2808965 - RNA, 13 nt, Human
gccgccugcacuc

SEQ ID NO: 2808966 - RNA, 19 nt, Human
gccgccucccagccugggg

SEQ ID NO: 2808967 - RNA, 19 nt, Human
gccgccugcacuccucagg

SEQ ID NO: 2808968 - RNA, 18 nt, Human
gccgccugcacuccucag

SEQ ID NO: 2808969 - RNA, 22 nt, Human
gccgccugcacuccucagggca

SEQ ID NO: 2808970 - RNA, 13 nt, Human
gccgccugguacu

SEQ ID NO: 2808971 - RNA, 15 nt, Human
gccgccugguacuca

SEQ ID NO: 2808972 - RNA, 23 nt, Human
gccgcugugagccccugguccug

SEQ ID NO: 2808973 - RNA, 12 nt, Human
gccgcugugagc

SEQ ID NO: 2808974 - RNA, 17 nt, Human
gccgcugugagccccug

SEQ ID NO: 2808975 - RNA, 19 nt, Human
gccggccaauggaaaccuc

SEQ ID NO: 2808976 - RNA, 11 nt, Human
gccggccagcc

SEQ ID NO: 2808977 - RNA, 12 nt, Human
gccggccagcca

SEQ ID NO: 2808978 - RNA, 13 nt, Human
gccggccagccag

SEQ ID NO: 2808979 - RNA, 14 nt, Human
gccggccagccagc

SEQ ID NO: 2808980 - RNA, 15 nt, Human
gccggccagccagcc

SEQ ID NO: 2808981 - RNA, 17 nt, Human
gccggccagccagccac

SEQ ID NO: 2808982 - RNA, 18 nt, Human
gccgccauugccaccagg

SEQ ID NO: 2808983 - RNA, 17 nt, Human
gccgccauugccaccag

SEQ ID NO: 2808984 - RNA, 16 nt, Human
gccgccauugccacca

SEQ ID NO: 2808985 - RNA, 12 nt, Human
gcccugcugccc

SEQ ID NO: 2808986 - RNA, 16 nt, Human
gccgccaucagcccaa

SEQ ID NO: 2808987 - RNA, 21 nt, Human
gccgccauugccaccaggaga

SEQ ID NO: 2808988 - RNA, 13 nt, Human
gccgccucccagc

SEQ ID NO: 2808989 - RNA, 12 nt, Human
gccgccucccag

SEQ ID NO: 2808990 - RNA, 17 nt, Human
gccgccucccagccugg

SEQ ID NO: 2808991 - RNA, 16 nt, Human
gccgccucccagccug

SEQ ID NO: 2808992 - RNA, 15 nt, Human
gccgccucccagccu

SEQ ID NO: 2808993 - RNA, 14 nt, Human
gccgccucccagcc

SEQ ID NO: 2808994 - RNA, 17 nt, Human
gccugccuguucccauu

SEQ ID NO: 2808995 - RNA, 12 nt, Human
gccugccuggag

SEQ ID NO: 2808996 - RNA, 13 nt, Human
gccugccuggagc

SEQ ID NO: 2808997 - RNA, 14 nt, Human
gccugccuggagcg

SEQ ID NO: 2808998 - RNA, 14 nt, Human
gccugccuggcccc

SEQ ID NO: 2808999 - RNA, 15 nt, Human
gccugccuggccccu

SEQ ID NO: 2809000 - RNA, 16 nt, Human
gccugccuggccccuc

SEQ ID NO: 2809001 - RNA, 16 nt, Human
gccugccuugaagcca

SEQ ID NO: 2809002 - RNA, 23 nt, Human
gccugccuugaagccacugaagc

SEQ ID NO: 2809003 - RNA, 15 nt, Human
gccugggaggcacag

SEQ ID NO: 2809004 - RNA, 13 nt, Human
gccuggccggcca

SEQ ID NO: 2809005 - RNA, 14 nt, Human
gccuggccggccag

SEQ ID NO: 2809006 - RNA, 15 nt, Human
gccuggccggccagc

SEQ ID NO: 2809007 - RNA, 16 nt, Human
gccuggccggccagcc

SEQ ID NO: 2809008 - RNA, 17 nt, Human
gccuggccggccagcca

SEQ ID NO: 2809009 - RNA, 18 nt, Human
gccuggccggccagccag

SEQ ID NO: 2809010 - RNA, 20 nt, Human
gccuggccggccagccagcc

SEQ ID NO: 2809011 - RNA, 22 nt, Human
gccuggccggccagccagccac

SEQ ID NO: 2809012 - RNA, 23 nt, Human
gccuggccggccagccagccacu

SEQ ID NO: 2809013 - RNA, 12 nt, Human
gccuggccucca

SEQ ID NO: 2809014 - RNA, 13 nt, Human
gccuggccuccag

SEQ ID NO: 2809015 - RNA, 14 nt, Human
gccuggccuccagg

SEQ ID NO: 2809016 - RNA, 15 nt, Human
gccuggccuccaggc

SEQ ID NO: 2809017 - RNA, 16 nt, Human
gccuggccuccaggcc

SEQ ID NO: 2809018 - RNA, 17 nt, Human
gccuggccuccaggccc

SEQ ID NO: 2809019 - RNA, 18 nt, Human
gccuggccuccaggcccg

SEQ ID NO: 2809020 - RNA, 12 nt, Human
gccuggcccugc

SEQ ID NO: 2809021 - RNA, 15 nt, Human
gccuggcccugcccu

SEQ ID NO: 2809022 - RNA, 16 nt, Human
gccuggcccugcccug

SEQ ID NO: 2809023 - RNA, 17 nt, Human
gccuggcccugcccuga

SEQ ID NO: 2809024 - RNA, 19 nt, Human
gccuggcccugcccugagg

SEQ ID NO: 2809025 - RNA, 13 nt, Human
gccuggcuucugg

SEQ ID NO: 2809026 - RNA, 23 nt, Human
gccuggcuucuggagcccuuggg

SEQ ID NO: 2809027 - RNA, 20 nt, Human
gccuggcuucuuucucucag

SEQ ID NO: 2809028 - RNA, 22 nt, Human
gccuggcuucuggagcccuugg

SEQ ID NO: 2809029 - RNA, 18 nt, Human
gccuggcuucuggagccc

SEQ ID NO: 2809030 - RNA, 17 nt, Human
gccuggcuucuggagcc

SEQ ID NO: 2809031 - RNA, 16 nt, Human
gccuggcuucuggagc

SEQ ID NO: 2809032 - RNA, 15 nt, Human
gccuggcuucuggag

SEQ ID NO: 2809033 - RNA, 14 nt, Human
gccuggcuucugga

SEQ ID NO: 2809034 - RNA, 14 nt, Human
gccuaccugcucuc

SEQ ID NO: 2809035 - RNA, 13 nt, Human
gccuaccugcucu

SEQ ID NO: 2809036 - RNA, 19 nt, Human
gccuacucgcuugcuagaa

SEQ ID NO: 2809037 - RNA, 12 nt, Human
gccuccucaucc

SEQ ID NO: 2809038 - RNA, 15 nt, Human
gccuccucaucccgu

SEQ ID NO: 2809039 - RNA, 15 nt, Human
gccuccucguuccuu

SEQ ID NO: 2809040 - RNA, 19 nt, Human
gccuccucguuccuuucuc

SEQ ID NO: 2809041 - RNA, 14 nt, Human
gccuccugccugcc

SEQ ID NO: 2809042 - RNA, 17 nt, Human
gccuccucaucccgugu

SEQ ID NO: 2809043 - RNA, 22 nt, Human
gccuccucaucccguguucucc

SEQ ID NO: 2809044 - RNA, 11 nt, Human
gccucugcugc

SEQ ID NO: 2809045 - RNA, 15 nt, Human
gccucugcugccaug

SEQ ID NO: 2809046 - RNA, 12 nt, Human
gccucuggcuag

SEQ ID NO: 2809047 - RNA, 17 nt, Human
gccuccugccugccccu

SEQ ID NO: 2809048 - RNA, 23 nt, Human
gccuccugccugccccucucccg

SEQ ID NO: 2809049 - RNA, 14 nt, Human
gccuccuggguuca

SEQ ID NO: 2809050 - RNA, 16 nt, Human
gccuccuguguacugu

SEQ ID NO: 2809051 - RNA, 18 nt, Human
gccuccuguguacugugu

SEQ ID NO: 2809052 - RNA, 19 nt, Human
gccuccuguguacuguguc

SEQ ID NO: 2809053 - RNA, 12 nt, Human
gccuccuguggg

SEQ ID NO: 2809054 - RNA, 13 nt, Human
gccuccugugggg

SEQ ID NO: 2809055 - RNA, 14 nt, Human
gccuccugugggga

SEQ ID NO: 2809056 - RNA, 18 nt, Human
gccuccuguggggaaagg

SEQ ID NO: 2809057 - RNA, 21 nt, Human
gccucuggcuagaggccagcc

SEQ ID NO: 2809058 - RNA, 19 nt, Human
gccucuggcuagaggccag

SEQ ID NO: 2809059 - RNA, 18 nt, Human
gccucuggcuagaggcca

SEQ ID NO: 2809060 - RNA, 13 nt, Human
gccucuggcuaga

SEQ ID NO: 2809061 - RNA, 12 nt, Human
gccucugugccu

SEQ ID NO: 2809062 - RNA, 23 nt, Human
gccucuggcuagaggccagcccc

SEQ ID NO: 2809063 - RNA, 22 nt, Human
gccucuggcuagaggccagccc

SEQ ID NO: 2809064 - RNA, 21 nt, Human
gccucugucuagcaugccaac

SEQ ID NO: 2809065 - RNA, 22 nt, Human
gccucugucuagcaugccaaca

SEQ ID NO: 2809066 - RNA, 18 nt, Human
gccucuuaaagcugccug

SEQ ID NO: 2809067 - RNA, 18 nt, Human
gccucuguguccuucccu

SEQ ID NO: 2809068 - RNA, 21 nt, Human
gccucuguguccuucccugca

SEQ ID NO: 2809069 - RNA, 14 nt, Human
gccucuguguccuu

SEQ ID NO: 2809070 - RNA, 15 nt, Human
gccucuguguccuuc

SEQ ID NO: 2809071 - RNA, 22 nt, Human
gccucuuccucccucauuccac

SEQ ID NO: 2809072 - RNA, 12 nt, Human
gccucuuccucc

SEQ ID NO: 2809073 - RNA, 19 nt, Human
gccugcccaggccccugcc

SEQ ID NO: 2809074 - RNA, 21 nt, Human
gccugccgguaaacacgccug

SEQ ID NO: 2809075 - RNA, 16 nt, Human
gccugccgguaaacac

SEQ ID NO: 2809076 - RNA, 18 nt, Human
gccugcccaggccccugc

SEQ ID NO: 2809077 - RNA, 17 nt, Human
gccugcccaggccccug

SEQ ID NO: 2809078 - RNA, 14 nt, Human
ccaaaagcugcuca

SEQ ID NO: 2809079 - RNA, 15 nt, Human
ccaaaagcaguaaau

SEQ ID NO: 2809080 - RNA, 20 nt, Human
ccaaaagccaauggcugcag

SEQ ID NO: 2809081 - RNA, 15 nt, Human
ccaaaagcuagacag

SEQ ID NO: 2809082 - RNA, 17 nt, Human
cauuuuuuuuuuaaauc

SEQ ID NO: 2809083 - RNA, 21 nt, Human
cauuuuuuuuuuuguuucuga

SEQ ID NO: 2809084 - RNA, 18 nt, Human
ccaaaaguggaagugaca

SEQ ID NO: 2809085 - RNA, 12 nt, Human
ccaaaaggaaaa

SEQ ID NO: 2809086 - RNA, 13 nt, Human
ccaaaaggaaaaa

SEQ ID NO: 2809087 - RNA, 15 nt, Human
ccaaaaggaaaaagc

SEQ ID NO: 2809088 - RNA, 16 nt, Human
ccaaaaggaaaaagcu

SEQ ID NO: 2809089 - RNA, 17 nt, Human
ccaaaaggaaaaagcuc

SEQ ID NO: 2809090 - RNA, 18 nt, Human
ccaaaaggaaaaagcucc

SEQ ID NO: 2809091 - RNA, 13 nt, Human
cauuuguuaaaau

SEQ ID NO: 2809092 - RNA, 22 nt, Human
cauuuguuaaaauuaucaauau

SEQ ID NO: 2809093 - RNA, 14 nt, Human
cauuuguucacuga

SEQ ID NO: 2809094 - RNA, 22 nt, Human
cauuuguucacugaaggugauu

SEQ ID NO: 2809095 - RNA, 18 nt, Human
cauuuguuaaaauuauca

SEQ ID NO: 2809096 - RNA, 15 nt, Human
cauuuguuaaaauua

SEQ ID NO: 2809097 - RNA, 20 nt, Human
cauuuguacagaauuuugga

SEQ ID NO: 2809098 - RNA, 22 nt, Human
cauuuguacagaauuuuggaag

SEQ ID NO: 2809099 - RNA, 18 nt, Human
cauuuguugugaugucuu

SEQ ID NO: 2809100 - RNA, 20 nt, Human
cauuuguugugaugucuuuu

SEQ ID NO: 2809101 - RNA, 16 nt, Human
cauuuguuggaaugaa

SEQ ID NO: 2809102 - RNA, 23 nt, Human
cauuuaucuacccaagggcagaa

SEQ ID NO: 2809103 - RNA, 12 nt, Human
cauuuaucauuc

SEQ ID NO: 2809104 - RNA, 15 nt, Human
cauuuaucauucuug

SEQ ID NO: 2809105 - RNA, 18 nt, Human
cauuuauccacaggaaag

SEQ ID NO: 2809106 - RNA, 22 nt, Human
cauuuauccacaggaaaguguu

SEQ ID NO: 2809107 - RNA, 16 nt, Human
cauuuaugaagcaagc

SEQ ID NO: 2809108 - RNA, 19 nt, Human
cauuuggcagagcuucuuc

SEQ ID NO: 2809109 - RNA, 15 nt, Human
cauuuaugauuuaau

SEQ ID NO: 2809110 - RNA, 19 nt, Human
cauuuaugaguaacuauua

SEQ ID NO: 2809111 - RNA, 23 nt, Human
cauuuaugaguaacuauuauuau

SEQ ID NO: 2809112 - RNA, 18 nt, Human
cauuuguaaaugcugugu

SEQ ID NO: 2809113 - RNA, 19 nt, Human
cauuuguaauuaaauuaug

SEQ ID NO: 2809114 - RNA, 12 nt, Human
cauuuguaauuu

SEQ ID NO: 2809115 - RNA, 13 nt, Human
cauugguguuguc

SEQ ID NO: 2809116 - RNA, 14 nt, Human
cauugguuaauuuu

SEQ ID NO: 2809117 - RNA, 15 nt, Human
cauugguuaauuuuu

SEQ ID NO: 2809118 - RNA, 13 nt, Human
cauugguccaaga

SEQ ID NO: 2809119 - RNA, 14 nt, Human
cauugguccaagau

SEQ ID NO: 2809120 - RNA, 21 nt, Human
cauugggguuccgcacuuucc

SEQ ID NO: 2809121 - RNA, 23 nt, Human
cauuggguuguagccaaagguuc

SEQ ID NO: 2809122 - RNA, 17 nt, Human
cauugggucuauuccag

SEQ ID NO: 2809123 - RNA, 18 nt, Human
cauugggucuauuccagc

SEQ ID NO: 2809124 - RNA, 19 nt, Human
cauugggucuauuccagcu

SEQ ID NO: 2809125 - RNA, 20 nt, Human
cauugggucuauuccagcuc

SEQ ID NO: 2809126 - RNA, 21 nt, Human
cauugggucuauuccagcuca

SEQ ID NO: 2809127 - RNA, 22 nt, Human
cauugggucuauuccagcucau

SEQ ID NO: 2809128 - RNA, 13 nt, Human
cauuuagucucuu

SEQ ID NO: 2809129 - RNA, 15 nt, Human
cauuuagucucuuua

SEQ ID NO: 2809130 - RNA, 17 nt, Human
cauuuagucucuuuauu

SEQ ID NO: 2809131 - RNA, 21 nt, Human
cauuuagucucuuuauuccua

SEQ ID NO: 2809132 - RNA, 22 nt, Human
cauuuagucucuuuauuccuag

SEQ ID NO: 2809133 - RNA, 23 nt, Human
cauuuagucucuuuauuccuagu

SEQ ID NO: 2809134 - RNA, 19 nt, Human
cauuuagugaguuauuccu

SEQ ID NO: 2809135 - RNA, 15 nt, Human
cauuuauauuuuuau

SEQ ID NO: 2809136 - RNA, 17 nt, Human
cauuggauuauccugag

SEQ ID NO: 2809137 - RNA, 16 nt, Human
cauuggauuauccuga

SEQ ID NO: 2809138 - RNA, 14 nt, Human
cauuggauacagca

SEQ ID NO: 2809139 - RNA, 17 nt, Human
cauuggauacagcagua

SEQ ID NO: 2809140 - RNA, 18 nt, Human
cauuggacccacaugagg

SEQ ID NO: 2809141 - RNA, 15 nt, Human
ccaacuccagcaacu

SEQ ID NO: 2809142 - RNA, 14 nt, Human
ccaacuccagcaac

SEQ ID NO: 2809143 - RNA, 13 nt, Human
ccaacuccagcaa

SEQ ID NO: 2809144 - RNA, 14 nt, Human
ccaacucaccugag

SEQ ID NO: 2809145 - RNA, 15 nt, Human
ccaagcucugcuccu

SEQ ID NO: 2809146 - RNA, 14 nt, Human
ccaagcucugcucc

SEQ ID NO: 2809147 - RNA, 16 nt, Human
ccaagcucugcuccuc

SEQ ID NO: 2809148 - RNA, 21 nt, Human
ccaacuccagcaacuucuucu

SEQ ID NO: 2809149 - RNA, 12 nt, Human
ccaacuccagga

SEQ ID NO: 2809150 - RNA, 14 nt, Human
ccaaggaaaacugc

SEQ ID NO: 2809151 - RNA, 16 nt, Human
ccaaggaaaacugcau

SEQ ID NO: 2809152 - RNA, 16 nt, Human
ccaaaucauaguggcu

SEQ ID NO: 2809153 - RNA, 20 nt, Human
ccaaaucaauaagaagguag

SEQ ID NO: 2809154 - RNA, 23 nt, Human
ccaaagugccacucauuccugua

SEQ ID NO: 2809155 - RNA, 15 nt, Human
ccaaagugcugagau

SEQ ID NO: 2809156 - RNA, 22 nt, Human
ccaauuauaugagacguuuuug

SEQ ID NO: 2809157 - RNA, 13 nt, Human
ccaauucaauaca

SEQ ID NO: 2809158 - RNA, 15 nt, Human
ccaauuauugauaua

SEQ ID NO: 2809159 - RNA, 18 nt, Human
ccaauuauugauauauau

SEQ ID NO: 2809160 - RNA, 20 nt, Human
ccaauuauugauauauauua

SEQ ID NO: 2809161 - RNA, 21 nt, Human
ccaauuauugauauauauuau

SEQ ID NO: 2809162 - RNA, 22 nt, Human
ccaauuauugauauauauuaua

SEQ ID NO: 2809163 - RNA, 18 nt, Human
ccaauuauuguuacacau

SEQ ID NO: 2809164 - RNA, 22 nt, Human
ccaauuauuugacuuuaauuua

SEQ ID NO: 2809165 - RNA, 21 nt, Human
ccaauggagacugucucaaga

SEQ ID NO: 2809166 - RNA, 24 nt, Human
ccaauuccucauccucagaugcuc

SEQ ID NO: 2809167 - RNA, 17 nt, Human
ccaauucucgagcuugg

SEQ ID NO: 2809168 - RNA, 18 nt, Human
ccaauucucgagcuuggg

SEQ ID NO: 2809169 - RNA, 20 nt, Human
ccaaggagggugagugcaag

SEQ ID NO: 2809170 - RNA, 23 nt, Human
ccaaggaggugaggagcagagca

SEQ ID NO: 2809171 - RNA, 12 nt, Human
ccaaggaggauu

SEQ ID NO: 2809172 - RNA, 13 nt, Human
ccaaugccaaaaa

SEQ ID NO: 2809173 - RNA, 21 nt, Human
ccaaugccacauacuugcagc

SEQ ID NO: 2809174 - RNA, 14 nt, Human
ccaaugcugauguc

SEQ ID NO: 2809175 - RNA, 18 nt, Human
ccaaugcuuuuaucaaac

SEQ ID NO: 2809176 - RNA, 12 nt, Human
ccaauggaaacc

SEQ ID NO: 2809177 - RNA, 14 nt, Human
ccaauggaaaccuc

SEQ ID NO: 2809178 - RNA, 15 nt, Human
ccaauggaaaccuca

SEQ ID NO: 2809179 - RNA, 17 nt, Human
ccaaugcugauguccuc

SEQ ID NO: 2809180 - RNA, 12 nt, Human
ccaaggagcaca

SEQ ID NO: 2809181 - RNA, 13 nt, Human
ccaaggagcacag

SEQ ID NO: 2809182 - RNA, 14 nt, Human
ccaaggagcacagg

SEQ ID NO: 2809183 - RNA, 16 nt, Human
ccaaggagcacagguc

SEQ ID NO: 2809184 - RNA, 17 nt, Human
ccaaggagcacaggucc

SEQ ID NO: 2809185 - RNA, 18 nt, Human
ccaaggagcacagguccc

SEQ ID NO: 2809186 - RNA, 19 nt, Human
ccaaggagcacagguccca

SEQ ID NO: 2809187 - RNA, 20 nt, Human
ccaaggagcacaggucccac

SEQ ID NO: 2809188 - RNA, 14 nt, Human
ccaaggagacacaa

SEQ ID NO: 2809189 - RNA, 15 nt, Human
ccaaggagaacaaau

SEQ ID NO: 2809190 - RNA, 23 nt, Human
ccaaggacugagggacucugaag

SEQ ID NO: 2809191 - RNA, 20 nt, Human
ccaaggaccuccucuucccc

SEQ ID NO: 2809192 - RNA, 22 nt, Human
ccaaggaccuccucuucccccu

SEQ ID NO: 2809193 - RNA, 15 nt, Human
ccaaggacugaggga

SEQ ID NO: 2809194 - RNA, 18 nt, Human
ccaaggaaaccacagcug

SEQ ID NO: 2809195 - RNA, 19 nt, Human
ccaaggaaaccacagcugc

SEQ ID NO: 2809196 - RNA, 20 nt, Human
ccaaggaaaccacagcugcu

SEQ ID NO: 2809197 - RNA, 21 nt, Human
ccaaggaaaccacagcugcug

SEQ ID NO: 2809198 - RNA, 22 nt, Human
ccaaggaaaccacagcugcugg

SEQ ID NO: 2809199 - RNA, 23 nt, Human
ccaaggaaaccacagcugcugga

SEQ ID NO: 2809200 - RNA, 17 nt, Human
ccaaggaaacgcuaccu

SEQ ID NO: 2809201 - RNA, 22 nt, Human
ccaaggaaacgcuaccucucug

SEQ ID NO: 2809202 - RNA, 15 nt, Human
ccaaggaaauauauu

SEQ ID NO: 2809203 - RNA, 13 nt, Human
ccaaggaacaaaa

SEQ ID NO: 2809204 - RNA, 14 nt, Human
ccaaagugcuggga

SEQ ID NO: 2809205 - RNA, 17 nt, Human
ccaaagugaccuaccca

SEQ ID NO: 2809206 - RNA, 18 nt, Human
ccaaagucucuaauucua

SEQ ID NO: 2809207 - RNA, 15 nt, Human
ccaaagucucuaauu

SEQ ID NO: 2809208 - RNA, 16 nt, Human
ccaaagucucuaauuc

SEQ ID NO: 2809209 - RNA, 14 nt, Human
ccaaagucucccuu

SEQ ID NO: 2809210 - RNA, 16 nt, Human
ccaaagucucccuucu

SEQ ID NO: 2809211 - RNA, 14 nt, Human
ccaaagucucuaau

SEQ ID NO: 2809212 - RNA, 19 nt, Human
cauguuggccaggcugguc

SEQ ID NO: 2809213 - RNA, 20 nt, Human
cauguuggccaggcugcucu

SEQ ID NO: 2809214 - RNA, 13 nt, Human
cauuaucccugaa

SEQ ID NO: 2809215 - RNA, 17 nt, Human
cauguuggccaggcugg

SEQ ID NO: 2809216 - RNA, 18 nt, Human
cauguuggccaggcuggu

SEQ ID NO: 2809217 - RNA, 14 nt, Human
cauguucugcuuuc

SEQ ID NO: 2809218 - RNA, 13 nt, Human
cauguuaauuuca

SEQ ID NO: 2809219 - RNA, 12 nt, Human
cauguuaccauc

SEQ ID NO: 2809220 - RNA, 16 nt, Human
cauguucuugcaguca

SEQ ID NO: 2809221 - RNA, 20 nt, Human
cauguugaccaugucuauga

SEQ ID NO: 2809222 - RNA, 21 nt, Human
cauguccaaagaggcugcccc

SEQ ID NO: 2809223 - RNA, 20 nt, Human
cauguucugcccccagccca

SEQ ID NO: 2809224 - RNA, 21 nt, Human
cauguucugcccccagcccaa

SEQ ID NO: 2809225 - RNA, 20 nt, Human
cauguccaaagaggcugccc

SEQ ID NO: 2809226 - RNA, 19 nt, Human
cauguccaaagaggcugcc

SEQ ID NO: 2809227 - RNA, 18 nt, Human
cauguccaaagaggcugc

SEQ ID NO: 2809228 - RNA, 17 nt, Human
cauguccaaagaggcug

SEQ ID NO: 2809229 - RNA, 16 nt, Human
cauguccaaagaggcu

SEQ ID NO: 2809230 - RNA, 15 nt, Human
cauguccaaagaggc

SEQ ID NO: 2809231 - RNA, 14 nt, Human
cauguccaaagagg

SEQ ID NO: 2809232 - RNA, 13 nt, Human
cauguccaaagag

SEQ ID NO: 2809233 - RNA, 12 nt, Human
cauguccaaaga

SEQ ID NO: 2809234 - RNA, 15 nt, Human
cauguauuauuucau

SEQ ID NO: 2809235 - RNA, 17 nt, Human
cauguaugucuuggaca

SEQ ID NO: 2809236 - RNA, 18 nt, Human
cauguaugucuuggacac

SEQ ID NO: 2809237 - RNA, 21 nt, Human
cauguaugucuuggacacugu

SEQ ID NO: 2809238 - RNA, 22 nt, Human
cauguaugucuuggacacugua

SEQ ID NO: 2809239 - RNA, 22 nt, Human
cauguauggaaucccacuguau

SEQ ID NO: 2809240 - RNA, 13 nt, Human
cauguaugucuug

SEQ ID NO: 2809241 - RNA, 19 nt, Human
cauuauuaguacugcucuu

SEQ ID NO: 2809242 - RNA, 22 nt, Human
cauuauuauauaaaucaugaug

SEQ ID NO: 2809243 - RNA, 14 nt, Human
cauuaucccugaau

SEQ ID NO: 2809244 - RNA, 15 nt, Human
cauucuccuuguugu

SEQ ID NO: 2809245 - RNA, 19 nt, Human
cauucucgugagucauuua

SEQ ID NO: 2809246 - RNA, 23 nt, Human
cauucucgugagucauuuaaaug

SEQ ID NO: 2809247 - RNA, 14 nt, Human
cauggccgugaacu

SEQ ID NO: 2809248 - RNA, 16 nt, Human
cauggccuaugcacau

SEQ ID NO: 2809249 - RNA, 17 nt, Human
cauggccuaugcacaua

SEQ ID NO: 2809250 - RNA, 19 nt, Human
cauggccuaugcacauaug

SEQ ID NO: 2809251 - RNA, 18 nt, Human
cauggcuuucagaaaacg

SEQ ID NO: 2809252 - RNA, 22 nt, Human
cauggcuuucagaaaacgggaa

SEQ ID NO: 2809253 - RNA, 13 nt, Human
caugggaaaggag

SEQ ID NO: 2809254 - RNA, 21 nt, Human
caugggaaaggaggcaugccu

SEQ ID NO: 2809255 - RNA, 22 nt, Human
caugggaaaggaggcaugccuc

SEQ ID NO: 2809256 - RNA, 20 nt, Human
caugggaaaugucaacaagu

SEQ ID NO: 2809257 - RNA, 12 nt, Human
caucuguacaaa

SEQ ID NO: 2809258 - RNA, 15 nt, Human
cauggccagguggcc

SEQ ID NO: 2809259 - RNA, 14 nt, Human
cauggccagguggc

SEQ ID NO: 2809260 - RNA, 12 nt, Human
cauggcccuggg

SEQ ID NO: 2809261 - RNA, 23 nt, Human
cauggcccucccaguaccuccug

SEQ ID NO: 2809262 - RNA, 14 nt, Human
cauggcccucccag

SEQ ID NO: 2809263 - RNA, 22 nt, Human
cauggcccucccaguaccuccu

SEQ ID NO: 2809264 - RNA, 14 nt, Human
cauggcccuggggu

SEQ ID NO: 2809265 - RNA, 14 nt, Human
cauggcccugugcu

SEQ ID NO: 2809266 - RNA, 12 nt, Human
cauggccccucu

SEQ ID NO: 2809267 - RNA, 13 nt, Human
cauggccccucug

SEQ ID NO: 2809268 - RNA, 16 nt, Human
cauggccccucugacc

SEQ ID NO: 2809269 - RNA, 15 nt, Human
cauggccccugugag

SEQ ID NO: 2809270 - RNA, 16 nt, Human
cauggccccugugagu

SEQ ID NO: 2809271 - RNA, 17 nt, Human
cauggccccucugaccu

SEQ ID NO: 2809272 - RNA, 18 nt, Human
cauggccccucugaccug

SEQ ID NO: 2809273 - RNA, 16 nt, Human
caugcaaaggcuggga

SEQ ID NO: 2809274 - RNA, 14 nt, Human
caugcaaaggcugg

SEQ ID NO: 2809275 - RNA, 15 nt, Human
caugcaaaggcuggg

SEQ ID NO: 2809276 - RNA, 20 nt, Human
caugcaagaacucaucacug

SEQ ID NO: 2809277 - RNA, 22 nt, Human
caugcaagaacucaucacugug

SEQ ID NO: 2809278 - RNA, 11 nt, Human
caugaugcagu

SEQ ID NO: 2809279 - RNA, 12 nt, Human
caugaugcaguc

SEQ ID NO: 2809280 - RNA, 14 nt, Human
caugaugcagucuc

SEQ ID NO: 2809281 - RNA, 15 nt, Human
caugaugcagucucc

SEQ ID NO: 2809282 - RNA, 23 nt, Human
caugaugcagucuccucuuuaaa

SEQ ID NO: 2809283 - RNA, 14 nt, Human
caugaugcuagcca

SEQ ID NO: 2809284 - RNA, 15 nt, Human
caugaugcugggauu

SEQ ID NO: 2809285 - RNA, 19 nt, Human
caugauggagcgcaccugc

SEQ ID NO: 2809286 - RNA, 18 nt, Human
caugauggagcgcaccug

SEQ ID NO: 2809287 - RNA, 16 nt, Human
caugaugcugggauuu

SEQ ID NO: 2809288 - RNA, 16 nt, Human
caugaugcuuuuacug

SEQ ID NO: 2809289 - RNA, 17 nt, Human
caugaugcuuuuacuga

SEQ ID NO: 2809290 - RNA, 18 nt, Human
caugaugcuuuuacugaa

SEQ ID NO: 2809291 - RNA, 14 nt, Human
caugauggaauuuc

SEQ ID NO: 2809292 - RNA, 13 nt, Human
caugaauuuuaca

SEQ ID NO: 2809293 - RNA, 15 nt, Human
caugaauuuuacaug

SEQ ID NO: 2809294 - RNA, 22 nt, Human
caugaaguuuccuuggcuggug

SEQ ID NO: 2809295 - RNA, 23 nt, Human
caugaaguuuccuuggcuggugc

SEQ ID NO: 2809296 - RNA, 20 nt, Human
caucugucaccaauugguua

SEQ ID NO: 2809297 - RNA, 17 nt, Human
caugaaucuuuguuuca

SEQ ID NO: 2809298 - RNA, 14 nt, Human
caugaaucugucuc

SEQ ID NO: 2809299 - RNA, 22 nt, Human
caugaaugguauggaacucucu

SEQ ID NO: 2809300 - RNA, 21 nt, Human
caugaaucccacccacaugug

SEQ ID NO: 2809301 - RNA, 15 nt, Human
caugaaucugcaaug

SEQ ID NO: 2809302 - RNA, 12 nt, Human
cauccugcaggc

SEQ ID NO: 2809303 - RNA, 13 nt, Human
cauccugccagcc

SEQ ID NO: 2809304 - RNA, 14 nt, Human
cauccugccagccc

SEQ ID NO: 2809305 - RNA, 15 nt, Human
cauccugccagcccc

SEQ ID NO: 2809306 - RNA, 17 nt, Human
cauccugccagccccac

SEQ ID NO: 2809307 - RNA, 19 nt, Human
cauccugccagccccacac

SEQ ID NO: 2809308 - RNA, 21 nt, Human
cauccugccagccccacacag

SEQ ID NO: 2809309 - RNA, 22 nt, Human
cauccugccagccccacacagc

SEQ ID NO: 2809310 - RNA, 22 nt, Human
cauccugacucugcccccugcu

SEQ ID NO: 2809311 - RNA, 12 nt, Human
cauccugagccc

SEQ ID NO: 2809312 - RNA, 13 nt, Human
cauccugagcccc

SEQ ID NO: 2809313 - RNA, 14 nt, Human
cauccugagccccg

SEQ ID NO: 2809314 - RNA, 16 nt, Human
cauccugagccccgcc

SEQ ID NO: 2809315 - RNA, 19 nt, Human
cauccugagccccgcccuc

SEQ ID NO: 2809316 - RNA, 20 nt, Human
cauccugagccccgcccucu

SEQ ID NO: 2809317 - RNA, 21 nt, Human
cauccugagccccgcccucuu

SEQ ID NO: 2809318 - RNA, 22 nt, Human
cauccugagccccgcccucuuc

SEQ ID NO: 2809319 - RNA, 17 nt, Human
cauccugacucugcccc

SEQ ID NO: 2809320 - RNA, 19 nt, Human
cauccugacucugcccccu

SEQ ID NO: 2809321 - RNA, 20 nt, Human
cauccugacucugcccccug

SEQ ID NO: 2809322 - RNA, 22 nt, Human
caucguuuucuucacuguccuc

SEQ ID NO: 2809323 - RNA, 21 nt, Human
caucuaaacugcccccucugc

SEQ ID NO: 2809324 - RNA, 15 nt, Human
caucuaaacugcccc

SEQ ID NO: 2809325 - RNA, 17 nt, Human
caucuggcugccuuugc

SEQ ID NO: 2809326 - RNA, 17 nt, Human
caucuggcuuauuuuaa

SEQ ID NO: 2809327 - RNA, 18 nt, Human
caucuggcuuauuuuaau

SEQ ID NO: 2809328 - RNA, 19 nt, Human
caucuggcuuauuuuaaug

SEQ ID NO: 2809329 - RNA, 22 nt, Human
caucuggcuuauuuuaauguga

SEQ ID NO: 2809330 - RNA, 15 nt, Human
caucuggguccuugc

SEQ ID NO: 2809331 - RNA, 14 nt, Human
caucuguagucagc

SEQ ID NO: 2809332 - RNA, 17 nt, Human
caucuguagucagccga

SEQ ID NO: 2809333 - RNA, 15 nt, Human
caucuguacuugguc

SEQ ID NO: 2809334 - RNA, 17 nt, Human
caucuguacuuggucca

SEQ ID NO: 2809335 - RNA, 21 nt, Human
caucuguacuugguccaacug

SEQ ID NO: 2809336 - RNA, 14 nt, Human
caucugucaacagg

SEQ ID NO: 2809337 - RNA, 15 nt, Human
caucuggccuggccu

SEQ ID NO: 2809338 - RNA, 16 nt, Human
caucuggccuggccug

SEQ ID NO: 2809339 - RNA, 17 nt, Human
caucuggccuggccugg

SEQ ID NO: 2809340 - RNA, 18 nt, Human
caucuggccuggccuggc

SEQ ID NO: 2809341 - RNA, 20 nt, Human
caucuggccuggccuggccc

SEQ ID NO: 2809342 - RNA, 21 nt, Human
caucuggccuggccuggcccu

SEQ ID NO: 2809343 - RNA, 23 nt, Human
caucuggccuggccuggcccugc

SEQ ID NO: 2809344 - RNA, 23 nt, Human
caucuggauaggagccugcuggu

SEQ ID NO: 2809345 - RNA, 12 nt, Human
caucuggccugg

SEQ ID NO: 2809346 - RNA, 23 nt, Human
caucuggccguugauguuggcug

SEQ ID NO: 2809347 - RNA, 11 nt, Human
caucuggccug

SEQ ID NO: 2809348 - RNA, 13 nt, Human
caucuggccuggc

SEQ ID NO: 2809349 - RNA, 14 nt, Human
caucuggccuggcc

SEQ ID NO: 2809350 - RNA, 16 nt, Human
caucuggauaggagcc

SEQ ID NO: 2809351 - RNA, 18 nt, Human
caucuggauaggagccug

SEQ ID NO: 2809352 - RNA, 20 nt, Human
caucuggauaggagccugcu

SEQ ID NO: 2809353 - RNA, 21 nt, Human
caucuggauaggagccugcug

SEQ ID NO: 2809354 - RNA, 22 nt, Human
caucuggauaggagccugcugg

SEQ ID NO: 2809355 - RNA, 14 nt, Human
caucccacacccug

SEQ ID NO: 2809356 - RNA, 17 nt, Human
caucccaaccagugcca

SEQ ID NO: 2809357 - RNA, 18 nt, Human
caucccaaccagugccaa

SEQ ID NO: 2809358 - RNA, 20 nt, Human
caucccaaccagugccaagg

SEQ ID NO: 2809359 - RNA, 22 nt, Human
caucccaaccagugccaaggac

SEQ ID NO: 2809360 - RNA, 16 nt, Human
cauccugacucugccc

SEQ ID NO: 2809361 - RNA, 12 nt, Human
cauccugaacag

SEQ ID NO: 2809362 - RNA, 14 nt, Human
cauccugaacagca

SEQ ID NO: 2809363 - RNA, 15 nt, Human
cauccugaacagcau

SEQ ID NO: 2809364 - RNA, 16 nt, Human
cauccugaacagcaug

SEQ ID NO: 2809365 - RNA, 13 nt, Human
caucccagcccaa

SEQ ID NO: 2809366 - RNA, 19 nt, Human
caucccagcccaauccagg

SEQ ID NO: 2809367 - RNA, 21 nt, Human
caucccagcccaauccaggua

SEQ ID NO: 2809368 - RNA, 11 nt, Human
cauccucuuuc

SEQ ID NO: 2809369 - RNA, 13 nt, Human
cauccucuuucuc

SEQ ID NO: 2809370 - RNA, 20 nt, Human
cauccucuuucucuuuucua

SEQ ID NO: 2809371 - RNA, 21 nt, Human
cauccucuuucucuuuucuag

SEQ ID NO: 2809372 - RNA, 15 nt, Human
caucccagcaccugc

SEQ ID NO: 2809373 - RNA, 20 nt, Human
caucccagcaccugccuccu

SEQ ID NO: 2809374 - RNA, 17 nt, Human
caucccagacagguccc

SEQ ID NO: 2809375 - RNA, 21 nt, Human
caucccagacaggucccuccc

SEQ ID NO: 2809376 - RNA, 23 nt, Human
caucccagacaggucccuccccu

SEQ ID NO: 2809377 - RNA, 12 nt, Human
caucagccagcu

SEQ ID NO: 2809378 - RNA, 14 nt, Human
caucagccagcugc

SEQ ID NO: 2809379 - RNA, 15 nt, Human
caucagccagcugcc

SEQ ID NO: 2809380 - RNA, 17 nt, Human
caucacuuuucagugau

SEQ ID NO: 2809381 - RNA, 15 nt, Human
caucacuuguacaaa

SEQ ID NO: 2809382 - RNA, 15 nt, Human
caucacuuuucagug

SEQ ID NO: 2809383 - RNA, 16 nt, Human
caucacuuuucaguga

SEQ ID NO: 2809384 - RNA, 19 nt, Human
caucacuuguacaaaauaa

SEQ ID NO: 2809385 - RNA, 23 nt, Human
cauagcagagaaugaaagggccc

SEQ ID NO: 2809386 - RNA, 16 nt, Human
cauagguauuucaaaa

SEQ ID NO: 2809387 - RNA, 13 nt, Human
cauauguaaaaua

SEQ ID NO: 2809388 - RNA, 18 nt, Human
cauauguugaauacuuuu

SEQ ID NO: 2809389 - RNA, 17 nt, Human
cauaugugaauauggac

SEQ ID NO: 2809390 - RNA, 14 nt, Human
cauaugugaucugu

SEQ ID NO: 2809391 - RNA, 15 nt, Human
cauaugugaucuguc

SEQ ID NO: 2809392 - RNA, 16 nt, Human
cauaugugaucugucu

SEQ ID NO: 2809393 - RNA, 20 nt, Human
cauaugugaucugucuugua

SEQ ID NO: 2809394 - RNA, 22 nt, Human
cauaugugaucugucuuguaau

SEQ ID NO: 2809395 - RNA, 13 nt, Human
cauauguuaagca

SEQ ID NO: 2809396 - RNA, 18 nt, Human
cauauguuaagcagcuaa

SEQ ID NO: 2809397 - RNA, 17 nt, Human
cauauguugaauacuuu

SEQ ID NO: 2809398 - RNA, 16 nt, Human
cauauguugaauacuu

SEQ ID NO: 2809399 - RNA, 16 nt, Human
cauaugucacuagaau

SEQ ID NO: 2809400 - RNA, 21 nt, Human
cauaugucacuagaauggaua

SEQ ID NO: 2809401 - RNA, 14 nt, Human
cauauguaaaauaa

SEQ ID NO: 2809402 - RNA, 13 nt, Human
cauauguaaacau

SEQ ID NO: 2809403 - RNA, 14 nt, Human
cauauguaaacaua

SEQ ID NO: 2809404 - RNA, 15 nt, Human
cauauguaaacauaa

SEQ ID NO: 2809405 - RNA, 15 nt, Human
cauauguacauaaau

SEQ ID NO: 2809406 - RNA, 16 nt, Human
cauauguacauaaauu

SEQ ID NO: 2809407 - RNA, 19 nt, Human
cauauguacauaaauugca

SEQ ID NO: 2809408 - RNA, 17 nt, Human
cauauguagacuauaua

SEQ ID NO: 2809409 - RNA, 19 nt, Human
cauauguagacuauauaca

SEQ ID NO: 2809410 - RNA, 20 nt, Human
cauauguagacuauauacau

SEQ ID NO: 2809411 - RNA, 21 nt, Human
cauauguagacuauauacaug

SEQ ID NO: 2809412 - RNA, 23 nt, Human
cauauguagacuauauacaugug

SEQ ID NO: 2809413 - RNA, 21 nt, Human
cauacaggauuugaacucaga

SEQ ID NO: 2809414 - RNA, 13 nt, Human
cauacaguuuuau

SEQ ID NO: 2809415 - RNA, 20 nt, Human
cauacaguuuuaugcucuuu

SEQ ID NO: 2809416 - RNA, 21 nt, Human
cauacaguuuuaugcucuuuu

SEQ ID NO: 2809417 - RNA, 22 nt, Human
cauacaguuuuaugcucuuuuu

SEQ ID NO: 2809418 - RNA, 11 nt, Human
cauaauuccua

SEQ ID NO: 2809419 - RNA, 16 nt, Human
cauaauuccuacagca

SEQ ID NO: 2809420 - RNA, 18 nt, Human
cauaauuccuacagcacu

SEQ ID NO: 2809421 - RNA, 19 nt, Human
cauaauuccuacagcacua

SEQ ID NO: 2809422 - RNA, 18 nt, Human
cauaaugcuaauuuaaag

SEQ ID NO: 2809423 - RNA, 20 nt, Human
cauaaugcuaauuuaaagag

SEQ ID NO: 2809424 - RNA, 21 nt, Human
cauaaugcuaauuuaaagaga

SEQ ID NO: 2809425 - RNA, 22 nt, Human
cauaaugcuaauuuaaagagac

SEQ ID NO: 2809426 - RNA, 16 nt, Human
cauaaugcuacugucu

SEQ ID NO: 2809427 - RNA, 18 nt, Human
cauaaugcuuaauuucua

SEQ ID NO: 2809428 - RNA, 19 nt, Human
cauaaugcuuaauuucuaa

SEQ ID NO: 2809429 - RNA, 19 nt, Human
cauaaugggccacugaaau

SEQ ID NO: 2809430 - RNA, 21 nt, Human
cauaaugggccacugaaaucu

SEQ ID NO: 2809431 - RNA, 22 nt, Human
cauaaugggccacugaaaucug

SEQ ID NO: 2809432 - RNA, 23 nt, Human
cauaaugggccacugaaaucugu

SEQ ID NO: 2809433 - RNA, 14 nt, Human
cauaaugcuacugu

SEQ ID NO: 2809434 - RNA, 15 nt, Human
cauaaugcuacuguc

SEQ ID NO: 2809435 - RNA, 11 nt, Human
caguuuuccuu

SEQ ID NO: 2809436 - RNA, 15 nt, Human
caguuuuaugcucuu

SEQ ID NO: 2809437 - RNA, 16 nt, Human
caguuuuaugcucuuu

SEQ ID NO: 2809438 - RNA, 18 nt, Human
caguuuuaugcucuuuuu

SEQ ID NO: 2809439 - RNA, 21 nt, Human
caguuuuaugcucuuuuuuac

SEQ ID NO: 2809440 - RNA, 16 nt, Human
caguuuauguuguaca

SEQ ID NO: 2809441 - RNA, 14 nt, Human
caguuuuaacaaau

SEQ ID NO: 2809442 - RNA, 18 nt, Human
caguuucaauucagugcu

SEQ ID NO: 2809443 - RNA, 13 nt, Human
caguuugaacaaa

SEQ ID NO: 2809444 - RNA, 15 nt, Human
caguuucuuagcuuu

SEQ ID NO: 2809445 - RNA, 18 nt, Human
caguuucuuagcuuuuua

SEQ ID NO: 2809446 - RNA, 22 nt, Human
caguuucuucugcgccucaggc

SEQ ID NO: 2809447 - RNA, 15 nt, Human
caguuucuguccugc

SEQ ID NO: 2809448 - RNA, 19 nt, Human
caguuucuguccugcuggu

SEQ ID NO: 2809449 - RNA, 23 nt, Human
caguuguucaauaauaaauauuu

SEQ ID NO: 2809450 - RNA, 18 nt, Human
caguuuauuuuuaaagau

SEQ ID NO: 2809451 - RNA, 21 nt, Human
caguuuauuuuuaaagauaga

SEQ ID NO: 2809452 - RNA, 21 nt, Human
caguuauaaguagcaggccaa

SEQ ID NO: 2809453 - RNA, 19 nt, Human
caguggugcgaucuggguu

SEQ ID NO: 2809454 - RNA, 15 nt, Human
caguggugccaucau

SEQ ID NO: 2809455 - RNA, 19 nt, Human
caguggugcgaucucggcu

SEQ ID NO: 2809456 - RNA, 21 nt, Human
cagugguaugaucacggcuca

SEQ ID NO: 2809457 - RNA, 13 nt, Human
caguggucucaca

SEQ ID NO: 2809458 - RNA, 20 nt, Human
cagugguccacaucccggga

SEQ ID NO: 2809459 - RNA, 16 nt, Human
caguuagcaaacuuug

SEQ ID NO: 2809460 - RNA, 13 nt, Human
caguuagacuagu

SEQ ID NO: 2809461 - RNA, 15 nt, Human
caguuagcaaacuuu

SEQ ID NO: 2809462 - RNA, 23 nt, Human
cagucugauucccaagcucugcu

SEQ ID NO: 2809463 - RNA, 15 nt, Human
cagucguuagaauau

SEQ ID NO: 2809464 - RNA, 14 nt, Human
cagugauuagcacu

SEQ ID NO: 2809465 - RNA, 15 nt, Human
cagugcaaaugucag

SEQ ID NO: 2809466 - RNA, 22 nt, Human
cagugcccacaggaucagucug

SEQ ID NO: 2809467 - RNA, 18 nt, Human
cagugcccacaggaucag

SEQ ID NO: 2809468 - RNA, 21 nt, Human
cagugcccacaggaucagucu

SEQ ID NO: 2809469 - RNA, 20 nt, Human
cagugcaaaugucagauaca

SEQ ID NO: 2809470 - RNA, 14 nt, Human
cagugcaaccucug

SEQ ID NO: 2809471 - RNA, 15 nt, Human
cagugcaaccucugc

SEQ ID NO: 2809472 - RNA, 16 nt, Human
cagugcaaccucugcu

SEQ ID NO: 2809473 - RNA, 19 nt, Human
cagugcaaccucugcuucc

SEQ ID NO: 2809474 - RNA, 21 nt, Human
cagugcaaccucugcuuccca

SEQ ID NO: 2809475 - RNA, 20 nt, Human
cagugguaugaucacggcuc

SEQ ID NO: 2809476 - RNA, 20 nt, Human
cagugggguuucgcagccug

SEQ ID NO: 2809477 - RNA, 21 nt, Human
cagugggguuucgcagccuga

SEQ ID NO: 2809478 - RNA, 22 nt, Human
cagugggguuucgcagccugag

SEQ ID NO: 2809479 - RNA, 23 nt, Human
cagugggguuucgcagccugagu

SEQ ID NO: 2809480 - RNA, 15 nt, Human
caguggguaaaauua

SEQ ID NO: 2809481 - RNA, 16 nt, Human
caguggguaaaauuag

SEQ ID NO: 2809482 - RNA, 13 nt, Human
caguggggccugu

SEQ ID NO: 2809483 - RNA, 14 nt, Human
caguggggccugug

SEQ ID NO: 2809484 - RNA, 15 nt, Human
caguggggccugugg

SEQ ID NO: 2809485 - RNA, 16 nt, Human
caguggggccugugga

SEQ ID NO: 2809486 - RNA, 17 nt, Human
caguggggccuguggaa

SEQ ID NO: 2809487 - RNA, 16 nt, Human
caguggggcucucuga

SEQ ID NO: 2809488 - RNA, 18 nt, Human
caguggggcucucugagu

SEQ ID NO: 2809489 - RNA, 19 nt, Human
caguggggcucucugaguc

SEQ ID NO: 2809490 - RNA, 20 nt, Human
caguggggcucucugagucc

SEQ ID NO: 2809491 - RNA, 21 nt, Human
caguggggcucucugaguccu

SEQ ID NO: 2809492 - RNA, 18 nt, Human
cagugggagcugccuguu

SEQ ID NO: 2809493 - RNA, 17 nt, Human
cagugggagcugccugu

SEQ ID NO: 2809494 - RNA, 15 nt, Human
cagugggagcugccu

SEQ ID NO: 2809495 - RNA, 16 nt, Human
cagugggagcugccug

SEQ ID NO: 2809496 - RNA, 15 nt, Human
cagucucucucuucc

SEQ ID NO: 2809497 - RNA, 14 nt, Human
cagucucucuuaaa

SEQ ID NO: 2809498 - RNA, 17 nt, Human
cagucucucuuaaaguu

SEQ ID NO: 2809499 - RNA, 18 nt, Human
cagucucucuuaaaguug

SEQ ID NO: 2809500 - RNA, 22 nt, Human
cagucugauucccaagcucugc

SEQ ID NO: 2809501 - RNA, 21 nt, Human
cagucugauucccaagcucug

SEQ ID NO: 2809502 - RNA, 12 nt, Human
cagucuccucuu

SEQ ID NO: 2809503 - RNA, 13 nt, Human
cagucuccucuuu

SEQ ID NO: 2809504 - RNA, 15 nt, Human
cagucuccucuuuaa

SEQ ID NO: 2809505 - RNA, 16 nt, Human
cagucuccucuuuaaa

SEQ ID NO: 2809506 - RNA, 17 nt, Human
cagucuccucuuuaaaa

SEQ ID NO: 2809507 - RNA, 19 nt, Human
cagucuccucuuuaaaaca

SEQ ID NO: 2809508 - RNA, 20 nt, Human
cagucuccucuuuaaaacaa

SEQ ID NO: 2809509 - RNA, 22 nt, Human
cagucuccucuuuaaaacaaaa

SEQ ID NO: 2809510 - RNA, 23 nt, Human
cagucuccucuuuaaaacaaaac

SEQ ID NO: 2809511 - RNA, 23 nt, Human
cagucucaaaaauacaaaauaaa

SEQ ID NO: 2809512 - RNA, 19 nt, Human
cagucuaguugccaaaucu

SEQ ID NO: 2809513 - RNA, 19 nt, Human
cagucuaaaaugcuucagu

SEQ ID NO: 2809514 - RNA, 23 nt, Human
caguucagaaucacuucugagaa

SEQ ID NO: 2809515 - RNA, 16 nt, Human
caguucaccugcacuu

SEQ ID NO: 2809516 - RNA, 14 nt, Human
caguucaagaaagc

SEQ ID NO: 2809517 - RNA, 22 nt, Human
caguucaauaaacuuaacuuua

SEQ ID NO: 2809518 - RNA, 14 nt, Human
caguuauuuauagu

SEQ ID NO: 2809519 - RNA, 14 nt, Human
caguuauuuugaua

SEQ ID NO: 2809520 - RNA, 17 nt, Human
caguuauuuugauaaca

SEQ ID NO: 2809521 - RNA, 19 nt, Human
caguucaaucucccgcugc

SEQ ID NO: 2809522 - RNA, 22 nt, Human
caguucaaucucccgcugcugc

SEQ ID NO: 2809523 - RNA, 23 nt, Human
caguucaaucucccgcugcugcu

SEQ ID NO: 2809524 - RNA, 13 nt, Human
caguucacacccu

SEQ ID NO: 2809525 - RNA, 14 nt, Human
caguucacacccug

SEQ ID NO: 2809526 - RNA, 15 nt, Human
caguucacacccugc

SEQ ID NO: 2809527 - RNA, 16 nt, Human
caguucacacccugca

SEQ ID NO: 2809528 - RNA, 17 nt, Human
caguucacacccugcaa

SEQ ID NO: 2809529 - RNA, 18 nt, Human
caguucacacccugcaag

SEQ ID NO: 2809530 - RNA, 19 nt, Human
caguucacacccugcaagg

SEQ ID NO: 2809531 - RNA, 20 nt, Human
caguucacacccugcaaggc

SEQ ID NO: 2809532 - RNA, 16 nt, Human
caguuauguucaguca

SEQ ID NO: 2809533 - RNA, 17 nt, Human
caguuauucauucugug

SEQ ID NO: 2809534 - RNA, 21 nt, Human
caguuauucauucugugauca

SEQ ID NO: 2809535 - RNA, 18 nt, Human
caguuauugguggaaucu

SEQ ID NO: 2809536 - RNA, 20 nt, Human
caguuauugguggaaucuuu

SEQ ID NO: 2809537 - RNA, 21 nt, Human
caguuauugguggaaucuuua

SEQ ID NO: 2809538 - RNA, 13 nt, Human
caguuaugaauca

SEQ ID NO: 2809539 - RNA, 16 nt, Human
caguucagcaccaccc

SEQ ID NO: 2809540 - RNA, 13 nt, Human
caguucagcacca

SEQ ID NO: 2809541 - RNA, 16 nt, Human
caguucauguuugcuu

SEQ ID NO: 2809542 - RNA, 23 nt, Human
caguucaguaauaaacuguguuu

SEQ ID NO: 2809543 - RNA, 23 nt, Human
caguucaggagucccaaggaaag

SEQ ID NO: 2809544 - RNA, 20 nt, Human
caguucaggagucccaagga

SEQ ID NO: 2809545 - RNA, 17 nt, Human
caguucaggagucccaa

SEQ ID NO: 2809546 - RNA, 17 nt, Human
caguucagcaccacccu

SEQ ID NO: 2809547 - RNA, 15 nt, Human
caguucauugcacuu

SEQ ID NO: 2809548 - RNA, 18 nt, Human
caguucauguuugcuuca

SEQ ID NO: 2809549 - RNA, 18 nt, Human
caguucauugcacuuuga

SEQ ID NO: 2809550 - RNA, 12 nt, Human
caguuccaagaa

SEQ ID NO: 2809551 - RNA, 13 nt, Human
caguuccaagaaa

SEQ ID NO: 2809552 - RNA, 16 nt, Human
caguuccaagaaagau

SEQ ID NO: 2809553 - RNA, 21 nt, Human
cagacuggaagcacagcuuca

SEQ ID NO: 2809554 - RNA, 20 nt, Human
cagacuggaagcacagcuuc

SEQ ID NO: 2809555 - RNA, 16 nt, Human
cagacuggcuggcugc

SEQ ID NO: 2809556 - RNA, 18 nt, Human
cagacuggaagcacagcu

SEQ ID NO: 2809557 - RNA, 17 nt, Human
cagacuggaagcacagc

SEQ ID NO: 2809558 - RNA, 16 nt, Human
cagacuggaagcacag

SEQ ID NO: 2809559 - RNA, 14 nt, Human
cagacuggaagcac

SEQ ID NO: 2809560 - RNA, 13 nt, Human
cagacuggaagca

SEQ ID NO: 2809561 - RNA, 23 nt, Human
cagacugcugggacuggccaggu

SEQ ID NO: 2809562 - RNA, 20 nt, Human
cagacugcugggacuggcca

SEQ ID NO: 2809563 - RNA, 20 nt, Human
cagacugcuuccaauuuucu

SEQ ID NO: 2809564 - RNA, 14 nt, Human
cagacugcuuccaa

SEQ ID NO: 2809565 - RNA, 18 nt, Human
cagacugcgauuuguccc

SEQ ID NO: 2809566 - RNA, 13 nt, Human
cagacugcuagug

SEQ ID NO: 2809567 - RNA, 19 nt, Human
cagacugcuaguguucugu

SEQ ID NO: 2809568 - RNA, 22 nt, Human
cagacugcuaguguucugucua

SEQ ID NO: 2809569 - RNA, 13 nt, Human
cagacugcaccca

SEQ ID NO: 2809570 - RNA, 14 nt, Human
cagacugcacccag

SEQ ID NO: 2809571 - RNA, 15 nt, Human
cagacugcacccagg

SEQ ID NO: 2809572 - RNA, 16 nt, Human
cagacugcacccagga

SEQ ID NO: 2809573 - RNA, 17 nt, Human
cagacugcacccaggag

SEQ ID NO: 2809574 - RNA, 18 nt, Human
cagacugcacccaggagg

SEQ ID NO: 2809575 - RNA, 19 nt, Human
cagacugcacccaggaggg

SEQ ID NO: 2809576 - RNA, 12 nt, Human
cagacugcaggu

SEQ ID NO: 2809577 - RNA, 15 nt, Human
cagacugcagguugg

SEQ ID NO: 2809578 - RNA, 21 nt, Human
cagacugcagguuggacccca

SEQ ID NO: 2809579 - RNA, 13 nt, Human
cagacugcuggga

SEQ ID NO: 2809580 - RNA, 16 nt, Human
cagacugcugggacug

SEQ ID NO: 2809581 - RNA, 15 nt, Human
cagacugcugggacu

SEQ ID NO: 2809582 - RNA, 21 nt, Human
cagacucuacagaggccaugg

SEQ ID NO: 2809583 - RNA, 20 nt, Human
cagacucuacagaggccaug

SEQ ID NO: 2809584 - RNA, 19 nt, Human
cagacucuacagaggccau

SEQ ID NO: 2809585 - RNA, 18 nt, Human
cagacucuacagaggcca

SEQ ID NO: 2809586 - RNA, 23 nt, Human
cagacucuacagaggccaugggc

SEQ ID NO: 2809587 - RNA, 15 nt, Human
cagacucucagccca

SEQ ID NO: 2809588 - RNA, 17 nt, Human
cagacucucagcccaga

SEQ ID NO: 2809589 - RNA, 18 nt, Human
cagacucucagcccagaa

SEQ ID NO: 2809590 - RNA, 19 nt, Human
cagacucucagcccagaag

SEQ ID NO: 2809591 - RNA, 21 nt, Human
cagacucucagcccagaagaa

SEQ ID NO: 2809592 - RNA, 20 nt, Human
cagacugacaaauguguauc

SEQ ID NO: 2809593 - RNA, 22 nt, Human
cagacucuuucgauacccagga

SEQ ID NO: 2809594 - RNA, 23 nt, Human
cagacaggcaagcaccuccugcc

SEQ ID NO: 2809595 - RNA, 22 nt, Human
cagacaggcaagcaccuccugc

SEQ ID NO: 2809596 - RNA, 17 nt, Human
cagacucuacagaggcc

SEQ ID NO: 2809597 - RNA, 22 nt, Human
cagacucgauucauauugaaua

SEQ ID NO: 2809598 - RNA, 21 nt, Human
cagacuccugugcaacuuucc

SEQ ID NO: 2809599 - RNA, 23 nt, Human
cagacuccugacugucucccggg

SEQ ID NO: 2809600 - RNA, 16 nt, Human
cagacaggucccuccc

SEQ ID NO: 2809601 - RNA, 16 nt, Human
cagacagguuuucaca

SEQ ID NO: 2809602 - RNA, 18 nt, Human
cagacagguuuucacaua

SEQ ID NO: 2809603 - RNA, 21 nt, Human
cagacagguuuucacauaaau

SEQ ID NO: 2809604 - RNA, 22 nt, Human
cagacagguuuucacauaaaug

SEQ ID NO: 2809605 - RNA, 23 nt, Human
cagacagguuuucacauaaaugc

SEQ ID NO: 2809606 - RNA, 19 nt, Human
cagacagaggaugagcucu

SEQ ID NO: 2809607 - RNA, 23 nt, Human
cagacagaacuugaaugugucag

SEQ ID NO: 2809608 - RNA, 16 nt, Human
cagacagacacacaca

SEQ ID NO: 2809609 - RNA, 19 nt, Human
cagacagacaucucugcac

SEQ ID NO: 2809610 - RNA, 20 nt, Human
cagacagagaauaugucugc

SEQ ID NO: 2809611 - RNA, 21 nt, Human
cagacagagaauaugucugcu

SEQ ID NO: 2809612 - RNA, 22 nt, Human
cagacagagaauaugucugcuc

SEQ ID NO: 2809613 - RNA, 14 nt, Human
cagacagaggauga

SEQ ID NO: 2809614 - RNA, 12 nt, Human
cagacagaggau

SEQ ID NO: 2809615 - RNA, 14 nt, Human
cagacagcaggcag

SEQ ID NO: 2809616 - RNA, 15 nt, Human
cagacagcaggcagc

SEQ ID NO: 2809617 - RNA, 16 nt, Human
cagacagcaggcagcg

SEQ ID NO: 2809618 - RNA, 17 nt, Human
cagacagcaggcagcgc

SEQ ID NO: 2809619 - RNA, 19 nt, Human
cagacagcaggcagcgcca

SEQ ID NO: 2809620 - RNA, 14 nt, Human
cagacagcccucca

SEQ ID NO: 2809621 - RNA, 15 nt, Human
cagacagaacuugaa

SEQ ID NO: 2809622 - RNA, 20 nt, Human
cagacagaacuugaaugugu

SEQ ID NO: 2809623 - RNA, 22 nt, Human
cagacagaacuugaauguguca

SEQ ID NO: 2809624 - RNA, 13 nt, Human
cagacagaagucu

SEQ ID NO: 2809625 - RNA, 17 nt, Human
cagacagaagucuccuc

SEQ ID NO: 2809626 - RNA, 18 nt, Human
cagacagaagucuccuca

SEQ ID NO: 2809627 - RNA, 14 nt, Human
cagacagacacaca

SEQ ID NO: 2809628 - RNA, 15 nt, Human
cagacagacacacac

SEQ ID NO: 2809629 - RNA, 21 nt, Human
cagacaggcaagcaccuccug

SEQ ID NO: 2809630 - RNA, 20 nt, Human
cagacaggcaagcaccuccu

SEQ ID NO: 2809631 - RNA, 18 nt, Human
cagacaggcaagcaccuc

SEQ ID NO: 2809632 - RNA, 13 nt, Human
cagacaggcaagc

SEQ ID NO: 2809633 - RNA, 11 nt, Human
cagacaggcaa

SEQ ID NO: 2809634 - RNA, 12 nt, Human
cagacaggagga

SEQ ID NO: 2809635 - RNA, 23 nt, Human
cagacuguuagaaaauggacacu

SEQ ID NO: 2809636 - RNA, 24 nt, Human
cagacuguuagaaaauggacacug

SEQ ID NO: 2809637 - RNA, 21 nt, Human
cagacuguguaaaaagagagc

SEQ ID NO: 2809638 - RNA, 12 nt, Human
cagacuguguaa

SEQ ID NO: 2809639 - RNA, 14 nt, Human
cagacuguguaaaa

SEQ ID NO: 2809640 - RNA, 22 nt, Human
cagacuguguaaaaagagagcu

SEQ ID NO: 2809641 - RNA, 16 nt, Human
cagacuguuaauuaua

SEQ ID NO: 2809642 - RNA, 12 nt, Human
cagccagccacu

SEQ ID NO: 2809643 - RNA, 13 nt, Human
cagccagccacuc

SEQ ID NO: 2809644 - RNA, 14 nt, Human
cagccagccacucu

SEQ ID NO: 2809645 - RNA, 16 nt, Human
cagccagccacucuac

SEQ ID NO: 2809646 - RNA, 10 nt, Human
cagcacuaac

SEQ ID NO: 2809647 - RNA, 15 nt, Human
cagcacuacugggug

SEQ ID NO: 2809648 - RNA, 16 nt, Human
cagcacuacugggugu

SEQ ID NO: 2809649 - RNA, 19 nt, Human
cagcacuacugggugucau

SEQ ID NO: 2809650 - RNA, 20 nt, Human
cagcacuacugggugucauu

SEQ ID NO: 2809651 - RNA, 14 nt, Human
cagcacggacaaua

SEQ ID NO: 2809652 - RNA, 15 nt, Human
cagcacggacaauaa

SEQ ID NO: 2809653 - RNA, 18 nt, Human
cagcacggacaauaaacc

SEQ ID NO: 2809654 - RNA, 19 nt, Human
cagcacggacaauaaaccu

SEQ ID NO: 2809655 - RNA, 20 nt, Human
cagcaccuguaagaaacaga

SEQ ID NO: 2809656 - RNA, 23 nt, Human
cagcaccuguaagaaacagagca

SEQ ID NO: 2809657 - RNA, 13 nt, Human
cagcaccugucuc

SEQ ID NO: 2809658 - RNA, 18 nt, Human
cagcacgggggccaagga

SEQ ID NO: 2809659 - RNA, 12 nt, Human
cagccaggcugc

SEQ ID NO: 2809660 - RNA, 19 nt, Human
cagccaggcucaggccaug

SEQ ID NO: 2809661 - RNA, 16 nt, Human
cagccaggcugccaag

SEQ ID NO: 2809662 - RNA, 13 nt, Human
cagccaggcugcc

SEQ ID NO: 2809663 - RNA, 18 nt, Human
cagauugcaacaggcugg

SEQ ID NO: 2809664 - RNA, 20 nt, Human
cagauugcaacaggcugggc

SEQ ID NO: 2809665 - RNA, 19 nt, Human
cagauugcaacaggcuggg

SEQ ID NO: 2809666 - RNA, 21 nt, Human
cagauuguaucaugugcuaga

SEQ ID NO: 2809667 - RNA, 14 nt, Human
cagauuguuaucua

SEQ ID NO: 2809668 - RNA, 13 nt, Human
cagauuguuuccu

SEQ ID NO: 2809669 - RNA, 16 nt, Human
cagauuguuucuauac

SEQ ID NO: 2809670 - RNA, 17 nt, Human
cagauuguuucuauaca

SEQ ID NO: 2809671 - RNA, 19 nt, Human
cagauuguuucuauacaaa

SEQ ID NO: 2809672 - RNA, 20 nt, Human
cagauuguuucuauacaaau

SEQ ID NO: 2809673 - RNA, 15 nt, Human
cagauugucuuaauu

SEQ ID NO: 2809674 - RNA, 20 nt, Human
cagauugucuuaauuucuau

SEQ ID NO: 2809675 - RNA, 16 nt, Human
cagauugugccacugc

SEQ ID NO: 2809676 - RNA, 13 nt, Human
cagauuuaauaca

SEQ ID NO: 2809677 - RNA, 13 nt, Human
cagcaccugccuc

SEQ ID NO: 2809678 - RNA, 15 nt, Human
cagcaccugccuccu

SEQ ID NO: 2809679 - RNA, 19 nt, Human
cagcaccugccuccucguu

SEQ ID NO: 2809680 - RNA, 21 nt, Human
cagcaccacccuagucccuuc

SEQ ID NO: 2809681 - RNA, 22 nt, Human
cagcaccacccuagucccuucc

SEQ ID NO: 2809682 - RNA, 16 nt, Human
cagauuucauaccuca

SEQ ID NO: 2809683 - RNA, 19 nt, Human
cagagcugacacaggauga

SEQ ID NO: 2809684 - RNA, 19 nt, Human
cagagcuuggacuggaugc

SEQ ID NO: 2809685 - RNA, 15 nt, Human
cagagcuuggacugg

SEQ ID NO: 2809686 - RNA, 16 nt, Human
cagagcuuggacugga

SEQ ID NO: 2809687 - RNA, 23 nt, Human
cagagcuucuuccaggugcccag

SEQ ID NO: 2809688 - RNA, 20 nt, Human
cagagcuucuuccaggugcc

SEQ ID NO: 2809689 - RNA, 18 nt, Human
cagaggggcuuucuggag

SEQ ID NO: 2809690 - RNA, 23 nt, Human
cagaggaaacaauauuuauaaag

SEQ ID NO: 2809691 - RNA, 13 nt, Human
cagagcuccucug

SEQ ID NO: 2809692 - RNA, 16 nt, Human
cagagcugaagaguug

SEQ ID NO: 2809693 - RNA, 21 nt, Human
cagagcugaagaguugccccg

SEQ ID NO: 2809694 - RNA, 14 nt, Human
cagagcugacacag

SEQ ID NO: 2809695 - RNA, 15 nt, Human
cagagcugacacagg

SEQ ID NO: 2809696 - RNA, 23 nt, Human
cagagaggguggugaccucugcc

SEQ ID NO: 2809697 - RNA, 21 nt, Human
cagagagggcaggcaugaagu

SEQ ID NO: 2809698 - RNA, 22 nt, Human
cagagaggguggugaccucugc

SEQ ID NO: 2809699 - RNA, 20 nt, Human
cagagaggguggugaccucu

SEQ ID NO: 2809700 - RNA, 17 nt, Human
cagagaggguggugacc

SEQ ID NO: 2809701 - RNA, 12 nt, Human
cagagagggugg

SEQ ID NO: 2809702 - RNA, 16 nt, Human
cagagagggcaggcau

SEQ ID NO: 2809703 - RNA, 18 nt, Human
cagagagggcaggcauga

SEQ ID NO: 2809704 - RNA, 13 nt, Human
cagagagggcagg

SEQ ID NO: 2809705 - RNA, 14 nt, Human
cagagagggcaggc

SEQ ID NO: 2809706 - RNA, 15 nt, Human
cagagagggcaggca

SEQ ID NO: 2809707 - RNA, 9 nt, Human
cagagagag

SEQ ID NO: 2809708 - RNA, 14 nt, Human
cagagacuuuguag

SEQ ID NO: 2809709 - RNA, 21 nt, Human
cagagacugucccugaaaccu

SEQ ID NO: 2809710 - RNA, 19 nt, Human
cagaggggcuuucuggaga

SEQ ID NO: 2809711 - RNA, 17 nt, Human
cagagggggacugcugc

SEQ ID NO: 2809712 - RNA, 21 nt, Human
cagagggggacugcugcugcc

SEQ ID NO: 2809713 - RNA, 14 nt, Human
cagauagaaagcau

SEQ ID NO: 2809714 - RNA, 15 nt, Human
cagauagaaagcauu

SEQ ID NO: 2809715 - RNA, 16 nt, Human
cagauagaaagcauua

SEQ ID NO: 2809716 - RNA, 16 nt, Human
cagauagaaucaauca

SEQ ID NO: 2809717 - RNA, 21 nt, Human
cagauagagaguuguugugua

SEQ ID NO: 2809718 - RNA, 15 nt, Human
cagauauacuuugug

SEQ ID NO: 2809719 - RNA, 18 nt, Human
cagauauacuuuguggac

SEQ ID NO: 2809720 - RNA, 19 nt, Human
cagauauauuaagugacug

SEQ ID NO: 2809721 - RNA, 20 nt, Human
cagauauauaucauauuggu

SEQ ID NO: 2809722 - RNA, 21 nt, Human
cagagagggagagcagagaaa

SEQ ID NO: 2809723 - RNA, 14 nt, Human
cagauccccaagcc

SEQ ID NO: 2809724 - RNA, 19 nt, Human
caggcuaaggcguggagcu

SEQ ID NO: 2809725 - RNA, 13 nt, Human
caggcuacacuga

SEQ ID NO: 2809726 - RNA, 22 nt, Human
caggcguucagcucacuguucu

SEQ ID NO: 2809727 - RNA, 13 nt, Human
caggcgugagcca

SEQ ID NO: 2809728 - RNA, 19 nt, Human
caggcguucagcucacugu

SEQ ID NO: 2809729 - RNA, 20 nt, Human
caggcuacacugacacuggu

SEQ ID NO: 2809730 - RNA, 14 nt, Human
caggcuacuagaau

SEQ ID NO: 2809731 - RNA, 16 nt, Human
caggccuuaucuccaa

SEQ ID NO: 2809732 - RNA, 22 nt, Human
caggccuuaucuccaagaccag

SEQ ID NO: 2809733 - RNA, 17 nt, Human
caggccuuaucuccaag

SEQ ID NO: 2809734 - RNA, 12 nt, Human
caggccugugug

SEQ ID NO: 2809735 - RNA, 16 nt, Human
caggcgauccaccugu

SEQ ID NO: 2809736 - RNA, 20 nt, Human
caggcgagagaggagccaga

SEQ ID NO: 2809737 - RNA, 19 nt, Human
caggcgauccaccugucuc

SEQ ID NO: 2809738 - RNA, 21 nt, Human
caggcggugggcacccacccu

SEQ ID NO: 2809739 - RNA, 13 nt, Human
caggcguucagcu

SEQ ID NO: 2809740 - RNA, 21 nt, Human
caggcgugagccaccgugccu

SEQ ID NO: 2809741 - RNA, 22 nt, Human
caggccggugugggcugugucg

SEQ ID NO: 2809742 - RNA, 20 nt, Human
caggccgggguggagcaugg

SEQ ID NO: 2809743 - RNA, 19 nt, Human
caggccggugugggcugug

SEQ ID NO: 2809744 - RNA, 19 nt, Human
caggccgggguggagcaug

SEQ ID NO: 2809745 - RNA, 12 nt, Human
caggccucugug

SEQ ID NO: 2809746 - RNA, 13 nt, Human
caggccucugugu

SEQ ID NO: 2809747 - RNA, 14 nt, Human
caggccucuguguc

SEQ ID NO: 2809748 - RNA, 15 nt, Human
caggccucugugucc

SEQ ID NO: 2809749 - RNA, 17 nt, Human
caggccucuguguccuu

SEQ ID NO: 2809750 - RNA, 22 nt, Human
caggccucuguguccuucccug

SEQ ID NO: 2809751 - RNA, 20 nt, Human
caggccggcgagcccugugg

SEQ ID NO: 2809752 - RNA, 13 nt, Human
caggccgggccug

SEQ ID NO: 2809753 - RNA, 16 nt, Human
caggccgggccuguac

SEQ ID NO: 2809754 - RNA, 17 nt, Human
caggccgggccuguaca

SEQ ID NO: 2809755 - RNA, 18 nt, Human
caggccgggccuguacag

SEQ ID NO: 2809756 - RNA, 19 nt, Human
caggccgggccuguacagu

SEQ ID NO: 2809757 - RNA, 21 nt, Human
caggccgggccuguacagucu

SEQ ID NO: 2809758 - RNA, 19 nt, Human
caggccuaaucucauaccu

SEQ ID NO: 2809759 - RNA, 18 nt, Human
caggggaaaacuguuacc

SEQ ID NO: 2809760 - RNA, 17 nt, Human
cagggcuccucccagcu

SEQ ID NO: 2809761 - RNA, 18 nt, Human
cagggcuccucccagcuu

SEQ ID NO: 2809762 - RNA, 19 nt, Human
cagggcuccucccagcuug

SEQ ID NO: 2809763 - RNA, 20 nt, Human
cagggcuccucccagcuugu

SEQ ID NO: 2809764 - RNA, 19 nt, Human
cagggcuuaccuguacacu

SEQ ID NO: 2809765 - RNA, 21 nt, Human
cagggcuuaccuguacacuga

SEQ ID NO: 2809766 - RNA, 23 nt, Human
cagggcuuaccuguacacugacu

SEQ ID NO: 2809767 - RNA, 12 nt, Human
cagggcucugac

SEQ ID NO: 2809768 - RNA, 15 nt, Human
cagggcucugaccag

SEQ ID NO: 2809769 - RNA, 15 nt, Human
cagggcucugcccca

SEQ ID NO: 2809770 - RNA, 16 nt, Human
cagggcucugccccag

SEQ ID NO: 2809771 - RNA, 10 nt, Human
caggcugggc

SEQ ID NO: 2809772 - RNA, 21 nt, Human
cagggagcaggcggugggcac

SEQ ID NO: 2809773 - RNA, 14 nt, Human
cagggagcagggaa

SEQ ID NO: 2809774 - RNA, 21 nt, Human
cagggagcagggaaggccuga

SEQ ID NO: 2809775 - RNA, 20 nt, Human
cagggagcagggaaggccug

SEQ ID NO: 2809776 - RNA, 18 nt, Human
cagggagcagggaaggcc

SEQ ID NO: 2809777 - RNA, 16 nt, Human
cagggagcagggaagg

SEQ ID NO: 2809778 - RNA, 15 nt, Human
cagggcuacccuccc

SEQ ID NO: 2809779 - RNA, 17 nt, Human
cagggcuacccuccccc

SEQ ID NO: 2809780 - RNA, 16 nt, Human
caggaccaucuucccg

SEQ ID NO: 2809781 - RNA, 17 nt, Human
caggaccucccuuccga

SEQ ID NO: 2809782 - RNA, 19 nt, Human
caggaccucccuuccgacc

SEQ ID NO: 2809783 - RNA, 20 nt, Human
caggaccucccuuccgaccc

SEQ ID NO: 2809784 - RNA, 22 nt, Human
caggaccucccuuccgacccuc

SEQ ID NO: 2809785 - RNA, 23 nt, Human
caggaccucccuuccgacccucu

SEQ ID NO: 2809786 - RNA, 17 nt, Human
caggacaugcugaagcc

SEQ ID NO: 2809787 - RNA, 13 nt, Human
caggaccaagcca

SEQ ID NO: 2809788 - RNA, 15 nt, Human
caggaccaagccaca

SEQ ID NO: 2809789 - RNA, 13 nt, Human
caggacaugcuga

SEQ ID NO: 2809790 - RNA, 16 nt, Human
caggacaugcugaagc

SEQ ID NO: 2809791 - RNA, 17 nt, Human
caggcaaugcuggcugu

SEQ ID NO: 2809792 - RNA, 16 nt, Human
caggcaaugcuggcug

SEQ ID NO: 2809793 - RNA, 15 nt, Human
caggcaaugcuggcu

SEQ ID NO: 2809794 - RNA, 14 nt, Human
caggcaaugcuggc

SEQ ID NO: 2809795 - RNA, 13 nt, Human
caggaggcgcccu

SEQ ID NO: 2809796 - RNA, 22 nt, Human
caggaggcgcccuuggcuucug

SEQ ID NO: 2809797 - RNA, 17 nt, Human
caggaggcgcccuuggc

SEQ ID NO: 2809798 - RNA, 12 nt, Human
caggaggcugag

SEQ ID NO: 2809799 - RNA, 16 nt, Human
caggaggcugaggcag

SEQ ID NO: 2809800 - RNA, 15 nt, Human
caggaggcugaggca

SEQ ID NO: 2809801 - RNA, 13 nt, Human
caggaggcugagg

SEQ ID NO: 2809802 - RNA, 15 nt, Human
caggaggcugagggg

SEQ ID NO: 2809803 - RNA, 21 nt, Human
caggaggcugaggcaggagga

SEQ ID NO: 2809804 - RNA, 20 nt, Human
caggaggcugaggcaggagg

SEQ ID NO: 2809805 - RNA, 19 nt, Human
caggaggcugaggcaggag

SEQ ID NO: 2809806 - RNA, 18 nt, Human
caggaggcugaggcagga

SEQ ID NO: 2809807 - RNA, 17 nt, Human
caggaggcugaggcagg

SEQ ID NO: 2809808 - RNA, 18 nt, Human
caggaggccaggccggcg

SEQ ID NO: 2809809 - RNA, 22 nt, Human
caggaggauugcuugagcccag

SEQ ID NO: 2809810 - RNA, 23 nt, Human
caggaggaaucaugucaggccug

SEQ ID NO: 2809811 - RNA, 23 nt, Human
caggcacuagccuuuggcucugg

SEQ ID NO: 2809812 - RNA, 14 nt, Human
caggcacgguuugg

SEQ ID NO: 2809813 - RNA, 16 nt, Human
caggcacuagccuuug

SEQ ID NO: 2809814 - RNA, 22 nt, Human
caggcacuagccuuuggcucug

SEQ ID NO: 2809815 - RNA, 19 nt, Human
caggcaccuagcaauucca

SEQ ID NO: 2809816 - RNA, 21 nt, Human
caggaggcuuggaaagcauca

SEQ ID NO: 2809817 - RNA, 14 nt, Human
caggccaggccagc

SEQ ID NO: 2809818 - RNA, 12 nt, Human
caggaaagaaua

SEQ ID NO: 2809819 - RNA, 13 nt, Human
caggaaagaauag

SEQ ID NO: 2809820 - RNA, 21 nt, Human
cagcugucccugcccuucuuc

SEQ ID NO: 2809821 - RNA, 17 nt, Human
cagcugccucacuuccu

SEQ ID NO: 2809822 - RNA, 13 nt, Human
cagcuucaccaga

SEQ ID NO: 2809823 - RNA, 14 nt, Human
cagcuucaccagag

SEQ ID NO: 2809824 - RNA, 13 nt, Human
caggaaaccaaca

SEQ ID NO: 2809825 - RNA, 18 nt, Human
caggaaaccaacacccaa

SEQ ID NO: 2809826 - RNA, 20 nt, Human
caggaaacccagucgcccuu

SEQ ID NO: 2809827 - RNA, 23 nt, Human
caggaaaauuguuugaacccagg

SEQ ID NO: 2809828 - RNA, 16 nt, Human
cagcuucaccagagca

SEQ ID NO: 2809829 - RNA, 14 nt, Human
cagcugccucacuu

SEQ ID NO: 2809830 - RNA, 22 nt, Human
cagcugccgggccugauuuggu

SEQ ID NO: 2809831 - RNA, 21 nt, Human
cagcugagagacuuuuaauca

SEQ ID NO: 2809832 - RNA, 22 nt, Human
cagcugagaaaaugagugacua

SEQ ID NO: 2809833 - RNA, 18 nt, Human
cagcuaaauuuucugaaa

SEQ ID NO: 2809834 - RNA, 17 nt, Human
cagcuaacaauugugaa

SEQ ID NO: 2809835 - RNA, 15 nt, Human
cagcuaacacacagc

SEQ ID NO: 2809836 - RNA, 16 nt, Human
cagcuaacacacagcu

SEQ ID NO: 2809837 - RNA, 17 nt, Human
cagcuaacacacagcuc

SEQ ID NO: 2809838 - RNA, 18 nt, Human
cagcuaacacacagcucc

SEQ ID NO: 2809839 - RNA, 20 nt, Human
cagcuaacacacagcuccca

SEQ ID NO: 2809840 - RNA, 14 nt, Human
cagcggccccugca

SEQ ID NO: 2809841 - RNA, 15 nt, Human
cagcggccccugcau

SEQ ID NO: 2809842 - RNA, 16 nt, Human
cagcggccccugcauc

SEQ ID NO: 2809843 - RNA, 17 nt, Human
cagcggagucuguccug

SEQ ID NO: 2809844 - RNA, 21 nt, Human
cagcggagucuguccugugac

SEQ ID NO: 2809845 - RNA, 16 nt, Human
cagcgcuuugggaggc

SEQ ID NO: 2809846 - RNA, 22 nt, Human
cagcgcuuugggaggccgaggc

SEQ ID NO: 2809847 - RNA, 13 nt, Human
cagcgcucugccu

SEQ ID NO: 2809848 - RNA, 20 nt, Human
cagcgcucugccucaccgcu

SEQ ID NO: 2809849 - RNA, 15 nt, Human
caauauuugaauuuu

SEQ ID NO: 2809850 - RNA, 21 nt, Human
caauauuucugcuuucuuuga

SEQ ID NO: 2809851 - RNA, 22 nt, Human
caauauuucugcuuucuuugau

SEQ ID NO: 2809852 - RNA, 23 nt, Human
caauauuucugcuuucuuugauu

SEQ ID NO: 2809853 - RNA, 17 nt, Human
caauauuuauaaagaau

SEQ ID NO: 2809854 - RNA, 14 nt, Human
caauauuuauggau

SEQ ID NO: 2809855 - RNA, 19 nt, Human
caauauuuauggaugcaac

SEQ ID NO: 2809856 - RNA, 14 nt, Human
caauauuuuuagau

SEQ ID NO: 2809857 - RNA, 19 nt, Human
caauauuugaauuuuaaau

SEQ ID NO: 2809858 - RNA, 20 nt, Human
caaugccauccucaaacacu

SEQ ID NO: 2809859 - RNA, 20 nt, Human
caaugcccguaaugcuuaga

SEQ ID NO: 2809860 - RNA, 20 nt, Human
caaugcuauuuuuguuuuua

SEQ ID NO: 2809861 - RNA, 19 nt, Human
caaugcugaugaaucacug

SEQ ID NO: 2809862 - RNA, 20 nt, Human
caaugcugaugaaucacugu

SEQ ID NO: 2809863 - RNA, 23 nt, Human
caaugcugaugaaucacuguuuu

SEQ ID NO: 2809864 - RNA, 16 nt, Human
caaugccauccucaaa

SEQ ID NO: 2809865 - RNA, 18 nt, Human
caaugccauccucaaaca

SEQ ID NO: 2809866 - RNA, 15 nt, Human
caaugccacauacuu

SEQ ID NO: 2809867 - RNA, 19 nt, Human
caaugccacauacuugcag

SEQ ID NO: 2809868 - RNA, 20 nt, Human
caaugccacauacuugcagc

SEQ ID NO: 2809869 - RNA, 17 nt, Human
caaucaaauaaguauuu

SEQ ID NO: 2809870 - RNA, 22 nt, Human
caaucaaauaaguauuuauaau

SEQ ID NO: 2809871 - RNA, 23 nt, Human
caaucaaauaaguauuuauaaua

SEQ ID NO: 2809872 - RNA, 12 nt, Human
caaucaacacua

SEQ ID NO: 2809873 - RNA, 14 nt, Human
caaucaacacuacc

SEQ ID NO: 2809874 - RNA, 12 nt, Human
caaucagcacug

SEQ ID NO: 2809875 - RNA, 13 nt, Human
caaucagcacuga

SEQ ID NO: 2809876 - RNA, 14 nt, Human
caaucagcacugaa

SEQ ID NO: 2809877 - RNA, 15 nt, Human
caaucagcacugaaa

SEQ ID NO: 2809878 - RNA, 16 nt, Human
caaucagcacugaaaa

SEQ ID NO: 2809879 - RNA, 17 nt, Human
caaucagcacugaaaau

SEQ ID NO: 2809880 - RNA, 11 nt, Human
caaucacuguc

SEQ ID NO: 2809881 - RNA, 15 nt, Human
caaucacuguccucc

SEQ ID NO: 2809882 - RNA, 15 nt, Human
caaucagaaugaaca

SEQ ID NO: 2809883 - RNA, 19 nt, Human
caaucagagaccaggcccu

SEQ ID NO: 2809884 - RNA, 20 nt, Human
caaucagagaccaggcccug

SEQ ID NO: 2809885 - RNA, 21 nt, Human
caaucagagaccaggcccugg

SEQ ID NO: 2809886 - RNA, 15 nt, Human
caauggcagccuugg

SEQ ID NO: 2809887 - RNA, 14 nt, Human
caauggcagccuug

SEQ ID NO: 2809888 - RNA, 13 nt, Human
caauggcagccuu

SEQ ID NO: 2809889 - RNA, 14 nt, Human
caaugcugauuugg

SEQ ID NO: 2809890 - RNA, 13 nt, Human
caaugcugauguc

SEQ ID NO: 2809891 - RNA, 20 nt, Human
caaugcugauguccucacca

SEQ ID NO: 2809892 - RNA, 16 nt, Human
caaugcugauuuggug

SEQ ID NO: 2809893 - RNA, 21 nt, Human
caaugcugauuuggugaccaa

SEQ ID NO: 2809894 - RNA, 16 nt, Human
caauugguuaaucuuu

SEQ ID NO: 2809895 - RNA, 12 nt, Human
caauuggaggaa

SEQ ID NO: 2809896 - RNA, 21 nt, Human
caauugugagccaccacgucc

SEQ ID NO: 2809897 - RNA, 13 nt, Human
caauugugcugcc

SEQ ID NO: 2809898 - RNA, 18 nt, Human
caauugugagccaccacg

SEQ ID NO: 2809899 - RNA, 21 nt, Human
caauugucgaaaagagucuuc

SEQ ID NO: 2809900 - RNA, 15 nt, Human
caauuucaagguucu

SEQ ID NO: 2809901 - RNA, 16 nt, Human
caauuucaagguucua

SEQ ID NO: 2809902 - RNA, 19 nt, Human
caauuucaagguucuaacc

SEQ ID NO: 2809903 - RNA, 16 nt, Human
cacaaggauugaaaau

SEQ ID NO: 2809904 - RNA, 18 nt, Human
cacaaggauugaaaauuc

SEQ ID NO: 2809905 - RNA, 22 nt, Human
caaguuccaugggauacaaccu

SEQ ID NO: 2809906 - RNA, 21 nt, Human
caaguuccucuagugcccucc

SEQ ID NO: 2809907 - RNA, 12 nt, Human
caaguuauugua

SEQ ID NO: 2809908 - RNA, 20 nt, Human
caaguuauuguacagcuguu

SEQ ID NO: 2809909 - RNA, 22 nt, Human
caaguauuugggaagugaagac

SEQ ID NO: 2809910 - RNA, 19 nt, Human
caaguauuugggaagugaa

SEQ ID NO: 2809911 - RNA, 12 nt, Human
caaguucuaaga

SEQ ID NO: 2809912 - RNA, 13 nt, Human
caaguucuaagau

SEQ ID NO: 2809913 - RNA, 14 nt, Human
caaguucuaagauu

SEQ ID NO: 2809914 - RNA, 20 nt, Human
caaggauugcuacuguccua

SEQ ID NO: 2809915 - RNA, 19 nt, Human
caaggauugcuacuguccu

SEQ ID NO: 2809916 - RNA, 17 nt, Human
caaggccagaguggccu

SEQ ID NO: 2809917 - RNA, 15 nt, Human
caaggccagggacag

SEQ ID NO: 2809918 - RNA, 22 nt, Human
caaggccagaguggccuggcca

SEQ ID NO: 2809919 - RNA, 21 nt, Human
caaggccagaguggccuggcc

SEQ ID NO: 2809920 - RNA, 20 nt, Human
caaggccagaguggccuggc

SEQ ID NO: 2809921 - RNA, 19 nt, Human
caaggccagaguggccugg

SEQ ID NO: 2809922 - RNA, 18 nt, Human
caaggccagaguggccug

SEQ ID NO: 2809923 - RNA, 23 nt, Human
caaguaauauaauggaagagaaa

SEQ ID NO: 2809924 - RNA, 20 nt, Human
caaguaagagacucagccug

SEQ ID NO: 2809925 - RNA, 21 nt, Human
caaguaagagacucagccugc

SEQ ID NO: 2809926 - RNA, 22 nt, Human
caaguaagagacucagccugca

SEQ ID NO: 2809927 - RNA, 15 nt, Human
caaguaagaggcugg

SEQ ID NO: 2809928 - RNA, 16 nt, Human
caaguaagaggcugga

SEQ ID NO: 2809929 - RNA, 17 nt, Human
caaguaagaggcuggag

SEQ ID NO: 2809930 - RNA, 20 nt, Human
caaguaagaggcuggaguug

SEQ ID NO: 2809931 - RNA, 21 nt, Human
caagguuuuagguucuaaagu

SEQ ID NO: 2809932 - RNA, 23 nt, Human
caagguuuuagguucuaaaguuc

SEQ ID NO: 2809933 - RNA, 13 nt, Human
caagguuuuaggu

SEQ ID NO: 2809934 - RNA, 18 nt, Human
caagguuuuagguucuaa

SEQ ID NO: 2809935 - RNA, 20 nt, Human
caagguuuuagguucuaaag

SEQ ID NO: 2809936 - RNA, 15 nt, Human
caaggcccacaggag

SEQ ID NO: 2809937 - RNA, 21 nt, Human
caagcuccaucuccacuccag

SEQ ID NO: 2809938 - RNA, 13 nt, Human
caagcucccaagg

SEQ ID NO: 2809939 - RNA, 18 nt, Human
caagcucccaagggaugg

SEQ ID NO: 2809940 - RNA, 22 nt, Human
caagcucccaagggauggugcc

SEQ ID NO: 2809941 - RNA, 17 nt, Human
caagcuccaucuccacu

SEQ ID NO: 2809942 - RNA, 16 nt, Human
caagcucugcuccucu

SEQ ID NO: 2809943 - RNA, 14 nt, Human
caagcuccuccucg

SEQ ID NO: 2809944 - RNA, 16 nt, Human
caagcuccuccucgga

SEQ ID NO: 2809945 - RNA, 19 nt, Human
caagcuccuccucggaacc

SEQ ID NO: 2809946 - RNA, 20 nt, Human
caagcuccuccucggaaccg

SEQ ID NO: 2809947 - RNA, 15 nt, Human
caagcucugcuccuc

SEQ ID NO: 2809948 - RNA, 13 nt, Human
caagcucccugcc

SEQ ID NO: 2809949 - RNA, 16 nt, Human
caagcucccugcccca

SEQ ID NO: 2809950 - RNA, 19 nt, Human
caagcucccugccccaaau

SEQ ID NO: 2809951 - RNA, 20 nt, Human
caagcuccgccucccggguu

SEQ ID NO: 2809952 - RNA, 12 nt, Human
caagcuccuccu

SEQ ID NO: 2809953 - RNA, 19 nt, Human
caacuauaagcccacuguu

SEQ ID NO: 2809954 - RNA, 19 nt, Human
caacuauccugacuucuaa

SEQ ID NO: 2809955 - RNA, 22 nt, Human
caacuaugauuuggaaaauaaa

SEQ ID NO: 2809956 - RNA, 16 nt, Human
caaccccuucgcuccu

SEQ ID NO: 2809957 - RNA, 14 nt, Human
caaccccuucgcuc

SEQ ID NO: 2809958 - RNA, 17 nt, Human
caaccccuucgcuccug

SEQ ID NO: 2809959 - RNA, 16 nt, Human
caacuaguuuuguuua

SEQ ID NO: 2809960 - RNA, 19 nt, Human
caaccccuuaagcccuggc

SEQ ID NO: 2809961 - RNA, 20 nt, Human
caaccccuuaagcccuggcc

SEQ ID NO: 2809962 - RNA, 21 nt, Human
caaccccuuaagcccuggccc

SEQ ID NO: 2809963 - RNA, 14 nt, Human
caacccccagccug

SEQ ID NO: 2809964 - RNA, 23 nt, Human
caacccccaccccacacuuguuc

SEQ ID NO: 2809965 - RNA, 18 nt, Human
caacccccaccccacacu

SEQ ID NO: 2809966 - RNA, 17 nt, Human
caacccccaccccacac

SEQ ID NO: 2809967 - RNA, 14 nt, Human
caacccccacccca

SEQ ID NO: 2809968 - RNA, 13 nt, Human
caacccccacccc

SEQ ID NO: 2809969 - RNA, 12 nt, Human
caacccccaccc

SEQ ID NO: 2809970 - RNA, 11 nt, Human
caacccccacc

SEQ ID NO: 2809971 - RNA, 15 nt, Human
caacuauuuuuccaa

SEQ ID NO: 2809972 - RNA, 12 nt, Human
caacuauuuuau

SEQ ID NO: 2809973 - RNA, 21 nt, Human
caacuauuuuauuauccuaga

SEQ ID NO: 2809974 - RNA, 17 nt, Human
caacuauggaucagaau

SEQ ID NO: 2809975 - RNA, 16 nt, Human
caacuauggaucagaa

SEQ ID NO: 2809976 - RNA, 21 nt, Human
caacucccugccccccagccc

SEQ ID NO: 2809977 - RNA, 13 nt, Human
caacuccagcaac

SEQ ID NO: 2809978 - RNA, 22 nt, Human
caacuccagcaacuucuucucc

SEQ ID NO: 2809979 - RNA, 20 nt, Human
caacuccagcaacuucuucu

SEQ ID NO: 2809980 - RNA, 20 nt, Human
caacucccugccccccagcc

SEQ ID NO: 2809981 - RNA, 19 nt, Human
caacucccugccccccagc

SEQ ID NO: 2809982 - RNA, 18 nt, Human
caagaauagaugcugacu

SEQ ID NO: 2809983 - RNA, 23 nt, Human
caagaauaauucaauuuuaaaga

SEQ ID NO: 2809984 - RNA, 22 nt, Human
caagaagcuuuaauauuuaaau

SEQ ID NO: 2809985 - RNA, 16 nt, Human
caagaauauugucccu

SEQ ID NO: 2809986 - RNA, 18 nt, Human
caagaauagcaucuguac

SEQ ID NO: 2809987 - RNA, 19 nt, Human
caagaauagcaucuguaca

SEQ ID NO: 2809988 - RNA, 22 nt, Human
caagaauagcaucuguacaaag

SEQ ID NO: 2809989 - RNA, 23 nt, Human
caagaauagcaucuguacaaagg

SEQ ID NO: 2809990 - RNA, 14 nt, Human
caagaauccacauu

SEQ ID NO: 2809991 - RNA, 18 nt, Human
caagaauccacauuucua

SEQ ID NO: 2809992 - RNA, 19 nt, Human
caagaauccacauuucuaa

SEQ ID NO: 2809993 - RNA, 23 nt, Human
caacuccaccagauagcagaggg

SEQ ID NO: 2809994 - RNA, 22 nt, Human
caagacagaugccccagagcug

SEQ ID NO: 2809995 - RNA, 21 nt, Human
caagaauccacauuucuaaaa

SEQ ID NO: 2809996 - RNA, 22 nt, Human
caagaauccacauuucuaaaau

SEQ ID NO: 2809997 - RNA, 12 nt, Human
caagcaagcucc

SEQ ID NO: 2809998 - RNA, 23 nt, Human
caagcaagcucccaagggauggu

SEQ ID NO: 2809999 - RNA, 15 nt, Human
caagcaagcucucuu

SEQ ID NO: 2810000 - RNA, 22 nt, Human
caagcaagcucucuugccgagg

SEQ ID NO: 2810001 - RNA, 18 nt, Human
caagcaagaaacacuggg

SEQ ID NO: 2810002 - RNA, 18 nt, Human
caagcaacacagaggaau

SEQ ID NO: 2810003 - RNA, 13 nt, Human
caagcaagaaaca

SEQ ID NO: 2810004 - RNA, 19 nt, Human
caagauccugucuuuaagg

SEQ ID NO: 2810005 - RNA, 15 nt, Human
caagaucauucagug

SEQ ID NO: 2810006 - RNA, 19 nt, Human
caagaccaccacuucgaaa

SEQ ID NO: 2810007 - RNA, 16 nt, Human
caagcaaaaggagaga

SEQ ID NO: 2810008 - RNA, 23 nt, Human
caagauuuugggagaguaaagcu

SEQ ID NO: 2810009 - RNA, 22 nt, Human
caagauccugucuuuaaggaaa

SEQ ID NO: 2810010 - RNA, 19 nt, Human
caagaugagagaacuggag

SEQ ID NO: 2810011 - RNA, 21 nt, Human
caagaugagauuggcauggcu

SEQ ID NO: 2810012 - RNA, 23 nt, Human
caagaugagauuggcauggcuuu

SEQ ID NO: 2810013 - RNA, 18 nt, Human
caagaugaaggagaggca

SEQ ID NO: 2810014 - RNA, 15 nt, Human
caagaugacuggggu

SEQ ID NO: 2810015 - RNA, 16 nt, Human
caagaugacuggggug

SEQ ID NO: 2810016 - RNA, 17 nt, Human
caagaugacuggggugg

SEQ ID NO: 2810017 - RNA, 15 nt, Human
caagcaaguucugag

SEQ ID NO: 2810018 - RNA, 13 nt, Human
caagcaccuccug

SEQ ID NO: 2810019 - RNA, 20 nt, Human
caagcacaucugcauuuuca

SEQ ID NO: 2810020 - RNA, 17 nt, Human
caagcacaucugcauuu

SEQ ID NO: 2810021 - RNA, 14 nt, Human
caagcaccuccugc

SEQ ID NO: 2810022 - RNA, 18 nt, Human
caagcaccuagccucgcu

SEQ ID NO: 2810023 - RNA, 13 nt, Human
cacuccagugcca

SEQ ID NO: 2810024 - RNA, 17 nt, Human
cacuccagaccccuggc

SEQ ID NO: 2810025 - RNA, 12 nt, Human
cacuccauuccc

SEQ ID NO: 2810026 - RNA, 13 nt, Human
cacuccauuccca

SEQ ID NO: 2810027 - RNA, 15 nt, Human
cacuccauucccaac

SEQ ID NO: 2810028 - RNA, 16 nt, Human
cacuccagugccagca

SEQ ID NO: 2810029 - RNA, 17 nt, Human
cacuccagugccagcaa

SEQ ID NO: 2810030 - RNA, 13 nt, Human
cacugaagcuggg

SEQ ID NO: 2810031 - RNA, 14 nt, Human
cacugaagccugcg

SEQ ID NO: 2810032 - RNA, 17 nt, Human
cacugaagccugcguug

SEQ ID NO: 2810033 - RNA, 15 nt, Human
cacucccacccaguc

SEQ ID NO: 2810034 - RNA, 11 nt, Human
cacugaagacg

SEQ ID NO: 2810035 - RNA, 17 nt, Human
cacugaagcugggauuc

SEQ ID NO: 2810036 - RNA, 19 nt, Human
cacugaaguagugugcagu

SEQ ID NO: 2810037 - RNA, 19 nt, Human
cacugaagggaaucacauc

SEQ ID NO: 2810038 - RNA, 15 nt, Human
cacgcuggagugcag

SEQ ID NO: 2810039 - RNA, 20 nt, Human
cacgcuggagugcagugagc

SEQ ID NO: 2810040 - RNA, 18 nt, Human
cacgcuggagugcaguga

SEQ ID NO: 2810041 - RNA, 17 nt, Human
cacgcuggagugcagug

SEQ ID NO: 2810042 - RNA, 16 nt, Human
cacgcuggagugcagu

SEQ ID NO: 2810043 - RNA, 21 nt, Human
cacgcuggagugcagugagcc

SEQ ID NO: 2810044 - RNA, 18 nt, Human
cacgcuggguccuaauua

SEQ ID NO: 2810045 - RNA, 13 nt, Human
cacgcuguucuaa

SEQ ID NO: 2810046 - RNA, 14 nt, Human
cacgcuucacagug

SEQ ID NO: 2810047 - RNA, 15 nt, Human
cacuacauucauuua

SEQ ID NO: 2810048 - RNA, 12 nt, Human
cacuacugggug

SEQ ID NO: 2810049 - RNA, 13 nt, Human
cacuacugggugu

SEQ ID NO: 2810050 - RNA, 14 nt, Human
cacuacuggguguc

SEQ ID NO: 2810051 - RNA, 15 nt, Human
cacuacuggguguca

SEQ ID NO: 2810052 - RNA, 16 nt, Human
cacuacugggugucau

SEQ ID NO: 2810053 - RNA, 21 nt, Human
cacuacugggugucauuucau

SEQ ID NO: 2810054 - RNA, 22 nt, Human
cacuacugggugucauuucauu

SEQ ID NO: 2810055 - RNA, 12 nt, Human
cacuagaaaacu

SEQ ID NO: 2810056 - RNA, 20 nt, Human
cacuagaaaagcugaucaua

SEQ ID NO: 2810057 - RNA, 17 nt, Human
cacuagaacucuccauc

SEQ ID NO: 2810058 - RNA, 13 nt, Human
cacuagaauggau

SEQ ID NO: 2810059 - RNA, 18 nt, Human
cacuagaauggauaaaau

SEQ ID NO: 2810060 - RNA, 19 nt, Human
cacuagaauggauaaaaua

SEQ ID NO: 2810061 - RNA, 15 nt, Human
cacuagaacucucca

SEQ ID NO: 2810062 - RNA, 16 nt, Human
cacuagacccacugga

SEQ ID NO: 2810063 - RNA, 16 nt, Human
cacuagagaaugcaca

SEQ ID NO: 2810064 - RNA, 23 nt, Human
cacuagagaaugcacagauauac

SEQ ID NO: 2810065 - RNA, 14 nt, Human
cacuccagaccccu

SEQ ID NO: 2810066 - RNA, 16 nt, Human
cacuccagaccccugg

SEQ ID NO: 2810067 - RNA, 21 nt, Human
cacuacauuauaaaugucucu

SEQ ID NO: 2810068 - RNA, 15 nt, Human
cacggacaauaaacc

SEQ ID NO: 2810069 - RNA, 17 nt, Human
cacggacaauaaaccuc

SEQ ID NO: 2810070 - RNA, 19 nt, Human
cacggacaauaaaccuccg

SEQ ID NO: 2810071 - RNA, 20 nt, Human
cacggagauaugaagagcaa

SEQ ID NO: 2810072 - RNA, 14 nt, Human
caccugcccugccc

SEQ ID NO: 2810073 - RNA, 12 nt, Human
cacccuccuuuc

SEQ ID NO: 2810074 - RNA, 23 nt, Human
cacccucgaagcgcgccacucgc

SEQ ID NO: 2810075 - RNA, 19 nt, Human
cacccucgaagcgcgccac

SEQ ID NO: 2810076 - RNA, 24 nt, Human
cacccucgaagcgcgccacucgcu

SEQ ID NO: 2810077 - RNA, 16 nt, Human
cacccucgaagcgcgc

SEQ ID NO: 2810078 - RNA, 12 nt, Human
cacccugcucuc

SEQ ID NO: 2810079 - RNA, 12 nt, Human
cacccugcuaca

SEQ ID NO: 2810080 - RNA, 21 nt, Human
cacccuggaggauuucaucuc

SEQ ID NO: 2810081 - RNA, 11 nt, Human
cacccuggaau

SEQ ID NO: 2810082 - RNA, 16 nt, Human
cacccugggagacaga

SEQ ID NO: 2810083 - RNA, 17 nt, Human
cacccugggagacagac

SEQ ID NO: 2810084 - RNA, 17 nt, Human
cacccugaggucaggga

SEQ ID NO: 2810085 - RNA, 20 nt, Human
cacccugaggucagggagug

SEQ ID NO: 2810086 - RNA, 17 nt, Human
cacccugauuucuugcu

SEQ ID NO: 2810087 - RNA, 11 nt, Human
cacccugcaag

SEQ ID NO: 2810088 - RNA, 13 nt, Human
cacccugcaaggc

SEQ ID NO: 2810089 - RNA, 14 nt, Human
cacccugcaaggcc

SEQ ID NO: 2810090 - RNA, 17 nt, Human
cacccugcaaggcccac

SEQ ID NO: 2810091 - RNA, 21 nt, Human
cacccugcaaggcccacagga

SEQ ID NO: 2810092 - RNA, 23 nt, Human
cacccugcaaggcccacaggagg

SEQ ID NO: 2810093 - RNA, 22 nt, Human
caccugccagccuggcuucugg

SEQ ID NO: 2810094 - RNA, 13 nt, Human
caccugcccugcc

SEQ ID NO: 2810095 - RNA, 12 nt, Human
caccugcccugc

SEQ ID NO: 2810096 - RNA, 20 nt, Human
caccugccagccuggcuucu

SEQ ID NO: 2810097 - RNA, 17 nt, Human
caccugccagccuggcu

SEQ ID NO: 2810098 - RNA, 16 nt, Human
caccugccagccuggc

SEQ ID NO: 2810099 - RNA, 15 nt, Human
caccugccagccugg

SEQ ID NO: 2810100 - RNA, 14 nt, Human
caccugccagccug

SEQ ID NO: 2810101 - RNA, 13 nt, Human
caccugccagccu

SEQ ID NO: 2810102 - RNA, 16 nt, Human
caccuauagucccagc

SEQ ID NO: 2810103 - RNA, 17 nt, Human
cacccuggggagaaagu

SEQ ID NO: 2810104 - RNA, 13 nt, Human
cacccuggggccu

SEQ ID NO: 2810105 - RNA, 16 nt, Human
cacccuguaccucauc

SEQ ID NO: 2810106 - RNA, 22 nt, Human
cacccuguaccucaucccauga

SEQ ID NO: 2810107 - RNA, 16 nt, Human
cacccuguacuguucu

SEQ ID NO: 2810108 - RNA, 17 nt, Human
cacccuguacuguucug

SEQ ID NO: 2810109 - RNA, 21 nt, Human
cacccuguacuguucuguguc

SEQ ID NO: 2810110 - RNA, 21 nt, Human
cacccuggggccuggaccugc

SEQ ID NO: 2810111 - RNA, 22 nt, Human
cacccuggggccuggaccugcc

SEQ ID NO: 2810112 - RNA, 14 nt, Human
cacccuggggccug

SEQ ID NO: 2810113 - RNA, 15 nt, Human
cacccuggggccugg

SEQ ID NO: 2810114 - RNA, 19 nt, Human
cacccuggggccuggaccu

SEQ ID NO: 2810115 - RNA, 20 nt, Human
cacccuggggccuggaccug

SEQ ID NO: 2810116 - RNA, 15 nt, Human
caccuaguccaguga

SEQ ID NO: 2810117 - RNA, 15 nt, Human
cacccugcugccuuc

SEQ ID NO: 2810118 - RNA, 23 nt, Human
cacccuguacuguucugugucuu

SEQ ID NO: 2810119 - RNA, 22 nt, Human
cacaucuugcucugcugacaga

SEQ ID NO: 2810120 - RNA, 21 nt, Human
cacaucuugcucugcugacag

SEQ ID NO: 2810121 - RNA, 20 nt, Human
cacaucuugcucugcugaca

SEQ ID NO: 2810122 - RNA, 15 nt, Human
cacaucuugcucugc

SEQ ID NO: 2810123 - RNA, 14 nt, Human
cacaucuugcucug

SEQ ID NO: 2810124 - RNA, 13 nt, Human
cacaucuugcucu

SEQ ID NO: 2810125 - RNA, 18 nt, Human
cacauccaacuccagcaa

SEQ ID NO: 2810126 - RNA, 16 nt, Human
cacauccaacuccagc

SEQ ID NO: 2810127 - RNA, 12 nt, Human
cacauccaacuc

SEQ ID NO: 2810128 - RNA, 19 nt, Human
cacauccaacuccagcaac

SEQ ID NO: 2810129 - RNA, 13 nt, Human
cacauccauuccc

SEQ ID NO: 2810130 - RNA, 14 nt, Human
cacauccauuccca

SEQ ID NO: 2810131 - RNA, 21 nt, Human
cacauccauucccaagaaaug

SEQ ID NO: 2810132 - RNA, 22 nt, Human
cacauccauucccaagaaaugc

SEQ ID NO: 2810133 - RNA, 12 nt, Human
cacaucccagcc

SEQ ID NO: 2810134 - RNA, 14 nt, Human
cacaucccagccca

SEQ ID NO: 2810135 - RNA, 15 nt, Human
cacaucccagcccaa

SEQ ID NO: 2810136 - RNA, 19 nt, Human
caccaggagaaccacuaca

SEQ ID NO: 2810137 - RNA, 17 nt, Human
caccaggagaaccacua

SEQ ID NO: 2810138 - RNA, 16 nt, Human
caccaggagaaccacu

SEQ ID NO: 2810139 - RNA, 19 nt, Human
caccagcccuuagcaggga

SEQ ID NO: 2810140 - RNA, 22 nt, Human
caccagccccagugcccacagg

SEQ ID NO: 2810141 - RNA, 16 nt, Human
cacauuuaagagacag

SEQ ID NO: 2810142 - RNA, 21 nt, Human
caccagccccagugcccacag

SEQ ID NO: 2810143 - RNA, 18 nt, Human
caccagccccagugccca

SEQ ID NO: 2810144 - RNA, 17 nt, Human
caccagccccagugccc

SEQ ID NO: 2810145 - RNA, 18 nt, Human
cacauuuauucugcucac

SEQ ID NO: 2810146 - RNA, 17 nt, Human
cacauuuauucugcuca

SEQ ID NO: 2810147 - RNA, 15 nt, Human
cacauuguuuuaaaa

SEQ ID NO: 2810148 - RNA, 16 nt, Human
cacauuguuuuaaaaa

SEQ ID NO: 2810149 - RNA, 18 nt, Human
cacauuguuuuaaaaaga

SEQ ID NO: 2810150 - RNA, 23 nt, Human
cacauuguuuuaaaaagaaacaa

SEQ ID NO: 2810151 - RNA, 19 nt, Human
cacauuuaagagacaguca

SEQ ID NO: 2810152 - RNA, 11 nt, Human
cacauuuaagg

SEQ ID NO: 2810153 - RNA, 13 nt, Human
cacauuuaaggau

SEQ ID NO: 2810154 - RNA, 14 nt, Human
cacauuuaaggaug

SEQ ID NO: 2810155 - RNA, 17 nt, Human
cacauuuagucucuuua

SEQ ID NO: 2810156 - RNA, 18 nt, Human
cacauuuagucucuuuau

SEQ ID NO: 2810157 - RNA, 19 nt, Human
cacauuuagucucuuuauu

SEQ ID NO: 2810158 - RNA, 19 nt, Human
cacaucuugcucugcugac

SEQ ID NO: 2810159 - RNA, 13 nt, Human
cacaucuuggcac

SEQ ID NO: 2810160 - RNA, 21 nt, Human
cacaucuuggcuauguaauuc

SEQ ID NO: 2810161 - RNA, 15 nt, Human
cacaucuuuaucugu

SEQ ID NO: 2810162 - RNA, 22 nt, Human
cacaucuuuaucuguucuugcu

SEQ ID NO: 2810163 - RNA, 23 nt, Human
cacaucuugcucugcugacagac

SEQ ID NO: 2810164 - RNA, 21 nt, Human
cacaugaaaccuacacacugu

SEQ ID NO: 2810165 - RNA, 14 nt, Human
cacaucuuuccugu

SEQ ID NO: 2810166 - RNA, 15 nt, Human
cacaucuuuccuguc

SEQ ID NO: 2810167 - RNA, 12 nt, Human
cacauuguuuua

SEQ ID NO: 2810168 - RNA, 13 nt, Human
cacaugaagaaau

SEQ ID NO: 2810169 - RNA, 14 nt, Human
cacaugaagaaaua

SEQ ID NO: 2810170 - RNA, 18 nt, Human
cacaugaagaaauacugc

SEQ ID NO: 2810171 - RNA, 22 nt, Human
cacaugaagaaauacugcacuu

SEQ ID NO: 2810172 - RNA, 12 nt, Human
cacccagcccac

SEQ ID NO: 2810173 - RNA, 21 nt, Human
cacccaggaggggaacacugc

SEQ ID NO: 2810174 - RNA, 22 nt, Human
cacccaggaggggaacacugcc

SEQ ID NO: 2810175 - RNA, 21 nt, Human
cacccaggccuauguugaucc

SEQ ID NO: 2810176 - RNA, 20 nt, Human
cacccaggcuggagugcagu

SEQ ID NO: 2810177 - RNA, 18 nt, Human
cacccagucucugcucca

SEQ ID NO: 2810178 - RNA, 19 nt, Human
cacccagucucugcuccac

SEQ ID NO: 2810179 - RNA, 15 nt, Human
cacccacucagcucc

SEQ ID NO: 2810180 - RNA, 21 nt, Human
cacccagaugggggaaagcac

SEQ ID NO: 2810181 - RNA, 14 nt, Human
cacccaugaagaca

SEQ ID NO: 2810182 - RNA, 21 nt, Human
cacccagaagaagauggcugu

SEQ ID NO: 2810183 - RNA, 17 nt, Human
cacccauaauccuuucu

SEQ ID NO: 2810184 - RNA, 17 nt, Human
auuuucucaaaagcauu

SEQ ID NO: 2810185 - RNA, 19 nt, Human
auuuucucaaaagcauuua

SEQ ID NO: 2810186 - RNA, 20 nt, Human
auuuucucaaaagcauuuau

SEQ ID NO: 2810187 - RNA, 22 nt, Human
auuuucucaaaagcauuuauca

SEQ ID NO: 2810188 - RNA, 23 nt, Human
auuuucucaaaagcauuuaucau

SEQ ID NO: 2810189 - RNA, 12 nt, Human
auuuuauaaagu

SEQ ID NO: 2810190 - RNA, 12 nt, Human
auuuucugaaag

SEQ ID NO: 2810191 - RNA, 18 nt, Human
auuuucugaaaguuaccc

SEQ ID NO: 2810192 - RNA, 22 nt, Human
auuuucugaaaguuacccacug

SEQ ID NO: 2810193 - RNA, 14 nt, Human
auuuucuccagcuc

SEQ ID NO: 2810194 - RNA, 14 nt, Human
auuuucuauguacu

SEQ ID NO: 2810195 - RNA, 15 nt, Human
auuuucuauguacua

SEQ ID NO: 2810196 - RNA, 19 nt, Human
auuuucuauguacuaguac

SEQ ID NO: 2810197 - RNA, 21 nt, Human
auuuucuauguacuaguacug

SEQ ID NO: 2810198 - RNA, 22 nt, Human
auuuucuauguacuaguacugu

SEQ ID NO: 2810199 - RNA, 23 nt, Human
auuuucuauguacuaguacugug

SEQ ID NO: 2810200 - RNA, 22 nt, Human
auuuucuggaauacaugaaaua

SEQ ID NO: 2810201 - RNA, 22 nt, Human
auuuucuggggcuccucacaua

SEQ ID NO: 2810202 - RNA, 23 nt, Human
auuuucuggggcuccucacauag

SEQ ID NO: 2810203 - RNA, 19 nt, Human
auuuucuggaauacaugaa

SEQ ID NO: 2810204 - RNA, 18 nt, Human
auuuucuggaauacauga

SEQ ID NO: 2810205 - RNA, 21 nt, Human
auuugcacuggaguucuaugc

SEQ ID NO: 2810206 - RNA, 16 nt, Human
auuugcacccuccgcc

SEQ ID NO: 2810207 - RNA, 13 nt, Human
auuuguguuuuaa

SEQ ID NO: 2810208 - RNA, 20 nt, Human
auuuguguuuuaauuuaaac

SEQ ID NO: 2810209 - RNA, 22 nt, Human
auuuguguguuauaccuugauu

SEQ ID NO: 2810210 - RNA, 14 nt, Human
auuuguuaaaauua

SEQ ID NO: 2810211 - RNA, 21 nt, Human
auuuguuaaaauuaucaauau

SEQ ID NO: 2810212 - RNA, 21 nt, Human
auuuguguuuuaauuuaaaca

SEQ ID NO: 2810213 - RNA, 14 nt, Human
auuuguuaaaauac

SEQ ID NO: 2810214 - RNA, 22 nt, Human
auuuguuaaaauacaguucugu

SEQ ID NO: 2810215 - RNA, 15 nt, Human
auuuguuauggcaga

SEQ ID NO: 2810216 - RNA, 21 nt, Human
auuuguuauggcagaugacaa

SEQ ID NO: 2810217 - RNA, 14 nt, Human
auuuguuacagcca

SEQ ID NO: 2810218 - RNA, 21 nt, Human
auuuguuaguuccuguaugaa

SEQ ID NO: 2810219 - RNA, 22 nt, Human
auuuguuaguuccuguaugaaa

SEQ ID NO: 2810220 - RNA, 12 nt, Human
auuuguucaagu

SEQ ID NO: 2810221 - RNA, 18 nt, Human
auuuguucacugaaggug

SEQ ID NO: 2810222 - RNA, 23 nt, Human
auuuguucacugaaggugauuca

SEQ ID NO: 2810223 - RNA, 17 nt, Human
auuuguuauuuucagua

SEQ ID NO: 2810224 - RNA, 12 nt, Human
auuuguucaugu

SEQ ID NO: 2810225 - RNA, 13 nt, Human
auuuguucauguu

SEQ ID NO: 2810226 - RNA, 14 nt, Human
auuuguucauguuu

SEQ ID NO: 2810227 - RNA, 15 nt, Human
auuuguucauguuug

SEQ ID NO: 2810228 - RNA, 16 nt, Human
auuuguucauguuugg

SEQ ID NO: 2810229 - RNA, 13 nt, Human
auuuuaguauuca

SEQ ID NO: 2810230 - RNA, 14 nt, Human
auuuuaguauucau

SEQ ID NO: 2810231 - RNA, 16 nt, Human
auuuuaguauucauuc

SEQ ID NO: 2810232 - RNA, 19 nt, Human
auuuuaguauucauucugc

SEQ ID NO: 2810233 - RNA, 20 nt, Human
auuuuaguauucauucugca

SEQ ID NO: 2810234 - RNA, 13 nt, Human
auuuguucucugu

SEQ ID NO: 2810235 - RNA, 14 nt, Human
auuuguucucuguc

SEQ ID NO: 2810236 - RNA, 15 nt, Human
auuuguucugggagu

SEQ ID NO: 2810237 - RNA, 16 nt, Human
auuuguucugggagua

SEQ ID NO: 2810238 - RNA, 16 nt, Human
auuuguucuucaagaa

SEQ ID NO: 2810239 - RNA, 23 nt, Human
auuuuagucacacguggucuuuc

SEQ ID NO: 2810240 - RNA, 14 nt, Human
auuuuaguccaaau

SEQ ID NO: 2810241 - RNA, 16 nt, Human
auuuuaguccaaauaa

SEQ ID NO: 2810242 - RNA, 17 nt, Human
auuuugaaaagauguac

SEQ ID NO: 2810243 - RNA, 13 nt, Human
auuuugaaaagcu

SEQ ID NO: 2810244 - RNA, 14 nt, Human
auuuugaaaagcuu

SEQ ID NO: 2810245 - RNA, 18 nt, Human
auuuugaaaagcuucuua

SEQ ID NO: 2810246 - RNA, 19 nt, Human
auuuugaaaagcuucuuaa

SEQ ID NO: 2810247 - RNA, 20 nt, Human
auuuugaaaagcuucuuaau

SEQ ID NO: 2810248 - RNA, 19 nt, Human
caaaagcauuuaucauucu

SEQ ID NO: 2810249 - RNA, 21 nt, Human
caaaagcauuuaucauucuug

SEQ ID NO: 2810250 - RNA, 21 nt, Human
caaacaugaaguguguuuccu

SEQ ID NO: 2810251 - RNA, 14 nt, Human
caaacaugaagugu

SEQ ID NO: 2810252 - RNA, 12 nt, Human
caaacaugaagu

SEQ ID NO: 2810253 - RNA, 17 nt, Human
caaacaucacucugcug

SEQ ID NO: 2810254 - RNA, 16 nt, Human
caaacauaugcacauu

SEQ ID NO: 2810255 - RNA, 18 nt, Human
caaacauccuaucaacaa

SEQ ID NO: 2810256 - RNA, 18 nt, Human
caaacaucacucugcugc

SEQ ID NO: 2810257 - RNA, 21 nt, Human
caaacaucacucugcugcuua

SEQ ID NO: 2810258 - RNA, 14 nt, Human
auuuuuuuuaguau

SEQ ID NO: 2810259 - RNA, 14 nt, Human
auuuuuuuuacauu

SEQ ID NO: 2810260 - RNA, 18 nt, Human
auuuuuuuuaguauuuau

SEQ ID NO: 2810261 - RNA, 18 nt, Human
auuuuuuuuaaguauuua

SEQ ID NO: 2810262 - RNA, 21 nt, Human
auuuuuuuuguuguuucagug

SEQ ID NO: 2810263 - RNA, 22 nt, Human
auuuuuuuuguuguuucaguga

SEQ ID NO: 2810264 - RNA, 20 nt, Human
caaaagcaguaaauuugcua

SEQ ID NO: 2810265 - RNA, 21 nt, Human
caaaagcagugggcuccuggc

SEQ ID NO: 2810266 - RNA, 23 nt, Human
auuuuuuuuucauagagauuugu

SEQ ID NO: 2810267 - RNA, 11 nt, Human
auuuuuaucag

SEQ ID NO: 2810268 - RNA, 21 nt, Human
auuuuuaaacagguggugaga

SEQ ID NO: 2810269 - RNA, 12 nt, Human
auuuuuaucuuu

SEQ ID NO: 2810270 - RNA, 15 nt, Human
auuuuuaucuuucgu

SEQ ID NO: 2810271 - RNA, 19 nt, Human
auuuuuaucuuucgugaua

SEQ ID NO: 2810272 - RNA, 17 nt, Human
auuuuuaugaugaugaa

SEQ ID NO: 2810273 - RNA, 13 nt, Human
auuuuuaaaagau

SEQ ID NO: 2810274 - RNA, 16 nt, Human
auuuuuaaaauauuua

SEQ ID NO: 2810275 - RNA, 17 nt, Human
auuuuuaaaauauuuau

SEQ ID NO: 2810276 - RNA, 16 nt, Human
auuuuuaaaaaaugaa

SEQ ID NO: 2810277 - RNA, 22 nt, Human
auuuuuaaaaaaugaaauccuu

SEQ ID NO: 2810278 - RNA, 12 nt, Human
auuuuuaaaaac

SEQ ID NO: 2810279 - RNA, 13 nt, Human
auuuuuaaaaaga

SEQ ID NO: 2810280 - RNA, 17 nt, Human
auuuuuaaaaagaaauc

SEQ ID NO: 2810281 - RNA, 23 nt, Human
auuuuuaaaaagaaaucuggucu

SEQ ID NO: 2810282 - RNA, 19 nt, Human
auuuuuuucccaauugaga

SEQ ID NO: 2810283 - RNA, 14 nt, Human
auuuuuauuucaga

SEQ ID NO: 2810284 - RNA, 16 nt, Human
auuuuuauuucagauu

SEQ ID NO: 2810285 - RNA, 17 nt, Human
auuuuuauuucagauuu

SEQ ID NO: 2810286 - RNA, 19 nt, Human
auuuuuauuucagauuuug

SEQ ID NO: 2810287 - RNA, 20 nt, Human
auuuuuauuucagauuuuga

SEQ ID NO: 2810288 - RNA, 21 nt, Human
auuuuuauuucagauuuugau

SEQ ID NO: 2810289 - RNA, 13 nt, Human
auuuuuauuuaug

SEQ ID NO: 2810290 - RNA, 14 nt, Human
auuuuuauuuauga

SEQ ID NO: 2810291 - RNA, 16 nt, Human
auuuuuauuuaugaag

SEQ ID NO: 2810292 - RNA, 15 nt, Human
caaacaugagaugug

SEQ ID NO: 2810293 - RNA, 22 nt, Human
caaacaugaaguguguuuccuu

SEQ ID NO: 2810294 - RNA, 13 nt, Human
caaacauguauuu

SEQ ID NO: 2810295 - RNA, 14 nt, Human
caaacauguauuua

SEQ ID NO: 2810296 - RNA, 15 nt, Human
caaacauguauuuau

SEQ ID NO: 2810297 - RNA, 16 nt, Human
caaacauguauuuaug

SEQ ID NO: 2810298 - RNA, 18 nt, Human
caaacauguauuuaugua

SEQ ID NO: 2810299 - RNA, 23 nt, Human
caaacaugagauguguggacugu

SEQ ID NO: 2810300 - RNA, 16 nt, Human
auuucacuagaaaagc

SEQ ID NO: 2810301 - RNA, 15 nt, Human
auuucaggagcagcc

SEQ ID NO: 2810302 - RNA, 20 nt, Human
auuucacgucgucuucugua

SEQ ID NO: 2810303 - RNA, 17 nt, Human
auuucaggcuccccaga

SEQ ID NO: 2810304 - RNA, 21 nt, Human
auuucacauuaauauuugcug

SEQ ID NO: 2810305 - RNA, 22 nt, Human
auuucacauuaauauuugcuga

SEQ ID NO: 2810306 - RNA, 16 nt, Human
auuucacauuaauggu

SEQ ID NO: 2810307 - RNA, 18 nt, Human
auuucacauuaauggucu

SEQ ID NO: 2810308 - RNA, 22 nt, Human
auuucacauuaauggucuaaaa

SEQ ID NO: 2810309 - RNA, 14 nt, Human
auuuaucucuauuu

SEQ ID NO: 2810310 - RNA, 15 nt, Human
auuucaauucucaaa

SEQ ID NO: 2810311 - RNA, 14 nt, Human
auuucacaaauaau

SEQ ID NO: 2810312 - RNA, 13 nt, Human
auuucacauuaau

SEQ ID NO: 2810313 - RNA, 23 nt, Human
auuucacaguguguuugugauug

SEQ ID NO: 2810314 - RNA, 19 nt, Human
auuucacacgcuguucuaa

SEQ ID NO: 2810315 - RNA, 14 nt, Human
auuucacaggcuaa

SEQ ID NO: 2810316 - RNA, 15 nt, Human
auuuauccauuugua

SEQ ID NO: 2810317 - RNA, 16 nt, Human
auuuauccauuuguaa

SEQ ID NO: 2810318 - RNA, 13 nt, Human
auuuaucauucuu

SEQ ID NO: 2810319 - RNA, 17 nt, Human
auuuauccaaaaugugu

SEQ ID NO: 2810320 - RNA, 18 nt, Human
auuuauccaaaaugugua

SEQ ID NO: 2810321 - RNA, 19 nt, Human
auuuauccaaaauguguau

SEQ ID NO: 2810322 - RNA, 20 nt, Human
auuuauccacaggaaagugu

SEQ ID NO: 2810323 - RNA, 21 nt, Human
auuuauccacaggaaaguguu

SEQ ID NO: 2810324 - RNA, 12 nt, Human
auuuauccacua

SEQ ID NO: 2810325 - RNA, 18 nt, Human
auuuauauauuuauaacu

SEQ ID NO: 2810326 - RNA, 17 nt, Human
auuuauauauuuauaac

SEQ ID NO: 2810327 - RNA, 16 nt, Human
auuuauauauuuauaa

SEQ ID NO: 2810328 - RNA, 15 nt, Human
auuuauauauuuaua

SEQ ID NO: 2810329 - RNA, 18 nt, Human
auuuauccugaaauuuca

SEQ ID NO: 2810330 - RNA, 20 nt, Human
auuuauccugaaauuucaga

SEQ ID NO: 2810331 - RNA, 19 nt, Human
auuuauccugaaauuucag

SEQ ID NO: 2810332 - RNA, 21 nt, Human
auuuauccugaaauuucagau

SEQ ID NO: 2810333 - RNA, 13 nt, Human
auuuaucuaaauu

SEQ ID NO: 2810334 - RNA, 15 nt, Human
auuuaucuaaauuaa

SEQ ID NO: 2810335 - RNA, 20 nt, Human
auuuaucuaaauuaaagccu

SEQ ID NO: 2810336 - RNA, 16 nt, Human
auuuaauaaaaaaaca

SEQ ID NO: 2810337 - RNA, 19 nt, Human
auuuaauaaaauaauucua

SEQ ID NO: 2810338 - RNA, 21 nt, Human
auuuaauaaaauaauucuaaa

SEQ ID NO: 2810339 - RNA, 22 nt, Human
auuuaauaaaauaauucuaaag

SEQ ID NO: 2810340 - RNA, 19 nt, Human
auuuaaguucauauuccau

SEQ ID NO: 2810341 - RNA, 20 nt, Human
auuuaaguuucaaacuuacu

SEQ ID NO: 2810342 - RNA, 20 nt, Human
auuuaagugcguguguagag

SEQ ID NO: 2810343 - RNA, 21 nt, Human
auuuaagugcguguguagagu

SEQ ID NO: 2810344 - RNA, 22 nt, Human
auuuaagugcguguguagaguu

SEQ ID NO: 2810345 - RNA, 20 nt, Human
auuuaaguggggcaaaaccu

SEQ ID NO: 2810346 - RNA, 13 nt, Human
auuuaagcaaaua

SEQ ID NO: 2810347 - RNA, 15 nt, Human
auuuaagcaaauacu

SEQ ID NO: 2810348 - RNA, 16 nt, Human
auuuaagcaaauacuu

SEQ ID NO: 2810349 - RNA, 17 nt, Human
auuuaagcaaauacuua

SEQ ID NO: 2810350 - RNA, 22 nt, Human
auuuaagcaaauacuuagcaaa

SEQ ID NO: 2810351 - RNA, 16 nt, Human
auuuaagcaacaucuu

SEQ ID NO: 2810352 - RNA, 15 nt, Human
auuuaagcacaaacu

SEQ ID NO: 2810353 - RNA, 18 nt, Human
auuuaagcacaaacuuua

SEQ ID NO: 2810354 - RNA, 17 nt, Human
auuuaagccucauauuu

SEQ ID NO: 2810355 - RNA, 19 nt, Human
auuuaagccucauauuuaa

SEQ ID NO: 2810356 - RNA, 21 nt, Human
auuuaagccucauauuuaaag

SEQ ID NO: 2810357 - RNA, 19 nt, Human
auuuaagugcguguguaga

SEQ ID NO: 2810358 - RNA, 14 nt, Human
auuuaagugcgugu

SEQ ID NO: 2810359 - RNA, 16 nt, Human
auuuauaguuuguaca

SEQ ID NO: 2810360 - RNA, 22 nt, Human
auuuauaguuuguacaugcauu

SEQ ID NO: 2810361 - RNA, 15 nt, Human
auuuauauaaaugua

SEQ ID NO: 2810362 - RNA, 18 nt, Human
auuuauauaaauguaaaa

SEQ ID NO: 2810363 - RNA, 13 nt, Human
auuuauauaugaa

SEQ ID NO: 2810364 - RNA, 14 nt, Human
auuuauauaugaaa

SEQ ID NO: 2810365 - RNA, 15 nt, Human
auuuauauaugaaaa

SEQ ID NO: 2810366 - RNA, 16 nt, Human
auuuauauaugaaaac

SEQ ID NO: 2810367 - RNA, 17 nt, Human
auuuauauaugaaaacu

SEQ ID NO: 2810368 - RNA, 18 nt, Human
auuuauauaugaaaacua

SEQ ID NO: 2810369 - RNA, 19 nt, Human
auuuauauaugaaaacuau

SEQ ID NO: 2810370 - RNA, 20 nt, Human
auuuauauaugaaaacuaua

SEQ ID NO: 2810371 - RNA, 22 nt, Human
auuuauauaugaaaacuauaca

SEQ ID NO: 2810372 - RNA, 14 nt, Human
auuuauauauuuau

SEQ ID NO: 2810373 - RNA, 18 nt, Human
auuuaauuuaggacacau

SEQ ID NO: 2810374 - RNA, 15 nt, Human
auuuaauuuagugau

SEQ ID NO: 2810375 - RNA, 12 nt, Human
auuuaauuucca

SEQ ID NO: 2810376 - RNA, 13 nt, Human
auuuaauuuccag

SEQ ID NO: 2810377 - RNA, 12 nt, Human
auuuaauuauua

SEQ ID NO: 2810378 - RNA, 13 nt, Human
auuuaauuauuaa

SEQ ID NO: 2810379 - RNA, 15 nt, Human
auuuaauuauuaacu

SEQ ID NO: 2810380 - RNA, 20 nt, Human
auuuaauuauuaacuacauu

SEQ ID NO: 2810381 - RNA, 22 nt, Human
auugauaagagggcacacacug

SEQ ID NO: 2810382 - RNA, 23 nt, Human
auugauaagagggcacacacugu

SEQ ID NO: 2810383 - RNA, 16 nt, Human
auugauaagagggcac

SEQ ID NO: 2810384 - RNA, 14 nt, Human
auugagguaaguuu

SEQ ID NO: 2810385 - RNA, 14 nt, Human
auugaggcuuugug

SEQ ID NO: 2810386 - RNA, 15 nt, Human
auugaggcuuugugu

SEQ ID NO: 2810387 - RNA, 16 nt, Human
auugaggcuuuguguu

SEQ ID NO: 2810388 - RNA, 19 nt, Human
auugaggcuuuguguugua

SEQ ID NO: 2810389 - RNA, 22 nt, Human
auugaggcuuuguguuguaauu

SEQ ID NO: 2810390 - RNA, 16 nt, Human
auuuaagagacaguca

SEQ ID NO: 2810391 - RNA, 19 nt, Human
auuuaagagcaguccauuu

SEQ ID NO: 2810392 - RNA, 23 nt, Human
auuucuuaaauaaugcuucagau

SEQ ID NO: 2810393 - RNA, 14 nt, Human
auuucuguuucuca

SEQ ID NO: 2810394 - RNA, 15 nt, Human
auuucuguuucucau

SEQ ID NO: 2810395 - RNA, 23 nt, Human
auuucugaguuucauucuccugc

SEQ ID NO: 2810396 - RNA, 13 nt, Human
auuucugcaaaca

SEQ ID NO: 2810397 - RNA, 23 nt, Human
auuucagguuguuggugacuauc

SEQ ID NO: 2810398 - RNA, 21 nt, Human
auuucagguuuuguaaagaug

SEQ ID NO: 2810399 - RNA, 20 nt, Human
auuucagguuuuguaaagau

SEQ ID NO: 2810400 - RNA, 14 nt, Human
auuucaguacuuca

SEQ ID NO: 2810401 - RNA, 17 nt, Human
auuucaguacuucagca

SEQ ID NO: 2810402 - RNA, 18 nt, Human
auuucaguacuucagcaa

SEQ ID NO: 2810403 - RNA, 19 nt, Human
auuucaguacuucagcaag

SEQ ID NO: 2810404 - RNA, 22 nt, Human
auuucaguacuucagcaagaga

SEQ ID NO: 2810405 - RNA, 17 nt, Human
auuucaguccuguaguu

SEQ ID NO: 2810406 - RNA, 17 nt, Human
auuucucuaguaguuaa

SEQ ID NO: 2810407 - RNA, 22 nt, Human
auuucucuaguaguuaaaaaaa

SEQ ID NO: 2810408 - RNA, 16 nt, Human
auuucaguguaguuaa

SEQ ID NO: 2810409 - RNA, 17 nt, Human
auuucucuaauuaugca

SEQ ID NO: 2810410 - RNA, 21 nt, Human
auuugcaauauuccuuugggc

SEQ ID NO: 2810411 - RNA, 18 nt, Human
auuugcaaugggauguau

SEQ ID NO: 2810412 - RNA, 21 nt, Human
auuugcaaugggauguaugaa

SEQ ID NO: 2810413 - RNA, 23 nt, Human
auuugcacagaagcacaugcacc

SEQ ID NO: 2810414 - RNA, 12 nt, Human
auugaggaagag

SEQ ID NO: 2810415 - RNA, 15 nt, Human
auugaggaagagucu

SEQ ID NO: 2810416 - RNA, 21 nt, Human
auucgugauuuucaagcagca

SEQ ID NO: 2810417 - RNA, 16 nt, Human
auucgaaugaaaagac

SEQ ID NO: 2810418 - RNA, 18 nt, Human
auuccuuuguguuucuau

SEQ ID NO: 2810419 - RNA, 16 nt, Human
auuccuuugucuucaa

SEQ ID NO: 2810420 - RNA, 23 nt, Human
auuccuuugucuucaaacuguga

SEQ ID NO: 2810421 - RNA, 19 nt, Human
auucgcccgagcuguuuau

SEQ ID NO: 2810422 - RNA, 19 nt, Human
auucauuuauaagaagaga

SEQ ID NO: 2810423 - RNA, 18 nt, Human
auuccuuucccuuccucu

SEQ ID NO: 2810424 - RNA, 19 nt, Human
auuccuuucccuuccucuu

SEQ ID NO: 2810425 - RNA, 20 nt, Human
auuccuuucccuuccucuuc

SEQ ID NO: 2810426 - RNA, 13 nt, Human
auucauugucucu

SEQ ID NO: 2810427 - RNA, 23 nt, Human
auucucugugucuaagauucuag

SEQ ID NO: 2810428 - RNA, 22 nt, Human
auucucugugucuaagauucua

SEQ ID NO: 2810429 - RNA, 17 nt, Human
auucuuuaaauuucauc

SEQ ID NO: 2810430 - RNA, 15 nt, Human
auucucuuguauaag

SEQ ID NO: 2810431 - RNA, 18 nt, Human
auucucuuguauaagauc

SEQ ID NO: 2810432 - RNA, 17 nt, Human
auucuuuauuucuguca

SEQ ID NO: 2810433 - RNA, 21 nt, Human
auucuuuauuucugucauuca

SEQ ID NO: 2810434 - RNA, 14 nt, Human
auucuuucaauucu

SEQ ID NO: 2810435 - RNA, 20 nt, Human
auucuuucaauucuguaggu

SEQ ID NO: 2810436 - RNA, 18 nt, Human
auucuuucagcuaucagu

SEQ ID NO: 2810437 - RNA, 17 nt, Human
auucgcucccacauucu

SEQ ID NO: 2810438 - RNA, 11 nt, Human
auuagaugaau

SEQ ID NO: 2810439 - RNA, 23 nt, Human
auuagaugaauuauccuauuuca

SEQ ID NO: 2810440 - RNA, 13 nt, Human
auuagaugcaugu

SEQ ID NO: 2810441 - RNA, 14 nt, Human
auuagaugcauguu

SEQ ID NO: 2810442 - RNA, 20 nt, Human
auuagaugcauguugaccau

SEQ ID NO: 2810443 - RNA, 21 nt, Human
auuagaugcauguugaccaug

SEQ ID NO: 2810444 - RNA, 15 nt, Human
auuagagucagccuu

SEQ ID NO: 2810445 - RNA, 19 nt, Human
auuagagggaggagaauga

SEQ ID NO: 2810446 - RNA, 21 nt, Human
auuagagggaggagaaugagc

SEQ ID NO: 2810447 - RNA, 20 nt, Human
auuaugugacauuuuacauu

SEQ ID NO: 2810448 - RNA, 15 nt, Human
auucaagguggccaa

SEQ ID NO: 2810449 - RNA, 19 nt, Human
auuaugucuuuuauauuug

SEQ ID NO: 2810450 - RNA, 23 nt, Human
auuaugucuuuuauauuuguauc

SEQ ID NO: 2810451 - RNA, 14 nt, Human
auucaaguuauugu

SEQ ID NO: 2810452 - RNA, 15 nt, Human
auucaaguuauugua

SEQ ID NO: 2810453 - RNA, 16 nt, Human
auucaaguuauuguac

SEQ ID NO: 2810454 - RNA, 17 nt, Human
auuauguccacugugua

SEQ ID NO: 2810455 - RNA, 19 nt, Human
auuauguccacuguguaua

SEQ ID NO: 2810456 - RNA, 19 nt, Human
auuaugugacauuuuacau

SEQ ID NO: 2810457 - RNA, 13 nt, Human
auuaugugacauu

SEQ ID NO: 2810458 - RNA, 14 nt, Human
auuauguaaugcaa

SEQ ID NO: 2810459 - RNA, 14 nt, Human
auucauauugaaua

SEQ ID NO: 2810460 - RNA, 17 nt, Human
auucauauugaauauaa

SEQ ID NO: 2810461 - RNA, 15 nt, Human
auucauauuggaaaa

SEQ ID NO: 2810462 - RNA, 20 nt, Human
auucauauuggaaaaaucac

SEQ ID NO: 2810463 - RNA, 13 nt, Human
auucauauugaau

SEQ ID NO: 2810464 - RNA, 19 nt, Human
auucauauucuguuggaag

SEQ ID NO: 2810465 - RNA, 16 nt, Human
auucauauucuucaua

SEQ ID NO: 2810466 - RNA, 14 nt, Human
auucauauucuuuu

SEQ ID NO: 2810467 - RNA, 18 nt, Human
auucauucugugaucauu

SEQ ID NO: 2810468 - RNA, 19 nt, Human
auucauucugugaucauuu

SEQ ID NO: 2810469 - RNA, 22 nt, Human
auucauucugugaucauuuauu

SEQ ID NO: 2810470 - RNA, 12 nt, Human
auucauucucau

SEQ ID NO: 2810471 - RNA, 20 nt, Human
auucauucucauaauuccua

SEQ ID NO: 2810472 - RNA, 22 nt, Human
auucauucucauaauuccuaca

SEQ ID NO: 2810473 - RNA, 18 nt, Human
auucauucugcauugcua

SEQ ID NO: 2810474 - RNA, 17 nt, Human
auucauguuauauuuaa

SEQ ID NO: 2810475 - RNA, 22 nt, Human
auucauguuauauuuaaugcau

SEQ ID NO: 2810476 - RNA, 15 nt, Human
auucauuagcuguga

SEQ ID NO: 2810477 - RNA, 15 nt, Human
auucauuaaauguuu

SEQ ID NO: 2810478 - RNA, 16 nt, Human
auucauuaaauguuug

SEQ ID NO: 2810479 - RNA, 19 nt, Human
auucauaguaacuucuuau

SEQ ID NO: 2810480 - RNA, 22 nt, Human
auuacaagcgugagccacugca

SEQ ID NO: 2810481 - RNA, 13 nt, Human
auuaauuuuacuc

SEQ ID NO: 2810482 - RNA, 12 nt, Human
auuacaauggaa

SEQ ID NO: 2810483 - RNA, 15 nt, Human
auuacaauggaaaca

SEQ ID NO: 2810484 - RNA, 17 nt, Human
auuacaauggaaacaau

SEQ ID NO: 2810485 - RNA, 15 nt, Human
auuacacauuuguac

SEQ ID NO: 2810486 - RNA, 18 nt, Human
auuacacauuuguacaga

SEQ ID NO: 2810487 - RNA, 14 nt, Human
auuacacccaaaga

SEQ ID NO: 2810488 - RNA, 18 nt, Human
auuacacuguauuuguau

SEQ ID NO: 2810489 - RNA, 19 nt, Human
auuacacuguauuuguauc

SEQ ID NO: 2810490 - RNA, 15 nt, Human
auuacaggcuugagc

SEQ ID NO: 2810491 - RNA, 13 nt, Human
auuacagguguga

SEQ ID NO: 2810492 - RNA, 19 nt, Human
auuacaggcuccugccacc

SEQ ID NO: 2810493 - RNA, 17 nt, Human
auuacaggcuccugcca

SEQ ID NO: 2810494 - RNA, 20 nt, Human
auuacacuguauuuguaucu

SEQ ID NO: 2810495 - RNA, 16 nt, Human
auuacaggcuccugcc

SEQ ID NO: 2810496 - RNA, 15 nt, Human
auuacaggcuccugc

SEQ ID NO: 2810497 - RNA, 21 nt, Human
auuaauuugcaucugaaauag

SEQ ID NO: 2810498 - RNA, 15 nt, Human
auuaauuugcaucug

SEQ ID NO: 2810499 - RNA, 16 nt, Human
auuaauuugauuaaca

SEQ ID NO: 2810500 - RNA, 17 nt, Human
auuaauuugauuaacaa

SEQ ID NO: 2810501 - RNA, 18 nt, Human
auuaauuugauuaacaaa

SEQ ID NO: 2810502 - RNA, 20 nt, Human
auuaauuugauuaacaaaua

SEQ ID NO: 2810503 - RNA, 21 nt, Human
auuaauuugauuaacaaauau

SEQ ID NO: 2810504 - RNA, 22 nt, Human
auuaauuugauuaacaaauaug

SEQ ID NO: 2810505 - RNA, 18 nt, Human
auuaauuguuuugcacuu

SEQ ID NO: 2810506 - RNA, 19 nt, Human
auuaauuguuuugcacuuu

SEQ ID NO: 2810507 - RNA, 20 nt, Human
auuaauuguuuugcacuuuu

SEQ ID NO: 2810508 - RNA, 13 nt, Human
auuaauggcacug

SEQ ID NO: 2810509 - RNA, 14 nt, Human
auuaauggcacuga

SEQ ID NO: 2810510 - RNA, 15 nt, Human
auuaauggcacugau

SEQ ID NO: 2810511 - RNA, 15 nt, Human
auuaauggucuaaaa

SEQ ID NO: 2810512 - RNA, 17 nt, Human
auuaauggucuaaaaau

SEQ ID NO: 2810513 - RNA, 16 nt, Human
auuaauguacuuguuu

SEQ ID NO: 2810514 - RNA, 23 nt, Human
auuaauguacuuguuucucuguu

SEQ ID NO: 2810515 - RNA, 15 nt, Human
auuaauggaaauguu

SEQ ID NO: 2810516 - RNA, 20 nt, Human
auuaaugccauuaucccuga

SEQ ID NO: 2810517 - RNA, 20 nt, Human
auuaaauuuugaguucuaca

SEQ ID NO: 2810518 - RNA, 17 nt, Human
auuaaauuuuuuuuaca

SEQ ID NO: 2810519 - RNA, 19 nt, Human
auuaaauuuuuuuuacauu

SEQ ID NO: 2810520 - RNA, 18 nt, Human
auuaaauuuuuuuuacau

SEQ ID NO: 2810521 - RNA, 20 nt, Human
auuaaauuuuuuuuacauuu

SEQ ID NO: 2810522 - RNA, 12 nt, Human
auuaacaaaagu

SEQ ID NO: 2810523 - RNA, 12 nt, Human
auuaacaaauau

SEQ ID NO: 2810524 - RNA, 13 nt, Human
auuaacaaauaug

SEQ ID NO: 2810525 - RNA, 15 nt, Human
auuaacaaauaugcu

SEQ ID NO: 2810526 - RNA, 16 nt, Human
auuaacaaauaugcua

SEQ ID NO: 2810527 - RNA, 17 nt, Human
auuaacaaauaugcuaa

SEQ ID NO: 2810528 - RNA, 20 nt, Human
auuaacaaauaugcuaauuu

SEQ ID NO: 2810529 - RNA, 21 nt, Human
auuaacaaauaugcuaauuug

SEQ ID NO: 2810530 - RNA, 18 nt, Human
auuaacaacaauaacacu

SEQ ID NO: 2810531 - RNA, 13 nt, Human
auuaacacaaagg

SEQ ID NO: 2810532 - RNA, 22 nt, Human
ccuuuccuggacacucagaccu

SEQ ID NO: 2810533 - RNA, 17 nt, Human
ccuuuccuccuuuauca

SEQ ID NO: 2810534 - RNA, 18 nt, Human
ccuuuccuccuuuaucac

SEQ ID NO: 2810535 - RNA, 17 nt, Human
ccuuuccucucuccugu

SEQ ID NO: 2810536 - RNA, 13 nt, Human
ccuuuccuuccua

SEQ ID NO: 2810537 - RNA, 15 nt, Human
ccuuuccuuccuaau

SEQ ID NO: 2810538 - RNA, 18 nt, Human
ccuuuccuuccaucccua

SEQ ID NO: 2810539 - RNA, 16 nt, Human
ccuuuccuuccauccc

SEQ ID NO: 2810540 - RNA, 16 nt, Human
cgccaagugcgugccg

SEQ ID NO: 2810541 - RNA, 21 nt, Human
cgccacacagaccaccaucca

SEQ ID NO: 2810542 - RNA, 13 nt, Human
cgcaggggaaacg

SEQ ID NO: 2810543 - RNA, 22 nt, Human
cgcaggcuggcccugcccuggu

SEQ ID NO: 2810544 - RNA, 21 nt, Human
cgcaggcuggcccugcccugg

SEQ ID NO: 2810545 - RNA, 15 nt, Human
cgagucugggacaca

SEQ ID NO: 2810546 - RNA, 16 nt, Human
cgagucugggacacaa

SEQ ID NO: 2810547 - RNA, 17 nt, Human
cgagugagacaaaauuu

SEQ ID NO: 2810548 - RNA, 16 nt, Human
cgagugcuaaguguag

SEQ ID NO: 2810549 - RNA, 21 nt, Human
cgagugcuaaguguaggauau

SEQ ID NO: 2810550 - RNA, 20 nt, Human
cgagucucuucuccacugga

SEQ ID NO: 2810551 - RNA, 21 nt, Human
cgagucucuucuccacuggau

SEQ ID NO: 2810552 - RNA, 15 nt, Human
cgaggguccuggcuc

SEQ ID NO: 2810553 - RNA, 14 nt, Human
cgaggguccuggcu

SEQ ID NO: 2810554 - RNA, 20 nt, Human
cgaggggcucucagcucagc

SEQ ID NO: 2810555 - RNA, 17 nt, Human
cgagucucuucuccacu

SEQ ID NO: 2810556 - RNA, 18 nt, Human
cgagucucuucuccacug

SEQ ID NO: 2810557 - RNA, 23 nt, Human
cgaggguccuggcuccugagggg

SEQ ID NO: 2810558 - RNA, 20 nt, Human
cgaggguugauuaaggcagu

SEQ ID NO: 2810559 - RNA, 16 nt, Human
cgaggguccuggcucc

SEQ ID NO: 2810560 - RNA, 16 nt, Human
cgagucucuucuccac

SEQ ID NO: 2810561 - RNA, 21 nt, Human
cgagggcagggaccacacccu

SEQ ID NO: 2810562 - RNA, 20 nt, Human
cgcugaguauggagcagccu

SEQ ID NO: 2810563 - RNA, 21 nt, Human
cgcucuguggaugccagggcc

SEQ ID NO: 2810564 - RNA, 20 nt, Human
cgcucuguggaugccagggc

SEQ ID NO: 2810565 - RNA, 22 nt, Human
cgcucuguugcccaggcuggag

SEQ ID NO: 2810566 - RNA, 24 nt, Human
cgcucuucgcgcccgccccugcag

SEQ ID NO: 2810567 - RNA, 21 nt, Human
cgcucuuggcagguacucagc

SEQ ID NO: 2810568 - RNA, 19 nt, Human
cgcucuguugcccaggcug

SEQ ID NO: 2810569 - RNA, 20 nt, Human
cgcucugucgcccaggcugg

SEQ ID NO: 2810570 - RNA, 13 nt, Human
cgcucucuuuucu

SEQ ID NO: 2810571 - RNA, 19 nt, Human
cgcucucuuuucuguacuu

SEQ ID NO: 2810572 - RNA, 21 nt, Human
cgcucugccucaccgcuuccc

SEQ ID NO: 2810573 - RNA, 15 nt, Human
cgcucugcucagugg

SEQ ID NO: 2810574 - RNA, 12 nt, Human
cgcucucuuccu

SEQ ID NO: 2810575 - RNA, 14 nt, Human
cgcucucuuccugc

SEQ ID NO: 2810576 - RNA, 15 nt, Human
cgcucucuuccugcc

SEQ ID NO: 2810577 - RNA, 16 nt, Human
cgcucucuuccugccc

SEQ ID NO: 2810578 - RNA, 23 nt, Human
cgcucucuuccugccccucuuuc

SEQ ID NO: 2810579 - RNA, 22 nt, Human
cgccugcacuccucagggcagc

SEQ ID NO: 2810580 - RNA, 12 nt, Human
cgccugcccacc

SEQ ID NO: 2810581 - RNA, 13 nt, Human
cgccugcccaccu

SEQ ID NO: 2810582 - RNA, 15 nt, Human
cgccugcccaccugc

SEQ ID NO: 2810583 - RNA, 17 nt, Human
cgccugcccaccugccu

SEQ ID NO: 2810584 - RNA, 18 nt, Human
cgccugcccaccugccug

SEQ ID NO: 2810585 - RNA, 20 nt, Human
cgccugcccaccugccuggc

SEQ ID NO: 2810586 - RNA, 21 nt, Human
cgccugcccaccugccuggcc

SEQ ID NO: 2810587 - RNA, 17 nt, Human
cgccugcccucauggcc

SEQ ID NO: 2810588 - RNA, 20 nt, Human
cgccugcccucauggccccu

SEQ ID NO: 2810589 - RNA, 22 nt, Human
cgccugcccucauggccccucu

SEQ ID NO: 2810590 - RNA, 19 nt, Human
cgccugcaaacgcugccug

SEQ ID NO: 2810591 - RNA, 21 nt, Human
cgccugcaaacgcugccugcc

SEQ ID NO: 2810592 - RNA, 20 nt, Human
cgccugcaaacgcugccugc

SEQ ID NO: 2810593 - RNA, 22 nt, Human
cgccugcauguaaacacgccug

SEQ ID NO: 2810594 - RNA, 17 nt, Human
cgccugcauguaaacac

SEQ ID NO: 2810595 - RNA, 22 nt, Human
cgccugcaaacgcugccugccg

SEQ ID NO: 2810596 - RNA, 22 nt, Human
cgccugcaaacgcugccugccc

SEQ ID NO: 2810597 - RNA, 13 nt, Human
cgccacccgcagc

SEQ ID NO: 2810598 - RNA, 18 nt, Human
cgccaccgccacccgcag

SEQ ID NO: 2810599 - RNA, 18 nt, Human
cgcuggagugcagugagc

SEQ ID NO: 2810600 - RNA, 17 nt, Human
cgcuggagugcagugag

SEQ ID NO: 2810601 - RNA, 20 nt, Human
cgcugagugggagaaggcag

SEQ ID NO: 2810602 - RNA, 15 nt, Human
cgcugccugcccaca

SEQ ID NO: 2810603 - RNA, 19 nt, Human
cgcugcuccacgcgcuucg

SEQ ID NO: 2810604 - RNA, 21 nt, Human
cgcugcuccacgcgcuucgac

SEQ ID NO: 2810605 - RNA, 12 nt, Human
cgcugcuccuug

SEQ ID NO: 2810606 - RNA, 20 nt, Human
cgcuggccccuuugggcccu

SEQ ID NO: 2810607 - RNA, 22 nt, Human
cgcuggccccuuugggcccugc

SEQ ID NO: 2810608 - RNA, 16 nt, Human
cgcugacuucauggaa

SEQ ID NO: 2810609 - RNA, 20 nt, Human
cgguggcucaggccuauaac

SEQ ID NO: 2810610 - RNA, 15 nt, Human
cggugggcacccacc

SEQ ID NO: 2810611 - RNA, 18 nt, Human
cggugggcacccacccug

SEQ ID NO: 2810612 - RNA, 17 nt, Human
cgguggcggccccagca

SEQ ID NO: 2810613 - RNA, 20 nt, Human
cgggcuuugugugaaggcag

SEQ ID NO: 2810614 - RNA, 22 nt, Human
cgggcuuugugugaaggcagag

SEQ ID NO: 2810615 - RNA, 19 nt, Human
cggugggcacccacccugg

SEQ ID NO: 2810616 - RNA, 23 nt, Human
cggugggcacccacccugggacc

SEQ ID NO: 2810617 - RNA, 15 nt, Human
cguaaccacggaaaa

SEQ ID NO: 2810618 - RNA, 20 nt, Human
cguaaauacacaacacacac

SEQ ID NO: 2810619 - RNA, 13 nt, Human
cguaagcacuguu

SEQ ID NO: 2810620 - RNA, 14 nt, Human
cguaagcacuguuu

SEQ ID NO: 2810621 - RNA, 15 nt, Human
cguaagcacuguuuu

SEQ ID NO: 2810622 - RNA, 12 nt, Human
cguaaccagcca

SEQ ID NO: 2810623 - RNA, 13 nt, Human
cguaaccagccag

SEQ ID NO: 2810624 - RNA, 14 nt, Human
cguaaccagccaga

SEQ ID NO: 2810625 - RNA, 23 nt, Human
cguaaccagccagauccucuugg

SEQ ID NO: 2810626 - RNA, 17 nt, Human
cguacauucaauguuua

SEQ ID NO: 2810627 - RNA, 13 nt, Human
cguacuugugauu

SEQ ID NO: 2810628 - RNA, 16 nt, Human
cgggcugggagcucug

SEQ ID NO: 2810629 - RNA, 20 nt, Human
cgggcugggagcucugcaga

SEQ ID NO: 2810630 - RNA, 16 nt, Human
cgggccuggagaacua

SEQ ID NO: 2810631 - RNA, 20 nt, Human
cgggccuggagaacuagaga

SEQ ID NO: 2810632 - RNA, 15 nt, Human
cgggcucucugcugu

SEQ ID NO: 2810633 - RNA, 14 nt, Human
cgggcucucugcug

SEQ ID NO: 2810634 - RNA, 13 nt, Human
cgggccuguacag

SEQ ID NO: 2810635 - RNA, 14 nt, Human
cgggccuguacagu

SEQ ID NO: 2810636 - RNA, 17 nt, Human
cgggccuguacagucug

SEQ ID NO: 2810637 - RNA, 18 nt, Human
cgggccuguacagucugu

SEQ ID NO: 2810638 - RNA, 20 nt, Human
cgggccuguacagucugucu

SEQ ID NO: 2810639 - RNA, 14 nt, Human
cgggcccagcacuu

SEQ ID NO: 2810640 - RNA, 19 nt, Human
cggcuaauuuuuauauuuu

SEQ ID NO: 2810641 - RNA, 17 nt, Human
cggagacggagucccac

SEQ ID NO: 2810642 - RNA, 20 nt, Human
cggagacggagucccaccuu

SEQ ID NO: 2810643 - RNA, 17 nt, Human
cggaggccccacugaug

SEQ ID NO: 2810644 - RNA, 18 nt, Human
cggaggccccacugaugc

SEQ ID NO: 2810645 - RNA, 13 nt, Human
cggaggcugcccc

SEQ ID NO: 2810646 - RNA, 11 nt, Human
cggagaggaag

SEQ ID NO: 2810647 - RNA, 19 nt, Human
cggagaggaagagacacuc

SEQ ID NO: 2810648 - RNA, 13 nt, Human
cggagaggacagu

SEQ ID NO: 2810649 - RNA, 22 nt, Human
cggagucccaccuuggcugcag

SEQ ID NO: 2810650 - RNA, 21 nt, Human
cggagucccaccuuggcugca

SEQ ID NO: 2810651 - RNA, 16 nt, Human
cggaggcugcccccgg

SEQ ID NO: 2810652 - RNA, 19 nt, Human
cggaggcugcccccggccc

SEQ ID NO: 2810653 - RNA, 22 nt, Human
cggaggcugcccccggcccccu

SEQ ID NO: 2810654 - RNA, 12 nt, Human
cggaggcugugu

SEQ ID NO: 2810655 - RNA, 23 nt, Human
cggagucccaccuuggcugcagg

SEQ ID NO: 2810656 - RNA, 15 nt, Human
cggaggggccuggca

SEQ ID NO: 2810657 - RNA, 15 nt, Human
cggcuaagaggcugc

SEQ ID NO: 2810658 - RNA, 16 nt, Human
cggcuaagaggcugcu

SEQ ID NO: 2810659 - RNA, 18 nt, Human
cggcuaauuuuuguauuu

SEQ ID NO: 2810660 - RNA, 22 nt, Human
cuaauuugcauuaaauucacaa

SEQ ID NO: 2810661 - RNA, 21 nt, Human
cuaauuugcauuaaauucaca

SEQ ID NO: 2810662 - RNA, 19 nt, Human
cuaauuugcauuaaauuca

SEQ ID NO: 2810663 - RNA, 15 nt, Human
cuaauuuuaguauuc

SEQ ID NO: 2810664 - RNA, 17 nt, Human
cuaauuuuaguauucau

SEQ ID NO: 2810665 - RNA, 13 nt, Human
cuaauuuucucaa

SEQ ID NO: 2810666 - RNA, 19 nt, Human
cuaauuuucucaaaagcau

SEQ ID NO: 2810667 - RNA, 20 nt, Human
cuaauuuucucaaaagcauu

SEQ ID NO: 2810668 - RNA, 22 nt, Human
cuaauuuucucaaaagcauuua

SEQ ID NO: 2810669 - RNA, 20 nt, Human
cuaauuuuacacauuagauu

SEQ ID NO: 2810670 - RNA, 16 nt, Human
cuaauuugaggcucag

SEQ ID NO: 2810671 - RNA, 15 nt, Human
cuaauuugauguuua

SEQ ID NO: 2810672 - RNA, 16 nt, Human
cuaauuugauguuuac

SEQ ID NO: 2810673 - RNA, 12 nt, Human
cuaauuugcauu

SEQ ID NO: 2810674 - RNA, 14 nt, Human
cuaauuugcauuaa

SEQ ID NO: 2810675 - RNA, 13 nt, Human
cuaauuugcauua

SEQ ID NO: 2810676 - RNA, 19 nt, Human
cuaaguuucuaagauucua

SEQ ID NO: 2810677 - RNA, 21 nt, Human
cuaaguuucuaagauucuaaa

SEQ ID NO: 2810678 - RNA, 22 nt, Human
cuaaguuucuaagauucuaaag

SEQ ID NO: 2810679 - RNA, 23 nt, Human
cuaaguuucuaagauucuaaagg

SEQ ID NO: 2810680 - RNA, 12 nt, Human
cuaaguuucuaa

SEQ ID NO: 2810681 - RNA, 13 nt, Human
cuaaguuucuaag

SEQ ID NO: 2810682 - RNA, 14 nt, Human
cuaaguuucuaaga

SEQ ID NO: 2810683 - RNA, 15 nt, Human
cuaaguuucuaagau

SEQ ID NO: 2810684 - RNA, 17 nt, Human
cuaaguuucuaagauuc

SEQ ID NO: 2810685 - RNA, 18 nt, Human
cuaaguuucuaagauucu

SEQ ID NO: 2810686 - RNA, 20 nt, Human
cuaaguauuaaaacauugga

SEQ ID NO: 2810687 - RNA, 13 nt, Human
cuaaguauuaaaa

SEQ ID NO: 2810688 - RNA, 18 nt, Human
cuaaguauuaaaacauug

SEQ ID NO: 2810689 - RNA, 15 nt, Human
cuaaguccuuuaugu

SEQ ID NO: 2810690 - RNA, 14 nt, Human
cuaagucucuguga

SEQ ID NO: 2810691 - RNA, 13 nt, Human
cuaagucucugug

SEQ ID NO: 2810692 - RNA, 12 nt, Human
cuaagucucugu

SEQ ID NO: 2810693 - RNA, 19 nt, Human
cuaaguacacaauaagcaa

SEQ ID NO: 2810694 - RNA, 11 nt, Human
cuaaguauuaa

SEQ ID NO: 2810695 - RNA, 12 nt, Human
cuaaguauuaaa

SEQ ID NO: 2810696 - RNA, 20 nt, Human
cuaaguacacaauaagcaaa

SEQ ID NO: 2810697 - RNA, 13 nt, Human
cuaaguacuguaa

SEQ ID NO: 2810698 - RNA, 21 nt, Human
cuaaguacuguaauaauaccu

SEQ ID NO: 2810699 - RNA, 22 nt, Human
cuaaguacuguaauaauaccuc

SEQ ID NO: 2810700 - RNA, 23 nt, Human
cuaagacuuacucuaagaucuua

SEQ ID NO: 2810701 - RNA, 22 nt, Human
cuaagacugugacaacugucua

SEQ ID NO: 2810702 - RNA, 21 nt, Human
cuaagacucaaauguucuaag

SEQ ID NO: 2810703 - RNA, 22 nt, Human
cuaagacucaaauguucuaagu

SEQ ID NO: 2810704 - RNA, 17 nt, Human
cuaagacuuacucuaag

SEQ ID NO: 2810705 - RNA, 18 nt, Human
cuaagacuuacucuaaga

SEQ ID NO: 2810706 - RNA, 19 nt, Human
cuaagacuuacucuaagau

SEQ ID NO: 2810707 - RNA, 22 nt, Human
cuaagacuuacucuaagaucuu

SEQ ID NO: 2810708 - RNA, 17 nt, Human
cuaagaauucaaacugg

SEQ ID NO: 2810709 - RNA, 15 nt, Human
cuaagacacaaaugc

SEQ ID NO: 2810710 - RNA, 22 nt, Human
cuaagacacaaaugcaugaaca

SEQ ID NO: 2810711 - RNA, 23 nt, Human
cuaagacacaaaugcaugaacaa

SEQ ID NO: 2810712 - RNA, 21 nt, Human
cuaagacaccugaacccucca

SEQ ID NO: 2810713 - RNA, 13 nt, Human
cuaagacauguaa

SEQ ID NO: 2810714 - RNA, 16 nt, Human
cuaagaauacagcuuu

SEQ ID NO: 2810715 - RNA, 17 nt, Human
cuaagaauacagcuuuc

SEQ ID NO: 2810716 - RNA, 20 nt, Human
cuaagaauacagcuuucuga

SEQ ID NO: 2810717 - RNA, 13 nt, Human
cuaagacucaaau

SEQ ID NO: 2810718 - RNA, 16 nt, Human
cuaagacucaaauguu

SEQ ID NO: 2810719 - RNA, 17 nt, Human
cuaagacucaaauguuc

SEQ ID NO: 2810720 - RNA, 19 nt, Human
cuaagacucaaauguucua

SEQ ID NO: 2810721 - RNA, 20 nt, Human
cuaagacucaaauguucuaa

SEQ ID NO: 2810722 - RNA, 21 nt, Human
cuaaagugaugggcuuucucu

SEQ ID NO: 2810723 - RNA, 14 nt, Human
cuaaagugcuggga

SEQ ID NO: 2810724 - RNA, 16 nt, Human
cuaaagugcugggauu

SEQ ID NO: 2810725 - RNA, 20 nt, Human
cuaaagugcugggauuacag

SEQ ID NO: 2810726 - RNA, 15 nt, Human
cuaacguaaauacac

SEQ ID NO: 2810727 - RNA, 17 nt, Human
cuaacguugagccccug

SEQ ID NO: 2810728 - RNA, 22 nt, Human
cuaacggucuguucuguuucaa

SEQ ID NO: 2810729 - RNA, 16 nt, Human
cuaaaguauguaaagu

SEQ ID NO: 2810730 - RNA, 20 nt, Human
cuaaaguauguaaaguaugu

SEQ ID NO: 2810731 - RNA, 19 nt, Human
cuaaaguauuuuuauaaau

SEQ ID NO: 2810732 - RNA, 23 nt, Human
cuaaagguggccacaaauucuuu

SEQ ID NO: 2810733 - RNA, 16 nt, Human
cuaaagguguauuuaa

SEQ ID NO: 2810734 - RNA, 17 nt, Human
cuaaagguguauuuaaa

SEQ ID NO: 2810735 - RNA, 12 nt, Human
cuaaagcucuga

SEQ ID NO: 2810736 - RNA, 23 nt, Human
cuaaagguccacaggucuagacu

SEQ ID NO: 2810737 - RNA, 14 nt, Human
cuaaagcucugaca

SEQ ID NO: 2810738 - RNA, 22 nt, Human
cuaacguugagccccuggaggc

SEQ ID NO: 2810739 - RNA, 15 nt, Human
cuaagaaauauguga

SEQ ID NO: 2810740 - RNA, 16 nt, Human
cuaagaaauaugugag

SEQ ID NO: 2810741 - RNA, 17 nt, Human
cuaagaaauaugugaga

SEQ ID NO: 2810742 - RNA, 20 nt, Human
cuaagaaauaugugagauuu

SEQ ID NO: 2810743 - RNA, 21 nt, Human
cuaagaaauaugugagauuuu

SEQ ID NO: 2810744 - RNA, 15 nt, Human
cuaagaaauauucca

SEQ ID NO: 2810745 - RNA, 20 nt, Human
cuaacuuuagaagugcauuu

SEQ ID NO: 2810746 - RNA, 22 nt, Human
cuaacuuuagaagugcauuucu

SEQ ID NO: 2810747 - RNA, 23 nt, Human
cuaacuuuagaagugcauuucug

SEQ ID NO: 2810748 - RNA, 14 nt, Human
cuaagaagcuucua

SEQ ID NO: 2810749 - RNA, 16 nt, Human
cuaagaagcuucuaau

SEQ ID NO: 2810750 - RNA, 17 nt, Human
cuaagaagcuucuaaua

SEQ ID NO: 2810751 - RNA, 18 nt, Human
cuaagaagcuucuaauaa

SEQ ID NO: 2810752 - RNA, 21 nt, Human
cuaagaagcuucuaauaaauu

SEQ ID NO: 2810753 - RNA, 22 nt, Human
cuaagaagcuucuaauaaauua

SEQ ID NO: 2810754 - RNA, 23 nt, Human
cuaagaagcuucuaauaaauuau

SEQ ID NO: 2810755 - RNA, 13 nt, Human
cguucacuccaau

SEQ ID NO: 2810756 - RNA, 20 nt, Human
cuaaagauucuauaguucua

SEQ ID NO: 2810757 - RNA, 22 nt, Human
cuaaagauucuauaguucuaga

SEQ ID NO: 2810758 - RNA, 23 nt, Human
cuaaagauucuauaguucuagac

SEQ ID NO: 2810759 - RNA, 14 nt, Human
cuaaagccagccug

SEQ ID NO: 2810760 - RNA, 15 nt, Human
cuaaagccagccuga

SEQ ID NO: 2810761 - RNA, 13 nt, Human
cguuagcuuuuuc

SEQ ID NO: 2810762 - RNA, 16 nt, Human
cguuagaccgcucucu

SEQ ID NO: 2810763 - RNA, 11 nt, Human
cguuauauuaa

SEQ ID NO: 2810764 - RNA, 18 nt, Human
cguuauaaagugugccac

SEQ ID NO: 2810765 - RNA, 14 nt, Human
cgugaucaaagcca

SEQ ID NO: 2810766 - RNA, 13 nt, Human
cgugauacauuug

SEQ ID NO: 2810767 - RNA, 19 nt, Human
cgugagugucucuugucua

SEQ ID NO: 2810768 - RNA, 16 nt, Human
cguguucuccuuuucc

SEQ ID NO: 2810769 - RNA, 18 nt, Human
cgugaucaaagccacacu

SEQ ID NO: 2810770 - RNA, 12 nt, Human
cgugacaacacu

SEQ ID NO: 2810771 - RNA, 15 nt, Human
cgugacaacacuugu

SEQ ID NO: 2810772 - RNA, 14 nt, Human
cgugacaacacuug

SEQ ID NO: 2810773 - RNA, 20 nt, Human
cgugagccacugcaccgggc

SEQ ID NO: 2810774 - RNA, 15 nt, Human
cgugagccacugcac

SEQ ID NO: 2810775 - RNA, 14 nt, Human
cgugagccacugca

SEQ ID NO: 2810776 - RNA, 16 nt, Human
cgugacacucuccuug

SEQ ID NO: 2810777 - RNA, 18 nt, Human
cgugacacucuccuugca

SEQ ID NO: 2810778 - RNA, 21 nt, Human
cgugacacucuccuugcaguu

SEQ ID NO: 2810779 - RNA, 22 nt, Human
cgugacacucuccuugcaguuc

SEQ ID NO: 2810780 - RNA, 16 nt, Human
cgugagcgccugugca

SEQ ID NO: 2810781 - RNA, 20 nt, Human
cgugagcgccugugcacaca

SEQ ID NO: 2810782 - RNA, 21 nt, Human
cgugagcgccugugcacacac

SEQ ID NO: 2810783 - RNA, 22 nt, Human
cgugagccacugcaccgggcca

SEQ ID NO: 2810784 - RNA, 13 nt, Human
cgugagccccauc

SEQ ID NO: 2810785 - RNA, 14 nt, Human
cgugagccccaucu

SEQ ID NO: 2810786 - RNA, 16 nt, Human
cgugagccccaucuuc

SEQ ID NO: 2810787 - RNA, 11 nt, Human
ccuucucugug

SEQ ID NO: 2810788 - RNA, 12 nt, Human
ccuucucuguga

SEQ ID NO: 2810789 - RNA, 21 nt, Human
ccuucuguccuacucuguguc

SEQ ID NO: 2810790 - RNA, 20 nt, Human
ccuucuguccuacucugugu

SEQ ID NO: 2810791 - RNA, 22 nt, Human
ccuucuguccuacucuguguca

SEQ ID NO: 2810792 - RNA, 15 nt, Human
ccuucucucccugcc

SEQ ID NO: 2810793 - RNA, 16 nt, Human
ccuucccuaaagugau

SEQ ID NO: 2810794 - RNA, 17 nt, Human
ccuucccuaaagugaug

SEQ ID NO: 2810795 - RNA, 18 nt, Human
ccuuccccucccuggcuc

SEQ ID NO: 2810796 - RNA, 17 nt, Human
ccuuccccucccuggcu

SEQ ID NO: 2810797 - RNA, 15 nt, Human
ccuuccccucccugg

SEQ ID NO: 2810798 - RNA, 23 nt, Human
ccuuccccucagccacacccagg

SEQ ID NO: 2810799 - RNA, 22 nt, Human
ccuuccccucccuggcucccau

SEQ ID NO: 2810800 - RNA, 19 nt, Human
ccuuccccucccuggcucc

SEQ ID NO: 2810801 - RNA, 16 nt, Human
ccuuccccuccuucuc

SEQ ID NO: 2810802 - RNA, 23 nt, Human
ccuucccaugacccaggcugggc

SEQ ID NO: 2810803 - RNA, 22 nt, Human
ccuucccccaccgguccagcug

SEQ ID NO: 2810804 - RNA, 15 nt, Human
ccuuccccagcgucc

SEQ ID NO: 2810805 - RNA, 21 nt, Human
ccuucccccaccgguccagcu

SEQ ID NO: 2810806 - RNA, 19 nt, Human
ccuucccccuccaauccca

SEQ ID NO: 2810807 - RNA, 20 nt, Human
ccuucccccucccagggcca

SEQ ID NO: 2810808 - RNA, 17 nt, Human
ccuucccccucccaggg

SEQ ID NO: 2810809 - RNA, 16 nt, Human
ccuucccccucccagg

SEQ ID NO: 2810810 - RNA, 12 nt, Human
ccuucccuugcc

SEQ ID NO: 2810811 - RNA, 13 nt, Human
ccuucccuugcca

SEQ ID NO: 2810812 - RNA, 14 nt, Human
ccuucccuugccac

SEQ ID NO: 2810813 - RNA, 16 nt, Human
ccuucccuugccacuu

SEQ ID NO: 2810814 - RNA, 18 nt, Human
ccuucccuugccacuuug

SEQ ID NO: 2810815 - RNA, 19 nt, Human
ccuucccuugccacuuugc

SEQ ID NO: 2810816 - RNA, 20 nt, Human
ccuucccuugccacuuugca

SEQ ID NO: 2810817 - RNA, 14 nt, Human
ccuuccgacccucu

SEQ ID NO: 2810818 - RNA, 16 nt, Human
ccuuccgacccucugg

SEQ ID NO: 2810819 - RNA, 17 nt, Human
ccuuccgacccucuggg

SEQ ID NO: 2810820 - RNA, 18 nt, Human
ccuuccgacccucuggga

SEQ ID NO: 2810821 - RNA, 19 nt, Human
ccuuccgacccucugggaa

SEQ ID NO: 2810822 - RNA, 22 nt, Human
ccuuccgacccucugggaaccu

SEQ ID NO: 2810823 - RNA, 18 nt, Human
ccuuccuaauuccacagc

SEQ ID NO: 2810824 - RNA, 9 nt, Human
ccuuccuaa

SEQ ID NO: 2810825 - RNA, 16 nt, Human
ccuuccgccccuuccc

SEQ ID NO: 2810826 - RNA, 19 nt, Human
ccuuccgccccuucccuuc

SEQ ID NO: 2810827 - RNA, 20 nt, Human
ccuuccuaauuccacagcug

SEQ ID NO: 2810828 - RNA, 19 nt, Human
ccuuccuaauuccacagcu

SEQ ID NO: 2810829 - RNA, 20 nt, Human
ccuucccuuccacugccucu

SEQ ID NO: 2810830 - RNA, 23 nt, Human
ccuucccuuccacugccucugcc

SEQ ID NO: 2810831 - RNA, 12 nt, Human
ccuucccugcac

SEQ ID NO: 2810832 - RNA, 13 nt, Human
ccuucccugcacu

SEQ ID NO: 2810833 - RNA, 16 nt, Human
ccuuccucuccacugc

SEQ ID NO: 2810834 - RNA, 17 nt, Human
ccuuccucuccacugcc

SEQ ID NO: 2810835 - RNA, 14 nt, Human
ccuuccucuccacu

SEQ ID NO: 2810836 - RNA, 15 nt, Human
ccuuccucuccacug

SEQ ID NO: 2810837 - RNA, 16 nt, Human
ccuuccuccuccacca

SEQ ID NO: 2810838 - RNA, 21 nt, Human
ccuuccuccuccaccaccgcc

SEQ ID NO: 2810839 - RNA, 20 nt, Human
ccuuccucauccaccccauc

SEQ ID NO: 2810840 - RNA, 21 nt, Human
ccuuccucauccaccccaucc

SEQ ID NO: 2810841 - RNA, 14 nt, Human
ccuuccuccauccu

SEQ ID NO: 2810842 - RNA, 16 nt, Human
ccuuccucauccaccc

SEQ ID NO: 2810843 - RNA, 17 nt, Human
ccuuccucauccacccc

SEQ ID NO: 2810844 - RNA, 18 nt, Human
ccuuccucauccacccca

SEQ ID NO: 2810845 - RNA, 19 nt, Human
ccuuccucauccaccccau

SEQ ID NO: 2810846 - RNA, 14 nt, Human
ccuuccucacugcc

SEQ ID NO: 2810847 - RNA, 11 nt, Human
ccuuccuauaa

SEQ ID NO: 2810848 - RNA, 21 nt, Human
ccuuccuauaacuugaugcau

SEQ ID NO: 2810849 - RNA, 23 nt, Human
ccuuccuauaacuugaugcaugu

SEQ ID NO: 2810850 - RNA, 23 nt, Human
ccuucccccuuuuuuguccccca

SEQ ID NO: 2810851 - RNA, 18 nt, Human
ccuuccuacccuccugca

SEQ ID NO: 2810852 - RNA, 21 nt, Human
ccuuccuaauuccacagcugc

SEQ ID NO: 2810853 - RNA, 16 nt, Human
ccuuccuaagccugug

SEQ ID NO: 2810854 - RNA, 17 nt, Human
ccuuccuaagccugugg

SEQ ID NO: 2810855 - RNA, 23 nt, Human
ccuuccuaagccuguggcugugg

SEQ ID NO: 2810856 - RNA, 16 nt, Human
ccuucucugaaggaca

SEQ ID NO: 2810857 - RNA, 14 nt, Human
ccuucucugaagga

SEQ ID NO: 2810858 - RNA, 22 nt, Human
ccuucucugcuccaccacaucc

SEQ ID NO: 2810859 - RNA, 20 nt, Human
ccuucucugcuccaccacau

SEQ ID NO: 2810860 - RNA, 17 nt, Human
ccuucucugcuccacca

SEQ ID NO: 2810861 - RNA, 16 nt, Human
ccuucucugcuccacc

SEQ ID NO: 2810862 - RNA, 14 nt, Human
ccuucucugcucca

SEQ ID NO: 2810863 - RNA, 13 nt, Human
ccuucucugcucc

SEQ ID NO: 2810864 - RNA, 13 nt, Human
ccuucucugaaca

SEQ ID NO: 2810865 - RNA, 15 nt, Human
ccuucucugaacaca

SEQ ID NO: 2810866 - RNA, 17 nt, Human
ccuucucugaacacagg

SEQ ID NO: 2810867 - RNA, 18 nt, Human
ccuucucugaacacaggc

SEQ ID NO: 2810868 - RNA, 19 nt, Human
ccuucucugaacacaggca

SEQ ID NO: 2810869 - RNA, 20 nt, Human
ccuucucugaacacaggcag

SEQ ID NO: 2810870 - RNA, 21 nt, Human
ccuucucugaacacaggcagc

SEQ ID NO: 2810871 - RNA, 22 nt, Human
ccuucucugaacacaggcagcu

SEQ ID NO: 2810872 - RNA, 20 nt, Human
ccuuccucuccacugccuuc

SEQ ID NO: 2810873 - RNA, 24 nt, Human
ccuugccaccccacccucccugga

SEQ ID NO: 2810874 - RNA, 15 nt, Human
ccuugccacuuugca

SEQ ID NO: 2810875 - RNA, 19 nt, Human
ccuugccacuuugcacgac

SEQ ID NO: 2810876 - RNA, 23 nt, Human
ccuugccaccccacccucccugg

SEQ ID NO: 2810877 - RNA, 19 nt, Human
ccuuuauguggaaaacaga

SEQ ID NO: 2810878 - RNA, 23 nt, Human
ccuuuauguggaaaacagaacau

SEQ ID NO: 2810879 - RNA, 19 nt, Human
ccuuuauauuuagugaacu

SEQ ID NO: 2810880 - RNA, 19 nt, Human
ccuuuaguaccugaaaagu

SEQ ID NO: 2810881 - RNA, 17 nt, Human
ccuuuaguaucaguguu

SEQ ID NO: 2810882 - RNA, 18 nt, Human
ccuuuaguaucaguguuu

SEQ ID NO: 2810883 - RNA, 21 nt, Human
ccuuuaguaucaguguuuuaa

SEQ ID NO: 2810884 - RNA, 18 nt, Human
ccuuuaguaccugaaaag

SEQ ID NO: 2810885 - RNA, 21 nt, Human
ccuugcuccuggccuugcuga

SEQ ID NO: 2810886 - RNA, 14 nt, Human
ccuugcuaauuuuc

SEQ ID NO: 2810887 - RNA, 21 nt, Human
ccuugcggggauaaagagaga

SEQ ID NO: 2810888 - RNA, 15 nt, Human
ccuuucaaauuucac

SEQ ID NO: 2810889 - RNA, 16 nt, Human
ccuuucaaauuucaca

SEQ ID NO: 2810890 - RNA, 14 nt, Human
ccuuucccucgcua

SEQ ID NO: 2810891 - RNA, 12 nt, Human
ccuuucccuucc

SEQ ID NO: 2810892 - RNA, 13 nt, Human
ccuuucccuuccu

SEQ ID NO: 2810893 - RNA, 14 nt, Human
ccuuucccuuccuc

SEQ ID NO: 2810894 - RNA, 15 nt, Human
ccuuucccuuccucu

SEQ ID NO: 2810895 - RNA, 16 nt, Human
ccuuucccuuccucuu

SEQ ID NO: 2810896 - RNA, 14 nt, Human
ccuuucaaauuuag

SEQ ID NO: 2810897 - RNA, 15 nt, Human
ccuuucaaauuuaga

SEQ ID NO: 2810898 - RNA, 16 nt, Human
ccuuucaaauuuagaa

SEQ ID NO: 2810899 - RNA, 21 nt, Human
ccuuucaaauuuagaaacuaa

SEQ ID NO: 2810900 - RNA, 22 nt, Human
ccuuucaaauuuagaaacuaau

SEQ ID NO: 2810901 - RNA, 23 nt, Human
ccuuuauuacccccuccuucaga

SEQ ID NO: 2810902 - RNA, 14 nt, Human
ccuuuauucuggca

SEQ ID NO: 2810903 - RNA, 21 nt, Human
ccuuuauuggguaucaagaca

SEQ ID NO: 2810904 - RNA, 23 nt, Human
ccuugcaguucagcaccacccua

SEQ ID NO: 2810905 - RNA, 13 nt, Human
ccuugccacccca

SEQ ID NO: 2810906 - RNA, 17 nt, Human
ccuugccaccccacccu

SEQ ID NO: 2810907 - RNA, 19 nt, Human
ccuugccaccccacccucc

SEQ ID NO: 2810908 - RNA, 22 nt, Human
ccuugcaguucagcaccacccu

SEQ ID NO: 2810909 - RNA, 20 nt, Human
ccuugcaguucagcaccacc

SEQ ID NO: 2810910 - RNA, 19 nt, Human
ccuugcaguucagcaccac

SEQ ID NO: 2810911 - RNA, 17 nt, Human
ccuugcaguucagcacc

SEQ ID NO: 2810912 - RNA, 15 nt, Human
ccuugcagcuaguuu

SEQ ID NO: 2810913 - RNA, 13 nt, Human
ccuugcagaacug

SEQ ID NO: 2810914 - RNA, 14 nt, Human
ccuugcagaacugc

SEQ ID NO: 2810915 - RNA, 16 nt, Human
ccuugcagaacugcca

SEQ ID NO: 2810916 - RNA, 17 nt, Human
ccuugcagaacugccau

SEQ ID NO: 2810917 - RNA, 18 nt, Human
ccuugcagaacugccauu

SEQ ID NO: 2810918 - RNA, 18 nt, Human
ccuugcaccccucacucu

SEQ ID NO: 2810919 - RNA, 13 nt, Human
ccuugcaccccuc

SEQ ID NO: 2810920 - RNA, 14 nt, Human
ccuugcaccccuca

SEQ ID NO: 2810921 - RNA, 17 nt, Human
ccuugcaccccucacuc

SEQ ID NO: 2810922 - RNA, 23 nt, Human
ccuuaggccuuccucucuccaga

SEQ ID NO: 2810923 - RNA, 18 nt, Human
ccuuagggaagcuggccu

SEQ ID NO: 2810924 - RNA, 20 nt, Human
ccuuaggugauccacucgcc

SEQ ID NO: 2810925 - RNA, 14 nt, Human
ccuuaggccuuccu

SEQ ID NO: 2810926 - RNA, 15 nt, Human
ccuuaggccuuccuc

SEQ ID NO: 2810927 - RNA, 13 nt, Human
ccuuaggccuucc

SEQ ID NO: 2810928 - RNA, 22 nt, Human
ccuuaggccacaugggagcagu

SEQ ID NO: 2810929 - RNA, 19 nt, Human
ccuuaggccuaccugaugg

SEQ ID NO: 2810930 - RNA, 16 nt, Human
ccuuauaguuugggcu

SEQ ID NO: 2810931 - RNA, 19 nt, Human
ccuuauaguuugggcuuca

SEQ ID NO: 2810932 - RNA, 22 nt, Human
ccuuauaguuugggcuucagcc

SEQ ID NO: 2810933 - RNA, 13 nt, Human
ccuuaucaaagga

SEQ ID NO: 2810934 - RNA, 22 nt, Human
ccuuagucccccaacucugagc

SEQ ID NO: 2810935 - RNA, 15 nt, Human
ccuuagugggccagg

SEQ ID NO: 2810936 - RNA, 19 nt, Human
ccuuagugggccagggcug

SEQ ID NO: 2810937 - RNA, 22 nt, Human
ccuuagugggccagggcugccc

SEQ ID NO: 2810938 - RNA, 21 nt, Human
ccuuagggaagcuggccugag

SEQ ID NO: 2810939 - RNA, 20 nt, Human
ccuuagggaagcuggccuga

SEQ ID NO: 2810940 - RNA, 14 nt, Human
ccuuagucucaguu

SEQ ID NO: 2810941 - RNA, 20 nt, Human
ccuuagucucaguuugugug

SEQ ID NO: 2810942 - RNA, 17 nt, Human
ccuuaucugugcucagg

SEQ ID NO: 2810943 - RNA, 15 nt, Human
ccuuaucugugcuca

SEQ ID NO: 2810944 - RNA, 19 nt, Human
ccuuaugacuugcuacuuu

SEQ ID NO: 2810945 - RNA, 22 nt, Human
ccuuaucuccaagaccagagau

SEQ ID NO: 2810946 - RNA, 16 nt, Human
ccuuaucuccaagacc

SEQ ID NO: 2810947 - RNA, 16 nt, Human
ccuuauccuucaucuu

SEQ ID NO: 2810948 - RNA, 14 nt, Human
ccuuauccuuccuc

SEQ ID NO: 2810949 - RNA, 20 nt, Human
ccuuauccuuccucuccuuc

SEQ ID NO: 2810950 - RNA, 14 nt, Human
ccuuauccccacuu

SEQ ID NO: 2810951 - RNA, 18 nt, Human
ccuuaucaaaggacacca

SEQ ID NO: 2810952 - RNA, 14 nt, Human
ccuuaucaaaggac

SEQ ID NO: 2810953 - RNA, 13 nt, Human
ccuuaucagagcu

SEQ ID NO: 2810954 - RNA, 14 nt, Human
ccuuaucagagcua

SEQ ID NO: 2810955 - RNA, 22 nt, Human
ccuucccaaguaagaggcugga

SEQ ID NO: 2810956 - RNA, 17 nt, Human
ccuucccaaucagcacu

SEQ ID NO: 2810957 - RNA, 18 nt, Human
ccuucccaaucagcacug

SEQ ID NO: 2810958 - RNA, 19 nt, Human
ccuucccaaucagcacuga

SEQ ID NO: 2810959 - RNA, 20 nt, Human
ccuucccaaucagcacugaa

SEQ ID NO: 2810960 - RNA, 21 nt, Human
ccuucccaaucagcacugaaa

SEQ ID NO: 2810961 - RNA, 14 nt, Human
ccuucccaucgcug

SEQ ID NO: 2810962 - RNA, 15 nt, Human
ccuucccaucgcugu

SEQ ID NO: 2810963 - RNA, 18 nt, Human
ccuucccaugacccaggc

SEQ ID NO: 2810964 - RNA, 21 nt, Human
ccuucccaugacccaggcugg

SEQ ID NO: 2810965 - RNA, 15 nt, Human
ccuucccaugcccug

SEQ ID NO: 2810966 - RNA, 18 nt, Human
ccuucccacucaccccgg

SEQ ID NO: 2810967 - RNA, 15 nt, Human
ccuucccacucaccc

SEQ ID NO: 2810968 - RNA, 17 nt, Human
ccuucccacucaccccg

SEQ ID NO: 2810969 - RNA, 22 nt, Human
ccuuagcuggcauuacagcugg

SEQ ID NO: 2810970 - RNA, 19 nt, Human
ccuuagcuggcauuacagc

SEQ ID NO: 2810971 - RNA, 19 nt, Human
ccuuagcucccucccgcac

SEQ ID NO: 2810972 - RNA, 16 nt, Human
ccuuagccucccugaa

SEQ ID NO: 2810973 - RNA, 15 nt, Human
ccuuagccucccuga

SEQ ID NO: 2810974 - RNA, 14 nt, Human
ccuuagccucccug

SEQ ID NO: 2810975 - RNA, 21 nt, Human
ccuuagccuaaaauccacacc

SEQ ID NO: 2810976 - RNA, 20 nt, Human
ccuuagcacuaccacuccug

SEQ ID NO: 2810977 - RNA, 20 nt, Human
ccuuagcagggaaacagcua

SEQ ID NO: 2810978 - RNA, 19 nt, Human
ccuuagcagggaaacagcu

SEQ ID NO: 2810979 - RNA, 17 nt, Human
ccuguuggauuuguuua

SEQ ID NO: 2810980 - RNA, 24 nt, Human
ccuguuggauuuguuuaaaaggau

SEQ ID NO: 2810981 - RNA, 20 nt, Human
ccuuagauuuaguaguguaa

SEQ ID NO: 2810982 - RNA, 17 nt, Human
ccuguugcuguguuuaa

SEQ ID NO: 2810983 - RNA, 22 nt, Human
ccuguugcuguguuuaauuuga

SEQ ID NO: 2810984 - RNA, 22 nt, Human
ccuguugcccuuucuguaccau

SEQ ID NO: 2810985 - RNA, 21 nt, Human
ccuguugcgugacacucuccu

SEQ ID NO: 2810986 - RNA, 19 nt, Human
ccuguucagcuccagcuca

SEQ ID NO: 2810987 - RNA, 16 nt, Human
ccuguucagcuccagc

SEQ ID NO: 2810988 - RNA, 15 nt, Human
ccuguucagcuccag

SEQ ID NO: 2810989 - RNA, 14 nt, Human
ccuguucagcucca

SEQ ID NO: 2810990 - RNA, 21 nt, Human
ccuguucagcuccagcucacc

SEQ ID NO: 2810991 - RNA, 20 nt, Human
ccuguucagcuccagcucac

SEQ ID NO: 2810992 - RNA, 23 nt, Human
ccuguucagcuccagcucaccag

SEQ ID NO: 2810993 - RNA, 16 nt, Human
ccuguucugcuuuccu

SEQ ID NO: 2810994 - RNA, 19 nt, Human
ccuguucugggugcagcug

SEQ ID NO: 2810995 - RNA, 12 nt, Human
ccuguucuuccu

SEQ ID NO: 2810996 - RNA, 13 nt, Human
ccuguucuuccuc

SEQ ID NO: 2810997 - RNA, 14 nt, Human
ccuguucuuccucc

SEQ ID NO: 2810998 - RNA, 16 nt, Human
ccuguucuuccuccag

SEQ ID NO: 2810999 - RNA, 20 nt, Human
ccuguucuuccuccagcugc

SEQ ID NO: 2811000 - RNA, 24 nt, Human
ccuguucuuccuccagcugcacca

SEQ ID NO: 2811001 - RNA, 12 nt, Human
ccuguucccauu

SEQ ID NO: 2811002 - RNA, 12 nt, Human
ccuguucuaagg

SEQ ID NO: 2811003 - RNA, 16 nt, Human
ccuguucuaaggggga

SEQ ID NO: 2811004 - RNA, 21 nt, Human
ccuguucuaagggggagggga

SEQ ID NO: 2811005 - RNA, 13 nt, Human
ccuguucagcucc

SEQ ID NO: 2811006 - RNA, 19 nt, Human
ccuguuaggagaagcugca

SEQ ID NO: 2811007 - RNA, 13 nt, Human
ccuguuauuuuca

SEQ ID NO: 2811008 - RNA, 19 nt, Human
ccuguuauuuucaaguagc

SEQ ID NO: 2811009 - RNA, 15 nt, Human
ccuguucaaggcccc

SEQ ID NO: 2811010 - RNA, 21 nt, Human
ccuguucacucuacuuagcau

SEQ ID NO: 2811011 - RNA, 18 nt, Human
ccuguuagcuccucacug

SEQ ID NO: 2811012 - RNA, 22 nt, Human
ccuguuagcuccucacuguggu

SEQ ID NO: 2811013 - RNA, 23 nt, Human
ccuguuagcuccucacuguggua

SEQ ID NO: 2811014 - RNA, 16 nt, Human
ccugcugcugucaccu

SEQ ID NO: 2811015 - RNA, 18 nt, Human
ccugcugcugucaccucu

SEQ ID NO: 2811016 - RNA, 19 nt, Human
ccugcugcugucaccucuc

SEQ ID NO: 2811017 - RNA, 20 nt, Human
ccugcugcugucaccucucc

SEQ ID NO: 2811018 - RNA, 22 nt, Human
ccugcugcugucaccucuccca

SEQ ID NO: 2811019 - RNA, 23 nt, Human
ccugcugcugucaccucucccac

SEQ ID NO: 2811020 - RNA, 15 nt, Human
cuauguuacuauuuu

SEQ ID NO: 2811021 - RNA, 16 nt, Human
cuauguuacuauuuuc

SEQ ID NO: 2811022 - RNA, 18 nt, Human
cuauguuacuauuuucua

SEQ ID NO: 2811023 - RNA, 22 nt, Human
cuauguuacuauuuucuacaau

SEQ ID NO: 2811024 - RNA, 22 nt, Human
cuauguugcccaggcaggucuu

SEQ ID NO: 2811025 - RNA, 21 nt, Human
cuauguugcccaggcaggucu

SEQ ID NO: 2811026 - RNA, 19 nt, Human
cuauguugcccaggcaggu

SEQ ID NO: 2811027 - RNA, 18 nt, Human
cuauguugcccaggcagg

SEQ ID NO: 2811028 - RNA, 12 nt, Human
cuauccuucgug

SEQ ID NO: 2811029 - RNA, 13 nt, Human
cuauccuucguga

SEQ ID NO: 2811030 - RNA, 11 nt, Human
cuauccuuggc

SEQ ID NO: 2811031 - RNA, 12 nt, Human
cuauccuuggca

SEQ ID NO: 2811032 - RNA, 17 nt, Human
cuauccuuggcaccaaa

SEQ ID NO: 2811033 - RNA, 18 nt, Human
cuauccuuggcaccaaag

SEQ ID NO: 2811034 - RNA, 20 nt, Human
cuauccuuggcaccaaagau

SEQ ID NO: 2811035 - RNA, 13 nt, Human
cuauccuggcucu

SEQ ID NO: 2811036 - RNA, 19 nt, Human
cuauccuggcucuuuggag

SEQ ID NO: 2811037 - RNA, 14 nt, Human
cuaucucagagaua

SEQ ID NO: 2811038 - RNA, 13 nt, Human
cuaugucccuugc

SEQ ID NO: 2811039 - RNA, 16 nt, Human
cuaugucccuugcugu

SEQ ID NO: 2811040 - RNA, 15 nt, Human
cuauccugcuguucu

SEQ ID NO: 2811041 - RNA, 11 nt, Human
cuauccuggcc

SEQ ID NO: 2811042 - RNA, 19 nt, Human
cuauccugaaaauucugua

SEQ ID NO: 2811043 - RNA, 23 nt, Human
cuauccugacuucuaauaucauu

SEQ ID NO: 2811044 - RNA, 17 nt, Human
cuauccuacuuccccuu

SEQ ID NO: 2811045 - RNA, 18 nt, Human
cuauccuacaaggccuau

SEQ ID NO: 2811046 - RNA, 14 nt, Human
cuauccucacugcc

SEQ ID NO: 2811047 - RNA, 13 nt, Human
cuauccuacccca

SEQ ID NO: 2811048 - RNA, 14 nt, Human
cuaucccucacaca

SEQ ID NO: 2811049 - RNA, 22 nt, Human
cuaucauacuacugaaacagau

SEQ ID NO: 2811050 - RNA, 16 nt, Human
cuaucauaguuaacau

SEQ ID NO: 2811051 - RNA, 17 nt, Human
cuaucauaguuaacaua

SEQ ID NO: 2811052 - RNA, 13 nt, Human
cuaucagaagacc

SEQ ID NO: 2811053 - RNA, 19 nt, Human
cuaucagcagcuagaaaac

SEQ ID NO: 2811054 - RNA, 17 nt, Human
cuaucaccuauuuccau

SEQ ID NO: 2811055 - RNA, 16 nt, Human
cuaucaccuauuucca

SEQ ID NO: 2811056 - RNA, 18 nt, Human
cuacaaaacgcgcagaug

SEQ ID NO: 2811057 - RNA, 12 nt, Human
cucaauguuuga

SEQ ID NO: 2811058 - RNA, 18 nt, Human
cucaauguuuguaauaau

SEQ ID NO: 2811059 - RNA, 13 nt, Human
cuauuaaaacuca

SEQ ID NO: 2811060 - RNA, 16 nt, Human
cucaaugaagccagcu

SEQ ID NO: 2811061 - RNA, 22 nt, Human
cucaaugaaaaauagugucuuu

SEQ ID NO: 2811062 - RNA, 13 nt, Human
cucaaugaaaaau

SEQ ID NO: 2811063 - RNA, 12 nt, Human
cucaaugaaaaa

SEQ ID NO: 2811064 - RNA, 14 nt, Human
cucaauggacugga

SEQ ID NO: 2811065 - RNA, 17 nt, Human
cucaauggacuggaagg

SEQ ID NO: 2811066 - RNA, 20 nt, Human
cucaauggacuggaagggga

SEQ ID NO: 2811067 - RNA, 20 nt, Human
cucaauggaguaugucugau

SEQ ID NO: 2811068 - RNA, 22 nt, Human
cucaauggccuaaaacuggccu

SEQ ID NO: 2811069 - RNA, 23 nt, Human
cucaauggccuaaaacuggccug

SEQ ID NO: 2811070 - RNA, 11 nt, Human
cucaaugugaa

SEQ ID NO: 2811071 - RNA, 13 nt, Human
cucaaugugaaaa

SEQ ID NO: 2811072 - RNA, 14 nt, Human
cucaauccucuaag

SEQ ID NO: 2811073 - RNA, 17 nt, Human
cucaauccugcaguggg

SEQ ID NO: 2811074 - RNA, 15 nt, Human
cucaaucaagaaaau

SEQ ID NO: 2811075 - RNA, 21 nt, Human
cucaagugauucuccugccuc

SEQ ID NO: 2811076 - RNA, 22 nt, Human
cuauguugauccauccagcuug

SEQ ID NO: 2811077 - RNA, 11 nt, Human
cuauguuuacu

SEQ ID NO: 2811078 - RNA, 14 nt, Human
cuauguuucaucuu

SEQ ID NO: 2811079 - RNA, 15 nt, Human
cuauguuucaucuug

SEQ ID NO: 2811080 - RNA, 14 nt, Human
cuauguuugcacuu

SEQ ID NO: 2811081 - RNA, 18 nt, Human
cuauguugugguccauca

SEQ ID NO: 2811082 - RNA, 14 nt, Human
cucaaguugaaaga

SEQ ID NO: 2811083 - RNA, 20 nt, Human
cucaaguguucacaaccugg

SEQ ID NO: 2811084 - RNA, 13 nt, Human
cucaaguucuaag

SEQ ID NO: 2811085 - RNA, 14 nt, Human
cucaaguucuaaga

SEQ ID NO: 2811086 - RNA, 15 nt, Human
cucaaguucuaagau

SEQ ID NO: 2811087 - RNA, 18 nt, Human
cucaaguucuaagauucu

SEQ ID NO: 2811088 - RNA, 19 nt, Human
cucaaguucuaagauucua

SEQ ID NO: 2811089 - RNA, 20 nt, Human
cucaaguucuaagauucuaa

SEQ ID NO: 2811090 - RNA, 15 nt, Human
cucaguccauuuaua

SEQ ID NO: 2811091 - RNA, 19 nt, Human
cucaguccauuuauauaug

SEQ ID NO: 2811092 - RNA, 23 nt, Human
cucaguccauuuauauaugaaaa

SEQ ID NO: 2811093 - RNA, 12 nt, Human
cucagucccaaa

SEQ ID NO: 2811094 - RNA, 21 nt, Human
cucagucccaaauccuuccca

SEQ ID NO: 2811095 - RNA, 18 nt, Human
cucagucauuagacuccu

SEQ ID NO: 2811096 - RNA, 22 nt, Human
cucagucaugcauaaauaugca

SEQ ID NO: 2811097 - RNA, 23 nt, Human
cucagucaugcauaaauaugcag

SEQ ID NO: 2811098 - RNA, 14 nt, Human
cucaguccuccccu

SEQ ID NO: 2811099 - RNA, 16 nt, Human
cucaguccuccccuca

SEQ ID NO: 2811100 - RNA, 17 nt, Human
cucaguccuccccucac

SEQ ID NO: 2811101 - RNA, 18 nt, Human
cucaguccuccccucaca

SEQ ID NO: 2811102 - RNA, 19 nt, Human
cucaguccuccccucacag

SEQ ID NO: 2811103 - RNA, 20 nt, Human
cucaguccuccccucacagc

SEQ ID NO: 2811104 - RNA, 17 nt, Human
cucaguccauagcagag

SEQ ID NO: 2811105 - RNA, 15 nt, Human
cucaguccauagcag

SEQ ID NO: 2811106 - RNA, 15 nt, Human
cucaguauauuuaaa

SEQ ID NO: 2811107 - RNA, 18 nt, Human
cucaguauauuuaaacuc

SEQ ID NO: 2811108 - RNA, 14 nt, Human
cucagguugucuga

SEQ ID NO: 2811109 - RNA, 18 nt, Human
cucaguaugcugccccug

SEQ ID NO: 2811110 - RNA, 14 nt, Human
cucagucaugcaua

SEQ ID NO: 2811111 - RNA, 15 nt, Human
cucagucaugcauaa

SEQ ID NO: 2811112 - RNA, 16 nt, Human
cucagucaugcauaaa

SEQ ID NO: 2811113 - RNA, 18 nt, Human
cucagucaugcauaaaua

SEQ ID NO: 2811114 - RNA, 14 nt, Human
cucagugcagcaau

SEQ ID NO: 2811115 - RNA, 17 nt, Human
cucaugaggaggggccc

SEQ ID NO: 2811116 - RNA, 15 nt, Human
cucagugcaaccucu

SEQ ID NO: 2811117 - RNA, 16 nt, Human
cucagugcaaccucug

SEQ ID NO: 2811118 - RNA, 17 nt, Human
cucagugcaaccucugc

SEQ ID NO: 2811119 - RNA, 22 nt, Human
cucagugcaaccucugcuuccc

SEQ ID NO: 2811120 - RNA, 23 nt, Human
cucagugcaaccucugcuuccca

SEQ ID NO: 2811121 - RNA, 14 nt, Human
cucauggccccucu

SEQ ID NO: 2811122 - RNA, 15 nt, Human
cucauggccccucug

SEQ ID NO: 2811123 - RNA, 17 nt, Human
cucauggccccucugac

SEQ ID NO: 2811124 - RNA, 19 nt, Human
cucauggccccucugaccu

SEQ ID NO: 2811125 - RNA, 23 nt, Human
cucaugaggaggggccccccugc

SEQ ID NO: 2811126 - RNA, 23 nt, Human
cucaggugucccugcacuugcag

SEQ ID NO: 2811127 - RNA, 22 nt, Human
cucagguguuuuuuaugaagug

SEQ ID NO: 2811128 - RNA, 22 nt, Human
cucagccucccgaauagcuggg

SEQ ID NO: 2811129 - RNA, 23 nt, Human
cucagccggcguggcaaauauaa

SEQ ID NO: 2811130 - RNA, 21 nt, Human
cucagccucccgaauagcugg

SEQ ID NO: 2811131 - RNA, 19 nt, Human
cucagccucccgaauagcu

SEQ ID NO: 2811132 - RNA, 15 nt, Human
cucagcccugaggug

SEQ ID NO: 2811133 - RNA, 14 nt, Human
cucagcccugaggu

SEQ ID NO: 2811134 - RNA, 13 nt, Human
cucagcccugagg

SEQ ID NO: 2811135 - RNA, 23 nt, Human
cucagaagacacugaugggcaac

SEQ ID NO: 2811136 - RNA, 11 nt, Human
cucagaagccu

SEQ ID NO: 2811137 - RNA, 15 nt, Human
cucagaagccucugg

SEQ ID NO: 2811138 - RNA, 17 nt, Human
cucagaagccugaggcu

SEQ ID NO: 2811139 - RNA, 16 nt, Human
cucagaagccugaggc

SEQ ID NO: 2811140 - RNA, 18 nt, Human
cucagaagccugaggcug

SEQ ID NO: 2811141 - RNA, 15 nt, Human
cucagaagccugagg

SEQ ID NO: 2811142 - RNA, 14 nt, Human
cucagaagccugag

SEQ ID NO: 2811143 - RNA, 13 nt, Human
cucagaagccuga

SEQ ID NO: 2811144 - RNA, 17 nt, Human
cucagaagccucugggu

SEQ ID NO: 2811145 - RNA, 15 nt, Human
cucagaccagcucuu

SEQ ID NO: 2811146 - RNA, 14 nt, Human
cucagaccagcucu

SEQ ID NO: 2811147 - RNA, 16 nt, Human
cucagaccagcucuuc

SEQ ID NO: 2811148 - RNA, 14 nt, Human
cucagaccagagaa

SEQ ID NO: 2811149 - RNA, 15 nt, Human
cucagaccagagaag

SEQ ID NO: 2811150 - RNA, 15 nt, Human
cucagacugcaccca

SEQ ID NO: 2811151 - RNA, 16 nt, Human
cucagacugcacccag

SEQ ID NO: 2811152 - RNA, 17 nt, Human
cucagacugcacccagg

SEQ ID NO: 2811153 - RNA, 18 nt, Human
cucagacugcacccagga

SEQ ID NO: 2811154 - RNA, 19 nt, Human
cucagacugcacccaggag

SEQ ID NO: 2811155 - RNA, 20 nt, Human
cucagacugcacccaggagg

SEQ ID NO: 2811156 - RNA, 21 nt, Human
cucagacugcacccaggaggg

SEQ ID NO: 2811157 - RNA, 20 nt, Human
cucacgccuaugaucccagc

SEQ ID NO: 2811158 - RNA, 18 nt, Human
cucacgccuguaauccca

SEQ ID NO: 2811159 - RNA, 14 nt, Human
cucacgcugggucc

SEQ ID NO: 2811160 - RNA, 23 nt, Human
cucacgcuuaccucaaccauccu

SEQ ID NO: 2811161 - RNA, 13 nt, Human
cucacgcuucaca

SEQ ID NO: 2811162 - RNA, 15 nt, Human
cucacgcuucacagu

SEQ ID NO: 2811163 - RNA, 22 nt, Human
cucacgucuguaaucccagcgc

SEQ ID NO: 2811164 - RNA, 21 nt, Human
cucacgggcaugggcacuccc

SEQ ID NO: 2811165 - RNA, 16 nt, Human
cucacguccagguuca

SEQ ID NO: 2811166 - RNA, 17 nt, Human
cucacgggcaugggcac

SEQ ID NO: 2811167 - RNA, 22 nt, Human
cucagaagacacugaugggcaa

SEQ ID NO: 2811168 - RNA, 20 nt, Human
cucagaagacacugaugggc

SEQ ID NO: 2811169 - RNA, 17 nt, Human
cucagaagacacugaug

SEQ ID NO: 2811170 - RNA, 15 nt, Human
cucagaagacacuga

SEQ ID NO: 2811171 - RNA, 13 nt, Human
cucagaagacacu

SEQ ID NO: 2811172 - RNA, 13 nt, Human
cucagaacccagg

SEQ ID NO: 2811173 - RNA, 14 nt, Human
cucagaacccaggg

SEQ ID NO: 2811174 - RNA, 16 nt, Human
cucagaacccagggcu

SEQ ID NO: 2811175 - RNA, 17 nt, Human
cucagaacccagggcuc

SEQ ID NO: 2811176 - RNA, 23 nt, Human
cucagaacccagggcucugcccc

SEQ ID NO: 2811177 - RNA, 21 nt, Human
cucagaacccuuggcuugccc

SEQ ID NO: 2811178 - RNA, 21 nt, Human
cucagaacugucggaggaaag

SEQ ID NO: 2811179 - RNA, 22 nt, Human
cucagaacugucggaggaaaga

SEQ ID NO: 2811180 - RNA, 14 nt, Human
cucagaacccuugg

SEQ ID NO: 2811181 - RNA, 20 nt, Human
cucacuacccuauucucucu

SEQ ID NO: 2811182 - RNA, 23 nt, Human
cucaggccuauaaccccagcucc

SEQ ID NO: 2811183 - RNA, 19 nt, Human
cucaggccaacaagccaac

SEQ ID NO: 2811184 - RNA, 20 nt, Human
cucaggccaagaaacgucuu

SEQ ID NO: 2811185 - RNA, 13 nt, Human
cucagccugcaca

SEQ ID NO: 2811186 - RNA, 14 nt, Human
cucagccugcugcc

SEQ ID NO: 2811187 - RNA, 15 nt, Human
cucagccugcugccc

SEQ ID NO: 2811188 - RNA, 16 nt, Human
cucagccugcugccca

SEQ ID NO: 2811189 - RNA, 17 nt, Human
cucagccugcugcccag

SEQ ID NO: 2811190 - RNA, 19 nt, Human
cucagccugcugcccaggc

SEQ ID NO: 2811191 - RNA, 11 nt, Human
cucagccugca

SEQ ID NO: 2811192 - RNA, 14 nt, Human
cucagccugggaca

SEQ ID NO: 2811193 - RNA, 23 nt, Human
cucagggaaaagcagcucucccc

SEQ ID NO: 2811194 - RNA, 17 nt, Human
cucagggaaaagcagcu

SEQ ID NO: 2811195 - RNA, 17 nt, Human
cucaggcuuccuuggca

SEQ ID NO: 2811196 - RNA, 17 nt, Human
cucaggcuggugggagg

SEQ ID NO: 2811197 - RNA, 22 nt, Human
cucagggaaaagcagcucuccc

SEQ ID NO: 2811198 - RNA, 20 nt, Human
cucagggaaaagcagcucuc

SEQ ID NO: 2811199 - RNA, 24 nt, Human
cucaggcugcuggggccucagacg

SEQ ID NO: 2811200 - RNA, 13 nt, Human
cucaggcugcagc

SEQ ID NO: 2811201 - RNA, 16 nt, Human
cucaggcugcagcugg

SEQ ID NO: 2811202 - RNA, 17 nt, Human
cucaggcugcagcugga

SEQ ID NO: 2811203 - RNA, 18 nt, Human
cucaggcugcagcuggac

SEQ ID NO: 2811204 - RNA, 19 nt, Human
cucaggcugcagcuggaca

SEQ ID NO: 2811205 - RNA, 20 nt, Human
cucaggcugcagcuggacag

SEQ ID NO: 2811206 - RNA, 21 nt, Human
cucaggcugcagcuggacaga

SEQ ID NO: 2811207 - RNA, 22 nt, Human
cucaggcugcagcuggacagag

SEQ ID NO: 2811208 - RNA, 23 nt, Human
cucaggcugcagcuggacagagg

SEQ ID NO: 2811209 - RNA, 21 nt, Human
cucaggcgauccaccugucuc

SEQ ID NO: 2811210 - RNA, 13 nt, Human
cucaggcucucca

SEQ ID NO: 2811211 - RNA, 20 nt, Human
cucaggcgauccaccugucu

SEQ ID NO: 2811212 - RNA, 15 nt, Human
cuccccucacagccu

SEQ ID NO: 2811213 - RNA, 16 nt, Human
cuccccucacagccuc

SEQ ID NO: 2811214 - RNA, 17 nt, Human
cuccccucacagccucu

SEQ ID NO: 2811215 - RNA, 18 nt, Human
cuccccucacagccucug

SEQ ID NO: 2811216 - RNA, 13 nt, Human
cuccccucacagc

SEQ ID NO: 2811217 - RNA, 14 nt, Human
cuccccucacagcc

SEQ ID NO: 2811218 - RNA, 14 nt, Human
cuccccggcucgag

SEQ ID NO: 2811219 - RNA, 13 nt, Human
cucccuccagcac

SEQ ID NO: 2811220 - RNA, 14 nt, Human
cucccuccagcaca

SEQ ID NO: 2811221 - RNA, 15 nt, Human
cucccuccagcacaa

SEQ ID NO: 2811222 - RNA, 16 nt, Human
cucccuccagcacaaa

SEQ ID NO: 2811223 - RNA, 16 nt, Human
cucccaggagacaguu

SEQ ID NO: 2811224 - RNA, 21 nt, Human
cucccaggacucugaccccag

SEQ ID NO: 2811225 - RNA, 18 nt, Human
cucccaggaacugggcca

SEQ ID NO: 2811226 - RNA, 18 nt, Human
cucccagcuuguaggagc

SEQ ID NO: 2811227 - RNA, 19 nt, Human
cucccagcuuguaggagcu

SEQ ID NO: 2811228 - RNA, 20 nt, Human
cucccagcuuguaggagcug

SEQ ID NO: 2811229 - RNA, 19 nt, Human
cucccaggagacaguucaa

SEQ ID NO: 2811230 - RNA, 15 nt, Human
cucccccggcucuac

SEQ ID NO: 2811231 - RNA, 15 nt, Human
cucccccgccacucc

SEQ ID NO: 2811232 - RNA, 21 nt, Human
cucccccuaaaccccuguccc

SEQ ID NO: 2811233 - RNA, 22 nt, Human
cucccccuaaaccccuguccca

SEQ ID NO: 2811234 - RNA, 12 nt, Human
cucccccgccac

SEQ ID NO: 2811235 - RNA, 14 nt, Human
cucccccgccacuc

SEQ ID NO: 2811236 - RNA, 17 nt, Human
cucccucucaggaucca

SEQ ID NO: 2811237 - RNA, 22 nt, Human
cucccucucccccuuaccccac

SEQ ID NO: 2811238 - RNA, 13 nt, Human
cucccucucccug

SEQ ID NO: 2811239 - RNA, 15 nt, Human
cucccucucccuguc

SEQ ID NO: 2811240 - RNA, 14 nt, Human
cucccucuauuuau

SEQ ID NO: 2811241 - RNA, 19 nt, Human
cucccucuaggcucugccu

SEQ ID NO: 2811242 - RNA, 20 nt, Human
cucccucuaggcucugccuu

SEQ ID NO: 2811243 - RNA, 21 nt, Human
cucccucuaggcucugccuuc

SEQ ID NO: 2811244 - RNA, 22 nt, Human
cucccucuaggcucugccuucg

SEQ ID NO: 2811245 - RNA, 23 nt, Human
cucccugaaaauguuuuucugcc

SEQ ID NO: 2811246 - RNA, 21 nt, Human
cucccugaaaauguuuuucug

SEQ ID NO: 2811247 - RNA, 13 nt, Human
cucccugaagcca

SEQ ID NO: 2811248 - RNA, 14 nt, Human
cucccugaagccag

SEQ ID NO: 2811249 - RNA, 20 nt, Human
cucccugaaguaagcaaaga

SEQ ID NO: 2811250 - RNA, 15 nt, Human
cucccugaagccagc

SEQ ID NO: 2811251 - RNA, 16 nt, Human
cucccugaagccagcc

SEQ ID NO: 2811252 - RNA, 17 nt, Human
cucccugaagccagccu

SEQ ID NO: 2811253 - RNA, 18 nt, Human
cucccugaagccagccuu

SEQ ID NO: 2811254 - RNA, 19 nt, Human
cucccugaagccagccuuc

SEQ ID NO: 2811255 - RNA, 16 nt, Human
cucccugacccgucua

SEQ ID NO: 2811256 - RNA, 20 nt, Human
cucauggccccucugaccug

SEQ ID NO: 2811257 - RNA, 16 nt, Human
cucaugggguccaagu

SEQ ID NO: 2811258 - RNA, 15 nt, Human
cucaugguggguuca

SEQ ID NO: 2811259 - RNA, 16 nt, Human
cucauguaucaucugg

SEQ ID NO: 2811260 - RNA, 16 nt, Human
cucauguacauacccu

SEQ ID NO: 2811261 - RNA, 19 nt, Human
cucauguaucaucuggaua

SEQ ID NO: 2811262 - RNA, 17 nt, Human
cucauguaucaucugga

SEQ ID NO: 2811263 - RNA, 22 nt, Human
cucccagagcugguggacccag

SEQ ID NO: 2811264 - RNA, 17 nt, Human
cucccagagcuggugga

SEQ ID NO: 2811265 - RNA, 13 nt, Human
cucccagaauccc

SEQ ID NO: 2811266 - RNA, 15 nt, Human
cucccagaaucccag

SEQ ID NO: 2811267 - RNA, 16 nt, Human
cucccagaaucccagc

SEQ ID NO: 2811268 - RNA, 17 nt, Human
cucccagaaucccagcc

SEQ ID NO: 2811269 - RNA, 19 nt, Human
cucccagaaucccagccgg

SEQ ID NO: 2811270 - RNA, 20 nt, Human
cucccagaaucccagccggc

SEQ ID NO: 2811271 - RNA, 21 nt, Human
cucccagaaucccagccggcc

SEQ ID NO: 2811272 - RNA, 23 nt, Human
cucccacugggguccagggagca

SEQ ID NO: 2811273 - RNA, 15 nt, Human
cucccacaggcccuu

SEQ ID NO: 2811274 - RNA, 14 nt, Human
cucccacaggcccu

SEQ ID NO: 2811275 - RNA, 16 nt, Human
cucccacaggcccuuc

SEQ ID NO: 2811276 - RNA, 20 nt, Human
cucccacaggcccuuccucu

SEQ ID NO: 2811277 - RNA, 21 nt, Human
cucccacaggcccuuccucuc

SEQ ID NO: 2811278 - RNA, 14 nt, Human
cucccacugaguuu

SEQ ID NO: 2811279 - RNA, 21 nt, Human
cucccacgugggagacaagaa

SEQ ID NO: 2811280 - RNA, 20 nt, Human
cuccaggcuguaucccauga

SEQ ID NO: 2811281 - RNA, 23 nt, Human
cuccaggcuccuuuagcgcccag

SEQ ID NO: 2811282 - RNA, 15 nt, Human
cuccaggcuccuuua

SEQ ID NO: 2811283 - RNA, 14 nt, Human
cuccagguggcucu

SEQ ID NO: 2811284 - RNA, 17 nt, Human
cuccagguggcucugag

SEQ ID NO: 2811285 - RNA, 14 nt, Human
cuccaguauucuug

SEQ ID NO: 2811286 - RNA, 16 nt, Human
cuccaguaccuugcuu

SEQ ID NO: 2811287 - RNA, 21 nt, Human
cuccaggcugggugacagagc

SEQ ID NO: 2811288 - RNA, 15 nt, Human
cuccucuguccaggc

SEQ ID NO: 2811289 - RNA, 12 nt, Human
cuccucugucca

SEQ ID NO: 2811290 - RNA, 16 nt, Human
cuccucuguccugcuu

SEQ ID NO: 2811291 - RNA, 17 nt, Human
cuccucuguccugcuuc

SEQ ID NO: 2811292 - RNA, 19 nt, Human
cuccucuucccccuuccaa

SEQ ID NO: 2811293 - RNA, 23 nt, Human
cuccucuucuuuuuuuucauuau

SEQ ID NO: 2811294 - RNA, 12 nt, Human
cuccucuugcca

SEQ ID NO: 2811295 - RNA, 15 nt, Human
cuccucuugccacug

SEQ ID NO: 2811296 - RNA, 16 nt, Human
cuccucuugccacugc

SEQ ID NO: 2811297 - RNA, 18 nt, Human
cuccugggcuaagugauc

SEQ ID NO: 2811298 - RNA, 19 nt, Human
cuccuggccucaagugauu

SEQ ID NO: 2811299 - RNA, 22 nt, Human
cuccuggcucuugauacccccc

SEQ ID NO: 2811300 - RNA, 14 nt, Human
cuccuggccucaga

SEQ ID NO: 2811301 - RNA, 15 nt, Human
cuccuggccucagac

SEQ ID NO: 2811302 - RNA, 18 nt, Human
cuccuggccucagacugc

SEQ ID NO: 2811303 - RNA, 23 nt, Human
cuccuggccucagacugcaccca

SEQ ID NO: 2811304 - RNA, 23 nt, Human
cuccuggccuuuccugguuuuca

SEQ ID NO: 2811305 - RNA, 21 nt, Human
cuccuguccucccauccccug

SEQ ID NO: 2811306 - RNA, 16 nt, Human
cuccuuguggccuggg

SEQ ID NO: 2811307 - RNA, 15 nt, Human
cuccuuguccaccca

SEQ ID NO: 2811308 - RNA, 20 nt, Human
cuccuuguggccugggccuc

SEQ ID NO: 2811309 - RNA, 16 nt, Human
cuccuuguccacccac

SEQ ID NO: 2811310 - RNA, 18 nt, Human
cuccuuguggccugggcc

SEQ ID NO: 2811311 - RNA, 15 nt, Human
cuccuuucaccacau

SEQ ID NO: 2811312 - RNA, 16 nt, Human
cuccuuucacaaccuu

SEQ ID NO: 2811313 - RNA, 17 nt, Human
cuccuuucacaaccuuc

SEQ ID NO: 2811314 - RNA, 22 nt, Human
cuccuuuacaaaagaaauaccu

SEQ ID NO: 2811315 - RNA, 17 nt, Human
cuccuuuaagagcucug

SEQ ID NO: 2811316 - RNA, 13 nt, Human
cuccuuucacaac

SEQ ID NO: 2811317 - RNA, 20 nt, Human
cuccuguaacauacuggccu

SEQ ID NO: 2811318 - RNA, 22 nt, Human
cuccuguaacauacuggccugg

SEQ ID NO: 2811319 - RNA, 23 nt, Human
cuccuguaacauacuggccugga

SEQ ID NO: 2811320 - RNA, 17 nt, Human
cuccuguaagccaaaga

SEQ ID NO: 2811321 - RNA, 20 nt, Human
cuccuguaagccaaagaaau

SEQ ID NO: 2811322 - RNA, 20 nt, Human
cuccuguccaucagccagga

SEQ ID NO: 2811323 - RNA, 12 nt, Human
cuccuguccucc

SEQ ID NO: 2811324 - RNA, 13 nt, Human
cuccuguccuccc

SEQ ID NO: 2811325 - RNA, 15 nt, Human
cuccuguccucccau

SEQ ID NO: 2811326 - RNA, 20 nt, Human
cuccuguccucccauccccu

SEQ ID NO: 2811327 - RNA, 16 nt, Human
cuccuggggcguccag

SEQ ID NO: 2811328 - RNA, 13 nt, Human
cuccuggugucac

SEQ ID NO: 2811329 - RNA, 15 nt, Human
cuccuggugucaccc

SEQ ID NO: 2811330 - RNA, 17 nt, Human
cuccuggugucacccca

SEQ ID NO: 2811331 - RNA, 18 nt, Human
cuccuggugucaccccag

SEQ ID NO: 2811332 - RNA, 19 nt, Human
cuccuggugucaccccaga

SEQ ID NO: 2811333 - RNA, 20 nt, Human
cuccuggugucaccccagag

SEQ ID NO: 2811334 - RNA, 21 nt, Human
cuccuggugucaccccagagc

SEQ ID NO: 2811335 - RNA, 22 nt, Human
cuccuggugucaccccagagcc

SEQ ID NO: 2811336 - RNA, 23 nt, Human
cuccuggugucaccccagagcca

SEQ ID NO: 2811337 - RNA, 13 nt, Human
cuccugggcucag

SEQ ID NO: 2811338 - RNA, 14 nt, Human
cuccuggggccagg

SEQ ID NO: 2811339 - RNA, 15 nt, Human
cuccuggggccaggc

SEQ ID NO: 2811340 - RNA, 16 nt, Human
cuccuggggccaggcc

SEQ ID NO: 2811341 - RNA, 17 nt, Human
cuccuggggccaggccg

SEQ ID NO: 2811342 - RNA, 22 nt, Human
cuccuggggccaggccgggccu

SEQ ID NO: 2811343 - RNA, 23 nt, Human
cuccuggggccaggccgggccug

SEQ ID NO: 2811344 - RNA, 15 nt, Human
cuccuacccugcgcc

SEQ ID NO: 2811345 - RNA, 18 nt, Human
cuccuacccugcgcccag

SEQ ID NO: 2811346 - RNA, 15 nt, Human
cuccuaccucagccu

SEQ ID NO: 2811347 - RNA, 14 nt, Human
cuccuaccucagcc

SEQ ID NO: 2811348 - RNA, 13 nt, Human
cuccuaccucagc

SEQ ID NO: 2811349 - RNA, 12 nt, Human
cuccuaccucag

SEQ ID NO: 2811350 - RNA, 18 nt, Human
cuccuaccucagccuaga

SEQ ID NO: 2811351 - RNA, 16 nt, Human
cuccuaccucagccua

SEQ ID NO: 2811352 - RNA, 13 nt, Human
cuccuaccuggua

SEQ ID NO: 2811353 - RNA, 13 nt, Human
cuccuacuccuga

SEQ ID NO: 2811354 - RNA, 14 nt, Human
cuccuacuccugac

SEQ ID NO: 2811355 - RNA, 17 nt, Human
cuccuaccugcccugga

SEQ ID NO: 2811356 - RNA, 18 nt, Human
cuccuaccugcccuggaa

SEQ ID NO: 2811357 - RNA, 20 nt, Human
cuccuaccugcccuggaaca

SEQ ID NO: 2811358 - RNA, 23 nt, Human
cuccgcuuucuacccagcgagcc

SEQ ID NO: 2811359 - RNA, 21 nt, Human
cuccggcccuccuacccugcg

SEQ ID NO: 2811360 - RNA, 16 nt, Human
cucucccugccagagg

SEQ ID NO: 2811361 - RNA, 21 nt, Human
cucuaugccagcucaguccca

SEQ ID NO: 2811362 - RNA, 16 nt, Human
cucuaugccccaaaua

SEQ ID NO: 2811363 - RNA, 19 nt, Human
cucuaugccccaaauauag

SEQ ID NO: 2811364 - RNA, 18 nt, Human
cucucccccuuaccccac

SEQ ID NO: 2811365 - RNA, 17 nt, Human
cucucccuccccugcca

SEQ ID NO: 2811366 - RNA, 15 nt, Human
cucucccucuaggcu

SEQ ID NO: 2811367 - RNA, 22 nt, Human
cucucccucuaggcucugccuu

SEQ ID NO: 2811368 - RNA, 23 nt, Human
cucucccucuaggcucugccuuc

SEQ ID NO: 2811369 - RNA, 13 nt, Human
cucucccuccccu

SEQ ID NO: 2811370 - RNA, 11 nt, Human
cucucuuccug

SEQ ID NO: 2811371 - RNA, 12 nt, Human
cucucuuccugc

SEQ ID NO: 2811372 - RNA, 13 nt, Human
cucucuuccugcc

SEQ ID NO: 2811373 - RNA, 14 nt, Human
cucucuuccugccc

SEQ ID NO: 2811374 - RNA, 15 nt, Human
cucucuuccugcccc

SEQ ID NO: 2811375 - RNA, 18 nt, Human
cucucuuccugccccucu

SEQ ID NO: 2811376 - RNA, 19 nt, Human
cucucuuccugccccucuu

SEQ ID NO: 2811377 - RNA, 20 nt, Human
cucucuuccugccccucuuu

SEQ ID NO: 2811378 - RNA, 21 nt, Human
cucucuuccugccccucuuuc

SEQ ID NO: 2811379 - RNA, 15 nt, Human
cucucuucugcucca

SEQ ID NO: 2811380 - RNA, 14 nt, Human
cucucuucugcucc

SEQ ID NO: 2811381 - RNA, 12 nt, Human
cucucuucugcu

SEQ ID NO: 2811382 - RNA, 16 nt, Human
cucucugugcugugga

SEQ ID NO: 2811383 - RNA, 15 nt, Human
cucucugguggcucu

SEQ ID NO: 2811384 - RNA, 16 nt, Human
cucucugugucugaga

SEQ ID NO: 2811385 - RNA, 20 nt, Human
cucucuuaaaguuggaauuu

SEQ ID NO: 2811386 - RNA, 15 nt, Human
cucucuucagacucu

SEQ ID NO: 2811387 - RNA, 22 nt, Human
cucucuucagacucucagccca

SEQ ID NO: 2811388 - RNA, 23 nt, Human
cucucuucagacucucagcccag

SEQ ID NO: 2811389 - RNA, 12 nt, Human
cucucuucccuc

SEQ ID NO: 2811390 - RNA, 13 nt, Human
cucucuucccuca

SEQ ID NO: 2811391 - RNA, 14 nt, Human
cucucuucccucag

SEQ ID NO: 2811392 - RNA, 15 nt, Human
cucucuucccucaga

SEQ ID NO: 2811393 - RNA, 15 nt, Human
cucucuucccuuucc

SEQ ID NO: 2811394 - RNA, 20 nt, Human
cucucuucccuuuccccagc

SEQ ID NO: 2811395 - RNA, 22 nt, Human
cucucuucccuuuccccagcau

SEQ ID NO: 2811396 - RNA, 23 nt, Human
cucucuucccuuuccccagcauc

SEQ ID NO: 2811397 - RNA, 13 nt, Human
cucucuguauaaa

SEQ ID NO: 2811398 - RNA, 15 nt, Human
cucucuguauaaaca

SEQ ID NO: 2811399 - RNA, 16 nt, Human
cucucuguauaaacau

SEQ ID NO: 2811400 - RNA, 18 nt, Human
cucucuguauaaacauua

SEQ ID NO: 2811401 - RNA, 20 nt, Human
cucucuguauaaacauuaaa

SEQ ID NO: 2811402 - RNA, 17 nt, Human
cucucuguauuuuuucu

SEQ ID NO: 2811403 - RNA, 18 nt, Human
cucucugucccuugcugu

SEQ ID NO: 2811404 - RNA, 19 nt, Human
cucucugucccuugcugua

SEQ ID NO: 2811405 - RNA, 23 nt, Human
cucucugucccuugcuguaugcu

SEQ ID NO: 2811406 - RNA, 16 nt, Human
cucucugggccucaga

SEQ ID NO: 2811407 - RNA, 20 nt, Human
cucucugggccucagaggcc

SEQ ID NO: 2811408 - RNA, 15 nt, Human
cucgugagucauuua

SEQ ID NO: 2811409 - RNA, 20 nt, Human
cucgugagucauuuaaaugu

SEQ ID NO: 2811410 - RNA, 17 nt, Human
cucuaugccagcucagu

SEQ ID NO: 2811411 - RNA, 17 nt, Human
cucuaugagucuagaug

SEQ ID NO: 2811412 - RNA, 19 nt, Human
cucuaugagucuagauguu

SEQ ID NO: 2811413 - RNA, 13 nt, Human
cucuaugagucua

SEQ ID NO: 2811414 - RNA, 14 nt, Human
cucuaugagucuag

SEQ ID NO: 2811415 - RNA, 15 nt, Human
cucuaugagucuaga

SEQ ID NO: 2811416 - RNA, 16 nt, Human
cucuaugagucuagau

SEQ ID NO: 2811417 - RNA, 20 nt, Human
cuccuuucacaaccuucugu

SEQ ID NO: 2811418 - RNA, 22 nt, Human
cucugucccacuuggcaucagc

SEQ ID NO: 2811419 - RNA, 17 nt, Human
cucuguccauuuaucca

SEQ ID NO: 2811420 - RNA, 21 nt, Human
cucuguccauuuauccacagg

SEQ ID NO: 2811421 - RNA, 17 nt, Human
cucuuaggcacuuuggg

SEQ ID NO: 2811422 - RNA, 22 nt, Human
cucuuaggcauguaggacccug

SEQ ID NO: 2811423 - RNA, 13 nt, Human
cucuuagcugucu

SEQ ID NO: 2811424 - RNA, 15 nt, Human
cucugucccuugcug

SEQ ID NO: 2811425 - RNA, 16 nt, Human
cucugucccuugcugu

SEQ ID NO: 2811426 - RNA, 14 nt, Human
cucuguccugcuuc

SEQ ID NO: 2811427 - RNA, 15 nt, Human
cucuguccugcuucu

SEQ ID NO: 2811428 - RNA, 16 nt, Human
cucuguccugcuucug

SEQ ID NO: 2811429 - RNA, 17 nt, Human
cucuguccugcuucuga

SEQ ID NO: 2811430 - RNA, 16 nt, Human
cucugcugcugucccu

SEQ ID NO: 2811431 - RNA, 21 nt, Human
cucugcugccgccccacccag

SEQ ID NO: 2811432 - RNA, 22 nt, Human
cucugcugccugcccgcacagc

SEQ ID NO: 2811433 - RNA, 23 nt, Human
cucugcugccugcccgcacagca

SEQ ID NO: 2811434 - RNA, 21 nt, Human
cucugcugcugucccuccccc

SEQ ID NO: 2811435 - RNA, 22 nt, Human
cucugcugcugucccucccccu

SEQ ID NO: 2811436 - RNA, 18 nt, Human
cucugcuggcccagccaa

SEQ ID NO: 2811437 - RNA, 14 nt, Human
cucugcuggcccag

SEQ ID NO: 2811438 - RNA, 13 nt, Human
cucugcugcuuag

SEQ ID NO: 2811439 - RNA, 13 nt, Human
cucugcugccgcc

SEQ ID NO: 2811440 - RNA, 11 nt, Human
cucugcugcuu

SEQ ID NO: 2811441 - RNA, 23 nt, Human
cucugcugacagacacaggcccg

SEQ ID NO: 2811442 - RNA, 15 nt, Human
cucugcugccauggc

SEQ ID NO: 2811443 - RNA, 13 nt, Human
cucugcugccaug

SEQ ID NO: 2811444 - RNA, 20 nt, Human
cucugcugacagacacaggc

SEQ ID NO: 2811445 - RNA, 17 nt, Human
cucugcucgccuuagca

SEQ ID NO: 2811446 - RNA, 16 nt, Human
cucugcucgccuuagc

SEQ ID NO: 2811447 - RNA, 22 nt, Human
cucugcugacagacacaggccc

SEQ ID NO: 2811448 - RNA, 21 nt, Human
cucugcugacagacacaggcc

SEQ ID NO: 2811449 - RNA, 11 nt, Human
cucugcagcug

SEQ ID NO: 2811450 - RNA, 21 nt, Human
cucugcuccucuccccagcaa

SEQ ID NO: 2811451 - RNA, 15 nt, Human
cucugcucgccuuag

SEQ ID NO: 2811452 - RNA, 13 nt, Human
cucugcucgccuu

SEQ ID NO: 2811453 - RNA, 17 nt, Human
cucugcucgcccuccuu

SEQ ID NO: 2811454 - RNA, 20 nt, Human
cucugcucgcccuccuuucu

SEQ ID NO: 2811455 - RNA, 21 nt, Human
cucugcucgcccuccuuucug

SEQ ID NO: 2811456 - RNA, 12 nt, Human
cucugcagcugc

SEQ ID NO: 2811457 - RNA, 13 nt, Human
cucugcagcugcc

SEQ ID NO: 2811458 - RNA, 14 nt, Human
cucugcagcugccg

SEQ ID NO: 2811459 - RNA, 19 nt, Human
cucugcaggcuuaauaaaa

SEQ ID NO: 2811460 - RNA, 23 nt, Human
cucugcaggcuuaauaaaaauga

SEQ ID NO: 2811461 - RNA, 13 nt, Human
cucugcacauguc

SEQ ID NO: 2811462 - RNA, 14 nt, Human
cucugcacaugucu

SEQ ID NO: 2811463 - RNA, 12 nt, Human
ccuaagacaugu

SEQ ID NO: 2811464 - RNA, 15 nt, Human
ccuaagaccuggggu

SEQ ID NO: 2811465 - RNA, 23 nt, Human
ccuaagaccugggguugucagcu

SEQ ID NO: 2811466 - RNA, 15 nt, Human
ccuaagacugugaca

SEQ ID NO: 2811467 - RNA, 22 nt, Human
ccuaagagacugcguucugcaa

SEQ ID NO: 2811468 - RNA, 16 nt, Human
ccuaacugaagagaca

SEQ ID NO: 2811469 - RNA, 11 nt, Human
ccuaacuguau

SEQ ID NO: 2811470 - RNA, 14 nt, Human
ccuaacuguaucuu

SEQ ID NO: 2811471 - RNA, 16 nt, Human
ccuaacuguaucuuga

SEQ ID NO: 2811472 - RNA, 14 nt, Human
ccuaacuuuucaau

SEQ ID NO: 2811473 - RNA, 15 nt, Human
ccuaagaaauaugug

SEQ ID NO: 2811474 - RNA, 19 nt, Human
ccuaagaaauaugugagau

SEQ ID NO: 2811475 - RNA, 20 nt, Human
ccuaagaaauaugugagauu

SEQ ID NO: 2811476 - RNA, 15 nt, Human
ccggcuccaggcucc

SEQ ID NO: 2811477 - RNA, 21 nt, Human
ccgucgaggggcucucagcuc

SEQ ID NO: 2811478 - RNA, 22 nt, Human
ccgucgaggggcucucagcuca

SEQ ID NO: 2811479 - RNA, 14 nt, Human
ccggcuccaggcuc

SEQ ID NO: 2811480 - RNA, 13 nt, Human
ccggcuccaggcu

SEQ ID NO: 2811481 - RNA, 12 nt, Human
ccggcuccaggc

SEQ ID NO: 2811482 - RNA, 17 nt, Human
ccggccgcuccaccagc

SEQ ID NO: 2811483 - RNA, 12 nt, Human
ccuaagagauuc

SEQ ID NO: 2811484 - RNA, 14 nt, Human
ccuaagaaucagag

SEQ ID NO: 2811485 - RNA, 14 nt, Human
ccuaaucucauacc

SEQ ID NO: 2811486 - RNA, 18 nt, Human
ccuaaucucauaccucug

SEQ ID NO: 2811487 - RNA, 19 nt, Human
ccuaaucucauaccucuga

SEQ ID NO: 2811488 - RNA, 21 nt, Human
ccuaaucucauaccucugacc

SEQ ID NO: 2811489 - RNA, 12 nt, Human
ccuaaugaaagu

SEQ ID NO: 2811490 - RNA, 21 nt, Human
ccuaaugaaagugaugacaua

SEQ ID NO: 2811491 - RNA, 22 nt, Human
ccuaaugaaagugaugacauau

SEQ ID NO: 2811492 - RNA, 13 nt, Human
ccuagcccucuca

SEQ ID NO: 2811493 - RNA, 20 nt, Human
ccuagcccucucacauuuau

SEQ ID NO: 2811494 - RNA, 16 nt, Human
ccuagcccucucccuc

SEQ ID NO: 2811495 - RNA, 12 nt, Human
ccuagcagugaa

SEQ ID NO: 2811496 - RNA, 13 nt, Human
ccuagcagugaac

SEQ ID NO: 2811497 - RNA, 16 nt, Human
ccuagcagugaacuau

SEQ ID NO: 2811498 - RNA, 15 nt, Human
ccggccccugcuggu

SEQ ID NO: 2811499 - RNA, 14 nt, Human
ccggccgauggaga

SEQ ID NO: 2811500 - RNA, 15 nt, Human
ccggccgcuccacca

SEQ ID NO: 2811501 - RNA, 22 nt, Human
ccggcccugggcucggaggcug

SEQ ID NO: 2811502 - RNA, 24 nt, Human
ccggcccugggcucggaggcugcc

SEQ ID NO: 2811503 - RNA, 14 nt, Human
ccggcccuagccca

SEQ ID NO: 2811504 - RNA, 21 nt, Human
ccggcccuccuacccugcgcc

SEQ ID NO: 2811505 - RNA, 19 nt, Human
ccggcccugggcucggagg

SEQ ID NO: 2811506 - RNA, 18 nt, Human
ccggcauguuuccagcag

SEQ ID NO: 2811507 - RNA, 15 nt, Human
ccggccaauggaaac

SEQ ID NO: 2811508 - RNA, 16 nt, Human
ccggccaauggaaacc

SEQ ID NO: 2811509 - RNA, 17 nt, Human
ccggccaauggaaaccu

SEQ ID NO: 2811510 - RNA, 18 nt, Human
ccggccaauggaaaccuc

SEQ ID NO: 2811511 - RNA, 12 nt, Human
ccggccaccucu

SEQ ID NO: 2811512 - RNA, 13 nt, Human
ccggccaccucug

SEQ ID NO: 2811513 - RNA, 14 nt, Human
ccggccaccucugc

SEQ ID NO: 2811514 - RNA, 15 nt, Human
ccggccaccucugcg

SEQ ID NO: 2811515 - RNA, 21 nt, Human
cccuuccucuccacugccuuc

SEQ ID NO: 2811516 - RNA, 14 nt, Human
cccugucuaaaaaa

SEQ ID NO: 2811517 - RNA, 18 nt, Human
cccuguccucacugcucc

SEQ ID NO: 2811518 - RNA, 14 nt, Human
cccuguccucacug

SEQ ID NO: 2811519 - RNA, 15 nt, Human
cccuguccucacugc

SEQ ID NO: 2811520 - RNA, 16 nt, Human
cccuguccucacugcu

SEQ ID NO: 2811521 - RNA, 17 nt, Human
cccuguccucacugcuc

SEQ ID NO: 2811522 - RNA, 13 nt, Human
cccuguccucacu

SEQ ID NO: 2811523 - RNA, 22 nt, Human
cccuguccggaaugccacccac

SEQ ID NO: 2811524 - RNA, 21 nt, Human
cccuguccggaaugccaccca

SEQ ID NO: 2811525 - RNA, 23 nt, Human
cccugucccucccaccucuguga

SEQ ID NO: 2811526 - RNA, 24 nt, Human
cccugucccucccaccucugugac

SEQ ID NO: 2811527 - RNA, 21 nt, Human
cccugucgaguucggcucugg

SEQ ID NO: 2811528 - RNA, 23 nt, Human
cccugucgaguucggcucugggu

SEQ ID NO: 2811529 - RNA, 17 nt, Human
cccugucgggcuuugug

SEQ ID NO: 2811530 - RNA, 21 nt, Human
cccugucgggcuuugugugaa

SEQ ID NO: 2811531 - RNA, 13 nt, Human
cccuguccugcca

SEQ ID NO: 2811532 - RNA, 15 nt, Human
cccuguccugccaug

SEQ ID NO: 2811533 - RNA, 20 nt, Human
ccgcagaccuccccagcccc

SEQ ID NO: 2811534 - RNA, 21 nt, Human
ccgcagaccuccccagccccu

SEQ ID NO: 2811535 - RNA, 14 nt, Human
ccgcagaccucugg

SEQ ID NO: 2811536 - RNA, 17 nt, Human
ccgaccacuuccagggg

SEQ ID NO: 2811537 - RNA, 13 nt, Human
ccgcagaccuccc

SEQ ID NO: 2811538 - RNA, 15 nt, Human
ccgcagaccucccca

SEQ ID NO: 2811539 - RNA, 16 nt, Human
ccgcagaccuccccag

SEQ ID NO: 2811540 - RNA, 17 nt, Human
ccgcagaccuccccagc

SEQ ID NO: 2811541 - RNA, 18 nt, Human
ccgcagaccuccccagcc

SEQ ID NO: 2811542 - RNA, 19 nt, Human
ccgcagaccuccccagccc

SEQ ID NO: 2811543 - RNA, 23 nt, Human
ccgcccacaggaagccugcaguc

SEQ ID NO: 2811544 - RNA, 22 nt, Human
ccgcccagcugcaccugccagc

SEQ ID NO: 2811545 - RNA, 17 nt, Human
ccgcccagcugcaccug

SEQ ID NO: 2811546 - RNA, 17 nt, Human
ccgaccagacaccuuga

SEQ ID NO: 2811547 - RNA, 13 nt, Human
ccgaccagacacc

SEQ ID NO: 2811548 - RNA, 15 nt, Human
ccgaccaccugccca

SEQ ID NO: 2811549 - RNA, 18 nt, Human
ccgaccagacaccuugac

SEQ ID NO: 2811550 - RNA, 17 nt, Human
ccgaauagcugggacua

SEQ ID NO: 2811551 - RNA, 16 nt, Human
ccgaauagcugggacu

SEQ ID NO: 2811552 - RNA, 21 nt, Human
ccgaaguggacuggccccugg

SEQ ID NO: 2811553 - RNA, 13 nt, Human
ccgaagucuuuug

SEQ ID NO: 2811554 - RNA, 15 nt, Human
ccgaaggugcuggag

SEQ ID NO: 2811555 - RNA, 23 nt, Human
ccgaaggugcuggaggugggagc

SEQ ID NO: 2811556 - RNA, 21 nt, Human
ccgaagguuauggucaauccc

SEQ ID NO: 2811557 - RNA, 19 nt, Human
ccgaaagggacuuggaagc

SEQ ID NO: 2811558 - RNA, 11 nt, Human
cccuuccuuua

SEQ ID NO: 2811559 - RNA, 12 nt, Human
cccuuccucuuc

SEQ ID NO: 2811560 - RNA, 16 nt, Human
cccuuccucuucggcc

SEQ ID NO: 2811561 - RNA, 22 nt, Human
cccuuccucuucggcccucaga

SEQ ID NO: 2811562 - RNA, 14 nt, Human
cccugagauccccu

SEQ ID NO: 2811563 - RNA, 16 nt, Human
cccugagauccccuga

SEQ ID NO: 2811564 - RNA, 17 nt, Human
cccugagauccccugag

SEQ ID NO: 2811565 - RNA, 19 nt, Human
cccugagauccccugagcc

SEQ ID NO: 2811566 - RNA, 20 nt, Human
cccugagauccccugagccc

SEQ ID NO: 2811567 - RNA, 16 nt, Human
cccugagcaggaaagu

SEQ ID NO: 2811568 - RNA, 12 nt, Human
cccugagcgccu

SEQ ID NO: 2811569 - RNA, 22 nt, Human
cccugagcgccuggauuucugg

SEQ ID NO: 2811570 - RNA, 15 nt, Human
cccugaccucacugu

SEQ ID NO: 2811571 - RNA, 17 nt, Human
cccugacucucugugac

SEQ ID NO: 2811572 - RNA, 13 nt, Human
cccugacucucug

SEQ ID NO: 2811573 - RNA, 18 nt, Human
cccugacucucugugacc

SEQ ID NO: 2811574 - RNA, 9 nt, Human
cccugacug

SEQ ID NO: 2811575 - RNA, 16 nt, Human
cccugagaagcugcuc

SEQ ID NO: 2811576 - RNA, 20 nt, Human
cccugagaagcugcuccagg

SEQ ID NO: 2811577 - RNA, 17 nt, Human
cccugcccggcugcgga

SEQ ID NO: 2811578 - RNA, 14 nt, Human
cccugcccggcugc

SEQ ID NO: 2811579 - RNA, 20 nt, Human
cccugcccguucuugaaaug

SEQ ID NO: 2811580 - RNA, 16 nt, Human
cccugcccguguacau

SEQ ID NO: 2811581 - RNA, 17 nt, Human
cccugcccguguacaua

SEQ ID NO: 2811582 - RNA, 14 nt, Human
cccugcccuccccu

SEQ ID NO: 2811583 - RNA, 18 nt, Human
cccugccccucccuucaa

SEQ ID NO: 2811584 - RNA, 19 nt, Human
cccugccccucccuucaac

SEQ ID NO: 2811585 - RNA, 23 nt, Human
cccugccccucccuucaaccauu

SEQ ID NO: 2811586 - RNA, 17 nt, Human
cccugccccucccuuca

SEQ ID NO: 2811587 - RNA, 16 nt, Human
cccugccccccagccu

SEQ ID NO: 2811588 - RNA, 19 nt, Human
cccugccccccagccucug

SEQ ID NO: 2811589 - RNA, 21 nt, Human
cccugccccccagccucuggc

SEQ ID NO: 2811590 - RNA, 18 nt, Human
cccugagccccagggugc

SEQ ID NO: 2811591 - RNA, 22 nt, Human
cccugaggaaggaggggaagcu

SEQ ID NO: 2811592 - RNA, 15 nt, Human
cccugcccaggccgg

SEQ ID NO: 2811593 - RNA, 18 nt, Human
cccugcccaggccggcca

SEQ ID NO: 2811594 - RNA, 22 nt, Human
cccugcccaggccggccagccu

SEQ ID NO: 2811595 - RNA, 10 nt, Human
cccugcccau

SEQ ID NO: 2811596 - RNA, 12 nt, Human
cccugccccaaa

SEQ ID NO: 2811597 - RNA, 13 nt, Human
cccugccccaaau

SEQ ID NO: 2811598 - RNA, 15 nt, Human
cccugccccccagcc

SEQ ID NO: 2811599 - RNA, 20 nt, Human
cccugccccccagcccuccu

SEQ ID NO: 2811600 - RNA, 14 nt, Human
cccugccccccagc

SEQ ID NO: 2811601 - RNA, 12 nt, Human
cccugcccccca

SEQ ID NO: 2811602 - RNA, 23 nt, Human
cccuggaguguggcugaggaggc

SEQ ID NO: 2811603 - RNA, 15 nt, Human
cccuggccgcccccu

SEQ ID NO: 2811604 - RNA, 19 nt, Human
cccuggauccaucaggcca

SEQ ID NO: 2811605 - RNA, 22 nt, Human
cccuggaucacgacgcugcaga

SEQ ID NO: 2811606 - RNA, 23 nt, Human
cccuggaucacgacgcugcagag

SEQ ID NO: 2811607 - RNA, 24 nt, Human
cccuggaucacgacgcugcagagc

SEQ ID NO: 2811608 - RNA, 20 nt, Human
cccuggaguguggcugagga

SEQ ID NO: 2811609 - RNA, 21 nt, Human
cccuggaguguggcugaggag

SEQ ID NO: 2811610 - RNA, 15 nt, Human
cccugcccuggucca

SEQ ID NO: 2811611 - RNA, 14 nt, Human
cccugcccuggucc

SEQ ID NO: 2811612 - RNA, 22 nt, Human
cccugcccugguuuccugcccu

SEQ ID NO: 2811613 - RNA, 18 nt, Human
cccugcccugguccaggg

SEQ ID NO: 2811614 - RNA, 23 nt, Human
cccugcccugguuuccugcccug

SEQ ID NO: 2811615 - RNA, 11 nt, Human
cccugcccugc

SEQ ID NO: 2811616 - RNA, 11 nt, Human
cccugcccucu

SEQ ID NO: 2811617 - RNA, 17 nt, Human
cccugcccucuccuucc

SEQ ID NO: 2811618 - RNA, 17 nt, Human
cccugcccugaggaagg

SEQ ID NO: 2811619 - RNA, 15 nt, Human
cccugcccuccccuc

SEQ ID NO: 2811620 - RNA, 13 nt, Human
cccugcccugcug

SEQ ID NO: 2811621 - RNA, 12 nt, Human
cccugcccuggu

SEQ ID NO: 2811622 - RNA, 11 nt, Human
cccugcccugg

SEQ ID NO: 2811623 - RNA, 13 nt, Human
cccuggccucugu

SEQ ID NO: 2811624 - RNA, 15 nt, Human
cccuggccucugugc

SEQ ID NO: 2811625 - RNA, 18 nt, Human
cccuggccucugugccuu

SEQ ID NO: 2811626 - RNA, 19 nt, Human
cccuggccucugugccuuc

SEQ ID NO: 2811627 - RNA, 19 nt, Human
cccuggcucccacaggccc

SEQ ID NO: 2811628 - RNA, 23 nt, Human
cccuggcucccaugaccauacug

SEQ ID NO: 2811629 - RNA, 15 nt, Human
cccuggcucccauga

SEQ ID NO: 2811630 - RNA, 14 nt, Human
cccuggcucccaug

SEQ ID NO: 2811631 - RNA, 13 nt, Human
cccuggcucccau

SEQ ID NO: 2811632 - RNA, 20 nt, Human
cccuggcucccacaggcccu

SEQ ID NO: 2811633 - RNA, 13 nt, Human
cccuggcucugca

SEQ ID NO: 2811634 - RNA, 13 nt, Human
cccuggcucugcu

SEQ ID NO: 2811635 - RNA, 17 nt, Human
cccuggcugagggcagc

SEQ ID NO: 2811636 - RNA, 21 nt, Human
cccucgcuuggacggcugggc

SEQ ID NO: 2811637 - RNA, 23 nt, Human
cccucgcuuggacggcugggcac

SEQ ID NO: 2811638 - RNA, 22 nt, Human
cccucgaagcgcgccacucgcu

SEQ ID NO: 2811639 - RNA, 16 nt, Human
cccucgauauuuuuaa

SEQ ID NO: 2811640 - RNA, 12 nt, Human
cccucgccugug

SEQ ID NO: 2811641 - RNA, 23 nt, Human
cccucgccuguggagcucagccc

SEQ ID NO: 2811642 - RNA, 14 nt, Human
cccucgcugcuucu

SEQ ID NO: 2811643 - RNA, 15 nt, Human
cccucgcugcuucug

SEQ ID NO: 2811644 - RNA, 17 nt, Human
cccucgcugcuucugug

SEQ ID NO: 2811645 - RNA, 17 nt, Human
cccuccuacccugcgcc

SEQ ID NO: 2811646 - RNA, 18 nt, Human
cccuccuacccugcgccc

SEQ ID NO: 2811647 - RNA, 11 nt, Human
cccuccuccug

SEQ ID NO: 2811648 - RNA, 18 nt, Human
cccuccuccuggacuccu

SEQ ID NO: 2811649 - RNA, 16 nt, Human
cccuccuccuggacuc

SEQ ID NO: 2811650 - RNA, 21 nt, Human
cccuccgccuucacuccggug

SEQ ID NO: 2811651 - RNA, 13 nt, Human
cccuccgccuuca

SEQ ID NO: 2811652 - RNA, 14 nt, Human
cccuccgccuucac

SEQ ID NO: 2811653 - RNA, 22 nt, Human
cccuccgccuucacuccggugu

SEQ ID NO: 2811654 - RNA, 21 nt, Human
cccucgaagcgcgccacucgc

SEQ ID NO: 2811655 - RNA, 19 nt, Human
cccucgaagcgcgccacuc

SEQ ID NO: 2811656 - RNA, 15 nt, Human
cccucgaagcgcgcc

SEQ ID NO: 2811657 - RNA, 18 nt, Human
cccuccucuagcuguggg

SEQ ID NO: 2811658 - RNA, 19 nt, Human
cccuccucuagcugugggg

SEQ ID NO: 2811659 - RNA, 14 nt, Human
cccuccucucugcc

SEQ ID NO: 2811660 - RNA, 21 nt, Human
cccugaaucccccuugccacc

SEQ ID NO: 2811661 - RNA, 23 nt, Human
cccugaaucccccuugccacccc

SEQ ID NO: 2811662 - RNA, 20 nt, Human
cccugacagucccuccucuc

SEQ ID NO: 2811663 - RNA, 23 nt, Human
cccugaaggaacauuccuuaguc

SEQ ID NO: 2811664 - RNA, 20 nt, Human
cccugaagugagcacagccu

SEQ ID NO: 2811665 - RNA, 15 nt, Human
cccugaaucccccuu

SEQ ID NO: 2811666 - RNA, 20 nt, Human
cccugaaucccccuugccac

SEQ ID NO: 2811667 - RNA, 18 nt, Human
cccugaagccagccuucu

SEQ ID NO: 2811668 - RNA, 16 nt, Human
cccugaagccagccuu

SEQ ID NO: 2811669 - RNA, 17 nt, Human
cccugaagccagccuuc

SEQ ID NO: 2811670 - RNA, 11 nt, Human
cccugaagcca

SEQ ID NO: 2811671 - RNA, 14 nt, Human
cccugaagccagcc

SEQ ID NO: 2811672 - RNA, 15 nt, Human
cccugaagccagccu

SEQ ID NO: 2811673 - RNA, 14 nt, Human
cccugaacaagaau

SEQ ID NO: 2811674 - RNA, 12 nt, Human
ccccggcccccu

SEQ ID NO: 2811675 - RNA, 13 nt, Human
ccccggcccccug

SEQ ID NO: 2811676 - RNA, 17 nt, Human
ccucuccuuccuuaccc

SEQ ID NO: 2811677 - RNA, 14 nt, Human
ccucuccuuccuug

SEQ ID NO: 2811678 - RNA, 15 nt, Human
ccucuccuuccuugu

SEQ ID NO: 2811679 - RNA, 16 nt, Human
ccucuccuuccuuguu

SEQ ID NO: 2811680 - RNA, 21 nt, Human
ccucuccuucguaucccgagu

SEQ ID NO: 2811681 - RNA, 16 nt, Human
ccucucgagggcaggg

SEQ ID NO: 2811682 - RNA, 17 nt, Human
ccucucggaaggcuggc

SEQ ID NO: 2811683 - RNA, 13 nt, Human
ccucuccuuccua

SEQ ID NO: 2811684 - RNA, 21 nt, Human
ccucuccuuguggccugggcc

SEQ ID NO: 2811685 - RNA, 14 nt, Human
ccucuccuuugaaa

SEQ ID NO: 2811686 - RNA, 16 nt, Human
ccucgaggugccuucu

SEQ ID NO: 2811687 - RNA, 18 nt, Human
ccucgaggugccuucuuc

SEQ ID NO: 2811688 - RNA, 23 nt, Human
ccucgaggugccuucuucagggc

SEQ ID NO: 2811689 - RNA, 14 nt, Human
ccucgccucuccca

SEQ ID NO: 2811690 - RNA, 12 nt, Human
ccucgccugugg

SEQ ID NO: 2811691 - RNA, 13 nt, Human
ccucgccugugga

SEQ ID NO: 2811692 - RNA, 15 nt, Human
ccucgccuguggagc

SEQ ID NO: 2811693 - RNA, 21 nt, Human
ccucgccuguggagcucagcc

SEQ ID NO: 2811694 - RNA, 22 nt, Human
ccucgccuguggagcucagccc

SEQ ID NO: 2811695 - RNA, 12 nt, Human
ccucgcucuguu

SEQ ID NO: 2811696 - RNA, 15 nt, Human
ccucgcucuguuacc

SEQ ID NO: 2811697 - RNA, 19 nt, Human
ccucgcucuguuacccagg

SEQ ID NO: 2811698 - RNA, 21 nt, Human
ccucgcucuguuacccagggu

SEQ ID NO: 2811699 - RNA, 20 nt, Human
ccucggcuuuucucagcugg

SEQ ID NO: 2811700 - RNA, 19 nt, Human
ccucggcuuuucucagcug

SEQ ID NO: 2811701 - RNA, 17 nt, Human
ccucucgguugaaaccu

SEQ ID NO: 2811702 - RNA, 23 nt, Human
ccucucgguugaaaccuguauaa

SEQ ID NO: 2811703 - RNA, 21 nt, Human
ccucucggaaggcuggcuggg

SEQ ID NO: 2811704 - RNA, 20 nt, Human
ccucugccugaagucacaca

SEQ ID NO: 2811705 - RNA, 11 nt, Human
ccucugccuga

SEQ ID NO: 2811706 - RNA, 23 nt, Human
ccucugccucugacacacagcuc

SEQ ID NO: 2811707 - RNA, 21 nt, Human
ccucugccucugacacacagc

SEQ ID NO: 2811708 - RNA, 20 nt, Human
ccucugccucugacacacag

SEQ ID NO: 2811709 - RNA, 23 nt, Human
ccucugcccucauuacugggccu

SEQ ID NO: 2811710 - RNA, 14 nt, Human
ccucugcccugcgg

SEQ ID NO: 2811711 - RNA, 13 nt, Human
ccucugcccugcg

SEQ ID NO: 2811712 - RNA, 12 nt, Human
ccucugcccugc

SEQ ID NO: 2811713 - RNA, 11 nt, Human
ccucugcccug

SEQ ID NO: 2811714 - RNA, 12 nt, Human
ccuccuuucucc

SEQ ID NO: 2811715 - RNA, 14 nt, Human
ccuccuuucuccuc

SEQ ID NO: 2811716 - RNA, 13 nt, Human
ccuccuuucugug

SEQ ID NO: 2811717 - RNA, 14 nt, Human
ccuccuuucugugc

SEQ ID NO: 2811718 - RNA, 16 nt, Human
ccuccuuucugugccc

SEQ ID NO: 2811719 - RNA, 18 nt, Human
ccuccuuucugugcccua

SEQ ID NO: 2811720 - RNA, 22 nt, Human
ccuccuuucugugcccuacuca

SEQ ID NO: 2811721 - RNA, 15 nt, Human
ccucgaacuggcugc

SEQ ID NO: 2811722 - RNA, 16 nt, Human
ccucgaacuggcugca

SEQ ID NO: 2811723 - RNA, 19 nt, Human
ccucgaagcgcgccacucg

SEQ ID NO: 2811724 - RNA, 18 nt, Human
ccucgaagcgcgccacuc

SEQ ID NO: 2811725 - RNA, 15 nt, Human
ccucgcccuuucuua

SEQ ID NO: 2811726 - RNA, 15 nt, Human
ccucgacaucacugu

SEQ ID NO: 2811727 - RNA, 16 nt, Human
ccuccgccucccgggu

SEQ ID NO: 2811728 - RNA, 13 nt, Human
ccuccgccucccg

SEQ ID NO: 2811729 - RNA, 18 nt, Human
ccuccguccaggagccug

SEQ ID NO: 2811730 - RNA, 19 nt, Human
ccuccgguugcauacugga

SEQ ID NO: 2811731 - RNA, 16 nt, Human
ccuccuacccugcgcc

SEQ ID NO: 2811732 - RNA, 12 nt, Human
ccucccugucaa

SEQ ID NO: 2811733 - RNA, 23 nt, Human
ccucccugucaaagcugucacuu

SEQ ID NO: 2811734 - RNA, 15 nt, Human
ccucccuuccgaccc

SEQ ID NO: 2811735 - RNA, 18 nt, Human
ccuccgccaaugcacggc

SEQ ID NO: 2811736 - RNA, 20 nt, Human
ccuccgccaaugcacggccu

SEQ ID NO: 2811737 - RNA, 21 nt, Human
ccuccgccaaugcacggccuc

SEQ ID NO: 2811738 - RNA, 19 nt, Human
ccucccuguucaaggcccc

SEQ ID NO: 2811739 - RNA, 20 nt, Human
ccucccuggcucccaugacc

SEQ ID NO: 2811740 - RNA, 18 nt, Human
ccucccuggcucccauga

SEQ ID NO: 2811741 - RNA, 16 nt, Human
ccucccuggcucccau

SEQ ID NO: 2811742 - RNA, 15 nt, Human
ccucccuggcuccca

SEQ ID NO: 2811743 - RNA, 14 nt, Human
ccucccuggcuccc

SEQ ID NO: 2811744 - RNA, 13 nt, Human
ccucccuggcucc

SEQ ID NO: 2811745 - RNA, 12 nt, Human
ccucccuggcuc

SEQ ID NO: 2811746 - RNA, 23 nt, Human
ccucccuggaguguggcugagga

SEQ ID NO: 2811747 - RNA, 20 nt, Human
ccucccuggagccuccacug

SEQ ID NO: 2811748 - RNA, 12 nt, Human
ccucccuggagu

SEQ ID NO: 2811749 - RNA, 13 nt, Human
ccucccuggagug

SEQ ID NO: 2811750 - RNA, 13 nt, Human
ccucccaccucca

SEQ ID NO: 2811751 - RNA, 14 nt, Human
ccucccaccuccag

SEQ ID NO: 2811752 - RNA, 15 nt, Human
ccucccaccuccagu

SEQ ID NO: 2811753 - RNA, 19 nt, Human
ccucccaccucugugaccu

SEQ ID NO: 2811754 - RNA, 12 nt, Human
ccucccaccucu

SEQ ID NO: 2811755 - RNA, 13 nt, Human
ccucccaccucug

SEQ ID NO: 2811756 - RNA, 14 nt, Human
ccucccaccucugu

SEQ ID NO: 2811757 - RNA, 15 nt, Human
ccucccaccucugug

SEQ ID NO: 2811758 - RNA, 15 nt, Human
ccucccacugggguc

SEQ ID NO: 2811759 - RNA, 13 nt, Human
ccucccacugggg

SEQ ID NO: 2811760 - RNA, 23 nt, Human
ccucccagagcugguggacccag

SEQ ID NO: 2811761 - RNA, 11 nt, Human
ccucccagagg

SEQ ID NO: 2811762 - RNA, 18 nt, Human
ccuccccacccuccuggc

SEQ ID NO: 2811763 - RNA, 13 nt, Human
ccuccccacgccc

SEQ ID NO: 2811764 - RNA, 15 nt, Human
ccuccccacgcccuc

SEQ ID NO: 2811765 - RNA, 17 nt, Human
ccuccccacgcccuccc

SEQ ID NO: 2811766 - RNA, 12 nt, Human
ccuccccagccc

SEQ ID NO: 2811767 - RNA, 14 nt, Human
ccuccccagccccu

SEQ ID NO: 2811768 - RNA, 15 nt, Human
ccuccccagccccua

SEQ ID NO: 2811769 - RNA, 16 nt, Human
ccuccccagccccuag

SEQ ID NO: 2811770 - RNA, 17 nt, Human
ccuccccagccccuagc

SEQ ID NO: 2811771 - RNA, 22 nt, Human
ccuccccagccccuagcccagg

SEQ ID NO: 2811772 - RNA, 20 nt, Human
ccuagcuuuauauauggaca

SEQ ID NO: 2811773 - RNA, 21 nt, Human
ccuagcuuuauauauggacau

SEQ ID NO: 2811774 - RNA, 22 nt, Human
ccuagcuuuauauauggacaug

SEQ ID NO: 2811775 - RNA, 23 nt, Human
ccuagcuuuauauauggacaugg

SEQ ID NO: 2811776 - RNA, 20 nt, Human
ccuagcuugggaggcuuccc

SEQ ID NO: 2811777 - RNA, 21 nt, Human
ccuagcuugggaggcuucccc

SEQ ID NO: 2811778 - RNA, 14 nt, Human
ccucagccugcaca

SEQ ID NO: 2811779 - RNA, 12 nt, Human
ccucagccugca

SEQ ID NO: 2811780 - RNA, 15 nt, Human
ccucagccuccugag

SEQ ID NO: 2811781 - RNA, 18 nt, Human
ccucagccuccugaguag

SEQ ID NO: 2811782 - RNA, 16 nt, Human
ccuaggaccacucagc

SEQ ID NO: 2811783 - RNA, 17 nt, Human
ccuaggaccacucagcc

SEQ ID NO: 2811784 - RNA, 18 nt, Human
ccuaggaccacucagccc

SEQ ID NO: 2811785 - RNA, 19 nt, Human
ccuaggaccacucagcccc

SEQ ID NO: 2811786 - RNA, 20 nt, Human
ccuaggaccacucagccccu

SEQ ID NO: 2811787 - RNA, 21 nt, Human
ccuaggaccacucagccccua

SEQ ID NO: 2811788 - RNA, 23 nt, Human
ccuaggaccacucagccccuagg

SEQ ID NO: 2811789 - RNA, 14 nt, Human
ccucagccuccuga

SEQ ID NO: 2811790 - RNA, 15 nt, Human
ccucaggcacuagcc

SEQ ID NO: 2811791 - RNA, 16 nt, Human
ccucaggcacuagccu

SEQ ID NO: 2811792 - RNA, 17 nt, Human
ccucaggcacuagccuu

SEQ ID NO: 2811793 - RNA, 18 nt, Human
ccucaggcacuagccuuu

SEQ ID NO: 2811794 - RNA, 13 nt, Human
ccucaggcagcuc

SEQ ID NO: 2811795 - RNA, 19 nt, Human
ccucaggcacuagccuuug

SEQ ID NO: 2811796 - RNA, 22 nt, Human
ccucaggcacuagccuuuggcu

SEQ ID NO: 2811797 - RNA, 14 nt, Human
ccucaggcagcuca

SEQ ID NO: 2811798 - RNA, 15 nt, Human
ccucaggcagcucaa

SEQ ID NO: 2811799 - RNA, 13 nt, Human
ccugccuccugcc

SEQ ID NO: 2811800 - RNA, 20 nt, Human
ccugccuccugccugccccu

SEQ ID NO: 2811801 - RNA, 12 nt, Human
ccugccugccau

SEQ ID NO: 2811802 - RNA, 13 nt, Human
ccugccugccaug

SEQ ID NO: 2811803 - RNA, 14 nt, Human
ccugccugccaugu

SEQ ID NO: 2811804 - RNA, 12 nt, Human
ccugccuggagc

SEQ ID NO: 2811805 - RNA, 13 nt, Human
ccugccugcgucu

SEQ ID NO: 2811806 - RNA, 18 nt, Human
ccugccugcgucuuccgc

SEQ ID NO: 2811807 - RNA, 14 nt, Human
ccugcugcaggggc

SEQ ID NO: 2811808 - RNA, 15 nt, Human
ccugcugcaggggcu

SEQ ID NO: 2811809 - RNA, 17 nt, Human
ccugcugcaggggcucu

SEQ ID NO: 2811810 - RNA, 20 nt, Human
ccugcugcaggggcucugga

SEQ ID NO: 2811811 - RNA, 21 nt, Human
ccugcugcaggggcucuggag

SEQ ID NO: 2811812 - RNA, 22 nt, Human
ccugcugcaggggcucuggaga

SEQ ID NO: 2811813 - RNA, 23 nt, Human
ccugcugcaggggcucuggagag

SEQ ID NO: 2811814 - RNA, 10 nt, Human
ccugcugcau

SEQ ID NO: 2811815 - RNA, 22 nt, Human
ccugcugcccaaucuccaucug

SEQ ID NO: 2811816 - RNA, 15 nt, Human
ccugcugcccaggcu

SEQ ID NO: 2811817 - RNA, 17 nt, Human
ccugcugcccaggcugu

SEQ ID NO: 2811818 - RNA, 22 nt, Human
ccugcugcccaggcugugcagc

SEQ ID NO: 2811819 - RNA, 21 nt, Human
ccugcugccgccucccagccu

SEQ ID NO: 2811820 - RNA, 18 nt, Human
ccugcugccgccucccag

SEQ ID NO: 2811821 - RNA, 15 nt, Human
ccugcugccgccucc

SEQ ID NO: 2811822 - RNA, 14 nt, Human
ccugcugccgccuc

SEQ ID NO: 2811823 - RNA, 14 nt, Human
ccucuuuggcuccc

SEQ ID NO: 2811824 - RNA, 18 nt, Human
ccucuuuggcuccccugu

SEQ ID NO: 2811825 - RNA, 18 nt, Human
ccucuugcugucucugcu

SEQ ID NO: 2811826 - RNA, 19 nt, Human
ccucuugcugucucugcuc

SEQ ID NO: 2811827 - RNA, 20 nt, Human
ccucuugcugucucugcucg

SEQ ID NO: 2811828 - RNA, 23 nt, Human
ccucuugcugucucugcucgccc

SEQ ID NO: 2811829 - RNA, 21 nt, Human
ccucuucuuucagacuugcca

SEQ ID NO: 2811830 - RNA, 22 nt, Human
ccucuucuuucagacuugccau

SEQ ID NO: 2811831 - RNA, 23 nt, Human
ccucuucuuucagacuugccaug

SEQ ID NO: 2811832 - RNA, 12 nt, Human
ccucuuggagac

SEQ ID NO: 2811833 - RNA, 15 nt, Human
ccucuucuggcucaa

SEQ ID NO: 2811834 - RNA, 16 nt, Human
ccucuucugccaagag

SEQ ID NO: 2811835 - RNA, 21 nt, Human
ccucugccugaagucacacag

SEQ ID NO: 2811836 - RNA, 15 nt, Human
ccucugccugucucc

SEQ ID NO: 2811837 - RNA, 13 nt, Human
ccucugcggaccc

SEQ ID NO: 2811838 - RNA, 18 nt, Human
ccucugccuuagaggagc

SEQ ID NO: 2811839 - RNA, 20 nt, Human
ccucugccuuagaggagccc

SEQ ID NO: 2811840 - RNA, 19 nt, Human
ccucugccugucuccccca

SEQ ID NO: 2811841 - RNA, 16 nt, Human
ccucugcggaccccag

SEQ ID NO: 2811842 - RNA, 17 nt, Human
ccucugcggaccccagc

SEQ ID NO: 2811843 - RNA, 18 nt, Human
ccucugcggaccccagcu

SEQ ID NO: 2811844 - RNA, 20 nt, Human
ccucugcggaccccagcugu

SEQ ID NO: 2811845 - RNA, 12 nt, Human
ccucugcucagc

SEQ ID NO: 2811846 - RNA, 13 nt, Human
ccucugcucagcc

SEQ ID NO: 2811847 - RNA, 14 nt, Human
ccucugcucagcca

SEQ ID NO: 2811848 - RNA, 15 nt, Human
ccucugcucagccaa

SEQ ID NO: 2811849 - RNA, 17 nt, Human
ccucugcucagccaagc

SEQ ID NO: 2811850 - RNA, 14 nt, Human
ccugaguucaucca

SEQ ID NO: 2811851 - RNA, 20 nt, Human
ccugaguucauccaggccca

SEQ ID NO: 2811852 - RNA, 21 nt, Human
ccugaguggccagggaaucua

SEQ ID NO: 2811853 - RNA, 19 nt, Human
ccucuuuggcuccccugua

SEQ ID NO: 2811854 - RNA, 20 nt, Human
ccucuuuggcuccccuguac

SEQ ID NO: 2811855 - RNA, 16 nt, Human
ccugacucaucauuug

SEQ ID NO: 2811856 - RNA, 20 nt, Human
ccugacgucugaagcuugac

SEQ ID NO: 2811857 - RNA, 23 nt, Human
ccugacuauuauguuguuagaga

SEQ ID NO: 2811858 - RNA, 13 nt, Human
ccugacgaaacug

SEQ ID NO: 2811859 - RNA, 16 nt, Human
ccugacgaaacuggcc

SEQ ID NO: 2811860 - RNA, 17 nt, Human
ccugacgaaacuggccc

SEQ ID NO: 2811861 - RNA, 18 nt, Human
ccugacgaaacuggcccc

SEQ ID NO: 2811862 - RNA, 21 nt, Human
ccugacgaaacuggccccgga

SEQ ID NO: 2811863 - RNA, 17 nt, Human
ccugaccuuccuuccug

SEQ ID NO: 2811864 - RNA, 14 nt, Human
ccugagugccuggc

SEQ ID NO: 2811865 - RNA, 15 nt, Human
ccugagugccuggcc

SEQ ID NO: 2811866 - RNA, 23 nt, Human
ccugaggggcaucugccccuccc

SEQ ID NO: 2811867 - RNA, 22 nt, Human
ccugaggggcaucugccccucc

SEQ ID NO: 2811868 - RNA, 20 nt, Human
ccugaggggcaucugccccu

SEQ ID NO: 2811869 - RNA, 19 nt, Human
ccugaggggcaucugcccc

SEQ ID NO: 2811870 - RNA, 18 nt, Human
ccugaggggcaucugccc

SEQ ID NO: 2811871 - RNA, 16 nt, Human
cccccuucaagccugu

SEQ ID NO: 2811872 - RNA, 11 nt, Human
cccccuuccac

SEQ ID NO: 2811873 - RNA, 23 nt, Human
ccccgcccagcugcaccugccag

SEQ ID NO: 2811874 - RNA, 17 nt, Human
ccccgcccagcugcacc

SEQ ID NO: 2811875 - RNA, 13 nt, Human
ccccgcagcccug

SEQ ID NO: 2811876 - RNA, 23 nt, Human
ccccgcagaccuccccagccccu

SEQ ID NO: 2811877 - RNA, 20 nt, Human
ccccgcagaccuccccagcc

SEQ ID NO: 2811878 - RNA, 21 nt, Human
ccccgcagaccuccccagccc

SEQ ID NO: 2811879 - RNA, 19 nt, Human
ccccgcagaccuccccagc

SEQ ID NO: 2811880 - RNA, 17 nt, Human
cccccuucucugcucca

SEQ ID NO: 2811881 - RNA, 16 nt, Human
cccccuucucugcucc

SEQ ID NO: 2811882 - RNA, 15 nt, Human
cccccuucucugcuc

SEQ ID NO: 2811883 - RNA, 18 nt, Human
ccccgccugcccucaugg

SEQ ID NO: 2811884 - RNA, 21 nt, Human
ccccgcccccugcccuccccu

SEQ ID NO: 2811885 - RNA, 17 nt, Human
ccccgcccucuuccuga

SEQ ID NO: 2811886 - RNA, 13 nt, Human
ccccgcccccugc

SEQ ID NO: 2811887 - RNA, 17 nt, Human
ccccgcccccugcccuc

SEQ ID NO: 2811888 - RNA, 18 nt, Human
ccccgcccccugcccucc

SEQ ID NO: 2811889 - RNA, 16 nt, Human
ccccgcuaaggaagau

SEQ ID NO: 2811890 - RNA, 21 nt, Human
ccccgccuuccgccccuuccc

SEQ ID NO: 2811891 - RNA, 17 nt, Human
cccauugguguugucau

SEQ ID NO: 2811892 - RNA, 21 nt, Human
cccauugguguugucauugua

SEQ ID NO: 2811893 - RNA, 18 nt, Human
ccccaaaacaaagucuuu

SEQ ID NO: 2811894 - RNA, 19 nt, Human
ccccaaaacaaagucuuug

SEQ ID NO: 2811895 - RNA, 20 nt, Human
cccauucuuccuaguuuucu

SEQ ID NO: 2811896 - RNA, 21 nt, Human
cccauugcaucaccucuguaa

SEQ ID NO: 2811897 - RNA, 23 nt, Human
ccccagcaguugaaugacaacag

SEQ ID NO: 2811898 - RNA, 12 nt, Human
ccccagcaucac

SEQ ID NO: 2811899 - RNA, 16 nt, Human
ccccagcaucacuccc

SEQ ID NO: 2811900 - RNA, 20 nt, Human
ccccagcaucacuccccaag

SEQ ID NO: 2811901 - RNA, 18 nt, Human
ccccagcauucucaggca

SEQ ID NO: 2811902 - RNA, 20 nt, Human
ccccagcauucucaggcacc

SEQ ID NO: 2811903 - RNA, 19 nt, Human
ccccagcauucucaggcac

SEQ ID NO: 2811904 - RNA, 22 nt, Human
ccccagcauucucaggcaccag

SEQ ID NO: 2811905 - RNA, 21 nt, Human
ccccagcauucucaggcacca

SEQ ID NO: 2811906 - RNA, 21 nt, Human
ccccauucugccugcccaggc

SEQ ID NO: 2811907 - RNA, 16 nt, Human
ccccauucuuccuagu

SEQ ID NO: 2811908 - RNA, 23 nt, Human
ccccauucuuccuaguuuucucc

SEQ ID NO: 2811909 - RNA, 21 nt, Human
ccccauucuuccuaguuuucu

SEQ ID NO: 2811910 - RNA, 14 nt, Human
ccccagcccaaagg

SEQ ID NO: 2811911 - RNA, 22 nt, Human
ccccagcccaaaggggacaggc

SEQ ID NO: 2811912 - RNA, 23 nt, Human
cccauucugccugcccaggcccc

SEQ ID NO: 2811913 - RNA, 12 nt, Human
cccauucuuccu

SEQ ID NO: 2811914 - RNA, 21 nt, Human
cccauucuuccuaguuuucuc

SEQ ID NO: 2811915 - RNA, 13 nt, Human
cccaucccacacc

SEQ ID NO: 2811916 - RNA, 15 nt, Human
cccaucccacacccu

SEQ ID NO: 2811917 - RNA, 21 nt, Human
cccauccaguucaugagaauc

SEQ ID NO: 2811918 - RNA, 14 nt, Human
cccauccaguucau

SEQ ID NO: 2811919 - RNA, 22 nt, Human
cccaucauuacccuucccugca

SEQ ID NO: 2811920 - RNA, 22 nt, Human
cccaucaugcccggucccaccc

SEQ ID NO: 2811921 - RNA, 18 nt, Human
cccagggccagggcccug

SEQ ID NO: 2811922 - RNA, 17 nt, Human
cccagggccagggcccu

SEQ ID NO: 2811923 - RNA, 15 nt, Human
cccagggccagggcc

SEQ ID NO: 2811924 - RNA, 12 nt, Human
cccagggcaccc

SEQ ID NO: 2811925 - RNA, 13 nt, Human
cccagggcacccu

SEQ ID NO: 2811926 - RNA, 18 nt, Human
cccaggcuggcgugcagu

SEQ ID NO: 2811927 - RNA, 20 nt, Human
cccaggcuggcgugcagugg

SEQ ID NO: 2811928 - RNA, 19 nt, Human
cccaggcuggcgugcagug

SEQ ID NO: 2811929 - RNA, 15 nt, Human
cccagcugugagccu

SEQ ID NO: 2811930 - RNA, 16 nt, Human
cccagcugugagccuu

SEQ ID NO: 2811931 - RNA, 17 nt, Human
cccagcugugagccuug

SEQ ID NO: 2811932 - RNA, 19 nt, Human
cccagcccacuucugccau

SEQ ID NO: 2811933 - RNA, 17 nt, Human
cccagcccacuucugcc

SEQ ID NO: 2811934 - RNA, 20 nt, Human
cccagcauuuuacugauuca

SEQ ID NO: 2811935 - RNA, 11 nt, Human
cccagcccaga

SEQ ID NO: 2811936 - RNA, 21 nt, Human
cccagcauccuuuucugcaga

SEQ ID NO: 2811937 - RNA, 17 nt, Human
cccagcaucacucccca

SEQ ID NO: 2811938 - RNA, 19 nt, Human
cccagcaucacuccccaag

SEQ ID NO: 2811939 - RNA, 12 nt, Human
cccagcaguucu

SEQ ID NO: 2811940 - RNA, 13 nt, Human
cccagcauucuca

SEQ ID NO: 2811941 - RNA, 22 nt, Human
cccagcaugacauaacagugca

SEQ ID NO: 2811942 - RNA, 23 nt, Human
cccagcaugacauaacagugcag

SEQ ID NO: 2811943 - RNA, 17 nt, Human
cccagccaaacccuguc

SEQ ID NO: 2811944 - RNA, 19 nt, Human
cccagcauucucaggcacc

SEQ ID NO: 2811945 - RNA, 17 nt, Human
cccagcauucucaggca

SEQ ID NO: 2811946 - RNA, 16 nt, Human
cccagcauucucaggc

SEQ ID NO: 2811947 - RNA, 15 nt, Human
cccagcauucucagg

SEQ ID NO: 2811948 - RNA, 21 nt, Human
ccaugggcacaaagggcccag

SEQ ID NO: 2811949 - RNA, 16 nt, Human
ccaugggauacaaccu

SEQ ID NO: 2811950 - RNA, 23 nt, Human
ccaugggauacaaccucccucuu

SEQ ID NO: 2811951 - RNA, 24 nt, Human
ccaugggauacaaccucccucuug

SEQ ID NO: 2811952 - RNA, 22 nt, Human
ccaugagaauaagagaaagaaa

SEQ ID NO: 2811953 - RNA, 15 nt, Human
ccaugagacccuggu

SEQ ID NO: 2811954 - RNA, 20 nt, Human
ccaugagacccuggugccug

SEQ ID NO: 2811955 - RNA, 23 nt, Human
ccaugagacccuggugccuggcu

SEQ ID NO: 2811956 - RNA, 17 nt, Human
ccaugggccuccugugu

SEQ ID NO: 2811957 - RNA, 13 nt, Human
ccaugggcucuga

SEQ ID NO: 2811958 - RNA, 13 nt, Human
ccaugggcuucac

SEQ ID NO: 2811959 - RNA, 16 nt, Human
ccaugggcuucacugu

SEQ ID NO: 2811960 - RNA, 19 nt, Human
ccaugggcuucacuguaua

SEQ ID NO: 2811961 - RNA, 20 nt, Human
ccaugggcuucacuguauaa

SEQ ID NO: 2811962 - RNA, 21 nt, Human
ccaugggcuucacuguauaaa

SEQ ID NO: 2811963 - RNA, 23 nt, Human
ccauggggacgcccucagucuag

SEQ ID NO: 2811964 - RNA, 20 nt, Human
ccaugucucugagcauuaga

SEQ ID NO: 2811965 - RNA, 17 nt, Human
ccaugugacucuggcuu

SEQ ID NO: 2811966 - RNA, 18 nt, Human
ccaugugacucuggcuug

SEQ ID NO: 2811967 - RNA, 22 nt, Human
ccaugugacucuggcuuggccu

SEQ ID NO: 2811968 - RNA, 15 nt, Human
ccaugucuuucucca

SEQ ID NO: 2811969 - RNA, 21 nt, Human
ccaugucuuucuccaaaguua

SEQ ID NO: 2811970 - RNA, 15 nt, Human
ccaugucucgacuca

SEQ ID NO: 2811971 - RNA, 14 nt, Human
ccaugucucgacuc

SEQ ID NO: 2811972 - RNA, 19 nt, Human
ccaugucgccucugcauuc

SEQ ID NO: 2811973 - RNA, 13 nt, Human
ccauugguguugu

SEQ ID NO: 2811974 - RNA, 14 nt, Human
ccauugguccaaga

SEQ ID NO: 2811975 - RNA, 14 nt, Human
ccauuuaaaaaguu

SEQ ID NO: 2811976 - RNA, 13 nt, Human
cccaaccugcucu

SEQ ID NO: 2811977 - RNA, 14 nt, Human
cccaaccugcucuc

SEQ ID NO: 2811978 - RNA, 21 nt, Human
cccaaccugcucuccucuugc

SEQ ID NO: 2811979 - RNA, 14 nt, Human
cccaaccugcugaa

SEQ ID NO: 2811980 - RNA, 23 nt, Human
cccaaccugcucuccucuugcca

SEQ ID NO: 2811981 - RNA, 15 nt, Human
cccaacgcacaggaa

SEQ ID NO: 2811982 - RNA, 16 nt, Human
cccaacgcacaggaaa

SEQ ID NO: 2811983 - RNA, 16 nt, Human
cccaacggcccugcag

SEQ ID NO: 2811984 - RNA, 20 nt, Human
cccaacggcccugcagccag

SEQ ID NO: 2811985 - RNA, 22 nt, Human
cccaacggcccugcagccagcu

SEQ ID NO: 2811986 - RNA, 14 nt, Human
cccaacgggaagca

SEQ ID NO: 2811987 - RNA, 14 nt, Human
cccaacucugagcc

SEQ ID NO: 2811988 - RNA, 15 nt, Human
cccaacucugagccc

SEQ ID NO: 2811989 - RNA, 16 nt, Human
cccaacucugagccca

SEQ ID NO: 2811990 - RNA, 17 nt, Human
cccaacucugagcccau

SEQ ID NO: 2811991 - RNA, 18 nt, Human
cccaacucugagcccaug

SEQ ID NO: 2811992 - RNA, 19 nt, Human
cccaacucugagcccaugu

SEQ ID NO: 2811993 - RNA, 17 nt, Human
cccaacugugagcaagg

SEQ ID NO: 2811994 - RNA, 16 nt, Human
cccaacuguguagcau

SEQ ID NO: 2811995 - RNA, 17 nt, Human
cccaagcucugcuccuc

SEQ ID NO: 2811996 - RNA, 12 nt, Human
cccaagcuccuc

SEQ ID NO: 2811997 - RNA, 13 nt, Human
cccaagcuccucc

SEQ ID NO: 2811998 - RNA, 14 nt, Human
cccaagcuccuccu

SEQ ID NO: 2811999 - RNA, 14 nt, Human
cccaagcuuagaac

SEQ ID NO: 2812000 - RNA, 19 nt, Human
cccaagcuguuuucuucua

SEQ ID NO: 2812001 - RNA, 16 nt, Human
cccaagcuggcugggg

SEQ ID NO: 2812002 - RNA, 22 nt, Human
cccaagccuucgggcgucugug

SEQ ID NO: 2812003 - RNA, 16 nt, Human
cccaagccuggcaagg

SEQ ID NO: 2812004 - RNA, 16 nt, Human
cccaagcccaggccac

SEQ ID NO: 2812005 - RNA, 20 nt, Human
cccaacuucucuugcuuucu

SEQ ID NO: 2812006 - RNA, 16 nt, Human
cccaagccaaaaaccu

SEQ ID NO: 2812007 - RNA, 23 nt, Human
cccaagccuacuuuugccauuga

SEQ ID NO: 2812008 - RNA, 20 nt, Human
cccaagaauagaugcugacu

SEQ ID NO: 2812009 - RNA, 21 nt, Human
cccaagaauagaugcugacug

SEQ ID NO: 2812010 - RNA, 18 nt, Human
cccaccaucaugucuggc

SEQ ID NO: 2812011 - RNA, 19 nt, Human
cccaaggaaagccccagca

SEQ ID NO: 2812012 - RNA, 14 nt, Human
cccaaggaaagccc

SEQ ID NO: 2812013 - RNA, 17 nt, Human
cccaaggaaaacugcau

SEQ ID NO: 2812014 - RNA, 19 nt, Human
cccacccccuucucugcuc

SEQ ID NO: 2812015 - RNA, 16 nt, Human
cccacccccuucucug

SEQ ID NO: 2812016 - RNA, 22 nt, Human
cccacccccuucucugcuccac

SEQ ID NO: 2812017 - RNA, 14 nt, Human
cccacccugggacc

SEQ ID NO: 2812018 - RNA, 12 nt, Human
cccacuguauga

SEQ ID NO: 2812019 - RNA, 17 nt, Human
cccacuguaugauuuau

SEQ ID NO: 2812020 - RNA, 17 nt, Human
cccacccuguuuggauu

SEQ ID NO: 2812021 - RNA, 21 nt, Human
cccacccuguuuggauuuuua

SEQ ID NO: 2812022 - RNA, 21 nt, Human
ccacuuggcuacacagggaug

SEQ ID NO: 2812023 - RNA, 18 nt, Human
ccacuuggcaucagcugg

SEQ ID NO: 2812024 - RNA, 18 nt, Human
ccacuucggccaggucac

SEQ ID NO: 2812025 - RNA, 20 nt, Human
ccacuucggccaggucacac

SEQ ID NO: 2812026 - RNA, 14 nt, Human
ccacuucucaucac

SEQ ID NO: 2812027 - RNA, 18 nt, Human
ccacuucucaucacacac

SEQ ID NO: 2812028 - RNA, 19 nt, Human
ccacuucucaucacacaca

SEQ ID NO: 2812029 - RNA, 20 nt, Human
ccacuucucaucacacacau

SEQ ID NO: 2812030 - RNA, 23 nt, Human
ccacuucucaucacacacaugga

SEQ ID NO: 2812031 - RNA, 14 nt, Human
ccacuucuggucaa

SEQ ID NO: 2812032 - RNA, 18 nt, Human
ccacuucuggucaaucaa

SEQ ID NO: 2812033 - RNA, 13 nt, Human
ccacuucugucca

SEQ ID NO: 2812034 - RNA, 17 nt, Human
ccacuucuguccauauu

SEQ ID NO: 2812035 - RNA, 13 nt, Human
ccacuucuuccuu

SEQ ID NO: 2812036 - RNA, 15 nt, Human
ccacuucuuccuuuc

SEQ ID NO: 2812037 - RNA, 17 nt, Human
ccacuucuuccuuucuc

SEQ ID NO: 2812038 - RNA, 18 nt, Human
ccacuucuuccuuucucu

SEQ ID NO: 2812039 - RNA, 22 nt, Human
ccacuucuuccuuucucuuucu

SEQ ID NO: 2812040 - RNA, 23 nt, Human
ccacuucuuccuuucucuuucuc

SEQ ID NO: 2812041 - RNA, 19 nt, Human
ccacuucuuguuccccacu

SEQ ID NO: 2812042 - RNA, 16 nt, Human
ccacuucuuuuauaac

SEQ ID NO: 2812043 - RNA, 14 nt, Human
ccacuugaaauguu

SEQ ID NO: 2812044 - RNA, 17 nt, Human
ccacuugaaauguuagu

SEQ ID NO: 2812045 - RNA, 20 nt, Human
ccacuucuuguuccccacug

SEQ ID NO: 2812046 - RNA, 19 nt, Human
ccacugcaccgggccacag

SEQ ID NO: 2812047 - RNA, 17 nt, Human
ccacugcaccgggccac

SEQ ID NO: 2812048 - RNA, 14 nt, Human
ccacugcaccgggc

SEQ ID NO: 2812049 - RNA, 13 nt, Human
ccacugcaccggg

SEQ ID NO: 2812050 - RNA, 20 nt, Human
ccacugcacuauagccuagg

SEQ ID NO: 2812051 - RNA, 19 nt, Human
ccacugcacuauagccuag

SEQ ID NO: 2812052 - RNA, 21 nt, Human
ccacuuccaggggaaccugcc

SEQ ID NO: 2812053 - RNA, 19 nt, Human
ccacuuccaggggaaccug

SEQ ID NO: 2812054 - RNA, 18 nt, Human
ccacuuccaggggaaccu

SEQ ID NO: 2812055 - RNA, 13 nt, Human
ccacuuccagggg

SEQ ID NO: 2812056 - RNA, 17 nt, Human
ccacugcacuccagccu

SEQ ID NO: 2812057 - RNA, 14 nt, Human
ccacugcacuccag

SEQ ID NO: 2812058 - RNA, 18 nt, Human
ccacugcaaguccuuuug

SEQ ID NO: 2812059 - RNA, 22 nt, Human
ccacugcaaguccuuuuguaaa

SEQ ID NO: 2812060 - RNA, 23 nt, Human
ccacugcaaguccuuuuguaaag

SEQ ID NO: 2812061 - RNA, 23 nt, Human
ccacugauauucagaauuaugau

SEQ ID NO: 2812062 - RNA, 16 nt, Human
ccacugaugcuguucu

SEQ ID NO: 2812063 - RNA, 17 nt, Human
ccacugaugcuguucuc

SEQ ID NO: 2812064 - RNA, 19 nt, Human
ccacugaugcuguucucuu

SEQ ID NO: 2812065 - RNA, 19 nt, Human
ccacugacagccucccacc

SEQ ID NO: 2812066 - RNA, 17 nt, Human
ccacugacagccuccca

SEQ ID NO: 2812067 - RNA, 16 nt, Human
ccacugacagccuccc

SEQ ID NO: 2812068 - RNA, 15 nt, Human
ccacugacagccucc

SEQ ID NO: 2812069 - RNA, 21 nt, Human
ccacugaaguagugugcaguu

SEQ ID NO: 2812070 - RNA, 18 nt, Human
ccacugaagcccauuucu

SEQ ID NO: 2812071 - RNA, 16 nt, Human
ccacugaagcugggau

SEQ ID NO: 2812072 - RNA, 15 nt, Human
ccacugaagcuggga

SEQ ID NO: 2812073 - RNA, 14 nt, Human
ccacugaagcuggg

SEQ ID NO: 2812074 - RNA, 14 nt, Human
ccacugaaaucugu

SEQ ID NO: 2812075 - RNA, 10 nt, Human
ccacuucugg

SEQ ID NO: 2812076 - RNA, 18 nt, Human
ccacuugucacugacaca

SEQ ID NO: 2812077 - RNA, 15 nt, Human
ccacuuguccgcugg

SEQ ID NO: 2812078 - RNA, 21 nt, Human
ccacuuguccgcuggguggua

SEQ ID NO: 2812079 - RNA, 20 nt, Human
ccacuuugcacagcucuccg

SEQ ID NO: 2812080 - RNA, 14 nt, Human
ccacuuugcacauu

SEQ ID NO: 2812081 - RNA, 15 nt, Human
ccacuuugcacauuu

SEQ ID NO: 2812082 - RNA, 19 nt, Human
ccacuuugcacauuuugau

SEQ ID NO: 2812083 - RNA, 21 nt, Human
ccacuuugcacgacgcccucu

SEQ ID NO: 2812084 - RNA, 23 nt, Human
ccacuuugcacgacgcccucucc

SEQ ID NO: 2812085 - RNA, 21 nt, Human
ccacuuugcauaugagccgug

SEQ ID NO: 2812086 - RNA, 13 nt, Human
ccacuuuguccau

SEQ ID NO: 2812087 - RNA, 21 nt, Human
ccacuuugguacauggccagu

SEQ ID NO: 2812088 - RNA, 18 nt, Human
ccacuuuacccaccuaga

SEQ ID NO: 2812089 - RNA, 17 nt, Human
ccacuuuaagagagaaa

SEQ ID NO: 2812090 - RNA, 19 nt, Human
ccacuuuacccaccuagaa

SEQ ID NO: 2812091 - RNA, 17 nt, Human
ccagacuacuauuuucu

SEQ ID NO: 2812092 - RNA, 14 nt, Human
ccagaccuuuuauc

SEQ ID NO: 2812093 - RNA, 15 nt, Human
ccagaccuucuagga

SEQ ID NO: 2812094 - RNA, 16 nt, Human
ccagacccggcugcgu

SEQ ID NO: 2812095 - RNA, 17 nt, Human
ccagacccggcugcgug

SEQ ID NO: 2812096 - RNA, 14 nt, Human
ccagaugcaccagc

SEQ ID NO: 2812097 - RNA, 13 nt, Human
ccagaugcaccag

SEQ ID NO: 2812098 - RNA, 19 nt, Human
ccagaucuggucccuugca

SEQ ID NO: 2812099 - RNA, 19 nt, Human
ccagaugaggcuggccaag

SEQ ID NO: 2812100 - RNA, 20 nt, Human
ccagaucacugccacacucu

SEQ ID NO: 2812101 - RNA, 13 nt, Human
ccagauccugggu

SEQ ID NO: 2812102 - RNA, 13 nt, Human
ccagaucuggucc

SEQ ID NO: 2812103 - RNA, 18 nt, Human
ccagaucacugccacacu

SEQ ID NO: 2812104 - RNA, 16 nt, Human
ccagaucacugccaca

SEQ ID NO: 2812105 - RNA, 15 nt, Human
ccagaucacugccac

SEQ ID NO: 2812106 - RNA, 16 nt, Human
ccagauaacugaggag

SEQ ID NO: 2812107 - RNA, 13 nt, Human
ccagagagggugg

SEQ ID NO: 2812108 - RNA, 13 nt, Human
ccagaggggaagg

SEQ ID NO: 2812109 - RNA, 14 nt, Human
ccagaggggaagga

SEQ ID NO: 2812110 - RNA, 23 nt, Human
ccagaggggaaggaggguacagc

SEQ ID NO: 2812111 - RNA, 18 nt, Human
ccagagagcaacucugag

SEQ ID NO: 2812112 - RNA, 20 nt, Human
ccagagagcaacucugagau

SEQ ID NO: 2812113 - RNA, 21 nt, Human
ccagagagcaacucugagauc

SEQ ID NO: 2812114 - RNA, 22 nt, Human
ccagagguaacagaacagcuuc

SEQ ID NO: 2812115 - RNA, 12 nt, Human
ccagaggugcuu

SEQ ID NO: 2812116 - RNA, 23 nt, Human
ccagagggguggguuccucuucc

SEQ ID NO: 2812117 - RNA, 17 nt, Human
ccagagguaacagaaca

SEQ ID NO: 2812118 - RNA, 18 nt, Human
ccagagguaacagaacag

SEQ ID NO: 2812119 - RNA, 19 nt, Human
ccagagguaacagaacagc

SEQ ID NO: 2812120 - RNA, 21 nt, Human
ccagagguaacagaacagcuu

SEQ ID NO: 2812121 - RNA, 23 nt, Human
ccagagguaacagaacagcuuca

SEQ ID NO: 2812122 - RNA, 14 nt, Human
ccagagguccagcc

SEQ ID NO: 2812123 - RNA, 15 nt, Human
ccagagguccagccc

SEQ ID NO: 2812124 - RNA, 16 nt, Human
ccagagguccagccca

SEQ ID NO: 2812125 - RNA, 17 nt, Human
ccagagguccagcccau

SEQ ID NO: 2812126 - RNA, 19 nt, Human
ccagagguccagcccaucu

SEQ ID NO: 2812127 - RNA, 16 nt, Human
ccagagaauucuuaga

SEQ ID NO: 2812128 - RNA, 12 nt, Human
ccagagaacagc

SEQ ID NO: 2812129 - RNA, 16 nt, Human
ccagagacuuuguaga

SEQ ID NO: 2812130 - RNA, 20 nt, Human
ccagagaccaggcugugucc

SEQ ID NO: 2812131 - RNA, 18 nt, Human
ccagagaccguccucacc

SEQ ID NO: 2812132 - RNA, 19 nt, Human
ccagagaccguccucaccc

SEQ ID NO: 2812133 - RNA, 21 nt, Human
ccagagaccguccucaccccu

SEQ ID NO: 2812134 - RNA, 15 nt, Human
ccagacuuccuugag

SEQ ID NO: 2812135 - RNA, 13 nt, Human
ccagacuuccuug

SEQ ID NO: 2812136 - RNA, 14 nt, Human
ccagacuuccuuga

SEQ ID NO: 2812137 - RNA, 15 nt, Human
ccagacuguuagaaa

SEQ ID NO: 2812138 - RNA, 20 nt, Human
ccagacuccugacugucucc

SEQ ID NO: 2812139 - RNA, 21 nt, Human
ccagacuccugacugucuccc

SEQ ID NO: 2812140 - RNA, 22 nt, Human
ccagacugcuuccaauuuucug

SEQ ID NO: 2812141 - RNA, 13 nt, Human
ccagacugcaggu

SEQ ID NO: 2812142 - RNA, 22 nt, Human
ccagacugcagguuggacccca

SEQ ID NO: 2812143 - RNA, 23 nt, Human
ccacuuuccuuuucuauuccuuc

SEQ ID NO: 2812144 - RNA, 19 nt, Human
ccagagaaggggugugcau

SEQ ID NO: 2812145 - RNA, 19 nt, Human
ccaggggcccaaggcggcc

SEQ ID NO: 2812146 - RNA, 22 nt, Human
ccaggggcccaaggcggccccu

SEQ ID NO: 2812147 - RNA, 22 nt, Human
ccaggcugagccucagucuccc

SEQ ID NO: 2812148 - RNA, 19 nt, Human
ccaggcugagccucagucu

SEQ ID NO: 2812149 - RNA, 17 nt, Human
ccaggcugagccucagu

SEQ ID NO: 2812150 - RNA, 16 nt, Human
ccaggcugagccucag

SEQ ID NO: 2812151 - RNA, 14 nt, Human
ccaggcugagccuc

SEQ ID NO: 2812152 - RNA, 13 nt, Human
ccaggcugagccu

SEQ ID NO: 2812153 - RNA, 14 nt, Human
ccaguauuagacug

SEQ ID NO: 2812154 - RNA, 17 nt, Human
ccaguccugccuggcca

SEQ ID NO: 2812155 - RNA, 16 nt, Human
ccaguccugccuggcc

SEQ ID NO: 2812156 - RNA, 15 nt, Human
ccaguccugccuggc

SEQ ID NO: 2812157 - RNA, 14 nt, Human
ccaguccugccugg

SEQ ID NO: 2812158 - RNA, 12 nt, Human
ccaguauucuug

SEQ ID NO: 2812159 - RNA, 13 nt, Human
ccaguccuuccac

SEQ ID NO: 2812160 - RNA, 17 nt, Human
ccaguccuuccaccucg

SEQ ID NO: 2812161 - RNA, 23 nt, Human
ccagucgcccuuacuucuugccc

SEQ ID NO: 2812162 - RNA, 22 nt, Human
ccaguccugccuggccaggcag

SEQ ID NO: 2812163 - RNA, 21 nt, Human
ccaguccugccuggccaggca

SEQ ID NO: 2812164 - RNA, 19 nt, Human
ccaguccugccuggccagg

SEQ ID NO: 2812165 - RNA, 18 nt, Human
ccaguccugccuggccag

SEQ ID NO: 2812166 - RNA, 14 nt, Human
ccaguauucuuguc

SEQ ID NO: 2812167 - RNA, 18 nt, Human
ccaggaguuugagaccag

SEQ ID NO: 2812168 - RNA, 17 nt, Human
ccaggaguuugagacca

SEQ ID NO: 2812169 - RNA, 22 nt, Human
ccaggaguuugaggcugcagcg

SEQ ID NO: 2812170 - RNA, 21 nt, Human
ccaggaguuugaggcugcagc

SEQ ID NO: 2812171 - RNA, 20 nt, Human
ccaggaguuugaggcugcag

SEQ ID NO: 2812172 - RNA, 17 nt, Human
ccaggaguuugaggcug

SEQ ID NO: 2812173 - RNA, 21 nt, Human
ccaggcagaucugugccccau

SEQ ID NO: 2812174 - RNA, 20 nt, Human
ccaggcagaucugugcccca

SEQ ID NO: 2812175 - RNA, 23 nt, Human
ccaggcagaucugugccccaugc

SEQ ID NO: 2812176 - RNA, 18 nt, Human
ccaggcaggcuaaggcgu

SEQ ID NO: 2812177 - RNA, 20 nt, Human
ccaggcaggcuaaggcgugg

SEQ ID NO: 2812178 - RNA, 21 nt, Human
ccaggcaggcuaaggcgugga

SEQ ID NO: 2812179 - RNA, 14 nt, Human
ccaggcagguagcc

SEQ ID NO: 2812180 - RNA, 18 nt, Human
ccaggcagguagccaggg

SEQ ID NO: 2812181 - RNA, 15 nt, Human
ccagcagaagacaaa

SEQ ID NO: 2812182 - RNA, 22 nt, Human
ccagcagaagacaaaaagacaa

SEQ ID NO: 2812183 - RNA, 21 nt, Human
ccagcgagcccugguggcagu

SEQ ID NO: 2812184 - RNA, 17 nt, Human
ccagccccggcccuggg

SEQ ID NO: 2812185 - RNA, 21 nt, Human
ccagcuuggggccaccaaagc

SEQ ID NO: 2812186 - RNA, 19 nt, Human
ccagcuuggggccaccaaa

SEQ ID NO: 2812187 - RNA, 22 nt, Human
ccagcuuggggccaccaaagcu

SEQ ID NO: 2812188 - RNA, 16 nt, Human
ccagcuuguaggagcu

SEQ ID NO: 2812189 - RNA, 16 nt, Human
ccagcuuggggccacc

SEQ ID NO: 2812190 - RNA, 14 nt, Human
ccagcuuggggcca

SEQ ID NO: 2812191 - RNA, 22 nt, Human
ccagcgucccagucucuggcag

SEQ ID NO: 2812192 - RNA, 19 nt, Human
ccagcguauauauaagaaa

SEQ ID NO: 2812193 - RNA, 21 nt, Human
ccagcguauauauaagaaaga

SEQ ID NO: 2812194 - RNA, 22 nt, Human
ccagcguauauauaagaaagac

SEQ ID NO: 2812195 - RNA, 23 nt, Human
ccagcguauauauaagaaagaca

SEQ ID NO: 2812196 - RNA, 15 nt, Human
ccagcgucccagucu

SEQ ID NO: 2812197 - RNA, 21 nt, Human
ccagcgucccagucucuggca

SEQ ID NO: 2812198 - RNA, 20 nt, Human
ccagcuugaaaccuucacuu

SEQ ID NO: 2812199 - RNA, 15 nt, Human
ccagcuugccagaug

SEQ ID NO: 2812200 - RNA, 18 nt, Human
ccagcuugccagaugcug

SEQ ID NO: 2812201 - RNA, 22 nt, Human
ccagcuugccagaugcugcaga

SEQ ID NO: 2812202 - RNA, 17 nt, Human
ccagcuugcgaauaaca

SEQ ID NO: 2812203 - RNA, 13 nt, Human
ccagcgcucugcc

SEQ ID NO: 2812204 - RNA, 14 nt, Human
ccagcgcucugccu

SEQ ID NO: 2812205 - RNA, 15 nt, Human
ccagcgcucugccuc

SEQ ID NO: 2812206 - RNA, 14 nt, Human
ccagcgcugagugg

SEQ ID NO: 2812207 - RNA, 23 nt, Human
ccagcgggaauggcagcugccac

SEQ ID NO: 2812208 - RNA, 17 nt, Human
ccagcgggaauggcagc

SEQ ID NO: 2812209 - RNA, 14 nt, Human
aaauuuacuuuaca

SEQ ID NO: 2812210 - RNA, 16 nt, Human
aaauuuacuuuacaca

SEQ ID NO: 2812211 - RNA, 13 nt, Human
aaauuuagaaacu

SEQ ID NO: 2812212 - RNA, 17 nt, Human
aaauuuagaaacuaauu

SEQ ID NO: 2812213 - RNA, 24 nt, Human
aaauuccuaagaaucagaguagaa

SEQ ID NO: 2812214 - RNA, 12 nt, Human
aaauuuaauucu

SEQ ID NO: 2812215 - RNA, 12 nt, Human
aaauuuacuaua

SEQ ID NO: 2812216 - RNA, 13 nt, Human
aaauuuacuauau

SEQ ID NO: 2812217 - RNA, 15 nt, Human
aaauuuacuauauau

SEQ ID NO: 2812218 - RNA, 14 nt, Human
aaauuuauaugaaa

SEQ ID NO: 2812219 - RNA, 12 nt, Human
aaauuuaucaaa

SEQ ID NO: 2812220 - RNA, 13 nt, Human
aaauuuaucaaag

SEQ ID NO: 2812221 - RNA, 17 nt, Human
aaauuuaucaaagcaua

SEQ ID NO: 2812222 - RNA, 18 nt, Human
aaauuucagguuguuggu

SEQ ID NO: 2812223 - RNA, 12 nt, Human
aaauuucagauu

SEQ ID NO: 2812224 - RNA, 20 nt, Human
gucacacaguauuacuucug

SEQ ID NO: 2812225 - RNA, 16 nt, Human
gucacacacuuuggcu

SEQ ID NO: 2812226 - RNA, 21 nt, Human
gucacaaauccuaaaagaagc

SEQ ID NO: 2812227 - RNA, 21 nt, Human
gucacaagccucgaggugccu

SEQ ID NO: 2812228 - RNA, 13 nt, Human
gucacacacugau

SEQ ID NO: 2812229 - RNA, 15 nt, Human
gucacaauguucuuu

SEQ ID NO: 2812230 - RNA, 17 nt, Human
gucacaauguucuuuau

SEQ ID NO: 2812231 - RNA, 18 nt, Human
gucacaauguucuuuaua

SEQ ID NO: 2812232 - RNA, 21 nt, Human
gucacaauguucuuuauauac

SEQ ID NO: 2812233 - RNA, 22 nt, Human
gucaaaugguaggcauuuccua

SEQ ID NO: 2812234 - RNA, 15 nt, Human
gucaaauuauguauu

SEQ ID NO: 2812235 - RNA, 16 nt, Human
gucaacaugaaacacc

SEQ ID NO: 2812236 - RNA, 12 nt, Human
gucaacauugug

SEQ ID NO: 2812237 - RNA, 19 nt, Human
gucaacccuucuggaaacu

SEQ ID NO: 2812238 - RNA, 17 nt, Human
gucaacccuucuggaaa

SEQ ID NO: 2812239 - RNA, 15 nt, Human
gucaacccuucugga

SEQ ID NO: 2812240 - RNA, 12 nt, Human
gucaaccagaca

SEQ ID NO: 2812241 - RNA, 13 nt, Human
gucaaccagacag

SEQ ID NO: 2812242 - RNA, 14 nt, Human
gucaaccagacaga

SEQ ID NO: 2812243 - RNA, 15 nt, Human
gucaaccagacagag

SEQ ID NO: 2812244 - RNA, 16 nt, Human
gucaaccagacagagg

SEQ ID NO: 2812245 - RNA, 17 nt, Human
gucaacccucaggggaa

SEQ ID NO: 2812246 - RNA, 16 nt, Human
gucaacguuguacugu

SEQ ID NO: 2812247 - RNA, 17 nt, Human
guauuuuuuuguaauug

SEQ ID NO: 2812248 - RNA, 15 nt, Human
guauuuuuucuugca

SEQ ID NO: 2812249 - RNA, 19 nt, Human
guauuuuuucuugcauuga

SEQ ID NO: 2812250 - RNA, 20 nt, Human
guauuuuuucuugcauugac

SEQ ID NO: 2812251 - RNA, 12 nt, Human
gucaaaacacug

SEQ ID NO: 2812252 - RNA, 13 nt, Human
gucaaaacacugu

SEQ ID NO: 2812253 - RNA, 14 nt, Human
gucaaaacacugug

SEQ ID NO: 2812254 - RNA, 15 nt, Human
gucaaaacacugugg

SEQ ID NO: 2812255 - RNA, 16 nt, Human
gucaaaacacugugga

SEQ ID NO: 2812256 - RNA, 14 nt, Human
aaauucauuucaca

SEQ ID NO: 2812257 - RNA, 16 nt, Human
aaauucauuucacauu

SEQ ID NO: 2812258 - RNA, 17 nt, Human
aaauucauuucacauua

SEQ ID NO: 2812259 - RNA, 19 nt, Human
aaauucauuucacauuaau

SEQ ID NO: 2812260 - RNA, 22 nt, Human
aaauucaggugaaaauguucau

SEQ ID NO: 2812261 - RNA, 16 nt, Human
aaauucauauucuguc

SEQ ID NO: 2812262 - RNA, 17 nt, Human
aaauucauauucuuuua

SEQ ID NO: 2812263 - RNA, 21 nt, Human
aaauucaucaaauggaagaca

SEQ ID NO: 2812264 - RNA, 22 nt, Human
aaauucacccccuuuccuggac

SEQ ID NO: 2812265 - RNA, 17 nt, Human
aaauuauuuuaaacaaa

SEQ ID NO: 2812266 - RNA, 14 nt, Human
aaauucaaaaagug

SEQ ID NO: 2812267 - RNA, 22 nt, Human
aaauuacuaauuuuacacauua

SEQ ID NO: 2812268 - RNA, 21 nt, Human
aaauucagcaaaccauuuuua

SEQ ID NO: 2812269 - RNA, 16 nt, Human
aaauuagaugcauguu

SEQ ID NO: 2812270 - RNA, 12 nt, Human
aaauuagaaaaa

SEQ ID NO: 2812271 - RNA, 19 nt, Human
aaauuagaaaaaaauuacu

SEQ ID NO: 2812272 - RNA, 23 nt, Human
aaauuagaaaccuuaauaugugg

SEQ ID NO: 2812273 - RNA, 20 nt, Human
aaauuagaaagcaacuuauc

SEQ ID NO: 2812274 - RNA, 15 nt, Human
aaauuauuuuaaaca

SEQ ID NO: 2812275 - RNA, 16 nt, Human
aaauuauuuuaaacaa

SEQ ID NO: 2812276 - RNA, 22 nt, Human
aaauuauuuguguaauagaaaa

SEQ ID NO: 2812277 - RNA, 23 nt, Human
aaauuauuuguguaauagaaaac

SEQ ID NO: 2812278 - RNA, 16 nt, Human
aaauuaucaauaucua

SEQ ID NO: 2812279 - RNA, 18 nt, Human
aaauuauauuugugcuau

SEQ ID NO: 2812280 - RNA, 22 nt, Human
aaauuauauuugugcuauagua

SEQ ID NO: 2812281 - RNA, 15 nt, Human
aaauguuauuucugc

SEQ ID NO: 2812282 - RNA, 17 nt, Human
aaauguuauuucugcaa

SEQ ID NO: 2812283 - RNA, 21 nt, Human
aaauuacuuaucauccacauu

SEQ ID NO: 2812284 - RNA, 12 nt, Human
aaauguuauuuc

SEQ ID NO: 2812285 - RNA, 20 nt, Human
aaauguuaaguugaugguga

SEQ ID NO: 2812286 - RNA, 17 nt, Human
aaauguuaucuucucaa

SEQ ID NO: 2812287 - RNA, 22 nt, Human
aaauguuaugacuauguaaacu

SEQ ID NO: 2812288 - RNA, 18 nt, Human
aaauguuaucuucucaag

SEQ ID NO: 2812289 - RNA, 23 nt, Human
aaauguuaucuucucaaguucua

SEQ ID NO: 2812290 - RNA, 20 nt, Human
guauugcuguccuugaaugc

SEQ ID NO: 2812291 - RNA, 14 nt, Human
guauugcuugccac

SEQ ID NO: 2812292 - RNA, 10 nt, Human
guauuggaaa

SEQ ID NO: 2812293 - RNA, 14 nt, Human
guauuuaagcaaau

SEQ ID NO: 2812294 - RNA, 15 nt, Human
guauuuaagcaaaua

SEQ ID NO: 2812295 - RNA, 17 nt, Human
guauuuaagcaaauacu

SEQ ID NO: 2812296 - RNA, 17 nt, Human
guauugguggcuuuccu

SEQ ID NO: 2812297 - RNA, 18 nt, Human
aaauguuagucauuguua

SEQ ID NO: 2812298 - RNA, 15 nt, Human
aaauguuaguuucuu

SEQ ID NO: 2812299 - RNA, 16 nt, Human
aaauguuaguuucuug

SEQ ID NO: 2812300 - RNA, 17 nt, Human
aaauguuaguuucuugg

SEQ ID NO: 2812301 - RNA, 19 nt, Human
aaauguuaguuucuuggua

SEQ ID NO: 2812302 - RNA, 20 nt, Human
aaauguuaucuuauacugua

SEQ ID NO: 2812303 - RNA, 21 nt, Human
aaauguuaucuuauacuguac

SEQ ID NO: 2812304 - RNA, 23 nt, Human
aaauguuaucuuauacuguacaa

SEQ ID NO: 2812305 - RNA, 23 nt, Human
guaugauuuauaaacagacaaua

SEQ ID NO: 2812306 - RNA, 13 nt, Human
guaguucuaagac

SEQ ID NO: 2812307 - RNA, 17 nt, Human
guaguucucuugguguu

SEQ ID NO: 2812308 - RNA, 20 nt, Human
guaguucucuugguguuaaa

SEQ ID NO: 2812309 - RNA, 17 nt, Human
guaguuauauaauuguu

SEQ ID NO: 2812310 - RNA, 14 nt, Human
guaguuauuuugca

SEQ ID NO: 2812311 - RNA, 21 nt, Human
aaauguaggcaucaugcaugu

SEQ ID NO: 2812312 - RNA, 15 nt, Human
aaauguacugagauu

SEQ ID NO: 2812313 - RNA, 17 nt, Human
aaauguaccuucuuuca

SEQ ID NO: 2812314 - RNA, 16 nt, Human
aaauguacagacauau

SEQ ID NO: 2812315 - RNA, 17 nt, Human
aaauguacagacauauu

SEQ ID NO: 2812316 - RNA, 19 nt, Human
aaauguacagacauauuua

SEQ ID NO: 2812317 - RNA, 20 nt, Human
aaauguacagacauauuuaa

SEQ ID NO: 2812318 - RNA, 18 nt, Human
aaauguaaugcgauuuua

SEQ ID NO: 2812319 - RNA, 18 nt, Human
guauaaauaggagaggau

SEQ ID NO: 2812320 - RNA, 11 nt, Human
guauaaaugua

SEQ ID NO: 2812321 - RNA, 12 nt, Human
guauaaauguau

SEQ ID NO: 2812322 - RNA, 13 nt, Human
guauaaauguaua

SEQ ID NO: 2812323 - RNA, 14 nt, Human
guauaaauguauau

SEQ ID NO: 2812324 - RNA, 16 nt, Human
guauaaauguauauac

SEQ ID NO: 2812325 - RNA, 17 nt, Human
guauaaauguauauaca

SEQ ID NO: 2812326 - RNA, 18 nt, Human
guauaaauguauauacac

SEQ ID NO: 2812327 - RNA, 19 nt, Human
guauaaauguauauacaca

SEQ ID NO: 2812328 - RNA, 21 nt, Human
guauaaauguauauacacaua

SEQ ID NO: 2812329 - RNA, 22 nt, Human
guauaaauguauauacacauau

SEQ ID NO: 2812330 - RNA, 13 nt, Human
guauaaauaggag

SEQ ID NO: 2812331 - RNA, 21 nt, Human
guauaaagcaacuguuaugaa

SEQ ID NO: 2812332 - RNA, 23 nt, Human
guauaaagcaacuguuaugaaau

SEQ ID NO: 2812333 - RNA, 20 nt, Human
guauaaagcaacuguuauga

SEQ ID NO: 2812334 - RNA, 18 nt, Human
guauaaagcaacuguuau

SEQ ID NO: 2812335 - RNA, 13 nt, Human
guauaaagaaaag

SEQ ID NO: 2812336 - RNA, 14 nt, Human
guauaaagaaaagu

SEQ ID NO: 2812337 - RNA, 13 nt, Human
guauaaacuauca

SEQ ID NO: 2812338 - RNA, 17 nt, Human
guauaaacuaucaguuu

SEQ ID NO: 2812339 - RNA, 11 nt, Human
guauaaacauu

SEQ ID NO: 2812340 - RNA, 13 nt, Human
guauaaacauuaa

SEQ ID NO: 2812341 - RNA, 14 nt, Human
guauaaacauuaaa

SEQ ID NO: 2812342 - RNA, 18 nt, Human
guauaaacauuaaauguc

SEQ ID NO: 2812343 - RNA, 19 nt, Human
guauaaacauuaaaugucu

SEQ ID NO: 2812344 - RNA, 21 nt, Human
guaguucuguuuggugugucc

SEQ ID NO: 2812345 - RNA, 17 nt, Human
guauauuacacauuugu

SEQ ID NO: 2812346 - RNA, 18 nt, Human
guauauuacacauuugua

SEQ ID NO: 2812347 - RNA, 22 nt, Human
guauauuacacauuuguacaga

SEQ ID NO: 2812348 - RNA, 20 nt, Human
guauaacuucuuaaaaguug

SEQ ID NO: 2812349 - RNA, 14 nt, Human
guauaagauccuag

SEQ ID NO: 2812350 - RNA, 22 nt, Human
guauaagauccuagauccuaag

SEQ ID NO: 2812351 - RNA, 17 nt, Human
guauaagcacugaaaaa

SEQ ID NO: 2812352 - RNA, 22 nt, Human
guauaagcacugaaaaacaaca

SEQ ID NO: 2812353 - RNA, 18 nt, Human
guauaagauccuagaucc

SEQ ID NO: 2812354 - RNA, 18 nt, Human
guauaacccuguuacaaa

SEQ ID NO: 2812355 - RNA, 14 nt, Human
guauaagaaaugca

SEQ ID NO: 2812356 - RNA, 17 nt, Human
guauaagaaaugcauau

SEQ ID NO: 2812357 - RNA, 15 nt, Human
guauauucauauauu

SEQ ID NO: 2812358 - RNA, 14 nt, Human
guauauuauuuggc

SEQ ID NO: 2812359 - RNA, 15 nt, Human
guauauuauuuggca

SEQ ID NO: 2812360 - RNA, 16 nt, Human
guaugauguguuguga

SEQ ID NO: 2812361 - RNA, 17 nt, Human
guaugauguguugugau

SEQ ID NO: 2812362 - RNA, 13 nt, Human
guaugauguguug

SEQ ID NO: 2812363 - RNA, 13 nt, Human
guauggaaauaaa

SEQ ID NO: 2812364 - RNA, 21 nt, Human
guauggaaaaaccauuugaag

SEQ ID NO: 2812365 - RNA, 14 nt, Human
guauggcucugcac

SEQ ID NO: 2812366 - RNA, 20 nt, Human
guauggcucugcaccccucu

SEQ ID NO: 2812367 - RNA, 21 nt, Human
guauggcucugcaccccucug

SEQ ID NO: 2812368 - RNA, 13 nt, Human
guauggagcucag

SEQ ID NO: 2812369 - RNA, 21 nt, Human
guauggagcagccuggagacc

SEQ ID NO: 2812370 - RNA, 18 nt, Human
guauggagcucagagagg

SEQ ID NO: 2812371 - RNA, 20 nt, Human
guauggauugggggggccaa

SEQ ID NO: 2812372 - RNA, 15 nt, Human
guauggagcucagag

SEQ ID NO: 2812373 - RNA, 21 nt, Human
guaucccaugagccucagcau

SEQ ID NO: 2812374 - RNA, 22 nt, Human
guaucacauuuuaguccagaga

SEQ ID NO: 2812375 - RNA, 19 nt, Human
guaucacgggucacuugaa

SEQ ID NO: 2812376 - RNA, 18 nt, Human
guaucagaagagagggga

SEQ ID NO: 2812377 - RNA, 19 nt, Human
guaucagaauugaaacacu

SEQ ID NO: 2812378 - RNA, 20 nt, Human
guaucagaauugaaacacuu

SEQ ID NO: 2812379 - RNA, 22 nt, Human
guaugaucacggcucacugcag

SEQ ID NO: 2812380 - RNA, 20 nt, Human
guauccccccccuguauagu

SEQ ID NO: 2812381 - RNA, 13 nt, Human
guaucccuucuca

SEQ ID NO: 2812382 - RNA, 17 nt, Human
guaucccuucucacagc

SEQ ID NO: 2812383 - RNA, 18 nt, Human
guaucccuucucacagca

SEQ ID NO: 2812384 - RNA, 19 nt, Human
guaucccuucucacagcac

SEQ ID NO: 2812385 - RNA, 18 nt, Human
guaucccgagucugggac

SEQ ID NO: 2812386 - RNA, 19 nt, Human
guaucccgagucugggaca

SEQ ID NO: 2812387 - RNA, 20 nt, Human
guaucccgagucugggacac

SEQ ID NO: 2812388 - RNA, 12 nt, Human
guauguggaagg

SEQ ID NO: 2812389 - RNA, 14 nt, Human
guauugagauacuu

SEQ ID NO: 2812390 - RNA, 23 nt, Human
guauugagauacuuuuucuuuug

SEQ ID NO: 2812391 - RNA, 15 nt, Human
guauucuuaaaaugc

SEQ ID NO: 2812392 - RNA, 19 nt, Human
guauucuuaaaaugcaaua

SEQ ID NO: 2812393 - RNA, 20 nt, Human
guauucuuaaaaugcaauau

SEQ ID NO: 2812394 - RNA, 15 nt, Human
guauucuucaaccuc

SEQ ID NO: 2812395 - RNA, 16 nt, Human
guauugagauuucuua

SEQ ID NO: 2812396 - RNA, 19 nt, Human
guauggguuaaaucaaaga

SEQ ID NO: 2812397 - RNA, 16 nt, Human
guaugggacuggccuc

SEQ ID NO: 2812398 - RNA, 13 nt, Human
guaugguggcugg

SEQ ID NO: 2812399 - RNA, 13 nt, Human
guauggucuaaca

SEQ ID NO: 2812400 - RNA, 13 nt, Human
guaugucuccagu

SEQ ID NO: 2812401 - RNA, 11 nt, Human
guaugucuguc

SEQ ID NO: 2812402 - RNA, 21 nt, Human
guaugugacaccaaagccacc

SEQ ID NO: 2812403 - RNA, 23 nt, Human
guaugugacaccaaagccaccuc

SEQ ID NO: 2812404 - RNA, 14 nt, Human
guaugugccauuua

SEQ ID NO: 2812405 - RNA, 16 nt, Human
guaugugcuguaauuu

SEQ ID NO: 2812406 - RNA, 11 nt, Human
guaugugccau

SEQ ID NO: 2812407 - RNA, 18 nt, Human
aaaucuaauauuaaaaau

SEQ ID NO: 2812408 - RNA, 19 nt, Human
aaaucuaauauuaaaaaua

SEQ ID NO: 2812409 - RNA, 23 nt, Human
aaauccccaugccuguggcugcg

SEQ ID NO: 2812410 - RNA, 20 nt, Human
aaaucuaaaucuauuuauua

SEQ ID NO: 2812411 - RNA, 17 nt, Human
aaaucuaauauuaaaaa

SEQ ID NO: 2812412 - RNA, 15 nt, Human
aaaucuaaaucuauu

SEQ ID NO: 2812413 - RNA, 16 nt, Human
aaaucuaaaucuauuu

SEQ ID NO: 2812414 - RNA, 17 nt, Human
aaaucuaaaucuauuua

SEQ ID NO: 2812415 - RNA, 15 nt, Human
aaaucuauucugugu

SEQ ID NO: 2812416 - RNA, 19 nt, Human
aaaucuauuuaauuaggaa

SEQ ID NO: 2812417 - RNA, 22 nt, Human
aaaucuauuuaauuaggaaaaa

SEQ ID NO: 2812418 - RNA, 22 nt, Human
aaaucuaguauuucaugcuggg

SEQ ID NO: 2812419 - RNA, 17 nt, Human
aaaugaaaaucgugaca

SEQ ID NO: 2812420 - RNA, 20 nt, Human
aaaugaaaaacaaccaagcg

SEQ ID NO: 2812421 - RNA, 22 nt, Human
aaaucuauuuauuaauauuuaa

SEQ ID NO: 2812422 - RNA, 12 nt, Human
aaaucuauuuau

SEQ ID NO: 2812423 - RNA, 16 nt, Human
aaaucuauuuauuaau

SEQ ID NO: 2812424 - RNA, 17 nt, Human
aaaucuauuuauuaaua

SEQ ID NO: 2812425 - RNA, 19 nt, Human
aaaucuauuuauuaauauu

SEQ ID NO: 2812426 - RNA, 21 nt, Human
aaaugaaacaaauaaucacau

SEQ ID NO: 2812427 - RNA, 11 nt, Human
aaaugaaaauu

SEQ ID NO: 2812428 - RNA, 11 nt, Human
aaaugaaaaua

SEQ ID NO: 2812429 - RNA, 16 nt, Human
aaauccuuccaugaaa

SEQ ID NO: 2812430 - RNA, 15 nt, Human
aaauccuucccaagu

SEQ ID NO: 2812431 - RNA, 22 nt, Human
aaauccuaagacacaaaugcau

SEQ ID NO: 2812432 - RNA, 21 nt, Human
aaauccuaguuuccucuccuu

SEQ ID NO: 2812433 - RNA, 18 nt, Human
aaauccgcucucuuccug

SEQ ID NO: 2812434 - RNA, 19 nt, Human
aaauccgcucucuuccugc

SEQ ID NO: 2812435 - RNA, 14 nt, Human
aaaucccuggauca

SEQ ID NO: 2812436 - RNA, 20 nt, Human
aaauccauaucuuaaagaaa

SEQ ID NO: 2812437 - RNA, 23 nt, Human
aaauccauaucuuaaagaaacag

SEQ ID NO: 2812438 - RNA, 17 nt, Human
aaaucccuguuuaauau

SEQ ID NO: 2812439 - RNA, 22 nt, Human
aaauccugacuauuauguuguu

SEQ ID NO: 2812440 - RNA, 22 nt, Human
aaauccugcaaugaaagguacu

SEQ ID NO: 2812441 - RNA, 16 nt, Human
aaauccugccauuuaa

SEQ ID NO: 2812442 - RNA, 18 nt, Human
aaauccugccauuuaaaa

SEQ ID NO: 2812443 - RNA, 13 nt, Human
aaauccuuccaaa

SEQ ID NO: 2812444 - RNA, 14 nt, Human
guaggcauuuccua

SEQ ID NO: 2812445 - RNA, 18 nt, Human
guaggccuuuuaacauuu

SEQ ID NO: 2812446 - RNA, 19 nt, Human
guaggccuuuuaacauuuu

SEQ ID NO: 2812447 - RNA, 20 nt, Human
guaggccuuuuaacauuuug

SEQ ID NO: 2812448 - RNA, 15 nt, Human
guaggaugaaaagau

SEQ ID NO: 2812449 - RNA, 20 nt, Human
guaggauauuuugucaccag

SEQ ID NO: 2812450 - RNA, 15 nt, Human
guaggaucuaaggcu

SEQ ID NO: 2812451 - RNA, 17 nt, Human
guaggaucuaaggcugu

SEQ ID NO: 2812452 - RNA, 14 nt, Human
guaggagcugccuu

SEQ ID NO: 2812453 - RNA, 22 nt, Human
guaggagcugccuuggcucaga

SEQ ID NO: 2812454 - RNA, 23 nt, Human
guaggagcugccuuggcucagac

SEQ ID NO: 2812455 - RNA, 22 nt, Human
guaggacuuuggugguuuaaaa

SEQ ID NO: 2812456 - RNA, 14 nt, Human
guaggaaagggcaa

SEQ ID NO: 2812457 - RNA, 12 nt, Human
guagcuuugcuc

SEQ ID NO: 2812458 - RNA, 14 nt, Human
guaggaaaaaaaua

SEQ ID NO: 2812459 - RNA, 15 nt, Human
guaggaaaaaaauag

SEQ ID NO: 2812460 - RNA, 17 nt, Human
guagcuuaccagaagcu

SEQ ID NO: 2812461 - RNA, 17 nt, Human
guagcuuucccaaauaa

SEQ ID NO: 2812462 - RNA, 14 nt, Human
guagcuugcucccu

SEQ ID NO: 2812463 - RNA, 19 nt, Human
guagcuugcucccuguguc

SEQ ID NO: 2812464 - RNA, 21 nt, Human
guagcugggacuacaggcacc

SEQ ID NO: 2812465 - RNA, 18 nt, Human
guagcugggauuacaggc

SEQ ID NO: 2812466 - RNA, 16 nt, Human
guagcuguaaaacgcu

SEQ ID NO: 2812467 - RNA, 21 nt, Human
guagcugggauuacaggugug

SEQ ID NO: 2812468 - RNA, 16 nt, Human
guagcugggauuuuaa

SEQ ID NO: 2812469 - RNA, 17 nt, Human
guagcugggauuuuaaa

SEQ ID NO: 2812470 - RNA, 22 nt, Human
guagcugggauuuuaaacuaga

SEQ ID NO: 2812471 - RNA, 24 nt, Human
guagcugggauuuuaaacuagaug

SEQ ID NO: 2812472 - RNA, 22 nt, Human
guagcuuaccagaagcuuccau

SEQ ID NO: 2812473 - RNA, 17 nt, Human
guagcuuaccugacaca

SEQ ID NO: 2812474 - RNA, 18 nt, Human
guagcuuaccugacacaa

SEQ ID NO: 2812475 - RNA, 19 nt, Human
guagcuuaccugacacaag

SEQ ID NO: 2812476 - RNA, 22 nt, Human
guagcuuaccugacacaagagg

SEQ ID NO: 2812477 - RNA, 19 nt, Human
guagcugggacuacaggca

SEQ ID NO: 2812478 - RNA, 18 nt, Human
guagcugggacuacaggc

SEQ ID NO: 2812479 - RNA, 12 nt, Human
guagcugggacu

SEQ ID NO: 2812480 - RNA, 17 nt, Human
guagcuggauuacaggc

SEQ ID NO: 2812481 - RNA, 16 nt, Human
aaaggaggcaugccuc

SEQ ID NO: 2812482 - RNA, 18 nt, Human
aaaggaggcaugccucug

SEQ ID NO: 2812483 - RNA, 14 nt, Human
aaaggaggcuggca

SEQ ID NO: 2812484 - RNA, 13 nt, Human
aaaggaggcuggc

SEQ ID NO: 2812485 - RNA, 16 nt, Human
aaaggagucaaaacua

SEQ ID NO: 2812486 - RNA, 19 nt, Human
aaaggagagaagagagaaa

SEQ ID NO: 2812487 - RNA, 22 nt, Human
aaaggagagacucccaugaagc

SEQ ID NO: 2812488 - RNA, 23 nt, Human
aaaggagagacucccaugaagcc

SEQ ID NO: 2812489 - RNA, 19 nt, Human
aaaggagacaaguuccaug

SEQ ID NO: 2812490 - RNA, 20 nt, Human
aaaggagacaaguuccaugg

SEQ ID NO: 2812491 - RNA, 13 nt, Human
aaaggacuguaau

SEQ ID NO: 2812492 - RNA, 18 nt, Human
aaaggauaguauuuuuau

SEQ ID NO: 2812493 - RNA, 21 nt, Human
aaaggauaguauuuuuaucca

SEQ ID NO: 2812494 - RNA, 17 nt, Human
aaagcgauauacagaug

SEQ ID NO: 2812495 - RNA, 21 nt, Human
aaaggauagaucaaagucaaa

SEQ ID NO: 2812496 - RNA, 20 nt, Human
aaaggaugaucaaaaauaau

SEQ ID NO: 2812497 - RNA, 14 nt, Human
guagcugccacuug

SEQ ID NO: 2812498 - RNA, 23 nt, Human
guagcugccacuugaacaaaauc

SEQ ID NO: 2812499 - RNA, 14 nt, Human
aaaugaaagaugau

SEQ ID NO: 2812500 - RNA, 15 nt, Human
aaaugaaagaugauu

SEQ ID NO: 2812501 - RNA, 20 nt, Human
aaaugaaagaugauuugcaa

SEQ ID NO: 2812502 - RNA, 13 nt, Human
aaaugaaauauuu

SEQ ID NO: 2812503 - RNA, 18 nt, Human
aaaugaagcagcuuuaaa

SEQ ID NO: 2812504 - RNA, 11 nt, Human
aaaugaagugc

SEQ ID NO: 2812505 - RNA, 12 nt, Human
aaaugaaauugu

SEQ ID NO: 2812506 - RNA, 14 nt, Human
aaaugaaauuguaa

SEQ ID NO: 2812507 - RNA, 15 nt, Human
aaaugaaauuguaaa

SEQ ID NO: 2812508 - RNA, 11 nt, Human
aaaugaaauuu

SEQ ID NO: 2812509 - RNA, 13 nt, Human
aaaugaaauuuaa

SEQ ID NO: 2812510 - RNA, 15 nt, Human
aaaugaaauuuaaac

SEQ ID NO: 2812511 - RNA, 16 nt, Human
aaaugaaauuuaaaca

SEQ ID NO: 2812512 - RNA, 17 nt, Human
aaaugaaauuuaaacau

SEQ ID NO: 2812513 - RNA, 19 nt, Human
aaaugaaauuuaaacauua

SEQ ID NO: 2812514 - RNA, 17 nt, Human
aaaugacuacuuagcau

SEQ ID NO: 2812515 - RNA, 21 nt, Human
aaaugacuacuuagcauccua

SEQ ID NO: 2812516 - RNA, 22 nt, Human
aaaugacuacuuagcauccuaa

SEQ ID NO: 2812517 - RNA, 20 nt, Human
aaaugaccucuguccucccu

SEQ ID NO: 2812518 - RNA, 14 nt, Human
aaaugacaucuuuu

SEQ ID NO: 2812519 - RNA, 15 nt, Human
aaaugacaucuuuuu

SEQ ID NO: 2812520 - RNA, 16 nt, Human
aaaugacaucuuuuua

SEQ ID NO: 2812521 - RNA, 17 nt, Human
aaaugacaucuuuuuaa

SEQ ID NO: 2812522 - RNA, 20 nt, Human
aaaugacaucuuuuuaaagc

SEQ ID NO: 2812523 - RNA, 21 nt, Human
aaaugacaucuuuuuaaagcu

SEQ ID NO: 2812524 - RNA, 22 nt, Human
aaaugacaucuuuuuaaagcuu

SEQ ID NO: 2812525 - RNA, 14 nt, Human
aaaugacaugcacu

SEQ ID NO: 2812526 - RNA, 17 nt, Human
aaaugacaugcacugac

SEQ ID NO: 2812527 - RNA, 19 nt, Human
aaaugacaugcacugaccc

SEQ ID NO: 2812528 - RNA, 15 nt, Human
aaaugacagacugaa

SEQ ID NO: 2812529 - RNA, 16 nt, Human
aaaugaauaucuauua

SEQ ID NO: 2812530 - RNA, 20 nt, Human
aaaugaagugcaaauuugau

SEQ ID NO: 2812531 - RNA, 17 nt, Human
aaaugaauaucuauuaa

SEQ ID NO: 2812532 - RNA, 18 nt, Human
aaaugaauaucuauuaau

SEQ ID NO: 2812533 - RNA, 19 nt, Human
aaaugaauaucuauuaaua

SEQ ID NO: 2812534 - RNA, 14 nt, Human
aaaugaauauuuug

SEQ ID NO: 2812535 - RNA, 15 nt, Human
aaaugaauauuuuga

SEQ ID NO: 2812536 - RNA, 16 nt, Human
aaaugaauauuuugau

SEQ ID NO: 2812537 - RNA, 18 nt, Human
aaaugaauauuuugauaa

SEQ ID NO: 2812538 - RNA, 19 nt, Human
aaaugaauauuuugauaau

SEQ ID NO: 2812539 - RNA, 11 nt, Human
aaaugaaugag

SEQ ID NO: 2812540 - RNA, 19 nt, Human
aaaugaaugucuaaaauug

SEQ ID NO: 2812541 - RNA, 15 nt, Human
aaaugagugugaagg

SEQ ID NO: 2812542 - RNA, 15 nt, Human
aaaugaggucuguuu

SEQ ID NO: 2812543 - RNA, 16 nt, Human
aaaugaggucuguuua

SEQ ID NO: 2812544 - RNA, 21 nt, Human
aaaugaggucuguuuaaagug

SEQ ID NO: 2812545 - RNA, 14 nt, Human
aaaugaguugugaa

SEQ ID NO: 2812546 - RNA, 15 nt, Human
aaaugaguugugaaa

SEQ ID NO: 2812547 - RNA, 19 nt, Human
aaaugaguugugaaaguuu

SEQ ID NO: 2812548 - RNA, 23 nt, Human
aaaugaguugugaaaguuuugag

SEQ ID NO: 2812549 - RNA, 13 nt, Human
aaaugauagauuu

SEQ ID NO: 2812550 - RNA, 15 nt, Human
aaaugauagauuuga

SEQ ID NO: 2812551 - RNA, 19 nt, Human
aaaugauagauuugaccuc

SEQ ID NO: 2812552 - RNA, 20 nt, Human
aaaugauagauuugaccucc

SEQ ID NO: 2812553 - RNA, 21 nt, Human
aaaugauagauuugaccuccu

SEQ ID NO: 2812554 - RNA, 21 nt, Human
aaaugauaguugauuuucaaa

SEQ ID NO: 2812555 - RNA, 19 nt, Human
aaaugaggucagagccugc

SEQ ID NO: 2812556 - RNA, 17 nt, Human
aaaugaggucagagccu

SEQ ID NO: 2812557 - RNA, 18 nt, Human
aaaugaggauuauugaua

SEQ ID NO: 2812558 - RNA, 16 nt, Human
aaaugaggacauguuu

SEQ ID NO: 2812559 - RNA, 14 nt, Human
aaaugaggacaugu

SEQ ID NO: 2812560 - RNA, 21 nt, Human
aaaugagaaggcagccaccag

SEQ ID NO: 2812561 - RNA, 17 nt, Human
aaaugccauaauacaaa

SEQ ID NO: 2812562 - RNA, 19 nt, Human
aaaugccauaauacaaaag

SEQ ID NO: 2812563 - RNA, 20 nt, Human
aaaugccauaauacaaaagg

SEQ ID NO: 2812564 - RNA, 23 nt, Human
aaaugccauaauacaaaaggcuc

SEQ ID NO: 2812565 - RNA, 22 nt, Human
aaaugccauuuauuuauugauu

SEQ ID NO: 2812566 - RNA, 21 nt, Human
aaaugccauuuauuuauugau

SEQ ID NO: 2812567 - RNA, 20 nt, Human
aaaugccauuuauuuauuga

SEQ ID NO: 2812568 - RNA, 14 nt, Human
aaaugcaugaacaa

SEQ ID NO: 2812569 - RNA, 19 nt, Human
aaaugccauuuauuuauug

SEQ ID NO: 2812570 - RNA, 15 nt, Human
aaaugccuaauaaac

SEQ ID NO: 2812571 - RNA, 15 nt, Human
aaaugccuaguuuuu

SEQ ID NO: 2812572 - RNA, 16 nt, Human
aaaugccuaguuuuua

SEQ ID NO: 2812573 - RNA, 19 nt, Human
aaaugccuaguuuuuagua

SEQ ID NO: 2812574 - RNA, 13 nt, Human
aaaugggaacauu

SEQ ID NO: 2812575 - RNA, 21 nt, Human
aaaugggaacauuuauuuuau

SEQ ID NO: 2812576 - RNA, 15 nt, Human
aaaugccuuaaaaug

SEQ ID NO: 2812577 - RNA, 17 nt, Human
aaaugccuuaaaaugga

SEQ ID NO: 2812578 - RNA, 18 nt, Human
aaaugccuuaaaauggaa

SEQ ID NO: 2812579 - RNA, 15 nt, Human
aaaugcaauauuugu

SEQ ID NO: 2812580 - RNA, 11 nt, Human
aaaugcaauau

SEQ ID NO: 2812581 - RNA, 15 nt, Human
aaaugcaaaguucug

SEQ ID NO: 2812582 - RNA, 17 nt, Human
aaaugcaaaguucugug

SEQ ID NO: 2812583 - RNA, 19 nt, Human
aaaugcaaaguucuguguu

SEQ ID NO: 2812584 - RNA, 23 nt, Human
aaaugauguucauuuagauugaa

SEQ ID NO: 2812585 - RNA, 15 nt, Human
aaaugauucuuagug

SEQ ID NO: 2812586 - RNA, 22 nt, Human
aaaugauccccaagugugaaca

SEQ ID NO: 2812587 - RNA, 15 nt, Human
aaaugauuguaaaau

SEQ ID NO: 2812588 - RNA, 22 nt, Human
aaaugauuguaaaauagcuugu

SEQ ID NO: 2812589 - RNA, 21 nt, Human
aaaugauuuguaguggaaaca

SEQ ID NO: 2812590 - RNA, 23 nt, Human
aaaugauuuuuacaaguuuuaaa

SEQ ID NO: 2812591 - RNA, 12 nt, Human
aaaugcagccca

SEQ ID NO: 2812592 - RNA, 13 nt, Human
aaaugcagcccau

SEQ ID NO: 2812593 - RNA, 21 nt, Human
aaaugcagcccauuucuccag

SEQ ID NO: 2812594 - RNA, 22 nt, Human
aaaugcagcccauuucuccaga

SEQ ID NO: 2812595 - RNA, 22 nt, Human
aaaugcagggauugcugccacu

SEQ ID NO: 2812596 - RNA, 14 nt, Human
aaaugcaguauauu

SEQ ID NO: 2812597 - RNA, 18 nt, Human
aaaugcaguauauuucuu

SEQ ID NO: 2812598 - RNA, 15 nt, Human
aaaugcauaaaugca

SEQ ID NO: 2812599 - RNA, 20 nt, Human
aaaugcauuauaggaucauu

SEQ ID NO: 2812600 - RNA, 15 nt, Human
aacauuucuguaaau

SEQ ID NO: 2812601 - RNA, 16 nt, Human
aacauuucuguaaaua

SEQ ID NO: 2812602 - RNA, 18 nt, Human
aacauuucuguaaauacc

SEQ ID NO: 2812603 - RNA, 19 nt, Human
aacauuucuguaaauacca

SEQ ID NO: 2812604 - RNA, 20 nt, Human
aacauuucuguaaauaccau

SEQ ID NO: 2812605 - RNA, 12 nt, Human
aacauuugccuu

SEQ ID NO: 2812606 - RNA, 13 nt, Human
aacauuugccuug

SEQ ID NO: 2812607 - RNA, 14 nt, Human
aacauuugccuugc

SEQ ID NO: 2812608 - RNA, 17 nt, Human
aacauuugccuugcaga

SEQ ID NO: 2812609 - RNA, 18 nt, Human
aacauuugccuugcagaa

SEQ ID NO: 2812610 - RNA, 20 nt, Human
aacauuugccuugcagaacu

SEQ ID NO: 2812611 - RNA, 22 nt, Human
aacauuugccuugcagaacugc

SEQ ID NO: 2812612 - RNA, 12 nt, Human
aacauuguauua

SEQ ID NO: 2812613 - RNA, 17 nt, Human
aacauucugauuuggaa

SEQ ID NO: 2812614 - RNA, 14 nt, Human
aacauuuacaugua

SEQ ID NO: 2812615 - RNA, 13 nt, Human
aacauuuacuaca

SEQ ID NO: 2812616 - RNA, 17 nt, Human
aacauuuacuacaguuu

SEQ ID NO: 2812617 - RNA, 19 nt, Human
aacauuuacuacaguuuuu

SEQ ID NO: 2812618 - RNA, 17 nt, Human
aacauuuauuuuaugag

SEQ ID NO: 2812619 - RNA, 19 nt, Human
aacauuuauuuuaugagaa

SEQ ID NO: 2812620 - RNA, 20 nt, Human
aacauuuauuuuaugagaaa

SEQ ID NO: 2812621 - RNA, 21 nt, Human
aacauuuauuuuaugagaaau

SEQ ID NO: 2812622 - RNA, 23 nt, Human
aacauuuauuuuaugagaaaugu

SEQ ID NO: 2812623 - RNA, 15 nt, Human
aacauugugauguau

SEQ ID NO: 2812624 - RNA, 22 nt, Human
aacauugugauguauauuccuu

SEQ ID NO: 2812625 - RNA, 19 nt, Human
aacauuguugcucccugug

SEQ ID NO: 2812626 - RNA, 20 nt, Human
aacauuguugcucccuguga

SEQ ID NO: 2812627 - RNA, 15 nt, Human
aacauuuacaguccu

SEQ ID NO: 2812628 - RNA, 15 nt, Human
aacauaccaacaugu

SEQ ID NO: 2812629 - RNA, 18 nt, Human
aacauucugauuuggaaa

SEQ ID NO: 2812630 - RNA, 21 nt, Human
aacauucuuuuaacuucuuuc

SEQ ID NO: 2812631 - RNA, 16 nt, Human
aacauucugauuugga

SEQ ID NO: 2812632 - RNA, 20 nt, Human
aacauugagauuaugaugaa

SEQ ID NO: 2812633 - RNA, 18 nt, Human
guccucuggagcccuaac

SEQ ID NO: 2812634 - RNA, 13 nt, Human
guccucuggagcc

SEQ ID NO: 2812635 - RNA, 17 nt, Human
guccucugaaugaaccu

SEQ ID NO: 2812636 - RNA, 13 nt, Human
guccucugaauga

SEQ ID NO: 2812637 - RNA, 12 nt, Human
aacauuugugau

SEQ ID NO: 2812638 - RNA, 13 nt, Human
aacauuugugaua

SEQ ID NO: 2812639 - RNA, 22 nt, Human
aacauuugugauauauguauua

SEQ ID NO: 2812640 - RNA, 15 nt, Human
aacauuuguguguua

SEQ ID NO: 2812641 - RNA, 17 nt, Human
aacauuuguguguuaua

SEQ ID NO: 2812642 - RNA, 17 nt, Human
guccucuccccuccagc

SEQ ID NO: 2812643 - RNA, 18 nt, Human
guccucuccccuccagcc

SEQ ID NO: 2812644 - RNA, 19 nt, Human
guccucuccccuccagccu

SEQ ID NO: 2812645 - RNA, 20 nt, Human
guccucuccccuccagccuu

SEQ ID NO: 2812646 - RNA, 21 nt, Human
guccucuccccuccagccuuu

SEQ ID NO: 2812647 - RNA, 20 nt, Human
guccugccuggccaggcaga

SEQ ID NO: 2812648 - RNA, 19 nt, Human
guccugccuggccaggcag

SEQ ID NO: 2812649 - RNA, 17 nt, Human
guccugccugcaauauu

SEQ ID NO: 2812650 - RNA, 14 nt, Human
guccuuccaccucg

SEQ ID NO: 2812651 - RNA, 22 nt, Human
guccuucaaaauccuuccaaag

SEQ ID NO: 2812652 - RNA, 15 nt, Human
guccugccuggccag

SEQ ID NO: 2812653 - RNA, 14 nt, Human
guccugccuggcca

SEQ ID NO: 2812654 - RNA, 13 nt, Human
guccugccuggcc

SEQ ID NO: 2812655 - RNA, 17 nt, Human
guccugccucagccucc

SEQ ID NO: 2812656 - RNA, 15 nt, Human
guccugccucagccu

SEQ ID NO: 2812657 - RNA, 16 nt, Human
guccugccggagagga

SEQ ID NO: 2812658 - RNA, 18 nt, Human
guccugccggagaggaag

SEQ ID NO: 2812659 - RNA, 18 nt, Human
guccugaggguccccacc

SEQ ID NO: 2812660 - RNA, 21 nt, Human
guccugaggguccccaccugg

SEQ ID NO: 2812661 - RNA, 14 nt, Human
aacaguaaaugugc

SEQ ID NO: 2812662 - RNA, 21 nt, Human
aacaggcuguucugcacugaa

SEQ ID NO: 2812663 - RNA, 22 nt, Human
aacaggcuguucugcacugaaa

SEQ ID NO: 2812664 - RNA, 23 nt, Human
aacaggcuguucugcacugaaaa

SEQ ID NO: 2812665 - RNA, 23 nt, Human
aacaggcugggcuucaguggcag

SEQ ID NO: 2812666 - RNA, 13 nt, Human
aacaggcugggcu

SEQ ID NO: 2812667 - RNA, 22 nt, Human
aacaggcugggcuucaguggca

SEQ ID NO: 2812668 - RNA, 19 nt, Human
aacagacuggaagcacagc

SEQ ID NO: 2812669 - RNA, 19 nt, Human
aacagacucgauucauauu

SEQ ID NO: 2812670 - RNA, 22 nt, Human
aacaguugugaaccaagaucua

SEQ ID NO: 2812671 - RNA, 20 nt, Human
aacagugcuugccacagagc

SEQ ID NO: 2812672 - RNA, 19 nt, Human
aacagaaagucauuccuuc

SEQ ID NO: 2812673 - RNA, 16 nt, Human
aacagaaacaaaaaca

SEQ ID NO: 2812674 - RNA, 13 nt, Human
aacagaacagcuu

SEQ ID NO: 2812675 - RNA, 14 nt, Human
aacagaacagcuuc

SEQ ID NO: 2812676 - RNA, 15 nt, Human
aacagaacagcuuca

SEQ ID NO: 2812677 - RNA, 16 nt, Human
aacagaacagcuucag

SEQ ID NO: 2812678 - RNA, 11 nt, Human
aacagaacagg

SEQ ID NO: 2812679 - RNA, 12 nt, Human
aacagaacaggg

SEQ ID NO: 2812680 - RNA, 13 nt, Human
aacagaacagggu

SEQ ID NO: 2812681 - RNA, 14 nt, Human
aacagaacaggguc

SEQ ID NO: 2812682 - RNA, 17 nt, Human
aacagaacagggucaug

SEQ ID NO: 2812683 - RNA, 20 nt, Human
aacagaacaucauuagaaca

SEQ ID NO: 2812684 - RNA, 16 nt, Human
guccggaaugccaccc

SEQ ID NO: 2812685 - RNA, 18 nt, Human
guccggacacuccuagag

SEQ ID NO: 2812686 - RNA, 19 nt, Human
guccggacccaccucaccc

SEQ ID NO: 2812687 - RNA, 22 nt, Human
guccgcugggugguacccucug

SEQ ID NO: 2812688 - RNA, 14 nt, Human
aacagaaaacauuc

SEQ ID NO: 2812689 - RNA, 19 nt, Human
aacagaaaacauucugauu

SEQ ID NO: 2812690 - RNA, 13 nt, Human
aacagaaacaaaa

SEQ ID NO: 2812691 - RNA, 19 nt, Human
aacacuuucucuucuuguu

SEQ ID NO: 2812692 - RNA, 17 nt, Human
aacacuuugccuccugu

SEQ ID NO: 2812693 - RNA, 13 nt, Human
aacacuuuuuugg

SEQ ID NO: 2812694 - RNA, 18 nt, Human
aacacuuuuuugggggua

SEQ ID NO: 2812695 - RNA, 17 nt, Human
guccggacacuccuaga

SEQ ID NO: 2812696 - RNA, 15 nt, Human
guccgauaauaucuu

SEQ ID NO: 2812697 - RNA, 16 nt, Human
gucccaaggaaagccc

SEQ ID NO: 2812698 - RNA, 15 nt, Human
gucccaacuuguaaa

SEQ ID NO: 2812699 - RNA, 18 nt, Human
guccauuuuucuuccagg

SEQ ID NO: 2812700 - RNA, 19 nt, Human
gucccaaauccuucccaag

SEQ ID NO: 2812701 - RNA, 21 nt, Human
aaauuuuucucaguuuguaua

SEQ ID NO: 2812702 - RNA, 22 nt, Human
aacaagaccaccacuucgaaac

SEQ ID NO: 2812703 - RNA, 15 nt, Human
gucacaggcaggucc

SEQ ID NO: 2812704 - RNA, 13 nt, Human
gucacaggcaggu

SEQ ID NO: 2812705 - RNA, 16 nt, Human
gucacaggcaggucca

SEQ ID NO: 2812706 - RNA, 12 nt, Human
aaauuuuuguaa

SEQ ID NO: 2812707 - RNA, 13 nt, Human
aaauuuuuguaaa

SEQ ID NO: 2812708 - RNA, 14 nt, Human
aaauuuuuguaaau

SEQ ID NO: 2812709 - RNA, 21 nt, Human
aaauuuuucaaccccacccug

SEQ ID NO: 2812710 - RNA, 12 nt, Human
aaauuuuguaau

SEQ ID NO: 2812711 - RNA, 14 nt, Human
aaauuuuguaauga

SEQ ID NO: 2812712 - RNA, 15 nt, Human
aaauuuuguaaugaa

SEQ ID NO: 2812713 - RNA, 18 nt, Human
aaauuuuguaaugaauuc

SEQ ID NO: 2812714 - RNA, 14 nt, Human
aacaaugaagauaa

SEQ ID NO: 2812715 - RNA, 18 nt, Human
aacaaugaagauaaaaag

SEQ ID NO: 2812716 - RNA, 22 nt, Human
aacaauugucgaaaagagucuu

SEQ ID NO: 2812717 - RNA, 15 nt, Human
aacaaugaugcccug

SEQ ID NO: 2812718 - RNA, 19 nt, Human
aacaaugcagcaaggcccu

SEQ ID NO: 2812719 - RNA, 19 nt, Human
aacaaugacacuagaaaac

SEQ ID NO: 2812720 - RNA, 20 nt, Human
aacaaugacacuagaaaacu

SEQ ID NO: 2812721 - RNA, 14 nt, Human
aacaauugugaagu

SEQ ID NO: 2812722 - RNA, 13 nt, Human
aacaauuuaaaaa

SEQ ID NO: 2812723 - RNA, 14 nt, Human
aacaauuuaaaaau

SEQ ID NO: 2812724 - RNA, 19 nt, Human
aacaauuuaaaaaugagug

SEQ ID NO: 2812725 - RNA, 20 nt, Human
aacaauuuccuuuauauuua

SEQ ID NO: 2812726 - RNA, 21 nt, Human
aacaauuuccuuuauauuuag

SEQ ID NO: 2812727 - RNA, 22 nt, Human
aacaauuuccuuuauauuuagu

SEQ ID NO: 2812728 - RNA, 20 nt, Human
aacaauuugggcuuccuguu

SEQ ID NO: 2812729 - RNA, 19 nt, Human
aacaaggggcuguuacaua

SEQ ID NO: 2812730 - RNA, 22 nt, Human
aacaagccugacccuguaaaau

SEQ ID NO: 2812731 - RNA, 23 nt, Human
aacaagcuaauugggaguccagg

SEQ ID NO: 2812732 - RNA, 13 nt, Human
aacaaguaccaaa

SEQ ID NO: 2812733 - RNA, 15 nt, Human
aacaauaaaugugca

SEQ ID NO: 2812734 - RNA, 18 nt, Human
aacaauaggcuguuccca

SEQ ID NO: 2812735 - RNA, 18 nt, Human
aacaauaguaauucucag

SEQ ID NO: 2812736 - RNA, 13 nt, Human
aacaauaucauau

SEQ ID NO: 2812737 - RNA, 18 nt, Human
aacaauaucauaucauca

SEQ ID NO: 2812738 - RNA, 13 nt, Human
aacaaucacacuc

SEQ ID NO: 2812739 - RNA, 17 nt, Human
aacaaucuggaagaaaa

SEQ ID NO: 2812740 - RNA, 20 nt, Human
aacaaucuggaagaaaaaaa

SEQ ID NO: 2812741 - RNA, 16 nt, Human
aacaaggcgaaauccu

SEQ ID NO: 2812742 - RNA, 19 nt, Human
aacaauaaauguuggcuug

SEQ ID NO: 2812743 - RNA, 20 nt, Human
guccaagguuuaaagagucu

SEQ ID NO: 2812744 - RNA, 17 nt, Human
guccaaggaaaccacag

SEQ ID NO: 2812745 - RNA, 22 nt, Human
guccaaggaaaccacagcugcu

SEQ ID NO: 2812746 - RNA, 21 nt, Human
guccaagguuuaaagagucua

SEQ ID NO: 2812747 - RNA, 12 nt, Human
guccaauaagac

SEQ ID NO: 2812748 - RNA, 19 nt, Human
guccauuuauauaugaaaa

SEQ ID NO: 2812749 - RNA, 22 nt, Human
guccauuuauauaugaaaacua

SEQ ID NO: 2812750 - RNA, 23 nt, Human
guccauuuauauaugaaaacuau

SEQ ID NO: 2812751 - RNA, 21 nt, Human
guccauuuauccacaggaaag

SEQ ID NO: 2812752 - RNA, 13 nt, Human
guccauuucuacc

SEQ ID NO: 2812753 - RNA, 13 nt, Human
guccauuuguaaa

SEQ ID NO: 2812754 - RNA, 14 nt, Human
guccauuuguaaaa

SEQ ID NO: 2812755 - RNA, 15 nt, Human
guccauuuguaaaac

SEQ ID NO: 2812756 - RNA, 16 nt, Human
guccauuuguaaaacu

SEQ ID NO: 2812757 - RNA, 14 nt, Human
guccauuuugugaa

SEQ ID NO: 2812758 - RNA, 15 nt, Human
guccauuuugugaag

SEQ ID NO: 2812759 - RNA, 16 nt, Human
guccauuuugugaagc

SEQ ID NO: 2812760 - RNA, 17 nt, Human
guccauuuugugaagcc

SEQ ID NO: 2812761 - RNA, 20 nt, Human
guccauuuugugaagcccug

SEQ ID NO: 2812762 - RNA, 21 nt, Human
guccauuuugugaagcccugu

SEQ ID NO: 2812763 - RNA, 22 nt, Human
guccauuuugugaagcccuguu

SEQ ID NO: 2812764 - RNA, 16 nt, Human
guccaauuuuaauuua

SEQ ID NO: 2812765 - RNA, 18 nt, Human
guccaauuuuaauuuagu

SEQ ID NO: 2812766 - RNA, 12 nt, Human
guccaauguggc

SEQ ID NO: 2812767 - RNA, 13 nt, Human
guccacagcuucc

SEQ ID NO: 2812768 - RNA, 14 nt, Human
guccacagcuuccu

SEQ ID NO: 2812769 - RNA, 19 nt, Human
guccacacccaauuccacu

SEQ ID NO: 2812770 - RNA, 13 nt, Human
guccacagagagg

SEQ ID NO: 2812771 - RNA, 15 nt, Human
guccacaacacacag

SEQ ID NO: 2812772 - RNA, 22 nt, Human
guccaagauuccggauccuaag

SEQ ID NO: 2812773 - RNA, 22 nt, Human
gucauuugcugugaacugaaau

SEQ ID NO: 2812774 - RNA, 16 nt, Human
gucauuuguuaaaaua

SEQ ID NO: 2812775 - RNA, 17 nt, Human
gucauuuguugugaugu

SEQ ID NO: 2812776 - RNA, 21 nt, Human
gucauuuguugugaugucuuu

SEQ ID NO: 2812777 - RNA, 22 nt, Human
gucauuugagcagggcucagcg

SEQ ID NO: 2812778 - RNA, 16 nt, Human
gucauuugcucugccu

SEQ ID NO: 2812779 - RNA, 21 nt, Human
gucauuugagcagggcucagc

SEQ ID NO: 2812780 - RNA, 11 nt, Human
aacacuuccau

SEQ ID NO: 2812781 - RNA, 14 nt, Human
aacacuucuguccu

SEQ ID NO: 2812782 - RNA, 17 nt, Human
aacacuucuguccugug

SEQ ID NO: 2812783 - RNA, 19 nt, Human
aacacuucuguccugugag

SEQ ID NO: 2812784 - RNA, 21 nt, Human
aacacuucuguccugugaggu

SEQ ID NO: 2812785 - RNA, 13 nt, Human
aacacuugaaccu

SEQ ID NO: 2812786 - RNA, 22 nt, Human
aacacuugcccaugcuauuugu

SEQ ID NO: 2812787 - RNA, 13 nt, Human
aacacuuggugcu

SEQ ID NO: 2812788 - RNA, 20 nt, Human
aacacuuggugcugggaacc

SEQ ID NO: 2812789 - RNA, 15 nt, Human
aacacuucaauaauu

SEQ ID NO: 2812790 - RNA, 12 nt, Human
aacacuguggaa

SEQ ID NO: 2812791 - RNA, 20 nt, Human
aacacuguggaacuaauaaa

SEQ ID NO: 2812792 - RNA, 18 nt, Human
aacacuguggguguguga

SEQ ID NO: 2812793 - RNA, 12 nt, Human
aacacugugaaa

SEQ ID NO: 2812794 - RNA, 15 nt, Human
aacacugccuuuuua

SEQ ID NO: 2812795 - RNA, 14 nt, Human
aacacugccuuuuu

SEQ ID NO: 2812796 - RNA, 14 nt, Human
aacacugcaggcau

SEQ ID NO: 2812797 - RNA, 22 nt, Human
aacacugccaucuuaguuugga

SEQ ID NO: 2812798 - RNA, 12 nt, Human
aacacugcccuc

SEQ ID NO: 2812799 - RNA, 21 nt, Human
aacacugcccucgcacggccc

SEQ ID NO: 2812800 - RNA, 23 nt, Human
aacacugccuuuuuauuuauaug

SEQ ID NO: 2812801 - RNA, 15 nt, Human
aacacugagcuguca

SEQ ID NO: 2812802 - RNA, 19 nt, Human
aacacucuuuugcuuuauu

SEQ ID NO: 2812803 - RNA, 15 nt, Human
aacacugaaaaauua

SEQ ID NO: 2812804 - RNA, 16 nt, Human
aacacucuuuugcuuu

SEQ ID NO: 2812805 - RNA, 13 nt, Human
aacacucuauauu

SEQ ID NO: 2812806 - RNA, 12 nt, Human
aacacucuuuug

SEQ ID NO: 2812807 - RNA, 12 nt, Human
aacaauuuucuu

SEQ ID NO: 2812808 - RNA, 18 nt, Human
aacaauuuucuugugaca

SEQ ID NO: 2812809 - RNA, 15 nt, Human
aacacaaaccacaac

SEQ ID NO: 2812810 - RNA, 16 nt, Human
aacacuccuugcauca

SEQ ID NO: 2812811 - RNA, 13 nt, Human
aacuccagcaacu

SEQ ID NO: 2812812 - RNA, 16 nt, Human
aacucccaucaccucu

SEQ ID NO: 2812813 - RNA, 19 nt, Human
aacuccccuuccucacugc

SEQ ID NO: 2812814 - RNA, 16 nt, Human
aacuccccuguuucaa

SEQ ID NO: 2812815 - RNA, 17 nt, Human
aacuccccuguuucaau

SEQ ID NO: 2812816 - RNA, 19 nt, Human
aacuccccuguuucaauca

SEQ ID NO: 2812817 - RNA, 22 nt, Human
aacuccccuguuucaaucacug

SEQ ID NO: 2812818 - RNA, 19 nt, Human
aacucccugccccccagcc

SEQ ID NO: 2812819 - RNA, 13 nt, Human
aacucccugcccc

SEQ ID NO: 2812820 - RNA, 23 nt, Human
aacuccccuuccucacugcccaa

SEQ ID NO: 2812821 - RNA, 15 nt, Human
aacucuacuguguaa

SEQ ID NO: 2812822 - RNA, 19 nt, Human
gugaaccaccacacccagc

SEQ ID NO: 2812823 - RNA, 19 nt, Human
gugaacaggcugggcugcu

SEQ ID NO: 2812824 - RNA, 14 nt, Human
aacucuaucugggc

SEQ ID NO: 2812825 - RNA, 18 nt, Human
aacucuaucugggccugg

SEQ ID NO: 2812826 - RNA, 23 nt, Human
gucuuuucuuggcaaaagccuug

SEQ ID NO: 2812827 - RNA, 19 nt, Human
aaccuggaaaaauuccaga

SEQ ID NO: 2812828 - RNA, 20 nt, Human
aaccugcucuccucuugcca

SEQ ID NO: 2812829 - RNA, 11 nt, Human
aaccugcucuc

SEQ ID NO: 2812830 - RNA, 15 nt, Human
aaccugcucuccucu

SEQ ID NO: 2812831 - RNA, 14 nt, Human
aacuaaauuugaua

SEQ ID NO: 2812832 - RNA, 16 nt, Human
aacuaaauuugauacu

SEQ ID NO: 2812833 - RNA, 17 nt, Human
aacuaaauuugauacuu

SEQ ID NO: 2812834 - RNA, 19 nt, Human
aacuaaauuugauacuuau

SEQ ID NO: 2812835 - RNA, 20 nt, Human
aacuaaauuugauacuuaua

SEQ ID NO: 2812836 - RNA, 21 nt, Human
aacuaaauuugauacuuauau

SEQ ID NO: 2812837 - RNA, 23 nt, Human
aacuaauccuucuggcagauuca

SEQ ID NO: 2812838 - RNA, 19 nt, Human
aacuaacacgugaugugau

SEQ ID NO: 2812839 - RNA, 13 nt, Human
aacuaaauguucu

SEQ ID NO: 2812840 - RNA, 14 nt, Human
aacuaaauguucua

SEQ ID NO: 2812841 - RNA, 18 nt, Human
aacuaaauguucuauggu

SEQ ID NO: 2812842 - RNA, 19 nt, Human
aacuaaagaagaucuguaa

SEQ ID NO: 2812843 - RNA, 22 nt, Human
aacuacagaccugcuuuuugaa

SEQ ID NO: 2812844 - RNA, 13 nt, Human
aacuacaaaucaa

SEQ ID NO: 2812845 - RNA, 13 nt, Human
aacuacaugagaa

SEQ ID NO: 2812846 - RNA, 15 nt, Human
aacuagaugaccuca

SEQ ID NO: 2812847 - RNA, 17 nt, Human
aacuagaugaccucauu

SEQ ID NO: 2812848 - RNA, 18 nt, Human
aacuagaugaccucauua

SEQ ID NO: 2812849 - RNA, 18 nt, Human
aacuaauugacuuuagaa

SEQ ID NO: 2812850 - RNA, 20 nt, Human
aacuaauugacuuuagaaag

SEQ ID NO: 2812851 - RNA, 13 nt, Human
gucuuaauuauua

SEQ ID NO: 2812852 - RNA, 18 nt, Human
gucuuaauuauuauuugu

SEQ ID NO: 2812853 - RNA, 21 nt, Human
gucuuaauuauuauuuguguu

SEQ ID NO: 2812854 - RNA, 20 nt, Human
gucuuaauuucuaucuuguu

SEQ ID NO: 2812855 - RNA, 22 nt, Human
gucuuaauuuuugaaaaaagua

SEQ ID NO: 2812856 - RNA, 17 nt, Human
gucugggcuagguagaa

SEQ ID NO: 2812857 - RNA, 20 nt, Human
gucugggaggaauggacaga

SEQ ID NO: 2812858 - RNA, 15 nt, Human
gucuggcuucacaga

SEQ ID NO: 2812859 - RNA, 18 nt, Human
gucugggaaaugagcagg

SEQ ID NO: 2812860 - RNA, 22 nt, Human
gucugggaaaugagcagggaug

SEQ ID NO: 2812861 - RNA, 14 nt, Human
gucugggacacaaa

SEQ ID NO: 2812862 - RNA, 17 nt, Human
aaccucuucuggcucaa

SEQ ID NO: 2812863 - RNA, 23 nt, Human
gucugcucagacagaaccccuac

SEQ ID NO: 2812864 - RNA, 12 nt, Human
aaccucuucccc

SEQ ID NO: 2812865 - RNA, 11 nt, Human
aaccucuuccc

SEQ ID NO: 2812866 - RNA, 14 nt, Human
aaccucuuccccag

SEQ ID NO: 2812867 - RNA, 21 nt, Human
aaccucuccucauguucugcu

SEQ ID NO: 2812868 - RNA, 16 nt, Human
aaccucuacauauuua

SEQ ID NO: 2812869 - RNA, 20 nt, Human
aaccucugccuccuggguuc

SEQ ID NO: 2812870 - RNA, 16 nt, Human
aaccucugcuucccag

SEQ ID NO: 2812871 - RNA, 18 nt, Human
aaccucugcuucccaggu

SEQ ID NO: 2812872 - RNA, 20 nt, Human
aaccucugcuucccagguuc

SEQ ID NO: 2812873 - RNA, 13 nt, Human
aaccucugucuca

SEQ ID NO: 2812874 - RNA, 14 nt, Human
aaccucugucucau

SEQ ID NO: 2812875 - RNA, 16 nt, Human
aaccucugucucaucc

SEQ ID NO: 2812876 - RNA, 13 nt, Human
gucugcugaggag

SEQ ID NO: 2812877 - RNA, 13 nt, Human
aaccucucacucc

SEQ ID NO: 2812878 - RNA, 17 nt, Human
gucugcuccuuuccccu

SEQ ID NO: 2812879 - RNA, 21 nt, Human
gucugcucuagaugagcuggg

SEQ ID NO: 2812880 - RNA, 18 nt, Human
gucuuuggaaaaauguuu

SEQ ID NO: 2812881 - RNA, 19 nt, Human
gucuuuggaaaaauguuug

SEQ ID NO: 2812882 - RNA, 20 nt, Human
gucuuuggaaaaauguuugu

SEQ ID NO: 2812883 - RNA, 14 nt, Human
gucuuuugaauauu

SEQ ID NO: 2812884 - RNA, 19 nt, Human
gucuuaauuauuauuugug

SEQ ID NO: 2812885 - RNA, 16 nt, Human
gucuucccuaccucag

SEQ ID NO: 2812886 - RNA, 17 nt, Human
gucuuauauagcagcaa

SEQ ID NO: 2812887 - RNA, 15 nt, Human
gucuucccuaccuca

SEQ ID NO: 2812888 - RNA, 18 nt, Human
gucuuccugaaaugcagu

SEQ ID NO: 2812889 - RNA, 21 nt, Human
gucuucccuaccucaggcagg

SEQ ID NO: 2812890 - RNA, 18 nt, Human
gucuucccuaccucaggc

SEQ ID NO: 2812891 - RNA, 19 nt, Human
gucuucccucuucccucag

SEQ ID NO: 2812892 - RNA, 17 nt, Human
gucuuccgccccugccu

SEQ ID NO: 2812893 - RNA, 19 nt, Human
gucuuccgccccugccugc

SEQ ID NO: 2812894 - RNA, 21 nt, Human
gucuuccgccccugccugcca

SEQ ID NO: 2812895 - RNA, 23 nt, Human
gucuuccgccccugccugccaug

SEQ ID NO: 2812896 - RNA, 18 nt, Human
aaccacaucuugcucugc

SEQ ID NO: 2812897 - RNA, 16 nt, Human
aaccaauuccucaucc

SEQ ID NO: 2812898 - RNA, 17 nt, Human
aaccaauuccucauccu

SEQ ID NO: 2812899 - RNA, 22 nt, Human
aaccaauuccucauccucagau

SEQ ID NO: 2812900 - RNA, 18 nt, Human
aaccaauuuucaaaguuc

SEQ ID NO: 2812901 - RNA, 20 nt, Human
aaccaauuuuuuguucuuca

SEQ ID NO: 2812902 - RNA, 21 nt, Human
aaccaauuuuuuguucuucag

SEQ ID NO: 2812903 - RNA, 22 nt, Human
aaccacaaaaaaauaccucagg

SEQ ID NO: 2812904 - RNA, 11 nt, Human
aaccacaaagg

SEQ ID NO: 2812905 - RNA, 15 nt, Human
aaccacaaaggccaa

SEQ ID NO: 2812906 - RNA, 20 nt, Human
aaccacaaaggccaaacugc

SEQ ID NO: 2812907 - RNA, 21 nt, Human
aaccacaaaggccaaacugcu

SEQ ID NO: 2812908 - RNA, 14 nt, Human
aaccacaacugaca

SEQ ID NO: 2812909 - RNA, 16 nt, Human
aaccacaacugacaca

SEQ ID NO: 2812910 - RNA, 17 nt, Human
aaccacaacugacacag

SEQ ID NO: 2812911 - RNA, 20 nt, Human
aaccacaacugacacaggaa

SEQ ID NO: 2812912 - RNA, 15 nt, Human
aaccacacaaagaca

SEQ ID NO: 2812913 - RNA, 15 nt, Human
aaccacacaccucac

SEQ ID NO: 2812914 - RNA, 21 nt, Human
aaccaaaagaacaagaauuuc

SEQ ID NO: 2812915 - RNA, 11 nt, Human
aaccaaaauga

SEQ ID NO: 2812916 - RNA, 16 nt, Human
aaccaaaaugacaucu

SEQ ID NO: 2812917 - RNA, 17 nt, Human
aaccaaaaugacaucuu

SEQ ID NO: 2812918 - RNA, 20 nt, Human
aaccaaaaugacaucuuuuu

SEQ ID NO: 2812919 - RNA, 21 nt, Human
aaccaaaaugacaucuuuuua

SEQ ID NO: 2812920 - RNA, 22 nt, Human
aaccaaaaugacaucuuuuuaa

SEQ ID NO: 2812921 - RNA, 14 nt, Human
aaccaaaaugauac

SEQ ID NO: 2812922 - RNA, 13 nt, Human
aaccaaacaauua

SEQ ID NO: 2812923 - RNA, 13 nt, Human
aaccaaaggacau

SEQ ID NO: 2812924 - RNA, 16 nt, Human
aaccaaaggacauuau

SEQ ID NO: 2812925 - RNA, 22 nt, Human
aaccacaucuugcucugcugac

SEQ ID NO: 2812926 - RNA, 20 nt, Human
aaccacaucuugcucugcug

SEQ ID NO: 2812927 - RNA, 14 nt, Human
aacauuuuguucuu

SEQ ID NO: 2812928 - RNA, 15 nt, Human
aacauuuuguucuua

SEQ ID NO: 2812929 - RNA, 18 nt, Human
aacauuuuguucuuacac

SEQ ID NO: 2812930 - RNA, 20 nt, Human
aacauuuuguucuuacacau

SEQ ID NO: 2812931 - RNA, 21 nt, Human
aacauuuuguucuuacacaua

SEQ ID NO: 2812932 - RNA, 23 nt, Human
aacauuuuguucuuacacauaca

SEQ ID NO: 2812933 - RNA, 15 nt, Human
aacauuuuucaacaa

SEQ ID NO: 2812934 - RNA, 22 nt, Human
aacauuuuucaacaaauaucuu

SEQ ID NO: 2812935 - RNA, 19 nt, Human
aacauuuuugauaaagccu

SEQ ID NO: 2812936 - RNA, 19 nt, Human
aacauuuuuuuuuuaaauc

SEQ ID NO: 2812937 - RNA, 23 nt, Human
aacauuuuuuuuuuaaaucaagu

SEQ ID NO: 2812938 - RNA, 14 nt, Human
gucuccuccccuuc

SEQ ID NO: 2812939 - RNA, 16 nt, Human
gucuccuccccuuccc

SEQ ID NO: 2812940 - RNA, 15 nt, Human
gucuccucucagccc

SEQ ID NO: 2812941 - RNA, 13 nt, Human
gucuccucuuuaa

SEQ ID NO: 2812942 - RNA, 18 nt, Human
gucuccucuuuaaaacaa

SEQ ID NO: 2812943 - RNA, 20 nt, Human
gucucccgauucccaacuga

SEQ ID NO: 2812944 - RNA, 14 nt, Human
gucuccuacuccug

SEQ ID NO: 2812945 - RNA, 15 nt, Human
gucuccuacuccuga

SEQ ID NO: 2812946 - RNA, 17 nt, Human
gucuccuacuccugacu

SEQ ID NO: 2812947 - RNA, 23 nt, Human
gucuccucaauuuuugucucaga

SEQ ID NO: 2812948 - RNA, 16 nt, Human
gucucccucccuuggg

SEQ ID NO: 2812949 - RNA, 22 nt, Human
guccuuccaggcccccaccacu

SEQ ID NO: 2812950 - RNA, 14 nt, Human
guccuuccaggccc

SEQ ID NO: 2812951 - RNA, 14 nt, Human
guccuugaaaauau

SEQ ID NO: 2812952 - RNA, 16 nt, Human
guccuugaaugccaua

SEQ ID NO: 2812953 - RNA, 11 nt, Human
guccuugaaaa

SEQ ID NO: 2812954 - RNA, 18 nt, Human
gucucaguggcuucaucu

SEQ ID NO: 2812955 - RNA, 22 nt, Human
gucucaguggcuucaucuguca

SEQ ID NO: 2812956 - RNA, 15 nt, Human
gucucaguuggaaau

SEQ ID NO: 2812957 - RNA, 21 nt, Human
gucucaguuugugugucuuaa

SEQ ID NO: 2812958 - RNA, 18 nt, Human
gucucaguuugugugucu

SEQ ID NO: 2812959 - RNA, 19 nt, Human
gucucaguuugugugucuu

SEQ ID NO: 2812960 - RNA, 15 nt, Human
gucucauccccaggg

SEQ ID NO: 2812961 - RNA, 14 nt, Human
gucucauccccagg

SEQ ID NO: 2812962 - RNA, 16 nt, Human
gucucauccccagggg

SEQ ID NO: 2812963 - RNA, 14 nt, Human
gucucauccuccug

SEQ ID NO: 2812964 - RNA, 13 nt, Human
gucucauccccag

SEQ ID NO: 2812965 - RNA, 17 nt, Human
gucucccacgugggaga

SEQ ID NO: 2812966 - RNA, 20 nt, Human
gucucccaguuaugaaucag

SEQ ID NO: 2812967 - RNA, 16 nt, Human
aaccuauaugauuuau

SEQ ID NO: 2812968 - RNA, 21 nt, Human
aaccuaugaagcaauggauau

SEQ ID NO: 2812969 - RNA, 17 nt, Human
aaccuaguacugccccc

SEQ ID NO: 2812970 - RNA, 15 nt, Human
aaccccacccuguuu

SEQ ID NO: 2812971 - RNA, 16 nt, Human
aacccccauucucauc

SEQ ID NO: 2812972 - RNA, 17 nt, Human
aaccucaaaaugucuaa

SEQ ID NO: 2812973 - RNA, 15 nt, Human
aacccccagccugcu

SEQ ID NO: 2812974 - RNA, 14 nt, Human
aacccccagccugc

SEQ ID NO: 2812975 - RNA, 13 nt, Human
aacccccagccug

SEQ ID NO: 2812976 - RNA, 12 nt, Human
aaccccagcucc

SEQ ID NO: 2812977 - RNA, 14 nt, Human
aaccccagcauccu

SEQ ID NO: 2812978 - RNA, 15 nt, Human
aaccuccuguggaac

SEQ ID NO: 2812979 - RNA, 22 nt, Human
aaccuccuguggaacccagcag

SEQ ID NO: 2812980 - RNA, 14 nt, Human
aaccuccugggcua

SEQ ID NO: 2812981 - RNA, 17 nt, Human
aaccuccgccucuuggg

SEQ ID NO: 2812982 - RNA, 13 nt, Human
aaccucccucuug

SEQ ID NO: 2812983 - RNA, 14 nt, Human
aaccucccucuugu

SEQ ID NO: 2812984 - RNA, 16 nt, Human
aaccucccucuuguuu

SEQ ID NO: 2812985 - RNA, 19 nt, Human
aaccucccucuuguuuugu

SEQ ID NO: 2812986 - RNA, 20 nt, Human
aaccucccucuuguuuuguu

SEQ ID NO: 2812987 - RNA, 23 nt, Human
aaccucccucuuguuuuguuugu

SEQ ID NO: 2812988 - RNA, 20 nt, Human
aaccuccgccaaugcacggc

SEQ ID NO: 2812989 - RNA, 12 nt, Human
aaccucaccccg

SEQ ID NO: 2812990 - RNA, 20 nt, Human
aaccucaccccgaggcccug

SEQ ID NO: 2812991 - RNA, 21 nt, Human
aaccucaccccgaggcccugc

SEQ ID NO: 2812992 - RNA, 22 nt, Human
aaccucaccccgaggcccugca

SEQ ID NO: 2812993 - RNA, 23 nt, Human
aaccucaccccgaggcccugcau

SEQ ID NO: 2812994 - RNA, 20 nt, Human
aaccucaaguaaacuccccu

SEQ ID NO: 2812995 - RNA, 15 nt, Human
aaccccaacgcacag

SEQ ID NO: 2812996 - RNA, 17 nt, Human
aaccccaacgcacagga

SEQ ID NO: 2812997 - RNA, 18 nt, Human
aaccccaacgcacaggaa

SEQ ID NO: 2812998 - RNA, 19 nt, Human
aaccccaacgcacaggaaa

SEQ ID NO: 2812999 - RNA, 20 nt, Human
aacccauuugucucuacuuu

SEQ ID NO: 2813000 - RNA, 15 nt, Human
aacccaugagauuca

SEQ ID NO: 2813001 - RNA, 18 nt, Human
aacccauaggcccacaca

SEQ ID NO: 2813002 - RNA, 19 nt, Human
aacccauaggcccacacac

SEQ ID NO: 2813003 - RNA, 21 nt, Human
aacccauaggcccacacacag

SEQ ID NO: 2813004 - RNA, 22 nt, Human
aacccauaggcccacacacagg

SEQ ID NO: 2813005 - RNA, 23 nt, Human
aacccauaggcccacacacaggu

SEQ ID NO: 2813006 - RNA, 15 nt, Human
aacccagucgcccuu

SEQ ID NO: 2813007 - RNA, 23 nt, Human
aacccagucgcccuuacuucuug

SEQ ID NO: 2813008 - RNA, 17 nt, Human
aacccagggcucugccc

SEQ ID NO: 2813009 - RNA, 19 nt, Human
aacccagggcucugcccca

SEQ ID NO: 2813010 - RNA, 20 nt, Human
aacccagggcucugccccag

SEQ ID NO: 2813011 - RNA, 21 nt, Human
aacccagggcucugccccagu

SEQ ID NO: 2813012 - RNA, 22 nt, Human
aacccagggcucugccccaguc

SEQ ID NO: 2813013 - RNA, 15 nt, Human
guuguaacuuauauu

SEQ ID NO: 2813014 - RNA, 22 nt, Human
guuguaacuuauauugaagaca

SEQ ID NO: 2813015 - RNA, 18 nt, Human
guuguaacuuauguagau

SEQ ID NO: 2813016 - RNA, 19 nt, Human
guuguaacuuauguagaua

SEQ ID NO: 2813017 - RNA, 18 nt, Human
guugguguuccacguguu

SEQ ID NO: 2813018 - RNA, 12 nt, Human
guuguacaugaa

SEQ ID NO: 2813019 - RNA, 14 nt, Human
guuguacaugaaau

SEQ ID NO: 2813020 - RNA, 16 nt, Human
guuguacaugaaauuu

SEQ ID NO: 2813021 - RNA, 14 nt, Human
guuguaaugcugca

SEQ ID NO: 2813022 - RNA, 23 nt, Human
guuguacuauggaaaaucagcug

SEQ ID NO: 2813023 - RNA, 16 nt, Human
guuguacuguauguga

SEQ ID NO: 2813024 - RNA, 23 nt, Human
guuguacauuuaugauuuaauaa

SEQ ID NO: 2813025 - RNA, 16 nt, Human
guuguacauuuaugau

SEQ ID NO: 2813026 - RNA, 18 nt, Human
guuguacauuuaugauuu

SEQ ID NO: 2813027 - RNA, 20 nt, Human
guuguacauuuaugauuuaa

SEQ ID NO: 2813028 - RNA, 13 nt, Human
guuuaaaacagua

SEQ ID NO: 2813029 - RNA, 17 nt, Human
guuuaaaacaguauuua

SEQ ID NO: 2813030 - RNA, 19 nt, Human
guuuaaaacaguauuuauu

SEQ ID NO: 2813031 - RNA, 13 nt, Human
guuguauuaacaa

SEQ ID NO: 2813032 - RNA, 16 nt, Human
guuguauuaacaaaag

SEQ ID NO: 2813033 - RNA, 12 nt, Human
guuguauaauuu

SEQ ID NO: 2813034 - RNA, 14 nt, Human
guuguauaauuucg

SEQ ID NO: 2813035 - RNA, 19 nt, Human
guuggugagaaaccuguau

SEQ ID NO: 2813036 - RNA, 16 nt, Human
guuggucgguggguug

SEQ ID NO: 2813037 - RNA, 23 nt, Human
guuggucucugcauuuuucugca

SEQ ID NO: 2813038 - RNA, 14 nt, Human
guuggucaggcugg

SEQ ID NO: 2813039 - RNA, 15 nt, Human
guuggucaggcuggu

SEQ ID NO: 2813040 - RNA, 14 nt, Human
guugguccagagcg

SEQ ID NO: 2813041 - RNA, 22 nt, Human
guugguccagagcggaggcugu

SEQ ID NO: 2813042 - RNA, 23 nt, Human
guugguccagagcggaggcugug

SEQ ID NO: 2813043 - RNA, 13 nt, Human
guuggguggaugc

SEQ ID NO: 2813044 - RNA, 19 nt, Human
guuggguggcaauuccaau

SEQ ID NO: 2813045 - RNA, 13 nt, Human
guugguaguuucu

SEQ ID NO: 2813046 - RNA, 20 nt, Human
guugcugguuauaagcagca

SEQ ID NO: 2813047 - RNA, 18 nt, Human
guugcuggcuuguuguaa

SEQ ID NO: 2813048 - RNA, 19 nt, Human
guugcuggcuuguuguaaa

SEQ ID NO: 2813049 - RNA, 21 nt, Human
guugcuggcuuguuguaaagc

SEQ ID NO: 2813050 - RNA, 22 nt, Human
guugcuggcuuguuguaaagca

SEQ ID NO: 2813051 - RNA, 23 nt, Human
guugcuggcuuguuguaaagcaa

SEQ ID NO: 2813052 - RNA, 12 nt, Human
guugcugccuca

SEQ ID NO: 2813053 - RNA, 19 nt, Human
guugcuguguuuaauuuga

SEQ ID NO: 2813054 - RNA, 15 nt, Human
guugcuguuucacaa

SEQ ID NO: 2813055 - RNA, 13 nt, Human
guuuaacauuugc

SEQ ID NO: 2813056 - RNA, 21 nt, Human
guuuaacauuugccuugcaga

SEQ ID NO: 2813057 - RNA, 22 nt, Human
guuuaacauuugccuugcagaa

SEQ ID NO: 2813058 - RNA, 23 nt, Human
guuuaagaaaaaauaacacacau

SEQ ID NO: 2813059 - RNA, 18 nt, Human
guuuaagaaaaguauuuu

SEQ ID NO: 2813060 - RNA, 20 nt, Human
guuuaagaaaaguauuuuga

SEQ ID NO: 2813061 - RNA, 21 nt, Human
guuuaagaaaaguauuuugaa

SEQ ID NO: 2813062 - RNA, 22 nt, Human
guuuaagaaaaguauuuugaag

SEQ ID NO: 2813063 - RNA, 23 nt, Human
guuuaagaaaaguauuuugaagu

SEQ ID NO: 2813064 - RNA, 20 nt, Human
guuuaagacauuuuuggaag

SEQ ID NO: 2813065 - RNA, 14 nt, Human
guuuauuuuucaua

SEQ ID NO: 2813066 - RNA, 16 nt, Human
guuuacaaguguauau

SEQ ID NO: 2813067 - RNA, 22 nt, Human
guuuacaagcccccccuuccac

SEQ ID NO: 2813068 - RNA, 18 nt, Human
guuuacaaguguauauca

SEQ ID NO: 2813069 - RNA, 19 nt, Human
guuuacaaguguauaucag

SEQ ID NO: 2813070 - RNA, 23 nt, Human
guuuacaaguguauaucagaaaa

SEQ ID NO: 2813071 - RNA, 18 nt, Human
guuuauguaaauguuugu

SEQ ID NO: 2813072 - RNA, 18 nt, Human
guuuacaagcccccccuu

SEQ ID NO: 2813073 - RNA, 19 nt, Human
guuuacaagcccccccuuc

SEQ ID NO: 2813074 - RNA, 15 nt, Human
guuuaauuguuuguc

SEQ ID NO: 2813075 - RNA, 19 nt, Human
guuuaauuguuuguccuca

SEQ ID NO: 2813076 - RNA, 14 nt, Human
guuuaauuucuuca

SEQ ID NO: 2813077 - RNA, 15 nt, Human
guuuaaugugaacuu

SEQ ID NO: 2813078 - RNA, 18 nt, Human
guuuaaugugaacuugua

SEQ ID NO: 2813079 - RNA, 21 nt, Human
guuuaaugugaacuuguagcu

SEQ ID NO: 2813080 - RNA, 20 nt, Human
guuuaauguucugugauaca

SEQ ID NO: 2813081 - RNA, 16 nt, Human
guugccccgucucugu

SEQ ID NO: 2813082 - RNA, 17 nt, Human
guugccccgucucuguu

SEQ ID NO: 2813083 - RNA, 17 nt, Human
guugcccaggcuggcgu

SEQ ID NO: 2813084 - RNA, 15 nt, Human
guugcccaggcaggu

SEQ ID NO: 2813085 - RNA, 21 nt, Human
guugcccaggcuggcgugcag

SEQ ID NO: 2813086 - RNA, 19 nt, Human
guugcccaggcaggucuug

SEQ ID NO: 2813087 - RNA, 18 nt, Human
guugcccaggcaggucuu

SEQ ID NO: 2813088 - RNA, 17 nt, Human
guugcccaggcaggucu

SEQ ID NO: 2813089 - RNA, 22 nt, Human
aaggaugugauuguggaaugga

SEQ ID NO: 2813090 - RNA, 17 nt, Human
aaggaugugauugugga

SEQ ID NO: 2813091 - RNA, 15 nt, Human
aaggaugugauugug

SEQ ID NO: 2813092 - RNA, 15 nt, Human
aaggaugucacaggg

SEQ ID NO: 2813093 - RNA, 16 nt, Human
aaggaugucacagggc

SEQ ID NO: 2813094 - RNA, 17 nt, Human
aaggaugucacagggcc

SEQ ID NO: 2813095 - RNA, 21 nt, Human
aaggccaauaaagaguuagaa

SEQ ID NO: 2813096 - RNA, 21 nt, Human
aaggccagaguggccuggcca

SEQ ID NO: 2813097 - RNA, 20 nt, Human
aaggccagaguggccuggcc

SEQ ID NO: 2813098 - RNA, 19 nt, Human
aaggccagaguggccuggc

SEQ ID NO: 2813099 - RNA, 17 nt, Human
aaggccagaguggccug

SEQ ID NO: 2813100 - RNA, 15 nt, Human
aaggcuaugugauua

SEQ ID NO: 2813101 - RNA, 17 nt, Human
aaggcucagucucagga

SEQ ID NO: 2813102 - RNA, 15 nt, Human
aaggcuccaagaccu

SEQ ID NO: 2813103 - RNA, 16 nt, Human
aaggcucagucucagg

SEQ ID NO: 2813104 - RNA, 22 nt, Human
aaggccagaguggccuggccag

SEQ ID NO: 2813105 - RNA, 23 nt, Human
guugaugaucuuugcagacaggc

SEQ ID NO: 2813106 - RNA, 21 nt, Human
guugaugccugugaacugaac

SEQ ID NO: 2813107 - RNA, 23 nt, Human
aaggaugaaugaggucccaggca

SEQ ID NO: 2813108 - RNA, 17 nt, Human
aaggaugggguuaugaa

SEQ ID NO: 2813109 - RNA, 19 nt, Human
aaggaugccccgucccccu

SEQ ID NO: 2813110 - RNA, 14 nt, Human
aaggaugucacagg

SEQ ID NO: 2813111 - RNA, 22 nt, Human
aaggauguagcuuuucaccuuu

SEQ ID NO: 2813112 - RNA, 23 nt, Human
aaggauguagcuuuucaccuuua

SEQ ID NO: 2813113 - RNA, 18 nt, Human
aaggcuuauauucaacca

SEQ ID NO: 2813114 - RNA, 21 nt, Human
aaggcuuauauucaaccaugg

SEQ ID NO: 2813115 - RNA, 23 nt, Human
aaggcuuauauucaaccauggac

SEQ ID NO: 2813116 - RNA, 18 nt, Human
guuucaaacacaaaugca

SEQ ID NO: 2813117 - RNA, 19 nt, Human
guuucaaacacaaaugcag

SEQ ID NO: 2813118 - RNA, 14 nt, Human
guuucaaacuguaa

SEQ ID NO: 2813119 - RNA, 16 nt, Human
guuuauuuuucauauu

SEQ ID NO: 2813120 - RNA, 18 nt, Human
guuuauuuuucauauugu

SEQ ID NO: 2813121 - RNA, 17 nt, Human
guuuauuuuucauauug

SEQ ID NO: 2813122 - RNA, 22 nt, Human
aaggcuuuuggucucccuggga

SEQ ID NO: 2813123 - RNA, 16 nt, Human
aaggcuuuuuauaaac

SEQ ID NO: 2813124 - RNA, 11 nt, Human
aaggcuuugug

SEQ ID NO: 2813125 - RNA, 15 nt, Human
aaggcuuuaucucag

SEQ ID NO: 2813126 - RNA, 23 nt, Human
aaggcuuugauuaguuuucuugu

SEQ ID NO: 2813127 - RNA, 16 nt, Human
aaggcuugaagcugug

SEQ ID NO: 2813128 - RNA, 14 nt, Human
aaggcuugaagcug

SEQ ID NO: 2813129 - RNA, 13 nt, Human
aaggcuugaagcu

SEQ ID NO: 2813130 - RNA, 13 nt, Human
aaggcuucagucu

SEQ ID NO: 2813131 - RNA, 15 nt, Human
aaggcuucagucuca

SEQ ID NO: 2813132 - RNA, 23 nt, Human
aaggggaauguuugccucugccu

SEQ ID NO: 2813133 - RNA, 22 nt, Human
aaggggaauguuugccucugcc

SEQ ID NO: 2813134 - RNA, 13 nt, Human
aaggggugugcau

SEQ ID NO: 2813135 - RNA, 16 nt, Human
aagggguuggauugca

SEQ ID NO: 2813136 - RNA, 15 nt, Human
aagggguugggguga

SEQ ID NO: 2813137 - RNA, 19 nt, Human
aagggguuggggugacagu

SEQ ID NO: 2813138 - RNA, 22 nt, Human
aagggguuggggugacagucau

SEQ ID NO: 2813139 - RNA, 16 nt, Human
aaggggucacuuacag

SEQ ID NO: 2813140 - RNA, 16 nt, Human
aaggggucugaaauuu

SEQ ID NO: 2813141 - RNA, 18 nt, Human
aaggggaagcacucgugu

SEQ ID NO: 2813142 - RNA, 16 nt, Human
aaggguaucaggugcu

SEQ ID NO: 2813143 - RNA, 16 nt, Human
aagggguuugccauuu

SEQ ID NO: 2813144 - RNA, 20 nt, Human
aagggguuugccauuugaua

SEQ ID NO: 2813145 - RNA, 21 nt, Human
aaggguuuuccacccuggaau

SEQ ID NO: 2813146 - RNA, 19 nt, Human
aaggguuuuccacccugga

SEQ ID NO: 2813147 - RNA, 22 nt, Human
aagguuuuggaucuugaaugug

SEQ ID NO: 2813148 - RNA, 23 nt, Human
aagguuuuggaucuugaaugugg

SEQ ID NO: 2813149 - RNA, 20 nt, Human
aagguuuuccucuucuauuu

SEQ ID NO: 2813150 - RNA, 14 nt, Human
guuuuauaaaauag

SEQ ID NO: 2813151 - RNA, 16 nt, Human
guuuuauaaaaucaag

SEQ ID NO: 2813152 - RNA, 21 nt, Human
guuuuagguucuaaaguucua

SEQ ID NO: 2813153 - RNA, 13 nt, Human
guuuuagguucua

SEQ ID NO: 2813154 - RNA, 15 nt, Human
guuuuagguucuaaa

SEQ ID NO: 2813155 - RNA, 16 nt, Human
guuuuagguucuaaag

SEQ ID NO: 2813156 - RNA, 17 nt, Human
guuuuagguucuaaagu

SEQ ID NO: 2813157 - RNA, 18 nt, Human
guuuuagaguaagaaauu

SEQ ID NO: 2813158 - RNA, 15 nt, Human
guuuucuguagucau

SEQ ID NO: 2813159 - RNA, 17 nt, Human
guuuucuguagucauuu

SEQ ID NO: 2813160 - RNA, 18 nt, Human
guuuucuguagucauuua

SEQ ID NO: 2813161 - RNA, 23 nt, Human
guuuucuguagucauuuacuaaa

SEQ ID NO: 2813162 - RNA, 18 nt, Human
guuuucuguguaaccauu

SEQ ID NO: 2813163 - RNA, 16 nt, Human
guuuucugagggaaag

SEQ ID NO: 2813164 - RNA, 18 nt, Human
guuuggggaugagaaagg

SEQ ID NO: 2813165 - RNA, 11 nt, Human
guuugggcuuc

SEQ ID NO: 2813166 - RNA, 13 nt, Human
guuugggcuucag

SEQ ID NO: 2813167 - RNA, 20 nt, Human
guuugggccccagaggcugg

SEQ ID NO: 2813168 - RNA, 11 nt, Human
guuuuacacug

SEQ ID NO: 2813169 - RNA, 12 nt, Human
guuuuacaaagg

SEQ ID NO: 2813170 - RNA, 23 nt, Human
guuuuacaauaaaaucuugaaaa

SEQ ID NO: 2813171 - RNA, 16 nt, Human
guuuuagguagaaaaa

SEQ ID NO: 2813172 - RNA, 17 nt, Human
guuuuagguagaaaaac

SEQ ID NO: 2813173 - RNA, 12 nt, Human
guuuuagguucu

SEQ ID NO: 2813174 - RNA, 21 nt, Human
guuuuagauuuucugguucua

SEQ ID NO: 2813175 - RNA, 16 nt, Human
guuuuagaagguucuc

SEQ ID NO: 2813176 - RNA, 20 nt, Human
guuuuagauuuucugguucu

SEQ ID NO: 2813177 - RNA, 21 nt, Human
guuuuacauuguugagcuauu

SEQ ID NO: 2813178 - RNA, 12 nt, Human
guuuuacauugu

SEQ ID NO: 2813179 - RNA, 15 nt, Human
guuucuaagauucua

SEQ ID NO: 2813180 - RNA, 17 nt, Human
guuucuguccugcuggu

SEQ ID NO: 2813181 - RNA, 14 nt, Human
guuucuaagauucu

SEQ ID NO: 2813182 - RNA, 13 nt, Human
aaguaauauaaug

SEQ ID NO: 2813183 - RNA, 16 nt, Human
aaguaauauaauggaa

SEQ ID NO: 2813184 - RNA, 21 nt, Human
aaguaauauaauggaagagaa

SEQ ID NO: 2813185 - RNA, 23 nt, Human
aaguaauauaauggaagagaaau

SEQ ID NO: 2813186 - RNA, 14 nt, Human
guuucuguuauuaa

SEQ ID NO: 2813187 - RNA, 13 nt, Human
guuucugucugua

SEQ ID NO: 2813188 - RNA, 16 nt, Human
guuucuguccugcugg

SEQ ID NO: 2813189 - RNA, 16 nt, Human
guuugccucugccucu

SEQ ID NO: 2813190 - RNA, 13 nt, Human
guuugccucugcc

SEQ ID NO: 2813191 - RNA, 14 nt, Human
guuuggcuuccucc

SEQ ID NO: 2813192 - RNA, 16 nt, Human
guuuggcuuccuccug

SEQ ID NO: 2813193 - RNA, 12 nt, Human
guuugcauuccu

SEQ ID NO: 2813194 - RNA, 22 nt, Human
guuugccauacuuugucugaaa

SEQ ID NO: 2813195 - RNA, 14 nt, Human
guuugccauacuuu

SEQ ID NO: 2813196 - RNA, 15 nt, Human
guuugccauacuuug

SEQ ID NO: 2813197 - RNA, 21 nt, Human
aagcuucauucuccuuguugu

SEQ ID NO: 2813198 - RNA, 15 nt, Human
aagcuuccaugauuc

SEQ ID NO: 2813199 - RNA, 18 nt, Human
aagcuucaaacugcauga

SEQ ID NO: 2813200 - RNA, 14 nt, Human
aagcuucaaauuaa

SEQ ID NO: 2813201 - RNA, 18 nt, Human
aagcuucaaauuaaaaca

SEQ ID NO: 2813202 - RNA, 17 nt, Human
aagcugagaacuccuga

SEQ ID NO: 2813203 - RNA, 18 nt, Human
aagcugagaacuccugac

SEQ ID NO: 2813204 - RNA, 19 nt, Human
aagcugagaacuccugacu

SEQ ID NO: 2813205 - RNA, 18 nt, Human
aagcugagagugcuauga

SEQ ID NO: 2813206 - RNA, 17 nt, Human
aagcugacauugccaaa

SEQ ID NO: 2813207 - RNA, 22 nt, Human
aagcugacauugccaaaaagga

SEQ ID NO: 2813208 - RNA, 17 nt, Human
aagcuccuguccuccca

SEQ ID NO: 2813209 - RNA, 20 nt, Human
aagcuccuguccucccaucc

SEQ ID NO: 2813210 - RNA, 22 nt, Human
aagcuccuguccucccaucccc

SEQ ID NO: 2813211 - RNA, 13 nt, Human
aagcuccuguccu

SEQ ID NO: 2813212 - RNA, 14 nt, Human
aagcuccuguccuc

SEQ ID NO: 2813213 - RNA, 15 nt, Human
aagcuccuguccucc

SEQ ID NO: 2813214 - RNA, 21 nt, Human
aagcuauuagccaggaucaug

SEQ ID NO: 2813215 - RNA, 16 nt, Human
aagcuauuagccagga

SEQ ID NO: 2813216 - RNA, 19 nt, Human
aagcuauuagccaggauca

SEQ ID NO: 2813217 - RNA, 17 nt, Human
aagcuauccuggcucuu

SEQ ID NO: 2813218 - RNA, 14 nt, Human
aagcuaucuaaagu

SEQ ID NO: 2813219 - RNA, 15 nt, Human
guucccucucccugu

SEQ ID NO: 2813220 - RNA, 17 nt, Human
guucccucucccuguug

SEQ ID NO: 2813221 - RNA, 19 nt, Human
guucccuuuccuuccaucc

SEQ ID NO: 2813222 - RNA, 19 nt, Human
guucccuuggccucagaau

SEQ ID NO: 2813223 - RNA, 18 nt, Human
guucccuuggccucagaa

SEQ ID NO: 2813224 - RNA, 14 nt, Human
guucccucugcuca

SEQ ID NO: 2813225 - RNA, 15 nt, Human
guucccucugcucag

SEQ ID NO: 2813226 - RNA, 16 nt, Human
guucccucugcucagc

SEQ ID NO: 2813227 - RNA, 17 nt, Human
guucccucugcucagcc

SEQ ID NO: 2813228 - RNA, 15 nt, Human
guucccggucccgag

SEQ ID NO: 2813229 - RNA, 14 nt, Human
guucccguuucucc

SEQ ID NO: 2813230 - RNA, 16 nt, Human
guucccguuucuccac

SEQ ID NO: 2813231 - RNA, 18 nt, Human
guucccguuucuccaccu

SEQ ID NO: 2813232 - RNA, 20 nt, Human
guucccuacuuccugugacu

SEQ ID NO: 2813233 - RNA, 19 nt, Human
guucccguuucuccaccua

SEQ ID NO: 2813234 - RNA, 18 nt, Human
guucccauguagcccccu

SEQ ID NO: 2813235 - RNA, 19 nt, Human
guucccauguagcccccug

SEQ ID NO: 2813236 - RNA, 16 nt, Human
guuccaugggauacaa

SEQ ID NO: 2813237 - RNA, 17 nt, Human
guucccauguagccccc

SEQ ID NO: 2813238 - RNA, 21 nt, Human
guucccagauggcuggaaggg

SEQ ID NO: 2813239 - RNA, 22 nt, Human
guucccagucuucugacaaacu

SEQ ID NO: 2813240 - RNA, 15 nt, Human
aagcuuguuuuccag

SEQ ID NO: 2813241 - RNA, 12 nt, Human
aagcuuuaugau

SEQ ID NO: 2813242 - RNA, 18 nt, Human
aagcuuuaugauuuucau

SEQ ID NO: 2813243 - RNA, 21 nt, Human
aagcuuuaugauuuucauaac

SEQ ID NO: 2813244 - RNA, 16 nt, Human
aagcuuuauuaccagu

SEQ ID NO: 2813245 - RNA, 21 nt, Human
aagcuuuauuaccaguggcgu

SEQ ID NO: 2813246 - RNA, 16 nt, Human
aagcuuccaugauucu

SEQ ID NO: 2813247 - RNA, 23 nt, Human
guuccaucuccuauaaucuguca

SEQ ID NO: 2813248 - RNA, 16 nt, Human
guuccaugaugcuggg

SEQ ID NO: 2813249 - RNA, 16 nt, Human
guugaggaacuguaca

SEQ ID NO: 2813250 - RNA, 17 nt, Human
guugaggaacuguacag

SEQ ID NO: 2813251 - RNA, 21 nt, Human
guugaggcagggcaaaugaca

SEQ ID NO: 2813252 - RNA, 22 nt, Human
guugaugaucuuugcagacagg

SEQ ID NO: 2813253 - RNA, 21 nt, Human
guugauaaauuccacuggacu

SEQ ID NO: 2813254 - RNA, 18 nt, Human
guugauaaauuccacugg

SEQ ID NO: 2813255 - RNA, 18 nt, Human
guugaggggcuccuggaa

SEQ ID NO: 2813256 - RNA, 17 nt, Human
guugaggggcuccugga

SEQ ID NO: 2813257 - RNA, 16 nt, Human
guugaggggcuccugg

SEQ ID NO: 2813258 - RNA, 15 nt, Human
guucuuaggcugcug

SEQ ID NO: 2813259 - RNA, 18 nt, Human
guucuuaggcugcuggga

SEQ ID NO: 2813260 - RNA, 14 nt, Human
guucuuaugcaaaa

SEQ ID NO: 2813261 - RNA, 17 nt, Human
guucuuaugcaaaaugg

SEQ ID NO: 2813262 - RNA, 18 nt, Human
guucuuaugcaaaaugga

SEQ ID NO: 2813263 - RNA, 19 nt, Human
guucuuaugcaaaauggaa

SEQ ID NO: 2813264 - RNA, 23 nt, Human
guucugggacacaguucaauucu

SEQ ID NO: 2813265 - RNA, 16 nt, Human
guucucuccuccccaa

SEQ ID NO: 2813266 - RNA, 18 nt, Human
guucuccuuuuccucucu

SEQ ID NO: 2813267 - RNA, 22 nt, Human
guucuccuuuuccucucucccg

SEQ ID NO: 2813268 - RNA, 13 nt, Human
guucuccuuuucc

SEQ ID NO: 2813269 - RNA, 22 nt, Human
guucuuaccuguaugucuccag

SEQ ID NO: 2813270 - RNA, 13 nt, Human
guucuuacacaua

SEQ ID NO: 2813271 - RNA, 16 nt, Human
guucuuacacauacag

SEQ ID NO: 2813272 - RNA, 22 nt, Human
guucuuacacauacaguuuuau

SEQ ID NO: 2813273 - RNA, 14 nt, Human
guucugggcucuuu

SEQ ID NO: 2813274 - RNA, 18 nt, Human
guucugggcucuuuccuc

SEQ ID NO: 2813275 - RNA, 20 nt, Human
guucuagacauggagguucu

SEQ ID NO: 2813276 - RNA, 21 nt, Human
guucuagacauggagguucua

SEQ ID NO: 2813277 - RNA, 22 nt, Human
guucuagacauggagguucuaa

SEQ ID NO: 2813278 - RNA, 23 nt, Human
guucuagacauggagguucuaag

SEQ ID NO: 2813279 - RNA, 23 nt, Human
guucuagcacuucaucuggcugc

SEQ ID NO: 2813280 - RNA, 21 nt, Human
guucuaccucaggcagcucaa

SEQ ID NO: 2813281 - RNA, 19 nt, Human
guucuacggaucaucaaca

SEQ ID NO: 2813282 - RNA, 22 nt, Human
guucccuuuccuuccaucccua

SEQ ID NO: 2813283 - RNA, 16 nt, Human
guucccuuggccucag

SEQ ID NO: 2813284 - RNA, 17 nt, Human
guucuacccguuccaaa

SEQ ID NO: 2813285 - RNA, 18 nt, Human
guucuacccguuccaaaa

SEQ ID NO: 2813286 - RNA, 20 nt, Human
guucuaccucaggcagcuca

SEQ ID NO: 2813287 - RNA, 21 nt, Human
guuacacacuuuuuaagaaau

SEQ ID NO: 2813288 - RNA, 20 nt, Human
guuacacauuaaguaaucaa

SEQ ID NO: 2813289 - RNA, 20 nt, Human
guuagcucaggaggcuugga

SEQ ID NO: 2813290 - RNA, 15 nt, Human
guuagcaaacuuugu

SEQ ID NO: 2813291 - RNA, 14 nt, Human
guuagcacuguuga

SEQ ID NO: 2813292 - RNA, 16 nt, Human
guuagcacuguugaug

SEQ ID NO: 2813293 - RNA, 21 nt, Human
guuagcacuguugauguaucu

SEQ ID NO: 2813294 - RNA, 13 nt, Human
guuacaaguauac

SEQ ID NO: 2813295 - RNA, 22 nt, Human
guuacaaguauacuuauauuuc

SEQ ID NO: 2813296 - RNA, 21 nt, Human
guuaauuuuuugguacaaaaa

SEQ ID NO: 2813297 - RNA, 11 nt, Human
guuaauguauu

SEQ ID NO: 2813298 - RNA, 20 nt, Human
guuaauguauuuguucaugu

SEQ ID NO: 2813299 - RNA, 22 nt, Human
guuaauguauuuguucauguuu

SEQ ID NO: 2813300 - RNA, 23 nt, Human
guuaauguauuuguucauguuug

SEQ ID NO: 2813301 - RNA, 15 nt, Human
guuaauguuauauca

SEQ ID NO: 2813302 - RNA, 23 nt, Human
guuaauguuauaucauauguaua

SEQ ID NO: 2813303 - RNA, 14 nt, Human
guuaauuagcauuc

SEQ ID NO: 2813304 - RNA, 15 nt, Human
guuaauuagcauucu

SEQ ID NO: 2813305 - RNA, 16 nt, Human
guuacaaacuacagac

SEQ ID NO: 2813306 - RNA, 17 nt, Human
guuaguguuuuaagaaa

SEQ ID NO: 2813307 - RNA, 21 nt, Human
guuaguguuuuaagaaaugua

SEQ ID NO: 2813308 - RNA, 22 nt, Human
guuagcguuucggccuucauaa

SEQ ID NO: 2813309 - RNA, 21 nt, Human
guuagguagagggaguuguca

SEQ ID NO: 2813310 - RNA, 18 nt, Human
guuagguagagggaguug

SEQ ID NO: 2813311 - RNA, 15 nt, Human
guuagguacagagac

SEQ ID NO: 2813312 - RNA, 18 nt, Human
guuaaugauagcuacugu

SEQ ID NO: 2813313 - RNA, 20 nt, Human
guuaauguaaucugauggcu

SEQ ID NO: 2813314 - RNA, 19 nt, Human
guuaaugcuuaagagggaa

SEQ ID NO: 2813315 - RNA, 14 nt, Human
guuaaucuucaugg

SEQ ID NO: 2813316 - RNA, 18 nt, Human
guuaaucucuguuaugua

SEQ ID NO: 2813317 - RNA, 19 nt, Human
guuaaucucuguuauguac

SEQ ID NO: 2813318 - RNA, 22 nt, Human
guuaaucucuguuauguacugu

SEQ ID NO: 2813319 - RNA, 23 nt, Human
guuaaucucuguuauguacugua

SEQ ID NO: 2813320 - RNA, 14 nt, Human
guuaaguaugugua

SEQ ID NO: 2813321 - RNA, 22 nt, Human
guuaaguugauggugaugaaau

SEQ ID NO: 2813322 - RNA, 17 nt, Human
guuaagguucaagacag

SEQ ID NO: 2813323 - RNA, 12 nt, Human
guuaaggaaacu

SEQ ID NO: 2813324 - RNA, 14 nt, Human
guuaaggaaacucu

SEQ ID NO: 2813325 - RNA, 21 nt, Human
guuaaggaaacucuuaucuca

SEQ ID NO: 2813326 - RNA, 22 nt, Human
guuaaggaccguggcccugccc

SEQ ID NO: 2813327 - RNA, 16 nt, Human
guuaaggaaacucuua

SEQ ID NO: 2813328 - RNA, 19 nt, Human
guuaaggaaacucuuaucu

SEQ ID NO: 2813329 - RNA, 21 nt, Human
guguuugggucaccccuccag

SEQ ID NO: 2813330 - RNA, 14 nt, Human
guguuugguuuaca

SEQ ID NO: 2813331 - RNA, 15 nt, Human
guguuugguuuacau

SEQ ID NO: 2813332 - RNA, 16 nt, Human
guguuugguuuacauu

SEQ ID NO: 2813333 - RNA, 17 nt, Human
guguuugguuuacauuu

SEQ ID NO: 2813334 - RNA, 20 nt, Human
guguuugguuuacauuuaaa

SEQ ID NO: 2813335 - RNA, 22 nt, Human
guguuuuaauuccaauaugaug

SEQ ID NO: 2813336 - RNA, 18 nt, Human
guguuuguugcuggcuug

SEQ ID NO: 2813337 - RNA, 15 nt, Human
guguuuuaauuccaa

SEQ ID NO: 2813338 - RNA, 13 nt, Human
guguuuuaauuua

SEQ ID NO: 2813339 - RNA, 20 nt, Human
guuaagcauuaccacucagg

SEQ ID NO: 2813340 - RNA, 11 nt, Human
guguuuguguu

SEQ ID NO: 2813341 - RNA, 13 nt, Human
guguuuuaaauuc

SEQ ID NO: 2813342 - RNA, 16 nt, Human
guguuuuaagaaaugu

SEQ ID NO: 2813343 - RNA, 21 nt, Human
guuaagcauuaccacucaggc

SEQ ID NO: 2813344 - RNA, 16 nt, Human
guuaagccuuuggaaa

SEQ ID NO: 2813345 - RNA, 13 nt, Human
guuaagccuuugg

SEQ ID NO: 2813346 - RNA, 12 nt, Human
guuaagccuuug

SEQ ID NO: 2813347 - RNA, 20 nt, Human
guuauuuauacaagauugaa

SEQ ID NO: 2813348 - RNA, 19 nt, Human
guuauuuauagucauuuau

SEQ ID NO: 2813349 - RNA, 17 nt, Human
guuaguuauagaugucu

SEQ ID NO: 2813350 - RNA, 15 nt, Human
guuauuucugcaaac

SEQ ID NO: 2813351 - RNA, 16 nt, Human
guuauuugcacacugc

SEQ ID NO: 2813352 - RNA, 12 nt, Human
guuauuuagacu

SEQ ID NO: 2813353 - RNA, 17 nt, Human
guucagcuccagcucac

SEQ ID NO: 2813354 - RNA, 16 nt, Human
guucagcuccagcuca

SEQ ID NO: 2813355 - RNA, 18 nt, Human
guucagcuccagcucacc

SEQ ID NO: 2813356 - RNA, 15 nt, Human
guucagcuccagcuc

SEQ ID NO: 2813357 - RNA, 20 nt, Human
guucaggggacucagcccug

SEQ ID NO: 2813358 - RNA, 19 nt, Human
guucaggguuggccccugc

SEQ ID NO: 2813359 - RNA, 18 nt, Human
guucaggguuggccccug

SEQ ID NO: 2813360 - RNA, 17 nt, Human
guucaggguuggccccu

SEQ ID NO: 2813361 - RNA, 19 nt, Human
guucaggggacucagcccu

SEQ ID NO: 2813362 - RNA, 22 nt, Human
guucauacacuaaccaaaucuc

SEQ ID NO: 2813363 - RNA, 18 nt, Human
guucaguuucuucugcgc

SEQ ID NO: 2813364 - RNA, 22 nt, Human
aagcuaggccuggccagaugca

SEQ ID NO: 2813365 - RNA, 16 nt, Human
aagcuaggccuggcca

SEQ ID NO: 2813366 - RNA, 18 nt, Human
aagcuaggccuggccaga

SEQ ID NO: 2813367 - RNA, 17 nt, Human
aagcuaggccuggccag

SEQ ID NO: 2813368 - RNA, 18 nt, Human
aagccucgaggugccuuc

SEQ ID NO: 2813369 - RNA, 19 nt, Human
aagccugcuuuuuaagugu

SEQ ID NO: 2813370 - RNA, 21 nt, Human
aagccugcguugguccagagc

SEQ ID NO: 2813371 - RNA, 22 nt, Human
aagccugcguugguccagagcg

SEQ ID NO: 2813372 - RNA, 17 nt, Human
aagccugggauugacag

SEQ ID NO: 2813373 - RNA, 14 nt, Human
guucauacauuuga

SEQ ID NO: 2813374 - RNA, 16 nt, Human
guucauacauuugagg

SEQ ID NO: 2813375 - RNA, 13 nt, Human
guucauaccuaag

SEQ ID NO: 2813376 - RNA, 16 nt, Human
guucauaccuaaguac

SEQ ID NO: 2813377 - RNA, 17 nt, Human
guucauaccuaaguacu

SEQ ID NO: 2813378 - RNA, 19 nt, Human
guucauaccuaaguacugu

SEQ ID NO: 2813379 - RNA, 20 nt, Human
guucauaccuaaguacugua

SEQ ID NO: 2813380 - RNA, 21 nt, Human
guucauaccuaaguacuguaa

SEQ ID NO: 2813381 - RNA, 14 nt, Human
aagccucuggcuag

SEQ ID NO: 2813382 - RNA, 12 nt, Human
aagccucuggcu

SEQ ID NO: 2813383 - RNA, 14 nt, Human
aagccucugcugcc

SEQ ID NO: 2813384 - RNA, 11 nt, Human
aagccucugcu

SEQ ID NO: 2813385 - RNA, 23 nt, Human
aagccucuggcuagaggccagcc

SEQ ID NO: 2813386 - RNA, 12 nt, Human
aagccucuggga

SEQ ID NO: 2813387 - RNA, 18 nt, Human
gugucuuuuuucacuaca

SEQ ID NO: 2813388 - RNA, 17 nt, Human
gugugaaaaugugugug

SEQ ID NO: 2813389 - RNA, 13 nt, Human
gugugaaaauggg

SEQ ID NO: 2813390 - RNA, 14 nt, Human
gugugaaacauacu

SEQ ID NO: 2813391 - RNA, 13 nt, Human
gugugaccugagg

SEQ ID NO: 2813392 - RNA, 12 nt, Human
gugugaccccuc

SEQ ID NO: 2813393 - RNA, 14 nt, Human
gugugaccccuccu

SEQ ID NO: 2813394 - RNA, 15 nt, Human
gugugaccccuccug

SEQ ID NO: 2813395 - RNA, 16 nt, Human
gugugaccccuccugg

SEQ ID NO: 2813396 - RNA, 17 nt, Human
gugugaccccuccuggg

SEQ ID NO: 2813397 - RNA, 18 nt, Human
gugugaccccuccugggg

SEQ ID NO: 2813398 - RNA, 23 nt, Human
gugugaccccuccuggggccagg

SEQ ID NO: 2813399 - RNA, 19 nt, Human
gugugaggagcugcuggcu

SEQ ID NO: 2813400 - RNA, 18 nt, Human
gugugaggagcugcuggc

SEQ ID NO: 2813401 - RNA, 16 nt, Human
gugugaggagcugcug

SEQ ID NO: 2813402 - RNA, 17 nt, Human
guguguagacaaauauu

SEQ ID NO: 2813403 - RNA, 15 nt, Human
gugugaccugagggc

SEQ ID NO: 2813404 - RNA, 14 nt, Human
guguguagccaagg

SEQ ID NO: 2813405 - RNA, 22 nt, Human
guguguauaagugcacacagaa

SEQ ID NO: 2813406 - RNA, 23 nt, Human
guguguauauauguguauauaua

SEQ ID NO: 2813407 - RNA, 21 nt, Human
guguguagaguuaagaagcug

SEQ ID NO: 2813408 - RNA, 19 nt, Human
guguguagacaaauauuug

SEQ ID NO: 2813409 - RNA, 13 nt, Human
guguguagaguua

SEQ ID NO: 2813410 - RNA, 16 nt, Human
guguguagaguuaaga

SEQ ID NO: 2813411 - RNA, 17 nt, Human
guguguagaguuaagaa

SEQ ID NO: 2813412 - RNA, 18 nt, Human
gugucuugcaauggcagc

SEQ ID NO: 2813413 - RNA, 17 nt, Human
gugucuugcaauggcag

SEQ ID NO: 2813414 - RNA, 21 nt, Human
gugucuuugugauuuugagua

SEQ ID NO: 2813415 - RNA, 18 nt, Human
gugucuuucacagcuccu

SEQ ID NO: 2813416 - RNA, 20 nt, Human
gugucuucuccaccacgcug

SEQ ID NO: 2813417 - RNA, 20 nt, Human
aagcaauccucucaccucag

SEQ ID NO: 2813418 - RNA, 22 nt, Human
aagcaauccucucaccucagcc

SEQ ID NO: 2813419 - RNA, 22 nt, Human
aagcaaugcugaugaaucacug

SEQ ID NO: 2813420 - RNA, 17 nt, Human
aagcaauggauauuugu

SEQ ID NO: 2813421 - RNA, 15 nt, Human
aagcaauuagacaag

SEQ ID NO: 2813422 - RNA, 12 nt, Human
gugucuuagcau

SEQ ID NO: 2813423 - RNA, 17 nt, Human
gugucuuccacuuugca

SEQ ID NO: 2813424 - RNA, 15 nt, Human
aagcaauuucuugcu

SEQ ID NO: 2813425 - RNA, 14 nt, Human
guguuguauuaaca

SEQ ID NO: 2813426 - RNA, 18 nt, Human
guguuguauuaacaaaag

SEQ ID NO: 2813427 - RNA, 19 nt, Human
guguuguauuaacaaaagu

SEQ ID NO: 2813428 - RNA, 15 nt, Human
guguugucauuguaa

SEQ ID NO: 2813429 - RNA, 17 nt, Human
guguugucauuguaaac

SEQ ID NO: 2813430 - RNA, 21 nt, Human
guguugucauuguaaacaaac

SEQ ID NO: 2813431 - RNA, 14 nt, Human
guguugggagggau

SEQ ID NO: 2813432 - RNA, 21 nt, Human
guguugggauacugcagggcc

SEQ ID NO: 2813433 - RNA, 14 nt, Human
guguuggguaaauu

SEQ ID NO: 2813434 - RNA, 17 nt, Human
guguuguaauucuucag

SEQ ID NO: 2813435 - RNA, 18 nt, Human
guguuguaauucuucagu

SEQ ID NO: 2813436 - RNA, 20 nt, Human
guguuguaauucuucaguug

SEQ ID NO: 2813437 - RNA, 20 nt, Human
guguugcccaggcuggucuc

SEQ ID NO: 2813438 - RNA, 18 nt, Human
guguugcgugucgugggu

SEQ ID NO: 2813439 - RNA, 16 nt, Human
guguuggacaaaugug

SEQ ID NO: 2813440 - RNA, 19 nt, Human
guguuggacaaaugugaag

SEQ ID NO: 2813441 - RNA, 20 nt, Human
guguuggacaaaugugaaga

SEQ ID NO: 2813442 - RNA, 14 nt, Human
guguuggacagaga

SEQ ID NO: 2813443 - RNA, 18 nt, Human
guguuuccauauuuuaua

SEQ ID NO: 2813444 - RNA, 20 nt, Human
guguuuauuuuucauauugu

SEQ ID NO: 2813445 - RNA, 14 nt, Human
guguugggauacug

SEQ ID NO: 2813446 - RNA, 16 nt, Human
guguugucuugaaaga

SEQ ID NO: 2813447 - RNA, 18 nt, Human
guguuguccuuuugucuu

SEQ ID NO: 2813448 - RNA, 20 nt, Human
guguugugauagcuaacauu

SEQ ID NO: 2813449 - RNA, 18 nt, Human
guguugucuugaaagauu

SEQ ID NO: 2813450 - RNA, 16 nt, Human
guguuuauuuuucaua

SEQ ID NO: 2813451 - RNA, 15 nt, Human
guguugaucccaaga

SEQ ID NO: 2813452 - RNA, 22 nt, Human
gugugucuguucacuuuuccuc

SEQ ID NO: 2813453 - RNA, 15 nt, Human
gugugucuguucacu

SEQ ID NO: 2813454 - RNA, 16 nt, Human
gugugucugcucagua

SEQ ID NO: 2813455 - RNA, 15 nt, Human
gugugucugcucagu

SEQ ID NO: 2813456 - RNA, 14 nt, Human
gugugucuuaauua

SEQ ID NO: 2813457 - RNA, 21 nt, Human
gugugucuuaauuauuauuug

SEQ ID NO: 2813458 - RNA, 20 nt, Human
guguguagaguuaagaagcu

SEQ ID NO: 2813459 - RNA, 18 nt, Human
guguguaugcgugugugu

SEQ ID NO: 2813460 - RNA, 17 nt, Human
gugguuugaucauuucu

SEQ ID NO: 2813461 - RNA, 21 nt, Human
gugguuugauggugacuuccu

SEQ ID NO: 2813462 - RNA, 21 nt, Human
gugguuugguuccucucuggu

SEQ ID NO: 2813463 - RNA, 23 nt, Human
gugguuuuagauuuucugguucu

SEQ ID NO: 2813464 - RNA, 14 nt, Human
aagauauacaugaa

SEQ ID NO: 2813465 - RNA, 23 nt, Human
aagaucuuagauucucugugucu

SEQ ID NO: 2813466 - RNA, 17 nt, Human
aagaucuucaaaaguaa

SEQ ID NO: 2813467 - RNA, 22 nt, Human
aagaucuucaaaaguaaugccu

SEQ ID NO: 2813468 - RNA, 23 nt, Human
aagaucuucaaaaguaaugccuc

SEQ ID NO: 2813469 - RNA, 13 nt, Human
aagaucuugcaga

SEQ ID NO: 2813470 - RNA, 19 nt, Human
aagaucuugcagaaguucu

SEQ ID NO: 2813471 - RNA, 22 nt, Human
aagaucuguuuugaaggcaaaa

SEQ ID NO: 2813472 - RNA, 21 nt, Human
aagaucuguuuugaaggcaaa

SEQ ID NO: 2813473 - RNA, 20 nt, Human
aagaucuguuuugaaggcaa

SEQ ID NO: 2813474 - RNA, 13 nt, Human
aagaucuuagauu

SEQ ID NO: 2813475 - RNA, 14 nt, Human
aagaucuuagauuc

SEQ ID NO: 2813476 - RNA, 15 nt, Human
aagaucuuagauucu

SEQ ID NO: 2813477 - RNA, 16 nt, Human
aagaucuuagauucuc

SEQ ID NO: 2813478 - RNA, 17 nt, Human
aagaucuuagauucucu

SEQ ID NO: 2813479 - RNA, 13 nt, Human
aagauauggagaa

SEQ ID NO: 2813480 - RNA, 15 nt, Human
aagauauggagaauu

SEQ ID NO: 2813481 - RNA, 17 nt, Human
aagauauggagaauugc

SEQ ID NO: 2813482 - RNA, 13 nt, Human
aagauaucuuuuc

SEQ ID NO: 2813483 - RNA, 16 nt, Human
aagauaucuuuucuuu

SEQ ID NO: 2813484 - RNA, 19 nt, Human
aagauaucuuuucuuuaga

SEQ ID NO: 2813485 - RNA, 13 nt, Human
aagauauuguaca

SEQ ID NO: 2813486 - RNA, 15 nt, Human
aagauauuguacaua

SEQ ID NO: 2813487 - RNA, 16 nt, Human
aagauauuguacauaa

SEQ ID NO: 2813488 - RNA, 17 nt, Human
aagauauuguacauaaa

SEQ ID NO: 2813489 - RNA, 14 nt, Human
aagauauuguucaa

SEQ ID NO: 2813490 - RNA, 15 nt, Human
aagauauuguucaaa

SEQ ID NO: 2813491 - RNA, 13 nt, Human
aagcaaauaaaua

SEQ ID NO: 2813492 - RNA, 14 nt, Human
aagcaaauaaauau

SEQ ID NO: 2813493 - RNA, 16 nt, Human
aagcaaauaaauauca

SEQ ID NO: 2813494 - RNA, 12 nt, Human
aagcaaauacuu

SEQ ID NO: 2813495 - RNA, 19 nt, Human
aagcaaccucccaacccag

SEQ ID NO: 2813496 - RNA, 22 nt, Human
aagcaagugauugggacagagg

SEQ ID NO: 2813497 - RNA, 19 nt, Human
aagcaauaaaauuuuuuug

SEQ ID NO: 2813498 - RNA, 20 nt, Human
aagcaauaaaauuuuuuugg

SEQ ID NO: 2813499 - RNA, 14 nt, Human
aagcaacuguuaug

SEQ ID NO: 2813500 - RNA, 22 nt, Human
aagcaaagacuuuccucuuagu

SEQ ID NO: 2813501 - RNA, 14 nt, Human
aagaugugauauuc

SEQ ID NO: 2813502 - RNA, 16 nt, Human
aagaugugauauucua

SEQ ID NO: 2813503 - RNA, 11 nt, Human
aagaugucugu

SEQ ID NO: 2813504 - RNA, 12 nt, Human
aagaugucuguu

SEQ ID NO: 2813505 - RNA, 16 nt, Human
aagaugucuguuugcu

SEQ ID NO: 2813506 - RNA, 18 nt, Human
aagaugucuguuugcuga

SEQ ID NO: 2813507 - RNA, 20 nt, Human
aagaugucuguuugcugaug

SEQ ID NO: 2813508 - RNA, 17 nt, Human
aagaugugauauucuaa

SEQ ID NO: 2813509 - RNA, 18 nt, Human
aagaugugauauucuaag

SEQ ID NO: 2813510 - RNA, 19 nt, Human
aagaugugauauucuaaga

SEQ ID NO: 2813511 - RNA, 23 nt, Human
aagaugcuccagcaacacagccu

SEQ ID NO: 2813512 - RNA, 15 nt, Human
aagaugcucuuuuaa

SEQ ID NO: 2813513 - RNA, 15 nt, Human
aagaugcucuucugu

SEQ ID NO: 2813514 - RNA, 16 nt, Human
aagaugccaucugugu

SEQ ID NO: 2813515 - RNA, 15 nt, Human
aagaugcauuguagu

SEQ ID NO: 2813516 - RNA, 17 nt, Human
aagaugcauuguaguuu

SEQ ID NO: 2813517 - RNA, 18 nt, Human
aagaugcauuguaguuua

SEQ ID NO: 2813518 - RNA, 22 nt, Human
aagaugcauuguaguuuaacca

SEQ ID NO: 2813519 - RNA, 18 nt, Human
aagaugccaauuauuguu

SEQ ID NO: 2813520 - RNA, 16 nt, Human
aagaugucagacuggc

SEQ ID NO: 2813521 - RNA, 17 nt, Human
aagaugcucuucugugg

SEQ ID NO: 2813522 - RNA, 22 nt, Human
aagaugcuggaugucugccaau

SEQ ID NO: 2813523 - RNA, 16 nt, Human
aagagcuuaacagugu

SEQ ID NO: 2813524 - RNA, 13 nt, Human
aagagcuugcuuu

SEQ ID NO: 2813525 - RNA, 14 nt, Human
aagagcuugcuuug

SEQ ID NO: 2813526 - RNA, 16 nt, Human
aagagcuugcuuugau

SEQ ID NO: 2813527 - RNA, 10 nt, Human
aagaggaaaa

SEQ ID NO: 2813528 - RNA, 23 nt, Human
aagaggaaaacccucaagggcau

SEQ ID NO: 2813529 - RNA, 16 nt, Human
aagaggaacugggccu

SEQ ID NO: 2813530 - RNA, 15 nt, Human
aagaggaacugggcc

SEQ ID NO: 2813531 - RNA, 22 nt, Human
aagaggaacagcacuggggagu

SEQ ID NO: 2813532 - RNA, 20 nt, Human
aagaggaacagcacugggga

SEQ ID NO: 2813533 - RNA, 18 nt, Human
guggcccgacagccuggc

SEQ ID NO: 2813534 - RNA, 19 nt, Human
guggcccgacagccuggca

SEQ ID NO: 2813535 - RNA, 17 nt, Human
guggcccgacagccugg

SEQ ID NO: 2813536 - RNA, 19 nt, Human
guggcccucucccuuaccc

SEQ ID NO: 2813537 - RNA, 20 nt, Human
aagacuuacucuaagaucuu

SEQ ID NO: 2813538 - RNA, 17 nt, Human
aagacuuagauugugcu

SEQ ID NO: 2813539 - RNA, 14 nt, Human
aagacuuacucuaa

SEQ ID NO: 2813540 - RNA, 15 nt, Human
aagacuuacucuaag

SEQ ID NO: 2813541 - RNA, 16 nt, Human
aagacuuacucuaaga

SEQ ID NO: 2813542 - RNA, 17 nt, Human
aagacuuacucuaagau

SEQ ID NO: 2813543 - RNA, 17 nt, Human
aagagauuguuguuugc

SEQ ID NO: 2813544 - RNA, 13 nt, Human
aagagcaaaaaua

SEQ ID NO: 2813545 - RNA, 14 nt, Human
aagagcaaaaauau

SEQ ID NO: 2813546 - RNA, 19 nt, Human
aagagccugaucucuuccu

SEQ ID NO: 2813547 - RNA, 20 nt, Human
aagagccugaucucuuccug

SEQ ID NO: 2813548 - RNA, 21 nt, Human
aagagccugaucucuuccugu

SEQ ID NO: 2813549 - RNA, 19 nt, Human
aagagcaauguguggcuga

SEQ ID NO: 2813550 - RNA, 16 nt, Human
aagagcacaaacauuu

SEQ ID NO: 2813551 - RNA, 17 nt, Human
aagagcacaaacauuuu

SEQ ID NO: 2813552 - RNA, 21 nt, Human
aagagcacaaacauuuuucaa

SEQ ID NO: 2813553 - RNA, 13 nt, Human
aagagcacacuug

SEQ ID NO: 2813554 - RNA, 14 nt, Human
aagagcagaacaga

SEQ ID NO: 2813555 - RNA, 22 nt, Human
aagacucuuuuugguuguccuc

SEQ ID NO: 2813556 - RNA, 12 nt, Human
aagacucuagag

SEQ ID NO: 2813557 - RNA, 13 nt, Human
aagacucuagagu

SEQ ID NO: 2813558 - RNA, 15 nt, Human
aagacucuagagucc

SEQ ID NO: 2813559 - RNA, 19 nt, Human
aagacucuagaguccaagg

SEQ ID NO: 2813560 - RNA, 21 nt, Human
aagacucuagaguccaagguu

SEQ ID NO: 2813561 - RNA, 17 nt, Human
aagacucuauucucaaa

SEQ ID NO: 2813562 - RNA, 19 nt, Human
aagaccugggguugucagc

SEQ ID NO: 2813563 - RNA, 12 nt, Human
aagaccuggcaa

SEQ ID NO: 2813564 - RNA, 21 nt, Human
aagaccuggcaaggacacaga

SEQ ID NO: 2813565 - RNA, 21 nt, Human
aagaccuacuguucuaaagcu

SEQ ID NO: 2813566 - RNA, 16 nt, Human
aagaccucaccuagaa

SEQ ID NO: 2813567 - RNA, 22 nt, Human
aagaccuacuguucuaaagcuc

SEQ ID NO: 2813568 - RNA, 23 nt, Human
aagaccuaggcucauggacgaga

SEQ ID NO: 2813569 - RNA, 18 nt, Human
aagaccuagugcucuuaa

SEQ ID NO: 2813570 - RNA, 17 nt, Human
aagaccucaccuagaaa

SEQ ID NO: 2813571 - RNA, 13 nt, Human
aagaccucuguga

SEQ ID NO: 2813572 - RNA, 17 nt, Human
aagaccuacuguucuaa

SEQ ID NO: 2813573 - RNA, 18 nt, Human
aagaccuacuguucuaaa

SEQ ID NO: 2813574 - RNA, 20 nt, Human
aagaccuacuguucuaaagc

SEQ ID NO: 2813575 - RNA, 22 nt, Human
gugggacccauagaucuucuga

SEQ ID NO: 2813576 - RNA, 13 nt, Human
gugggaccccagg

SEQ ID NO: 2813577 - RNA, 14 nt, Human
gugggaccccaggc

SEQ ID NO: 2813578 - RNA, 15 nt, Human
gugggaccccaggcc

SEQ ID NO: 2813579 - RNA, 17 nt, Human
gugggaccccaggccca

SEQ ID NO: 2813580 - RNA, 22 nt, Human
guggcuaaaugccuaauaaaca

SEQ ID NO: 2813581 - RNA, 16 nt, Human
guggcccugucccucc

SEQ ID NO: 2813582 - RNA, 17 nt, Human
guggcccugucccuccc

SEQ ID NO: 2813583 - RNA, 17 nt, Human
guggcccugcccucucc

SEQ ID NO: 2813584 - RNA, 18 nt, Human
guggcccugcccucuccu

SEQ ID NO: 2813585 - RNA, 21 nt, Human
guggcccugcccucuccuucc

SEQ ID NO: 2813586 - RNA, 23 nt, Human
guggcccugcccucuccuuccuu

SEQ ID NO: 2813587 - RNA, 11 nt, Human
guggcccuggc

SEQ ID NO: 2813588 - RNA, 15 nt, Human
guggcggccccagca

SEQ ID NO: 2813589 - RNA, 23 nt, Human
gugggaggcuccuguuagcuccu

SEQ ID NO: 2813590 - RNA, 15 nt, Human
gugggagaaggcagu

SEQ ID NO: 2813591 - RNA, 13 nt, Human
gugggagggagca

SEQ ID NO: 2813592 - RNA, 14 nt, Human
gugggagggagcag

SEQ ID NO: 2813593 - RNA, 15 nt, Human
gugggagggagcaga

SEQ ID NO: 2813594 - RNA, 19 nt, Human
gugggagggagcagacagg

SEQ ID NO: 2813595 - RNA, 13 nt, Human
gugggaggucagg

SEQ ID NO: 2813596 - RNA, 16 nt, Human
gugggaggucuugcua

SEQ ID NO: 2813597 - RNA, 21 nt, Human
gugggaggggcgcccaccucc

SEQ ID NO: 2813598 - RNA, 23 nt, Human
gugggugagaugcuggagaagag

SEQ ID NO: 2813599 - RNA, 13 nt, Human
gugggugcucaga

SEQ ID NO: 2813600 - RNA, 14 nt, Human
gugggugcucagaa

SEQ ID NO: 2813601 - RNA, 15 nt, Human
gugggugcucagaau

SEQ ID NO: 2813602 - RNA, 15 nt, Human
gugggugagaugcug

SEQ ID NO: 2813603 - RNA, 20 nt, Human
gugggugagaugcuggagaa

SEQ ID NO: 2813604 - RNA, 16 nt, Human
gugggugacaagagcc

SEQ ID NO: 2813605 - RNA, 18 nt, Human
gugggggccaccugccug

SEQ ID NO: 2813606 - RNA, 19 nt, Human
gugggggccaccugccugc

SEQ ID NO: 2813607 - RNA, 18 nt, Human
gugggguuucgcagccug

SEQ ID NO: 2813608 - RNA, 22 nt, Human
gugggguuucgcagccugaguc

SEQ ID NO: 2813609 - RNA, 13 nt, Human
guggguaaaauua

SEQ ID NO: 2813610 - RNA, 15 nt, Human
gugggguucuaggca

SEQ ID NO: 2813611 - RNA, 17 nt, Human
gugggguucugcuggga

SEQ ID NO: 2813612 - RNA, 22 nt, Human
guggguaauccaggcacagcug

SEQ ID NO: 2813613 - RNA, 16 nt, Human
aagaagugaguguuuc

SEQ ID NO: 2813614 - RNA, 20 nt, Human
aagaagugaguguuucuaug

SEQ ID NO: 2813615 - RNA, 21 nt, Human
aagaagugaguguuucuauga

SEQ ID NO: 2813616 - RNA, 16 nt, Human
aagaaggcaaaaaugu

SEQ ID NO: 2813617 - RNA, 15 nt, Human
aagaauacagcuuuc

SEQ ID NO: 2813618 - RNA, 13 nt, Human
aagaauacaguua

SEQ ID NO: 2813619 - RNA, 23 nt, Human
aagaauacaguuaggcaccagaa

SEQ ID NO: 2813620 - RNA, 14 nt, Human
aagaaaucccuguu

SEQ ID NO: 2813621 - RNA, 13 nt, Human
aagaaaucccugu

SEQ ID NO: 2813622 - RNA, 13 nt, Human
aagaaauauguga

SEQ ID NO: 2813623 - RNA, 15 nt, Human
aagaaauaugugaga

SEQ ID NO: 2813624 - RNA, 16 nt, Human
aagaaauaugugagau

SEQ ID NO: 2813625 - RNA, 18 nt, Human
aagaaauaugugagauuu

SEQ ID NO: 2813626 - RNA, 19 nt, Human
aagaaauaugugagauuuu

SEQ ID NO: 2813627 - RNA, 20 nt, Human
aagaaauaugugagauuuuu

SEQ ID NO: 2813628 - RNA, 20 nt, Human
aagaaauauuccaaaugucu

SEQ ID NO: 2813629 - RNA, 16 nt, Human
aagaagcuguuguaca

SEQ ID NO: 2813630 - RNA, 14 nt, Human
aagaagcuguugua

SEQ ID NO: 2813631 - RNA, 17 nt, Human
aagaagcuguuguacau

SEQ ID NO: 2813632 - RNA, 18 nt, Human
aagaagcuguuguacauu

SEQ ID NO: 2813633 - RNA, 19 nt, Human
aagaagcuguuguacauuu

SEQ ID NO: 2813634 - RNA, 21 nt, Human
aagaagcuguuguacauuuau

SEQ ID NO: 2813635 - RNA, 22 nt, Human
aagaagcuguuguacauuuaug

SEQ ID NO: 2813636 - RNA, 23 nt, Human
aagaagcuguuguacauuuauga

SEQ ID NO: 2813637 - RNA, 11 nt, Human
aagaaggaagu

SEQ ID NO: 2813638 - RNA, 14 nt, Human
aagaaggcaaaaau

SEQ ID NO: 2813639 - RNA, 15 nt, Human
aagaagcuucuaaua

SEQ ID NO: 2813640 - RNA, 18 nt, Human
aagaagcuucuaauaaau

SEQ ID NO: 2813641 - RNA, 19 nt, Human
aagaagcuucuaauaaauu

SEQ ID NO: 2813642 - RNA, 21 nt, Human
aagaagcuucuaauaaauuau

SEQ ID NO: 2813643 - RNA, 22 nt, Human
aagaagcuucuaauaaauuaua

SEQ ID NO: 2813644 - RNA, 21 nt, Human
aagaagcuuuaauauuuaaau

SEQ ID NO: 2813645 - RNA, 19 nt, Human
aagaauaggcauuaacaca

SEQ ID NO: 2813646 - RNA, 11 nt, Human
aagaaauaugu

SEQ ID NO: 2813647 - RNA, 20 nt, Human
aagaauagccuagauaugaa

SEQ ID NO: 2813648 - RNA, 15 nt, Human
aagaauagcaucugu

SEQ ID NO: 2813649 - RNA, 16 nt, Human
aagaauagcaucugua

SEQ ID NO: 2813650 - RNA, 21 nt, Human
aagaauagcaucuguacaaag

SEQ ID NO: 2813651 - RNA, 23 nt, Human
aagaauagcaucuguacaaaggg

SEQ ID NO: 2813652 - RNA, 16 nt, Human
aagaaacugaggaauu

SEQ ID NO: 2813653 - RNA, 20 nt, Human
aagaaacugaggaauuuucu

SEQ ID NO: 2813654 - RNA, 19 nt, Human
aagaaacugaggaauuuuc

SEQ ID NO: 2813655 - RNA, 21 nt, Human
aagaaacugaggaauuuucuu

SEQ ID NO: 2813656 - RNA, 15 nt, Human
aagaaaaagaagaac

SEQ ID NO: 2813657 - RNA, 12 nt, Human
aagaaaaagauu

SEQ ID NO: 2813658 - RNA, 14 nt, Human
aagaaagaaggaag

SEQ ID NO: 2813659 - RNA, 13 nt, Human
aagaaagaaggaa

SEQ ID NO: 2813660 - RNA, 12 nt, Human
aagaaacuuuug

SEQ ID NO: 2813661 - RNA, 13 nt, Human
aagaaacuuuugu

SEQ ID NO: 2813662 - RNA, 15 nt, Human
aagaaacuuuuguaa

SEQ ID NO: 2813663 - RNA, 16 nt, Human
aagaaacuuuuguaaa

SEQ ID NO: 2813664 - RNA, 17 nt, Human
aagaaacuuuuguaaag

SEQ ID NO: 2813665 - RNA, 18 nt, Human
aagaaacuuuuguaaaga

SEQ ID NO: 2813666 - RNA, 19 nt, Human
aagaaacuuuuguaaagaa

SEQ ID NO: 2813667 - RNA, 15 nt, Human
aagaaagaaggaagu

SEQ ID NO: 2813668 - RNA, 12 nt, Human
aagaaagacauc

SEQ ID NO: 2813669 - RNA, 14 nt, Human
aagaaagacaucuu

SEQ ID NO: 2813670 - RNA, 18 nt, Human
aagaaauaauaauaucca

SEQ ID NO: 2813671 - RNA, 13 nt, Human
aagaaagacucua

SEQ ID NO: 2813672 - RNA, 16 nt, Human
aagaaagacucuauuc

SEQ ID NO: 2813673 - RNA, 22 nt, Human
aagaaagacucuauucucaaag

SEQ ID NO: 2813674 - RNA, 22 nt, Human
aagaaauauaaacacaaauaua

SEQ ID NO: 2813675 - RNA, 12 nt, Human
aacuuuaaucaa

SEQ ID NO: 2813676 - RNA, 16 nt, Human
aacuuuaaucaaguug

SEQ ID NO: 2813677 - RNA, 20 nt, Human
aacuuuaauucucuuucaaa

SEQ ID NO: 2813678 - RNA, 21 nt, Human
aacuuuaauucucuuucaaag

SEQ ID NO: 2813679 - RNA, 13 nt, Human
aacuuguuuucug

SEQ ID NO: 2813680 - RNA, 15 nt, Human
aacuuuaaaaaauau

SEQ ID NO: 2813681 - RNA, 17 nt, Human
aacuuuaaaaaauauuu

SEQ ID NO: 2813682 - RNA, 19 nt, Human
aacuuuaaaaaauauuuau

SEQ ID NO: 2813683 - RNA, 15 nt, Human
aagaaaaaaaucuuc

SEQ ID NO: 2813684 - RNA, 14 nt, Human
aagaaaaaaaaaug

SEQ ID NO: 2813685 - RNA, 15 nt, Human
aagaaaaaaaaaugc

SEQ ID NO: 2813686 - RNA, 18 nt, Human
aagaaaaaaaaaugccau

SEQ ID NO: 2813687 - RNA, 19 nt, Human
aagaaaaaaacgaaaacag

SEQ ID NO: 2813688 - RNA, 20 nt, Human
aacuuuacccaaaaacuaaa

SEQ ID NO: 2813689 - RNA, 19 nt, Human
aagaaaaaaaaaagaagaa

SEQ ID NO: 2813690 - RNA, 20 nt, Human
aagaaaaaaaaaagaagaag

SEQ ID NO: 2813691 - RNA, 22 nt, Human
aagaaaaaaaaaagaagaagaa

SEQ ID NO: 2813692 - RNA, 11 nt, Human
aacuugucacu

SEQ ID NO: 2813693 - RNA, 12 nt, Human
aacuugucacuu

SEQ ID NO: 2813694 - RNA, 13 nt, Human
aacuugucacuug

SEQ ID NO: 2813695 - RNA, 17 nt, Human
aacuugucacuugcaug

SEQ ID NO: 2813696 - RNA, 17 nt, Human
aacuugguauuuuucag

SEQ ID NO: 2813697 - RNA, 12 nt, Human
aacuugggaacu

SEQ ID NO: 2813698 - RNA, 21 nt, Human
gugaaccaccacacccagccc

SEQ ID NO: 2813699 - RNA, 21 nt, Human
gugccgccugcacuccucagg

SEQ ID NO: 2813700 - RNA, 13 nt, Human
gugccgugugagu

SEQ ID NO: 2813701 - RNA, 15 nt, Human
gugccgugugagugu

SEQ ID NO: 2813702 - RNA, 18 nt, Human
gugccgugugagugugac

SEQ ID NO: 2813703 - RNA, 19 nt, Human
gugccgugugagugugaca

SEQ ID NO: 2813704 - RNA, 20 nt, Human
gugccgugugagugugacag

SEQ ID NO: 2813705 - RNA, 21 nt, Human
gugccgugugagugugacagg

SEQ ID NO: 2813706 - RNA, 23 nt, Human
gugccgugugagugugacagggc

SEQ ID NO: 2813707 - RNA, 15 nt, Human
gugccucugccuguc

SEQ ID NO: 2813708 - RNA, 13 nt, Human
gugccucugccug

SEQ ID NO: 2813709 - RNA, 12 nt, Human
gugccucugccu

SEQ ID NO: 2813710 - RNA, 21 nt, Human
aagaaugagaaggagucagaa

SEQ ID NO: 2813711 - RNA, 13 nt, Human
aagaauccuuuug

SEQ ID NO: 2813712 - RNA, 21 nt, Human
aagaauccuuuuguagaauga

SEQ ID NO: 2813713 - RNA, 21 nt, Human
aagaauccacauuucuaaaau

SEQ ID NO: 2813714 - RNA, 18 nt, Human
aagaaucccuagacuuua

SEQ ID NO: 2813715 - RNA, 23 nt, Human
aagaaucccuagacuuuaggcuu

SEQ ID NO: 2813716 - RNA, 14 nt, Human
guggcagcccugua

SEQ ID NO: 2813717 - RNA, 17 nt, Human
aagaauccacauuucua

SEQ ID NO: 2813718 - RNA, 18 nt, Human
aagaauccacauuucuaa

SEQ ID NO: 2813719 - RNA, 19 nt, Human
aagaauccacauuucuaaa

SEQ ID NO: 2813720 - RNA, 13 nt, Human
guggcagcccugu

SEQ ID NO: 2813721 - RNA, 12 nt, Human
guggcagcccug

SEQ ID NO: 2813722 - RNA, 19 nt, Human
guggaccucuacuuuccag

SEQ ID NO: 2813723 - RNA, 12 nt, Human
guggcacugcca

SEQ ID NO: 2813724 - RNA, 18 nt, Human
guggauucugaggcccug

SEQ ID NO: 2813725 - RNA, 13 nt, Human
aagaaugcauuga

SEQ ID NO: 2813726 - RNA, 20 nt, Human
aagaaugcauugauauugug

SEQ ID NO: 2813727 - RNA, 21 nt, Human
aagaaugcauugauauuguga

SEQ ID NO: 2813728 - RNA, 23 nt, Human
aagaaugcauugauauugugaac

SEQ ID NO: 2813729 - RNA, 13 nt, Human
aagaauggaaaag

SEQ ID NO: 2813730 - RNA, 15 nt, Human
aagaauggaaaagag

SEQ ID NO: 2813731 - RNA, 15 nt, Human
aagaauggagaggaa

SEQ ID NO: 2813732 - RNA, 16 nt, Human
aagaauggagcaguac

SEQ ID NO: 2813733 - RNA, 22 nt, Human
aagaaucagaguagaaauaaaa

SEQ ID NO: 2813734 - RNA, 19 nt, Human
aagaaugguggcuucuuuu

SEQ ID NO: 2813735 - RNA, 13 nt, Human
aagaauguguuuc

SEQ ID NO: 2813736 - RNA, 14 nt, Human
aagaauguguuuca

SEQ ID NO: 2813737 - RNA, 20 nt, Human
aagaauugaccaucugcuuu

SEQ ID NO: 2813738 - RNA, 21 nt, Human
aagaauugaccaucugcuuuu

SEQ ID NO: 2813739 - RNA, 22 nt, Human
aagaauugaccaucugcuuuua

SEQ ID NO: 2813740 - RNA, 17 nt, Human
aagacaaaucaaagcag

SEQ ID NO: 2813741 - RNA, 22 nt, Human
aagacaaaucaacagaagcauu

SEQ ID NO: 2813742 - RNA, 17 nt, Human
aagacaaagguuuuccu

SEQ ID NO: 2813743 - RNA, 13 nt, Human
aagacccuccccg

SEQ ID NO: 2813744 - RNA, 23 nt, Human
aagaccccuuaccacugcucuga

SEQ ID NO: 2813745 - RNA, 12 nt, Human
aagacaacacaa

SEQ ID NO: 2813746 - RNA, 18 nt, Human
guggaaguuccaagucca

SEQ ID NO: 2813747 - RNA, 20 nt, Human
guggaccaauuauugauaua

SEQ ID NO: 2813748 - RNA, 15 nt, Human
guggacaguccuggg

SEQ ID NO: 2813749 - RNA, 14 nt, Human
guggacaguccugg

SEQ ID NO: 2813750 - RNA, 16 nt, Human
guggacaguccuggga

SEQ ID NO: 2813751 - RNA, 22 nt, Human
guggacagucugcucuagauga

SEQ ID NO: 2813752 - RNA, 17 nt, Human
guggaccuuaggccuuc

SEQ ID NO: 2813753 - RNA, 18 nt, Human
guggaccuuaggccuucc

SEQ ID NO: 2813754 - RNA, 19 nt, Human
guggacccagcgggcaggu

SEQ ID NO: 2813755 - RNA, 21 nt, Human
guggaccuuaggccuuccucu

SEQ ID NO: 2813756 - RNA, 18 nt, Human
guggaccuuuuaaagugu

SEQ ID NO: 2813757 - RNA, 21 nt, Human
guggaccuuuuaaaguguuuc

SEQ ID NO: 2813758 - RNA, 21 nt, Human
guggaugccugguggcagcug

SEQ ID NO: 2813759 - RNA, 21 nt, Human
guggauggaaggggcugacag

SEQ ID NO: 2813760 - RNA, 14 nt, Human
guggauuaaacuua

SEQ ID NO: 2813761 - RNA, 18 nt, Human
guggauuaaacuuaugaa

SEQ ID NO: 2813762 - RNA, 21 nt, Human
guggauuaaacuuaugaaugu

SEQ ID NO: 2813763 - RNA, 21 nt, Human
guggauggguuuuaugagaug

SEQ ID NO: 2813764 - RNA, 23 nt, Human
guggauggguuuuaugagaugga

SEQ ID NO: 2813765 - RNA, 22 nt, Human
guggacacagcucuucuccagg

SEQ ID NO: 2813766 - RNA, 18 nt, Human
guggacacagcucuucuc

SEQ ID NO: 2813767 - RNA, 23 nt, Human
guggacacagcucuucuccaggc

SEQ ID NO: 2813768 - RNA, 13 nt, Human
guggacaguccug

SEQ ID NO: 2813769 - RNA, 17 nt, Human
guggacacagcucuucu

SEQ ID NO: 2813770 - RNA, 14 nt, Human
guggaaugagugug

SEQ ID NO: 2813771 - RNA, 18 nt, Human
guggaaugagugugcaug

SEQ ID NO: 2813772 - RNA, 13 nt, Human
guggaauauaaag

SEQ ID NO: 2813773 - RNA, 20 nt, Human
gugcugggauuacaggugug

SEQ ID NO: 2813774 - RNA, 20 nt, Human
gugcugggauuacaggcgug

SEQ ID NO: 2813775 - RNA, 22 nt, Human
gugcugggauuacaagcgugag

SEQ ID NO: 2813776 - RNA, 21 nt, Human
gugcugggauuacaagcguga

SEQ ID NO: 2813777 - RNA, 12 nt, Human
aagaauauauau

SEQ ID NO: 2813778 - RNA, 19 nt, Human
gugcucagaauaaggcagg

SEQ ID NO: 2813779 - RNA, 22 nt, Human
gugcucagaauaaggcaggcau

SEQ ID NO: 2813780 - RNA, 20 nt, Human
gugcucagagaccugaagug

SEQ ID NO: 2813781 - RNA, 21 nt, Human
gugcuauuuuguuuguuuugu

SEQ ID NO: 2813782 - RNA, 19 nt, Human
gugcucaccaugcuuccag

SEQ ID NO: 2813783 - RNA, 20 nt, Human
gugcugggaaccucagggua

SEQ ID NO: 2813784 - RNA, 22 nt, Human
gugcugggaaccucaggguauu

SEQ ID NO: 2813785 - RNA, 22 nt, Human
gugcucaggacucagaagccuc

SEQ ID NO: 2813786 - RNA, 18 nt, Human
gugcucaggacucagaag

SEQ ID NO: 2813787 - RNA, 14 nt, Human
gugcuggcucacag

SEQ ID NO: 2813788 - RNA, 19 nt, Human
gugcuggcucacaguacag

SEQ ID NO: 2813789 - RNA, 20 nt, Human
gugcuggcucacaguacagc

SEQ ID NO: 2813790 - RNA, 21 nt, Human
gugcuggcucacaguacagca

SEQ ID NO: 2813791 - RNA, 22 nt, Human
gugcuggcucacaguacagcau

SEQ ID NO: 2813792 - RNA, 19 nt, Human
aaugagacucuagggucca

SEQ ID NO: 2813793 - RNA, 15 nt, Human
aaugagacuugccuu

SEQ ID NO: 2813794 - RNA, 17 nt, Human
aaugagacuugccuucc

SEQ ID NO: 2813795 - RNA, 14 nt, Human
aaugacuuauugug

SEQ ID NO: 2813796 - RNA, 19 nt, Human
aaugacuuauuguggauaa

SEQ ID NO: 2813797 - RNA, 15 nt, Human
aaugagaaggcagcc

SEQ ID NO: 2813798 - RNA, 17 nt, Human
aaugagaaggcagccac

SEQ ID NO: 2813799 - RNA, 13 nt, Human
aaugagaaucuac

SEQ ID NO: 2813800 - RNA, 19 nt, Human
aaugaaaagucguuuucca

SEQ ID NO: 2813801 - RNA, 20 nt, Human
aaugaaaagucguuuuccaa

SEQ ID NO: 2813802 - RNA, 21 nt, Human
aaugaaaagucguuuuccaaa

SEQ ID NO: 2813803 - RNA, 11 nt, Human
aaugaaaauaa

SEQ ID NO: 2813804 - RNA, 13 nt, Human
aaugaaaaugaau

SEQ ID NO: 2813805 - RNA, 16 nt, Human
aaugaaaaugaauauc

SEQ ID NO: 2813806 - RNA, 15 nt, Human
aaugaaaauaaguga

SEQ ID NO: 2813807 - RNA, 21 nt, Human
aaugaaaauaagugaauaaua

SEQ ID NO: 2813808 - RNA, 13 nt, Human
aaugacacagucu

SEQ ID NO: 2813809 - RNA, 20 nt, Human
aaugacucaggacauccccc

SEQ ID NO: 2813810 - RNA, 22 nt, Human
aaugacaucucaggggccagag

SEQ ID NO: 2813811 - RNA, 12 nt, Human
aaugacaugcac

SEQ ID NO: 2813812 - RNA, 15 nt, Human
aaugacaugcacuga

SEQ ID NO: 2813813 - RNA, 16 nt, Human
aaugacaugcacugac

SEQ ID NO: 2813814 - RNA, 19 nt, Human
aaugacaugcacugacccu

SEQ ID NO: 2813815 - RNA, 22 nt, Human
aaugacaugcacugacccuucc

SEQ ID NO: 2813816 - RNA, 13 nt, Human
aaugacaucuuuu

SEQ ID NO: 2813817 - RNA, 16 nt, Human
aaugacaucuuuuuaa

SEQ ID NO: 2813818 - RNA, 19 nt, Human
aaugacaucuuuuuaaagc

SEQ ID NO: 2813819 - RNA, 20 nt, Human
aaugacaucuuuuuaaagcu

SEQ ID NO: 2813820 - RNA, 21 nt, Human
aaugacaucuuuuuaaagcuu

SEQ ID NO: 2813821 - RNA, 22 nt, Human
aaugacaucuuuuuaaagcuua

SEQ ID NO: 2813822 - RNA, 13 nt, Human
uaauggucuaaaa

SEQ ID NO: 2813823 - RNA, 17 nt, Human
uaauggucuaaaaauaa

SEQ ID NO: 2813824 - RNA, 21 nt, Human
uaauggucuaaaaauaaacca

SEQ ID NO: 2813825 - RNA, 23 nt, Human
uaaugaggagagaaaauauaugu

SEQ ID NO: 2813826 - RNA, 14 nt, Human
uaaugauaaaacac

SEQ ID NO: 2813827 - RNA, 14 nt, Human
uaaugguguuuuaa

SEQ ID NO: 2813828 - RNA, 13 nt, Human
uaauguaaaauga

SEQ ID NO: 2813829 - RNA, 14 nt, Human
uaauguaaaaugau

SEQ ID NO: 2813830 - RNA, 14 nt, Human
uaauguaaaauguu

SEQ ID NO: 2813831 - RNA, 18 nt, Human
uaaugguccacacccaau

SEQ ID NO: 2813832 - RNA, 17 nt, Human
uaauguaaaauguugaa

SEQ ID NO: 2813833 - RNA, 12 nt, Human
uaauguaaagau

SEQ ID NO: 2813834 - RNA, 18 nt, Human
uaauguaaagauuugcuu

SEQ ID NO: 2813835 - RNA, 13 nt, Human
aaucuuucugcag

SEQ ID NO: 2813836 - RNA, 14 nt, Human
aaucuugugcuaga

SEQ ID NO: 2813837 - RNA, 16 nt, Human
aaucuugugcuagaau

SEQ ID NO: 2813838 - RNA, 18 nt, Human
aaucuugugcuagaauac

SEQ ID NO: 2813839 - RNA, 19 nt, Human
aaucuugugcuagaauacu

SEQ ID NO: 2813840 - RNA, 20 nt, Human
aaucuugugcuagaauacuu

SEQ ID NO: 2813841 - RNA, 22 nt, Human
aaucuugugcuagaauacuuuu

SEQ ID NO: 2813842 - RNA, 22 nt, Human
aaucuuuguuucagguucagua

SEQ ID NO: 2813843 - RNA, 21 nt, Human
aaucuuuuaaaaauucaaaug

SEQ ID NO: 2813844 - RNA, 12 nt, Human
aaucuuuuacaa

SEQ ID NO: 2813845 - RNA, 22 nt, Human
aaucuuucuuuugauucuuccu

SEQ ID NO: 2813846 - RNA, 14 nt, Human
aaucuuugaaagac

SEQ ID NO: 2813847 - RNA, 16 nt, Human
aaucuuugaaagacuu

SEQ ID NO: 2813848 - RNA, 19 nt, Human
aaucuuugaaagacuucca

SEQ ID NO: 2813849 - RNA, 23 nt, Human
aaucuuugaaagacuuccaaaga

SEQ ID NO: 2813850 - RNA, 21 nt, Human
aaucuuuuacaacugccucga

SEQ ID NO: 2813851 - RNA, 16 nt, Human
aaucuucuccagauuu

SEQ ID NO: 2813852 - RNA, 21 nt, Human
uaauacugguauuuuuacuua

SEQ ID NO: 2813853 - RNA, 15 nt, Human
uaauacuaccuugaa

SEQ ID NO: 2813854 - RNA, 14 nt, Human
uaauacuaccuuga

SEQ ID NO: 2813855 - RNA, 22 nt, Human
uaauacgcaggcaucugauuug

SEQ ID NO: 2813856 - RNA, 13 nt, Human
uaauacuaaaaua

SEQ ID NO: 2813857 - RNA, 17 nt, Human
uaauacuaaaauauguc

SEQ ID NO: 2813858 - RNA, 18 nt, Human
uaauacuaaaauaugucu

SEQ ID NO: 2813859 - RNA, 21 nt, Human
uaauagcuuuuauuguauaaa

SEQ ID NO: 2813860 - RNA, 15 nt, Human
uaauacucuguugua

SEQ ID NO: 2813861 - RNA, 18 nt, Human
uaauagcuuuuauuguau

SEQ ID NO: 2813862 - RNA, 23 nt, Human
uaaucagugugucuaaauuugaa

SEQ ID NO: 2813863 - RNA, 14 nt, Human
uaaucaauaaagaa

SEQ ID NO: 2813864 - RNA, 17 nt, Human
uaaucaaguuguaacuu

SEQ ID NO: 2813865 - RNA, 21 nt, Human
uaaucaaguuguaacuuauau

SEQ ID NO: 2813866 - RNA, 17 nt, Human
uaaucaaucaucugugu

SEQ ID NO: 2813867 - RNA, 17 nt, Human
uaaucaaugaauauuga

SEQ ID NO: 2813868 - RNA, 19 nt, Human
uaaucaaugaauauugaag

SEQ ID NO: 2813869 - RNA, 20 nt, Human
uaaucaaugaauauugaagu

SEQ ID NO: 2813870 - RNA, 18 nt, Human
uaaugagcuauuaaaacu

SEQ ID NO: 2813871 - RNA, 19 nt, Human
uaaugagcuauuaaaacuc

SEQ ID NO: 2813872 - RNA, 21 nt, Human
uaaugagcuauuaaaacucag

SEQ ID NO: 2813873 - RNA, 16 nt, Human
uaaugacaugccuaua

SEQ ID NO: 2813874 - RNA, 19 nt, Human
uaaugaaagugaugacaua

SEQ ID NO: 2813875 - RNA, 22 nt, Human
uaaugaaagugaugacauauuu

SEQ ID NO: 2813876 - RNA, 16 nt, Human
uaaucaucuauaaaga

SEQ ID NO: 2813877 - RNA, 17 nt, Human
uaaucaucuauaaagaa

SEQ ID NO: 2813878 - RNA, 13 nt, Human
uaaucaugaaauu

SEQ ID NO: 2813879 - RNA, 16 nt, Human
uaaucaugaaauuacu

SEQ ID NO: 2813880 - RNA, 15 nt, Human
aaucaucuauaaaga

SEQ ID NO: 2813881 - RNA, 17 nt, Human
aaucaugaugcuagcca

SEQ ID NO: 2813882 - RNA, 18 nt, Human
aaucaucuauaaagaaga

SEQ ID NO: 2813883 - RNA, 12 nt, Human
aaucaucuauuu

SEQ ID NO: 2813884 - RNA, 13 nt, Human
aaucaucuauuuu

SEQ ID NO: 2813885 - RNA, 15 nt, Human
aaucaucuauuuuga

SEQ ID NO: 2813886 - RNA, 19 nt, Human
aaucaucuauuuugaugca

SEQ ID NO: 2813887 - RNA, 20 nt, Human
aaucaucuauuuugaugcag

SEQ ID NO: 2813888 - RNA, 23 nt, Human
aaucaucuauuuugaugcagcau

SEQ ID NO: 2813889 - RNA, 16 nt, Human
aaucaugucaggccug

SEQ ID NO: 2813890 - RNA, 15 nt, Human
aaucaucugugugaa

SEQ ID NO: 2813891 - RNA, 18 nt, Human
uaauaaaauguguugaaa

SEQ ID NO: 2813892 - RNA, 23 nt, Human
aaucauauugaugaaaagauuua

SEQ ID NO: 2813893 - RNA, 14 nt, Human
aaucaucgaaaauu

SEQ ID NO: 2813894 - RNA, 16 nt, Human
aaucaucgaaaauuca

SEQ ID NO: 2813895 - RNA, 17 nt, Human
aaucaucgaaaauucau

SEQ ID NO: 2813896 - RNA, 19 nt, Human
aaucaucgaaaauucauuu

SEQ ID NO: 2813897 - RNA, 21 nt, Human
aaucaucgaaaauucauuuca

SEQ ID NO: 2813898 - RNA, 23 nt, Human
aaucaucgaaaauucauuucaca

SEQ ID NO: 2813899 - RNA, 24 nt, Human
aaucaucggagucagccaggagcu

SEQ ID NO: 2813900 - RNA, 22 nt, Human
uaauaaaacuuaacuuccaaug

SEQ ID NO: 2813901 - RNA, 18 nt, Human
uaaguuugaaggaaacag

SEQ ID NO: 2813902 - RNA, 14 nt, Human
uaauaaaaaugaca

SEQ ID NO: 2813903 - RNA, 21 nt, Human
uaauaaaaaugacagacugaa

SEQ ID NO: 2813904 - RNA, 13 nt, Human
uaauaaaauaauu

SEQ ID NO: 2813905 - RNA, 19 nt, Human
uaauaaaauaauucuaaag

SEQ ID NO: 2813906 - RNA, 16 nt, Human
uaauaaaauaauucua

SEQ ID NO: 2813907 - RNA, 18 nt, Human
uaauaaaauaauucuaaa

SEQ ID NO: 2813908 - RNA, 12 nt, Human
uaaguacuguaa

SEQ ID NO: 2813909 - RNA, 14 nt, Human
uaaguacuguaaua

SEQ ID NO: 2813910 - RNA, 17 nt, Human
uaaguacuguaauaaua

SEQ ID NO: 2813911 - RNA, 19 nt, Human
uaaguacuguaauaauacc

SEQ ID NO: 2813912 - RNA, 21 nt, Human
uaaguacuguaauaauaccuc

SEQ ID NO: 2813913 - RNA, 23 nt, Human
uaaguacuguaauaauaccucaa

SEQ ID NO: 2813914 - RNA, 14 nt, Human
aaucagcaagaaga

SEQ ID NO: 2813915 - RNA, 20 nt, Human
aaucagcacagauaaaaagu

SEQ ID NO: 2813916 - RNA, 12 nt, Human
aaucagcacuga

SEQ ID NO: 2813917 - RNA, 13 nt, Human
aaucagcacugaa

SEQ ID NO: 2813918 - RNA, 14 nt, Human
aaucagcacugaaa

SEQ ID NO: 2813919 - RNA, 15 nt, Human
aaucagcacugaaaa

SEQ ID NO: 2813920 - RNA, 16 nt, Human
aaucagcacugaaaau

SEQ ID NO: 2813921 - RNA, 17 nt, Human
aaucagcacugaaaaua

SEQ ID NO: 2813922 - RNA, 20 nt, Human
uaaguauguguaaaauguga

SEQ ID NO: 2813923 - RNA, 16 nt, Human
uaaguauaaaauacaa

SEQ ID NO: 2813924 - RNA, 13 nt, Human
uaaguauacaguu

SEQ ID NO: 2813925 - RNA, 14 nt, Human
uaaguauacaguuc

SEQ ID NO: 2813926 - RNA, 20 nt, Human
uaaguauacaguucaauaaa

SEQ ID NO: 2813927 - RNA, 15 nt, Human
uaaguauaucaugua

SEQ ID NO: 2813928 - RNA, 17 nt, Human
uaaguauaucauguaaa

SEQ ID NO: 2813929 - RNA, 22 nt, Human
uaaguauaucauguaaagaaau

SEQ ID NO: 2813930 - RNA, 16 nt, Human
uaaguacuguuuacca

SEQ ID NO: 2813931 - RNA, 15 nt, Human
uaaguagauaagcag

SEQ ID NO: 2813932 - RNA, 16 nt, Human
uaaguagauaagcaga

SEQ ID NO: 2813933 - RNA, 13 nt, Human
aaucagagacaaa

SEQ ID NO: 2813934 - RNA, 18 nt, Human
aaucagagaccaggcccu

SEQ ID NO: 2813935 - RNA, 21 nt, Human
aaucagagaccaggcccuggc

SEQ ID NO: 2813936 - RNA, 15 nt, Human
aaucagaguagaaau

SEQ ID NO: 2813937 - RNA, 17 nt, Human
aaucagaguagaaauaa

SEQ ID NO: 2813938 - RNA, 18 nt, Human
aaucagaguagaaauaaa

SEQ ID NO: 2813939 - RNA, 13 nt, Human
aaucagacaaagu

SEQ ID NO: 2813940 - RNA, 15 nt, Human
aaucagaucuuuauu

SEQ ID NO: 2813941 - RNA, 13 nt, Human
uaaguucacauua

SEQ ID NO: 2813942 - RNA, 16 nt, Human
uaaguucacauuagaa

SEQ ID NO: 2813943 - RNA, 17 nt, Human
uaaguucacauuagaau

SEQ ID NO: 2813944 - RNA, 14 nt, Human
uaaguucagcacuu

SEQ ID NO: 2813945 - RNA, 14 nt, Human
uaaguauuaaaaca

SEQ ID NO: 2813946 - RNA, 17 nt, Human
aauauuuuaucuuuccu

SEQ ID NO: 2813947 - RNA, 15 nt, Human
uaaguauuaaaacau

SEQ ID NO: 2813948 - RNA, 16 nt, Human
uaaguauuaaaacauu

SEQ ID NO: 2813949 - RNA, 12 nt, Human
uaaguuugaagg

SEQ ID NO: 2813950 - RNA, 12 nt, Human
aauccuuccaaa

SEQ ID NO: 2813951 - RNA, 20 nt, Human
aauccuuccaaaaauuauua

SEQ ID NO: 2813952 - RNA, 21 nt, Human
aauccuuccaaaaauuauuau

SEQ ID NO: 2813953 - RNA, 17 nt, Human
aauccuugcuuaugaca

SEQ ID NO: 2813954 - RNA, 13 nt, Human
aauccuugcuuau

SEQ ID NO: 2813955 - RNA, 16 nt, Human
aaucuacuaauuccac

SEQ ID NO: 2813956 - RNA, 15 nt, Human
aaucuacuaauucca

SEQ ID NO: 2813957 - RNA, 14 nt, Human
aaucauugcuuuga

SEQ ID NO: 2813958 - RNA, 19 nt, Human
aaucauugcuuugaagcag

SEQ ID NO: 2813959 - RNA, 21 nt, Human
aaucauugcuuugaagcaguu

SEQ ID NO: 2813960 - RNA, 22 nt, Human
aaucauugcuuugaagcaguug

SEQ ID NO: 2813961 - RNA, 12 nt, Human
aaucauuguugc

SEQ ID NO: 2813962 - RNA, 14 nt, Human
aaucauuguugccu

SEQ ID NO: 2813963 - RNA, 14 nt, Human
aaucauuguuuuga

SEQ ID NO: 2813964 - RNA, 16 nt, Human
aaucauuguuuugaau

SEQ ID NO: 2813965 - RNA, 17 nt, Human
aaucauuguuuugaaua

SEQ ID NO: 2813966 - RNA, 18 nt, Human
aaucauuguuuugaauau

SEQ ID NO: 2813967 - RNA, 19 nt, Human
aaucauuguuuugaauauu

SEQ ID NO: 2813968 - RNA, 20 nt, Human
aaucauuguuuugaauauua

SEQ ID NO: 2813969 - RNA, 22 nt, Human
aaucauuguuuugaauauuacu

SEQ ID NO: 2813970 - RNA, 20 nt, Human
aaucauuuccccauaacuca

SEQ ID NO: 2813971 - RNA, 13 nt, Human
aaucauuucucac

SEQ ID NO: 2813972 - RNA, 16 nt, Human
aaucauuucucacugu

SEQ ID NO: 2813973 - RNA, 15 nt, Human
aauccuaaaagaagc

SEQ ID NO: 2813974 - RNA, 14 nt, Human
aauccuaagacaca

SEQ ID NO: 2813975 - RNA, 15 nt, Human
aauccuaagacacaa

SEQ ID NO: 2813976 - RNA, 17 nt, Human
aauccuaagacacaaau

SEQ ID NO: 2813977 - RNA, 17 nt, Human
aauccuauauagaaugc

SEQ ID NO: 2813978 - RNA, 22 nt, Human
aauccuauauagaaugcugcac

SEQ ID NO: 2813979 - RNA, 21 nt, Human
aaucuguccaaaggaggcugg

SEQ ID NO: 2813980 - RNA, 20 nt, Human
aaucuguccaaaggaggcug

SEQ ID NO: 2813981 - RNA, 19 nt, Human
aaucugucaaaacacugug

SEQ ID NO: 2813982 - RNA, 20 nt, Human
aaucugucaaaacacugugg

SEQ ID NO: 2813983 - RNA, 21 nt, Human
aaucugucaaaacacugugga

SEQ ID NO: 2813984 - RNA, 23 nt, Human
aaucugucaaaacacuguggaac

SEQ ID NO: 2813985 - RNA, 13 nt, Human
aaucugucaagag

SEQ ID NO: 2813986 - RNA, 19 nt, Human
aaucugucaagaguaguua

SEQ ID NO: 2813987 - RNA, 20 nt, Human
aaucugucaagaguaguuau

SEQ ID NO: 2813988 - RNA, 23 nt, Human
aaucuaggcaugaagagcaaaaa

SEQ ID NO: 2813989 - RNA, 19 nt, Human
aaucuaguauuucaugcug

SEQ ID NO: 2813990 - RNA, 15 nt, Human
aaucuaguuuacaga

SEQ ID NO: 2813991 - RNA, 17 nt, Human
aaucuaguuuacagaaa

SEQ ID NO: 2813992 - RNA, 18 nt, Human
aaucuaguuuacagaaaa

SEQ ID NO: 2813993 - RNA, 19 nt, Human
aaucuaguuuacagaaaaa

SEQ ID NO: 2813994 - RNA, 17 nt, Human
aaucuauaaacaaugaa

SEQ ID NO: 2813995 - RNA, 13 nt, Human
aaucuagacaaua

SEQ ID NO: 2813996 - RNA, 16 nt, Human
aaucuagacaauauac

SEQ ID NO: 2813997 - RNA, 17 nt, Human
aaucuacuaauuccaca

SEQ ID NO: 2813998 - RNA, 14 nt, Human
uacaaaaauaaauu

SEQ ID NO: 2813999 - RNA, 15 nt, Human
uacaaaaauaaauuu

SEQ ID NO: 2814000 - RNA, 17 nt, Human
uacaaaaauaaauuuau

SEQ ID NO: 2814001 - RNA, 22 nt, Human
uacaaaaauaaauuuauaugaa

SEQ ID NO: 2814002 - RNA, 19 nt, Human
uacaaaauaaacaaauaac

SEQ ID NO: 2814003 - RNA, 13 nt, Human
uacaaaauaaaaa

SEQ ID NO: 2814004 - RNA, 15 nt, Human
uacaaaauaaaaaca

SEQ ID NO: 2814005 - RNA, 12 nt, Human
uacaaaaauaaa

SEQ ID NO: 2814006 - RNA, 23 nt, Human
uacaaaagaggagcacuuccaaa

SEQ ID NO: 2814007 - RNA, 22 nt, Human
uacaaaaauuugccaggcgugg

SEQ ID NO: 2814008 - RNA, 16 nt, Human
uacaaaaaucagccag

SEQ ID NO: 2814009 - RNA, 17 nt, Human
uacaaaaaucagccaga

SEQ ID NO: 2814010 - RNA, 18 nt, Human
uacaaaaaucagccagac

SEQ ID NO: 2814011 - RNA, 19 nt, Human
uacaaaaaucagccagaca

SEQ ID NO: 2814012 - RNA, 17 nt, Human
uacaaaacgcgcagaug

SEQ ID NO: 2814013 - RNA, 19 nt, Human
uacaaaacgcgcagaugug

SEQ ID NO: 2814014 - RNA, 20 nt, Human
uacaaaacgcgcagaugugc

SEQ ID NO: 2814015 - RNA, 23 nt, Human
uaauuucaguccuguaguuuuau

SEQ ID NO: 2814016 - RNA, 20 nt, Human
uaauuucaaaaugcuuuuua

SEQ ID NO: 2814017 - RNA, 16 nt, Human
uaauuucaaaaugcuu

SEQ ID NO: 2814018 - RNA, 15 nt, Human
uaauuucaaaaugcu

SEQ ID NO: 2814019 - RNA, 18 nt, Human
uaauuuauuauugaaauu

SEQ ID NO: 2814020 - RNA, 20 nt, Human
uaauuuauuauugaaauugu

SEQ ID NO: 2814021 - RNA, 17 nt, Human
uaauuuauuauugaaau

SEQ ID NO: 2814022 - RNA, 14 nt, Human
uaauuuauuauuga

SEQ ID NO: 2814023 - RNA, 20 nt, Human
uaauuuaugaguuuuugaua

SEQ ID NO: 2814024 - RNA, 22 nt, Human
uaauuuaugcacuuauaaggug

SEQ ID NO: 2814025 - RNA, 14 nt, Human
uaauuuaugugaaa

SEQ ID NO: 2814026 - RNA, 13 nt, Human
aaucuuuguuaag

SEQ ID NO: 2814027 - RNA, 12 nt, Human
uaauuucaaaau

SEQ ID NO: 2814028 - RNA, 20 nt, Human
uaauuucaaaaauauaacuu

SEQ ID NO: 2814029 - RNA, 21 nt, Human
uaauuucaaaaauauaacuua

SEQ ID NO: 2814030 - RNA, 17 nt, Human
uaauuucaaaaauauaa

SEQ ID NO: 2814031 - RNA, 18 nt, Human
uaauuucaaaaauauaac

SEQ ID NO: 2814032 - RNA, 19 nt, Human
uaauuucaaaaauauaacu

SEQ ID NO: 2814033 - RNA, 15 nt, Human
uaauuccaauaugau

SEQ ID NO: 2814034 - RNA, 16 nt, Human
uaauuccaauaugaug

SEQ ID NO: 2814035 - RNA, 18 nt, Human
uaauuccaauaugaugac

SEQ ID NO: 2814036 - RNA, 13 nt, Human
uaauucaagaaaa

SEQ ID NO: 2814037 - RNA, 18 nt, Human
aaugagcuauuaaaacuc

SEQ ID NO: 2814038 - RNA, 19 nt, Human
aaugagcuauuaaaacuca

SEQ ID NO: 2814039 - RNA, 23 nt, Human
aaugagcuauuaaaacucagccu

SEQ ID NO: 2814040 - RNA, 14 nt, Human
aaugaggacauguu

SEQ ID NO: 2814041 - RNA, 16 nt, Human
aaugaggacauguuuu

SEQ ID NO: 2814042 - RNA, 15 nt, Human
uaauuuaaaaaauaa

SEQ ID NO: 2814043 - RNA, 14 nt, Human
uaauuuaugaguuu

SEQ ID NO: 2814044 - RNA, 14 nt, Human
uaauuuaucuaaau

SEQ ID NO: 2814045 - RNA, 15 nt, Human
uaauuuaucuaaauu

SEQ ID NO: 2814046 - RNA, 18 nt, Human
uaauuuaucuaaauuaaa

SEQ ID NO: 2814047 - RNA, 20 nt, Human
uaauuuaucuaaauuaaagc

SEQ ID NO: 2814048 - RNA, 21 nt, Human
uaauuuaucuaaauuaaagcc

SEQ ID NO: 2814049 - RNA, 16 nt, Human
uaauuguuuugcacuu

SEQ ID NO: 2814050 - RNA, 18 nt, Human
uaauuguuuugcacuuuu

SEQ ID NO: 2814051 - RNA, 17 nt, Human
uaauuccacaccuuuua

SEQ ID NO: 2814052 - RNA, 15 nt, Human
uaauuguuguuucuu

SEQ ID NO: 2814053 - RNA, 16 nt, Human
uaauuguuguuucuuu

SEQ ID NO: 2814054 - RNA, 19 nt, Human
uaauuguuguuucuuucua

SEQ ID NO: 2814055 - RNA, 22 nt, Human
uaauuguuguuucuuucuagug

SEQ ID NO: 2814056 - RNA, 17 nt, Human
uaauuccacagcugcuc

SEQ ID NO: 2814057 - RNA, 14 nt, Human
uaauuccacagcug

SEQ ID NO: 2814058 - RNA, 13 nt, Human
uaauuccacagcu

SEQ ID NO: 2814059 - RNA, 15 nt, Human
uaauuccacaccuuu

SEQ ID NO: 2814060 - RNA, 19 nt, Human
uaauuccaauaugaugacu

SEQ ID NO: 2814061 - RNA, 20 nt, Human
uaauuccaauaugaugacuc

SEQ ID NO: 2814062 - RNA, 23 nt, Human
aaugccaacuuguccuuuuguac

SEQ ID NO: 2814063 - RNA, 13 nt, Human
aaugccaagauaa

SEQ ID NO: 2814064 - RNA, 17 nt, Human
aaugccaagauaauuca

SEQ ID NO: 2814065 - RNA, 14 nt, Human
aaugcauaaaugca

SEQ ID NO: 2814066 - RNA, 16 nt, Human
aaugcauaaaauguua

SEQ ID NO: 2814067 - RNA, 17 nt, Human
aaugcauacagaaauau

SEQ ID NO: 2814068 - RNA, 22 nt, Human
aaugcauuauaggaucauuugu

SEQ ID NO: 2814069 - RNA, 23 nt, Human
aaugcauuauaggaucauuuguu

SEQ ID NO: 2814070 - RNA, 14 nt, Human
aaugcauugauauu

SEQ ID NO: 2814071 - RNA, 16 nt, Human
aaugcauugauauugu

SEQ ID NO: 2814072 - RNA, 19 nt, Human
aaugcauugauauugugaa

SEQ ID NO: 2814073 - RNA, 20 nt, Human
aaugcauugauauugugaac

SEQ ID NO: 2814074 - RNA, 21 nt, Human
aaugcauugauauugugaaca

SEQ ID NO: 2814075 - RNA, 22 nt, Human
aaugcauugauauugugaacau

SEQ ID NO: 2814076 - RNA, 19 nt, Human
uacaaggggccauuuggca

SEQ ID NO: 2814077 - RNA, 14 nt, Human
uacaaggacagccc

SEQ ID NO: 2814078 - RNA, 17 nt, Human
uacaaggaagguggugg

SEQ ID NO: 2814079 - RNA, 20 nt, Human
uacaaaauaaacaaauaaca

SEQ ID NO: 2814080 - RNA, 13 nt, Human
uacaaaaggcucc

SEQ ID NO: 2814081 - RNA, 20 nt, Human
uacaaguauacuuauauuuc

SEQ ID NO: 2814082 - RNA, 13 nt, Human
aaugcauaaaaug

SEQ ID NO: 2814083 - RNA, 15 nt, Human
aaugcaguauauuuc

SEQ ID NO: 2814084 - RNA, 12 nt, Human
aaugcuguguua

SEQ ID NO: 2814085 - RNA, 20 nt, Human
aaugcuuuuuauuucugcau

SEQ ID NO: 2814086 - RNA, 19 nt, Human
aaugcuuuuuauuucugca

SEQ ID NO: 2814087 - RNA, 11 nt, Human
aaugcuuuuug

SEQ ID NO: 2814088 - RNA, 14 nt, Human
aaugcuuuuugaau

SEQ ID NO: 2814089 - RNA, 17 nt, Human
aaugcuuuuugaauguu

SEQ ID NO: 2814090 - RNA, 18 nt, Human
aauggaaaaaaaaaaaag

SEQ ID NO: 2814091 - RNA, 20 nt, Human
aauggaaaaaaaaaaaagag

SEQ ID NO: 2814092 - RNA, 21 nt, Human
aauggaaaaaaaaaaaagagg

SEQ ID NO: 2814093 - RNA, 22 nt, Human
aauggaaaaaaaaaaaagagga

SEQ ID NO: 2814094 - RNA, 22 nt, Human
aauggaauaaaaggcuugaagc

SEQ ID NO: 2814095 - RNA, 12 nt, Human
aauggacacuuu

SEQ ID NO: 2814096 - RNA, 22 nt, Human
aauggacauccuguauaagcac

SEQ ID NO: 2814097 - RNA, 14 nt, Human
aauggacauggugg

SEQ ID NO: 2814098 - RNA, 18 nt, Human
aauggaauaaaaggcuug

SEQ ID NO: 2814099 - RNA, 17 nt, Human
aauggaaaccacaacuu

SEQ ID NO: 2814100 - RNA, 19 nt, Human
aauggaaaccacaacuuuu

SEQ ID NO: 2814101 - RNA, 14 nt, Human
aauggaaaccucac

SEQ ID NO: 2814102 - RNA, 14 nt, Human
aauggaagagaaau

SEQ ID NO: 2814103 - RNA, 15 nt, Human
aauggaagagaaauc

SEQ ID NO: 2814104 - RNA, 16 nt, Human
aauggaagagaaaucu

SEQ ID NO: 2814105 - RNA, 18 nt, Human
aauggaagagaaaucuca

SEQ ID NO: 2814106 - RNA, 16 nt, Human
uacacuccagccugag

SEQ ID NO: 2814107 - RNA, 15 nt, Human
uacacuccagccuga

SEQ ID NO: 2814108 - RNA, 18 nt, Human
uacacuccagccugagca

SEQ ID NO: 2814109 - RNA, 17 nt, Human
uacacuccagccugagc

SEQ ID NO: 2814110 - RNA, 11 nt, Human
uacagaggaaa

SEQ ID NO: 2814111 - RNA, 15 nt, Human
uacagaggaaaucug

SEQ ID NO: 2814112 - RNA, 17 nt, Human
uacagaggaaaucugua

SEQ ID NO: 2814113 - RNA, 18 nt, Human
uacagaggaaaucuguaa

SEQ ID NO: 2814114 - RNA, 18 nt, Human
uacagaggccaugggccu

SEQ ID NO: 2814115 - RNA, 15 nt, Human
uacaggcauagaguu

SEQ ID NO: 2814116 - RNA, 17 nt, Human
uacaggcuccugccacc

SEQ ID NO: 2814117 - RNA, 16 nt, Human
uacagggaaugccuga

SEQ ID NO: 2814118 - RNA, 20 nt, Human
uacagggaaugccugagugc

SEQ ID NO: 2814119 - RNA, 16 nt, Human
uacaguaacuuuaugu

SEQ ID NO: 2814120 - RNA, 13 nt, Human
uacaguaacuuua

SEQ ID NO: 2814121 - RNA, 17 nt, Human
uacaguaacuuuaugug

SEQ ID NO: 2814122 - RNA, 18 nt, Human
uacaguaacuuuaugugu

SEQ ID NO: 2814123 - RNA, 20 nt, Human
uacaguaacuuuauguguaa

SEQ ID NO: 2814124 - RNA, 23 nt, Human
uacaguaacuuuauguguaaaua

SEQ ID NO: 2814125 - RNA, 22 nt, Human
uacaggcgugagccaccgugcc

SEQ ID NO: 2814126 - RNA, 14 nt, Human
uacaggcccugcuc

SEQ ID NO: 2814127 - RNA, 15 nt, Human
uacaggcccugcucc

SEQ ID NO: 2814128 - RNA, 16 nt, Human
uacaggcccugcuccu

SEQ ID NO: 2814129 - RNA, 19 nt, Human
uacaggcccugcuccugca

SEQ ID NO: 2814130 - RNA, 15 nt, Human
uacaggcuccugcca

SEQ ID NO: 2814131 - RNA, 14 nt, Human
uacaggcuccugcc

SEQ ID NO: 2814132 - RNA, 13 nt, Human
aauggagaggaac

SEQ ID NO: 2814133 - RNA, 21 nt, Human
aauggacuuauuucuucaaau

SEQ ID NO: 2814134 - RNA, 20 nt, Human
aauggagauucaguuuucau

SEQ ID NO: 2814135 - RNA, 13 nt, Human
uacaccacacaca

SEQ ID NO: 2814136 - RNA, 14 nt, Human
uacaccacacacaa

SEQ ID NO: 2814137 - RNA, 16 nt, Human
uacaccacacacaaca

SEQ ID NO: 2814138 - RNA, 17 nt, Human
uacaccacacacaacag

SEQ ID NO: 2814139 - RNA, 18 nt, Human
uacaccacacacaacagc

SEQ ID NO: 2814140 - RNA, 19 nt, Human
uacaccacacacaacagcc

SEQ ID NO: 2814141 - RNA, 21 nt, Human
uacaccacacacaacagccaa

SEQ ID NO: 2814142 - RNA, 22 nt, Human
uacaccacacacaacagccaac

SEQ ID NO: 2814143 - RNA, 23 nt, Human
uacaccacacacaacagccaaca

SEQ ID NO: 2814144 - RNA, 17 nt, Human
aauggacuuuggaagca

SEQ ID NO: 2814145 - RNA, 16 nt, Human
uacacauuuuuaaauu

SEQ ID NO: 2814146 - RNA, 17 nt, Human
uacacauuuuuaaauug

SEQ ID NO: 2814147 - RNA, 19 nt, Human
uacacauuuuuaaauuguu

SEQ ID NO: 2814148 - RNA, 20 nt, Human
uacacauuuuuaaauuguua

SEQ ID NO: 2814149 - RNA, 23 nt, Human
uacacauuuuuaaauuguuagcu

SEQ ID NO: 2814150 - RNA, 16 nt, Human
uacaccauauacuguu

SEQ ID NO: 2814151 - RNA, 17 nt, Human
aaugugaugauguaauu

SEQ ID NO: 2814152 - RNA, 18 nt, Human
aaugugaugauguaauug

SEQ ID NO: 2814153 - RNA, 20 nt, Human
aaugugaugauguaauugac

SEQ ID NO: 2814154 - RNA, 14 nt, Human
aaugugaucuaugu

SEQ ID NO: 2814155 - RNA, 19 nt, Human
aaugugaucuauguuucau

SEQ ID NO: 2814156 - RNA, 22 nt, Human
aaugugaucuauguuucaucuu

SEQ ID NO: 2814157 - RNA, 21 nt, Human
aauguggcuugagaaauaugg

SEQ ID NO: 2814158 - RNA, 16 nt, Human
aauguggcuugagaaa

SEQ ID NO: 2814159 - RNA, 12 nt, Human
aauguggcuuga

SEQ ID NO: 2814160 - RNA, 14 nt, Human
aauguggcuccugg

SEQ ID NO: 2814161 - RNA, 13 nt, Human
aaugugauguucu

SEQ ID NO: 2814162 - RNA, 21 nt, Human
aaugugaguuuggucuggacu

SEQ ID NO: 2814163 - RNA, 23 nt, Human
aaugugaguuuggucuggacuga

SEQ ID NO: 2814164 - RNA, 21 nt, Human
aauguauuuauuuaaaagauu

SEQ ID NO: 2814165 - RNA, 13 nt, Human
aauguauuuguuc

SEQ ID NO: 2814166 - RNA, 14 nt, Human
aauguauuuguuca

SEQ ID NO: 2814167 - RNA, 15 nt, Human
aauguauuuguucau

SEQ ID NO: 2814168 - RNA, 17 nt, Human
aauguauuuguucaugu

SEQ ID NO: 2814169 - RNA, 18 nt, Human
aauguauuuguucauguu

SEQ ID NO: 2814170 - RNA, 19 nt, Human
aauguauuuguucauguuu

SEQ ID NO: 2814171 - RNA, 20 nt, Human
aauguauuuguucauguuug

SEQ ID NO: 2814172 - RNA, 21 nt, Human
aauguauuuguucauguuugg

SEQ ID NO: 2814173 - RNA, 15 nt, Human
aauguacugagauuu

SEQ ID NO: 2814174 - RNA, 19 nt, Human
aauguauguaauguguggu

SEQ ID NO: 2814175 - RNA, 19 nt, Human
aauguauugaacuuggaaa

SEQ ID NO: 2814176 - RNA, 18 nt, Human
aauguauugaacuuggaa

SEQ ID NO: 2814177 - RNA, 13 nt, Human
uacagagcugugg

SEQ ID NO: 2814178 - RNA, 21 nt, Human
uacauagugcauuguuucugu

SEQ ID NO: 2814179 - RNA, 22 nt, Human
uacauagugcauuguuucugug

SEQ ID NO: 2814180 - RNA, 21 nt, Human
uacauagauuuauuuuucagu

SEQ ID NO: 2814181 - RNA, 22 nt, Human
uacauagauuuauuuuucaguu

SEQ ID NO: 2814182 - RNA, 17 nt, Human
uacauauuugagacuag

SEQ ID NO: 2814183 - RNA, 15 nt, Human
uacauauucuuuaaa

SEQ ID NO: 2814184 - RNA, 15 nt, Human
aauguaccuucuuuc

SEQ ID NO: 2814185 - RNA, 21 nt, Human
aauguaccuucuuucacucug

SEQ ID NO: 2814186 - RNA, 12 nt, Human
aauguacugaga

SEQ ID NO: 2814187 - RNA, 16 nt, Human
uacauauuuguggaau

SEQ ID NO: 2814188 - RNA, 17 nt, Human
uacauauuuguggaaua

SEQ ID NO: 2814189 - RNA, 17 nt, Human
uacauauuuauuuucuu

SEQ ID NO: 2814190 - RNA, 12 nt, Human
uacauaguguaa

SEQ ID NO: 2814191 - RNA, 17 nt, Human
uacauauguagacuaua

SEQ ID NO: 2814192 - RNA, 19 nt, Human
uacauauguagacuauaua

SEQ ID NO: 2814193 - RNA, 20 nt, Human
uacauauguagacuauauac

SEQ ID NO: 2814194 - RNA, 21 nt, Human
uacauauguagacuauauaca

SEQ ID NO: 2814195 - RNA, 22 nt, Human
uacauauguagacuauauacau

SEQ ID NO: 2814196 - RNA, 23 nt, Human
uacauauguagacuauauacaug

SEQ ID NO: 2814197 - RNA, 14 nt, Human
uacauauucuuuaa

SEQ ID NO: 2814198 - RNA, 15 nt, Human
uacauaguuuuaaac

SEQ ID NO: 2814199 - RNA, 19 nt, Human
uacauaguuuuaaacucau

SEQ ID NO: 2814200 - RNA, 21 nt, Human
uacauaguuuuaaacucauuu

SEQ ID NO: 2814201 - RNA, 20 nt, Human
aauacaaaaauuagccgggc

SEQ ID NO: 2814202 - RNA, 14 nt, Human
aauacaaaaauuug

SEQ ID NO: 2814203 - RNA, 17 nt, Human
aauaauuuuuauauuua

SEQ ID NO: 2814204 - RNA, 19 nt, Human
aauaauuuuuauauuuaau

SEQ ID NO: 2814205 - RNA, 22 nt, Human
aauaauuuuuauauuuaauuau

SEQ ID NO: 2814206 - RNA, 21 nt, Human
aauacaaaaaauuagccgggc

SEQ ID NO: 2814207 - RNA, 18 nt, Human
aauacaaaaaucagccag

SEQ ID NO: 2814208 - RNA, 21 nt, Human
aauacaaaaaucagccagaca

SEQ ID NO: 2814209 - RNA, 23 nt, Human
aauacaaaaaucagccagacaug

SEQ ID NO: 2814210 - RNA, 21 nt, Human
uaaauaaacuuuuuuucaaug

SEQ ID NO: 2814211 - RNA, 22 nt, Human
uaaauaaacuuuuuuucaaugu

SEQ ID NO: 2814212 - RNA, 23 nt, Human
uaaauaaacuuuuuuucaaugug

SEQ ID NO: 2814213 - RNA, 14 nt, Human
aauacaacaaagga

SEQ ID NO: 2814214 - RNA, 16 nt, Human
aauacaaaaggcucca

SEQ ID NO: 2814215 - RNA, 22 nt, Human
aauacaacauguagcugaguuu

SEQ ID NO: 2814216 - RNA, 18 nt, Human
uaaauaagauucuaacgg

SEQ ID NO: 2814217 - RNA, 16 nt, Human
uaaauaaucuuacucu

SEQ ID NO: 2814218 - RNA, 17 nt, Human
uaaauaaugcuucagau

SEQ ID NO: 2814219 - RNA, 18 nt, Human
uaaauaaugcuucagaua

SEQ ID NO: 2814220 - RNA, 16 nt, Human
uaaauaaaucauuaau

SEQ ID NO: 2814221 - RNA, 13 nt, Human
uaaauaagauucu

SEQ ID NO: 2814222 - RNA, 14 nt, Human
uaaauaagauucua

SEQ ID NO: 2814223 - RNA, 15 nt, Human
uaaauaagauucuaa

SEQ ID NO: 2814224 - RNA, 21 nt, Human
uaaauacauacggucagguuu

SEQ ID NO: 2814225 - RNA, 22 nt, Human
uaaauaccucaaccuaugguau

SEQ ID NO: 2814226 - RNA, 17 nt, Human
uaaauaccagacacgua

SEQ ID NO: 2814227 - RNA, 18 nt, Human
uaaauaccagacugcagg

SEQ ID NO: 2814228 - RNA, 12 nt, Human
uaaauaccagga

SEQ ID NO: 2814229 - RNA, 14 nt, Human
uaaauaccaggauu

SEQ ID NO: 2814230 - RNA, 12 nt, Human
uaaauaccauug

SEQ ID NO: 2814231 - RNA, 17 nt, Human
uaaauaccauugacaca

SEQ ID NO: 2814232 - RNA, 21 nt, Human
aauaauuuuaagaaaucaaag

SEQ ID NO: 2814233 - RNA, 16 nt, Human
aauaauuucuaauguu

SEQ ID NO: 2814234 - RNA, 15 nt, Human
aauaauuucucuaca

SEQ ID NO: 2814235 - RNA, 12 nt, Human
aauaauuuuaaa

SEQ ID NO: 2814236 - RNA, 13 nt, Human
aauaauuuuaaaa

SEQ ID NO: 2814237 - RNA, 14 nt, Human
aauaauuuuaaaaa

SEQ ID NO: 2814238 - RNA, 17 nt, Human
aauaauuuuaaaaaugg

SEQ ID NO: 2814239 - RNA, 16 nt, Human
aauaauuuuaaacaaa

SEQ ID NO: 2814240 - RNA, 13 nt, Human
aauaauuucuaau

SEQ ID NO: 2814241 - RNA, 15 nt, Human
aauaauuucuaaugu

SEQ ID NO: 2814242 - RNA, 13 nt, Human
aauaauuuaacua

SEQ ID NO: 2814243 - RNA, 18 nt, Human
aauaauuuaacuacccuu

SEQ ID NO: 2814244 - RNA, 23 nt, Human
aauaauuuaacuacccuuaauua

SEQ ID NO: 2814245 - RNA, 16 nt, Human
aauaacugugaaguuu

SEQ ID NO: 2814246 - RNA, 14 nt, Human
aauaacugugaagu

SEQ ID NO: 2814247 - RNA, 20 nt, Human
aauaacugugaaguuuacau

SEQ ID NO: 2814248 - RNA, 13 nt, Human
aauaacuucaguc

SEQ ID NO: 2814249 - RNA, 14 nt, Human
aauaacuucagucc

SEQ ID NO: 2814250 - RNA, 15 nt, Human
aauaacuucaguccu

SEQ ID NO: 2814251 - RNA, 21 nt, Human
aauaacuucaguccugcucca

SEQ ID NO: 2814252 - RNA, 24 nt, Human
aauaacuucaguccugcuccagaa

SEQ ID NO: 2814253 - RNA, 15 nt, Human
aauaacuucugaccu

SEQ ID NO: 2814254 - RNA, 13 nt, Human
aauaagaauagaa

SEQ ID NO: 2814255 - RNA, 15 nt, Human
aauaagaaaguuuca

SEQ ID NO: 2814256 - RNA, 15 nt, Human
aauaagaagcaaaua

SEQ ID NO: 2814257 - RNA, 12 nt, Human
aauaagaaggua

SEQ ID NO: 2814258 - RNA, 14 nt, Human
aauaagaaugauuu

SEQ ID NO: 2814259 - RNA, 15 nt, Human
aauaagaauggaaaa

SEQ ID NO: 2814260 - RNA, 18 nt, Human
aauaagaauagaaauaaa

SEQ ID NO: 2814261 - RNA, 18 nt, Human
aauaauuauuuauuuaau

SEQ ID NO: 2814262 - RNA, 15 nt, Human
aauaauucauauucu

SEQ ID NO: 2814263 - RNA, 17 nt, Human
aauaauucauauucuuc

SEQ ID NO: 2814264 - RNA, 19 nt, Human
aauaauucauauucuucau

SEQ ID NO: 2814265 - RNA, 14 nt, Human
aauaauucuaaauc

SEQ ID NO: 2814266 - RNA, 20 nt, Human
aauaauuaugaguuugcuua

SEQ ID NO: 2814267 - RNA, 15 nt, Human
aauaagagaaagaaa

SEQ ID NO: 2814268 - RNA, 17 nt, Human
aauaagacauaacguuu

SEQ ID NO: 2814269 - RNA, 14 nt, Human
aauaagagaaagaa

SEQ ID NO: 2814270 - RNA, 18 nt, Human
uaaauagaguauaugcac

SEQ ID NO: 2814271 - RNA, 18 nt, Human
uaaauagaguuugcuauu

SEQ ID NO: 2814272 - RNA, 11 nt, Human
uaaauagagca

SEQ ID NO: 2814273 - RNA, 12 nt, Human
uaaauagagcaa

SEQ ID NO: 2814274 - RNA, 19 nt, Human
uaaauagagcaauuacaag

SEQ ID NO: 2814275 - RNA, 16 nt, Human
uaaauacuguguggaa

SEQ ID NO: 2814276 - RNA, 17 nt, Human
uaaauacuguguggaac

SEQ ID NO: 2814277 - RNA, 21 nt, Human
uaaauacuguguggaacuuuu

SEQ ID NO: 2814278 - RNA, 16 nt, Human
uaaaucuauuuauuaa

SEQ ID NO: 2814279 - RNA, 20 nt, Human
uaaaucugcuggaguuucau

SEQ ID NO: 2814280 - RNA, 18 nt, Human
uaaaucuauuuauuaaua

SEQ ID NO: 2814281 - RNA, 19 nt, Human
uaaaucuauuuauuaauau

SEQ ID NO: 2814282 - RNA, 20 nt, Human
uaaaucuauuuauuaauauu

SEQ ID NO: 2814283 - RNA, 14 nt, Human
uaaaucucuaauau

SEQ ID NO: 2814284 - RNA, 15 nt, Human
uaaaucucuaauaug

SEQ ID NO: 2814285 - RNA, 18 nt, Human
uaaaucucuaauauggca

SEQ ID NO: 2814286 - RNA, 19 nt, Human
uaaaucuuaaaaaguuguu

SEQ ID NO: 2814287 - RNA, 21 nt, Human
uaaaucuguucugggcucuuu

SEQ ID NO: 2814288 - RNA, 14 nt, Human
uaaaucuuuuacaa

SEQ ID NO: 2814289 - RNA, 16 nt, Human
uaaaugcauaaaugca

SEQ ID NO: 2814290 - RNA, 14 nt, Human
uaaaugcauuauag

SEQ ID NO: 2814291 - RNA, 11 nt, Human
uaaaugccaca

SEQ ID NO: 2814292 - RNA, 12 nt, Human
uaaaugccacac

SEQ ID NO: 2814293 - RNA, 15 nt, Human
uaaaugccacacacc

SEQ ID NO: 2814294 - RNA, 12 nt, Human
uaaaugcagccc

SEQ ID NO: 2814295 - RNA, 13 nt, Human
uaaaugcagccca

SEQ ID NO: 2814296 - RNA, 14 nt, Human
uaaaugcagcccau

SEQ ID NO: 2814297 - RNA, 19 nt, Human
uaaaugcagcccauuucuc

SEQ ID NO: 2814298 - RNA, 21 nt, Human
uaaaugcagcccauuucucca

SEQ ID NO: 2814299 - RNA, 23 nt, Human
uaaaugcagcccauuucuccaga

SEQ ID NO: 2814300 - RNA, 23 nt, Human
uaaauguuaugacuauguaaacu

SEQ ID NO: 2814301 - RNA, 22 nt, Human
uaaauguuaugacuauguaaac

SEQ ID NO: 2814302 - RNA, 17 nt, Human
uaaauuuugaguucuac

SEQ ID NO: 2814303 - RNA, 15 nt, Human
uaaauguuauuucug

SEQ ID NO: 2814304 - RNA, 16 nt, Human
uaaauguuauuucugc

SEQ ID NO: 2814305 - RNA, 21 nt, Human
uaaauguuauuucugcaaaca

SEQ ID NO: 2814306 - RNA, 13 nt, Human
uaaauguucuaug

SEQ ID NO: 2814307 - RNA, 22 nt, Human
uaaauguucuaugguuaugaaa

SEQ ID NO: 2814308 - RNA, 18 nt, Human
uaaauuaaagccuuuagu

SEQ ID NO: 2814309 - RNA, 19 nt, Human
uaaauuaaagccuuuagua

SEQ ID NO: 2814310 - RNA, 20 nt, Human
uaaauuaaagccuuuaguau

SEQ ID NO: 2814311 - RNA, 16 nt, Human
aauaaauugcuccuug

SEQ ID NO: 2814312 - RNA, 20 nt, Human
aauaaauugcuccuugacau

SEQ ID NO: 2814313 - RNA, 12 nt, Human
aauaacacacau

SEQ ID NO: 2814314 - RNA, 15 nt, Human
aauaacacacagcua

SEQ ID NO: 2814315 - RNA, 13 nt, Human
aauaacauuaccu

SEQ ID NO: 2814316 - RNA, 14 nt, Human
aauaacauuaccuu

SEQ ID NO: 2814317 - RNA, 15 nt, Human
aauaacauuaccuua

SEQ ID NO: 2814318 - RNA, 20 nt, Human
aauaacauuaccuuacugug

SEQ ID NO: 2814319 - RNA, 22 nt, Human
aauaaauuguuuggcuuccucc

SEQ ID NO: 2814320 - RNA, 15 nt, Human
aauaaauuuauauga

SEQ ID NO: 2814321 - RNA, 18 nt, Human
aauaaauuuauaugaaaa

SEQ ID NO: 2814322 - RNA, 13 nt, Human
aauaacaaugugc

SEQ ID NO: 2814323 - RNA, 13 nt, Human
aauaacaauguua

SEQ ID NO: 2814324 - RNA, 19 nt, Human
aauaacaaugugcucucgg

SEQ ID NO: 2814325 - RNA, 14 nt, Human
aauaacaauguuaa

SEQ ID NO: 2814326 - RNA, 15 nt, Human
aauaacaauguuaag

SEQ ID NO: 2814327 - RNA, 20 nt, Human
aauaacaauguuaaggaaac

SEQ ID NO: 2814328 - RNA, 24 nt, Human
aauaacaauguuaaggaaacucuu

SEQ ID NO: 2814329 - RNA, 13 nt, Human
aauaacugugaag

SEQ ID NO: 2814330 - RNA, 19 nt, Human
aauaacucuguggcauuau

SEQ ID NO: 2814331 - RNA, 19 nt, Human
aauaaccuuccauacauuu

SEQ ID NO: 2814332 - RNA, 21 nt, Human
aauaaaucauuaauacucuuc

SEQ ID NO: 2814333 - RNA, 15 nt, Human
aauaaauggaaauca

SEQ ID NO: 2814334 - RNA, 11 nt, Human
aauaaaucuuu

SEQ ID NO: 2814335 - RNA, 15 nt, Human
aauaaaucuuuggaa

SEQ ID NO: 2814336 - RNA, 16 nt, Human
aauaaaucuuuggaaa

SEQ ID NO: 2814337 - RNA, 22 nt, Human
aauaaaaccuuucaaauuucac

SEQ ID NO: 2814338 - RNA, 21 nt, Human
aauaaaaccuuucaaauuuca

SEQ ID NO: 2814339 - RNA, 16 nt, Human
aauaaaaccuuucaaa

SEQ ID NO: 2814340 - RNA, 15 nt, Human
aauaaaaccuuucaa

SEQ ID NO: 2814341 - RNA, 23 nt, Human
aauaaaaccuuucaaauuucaca

SEQ ID NO: 2814342 - RNA, 13 nt, Human
aauaaaaagugac

SEQ ID NO: 2814343 - RNA, 19 nt, Human
aauaaaaagugacacagca

SEQ ID NO: 2814344 - RNA, 20 nt, Human
aauaaaaagugacacagcag

SEQ ID NO: 2814345 - RNA, 13 nt, Human
aauaaaacaaagg

SEQ ID NO: 2814346 - RNA, 14 nt, Human
aauaaaacaaaggg

SEQ ID NO: 2814347 - RNA, 21 nt, Human
aauaaaacagcugucucuaac

SEQ ID NO: 2814348 - RNA, 14 nt, Human
aauaaaacauuaug

SEQ ID NO: 2814349 - RNA, 14 nt, Human
aauaaaaccuuuca

SEQ ID NO: 2814350 - RNA, 13 nt, Human
aauaaaaccuuuc

SEQ ID NO: 2814351 - RNA, 12 nt, Human
aauaaaaccuuu

SEQ ID NO: 2814352 - RNA, 13 nt, Human
aauaaaaccagcu

SEQ ID NO: 2814353 - RNA, 14 nt, Human
aaguuuuuguauua

SEQ ID NO: 2814354 - RNA, 12 nt, Human
uaaaguauuuuu

SEQ ID NO: 2814355 - RNA, 21 nt, Human
uaaaguauuuuuauaaauaua

SEQ ID NO: 2814356 - RNA, 23 nt, Human
uaaaguauuuuuauaaauauaag

SEQ ID NO: 2814357 - RNA, 21 nt, Human
uaaaguauguaaaguauguaa

SEQ ID NO: 2814358 - RNA, 22 nt, Human
uaaaguauguaaaguauguaaa

SEQ ID NO: 2814359 - RNA, 13 nt, Human
uaaaguauguaaa

SEQ ID NO: 2814360 - RNA, 15 nt, Human
uaaaguauguaaaca

SEQ ID NO: 2814361 - RNA, 16 nt, Human
uaaaguauguaaacag

SEQ ID NO: 2814362 - RNA, 22 nt, Human
uaaaguauguaaacaggagaca

SEQ ID NO: 2814363 - RNA, 15 nt, Human
uaaaguacuugagug

SEQ ID NO: 2814364 - RNA, 21 nt, Human
uaaaguacuugaguguaaugu

SEQ ID NO: 2814365 - RNA, 13 nt, Human
uaaaguagaagag

SEQ ID NO: 2814366 - RNA, 18 nt, Human
uaaaguagaagaggguuu

SEQ ID NO: 2814367 - RNA, 18 nt, Human
uaaaguauagagagaagu

SEQ ID NO: 2814368 - RNA, 19 nt, Human
uaaaguauagagagaaguu

SEQ ID NO: 2814369 - RNA, 20 nt, Human
uaaaguauagagagaaguuc

SEQ ID NO: 2814370 - RNA, 19 nt, Human
uaaaguauauauagaaucu

SEQ ID NO: 2814371 - RNA, 14 nt, Human
uaaagguguauuua

SEQ ID NO: 2814372 - RNA, 13 nt, Human
uaaagguggauuu

SEQ ID NO: 2814373 - RNA, 19 nt, Human
uaaagguggccacaaauuc

SEQ ID NO: 2814374 - RNA, 14 nt, Human
uaaagggccugccu

SEQ ID NO: 2814375 - RNA, 15 nt, Human
uaaagggccugccug

SEQ ID NO: 2814376 - RNA, 16 nt, Human
uaaagggccugccugg

SEQ ID NO: 2814377 - RNA, 18 nt, Human
uaaaggggucugaaauuu

SEQ ID NO: 2814378 - RNA, 19 nt, Human
guuuugaagcuacugugug

SEQ ID NO: 2814379 - RNA, 19 nt, Human
uaaagguccacaggucuag

SEQ ID NO: 2814380 - RNA, 20 nt, Human
uaaagguccacaggucuaga

SEQ ID NO: 2814381 - RNA, 22 nt, Human
guuuucuuaaggugaggccugu

SEQ ID NO: 2814382 - RNA, 21 nt, Human
uaaagguccacaggucuagac

SEQ ID NO: 2814383 - RNA, 22 nt, Human
uaaagguccacaggucuagacu

SEQ ID NO: 2814384 - RNA, 13 nt, Human
guuuugaaaagcu

SEQ ID NO: 2814385 - RNA, 14 nt, Human
guuuugaaaagcua

SEQ ID NO: 2814386 - RNA, 15 nt, Human
guuuugaaaagcuau

SEQ ID NO: 2814387 - RNA, 21 nt, Human
guuuugaaaagcuauuagcca

SEQ ID NO: 2814388 - RNA, 18 nt, Human
guuuugaagcuacugugu

SEQ ID NO: 2814389 - RNA, 14 nt, Human
guuuucuuugaaug

SEQ ID NO: 2814390 - RNA, 20 nt, Human
guuuucuuugcaaaguauug

SEQ ID NO: 2814391 - RNA, 15 nt, Human
guuuucuuguugcuu

SEQ ID NO: 2814392 - RNA, 18 nt, Human
guuuucuuguugcuuugu

SEQ ID NO: 2814393 - RNA, 19 nt, Human
guuuucuuguugcuuuguu

SEQ ID NO: 2814394 - RNA, 20 nt, Human
guuuucuuguugcuuuguug

SEQ ID NO: 2814395 - RNA, 22 nt, Human
guuuucuuguugcuuuguugca

SEQ ID NO: 2814396 - RNA, 22 nt, Human
guuuugaaaaccuaaaagacag

SEQ ID NO: 2814397 - RNA, 19 nt, Human
guuuucuuccuuguaaauu

SEQ ID NO: 2814398 - RNA, 12 nt, Human
guuuucuuccuu

SEQ ID NO: 2814399 - RNA, 15 nt, Human
guuuucuuucuuuaa

SEQ ID NO: 2814400 - RNA, 16 nt, Human
guuuucuuucuuuaaa

SEQ ID NO: 2814401 - RNA, 17 nt, Human
guuuucuuucuuuaaau

SEQ ID NO: 2814402 - RNA, 20 nt, Human
guuuucuuucuuuaaauguu

SEQ ID NO: 2814403 - RNA, 14 nt, Human
aauaucuuguguug

SEQ ID NO: 2814404 - RNA, 18 nt, Human
aauaugaacccuuuguuu

SEQ ID NO: 2814405 - RNA, 20 nt, Human
aauaugaacccuuuguuucu

SEQ ID NO: 2814406 - RNA, 21 nt, Human
aauaugaacccuuuguuucuu

SEQ ID NO: 2814407 - RNA, 16 nt, Human
aauaugaguacaaaug

SEQ ID NO: 2814408 - RNA, 17 nt, Human
aauaugaguacaaaugc

SEQ ID NO: 2814409 - RNA, 19 nt, Human
aauaugaguacaaaugccu

SEQ ID NO: 2814410 - RNA, 21 nt, Human
aauaugaguacaaaugccuua

SEQ ID NO: 2814411 - RNA, 20 nt, Human
aauaugaaucugcucacuuu

SEQ ID NO: 2814412 - RNA, 12 nt, Human
aauaugaaguua

SEQ ID NO: 2814413 - RNA, 19 nt, Human
aauaugaaguuacuuucuu

SEQ ID NO: 2814414 - RNA, 23 nt, Human
aauaugaaguuacuuucuuaaug

SEQ ID NO: 2814415 - RNA, 15 nt, Human
aauaucuauuaauau

SEQ ID NO: 2814416 - RNA, 16 nt, Human
aauaucuauuaauaua

SEQ ID NO: 2814417 - RNA, 13 nt, Human
aauaucugaaaug

SEQ ID NO: 2814418 - RNA, 15 nt, Human
aauaucugaacauuu

SEQ ID NO: 2814419 - RNA, 19 nt, Human
aauaucugaacauuuacua

SEQ ID NO: 2814420 - RNA, 21 nt, Human
aauaucugaacauuuacuaca

SEQ ID NO: 2814421 - RNA, 12 nt, Human
aauaucugaagc

SEQ ID NO: 2814422 - RNA, 18 nt, Human
aauaucuucagcucuuuu

SEQ ID NO: 2814423 - RNA, 19 nt, Human
aauaucuuugugauaauuu

SEQ ID NO: 2814424 - RNA, 20 nt, Human
aauaucuuugugauaauuua

SEQ ID NO: 2814425 - RNA, 21 nt, Human
aauaucuuugugauaauuuaa

SEQ ID NO: 2814426 - RNA, 22 nt, Human
aauaucuuugugauaauuuaag

SEQ ID NO: 2814427 - RNA, 14 nt, Human
aauaucuuuuaugu

SEQ ID NO: 2814428 - RNA, 15 nt, Human
aauaucuuuuauguu

SEQ ID NO: 2814429 - RNA, 18 nt, Human
aauaucuuuuauguuuga

SEQ ID NO: 2814430 - RNA, 19 nt, Human
aauaucuuuuauguuugaa

SEQ ID NO: 2814431 - RNA, 20 nt, Human
aauaucuuuuauguuugaau

SEQ ID NO: 2814432 - RNA, 21 nt, Human
aauaucuuuuauguuugaaua

SEQ ID NO: 2814433 - RNA, 23 nt, Human
aauaucuuuuauguuugaauaug

SEQ ID NO: 2814434 - RNA, 14 nt, Human
aauaucuauuaaua

SEQ ID NO: 2814435 - RNA, 14 nt, Human
aauaucuaauauau

SEQ ID NO: 2814436 - RNA, 12 nt, Human
aauaucuaaagu

SEQ ID NO: 2814437 - RNA, 14 nt, Human
aauaucuaaaguua

SEQ ID NO: 2814438 - RNA, 15 nt, Human
aauaucuaaaguuau

SEQ ID NO: 2814439 - RNA, 16 nt, Human
aauaucuaaaguuaua

SEQ ID NO: 2814440 - RNA, 20 nt, Human
aauaucuaaaguuauauuuc

SEQ ID NO: 2814441 - RNA, 20 nt, Human
aauaucuaauauauaugaau

SEQ ID NO: 2814442 - RNA, 21 nt, Human
aauaucuaauauauaugaaua

SEQ ID NO: 2814443 - RNA, 22 nt, Human
aauaucuaauauauaugaauaa

SEQ ID NO: 2814444 - RNA, 17 nt, Human
uaagaaucagaguagaa

SEQ ID NO: 2814445 - RNA, 18 nt, Human
uaagaaucagaguagaaa

SEQ ID NO: 2814446 - RNA, 19 nt, Human
uaagaaucagaguagaaau

SEQ ID NO: 2814447 - RNA, 20 nt, Human
uaagaaucagaguagaaaua

SEQ ID NO: 2814448 - RNA, 21 nt, Human
uaagaaucagaguagaaauaa

SEQ ID NO: 2814449 - RNA, 12 nt, Human
uaaccugugucu

SEQ ID NO: 2814450 - RNA, 21 nt, Human
uaagacaugcacuaugaggaa

SEQ ID NO: 2814451 - RNA, 19 nt, Human
uaagacauguaacgaaaca

SEQ ID NO: 2814452 - RNA, 22 nt, Human
uaagacauugggucuauuccag

SEQ ID NO: 2814453 - RNA, 17 nt, Human
uaagaccaccaccucag

SEQ ID NO: 2814454 - RNA, 18 nt, Human
uaagaccaccaccucaga

SEQ ID NO: 2814455 - RNA, 14 nt, Human
uaagaccuacuguu

SEQ ID NO: 2814456 - RNA, 16 nt, Human
uaagaccuacuguucu

SEQ ID NO: 2814457 - RNA, 17 nt, Human
uaagaccuacuguucua

SEQ ID NO: 2814458 - RNA, 18 nt, Human
uaagaccuacuguucuaa

SEQ ID NO: 2814459 - RNA, 19 nt, Human
uaagaccuacuguucuaaa

SEQ ID NO: 2814460 - RNA, 20 nt, Human
uaagaccuacuguucuaaag

SEQ ID NO: 2814461 - RNA, 21 nt, Human
uaagaccuacuguucuaaagc

SEQ ID NO: 2814462 - RNA, 22 nt, Human
uaagaccuacuguucuaaagcu

SEQ ID NO: 2814463 - RNA, 17 nt, Human
uaagaaugguugccuua

SEQ ID NO: 2814464 - RNA, 18 nt, Human
uaagaauguugguuuacu

SEQ ID NO: 2814465 - RNA, 19 nt, Human
uaagaauguugguuuacuu

SEQ ID NO: 2814466 - RNA, 21 nt, Human
uaagaauguugguuuacuuuc

SEQ ID NO: 2814467 - RNA, 19 nt, Human
uaagacaugauuuccuuga

SEQ ID NO: 2814468 - RNA, 14 nt, Human
uaagaauggaaaag

SEQ ID NO: 2814469 - RNA, 17 nt, Human
uaagaauggaaaagaga

SEQ ID NO: 2814470 - RNA, 17 nt, Human
uaagacauuuuuggaag

SEQ ID NO: 2814471 - RNA, 21 nt, Human
uaagacaugauuuccuugaau

SEQ ID NO: 2814472 - RNA, 20 nt, Human
uaagacaugauuuccuugaa

SEQ ID NO: 2814473 - RNA, 16 nt, Human
uaacuaaauuugauac

SEQ ID NO: 2814474 - RNA, 17 nt, Human
uaacuaaauuugauacu

SEQ ID NO: 2814475 - RNA, 18 nt, Human
uaacuaaauuugauacuu

SEQ ID NO: 2814476 - RNA, 20 nt, Human
uaacuaaauuugauacuuau

SEQ ID NO: 2814477 - RNA, 21 nt, Human
uaacuaaauuugauacuuaua

SEQ ID NO: 2814478 - RNA, 22 nt, Human
uaacuaaauuugauacuuauau

SEQ ID NO: 2814479 - RNA, 15 nt, Human
uaacuacaaaugauc

SEQ ID NO: 2814480 - RNA, 12 nt, Human
uaacuacauuua

SEQ ID NO: 2814481 - RNA, 13 nt, Human
uaacuacauuuau

SEQ ID NO: 2814482 - RNA, 14 nt, Human
uaacuacauuuaug

SEQ ID NO: 2814483 - RNA, 18 nt, Human
uaacuacccuuaauuacu

SEQ ID NO: 2814484 - RNA, 20 nt, Human
uaacuacccuuaauuacuua

SEQ ID NO: 2814485 - RNA, 22 nt, Human
uaacuacccuuaauuacuuaaa

SEQ ID NO: 2814486 - RNA, 15 nt, Human
uaacuacuaguuuuu

SEQ ID NO: 2814487 - RNA, 22 nt, Human
uaacuacuauauugauuguccu

SEQ ID NO: 2814488 - RNA, 14 nt, Human
aauauuguuuuucu

SEQ ID NO: 2814489 - RNA, 18 nt, Human
aauauuguuuuucuuucu

SEQ ID NO: 2814490 - RNA, 14 nt, Human
aauauuuaaaaaug

SEQ ID NO: 2814491 - RNA, 15 nt, Human
aauauuuaaaaaugu

SEQ ID NO: 2814492 - RNA, 17 nt, Human
aauauuuaaaaaugucu

SEQ ID NO: 2814493 - RNA, 20 nt, Human
aauauuguugacaacuguga

SEQ ID NO: 2814494 - RNA, 12 nt, Human
aauauuuaaaca

SEQ ID NO: 2814495 - RNA, 14 nt, Human
aauauuuaaacagc

SEQ ID NO: 2814496 - RNA, 16 nt, Human
aauauuuaaacagcag

SEQ ID NO: 2814497 - RNA, 17 nt, Human
aauauuucugcuuucuu

SEQ ID NO: 2814498 - RNA, 20 nt, Human
aauauugcuuuggucauaug

SEQ ID NO: 2814499 - RNA, 18 nt, Human
aauauuguguugugaaug

SEQ ID NO: 2814500 - RNA, 15 nt, Human
aauauuguuucuuua

SEQ ID NO: 2814501 - RNA, 19 nt, Human
aauauuguuucuuuaucac

SEQ ID NO: 2814502 - RNA, 16 nt, Human
aauauuguugacaacu

SEQ ID NO: 2814503 - RNA, 22 nt, Human
aauauuguugacaacugugacu

SEQ ID NO: 2814504 - RNA, 18 nt, Human
aauauuguuguauaauuu

SEQ ID NO: 2814505 - RNA, 19 nt, Human
aauauuguuguauaauuuc

SEQ ID NO: 2814506 - RNA, 23 nt, Human
aauauuguuguauaauuucgaga

SEQ ID NO: 2814507 - RNA, 16 nt, Human
aauauuuucagccuac

SEQ ID NO: 2814508 - RNA, 13 nt, Human
aauauuuucagua

SEQ ID NO: 2814509 - RNA, 14 nt, Human
aauauuuucaguaa

SEQ ID NO: 2814510 - RNA, 14 nt, Human
aaucacuugaaccc

SEQ ID NO: 2814511 - RNA, 16 nt, Human
aaucacuugauucaua

SEQ ID NO: 2814512 - RNA, 18 nt, Human
aaucacuugauucauaaa

SEQ ID NO: 2814513 - RNA, 21 nt, Human
aaucacuugauucauaaagau

SEQ ID NO: 2814514 - RNA, 13 nt, Human
aaucacuuugucu

SEQ ID NO: 2814515 - RNA, 16 nt, Human
aaucacuuugucuaac

SEQ ID NO: 2814516 - RNA, 23 nt, Human
aaucacuuugucuaacucagaau

SEQ ID NO: 2814517 - RNA, 13 nt, Human
aaucagaaauuuu

SEQ ID NO: 2814518 - RNA, 14 nt, Human
aaucagaaauuuuu

SEQ ID NO: 2814519 - RNA, 14 nt, Human
aaucacuguuuuua

SEQ ID NO: 2814520 - RNA, 16 nt, Human
aaucacuguuuuuaga

SEQ ID NO: 2814521 - RNA, 22 nt, Human
aaucacuguuuuuagacaccuu

SEQ ID NO: 2814522 - RNA, 17 nt, Human
aaucacuuaacauuccu

SEQ ID NO: 2814523 - RNA, 18 nt, Human
aaucacuuaacauuccua

SEQ ID NO: 2814524 - RNA, 19 nt, Human
aaucacuuaacauuccuaa

SEQ ID NO: 2814525 - RNA, 20 nt, Human
aauaugauuuuuuaaaagaa

SEQ ID NO: 2814526 - RNA, 21 nt, Human
aauaugauuuuuuaaaagaaa

SEQ ID NO: 2814527 - RNA, 22 nt, Human
aauaugauuuuuuaaaagaaau

SEQ ID NO: 2814528 - RNA, 23 nt, Human
aauaugauuuuuuaaaagaaauu

SEQ ID NO: 2814529 - RNA, 11 nt, Human
aauaugaugac

SEQ ID NO: 2814530 - RNA, 14 nt, Human
aauaucaaucaagc

SEQ ID NO: 2814531 - RNA, 23 nt, Human
aauaucauuuauuuuuuacauua

SEQ ID NO: 2814532 - RNA, 13 nt, Human
aauaucauuuauu

SEQ ID NO: 2814533 - RNA, 17 nt, Human
aauauccaggucaacag

SEQ ID NO: 2814534 - RNA, 20 nt, Human
aauauccaggucaacagaau

SEQ ID NO: 2814535 - RNA, 21 nt, Human
aauauccaggucaacagaaug

SEQ ID NO: 2814536 - RNA, 22 nt, Human
aauauccaggucaacagaauga

SEQ ID NO: 2814537 - RNA, 23 nt, Human
aauauccaggucaacagaaugaa

SEQ ID NO: 2814538 - RNA, 24 nt, Human
aauauccaggucaacagaaugaaa

SEQ ID NO: 2814539 - RNA, 18 nt, Human
aauauauguauuauuuau

SEQ ID NO: 2814540 - RNA, 14 nt, Human
aauauauguauuau

SEQ ID NO: 2814541 - RNA, 15 nt, Human
aauauauuaccagca

SEQ ID NO: 2814542 - RNA, 20 nt, Human
aauauauuaccagcaagaau

SEQ ID NO: 2814543 - RNA, 22 nt, Human
aauauauuaccagcaagaauaa

SEQ ID NO: 2814544 - RNA, 23 nt, Human
aauauauuaccagcaagaauaaa

SEQ ID NO: 2814545 - RNA, 15 nt, Human
aauaguauuugagag

SEQ ID NO: 2814546 - RNA, 23 nt, Human
aauaguaugaguaaugcuuaagg

SEQ ID NO: 2814547 - RNA, 12 nt, Human
aauauauguauu

SEQ ID NO: 2814548 - RNA, 21 nt, Human
aauauauguauuauuuauaau

SEQ ID NO: 2814549 - RNA, 13 nt, Human
aauauauguauuu

SEQ ID NO: 2814550 - RNA, 14 nt, Human
aauauauguauuuu

SEQ ID NO: 2814551 - RNA, 22 nt, Human
aauauauguauuuuuauauaau

SEQ ID NO: 2814552 - RNA, 13 nt, Human
aauauauggcauu

SEQ ID NO: 2814553 - RNA, 14 nt, Human
aauauauggcauuu

SEQ ID NO: 2814554 - RNA, 16 nt, Human
aauauauggcauuugc

SEQ ID NO: 2814555 - RNA, 17 nt, Human
aauauauggcauuugca

SEQ ID NO: 2814556 - RNA, 18 nt, Human
aauauauggcauuugcag

SEQ ID NO: 2814557 - RNA, 22 nt, Human
aauauauggcauuugcagauuu

SEQ ID NO: 2814558 - RNA, 16 nt, Human
uaacauaauuuguaca

SEQ ID NO: 2814559 - RNA, 15 nt, Human
uaacauaauaaauua

SEQ ID NO: 2814560 - RNA, 17 nt, Human
uaacauaauaaauuaaa

SEQ ID NO: 2814561 - RNA, 19 nt, Human
uaacauaauuuguacauau

SEQ ID NO: 2814562 - RNA, 16 nt, Human
uaaccugcaaaaucug

SEQ ID NO: 2814563 - RNA, 22 nt, Human
uaaccugacugguuaacagcag

SEQ ID NO: 2814564 - RNA, 13 nt, Human
aauaggagaggau

SEQ ID NO: 2814565 - RNA, 15 nt, Human
aauaggagaggauga

SEQ ID NO: 2814566 - RNA, 20 nt, Human
aauaggagaggaugagagcc

SEQ ID NO: 2814567 - RNA, 23 nt, Human
aauaggagaggaugagagcccag

SEQ ID NO: 2814568 - RNA, 16 nt, Human
aauaggcauuaacaca

SEQ ID NO: 2814569 - RNA, 22 nt, Human
aauaggcauuaacacaaaggag

SEQ ID NO: 2814570 - RNA, 15 nt, Human
aauaggggauauuua

SEQ ID NO: 2814571 - RNA, 16 nt, Human
aauaggggauauuuaa

SEQ ID NO: 2814572 - RNA, 21 nt, Human
aauagcugcccauuucgugag

SEQ ID NO: 2814573 - RNA, 14 nt, Human
aauagcuuguauag

SEQ ID NO: 2814574 - RNA, 19 nt, Human
aauagcuuguauaguguaa

SEQ ID NO: 2814575 - RNA, 13 nt, Human
aauaggaaacaag

SEQ ID NO: 2814576 - RNA, 11 nt, Human
aauaggaauaa

SEQ ID NO: 2814577 - RNA, 17 nt, Human
aauagcuuuuauuguau

SEQ ID NO: 2814578 - RNA, 14 nt, Human
aauagcugggacua

SEQ ID NO: 2814579 - RNA, 13 nt, Human
aauagcugggacu

SEQ ID NO: 2814580 - RNA, 23 nt, Human
aauagccacugcauaccaaccug

SEQ ID NO: 2814581 - RNA, 15 nt, Human
aauagaucuuagggu

SEQ ID NO: 2814582 - RNA, 16 nt, Human
aauagaugcugacugu

SEQ ID NO: 2814583 - RNA, 12 nt, Human
aauagaugucuu

SEQ ID NO: 2814584 - RNA, 14 nt, Human
aauagaugucuuuu

SEQ ID NO: 2814585 - RNA, 16 nt, Human
aauagaugucuuuuau

SEQ ID NO: 2814586 - RNA, 23 nt, Human
aauagccacauuuggaauacuuu

SEQ ID NO: 2814587 - RNA, 22 nt, Human
aauagccacauuuggaauacuu

SEQ ID NO: 2814588 - RNA, 20 nt, Human
aauagccacauuuggaauac

SEQ ID NO: 2814589 - RNA, 11 nt, Human
aauagauucuc

SEQ ID NO: 2814590 - RNA, 12 nt, Human
aauagauucucu

SEQ ID NO: 2814591 - RNA, 23 nt, Human
aauagacacuccccgaagucuuu

SEQ ID NO: 2814592 - RNA, 22 nt, Human
aauagacacuccccgaagucuu

SEQ ID NO: 2814593 - RNA, 22 nt, Human
aauagaguuugcuauuagagca

SEQ ID NO: 2814594 - RNA, 19 nt, Human
uaaauuuugaguucuacau

SEQ ID NO: 2814595 - RNA, 18 nt, Human
uaaauuuugaguucuaca

SEQ ID NO: 2814596 - RNA, 20 nt, Human
uaaauuuugucuuuaacuca

SEQ ID NO: 2814597 - RNA, 13 nt, Human
uaaauuuuguaau

SEQ ID NO: 2814598 - RNA, 14 nt, Human
uaaauuuuguaaug

SEQ ID NO: 2814599 - RNA, 15 nt, Human
uaaauuuuguaauga

SEQ ID NO: 2814600 - RNA, 22 nt, Human
uagccuugcccggauucuggga

SEQ ID NO: 2814601 - RNA, 16 nt, Human
uagccuuuggcucugg

SEQ ID NO: 2814602 - RNA, 18 nt, Human
uagccuuuggcucuggag

SEQ ID NO: 2814603 - RNA, 21 nt, Human
uagccuuuacauggacagaau

SEQ ID NO: 2814604 - RNA, 22 nt, Human
uagccuuuacauggacagaauu

SEQ ID NO: 2814605 - RNA, 23 nt, Human
uagccuuuacauggacagaauuu

SEQ ID NO: 2814606 - RNA, 18 nt, Human
acaaugaagauaaaaaga

SEQ ID NO: 2814607 - RNA, 14 nt, Human
acaauaugugagug

SEQ ID NO: 2814608 - RNA, 18 nt, Human
acaaucuggaagaaaaaa

SEQ ID NO: 2814609 - RNA, 12 nt, Human
acaaucucuuaa

SEQ ID NO: 2814610 - RNA, 13 nt, Human
acaaucucuuaaa

SEQ ID NO: 2814611 - RNA, 14 nt, Human
acaaucucuuaaau

SEQ ID NO: 2814612 - RNA, 16 nt, Human
acaaugaacacuuaua

SEQ ID NO: 2814613 - RNA, 16 nt, Human
uagcuaucagaagacc

SEQ ID NO: 2814614 - RNA, 13 nt, Human
uagcuauuacugu

SEQ ID NO: 2814615 - RNA, 14 nt, Human
uagcuauuacuguc

SEQ ID NO: 2814616 - RNA, 15 nt, Human
uagcuauuacugucu

SEQ ID NO: 2814617 - RNA, 21 nt, Human
uagcuaucagaagaccacaaa

SEQ ID NO: 2814618 - RNA, 16 nt, Human
uagcuaugugaccuug

SEQ ID NO: 2814619 - RNA, 23 nt, Human
uagcuacaggaagcaccccaugc

SEQ ID NO: 2814620 - RNA, 19 nt, Human
uagcuacccaaaagagaaa

SEQ ID NO: 2814621 - RNA, 20 nt, Human
uagcuacccaaaagagaaaa

SEQ ID NO: 2814622 - RNA, 21 nt, Human
uagcuacccaaaagagaaaaa

SEQ ID NO: 2814623 - RNA, 21 nt, Human
uagcuuacaagccagcuggag

SEQ ID NO: 2814624 - RNA, 16 nt, Human
uagcuuaccagaagcu

SEQ ID NO: 2814625 - RNA, 15 nt, Human
uagcuuaccugacac

SEQ ID NO: 2814626 - RNA, 16 nt, Human
uagcuuaccugacaca

SEQ ID NO: 2814627 - RNA, 19 nt, Human
uagcuuaccugacacaaga

SEQ ID NO: 2814628 - RNA, 16 nt, Human
uagcucaggugucccu

SEQ ID NO: 2814629 - RNA, 23 nt, Human
uagcucaagagaaaaguugacac

SEQ ID NO: 2814630 - RNA, 18 nt, Human
acaagccuggcaacacac

SEQ ID NO: 2814631 - RNA, 20 nt, Human
acaagccugguaggaaaggg

SEQ ID NO: 2814632 - RNA, 22 nt, Human
acaagagccugaucucuuccug

SEQ ID NO: 2814633 - RNA, 13 nt, Human
acaaguuccaugg

SEQ ID NO: 2814634 - RNA, 16 nt, Human
acaauagguaaagcua

SEQ ID NO: 2814635 - RNA, 21 nt, Human
acaauauaaccacaaagcaca

SEQ ID NO: 2814636 - RNA, 10 nt, Human
acaauauaua

SEQ ID NO: 2814637 - RNA, 15 nt, Human
acaauauauaaaaau

SEQ ID NO: 2814638 - RNA, 16 nt, Human
acaauauauaaaaaua

SEQ ID NO: 2814639 - RNA, 17 nt, Human
acaauauauaaaaauau

SEQ ID NO: 2814640 - RNA, 18 nt, Human
acaauauauaaaaauaua

SEQ ID NO: 2814641 - RNA, 23 nt, Human
acaauauauagcuggcaagaaug

SEQ ID NO: 2814642 - RNA, 12 nt, Human
acaauaucauau

SEQ ID NO: 2814643 - RNA, 15 nt, Human
acaauaucauaucau

SEQ ID NO: 2814644 - RNA, 17 nt, Human
acaauaucauaucauca

SEQ ID NO: 2814645 - RNA, 14 nt, Human
acaauauugaacuu

SEQ ID NO: 2814646 - RNA, 20 nt, Human
acaaucucggcucacugcau

SEQ ID NO: 2814647 - RNA, 18 nt, Human
acaaucucggcucacugc

SEQ ID NO: 2814648 - RNA, 18 nt, Human
acaauaguaaccugggua

SEQ ID NO: 2814649 - RNA, 15 nt, Human
acaaguuuuucuguc

SEQ ID NO: 2814650 - RNA, 16 nt, Human
acaaguuuuucuguca

SEQ ID NO: 2814651 - RNA, 22 nt, Human
acaaguuuuucugucaagaaga

SEQ ID NO: 2814652 - RNA, 14 nt, Human
acaaguuuuaaaua

SEQ ID NO: 2814653 - RNA, 15 nt, Human
acaaguuuuaaugua

SEQ ID NO: 2814654 - RNA, 15 nt, Human
acaauaaaacauuau

SEQ ID NO: 2814655 - RNA, 13 nt, Human
acaauaaaagcuu

SEQ ID NO: 2814656 - RNA, 19 nt, Human
uagaugcauguugaccaug

SEQ ID NO: 2814657 - RNA, 14 nt, Human
acaaaugucuauca

SEQ ID NO: 2814658 - RNA, 13 nt, Human
acaaaugugaaga

SEQ ID NO: 2814659 - RNA, 15 nt, Human
acaaauugagacagu

SEQ ID NO: 2814660 - RNA, 14 nt, Human
acaaauugcacaga

SEQ ID NO: 2814661 - RNA, 20 nt, Human
acaaauugcacagaaguccu

SEQ ID NO: 2814662 - RNA, 14 nt, Human
acaaauguaaacau

SEQ ID NO: 2814663 - RNA, 17 nt, Human
acaaauguaaacauuuu

SEQ ID NO: 2814664 - RNA, 18 nt, Human
acaaauguaaacauuuuc

SEQ ID NO: 2814665 - RNA, 16 nt, Human
acaacagccaacagcu

SEQ ID NO: 2814666 - RNA, 17 nt, Human
acaacagccaacagcua

SEQ ID NO: 2814667 - RNA, 24 nt, Human
acaacagccaacagcuacaacagc

SEQ ID NO: 2814668 - RNA, 18 nt, Human
acaacagcucgauccaaa

SEQ ID NO: 2814669 - RNA, 20 nt, Human
acaacagcucgauccaaauu

SEQ ID NO: 2814670 - RNA, 22 nt, Human
acaacagcucgauccaaauugu

SEQ ID NO: 2814671 - RNA, 13 nt, Human
acaagacacagug

SEQ ID NO: 2814672 - RNA, 16 nt, Human
acaacauccauguccu

SEQ ID NO: 2814673 - RNA, 17 nt, Human
acaacauccauguccua

SEQ ID NO: 2814674 - RNA, 19 nt, Human
acaacauccauguccuaug

SEQ ID NO: 2814675 - RNA, 22 nt, Human
acaacauccauguccuaugugu

SEQ ID NO: 2814676 - RNA, 23 nt, Human
acaacauccauguccuaugugug

SEQ ID NO: 2814677 - RNA, 17 nt, Human
acaaaugcaugaacaag

SEQ ID NO: 2814678 - RNA, 18 nt, Human
acaaaugcaugaacaagu

SEQ ID NO: 2814679 - RNA, 19 nt, Human
acaaaugccuuaaaaugga

SEQ ID NO: 2814680 - RNA, 20 nt, Human
acaaaugccuuaaaauggaa

SEQ ID NO: 2814681 - RNA, 17 nt, Human
acaaaugcuauuaaagu

SEQ ID NO: 2814682 - RNA, 17 nt, Human
uagcaaggucauuucuu

SEQ ID NO: 2814683 - RNA, 19 nt, Human
uagcaaggucauuucuuca

SEQ ID NO: 2814684 - RNA, 24 nt, Human
uagcaagauugcuuaaaauagcaa

SEQ ID NO: 2814685 - RNA, 13 nt, Human
uagcaagcuggcc

SEQ ID NO: 2814686 - RNA, 14 nt, Human
uagcaagcuggccu

SEQ ID NO: 2814687 - RNA, 15 nt, Human
uagcaagcuggccuc

SEQ ID NO: 2814688 - RNA, 16 nt, Human
uagcaagcuggccucu

SEQ ID NO: 2814689 - RNA, 20 nt, Human
uagcaagauugcuuaaaaua

SEQ ID NO: 2814690 - RNA, 18 nt, Human
uagcaagacacaucccua

SEQ ID NO: 2814691 - RNA, 12 nt, Human
uagcaacaggaa

SEQ ID NO: 2814692 - RNA, 17 nt, Human
uagcaacuuuuguguaa

SEQ ID NO: 2814693 - RNA, 13 nt, Human
uagcaacuuuugu

SEQ ID NO: 2814694 - RNA, 17 nt, Human
uagcaagacacaucccu

SEQ ID NO: 2814695 - RNA, 12 nt, Human
uagcaagacaca

SEQ ID NO: 2814696 - RNA, 17 nt, Human
acaagcgugagccacug

SEQ ID NO: 2814697 - RNA, 14 nt, Human
acaagauuuagaaa

SEQ ID NO: 2814698 - RNA, 16 nt, Human
acaagauuuagaaaaa

SEQ ID NO: 2814699 - RNA, 18 nt, Human
acaagauuuccuugugca

SEQ ID NO: 2814700 - RNA, 20 nt, Human
acaagauuuccuugugcaaa

SEQ ID NO: 2814701 - RNA, 17 nt, Human
acaagcccccccuucca

SEQ ID NO: 2814702 - RNA, 18 nt, Human
acaagcccccccuuccac

SEQ ID NO: 2814703 - RNA, 14 nt, Human
acaagcccccccuu

SEQ ID NO: 2814704 - RNA, 19 nt, Human
acaagagcuuaacagugug

SEQ ID NO: 2814705 - RNA, 18 nt, Human
acaagagcuuaacagugu

SEQ ID NO: 2814706 - RNA, 22 nt, Human
acaagaguuuauuuccaaauaa

SEQ ID NO: 2814707 - RNA, 16 nt, Human
acaagagguacagggu

SEQ ID NO: 2814708 - RNA, 19 nt, Human
acaagagguacaggguuuu

SEQ ID NO: 2814709 - RNA, 15 nt, Human
acaagauauuguaca

SEQ ID NO: 2814710 - RNA, 16 nt, Human
acaagauauuguacau

SEQ ID NO: 2814711 - RNA, 17 nt, Human
acaagauauuguacaua

SEQ ID NO: 2814712 - RNA, 18 nt, Human
acaagauauuguacauaa

SEQ ID NO: 2814713 - RNA, 19 nt, Human
acaagauauuguacauaaa

SEQ ID NO: 2814714 - RNA, 22 nt, Human
acaagauauuguacauaaaaga

SEQ ID NO: 2814715 - RNA, 18 nt, Human
acaagaguuuauuuccaa

SEQ ID NO: 2814716 - RNA, 19 nt, Human
acaagaccaccacuucgaa

SEQ ID NO: 2814717 - RNA, 14 nt, Human
acaagacacaguga

SEQ ID NO: 2814718 - RNA, 14 nt, Human
aauuuuuguaauuu

SEQ ID NO: 2814719 - RNA, 15 nt, Human
aauuuuuugguacaa

SEQ ID NO: 2814720 - RNA, 16 nt, Human
aauuuuuugguacaaa

SEQ ID NO: 2814721 - RNA, 20 nt, Human
aauuuuuugguacaaaaaua

SEQ ID NO: 2814722 - RNA, 21 nt, Human
aauuuuuugguacaaaaauaa

SEQ ID NO: 2814723 - RNA, 19 nt, Human
aauuuuuuguucuucagag

SEQ ID NO: 2814724 - RNA, 20 nt, Human
aauuuuuuguucuucagaga

SEQ ID NO: 2814725 - RNA, 16 nt, Human
aauuuuuuugucuuua

SEQ ID NO: 2814726 - RNA, 20 nt, Human
aauuuuuuuuaguauuuauu

SEQ ID NO: 2814727 - RNA, 15 nt, Human
aauuuuuuuuaguau

SEQ ID NO: 2814728 - RNA, 23 nt, Human
aauuuuuuuuaguauuuauuuau

SEQ ID NO: 2814729 - RNA, 13 nt, Human
aauuuuuuuucau

SEQ ID NO: 2814730 - RNA, 16 nt, Human
aauuuuuuuuacauuu

SEQ ID NO: 2814731 - RNA, 12 nt, Human
aauuuuuuuuac

SEQ ID NO: 2814732 - RNA, 13 nt, Human
aauuuuuaagcaa

SEQ ID NO: 2814733 - RNA, 20 nt, Human
aauuuuuaaauguaaaacau

SEQ ID NO: 2814734 - RNA, 20 nt, Human
aauuuuugccuucauuaccu

SEQ ID NO: 2814735 - RNA, 17 nt, Human
aauuuuugccuucauua

SEQ ID NO: 2814736 - RNA, 16 nt, Human
aauuuuugccuucauu

SEQ ID NO: 2814737 - RNA, 17 nt, Human
aauuuguuugaaaucuu

SEQ ID NO: 2814738 - RNA, 19 nt, Human
aauuuuuaaaaauacacuu

SEQ ID NO: 2814739 - RNA, 13 nt, Human
uacuuuuuccugg

SEQ ID NO: 2814740 - RNA, 12 nt, Human
uacuuuuucuaa

SEQ ID NO: 2814741 - RNA, 13 nt, Human
uacuuuuucuaau

SEQ ID NO: 2814742 - RNA, 14 nt, Human
uacuuuuucuaaug

SEQ ID NO: 2814743 - RNA, 16 nt, Human
uacuuuuucuaaugag

SEQ ID NO: 2814744 - RNA, 17 nt, Human
uacuuuuucuuuuguaa

SEQ ID NO: 2814745 - RNA, 18 nt, Human
uacuuuuucuuuuguaag

SEQ ID NO: 2814746 - RNA, 21 nt, Human
uacuuuuaaacagugagccug

SEQ ID NO: 2814747 - RNA, 21 nt, Human
uacuuuguggaccaauuauug

SEQ ID NO: 2814748 - RNA, 22 nt, Human
uacuuuguggaccaauuauuga

SEQ ID NO: 2814749 - RNA, 12 nt, Human
uacuuuuuucca

SEQ ID NO: 2814750 - RNA, 13 nt, Human
uacuuuuuguuau

SEQ ID NO: 2814751 - RNA, 13 nt, Human
uacuuuuugugaa

SEQ ID NO: 2814752 - RNA, 15 nt, Human
uacuuuuugugaaga

SEQ ID NO: 2814753 - RNA, 20 nt, Human
aauuugcacuaaaucagaga

SEQ ID NO: 2814754 - RNA, 15 nt, Human
aauuugcauuaaauu

SEQ ID NO: 2814755 - RNA, 17 nt, Human
aauuugcauuaaauuca

SEQ ID NO: 2814756 - RNA, 21 nt, Human
aauuugcauuaaauucacaaa

SEQ ID NO: 2814757 - RNA, 18 nt, Human
aauuugcauuaaauucac

SEQ ID NO: 2814758 - RNA, 19 nt, Human
aauuugguuuaaaaauaca

SEQ ID NO: 2814759 - RNA, 20 nt, Human
aauuugcccugggaaacccc

SEQ ID NO: 2814760 - RNA, 23 nt, Human
aauuugcauuaaauucacaaacu

SEQ ID NO: 2814761 - RNA, 17 nt, Human
uagaugcgcagccccau

SEQ ID NO: 2814762 - RNA, 19 nt, Human
uagaugcgcagccccaucu

SEQ ID NO: 2814763 - RNA, 19 nt, Human
uagaucauuuguucuggga

SEQ ID NO: 2814764 - RNA, 12 nt, Human
uagaucuucuga

SEQ ID NO: 2814765 - RNA, 13 nt, Human
uagaucuucugaa

SEQ ID NO: 2814766 - RNA, 14 nt, Human
uagaucuucugaaa

SEQ ID NO: 2814767 - RNA, 15 nt, Human
uagaucuucugaaau

SEQ ID NO: 2814768 - RNA, 16 nt, Human
uagaucuucugaaaug

SEQ ID NO: 2814769 - RNA, 16 nt, Human
uagaugaaguuuuaca

SEQ ID NO: 2814770 - RNA, 16 nt, Human
uagauagguaaauacc

SEQ ID NO: 2814771 - RNA, 17 nt, Human
uagauaguuagaaccug

SEQ ID NO: 2814772 - RNA, 13 nt, Human
uagauagggcugg

SEQ ID NO: 2814773 - RNA, 23 nt, Human
uagauagggcugggcaaggaaaa

SEQ ID NO: 2814774 - RNA, 13 nt, Human
acaaauauucaga

SEQ ID NO: 2814775 - RNA, 14 nt, Human
acaaauauucagaa

SEQ ID NO: 2814776 - RNA, 12 nt, Human
acaaauaugcaa

SEQ ID NO: 2814777 - RNA, 23 nt, Human
acaaauauuuauuuucuuucugu

SEQ ID NO: 2814778 - RNA, 22 nt, Human
acaaauauuuauuuucuuucug

SEQ ID NO: 2814779 - RNA, 18 nt, Human
acaaauauuuauuuucuu

SEQ ID NO: 2814780 - RNA, 12 nt, Human
acaaauauuuau

SEQ ID NO: 2814781 - RNA, 11 nt, Human
acaaauaugca

SEQ ID NO: 2814782 - RNA, 14 nt, Human
acaaauauaagauu

SEQ ID NO: 2814783 - RNA, 12 nt, Human
acaaauauauug

SEQ ID NO: 2814784 - RNA, 15 nt, Human
acaaauauauuguua

SEQ ID NO: 2814785 - RNA, 21 nt, Human
acaaauaucuuguguuguccu

SEQ ID NO: 2814786 - RNA, 22 nt, Human
acaaauaucuuguguuguccuu

SEQ ID NO: 2814787 - RNA, 19 nt, Human
acaaauaugcaaaagguuc

SEQ ID NO: 2814788 - RNA, 16 nt, Human
acaaauaugcuaauuu

SEQ ID NO: 2814789 - RNA, 17 nt, Human
acaaauaugcuaauuug

SEQ ID NO: 2814790 - RNA, 18 nt, Human
acaaauaugcuaauuugg

SEQ ID NO: 2814791 - RNA, 20 nt, Human
acaaauagugcaacuaugaa

SEQ ID NO: 2814792 - RNA, 15 nt, Human
acaaauauaaaucuu

SEQ ID NO: 2814793 - RNA, 16 nt, Human
acaaagucuuuggggu

SEQ ID NO: 2814794 - RNA, 18 nt, Human
acaaagugagacagucca

SEQ ID NO: 2814795 - RNA, 15 nt, Human
acaaaguuguaugug

SEQ ID NO: 2814796 - RNA, 15 nt, Human
acaaagcgugcacaa

SEQ ID NO: 2814797 - RNA, 13 nt, Human
acaaagcuguuaa

SEQ ID NO: 2814798 - RNA, 14 nt, Human
acaaagcuguuaaa

SEQ ID NO: 2814799 - RNA, 17 nt, Human
acaaagcuguuaaacug

SEQ ID NO: 2814800 - RNA, 18 nt, Human
acaaagcuguuaaacugu

SEQ ID NO: 2814801 - RNA, 19 nt, Human
acaaagcuguuaaacuguu

SEQ ID NO: 2814802 - RNA, 20 nt, Human
acaaagcuguuaaacuguua

SEQ ID NO: 2814803 - RNA, 19 nt, Human
acaaaggaagugcccccuc

SEQ ID NO: 2814804 - RNA, 14 nt, Human
aauuuuuguaaauc

SEQ ID NO: 2814805 - RNA, 11 nt, Human
acaaaacuucu

SEQ ID NO: 2814806 - RNA, 12 nt, Human
acaaaacuucuu

SEQ ID NO: 2814807 - RNA, 13 nt, Human
acaaaacuucuug

SEQ ID NO: 2814808 - RNA, 17 nt, Human
acaaaacuucuugucag

SEQ ID NO: 2814809 - RNA, 18 nt, Human
acaaaacuucuugucaga

SEQ ID NO: 2814810 - RNA, 19 nt, Human
acaaaacuucuugucagac

SEQ ID NO: 2814811 - RNA, 20 nt, Human
acaaaacuucuugucagaca

SEQ ID NO: 2814812 - RNA, 15 nt, Human
acaaaagaaaagacu

SEQ ID NO: 2814813 - RNA, 20 nt, Human
acaaaagaaaagacuuguaa

SEQ ID NO: 2814814 - RNA, 15 nt, Human
acaaaagaaauaccu

SEQ ID NO: 2814815 - RNA, 16 nt, Human
acaaaagaaauaccuu

SEQ ID NO: 2814816 - RNA, 18 nt, Human
acaaaagaaauaccuuga

SEQ ID NO: 2814817 - RNA, 19 nt, Human
aauuuuuuuuuccuagccc

SEQ ID NO: 2814818 - RNA, 20 nt, Human
aauuuuuuuuguuguuucag

SEQ ID NO: 2814819 - RNA, 21 nt, Human
aauuuuuuuuguuguuucagu

SEQ ID NO: 2814820 - RNA, 22 nt, Human
aauuuuuuuuguuguuucagug

SEQ ID NO: 2814821 - RNA, 23 nt, Human
aauuuuuuuuguuguuucaguga

SEQ ID NO: 2814822 - RNA, 20 nt, Human
aauuuuuuuuucauagagau

SEQ ID NO: 2814823 - RNA, 23 nt, Human
acaaaacuacaugagaacaaaca

SEQ ID NO: 2814824 - RNA, 17 nt, Human
acaaaacuacaugagaa

SEQ ID NO: 2814825 - RNA, 10 nt, Human
acaaaacuau

SEQ ID NO: 2814826 - RNA, 14 nt, Human
acaaaacuauacuu

SEQ ID NO: 2814827 - RNA, 15 nt, Human
acaaaacuauacuug

SEQ ID NO: 2814828 - RNA, 16 nt, Human
acaaaacuauacuuga

SEQ ID NO: 2814829 - RNA, 17 nt, Human
acaaaacuauacuugaa

SEQ ID NO: 2814830 - RNA, 21 nt, Human
acaaaacuauacuugaacaaa

SEQ ID NO: 2814831 - RNA, 18 nt, Human
acaaagcccuuccauguc

SEQ ID NO: 2814832 - RNA, 23 nt, Human
acaaaagaggagcacuuccaaaa

SEQ ID NO: 2814833 - RNA, 13 nt, Human
acaaaagaugaaa

SEQ ID NO: 2814834 - RNA, 19 nt, Human
acaaagccaaacucugcca

SEQ ID NO: 2814835 - RNA, 17 nt, Human
uacuuauuuuugacagu

SEQ ID NO: 2814836 - RNA, 22 nt, Human
uacuuccaccucgggcacauuu

SEQ ID NO: 2814837 - RNA, 19 nt, Human
uacuuauuuuugacagugu

SEQ ID NO: 2814838 - RNA, 20 nt, Human
uacuuccccuuccuaauucc

SEQ ID NO: 2814839 - RNA, 18 nt, Human
uacuuccccuuccuaauu

SEQ ID NO: 2814840 - RNA, 15 nt, Human
uacuuccccuuccua

SEQ ID NO: 2814841 - RNA, 14 nt, Human
uacuuccccuuccu

SEQ ID NO: 2814842 - RNA, 18 nt, Human
uacuucuccacccugcuc

SEQ ID NO: 2814843 - RNA, 13 nt, Human
uacuucuccaccc

SEQ ID NO: 2814844 - RNA, 16 nt, Human
uacuuccuccucccca

SEQ ID NO: 2814845 - RNA, 15 nt, Human
uacuuccugaguggc

SEQ ID NO: 2814846 - RNA, 22 nt, Human
uacuuccugaguggccagggaa

SEQ ID NO: 2814847 - RNA, 17 nt, Human
uacuucgucuucuaauu

SEQ ID NO: 2814848 - RNA, 18 nt, Human
uacuucgucuucuaauuu

SEQ ID NO: 2814849 - RNA, 14 nt, Human
uacuuccuccuccc

SEQ ID NO: 2814850 - RNA, 23 nt, Human
uacuuccugugacuucagcucug

SEQ ID NO: 2814851 - RNA, 21 nt, Human
uacuuauauuucccuaaaaua

SEQ ID NO: 2814852 - RNA, 14 nt, Human
uacuuauauuuucg

SEQ ID NO: 2814853 - RNA, 16 nt, Human
uacuuauauuuucgua

SEQ ID NO: 2814854 - RNA, 17 nt, Human
uacuuauauuuucguau

SEQ ID NO: 2814855 - RNA, 20 nt, Human
uacuuauauuuucguaugaa

SEQ ID NO: 2814856 - RNA, 22 nt, Human
uacuuauauuuucguaugaaaa

SEQ ID NO: 2814857 - RNA, 23 nt, Human
uacuuauauuuucguaugaaaau

SEQ ID NO: 2814858 - RNA, 20 nt, Human
aauuugauugauuugaagaa

SEQ ID NO: 2814859 - RNA, 17 nt, Human
aauuugauugauuugaa

SEQ ID NO: 2814860 - RNA, 15 nt, Human
aauuugauuucuauu

SEQ ID NO: 2814861 - RNA, 20 nt, Human
uacuuaucauccacauuguu

SEQ ID NO: 2814862 - RNA, 15 nt, Human
uacuuaucccugccc

SEQ ID NO: 2814863 - RNA, 17 nt, Human
uacuuaucccugcccau

SEQ ID NO: 2814864 - RNA, 18 nt, Human
uacuuaucccugcccauu

SEQ ID NO: 2814865 - RNA, 21 nt, Human
uacuuaucccugcccauuuca

SEQ ID NO: 2814866 - RNA, 23 nt, Human
uacuuaucccugcccauuucaua

SEQ ID NO: 2814867 - RNA, 23 nt, Human
aauuugaaaacauaaucugcaaa

SEQ ID NO: 2814868 - RNA, 21 nt, Human
aauuucuucacuguugaaaau

SEQ ID NO: 2814869 - RNA, 12 nt, Human
aauuugauugau

SEQ ID NO: 2814870 - RNA, 20 nt, Human
aauuugauugacugcccauu

SEQ ID NO: 2814871 - RNA, 18 nt, Human
aauuugauuaacaaauau

SEQ ID NO: 2814872 - RNA, 16 nt, Human
aauuugauugauuuga

SEQ ID NO: 2814873 - RNA, 15 nt, Human
aauuugauugauuug

SEQ ID NO: 2814874 - RNA, 14 nt, Human
aauuugauugauuu

SEQ ID NO: 2814875 - RNA, 13 nt, Human
aauuugauugauu

SEQ ID NO: 2814876 - RNA, 22 nt, Human
aauuugcacaucuuggcuaugu

SEQ ID NO: 2814877 - RNA, 15 nt, Human
uacuucugcuacaua

SEQ ID NO: 2814878 - RNA, 20 nt, Human
uacuucuccacccugcucuc

SEQ ID NO: 2814879 - RNA, 15 nt, Human
uacuugaaaaaguaa

SEQ ID NO: 2814880 - RNA, 16 nt, Human
uacuucuuugcuuugc

SEQ ID NO: 2814881 - RNA, 13 nt, Human
uacuugaacaaaa

SEQ ID NO: 2814882 - RNA, 14 nt, Human
uacuugaacaaaag

SEQ ID NO: 2814883 - RNA, 15 nt, Human
uacuugaacaaaagg

SEQ ID NO: 2814884 - RNA, 19 nt, Human
uacuugaacaaaaggguca

SEQ ID NO: 2814885 - RNA, 20 nt, Human
uacuuuccuuuccccagccc

SEQ ID NO: 2814886 - RNA, 17 nt, Human
uacuuucguacauuggc

SEQ ID NO: 2814887 - RNA, 19 nt, Human
uacuuuccuuuccccagcc

SEQ ID NO: 2814888 - RNA, 12 nt, Human
uacuuucccuug

SEQ ID NO: 2814889 - RNA, 15 nt, Human
uacuuucccuugcuu

SEQ ID NO: 2814890 - RNA, 23 nt, Human
uacuuucccuugcuuuucccucu

SEQ ID NO: 2814891 - RNA, 14 nt, Human
uacuuugucugaaa

SEQ ID NO: 2814892 - RNA, 16 nt, Human
uacuuugucugaaaaa

SEQ ID NO: 2814893 - RNA, 18 nt, Human
uacuuucuuaaugugacc

SEQ ID NO: 2814894 - RNA, 15 nt, Human
aauuuacuuuacaca

SEQ ID NO: 2814895 - RNA, 15 nt, Human
aauuuaguuauugau

SEQ ID NO: 2814896 - RNA, 21 nt, Human
aauuuagugaucuuagcauag

SEQ ID NO: 2814897 - RNA, 23 nt, Human
aauuuagugaucuuagcauagcu

SEQ ID NO: 2814898 - RNA, 20 nt, Human
aauuuaguaaauguuaucuu

SEQ ID NO: 2814899 - RNA, 12 nt, Human
aauuuacuauau

SEQ ID NO: 2814900 - RNA, 13 nt, Human
aauuuacuauaua

SEQ ID NO: 2814901 - RNA, 15 nt, Human
aauuuacuauauaua

SEQ ID NO: 2814902 - RNA, 16 nt, Human
aauuuacuauauauau

SEQ ID NO: 2814903 - RNA, 19 nt, Human
aauuuacuauauauauaug

SEQ ID NO: 2814904 - RNA, 16 nt, Human
aauuuaccugauuucu

SEQ ID NO: 2814905 - RNA, 15 nt, Human
aauuuacacugccau

SEQ ID NO: 2814906 - RNA, 14 nt, Human
aauuuaaauauaau

SEQ ID NO: 2814907 - RNA, 20 nt, Human
aauuggaagcugcccugccc

SEQ ID NO: 2814908 - RNA, 20 nt, Human
aauuggaacagaauguuuua

SEQ ID NO: 2814909 - RNA, 16 nt, Human
aauuggaacaaaguga

SEQ ID NO: 2814910 - RNA, 17 nt, Human
aauuggaacaaagugaa

SEQ ID NO: 2814911 - RNA, 17 nt, Human
aauugcuuuuuuaaaua

SEQ ID NO: 2814912 - RNA, 20 nt, Human
aauuuaaauauaauucugua

SEQ ID NO: 2814913 - RNA, 23 nt, Human
aauuuaaauauaauucuguaaau

SEQ ID NO: 2814914 - RNA, 18 nt, Human
aauuggaccauccuauuu

SEQ ID NO: 2814915 - RNA, 19 nt, Human
aauuggacuuucaaaauua

SEQ ID NO: 2814916 - RNA, 16 nt, Human
aauuuaaauauaauuc

SEQ ID NO: 2814917 - RNA, 19 nt, Human
aauuuaaauauaauucugu

SEQ ID NO: 2814918 - RNA, 21 nt, Human
aauuuaacuacccuuaauuac

SEQ ID NO: 2814919 - RNA, 23 nt, Human
aauuuaacuacccuuaauuacuu

SEQ ID NO: 2814920 - RNA, 21 nt, Human
aauuuaacuagacacagauaa

SEQ ID NO: 2814921 - RNA, 23 nt, Human
aauuuaagagcaguccauuucua

SEQ ID NO: 2814922 - RNA, 13 nt, Human
aauuuaaauguua

SEQ ID NO: 2814923 - RNA, 11 nt, Human
aauuuaaauuu

SEQ ID NO: 2814924 - RNA, 15 nt, Human
aauuuaaauuuaaag

SEQ ID NO: 2814925 - RNA, 17 nt, Human
aauuuaaauuuaaagau

SEQ ID NO: 2814926 - RNA, 18 nt, Human
aauuuaaauuuaaagaua

SEQ ID NO: 2814927 - RNA, 11 nt, Human
aauuuaaaugu

SEQ ID NO: 2814928 - RNA, 15 nt, Human
aauuuaagcuuaagc

SEQ ID NO: 2814929 - RNA, 14 nt, Human
aauuuaaguaucuu

SEQ ID NO: 2814930 - RNA, 14 nt, Human
aauuuaagugcgug

SEQ ID NO: 2814931 - RNA, 19 nt, Human
aauuuauuaguuaauauau

SEQ ID NO: 2814932 - RNA, 14 nt, Human
aauuucucaucaca

SEQ ID NO: 2814933 - RNA, 20 nt, Human
aauuucuucacuguugaaaa

SEQ ID NO: 2814934 - RNA, 14 nt, Human
aauuucuucaaaau

SEQ ID NO: 2814935 - RNA, 16 nt, Human
aauuucuucaaaaugu

SEQ ID NO: 2814936 - RNA, 19 nt, Human
aauuucuucaaaauguaua

SEQ ID NO: 2814937 - RNA, 17 nt, Human
aauuucuugguaagaag

SEQ ID NO: 2814938 - RNA, 23 nt, Human
aauuucuucuccuggaguugcau

SEQ ID NO: 2814939 - RNA, 21 nt, Human
aauuucuugcucuaucucuca

SEQ ID NO: 2814940 - RNA, 24 nt, Human
aauuucuugcucuaucucucaaaa

SEQ ID NO: 2814941 - RNA, 20 nt, Human
aauuucuugguaagaagccg

SEQ ID NO: 2814942 - RNA, 11 nt, Human
aauuucuuguu

SEQ ID NO: 2814943 - RNA, 15 nt, Human
aauuucuuguuucuc

SEQ ID NO: 2814944 - RNA, 22 nt, Human
aauuucuagccugcacuuugau

SEQ ID NO: 2814945 - RNA, 17 nt, Human
aauuuauacaauaucau

SEQ ID NO: 2814946 - RNA, 17 nt, Human
aauuuaucacacuucug

SEQ ID NO: 2814947 - RNA, 21 nt, Human
aauuuauaccuaccugugugg

SEQ ID NO: 2814948 - RNA, 14 nt, Human
aauuuauaugaaaa

SEQ ID NO: 2814949 - RNA, 16 nt, Human
aauuuauauguauauu

SEQ ID NO: 2814950 - RNA, 14 nt, Human
aauuuaucaaagca

SEQ ID NO: 2814951 - RNA, 15 nt, Human
aauuuaucaaagcau

SEQ ID NO: 2814952 - RNA, 16 nt, Human
aauuuaucaaagcaua

SEQ ID NO: 2814953 - RNA, 22 nt, Human
aauuuaucaaagcauagauguu

SEQ ID NO: 2814954 - RNA, 19 nt, Human
aauuuauuacuuguugcaa

SEQ ID NO: 2814955 - RNA, 17 nt, Human
aauuuauuaguuaauau

SEQ ID NO: 2814956 - RNA, 18 nt, Human
aauuuauuaguuaauaua

SEQ ID NO: 2814957 - RNA, 15 nt, Human
aauuuauuaaaauga

SEQ ID NO: 2814958 - RNA, 15 nt, Human
aauuuauaaaguacc

SEQ ID NO: 2814959 - RNA, 12 nt, Human
aauuuauaauuc

SEQ ID NO: 2814960 - RNA, 13 nt, Human
aauuuauaauuca

SEQ ID NO: 2814961 - RNA, 17 nt, Human
aauuuauaauucaguau

SEQ ID NO: 2814962 - RNA, 15 nt, Human
aauuuauacaauauc

SEQ ID NO: 2814963 - RNA, 14 nt, Human
aauuuauaaaauua

SEQ ID NO: 2814964 - RNA, 15 nt, Human
aauuuauaaaauuag

SEQ ID NO: 2814965 - RNA, 16 nt, Human
aauuuauaaaauuaga

SEQ ID NO: 2814966 - RNA, 18 nt, Human
aauuuauaaaauuagaaa

SEQ ID NO: 2814967 - RNA, 21 nt, Human
aauuuauaaaauuagaaagca

SEQ ID NO: 2814968 - RNA, 12 nt, Human
aauugagcacaa

SEQ ID NO: 2814969 - RNA, 19 nt, Human
aauugagaugauuaaaaug

SEQ ID NO: 2814970 - RNA, 12 nt, Human
aauugagacagu

SEQ ID NO: 2814971 - RNA, 23 nt, Human
aauugagaaaaauauauacuaaa

SEQ ID NO: 2814972 - RNA, 19 nt, Human
aauugagaaaaauauauac

SEQ ID NO: 2814973 - RNA, 19 nt, Human
uacuguacauaaacaauga

SEQ ID NO: 2814974 - RNA, 21 nt, Human
uacuguacauaaacaaugaug

SEQ ID NO: 2814975 - RNA, 12 nt, Human
uacuguacaaua

SEQ ID NO: 2814976 - RNA, 14 nt, Human
uacuguacaauaaa

SEQ ID NO: 2814977 - RNA, 15 nt, Human
uacuguacaauaaaa

SEQ ID NO: 2814978 - RNA, 18 nt, Human
uacuguacaauaaaaaca

SEQ ID NO: 2814979 - RNA, 16 nt, Human
uacuguaauuccucaa

SEQ ID NO: 2814980 - RNA, 15 nt, Human
uacuguaauuccuca

SEQ ID NO: 2814981 - RNA, 13 nt, Human
uacuguaauuccu

SEQ ID NO: 2814982 - RNA, 21 nt, Human
aauugcacaauauugaacuuu

SEQ ID NO: 2814983 - RNA, 18 nt, Human
aauugcacagaaguccug

SEQ ID NO: 2814984 - RNA, 19 nt, Human
aauugcacagaaguccugu

SEQ ID NO: 2814985 - RNA, 20 nt, Human
aauugcacagaaguccugua

SEQ ID NO: 2814986 - RNA, 22 nt, Human
aauugcacagaaguccuguaug

SEQ ID NO: 2814987 - RNA, 18 nt, Human
aauugcaaaucuugaaau

SEQ ID NO: 2814988 - RNA, 14 nt, Human
aauugcaaaucuug

SEQ ID NO: 2814989 - RNA, 23 nt, Human
aauugauuugcauugaacacaaa

SEQ ID NO: 2814990 - RNA, 11 nt, Human
aauugcauuga

SEQ ID NO: 2814991 - RNA, 13 nt, Human
aauugcagacugu

SEQ ID NO: 2814992 - RNA, 20 nt, Human
aauugcagauaacuuugacu

SEQ ID NO: 2814993 - RNA, 15 nt, Human
aauugcauaaagcau

SEQ ID NO: 2814994 - RNA, 16 nt, Human
aauugcauaaagcaua

SEQ ID NO: 2814995 - RNA, 21 nt, Human
aauugauuucuuuucuuccug

SEQ ID NO: 2814996 - RNA, 22 nt, Human
aauugauuucuuuucuuccugg

SEQ ID NO: 2814997 - RNA, 13 nt, Human
aauugauuugcau

SEQ ID NO: 2814998 - RNA, 22 nt, Human
aauugauuugcauugaacacaa

SEQ ID NO: 2814999 - RNA, 20 nt, Human
aauugauuugcauugaacac

SEQ ID NO: 2815000 - RNA, 16 nt, Human
aauugauuugcauuga

SEQ ID NO: 2815001 - RNA, 14 nt, Human
aauugauuugcauu

SEQ ID NO: 2815002 - RNA, 15 nt, Human
uacugacccuggggc

SEQ ID NO: 2815003 - RNA, 17 nt, Human
uacugacccuggggcug

SEQ ID NO: 2815004 - RNA, 19 nt, Human
uacugacccuggggcuggc

SEQ ID NO: 2815005 - RNA, 22 nt, Human
uacugacccuggggcuggcuuu

SEQ ID NO: 2815006 - RNA, 20 nt, Human
uacugaaagguuacccugua

SEQ ID NO: 2815007 - RNA, 22 nt, Human
uacucucacacugguucucaau

SEQ ID NO: 2815008 - RNA, 20 nt, Human
uacucuaugccccaaauaua

SEQ ID NO: 2815009 - RNA, 14 nt, Human
uacucuagaugaag

SEQ ID NO: 2815010 - RNA, 14 nt, Human
uacucuagauaccu

SEQ ID NO: 2815011 - RNA, 21 nt, Human
uacucuagauaccuaaaacau

SEQ ID NO: 2815012 - RNA, 16 nt, Human
uacucuuucuguauau

SEQ ID NO: 2815013 - RNA, 13 nt, Human
uacugaaagccuu

SEQ ID NO: 2815014 - RNA, 14 nt, Human
uacugaaacagauu

SEQ ID NO: 2815015 - RNA, 15 nt, Human
uacucuuucuguaua

SEQ ID NO: 2815016 - RNA, 14 nt, Human
uacucuuucuguau

SEQ ID NO: 2815017 - RNA, 13 nt, Human
uacucuuucugua

SEQ ID NO: 2815018 - RNA, 20 nt, Human
uacugagaaaagccucucca

SEQ ID NO: 2815019 - RNA, 12 nt, Human
uacugggccuua

SEQ ID NO: 2815020 - RNA, 22 nt, Human
uacugggccuuagugggccagg

SEQ ID NO: 2815021 - RNA, 23 nt, Human
uacugggccuuagugggccaggg

SEQ ID NO: 2815022 - RNA, 14 nt, Human
uacugggugucauu

SEQ ID NO: 2815023 - RNA, 15 nt, Human
uacugggugucauuu

SEQ ID NO: 2815024 - RNA, 17 nt, Human
uacugggugucauuuca

SEQ ID NO: 2815025 - RNA, 20 nt, Human
uacugggugucauuucauuc

SEQ ID NO: 2815026 - RNA, 22 nt, Human
uacugggugucauuucauucca

SEQ ID NO: 2815027 - RNA, 23 nt, Human
uacugggugucauuucauuccau

SEQ ID NO: 2815028 - RNA, 23 nt, Human
uacuguaauaauaccucaauguu

SEQ ID NO: 2815029 - RNA, 20 nt, Human
uacuaaaaguucuucuccaa

SEQ ID NO: 2815030 - RNA, 12 nt, Human
uacuaaaauaua

SEQ ID NO: 2815031 - RNA, 13 nt, Human
uacuaaaauauau

SEQ ID NO: 2815032 - RNA, 13 nt, Human
uacuagaaugcuu

SEQ ID NO: 2815033 - RNA, 14 nt, Human
uacuagaaugcuua

SEQ ID NO: 2815034 - RNA, 16 nt, Human
uacgucugacaggcaa

SEQ ID NO: 2815035 - RNA, 17 nt, Human
uacgugacccucugcug

SEQ ID NO: 2815036 - RNA, 21 nt, Human
uacgugacccucugcugaaga

SEQ ID NO: 2815037 - RNA, 22 nt, Human
uacgugacccucugcugaagac

SEQ ID NO: 2815038 - RNA, 13 nt, Human
uacuauuuagaua

SEQ ID NO: 2815039 - RNA, 18 nt, Human
uacuauuuucuacaauua

SEQ ID NO: 2815040 - RNA, 19 nt, Human
uacuauuuucuacaauuaa

SEQ ID NO: 2815041 - RNA, 17 nt, Human
uacuauuuugacaguua

SEQ ID NO: 2815042 - RNA, 20 nt, Human
uacuagcuuuucaaacaaga

SEQ ID NO: 2815043 - RNA, 23 nt, Human
uacuagcuuuucaaacaagaaug

SEQ ID NO: 2815044 - RNA, 21 nt, Human
uacuauuuaaagccuccucau

SEQ ID NO: 2815045 - RNA, 22 nt, Human
uacuauuuaaagccuccucauc

SEQ ID NO: 2815046 - RNA, 12 nt, Human
uacuauuuaaag

SEQ ID NO: 2815047 - RNA, 19 nt, Human
uacuauuuaaagccuccuc

SEQ ID NO: 2815048 - RNA, 15 nt, Human
uacgucugacaggca

SEQ ID NO: 2815049 - RNA, 13 nt, Human
uacggacaccccc

SEQ ID NO: 2815050 - RNA, 14 nt, Human
uacggacacccccu

SEQ ID NO: 2815051 - RNA, 12 nt, Human
uacgcuuuucuu

SEQ ID NO: 2815052 - RNA, 17 nt, Human
uacgcuuuucuuuguua

SEQ ID NO: 2815053 - RNA, 19 nt, Human
uacggaccagguauagaga

SEQ ID NO: 2815054 - RNA, 19 nt, Human
uacggaucaucaacaagau

SEQ ID NO: 2815055 - RNA, 21 nt, Human
uacgcucuccuuucuuucuaa

SEQ ID NO: 2815056 - RNA, 13 nt, Human
uacgcuggugcug

SEQ ID NO: 2815057 - RNA, 14 nt, Human
uacgcuggugcuga

SEQ ID NO: 2815058 - RNA, 19 nt, Human
uacgcucuccuuucuuucu

SEQ ID NO: 2815059 - RNA, 15 nt, Human
uacgcucuccuuucu

SEQ ID NO: 2815060 - RNA, 15 nt, Human
uacgcuuugauucau

SEQ ID NO: 2815061 - RNA, 12 nt, Human
uacgcuuuguca

SEQ ID NO: 2815062 - RNA, 20 nt, Human
uacgcuuugucacacaaaaa

SEQ ID NO: 2815063 - RNA, 14 nt, Human
uacgcuuugauuca

SEQ ID NO: 2815064 - RNA, 13 nt, Human
uacgcucuccuuu

SEQ ID NO: 2815065 - RNA, 17 nt, Human
aauugaccaucugcuuu

SEQ ID NO: 2815066 - RNA, 18 nt, Human
aauugaccaucugcuuuu

SEQ ID NO: 2815067 - RNA, 19 nt, Human
aauugaccaucugcuuuua

SEQ ID NO: 2815068 - RNA, 24 nt, Human
uacgcuccaucgcugucaucucag

SEQ ID NO: 2815069 - RNA, 23 nt, Human
aauguguguauucuuaaaaugca

SEQ ID NO: 2815070 - RNA, 18 nt, Human
aauguguguauguguauu

SEQ ID NO: 2815071 - RNA, 21 nt, Human
aauguguguauguguauuuau

SEQ ID NO: 2815072 - RNA, 16 nt, Human
aauguguggccugcac

SEQ ID NO: 2815073 - RNA, 16 nt, Human
aaugugugguggccuc

SEQ ID NO: 2815074 - RNA, 21 nt, Human
aaugugugguggccucagcug

SEQ ID NO: 2815075 - RNA, 19 nt, Human
aaugugugccauagaguuu

SEQ ID NO: 2815076 - RNA, 12 nt, Human
aauguguguaug

SEQ ID NO: 2815077 - RNA, 13 nt, Human
aauguguguaugu

SEQ ID NO: 2815078 - RNA, 13 nt, Human
aaugugugaaaaa

SEQ ID NO: 2815079 - RNA, 22 nt, Human
aaugugugaaaaagaugccaau

SEQ ID NO: 2815080 - RNA, 19 nt, Human
aauguguaucggaugcuuu

SEQ ID NO: 2815081 - RNA, 19 nt, Human
aauguguacaauguacaca

SEQ ID NO: 2815082 - RNA, 14 nt, Human
aauguguccuaucu

SEQ ID NO: 2815083 - RNA, 19 nt, Human
aauguguccuaucuaucuu

SEQ ID NO: 2815084 - RNA, 23 nt, Human
aauguguccuaucuaucuuccaa

SEQ ID NO: 2815085 - RNA, 18 nt, Human
aaugugguuucaaucuaa

SEQ ID NO: 2815086 - RNA, 17 nt, Human
aaugugguuuuccugaa

SEQ ID NO: 2815087 - RNA, 23 nt, Human
aauguguaaagaucuacaugaau

SEQ ID NO: 2815088 - RNA, 15 nt, Human
aauguggucucagga

SEQ ID NO: 2815089 - RNA, 16 nt, Human
aauguggucucaggau

SEQ ID NO: 2815090 - RNA, 14 nt, Human
aaugugggcagaga

SEQ ID NO: 2815091 - RNA, 20 nt, Human
aauguggccuaaaaaugcaa

SEQ ID NO: 2815092 - RNA, 13 nt, Human
aaugugggcacug

SEQ ID NO: 2815093 - RNA, 15 nt, Human
acacaccucaccaga

SEQ ID NO: 2815094 - RNA, 13 nt, Human
acacacgcacgca

SEQ ID NO: 2815095 - RNA, 17 nt, Human
acacaccuuuaaguaga

SEQ ID NO: 2815096 - RNA, 14 nt, Human
acacacgcacgcac

SEQ ID NO: 2815097 - RNA, 15 nt, Human
acacacgcacgcaca

SEQ ID NO: 2815098 - RNA, 16 nt, Human
acacacgcacgcacac

SEQ ID NO: 2815099 - RNA, 17 nt, Human
acacacgcacgcacaca

SEQ ID NO: 2815100 - RNA, 13 nt, Human
acacacccugagg

SEQ ID NO: 2815101 - RNA, 14 nt, Human
acacacccugaggu

SEQ ID NO: 2815102 - RNA, 12 nt, Human
acacacauagau

SEQ ID NO: 2815103 - RNA, 12 nt, Human
acacacaugcac

SEQ ID NO: 2815104 - RNA, 13 nt, Human
acacacaugcaca

SEQ ID NO: 2815105 - RNA, 14 nt, Human
acacacaugcacac

SEQ ID NO: 2815106 - RNA, 17 nt, Human
acacacaugcacacaca

SEQ ID NO: 2815107 - RNA, 21 nt, Human
acacacagguggugucacugu

SEQ ID NO: 2815108 - RNA, 23 nt, Human
acacacagguggugucacugucc

SEQ ID NO: 2815109 - RNA, 21 nt, Human
acacacauauaaacaucacac

SEQ ID NO: 2815110 - RNA, 12 nt, Human
acacacauacac

SEQ ID NO: 2815111 - RNA, 19 nt, Human
acacacagcucuguccugg

SEQ ID NO: 2815112 - RNA, 12 nt, Human
acacacagcucc

SEQ ID NO: 2815113 - RNA, 20 nt, Human
acacacagcuaacacacagc

SEQ ID NO: 2815114 - RNA, 13 nt, Human
acacacacauaca

SEQ ID NO: 2815115 - RNA, 12 nt, Human
acacacagcucu

SEQ ID NO: 2815116 - RNA, 11 nt, Human
acacacagcuc

SEQ ID NO: 2815117 - RNA, 11 nt, Human
acacacacaua

SEQ ID NO: 2815118 - RNA, 16 nt, Human
acaaugguuuuuaaau

SEQ ID NO: 2815119 - RNA, 18 nt, Human
acaaugguuuuuaaauuu

SEQ ID NO: 2815120 - RNA, 14 nt, Human
acaauguacacacu

SEQ ID NO: 2815121 - RNA, 23 nt, Human
acaauguagauggccucuuacua

SEQ ID NO: 2815122 - RNA, 18 nt, Human
acacaacuauuuuuccaa

SEQ ID NO: 2815123 - RNA, 19 nt, Human
acaauguauuuauuuaaaa

SEQ ID NO: 2815124 - RNA, 14 nt, Human
acaauguauuuauu

SEQ ID NO: 2815125 - RNA, 17 nt, Human
acaauguauuuauuuaa

SEQ ID NO: 2815126 - RNA, 22 nt, Human
acacaagaagaagggcacccua

SEQ ID NO: 2815127 - RNA, 16 nt, Human
acacacacacgcacgc

SEQ ID NO: 2815128 - RNA, 22 nt, Human
acaaugguguuauuugaaacuu

SEQ ID NO: 2815129 - RNA, 14 nt, Human
acacacacagaugu

SEQ ID NO: 2815130 - RNA, 13 nt, Human
acacacacagaaa

SEQ ID NO: 2815131 - RNA, 13 nt, Human
acacacacacgca

SEQ ID NO: 2815132 - RNA, 14 nt, Human
acacacacacgcac

SEQ ID NO: 2815133 - RNA, 17 nt, Human
acaauggggauguugug

SEQ ID NO: 2815134 - RNA, 18 nt, Human
acaauggcagaacaggug

SEQ ID NO: 2815135 - RNA, 17 nt, Human
acaaugcugauuuggug

SEQ ID NO: 2815136 - RNA, 13 nt, Human
acaaugcagcaag

SEQ ID NO: 2815137 - RNA, 22 nt, Human
acaaugcagcaaggcccugcug

SEQ ID NO: 2815138 - RNA, 15 nt, Human
uagcuuauuauugaa

SEQ ID NO: 2815139 - RNA, 13 nt, Human
acacacucagugc

SEQ ID NO: 2815140 - RNA, 14 nt, Human
acacacucagugca

SEQ ID NO: 2815141 - RNA, 12 nt, Human
acacacugaaag

SEQ ID NO: 2815142 - RNA, 14 nt, Human
acacacugaaagcu

SEQ ID NO: 2815143 - RNA, 18 nt, Human
acacacgcacgcacacac

SEQ ID NO: 2815144 - RNA, 22 nt, Human
acacagcucuucuccaggcugu

SEQ ID NO: 2815145 - RNA, 22 nt, Human
acacagcugagagacuuuuaau

SEQ ID NO: 2815146 - RNA, 11 nt, Human
acacagcuguu

SEQ ID NO: 2815147 - RNA, 18 nt, Human
acacagcuguucuucugu

SEQ ID NO: 2815148 - RNA, 11 nt, Human
acacagugagu

SEQ ID NO: 2815149 - RNA, 19 nt, Human
acacagucuuggcucacug

SEQ ID NO: 2815150 - RNA, 15 nt, Human
acacagucaaaauaa

SEQ ID NO: 2815151 - RNA, 18 nt, Human
acacagucaaaauaauuc

SEQ ID NO: 2815152 - RNA, 19 nt, Human
acacagucaaaauaauucu

SEQ ID NO: 2815153 - RNA, 23 nt, Human
acacagucaaaauaauucuaaau

SEQ ID NO: 2815154 - RNA, 17 nt, Human
acacagugaccauacua

SEQ ID NO: 2815155 - RNA, 20 nt, Human
uagguugccaauaauacacu

SEQ ID NO: 2815156 - RNA, 14 nt, Human
uaguaauagagcaa

SEQ ID NO: 2815157 - RNA, 16 nt, Human
uaguaaguaauuaugc

SEQ ID NO: 2815158 - RNA, 17 nt, Human
uaguaaguaauuaugca

SEQ ID NO: 2815159 - RNA, 21 nt, Human
uaguaaguaauuaugcacuaa

SEQ ID NO: 2815160 - RNA, 17 nt, Human
uaguaaguucagcacuu

SEQ ID NO: 2815161 - RNA, 18 nt, Human
uaguaaguucagcacuug

SEQ ID NO: 2815162 - RNA, 20 nt, Human
uaguaaguuuuucuucauga

SEQ ID NO: 2815163 - RNA, 16 nt, Human
uaguaagaaaacauca

SEQ ID NO: 2815164 - RNA, 11 nt, Human
uagguuucaaa

SEQ ID NO: 2815165 - RNA, 14 nt, Human
uagguuucaaagau

SEQ ID NO: 2815166 - RNA, 19 nt, Human
uaguaacuucuuauggaau

SEQ ID NO: 2815167 - RNA, 22 nt, Human
uagucuucucaaauuagaaagu

SEQ ID NO: 2815168 - RNA, 20 nt, Human
uaguaauagagcaaaauuga

SEQ ID NO: 2815169 - RNA, 15 nt, Human
uaguacugcucuugu

SEQ ID NO: 2815170 - RNA, 13 nt, Human
uaguacugcucuu

SEQ ID NO: 2815171 - RNA, 14 nt, Human
uaguacuguguacu

SEQ ID NO: 2815172 - RNA, 18 nt, Human
uaguacuguguacuguau

SEQ ID NO: 2815173 - RNA, 13 nt, Human
uaguagagacagg

SEQ ID NO: 2815174 - RNA, 15 nt, Human
uaguagacacacuau

SEQ ID NO: 2815175 - RNA, 10 nt, Human
uaguccuugg

SEQ ID NO: 2815176 - RNA, 13 nt, Human
uaguccuuggcau

SEQ ID NO: 2815177 - RNA, 14 nt, Human
uaguccuuggcaua

SEQ ID NO: 2815178 - RNA, 13 nt, Human
uagucuaguguag

SEQ ID NO: 2815179 - RNA, 16 nt, Human
uagucuaguguaguau

SEQ ID NO: 2815180 - RNA, 19 nt, Human
acacuaaccacgcuggacc

SEQ ID NO: 2815181 - RNA, 17 nt, Human
acacuaaccacgcugga

SEQ ID NO: 2815182 - RNA, 16 nt, Human
acacuaaccacgcugg

SEQ ID NO: 2815183 - RNA, 14 nt, Human
acacuacaccacac

SEQ ID NO: 2815184 - RNA, 15 nt, Human
acacuacaccacaca

SEQ ID NO: 2815185 - RNA, 16 nt, Human
acacuacaccacacac

SEQ ID NO: 2815186 - RNA, 17 nt, Human
acacuacaccacacaca

SEQ ID NO: 2815187 - RNA, 21 nt, Human
acacuacaccacacacaacag

SEQ ID NO: 2815188 - RNA, 15 nt, Human
uauaacuaacagcau

SEQ ID NO: 2815189 - RNA, 17 nt, Human
uauaacgugauacauuu

SEQ ID NO: 2815190 - RNA, 15 nt, Human
uauaaccccagcucc

SEQ ID NO: 2815191 - RNA, 16 nt, Human
uauaacccuguuacaa

SEQ ID NO: 2815192 - RNA, 19 nt, Human
uauaacccuguuacaaagc

SEQ ID NO: 2815193 - RNA, 15 nt, Human
uauaaccauaugaua

SEQ ID NO: 2815194 - RNA, 18 nt, Human
uauaacuaguccuuuacu

SEQ ID NO: 2815195 - RNA, 14 nt, Human
uauaacuaguccuu

SEQ ID NO: 2815196 - RNA, 23 nt, Human
acacuaauuccuuucuauccuac

SEQ ID NO: 2815197 - RNA, 14 nt, Human
acacuacauuagaa

SEQ ID NO: 2815198 - RNA, 20 nt, Human
acacuaccagcguauauaua

SEQ ID NO: 2815199 - RNA, 14 nt, Human
acacuacugagaau

SEQ ID NO: 2815200 - RNA, 13 nt, Human
acaccucccagga

SEQ ID NO: 2815201 - RNA, 21 nt, Human
acaccccucaguugugcagcu

SEQ ID NO: 2815202 - RNA, 12 nt, Human
acaccucccagg

SEQ ID NO: 2815203 - RNA, 19 nt, Human
acaccucccaggagacagu

SEQ ID NO: 2815204 - RNA, 23 nt, Human
acacccagccucaguccuccccu

SEQ ID NO: 2815205 - RNA, 17 nt, Human
acacccagccucagucc

SEQ ID NO: 2815206 - RNA, 20 nt, Human
acacccagccucaguccucc

SEQ ID NO: 2815207 - RNA, 13 nt, Human
acacccagccuca

SEQ ID NO: 2815208 - RNA, 14 nt, Human
acacccagccucag

SEQ ID NO: 2815209 - RNA, 16 nt, Human
acacccagccucaguc

SEQ ID NO: 2815210 - RNA, 12 nt, Human
acacccagccuc

SEQ ID NO: 2815211 - RNA, 17 nt, Human
acacccacucagcuccg

SEQ ID NO: 2815212 - RNA, 16 nt, Human
acaccuugacagggca

SEQ ID NO: 2815213 - RNA, 15 nt, Human
acaccuugacagggc

SEQ ID NO: 2815214 - RNA, 14 nt, Human
acaccuugacaggg

SEQ ID NO: 2815215 - RNA, 18 nt, Human
acaccuucuuauuauaua

SEQ ID NO: 2815216 - RNA, 19 nt, Human
acaccuucuuauuauauau

SEQ ID NO: 2815217 - RNA, 21 nt, Human
acaccuucuuauuauauauau

SEQ ID NO: 2815218 - RNA, 14 nt, Human
acaccugcccugcc

SEQ ID NO: 2815219 - RNA, 13 nt, Human
acaccugcccugc

SEQ ID NO: 2815220 - RNA, 19 nt, Human
uauaaaauaguuguccaua

SEQ ID NO: 2815221 - RNA, 19 nt, Human
uauaaaauauaaacaaaga

SEQ ID NO: 2815222 - RNA, 18 nt, Human
uauaaaauauaaacaaag

SEQ ID NO: 2815223 - RNA, 21 nt, Human
uauaaaaauagauaauuaaaa

SEQ ID NO: 2815224 - RNA, 13 nt, Human
uauaaaaauauau

SEQ ID NO: 2815225 - RNA, 16 nt, Human
uauaaaaauauauaua

SEQ ID NO: 2815226 - RNA, 14 nt, Human
uaguuuucuuguug

SEQ ID NO: 2815227 - RNA, 19 nt, Human
uaguuuucuuguugcuuug

SEQ ID NO: 2815228 - RNA, 13 nt, Human
uaguuauuuugca

SEQ ID NO: 2815229 - RNA, 16 nt, Human
uaguuauaguuucaga

SEQ ID NO: 2815230 - RNA, 15 nt, Human
uaguuauauaauugu

SEQ ID NO: 2815231 - RNA, 12 nt, Human
uaguguucuguu

SEQ ID NO: 2815232 - RNA, 15 nt, Human
uaguguucuguuugu

SEQ ID NO: 2815233 - RNA, 20 nt, Human
uaguuuuuacagcuguguua

SEQ ID NO: 2815234 - RNA, 17 nt, Human
uaguuuuuguaauuuau

SEQ ID NO: 2815235 - RNA, 16 nt, Human
acacaugcuaggaugc

SEQ ID NO: 2815236 - RNA, 12 nt, Human
uauaaaaugugc

SEQ ID NO: 2815237 - RNA, 21 nt, Human
uauaaaaugugcagaugcaau

SEQ ID NO: 2815238 - RNA, 15 nt, Human
uauaaaauuaagcaa

SEQ ID NO: 2815239 - RNA, 12 nt, Human
acacaugcacac

SEQ ID NO: 2815240 - RNA, 13 nt, Human
acacaugcacaca

SEQ ID NO: 2815241 - RNA, 15 nt, Human
acacaugcacacaca

SEQ ID NO: 2815242 - RNA, 14 nt, Human
acacauggaaaccc

SEQ ID NO: 2815243 - RNA, 18 nt, Human
acacauggaaacccauag

SEQ ID NO: 2815244 - RNA, 19 nt, Human
acacauggaaacccauagg

SEQ ID NO: 2815245 - RNA, 13 nt, Human
acacauuguuauu

SEQ ID NO: 2815246 - RNA, 14 nt, Human
acacauuguuauuu

SEQ ID NO: 2815247 - RNA, 22 nt, Human
acacauuguuauuuucagugau

SEQ ID NO: 2815248 - RNA, 23 nt, Human
acacauuagauuuuauuuuacua

SEQ ID NO: 2815249 - RNA, 13 nt, Human
acacccagcccac

SEQ ID NO: 2815250 - RNA, 12 nt, Human
acacccagccca

SEQ ID NO: 2815251 - RNA, 11 nt, Human
acacauuugua

SEQ ID NO: 2815252 - RNA, 12 nt, Human
acacauuuguac

SEQ ID NO: 2815253 - RNA, 13 nt, Human
acacauuuguaca

SEQ ID NO: 2815254 - RNA, 15 nt, Human
acacauuuguacaga

SEQ ID NO: 2815255 - RNA, 18 nt, Human
acacauuuguacagaauu

SEQ ID NO: 2815256 - RNA, 15 nt, Human
acacccacucagcuc

SEQ ID NO: 2815257 - RNA, 13 nt, Human
acacuccagugcc

SEQ ID NO: 2815258 - RNA, 13 nt, Human
acacuccuugcau

SEQ ID NO: 2815259 - RNA, 14 nt, Human
acacuccuugcauc

SEQ ID NO: 2815260 - RNA, 17 nt, Human
acacuccagccugagca

SEQ ID NO: 2815261 - RNA, 16 nt, Human
acacuccagccugagc

SEQ ID NO: 2815262 - RNA, 15 nt, Human
acacuccagccugag

SEQ ID NO: 2815263 - RNA, 14 nt, Human
acacuccagccuga

SEQ ID NO: 2815264 - RNA, 12 nt, Human
acacuccagccu

SEQ ID NO: 2815265 - RNA, 16 nt, Human
acacucugcagacugc

SEQ ID NO: 2815266 - RNA, 19 nt, Human
acacucugccagcaaagag

SEQ ID NO: 2815267 - RNA, 15 nt, Human
acacucuccuugcag

SEQ ID NO: 2815268 - RNA, 17 nt, Human
acacucuccuugcaguu

SEQ ID NO: 2815269 - RNA, 18 nt, Human
acacucuccuugcaguuc

SEQ ID NO: 2815270 - RNA, 22 nt, Human
acacucuccuugcaguucuuga

SEQ ID NO: 2815271 - RNA, 23 nt, Human
acacucuccuugcaguucuugag

SEQ ID NO: 2815272 - RNA, 14 nt, Human
acacucucuggaag

SEQ ID NO: 2815273 - RNA, 23 nt, Human
acacucucuggaagcccuggaga

SEQ ID NO: 2815274 - RNA, 14 nt, Human
uauaagucacaaag

SEQ ID NO: 2815275 - RNA, 15 nt, Human
uauaagucacaaaga

SEQ ID NO: 2815276 - RNA, 15 nt, Human
uauaagguuuuaagu

SEQ ID NO: 2815277 - RNA, 18 nt, Human
uauaaguaacuuuauucu

SEQ ID NO: 2815278 - RNA, 22 nt, Human
uauaaguaacuuuauucuugaa

SEQ ID NO: 2815279 - RNA, 20 nt, Human
uauaagguguuuucugugua

SEQ ID NO: 2815280 - RNA, 21 nt, Human
uauaagguguuuucuguguaa

SEQ ID NO: 2815281 - RNA, 22 nt, Human
uauaagguguuuucuguguaac

SEQ ID NO: 2815282 - RNA, 23 nt, Human
uauaagguguuuucuguguaacc

SEQ ID NO: 2815283 - RNA, 16 nt, Human
uauaaguagcaggcca

SEQ ID NO: 2815284 - RNA, 20 nt, Human
acacucaccaugaagcgaaa

SEQ ID NO: 2815285 - RNA, 14 nt, Human
acacucagaccuga

SEQ ID NO: 2815286 - RNA, 19 nt, Human
acacucagaccugaauucu

SEQ ID NO: 2815287 - RNA, 21 nt, Human
acacucuuuugcuuuauucca

SEQ ID NO: 2815288 - RNA, 13 nt, Human
acacugaaaaauu

SEQ ID NO: 2815289 - RNA, 14 nt, Human
acacugaaaaauua

SEQ ID NO: 2815290 - RNA, 16 nt, Human
acacugaaaaauuaua

SEQ ID NO: 2815291 - RNA, 20 nt, Human
acacucugggcuccagagug

SEQ ID NO: 2815292 - RNA, 22 nt, Human
acacucuucuaugacccagcau

SEQ ID NO: 2815293 - RNA, 15 nt, Human
uauauuuaaugauaa

SEQ ID NO: 2815294 - RNA, 15 nt, Human
uauauuuaacaagau

SEQ ID NO: 2815295 - RNA, 20 nt, Human
uauauuuaagcaacaucuuu

SEQ ID NO: 2815296 - RNA, 13 nt, Human
uauauuuaaacuc

SEQ ID NO: 2815297 - RNA, 14 nt, Human
uauauuuaaacuca

SEQ ID NO: 2815298 - RNA, 13 nt, Human
uauauuauuuggc

SEQ ID NO: 2815299 - RNA, 14 nt, Human
uauauuauuuggca

SEQ ID NO: 2815300 - RNA, 22 nt, Human
uauauuauuuggcaguuuggua

SEQ ID NO: 2815301 - RNA, 12 nt, Human
uauauucaacca

SEQ ID NO: 2815302 - RNA, 13 nt, Human
uauauucaaccau

SEQ ID NO: 2815303 - RNA, 14 nt, Human
uauauucaaccaug

SEQ ID NO: 2815304 - RNA, 21 nt, Human
uauauucaaccauggacuuua

SEQ ID NO: 2815305 - RNA, 14 nt, Human
uauauucauauauu

SEQ ID NO: 2815306 - RNA, 18 nt, Human
uauauucccaauagcaac

SEQ ID NO: 2815307 - RNA, 15 nt, Human
uauauuccuaaacua

SEQ ID NO: 2815308 - RNA, 15 nt, Human
acagacacaggcccg

SEQ ID NO: 2815309 - RNA, 17 nt, Human
acagacacaggcccggc

SEQ ID NO: 2815310 - RNA, 22 nt, Human
acagacacaggcccggcuccag

SEQ ID NO: 2815311 - RNA, 18 nt, Human
acagacacaggcccggcu

SEQ ID NO: 2815312 - RNA, 21 nt, Human
acagacuggaagcacagcuuc

SEQ ID NO: 2815313 - RNA, 19 nt, Human
acagacuggaagcacagcu

SEQ ID NO: 2815314 - RNA, 17 nt, Human
acagacuggaagcacag

SEQ ID NO: 2815315 - RNA, 16 nt, Human
acacuguuguuuaguu

SEQ ID NO: 2815316 - RNA, 20 nt, Human
acacuuguauaaauguauau

SEQ ID NO: 2815317 - RNA, 20 nt, Human
acacuuguuccagcucuuug

SEQ ID NO: 2815318 - RNA, 19 nt, Human
acacuuguuccagcucuuu

SEQ ID NO: 2815319 - RNA, 19 nt, Human
acacuugugauuauaaaau

SEQ ID NO: 2815320 - RNA, 22 nt, Human
acacuugugauuauaaaauuaa

SEQ ID NO: 2815321 - RNA, 17 nt, Human
acagaaacaaaaacacu

SEQ ID NO: 2815322 - RNA, 12 nt, Human
acagaaacaaaa

SEQ ID NO: 2815323 - RNA, 11 nt, Human
acacuuuuaug

SEQ ID NO: 2815324 - RNA, 15 nt, Human
acacuuuucaccucc

SEQ ID NO: 2815325 - RNA, 19 nt, Human
acacuuuucaccuccuuca

SEQ ID NO: 2815326 - RNA, 15 nt, Human
acacuuuggaccuua

SEQ ID NO: 2815327 - RNA, 19 nt, Human
acagaaacacugccuuuuu

SEQ ID NO: 2815328 - RNA, 15 nt, Human
acagaaaccuuuuua

SEQ ID NO: 2815329 - RNA, 20 nt, Human
acagaaaccuuuuuaaaaau

SEQ ID NO: 2815330 - RNA, 18 nt, Human
acagaaacgcauccagca

SEQ ID NO: 2815331 - RNA, 14 nt, Human
acagaaacacugcc

SEQ ID NO: 2815332 - RNA, 13 nt, Human
acagaaacacugc

SEQ ID NO: 2815333 - RNA, 12 nt, Human
acagaaacacug

SEQ ID NO: 2815334 - RNA, 21 nt, Human
acacugaaagcucuguugcaa

SEQ ID NO: 2815335 - RNA, 18 nt, Human
acagaaacacugccuuuu

SEQ ID NO: 2815336 - RNA, 15 nt, Human
acagaaacacugccu

SEQ ID NO: 2815337 - RNA, 17 nt, Human
acagaaaccuauccuca

SEQ ID NO: 2815338 - RNA, 22 nt, Human
acagaaaccuauccucacugcc

SEQ ID NO: 2815339 - RNA, 12 nt, Human
acacuuucucuu

SEQ ID NO: 2815340 - RNA, 16 nt, Human
acacuuugccuccugu

SEQ ID NO: 2815341 - RNA, 19 nt, Human
acacuuugccuccugugua

SEQ ID NO: 2815342 - RNA, 20 nt, Human
acacuuugccuccuguguac

SEQ ID NO: 2815343 - RNA, 23 nt, Human
acacuuugccuccuguguacugu

SEQ ID NO: 2815344 - RNA, 23 nt, Human
acacuuguugauuaauggaaaug

SEQ ID NO: 2815345 - RNA, 20 nt, Human
acacuuguugauuaauggaa

SEQ ID NO: 2815346 - RNA, 13 nt, Human
acagccgcagccu

SEQ ID NO: 2815347 - RNA, 19 nt, Human
acagccgauucaccugagc

SEQ ID NO: 2815348 - RNA, 20 nt, Human
acagccgcagccucccucug

SEQ ID NO: 2815349 - RNA, 23 nt, Human
uaucuuggugaauuuuuuuuucc

SEQ ID NO: 2815350 - RNA, 13 nt, Human
uaucuuguguugu

SEQ ID NO: 2815351 - RNA, 16 nt, Human
uaucuuguguuguccu

SEQ ID NO: 2815352 - RNA, 18 nt, Human
uaucuuguguuguccuuu

SEQ ID NO: 2815353 - RNA, 15 nt, Human
uaucuuguuccaagg

SEQ ID NO: 2815354 - RNA, 13 nt, Human
uaugaaauaaaga

SEQ ID NO: 2815355 - RNA, 14 nt, Human
uaugaaagauugug

SEQ ID NO: 2815356 - RNA, 17 nt, Human
uaugaaagauugugggg

SEQ ID NO: 2815357 - RNA, 23 nt, Human
uaugaaagauggcugugccucug

SEQ ID NO: 2815358 - RNA, 20 nt, Human
uaugaaagauggcugugccu

SEQ ID NO: 2815359 - RNA, 22 nt, Human
uaugaaagauggcugugccucu

SEQ ID NO: 2815360 - RNA, 19 nt, Human
uaugaaagaauauauuuau

SEQ ID NO: 2815361 - RNA, 23 nt, Human
uaugaaagaauauauuuauuuaa

SEQ ID NO: 2815362 - RNA, 15 nt, Human
uaucuuuaagaaaaa

SEQ ID NO: 2815363 - RNA, 23 nt, Human
uaucuuucgugauaaacuuugcu

SEQ ID NO: 2815364 - RNA, 22 nt, Human
acagauggcacuuugaaggggc

SEQ ID NO: 2815365 - RNA, 18 nt, Human
acagaugccuuuuuugua

SEQ ID NO: 2815366 - RNA, 19 nt, Human
acagaugccuuuuuuguag

SEQ ID NO: 2815367 - RNA, 22 nt, Human
acagaugccccagagcuguuua

SEQ ID NO: 2815368 - RNA, 21 nt, Human
acagaugccccagagcuguuu

SEQ ID NO: 2815369 - RNA, 22 nt, Human
acagaugugggcuuugauuucc

SEQ ID NO: 2815370 - RNA, 19 nt, Human
acagauguucccccaucuc

SEQ ID NO: 2815371 - RNA, 21 nt, Human
acagauguucgguuuuuuucc

SEQ ID NO: 2815372 - RNA, 15 nt, Human
acagauucacacugu

SEQ ID NO: 2815373 - RNA, 19 nt, Human
acagauucacacugucugg

SEQ ID NO: 2815374 - RNA, 13 nt, Human
acagauucagucu

SEQ ID NO: 2815375 - RNA, 14 nt, Human
acagauucagucuu

SEQ ID NO: 2815376 - RNA, 15 nt, Human
acagauucagucuug

SEQ ID NO: 2815377 - RNA, 17 nt, Human
acagauucagucuugcc

SEQ ID NO: 2815378 - RNA, 18 nt, Human
acagauucagucuugccu

SEQ ID NO: 2815379 - RNA, 19 nt, Human
acagauucagucuugccuu

SEQ ID NO: 2815380 - RNA, 17 nt, Human
acagauucacacugucu

SEQ ID NO: 2815381 - RNA, 16 nt, Human
acagauucacacuguc

SEQ ID NO: 2815382 - RNA, 13 nt, Human
acagcaaaccaag

SEQ ID NO: 2815383 - RNA, 14 nt, Human
acagcaaaccaaga

SEQ ID NO: 2815384 - RNA, 15 nt, Human
acagcaaaccaagag

SEQ ID NO: 2815385 - RNA, 16 nt, Human
acagcaaaccaagaga

SEQ ID NO: 2815386 - RNA, 17 nt, Human
acagcaaaccaagagau

SEQ ID NO: 2815387 - RNA, 18 nt, Human
acagcaaaccaagagauu

SEQ ID NO: 2815388 - RNA, 21 nt, Human
acagcaaaccaagagauugcu

SEQ ID NO: 2815389 - RNA, 23 nt, Human
acagcaaaccaagagauugcuaa

SEQ ID NO: 2815390 - RNA, 19 nt, Human
acagaugccccagagcugu

SEQ ID NO: 2815391 - RNA, 18 nt, Human
acagaugccccagagcug

SEQ ID NO: 2815392 - RNA, 17 nt, Human
acagaugccccagagcu

SEQ ID NO: 2815393 - RNA, 16 nt, Human
acagaugccccagagc

SEQ ID NO: 2815394 - RNA, 14 nt, Human
acagaugccccaga

SEQ ID NO: 2815395 - RNA, 13 nt, Human
acagaugccccag

SEQ ID NO: 2815396 - RNA, 14 nt, Human
acagauagagaguu

SEQ ID NO: 2815397 - RNA, 15 nt, Human
acagauaauaauggg

SEQ ID NO: 2815398 - RNA, 21 nt, Human
acagauaauaauggguuucuu

SEQ ID NO: 2815399 - RNA, 22 nt, Human
acagauaauaauggguuucuuu

SEQ ID NO: 2815400 - RNA, 14 nt, Human
acagauaaucagug

SEQ ID NO: 2815401 - RNA, 15 nt, Human
acagauacacacaca

SEQ ID NO: 2815402 - RNA, 13 nt, Human
acagauacauuuc

SEQ ID NO: 2815403 - RNA, 12 nt, Human
acagauaccaua

SEQ ID NO: 2815404 - RNA, 15 nt, Human
uaucccggcugcccu

SEQ ID NO: 2815405 - RNA, 24 nt, Human
uauauuuauaacucaucauaaaau

SEQ ID NO: 2815406 - RNA, 23 nt, Human
uauauuuauaacucaucauaaaa

SEQ ID NO: 2815407 - RNA, 22 nt, Human
uauauuuauaacucaucauaaa

SEQ ID NO: 2815408 - RNA, 11 nt, Human
uauauuuaaug

SEQ ID NO: 2815409 - RNA, 21 nt, Human
uauauuuauaacucaucauaa

SEQ ID NO: 2815410 - RNA, 16 nt, Human
uauauuuaaugcauua

SEQ ID NO: 2815411 - RNA, 19 nt, Human
uauauuuaaugcauuaaac

SEQ ID NO: 2815412 - RNA, 22 nt, Human
uauauuuaaugcauuaaaccug

SEQ ID NO: 2815413 - RNA, 15 nt, Human
uauauuuaauuauua

SEQ ID NO: 2815414 - RNA, 13 nt, Human
uaucccugcccau

SEQ ID NO: 2815415 - RNA, 10 nt, Human
uaucccuucc

SEQ ID NO: 2815416 - RNA, 16 nt, Human
uaucccggcugcccuu

SEQ ID NO: 2815417 - RNA, 15 nt, Human
uauccuacaacaaga

SEQ ID NO: 2815418 - RNA, 19 nt, Human
uauccuacaacaagaguuu

SEQ ID NO: 2815419 - RNA, 17 nt, Human
uauccuagcacaugcuu

SEQ ID NO: 2815420 - RNA, 19 nt, Human
uauccuagcacaugcuuca

SEQ ID NO: 2815421 - RNA, 20 nt, Human
uauccuagcacaugcuucaa

SEQ ID NO: 2815422 - RNA, 22 nt, Human
uauccuagcacaugcuucaaua

SEQ ID NO: 2815423 - RNA, 24 nt, Human
uauccuagcacaugcuucaauagu

SEQ ID NO: 2815424 - RNA, 13 nt, Human
uauccuauuucag

SEQ ID NO: 2815425 - RNA, 14 nt, Human
uauccuauuucagu

SEQ ID NO: 2815426 - RNA, 13 nt, Human
uauccucacugcc

SEQ ID NO: 2815427 - RNA, 16 nt, Human
uauccucacugcccuc

SEQ ID NO: 2815428 - RNA, 17 nt, Human
uauccuacuuccccuuc

SEQ ID NO: 2815429 - RNA, 14 nt, Human
uauccuacuucccc

SEQ ID NO: 2815430 - RNA, 16 nt, Human
uaucucacuugugcca

SEQ ID NO: 2815431 - RNA, 19 nt, Human
acagaggaaacaauauuua

SEQ ID NO: 2815432 - RNA, 23 nt, Human
acagaggaaacaauauuuauaaa

SEQ ID NO: 2815433 - RNA, 19 nt, Human
acagaggaagaauuuguua

SEQ ID NO: 2815434 - RNA, 20 nt, Human
acagaggaagaauuuguuau

SEQ ID NO: 2815435 - RNA, 22 nt, Human
acagagcugucacuuuugcucc

SEQ ID NO: 2815436 - RNA, 12 nt, Human
acagagcugugg

SEQ ID NO: 2815437 - RNA, 22 nt, Human
acagagcuguggaggauugcua

SEQ ID NO: 2815438 - RNA, 17 nt, Human
acagagauugaacucca

SEQ ID NO: 2815439 - RNA, 20 nt, Human
acagagauugaacuccaaga

SEQ ID NO: 2815440 - RNA, 20 nt, Human
acagagcacuagguucaauu

SEQ ID NO: 2815441 - RNA, 22 nt, Human
acagagcacuagguucaauucc

SEQ ID NO: 2815442 - RNA, 20 nt, Human
uaucucuauuuaauauuuau

SEQ ID NO: 2815443 - RNA, 17 nt, Human
uaucucuauuuaauauu

SEQ ID NO: 2815444 - RNA, 18 nt, Human
uaucucuauuuaauauuu

SEQ ID NO: 2815445 - RNA, 16 nt, Human
uaucucuauuuaauau

SEQ ID NO: 2815446 - RNA, 12 nt, Human
uaucucucugug

SEQ ID NO: 2815447 - RNA, 13 nt, Human
uaucucucugugc

SEQ ID NO: 2815448 - RNA, 15 nt, Human
uaucucugaagcaug

SEQ ID NO: 2815449 - RNA, 16 nt, Human
uaucucugaagcaugu

SEQ ID NO: 2815450 - RNA, 17 nt, Human
uaucucugaagcauguu

SEQ ID NO: 2815451 - RNA, 23 nt, Human
uaucucugaagcauguuucaugu

SEQ ID NO: 2815452 - RNA, 18 nt, Human
uaucucugaagcauguuu

SEQ ID NO: 2815453 - RNA, 23 nt, Human
uaucucugugugcacaaauauuu

SEQ ID NO: 2815454 - RNA, 18 nt, Human
uaucucugugugcacaaa

SEQ ID NO: 2815455 - RNA, 17 nt, Human
uaucucugugugcacaa

SEQ ID NO: 2815456 - RNA, 16 nt, Human
uaucucugugugcaca

SEQ ID NO: 2815457 - RNA, 11 nt, Human
uaucucugugu

SEQ ID NO: 2815458 - RNA, 18 nt, Human
acaugcuaggaugcggaa

SEQ ID NO: 2815459 - RNA, 14 nt, Human
ucaaauaaaaauaa

SEQ ID NO: 2815460 - RNA, 23 nt, Human
ucaaauaaaacuagugacagcuu

SEQ ID NO: 2815461 - RNA, 22 nt, Human
ucaaaguuuugaaaagcuauua

SEQ ID NO: 2815462 - RNA, 17 nt, Human
ucaaauaaguauuuaua

SEQ ID NO: 2815463 - RNA, 20 nt, Human
ucaaauaaguauuuauaaua

SEQ ID NO: 2815464 - RNA, 18 nt, Human
ucaaauaaguauuuauaa

SEQ ID NO: 2815465 - RNA, 19 nt, Human
ucaaauaaguauuuauaau

SEQ ID NO: 2815466 - RNA, 15 nt, Human
ucaaagccacacucu

SEQ ID NO: 2815467 - RNA, 15 nt, Human
ucaaagccacauuau

SEQ ID NO: 2815468 - RNA, 17 nt, Human
ucaaagccacauuauuu

SEQ ID NO: 2815469 - RNA, 18 nt, Human
ucaaagccacauuauuuc

SEQ ID NO: 2815470 - RNA, 20 nt, Human
ucaaagccacauuauuucua

SEQ ID NO: 2815471 - RNA, 21 nt, Human
ucaaagccacauuauuucuag

SEQ ID NO: 2815472 - RNA, 14 nt, Human
ucaaagcauagaug

SEQ ID NO: 2815473 - RNA, 16 nt, Human
ucaaacacugcaggca

SEQ ID NO: 2815474 - RNA, 14 nt, Human
ucaaacacugcagg

SEQ ID NO: 2815475 - RNA, 10 nt, Human
ucaaagcaga

SEQ ID NO: 2815476 - RNA, 19 nt, Human
ucaaaauuguuuaaaaauu

SEQ ID NO: 2815477 - RNA, 22 nt, Human
ucaaaauuguuuaaaaauucuu

SEQ ID NO: 2815478 - RNA, 22 nt, Human
ucaaaauguuaucuucucaagu

SEQ ID NO: 2815479 - RNA, 14 nt, Human
ucaaaauuaaaucu

SEQ ID NO: 2815480 - RNA, 15 nt, Human
ucaaaauuaaaucug

SEQ ID NO: 2815481 - RNA, 19 nt, Human
ucaaacaaacucucugaac

SEQ ID NO: 2815482 - RNA, 15 nt, Human
ucaaacaacacuggu

SEQ ID NO: 2815483 - RNA, 17 nt, Human
ucaaacaacacuggugu

SEQ ID NO: 2815484 - RNA, 13 nt, Human
ucaaacaagaaug

SEQ ID NO: 2815485 - RNA, 14 nt, Human
ucaaacaagaaugu

SEQ ID NO: 2815486 - RNA, 14 nt, Human
ucaaacacaaaugc

SEQ ID NO: 2815487 - RNA, 12 nt, Human
ucaaacacugca

SEQ ID NO: 2815488 - RNA, 15 nt, Human
ucaaacacaaaugca

SEQ ID NO: 2815489 - RNA, 16 nt, Human
ucaaacacaaaugcag

SEQ ID NO: 2815490 - RNA, 17 nt, Human
ucaaacacaaaugcagg

SEQ ID NO: 2815491 - RNA, 22 nt, Human
ucaaaguuuccuaaucagaaau

SEQ ID NO: 2815492 - RNA, 13 nt, Human
ucaaaguuuugaa

SEQ ID NO: 2815493 - RNA, 14 nt, Human
ucaaaguuuugaaa

SEQ ID NO: 2815494 - RNA, 15 nt, Human
ucaaaguuuugaaaa

SEQ ID NO: 2815495 - RNA, 17 nt, Human
ucaaaguuuugaaaagc

SEQ ID NO: 2815496 - RNA, 18 nt, Human
ucaaaguuuugaaaagcu

SEQ ID NO: 2815497 - RNA, 19 nt, Human
ucaaaguuuugaaaagcua

SEQ ID NO: 2815498 - RNA, 20 nt, Human
ucaaaguuuugaaaagcuau

SEQ ID NO: 2815499 - RNA, 15 nt, Human
ucaaagcuuuuucca

SEQ ID NO: 2815500 - RNA, 17 nt, Human
ucaaagggacggucagu

SEQ ID NO: 2815501 - RNA, 19 nt, Human
ucaaagggacggucaguuu

SEQ ID NO: 2815502 - RNA, 16 nt, Human
ucaaagcuuuuuccag

SEQ ID NO: 2815503 - RNA, 19 nt, Human
ucaaagcucacaccaaauu

SEQ ID NO: 2815504 - RNA, 15 nt, Human
ucaaagccagggucu

SEQ ID NO: 2815505 - RNA, 12 nt, Human
ucaaagcauuua

SEQ ID NO: 2815506 - RNA, 18 nt, Human
ucaaaagaaaaggcaaaa

SEQ ID NO: 2815507 - RNA, 22 nt, Human
uauuuuugaaaggcauguuccu

SEQ ID NO: 2815508 - RNA, 17 nt, Human
ucaaaacuugguauuuu

SEQ ID NO: 2815509 - RNA, 21 nt, Human
uauuuuuauauuuaguuauag

SEQ ID NO: 2815510 - RNA, 21 nt, Human
uauuuuuauacucuuccuauu

SEQ ID NO: 2815511 - RNA, 20 nt, Human
uauuuuucuacauuauugcu

SEQ ID NO: 2815512 - RNA, 12 nt, Human
uauuuuuaucca

SEQ ID NO: 2815513 - RNA, 14 nt, Human
uauuuuucucauga

SEQ ID NO: 2815514 - RNA, 17 nt, Human
uauuugugcuauaguau

SEQ ID NO: 2815515 - RNA, 18 nt, Human
uauuugugcuauaguauu

SEQ ID NO: 2815516 - RNA, 21 nt, Human
uauuugugcuauaguauuuga

SEQ ID NO: 2815517 - RNA, 22 nt, Human
uauuuuuauaaauauaagccuu

SEQ ID NO: 2815518 - RNA, 17 nt, Human
uauuuuuauacaaaccu

SEQ ID NO: 2815519 - RNA, 19 nt, Human
uauuuuuagacucaucaau

SEQ ID NO: 2815520 - RNA, 18 nt, Human
uauuuuuauauaauaucu

SEQ ID NO: 2815521 - RNA, 19 nt, Human
uauuuuuauauaauaucua

SEQ ID NO: 2815522 - RNA, 22 nt, Human
uauuuuuauauaauaucuaaag

SEQ ID NO: 2815523 - RNA, 23 nt, Human
uauuuuuauauaauaucuaaagu

SEQ ID NO: 2815524 - RNA, 13 nt, Human
uauuuguguauuu

SEQ ID NO: 2815525 - RNA, 15 nt, Human
uauuuguguauuuaa

SEQ ID NO: 2815526 - RNA, 12 nt, Human
uauuuguggaau

SEQ ID NO: 2815527 - RNA, 14 nt, Human
uauuuguggaauaa

SEQ ID NO: 2815528 - RNA, 13 nt, Human
uauuuguguaaua

SEQ ID NO: 2815529 - RNA, 14 nt, Human
uauuuguguaauag

SEQ ID NO: 2815530 - RNA, 17 nt, Human
uauuuguguauuuaaca

SEQ ID NO: 2815531 - RNA, 18 nt, Human
uauuuguguauuuaacag

SEQ ID NO: 2815532 - RNA, 17 nt, Human
uauuuguguaauagaaa

SEQ ID NO: 2815533 - RNA, 12 nt, Human
ucaaaauaaaaa

SEQ ID NO: 2815534 - RNA, 15 nt, Human
ucaaaaguuggacua

SEQ ID NO: 2815535 - RNA, 17 nt, Human
ucaaaaguuggacuaaa

SEQ ID NO: 2815536 - RNA, 18 nt, Human
ucaaaaguuggacuaaau

SEQ ID NO: 2815537 - RNA, 20 nt, Human
ucaaaaguuggacuaaaugc

SEQ ID NO: 2815538 - RNA, 22 nt, Human
ucaaaaguuccaagagucuaaa

SEQ ID NO: 2815539 - RNA, 13 nt, Human
ucaaaagcauuua

SEQ ID NO: 2815540 - RNA, 17 nt, Human
ucaaaagcauuuaucau

SEQ ID NO: 2815541 - RNA, 15 nt, Human
ucaaaagcuggauua

SEQ ID NO: 2815542 - RNA, 13 nt, Human
ucaaaagacaugu

SEQ ID NO: 2815543 - RNA, 17 nt, Human
ucaaaagacauguugua

SEQ ID NO: 2815544 - RNA, 21 nt, Human
ucaaaagacauguuguaaauu

SEQ ID NO: 2815545 - RNA, 20 nt, Human
ucaaaagagaaaaacaaaac

SEQ ID NO: 2815546 - RNA, 23 nt, Human
ucaaaauaaaaagugacacagca

SEQ ID NO: 2815547 - RNA, 13 nt, Human
ucaaaauaauucu

SEQ ID NO: 2815548 - RNA, 14 nt, Human
ucaaaauagaaaag

SEQ ID NO: 2815549 - RNA, 15 nt, Human
ucaaaauagaaaagu

SEQ ID NO: 2815550 - RNA, 19 nt, Human
ucaaaauagaaaaguuauu

SEQ ID NO: 2815551 - RNA, 20 nt, Human
ucaaaauaaaaagugacaca

SEQ ID NO: 2815552 - RNA, 21 nt, Human
ucaaaauaaaaagugacacag

SEQ ID NO: 2815553 - RNA, 15 nt, Human
ucaaaauauuacuca

SEQ ID NO: 2815554 - RNA, 14 nt, Human
ucaaaaugucuaag

SEQ ID NO: 2815555 - RNA, 20 nt, Human
ucaaaauguuaucuucucaa

SEQ ID NO: 2815556 - RNA, 21 nt, Human
ucaaaauguuaucuucucaag

SEQ ID NO: 2815557 - RNA, 19 nt, Human
ucaaaaugcuuuuuauuuc

SEQ ID NO: 2815558 - RNA, 13 nt, Human
ucaaaauguauau

SEQ ID NO: 2815559 - RNA, 14 nt, Human
ucaaaauguauaua

SEQ ID NO: 2815560 - RNA, 22 nt, Human
ucaaaauguauauauuuagugc

SEQ ID NO: 2815561 - RNA, 17 nt, Human
ucaaaaugcuuuuuauu

SEQ ID NO: 2815562 - RNA, 12 nt, Human
ucaaaaugcuuu

SEQ ID NO: 2815563 - RNA, 16 nt, Human
ucaaaauccaaaaaga

SEQ ID NO: 2815564 - RNA, 18 nt, Human
ucaaaauauuuguacaua

SEQ ID NO: 2815565 - RNA, 19 nt, Human
ucaaaauauuuguacauag

SEQ ID NO: 2815566 - RNA, 18 nt, Human
ucaaaauauuuuuaaaag

SEQ ID NO: 2815567 - RNA, 19 nt, Human
ucaaaauauuuuuaaaaga

SEQ ID NO: 2815568 - RNA, 20 nt, Human
ucaaaauauuuuuaaaagau

SEQ ID NO: 2815569 - RNA, 23 nt, Human
ucaaaauauuuuuaaaagaucuu

SEQ ID NO: 2815570 - RNA, 17 nt, Human
ucaaaauauuuguacau

SEQ ID NO: 2815571 - RNA, 16 nt, Human
ucaaaauauuuguaca

SEQ ID NO: 2815572 - RNA, 12 nt, Human
ucaaaauauuua

SEQ ID NO: 2815573 - RNA, 13 nt, Human
ucaaaauauuuaa

SEQ ID NO: 2815574 - RNA, 14 nt, Human
ucaaaauauuuaaa

SEQ ID NO: 2815575 - RNA, 15 nt, Human
ucaaaauauuuaaaa

SEQ ID NO: 2815576 - RNA, 19 nt, Human
ucaaaauauuuaaaaaugu

SEQ ID NO: 2815577 - RNA, 20 nt, Human
ucaaaauauuuaaaaauguc

SEQ ID NO: 2815578 - RNA, 21 nt, Human
ucaaaauauuuaaaaaugucu

SEQ ID NO: 2815579 - RNA, 22 nt, Human
ucaaaauauuuaaaaaugucuu

SEQ ID NO: 2815580 - RNA, 23 nt, Human
ucaaaauauuuaaaaaugucuug

SEQ ID NO: 2815581 - RNA, 23 nt, Human
ucaaaauccaaaaagaaaugaug

SEQ ID NO: 2815582 - RNA, 16 nt, Human
ucaaaauccuuccaaa

SEQ ID NO: 2815583 - RNA, 18 nt, Human
ucaaaauccuuccaaaga

SEQ ID NO: 2815584 - RNA, 19 nt, Human
ucaaaauccuuccaaagaa

SEQ ID NO: 2815585 - RNA, 12 nt, Human
ucaaaaugcuuc

SEQ ID NO: 2815586 - RNA, 17 nt, Human
ucaagaugucagacugg

SEQ ID NO: 2815587 - RNA, 13 nt, Human
ucaagagcugccc

SEQ ID NO: 2815588 - RNA, 16 nt, Human
ucaagagcugcccucc

SEQ ID NO: 2815589 - RNA, 15 nt, Human
ucaagagcacacuug

SEQ ID NO: 2815590 - RNA, 17 nt, Human
ucaaggcuuauauucaa

SEQ ID NO: 2815591 - RNA, 18 nt, Human
ucaaggcuuauauucaac

SEQ ID NO: 2815592 - RNA, 20 nt, Human
ucaaggcuuauauucaacca

SEQ ID NO: 2815593 - RNA, 14 nt, Human
ucaaggcuucaguc

SEQ ID NO: 2815594 - RNA, 17 nt, Human
ucaaggcuucagucuca

SEQ ID NO: 2815595 - RNA, 14 nt, Human
ucaaggcuuccacu

SEQ ID NO: 2815596 - RNA, 18 nt, Human
ucaagaugucagacuggc

SEQ ID NO: 2815597 - RNA, 17 nt, Human
ucaagggcuuacuauuu

SEQ ID NO: 2815598 - RNA, 18 nt, Human
ucaagggcuuacuauuuc

SEQ ID NO: 2815599 - RNA, 15 nt, Human
ucaagggacaaggac

SEQ ID NO: 2815600 - RNA, 13 nt, Human
ucaaggggucacu

SEQ ID NO: 2815601 - RNA, 14 nt, Human
ucaaggggucacuu

SEQ ID NO: 2815602 - RNA, 12 nt, Human
ucaaguauuugg

SEQ ID NO: 2815603 - RNA, 12 nt, Human
ucaaguauuuug

SEQ ID NO: 2815604 - RNA, 20 nt, Human
ucaaguauuuuguguuugga

SEQ ID NO: 2815605 - RNA, 21 nt, Human
ucaaguagcugggauuuuaaa

SEQ ID NO: 2815606 - RNA, 16 nt, Human
ucaagggugcgucugg

SEQ ID NO: 2815607 - RNA, 19 nt, Human
ucaagacuggaaggugggg

SEQ ID NO: 2815608 - RNA, 20 nt, Human
ucaagacuggaaggugggga

SEQ ID NO: 2815609 - RNA, 14 nt, Human
ucaagacauagcau

SEQ ID NO: 2815610 - RNA, 20 nt, Human
ucaagacauagcauccaagu

SEQ ID NO: 2815611 - RNA, 21 nt, Human
ucaagacauagcauccaagug

SEQ ID NO: 2815612 - RNA, 21 nt, Human
ucaagaaagcuucaaacugca

SEQ ID NO: 2815613 - RNA, 23 nt, Human
ucaagaagcaggcuacacugaca

SEQ ID NO: 2815614 - RNA, 14 nt, Human
ucaagaagaaaaag

SEQ ID NO: 2815615 - RNA, 18 nt, Human
ucaagaagaaaaagguuu

SEQ ID NO: 2815616 - RNA, 15 nt, Human
ucaacaucuuuuaca

SEQ ID NO: 2815617 - RNA, 14 nt, Human
ucaacaugaaacac

SEQ ID NO: 2815618 - RNA, 15 nt, Human
ucaacaugaaacacc

SEQ ID NO: 2815619 - RNA, 23 nt, Human
ucaagaaacugaggaauuuucuu

SEQ ID NO: 2815620 - RNA, 22 nt, Human
ucaagaaacugaggaauuuucu

SEQ ID NO: 2815621 - RNA, 20 nt, Human
ucaagaaacugaggaauuuu

SEQ ID NO: 2815622 - RNA, 18 nt, Human
ucaagaaacugaggaauu

SEQ ID NO: 2815623 - RNA, 17 nt, Human
ucaagaaacugaggaau

SEQ ID NO: 2815624 - RNA, 13 nt, Human
ucaagaaacugag

SEQ ID NO: 2815625 - RNA, 12 nt, Human
ucaagaaacuga

SEQ ID NO: 2815626 - RNA, 13 nt, Human
ucaacaucacuga

SEQ ID NO: 2815627 - RNA, 15 nt, Human
ucaacaucacugaaa

SEQ ID NO: 2815628 - RNA, 17 nt, Human
ucaacaucacugaaacc

SEQ ID NO: 2815629 - RNA, 14 nt, Human
ucaacauccugcca

SEQ ID NO: 2815630 - RNA, 15 nt, Human
ucaacauccugccag

SEQ ID NO: 2815631 - RNA, 16 nt, Human
ucaacauccugccagc

SEQ ID NO: 2815632 - RNA, 17 nt, Human
ucaacauccugccagcc

SEQ ID NO: 2815633 - RNA, 18 nt, Human
ucaacauccugccagccc

SEQ ID NO: 2815634 - RNA, 20 nt, Human
ucaacauccugccagcccca

SEQ ID NO: 2815635 - RNA, 23 nt, Human
ucaacauaacccacuugucacug

SEQ ID NO: 2815636 - RNA, 19 nt, Human
acauguccuaauucuucug

SEQ ID NO: 2815637 - RNA, 20 nt, Human
acauguccuaauucuucugu

SEQ ID NO: 2815638 - RNA, 22 nt, Human
acauguccuaauucuucugucc

SEQ ID NO: 2815639 - RNA, 22 nt, Human
acauuaaauuuuuuuuacauuu

SEQ ID NO: 2815640 - RNA, 12 nt, Human
acauuaaauguc

SEQ ID NO: 2815641 - RNA, 13 nt, Human
acauuaaaugucu

SEQ ID NO: 2815642 - RNA, 14 nt, Human
acauuaaaugucuu

SEQ ID NO: 2815643 - RNA, 17 nt, Human
acauuaaaugucuuaua

SEQ ID NO: 2815644 - RNA, 16 nt, Human
acaugcuggccagccu

SEQ ID NO: 2815645 - RNA, 19 nt, Human
acaugcuggccagccuggg

SEQ ID NO: 2815646 - RNA, 14 nt, Human
acaugcugaagcca

SEQ ID NO: 2815647 - RNA, 17 nt, Human
acaugcugaagccaaag

SEQ ID NO: 2815648 - RNA, 19 nt, Human
acauuagauuuuauuuuac

SEQ ID NO: 2815649 - RNA, 14 nt, Human
acauuaguaaaugu

SEQ ID NO: 2815650 - RNA, 15 nt, Human
acauuaguaaauguc

SEQ ID NO: 2815651 - RNA, 16 nt, Human
acauuaguaaaugucu

SEQ ID NO: 2815652 - RNA, 17 nt, Human
acauuaguaaaugucuu

SEQ ID NO: 2815653 - RNA, 18 nt, Human
acauuaguaaaugucuuu

SEQ ID NO: 2815654 - RNA, 19 nt, Human
acauuaguaaaugucuuug

SEQ ID NO: 2815655 - RNA, 20 nt, Human
acauuaguaaaugucuuugu

SEQ ID NO: 2815656 - RNA, 21 nt, Human
acauuaguaaaugucuuugua

SEQ ID NO: 2815657 - RNA, 22 nt, Human
acauuaguaaaugucuuuguaa

SEQ ID NO: 2815658 - RNA, 23 nt, Human
acauuaguaaaugucuuuguaag

SEQ ID NO: 2815659 - RNA, 24 nt, Human
acauuaguaaaugucuuuguaagu

SEQ ID NO: 2815660 - RNA, 11 nt, Human
acauuauaaac

SEQ ID NO: 2815661 - RNA, 14 nt, Human
acauuauaaacgcu

SEQ ID NO: 2815662 - RNA, 15 nt, Human
acauuauaaacgcuu

SEQ ID NO: 2815663 - RNA, 15 nt, Human
acauucaugccuggc

SEQ ID NO: 2815664 - RNA, 15 nt, Human
acauucagcugaggu

SEQ ID NO: 2815665 - RNA, 20 nt, Human
acauucagcugagguucauu

SEQ ID NO: 2815666 - RNA, 21 nt, Human
acauucagcugagguucauua

SEQ ID NO: 2815667 - RNA, 22 nt, Human
acauucagcugagguucauuac

SEQ ID NO: 2815668 - RNA, 12 nt, Human
acauucaauguu

SEQ ID NO: 2815669 - RNA, 13 nt, Human
acauuaagaaugu

SEQ ID NO: 2815670 - RNA, 14 nt, Human
acauuaagaauguu

SEQ ID NO: 2815671 - RNA, 15 nt, Human
acauuaagaauguug

SEQ ID NO: 2815672 - RNA, 19 nt, Human
acauuaagaauguugguuu

SEQ ID NO: 2815673 - RNA, 18 nt, Human
acauuagcaguuugcuuu

SEQ ID NO: 2815674 - RNA, 22 nt, Human
acauuagcaguuugcuuuguau

SEQ ID NO: 2815675 - RNA, 16 nt, Human
acauucaugccuggcu

SEQ ID NO: 2815676 - RNA, 16 nt, Human
acauuccaagacucua

SEQ ID NO: 2815677 - RNA, 19 nt, Human
acauucugauuuggaaaaa

SEQ ID NO: 2815678 - RNA, 18 nt, Human
ucaacagcuaugcuggua

SEQ ID NO: 2815679 - RNA, 23 nt, Human
ucaacaggggcgugaggucccag

SEQ ID NO: 2815680 - RNA, 16 nt, Human
ucaacagcuaugcugg

SEQ ID NO: 2815681 - RNA, 22 nt, Human
ucaacagauuauuuuggaaagu

SEQ ID NO: 2815682 - RNA, 18 nt, Human
ucaacacucccuucccau

SEQ ID NO: 2815683 - RNA, 23 nt, Human
ucaacacuaccagcguauauaua

SEQ ID NO: 2815684 - RNA, 15 nt, Human
ucaacaccccugugu

SEQ ID NO: 2815685 - RNA, 14 nt, Human
ucaacaauaaaaca

SEQ ID NO: 2815686 - RNA, 15 nt, Human
ucaacaauaaaacau

SEQ ID NO: 2815687 - RNA, 20 nt, Human
acaugaucuguuuuucacca

SEQ ID NO: 2815688 - RNA, 14 nt, Human
ucaacaauuugggc

SEQ ID NO: 2815689 - RNA, 22 nt, Human
ucaacaauuugggcuuccuguu

SEQ ID NO: 2815690 - RNA, 14 nt, Human
ucaacagaagcauu

SEQ ID NO: 2815691 - RNA, 15 nt, Human
ucaacagaagcauuu

SEQ ID NO: 2815692 - RNA, 18 nt, Human
ucaacagaagcauuugua

SEQ ID NO: 2815693 - RNA, 20 nt, Human
ucaacagaagcauuuguauu

SEQ ID NO: 2815694 - RNA, 21 nt, Human
ucaacagaagcauuuguauuu

SEQ ID NO: 2815695 - RNA, 22 nt, Human
ucaacagaagcauuuguauuuu

SEQ ID NO: 2815696 - RNA, 12 nt, Human
ucaacagaauga

SEQ ID NO: 2815697 - RNA, 13 nt, Human
ucaacagaaugaa

SEQ ID NO: 2815698 - RNA, 14 nt, Human
ucaacagaaugaaa

SEQ ID NO: 2815699 - RNA, 15 nt, Human
ucaacagaaugaaaa

SEQ ID NO: 2815700 - RNA, 19 nt, Human
ucaacagaaugaaaaauga

SEQ ID NO: 2815701 - RNA, 22 nt, Human
ucaacagaaugaaaaaugaaag

SEQ ID NO: 2815702 - RNA, 23 nt, Human
ucaacagaaugaaaaaugaaaga

SEQ ID NO: 2815703 - RNA, 12 nt, Human
acaguuuuaugc

SEQ ID NO: 2815704 - RNA, 13 nt, Human
acaguuuuaugcu

SEQ ID NO: 2815705 - RNA, 16 nt, Human
acaguuuuaugcucuu

SEQ ID NO: 2815706 - RNA, 19 nt, Human
acaguuuuaugcucuuuuu

SEQ ID NO: 2815707 - RNA, 20 nt, Human
acaguuuuaugcucuuuuuu

SEQ ID NO: 2815708 - RNA, 14 nt, Human
acaguuugucacau

SEQ ID NO: 2815709 - RNA, 23 nt, Human
acaguuuugucagucuuucuuag

SEQ ID NO: 2815710 - RNA, 13 nt, Human
acaguuuugagaa

SEQ ID NO: 2815711 - RNA, 20 nt, Human
acaguuuugagaacguaaag

SEQ ID NO: 2815712 - RNA, 21 nt, Human
acauacccuggccgcccccug

SEQ ID NO: 2815713 - RNA, 14 nt, Human
acauacggucaggu

SEQ ID NO: 2815714 - RNA, 20 nt, Human
acauacggucagguuuaaca

SEQ ID NO: 2815715 - RNA, 21 nt, Human
acauacggucagguuuaacau

SEQ ID NO: 2815716 - RNA, 22 nt, Human
acauacggucagguuuaacauu

SEQ ID NO: 2815717 - RNA, 20 nt, Human
acauaccuggguauguguag

SEQ ID NO: 2815718 - RNA, 16 nt, Human
acauaccuuuuauuuu

SEQ ID NO: 2815719 - RNA, 14 nt, Human
acauacgaaacaca

SEQ ID NO: 2815720 - RNA, 17 nt, Human
acauacgaaacacaaac

SEQ ID NO: 2815721 - RNA, 15 nt, Human
acauaccagcuuaga

SEQ ID NO: 2815722 - RNA, 19 nt, Human
acaguuuuuaacucuacug

SEQ ID NO: 2815723 - RNA, 20 nt, Human
acauacaguuuuaugcucuu

SEQ ID NO: 2815724 - RNA, 20 nt, Human
acauacccuggccgcccccu

SEQ ID NO: 2815725 - RNA, 18 nt, Human
acauacuggccuggacug

SEQ ID NO: 2815726 - RNA, 19 nt, Human
acauacuggccuggacugu

SEQ ID NO: 2815727 - RNA, 22 nt, Human
acauacuuucauccugacucug

SEQ ID NO: 2815728 - RNA, 17 nt, Human
acauagaaaguucaugg

SEQ ID NO: 2815729 - RNA, 23 nt, Human
acauacuuucauccugacucugc

SEQ ID NO: 2815730 - RNA, 18 nt, Human
uaugaagaaacgcaacaa

SEQ ID NO: 2815731 - RNA, 18 nt, Human
uauuuccauucaacaaga

SEQ ID NO: 2815732 - RNA, 22 nt, Human
uauuuccaguguucuaugaaca

SEQ ID NO: 2815733 - RNA, 18 nt, Human
uauuucauuuuuugcauc

SEQ ID NO: 2815734 - RNA, 14 nt, Human
uaugaaauaaagaa

SEQ ID NO: 2815735 - RNA, 19 nt, Human
uaugaaauaaagaaauugc

SEQ ID NO: 2815736 - RNA, 15 nt, Human
uauuucccuccccug

SEQ ID NO: 2815737 - RNA, 20 nt, Human
uauuucccuccccuggggac

SEQ ID NO: 2815738 - RNA, 21 nt, Human
uauuucccauuugugccagag

SEQ ID NO: 2815739 - RNA, 15 nt, Human
uauuucccuaaaaua

SEQ ID NO: 2815740 - RNA, 16 nt, Human
uauuucccuaaaauac

SEQ ID NO: 2815741 - RNA, 19 nt, Human
uauuucccuaaaauacauu

SEQ ID NO: 2815742 - RNA, 20 nt, Human
uauuucccuaaaauacauuu

SEQ ID NO: 2815743 - RNA, 21 nt, Human
uauuucccuaaaauacauuua

SEQ ID NO: 2815744 - RNA, 15 nt, Human
uauuucgaaagcugc

SEQ ID NO: 2815745 - RNA, 18 nt, Human
uauuuccuggauguuugg

SEQ ID NO: 2815746 - RNA, 19 nt, Human
uauuucuagggcugggaaa

SEQ ID NO: 2815747 - RNA, 17 nt, Human
uauuucuaguccaaaau

SEQ ID NO: 2815748 - RNA, 21 nt, Human
uauuucuaguccaaaauuaca

SEQ ID NO: 2815749 - RNA, 18 nt, Human
acaguugcagcccuugug

SEQ ID NO: 2815750 - RNA, 19 nt, Human
acaguugccaccaccucug

SEQ ID NO: 2815751 - RNA, 20 nt, Human
acaguugccaccaccucugu

SEQ ID NO: 2815752 - RNA, 21 nt, Human
acaguugccaccaccucugug

SEQ ID NO: 2815753 - RNA, 22 nt, Human
acaguugccaccaccucugugg

SEQ ID NO: 2815754 - RNA, 23 nt, Human
acaguugccaccaccucuguggc

SEQ ID NO: 2815755 - RNA, 16 nt, Human
acaguuggccuucaga

SEQ ID NO: 2815756 - RNA, 17 nt, Human
acaguugucuagagaua

SEQ ID NO: 2815757 - RNA, 20 nt, Human
acaguugucuagagauauau

SEQ ID NO: 2815758 - RNA, 22 nt, Human
acaguuucuuagcuuuuuaauu

SEQ ID NO: 2815759 - RNA, 15 nt, Human
acaguuugaacaaaa

SEQ ID NO: 2815760 - RNA, 16 nt, Human
acaguuugaugucauu

SEQ ID NO: 2815761 - RNA, 20 nt, Human
acaguuugaugucauuaaug

SEQ ID NO: 2815762 - RNA, 14 nt, Human
acaguuugcucuag

SEQ ID NO: 2815763 - RNA, 13 nt, Human
acaguuuguaaau

SEQ ID NO: 2815764 - RNA, 16 nt, Human
acaguuuguaaauguu

SEQ ID NO: 2815765 - RNA, 17 nt, Human
acaguuuguaaauguua

SEQ ID NO: 2815766 - RNA, 18 nt, Human
acaguuuguaaauguuau

SEQ ID NO: 2815767 - RNA, 19 nt, Human
acaguuuguaaauguuauu

SEQ ID NO: 2815768 - RNA, 22 nt, Human
acaguuuguaaauguuauuucu

SEQ ID NO: 2815769 - RNA, 12 nt, Human
acaguuucuuag

SEQ ID NO: 2815770 - RNA, 14 nt, Human
acaguuucuuagcu

SEQ ID NO: 2815771 - RNA, 16 nt, Human
acaguuucuuagcuuu

SEQ ID NO: 2815772 - RNA, 17 nt, Human
acaguuucuuagcuuuu

SEQ ID NO: 2815773 - RNA, 18 nt, Human
acaguuucuuagcuuuuu

SEQ ID NO: 2815774 - RNA, 20 nt, Human
acaguuucuuagcuuuuuaa

SEQ ID NO: 2815775 - RNA, 15 nt, Human
acaguuuaucaugaa

SEQ ID NO: 2815776 - RNA, 16 nt, Human
acaguuuaucaugaag

SEQ ID NO: 2815777 - RNA, 17 nt, Human
acaguuuaucaugaagc

SEQ ID NO: 2815778 - RNA, 18 nt, Human
acaguuuaucaugaagcc

SEQ ID NO: 2815779 - RNA, 19 nt, Human
acaguuuaucaugaagccu

SEQ ID NO: 2815780 - RNA, 20 nt, Human
acaguuuaucaugaagccug

SEQ ID NO: 2815781 - RNA, 22 nt, Human
acaguuuaucaugaagccugug

SEQ ID NO: 2815782 - RNA, 22 nt, Human
acauauuccauguuuggaagac

SEQ ID NO: 2815783 - RNA, 15 nt, Human
acauauuuguggaau

SEQ ID NO: 2815784 - RNA, 16 nt, Human
acauauuuguggaaua

SEQ ID NO: 2815785 - RNA, 17 nt, Human
acauauuuguggaauaa

SEQ ID NO: 2815786 - RNA, 19 nt, Human
acauauuuguggaauaaug

SEQ ID NO: 2815787 - RNA, 17 nt, Human
acauauuuuauuaagaa

SEQ ID NO: 2815788 - RNA, 19 nt, Human
acauauuuuauuaagaacu

SEQ ID NO: 2815789 - RNA, 13 nt, Human
acauauuuucugu

SEQ ID NO: 2815790 - RNA, 15 nt, Human
acauauuuuuuauau

SEQ ID NO: 2815791 - RNA, 19 nt, Human
acauauuuuuuauaucugg

SEQ ID NO: 2815792 - RNA, 21 nt, Human
acauauuuuuuauaucuggaa

SEQ ID NO: 2815793 - RNA, 22 nt, Human
acauauuuuuuauaucuggaau

SEQ ID NO: 2815794 - RNA, 19 nt, Human
acaucuauuuuggauugua

SEQ ID NO: 2815795 - RNA, 18 nt, Human
acaucuauuuuggauugu

SEQ ID NO: 2815796 - RNA, 17 nt, Human
acaucacuguucaugcu

SEQ ID NO: 2815797 - RNA, 14 nt, Human
acaucuaugauaua

SEQ ID NO: 2815798 - RNA, 12 nt, Human
acaucagauaag

SEQ ID NO: 2815799 - RNA, 23 nt, Human
acaucuauuuuggauuguauauu

SEQ ID NO: 2815800 - RNA, 20 nt, Human
acaucucaggggccagagga

SEQ ID NO: 2815801 - RNA, 19 nt, Human
acaucucaggggccagagg

SEQ ID NO: 2815802 - RNA, 13 nt, Human
acaucacaggaca

SEQ ID NO: 2815803 - RNA, 13 nt, Human
acaucacacacac

SEQ ID NO: 2815804 - RNA, 13 nt, Human
acaucacagcagc

SEQ ID NO: 2815805 - RNA, 14 nt, Human
acaucacagcagcc

SEQ ID NO: 2815806 - RNA, 20 nt, Human
acaucaccgacgcgucuccu

SEQ ID NO: 2815807 - RNA, 21 nt, Human
acaucaccgacgcgucuccug

SEQ ID NO: 2815808 - RNA, 23 nt, Human
acaucaccgacgcgucuccuguu

SEQ ID NO: 2815809 - RNA, 22 nt, Human
acaucacuauccaugcaccaaa

SEQ ID NO: 2815810 - RNA, 22 nt, Human
acaucaccgacgcgucuccugu

SEQ ID NO: 2815811 - RNA, 16 nt, Human
acaucacucugcugcu

SEQ ID NO: 2815812 - RNA, 19 nt, Human
acaucacucugcugcuuag

SEQ ID NO: 2815813 - RNA, 23 nt, Human
acaucacugaaaccuuuaagaaa

SEQ ID NO: 2815814 - RNA, 14 nt, Human
acaucacugcuuga

SEQ ID NO: 2815815 - RNA, 21 nt, Human
acaucacugcuugaugaagca

SEQ ID NO: 2815816 - RNA, 22 nt, Human
acaucacugcuugaugaagcaa

SEQ ID NO: 2815817 - RNA, 19 nt, Human
acaucacuuguacaaaaua

SEQ ID NO: 2815818 - RNA, 16 nt, Human
acaucacuuguacaaa

SEQ ID NO: 2815819 - RNA, 15 nt, Human
acaucacuuguacaa

SEQ ID NO: 2815820 - RNA, 13 nt, Human
acaucuugcucug

SEQ ID NO: 2815821 - RNA, 24 nt, Human
acaucuuccauuuccauguccccu

SEQ ID NO: 2815822 - RNA, 16 nt, Human
acaucuucagcaaaua

SEQ ID NO: 2815823 - RNA, 13 nt, Human
acaucuggcuuau

SEQ ID NO: 2815824 - RNA, 17 nt, Human
acaucuggcuuauuuua

SEQ ID NO: 2815825 - RNA, 18 nt, Human
acaucuggcuuauuuuaa

SEQ ID NO: 2815826 - RNA, 19 nt, Human
acaucuggcuuauuuuaau

SEQ ID NO: 2815827 - RNA, 20 nt, Human
acaucuggcuuauuuuaaug

SEQ ID NO: 2815828 - RNA, 21 nt, Human
acaucuggcuuauuuuaaugu

SEQ ID NO: 2815829 - RNA, 20 nt, Human
acaucucuuugaugucauau

SEQ ID NO: 2815830 - RNA, 22 nt, Human
acaucucugcacccuggggccu

SEQ ID NO: 2815831 - RNA, 12 nt, Human
acaucucucccc

SEQ ID NO: 2815832 - RNA, 21 nt, Human
acaucucuccccaacccuagg

SEQ ID NO: 2815833 - RNA, 15 nt, Human
acaucucugaaagca

SEQ ID NO: 2815834 - RNA, 18 nt, Human
acaucucugaaagcacag

SEQ ID NO: 2815835 - RNA, 19 nt, Human
acaucuugcucugcugaca

SEQ ID NO: 2815836 - RNA, 18 nt, Human
acaucuugcucugcugac

SEQ ID NO: 2815837 - RNA, 21 nt, Human
acaucuugcucugcugacaga

SEQ ID NO: 2815838 - RNA, 18 nt, Human
uauuuggucucuauuuca

SEQ ID NO: 2815839 - RNA, 21 nt, Human
uauuugguuuggccaucucug

SEQ ID NO: 2815840 - RNA, 15 nt, Human
acauagauauuuuca

SEQ ID NO: 2815841 - RNA, 16 nt, Human
acauagauauuuucac

SEQ ID NO: 2815842 - RNA, 18 nt, Human
acauagauauuuucacaa

SEQ ID NO: 2815843 - RNA, 14 nt, Human
acauagagguauau

SEQ ID NO: 2815844 - RNA, 16 nt, Human
acauagagguauauug

SEQ ID NO: 2815845 - RNA, 18 nt, Human
acauagagguauauugga

SEQ ID NO: 2815846 - RNA, 20 nt, Human
acauagagguauauuggaag

SEQ ID NO: 2815847 - RNA, 21 nt, Human
acauagagguauauuggaaga

SEQ ID NO: 2815848 - RNA, 22 nt, Human
acauagagugacuccaagaaca

SEQ ID NO: 2815849 - RNA, 14 nt, Human
acauagcccauccc

SEQ ID NO: 2815850 - RNA, 18 nt, Human
acauagcccaucccugcc

SEQ ID NO: 2815851 - RNA, 19 nt, Human
acauagcccaucccugccu

SEQ ID NO: 2815852 - RNA, 14 nt, Human
acauagauuaaugg

SEQ ID NO: 2815853 - RNA, 18 nt, Human
acauagauuaauggcacu

SEQ ID NO: 2815854 - RNA, 19 nt, Human
acauagauuaauggcacug

SEQ ID NO: 2815855 - RNA, 20 nt, Human
acauagauuaauggcacuga

SEQ ID NO: 2815856 - RNA, 22 nt, Human
acauagauuuauuuuucaguuc

SEQ ID NO: 2815857 - RNA, 20 nt, Human
acauagcauccaaguggcau

SEQ ID NO: 2815858 - RNA, 21 nt, Human
acauagcuacccaaaagagaa

SEQ ID NO: 2815859 - RNA, 22 nt, Human
acauagcuacccaaaagagaaa

SEQ ID NO: 2815860 - RNA, 22 nt, Human
acauagcccaucccugccuggu

SEQ ID NO: 2815861 - RNA, 21 nt, Human
acauagcuuacaagccagcug

SEQ ID NO: 2815862 - RNA, 14 nt, Human
acauauacacacac

SEQ ID NO: 2815863 - RNA, 15 nt, Human
acauauacacacaca

SEQ ID NO: 2815864 - RNA, 22 nt, Human
acauagugcauuguuucugugg

SEQ ID NO: 2815865 - RNA, 15 nt, Human
acauaguuauuuauu

SEQ ID NO: 2815866 - RNA, 17 nt, Human
acauaguucuccaguug

SEQ ID NO: 2815867 - RNA, 23 nt, Human
acauaguucuccaguuguaugga

SEQ ID NO: 2815868 - RNA, 17 nt, Human
acauaguuuuaaacuca

SEQ ID NO: 2815869 - RNA, 19 nt, Human
acauaguuuuaaacucauu

SEQ ID NO: 2815870 - RNA, 20 nt, Human
acauaguuuuaaacucauuu

SEQ ID NO: 2815871 - RNA, 21 nt, Human
acauaguuuuaaacucauuuu

SEQ ID NO: 2815872 - RNA, 12 nt, Human
acauaguguaau

SEQ ID NO: 2815873 - RNA, 20 nt, Human
acauauaaacaucacacaca

SEQ ID NO: 2815874 - RNA, 13 nt, Human
acauauaaaauaa

SEQ ID NO: 2815875 - RNA, 22 nt, Human
acauauaaaauaaugcaaagaa

SEQ ID NO: 2815876 - RNA, 17 nt, Human
acauaguaaguucagca

SEQ ID NO: 2815877 - RNA, 20 nt, Human
acauaguaaguucagcacuu

SEQ ID NO: 2815878 - RNA, 22 nt, Human
acauaguaaguucagcacuugu

SEQ ID NO: 2815879 - RNA, 16 nt, Human
acauagugaugguucc

SEQ ID NO: 2815880 - RNA, 21 nt, Human
acauagugaugguuccccugu

SEQ ID NO: 2815881 - RNA, 17 nt, Human
acauaucgcugacuuca

SEQ ID NO: 2815882 - RNA, 16 nt, Human
acauauaccuauaaug

SEQ ID NO: 2815883 - RNA, 19 nt, Human
acauauaccuauaaugugu

SEQ ID NO: 2815884 - RNA, 20 nt, Human
acauauaccuauaaugugug

SEQ ID NO: 2815885 - RNA, 21 nt, Human
acauauaccuauaaugugugu

SEQ ID NO: 2815886 - RNA, 22 nt, Human
acauauaccuauaaugugugua

SEQ ID NO: 2815887 - RNA, 23 nt, Human
acauauaccuauaauguguguau

SEQ ID NO: 2815888 - RNA, 16 nt, Human
acauauagaaugcaga

SEQ ID NO: 2815889 - RNA, 14 nt, Human
acauauauauuaca

SEQ ID NO: 2815890 - RNA, 16 nt, Human
acauauauuauuuauu

SEQ ID NO: 2815891 - RNA, 21 nt, Human
acauauauuuuuaaaaaauga

SEQ ID NO: 2815892 - RNA, 22 nt, Human
acauauauuuuuaaaaaaugaa

SEQ ID NO: 2815893 - RNA, 23 nt, Human
acauauggacucugcacaugaau

SEQ ID NO: 2815894 - RNA, 19 nt, Human
acauaugcaccuugugucu

SEQ ID NO: 2815895 - RNA, 20 nt, Human
acauaugcaccuugugucug

SEQ ID NO: 2815896 - RNA, 15 nt, Human
acauaugcaccuugu

SEQ ID NO: 2815897 - RNA, 16 nt, Human
acauaugcaccuugug

SEQ ID NO: 2815898 - RNA, 17 nt, Human
acauaugcaccuugugu

SEQ ID NO: 2815899 - RNA, 18 nt, Human
acauaugcaccuuguguc

SEQ ID NO: 2815900 - RNA, 14 nt, Human
acauaugacuugau

SEQ ID NO: 2815901 - RNA, 15 nt, Human
acauaugauuucacu

SEQ ID NO: 2815902 - RNA, 22 nt, Human
acauaugauuucacuagaaaag

SEQ ID NO: 2815903 - RNA, 13 nt, Human
acauauuuaacug

SEQ ID NO: 2815904 - RNA, 14 nt, Human
acauauuuaacugg

SEQ ID NO: 2815905 - RNA, 15 nt, Human
acauauuuaacuggu

SEQ ID NO: 2815906 - RNA, 18 nt, Human
acauauuuaacuggugca

SEQ ID NO: 2815907 - RNA, 20 nt, Human
acauauuuaacuggugcacu

SEQ ID NO: 2815908 - RNA, 12 nt, Human
acauauuuaaug

SEQ ID NO: 2815909 - RNA, 13 nt, Human
acauauuuaaugu

SEQ ID NO: 2815910 - RNA, 14 nt, Human
acauauuuaauguu

SEQ ID NO: 2815911 - RNA, 15 nt, Human
acauauuuaauguuu

SEQ ID NO: 2815912 - RNA, 16 nt, Human
acauauuuaauguuuu

SEQ ID NO: 2815913 - RNA, 17 nt, Human
acauauuuaauguuuua

SEQ ID NO: 2815914 - RNA, 20 nt, Human
acauauuuaauguuuuaaau

SEQ ID NO: 2815915 - RNA, 21 nt, Human
acauauuuaauguuuuaaaug

SEQ ID NO: 2815916 - RNA, 19 nt, Human
acauauuuauauaacguga

SEQ ID NO: 2815917 - RNA, 13 nt, Human
acauaugugaaua

SEQ ID NO: 2815918 - RNA, 13 nt, Human
acauauguaaaau

SEQ ID NO: 2815919 - RNA, 14 nt, Human
acauauguaaaaua

SEQ ID NO: 2815920 - RNA, 16 nt, Human
acauauguaaacauaa

SEQ ID NO: 2815921 - RNA, 16 nt, Human
acauauguacauaaau

SEQ ID NO: 2815922 - RNA, 16 nt, Human
acauauguagacuaua

SEQ ID NO: 2815923 - RNA, 17 nt, Human
acauauguagacuauau

SEQ ID NO: 2815924 - RNA, 20 nt, Human
acauauguagacuauauaca

SEQ ID NO: 2815925 - RNA, 23 nt, Human
acauauguagacuauauacaugu

SEQ ID NO: 2815926 - RNA, 18 nt, Human
accaggcuugccugcagg

SEQ ID NO: 2815927 - RNA, 12 nt, Human
accaggccuggg

SEQ ID NO: 2815928 - RNA, 16 nt, Human
accagaaaaugagggc

SEQ ID NO: 2815929 - RNA, 16 nt, Human
accagcccuggggcug

SEQ ID NO: 2815930 - RNA, 17 nt, Human
accagcccuggggcugg

SEQ ID NO: 2815931 - RNA, 18 nt, Human
accagcccuggggcuggg

SEQ ID NO: 2815932 - RNA, 20 nt, Human
accagcccuggggcugggcc

SEQ ID NO: 2815933 - RNA, 18 nt, Human
accagcccuugagggaga

SEQ ID NO: 2815934 - RNA, 22 nt, Human
accagcccuugagggagaacuu

SEQ ID NO: 2815935 - RNA, 14 nt, Human
accagccuccaugc

SEQ ID NO: 2815936 - RNA, 19 nt, Human
accagccuccaugcugccu

SEQ ID NO: 2815937 - RNA, 20 nt, Human
accagccuccaugcugccuc

SEQ ID NO: 2815938 - RNA, 21 nt, Human
accagccuccaugcugccucc

SEQ ID NO: 2815939 - RNA, 19 nt, Human
ucaccucuggacuggcuag

SEQ ID NO: 2815940 - RNA, 13 nt, Human
ucaccucuguaau

SEQ ID NO: 2815941 - RNA, 18 nt, Human
ucaccucuggacuggcua

SEQ ID NO: 2815942 - RNA, 13 nt, Human
accaggcuguguc

SEQ ID NO: 2815943 - RNA, 14 nt, Human
ucaccuccuucaau

SEQ ID NO: 2815944 - RNA, 15 nt, Human
ucaccuccuucaauu

SEQ ID NO: 2815945 - RNA, 13 nt, Human
ucaccucucccac

SEQ ID NO: 2815946 - RNA, 16 nt, Human
ucaccucuaacacgca

SEQ ID NO: 2815947 - RNA, 18 nt, Human
ucaccucuacccaaaccc

SEQ ID NO: 2815948 - RNA, 23 nt, Human
ucaccucuacccaaacccuaggu

SEQ ID NO: 2815949 - RNA, 19 nt, Human
accaggcuugccugcaggc

SEQ ID NO: 2815950 - RNA, 19 nt, Human
ucaccugagucacccuacc

SEQ ID NO: 2815951 - RNA, 11 nt, Human
ucaccugcaaa

SEQ ID NO: 2815952 - RNA, 21 nt, Human
ucaccugcaaagcucuguggc

SEQ ID NO: 2815953 - RNA, 21 nt, Human
ucaccuucguuuacuaugccu

SEQ ID NO: 2815954 - RNA, 20 nt, Human
ucacuacccuauucucucuu

SEQ ID NO: 2815955 - RNA, 15 nt, Human
ucacuagcuuugccu

SEQ ID NO: 2815956 - RNA, 14 nt, Human
ucacuagaauggau

SEQ ID NO: 2815957 - RNA, 17 nt, Human
ucacuagaauggauaaa

SEQ ID NO: 2815958 - RNA, 19 nt, Human
ucacuagaauggauaaaau

SEQ ID NO: 2815959 - RNA, 21 nt, Human
ucaccuuccaggaccccuggg

SEQ ID NO: 2815960 - RNA, 12 nt, Human
ucaccuucccuu

SEQ ID NO: 2815961 - RNA, 13 nt, Human
ucaccuucccuug

SEQ ID NO: 2815962 - RNA, 16 nt, Human
ucaccuucccuugcca

SEQ ID NO: 2815963 - RNA, 23 nt, Human
ucaccuguuacugaaagugguuu

SEQ ID NO: 2815964 - RNA, 14 nt, Human
ucacuccagccugg

SEQ ID NO: 2815965 - RNA, 19 nt, Human
ucacuauguugcccaggca

SEQ ID NO: 2815966 - RNA, 17 nt, Human
ucacuauguugcccagg

SEQ ID NO: 2815967 - RNA, 18 nt, Human
ucacuauguugcccaggc

SEQ ID NO: 2815968 - RNA, 14 nt, Human
ucacucccagucca

SEQ ID NO: 2815969 - RNA, 14 nt, Human
ucacuccccaagga

SEQ ID NO: 2815970 - RNA, 17 nt, Human
ucacuccccaaggaaga

SEQ ID NO: 2815971 - RNA, 18 nt, Human
ucacuccccaaggaagag

SEQ ID NO: 2815972 - RNA, 21 nt, Human
ucacuccccaugccacguucc

SEQ ID NO: 2815973 - RNA, 23 nt, Human
ucacuccggugugccugcagccc

SEQ ID NO: 2815974 - RNA, 22 nt, Human
ucacuccggugugccugcagcc

SEQ ID NO: 2815975 - RNA, 21 nt, Human
ucacuccggugugccugcagc

SEQ ID NO: 2815976 - RNA, 20 nt, Human
ucacuccggugugccugcag

SEQ ID NO: 2815977 - RNA, 19 nt, Human
ucacuccggugugccugca

SEQ ID NO: 2815978 - RNA, 17 nt, Human
ucacuccggugugccug

SEQ ID NO: 2815979 - RNA, 14 nt, Human
ucacuccggugugc

SEQ ID NO: 2815980 - RNA, 13 nt, Human
accacuucgaaac

SEQ ID NO: 2815981 - RNA, 15 nt, Human
accacuucuuuuaua

SEQ ID NO: 2815982 - RNA, 17 nt, Human
accacuucuuuuauaac

SEQ ID NO: 2815983 - RNA, 16 nt, Human
accacuucuuuuauaa

SEQ ID NO: 2815984 - RNA, 13 nt, Human
accacuucauucu

SEQ ID NO: 2815985 - RNA, 14 nt, Human
accacuucauucug

SEQ ID NO: 2815986 - RNA, 14 nt, Human
accacuuccagggg

SEQ ID NO: 2815987 - RNA, 23 nt, Human
accacuuccaggggaaccugcca

SEQ ID NO: 2815988 - RNA, 15 nt, Human
accacuuccuuuaaa

SEQ ID NO: 2815989 - RNA, 20 nt, Human
accacuuccaggggaaccug

SEQ ID NO: 2815990 - RNA, 18 nt, Human
accacugcacuccagccu

SEQ ID NO: 2815991 - RNA, 23 nt, Human
accacugcucugaugaagaggag

SEQ ID NO: 2815992 - RNA, 17 nt, Human
accacugcucugaugaa

SEQ ID NO: 2815993 - RNA, 15 nt, Human
accacugcucugaug

SEQ ID NO: 2815994 - RNA, 17 nt, Human
accagaauugugcaaau

SEQ ID NO: 2815995 - RNA, 21 nt, Human
accagaauugugcaaauggaa

SEQ ID NO: 2815996 - RNA, 13 nt, Human
accagaagggaaa

SEQ ID NO: 2815997 - RNA, 16 nt, Human
accagacaaggaaaua

SEQ ID NO: 2815998 - RNA, 23 nt, Human
accagacaaggaaauacccuucu

SEQ ID NO: 2815999 - RNA, 16 nt, Human
accagagcccaccuug

SEQ ID NO: 2816000 - RNA, 14 nt, Human
accagagcccaccu

SEQ ID NO: 2816001 - RNA, 12 nt, Human
accagagcccac

SEQ ID NO: 2816002 - RNA, 16 nt, Human
accagacucgccaaca

SEQ ID NO: 2816003 - RNA, 17 nt, Human
accagacucgccaacau

SEQ ID NO: 2816004 - RNA, 20 nt, Human
accagacucgccaacauggu

SEQ ID NO: 2816005 - RNA, 13 nt, Human
accagacugcagg

SEQ ID NO: 2816006 - RNA, 14 nt, Human
accagacugcaggu

SEQ ID NO: 2816007 - RNA, 16 nt, Human
accagacugcagguug

SEQ ID NO: 2816008 - RNA, 14 nt, Human
accagacaccuuga

SEQ ID NO: 2816009 - RNA, 17 nt, Human
ucaauuuuugucucaga

SEQ ID NO: 2816010 - RNA, 19 nt, Human
ucaauuuuugucucagaag

SEQ ID NO: 2816011 - RNA, 13 nt, Human
ucaauuuugacuu

SEQ ID NO: 2816012 - RNA, 18 nt, Human
ucaauuuugacuuaaugu

SEQ ID NO: 2816013 - RNA, 14 nt, Human
ucaauuuuuaggaa

SEQ ID NO: 2816014 - RNA, 12 nt, Human
ucacaaauaaua

SEQ ID NO: 2816015 - RNA, 13 nt, Human
ucacaaauaauag

SEQ ID NO: 2816016 - RNA, 16 nt, Human
accaauugguuaaucu

SEQ ID NO: 2816017 - RNA, 13 nt, Human
accaauugugcug

SEQ ID NO: 2816018 - RNA, 14 nt, Human
accaauugugcugc

SEQ ID NO: 2816019 - RNA, 15 nt, Human
accaauugugcugcc

SEQ ID NO: 2816020 - RNA, 16 nt, Human
accaauugugcugcca

SEQ ID NO: 2816021 - RNA, 17 nt, Human
accaauugugcugccau

SEQ ID NO: 2816022 - RNA, 18 nt, Human
accaauugugcugccauu

SEQ ID NO: 2816023 - RNA, 20 nt, Human
accaauuguguccugaaaau

SEQ ID NO: 2816024 - RNA, 18 nt, Human
accaauuuacacugccau

SEQ ID NO: 2816025 - RNA, 14 nt, Human
ucaagaaccuggaa

SEQ ID NO: 2816026 - RNA, 14 nt, Human
accaauuauugaua

SEQ ID NO: 2816027 - RNA, 17 nt, Human
accaauuauugauauau

SEQ ID NO: 2816028 - RNA, 23 nt, Human
accaauuauugauauauauuaua

SEQ ID NO: 2816029 - RNA, 14 nt, Human
accacacccagccu

SEQ ID NO: 2816030 - RNA, 15 nt, Human
accacacccagccuc

SEQ ID NO: 2816031 - RNA, 16 nt, Human
accacacccagccuca

SEQ ID NO: 2816032 - RNA, 17 nt, Human
accacacccagccucag

SEQ ID NO: 2816033 - RNA, 22 nt, Human
accacacccagccucaguccuc

SEQ ID NO: 2816034 - RNA, 14 nt, Human
accacaaaaauuga

SEQ ID NO: 2816035 - RNA, 16 nt, Human
accaauuuuuuguucu

SEQ ID NO: 2816036 - RNA, 18 nt, Human
accaauuuuuuguucuuc

SEQ ID NO: 2816037 - RNA, 23 nt, Human
accaauuuuuuguucuucagaga

SEQ ID NO: 2816038 - RNA, 18 nt, Human
accacaaaaaaauaccuc

SEQ ID NO: 2816039 - RNA, 16 nt, Human
accacacuggacuccg

SEQ ID NO: 2816040 - RNA, 13 nt, Human
accacacuggacu

SEQ ID NO: 2816041 - RNA, 13 nt, Human
accacaccuggcu

SEQ ID NO: 2816042 - RNA, 14 nt, Human
accacaccuggcua

SEQ ID NO: 2816043 - RNA, 17 nt, Human
ucaauuccugggcccca

SEQ ID NO: 2816044 - RNA, 12 nt, Human
ucaauucucaaa

SEQ ID NO: 2816045 - RNA, 20 nt, Human
ucaauucuguagguuaaaaa

SEQ ID NO: 2816046 - RNA, 23 nt, Human
ucaauucuguagguuaaaaaaau

SEQ ID NO: 2816047 - RNA, 13 nt, Human
ucaauuccugggc

SEQ ID NO: 2816048 - RNA, 17 nt, Human
accacacccuguacugu

SEQ ID NO: 2816049 - RNA, 24 nt, Human
accacacccagccucaguccuccc

SEQ ID NO: 2816050 - RNA, 18 nt, Human
accacacccggcuaauuu

SEQ ID NO: 2816051 - RNA, 13 nt, Human
accacacccugua

SEQ ID NO: 2816052 - RNA, 14 nt, Human
accacacuccagcu

SEQ ID NO: 2816053 - RNA, 20 nt, Human
ucaagugaucugcccaccuc

SEQ ID NO: 2816054 - RNA, 17 nt, Human
ucaagugauccucccac

SEQ ID NO: 2816055 - RNA, 17 nt, Human
ucaagugauucucaugc

SEQ ID NO: 2816056 - RNA, 18 nt, Human
ucaagucaaucauuucuc

SEQ ID NO: 2816057 - RNA, 21 nt, Human
ucaagucauggcagguacagu

SEQ ID NO: 2816058 - RNA, 17 nt, Human
ucaccccggcaggcccu

SEQ ID NO: 2816059 - RNA, 18 nt, Human
ucaccccggcaggcccug

SEQ ID NO: 2816060 - RNA, 19 nt, Human
ucaccccggcaggcccugc

SEQ ID NO: 2816061 - RNA, 20 nt, Human
ucaccccggcaggcccugca

SEQ ID NO: 2816062 - RNA, 21 nt, Human
ucaccccggcaggcccugcag

SEQ ID NO: 2816063 - RNA, 22 nt, Human
ucaccccggcaggcccugcagu

SEQ ID NO: 2816064 - RNA, 23 nt, Human
ucaccccggcaggcccugcagug

SEQ ID NO: 2816065 - RNA, 12 nt, Human
ucaccccauccc

SEQ ID NO: 2816066 - RNA, 21 nt, Human
ucaccccaguggccacucagc

SEQ ID NO: 2816067 - RNA, 13 nt, Human
ucaccccacccuu

SEQ ID NO: 2816068 - RNA, 12 nt, Human
ucaccccagggc

SEQ ID NO: 2816069 - RNA, 15 nt, Human
ucaccccagggccug

SEQ ID NO: 2816070 - RNA, 13 nt, Human
ucaccccagggcc

SEQ ID NO: 2816071 - RNA, 21 nt, Human
ucaccccagggccugagccug

SEQ ID NO: 2816072 - RNA, 20 nt, Human
ucaccccagggccugagccu

SEQ ID NO: 2816073 - RNA, 19 nt, Human
ucaccccagggccugagcc

SEQ ID NO: 2816074 - RNA, 16 nt, Human
ucaccccagggccuga

SEQ ID NO: 2816075 - RNA, 12 nt, Human
ucaccccacccu

SEQ ID NO: 2816076 - RNA, 22 nt, Human
ucaccccaaguagucugcucac

SEQ ID NO: 2816077 - RNA, 23 nt, Human
ucaccccaaguagucugcucaca

SEQ ID NO: 2816078 - RNA, 12 nt, Human
ucaccccagagc

SEQ ID NO: 2816079 - RNA, 13 nt, Human
ucaccccagagcc

SEQ ID NO: 2816080 - RNA, 14 nt, Human
ucaccccagagcca

SEQ ID NO: 2816081 - RNA, 17 nt, Human
ucaccccagagccacac

SEQ ID NO: 2816082 - RNA, 18 nt, Human
ucaccccagagccacaca

SEQ ID NO: 2816083 - RNA, 19 nt, Human
ucaccccagagccacacau

SEQ ID NO: 2816084 - RNA, 21 nt, Human
ucaccaguguccccuccacug

SEQ ID NO: 2816085 - RNA, 17 nt, Human
ucaccaguguccccucc

SEQ ID NO: 2816086 - RNA, 20 nt, Human
ucaccaguguccccuccacu

SEQ ID NO: 2816087 - RNA, 22 nt, Human
ucaccaguggccuuaccccugc

SEQ ID NO: 2816088 - RNA, 13 nt, Human
ucaccaguguccc

SEQ ID NO: 2816089 - RNA, 17 nt, Human
ucacccaugaagacagg

SEQ ID NO: 2816090 - RNA, 17 nt, Human
ucacccaggccuauguu

SEQ ID NO: 2816091 - RNA, 19 nt, Human
ucacccaggcuggagugca

SEQ ID NO: 2816092 - RNA, 18 nt, Human
ucaccagcugcugcucug

SEQ ID NO: 2816093 - RNA, 13 nt, Human
ucacaugaccuga

SEQ ID NO: 2816094 - RNA, 20 nt, Human
ucacaugaccugaucacuag

SEQ ID NO: 2816095 - RNA, 15 nt, Human
ucacaucuuggcaca

SEQ ID NO: 2816096 - RNA, 21 nt, Human
ucacaucgcuucuguguaucu

SEQ ID NO: 2816097 - RNA, 14 nt, Human
ucacaucuuaugcu

SEQ ID NO: 2816098 - RNA, 13 nt, Human
ucacaucuuuuaa

SEQ ID NO: 2816099 - RNA, 18 nt, Human
ucacaucuuuuaagacaa

SEQ ID NO: 2816100 - RNA, 19 nt, Human
ucacaucuuuuaagacaaa

SEQ ID NO: 2816101 - RNA, 15 nt, Human
ucacauaucugucau

SEQ ID NO: 2816102 - RNA, 12 nt, Human
ucacauaucugu

SEQ ID NO: 2816103 - RNA, 20 nt, Human
ucacaaauccuaaaagaagc

SEQ ID NO: 2816104 - RNA, 22 nt, Human
ucacaaauuucacuuauaccug

SEQ ID NO: 2816105 - RNA, 16 nt, Human
ucacaacaaccugguc

SEQ ID NO: 2816106 - RNA, 22 nt, Human
ucacacgucuggcuucacagau

SEQ ID NO: 2816107 - RNA, 16 nt, Human
ucacaguguuuacacu

SEQ ID NO: 2816108 - RNA, 17 nt, Human
ucacaguguugcccagg

SEQ ID NO: 2816109 - RNA, 13 nt, Human
ucacaguguguuu

SEQ ID NO: 2816110 - RNA, 17 nt, Human
ucacacgggggcagcug

SEQ ID NO: 2816111 - RNA, 18 nt, Human
ucacacgggggcagcuga

SEQ ID NO: 2816112 - RNA, 16 nt, Human
ucacacgaccggggcc

SEQ ID NO: 2816113 - RNA, 13 nt, Human
ucacacuauuuua

SEQ ID NO: 2816114 - RNA, 21 nt, Human
ucacacucaguugugacuaac

SEQ ID NO: 2816115 - RNA, 22 nt, Human
accauuugcauggcuccagaaa

SEQ ID NO: 2816116 - RNA, 16 nt, Human
accauuugcuacugua

SEQ ID NO: 2816117 - RNA, 18 nt, Human
accauuugcuacuguaca

SEQ ID NO: 2816118 - RNA, 19 nt, Human
accauuugcuacuguacau

SEQ ID NO: 2816119 - RNA, 22 nt, Human
accauuuccucagcuuaucucu

SEQ ID NO: 2816120 - RNA, 11 nt, Human
acccacugcuc

SEQ ID NO: 2816121 - RNA, 10 nt, Human
acccacugcu

SEQ ID NO: 2816122 - RNA, 15 nt, Human
accauuuuauaaagu

SEQ ID NO: 2816123 - RNA, 17 nt, Human
accauuuuauaaagugc

SEQ ID NO: 2816124 - RNA, 13 nt, Human
acccacucagcuc

SEQ ID NO: 2816125 - RNA, 17 nt, Human
acccacgauuuucucca

SEQ ID NO: 2816126 - RNA, 18 nt, Human
acccacgauuuucuccag

SEQ ID NO: 2816127 - RNA, 19 nt, Human
acccacgauuuucuccagc

SEQ ID NO: 2816128 - RNA, 20 nt, Human
acccacgauuuucuccagcu

SEQ ID NO: 2816129 - RNA, 14 nt, Human
acccacguggcugc

SEQ ID NO: 2816130 - RNA, 18 nt, Human
acccacuauccuucguga

SEQ ID NO: 2816131 - RNA, 11 nt, Human
acccacugcuu

SEQ ID NO: 2816132 - RNA, 15 nt, Human
acccacugcucuggu

SEQ ID NO: 2816133 - RNA, 14 nt, Human
acccacugcucugg

SEQ ID NO: 2816134 - RNA, 13 nt, Human
acccacugcucug

SEQ ID NO: 2816135 - RNA, 17 nt, Human
acccagaccccaggcug

SEQ ID NO: 2816136 - RNA, 21 nt, Human
accaugguuaagaguccaaga

SEQ ID NO: 2816137 - RNA, 17 nt, Human
accaugguuaagagucc

SEQ ID NO: 2816138 - RNA, 19 nt, Human
accaugguuaagaguccaa

SEQ ID NO: 2816139 - RNA, 23 nt, Human
ucacucuuauugcccacgcugga

SEQ ID NO: 2816140 - RNA, 21 nt, Human
ucacucuuauugcccacgcug

SEQ ID NO: 2816141 - RNA, 15 nt, Human
ucacuccuaccuggu

SEQ ID NO: 2816142 - RNA, 17 nt, Human
accauucacaauaaaag

SEQ ID NO: 2816143 - RNA, 19 nt, Human
accauucacaauaaaagcu

SEQ ID NO: 2816144 - RNA, 20 nt, Human
accauucacaauaaaagcuu

SEQ ID NO: 2816145 - RNA, 23 nt, Human
accauucagaucacugaauuuau

SEQ ID NO: 2816146 - RNA, 13 nt, Human
accauuaaaacug

SEQ ID NO: 2816147 - RNA, 16 nt, Human
accauuaaaacugcuu

SEQ ID NO: 2816148 - RNA, 17 nt, Human
accauuaaaacugcuuu

SEQ ID NO: 2816149 - RNA, 18 nt, Human
accauuaaaacugcuuuu

SEQ ID NO: 2816150 - RNA, 19 nt, Human
accauuaaaacugcuuuuu

SEQ ID NO: 2816151 - RNA, 20 nt, Human
accauuaaaacugcuuuuuu

SEQ ID NO: 2816152 - RNA, 13 nt, Human
accauugacacau

SEQ ID NO: 2816153 - RNA, 22 nt, Human
accauugacacauccgccuuuu

SEQ ID NO: 2816154 - RNA, 14 nt, Human
ucagaaggcuucau

SEQ ID NO: 2816155 - RNA, 19 nt, Human
ucagaaguuucucagcucc

SEQ ID NO: 2816156 - RNA, 14 nt, Human
ucagaagacacuga

SEQ ID NO: 2816157 - RNA, 13 nt, Human
acccagccucagu

SEQ ID NO: 2816158 - RNA, 17 nt, Human
acccagccucaguccuc

SEQ ID NO: 2816159 - RNA, 17 nt, Human
ucagaagagaggggaag

SEQ ID NO: 2816160 - RNA, 17 nt, Human
ucagaagaguugugcac

SEQ ID NO: 2816161 - RNA, 20 nt, Human
ucagaagccugaggcuggga

SEQ ID NO: 2816162 - RNA, 15 nt, Human
ucagaagccugaggc

SEQ ID NO: 2816163 - RNA, 13 nt, Human
ucagaagccugag

SEQ ID NO: 2816164 - RNA, 16 nt, Human
ucagaagccucugggu

SEQ ID NO: 2816165 - RNA, 14 nt, Human
acccagaggaggca

SEQ ID NO: 2816166 - RNA, 23 nt, Human
acccagaggaggcagaauaagaa

SEQ ID NO: 2816167 - RNA, 21 nt, Human
acccagccgccaucagcccaa

SEQ ID NO: 2816168 - RNA, 12 nt, Human
acccagccucag

SEQ ID NO: 2816169 - RNA, 18 nt, Human
ucagagccugcaguuauu

SEQ ID NO: 2816170 - RNA, 15 nt, Human
ucagagccugcaguu

SEQ ID NO: 2816171 - RNA, 14 nt, Human
ucagagccugcagu

SEQ ID NO: 2816172 - RNA, 13 nt, Human
ucagagccugcag

SEQ ID NO: 2816173 - RNA, 12 nt, Human
ucagagccugca

SEQ ID NO: 2816174 - RNA, 16 nt, Human
ucagagaggccuuuug

SEQ ID NO: 2816175 - RNA, 14 nt, Human
ucagaauguaaaag

SEQ ID NO: 2816176 - RNA, 18 nt, Human
ucagaauguaaaagaacu

SEQ ID NO: 2816177 - RNA, 16 nt, Human
ucagaaucuuuguuaa

SEQ ID NO: 2816178 - RNA, 17 nt, Human
ucagaaucuuuguuaag

SEQ ID NO: 2816179 - RNA, 19 nt, Human
ucagaaugcuauugaaaau

SEQ ID NO: 2816180 - RNA, 13 nt, Human
ucagcauuucuuu

SEQ ID NO: 2816181 - RNA, 19 nt, Human
ucagcauuucuuuucuggc

SEQ ID NO: 2816182 - RNA, 22 nt, Human
ucagcauuucuuuucuggccaa

SEQ ID NO: 2816183 - RNA, 18 nt, Human
ucagagcugacacaggau

SEQ ID NO: 2816184 - RNA, 23 nt, Human
ucagcauucucacuccuaccugg

SEQ ID NO: 2816185 - RNA, 23 nt, Human
accauuugaaguguaccugugua

SEQ ID NO: 2816186 - RNA, 14 nt, Human
ucagagcugacaca

SEQ ID NO: 2816187 - RNA, 14 nt, Human
ucagagcuccucug

SEQ ID NO: 2816188 - RNA, 21 nt, Human
ucagagcuaagggugggugcu

SEQ ID NO: 2816189 - RNA, 23 nt, Human
ucagagcuaagggugggugcuca

SEQ ID NO: 2816190 - RNA, 22 nt, Human
ucagagaggccuuuuggaaugu

SEQ ID NO: 2816191 - RNA, 21 nt, Human
ucagagaggccuuuuggaaug

SEQ ID NO: 2816192 - RNA, 14 nt, Human
ucagccauguacag

SEQ ID NO: 2816193 - RNA, 15 nt, Human
ucagccauguacaga

SEQ ID NO: 2816194 - RNA, 18 nt, Human
ucagccaggagcugucac

SEQ ID NO: 2816195 - RNA, 19 nt, Human
ucagccaggagcugucacc

SEQ ID NO: 2816196 - RNA, 21 nt, Human
ucagccggcguggcaaauaua

SEQ ID NO: 2816197 - RNA, 22 nt, Human
ucagccggcguggcaaauauaa

SEQ ID NO: 2816198 - RNA, 23 nt, Human
acccagcgagcccugguggcagu

SEQ ID NO: 2816199 - RNA, 19 nt, Human
acccagcgagcccuggugg

SEQ ID NO: 2816200 - RNA, 16 nt, Human
ucagcccaagaugcuu

SEQ ID NO: 2816201 - RNA, 24 nt, Human
acccagcgagcccugguggcagug

SEQ ID NO: 2816202 - RNA, 23 nt, Human
acccagcgggcagguucugccug

SEQ ID NO: 2816203 - RNA, 20 nt, Human
acccaggauuugcugggaga

SEQ ID NO: 2816204 - RNA, 19 nt, Human
acccaggcuggagugcagu

SEQ ID NO: 2816205 - RNA, 12 nt, Human
acccaggcuggg

SEQ ID NO: 2816206 - RNA, 20 nt, Human
acccaggcuggagugcagug

SEQ ID NO: 2816207 - RNA, 13 nt, Human
acccaggcugggc

SEQ ID NO: 2816208 - RNA, 14 nt, Human
acccaggcugggca

SEQ ID NO: 2816209 - RNA, 20 nt, Human
acccaggcugggcaaggagg

SEQ ID NO: 2816210 - RNA, 22 nt, Human
acccaggcugggcaaggaggcc

SEQ ID NO: 2816211 - RNA, 18 nt, Human
acccaggcuggagugcag

SEQ ID NO: 2816212 - RNA, 17 nt, Human
acccaggccuauguuga

SEQ ID NO: 2816213 - RNA, 11 nt, Human
acccaggcucc

SEQ ID NO: 2816214 - RNA, 15 nt, Human
acccaggcuccgccc

SEQ ID NO: 2816215 - RNA, 16 nt, Human
acccaggcuccgcccu

SEQ ID NO: 2816216 - RNA, 19 nt, Human
acccaggcuccgcccuuag

SEQ ID NO: 2816217 - RNA, 20 nt, Human
acccaggcuccgcccuuagu

SEQ ID NO: 2816218 - RNA, 21 nt, Human
acccaggcuccgcccuuaguc

SEQ ID NO: 2816219 - RNA, 23 nt, Human
acccaggcuccgcccuuaguccc

SEQ ID NO: 2816220 - RNA, 13 nt, Human
accccacccuucc

SEQ ID NO: 2816221 - RNA, 20 nt, Human
accccacccucccuggagug

SEQ ID NO: 2816222 - RNA, 15 nt, Human
accccacccuguuug

SEQ ID NO: 2816223 - RNA, 16 nt, Human
accccacccuguuugg

SEQ ID NO: 2816224 - RNA, 19 nt, Human
accccacccuguuuggauu

SEQ ID NO: 2816225 - RNA, 16 nt, Human
accccacccucccugg

SEQ ID NO: 2816226 - RNA, 17 nt, Human
accccacccucccugga

SEQ ID NO: 2816227 - RNA, 18 nt, Human
accccacccucccuggag

SEQ ID NO: 2816228 - RNA, 14 nt, Human
acccagggccugca

SEQ ID NO: 2816229 - RNA, 15 nt, Human
accccacccucccug

SEQ ID NO: 2816230 - RNA, 13 nt, Human
acccagggccugc

SEQ ID NO: 2816231 - RNA, 12 nt, Human
acccagggccug

SEQ ID NO: 2816232 - RNA, 22 nt, Human
acccagggaacagccacucccc

SEQ ID NO: 2816233 - RNA, 13 nt, Human
acccagggaacag

SEQ ID NO: 2816234 - RNA, 19 nt, Human
accccacccuuccccuccu

SEQ ID NO: 2816235 - RNA, 19 nt, Human
accccacccucccuggagu

SEQ ID NO: 2816236 - RNA, 16 nt, Human
accccacgccuuaucc

SEQ ID NO: 2816237 - RNA, 12 nt, Human
accccaccugca

SEQ ID NO: 2816238 - RNA, 13 nt, Human
accccaccugcag

SEQ ID NO: 2816239 - RNA, 14 nt, Human
accccaccugcagg

SEQ ID NO: 2816240 - RNA, 13 nt, Human
accccaggcccac

SEQ ID NO: 2816241 - RNA, 15 nt, Human
accccaggcccacuc

SEQ ID NO: 2816242 - RNA, 16 nt, Human
accccaggcccacuca

SEQ ID NO: 2816243 - RNA, 18 nt, Human
accccaggcccacucagg

SEQ ID NO: 2816244 - RNA, 19 nt, Human
accccaggcccacucaggg

SEQ ID NO: 2816245 - RNA, 17 nt, Human
accccagcugugagccu

SEQ ID NO: 2816246 - RNA, 18 nt, Human
accccagcugugagccuu

SEQ ID NO: 2816247 - RNA, 19 nt, Human
accccagcugugagccuug

SEQ ID NO: 2816248 - RNA, 20 nt, Human
accccagcugugagccuugg

SEQ ID NO: 2816249 - RNA, 21 nt, Human
accccagcugugagccuuggc

SEQ ID NO: 2816250 - RNA, 22 nt, Human
accccagcugugagccuuggcu

SEQ ID NO: 2816251 - RNA, 16 nt, Human
acccccaaauuuucuu

SEQ ID NO: 2816252 - RNA, 23 nt, Human
accccaggcuggacaugcugacu

SEQ ID NO: 2816253 - RNA, 10 nt, Human
accccagggc

SEQ ID NO: 2816254 - RNA, 17 nt, Human
acccccacaccucaguu

SEQ ID NO: 2816255 - RNA, 15 nt, Human
acccccacaccucag

SEQ ID NO: 2816256 - RNA, 20 nt, Human
ucagcuuuuugucuuuucug

SEQ ID NO: 2816257 - RNA, 9 nt, Human
ucaggaaac

SEQ ID NO: 2816258 - RNA, 12 nt, Human
ucaggaaagaau

SEQ ID NO: 2816259 - RNA, 14 nt, Human
ucaggaaagaauag

SEQ ID NO: 2816260 - RNA, 20 nt, Human
ucaggaaagaauagaaagaa

SEQ ID NO: 2816261 - RNA, 23 nt, Human
ucaggaaagaauagaaagaaagu

SEQ ID NO: 2816262 - RNA, 20 nt, Human
ucagcuuguaaauagcucag

SEQ ID NO: 2816263 - RNA, 14 nt, Human
ucagcucacuguuc

SEQ ID NO: 2816264 - RNA, 18 nt, Human
ucagcucagcgccagccu

SEQ ID NO: 2816265 - RNA, 23 nt, Human
ucagcuuccuacccacaccucug

SEQ ID NO: 2816266 - RNA, 20 nt, Human
ucagcuucuauccuugacuu

SEQ ID NO: 2816267 - RNA, 14 nt, Human
ucagcggggacagc

SEQ ID NO: 2816268 - RNA, 19 nt, Human
ucagcuacugauuuuugug

SEQ ID NO: 2816269 - RNA, 19 nt, Human
ucagcuacuuaagagaaau

SEQ ID NO: 2816270 - RNA, 18 nt, Human
ucagcuagcuuuuaggaa

SEQ ID NO: 2816271 - RNA, 13 nt, Human
ucagcucacgcuu

SEQ ID NO: 2816272 - RNA, 21 nt, Human
ucagcucacgcuucacaguga

SEQ ID NO: 2816273 - RNA, 20 nt, Human
ucagcuauuuacugccaaag

SEQ ID NO: 2816274 - RNA, 20 nt, Human
ucagcuaucaguaggcuaau

SEQ ID NO: 2816275 - RNA, 19 nt, Human
ucagcuauuuacugccaaa

SEQ ID NO: 2816276 - RNA, 16 nt, Human
ucagcucacugcaacc

SEQ ID NO: 2816277 - RNA, 13 nt, Human
ucagcucacugca

SEQ ID NO: 2816278 - RNA, 14 nt, Human
acccccaccccaca

SEQ ID NO: 2816279 - RNA, 12 nt, Human
acccccacccca

SEQ ID NO: 2816280 - RNA, 14 nt, Human
accccccgugggcu

SEQ ID NO: 2816281 - RNA, 11 nt, Human
accccccucug

SEQ ID NO: 2816282 - RNA, 11 nt, Human
accccuguccc

SEQ ID NO: 2816283 - RNA, 21 nt, Human
accccugucccaugcaggccc

SEQ ID NO: 2816284 - RNA, 22 nt, Human
accccugucccaugcaggcccu

SEQ ID NO: 2816285 - RNA, 12 nt, Human
accccccuguuc

SEQ ID NO: 2816286 - RNA, 14 nt, Human
accccccuguucua

SEQ ID NO: 2816287 - RNA, 15 nt, Human
accccccuguucuaa

SEQ ID NO: 2816288 - RNA, 17 nt, Human
accccccuguucuaagg

SEQ ID NO: 2816289 - RNA, 19 nt, Human
accccccuguucuaagggg

SEQ ID NO: 2816290 - RNA, 15 nt, Human
accccuucgcuccug

SEQ ID NO: 2816291 - RNA, 14 nt, Human
accccuucgcuccu

SEQ ID NO: 2816292 - RNA, 15 nt, Human
accccuguccucacu

SEQ ID NO: 2816293 - RNA, 16 nt, Human
accccuguccucacug

SEQ ID NO: 2816294 - RNA, 17 nt, Human
accccuguccucacugc

SEQ ID NO: 2816295 - RNA, 18 nt, Human
accccuguccucacugcu

SEQ ID NO: 2816296 - RNA, 19 nt, Human
accccuguccucacugcuc

SEQ ID NO: 2816297 - RNA, 21 nt, Human
accccuguccucacugcuccc

SEQ ID NO: 2816298 - RNA, 16 nt, Human
accccuucgcuccugu

SEQ ID NO: 2816299 - RNA, 14 nt, Human
ucagcgccuggccu

SEQ ID NO: 2816300 - RNA, 19 nt, Human
ucagcggcgaccgcccucc

SEQ ID NO: 2816301 - RNA, 16 nt, Human
uccaucuaaacugccc

SEQ ID NO: 2816302 - RNA, 23 nt, Human
uccaucucuauauaaaaacaaaa

SEQ ID NO: 2816303 - RNA, 14 nt, Human
uccaucucucaucc

SEQ ID NO: 2816304 - RNA, 16 nt, Human
uccaucucucauccuc

SEQ ID NO: 2816305 - RNA, 18 nt, Human
uccaucucucauccucca

SEQ ID NO: 2816306 - RNA, 23 nt, Human
uccaucucccgaauucgcuguua

SEQ ID NO: 2816307 - RNA, 20 nt, Human
uccaucuccuauaaucuguc

SEQ ID NO: 2816308 - RNA, 21 nt, Human
uccaucuccuauaaucuguca

SEQ ID NO: 2816309 - RNA, 22 nt, Human
uccaucuccuauaaucugucaa

SEQ ID NO: 2816310 - RNA, 18 nt, Human
uccaucuaaacugccccc

SEQ ID NO: 2816311 - RNA, 14 nt, Human
uccaucucugacuu

SEQ ID NO: 2816312 - RNA, 22 nt, Human
uccauuuacaaacuacuugauu

SEQ ID NO: 2816313 - RNA, 14 nt, Human
ucccaaagugcugg

SEQ ID NO: 2816314 - RNA, 13 nt, Human
ucccaaagugcug

SEQ ID NO: 2816315 - RNA, 21 nt, Human
ucccaaguagcugggauuaca

SEQ ID NO: 2816316 - RNA, 23 nt, Human
ucccaaguagcugggauuacagg

SEQ ID NO: 2816317 - RNA, 13 nt, Human
ucccaaguccaca

SEQ ID NO: 2816318 - RNA, 20 nt, Human
ucccaaguagcugggauuac

SEQ ID NO: 2816319 - RNA, 18 nt, Human
ucccaaagugcugagauu

SEQ ID NO: 2816320 - RNA, 19 nt, Human
ucccaaagugcugagauua

SEQ ID NO: 2816321 - RNA, 20 nt, Human
ucccaaagugcugagauuac

SEQ ID NO: 2816322 - RNA, 23 nt, Human
ucccaaagugcugagauuacagg

SEQ ID NO: 2816323 - RNA, 15 nt, Human
ucccaaacgccuccc

SEQ ID NO: 2816324 - RNA, 21 nt, Human
ucccaaacgccuccccugccc

SEQ ID NO: 2816325 - RNA, 20 nt, Human
uccauuucgccccucauuua

SEQ ID NO: 2816326 - RNA, 14 nt, Human
uccauuuauauaug

SEQ ID NO: 2816327 - RNA, 15 nt, Human
uccauuuauauauga

SEQ ID NO: 2816328 - RNA, 16 nt, Human
uccauuuauauaugaa

SEQ ID NO: 2816329 - RNA, 17 nt, Human
uccauuuauauaugaaa

SEQ ID NO: 2816330 - RNA, 18 nt, Human
uccauuuauauaugaaaa

SEQ ID NO: 2816331 - RNA, 19 nt, Human
uccauuuauauaugaaaac

SEQ ID NO: 2816332 - RNA, 21 nt, Human
uccauuuauauaugaaaacua

SEQ ID NO: 2816333 - RNA, 23 nt, Human
uccauuuauauaugaaaacuaua

SEQ ID NO: 2816334 - RNA, 12 nt, Human
uccauuugagga

SEQ ID NO: 2816335 - RNA, 17 nt, Human
acgguuugaagccugga

SEQ ID NO: 2816336 - RNA, 14 nt, Human
acguacugucugau

SEQ ID NO: 2816337 - RNA, 16 nt, Human
acgugggagacaagaa

SEQ ID NO: 2816338 - RNA, 11 nt, Human
acgugggagac

SEQ ID NO: 2816339 - RNA, 24 nt, Human
acguagcuucuaccaugaacagaa

SEQ ID NO: 2816340 - RNA, 11 nt, Human
acguguagugu

SEQ ID NO: 2816341 - RNA, 15 nt, Human
acguguaguguccau

SEQ ID NO: 2816342 - RNA, 16 nt, Human
acguguaguguccauu

SEQ ID NO: 2816343 - RNA, 20 nt, Human
acguguaguguccauuuugu

SEQ ID NO: 2816344 - RNA, 18 nt, Human
acgugguuggggcccugc

SEQ ID NO: 2816345 - RNA, 14 nt, Human
acguucggggcaug

SEQ ID NO: 2816346 - RNA, 13 nt, Human
acgugucuuccac

SEQ ID NO: 2816347 - RNA, 19 nt, Human
acgugucuuccacuuugca

SEQ ID NO: 2816348 - RNA, 13 nt, Human
ucccacacccugg

SEQ ID NO: 2816349 - RNA, 11 nt, Human
ucccacacagg

SEQ ID NO: 2816350 - RNA, 13 nt, Human
ucccaaucagcac

SEQ ID NO: 2816351 - RNA, 22 nt, Human
ucccaauagcaacguagcuucu

SEQ ID NO: 2816352 - RNA, 17 nt, Human
ucccaagugccagucuu

SEQ ID NO: 2816353 - RNA, 19 nt, Human
ucccaaguuuccauagcaa

SEQ ID NO: 2816354 - RNA, 21 nt, Human
ucccaaguuuccauagcaaca

SEQ ID NO: 2816355 - RNA, 22 nt, Human
ucccaaguuuccauagcaacag

SEQ ID NO: 2816356 - RNA, 23 nt, Human
ucccaaguuuccauagcaacagg

SEQ ID NO: 2816357 - RNA, 23 nt, Human
acgggagcuggggagaggaaaga

SEQ ID NO: 2816358 - RNA, 18 nt, Human
ucccacccccacccccag

SEQ ID NO: 2816359 - RNA, 17 nt, Human
acggugucuuguucugu

SEQ ID NO: 2816360 - RNA, 20 nt, Human
acggugucuuguucugucac

SEQ ID NO: 2816361 - RNA, 22 nt, Human
acggugucuuguucugucacuc

SEQ ID NO: 2816362 - RNA, 14 nt, Human
acgguuaacuguaa

SEQ ID NO: 2816363 - RNA, 21 nt, Human
acgguucaguuucuucugcgc

SEQ ID NO: 2816364 - RNA, 14 nt, Human
acgggcugcccugc

SEQ ID NO: 2816365 - RNA, 18 nt, Human
acgggcaugggcacuccc

SEQ ID NO: 2816366 - RNA, 23 nt, Human
ucccaguaccuccugucucuggc

SEQ ID NO: 2816367 - RNA, 17 nt, Human
ucccaguaccuccuguc

SEQ ID NO: 2816368 - RNA, 14 nt, Human
ucccaucaaaacuc

SEQ ID NO: 2816369 - RNA, 21 nt, Human
ucccauauuggcauggauuuc

SEQ ID NO: 2816370 - RNA, 20 nt, Human
ucccaucacguguacuggcu

SEQ ID NO: 2816371 - RNA, 23 nt, Human
ucccaucacguguacuggcuccu

SEQ ID NO: 2816372 - RNA, 20 nt, Human
ucccaguccaaauguccucc

SEQ ID NO: 2816373 - RNA, 23 nt, Human
ucccaguccccagcccuucacau

SEQ ID NO: 2816374 - RNA, 14 nt, Human
uccccaccccuacc

SEQ ID NO: 2816375 - RNA, 15 nt, Human
uccccaccccuaccc

SEQ ID NO: 2816376 - RNA, 19 nt, Human
uccccaccccuaccccugg

SEQ ID NO: 2816377 - RNA, 21 nt, Human
uccccaccccuaccccuggcu

SEQ ID NO: 2816378 - RNA, 23 nt, Human
uccccaccccuaccccuggcugu

SEQ ID NO: 2816379 - RNA, 13 nt, Human
ucccauccccugg

SEQ ID NO: 2816380 - RNA, 15 nt, Human
ucccauccccuggac

SEQ ID NO: 2816381 - RNA, 22 nt, Human
ucccaucauuacccuucccugc

SEQ ID NO: 2816382 - RNA, 23 nt, Human
ucccaucauuacccuucccugca

SEQ ID NO: 2816383 - RNA, 19 nt, Human
uccccaucuucuaaaccca

SEQ ID NO: 2816384 - RNA, 13 nt, Human
uccccauggagcc

SEQ ID NO: 2816385 - RNA, 14 nt, Human
uccccaucuucuaa

SEQ ID NO: 2816386 - RNA, 16 nt, Human
uccccaugcagacaug

SEQ ID NO: 2816387 - RNA, 20 nt, Human
uccccaugccacguuccaca

SEQ ID NO: 2816388 - RNA, 21 nt, Human
uccccaugccacguuccacag

SEQ ID NO: 2816389 - RNA, 22 nt, Human
uccccaugccacguuccacagu

SEQ ID NO: 2816390 - RNA, 13 nt, Human
uccccaugccugu

SEQ ID NO: 2816391 - RNA, 16 nt, Human
uccccaugccuguggc

SEQ ID NO: 2816392 - RNA, 17 nt, Human
uccccaugccuguggcu

SEQ ID NO: 2816393 - RNA, 18 nt, Human
uccccaugccuguggcug

SEQ ID NO: 2816394 - RNA, 19 nt, Human
uccccaugccuguggcugc

SEQ ID NO: 2816395 - RNA, 20 nt, Human
uccccaugccuguggcugcg

SEQ ID NO: 2816396 - RNA, 15 nt, Human
uccccauggagccag

SEQ ID NO: 2816397 - RNA, 16 nt, Human
uccccauggagccagc

SEQ ID NO: 2816398 - RNA, 21 nt, Human
uccccauuagagucagccuuc

SEQ ID NO: 2816399 - RNA, 19 nt, Human
uccccauuagagucagccu

SEQ ID NO: 2816400 - RNA, 17 nt, Human
uccccaugucucgacuc

SEQ ID NO: 2816401 - RNA, 15 nt, Human
uccccacccuccugg

SEQ ID NO: 2816402 - RNA, 16 nt, Human
uccccacccuccuggc

SEQ ID NO: 2816403 - RNA, 22 nt, Human
uccccacccuccuggccucaga

SEQ ID NO: 2816404 - RNA, 21 nt, Human
ucccccaacccccaccccaca

SEQ ID NO: 2816405 - RNA, 13 nt, Human
acuacauuuuuuc

SEQ ID NO: 2816406 - RNA, 14 nt, Human
acuacauuuuuuca

SEQ ID NO: 2816407 - RNA, 21 nt, Human
acuaccaagaggcccugucug

SEQ ID NO: 2816408 - RNA, 20 nt, Human
acuacccaaaacaagccugg

SEQ ID NO: 2816409 - RNA, 22 nt, Human
acuacauugaguagacacauuu

SEQ ID NO: 2816410 - RNA, 11 nt, Human
acuacauuuau

SEQ ID NO: 2816411 - RNA, 13 nt, Human
acuacauuuauga

SEQ ID NO: 2816412 - RNA, 18 nt, Human
acuacccuauucucucuu

SEQ ID NO: 2816413 - RNA, 15 nt, Human
acuacccuuaauuac

SEQ ID NO: 2816414 - RNA, 16 nt, Human
acuacccuuaauuacu

SEQ ID NO: 2816415 - RNA, 14 nt, Human
uccccauuccuacc

SEQ ID NO: 2816416 - RNA, 14 nt, Human
uccccauucuuccu

SEQ ID NO: 2816417 - RNA, 22 nt, Human
uccccauucuuccuaguuuucu

SEQ ID NO: 2816418 - RNA, 17 nt, Human
uccccauucuuccuagu

SEQ ID NO: 2816419 - RNA, 12 nt, Human
ucccccaaaguu

SEQ ID NO: 2816420 - RNA, 17 nt, Human
ucccccaaaguucacaa

SEQ ID NO: 2816421 - RNA, 22 nt, Human
ucccccaacauauaaaauaaug

SEQ ID NO: 2816422 - RNA, 15 nt, Human
ucccccaacccccac

SEQ ID NO: 2816423 - RNA, 14 nt, Human
ucccccaaccccca

SEQ ID NO: 2816424 - RNA, 20 nt, Human
ucccccaacccccaccccac

SEQ ID NO: 2816425 - RNA, 19 nt, Human
ucccccaacccccacccca

SEQ ID NO: 2816426 - RNA, 17 nt, Human
ucccccaacccccaccc

SEQ ID NO: 2816427 - RNA, 16 nt, Human
ucccccaacccccacc

SEQ ID NO: 2816428 - RNA, 24 nt, Human
ucccagccaccccgggcucucugc

SEQ ID NO: 2816429 - RNA, 20 nt, Human
ucccagccaccccgggcucu

SEQ ID NO: 2816430 - RNA, 14 nt, Human
ucccagccaccccg

SEQ ID NO: 2816431 - RNA, 13 nt, Human
ucccagccacccc

SEQ ID NO: 2816432 - RNA, 12 nt, Human
ucccagccaccc

SEQ ID NO: 2816433 - RNA, 17 nt, Human
ucccagcugugcucugg

SEQ ID NO: 2816434 - RNA, 11 nt, Human
ucccagcccaa

SEQ ID NO: 2816435 - RNA, 16 nt, Human
ucccagcccaauccag

SEQ ID NO: 2816436 - RNA, 18 nt, Human
ucccagcccaauccaggu

SEQ ID NO: 2816437 - RNA, 12 nt, Human
ucccagcaccug

SEQ ID NO: 2816438 - RNA, 15 nt, Human
ucccagcaccugccu

SEQ ID NO: 2816439 - RNA, 13 nt, Human
ucccagcacuuug

SEQ ID NO: 2816440 - RNA, 16 nt, Human
acguugagccccugga

SEQ ID NO: 2816441 - RNA, 17 nt, Human
acuaacaggauauuuaa

SEQ ID NO: 2816442 - RNA, 12 nt, Human
acuaaccacgcu

SEQ ID NO: 2816443 - RNA, 13 nt, Human
acguuccacaguu

SEQ ID NO: 2816444 - RNA, 14 nt, Human
acuaaccaaaucuc

SEQ ID NO: 2816445 - RNA, 19 nt, Human
acuacaaaucaaguauuug

SEQ ID NO: 2816446 - RNA, 13 nt, Human
acuacaaaucaag

SEQ ID NO: 2816447 - RNA, 11 nt, Human
acuacaaauca

SEQ ID NO: 2816448 - RNA, 15 nt, Human
acuacaggcacccac

SEQ ID NO: 2816449 - RNA, 11 nt, Human
acuacaggcac

SEQ ID NO: 2816450 - RNA, 16 nt, Human
acuacagaccugcuuu

SEQ ID NO: 2816451 - RNA, 17 nt, Human
acuacagaccugcuuuu

SEQ ID NO: 2816452 - RNA, 18 nt, Human
acuacagaccugcuuuuu

SEQ ID NO: 2816453 - RNA, 19 nt, Human
acuacagaccugcuuuuug

SEQ ID NO: 2816454 - RNA, 23 nt, Human
acuacagaccugcuuuuugaaau

SEQ ID NO: 2816455 - RNA, 17 nt, Human
acuacagcuaugaagaa

SEQ ID NO: 2816456 - RNA, 18 nt, Human
acuacagcuaugaagaaa

SEQ ID NO: 2816457 - RNA, 19 nt, Human
acuacagcucuuaaaugua

SEQ ID NO: 2816458 - RNA, 19 nt, Human
uccccucccuggcucccau

SEQ ID NO: 2816459 - RNA, 16 nt, Human
uccccucccuggcucc

SEQ ID NO: 2816460 - RNA, 15 nt, Human
uccccucccuggcuc

SEQ ID NO: 2816461 - RNA, 20 nt, Human
uccccuugucugaacuggag

SEQ ID NO: 2816462 - RNA, 23 nt, Human
uccccuuggcagguccuggccag

SEQ ID NO: 2816463 - RNA, 17 nt, Human
ucccgaguagcugggac

SEQ ID NO: 2816464 - RNA, 16 nt, Human
ucccgaguagcuggga

SEQ ID NO: 2816465 - RNA, 18 nt, Human
ucccgaguagcugggacu

SEQ ID NO: 2816466 - RNA, 20 nt, Human
ucccgaguagcugagauuau

SEQ ID NO: 2816467 - RNA, 15 nt, Human
ucccgaguagcuggg

SEQ ID NO: 2816468 - RNA, 15 nt, Human
ucccgaguacagucu

SEQ ID NO: 2816469 - RNA, 16 nt, Human
ucccgaguacagucug

SEQ ID NO: 2816470 - RNA, 18 nt, Human
ucccgaguacagucugua

SEQ ID NO: 2816471 - RNA, 20 nt, Human
ucccgaauagcugggacuac

SEQ ID NO: 2816472 - RNA, 21 nt, Human
acucacauuuauucugcucac

SEQ ID NO: 2816473 - RNA, 21 nt, Human
acucaccagccccacugccag

SEQ ID NO: 2816474 - RNA, 20 nt, Human
acucaccagccccacugcca

SEQ ID NO: 2816475 - RNA, 14 nt, Human
acucaccagcccca

SEQ ID NO: 2816476 - RNA, 23 nt, Human
acucaccagccccacugccagca

SEQ ID NO: 2816477 - RNA, 22 nt, Human
acucaccagccccacugccagc

SEQ ID NO: 2816478 - RNA, 17 nt, Human
acucaccaguguccccu

SEQ ID NO: 2816479 - RNA, 19 nt, Human
acucaccaguguccccucc

SEQ ID NO: 2816480 - RNA, 23 nt, Human
acucaccaguguccccuccacug

SEQ ID NO: 2816481 - RNA, 13 nt, Human
acucaccaucugu

SEQ ID NO: 2816482 - RNA, 15 nt, Human
acucaccaucugugc

SEQ ID NO: 2816483 - RNA, 18 nt, Human
acucaccaugaagcgaaa

SEQ ID NO: 2816484 - RNA, 19 nt, Human
acuacuaguuuuuacuuuu

SEQ ID NO: 2816485 - RNA, 21 nt, Human
acuacuaguuuuuacuuuuau

SEQ ID NO: 2816486 - RNA, 13 nt, Human
acuacuauucaaa

SEQ ID NO: 2816487 - RNA, 15 nt, Human
uccccuacggaccag

SEQ ID NO: 2816488 - RNA, 16 nt, Human
uccccuacggaccagg

SEQ ID NO: 2816489 - RNA, 14 nt, Human
acucaccaucugug

SEQ ID NO: 2816490 - RNA, 21 nt, Human
uccccuauggaauuuauaauu

SEQ ID NO: 2816491 - RNA, 13 nt, Human
uccccucccuggc

SEQ ID NO: 2816492 - RNA, 17 nt, Human
uccccuccccugcugca

SEQ ID NO: 2816493 - RNA, 15 nt, Human
uccccuccccugcug

SEQ ID NO: 2816494 - RNA, 16 nt, Human
uccccuccccugcugc

SEQ ID NO: 2816495 - RNA, 11 nt, Human
uccccuccccc

SEQ ID NO: 2816496 - RNA, 19 nt, Human
uccccucccccaccccugc

SEQ ID NO: 2816497 - RNA, 20 nt, Human
uccccucccccaccccugcu

SEQ ID NO: 2816498 - RNA, 21 nt, Human
uccccucccccaccccugcug

SEQ ID NO: 2816499 - RNA, 13 nt, Human
uccccuccccugc

SEQ ID NO: 2816500 - RNA, 14 nt, Human
uccccuccccugcu

SEQ ID NO: 2816501 - RNA, 13 nt, Human
uccccucacagcc

SEQ ID NO: 2816502 - RNA, 14 nt, Human
uccccucacagccu

SEQ ID NO: 2816503 - RNA, 13 nt, Human
uccccucccagag

SEQ ID NO: 2816504 - RNA, 19 nt, Human
ucccucccaccucugugac

SEQ ID NO: 2816505 - RNA, 21 nt, Human
ucccucccaccucugugaccu

SEQ ID NO: 2816506 - RNA, 14 nt, Human
ucccuccccuucuc

SEQ ID NO: 2816507 - RNA, 15 nt, Human
ucccuccccuucucu

SEQ ID NO: 2816508 - RNA, 13 nt, Human
ucccuccagcaca

SEQ ID NO: 2816509 - RNA, 14 nt, Human
ucccuccagcacaa

SEQ ID NO: 2816510 - RNA, 17 nt, Human
ucccuccagcacaaaca

SEQ ID NO: 2816511 - RNA, 22 nt, Human
ucccuccagcacaaacacaagg

SEQ ID NO: 2816512 - RNA, 13 nt, Human
ucccucccaccuc

SEQ ID NO: 2816513 - RNA, 14 nt, Human
ucccucccaccucu

SEQ ID NO: 2816514 - RNA, 15 nt, Human
ucccucccaccucug

SEQ ID NO: 2816515 - RNA, 16 nt, Human
ucccucccaccucugu

SEQ ID NO: 2816516 - RNA, 22 nt, Human
ucccggcugcccuuucugggca

SEQ ID NO: 2816517 - RNA, 18 nt, Human
ucccggcugcccuuucug

SEQ ID NO: 2816518 - RNA, 15 nt, Human
ucccggcugcccuuu

SEQ ID NO: 2816519 - RNA, 14 nt, Human
ucccggcugcccuu

SEQ ID NO: 2816520 - RNA, 13 nt, Human
ucccggcugcccu

SEQ ID NO: 2816521 - RNA, 18 nt, Human
ucccugacucucugugac

SEQ ID NO: 2816522 - RNA, 17 nt, Human
ucccugacucucuguga

SEQ ID NO: 2816523 - RNA, 20 nt, Human
ucccugacucucugugaccu

SEQ ID NO: 2816524 - RNA, 16 nt, Human
ucccugacucucugug

SEQ ID NO: 2816525 - RNA, 19 nt, Human
ucccugaagccagccuucu

SEQ ID NO: 2816526 - RNA, 20 nt, Human
ucccugagagugucucugau

SEQ ID NO: 2816527 - RNA, 23 nt, Human
acucaccuggggcugcuggccug

SEQ ID NO: 2816528 - RNA, 14 nt, Human
acucaccuggggcu

SEQ ID NO: 2816529 - RNA, 18 nt, Human
acucaccuggggcugcug

SEQ ID NO: 2816530 - RNA, 19 nt, Human
acucaccuggggcugcugg

SEQ ID NO: 2816531 - RNA, 20 nt, Human
acucaccuggggcugcuggc

SEQ ID NO: 2816532 - RNA, 12 nt, Human
acucaccugggg

SEQ ID NO: 2816533 - RNA, 16 nt, Human
ucccugauugaccugc

SEQ ID NO: 2816534 - RNA, 17 nt, Human
ucccugauugaccugcu

SEQ ID NO: 2816535 - RNA, 18 nt, Human
ucccugauugaccugcuc

SEQ ID NO: 2816536 - RNA, 19 nt, Human
ucccugauugaccugcucc

SEQ ID NO: 2816537 - RNA, 20 nt, Human
ucccugauugaccugcuccg

SEQ ID NO: 2816538 - RNA, 23 nt, Human
ucccugauugaccugcuccgcug

SEQ ID NO: 2816539 - RNA, 22 nt, Human
acucacuggggccuacagcuuu

SEQ ID NO: 2816540 - RNA, 12 nt, Human
acucacugaagc

SEQ ID NO: 2816541 - RNA, 13 nt, Human
acucacugaagcc

SEQ ID NO: 2816542 - RNA, 14 nt, Human
acucacugaagccu

SEQ ID NO: 2816543 - RNA, 15 nt, Human
acucacugaagccug

SEQ ID NO: 2816544 - RNA, 16 nt, Human
acucacugaagccugc

SEQ ID NO: 2816545 - RNA, 18 nt, Human
acucacugaagccugcgu

SEQ ID NO: 2816546 - RNA, 19 nt, Human
acucacugaagccugcguu

SEQ ID NO: 2816547 - RNA, 13 nt, Human
acucauugaaaug

SEQ ID NO: 2816548 - RNA, 14 nt, Human
acucauugaaaugu

SEQ ID NO: 2816549 - RNA, 15 nt, Human
acucauugaaauguc

SEQ ID NO: 2816550 - RNA, 16 nt, Human
acucauugaaauguca

SEQ ID NO: 2816551 - RNA, 19 nt, Human
acucauugaaaugucacgu

SEQ ID NO: 2816552 - RNA, 15 nt, Human
acucauucuucugua

SEQ ID NO: 2816553 - RNA, 13 nt, Human
acucauuccugua

SEQ ID NO: 2816554 - RNA, 16 nt, Human
ucccugagcaggaaag

SEQ ID NO: 2816555 - RNA, 14 nt, Human
acucacugucaaug

SEQ ID NO: 2816556 - RNA, 13 nt, Human
acuccagccuggg

SEQ ID NO: 2816557 - RNA, 14 nt, Human
acuccagccugggc

SEQ ID NO: 2816558 - RNA, 23 nt, Human
acuccuccuccaaaggcccccua

SEQ ID NO: 2816559 - RNA, 11 nt, Human
acuccuccucu

SEQ ID NO: 2816560 - RNA, 12 nt, Human
acuccuccucuu

SEQ ID NO: 2816561 - RNA, 13 nt, Human
acuccuccucuuu

SEQ ID NO: 2816562 - RNA, 15 nt, Human
acuccuccucuuucu

SEQ ID NO: 2816563 - RNA, 16 nt, Human
acuccuccucuuucuc

SEQ ID NO: 2816564 - RNA, 18 nt, Human
acuccuccucuuucucuc

SEQ ID NO: 2816565 - RNA, 19 nt, Human
acuccuccucuuucucucc

SEQ ID NO: 2816566 - RNA, 21 nt, Human
acuccuccucuuucucucccc

SEQ ID NO: 2816567 - RNA, 22 nt, Human
acuccuccucuuucucucccca

SEQ ID NO: 2816568 - RNA, 15 nt, Human
acuccuccuuucucc

SEQ ID NO: 2816569 - RNA, 20 nt, Human
acuccagccugagcaacaga

SEQ ID NO: 2816570 - RNA, 19 nt, Human
acuccagccugagcaacag

SEQ ID NO: 2816571 - RNA, 15 nt, Human
acuccagccugagca

SEQ ID NO: 2816572 - RNA, 14 nt, Human
acuccagccugagc

SEQ ID NO: 2816573 - RNA, 13 nt, Human
acuccagccugag

SEQ ID NO: 2816574 - RNA, 19 nt, Human
acuccugacagucuugugc

SEQ ID NO: 2816575 - RNA, 21 nt, Human
acuccugacagucuugugcuu

SEQ ID NO: 2816576 - RNA, 15 nt, Human
acuccugacagucuu

SEQ ID NO: 2816577 - RNA, 21 nt, Human
acuccuccuccaaaggccccc

SEQ ID NO: 2816578 - RNA, 22 nt, Human
acuccuccuccaaaggcccccu

SEQ ID NO: 2816579 - RNA, 13 nt, Human
acuccucugucca

SEQ ID NO: 2816580 - RNA, 14 nt, Human
acuccucuguccag

SEQ ID NO: 2816581 - RNA, 14 nt, Human
ucccuggggugggg

SEQ ID NO: 2816582 - RNA, 19 nt, Human
ucccugucuuuacuccuca

SEQ ID NO: 2816583 - RNA, 23 nt, Human
ucccugucuuuacuccucacacu

SEQ ID NO: 2816584 - RNA, 14 nt, Human
ucccugucuuuccu

SEQ ID NO: 2816585 - RNA, 17 nt, Human
ucccugucuuuccuaag

SEQ ID NO: 2816586 - RNA, 20 nt, Human
ucccugucuuuccuaagacc

SEQ ID NO: 2816587 - RNA, 23 nt, Human
ucccugucuuuccuaagaccugg

SEQ ID NO: 2816588 - RNA, 12 nt, Human
ucccugugaggg

SEQ ID NO: 2816589 - RNA, 17 nt, Human
ucccuuuccuuccaucc

SEQ ID NO: 2816590 - RNA, 14 nt, Human
ucccuuuccuucca

SEQ ID NO: 2816591 - RNA, 10 nt, Human
ucccuuaccc

SEQ ID NO: 2816592 - RNA, 19 nt, Human
ucccuuuccuuccaucccu

SEQ ID NO: 2816593 - RNA, 18 nt, Human
ucccuuuccuuccauccc

SEQ ID NO: 2816594 - RNA, 23 nt, Human
ucccuuuccuuccaucccuaccc

SEQ ID NO: 2816595 - RNA, 16 nt, Human
ucccuuuccuuccuaa

SEQ ID NO: 2816596 - RNA, 17 nt, Human
ucccuuuccuuccuaau

SEQ ID NO: 2816597 - RNA, 18 nt, Human
ucccuuaaaauagaaaua

SEQ ID NO: 2816598 - RNA, 20 nt, Human
ucccuguguccaccuguggg

SEQ ID NO: 2816599 - RNA, 22 nt, Human
ucccuguguccaccugugggug

SEQ ID NO: 2816600 - RNA, 14 nt, Human
uccuacuuccccuu

SEQ ID NO: 2816601 - RNA, 20 nt, Human
uccuaacaaaagaugaaagc

SEQ ID NO: 2816602 - RNA, 17 nt, Human
uccuaacugaagagaca

SEQ ID NO: 2816603 - RNA, 18 nt, Human
uccuaacugaagagacag
